United States Patent Application Publication US 2014/0004565 A1 - sequence listing, part 57

SEQ ID NO: 1359426 - RNA, 19 nt, Artificial Sequence
  Description of Artificial Sequence: Synthetic oligonucleotide
auuugaacaugacuccccu

SEQ ID NO: 1359427 - RNA, 19 nt, Artificial Sequence
  Description of Artificial Sequence: Synthetic oligonucleotide
uauagagacuuggauagaa

SEQ ID NO: 1359428 - RNA, 19 nt, Artificial Sequence
  Description of Artificial Sequence: Synthetic oligonucleotide
caauguuagauauauaaau

SEQ ID NO: 1359429 - RNA, 19 nt, Artificial Sequence
  Description of Artificial Sequence: Synthetic oligonucleotide
acaauaugaugucuaucca

SEQ ID NO: 1359430 - RNA, 19 nt, Artificial Sequence
  Description of Artificial Sequence: Synthetic oligonucleotide
aguguuaucagaagcuuca

SEQ ID NO: 1359431 - RNA, 19 nt, Artificial Sequence
  Description of Artificial Sequence: Synthetic oligonucleotide
uugguacuaaacucuagau

SEQ ID NO: 1359432 - RNA, 19 nt, Artificial Sequence
  Description of Artificial Sequence: Synthetic oligonucleotide
uacuaaacucuagauaguc

SEQ ID NO: 1359433 - RNA, 19 nt, Artificial Sequence
  Description of Artificial Sequence: Synthetic oligonucleotide
ucaugucucuuuuaagcaa

SEQ ID NO: 1359434 - RNA, 19 nt, Artificial Sequence
  Description of Artificial Sequence: Synthetic oligonucleotide
acacgaaaacguuuuacaa

SEQ ID NO: 1359435 - RNA, 19 nt, Artificial Sequence
  Description of Artificial Sequence: Synthetic oligonucleotide
aaggguugggcagaaugag

SEQ ID NO: 1359436 - RNA, 19 nt, Artificial Sequence
  Description of Artificial Sequence: Synthetic oligonucleotide
aaaggguugggcagaauga

SEQ ID NO: 1359437 - RNA, 19 nt, Artificial Sequence
  Description of Artificial Sequence: Synthetic oligonucleotide
acaacagggugggugagac

SEQ ID NO: 1359438 - RNA, 19 nt, Artificial Sequence
  Description of Artificial Sequence: Synthetic oligonucleotide
uaugagcaaauguaguguu

SEQ ID NO: 1359439 - RNA, 19 nt, Artificial Sequence
  Description of Artificial Sequence: Synthetic oligonucleotide
acauuacaagaaaagguug

SEQ ID NO: 1359440 - RNA, 19 nt, Artificial Sequence
  Description of Artificial Sequence: Synthetic oligonucleotide
acccaacucgugcauauag

SEQ ID NO: 1359441 - RNA, 19 nt, Artificial Sequence
  Description of Artificial Sequence: Synthetic oligonucleotide
aacccauuggucaugcaca

SEQ ID NO: 1359442 - RNA, 19 nt, Artificial Sequence
  Description of Artificial Sequence: Synthetic oligonucleotide
auuauguaauaaauacaug

SEQ ID NO: 1359443 - RNA, 19 nt, Artificial Sequence
  Description of Artificial Sequence: Synthetic oligonucleotide
gagaauccuguuuucaaaa

SEQ ID NO: 1359444 - RNA, 19 nt, Artificial Sequence
  Description of Artificial Sequence: Synthetic oligonucleotide
cauugugagaaacuuuuga

SEQ ID NO: 1359445 - RNA, 19 nt, Artificial Sequence
  Description of Artificial Sequence: Synthetic oligonucleotide
acgauacaaaauaaaccuc

SEQ ID NO: 1359446 - RNA, 19 nt, Artificial Sequence
  Description of Artificial Sequence: Synthetic oligonucleotide
gguagaauguucauuacca

SEQ ID NO: 1359447 - RNA, 19 nt, Artificial Sequence
  Description of Artificial Sequence: Synthetic oligonucleotide
cauuggcaggcaauguuag

SEQ ID NO: 1359448 - RNA, 19 nt, Artificial Sequence
  Description of Artificial Sequence: Synthetic oligonucleotide
gaauaagaaagggcagacc

SEQ ID NO: 1359449 - RNA, 19 nt, Artificial Sequence
  Description of Artificial Sequence: Synthetic oligonucleotide
guuaggacagcuucccaac

SEQ ID NO: 1359450 - RNA, 19 nt, Artificial Sequence
  Description of Artificial Sequence: Synthetic oligonucleotide
uuagugaguucagucaccu

SEQ ID NO: 1359451 - RNA, 19 nt, Artificial Sequence
  Description of Artificial Sequence: Synthetic oligonucleotide
agauagucaacaggcaucu

SEQ ID NO: 1359452 - RNA, 19 nt, Artificial Sequence
  Description of Artificial Sequence: Synthetic oligonucleotide
uaugugucgauuggggacu

SEQ ID NO: 1359453 - RNA, 19 nt, Artificial Sequence
  Description of Artificial Sequence: Synthetic oligonucleotide
auagagacuuggauagaac

SEQ ID NO: 1359454 - RNA, 19 nt, Artificial Sequence
  Description of Artificial Sequence: Synthetic oligonucleotide
aggccuaacaaguguuauc

SEQ ID NO: 1359455 - RNA, 19 nt, Artificial Sequence
  Description of Artificial Sequence: Synthetic oligonucleotide
guagaaguugguacuaaac

SEQ ID NO: 1359456 - RNA, 19 nt, Artificial Sequence
  Description of Artificial Sequence: Synthetic oligonucleotide
uaagaaagggcagaccuuu

SEQ ID NO: 1359457 - RNA, 19 nt, Artificial Sequence
  Description of Artificial Sequence: Synthetic oligonucleotide
acucaguaucaucuaugag

SEQ ID NO: 1359458 - RNA, 19 nt, Artificial Sequence
  Description of Artificial Sequence: Synthetic oligonucleotide
uuaggacagcuucccaaca

SEQ ID NO: 1359459 - RNA, 19 nt, Artificial Sequence
  Description of Artificial Sequence: Synthetic oligonucleotide
cagcucauauaaaagucuc

SEQ ID NO: 1359460 - RNA, 19 nt, Artificial Sequence
  Description of Artificial Sequence: Synthetic oligonucleotide
ggaacggcuaauuugcuuc

SEQ ID NO: 1359461 - RNA, 19 nt, Artificial Sequence
  Description of Artificial Sequence: Synthetic oligonucleotide
agcugaaaguauaugcuug

SEQ ID NO: 1359462 - RNA, 19 nt, Artificial Sequence
  Description of Artificial Sequence: Synthetic oligonucleotide
uaggacagcuucccaacac

SEQ ID NO: 1359463 - RNA, 19 nt, Artificial Sequence
  Description of Artificial Sequence: Synthetic oligonucleotide
caugguuauaaacaggagu

SEQ ID NO: 1359464 - RNA, 19 nt, Artificial Sequence
  Description of Artificial Sequence: Synthetic oligonucleotide
ucauuaccacacagaagga

SEQ ID NO: 1359465 - RNA, 19 nt, Artificial Sequence
  Description of Artificial Sequence: Synthetic oligonucleotide
ugaugucuauccagaacaa

SEQ ID NO: 1359466 - RNA, 19 nt, Artificial Sequence
  Description of Artificial Sequence: Synthetic oligonucleotide
ugaacaugacuccccugcu

SEQ ID NO: 1359467 - RNA, 19 nt, Artificial Sequence
  Description of Artificial Sequence: Synthetic oligonucleotide
uuugaacaugacuccccug

SEQ ID NO: 1359468 - RNA, 19 nt, Artificial Sequence
  Description of Artificial Sequence: Synthetic oligonucleotide
aaggcaaggcagcacggaa

SEQ ID NO: 1359469 - RNA, 19 nt, Artificial Sequence
  Description of Artificial Sequence: Synthetic oligonucleotide
aaauagagcauggcccagu

SEQ ID NO: 1359470 - RNA, 19 nt, Artificial Sequence
  Description of Artificial Sequence: Synthetic oligonucleotide
ugcuugaguguagaaguug

SEQ ID NO: 1359471 - RNA, 19 nt, Artificial Sequence
  Description of Artificial Sequence: Synthetic oligonucleotide
ggagagagauuaugugucg

SEQ ID NO: 1359472 - RNA, 19 nt, Artificial Sequence
  Description of Artificial Sequence: Synthetic oligonucleotide
agagagauuaugugucgau

SEQ ID NO: 1359473 - RNA, 19 nt, Artificial Sequence
  Description of Artificial Sequence: Synthetic oligonucleotide
aguaguuugggaacacuca

SEQ ID NO: 1359474 - RNA, 19 nt, Artificial Sequence
  Description of Artificial Sequence: Synthetic oligonucleotide
ucgaagacacgaaaacguu

SEQ ID NO: 1359475 - RNA, 19 nt, Artificial Sequence
  Description of Artificial Sequence: Synthetic oligonucleotide
cuggcaugcuugucaaggg

SEQ ID NO: 1359476 - RNA, 19 nt, Artificial Sequence
  Description of Artificial Sequence: Synthetic oligonucleotide
caucccagugcucccagcc

SEQ ID NO: 1359477 - RNA, 19 nt, Artificial Sequence
  Description of Artificial Sequence: Synthetic oligonucleotide
agugcucccagccccuauc

SEQ ID NO: 1359478 - RNA, 19 nt, Artificial Sequence
  Description of Artificial Sequence: Synthetic oligonucleotide
ccacaaauagagcauggcc

SEQ ID NO: 1359479 - RNA, 19 nt, Artificial Sequence
  Description of Artificial Sequence: Synthetic oligonucleotide
agggcagaccuuuggaaca

SEQ ID NO: 1359480 - RNA, 19 nt, Artificial Sequence
  Description of Artificial Sequence: Synthetic oligonucleotide
gcuugucaaggguagaaug

SEQ ID NO: 1359481 - RNA, 19 nt, Artificial Sequence
  Description of Artificial Sequence: Synthetic oligonucleotide
aacggcuaauuugcuucac

SEQ ID NO: 1359482 - RNA, 19 nt, Artificial Sequence
  Description of Artificial Sequence: Synthetic oligonucleotide
cucgaagacacgaaaacgu

SEQ ID NO: 1359483 - RNA, 19 nt, Artificial Sequence
  Description of Artificial Sequence: Synthetic oligonucleotide
gaacaacgcaguguuaaca

SEQ ID NO: 1359484 - RNA, 19 nt, Artificial Sequence
  Description of Artificial Sequence: Synthetic oligonucleotide
agcaguauggaggcuagcu

SEQ ID NO: 1359485 - RNA, 19 nt, Artificial Sequence
  Description of Artificial Sequence: Synthetic oligonucleotide
uaucaucuaugagcaaaug

SEQ ID NO: 1359486 - RNA, 19 nt, Artificial Sequence
  Description of Artificial Sequence: Synthetic oligonucleotide
ccaacucgugcauauagag

SEQ ID NO: 1359487 - RNA, 19 nt, Artificial Sequence
  Description of Artificial Sequence: Synthetic oligonucleotide
aucuaauaugagaauccug

SEQ ID NO: 1359488 - RNA, 19 nt, Artificial Sequence
  Description of Artificial Sequence: Synthetic oligonucleotide
cuaucaaacgauacaaaau

SEQ ID NO: 1359489 - RNA, 19 nt, Artificial Sequence
  Description of Artificial Sequence: Synthetic oligonucleotide
caccuguuaggacagcuuc

SEQ ID NO: 1359490 - RNA, 19 nt, Artificial Sequence
  Description of Artificial Sequence: Synthetic oligonucleotide
agcuucccaacaccuagug

SEQ ID NO: 1359491 - RNA, 19 nt, Artificial Sequence
  Description of Artificial Sequence: Synthetic oligonucleotide
gugucgauuggggacuugg

SEQ ID NO: 1359492 - RNA, 19 nt, Artificial Sequence
  Description of Artificial Sequence: Synthetic oligonucleotide
uucagucaccuguuaggac

SEQ ID NO: 1359493 - RNA, 19 nt, Artificial Sequence
  Description of Artificial Sequence: Synthetic oligonucleotide
aaguuguuagugaguucag

SEQ ID NO: 1359494 - RNA, 19 nt, Artificial Sequence
  Description of Artificial Sequence: Synthetic oligonucleotide
acaugacuccccugcuuuc

SEQ ID NO: 1359495 - RNA, 19 nt, Artificial Sequence
  Description of Artificial Sequence: Synthetic oligonucleotide
aucaaacgauacaaaauaa

SEQ ID NO: 1359496 - RNA, 19 nt, Artificial Sequence
  Description of Artificial Sequence: Synthetic oligonucleotide
ucaaggguagaauguucau

SEQ ID NO: 1359497 - RNA, 19 nt, Artificial Sequence
  Description of Artificial Sequence: Synthetic oligonucleotide
gcauauagagacuuggaua

SEQ ID NO: 1359498 - RNA, 19 nt, Artificial Sequence
  Description of Artificial Sequence: Synthetic oligonucleotide
aaugagggacucagaauaa

SEQ ID NO: 1359499 - RNA, 19 nt, Artificial Sequence
  Description of Artificial Sequence: Synthetic oligonucleotide
ccuuucaugaugaauuuga

SEQ ID NO: 1359500 - RNA, 19 nt, Artificial Sequence
  Description of Artificial Sequence: Synthetic oligonucleotide
cacuucgcuggcaugcuug

SEQ ID NO: 1359501 - RNA, 19 nt, Artificial Sequence
  Description of Artificial Sequence: Synthetic oligonucleotide
ucgugcauauagagacuug

SEQ ID NO: 1359502 - RNA, 19 nt, Artificial Sequence
  Description of Artificial Sequence: Synthetic oligonucleotide
caugacuccccugcuuucg

SEQ ID NO: 1359503 - RNA, 19 nt, Artificial Sequence
  Description of Artificial Sequence: Synthetic oligonucleotide
ccugcuuucgagcaguaug

SEQ ID NO: 1359504 - RNA, 19 nt, Artificial Sequence
  Description of Artificial Sequence: Synthetic oligonucleotide
ggcagaaugagggacucag

SEQ ID NO: 1359505 - RNA, 19 nt, Artificial Sequence
  Description of Artificial Sequence: Synthetic oligonucleotide
ugucgauuggggacuuggu

SEQ ID NO: 1359506 - RNA, 19 nt, Artificial Sequence
  Description of Artificial Sequence: Synthetic oligonucleotide
agaaguguuagugcaggaa

SEQ ID NO: 1359507 - RNA, 19 nt, Artificial Sequence
  Description of Artificial Sequence: Synthetic oligonucleotide
ggcuaauuugcuucacggc

SEQ ID NO: 1359508 - RNA, 19 nt, Artificial Sequence
  Description of Artificial Sequence: Synthetic oligonucleotide
ugguaggcuggcccuacca

SEQ ID NO: 1359509 - RNA, 19 nt, Artificial Sequence
  Description of Artificial Sequence: Synthetic oligonucleotide
aagacacgaaaacguuuua

SEQ ID NO: 1359510 - RNA, 19 nt, Artificial Sequence
  Description of Artificial Sequence: Synthetic oligonucleotide
agagacuuggauagaacau

SEQ ID NO: 1359511 - RNA, 19 nt, Artificial Sequence
  Description of Artificial Sequence: Synthetic oligonucleotide
cuugucaaggguagaaugu

SEQ ID NO: 1359512 - RNA, 19 nt, Artificial Sequence
  Description of Artificial Sequence: Synthetic oligonucleotide
ugacaucaguucacauucu

SEQ ID NO: 1359513 - RNA, 19 nt, Artificial Sequence
  Description of Artificial Sequence: Synthetic oligonucleotide
aacgcaguguuaacagaca

SEQ ID NO: 1359514 - RNA, 19 nt, Artificial Sequence
  Description of Artificial Sequence: Synthetic oligonucleotide
ucaugcacauuugugccau

SEQ ID NO: 1359515 - RNA, 19 nt, Artificial Sequence
  Description of Artificial Sequence: Synthetic oligonucleotide
guuagugaguucagucacc

SEQ ID NO: 1359516 - RNA, 19 nt, Artificial Sequence
  Description of Artificial Sequence: Synthetic oligonucleotide
gucgauuggggacuugguc

SEQ ID NO: 1359517 - RNA, 19 nt, Artificial Sequence
  Description of Artificial Sequence: Synthetic oligonucleotide
gaggcuagcucuuccaagu

SEQ ID NO: 1359518 - RNA, 19 nt, Artificial Sequence
  Description of Artificial Sequence: Synthetic oligonucleotide
acaugguuauaaacaggag

SEQ ID NO: 1359519 - RNA, 19 nt, Artificial Sequence
  Description of Artificial Sequence: Synthetic oligonucleotide
acuccccugcuuucgagca

SEQ ID NO: 1359520 - RNA, 19 nt, Artificial Sequence
  Description of Artificial Sequence: Synthetic oligonucleotide
gaacggcuaauuugcuuca

SEQ ID NO: 1359521 - RNA, 19 nt, Artificial Sequence
  Description of Artificial Sequence: Synthetic oligonucleotide
ucaguaguuugggaacacu

SEQ ID NO: 1359522 - RNA, 19 nt, Artificial Sequence
  Description of Artificial Sequence: Synthetic oligonucleotide
ucccagccccuaucaaacg

SEQ ID NO: 1359523 - RNA, 19 nt, Artificial Sequence
  Description of Artificial Sequence: Synthetic oligonucleotide
ggccuaacaaguguuauca

SEQ ID NO: 1359524 - RNA, 19 nt, Artificial Sequence
  Description of Artificial Sequence: Synthetic oligonucleotide
augguaggcuggcccuacc

SEQ ID NO: 1359525 - RNA, 19 nt, Artificial Sequence
  Description of Artificial Sequence: Synthetic oligonucleotide
cgauacaaaauaaaccuca

SEQ ID NO: 1359526 - RNA, 19 nt, Artificial Sequence
  Description of Artificial Sequence: Synthetic oligonucleotide
agucaguaguuugggaaca

SEQ ID NO: 1359527 - RNA, 19 nt, Artificial Sequence
  Description of Artificial Sequence: Synthetic oligonucleotide
gucuauccagaacaacgca

SEQ ID NO: 1359528 - RNA, 19 nt, Artificial Sequence
  Description of Artificial Sequence: Synthetic oligonucleotide
cuucacggccuuugcauuc

SEQ ID NO: 1359529 - RNA, 19 nt, Artificial Sequence
  Description of Artificial Sequence: Synthetic oligonucleotide
acaggaguagagagaagug

SEQ ID NO: 1359530 - RNA, 19 nt, Artificial Sequence
  Description of Artificial Sequence: Synthetic oligonucleotide
ccuaucaaacgauacaaaa

SEQ ID NO: 1359531 - RNA, 19 nt, Artificial Sequence
  Description of Artificial Sequence: Synthetic oligonucleotide
caucucgaagacacgaaaa

SEQ ID NO: 1359532 - RNA, 19 nt, Artificial Sequence
  Description of Artificial Sequence: Synthetic oligonucleotide
acgcaguguuaacagacau

SEQ ID NO: 1359533 - RNA, 19 nt, Artificial Sequence
  Description of Artificial Sequence: Synthetic oligonucleotide
cuaauuugcuucacggccu

SEQ ID NO: 1359534 - RNA, 19 nt, Artificial Sequence
  Description of Artificial Sequence: Synthetic oligonucleotide
uggaggcuagcucuuccaa

SEQ ID NO: 1359535 - RNA, 19 nt, Artificial Sequence
  Description of Artificial Sequence: Synthetic oligonucleotide
ggaacacucaguaucaucu

SEQ ID NO: 1359536 - RNA, 19 nt, Artificial Sequence
  Description of Artificial Sequence: Synthetic oligonucleotide
uugucaaggguagaauguu

SEQ ID NO: 1359537 - RNA, 19 nt, Artificial Sequence
  Description of Artificial Sequence: Synthetic oligonucleotide
uggcccuaccacuucgcug

SEQ ID NO: 1359538 - RNA, 19 nt, Artificial Sequence
  Description of Artificial Sequence: Synthetic oligonucleotide
gcacggaacggcuaauuug

SEQ ID NO: 1359539 - RNA, 19 nt, Artificial Sequence
  Description of Artificial Sequence: Synthetic oligonucleotide
aguugguacuaaacucuag

SEQ ID NO: 1359540 - RNA, 19 nt, Artificial Sequence
  Description of Artificial Sequence: Synthetic oligonucleotide
accuagugcagagcaaucu

SEQ ID NO: 1359541 - RNA, 19 nt, Artificial Sequence
  Description of Artificial Sequence: Synthetic oligonucleotide
caacaggcaucucgaagac

SEQ ID NO: 1359542 - RNA, 19 nt, Artificial Sequence
  Description of Artificial Sequence: Synthetic oligonucleotide
cauggcccagugacaaccc

SEQ ID NO: 1359543 - RNA, 19 nt, Artificial Sequence
  Description of Artificial Sequence: Synthetic oligonucleotide
agugacaacccaacucgug

SEQ ID NO: 1359544 - RNA, 19 nt, Artificial Sequence
  Description of Artificial Sequence: Synthetic oligonucleotide
ucgagcaguauggaggcua

SEQ ID NO: 1359545 - RNA, 19 nt, Artificial Sequence
  Description of Artificial Sequence: Synthetic oligonucleotide
agacggcagcauuaagcug

SEQ ID NO: 1359546 - RNA, 19 nt, Artificial Sequence
  Description of Artificial Sequence: Synthetic oligonucleotide
caacucgugcauauagaga

SEQ ID NO: 1359547 - RNA, 19 nt, Artificial Sequence
  Description of Artificial Sequence: Synthetic oligonucleotide
gaagacacgaaaacguuuu

SEQ ID NO: 1359548 - RNA, 19 nt, Artificial Sequence
  Description of Artificial Sequence: Synthetic oligonucleotide
caaagacggcagcauuaag

SEQ ID NO: 1359549 - RNA, 19 nt, Artificial Sequence
  Description of Artificial Sequence: Synthetic oligonucleotide
acaaagacggcagcauuaa

SEQ ID NO: 1359550 - RNA, 19 nt, Artificial Sequence
  Description of Artificial Sequence: Synthetic oligonucleotide
agcauggcccagugacaac

SEQ ID NO: 1359551 - RNA, 19 nt, Artificial Sequence
  Description of Artificial Sequence: Synthetic oligonucleotide
gagagagauuaugugucga

SEQ ID NO: 1359552 - RNA, 19 nt, Artificial Sequence
  Description of Artificial Sequence: Synthetic oligonucleotide
ggacuuggucuucuguugc

SEQ ID NO: 1359553 - RNA, 19 nt, Artificial Sequence
  Description of Artificial Sequence: Synthetic oligonucleotide
aggaguagagagaaguguu

SEQ ID NO: 1359554 - RNA, 19 nt, Artificial Sequence
  Description of Artificial Sequence: Synthetic oligonucleotide
cuagauagucaacaggcau

SEQ ID NO: 1359555 - RNA, 19 nt, Artificial Sequence
  Description of Artificial Sequence: Synthetic oligonucleotide
caguauggaggcuagcucu

SEQ ID NO: 1359556 - RNA, 19 nt, Artificial Sequence
  Description of Artificial Sequence: Synthetic oligonucleotide
gcugaaaguauaugcuuga

SEQ ID NO: 1359557 - RNA, 19 nt, Artificial Sequence
  Description of Artificial Sequence: Synthetic oligonucleotide
uggcaggcaauguuagaua

SEQ ID NO: 1359558 - RNA, 19 nt, Artificial Sequence
  Description of Artificial Sequence: Synthetic oligonucleotide
acuggcucuacuaccacau

SEQ ID NO: 1359559 - RNA, 19 nt, Artificial Sequence
  Description of Artificial Sequence: Synthetic oligonucleotide
acauugugagaaacuuuug

SEQ ID NO: 1359560 - RNA, 19 nt, Artificial Sequence
  Description of Artificial Sequence: Synthetic oligonucleotide
agcucauauaaaagucucu

SEQ ID NO: 1359561 - RNA, 19 nt, Artificial Sequence
  Description of Artificial Sequence: Synthetic oligonucleotide
agcacggaacggcuaauuu

SEQ ID NO: 1359562 - RNA, 19 nt, Artificial Sequence
  Description of Artificial Sequence: Synthetic oligonucleotide
gucaugcacauuugugcca

SEQ ID NO: 1359563 - RNA, 19 nt, Artificial Sequence
  Description of Artificial Sequence: Synthetic oligonucleotide
ugggugagacuuggaaaug

SEQ ID NO: 1359564 - RNA, 19 nt, Artificial Sequence
  Description of Artificial Sequence: Synthetic oligonucleotide
caaauagagcauggcccag

SEQ ID NO: 1359565 - RNA, 19 nt, Artificial Sequence
  Description of Artificial Sequence: Synthetic oligonucleotide
acauacagcugcgggccuc

SEQ ID NO: 1359566 - RNA, 19 nt, Artificial Sequence
  Description of Artificial Sequence: Synthetic oligonucleotide
aacugaagcaugacacaua

SEQ ID NO: 1359567 - RNA, 19 nt, Artificial Sequence
  Description of Artificial Sequence: Synthetic oligonucleotide
cuaugagcaaauguagugu

SEQ ID NO: 1359568 - RNA, 19 nt, Artificial Sequence
  Description of Artificial Sequence: Synthetic oligonucleotide
cgugcauauagagacuugg

SEQ ID NO: 1359569 - RNA, 19 nt, Artificial Sequence
  Description of Artificial Sequence: Synthetic oligonucleotide
caggcaucucgaagacacg

SEQ ID NO: 1359570 - RNA, 19 nt, Artificial Sequence
  Description of Artificial Sequence: Synthetic oligonucleotide
cuagugcagagcaaucucu

SEQ ID NO: 1359571 - RNA, 19 nt, Artificial Sequence
  Description of Artificial Sequence: Synthetic oligonucleotide
auacauugugagaaacuuu

SEQ ID NO: 1359572 - RNA, 19 nt, Artificial Sequence
  Description of Artificial Sequence: Synthetic oligonucleotide
auauagagacuuggauaga

SEQ ID NO: 1359573 - RNA, 19 nt, Artificial Sequence
  Description of Artificial Sequence: Synthetic oligonucleotide
gcaauguuagauauauaaa

SEQ ID NO: 1359574 - RNA, 19 nt, Artificial Sequence
  Description of Artificial Sequence: Synthetic oligonucleotide
gcuauuggggcuucauguc

SEQ ID NO: 1359575 - RNA, 19 nt, Artificial Sequence
  Description of Artificial Sequence: Synthetic oligonucleotide
gcaaauguaguguuguuuu

SEQ ID NO: 1359576 - RNA, 19 nt, Artificial Sequence
  Description of Artificial Sequence: Synthetic oligonucleotide
cauacagcugcgggccucc

SEQ ID NO: 1359577 - RNA, 19 nt, Artificial Sequence
  Description of Artificial Sequence: Synthetic oligonucleotide
ugcuuucgagcaguaugga

SEQ ID NO: 1359578 - RNA, 19 nt, Artificial Sequence
  Description of Artificial Sequence: Synthetic oligonucleotide
gcaagacaaagacggcagc

SEQ ID NO: 1359579 - RNA, 19 nt, Artificial Sequence
  Description of Artificial Sequence: Synthetic oligonucleotide
gagcauggcccagugacaa

SEQ ID NO: 1359580 - RNA, 19 nt, Artificial Sequence
  Description of Artificial Sequence: Synthetic oligonucleotide
ggauagaacauggguauaa

SEQ ID NO: 1359581 - RNA, 19 nt, Artificial Sequence
  Description of Artificial Sequence: Synthetic oligonucleotide
guaacuggaaaggccaggu

SEQ ID NO: 1359582 - RNA, 19 nt, Artificial Sequence
  Description of Artificial Sequence: Synthetic oligonucleotide
gugcauauagagacuugga

SEQ ID NO: 1359583 - RNA, 19 nt, Artificial Sequence
  Description of Artificial Sequence: Synthetic oligonucleotide
gcaguauggaggcuagcuc

SEQ ID NO: 1359584 - RNA, 19 nt, Artificial Sequence
  Description of Artificial Sequence: Synthetic oligonucleotide
accucaguauaaaccauuu

SEQ ID NO: 1359585 - RNA, 19 nt, Artificial Sequence
  Description of Artificial Sequence: Synthetic oligonucleotide
cuauuggggcuucaugucu

SEQ ID NO: 1359586 - RNA, 19 nt, Artificial Sequence
  Description of Artificial Sequence: Synthetic oligonucleotide
guguuaucagaagcuucac

SEQ ID NO: 1359587 - RNA, 19 nt, Artificial Sequence
  Description of Artificial Sequence: Synthetic oligonucleotide
gccuaacaaguguuaucag

SEQ ID NO: 1359588 - RNA, 19 nt, Artificial Sequence
  Description of Artificial Sequence: Synthetic oligonucleotide
gccacaaauagagcauggc

SEQ ID NO: 1359589 - RNA, 19 nt, Artificial Sequence
  Description of Artificial Sequence: Synthetic oligonucleotide
caagccauugagcugugau

SEQ ID NO: 1359590 - RNA, 19 nt, Artificial Sequence
  Description of Artificial Sequence: Synthetic oligonucleotide
augcacauuugugccauuu

SEQ ID NO: 1359591 - RNA, 19 nt, Artificial Sequence
  Description of Artificial Sequence: Synthetic oligonucleotide
gacaacagggugggugaga

SEQ ID NO: 1359592 - RNA, 19 nt, Artificial Sequence
  Description of Artificial Sequence: Synthetic oligonucleotide
gccccuaucaaacgauaca

SEQ ID NO: 1359593 - RNA, 19 nt, Artificial Sequence
  Description of Artificial Sequence: Synthetic oligonucleotide
caggaguagagagaagugu

SEQ ID NO: 1359594 - RNA, 19 nt, Artificial Sequence
  Description of Artificial Sequence: Synthetic oligonucleotide
caugguaggcuggcccuac

SEQ ID NO: 1359595 - RNA, 19 nt, Artificial Sequence
  Description of Artificial Sequence: Synthetic oligonucleotide
gagagauuaugugucgauu

SEQ ID NO: 1359596 - RNA, 19 nt, Artificial Sequence
  Description of Artificial Sequence: Synthetic oligonucleotide
ggcaggcaauguuagauau

SEQ ID NO: 1359597 - RNA, 19 nt, Artificial Sequence
  Description of Artificial Sequence: Synthetic oligonucleotide
ugugucgauuggggacuug

SEQ ID NO: 1359598 - RNA, 19 nt, Artificial Sequence
  Description of Artificial Sequence: Synthetic oligonucleotide
guacuaaacucuagauagu

SEQ ID NO: 1359599 - RNA, 19 nt, Artificial Sequence
  Description of Artificial Sequence: Synthetic oligonucleotide
gaacaugacuccccugcuu

SEQ ID NO: 1359600 - RNA, 19 nt, Artificial Sequence
  Description of Artificial Sequence: Synthetic oligonucleotide
guguagaaguugguacuaa

SEQ ID NO: 1359601 - RNA, 19 nt, Artificial Sequence
  Description of Artificial Sequence: Synthetic oligonucleotide
gauuggggacuuggucuuc

SEQ ID NO: 1359602 - RNA, 19 nt, Artificial Sequence
  Description of Artificial Sequence: Synthetic oligonucleotide
uccgccaagcuggcuggca

SEQ ID NO: 1359603 - RNA, 19 nt, Artificial Sequence
  Description of Artificial Sequence: Synthetic oligonucleotide
aacccaacucgugcauaua

SEQ ID NO: 1359604 - RNA, 19 nt, Artificial Sequence
  Description of Artificial Sequence: Synthetic oligonucleotide
uucgagcaguauggaggcu

SEQ ID NO: 1359605 - RNA, 19 nt, Artificial Sequence
  Description of Artificial Sequence: Synthetic oligonucleotide
gaggccuaacaaguguuau

SEQ ID NO: 1359606 - RNA, 19 nt, Artificial Sequence
  Description of Artificial Sequence: Synthetic oligonucleotide
ggaguagagagaaguguua

SEQ ID NO: 1359607 - RNA, 19 nt, Artificial Sequence
  Description of Artificial Sequence: Synthetic oligonucleotide
augcuugaguguagaaguu

SEQ ID NO: 1359608 - RNA, 19 nt, Artificial Sequence
  Description of Artificial Sequence: Synthetic oligonucleotide
gcucauauaaaagucucuu

SEQ ID NO: 1359609 - RNA, 19 nt, Artificial Sequence
  Description of Artificial Sequence: Synthetic oligonucleotide
cuacaucccagugcuccca

SEQ ID NO: 1359610 - RNA, 19 nt, Artificial Sequence
  Description of Artificial Sequence: Synthetic oligonucleotide
caaguguuaucagaagcuu

SEQ ID NO: 1359611 - RNA, 19 nt, Artificial Sequence
  Description of Artificial Sequence: Synthetic oligonucleotide
auacagcugcgggccuccg

SEQ ID NO: 1359612 - RNA, 19 nt, Artificial Sequence
  Description of Artificial Sequence: Synthetic oligonucleotide
ccccuaucaaacgauacaa

SEQ ID NO: 1359613 - RNA, 19 nt, Artificial Sequence
  Description of Artificial Sequence: Synthetic oligonucleotide
ggcccagugacaacccaac

SEQ ID NO: 1359614 - RNA, 19 nt, Artificial Sequence
  Description of Artificial Sequence: Synthetic oligonucleotide
acggaacggcuaauuugcu

SEQ ID NO: 1359615 - RNA, 19 nt, Artificial Sequence
  Description of Artificial Sequence: Synthetic oligonucleotide
cccaacucgugcauauaga

SEQ ID NO: 1359616 - RNA, 19 nt, Artificial Sequence
  Description of Artificial Sequence: Synthetic oligonucleotide
caaggguagaauguucauu

SEQ ID NO: 1359617 - RNA, 19 nt, Artificial Sequence
  Description of Artificial Sequence: Synthetic oligonucleotide
cucgugcauauagagacuu

SEQ ID NO: 1359618 - RNA, 19 nt, Artificial Sequence
  Description of Artificial Sequence: Synthetic oligonucleotide
caguaucaucuaugagcaa

SEQ ID NO: 1359619 - RNA, 19 nt, Artificial Sequence
  Description of Artificial Sequence: Synthetic oligonucleotide
cagugacaacccaacucgu

SEQ ID NO: 1359620 - RNA, 19 nt, Artificial Sequence
  Description of Artificial Sequence: Synthetic oligonucleotide
cccuaucaaacgauacaaa

SEQ ID NO: 1359621 - RNA, 19 nt, Artificial Sequence
  Description of Artificial Sequence: Synthetic oligonucleotide
gguugucagacaacagggu

SEQ ID NO: 1359622 - RNA, 19 nt, Artificial Sequence
  Description of Artificial Sequence: Synthetic oligonucleotide
gugaugggaacuggcucua

SEQ ID NO: 1359623 - RNA, 19 nt, Artificial Sequence
  Description of Artificial Sequence: Synthetic oligonucleotide
cuuuggaacaacggccauu

SEQ ID NO: 1359624 - RNA, 19 nt, Artificial Sequence
  Description of Artificial Sequence: Synthetic oligonucleotide
caccaggaagaggccuaac

SEQ ID NO: 1359625 - RNA, 19 nt, Artificial Sequence
  Description of Artificial Sequence: Synthetic oligonucleotide
ccucauugcuauuggggcu

SEQ ID NO: 1359626 - RNA, 19 nt, Artificial Sequence
  Description of Artificial Sequence: Synthetic oligonucleotide
gcuggcccuaccacuucgc

SEQ ID NO: 1359627 - RNA, 19 nt, Artificial Sequence
  Description of Artificial Sequence: Synthetic oligonucleotide
acggcagcauuaagcugaa

SEQ ID NO: 1359628 - RNA, 19 nt, Artificial Sequence
  Description of Artificial Sequence: Synthetic oligonucleotide
augugucgauuggggacuu

SEQ ID NO: 1359629 - RNA, 19 nt, Artificial Sequence
  Description of Artificial Sequence: Synthetic oligonucleotide
caccaccauuggcaggcaa

SEQ ID NO: 1359630 - RNA, 19 nt, Artificial Sequence
  Description of Artificial Sequence: Synthetic oligonucleotide
cuggcccuaccacuucgcu

SEQ ID NO: 1359631 - RNA, 19 nt, Artificial Sequence
  Description of Artificial Sequence: Synthetic oligonucleotide
ccuaccacuucgcuggcau

SEQ ID NO: 1359632 - RNA, 19 nt, Artificial Sequence
  Description of Artificial Sequence: Synthetic oligonucleotide
gggcagaccuuuggaacaa

SEQ ID NO: 1359633 - RNA, 19 nt, Artificial Sequence
  Description of Artificial Sequence: Synthetic oligonucleotide
gcaggcaauguuagauaua

SEQ ID NO: 1359634 - RNA, 19 nt, Artificial Sequence
  Description of Artificial Sequence: Synthetic oligonucleotide
cgcaguguuaacagacaua

SEQ ID NO: 1359635 - RNA, 19 nt, Artificial Sequence
  Description of Artificial Sequence: Synthetic oligonucleotide
cagcugcgggccuccgcca

SEQ ID NO: 1359636 - RNA, 19 nt, Artificial Sequence
  Description of Artificial Sequence: Synthetic oligonucleotide
gggcuucaugucucuuuua

SEQ ID NO: 1359637 - RNA, 19 nt, Artificial Sequence
  Description of Artificial Sequence: Synthetic oligonucleotide
aggcagcacggaacggcua

SEQ ID NO: 1359638 - RNA, 19 nt, Artificial Sequence
  Description of Artificial Sequence: Synthetic oligonucleotide
ccagccccuaucaaacgau

SEQ ID NO: 1359639 - RNA, 19 nt, Artificial Sequence
  Description of Artificial Sequence: Synthetic oligonucleotide
gggcagaaugagggacuca

SEQ ID NO: 1359640 - RNA, 19 nt, Artificial Sequence
  Description of Artificial Sequence: Synthetic oligonucleotide
cagcacggaacggcuaauu

SEQ ID NO: 1359641 - RNA, 19 nt, Artificial Sequence
  Description of Artificial Sequence: Synthetic oligonucleotide
cgauuggggacuuggucuu

SEQ ID NO: 1359642 - RNA, 19 nt, Artificial Sequence
  Description of Artificial Sequence: Synthetic oligonucleotide
cggaacggcuaauuugcuu

SEQ ID NO: 1359643 - RNA, 19 nt, Artificial Sequence
  Description of Artificial Sequence: Synthetic oligonucleotide
ccaugguaggcuggcccua

SEQ ID NO: 1359644 - RNA, 19 nt, Artificial Sequence
  Description of Artificial Sequence: Synthetic oligonucleotide
gcagcacggaacggcuaau

SEQ ID NO: 1359645 - RNA, 19 nt, Artificial Sequence
  Description of Artificial Sequence: Synthetic oligonucleotide
cccauuggucaugcacauu

SEQ ID NO: 1359646 - RNA, 19 nt, Artificial Sequence
  Description of Artificial Sequence: Synthetic oligonucleotide
cggcagcauuaagcugaaa

SEQ ID NO: 1359647 - RNA, 19 nt, Artificial Sequence
  Description of Artificial Sequence: Synthetic oligonucleotide
aaugucuuaucugaggugc

SEQ ID NO: 1359648 - RNA, 19 nt, Artificial Sequence
  Description of Artificial Sequence: Synthetic oligonucleotide
guuauaaguauccucauag

SEQ ID NO: 1359649 - RNA, 19 nt, Artificial Sequence
  Description of Artificial Sequence: Synthetic oligonucleotide
gaugugaugguccagacug

SEQ ID NO: 1359650 - RNA, 19 nt, Artificial Sequence
  Description of Artificial Sequence: Synthetic oligonucleotide
aacugcuuaaaaugguccc

SEQ ID NO: 1359651 - RNA, 19 nt, Artificial Sequence
  Description of Artificial Sequence: Synthetic oligonucleotide
uuagacuccaaauacagcu

SEQ ID NO: 1359652 - RNA, 19 nt, Artificial Sequence
  Description of Artificial Sequence: Synthetic oligonucleotide
uucagcgugagucugaucu

SEQ ID NO: 1359653 - RNA, 19 nt, Artificial Sequence
  Description of Artificial Sequence: Synthetic oligonucleotide
uuaaaauggucccuguccc

SEQ ID NO: 1359654 - RNA, 19 nt, Artificial Sequence
  Description of Artificial Sequence: Synthetic oligonucleotide
gaugguagcauacuggcug

SEQ ID NO: 1359655 - RNA, 19 nt, Artificial Sequence
  Description of Artificial Sequence: Synthetic oligonucleotide
gaagauuuggggcccaucg

SEQ ID NO: 1359656 - RNA, 19 nt, Artificial Sequence
  Description of Artificial Sequence: Synthetic oligonucleotide
cuuaaaauggucccugucc

SEQ ID NO: 1359657 - RNA, 19 nt, Artificial Sequence
  Description of Artificial Sequence: Synthetic oligonucleotide
uguggugugcucaacuugg

SEQ ID NO: 1359658 - RNA, 19 nt, Artificial Sequence
  Description of Artificial Sequence: Synthetic oligonucleotide
uucaguguuuuccucaugc

SEQ ID NO: 1359659 - RNA, 19 nt, Artificial Sequence
  Description of Artificial Sequence: Synthetic oligonucleotide
cuuuaaugacuguagcugg

SEQ ID NO: 1359660 - RNA, 19 nt, Artificial Sequence
  Description of Artificial Sequence: Synthetic oligonucleotide
ucaggagucagaagguugg

SEQ ID NO: 1359661 - RNA, 19 nt, Artificial Sequence
  Description of Artificial Sequence: Synthetic oligonucleotide
aaucagucccuuaugaguc

SEQ ID NO: 1359662 - RNA, 19 nt, Artificial Sequence
  Description of Artificial Sequence: Synthetic oligonucleotide
guuaacagcacucugucac

SEQ ID NO: 1359663 - RNA, 19 nt, Artificial Sequence
  Description of Artificial Sequence: Synthetic oligonucleotide
aagacuuagacuccaaaua

SEQ ID NO: 1359664 - RNA, 19 nt, Artificial Sequence
  Description of Artificial Sequence: Synthetic oligonucleotide
ugucucauacaucuggagc

SEQ ID NO: 1359665 - RNA, 19 nt, Artificial Sequence
  Description of Artificial Sequence: Synthetic oligonucleotide
aguugcuuugccauggucc

SEQ ID NO: 1359666 - RNA, 19 nt, Artificial Sequence
  Description of Artificial Sequence: Synthetic oligonucleotide
aguagagcaguucuguaag

SEQ ID NO: 1359667 - RNA, 19 nt, Artificial Sequence
  Description of Artificial Sequence: Synthetic oligonucleotide
guagagaagauuuggggcc

SEQ ID NO: 1359668 - RNA, 19 nt, Artificial Sequence
  Description of Artificial Sequence: Synthetic oligonucleotide
agguagagaagauuugggg

SEQ ID NO: 1359669 - RNA, 19 nt, Artificial Sequence
  Description of Artificial Sequence: Synthetic oligonucleotide
uagguagagaagauuuggg

SEQ ID NO: 1359670 - RNA, 19 nt, Artificial Sequence
  Description of Artificial Sequence: Synthetic oligonucleotide
guuguuauaaguauccuca

SEQ ID NO: 1359671 - RNA, 19 nt, Artificial Sequence
  Description of Artificial Sequence: Synthetic oligonucleotide
agacugaucacguugcucu

SEQ ID NO: 1359672 - RNA, 19 nt, Artificial Sequence
  Description of Artificial Sequence: Synthetic oligonucleotide
uggaaugucuuaucugagg

SEQ ID NO: 1359673 - RNA, 19 nt, Artificial Sequence
  Description of Artificial Sequence: Synthetic oligonucleotide
auacaucuggagcuucucc

SEQ ID NO: 1359674 - RNA, 19 nt, Artificial Sequence
  Description of Artificial Sequence: Synthetic oligonucleotide
uuguagguagagaagauuu

SEQ ID NO: 1359675 - RNA, 19 nt, Artificial Sequence
  Description of Artificial Sequence: Synthetic oligonucleotide
aggguuguuauaaguaucc

SEQ ID NO: 1359676 - RNA, 19 nt, Artificial Sequence
  Description of Artificial Sequence: Synthetic oligonucleotide
uggcucaugacuagcuucg

SEQ ID NO: 1359677 - RNA, 19 nt, Artificial Sequence
  Description of Artificial Sequence: Synthetic oligonucleotide
uggagcuguuggcagaugg

SEQ ID NO: 1359678 - RNA, 19 nt, Artificial Sequence
  Description of Artificial Sequence: Synthetic oligonucleotide
acuagcuucggcugcaaag

SEQ ID NO: 1359679 - RNA, 19 nt, Artificial Sequence
  Description of Artificial Sequence: Synthetic oligonucleotide
guugcuuugccaugguccg

SEQ ID NO: 1359680 - RNA, 19 nt, Artificial Sequence
  Description of Artificial Sequence: Synthetic oligonucleotide
gguagagaagauuuggggc

SEQ ID NO: 1359681 - RNA, 19 nt, Artificial Sequence
  Description of Artificial Sequence: Synthetic oligonucleotide
ugaaggguuccacacuuug

SEQ ID NO: 1359682 - RNA, 19 nt, Artificial Sequence
  Description of Artificial Sequence: Synthetic oligonucleotide
acuuagacuccaaauacag

SEQ ID NO: 1359683 - RNA, 19 nt, Artificial Sequence
  Description of Artificial Sequence: Synthetic oligonucleotide
auacuggcugaugugaugg

SEQ ID NO: 1359684 - RNA, 19 nt, Artificial Sequence
  Description of Artificial Sequence: Synthetic oligonucleotide
cagacuaggggacucgugg

SEQ ID NO: 1359685 - RNA, 19 nt, Artificial Sequence
  Description of Artificial Sequence: Synthetic oligonucleotide
ggugugcucaacuuggagg

SEQ ID NO: 1359686 - RNA, 19 nt, Artificial Sequence
  Description of Artificial Sequence: Synthetic oligonucleotide
gaccacaguacccugaaga

SEQ ID NO: 1359687 - RNA, 19 nt, Artificial Sequence
  Description of Artificial Sequence: Synthetic oligonucleotide
agacuaggggacucguggc

SEQ ID NO: 1359688 - RNA, 19 nt, Artificial Sequence
  Description of Artificial Sequence: Synthetic oligonucleotide
uguaauggggagcuuggaa

SEQ ID NO: 1359689 - RNA, 19 nt, Artificial Sequence
  Description of Artificial Sequence: Synthetic oligonucleotide
ucugucuggauucuucaaa

SEQ ID NO: 1359690 - RNA, 19 nt, Artificial Sequence
  Description of Artificial Sequence: Synthetic oligonucleotide
ggaguauugucucugggcc

SEQ ID NO: 1359691 - RNA, 19 nt, Artificial Sequence
  Description of Artificial Sequence: Synthetic oligonucleotide
cuuagacuccaaauacagc

SEQ ID NO: 1359692 - RNA, 19 nt, Artificial Sequence
  Description of Artificial Sequence: Synthetic oligonucleotide
gugagucugaucuccuugg

SEQ ID NO: 1359693 - RNA, 19 nt, Artificial Sequence
  Description of Artificial Sequence: Synthetic oligonucleotide
gaaucaagggugguucagg

SEQ ID NO: 1359694 - RNA, 19 nt, Artificial Sequence
  Description of Artificial Sequence: Synthetic oligonucleotide
uguuauaaguauccucaua

SEQ ID NO: 1359695 - RNA, 19 nt, Artificial Sequence
  Description of Artificial Sequence: Synthetic oligonucleotide
ucaugacuagcuucggcug

SEQ ID NO: 1359696 - RNA, 19 nt, Artificial Sequence
  Description of Artificial Sequence: Synthetic oligonucleotide
uugcauggaguucuggggu

SEQ ID NO: 1359697 - RNA, 19 nt, Artificial Sequence
  Description of Artificial Sequence: Synthetic oligonucleotide
ugagccucugucuccaggc

SEQ ID NO: 1359698 - RNA, 19 nt, Artificial Sequence
  Description of Artificial Sequence: Synthetic oligonucleotide
ucaggauacccaguuaaca

SEQ ID NO: 1359699 - RNA, 19 nt, Artificial Sequence
  Description of Artificial Sequence: Synthetic oligonucleotide
aggcgggcaaugcagcugc

SEQ ID NO: 1359700 - RNA, 19 nt, Artificial Sequence
  Description of Artificial Sequence: Synthetic oligonucleotide
uuaaugacuguagcugggc

SEQ ID NO: 1359701 - RNA, 19 nt, Artificial Sequence
  Description of Artificial Sequence: Synthetic oligonucleotide
uggagagcgcuguugcagg

SEQ ID NO: 1359702 - RNA, 19 nt, Artificial Sequence
  Description of Artificial Sequence: Synthetic oligonucleotide
guacccugaagacuuagac

SEQ ID NO: 1359703 - RNA, 19 nt, Artificial Sequence
  Description of Artificial Sequence: Synthetic oligonucleotide
gacaagaggaguagagcag

SEQ ID NO: 1359704 - RNA, 19 nt, Artificial Sequence
  Description of Artificial Sequence: Synthetic oligonucleotide
uacccugaagacuuagacu

SEQ ID NO: 1359705 - RNA, 19 nt, Artificial Sequence
  Description of Artificial Sequence: Synthetic oligonucleotide
aagauuuggggcccaucgu

SEQ ID NO: 1359706 - RNA, 19 nt, Artificial Sequence
  Description of Artificial Sequence: Synthetic oligonucleotide
ugguguugaggucacgagu

SEQ ID NO: 1359707 - RNA, 19 nt, Artificial Sequence
  Description of Artificial Sequence: Synthetic oligonucleotide
aaagugcuacugggaaggc

SEQ ID NO: 1359708 - RNA, 19 nt, Artificial Sequence
  Description of Artificial Sequence: Synthetic oligonucleotide
uugcucgucagcuccuggg

SEQ ID NO: 1359709 - RNA, 19 nt, Artificial Sequence
  Description of Artificial Sequence: Synthetic oligonucleotide
caucguggugaacaggagc

SEQ ID NO: 1359710 - RNA, 19 nt, Artificial Sequence
  Description of Artificial Sequence: Synthetic oligonucleotide
ucacgaguggguaggacaa

SEQ ID NO: 1359711 - RNA, 19 nt, Artificial Sequence
  Description of Artificial Sequence: Synthetic oligonucleotide
aucaagggugguucagggg

SEQ ID NO: 1359712 - RNA, 19 nt, Artificial Sequence
  Description of Artificial Sequence: Synthetic oligonucleotide
uuucuguggcgaguguugg

SEQ ID NO: 1359713 - RNA, 19 nt, Artificial Sequence
  Description of Artificial Sequence: Synthetic oligonucleotide
cacucugucaccccaauca

SEQ ID NO: 1359714 - RNA, 19 nt, Artificial Sequence
  Description of Artificial Sequence: Synthetic oligonucleotide
aagugcuacugggaaggcg

SEQ ID NO: 1359715 - RNA, 19 nt, Artificial Sequence
  Description of Artificial Sequence: Synthetic oligonucleotide
ugcucaacuuggaggacug

SEQ ID NO: 1359716 - RNA, 19 nt, Artificial Sequence
  Description of Artificial Sequence: Synthetic oligonucleotide
gggccaacugcuuaaaaug

SEQ ID NO: 1359717 - RNA, 19 nt, Artificial Sequence
  Description of Artificial Sequence: Synthetic oligonucleotide
ugaugugaugguccagacu

SEQ ID NO: 1359718 - RNA, 19 nt, Artificial Sequence
  Description of Artificial Sequence: Synthetic oligonucleotide
aagucagacuaggggacuc

SEQ ID NO: 1359719 - RNA, 19 nt, Artificial Sequence
  Description of Artificial Sequence: Synthetic oligonucleotide
ucggcuauauuugaggguu

SEQ ID NO: 1359720 - RNA, 19 nt, Artificial Sequence
  Description of Artificial Sequence: Synthetic oligonucleotide
gugugcucaacuuggagga

SEQ ID NO: 1359721 - RNA, 19 nt, Artificial Sequence
  Description of Artificial Sequence: Synthetic oligonucleotide
ggacaagaggaguagagca

SEQ ID NO: 1359722 - RNA, 19 nt, Artificial Sequence
  Description of Artificial Sequence: Synthetic oligonucleotide
gaagacuuagacuccaaau

SEQ ID NO: 1359723 - RNA, 19 nt, Artificial Sequence
  Description of Artificial Sequence: Synthetic oligonucleotide
ugaggucacgaguggguag

SEQ ID NO: 1359724 - RNA, 19 nt, Artificial Sequence
  Description of Artificial Sequence: Synthetic oligonucleotide
guauccucauaggugaggc

SEQ ID NO: 1359725 - RNA, 19 nt, Artificial Sequence
  Description of Artificial Sequence: Synthetic oligonucleotide
gaggucacgaguggguagg

SEQ ID NO: 1359726 - RNA, 19 nt, Artificial Sequence
  Description of Artificial Sequence: Synthetic oligonucleotide
agggaguauugucucuggg

SEQ ID NO: 1359727 - RNA, 19 nt, Artificial Sequence
  Description of Artificial Sequence: Synthetic oligonucleotide
uucggcugcaaagucagac

SEQ ID NO: 1359728 - RNA, 19 nt, Artificial Sequence
  Description of Artificial Sequence: Synthetic oligonucleotide
aguauccucauaggugagg

SEQ ID NO: 1359729 - RNA, 19 nt, Artificial Sequence
  Description of Artificial Sequence: Synthetic oligonucleotide
acaggugcacuagggaugg

SEQ ID NO: 1359730 - RNA, 19 nt, Artificial Sequence
  Description of Artificial Sequence: Synthetic oligonucleotide
gauucccagagugugugug

SEQ ID NO: 1359731 - RNA, 19 nt, Artificial Sequence
  Description of Artificial Sequence: Synthetic oligonucleotide
cacaggugcacuagggaug

SEQ ID NO: 1359732 - RNA, 19 nt, Artificial Sequence
  Description of Artificial Sequence: Synthetic oligonucleotide
ucuguggcgaguguuggcu

SEQ ID NO: 1359733 - RNA, 19 nt, Artificial Sequence
  Description of Artificial Sequence: Synthetic oligonucleotide
caguuaacagcacucuguc

SEQ ID NO: 1359734 - RNA, 19 nt, Artificial Sequence
  Description of Artificial Sequence: Synthetic oligonucleotide
ugggccuuagguagagagc

SEQ ID NO: 1359735 - RNA, 19 nt, Artificial Sequence
  Description of Artificial Sequence: Synthetic oligonucleotide
gaaggaaggacuggcgcug

SEQ ID NO: 1359736 - RNA, 19 nt, Artificial Sequence
  Description of Artificial Sequence: Synthetic oligonucleotide
cugagucccgaguucagug

SEQ ID NO: 1359737 - RNA, 19 nt, Artificial Sequence
  Description of Artificial Sequence: Synthetic oligonucleotide
guagagagccccucuucag

SEQ ID NO: 1359738 - RNA, 19 nt, Artificial Sequence
  Description of Artificial Sequence: Synthetic oligonucleotide
aucguggugaacaggagca

SEQ ID NO: 1359739 - RNA, 19 nt, Artificial Sequence
  Description of Artificial Sequence: Synthetic oligonucleotide
uuggaagguguuguggugu

SEQ ID NO: 1359740 - RNA, 19 nt, Artificial Sequence
  Description of Artificial Sequence: Synthetic oligonucleotide
aguuaacagcacucuguca

SEQ ID NO: 1359741 - RNA, 19 nt, Artificial Sequence
  Description of Artificial Sequence: Synthetic oligonucleotide
ucagacuaggggacucgug

SEQ ID NO: 1359742 - RNA, 19 nt, Artificial Sequence
  Description of Artificial Sequence: Synthetic oligonucleotide
gucacgaguggguaggaca

SEQ ID NO: 1359743 - RNA, 19 nt, Artificial Sequence
  Description of Artificial Sequence: Synthetic oligonucleotide
gaaggguuccacacuuugc

SEQ ID NO: 1359744 - RNA, 19 nt, Artificial Sequence
  Description of Artificial Sequence: Synthetic oligonucleotide
agcauacuggcugauguga

SEQ ID NO: 1359745 - RNA, 19 nt, Artificial Sequence
  Description of Artificial Sequence: Synthetic oligonucleotide
gguguugaggucacgagug

SEQ ID NO: 1359746 - RNA, 19 nt, Artificial Sequence
  Description of Artificial Sequence: Synthetic oligonucleotide
ugagucccgaguucagugu

SEQ ID NO: 1359747 - RNA, 19 nt, Artificial Sequence
  Description of Artificial Sequence: Synthetic oligonucleotide
agaaucaagggugguucag

SEQ ID NO: 1359748 - RNA, 19 nt, Artificial Sequence
  Description of Artificial Sequence: Synthetic oligonucleotide
uccaagugggauucccaga

SEQ ID NO: 1359749 - RNA, 19 nt, Artificial Sequence
  Description of Artificial Sequence: Synthetic oligonucleotide
auuucuguggcgaguguug

SEQ ID NO: 1359750 - RNA, 19 nt, Artificial Sequence
  Description of Artificial Sequence: Synthetic oligonucleotide
ucggcugcaaagucagacu

SEQ ID NO: 1359751 - RNA, 19 nt, Artificial Sequence
  Description of Artificial Sequence: Synthetic oligonucleotide
agugcgccucuucuugccg

SEQ ID NO: 1359752 - RNA, 19 nt, Artificial Sequence
  Description of Artificial Sequence: Synthetic oligonucleotide
acucguggcaagcucggcu

SEQ ID NO: 1359753 - RNA, 19 nt, Artificial Sequence
  Description of Artificial Sequence: Synthetic oligonucleotide
ugcucgucagcuccuggga

SEQ ID NO: 1359754 - RNA, 19 nt, Artificial Sequence
  Description of Artificial Sequence: Synthetic oligonucleotide
aaggaaggacuggcgcugg

SEQ ID NO: 1359755 - RNA, 19 nt, Artificial Sequence
  Description of Artificial Sequence: Synthetic oligonucleotide
ugucucugggccaggcgca

SEQ ID NO: 1359756 - RNA, 19 nt, Artificial Sequence
  Description of Artificial Sequence: Synthetic oligonucleotide
gcugcaaagucagacuagg

SEQ ID NO: 1359757 - RNA, 19 nt, Artificial Sequence
  Description of Artificial Sequence: Synthetic oligonucleotide
accccaaucagucccuuau

SEQ ID NO: 1359758 - RNA, 19 nt, Artificial Sequence
  Description of Artificial Sequence: Synthetic oligonucleotide
guguugaggucacgagugg

SEQ ID NO: 1359759 - RNA, 19 nt, Artificial Sequence
  Description of Artificial Sequence: Synthetic oligonucleotide
augguagcauacuggcuga

SEQ ID NO: 1359760 - RNA, 19 nt, Artificial Sequence
  Description of Artificial Sequence: Synthetic oligonucleotide
gaagcuggguuuggagggg

SEQ ID NO: 1359761 - RNA, 19 nt, Artificial Sequence
  Description of Artificial Sequence: Synthetic oligonucleotide
gugggauucccagagugug

SEQ ID NO: 1359762 - RNA, 19 nt, Artificial Sequence
  Description of Artificial Sequence: Synthetic oligonucleotide
aaggacuggcgcuggcgcu

SEQ ID NO: 1359763 - RNA, 19 nt, Artificial Sequence
  Description of Artificial Sequence: Synthetic oligonucleotide
gggccuuagguagagagcc

SEQ ID NO: 1359764 - RNA, 19 nt, Artificial Sequence
  Description of Artificial Sequence: Synthetic oligonucleotide
caugguccgggucacagga

SEQ ID NO: 1359765 - RNA, 19 nt, Artificial Sequence
  Description of Artificial Sequence: Synthetic oligonucleotide
gugguuguagguagagaag

SEQ ID NO: 1359766 - RNA, 19 nt, Artificial Sequence
  Description of Artificial Sequence: Synthetic oligonucleotide
gaugguccagacugaucac

SEQ ID NO: 1359767 - RNA, 19 nt, Artificial Sequence
  Description of Artificial Sequence: Synthetic oligonucleotide
gggaaggaaggacuggcgc

SEQ ID NO: 1359768 - RNA, 19 nt, Artificial Sequence
  Description of Artificial Sequence: Synthetic oligonucleotide
guggagacuguuccugaug

SEQ ID NO: 1359769 - RNA, 19 nt, Artificial Sequence
  Description of Artificial Sequence: Synthetic oligonucleotide
cucguggcaagcucggcuc

SEQ ID NO: 1359770 - RNA, 19 nt, Artificial Sequence
  Description of Artificial Sequence: Synthetic oligonucleotide
gacuccucagagauguuga

SEQ ID NO: 1359771 - RNA, 19 nt, Artificial Sequence
  Description of Artificial Sequence: Synthetic oligonucleotide
aggugcacuagggauggag

SEQ ID NO: 1359772 - RNA, 19 nt, Artificial Sequence
  Description of Artificial Sequence: Synthetic oligonucleotide
aaguauccucauaggugag

SEQ ID NO: 1359773 - RNA, 19 nt, Artificial Sequence
  Description of Artificial Sequence: Synthetic oligonucleotide
gcuguuggcagaugguagc

SEQ ID NO: 1359774 - RNA, 19 nt, Artificial Sequence
  Description of Artificial Sequence: Synthetic oligonucleotide
ggagaaucaagggugguuc

SEQ ID NO: 1359775 - RNA, 19 nt, Artificial Sequence
  Description of Artificial Sequence: Synthetic oligonucleotide
agucagacuaggggacucg

SEQ ID NO: 1359776 - RNA, 19 nt, Artificial Sequence
  Description of Artificial Sequence: Synthetic oligonucleotide
auuuggggcccaucguggu

SEQ ID NO: 1359777 - RNA, 19 nt, Artificial Sequence
  Description of Artificial Sequence: Synthetic oligonucleotide
ggaaugucuuaucugaggu

SEQ ID NO: 1359778 - RNA, 19 nt, Artificial Sequence
  Description of Artificial Sequence: Synthetic oligonucleotide
gacuaggggacucguggca

SEQ ID NO: 1359779 - RNA, 19 nt, Artificial Sequence
  Description of Artificial Sequence: Synthetic oligonucleotide
uauccucauaggugaggcu

SEQ ID NO: 1359780 - RNA, 19 nt, Artificial Sequence
  Description of Artificial Sequence: Synthetic oligonucleotide
uggcgcuuagucuccagau

SEQ ID NO: 1359781 - RNA, 19 nt, Artificial Sequence
  Description of Artificial Sequence: Synthetic oligonucleotide
cuucgcccgaccaggaguc

SEQ ID NO: 1359782 - RNA, 19 nt, Artificial Sequence
  Description of Artificial Sequence: Synthetic oligonucleotide
uuggggcccaucgugguga

SEQ ID NO: 1359783 - RNA, 19 nt, Artificial Sequence
  Description of Artificial Sequence: Synthetic oligonucleotide
gcuuagucuccagauuugg

SEQ ID NO: 1359784 - RNA, 19 nt, Artificial Sequence
  Description of Artificial Sequence: Synthetic oligonucleotide
uagguagagagccccucuu

SEQ ID NO: 1359785 - RNA, 19 nt, Artificial Sequence
  Description of Artificial Sequence: Synthetic oligonucleotide
cagagugugugugaggcca

SEQ ID NO: 1359786 - RNA, 19 nt, Artificial Sequence
  Description of Artificial Sequence: Synthetic oligonucleotide
cucguggucaggauaccca

SEQ ID NO: 1359787 - RNA, 19 nt, Artificial Sequence
  Description of Artificial Sequence: Synthetic oligonucleotide
cucgggaaacugaagaccu

SEQ ID NO: 1359788 - RNA, 19 nt, Artificial Sequence
  Description of Artificial Sequence: Synthetic oligonucleotide
ugcauggaguucuggggua

SEQ ID NO: 1359789 - RNA, 19 nt, Artificial Sequence
  Description of Artificial Sequence: Synthetic oligonucleotide
uggagaaucaagggugguu

SEQ ID NO: 1359790 - RNA, 19 nt, Artificial Sequence
  Description of Artificial Sequence: Synthetic oligonucleotide
cuccaaauacagcuccuga

SEQ ID NO: 1359791 - RNA, 19 nt, Artificial Sequence
  Description of Artificial Sequence: Synthetic oligonucleotide
cagcgugagucugaucucc

SEQ ID NO: 1359792 - RNA, 19 nt, Artificial Sequence
  Description of Artificial Sequence: Synthetic oligonucleotide
ucagucccuuaugaguccu

SEQ ID NO: 1359793 - RNA, 19 nt, Artificial Sequence
  Description of Artificial Sequence: Synthetic oligonucleotide
cuuaucugaggugcaguca

SEQ ID NO: 1359794 - RNA, 19 nt, Artificial Sequence
  Description of Artificial Sequence: Synthetic oligonucleotide
gggacucguggcaagcucg

SEQ ID NO: 1359795 - RNA, 19 nt, Artificial Sequence
  Description of Artificial Sequence: Synthetic oligonucleotide
acugggaaggcgggcaaug

SEQ ID NO: 1359796 - RNA, 19 nt, Artificial Sequence
  Description of Artificial Sequence: Synthetic oligonucleotide
gauggagggcuggucuuug

SEQ ID NO: 1359797 - RNA, 19 nt, Artificial Sequence
  Description of Artificial Sequence: Synthetic oligonucleotide
guaaggcagaagaggccag

SEQ ID NO: 1359798 - RNA, 19 nt, Artificial Sequence
  Description of Artificial Sequence: Synthetic oligonucleotide
uugccggcagugguuguag

SEQ ID NO: 1359799 - RNA, 19 nt, Artificial Sequence
  Description of Artificial Sequence: Synthetic oligonucleotide
uugaggucacgagugggua

SEQ ID NO: 1359800 - RNA, 19 nt, Artificial Sequence
  Description of Artificial Sequence: Synthetic oligonucleotide
cccgaguucaguguuuucc

SEQ ID NO: 1359801 - RNA, 19 nt, Artificial Sequence
  Description of Artificial Sequence: Synthetic oligonucleotide
agugggauucccagagugu

SEQ ID NO: 1359802 - RNA, 19 nt, Artificial Sequence
  Description of Artificial Sequence: Synthetic oligonucleotide
aggagucagaagguuggcu

SEQ ID NO: 1359803 - RNA, 19 nt, Artificial Sequence
  Description of Artificial Sequence: Synthetic oligonucleotide
ucuucagcgugagucugau

SEQ ID NO: 1359804 - RNA, 19 nt, Artificial Sequence
  Description of Artificial Sequence: Synthetic oligonucleotide
ggggacccggccuuuaaug

SEQ ID NO: 1359805 - RNA, 19 nt, Artificial Sequence
  Description of Artificial Sequence: Synthetic oligonucleotide
augucaggagucagaaggu

SEQ ID NO: 1359806 - RNA, 19 nt, Artificial Sequence
  Description of Artificial Sequence: Synthetic oligonucleotide
gucaggauacccaguuaac

SEQ ID NO: 1359807 - RNA, 19 nt, Artificial Sequence
  Description of Artificial Sequence: Synthetic oligonucleotide
ggccucgggaaacugaaga

SEQ ID NO: 1359808 - RNA, 19 nt, Artificial Sequence
  Description of Artificial Sequence: Synthetic oligonucleotide
ugucaggagucagaagguu

SEQ ID NO: 1359809 - RNA, 19 nt, Artificial Sequence
  Description of Artificial Sequence: Synthetic oligonucleotide
uggauucuucaaagugcua

SEQ ID NO: 1359810 - RNA, 19 nt, Artificial Sequence
  Description of Artificial Sequence: Synthetic oligonucleotide
ggagguccuuucuccuucg

SEQ ID NO: 1359811 - RNA, 19 nt, Artificial Sequence
  Description of Artificial Sequence: Synthetic oligonucleotide
ucguggcaagcucggcucu

SEQ ID NO: 1359812 - RNA, 19 nt, Artificial Sequence
  Description of Artificial Sequence: Synthetic oligonucleotide
ggagagcgcuguugcaggg

SEQ ID NO: 1359813 - RNA, 19 nt, Artificial Sequence
  Description of Artificial Sequence: Synthetic oligonucleotide
cuucgggaguucugggcuc

SEQ ID NO: 1359814 - RNA, 19 nt, Artificial Sequence
  Description of Artificial Sequence: Synthetic oligonucleotide
caggacuggcuggagugcc

SEQ ID NO: 1359815 - RNA, 19 nt, Artificial Sequence
  Description of Artificial Sequence: Synthetic oligonucleotide
gggauucccagagugugug

SEQ ID NO: 1359816 - RNA, 19 nt, Artificial Sequence
  Description of Artificial Sequence: Synthetic oligonucleotide
ggucugucuggauucuuca

SEQ ID NO: 1359817 - RNA, 19 nt, Artificial Sequence
  Description of Artificial Sequence: Synthetic oligonucleotide
uucgggaguucugggcuca

SEQ ID NO: 1359818 - RNA, 19 nt, Artificial Sequence
  Description of Artificial Sequence: Synthetic oligonucleotide
ccucgggaaacugaagacc

SEQ ID NO: 1359819 - RNA, 19 nt, Artificial Sequence
  Description of Artificial Sequence: Synthetic oligonucleotide
ugugcucaacuuggaggac

SEQ ID NO: 1359820 - RNA, 19 nt, Artificial Sequence
  Description of Artificial Sequence: Synthetic oligonucleotide
acggucggcuauauuugag

SEQ ID NO: 1359821 - RNA, 19 nt, Artificial Sequence
  Description of Artificial Sequence: Synthetic oligonucleotide
ggcacggucggcuauauuu

SEQ ID NO: 1359822 - RNA, 19 nt, Artificial Sequence
  Description of Artificial Sequence: Synthetic oligonucleotide
gagcuguuggcagauggua

SEQ ID NO: 1359823 - RNA, 19 nt, Artificial Sequence
  Description of Artificial Sequence: Synthetic oligonucleotide
ggugguguugaggucacga

SEQ ID NO: 1359824 - RNA, 19 nt, Artificial Sequence
  Description of Artificial Sequence: Synthetic oligonucleotide
cuagcuucggcugcaaagu

SEQ ID NO: 1359825 - RNA, 19 nt, Artificial Sequence
  Description of Artificial Sequence: Synthetic oligonucleotide
caguugcuuugccaugguc

SEQ ID NO: 1359826 - RNA, 19 nt, Artificial Sequence
  Description of Artificial Sequence: Synthetic oligonucleotide
gucccugucccauuucugu

SEQ ID NO: 1359827 - RNA, 19 nt, Artificial Sequence
  Description of Artificial Sequence: Synthetic oligonucleotide
agcacucugucaccccaau

SEQ ID NO: 1359828 - RNA, 19 nt, Artificial Sequence
  Description of Artificial Sequence: Synthetic oligonucleotide
cuguggagacuguuccuga

SEQ ID NO: 1359829 - RNA, 19 nt, Artificial Sequence
  Description of Artificial Sequence: Synthetic oligonucleotide
gccuuagguagagagcccc

SEQ ID NO: 1359830 - RNA, 19 nt, Artificial Sequence
  Description of Artificial Sequence: Synthetic oligonucleotide
cggucggcuauauuugagg

SEQ ID NO: 1359831 - RNA, 19 nt, Artificial Sequence
  Description of Artificial Sequence: Synthetic oligonucleotide
gccucgggaaacugaagac

SEQ ID NO: 1359832 - RNA, 19 nt, Artificial Sequence
  Description of Artificial Sequence: Synthetic oligonucleotide
ucguggugaacaggagcac

SEQ ID NO: 1359833 - RNA, 19 nt, Artificial Sequence
  Description of Artificial Sequence: Synthetic oligonucleotide
ggacccggccuuuaaugac

SEQ ID NO: 1359834 - RNA, 19 nt, Artificial Sequence
  Description of Artificial Sequence: Synthetic oligonucleotide
ggucucaaguucugagauc

SEQ ID NO: 1359835 - RNA, 19 nt, Artificial Sequence
  Description of Artificial Sequence: Synthetic oligonucleotide
cacggucggcuauauuuga

SEQ ID NO: 1359836 - RNA, 19 nt, Artificial Sequence
  Description of Artificial Sequence: Synthetic oligonucleotide
gucggcuauauuugagggu

SEQ ID NO: 1359837 - RNA, 19 nt, Artificial Sequence
  Description of Artificial Sequence: Synthetic oligonucleotide
guugaggucacgagugggu

SEQ ID NO: 1359838 - RNA, 19 nt, Artificial Sequence
  Description of Artificial Sequence: Synthetic oligonucleotide
gggacccggccuuuaauga

SEQ ID NO: 1359839 - RNA, 19 nt, Artificial Sequence
  Description of Artificial Sequence: Synthetic oligonucleotide
guauugucucugggccagg

SEQ ID NO: 1359840 - RNA, 19 nt, Artificial Sequence
  Description of Artificial Sequence: Synthetic oligonucleotide
ggaaggcgggcaaugcagc

SEQ ID NO: 1359841 - RNA, 19 nt, Artificial Sequence
  Description of Artificial Sequence: Synthetic oligonucleotide
gggcccaucguggugaaca

SEQ ID NO: 1359842 - RNA, 19 nt, Artificial Sequence
  Description of Artificial Sequence: Synthetic oligonucleotide
gggaaacauuuccuuccac

SEQ ID NO: 1359843 - RNA, 19 nt, Artificial Sequence
  Description of Artificial Sequence: Synthetic oligonucleotide
gcgaguguuggcucaugac

SEQ ID NO: 1359844 - RNA, 19 nt, Artificial Sequence
  Description of Artificial Sequence: Synthetic oligonucleotide
cccaguuaacagcacucug

SEQ ID NO: 1359845 - RNA, 19 nt, Artificial Sequence
  Description of Artificial Sequence: Synthetic oligonucleotide
cgugagucugaucuccuug

SEQ ID NO: 1359846 - RNA, 19 nt, Artificial Sequence
  Description of Artificial Sequence: Synthetic oligonucleotide
gcacggucggcuauauuug

SEQ ID NO: 1359847 - RNA, 19 nt, Artificial Sequence
  Description of Artificial Sequence: Synthetic oligonucleotide
cacaaccaucuguuucuga

SEQ ID NO: 1359848 - RNA, 19 nt, Artificial Sequence
  Description of Artificial Sequence: Synthetic oligonucleotide
guuguagguagagaagauu

SEQ ID NO: 1359849 - RNA, 19 nt, Artificial Sequence
  Description of Artificial Sequence: Synthetic oligonucleotide
acccggagggccaacugcu

SEQ ID NO: 1359850 - RNA, 19 nt, Artificial Sequence
  Description of Artificial Sequence: Synthetic oligonucleotide
agggcuggucuuugcucgu

SEQ ID NO: 1359851 - RNA, 19 nt, Artificial Sequence
  Description of Artificial Sequence: Synthetic oligonucleotide
ggacucguggcaagcucgg

SEQ ID NO: 1359852 - RNA, 19 nt, Artificial Sequence
  Description of Artificial Sequence: Synthetic oligonucleotide
cuguuggcagaugguagca

SEQ ID NO: 1359853 - RNA, 19 nt, Artificial Sequence
  Description of Artificial Sequence: Synthetic oligonucleotide
cacaggaccacaguacccu

SEQ ID NO: 1359854 - RNA, 19 nt, Artificial Sequence
  Description of Artificial Sequence: Synthetic oligonucleotide
cucaacuuggaggacuggu

SEQ ID NO: 1359855 - RNA, 19 nt, Artificial Sequence
  Description of Artificial Sequence: Synthetic oligonucleotide
gguguuguggugugcucaa

SEQ ID NO: 1359856 - RNA, 19 nt, Artificial Sequence
  Description of Artificial Sequence: Synthetic oligonucleotide
gacucguggcaagcucggc

SEQ ID NO: 1359857 - RNA, 19 nt, Artificial Sequence
  Description of Artificial Sequence: Synthetic oligonucleotide
gauuuggggcuggugggcu

SEQ ID NO: 1359858 - RNA, 19 nt, Artificial Sequence
  Description of Artificial Sequence: Synthetic oligonucleotide
cccauuucuguggcgagug

SEQ ID NO: 1359859 - RNA, 19 nt, Artificial Sequence
  Description of Artificial Sequence: Synthetic oligonucleotide
ucccgaguucaguguuuuc

SEQ ID NO: 1359860 - RNA, 19 nt, Artificial Sequence
  Description of Artificial Sequence: Synthetic oligonucleotide
gggagcuuggaagguguug

SEQ ID NO: 1359861 - RNA, 19 nt, Artificial Sequence
  Description of Artificial Sequence: Synthetic oligonucleotide
ggcgaguguuggcucauga

SEQ ID NO: 1359862 - RNA, 19 nt, Artificial Sequence
  Description of Artificial Sequence: Synthetic oligonucleotide
cacgaguggguaggacaag

SEQ ID NO: 1359863 - RNA, 19 nt, Artificial Sequence
  Description of Artificial Sequence: Synthetic oligonucleotide
ccaugguccgggucacagg

SEQ ID NO: 1359864 - RNA, 19 nt, Artificial Sequence
  Description of Artificial Sequence: Synthetic oligonucleotide
gacccggccuuuaaugacu

SEQ ID NO: 1359865 - RNA, 19 nt, Artificial Sequence
  Description of Artificial Sequence: Synthetic oligonucleotide
ucgcccgaccaggaguccu

SEQ ID NO: 1359866 - RNA, 19 nt, Artificial Sequence
  Description of Artificial Sequence: Synthetic oligonucleotide
aggggacucguggcaagcu

SEQ ID NO: 1359867 - RNA, 19 nt, Artificial Sequence
  Description of Artificial Sequence: Synthetic oligonucleotide
cagucccuuaugaguccuc

SEQ ID NO: 1359868 - RNA, 19 nt, Artificial Sequence
  Description of Artificial Sequence: Synthetic oligonucleotide
agcgugagucugaucuccu

SEQ ID NO: 1359869 - RNA, 19 nt, Artificial Sequence
  Description of Artificial Sequence: Synthetic oligonucleotide
gcuccugaucuagaggguc

SEQ ID NO: 1359870 - RNA, 19 nt, Artificial Sequence
  Description of Artificial Sequence: Synthetic oligonucleotide
acccggccuuuaaugacug

SEQ ID NO: 1359871 - RNA, 19 nt, Artificial Sequence
  Description of Artificial Sequence: Synthetic oligonucleotide
ggcucugagucccgaguuc

SEQ ID NO: 1359872 - RNA, 19 nt, Artificial Sequence
  Description of Artificial Sequence: Synthetic oligonucleotide
cuguuccugaugggaaaca

SEQ ID NO: 1359873 - RNA, 19 nt, Artificial Sequence
  Description of Artificial Sequence: Synthetic oligonucleotide
ggcucaugacuagcuucgg

SEQ ID NO: 1359874 - RNA, 19 nt, Artificial Sequence
  Description of Artificial Sequence: Synthetic oligonucleotide
gagucccgaguucaguguu

SEQ ID NO: 1359875 - RNA, 19 nt, Artificial Sequence
  Description of Artificial Sequence: Synthetic oligonucleotide
gcacaggugcacuagggau

SEQ ID NO: 1359876 - RNA, 19 nt, Artificial Sequence
  Description of Artificial Sequence: Synthetic oligonucleotide
ugacuagcuucggcugcaa

SEQ ID NO: 1359877 - RNA, 19 nt, Artificial Sequence
  Description of Artificial Sequence: Synthetic oligonucleotide
gugcucaacuuggaggacu

SEQ ID NO: 1359878 - RNA, 19 nt, Artificial Sequence
  Description of Artificial Sequence: Synthetic oligonucleotide
ugguagcauacuggcugau

SEQ ID NO: 1359879 - RNA, 19 nt, Artificial Sequence
  Description of Artificial Sequence: Synthetic oligonucleotide
ucgggaguucugggcucag

SEQ ID NO: 1359880 - RNA, 19 nt, Artificial Sequence
  Description of Artificial Sequence: Synthetic oligonucleotide
cugggcagacucgggagga

SEQ ID NO: 1359881 - RNA, 19 nt, Artificial Sequence
  Description of Artificial Sequence: Synthetic oligonucleotide
uucgcccgaccaggagucc

SEQ ID NO: 1359882 - RNA, 19 nt, Artificial Sequence
  Description of Artificial Sequence: Synthetic oligonucleotide
ggggacucguggcaagcuc

SEQ ID NO: 1359883 - RNA, 19 nt, Artificial Sequence
  Description of Artificial Sequence: Synthetic oligonucleotide
uuggcacggucggcuauau

SEQ ID NO: 1359884 - RNA, 19 nt, Artificial Sequence
  Description of Artificial Sequence: Synthetic oligonucleotide
gguccaagugggauuccca

SEQ ID NO: 1359885 - RNA, 19 nt, Artificial Sequence
  Description of Artificial Sequence: Synthetic oligonucleotide
gcgcuuagucuccagauuu

SEQ ID NO: 1359886 - RNA, 19 nt, Artificial Sequence
  Description of Artificial Sequence: Synthetic oligonucleotide
uggcgaguguuggcucaug

SEQ ID NO: 1359887 - RNA, 19 nt, Artificial Sequence
  Description of Artificial Sequence: Synthetic oligonucleotide
cgcuuagucuccagauuug

SEQ ID NO: 1359888 - RNA, 19 nt, Artificial Sequence
  Description of Artificial Sequence: Synthetic oligonucleotide
gcucaacuuggaggacugg

SEQ ID NO: 1359889 - RNA, 19 nt, Artificial Sequence
  Description of Artificial Sequence: Synthetic oligonucleotide
guccgggucacaggaccac

SEQ ID NO: 1359890 - RNA, 19 nt, Artificial Sequence
  Description of Artificial Sequence: Synthetic oligonucleotide
aggacuggcgcuggcgcuu

SEQ ID NO: 1359891 - RNA, 19 nt, Artificial Sequence
  Description of Artificial Sequence: Synthetic oligonucleotide
cauuuccuuccacaaccau

SEQ ID NO: 1359892 - RNA, 19 nt, Artificial Sequence
  Description of Artificial Sequence: Synthetic oligonucleotide
cauuucuguggcgaguguu

SEQ ID NO: 1359893 - RNA, 19 nt, Artificial Sequence
  Description of Artificial Sequence: Synthetic oligonucleotide
ccccaaucagucccuuaug

SEQ ID NO: 1359894 - RNA, 19 nt, Artificial Sequence
  Description of Artificial Sequence: Synthetic oligonucleotide
cagagauguugaagguggu

SEQ ID NO: 1359895 - RNA, 19 nt, Artificial Sequence
  Description of Artificial Sequence: Synthetic oligonucleotide
acguugcucuucagcguga

SEQ ID NO: 1359896 - RNA, 19 nt, Artificial Sequence
  Description of Artificial Sequence: Synthetic oligonucleotide
aggucacgaguggguagga

SEQ ID NO: 1359897 - RNA, 19 nt, Artificial Sequence
  Description of Artificial Sequence: Synthetic oligonucleotide
ggcuauauuugaggguugu

SEQ ID NO: 1359898 - RNA, 19 nt, Artificial Sequence
  Description of Artificial Sequence: Synthetic oligonucleotide
cuucggcugcaaagucaga

SEQ ID NO: 1359899 - RNA, 19 nt, Artificial Sequence
  Description of Artificial Sequence: Synthetic oligonucleotide
agucccgaguucaguguuu

SEQ ID NO: 1359900 - RNA, 19 nt, Artificial Sequence
  Description of Artificial Sequence: Synthetic oligonucleotide
cuucuugccggcagugguu

SEQ ID NO: 1359901 - RNA, 19 nt, Artificial Sequence
  Description of Artificial Sequence: Synthetic oligonucleotide
ggccuuagguagagagccc

SEQ ID NO: 1359902 - RNA, 19 nt, Artificial Sequence
  Description of Artificial Sequence: Synthetic oligonucleotide
uggggcccaucguggugaa

SEQ ID NO: 1359903 - RNA, 19 nt, Artificial Sequence
  Description of Artificial Sequence: Synthetic oligonucleotide
ggucacgaguggguaggac

SEQ ID NO: 1359904 - RNA, 19 nt, Artificial Sequence
  Description of Artificial Sequence: Synthetic oligonucleotide
uggcacggucggcuauauu

SEQ ID NO: 1359905 - RNA, 19 nt, Artificial Sequence
  Description of Artificial Sequence: Synthetic oligonucleotide
gcacuagggauggagggcu

SEQ ID NO: 1359906 - RNA, 19 nt, Artificial Sequence
  Description of Artificial Sequence: Synthetic oligonucleotide
caagugggauucccagagu

SEQ ID NO: 1359907 - RNA, 19 nt, Artificial Sequence
  Description of Artificial Sequence: Synthetic oligonucleotide
gucagacuaggggacucgu

SEQ ID NO: 1359908 - RNA, 19 nt, Artificial Sequence
  Description of Artificial Sequence: Synthetic oligonucleotide
ccugaucuagagggucccc

SEQ ID NO: 1359909 - RNA, 19 nt, Artificial Sequence
  Description of Artificial Sequence: Synthetic oligonucleotide
cuugccggcagugguugua

SEQ ID NO: 1359910 - RNA, 19 nt, Artificial Sequence
  Description of Artificial Sequence: Synthetic oligonucleotide
ccgaguucaguguuuuccu

SEQ ID NO: 1359911 - RNA, 19 nt, Artificial Sequence
  Description of Artificial Sequence: Synthetic oligonucleotide
gcccaggcuguaaugggga

SEQ ID NO: 1359912 - RNA, 19 nt, Artificial Sequence
  Description of Artificial Sequence: Synthetic oligonucleotide
gguccgggucacaggacca

SEQ ID NO: 1359913 - RNA, 19 nt, Artificial Sequence
  Description of Artificial Sequence: Synthetic oligonucleotide
cccgaccaggaguccuggg

SEQ ID NO: 1359914 - RNA, 19 nt, Artificial Sequence
  Description of Artificial Sequence: Synthetic oligonucleotide
caccccaaucagucccuua

SEQ ID NO: 1359915 - RNA, 19 nt, Artificial Sequence
  Description of Artificial Sequence: Synthetic oligonucleotide
ggauucccagagugugugu

SEQ ID NO: 1359916 - RNA, 19 nt, Artificial Sequence
  Description of Artificial Sequence: Synthetic oligonucleotide
agcucggcucuggcaucug

SEQ ID NO: 1359917 - RNA, 19 nt, Artificial Sequence
  Description of Artificial Sequence: Synthetic oligonucleotide
ccggccuuuaaugacugua

SEQ ID NO: 1359918 - RNA, 19 nt, Artificial Sequence
  Description of Artificial Sequence: Synthetic oligonucleotide
gcggccucgggaaacugaa

SEQ ID NO: 1359919 - RNA, 19 nt, Artificial Sequence
  Description of Artificial Sequence: Synthetic oligonucleotide
cccuucgcccgaccaggag

SEQ ID NO: 1359920 - RNA, 19 nt, Artificial Sequence
  Description of Artificial Sequence: Synthetic oligonucleotide
ggcgcuuagucuccagauu

SEQ ID NO: 1359921 - RNA, 19 nt, Artificial Sequence
  Description of Artificial Sequence: Synthetic oligonucleotide
ggagggccaacugcuuaaa

SEQ ID NO: 1359922 - RNA, 19 nt, Artificial Sequence
  Description of Artificial Sequence: Synthetic oligonucleotide
gucccgaguucaguguuuu

SEQ ID NO: 1359923 - RNA, 19 nt, Artificial Sequence
  Description of Artificial Sequence: Synthetic oligonucleotide
ccacaguacccugaagacu

SEQ ID NO: 1359924 - RNA, 19 nt, Artificial Sequence
  Description of Artificial Sequence: Synthetic oligonucleotide
ggccccugucucauacauc

SEQ ID NO: 1359925 - RNA, 19 nt, Artificial Sequence
  Description of Artificial Sequence: Synthetic oligonucleotide
gagugugugugaggccauu

SEQ ID NO: 1359926 - RNA, 19 nt, Artificial Sequence
  Description of Artificial Sequence: Synthetic oligonucleotide
gcuauauuugaggguuguu

SEQ ID NO: 1359927 - RNA, 19 nt, Artificial Sequence
  Description of Artificial Sequence: Synthetic oligonucleotide
ccggcagugguuguaggua

SEQ ID NO: 1359928 - RNA, 19 nt, Artificial Sequence
  Description of Artificial Sequence: Synthetic oligonucleotide
cggagggccaacugcuuaa

SEQ ID NO: 1359929 - RNA, 19 nt, Artificial Sequence
  Description of Artificial Sequence: Synthetic oligonucleotide
cgcccgaccaggaguccug

SEQ ID NO: 1359930 - RNA, 19 nt, Artificial Sequence
  Description of Artificial Sequence: Synthetic oligonucleotide
cuggagugcccaggcugua

SEQ ID NO: 1359931 - RNA, 19 nt, Artificial Sequence
  Description of Artificial Sequence: Synthetic oligonucleotide
ccagacugaucacguugcu

SEQ ID NO: 1359932 - RNA, 19 nt, Artificial Sequence
  Description of Artificial Sequence: Synthetic oligonucleotide
gcgugagucugaucuccuu

SEQ ID NO: 1359933 - RNA, 19 nt, Artificial Sequence
  Description of Artificial Sequence: Synthetic oligonucleotide
gcugcggccucgggaaacu

SEQ ID NO: 1359934 - RNA, 19 nt, Artificial Sequence
  Description of Artificial Sequence: Synthetic oligonucleotide
ccauuucuguggcgagugu

SEQ ID NO: 1359935 - RNA, 19 nt, Artificial Sequence
  Description of Artificial Sequence: Synthetic oligonucleotide
caggugcacuagggaugga

SEQ ID NO: 1359936 - RNA, 19 nt, Artificial Sequence
  Description of Artificial Sequence: Synthetic oligonucleotide
ccccuucgcccgaccagga

SEQ ID NO: 1359937 - RNA, 19 nt, Artificial Sequence
  Description of Artificial Sequence: Synthetic oligonucleotide
gccccucuucaggcaggga

SEQ ID NO: 1359938 - RNA, 19 nt, Artificial Sequence
  Description of Artificial Sequence: Synthetic oligonucleotide
cccggccuuuaaugacugu

SEQ ID NO: 1359939 - RNA, 19 nt, Artificial Sequence
  Description of Artificial Sequence: Synthetic oligonucleotide
cgggaguucugggcucaga

SEQ ID NO: 1359940 - RNA, 19 nt, Artificial Sequence
  Description of Artificial Sequence: Synthetic oligonucleotide
uauuuuaaagaacggaagg

SEQ ID NO: 1359941 - RNA, 19 nt, Artificial Sequence
  Description of Artificial Sequence: Synthetic oligonucleotide
aacggaagguuucauaagc

SEQ ID NO: 1359942 - RNA, 19 nt, Artificial Sequence
  Description of Artificial Sequence: Synthetic oligonucleotide
ugaugauucagaaggacgg

SEQ ID NO: 1359943 - RNA, 19 nt, Artificial Sequence
  Description of Artificial Sequence: Synthetic oligonucleotide
ugaaacaauucccacagag

SEQ ID NO: 1359944 - RNA, 19 nt, Artificial Sequence
  Description of Artificial Sequence: Synthetic oligonucleotide
agaguuuuggaauagaagu

SEQ ID NO: 1359945 - RNA, 19 nt, Artificial Sequence
  Description of Artificial Sequence: Synthetic oligonucleotide
aagaucacgugucucaagg

SEQ ID NO: 1359946 - RNA, 19 nt, Artificial Sequence
  Description of Artificial Sequence: Synthetic oligonucleotide
aauuuuggguacucuggcc

SEQ ID NO: 1359947 - RNA, 19 nt, Artificial Sequence
  Description of Artificial Sequence: Synthetic oligonucleotide
uuuucuagagaccccaucc

SEQ ID NO: 1359948 - RNA, 19 nt, Artificial Sequence
  Description of Artificial Sequence: Synthetic oligonucleotide
ugcaaagucaucugcauag

SEQ ID NO: 1359949 - RNA, 19 nt, Artificial Sequence
  Description of Artificial Sequence: Synthetic oligonucleotide
ugcuaugguaacuugacag

SEQ ID NO: 1359950 - RNA, 19 nt, Artificial Sequence
  Description of Artificial Sequence: Synthetic oligonucleotide
gaaacaugauucuuugagg

SEQ ID NO: 1359951 - RNA, 19 nt, Artificial Sequence
  Description of Artificial Sequence: Synthetic oligonucleotide
ucauaagccaacaaacuga

SEQ ID NO: 1359952 - RNA, 19 nt, Artificial Sequence
  Description of Artificial Sequence: Synthetic oligonucleotide
uuagauaggagcccaagga

SEQ ID NO: 1359953 - RNA, 19 nt, Artificial Sequence
  Description of Artificial Sequence: Synthetic oligonucleotide
uucauaagccaacaaacug

SEQ ID NO: 1359954 - RNA, 19 nt, Artificial Sequence
  Description of Artificial Sequence: Synthetic oligonucleotide
augguaacuugacaggacc

SEQ ID NO: 1359955 - RNA, 19 nt, Artificial Sequence
  Description of Artificial Sequence: Synthetic oligonucleotide
aaacaauacgaaaggauuc

SEQ ID NO: 1359956 - RNA, 19 nt, Artificial Sequence
  Description of Artificial Sequence: Synthetic oligonucleotide
gaagggucgguauucaagg

SEQ ID NO: 1359957 - RNA, 19 nt, Artificial Sequence
  Description of Artificial Sequence: Synthetic oligonucleotide
uuugagguaaacuagcuuu

SEQ ID NO: 1359958 - RNA, 19 nt, Artificial Sequence
  Description of Artificial Sequence: Synthetic oligonucleotide
aacaaacugauaggaacgc

SEQ ID NO: 1359959 - RNA, 19 nt, Artificial Sequence
  Description of Artificial Sequence: Synthetic oligonucleotide
ucucgcucagacuacaagg

SEQ ID NO: 1359960 - RNA, 19 nt, Artificial Sequence
  Description of Artificial Sequence: Synthetic oligonucleotide
aaacccugccacuuagagc

SEQ ID NO: 1359961 - RNA, 19 nt, Artificial Sequence
  Description of Artificial Sequence: Synthetic oligonucleotide
caacaaacugauaggaacg

SEQ ID NO: 1359962 - RNA, 19 nt, Artificial Sequence
  Description of Artificial Sequence: Synthetic oligonucleotide
acagcugauauguugauga

SEQ ID NO: 1359963 - RNA, 19 nt, Artificial Sequence
  Description of Artificial Sequence: Synthetic oligonucleotide
uguccuaccuuucaguggc

SEQ ID NO: 1359964 - RNA, 19 nt, Artificial Sequence
  Description of Artificial Sequence: Synthetic oligonucleotide
auuagauaggagcccaagg

SEQ ID NO: 1359965 - RNA, 19 nt, Artificial Sequence
  Description of Artificial Sequence: Synthetic oligonucleotide
aaguauguuuccuccaaug

SEQ ID NO: 1359966 - RNA, 19 nt, Artificial Sequence
  Description of Artificial Sequence: Synthetic oligonucleotide
uuuuguguuacggggaggg

SEQ ID NO: 1359967 - RNA, 19 nt, Artificial Sequence
  Description of Artificial Sequence: Synthetic oligonucleotide
uuucauaagccaacaaacu

SEQ ID NO: 1359968 - RNA, 19 nt, Artificial Sequence
  Description of Artificial Sequence: Synthetic oligonucleotide
gucauugguuuccaaaugg

SEQ ID NO: 1359969 - RNA, 19 nt, Artificial Sequence
  Description of Artificial Sequence: Synthetic oligonucleotide
uagauaggagcccaaggag

SEQ ID NO: 1359970 - RNA, 19 nt, Artificial Sequence
  Description of Artificial Sequence: Synthetic oligonucleotide
uaacacuguugucuaaagg

SEQ ID NO: 1359971 - RNA, 19 nt, Artificial Sequence
  Description of Artificial Sequence: Synthetic oligonucleotide
ugaugaaacaauucccaca

SEQ ID NO: 1359972 - RNA, 19 nt, Artificial Sequence
  Description of Artificial Sequence: Synthetic oligonucleotide
ugauaggaacgccagggag

SEQ ID NO: 1359973 - RNA, 19 nt, Artificial Sequence
  Description of Artificial Sequence: Synthetic oligonucleotide
agaaggacggggaagaagg

SEQ ID NO: 1359974 - RNA, 19 nt, Artificial Sequence
  Description of Artificial Sequence: Synthetic oligonucleotide
uuuagggcuuaauuuuggg

SEQ ID NO: 1359975 - RNA, 19 nt, Artificial Sequence
  Description of Artificial Sequence: Synthetic oligonucleotide
uuaaagaacggaagguuuc

SEQ ID NO: 1359976 - RNA, 19 nt, Artificial Sequence
  Description of Artificial Sequence: Synthetic oligonucleotide
cugcuuagcccauacaucc

SEQ ID NO: 1359977 - RNA, 19 nt, Artificial Sequence
  Description of Artificial Sequence: Synthetic oligonucleotide
ugauuagcuguccaccugc

SEQ ID NO: 1359978 - RNA, 19 nt, Artificial Sequence
  Description of Artificial Sequence: Synthetic oligonucleotide
ugauauguugaugaaacaa

SEQ ID NO: 1359979 - RNA, 19 nt, Artificial Sequence
  Description of Artificial Sequence: Synthetic oligonucleotide
cugggauuagauaggagcc

SEQ ID NO: 1359980 - RNA, 19 nt, Artificial Sequence
  Description of Artificial Sequence: Synthetic oligonucleotide
ugugcuuaaguauguuucc

SEQ ID NO: 1359981 - RNA, 19 nt, Artificial Sequence
  Description of Artificial Sequence: Synthetic oligonucleotide
gaggcugcucacuacaugc

SEQ ID NO: 1359982 - RNA, 19 nt, Artificial Sequence
  Description of Artificial Sequence: Synthetic oligonucleotide
ccaaauggaaacaugauuc

SEQ ID NO: 1359983 - RNA, 19 nt, Artificial Sequence
  Description of Artificial Sequence: Synthetic oligonucleotide
uuaaguauguuuccuccaa

SEQ ID NO: 1359984 - RNA, 19 nt, Artificial Sequence
  Description of Artificial Sequence: Synthetic oligonucleotide
uccgacaugugcuugaguc

SEQ ID NO: 1359985 - RNA, 19 nt, Artificial Sequence
  Description of Artificial Sequence: Synthetic oligonucleotide
ugaccuucggugcaguuug

SEQ ID NO: 1359986 - RNA, 19 nt, Artificial Sequence
  Description of Artificial Sequence: Synthetic oligonucleotide
agggcuuaauuuuggguac

SEQ ID NO: 1359987 - RNA, 19 nt, Artificial Sequence
  Description of Artificial Sequence: Synthetic oligonucleotide
auaagggagcccuuccgac

SEQ ID NO: 1359988 - RNA, 19 nt, Artificial Sequence
  Description of Artificial Sequence: Synthetic oligonucleotide
aguauguuuccuccaauga

SEQ ID NO: 1359989 - RNA, 19 nt, Artificial Sequence
  Description of Artificial Sequence: Synthetic oligonucleotide
ggagccauugucuuugugg

SEQ ID NO: 1359990 - RNA, 19 nt, Artificial Sequence
  Description of Artificial Sequence: Synthetic oligonucleotide
uagggcuuaauuuugggua

SEQ ID NO: 1359991 - RNA, 19 nt, Artificial Sequence
  Description of Artificial Sequence: Synthetic oligonucleotide
augaugauucagaaggacg

SEQ ID NO: 1359992 - RNA, 19 nt, Artificial Sequence
  Description of Artificial Sequence: Synthetic oligonucleotide
aaggacaccaggcucagua

SEQ ID NO: 1359993 - RNA, 19 nt, Artificial Sequence
  Description of Artificial Sequence: Synthetic oligonucleotide
acgggaacauuccucaguc

SEQ ID NO: 1359994 - RNA, 19 nt, Artificial Sequence
  Description of Artificial Sequence: Synthetic oligonucleotide
cugugcuuaaguauguuuc

SEQ ID NO: 1359995 - RNA, 19 nt, Artificial Sequence
  Description of Artificial Sequence: Synthetic oligonucleotide
gagaguuuuggaauagaag

SEQ ID NO: 1359996 - RNA, 19 nt, Artificial Sequence
  Description of Artificial Sequence: Synthetic oligonucleotide
ugucauugguuuccaaaug

SEQ ID NO: 1359997 - RNA, 19 nt, Artificial Sequence
  Description of Artificial Sequence: Synthetic oligonucleotide
auagaaguggggcacgcug

SEQ ID NO: 1359998 - RNA, 19 nt, Artificial Sequence
  Description of Artificial Sequence: Synthetic oligonucleotide
uugaacuguacccucugcu

SEQ ID NO: 1359999 - RNA, 19 nt, Artificial Sequence
  Description of Artificial Sequence: Synthetic oligonucleotide
acuacaugcuaacugggga

SEQ ID NO: 1360000 - RNA, 19 nt, Artificial Sequence
  Description of Artificial Sequence: Synthetic oligonucleotide
ucauccauucucaagccau

SEQ ID NO: 1360001 - RNA, 19 nt, Artificial Sequence
  Description of Artificial Sequence: Synthetic oligonucleotide
uuuuaaagaacggaagguu

SEQ ID NO: 1360002 - RNA, 19 nt, Artificial Sequence
  Description of Artificial Sequence: Synthetic oligonucleotide
uucaaggggagaguuuugg

SEQ ID NO: 1360003 - RNA, 19 nt, Artificial Sequence
  Description of Artificial Sequence: Synthetic oligonucleotide
gaacuguacccucugcugc

SEQ ID NO: 1360004 - RNA, 19 nt, Artificial Sequence
  Description of Artificial Sequence: Synthetic oligonucleotide
ucgaauggaacugaucucu

SEQ ID NO: 1360005 - RNA, 19 nt, Artificial Sequence
  Description of Artificial Sequence: Synthetic oligonucleotide
gucuuaaguuucaagauac

SEQ ID NO: 1360006 - RNA, 19 nt, Artificial Sequence
  Description of Artificial Sequence: Synthetic oligonucleotide
gacuacaaggccucugcag

SEQ ID NO: 1360007 - RNA, 19 nt, Artificial Sequence
  Description of Artificial Sequence: Synthetic oligonucleotide
cuacaugcuaacuggggag

SEQ ID NO: 1360008 - RNA, 19 nt, Artificial Sequence
  Description of Artificial Sequence: Synthetic oligonucleotide
aagggucgguauucaaggg

SEQ ID NO: 1360009 - RNA, 19 nt, Artificial Sequence
  Description of Artificial Sequence: Synthetic oligonucleotide
uuagggcuuaauuuugggu

SEQ ID NO: 1360010 - RNA, 19 nt, Artificial Sequence
  Description of Artificial Sequence: Synthetic oligonucleotide
gaucacgugucucaaggac

SEQ ID NO: 1360011 - RNA, 19 nt, Artificial Sequence
  Description of Artificial Sequence: Synthetic oligonucleotide
agggucgguauucaagggg

SEQ ID NO: 1360012 - RNA, 19 nt, Artificial Sequence
  Description of Artificial Sequence: Synthetic oligonucleotide
agauaggagcccaaggagg

SEQ ID NO: 1360013 - RNA, 19 nt, Artificial Sequence
  Description of Artificial Sequence: Synthetic oligonucleotide
cauuccucaguccuguuug

SEQ ID NO: 1360014 - RNA, 19 nt, Artificial Sequence
  Description of Artificial Sequence: Synthetic oligonucleotide
uaugguaacuugacaggac

SEQ ID NO: 1360015 - RNA, 19 nt, Artificial Sequence
  Description of Artificial Sequence: Synthetic oligonucleotide
ugguaacuugacaggaccc

SEQ ID NO: 1360016 - RNA, 19 nt, Artificial Sequence
  Description of Artificial Sequence: Synthetic oligonucleotide
agcccauacauccauuucu

SEQ ID NO: 1360017 - RNA, 19 nt, Artificial Sequence
  Description of Artificial Sequence: Synthetic oligonucleotide
uuuugcucgaauggaacug

SEQ ID NO: 1360018 - RNA, 19 nt, Artificial Sequence
  Description of Artificial Sequence: Synthetic oligonucleotide
ugcacgggaacauuccuca

SEQ ID NO: 1360019 - RNA, 19 nt, Artificial Sequence
  Description of Artificial Sequence: Synthetic oligonucleotide
gaugauucagaaggacggg

SEQ ID NO: 1360020 - RNA, 19 nt, Artificial Sequence
  Description of Artificial Sequence: Synthetic oligonucleotide
guuuuggaauagaaguggg

SEQ ID NO: 1360021 - RNA, 19 nt, Artificial Sequence
  Description of Artificial Sequence: Synthetic oligonucleotide
uuugaaggaagcugagaaa

SEQ ID NO: 1360022 - RNA, 19 nt, Artificial Sequence
  Description of Artificial Sequence: Synthetic oligonucleotide
cucgcucagacuacaaggc

SEQ ID NO: 1360023 - RNA, 19 nt, Artificial Sequence
  Description of Artificial Sequence: Synthetic oligonucleotide
auaggaacgccagggaggg

SEQ ID NO: 1360024 - RNA, 19 nt, Artificial Sequence
  Description of Artificial Sequence: Synthetic oligonucleotide
cuaugguguucucaaagac

SEQ ID NO: 1360025 - RNA, 19 nt, Artificial Sequence
  Description of Artificial Sequence: Synthetic oligonucleotide
ucuuaaguuucaagauaca

SEQ ID NO: 1360026 - RNA, 19 nt, Artificial Sequence
  Description of Artificial Sequence: Synthetic oligonucleotide
ugucucauaagggagcccu

SEQ ID NO: 1360027 - RNA, 19 nt, Artificial Sequence
  Description of Artificial Sequence: Synthetic oligonucleotide
guugaugaaacaauuccca

SEQ ID NO: 1360028 - RNA, 19 nt, Artificial Sequence
  Description of Artificial Sequence: Synthetic oligonucleotide
agaaacaauacgaaaggau

SEQ ID NO: 1360029 - RNA, 19 nt, Artificial Sequence
  Description of Artificial Sequence: Synthetic oligonucleotide
uacaugcuaacuggggagg

SEQ ID NO: 1360030 - RNA, 19 nt, Artificial Sequence
  Description of Artificial Sequence: Synthetic oligonucleotide
aaccuuuccuccccaucuc

SEQ ID NO: 1360031 - RNA, 19 nt, Artificial Sequence
  Description of Artificial Sequence: Synthetic oligonucleotide
ucaaagacagucggggaug

SEQ ID NO: 1360032 - RNA, 19 nt, Artificial Sequence
  Description of Artificial Sequence: Synthetic oligonucleotide
uucuagagaccccauccac

SEQ ID NO: 1360033 - RNA, 19 nt, Artificial Sequence
  Description of Artificial Sequence: Synthetic oligonucleotide
gcuaugguaacuugacagg

SEQ ID NO: 1360034 - RNA, 19 nt, Artificial Sequence
  Description of Artificial Sequence: Synthetic oligonucleotide
ugaaggauucucugcuuca

SEQ ID NO: 1360035 - RNA, 19 nt, Artificial Sequence
  Description of Artificial Sequence: Synthetic oligonucleotide
cacuacaugcuaacugggg

SEQ ID NO: 1360036 - RNA, 19 nt, Artificial Sequence
  Description of Artificial Sequence: Synthetic oligonucleotide
augauucagaaggacgggg

SEQ ID NO: 1360037 - RNA, 19 nt, Artificial Sequence
  Description of Artificial Sequence: Synthetic oligonucleotide
caaacccugccacuuagag

SEQ ID NO: 1360038 - RNA, 19 nt, Artificial Sequence
  Description of Artificial Sequence: Synthetic oligonucleotide
gaagguuucauaagccaac

SEQ ID NO: 1360039 - RNA, 19 nt, Artificial Sequence
  Description of Artificial Sequence: Synthetic oligonucleotide
uauucaaggggagaguuuu

SEQ ID NO: 1360040 - RNA, 19 nt, Artificial Sequence
  Description of Artificial Sequence: Synthetic oligonucleotide
acggaagguuucauaagcc

SEQ ID NO: 1360041 - RNA, 19 nt, Artificial Sequence
  Description of Artificial Sequence: Synthetic oligonucleotide
uaaagaacggaagguuuca

SEQ ID NO: 1360042 - RNA, 19 nt, Artificial Sequence
  Description of Artificial Sequence: Synthetic oligonucleotide
ucuccuagaugcacucugc

SEQ ID NO: 1360043 - RNA, 19 nt, Artificial Sequence
  Description of Artificial Sequence: Synthetic oligonucleotide
cagacuacaaggccucugc

SEQ ID NO: 1360044 - RNA, 19 nt, Artificial Sequence
  Description of Artificial Sequence: Synthetic oligonucleotide
gcugauauguugaugaaac

SEQ ID NO: 1360045 - RNA, 19 nt, Artificial Sequence
  Description of Artificial Sequence: Synthetic oligonucleotide
agagacgaccuguccuacc

SEQ ID NO: 1360046 - RNA, 19 nt, Artificial Sequence
  Description of Artificial Sequence: Synthetic oligonucleotide
acuuagagcccuugccauc

SEQ ID NO: 1360047 - RNA, 19 nt, Artificial Sequence
  Description of Artificial Sequence: Synthetic oligonucleotide
ucugucucauaagggagcc

SEQ ID NO: 1360048 - RNA, 19 nt, Artificial Sequence
  Description of Artificial Sequence: Synthetic oligonucleotide
aacugaucucugcacggga

SEQ ID NO: 1360049 - RNA, 19 nt, Artificial Sequence
  Description of Artificial Sequence: Synthetic oligonucleotide
auucugaagaggggcaggg

SEQ ID NO: 1360050 - RNA, 19 nt, Artificial Sequence
  Description of Artificial Sequence: Synthetic oligonucleotide
aagguuucauaagccaaca

SEQ ID NO: 1360051 - RNA, 19 nt, Artificial Sequence
  Description of Artificial Sequence: Synthetic oligonucleotide
cuuggagccauugucuuug

SEQ ID NO: 1360052 - RNA, 19 nt, Artificial Sequence
  Description of Artificial Sequence: Synthetic oligonucleotide
gaaacaauacgaaaggauu

SEQ ID NO: 1360053 - RNA, 19 nt, Artificial Sequence
  Description of Artificial Sequence: Synthetic oligonucleotide
acggggaagaaggaccacc

SEQ ID NO: 1360054 - RNA, 19 nt, Artificial Sequence
  Description of Artificial Sequence: Synthetic oligonucleotide
ggaacugaucucugcacgg

SEQ ID NO: 1360055 - RNA, 19 nt, Artificial Sequence
  Description of Artificial Sequence: Synthetic oligonucleotide
guugcuaugguaacuugac

SEQ ID NO: 1360056 - RNA, 19 nt, Artificial Sequence
  Description of Artificial Sequence: Synthetic oligonucleotide
guaagggagggcugugggg

SEQ ID NO: 1360057 - RNA, 19 nt, Artificial Sequence
  Description of Artificial Sequence: Synthetic oligonucleotide
uuuucgaagggucgguauu

SEQ ID NO: 1360058 - RNA, 19 nt, Artificial Sequence
  Description of Artificial Sequence: Synthetic oligonucleotide
guugucuaaagguauauuu

SEQ ID NO: 1360059 - RNA, 19 nt, Artificial Sequence
  Description of Artificial Sequence: Synthetic oligonucleotide
cuguccuaccuuucagugg

SEQ ID NO: 1360060 - RNA, 19 nt, Artificial Sequence
  Description of Artificial Sequence: Synthetic oligonucleotide
gguuucauaagccaacaaa

SEQ ID NO: 1360061 - RNA, 19 nt, Artificial Sequence
  Description of Artificial Sequence: Synthetic oligonucleotide
uugcuaugguaacuugaca

SEQ ID NO: 1360062 - RNA, 19 nt, Artificial Sequence
  Description of Artificial Sequence: Synthetic oligonucleotide
gaacugaucucugcacggg

SEQ ID NO: 1360063 - RNA, 19 nt, Artificial Sequence
  Description of Artificial Sequence: Synthetic oligonucleotide
agguagaaucuccuagaug

SEQ ID NO: 1360064 - RNA, 19 nt, Artificial Sequence
  Description of Artificial Sequence: Synthetic oligonucleotide
uaaguauguuuccuccaau

SEQ ID NO: 1360065 - RNA, 19 nt, Artificial Sequence
  Description of Artificial Sequence: Synthetic oligonucleotide
uugagguaaacuagcuuuu

SEQ ID NO: 1360066 - RNA, 19 nt, Artificial Sequence
  Description of Artificial Sequence: Synthetic oligonucleotide
ucgcucagacuacaaggcc

SEQ ID NO: 1360067 - RNA, 19 nt, Artificial Sequence
  Description of Artificial Sequence: Synthetic oligonucleotide
uuugcucgaauggaacuga

SEQ ID NO: 1360068 - RNA, 19 nt, Artificial Sequence
  Description of Artificial Sequence: Synthetic oligonucleotide
ucaaggggagaguuuugga

SEQ ID NO: 1360069 - RNA, 19 nt, Artificial Sequence
  Description of Artificial Sequence: Synthetic oligonucleotide
gauaggagcccaaggagga

SEQ ID NO: 1360070 - RNA, 19 nt, Artificial Sequence
  Description of Artificial Sequence: Synthetic oligonucleotide
ugggauuagauaggagccc

SEQ ID NO: 1360071 - RNA, 19 nt, Artificial Sequence
  Description of Artificial Sequence: Synthetic oligonucleotide
agaaucaggcugauuagcu

SEQ ID NO: 1360072 - RNA, 19 nt, Artificial Sequence
  Description of Artificial Sequence: Synthetic oligonucleotide
gauauguugaugaaacaau

SEQ ID NO: 1360073 - RNA, 19 nt, Artificial Sequence
  Description of Artificial Sequence: Synthetic oligonucleotide
ucugcacgggaacauuccu

SEQ ID NO: 1360074 - RNA, 19 nt, Artificial Sequence
  Description of Artificial Sequence: Synthetic oligonucleotide
uuagcccauacauccauuu

SEQ ID NO: 1360075 - RNA, 19 nt, Artificial Sequence
  Description of Artificial Sequence: Synthetic oligonucleotide
agagaccccauccacuuau

SEQ ID NO: 1360076 - RNA, 19 nt, Artificial Sequence
  Description of Artificial Sequence: Synthetic oligonucleotide
auacgaaaggauucaucaa

SEQ ID NO: 1360077 - RNA, 19 nt, Artificial Sequence
  Description of Artificial Sequence: Synthetic oligonucleotide
aguccuguuugcugaagga

SEQ ID NO: 1360078 - RNA, 19 nt, Artificial Sequence
  Description of Artificial Sequence: Synthetic oligonucleotide
ucucugcacgggaacauuc

SEQ ID NO: 1360079 - RNA, 19 nt, Artificial Sequence
  Description of Artificial Sequence: Synthetic oligonucleotide
gugagcuuugaugauggug

SEQ ID NO: 1360080 - RNA, 19 nt, Artificial Sequence
  Description of Artificial Sequence: Synthetic oligonucleotide
cucugcacgggaacauucc

SEQ ID NO: 1360081 - RNA, 19 nt, Artificial Sequence
  Description of Artificial Sequence: Synthetic oligonucleotide
uuuguguuacggggagggg

SEQ ID NO: 1360082 - RNA, 19 nt, Artificial Sequence
  Description of Artificial Sequence: Synthetic oligonucleotide
gcucacuacaugcuaacug

SEQ ID NO: 1360083 - RNA, 19 nt, Artificial Sequence
  Description of Artificial Sequence: Synthetic oligonucleotide
guuguggagacuccccaac

SEQ ID NO: 1360084 - RNA, 19 nt, Artificial Sequence
  Description of Artificial Sequence: Synthetic oligonucleotide
gaauagaaguggggcacgc

SEQ ID NO: 1360085 - RNA, 19 nt, Artificial Sequence
  Description of Artificial Sequence: Synthetic oligonucleotide
cucgaauggaacugaucuc

SEQ ID NO: 1360086 - RNA, 19 nt, Artificial Sequence
  Description of Artificial Sequence: Synthetic oligonucleotide
caauuccagagucagccca

SEQ ID NO: 1360087 - RNA, 19 nt, Artificial Sequence
  Description of Artificial Sequence: Synthetic oligonucleotide
ugcuuagcccauacaucca

SEQ ID NO: 1360088 - RNA, 19 nt, Artificial Sequence
  Description of Artificial Sequence: Synthetic oligonucleotide
acagagacgaccuguccua

SEQ ID NO: 1360089 - RNA, 19 nt, Artificial Sequence
  Description of Artificial Sequence: Synthetic oligonucleotide
uccuagaugcacucugcau

SEQ ID NO: 1360090 - RNA, 19 nt, Artificial Sequence
  Description of Artificial Sequence: Synthetic oligonucleotide
ugccacuuagagcccuugc

SEQ ID NO: 1360091 - RNA, 19 nt, Artificial Sequence
  Description of Artificial Sequence: Synthetic oligonucleotide
ugcauagcaauggcaccag

SEQ ID NO: 1360092 - RNA, 19 nt, Artificial Sequence
  Description of Artificial Sequence: Synthetic oligonucleotide
cuaugguaacuugacagga

SEQ ID NO: 1360093 - RNA, 19 nt, Artificial Sequence
  Description of Artificial Sequence: Synthetic oligonucleotide
gacuaagccaagaucacgu

SEQ ID NO: 1360094 - RNA, 19 nt, Artificial Sequence
  Description of Artificial Sequence: Synthetic oligonucleotide
cucucgcucagacuacaag

SEQ ID NO: 1360095 - RNA, 19 nt, Artificial Sequence
  Description of Artificial Sequence: Synthetic oligonucleotide
gcucgaauggaacugaucu

SEQ ID NO: 1360096 - RNA, 19 nt, Artificial Sequence
  Description of Artificial Sequence: Synthetic oligonucleotide
ucagacuacaaggccucug

SEQ ID NO: 1360097 - RNA, 19 nt, Artificial Sequence
  Description of Artificial Sequence: Synthetic oligonucleotide
gagccauugucuuuguggu

SEQ ID NO: 1360098 - RNA, 19 nt, Artificial Sequence
  Description of Artificial Sequence: Synthetic oligonucleotide
cugauuagcuguccaccug

SEQ ID NO: 1360099 - RNA, 19 nt, Artificial Sequence
  Description of Artificial Sequence: Synthetic oligonucleotide
gcuuuuguguuacggggag

SEQ ID NO: 1360100 - RNA, 19 nt, Artificial Sequence
  Description of Artificial Sequence: Synthetic oligonucleotide
caaugaugauucagaagga

SEQ ID NO: 1360101 - RNA, 19 nt, Artificial Sequence
  Description of Artificial Sequence: Synthetic oligonucleotide
aggguuguggagacucccc

SEQ ID NO: 1360102 - RNA, 19 nt, Artificial Sequence
  Description of Artificial Sequence: Synthetic oligonucleotide
accuguccuaccuuucagu

SEQ ID NO: 1360103 - RNA, 19 nt, Artificial Sequence
  Description of Artificial Sequence: Synthetic oligonucleotide
accagauucugaagagggg

SEQ ID NO: 1360104 - RNA, 19 nt, Artificial Sequence
  Description of Artificial Sequence: Synthetic oligonucleotide
cugcauccaaccuuuccuc

SEQ ID NO: 1360105 - RNA, 19 nt, Artificial Sequence
  Description of Artificial Sequence: Synthetic oligonucleotide
ccggacuaagccaagauca

SEQ ID NO: 1360106 - RNA, 19 nt, Artificial Sequence
  Description of Artificial Sequence: Synthetic oligonucleotide
uagcccauacauccauuuc

SEQ ID NO: 1360107 - RNA, 19 nt, Artificial Sequence
  Description of Artificial Sequence: Synthetic oligonucleotide
ugcucgaauggaacugauc

SEQ ID NO: 1360108 - RNA, 19 nt, Artificial Sequence
  Description of Artificial Sequence: Synthetic oligonucleotide
aucacgugucucaaggaca

SEQ ID NO: 1360109 - RNA, 19 nt, Artificial Sequence
  Description of Artificial Sequence: Synthetic oligonucleotide
aggguaacacuguugucua

SEQ ID NO: 1360110 - RNA, 19 nt, Artificial Sequence
  Description of Artificial Sequence: Synthetic oligonucleotide
cucaggguaacacuguugu

SEQ ID NO: 1360111 - RNA, 19 nt, Artificial Sequence
  Description of Artificial Sequence: Synthetic oligonucleotide
cugaucucugcacgggaac

SEQ ID NO: 1360112 - RNA, 19 nt, Artificial Sequence
  Description of Artificial Sequence: Synthetic oligonucleotide
uuccuccccaucucaggcc

SEQ ID NO: 1360113 - RNA, 19 nt, Artificial Sequence
  Description of Artificial Sequence: Synthetic oligonucleotide
cauaagggagcccuuccga

SEQ ID NO: 1360114 - RNA, 19 nt, Artificial Sequence
  Description of Artificial Sequence: Synthetic oligonucleotide
ggagguagaaucuccuaga

SEQ ID NO: 1360115 - RNA, 19 nt, Artificial Sequence
  Description of Artificial Sequence: Synthetic oligonucleotide
caaacugaccuucggugca

SEQ ID NO: 1360116 - RNA, 19 nt, Artificial Sequence
  Description of Artificial Sequence: Synthetic oligonucleotide
ggacuaagccaagaucacg

SEQ ID NO: 1360117 - RNA, 19 nt, Artificial Sequence
  Description of Artificial Sequence: Synthetic oligonucleotide
cugauauguugaugaaaca

SEQ ID NO: 1360118 - RNA, 19 nt, Artificial Sequence
  Description of Artificial Sequence: Synthetic oligonucleotide
agacuacaaggccucugca

SEQ ID NO: 1360119 - RNA, 19 nt, Artificial Sequence
  Description of Artificial Sequence: Synthetic oligonucleotide
cugcucacuacaugcuaac

SEQ ID NO: 1360120 - RNA, 19 nt, Artificial Sequence
  Description of Artificial Sequence: Synthetic oligonucleotide
gaacgccagggagggaugg

SEQ ID NO: 1360121 - RNA, 19 nt, Artificial Sequence
  Description of Artificial Sequence: Synthetic oligonucleotide
uguugucuaaagguauauu

SEQ ID NO: 1360122 - RNA, 19 nt, Artificial Sequence
  Description of Artificial Sequence: Synthetic oligonucleotide
gccacuuagagcccuugcc

SEQ ID NO: 1360123 - RNA, 19 nt, Artificial Sequence
  Description of Artificial Sequence: Synthetic oligonucleotide
gcugcuuugaacucugucu

SEQ ID NO: 1360124 - RNA, 19 nt, Artificial Sequence
  Description of Artificial Sequence: Synthetic oligonucleotide
ggugcaguuugaaggaagc

SEQ ID NO: 1360125 - RNA, 19 nt, Artificial Sequence
  Description of Artificial Sequence: Synthetic oligonucleotide
uuggguacucuggccaggc

SEQ ID NO: 1360126 - RNA, 19 nt, Artificial Sequence
  Description of Artificial Sequence: Synthetic oligonucleotide
gcaguuugaaggaagcuga

SEQ ID NO: 1360127 - RNA, 19 nt, Artificial Sequence
  Description of Artificial Sequence: Synthetic oligonucleotide
ugagguaaacuagcuuuua

SEQ ID NO: 1360128 - RNA, 19 nt, Artificial Sequence
  Description of Artificial Sequence: Synthetic oligonucleotide
ggaauagaaguggggcacg

SEQ ID NO: 1360129 - RNA, 19 nt, Artificial Sequence
  Description of Artificial Sequence: Synthetic oligonucleotide
uucgaagggucgguauuca

SEQ ID NO: 1360130 - RNA, 19 nt, Artificial Sequence
  Description of Artificial Sequence: Synthetic oligonucleotide
aggaacgccagggagggau

SEQ ID NO: 1360131 - RNA, 19 nt, Artificial Sequence
  Description of Artificial Sequence: Synthetic oligonucleotide
cuuuugcucgaauggaacu

SEQ ID NO: 1360132 - RNA, 19 nt, Artificial Sequence
  Description of Artificial Sequence: Synthetic oligonucleotide
cauaagccaacaaacugau

SEQ ID NO: 1360133 - RNA, 19 nt, Artificial Sequence
  Description of Artificial Sequence: Synthetic oligonucleotide
ccuuuugcucgaauggaac

SEQ ID NO: 1360134 - RNA, 19 nt, Artificial Sequence
  Description of Artificial Sequence: Synthetic oligonucleotide
cugcacgggaacauuccuc

SEQ ID NO: 1360135 - RNA, 19 nt, Artificial Sequence
  Description of Artificial Sequence: Synthetic oligonucleotide
agguuucauaagccaacaa

SEQ ID NO: 1360136 - RNA, 19 nt, Artificial Sequence
  Description of Artificial Sequence: Synthetic oligonucleotide
ccauucucaagccauguca

SEQ ID NO: 1360137 - RNA, 19 nt, Artificial Sequence
  Description of Artificial Sequence: Synthetic oligonucleotide
uuguucugucuuggugagg

SEQ ID NO: 1360138 - RNA, 19 nt, Artificial Sequence
  Description of Artificial Sequence: Synthetic oligonucleotide
acaauacgaaaggauucau

SEQ ID NO: 1360139 - RNA, 19 nt, Artificial Sequence
  Description of Artificial Sequence: Synthetic oligonucleotide
ccuguccuaccuuucagug

SEQ ID NO: 1360140 - RNA, 19 nt, Artificial Sequence
  Description of Artificial Sequence: Synthetic oligonucleotide
caggguaacacuguugucu

SEQ ID NO: 1360141 - RNA, 19 nt, Artificial Sequence
  Description of Artificial Sequence: Synthetic oligonucleotide
ggcugauuagcuguccacc

SEQ ID NO: 1360142 - RNA, 19 nt, Artificial Sequence
  Description of Artificial Sequence: Synthetic oligonucleotide
ugcucacuacaugcuaacu

SEQ ID NO: 1360143 - RNA, 19 nt, Artificial Sequence
  Description of Artificial Sequence: Synthetic oligonucleotide
gcugaccccggacuaagcc

SEQ ID NO: 1360144 - RNA, 19 nt, Artificial Sequence
  Description of Artificial Sequence: Synthetic oligonucleotide
cuuauccuugaggcucagg

SEQ ID NO: 1360145 - RNA, 19 nt, Artificial Sequence
  Description of Artificial Sequence: Synthetic oligonucleotide
cuaagccaagaucacgugu

SEQ ID NO: 1360146 - RNA, 19 nt, Artificial Sequence
  Description of Artificial Sequence: Synthetic oligonucleotide
uggguacucuggccaggcc

SEQ ID NO: 1360147 - RNA, 19 nt, Artificial Sequence
  Description of Artificial Sequence: Synthetic oligonucleotide
ucgaagggucgguauucaa

SEQ ID NO: 1360148 - RNA, 19 nt, Artificial Sequence
  Description of Artificial Sequence: Synthetic oligonucleotide
ggaguugcugguugcuaug

SEQ ID NO: 1360149 - RNA, 19 nt, Artificial Sequence
  Description of Artificial Sequence: Synthetic oligonucleotide
caaccuuuccuccccaucu

SEQ ID NO: 1360150 - RNA, 19 nt, Artificial Sequence
  Description of Artificial Sequence: Synthetic oligonucleotide
ggaagguuucauaagccaa

SEQ ID NO: 1360151 - RNA, 19 nt, Artificial Sequence
  Description of Artificial Sequence: Synthetic oligonucleotide
cgaagggucgguauucaag

SEQ ID NO: 1360152 - RNA, 19 nt, Artificial Sequence
  Description of Artificial Sequence: Synthetic oligonucleotide
auuagcuguccaccugcuu

SEQ ID NO: 1360153 - RNA, 19 nt, Artificial Sequence
  Description of Artificial Sequence: Synthetic oligonucleotide
cuuccgacaugugcuugag

SEQ ID NO: 1360154 - RNA, 19 nt, Artificial Sequence
  Description of Artificial Sequence: Synthetic oligonucleotide
ggagaguuuuggaauagaa

SEQ ID NO: 1360155 - RNA, 19 nt, Artificial Sequence
  Description of Artificial Sequence: Synthetic oligonucleotide
gguaacacuguugucuaaa

SEQ ID NO: 1360156 - RNA, 19 nt, Artificial Sequence
  Description of Artificial Sequence: Synthetic oligonucleotide
agcagcugaccccggacua

SEQ ID NO: 1360157 - RNA, 19 nt, Artificial Sequence
  Description of Artificial Sequence: Synthetic oligonucleotide
acaugcuaacuggggagga

SEQ ID NO: 1360158 - RNA, 19 nt, Artificial Sequence
  Description of Artificial Sequence: Synthetic oligonucleotide
gugaggcugugcuuaagua

SEQ ID NO: 1360159 - RNA, 19 nt, Artificial Sequence
  Description of Artificial Sequence: Synthetic oligonucleotide
auucaaggggagaguuuug

SEQ ID NO: 1360160 - RNA, 19 nt, Artificial Sequence
  Description of Artificial Sequence: Synthetic oligonucleotide
acugaucucugcacgggaa

SEQ ID NO: 1360161 - RNA, 19 nt, Artificial Sequence
  Description of Artificial Sequence: Synthetic oligonucleotide
uacccucugcugcuuugaa

SEQ ID NO: 1360162 - RNA, 19 nt, Artificial Sequence
  Description of Artificial Sequence: Synthetic oligonucleotide
gcugcauccaaccuuuccu

SEQ ID NO: 1360163 - RNA, 19 nt, Artificial Sequence
  Description of Artificial Sequence: Synthetic oligonucleotide
uagagaccccauccacuua

SEQ ID NO: 1360164 - RNA, 19 nt, Artificial Sequence
  Description of Artificial Sequence: Synthetic oligonucleotide
ggcacgcugcuggaaaggg

SEQ ID NO: 1360165 - RNA, 19 nt, Artificial Sequence
  Description of Artificial Sequence: Synthetic oligonucleotide
cacuguugucuaaagguau

SEQ ID NO: 1360166 - RNA, 19 nt, Artificial Sequence
  Description of Artificial Sequence: Synthetic oligonucleotide
gaccugguuccuucucaga

SEQ ID NO: 1360167 - RNA, 19 nt, Artificial Sequence
  Description of Artificial Sequence: Synthetic oligonucleotide
gaaggacggggaagaagga

SEQ ID NO: 1360168 - RNA, 19 nt, Artificial Sequence
  Description of Artificial Sequence: Synthetic oligonucleotide
acaugugcuugagucuuaa

SEQ ID NO: 1360169 - RNA, 19 nt, Artificial Sequence
  Description of Artificial Sequence: Synthetic oligonucleotide
uuagagcccuugccaucuc

SEQ ID NO: 1360170 - RNA, 19 nt, Artificial Sequence
  Description of Artificial Sequence: Synthetic oligonucleotide
uuggagccauugucuuugu

SEQ ID NO: 1360171 - RNA, 19 nt, Artificial Sequence
  Description of Artificial Sequence: Synthetic oligonucleotide
cuuagagcccuugccaucu

SEQ ID NO: 1360172 - RNA, 19 nt, Artificial Sequence
  Description of Artificial Sequence: Synthetic oligonucleotide
gggucgguauucaagggga

SEQ ID NO: 1360173 - RNA, 19 nt, Artificial Sequence
  Description of Artificial Sequence: Synthetic oligonucleotide
gagggucauccauucucaa

SEQ ID NO: 1360174 - RNA, 19 nt, Artificial Sequence
  Description of Artificial Sequence: Synthetic oligonucleotide
aacgccagggagggaugga

SEQ ID NO: 1360175 - RNA, 19 nt, Artificial Sequence
  Description of Artificial Sequence: Synthetic oligonucleotide
caauucccacagaggucug

SEQ ID NO: 1360176 - RNA, 19 nt, Artificial Sequence
  Description of Artificial Sequence: Synthetic oligonucleotide
ccuuuccuccccaucucag

SEQ ID NO: 1360177 - RNA, 19 nt, Artificial Sequence
  Description of Artificial Sequence: Synthetic oligonucleotide
gcugcuuagcccauacauc

SEQ ID NO: 1360178 - RNA, 19 nt, Artificial Sequence
  Description of Artificial Sequence: Synthetic oligonucleotide
ccacuuagagcccuugcca

SEQ ID NO: 1360179 - RNA, 19 nt, Artificial Sequence
  Description of Artificial Sequence: Synthetic oligonucleotide
cugucucauaagggagccc

SEQ ID NO: 1360180 - RNA, 19 nt, Artificial Sequence
  Description of Artificial Sequence: Synthetic oligonucleotide
ucggugcaguuugaaggaa

SEQ ID NO: 1360181 - RNA, 19 nt, Artificial Sequence
  Description of Artificial Sequence: Synthetic oligonucleotide
gcugauuagcuguccaccu

SEQ ID NO: 1360182 - RNA, 19 nt, Artificial Sequence
  Description of Artificial Sequence: Synthetic oligonucleotide
cuggagguagaaucuccua

SEQ ID NO: 1360183 - RNA, 19 nt, Artificial Sequence
  Description of Artificial Sequence: Synthetic oligonucleotide
cuguugaacuguacccucu

SEQ ID NO: 1360184 - RNA, 19 nt, Artificial Sequence
  Description of Artificial Sequence: Synthetic oligonucleotide
cacuuagagcccuugccau

SEQ ID NO: 1360185 - RNA, 19 nt, Artificial Sequence
  Description of Artificial Sequence: Synthetic oligonucleotide
ggggcacgcugcuggaaag

SEQ ID NO: 1360186 - RNA, 19 nt, Artificial Sequence
  Description of Artificial Sequence: Synthetic oligonucleotide
gaccaccgaagagacagcu

SEQ ID NO: 1360187 - RNA, 19 nt, Artificial Sequence
  Description of Artificial Sequence: Synthetic oligonucleotide
cagagacgaccuguccuac

SEQ ID NO: 1360188 - RNA, 19 nt, Artificial Sequence
  Description of Artificial Sequence: Synthetic oligonucleotide
cccggacuaagccaagauc

SEQ ID NO: 1360189 - RNA, 19 nt, Artificial Sequence
  Description of Artificial Sequence: Synthetic oligonucleotide
gguaacuugacaggacccu

SEQ ID NO: 1360190 - RNA, 19 nt, Artificial Sequence
  Description of Artificial Sequence: Synthetic oligonucleotide
ggucgguauucaaggggag

SEQ ID NO: 1360191 - RNA, 19 nt, Artificial Sequence
  Description of Artificial Sequence: Synthetic oligonucleotide
ggcucaguaagggagggcu

SEQ ID NO: 1360192 - RNA, 19 nt, Artificial Sequence
  Description of Artificial Sequence: Synthetic oligonucleotide
agauggcuggagguagaau

SEQ ID NO: 1360193 - RNA, 19 nt, Artificial Sequence
  Description of Artificial Sequence: Synthetic oligonucleotide
caccaggcucaguaaggga

SEQ ID NO: 1360194 - RNA, 19 nt, Artificial Sequence
  Description of Artificial Sequence: Synthetic oligonucleotide
auagcccaucuuugccuuu

SEQ ID NO: 1360195 - RNA, 19 nt, Artificial Sequence
  Description of Artificial Sequence: Synthetic oligonucleotide
gguuguggagacuccccaa

SEQ ID NO: 1360196 - RNA, 19 nt, Artificial Sequence
  Description of Artificial Sequence: Synthetic oligonucleotide
cacgggaacauuccucagu

SEQ ID NO: 1360197 - RNA, 19 nt, Artificial Sequence
  Description of Artificial Sequence: Synthetic oligonucleotide
ggcuuaauuuuggguacuc

SEQ ID NO: 1360198 - RNA, 19 nt, Artificial Sequence
  Description of Artificial Sequence: Synthetic oligonucleotide
gcacgcugcuggaaagggg

SEQ ID NO: 1360199 - RNA, 19 nt, Artificial Sequence
  Description of Artificial Sequence: Synthetic oligonucleotide
gacggggaagaaggaccac

SEQ ID NO: 1360200 - RNA, 19 nt, Artificial Sequence
  Description of Artificial Sequence: Synthetic oligonucleotide
gaucucugcacgggaacau

SEQ ID NO: 1360201 - RNA, 19 nt, Artificial Sequence
  Description of Artificial Sequence: Synthetic oligonucleotide
ggacggggaagaaggacca

SEQ ID NO: 1360202 - RNA, 19 nt, Artificial Sequence
  Description of Artificial Sequence: Synthetic oligonucleotide
caugcuaacuggggaggaa

SEQ ID NO: 1360203 - RNA, 19 nt, Artificial Sequence
  Description of Artificial Sequence: Synthetic oligonucleotide
cuugaggcucaggguaaca

SEQ ID NO: 1360204 - RNA, 19 nt, Artificial Sequence
  Description of Artificial Sequence: Synthetic oligonucleotide
gcacgggaacauuccucag

SEQ ID NO: 1360205 - RNA, 19 nt, Artificial Sequence
  Description of Artificial Sequence: Synthetic oligonucleotide
gggcacgcugcuggaaagg

SEQ ID NO: 1360206 - RNA, 19 nt, Artificial Sequence
  Description of Artificial Sequence: Synthetic oligonucleotide
cuggacaguccagugcaaa

SEQ ID NO: 1360207 - RNA, 19 nt, Artificial Sequence
  Description of Artificial Sequence: Synthetic oligonucleotide
gcugcucacuacaugcuaa

SEQ ID NO: 1360208 - RNA, 19 nt, Artificial Sequence
  Description of Artificial Sequence: Synthetic oligonucleotide
agggagcccuuccgacaug

SEQ ID NO: 1360209 - RNA, 19 nt, Artificial Sequence
  Description of Artificial Sequence: Synthetic oligonucleotide
acgccagggagggauggaa

SEQ ID NO: 1360210 - RNA, 19 nt, Artificial Sequence
  Description of Artificial Sequence: Synthetic oligonucleotide
accuucggugcaguuugaa

SEQ ID NO: 1360211 - RNA, 19 nt, Artificial Sequence
  Description of Artificial Sequence: Synthetic oligonucleotide
gcugugcuuaaguauguuu

SEQ ID NO: 1360212 - RNA, 19 nt, Artificial Sequence
  Description of Artificial Sequence: Synthetic oligonucleotide
gggagaguuuuggaauaga

SEQ ID NO: 1360213 - RNA, 19 nt, Artificial Sequence
  Description of Artificial Sequence: Synthetic oligonucleotide
gcucaguaagggagggcug

SEQ ID NO: 1360214 - RNA, 19 nt, Artificial Sequence
  Description of Artificial Sequence: Synthetic oligonucleotide
cuguugucuaaagguauau

SEQ ID NO: 1360215 - RNA, 19 nt, Artificial Sequence
  Description of Artificial Sequence: Synthetic oligonucleotide
accccggacuaagccaaga

SEQ ID NO: 1360216 - RNA, 19 nt, Artificial Sequence
  Description of Artificial Sequence: Synthetic oligonucleotide
ccuuccgacaugugcuuga

SEQ ID NO: 1360217 - RNA, 19 nt, Artificial Sequence
  Description of Artificial Sequence: Synthetic oligonucleotide
ccauacauccauuucuauu

SEQ ID NO: 1360218 - RNA, 19 nt, Artificial Sequence
  Description of Artificial Sequence: Synthetic oligonucleotide
ggcugcucacuacaugcua

SEQ ID NO: 1360219 - RNA, 19 nt, Artificial Sequence
  Description of Artificial Sequence: Synthetic oligonucleotide
gcuuagcccauacauccau

SEQ ID NO: 1360220 - RNA, 19 nt, Artificial Sequence
  Description of Artificial Sequence: Synthetic oligonucleotide
gccuuuugcucgaauggaa

SEQ ID NO: 1360221 - RNA, 19 nt, Artificial Sequence
  Description of Artificial Sequence: Synthetic oligonucleotide
guauucaaggggagaguuu

SEQ ID NO: 1360222 - RNA, 19 nt, Artificial Sequence
  Description of Artificial Sequence: Synthetic oligonucleotide
cuuagcccauacauccauu

SEQ ID NO: 1360223 - RNA, 19 nt, Artificial Sequence
  Description of Artificial Sequence: Synthetic oligonucleotide
guccuaccuuucaguggcc

SEQ ID NO: 1360224 - RNA, 19 nt, Artificial Sequence
  Description of Artificial Sequence: Synthetic oligonucleotide
ggaacgccagggagggaug

SEQ ID NO: 1360225 - RNA, 19 nt, Artificial Sequence
  Description of Artificial Sequence: Synthetic oligonucleotide
cgggaacauuccucagucc

SEQ ID NO: 1360226 - RNA, 19 nt, Artificial Sequence
  Description of Artificial Sequence: Synthetic oligonucleotide
ccgaagagacagcugauau

SEQ ID NO: 1360227 - RNA, 19 nt, Artificial Sequence
  Description of Artificial Sequence: Synthetic oligonucleotide
ggaccaccgaagagacagc

SEQ ID NO: 1360228 - RNA, 19 nt, Artificial Sequence
  Description of Artificial Sequence: Synthetic oligonucleotide
cccaucucaggcccgggga

SEQ ID NO: 1360229 - RNA, 19 nt, Artificial Sequence
  Description of Artificial Sequence: Synthetic oligonucleotide
gaccuucggugcaguuuga

SEQ ID NO: 1360230 - RNA, 19 nt, Artificial Sequence
  Description of Artificial Sequence: Synthetic oligonucleotide
ggguagaugagggcauaua

SEQ ID NO: 1360231 - RNA, 19 nt, Artificial Sequence
  Description of Artificial Sequence: Synthetic oligonucleotide
ccaaacccugccacuuaga

SEQ ID NO: 1360232 - RNA, 19 nt, Artificial Sequence
  Description of Artificial Sequence: Synthetic oligonucleotide
gggugcuguugaacuguac

SEQ ID NO: 1360233 - RNA, 19 nt, Artificial Sequence
  Description of Artificial Sequence: Synthetic oligonucleotide
ccgacaugugcuugagucu

SEQ ID NO: 1360234 - RNA, 19 nt, Artificial Sequence
  Description of Artificial Sequence: Synthetic oligonucleotide
ggccuucuaugguguucuc

SEQ ID NO: 1360235 - RNA, 19 nt, Artificial Sequence
  Description of Artificial Sequence: Synthetic oligonucleotide
ggccucucgcucagacuac

SEQ ID NO: 1360236 - RNA, 19 nt, Artificial Sequence
  Description of Artificial Sequence: Synthetic oligonucleotide
gggagcccuuccgacaugu

SEQ ID NO: 1360237 - RNA, 19 nt, Artificial Sequence
  Description of Artificial Sequence: Synthetic oligonucleotide
ccccaaacugaccuucggu

SEQ ID NO: 1360238 - RNA, 19 nt, Artificial Sequence
  Description of Artificial Sequence: Synthetic oligonucleotide
gcagcugaccccggacuaa

SEQ ID NO: 1360239 - RNA, 19 nt, Artificial Sequence
  Description of Artificial Sequence: Synthetic oligonucleotide
guggggcacgcugcuggaa

SEQ ID NO: 1360240 - RNA, 19 nt, Artificial Sequence
  Description of Artificial Sequence: Synthetic oligonucleotide
ccaugucauugguuuccaa

SEQ ID NO: 1360241 - RNA, 19 nt, Artificial Sequence
  Description of Artificial Sequence: Synthetic oligonucleotide
cagucggggauggagccuu

SEQ ID NO: 1360242 - RNA, 19 nt, Artificial Sequence
  Description of Artificial Sequence: Synthetic oligonucleotide
ccucucgcucagacuacaa

SEQ ID NO: 1360243 - RNA, 19 nt, Artificial Sequence
  Description of Artificial Sequence: Synthetic oligonucleotide
cccauacauccauuucuau

SEQ ID NO: 1360244 - RNA, 19 nt, Artificial Sequence
  Description of Artificial Sequence: Synthetic oligonucleotide
ggcugugcuuaaguauguu

SEQ ID NO: 1360245 - RNA, 19 nt, Artificial Sequence
  Description of Artificial Sequence: Synthetic oligonucleotide
cgacaugugcuugagucuu

SEQ ID NO: 1360246 - RNA, 19 nt, Artificial Sequence
  Description of Artificial Sequence: Synthetic oligonucleotide
gcccuuccgacaugugcuu

SEQ ID NO: 1360247 - RNA, 19 nt, Artificial Sequence
  Description of Artificial Sequence: Synthetic oligonucleotide
caaggacaccaggcucagu

SEQ ID NO: 1360248 - RNA, 19 nt, Artificial Sequence
  Description of Artificial Sequence: Synthetic oligonucleotide
ccccggacuaagccaagau

SEQ ID NO: 1360249 - RNA, 19 nt, Artificial Sequence
  Description of Artificial Sequence: Synthetic oligonucleotide
ccccuagcauuuagggcuu

SEQ ID NO: 1360250 - RNA, 19 nt, Artificial Sequence
  Description of Artificial Sequence: Synthetic oligonucleotide
ccugccacuuagagcccuu

SEQ ID NO: 1360251 - RNA, 19 nt, Artificial Sequence
  Description of Artificial Sequence: Synthetic oligonucleotide
gcccggggaccugguuccu

SEQ ID NO: 1360252 - RNA, 19 nt, Artificial Sequence
  Description of Artificial Sequence: Synthetic oligonucleotide
aacuacaauacccagaggc

SEQ ID NO: 1360253 - RNA, 19 nt, Artificial Sequence
  Description of Artificial Sequence: Synthetic oligonucleotide
aagauuuggagacauacuc

SEQ ID NO: 1360254 - RNA, 19 nt, Artificial Sequence
  Description of Artificial Sequence: Synthetic oligonucleotide
caauuuaugcauuugaugc

SEQ ID NO: 1360255 - RNA, 19 nt, Artificial Sequence
  Description of Artificial Sequence: Synthetic oligonucleotide
cuugcaaacaaguauaggc

SEQ ID NO: 1360256 - RNA, 19 nt, Artificial Sequence
  Description of Artificial Sequence: Synthetic oligonucleotide
cauaucuucacauggagcg

SEQ ID NO: 1360257 - RNA, 19 nt, Artificial Sequence
  Description of Artificial Sequence: Synthetic oligonucleotide
auaggugugaagcaaagac

SEQ ID NO: 1360258 - RNA, 19 nt, Artificial Sequence
  Description of Artificial Sequence: Synthetic oligonucleotide
aaagaccgcacauucuugc

SEQ ID NO: 1360259 - RNA, 19 nt, Artificial Sequence
  Description of Artificial Sequence: Synthetic oligonucleotide
  modified_base (3)..(3): a, c, u, g, unknown or other
uunagaggaguacuguggg

SEQ ID NO: 1360260 - RNA, 19 nt, Artificial Sequence
  Description of Artificial Sequence: Synthetic oligonucleotide
auaguauccaacccacucc

SEQ ID NO: 1360261 - RNA, 19 nt, Artificial Sequence
  Description of Artificial Sequence: Synthetic oligonucleotide
uuaaaaucgcaacaacaag

SEQ ID NO: 1360262 - RNA, 19 nt, Artificial Sequence
  Description of Artificial Sequence: Synthetic oligonucleotide
acaacaauucucuuaugac

SEQ ID NO: 1360263 - RNA, 19 nt, Artificial Sequence
  Description of Artificial Sequence: Synthetic oligonucleotide
acauuauagauagaacucc

SEQ ID NO: 1360264 - RNA, 19 nt, Artificial Sequence
  Description of Artificial Sequence: Synthetic oligonucleotide
aggucaugaauccauauuc

SEQ ID NO: 1360265 - RNA, 19 nt, Artificial Sequence
  Description of Artificial Sequence: Synthetic oligonucleotide
aaugagaucagugggcuuc

SEQ ID NO: 1360266 - RNA, 19 nt, Artificial Sequence
  Description of Artificial Sequence: Synthetic oligonucleotide
cuuaucauuuguaaauacc

SEQ ID NO: 1360267 - RNA, 19 nt, Artificial Sequence
  Description of Artificial Sequence: Synthetic oligonucleotide
aagcaaagaccgcacauuc

SEQ ID NO: 1360268 - RNA, 19 nt, Artificial Sequence
  Description of Artificial Sequence: Synthetic oligonucleotide
uuacaauuuaugcauuuga

SEQ ID NO: 1360269 - RNA, 19 nt, Artificial Sequence
  Description of Artificial Sequence: Synthetic oligonucleotide
aacguauuugguguaggcc

SEQ ID NO: 1360270 - RNA, 19 nt, Artificial Sequence
  Description of Artificial Sequence: Synthetic oligonucleotide
uucucuuaugaccaugucc

SEQ ID NO: 1360271 - RNA, 19 nt, Artificial Sequence
  Description of Artificial Sequence: Synthetic oligonucleotide
acaaguauaggcucgugag

SEQ ID NO: 1360272 - RNA, 19 nt, Artificial Sequence
  Description of Artificial Sequence: Synthetic oligonucleotide
caacaauucucuuaugacc

SEQ ID NO: 1360273 - RNA, 19 nt, Artificial Sequence
  Description of Artificial Sequence: Synthetic oligonucleotide
  modified_base (9)..(9): a, c, u, g, unknown or other
ucaucaacngaaagauggg

SEQ ID NO: 1360274 - RNA, 19 nt, Artificial Sequence
  Description of Artificial Sequence: Synthetic oligonucleotide
agggcaaucaguuugcuga

SEQ ID NO: 1360275 - RNA, 19 nt, Artificial Sequence
  Description of Artificial Sequence: Synthetic oligonucleotide
ucauuuguaaauaccucca

SEQ ID NO: 1360276 - RNA, 19 nt, Artificial Sequence
  Description of Artificial Sequence: Synthetic oligonucleotide
uuagcugaggggauggcag

SEQ ID NO: 1360277 - RNA, 19 nt, Artificial Sequence
  Description of Artificial Sequence: Synthetic oligonucleotide
  modified_base (4)..(4): a, c, u, g, unknown or other
guunagaggaguacugugg

SEQ ID NO: 1360278 - RNA, 19 nt, Artificial Sequence
  Description of Artificial Sequence: Synthetic oligonucleotide
ggauuggcaacauugaaag

SEQ ID NO: 1360279 - RNA, 19 nt, Artificial Sequence
  Description of Artificial Sequence: Synthetic oligonucleotide
augaccauguccuuuuauc

SEQ ID NO: 1360280 - RNA, 19 nt, Artificial Sequence
  Description of Artificial Sequence: Synthetic oligonucleotide
ucaacacacauccuaacuc

SEQ ID NO: 1360281 - RNA, 19 nt, Artificial Sequence
  Description of Artificial Sequence: Synthetic oligonucleotide
aacaaguauaggcucguga

SEQ ID NO: 1360282 - RNA, 19 nt, Artificial Sequence
  Description of Artificial Sequence: Synthetic oligonucleotide
aacucaugaaggaaaaucu

SEQ ID NO: 1360283 - RNA, 19 nt, Artificial Sequence
  Description of Artificial Sequence: Synthetic oligonucleotide
  modified_base (15)..(15): a, c, u, g, unknown or other
uauucacagggguunagag

SEQ ID NO: 1360284 - RNA, 19 nt, Artificial Sequence
  Description of Artificial Sequence: Synthetic oligonucleotide
ucuccaacguauuuggugu

SEQ ID NO: 1360285 - RNA, 19 nt, Artificial Sequence
  Description of Artificial Sequence: Synthetic oligonucleotide
agaucagugggcuucagga

SEQ ID NO: 1360286 - RNA, 19 nt, Artificial Sequence
  Description of Artificial Sequence: Synthetic oligonucleotide
aaguauaggcucgugagcu

SEQ ID NO: 1360287 - RNA, 19 nt, Artificial Sequence
  Description of Artificial Sequence: Synthetic oligonucleotide
ugaccauguccuuuuaucc

SEQ ID NO: 1360288 - RNA, 19 nt, Artificial Sequence
  Description of Artificial Sequence: Synthetic oligonucleotide
agcucaacacucuugaccu

SEQ ID NO: 1360289 - RNA, 19 nt, Artificial Sequence
  Description of Artificial Sequence: Synthetic oligonucleotide
ggcaaugagagaccgaugg

SEQ ID NO: 1360290 - RNA, 19 nt, Artificial Sequence
  Description of Artificial Sequence: Synthetic oligonucleotide
aaauaccuccacuaaguaa

SEQ ID NO: 1360291 - RNA, 19 nt, Artificial Sequence
  Description of Artificial Sequence: Synthetic oligonucleotide
uagucaguaccgcugcugg

SEQ ID NO: 1360292 - RNA, 19 nt, Artificial Sequence
  Description of Artificial Sequence: Synthetic oligonucleotide
aaucgcaacaacaagguua

SEQ ID NO: 1360293 - RNA, 19 nt, Artificial Sequence
  Description of Artificial Sequence: Synthetic oligonucleotide
aaaaucugcugguagugau

SEQ ID NO: 1360294 - RNA, 19 nt, Artificial Sequence
  Description of Artificial Sequence: Synthetic oligonucleotide
uucuccaacguauuuggug

SEQ ID NO: 1360295 - RNA, 19 nt, Artificial Sequence
  Description of Artificial Sequence: Synthetic oligonucleotide
guagccauauguuuugggc

SEQ ID NO: 1360296 - RNA, 19 nt, Artificial Sequence
  Description of Artificial Sequence: Synthetic oligonucleotide
aacuuuaaaaucgcaacaa

SEQ ID NO: 1360297 - RNA, 19 nt, Artificial Sequence
  Description of Artificial Sequence: Synthetic oligonucleotide
gagcucaacacucuugacc

SEQ ID NO: 1360298 - RNA, 19 nt, Artificial Sequence
  Description of Artificial Sequence: Synthetic oligonucleotide
caccucucaacacacaucc

SEQ ID NO: 1360299 - RNA, 19 nt, Artificial Sequence
  Description of Artificial Sequence: Synthetic oligonucleotide
auuuguaaauaccuccacu

SEQ ID NO: 1360300 - RNA, 19 nt, Artificial Sequence
  Description of Artificial Sequence: Synthetic oligonucleotide
cugauuuacaauuuaugca

SEQ ID NO: 1360301 - RNA, 19 nt, Artificial Sequence
  Description of Artificial Sequence: Synthetic oligonucleotide
ucuugguuuaaaacuacaa

SEQ ID NO: 1360302 - RNA, 19 nt, Artificial Sequence
  Description of Artificial Sequence: Synthetic oligonucleotide
acguauuugguguaggcca

SEQ ID NO: 1360303 - RNA, 19 nt, Artificial Sequence
  Description of Artificial Sequence: Synthetic oligonucleotide
  modified_base (2)..(2): a, c, u, g, unknown or other
ancgguauggggacugagc

SEQ ID NO: 1360304 - RNA, 19 nt, Artificial Sequence
  Description of Artificial Sequence: Synthetic oligonucleotide
  modified_base (4)..(4): a, c, u, g, unknown or other
aacngaaagaugggcaucu

SEQ ID NO: 1360305 - RNA, 19 nt, Artificial Sequence
  Description of Artificial Sequence: Synthetic oligonucleotide
uuugcugaaugcagauggg

SEQ ID NO: 1360306 - RNA, 19 nt, Artificial Sequence
  Description of Artificial Sequence: Synthetic oligonucleotide
aguuaaagcuugguuauag

SEQ ID NO: 1360307 - RNA, 19 nt, Artificial Sequence
  Description of Artificial Sequence: Synthetic oligonucleotide
ugauaggugugaagcaaag

SEQ ID NO: 1360308 - RNA, 19 nt, Artificial Sequence
  Description of Artificial Sequence: Synthetic oligonucleotide
ucgguauuaaggcagguuu

SEQ ID NO: 1360309 - RNA, 19 nt, Artificial Sequence
  Description of Artificial Sequence: Synthetic oligonucleotide
cugaaugagaucagugggc

SEQ ID NO: 1360310 - RNA, 19 nt, Artificial Sequence
  Description of Artificial Sequence: Synthetic oligonucleotide
uggagauaguauccaaccc

SEQ ID NO: 1360311 - RNA, 19 nt, Artificial Sequence
  Description of Artificial Sequence: Synthetic oligonucleotide
cuaacauggacacauaucu

SEQ ID NO: 1360312 - RNA, 19 nt, Artificial Sequence
  Description of Artificial Sequence: Synthetic oligonucleotide
aagacaucaacaacaccag

SEQ ID NO: 1360313 - RNA, 19 nt, Artificial Sequence
  Description of Artificial Sequence: Synthetic oligonucleotide
uugcaaaugggucugggua

SEQ ID NO: 1360314 - RNA, 19 nt, Artificial Sequence
  Description of Artificial Sequence: Synthetic oligonucleotide
  modified_base (6)..(6): a, c, u, g, unknown or other
ucaacngaaagaugggcau

SEQ ID NO: 1360315 - RNA, 19 nt, Artificial Sequence
  Description of Artificial Sequence: Synthetic oligonucleotide
aaaugggaguuaaagcuug

SEQ ID NO: 1360316 - RNA, 19 nt, Artificial Sequence
  Description of Artificial Sequence: Synthetic oligonucleotide
uuuauccagaccaccugug

SEQ ID NO: 1360317 - RNA, 19 nt, Artificial Sequence
  Description of Artificial Sequence: Synthetic oligonucleotide
caaucaguuugcugaaugc

SEQ ID NO: 1360318 - RNA, 19 nt, Artificial Sequence
  Description of Artificial Sequence: Synthetic oligonucleotide
cuucauaaugccuccugag

SEQ ID NO: 1360319 - RNA, 19 nt, Artificial Sequence
  Description of Artificial Sequence: Synthetic oligonucleotide
ugcaagacgagcaggaguu

SEQ ID NO: 1360320 - RNA, 19 nt, Artificial Sequence
  Description of Artificial Sequence: Synthetic oligonucleotide
uaguauccaacccacuccu

SEQ ID NO: 1360321 - RNA, 19 nt, Artificial Sequence
  Description of Artificial Sequence: Synthetic oligonucleotide
ugcaaacaaguauaggcuc

SEQ ID NO: 1360322 - RNA, 19 nt, Artificial Sequence
  Description of Artificial Sequence: Synthetic oligonucleotide
uuguaaauaccuccacuaa

SEQ ID NO: 1360323 - RNA, 19 nt, Artificial Sequence
  Description of Artificial Sequence: Synthetic oligonucleotide
acuaacauggacacauauc

SEQ ID NO: 1360324 - RNA, 19 nt, Artificial Sequence
  Description of Artificial Sequence: Synthetic oligonucleotide
uccaacaccaccucucaac

SEQ ID NO: 1360325 - RNA, 19 nt, Artificial Sequence
  Description of Artificial Sequence: Synthetic oligonucleotide
uacaauacccagaggcucu

SEQ ID NO: 1360326 - RNA, 19 nt, Artificial Sequence
  Description of Artificial Sequence: Synthetic oligonucleotide
gcaaagaaaaguuggcugc

SEQ ID NO: 1360327 - RNA, 19 nt, Artificial Sequence
  Description of Artificial Sequence: Synthetic oligonucleotide
  modified_base (5)..(5): a, c, u, g, unknown or other
  modified_base (11)..(11): a, c, u, g, unknown or other
gagcngguaancgguaugg

SEQ ID NO: 1360328 - RNA, 19 nt, Artificial Sequence
  Description of Artificial Sequence: Synthetic oligonucleotide
ucuugcaaacaaguauagg

SEQ ID NO: 1360329 - RNA, 19 nt, Artificial Sequence
  Description of Artificial Sequence: Synthetic oligonucleotide
uugaaagcaaguggcgagg

SEQ ID NO: 1360330 - RNA, 19 nt, Artificial Sequence
  Description of Artificial Sequence: Synthetic oligonucleotide
uccuaguggagauaguauc

SEQ ID NO: 1360331 - RNA, 19 nt, Artificial Sequence
  Description of Artificial Sequence: Synthetic oligonucleotide
aacaacaagguuaggcuga

SEQ ID NO: 1360332 - RNA, 19 nt, Artificial Sequence
  Description of Artificial Sequence: Synthetic oligonucleotide
uagccauauguuuugggcu

SEQ ID NO: 1360333 - RNA, 19 nt, Artificial Sequence
  Description of Artificial Sequence: Synthetic oligonucleotide
  modified_base (7)..(7): a, c, u, g, unknown or other
aucaacngaaagaugggca

SEQ ID NO: 1360334 - RNA, 19 nt, Artificial Sequence
  Description of Artificial Sequence: Synthetic oligonucleotide
agaggaguacugugggugg

SEQ ID NO: 1360335 - RNA, 19 nt, Artificial Sequence
  Description of Artificial Sequence: Synthetic oligonucleotide
  modified_base (6)..(6): a, c, u, g, unknown or other
  modified_base (12)..(12): a, c, u, g, unknown or other
ugagcngguaancgguaug

SEQ ID NO: 1360336 - RNA, 19 nt, Artificial Sequence
  Description of Artificial Sequence: Synthetic oligonucleotide
  modified_base (8)..(8): a, c, u, g, unknown or other
aaaggccnccuggaggagc

SEQ ID NO: 1360337 - RNA, 19 nt, Artificial Sequence
  Description of Artificial Sequence: Synthetic oligonucleotide
ugugaagcaaagaccgcac

SEQ ID NO: 1360338 - RNA, 19 nt, Artificial Sequence
  Description of Artificial Sequence: Synthetic oligonucleotide
  modified_base (10)..(10): a, c, u, g, unknown or other
  modified_base (16)..(16): a, c, u, g, unknown or other
gccuugagcngguaancgg

SEQ ID NO: 1360339 - RNA, 19 nt, Artificial Sequence
  Description of Artificial Sequence: Synthetic oligonucleotide
ugugggauggcucccaaua

SEQ ID NO: 1360340 - RNA, 19 nt, Artificial Sequence
  Description of Artificial Sequence: Synthetic oligonucleotide
uggguagucaguaccgcug

SEQ ID NO: 1360341 - RNA, 19 nt, Artificial Sequence
  Description of Artificial Sequence: Synthetic oligonucleotide
caacaacaagguuaggcug

SEQ ID NO: 1360342 - RNA, 19 nt, Artificial Sequence
  Description of Artificial Sequence: Synthetic oligonucleotide
aagaaaaguuggcugccaa

SEQ ID NO: 1360343 - RNA, 19 nt, Artificial Sequence
  Description of Artificial Sequence: Synthetic oligonucleotide
  modified_base (2)..(2): a, c, u, g, unknown or other
  modified_base (8)..(8): a, c, u, g, unknown or other
cngguaancgguaugggga

SEQ ID NO: 1360344 - RNA, 19 nt, Artificial Sequence
  Description of Artificial Sequence: Synthetic oligonucleotide
aucgcaacaacaagguuag

SEQ ID NO: 1360345 - RNA, 19 nt, Artificial Sequence
  Description of Artificial Sequence: Synthetic oligonucleotide
auaucuucacauggagcgc

SEQ ID NO: 1360346 - RNA, 19 nt, Artificial Sequence
  Description of Artificial Sequence: Synthetic oligonucleotide
cauuugaugcauaguuuac

SEQ ID NO: 1360347 - RNA, 19 nt, Artificial Sequence
  Description of Artificial Sequence: Synthetic oligonucleotide
cacaacaauucucuuauga

SEQ ID NO: 1360348 - RNA, 19 nt, Artificial Sequence
  Description of Artificial Sequence: Synthetic oligonucleotide
uaaauaccuccacuaagua

SEQ ID NO: 1360349 - RNA, 19 nt, Artificial Sequence
  Description of Artificial Sequence: Synthetic oligonucleotide
ugaccuggaugucaacacc

SEQ ID NO: 1360350 - RNA, 19 nt, Artificial Sequence
  Description of Artificial Sequence: Synthetic oligonucleotide
accuccacuaaguaaggca

SEQ ID NO: 1360351 - RNA, 19 nt, Artificial Sequence
  Description of Artificial Sequence: Synthetic oligonucleotide
  modified_base (12)..(12): a, c, u, g, unknown or other
agcucaucaacngaaagau

SEQ ID NO: 1360352 - RNA, 19 nt, Artificial Sequence
  Description of Artificial Sequence: Synthetic oligonucleotide
ugggauggcucccaauagc

SEQ ID NO: 1360353 - RNA, 19 nt, Artificial Sequence
  Description of Artificial Sequence: Synthetic oligonucleotide
  modified_base (2)..(2): a, c, u, g, unknown or other
cngaaagaugggcaucucc

SEQ ID NO: 1360354 - RNA, 19 nt, Artificial Sequence
  Description of Artificial Sequence: Synthetic oligonucleotide
  modified_base (3)..(3): a, c, u, g, unknown or other
  modified_base (9)..(9): a, c, u, g, unknown or other
gcngguaancgguaugggg

SEQ ID NO: 1360355 - RNA, 19 nt, Artificial Sequence
  Description of Artificial Sequence: Synthetic oligonucleotide
ucugcugauuuacaauuua

SEQ ID NO: 1360356 - RNA, 19 nt, Artificial Sequence
  Description of Artificial Sequence: Synthetic oligonucleotide
caaguauaggcucgugagc

SEQ ID NO: 1360357 - RNA, 19 nt, Artificial Sequence
  Description of Artificial Sequence: Synthetic oligonucleotide
  modified_base (19)..(19): a, c, u, g, unknown or other
uccauauucacagggguun

SEQ ID NO: 1360358 - RNA, 19 nt, Artificial Sequence
  Description of Artificial Sequence: Synthetic oligonucleotide
cucaacacucuugaccugg

SEQ ID NO: 1360359 - RNA, 19 nt, Artificial Sequence
  Description of Artificial Sequence: Synthetic oligonucleotide
  modified_base (16)..(16): a, c, u, g, unknown or other
auauucacagggguunaga

SEQ ID NO: 1360360 - RNA, 19 nt, Artificial Sequence
  Description of Artificial Sequence: Synthetic oligonucleotide
cugcccucgguauuaaggc

SEQ ID NO: 1360361 - RNA, 19 nt, Artificial Sequence
  Description of Artificial Sequence: Synthetic oligonucleotide
  modified_base (4)..(4): a, c, u, g, unknown or other
  modified_base (10)..(10): a, c, u, g, unknown or other
agcngguaancgguauggg

SEQ ID NO: 1360362 - RNA, 19 nt, Artificial Sequence
  Description of Artificial Sequence: Synthetic oligonucleotide
agaugggcaucuccuuccc

SEQ ID NO: 1360363 - RNA, 19 nt, Artificial Sequence
  Description of Artificial Sequence: Synthetic oligonucleotide
caacguauuugguguaggc

SEQ ID NO: 1360364 - RNA, 19 nt, Artificial Sequence
  Description of Artificial Sequence: Synthetic oligonucleotide
ugcauuugaugcauaguuu

SEQ ID NO: 1360365 - RNA, 19 nt, Artificial Sequence
  Description of Artificial Sequence: Synthetic oligonucleotide
uacucuucggccuuaucau

SEQ ID NO: 1360366 - RNA, 19 nt, Artificial Sequence
  Description of Artificial Sequence: Synthetic oligonucleotide
cuucuugguuuaaaacuac

SEQ ID NO: 1360367 - RNA, 19 nt, Artificial Sequence
  Description of Artificial Sequence: Synthetic oligonucleotide
cauuuguaaauaccuccac

SEQ ID NO: 1360368 - RNA, 19 nt, Artificial Sequence
  Description of Artificial Sequence: Synthetic oligonucleotide
  modified_base (8)..(8): a, c, u, g, unknown or other
caucaacngaaagaugggc

SEQ ID NO: 1360369 - RNA, 19 nt, Artificial Sequence
  Description of Artificial Sequence: Synthetic oligonucleotide
auucucuuaugaccauguc

SEQ ID NO: 1360370 - RNA, 19 nt, Artificial Sequence
  Description of Artificial Sequence: Synthetic oligonucleotide
ugagcuucacauacucuuc

SEQ ID NO: 1360371 - RNA, 19 nt, Artificial Sequence
  Description of Artificial Sequence: Synthetic oligonucleotide
auggacacauaucuucaca

SEQ ID NO: 1360372 - RNA, 19 nt, Artificial Sequence
  Description of Artificial Sequence: Synthetic oligonucleotide
  modified_base (5)..(5): a, c, u, g, unknown or other
gguunagaggaguacugug

SEQ ID NO: 1360373 - RNA, 19 nt, Artificial Sequence
  Description of Artificial Sequence: Synthetic oligonucleotide
ggagauaguauccaaccca

SEQ ID NO: 1360374 - RNA, 19 nt, Artificial Sequence
  Description of Artificial Sequence: Synthetic oligonucleotide
auucuugcaaacaaguaua

SEQ ID NO: 1360375 - RNA, 19 nt, Artificial Sequence
  Description of Artificial Sequence: Synthetic oligonucleotide
  modified_base (7)..(7): a, c, u, g, unknown or other
  modified_base (13)..(13): a, c, u, g, unknown or other
uugagcngguaancgguau

SEQ ID NO: 1360376 - RNA, 19 nt, Artificial Sequence
  Description of Artificial Sequence: Synthetic oligonucleotide
ucggccuuaucauuuguaa

SEQ ID NO: 1360377 - RNA, 19 nt, Artificial Sequence
  Description of Artificial Sequence: Synthetic oligonucleotide
acguugcugaccuggaugu

SEQ ID NO: 1360378 - RNA, 19 nt, Artificial Sequence
  Description of Artificial Sequence: Synthetic oligonucleotide
ugacuugcccuugagggca

SEQ ID NO: 1360379 - RNA, 19 nt, Artificial Sequence
  Description of Artificial Sequence: Synthetic oligonucleotide
aagaccgcacauucuugca

SEQ ID NO: 1360380 - RNA, 19 nt, Artificial Sequence
  Description of Artificial Sequence: Synthetic oligonucleotide
cauaaugccuccugagcuc

SEQ ID NO: 1360381 - RNA, 19 nt, Artificial Sequence
  Description of Artificial Sequence: Synthetic oligonucleotide
uuccuaguggagauaguau

SEQ ID NO: 1360382 - RNA, 19 nt, Artificial Sequence
  Description of Artificial Sequence: Synthetic oligonucleotide
auccuaacucaauucugug

SEQ ID NO: 1360383 - RNA, 19 nt, Artificial Sequence
  Description of Artificial Sequence: Synthetic oligonucleotide
acgggaucuggucuuagcu

SEQ ID NO: 1360384 - RNA, 19 nt, Artificial Sequence
  Description of Artificial Sequence: Synthetic oligonucleotide
  modified_base (18)..(18): a, c, u, g, unknown or other
caugccuggaaaaggccnc

SEQ ID NO: 1360385 - RNA, 19 nt, Artificial Sequence
  Description of Artificial Sequence: Synthetic oligonucleotide
  modified_base (13)..(13): a, c, u, g, unknown or other
gagcucaucaacngaaaga

SEQ ID NO: 1360386 - RNA, 19 nt, Artificial Sequence
  Description of Artificial Sequence: Synthetic oligonucleotide
ugguguaggccauggaaaa

SEQ ID NO: 1360387 - RNA, 19 nt, Artificial Sequence
  Description of Artificial Sequence: Synthetic oligonucleotide
aaaucgcaacaacaagguu

SEQ ID NO: 1360388 - RNA, 19 nt, Artificial Sequence
  Description of Artificial Sequence: Synthetic oligonucleotide
ucacauggagcgcuuccca

SEQ ID NO: 1360389 - RNA, 19 nt, Artificial Sequence
  Description of Artificial Sequence: Synthetic oligonucleotide
acuacaauacccagaggcu

SEQ ID NO: 1360390 - RNA, 19 nt, Artificial Sequence
  Description of Artificial Sequence: Synthetic oligonucleotide
ccuaguggagauaguaucc

SEQ ID NO: 1360391 - RNA, 19 nt, Artificial Sequence
  Description of Artificial Sequence: Synthetic oligonucleotide
aguaccgcugcugggauug

SEQ ID NO: 1360392 - RNA, 19 nt, Artificial Sequence
  Description of Artificial Sequence: Synthetic oligonucleotide
uuccgggacagccuguagu

SEQ ID NO: 1360393 - RNA, 19 nt, Artificial Sequence
  Description of Artificial Sequence: Synthetic oligonucleotide
aaguuggcugccaauuuga

SEQ ID NO: 1360394 - RNA, 19 nt, Artificial Sequence
  Description of Artificial Sequence: Synthetic oligonucleotide
uccacuaaguaaggcagac

SEQ ID NO: 1360395 - RNA, 19 nt, Artificial Sequence
  Description of Artificial Sequence: Synthetic oligonucleotide
  modified_base (2)..(2): a, c, u, g, unknown or other
unagaggaguacugugggu

SEQ ID NO: 1360396 - RNA, 19 nt, Artificial Sequence
  Description of Artificial Sequence: Synthetic oligonucleotide
aggcucgugagcuucacau

SEQ ID NO: 1360397 - RNA, 19 nt, Artificial Sequence
  Description of Artificial Sequence: Synthetic oligonucleotide
uggguggcuucauaaugcc

SEQ ID NO: 1360398 - RNA, 19 nt, Artificial Sequence
  Description of Artificial Sequence: Synthetic oligonucleotide
aaaugggucuggguaguca

SEQ ID NO: 1360399 - RNA, 19 nt, Artificial Sequence
  Description of Artificial Sequence: Synthetic oligonucleotide
uguuuugggcugcaguguu

SEQ ID NO: 1360400 - RNA, 19 nt, Artificial Sequence
  Description of Artificial Sequence: Synthetic oligonucleotide
gcaaacaaguauaggcucg

SEQ ID NO: 1360401 - RNA, 19 nt, Artificial Sequence
  Description of Artificial Sequence: Synthetic oligonucleotide
  modified_base (17)..(17): a, c, u, g, unknown or other
uccugagcucaucaacnga

SEQ ID NO: 1360402 - RNA, 19 nt, Artificial Sequence
  Description of Artificial Sequence: Synthetic oligonucleotide
guauccaacccacuccuuc

SEQ ID NO: 1360403 - RNA, 19 nt, Artificial Sequence
  Description of Artificial Sequence: Synthetic oligonucleotide
gcugggauuggcaacauug

SEQ ID NO: 1360404 - RNA, 19 nt, Artificial Sequence
  Description of Artificial Sequence: Synthetic oligonucleotide
  modified_base (3)..(3): a, c, u, g, unknown or other
aancgguauggggacugag

SEQ ID NO: 1360405 - RNA, 19 nt, Artificial Sequence
  Description of Artificial Sequence: Synthetic oligonucleotide
cuacaauacccagaggcuc

SEQ ID NO: 1360406 - RNA, 19 nt, Artificial Sequence
  Description of Artificial Sequence: Synthetic oligonucleotide
  modified_base (18)..(18): a, c, u, g, unknown or other
cuccugagcucaucaacng

SEQ ID NO: 1360407 - RNA, 19 nt, Artificial Sequence
  Description of Artificial Sequence: Synthetic oligonucleotide
gcaaucaguuugcugaaug

SEQ ID NO: 1360408 - RNA, 19 nt, Artificial Sequence
  Description of Artificial Sequence: Synthetic oligonucleotide
uccaacguauuugguguag

SEQ ID NO: 1360409 - RNA, 19 nt, Artificial Sequence
  Description of Artificial Sequence: Synthetic oligonucleotide
caaagaccgcacauucuug

SEQ ID NO: 1360410 - RNA, 19 nt, Artificial Sequence
  Description of Artificial Sequence: Synthetic oligonucleotide
ccuccacuaaguaaggcag

SEQ ID NO: 1360411 - RNA, 19 nt, Artificial Sequence
  Description of Artificial Sequence: Synthetic oligonucleotide
uauaggcucgugagcuuca

SEQ ID NO: 1360412 - RNA, 19 nt, Artificial Sequence
  Description of Artificial Sequence: Synthetic oligonucleotide
accgcacauucuugcaaac

SEQ ID NO: 1360413 - RNA, 19 nt, Artificial Sequence
  Description of Artificial Sequence: Synthetic oligonucleotide
  modified_base (5)..(5): a, c, u, g, unknown or other
guaancgguauggggacug

SEQ ID NO: 1360414 - RNA, 19 nt, Artificial Sequence
  Description of Artificial Sequence: Synthetic oligonucleotide
gagggcaaucaguuugcug

SEQ ID NO: 1360415 - RNA, 19 nt, Artificial Sequence
  Description of Artificial Sequence: Synthetic oligonucleotide
cugcaguguuucuccaacg

SEQ ID NO: 1360416 - RNA, 19 nt, Artificial Sequence
  Description of Artificial Sequence: Synthetic oligonucleotide
agcuuuacagccaacuuua

SEQ ID NO: 1360417 - RNA, 19 nt, Artificial Sequence
  Description of Artificial Sequence: Synthetic oligonucleotide
auggguagcucacuuggaa

SEQ ID NO: 1360418 - RNA, 19 nt, Artificial Sequence
  Description of Artificial Sequence: Synthetic oligonucleotide
accgauggccuucuugcug

SEQ ID NO: 1360419 - RNA, 19 nt, Artificial Sequence
  Description of Artificial Sequence: Synthetic oligonucleotide
ggccaagggagcuuagccg

SEQ ID NO: 1360420 - RNA, 19 nt, Artificial Sequence
  Description of Artificial Sequence: Synthetic oligonucleotide
aaacaaguauaggcucgug

SEQ ID NO: 1360421 - RNA, 19 nt, Artificial Sequence
  Description of Artificial Sequence: Synthetic oligonucleotide
ggugcaaagaaaaguuggc

SEQ ID NO: 1360422 - RNA, 19 nt, Artificial Sequence
  Description of Artificial Sequence: Synthetic oligonucleotide
ucuuaugaccauguccuuu

SEQ ID NO: 1360423 - RNA, 19 nt, Artificial Sequence
  Description of Artificial Sequence: Synthetic oligonucleotide
acauccuaacucaauucug

SEQ ID NO: 1360424 - RNA, 19 nt, Artificial Sequence
  Description of Artificial Sequence: Synthetic oligonucleotide
gucuuagcugaggggaugg

SEQ ID NO: 1360425 - RNA, 19 nt, Artificial Sequence
  Description of Artificial Sequence: Synthetic oligonucleotide
uugcugaaugcagaugggu

SEQ ID NO: 1360426 - RNA, 19 nt, Artificial Sequence
  Description of Artificial Sequence: Synthetic oligonucleotide
uccacacuacuguagccau

SEQ ID NO: 1360427 - RNA, 19 nt, Artificial Sequence
  Description of Artificial Sequence: Synthetic oligonucleotide
gugggauggcucccaauag

SEQ ID NO: 1360428 - RNA, 19 nt, Artificial Sequence
  Description of Artificial Sequence: Synthetic oligonucleotide
cucccaauagcuccuccac

SEQ ID NO: 1360429 - RNA, 19 nt, Artificial Sequence
  Description of Artificial Sequence: Synthetic oligonucleotide
acauggacacauaucuuca

SEQ ID NO: 1360430 - RNA, 19 nt, Artificial Sequence
  Description of Artificial Sequence: Synthetic oligonucleotide
gguauggggacugagcuca

SEQ ID NO: 1360431 - RNA, 19 nt, Artificial Sequence
  Description of Artificial Sequence: Synthetic oligonucleotide
ccuuaucauuuguaaauac

SEQ ID NO: 1360432 - RNA, 19 nt, Artificial Sequence
  Description of Artificial Sequence: Synthetic oligonucleotide
auaaugccuccugagcuca

SEQ ID NO: 1360433 - RNA, 19 nt, Artificial Sequence
  Description of Artificial Sequence: Synthetic oligonucleotide
  modified_base (8)..(8): a, c, u, g, unknown or other
agggguunagaggaguacu

SEQ ID NO: 1360434 - RNA, 19 nt, Artificial Sequence
  Description of Artificial Sequence: Synthetic oligonucleotide
ucuggguagucaguaccgc

SEQ ID NO: 1360435 - RNA, 19 nt, Artificial Sequence
  Description of Artificial Sequence: Synthetic oligonucleotide
ggccauggaaaacucauga

SEQ ID NO: 1360436 - RNA, 19 nt, Artificial Sequence
  Description of Artificial Sequence: Synthetic oligonucleotide
gauaggugugaagcaaaga

SEQ ID NO: 1360437 - RNA, 19 nt, Artificial Sequence
  Description of Artificial Sequence: Synthetic oligonucleotide
  modified_base (7)..(7): a, c, u, g, unknown or other
aaggccnccuggaggagcu

SEQ ID NO: 1360438 - RNA, 19 nt, Artificial Sequence
  Description of Artificial Sequence: Synthetic oligonucleotide
uaguggagauaguauccaa

SEQ ID NO: 1360439 - RNA, 19 nt, Artificial Sequence
  Description of Artificial Sequence: Synthetic oligonucleotide
agacucuucaguagcucag

SEQ ID NO: 1360440 - RNA, 19 nt, Artificial Sequence
  Description of Artificial Sequence: Synthetic oligonucleotide
cuggucuuagcugagggga

SEQ ID NO: 1360441 - RNA, 19 nt, Artificial Sequence
  Description of Artificial Sequence: Synthetic oligonucleotide
ggacacauaucuucacaug

SEQ ID NO: 1360442 - RNA, 19 nt, Artificial Sequence
  Description of Artificial Sequence: Synthetic oligonucleotide
aagacgagcaggaguuaca

SEQ ID NO: 1360443 - RNA, 19 nt, Artificial Sequence
  Description of Artificial Sequence: Synthetic oligonucleotide
  modified_base (9)..(9): a, c, u, g, unknown or other
aaaaggccnccuggaggag

SEQ ID NO: 1360444 - RNA, 19 nt, Artificial Sequence
  Description of Artificial Sequence: Synthetic oligonucleotide
uguguccuugcugaacagu

SEQ ID NO: 1360445 - RNA, 19 nt, Artificial Sequence
  Description of Artificial Sequence: Synthetic oligonucleotide
ugagcucaacacucuugac

SEQ ID NO: 1360446 - RNA, 19 nt, Artificial Sequence
  Description of Artificial Sequence: Synthetic oligonucleotide
gcauuugaugcauaguuua

SEQ ID NO: 1360447 - RNA, 19 nt, Artificial Sequence
  Description of Artificial Sequence: Synthetic oligonucleotide
caagacgagcaggaguuac

SEQ ID NO: 1360448 - RNA, 19 nt, Artificial Sequence
  Description of Artificial Sequence: Synthetic oligonucleotide
guagucaguaccgcugcug

SEQ ID NO: 1360449 - RNA, 19 nt, Artificial Sequence
  Description of Artificial Sequence: Synthetic oligonucleotide
ugcccucgguauuaaggca

SEQ ID NO: 1360450 - RNA, 19 nt, Artificial Sequence
  Description of Artificial Sequence: Synthetic oligonucleotide
cauccuaacucaauucugu

SEQ ID NO: 1360451 - RNA, 19 nt, Artificial Sequence
  Description of Artificial Sequence: Synthetic oligonucleotide
gcaacaacaagguuaggcu

SEQ ID NO: 1360452 - RNA, 19 nt, Artificial Sequence
  Description of Artificial Sequence: Synthetic oligonucleotide
cagacucuucaguagcuca

SEQ ID NO: 1360453 - RNA, 19 nt, Artificial Sequence
  Description of Artificial Sequence: Synthetic oligonucleotide
gggaucuggucuuagcuga

SEQ ID NO: 1360454 - RNA, 19 nt, Artificial Sequence
  Description of Artificial Sequence: Synthetic oligonucleotide
cccaauagcuccuccacac

SEQ ID NO: 1360455 - RNA, 19 nt, Artificial Sequence
  Description of Artificial Sequence: Synthetic oligonucleotide
gaccgcacauucuugcaaa

SEQ ID NO: 1360456 - RNA, 19 nt, Artificial Sequence
  Description of Artificial Sequence: Synthetic oligonucleotide
ucaguaccgcugcugggau

SEQ ID NO: 1360457 - RNA, 19 nt, Artificial Sequence
  Description of Artificial Sequence: Synthetic oligonucleotide
  modified_base (2)..(2): a, c, u, g, unknown or other
cnccuggaggagcugcugc

SEQ ID NO: 1360458 - RNA, 19 nt, Artificial Sequence
  Description of Artificial Sequence: Synthetic oligonucleotide
agaccgcacauucuugcaa

SEQ ID NO: 1360459 - RNA, 19 nt, Artificial Sequence
  Description of Artificial Sequence: Synthetic oligonucleotide
aaaucugcugguagugaua

SEQ ID NO: 1360460 - RNA, 19 nt, Artificial Sequence
  Description of Artificial Sequence: Synthetic oligonucleotide
cacauccuaacucaauucu

SEQ ID NO: 1360461 - RNA, 19 nt, Artificial Sequence
  Description of Artificial Sequence: Synthetic oligonucleotide
  modified_base (3)..(3): a, c, u, g, unknown or other
acngaaagaugggcaucuc

SEQ ID NO: 1360462 - RNA, 19 nt, Artificial Sequence
  Description of Artificial Sequence: Synthetic oligonucleotide
  modified_base (7)..(7): a, c, u, g, unknown or other
gggguunagaggaguacug

SEQ ID NO: 1360463 - RNA, 19 nt, Artificial Sequence
  Description of Artificial Sequence: Synthetic oligonucleotide
  modified_base (8)..(8): a, c, u, g, unknown or other
  modified_base (14)..(14): a, c, u, g, unknown or other
cuugagcngguaancggua

SEQ ID NO: 1360464 - RNA, 19 nt, Artificial Sequence
  Description of Artificial Sequence: Synthetic oligonucleotide
cuaguggagauaguaucca

SEQ ID NO: 1360465 - RNA, 19 nt, Artificial Sequence
  Description of Artificial Sequence: Synthetic oligonucleotide
uggucuuagcugaggggau

SEQ ID NO: 1360466 - RNA, 19 nt, Artificial Sequence
  Description of Artificial Sequence: Synthetic oligonucleotide
gacauacuccuuggagacc

SEQ ID NO: 1360467 - RNA, 19 nt, Artificial Sequence
  Description of Artificial Sequence: Synthetic oligonucleotide
gcgcuucccagcuuuacag

SEQ ID NO: 1360468 - RNA, 19 nt, Artificial Sequence
  Description of Artificial Sequence: Synthetic oligonucleotide
  modified_base (4)..(4): a, c, u, g, unknown or other
uaancgguauggggacuga

SEQ ID NO: 1360469 - RNA, 19 nt, Artificial Sequence
  Description of Artificial Sequence: Synthetic oligonucleotide
guauaggcucgugagcuuc

SEQ ID NO: 1360470 - RNA, 19 nt, Artificial Sequence
  Description of Artificial Sequence: Synthetic oligonucleotide
  modified_base (5)..(5): a, c, u, g, unknown or other
caacngaaagaugggcauc

SEQ ID NO: 1360471 - RNA, 19 nt, Artificial Sequence
  Description of Artificial Sequence: Synthetic oligonucleotide
cauauguuuugggcugcag

SEQ ID NO: 1360472 - RNA, 19 nt, Artificial Sequence
  Description of Artificial Sequence: Synthetic oligonucleotide
gcgaggcucuguuuaaaag

SEQ ID NO: 1360473 - RNA, 19 nt, Artificial Sequence
  Description of Artificial Sequence: Synthetic oligonucleotide
caacacucuugaccuggcc

SEQ ID NO: 1360474 - RNA, 19 nt, Artificial Sequence
  Description of Artificial Sequence: Synthetic oligonucleotide
uaccuccacuaaguaaggc

SEQ ID NO: 1360475 - RNA, 19 nt, Artificial Sequence
  Description of Artificial Sequence: Synthetic oligonucleotide
ggaguuaaagcuugguuau

SEQ ID NO: 1360476 - RNA, 19 nt, Artificial Sequence
  Description of Artificial Sequence: Synthetic oligonucleotide
cuuccuaguggagauagua

SEQ ID NO: 1360477 - RNA, 19 nt, Artificial Sequence
  Description of Artificial Sequence: Synthetic oligonucleotide
  modified_base (12)..(12): a, c, u, g, unknown or other
  modified_base (18)..(18): a, c, u, g, unknown or other
uggccuugagcngguaanc

SEQ ID NO: 1360478 - RNA, 19 nt, Artificial Sequence
  Description of Artificial Sequence: Synthetic oligonucleotide
auaggcucgugagcuucac

SEQ ID NO: 1360479 - RNA, 19 nt, Artificial Sequence
  Description of Artificial Sequence: Synthetic oligonucleotide
gugaagcaaagaccgcaca

SEQ ID NO: 1360480 - RNA, 19 nt, Artificial Sequence
  Description of Artificial Sequence: Synthetic oligonucleotide
caguguuucuccaacguau

SEQ ID NO: 1360481 - RNA, 19 nt, Artificial Sequence
  Description of Artificial Sequence: Synthetic oligonucleotide
gucaguaccgcugcuggga

SEQ ID NO: 1360482 - RNA, 19 nt, Artificial Sequence
  Description of Artificial Sequence: Synthetic oligonucleotide
gaccaagacugggagguga

SEQ ID NO: 1360483 - RNA, 19 nt, Artificial Sequence
  Description of Artificial Sequence: Synthetic oligonucleotide
uaggcucgugagcuucaca

SEQ ID NO: 1360484 - RNA, 19 nt, Artificial Sequence
  Description of Artificial Sequence: Synthetic oligonucleotide
aagggagcuuagccgguuu

SEQ ID NO: 1360485 - RNA, 19 nt, Artificial Sequence
  Description of Artificial Sequence: Synthetic oligonucleotide
gggacugagcucaacacuc

SEQ ID NO: 1360486 - RNA, 19 nt, Artificial Sequence
  Description of Artificial Sequence: Synthetic oligonucleotide
aguauaggcucgugagcuu

SEQ ID NO: 1360487 - RNA, 19 nt, Artificial Sequence
  Description of Artificial Sequence: Synthetic oligonucleotide
gaggaguacuguggguggc

SEQ ID NO: 1360488 - RNA, 19 nt, Artificial Sequence
  Description of Artificial Sequence: Synthetic oligonucleotide
ggguagucaguaccgcugc

SEQ ID NO: 1360489 - RNA, 19 nt, Artificial Sequence
  Description of Artificial Sequence: Synthetic oligonucleotide
cuccacacuacuguagcca

SEQ ID NO: 1360490 - RNA, 19 nt, Artificial Sequence
  Description of Artificial Sequence: Synthetic oligonucleotide
  modified_base (9)..(9): a, c, u, g, unknown or other
cagggguunagaggaguac

SEQ ID NO: 1360491 - RNA, 19 nt, Artificial Sequence
  Description of Artificial Sequence: Synthetic oligonucleotide
  modified_base (11)..(11): a, c, u, g, unknown or other
  modified_base (17)..(17): a, c, u, g, unknown or other
ggccuugagcngguaancg

SEQ ID NO: 1360492 - RNA, 19 nt, Artificial Sequence
  Description of Artificial Sequence: Synthetic oligonucleotide
cuccuuccgggacagccug

SEQ ID NO: 1360493 - RNA, 19 nt, Artificial Sequence
  Description of Artificial Sequence: Synthetic oligonucleotide
ggucaugaauccauauuca

SEQ ID NO: 1360494 - RNA, 19 nt, Artificial Sequence
  Description of Artificial Sequence: Synthetic oligonucleotide
gaguacuguggguggcuuc

SEQ ID NO: 1360495 - RNA, 19 nt, Artificial Sequence
  Description of Artificial Sequence: Synthetic oligonucleotide
aagcuugguuauaggugca

SEQ ID NO: 1360496 - RNA, 19 nt, Artificial Sequence
  Description of Artificial Sequence: Synthetic oligonucleotide
  modified_base (10)..(10): a, c, u, g, unknown or other
acagggguunagaggagua

SEQ ID NO: 1360497 - RNA, 19 nt, Artificial Sequence
  Description of Artificial Sequence: Synthetic oligonucleotide
caaaugggaguuaaagcuu

SEQ ID NO: 1360498 - RNA, 19 nt, Artificial Sequence
  Description of Artificial Sequence: Synthetic oligonucleotide
gacaguaucuccccuucuu

SEQ ID NO: 1360499 - RNA, 19 nt, Artificial Sequence
  Description of Artificial Sequence: Synthetic oligonucleotide
  modified_base (16)..(16): a, c, u, g, unknown or other
acaauggccuugagcnggu

SEQ ID NO: 1360500 - RNA, 19 nt, Artificial Sequence
  Description of Artificial Sequence: Synthetic oligonucleotide
gaugacgggaucuggucuu

SEQ ID NO: 1360501 - RNA, 19 nt, Artificial Sequence
  Description of Artificial Sequence: Synthetic oligonucleotide
gauggguagcucacuugga

SEQ ID NO: 1360502 - RNA, 19 nt, Artificial Sequence
  Description of Artificial Sequence: Synthetic oligonucleotide
ugcugcccucgguauuaag

SEQ ID NO: 1360503 - RNA, 19 nt, Artificial Sequence
  Description of Artificial Sequence: Synthetic oligonucleotide
gaugggcaucuccuuccca

SEQ ID NO: 1360504 - RNA, 19 nt, Artificial Sequence
  Description of Artificial Sequence: Synthetic oligonucleotide
cuccacuaaguaaggcaga

SEQ ID NO: 1360505 - RNA, 19 nt, Artificial Sequence
  Description of Artificial Sequence: Synthetic oligonucleotide
gaagcaaagaccgcacauu

SEQ ID NO: 1360506 - RNA, 19 nt, Artificial Sequence
  Description of Artificial Sequence: Synthetic oligonucleotide
aguguuucuccaacguauu

SEQ ID NO: 1360507 - RNA, 19 nt, Artificial Sequence
  Description of Artificial Sequence: Synthetic oligonucleotide
auccauauucacagggguu

SEQ ID NO: 1360508 - RNA, 19 nt, Artificial Sequence
  Description of Artificial Sequence: Synthetic oligonucleotide
ugagggcaaucaguuugcu

SEQ ID NO: 1360509 - RNA, 19 nt, Artificial Sequence
  Description of Artificial Sequence: Synthetic oligonucleotide
ccuuggagaccaagacugg

SEQ ID NO: 1360510 - RNA, 19 nt, Artificial Sequence
  Description of Artificial Sequence: Synthetic oligonucleotide
aaguggcgaggcucuguuu

SEQ ID NO: 1360511 - RNA, 19 nt, Artificial Sequence
  Description of Artificial Sequence: Synthetic oligonucleotide
cugaucaaccuuggccuuc

SEQ ID NO: 1360512 - RNA, 19 nt, Artificial Sequence
  Description of Artificial Sequence: Synthetic oligonucleotide
guagcucacuuggaagaca

SEQ ID NO: 1360513 - RNA, 19 nt, Artificial Sequence
  Description of Artificial Sequence: Synthetic oligonucleotide
gcccucgguauuaaggcag

SEQ ID NO: 1360514 - RNA, 19 nt, Artificial Sequence
  Description of Artificial Sequence: Synthetic oligonucleotide
acaacaagguuaggcugau

SEQ ID NO: 1360515 - RNA, 19 nt, Artificial Sequence
  Description of Artificial Sequence: Synthetic oligonucleotide
ccaacguauuugguguagg

SEQ ID NO: 1360516 - RNA, 19 nt, Artificial Sequence
  Description of Artificial Sequence: Synthetic oligonucleotide
caaacugaaugagaucagu

SEQ ID NO: 1360517 - RNA, 19 nt, Artificial Sequence
  Description of Artificial Sequence: Synthetic oligonucleotide
gguagcucacuuggaagac

SEQ ID NO: 1360518 - RNA, 19 nt, Artificial Sequence
  Description of Artificial Sequence: Synthetic oligonucleotide
aggaguacuguggguggcu

SEQ ID NO: 1360519 - RNA, 19 nt, Artificial Sequence
  Description of Artificial Sequence: Synthetic oligonucleotide
cuuccgggacagccuguag

SEQ ID NO: 1360520 - RNA, 19 nt, Artificial Sequence
  Description of Artificial Sequence: Synthetic oligonucleotide
cugcugauuuacaauuuau

SEQ ID NO: 1360521 - RNA, 19 nt, Artificial Sequence
  Description of Artificial Sequence: Synthetic oligonucleotide
  modified_base (19)..(19): a, c, u, g, unknown or other
ccaugccuggaaaaggccn

SEQ ID NO: 1360522 - RNA, 19 nt, Artificial Sequence
  Description of Artificial Sequence: Synthetic oligonucleotide
ggugugaagcaaagaccgc

SEQ ID NO: 1360523 - RNA, 19 nt, Artificial Sequence
  Description of Artificial Sequence: Synthetic oligonucleotide
ugaccuggccaugccugga

SEQ ID NO: 1360524 - RNA, 19 nt, Artificial Sequence
  Description of Artificial Sequence: Synthetic oligonucleotide
ccuccacacuacuguagcc

SEQ ID NO: 1360525 - RNA, 19 nt, Artificial Sequence
  Description of Artificial Sequence: Synthetic oligonucleotide
ucgcaacaacaagguuagg

SEQ ID NO: 1360526 - RNA, 19 nt, Artificial Sequence
  Description of Artificial Sequence: Synthetic oligonucleotide
agcuugguuauaggugcaa

SEQ ID NO: 1360527 - RNA, 19 nt, Artificial Sequence
  Description of Artificial Sequence: Synthetic oligonucleotide
caggaguuacaggacagua

SEQ ID NO: 1360528 - RNA, 19 nt, Artificial Sequence
  Description of Artificial Sequence: Synthetic oligonucleotide
ggucuuagcugaggggaug

SEQ ID NO: 1360529 - RNA, 19 nt, Artificial Sequence
  Description of Artificial Sequence: Synthetic oligonucleotide
uccuuccgggacagccugu

SEQ ID NO: 1360530 - RNA, 19 nt, Artificial Sequence
  Description of Artificial Sequence: Synthetic oligonucleotide
cccucgguauuaaggcagg

SEQ ID NO: 1360531 - RNA, 19 nt, Artificial Sequence
  Description of Artificial Sequence: Synthetic oligonucleotide
uaaugccuccugagcucau

SEQ ID NO: 1360532 - RNA, 19 nt, Artificial Sequence
  Description of Artificial Sequence: Synthetic oligonucleotide
gccauggaaaacucaugaa

SEQ ID NO: 1360533 - RNA, 19 nt, Artificial Sequence
  Description of Artificial Sequence: Synthetic oligonucleotide
gguguaggccauggaaaac

SEQ ID NO: 1360534 - RNA, 19 nt, Artificial Sequence
  Description of Artificial Sequence: Synthetic oligonucleotide
  modified_base (11)..(11): a, c, u, g, unknown or other
gcucaucaacngaaagaug

SEQ ID NO: 1360535 - RNA, 19 nt, Artificial Sequence
  Description of Artificial Sequence: Synthetic oligonucleotide
gaguuaaagcuugguuaua

SEQ ID NO: 1360536 - RNA, 19 nt, Artificial Sequence
  Description of Artificial Sequence: Synthetic oligonucleotide
gaagggcaggggccagcac

SEQ ID NO: 1360537 - RNA, 19 nt, Artificial Sequence
  Description of Artificial Sequence: Synthetic oligonucleotide
cuugaggguguuccucaaa

SEQ ID NO: 1360538 - RNA, 19 nt, Artificial Sequence
  Description of Artificial Sequence: Synthetic oligonucleotide
cuggguagucaguaccgcu

SEQ ID NO: 1360539 - RNA, 19 nt, Artificial Sequence
  Description of Artificial Sequence: Synthetic oligonucleotide
cacucuugaccuggccaug

SEQ ID NO: 1360540 - RNA, 19 nt, Artificial Sequence
  Description of Artificial Sequence: Synthetic oligonucleotide
ucccagcuuuacagccaac

SEQ ID NO: 1360541 - RNA, 19 nt, Artificial Sequence
  Description of Artificial Sequence: Synthetic oligonucleotide
gcaguguuucuccaacgua

SEQ ID NO: 1360542 - RNA, 19 nt, Artificial Sequence
  Description of Artificial Sequence: Synthetic oligonucleotide
gaaugagaucagugggcuu

SEQ ID NO: 1360543 - RNA, 19 nt, Artificial Sequence
  Description of Artificial Sequence: Synthetic oligonucleotide
uggcgaggcucuguuuaaa

SEQ ID NO: 1360544 - RNA, 19 nt, Artificial Sequence
  Description of Artificial Sequence: Synthetic oligonucleotide
cuugccgcucugcugauuu

SEQ ID NO: 1360545 - RNA, 19 nt, Artificial Sequence
  Description of Artificial Sequence: Synthetic oligonucleotide
guggcgaggcucuguuuaa

SEQ ID NO: 1360546 - RNA, 19 nt, Artificial Sequence
  Description of Artificial Sequence: Synthetic oligonucleotide
ggcgaggcucuguuuaaaa

SEQ ID NO: 1360547 - RNA, 19 nt, Artificial Sequence
  Description of Artificial Sequence: Synthetic oligonucleotide
  modified_base (9)..(9): a, c, u, g, unknown or other
  modified_base (15)..(15): a, c, u, g, unknown or other
ccuugagcngguaancggu

SEQ ID NO: 1360548 - RNA, 19 nt, Artificial Sequence
  Description of Artificial Sequence: Synthetic oligonucleotide
gcucaacacucuugaccug

SEQ ID NO: 1360549 - RNA, 19 nt, Artificial Sequence
  Description of Artificial Sequence: Synthetic oligonucleotide
ggacagccuguaguccacg

SEQ ID NO: 1360550 - RNA, 19 nt, Artificial Sequence
  Description of Artificial Sequence: Synthetic oligonucleotide
gaaaaggccaagggagcuu

SEQ ID NO: 1360551 - RNA, 19 nt, Artificial Sequence
  Description of Artificial Sequence: Synthetic oligonucleotide
cugggcaaugagagaccga

SEQ ID NO: 1360552 - RNA, 19 nt, Artificial Sequence
  Description of Artificial Sequence: Synthetic oligonucleotide
augggucuggguagucagu

SEQ ID NO: 1360553 - RNA, 19 nt, Artificial Sequence
  Description of Artificial Sequence: Synthetic oligonucleotide
gaggcucuugaggguguuc

SEQ ID NO: 1360554 - RNA, 19 nt, Artificial Sequence
  Description of Artificial Sequence: Synthetic oligonucleotide
cuccaacguauuuggugua

SEQ ID NO: 1360555 - RNA, 19 nt, Artificial Sequence
  Description of Artificial Sequence: Synthetic oligonucleotide
gggauggcucccaauagcu

SEQ ID NO: 1360556 - RNA, 19 nt, Artificial Sequence
  Description of Artificial Sequence: Synthetic oligonucleotide
  modified_base (5)..(5): a, c, u, g, unknown or other
ggccnccuggaggagcugc

SEQ ID NO: 1360557 - RNA, 19 nt, Artificial Sequence
  Description of Artificial Sequence: Synthetic oligonucleotide
uugccgcucugcugauuua

SEQ ID NO: 1360558 - RNA, 19 nt, Artificial Sequence
  Description of Artificial Sequence: Synthetic oligonucleotide
ggauggcucccaauagcuc

SEQ ID NO: 1360559 - RNA, 19 nt, Artificial Sequence
  Description of Artificial Sequence: Synthetic oligonucleotide
guaccgcugcugggauugg

SEQ ID NO: 1360560 - RNA, 19 nt, Artificial Sequence
  Description of Artificial Sequence: Synthetic oligonucleotide
  modified_base (6)..(6): a, c, u, g, unknown or other
ggguunagaggaguacugu

SEQ ID NO: 1360561 - RNA, 19 nt, Artificial Sequence
  Description of Artificial Sequence: Synthetic oligonucleotide
uugcugcccucgguauuaa

SEQ ID NO: 1360562 - RNA, 19 nt, Artificial Sequence
  Description of Artificial Sequence: Synthetic oligonucleotide
augacgggaucuggucuua

SEQ ID NO: 1360563 - RNA, 19 nt, Artificial Sequence
  Description of Artificial Sequence: Synthetic oligonucleotide
cuucggccuuaucauuugu

SEQ ID NO: 1360564 - RNA, 19 nt, Artificial Sequence
  Description of Artificial Sequence: Synthetic oligonucleotide
gagagaccgauggccuucu

SEQ ID NO: 1360565 - RNA, 19 nt, Artificial Sequence
  Description of Artificial Sequence: Synthetic oligonucleotide
cugccaauuugacucuauu

SEQ ID NO: 1360566 - RNA, 19 nt, Artificial Sequence
  Description of Artificial Sequence: Synthetic oligonucleotide
gcuccuccacacuacugua

SEQ ID NO: 1360567 - RNA, 19 nt, Artificial Sequence
  Description of Artificial Sequence: Synthetic oligonucleotide
cucgguauuaaggcagguu

SEQ ID NO: 1360568 - RNA, 19 nt, Artificial Sequence
  Description of Artificial Sequence: Synthetic oligonucleotide
  modified_base (6)..(6): a, c, u, g, unknown or other
gguaancgguauggggacu

SEQ ID NO: 1360569 - RNA, 19 nt, Artificial Sequence
  Description of Artificial Sequence: Synthetic oligonucleotide
gguagucaguaccgcugcu

SEQ ID NO: 1360570 - RNA, 19 nt, Artificial Sequence
  Description of Artificial Sequence: Synthetic oligonucleotide
cagugggcuucaggaugac

SEQ ID NO: 1360571 - RNA, 19 nt, Artificial Sequence
  Description of Artificial Sequence: Synthetic oligonucleotide
ggacaguaucuccccuucu

SEQ ID NO: 1360572 - RNA, 19 nt, Artificial Sequence
  Description of Artificial Sequence: Synthetic oligonucleotide
cggccuuaucauuuguaaa

SEQ ID NO: 1360573 - RNA, 19 nt, Artificial Sequence
  Description of Artificial Sequence: Synthetic oligonucleotide
  modified_base (18)..(18): a, c, u, g, unknown or other
ccauauucacagggguuna

SEQ ID NO: 1360574 - RNA, 19 nt, Artificial Sequence
  Description of Artificial Sequence: Synthetic oligonucleotide
guuuugggcugcaguguuu

SEQ ID NO: 1360575 - RNA, 19 nt, Artificial Sequence
  Description of Artificial Sequence: Synthetic oligonucleotide
ggacugagcucaacacucu

SEQ ID NO: 1360576 - RNA, 19 nt, Artificial Sequence
  Description of Artificial Sequence: Synthetic oligonucleotide
  modified_base (6)..(6): a, c, u, g, unknown or other
aggccnccuggaggagcug

SEQ ID NO: 1360577 - RNA, 19 nt, Artificial Sequence
  Description of Artificial Sequence: Synthetic oligonucleotide
  modified_base (3)..(3): a, c, u, g, unknown or other
ccnccuggaggagcugcug

SEQ ID NO: 1360578 - RNA, 19 nt, Artificial Sequence
  Description of Artificial Sequence: Synthetic oligonucleotide
gcccuugagggcaaucagu

SEQ ID NO: 1360579 - RNA, 19 nt, Artificial Sequence
  Description of Artificial Sequence: Synthetic oligonucleotide
gccgcucugcugauuuaca

SEQ ID NO: 1360580 - RNA, 19 nt, Artificial Sequence
  Description of Artificial Sequence: Synthetic oligonucleotide
ccauauguuuugggcugca

SEQ ID NO: 1360581 - RNA, 19 nt, Artificial Sequence
  Description of Artificial Sequence: Synthetic oligonucleotide
gcaagacgagcaggaguua

SEQ ID NO: 1360582 - RNA, 19 nt, Artificial Sequence
  Description of Artificial Sequence: Synthetic oligonucleotide
ccacacuacuguagccaua

SEQ ID NO: 1360583 - RNA, 19 nt, Artificial Sequence
  Description of Artificial Sequence: Synthetic oligonucleotide
ggcaaucaguuugcugaau

SEQ ID NO: 1360584 - RNA, 19 nt, Artificial Sequence
  Description of Artificial Sequence: Synthetic oligonucleotide
ggaguacuguggguggcuu

SEQ ID NO: 1360585 - RNA, 19 nt, Artificial Sequence
  Description of Artificial Sequence: Synthetic oligonucleotide
guacuguggguggcuucau

SEQ ID NO: 1360586 - RNA, 19 nt, Artificial Sequence
  Description of Artificial Sequence: Synthetic oligonucleotide
ccacuaaguaaggcagacu

SEQ ID NO: 1360587 - RNA, 19 nt, Artificial Sequence
  Description of Artificial Sequence: Synthetic oligonucleotide
  modified_base (15)..(15): a, c, u, g, unknown or other
caauggccuugagcnggua

SEQ ID NO: 1360588 - RNA, 19 nt, Artificial Sequence
  Description of Artificial Sequence: Synthetic oligonucleotide
caguaccgcugcugggauu

SEQ ID NO: 1360589 - RNA, 19 nt, Artificial Sequence
  Description of Artificial Sequence: Synthetic oligonucleotide
ccuuccgggacagccugua

SEQ ID NO: 1360590 - RNA, 19 nt, Artificial Sequence
  Description of Artificial Sequence: Synthetic oligonucleotide
ccucgguauuaaggcaggu

SEQ ID NO: 1360591 - RNA, 19 nt, Artificial Sequence
  Description of Artificial Sequence: Synthetic oligonucleotide
ccuugccgcucugcugauu

SEQ ID NO: 1360592 - RNA, 19 nt, Artificial Sequence
  Description of Artificial Sequence: Synthetic oligonucleotide
  modified_base (1)..(1): a, c, u, g, unknown or other
  modified_base (7)..(7): a, c, u, g, unknown or other
ngguaancgguauggggac

SEQ ID NO: 1360593 - RNA, 19 nt, Artificial Sequence
  Description of Artificial Sequence: Synthetic oligonucleotide
  modified_base (1)..(1): a, c, u, g, unknown or other
nagaggaguacugugggug

SEQ ID NO: 1360594 - RNA, 19 nt, Artificial Sequence
  Description of Artificial Sequence: Synthetic oligonucleotide
  modified_base (1)..(1): a, c, u, g, unknown or other
ncgguauggggacugagcu

SEQ ID NO: 1360595 - RNA, 19 nt, Artificial Sequence
  Description of Artificial Sequence: Synthetic oligonucleotide
uagauuguuacucaugagg

SEQ ID NO: 1360596 - RNA, 19 nt, Artificial Sequence
  Description of Artificial Sequence: Synthetic oligonucleotide
agaaguagcaaacagucag

SEQ ID NO: 1360597 - RNA, 19 nt, Artificial Sequence
  Description of Artificial Sequence: Synthetic oligonucleotide
aaaccggagguucagaguc

SEQ ID NO: 1360598 - RNA, 19 nt, Artificial Sequence
  Description of Artificial Sequence: Synthetic oligonucleotide
gauguuggagcccaggucg

SEQ ID NO: 1360599 - RNA, 19 nt, Artificial Sequence
  Description of Artificial Sequence: Synthetic oligonucleotide
agcacguugauguuggagc

SEQ ID NO: 1360600 - RNA, 19 nt, Artificial Sequence
  Description of Artificial Sequence: Synthetic oligonucleotide
uuacaaacggagaagggag

SEQ ID NO: 1360601 - RNA, 19 nt, Artificial Sequence
  Description of Artificial Sequence: Synthetic oligonucleotide
uccucguugaugcugaggg

SEQ ID NO: 1360602 - RNA, 19 nt, Artificial Sequence
  Description of Artificial Sequence: Synthetic oligonucleotide
aaaucauauucccucagcu

SEQ ID NO: 1360603 - RNA, 19 nt, Artificial Sequence
  Description of Artificial Sequence: Synthetic oligonucleotide
ugagacauggcaaucggag

SEQ ID NO: 1360604 - RNA, 19 nt, Artificial Sequence
  Description of Artificial Sequence: Synthetic oligonucleotide
agauuguuacucaugaggc

SEQ ID NO: 1360605 - RNA, 19 nt, Artificial Sequence
  Description of Artificial Sequence: Synthetic oligonucleotide
ucauggagcuaucagauga

SEQ ID NO: 1360606 - RNA, 19 nt, Artificial Sequence
  Description of Artificial Sequence: Synthetic oligonucleotide
uucgguaucuuuaaucacc

SEQ ID NO: 1360607 - RNA, 19 nt, Artificial Sequence
  Description of Artificial Sequence: Synthetic oligonucleotide
ugagaaauccucccaaagc

SEQ ID NO: 1360608 - RNA, 19 nt, Artificial Sequence
  Description of Artificial Sequence: Synthetic oligonucleotide
aagauagagaaguagcaaa

SEQ ID NO: 1360609 - RNA, 19 nt, Artificial Sequence
  Description of Artificial Sequence: Synthetic oligonucleotide
agcaccagaacaaaagucc

SEQ ID NO: 1360610 - RNA, 19 nt, Artificial Sequence
  Description of Artificial Sequence: Synthetic oligonucleotide
acaguugcgcugcugagcc

SEQ ID NO: 1360611 - RNA, 19 nt, Artificial Sequence
  Description of Artificial Sequence: Synthetic oligonucleotide
agagaaguagcaaacaguc

SEQ ID NO: 1360612 - RNA, 19 nt, Artificial Sequence
  Description of Artificial Sequence: Synthetic oligonucleotide
aaucggaguccucaguuuc

SEQ ID NO: 1360613 - RNA, 19 nt, Artificial Sequence
  Description of Artificial Sequence: Synthetic oligonucleotide
aagcaggagacuuucgguc

SEQ ID NO: 1360614 - RNA, 19 nt, Artificial Sequence
  Description of Artificial Sequence: Synthetic oligonucleotide
uuacccuccucccagagcc

SEQ ID NO: 1360615 - RNA, 19 nt, Artificial Sequence
  Description of Artificial Sequence: Synthetic oligonucleotide
gauucgguaucuuuaauca

SEQ ID NO: 1360616 - RNA, 19 nt, Artificial Sequence
  Description of Artificial Sequence: Synthetic oligonucleotide
cuaggaagcagcgaaaccg

SEQ ID NO: 1360617 - RNA, 19 nt, Artificial Sequence
  Description of Artificial Sequence: Synthetic oligonucleotide
gaagcagcgaaaccggagg

SEQ ID NO: 1360618 - RNA, 19 nt, Artificial Sequence
  Description of Artificial Sequence: Synthetic oligonucleotide
uugagcacguugauguugg

SEQ ID NO: 1360619 - RNA, 19 nt, Artificial Sequence
  Description of Artificial Sequence: Synthetic oligonucleotide
agacauggcaaucggaguc

SEQ ID NO: 1360620 - RNA, 19 nt, Artificial Sequence
  Description of Artificial Sequence: Synthetic oligonucleotide
ucuaucuggucaauggucu

SEQ ID NO: 1360621 - RNA, 19 nt, Artificial Sequence
  Description of Artificial Sequence: Synthetic oligonucleotide
agcucuaucuggucaaugg

SEQ ID NO: 1360622 - RNA, 19 nt, Artificial Sequence
  Description of Artificial Sequence: Synthetic oligonucleotide
uguaggaggaagagauugg

SEQ ID NO: 1360623 - RNA, 19 nt, Artificial Sequence
  Description of Artificial Sequence: Synthetic oligonucleotide
guuuugaacagagauucgg

SEQ ID NO: 1360624 - RNA, 19 nt, Artificial Sequence
  Description of Artificial Sequence: Synthetic oligonucleotide
uggaacaucuggaucaugu

SEQ ID NO: 1360625 - RNA, 19 nt, Artificial Sequence
  Description of Artificial Sequence: Synthetic oligonucleotide
agcaggagacuuucggucc

SEQ ID NO: 1360626 - RNA, 19 nt, Artificial Sequence
  Description of Artificial Sequence: Synthetic oligonucleotide
aaagcaggagacuuucggu

SEQ ID NO: 1360627 - RNA, 19 nt, Artificial Sequence
  Description of Artificial Sequence: Synthetic oligonucleotide
uaucucauggagcuaucag

SEQ ID NO: 1360628 - RNA, 19 nt, Artificial Sequence
  Description of Artificial Sequence: Synthetic oligonucleotide
uaggaagcagcgaaaccgg

SEQ ID NO: 1360629 - RNA, 19 nt, Artificial Sequence
  Description of Artificial Sequence: Synthetic oligonucleotide
aaacggagaagggaggauc

SEQ ID NO: 1360630 - RNA, 19 nt, Artificial Sequence
  Description of Artificial Sequence: Synthetic oligonucleotide
uuggccgugaugucgaugc

SEQ ID NO: 1360631 - RNA, 19 nt, Artificial Sequence
  Description of Artificial Sequence: Synthetic oligonucleotide
cauguacucgugcaggugg

SEQ ID NO: 1360632 - RNA, 19 nt, Artificial Sequence
  Description of Artificial Sequence: Synthetic oligonucleotide
guuagcaccagaacaaaag

SEQ ID NO: 1360633 - RNA, 19 nt, Artificial Sequence
  Description of Artificial Sequence: Synthetic oligonucleotide
gaggcgaauaggcagcggg

SEQ ID NO: 1360634 - RNA, 19 nt, Artificial Sequence
  Description of Artificial Sequence: Synthetic oligonucleotide
aacagucagagugaagaag

SEQ ID NO: 1360635 - RNA, 19 nt, Artificial Sequence
  Description of Artificial Sequence: Synthetic oligonucleotide
ucuguuagauuguuacuca

SEQ ID NO: 1360636 - RNA, 19 nt, Artificial Sequence
  Description of Artificial Sequence: Synthetic oligonucleotide
aagagauugggaccgaaua

SEQ ID NO: 1360637 - RNA, 19 nt, Artificial Sequence
  Description of Artificial Sequence: Synthetic oligonucleotide
ucucauggagcuaucagau

SEQ ID NO: 1360638 - RNA, 19 nt, Artificial Sequence
  Description of Artificial Sequence: Synthetic oligonucleotide
uacaaacggagaagggagg

SEQ ID NO: 1360639 - RNA, 19 nt, Artificial Sequence
  Description of Artificial Sequence: Synthetic oligonucleotide
aucacauuccuuacaaacg

SEQ ID NO: 1360640 - RNA, 19 nt, Artificial Sequence
  Description of Artificial Sequence: Synthetic oligonucleotide
uuggcuaggaagcagcgaa

SEQ ID NO: 1360641 - RNA, 19 nt, Artificial Sequence
  Description of Artificial Sequence: Synthetic oligonucleotide
aggucacacagcuuggccg

SEQ ID NO: 1360642 - RNA, 19 nt, Artificial Sequence
  Description of Artificial Sequence: Synthetic oligonucleotide
auucgguaucuuuaaucac

SEQ ID NO: 1360643 - RNA, 19 nt, Artificial Sequence
  Description of Artificial Sequence: Synthetic oligonucleotide
ugaacagagauucgguauc

SEQ ID NO: 1360644 - RNA, 19 nt, Artificial Sequence
  Description of Artificial Sequence: Synthetic oligonucleotide
gagugucccaaugucaugg

SEQ ID NO: 1360645 - RNA, 19 nt, Artificial Sequence
  Description of Artificial Sequence: Synthetic oligonucleotide
aacaucuggaucauguccu

SEQ ID NO: 1360646 - RNA, 19 nt, Artificial Sequence
  Description of Artificial Sequence: Synthetic oligonucleotide
uuagauuguuacucaugag

SEQ ID NO: 1360647 - RNA, 19 nt, Artificial Sequence
  Description of Artificial Sequence: Synthetic oligonucleotide
ugugugaugaggcggcggc

SEQ ID NO: 1360648 - RNA, 19 nt, Artificial Sequence
  Description of Artificial Sequence: Synthetic oligonucleotide
gagucugcugcacagugcc

SEQ ID NO: 1360649 - RNA, 19 nt, Artificial Sequence
  Description of Artificial Sequence: Synthetic oligonucleotide
caagccuagcuccagacac

SEQ ID NO: 1360650 - RNA, 19 nt, Artificial Sequence
  Description of Artificial Sequence: Synthetic oligonucleotide
aaugucauggggauaucca

SEQ ID NO: 1360651 - RNA, 19 nt, Artificial Sequence
  Description of Artificial Sequence: Synthetic oligonucleotide
uccucaguuucgcuuggcg

SEQ ID NO: 1360652 - RNA, 19 nt, Artificial Sequence
  Description of Artificial Sequence: Synthetic oligonucleotide
aucugcacguccaagcccc

SEQ ID NO: 1360653 - RNA, 19 nt, Artificial Sequence
  Description of Artificial Sequence: Synthetic oligonucleotide
ugaaagcaggagacuuucg

SEQ ID NO: 1360654 - RNA, 19 nt, Artificial Sequence
  Description of Artificial Sequence: Synthetic oligonucleotide
ucgguaucuuuaaucaccu

SEQ ID NO: 1360655 - RNA, 19 nt, Artificial Sequence
  Description of Artificial Sequence: Synthetic oligonucleotide
augucauggggauauccag

SEQ ID NO: 1360656 - RNA, 19 nt, Artificial Sequence
  Description of Artificial Sequence: Synthetic oligonucleotide
uggagcuaucagaugagac

SEQ ID NO: 1360657 - RNA, 19 nt, Artificial Sequence
  Description of Artificial Sequence: Synthetic oligonucleotide
uucucccggguuuugaaca

SEQ ID NO: 1360658 - RNA, 19 nt, Artificial Sequence
  Description of Artificial Sequence: Synthetic oligonucleotide
accagaacaaaaguccaag

SEQ ID NO: 1360659 - RNA, 19 nt, Artificial Sequence
  Description of Artificial Sequence: Synthetic oligonucleotide
cucuguuagauuguuacuc

SEQ ID NO: 1360660 - RNA, 19 nt, Artificial Sequence
  Description of Artificial Sequence: Synthetic oligonucleotide
cuguaggaggaagagauug

SEQ ID NO: 1360661 - RNA, 19 nt, Artificial Sequence
  Description of Artificial Sequence: Synthetic oligonucleotide
uccaagccccguuucaugc

SEQ ID NO: 1360662 - RNA, 19 nt, Artificial Sequence
  Description of Artificial Sequence: Synthetic oligonucleotide
gagauugggaccgaauaac

SEQ ID NO: 1360663 - RNA, 19 nt, Artificial Sequence
  Description of Artificial Sequence: Synthetic oligonucleotide
agagauugggaccgaauaa

SEQ ID NO: 1360664 - RNA, 19 nt, Artificial Sequence
  Description of Artificial Sequence: Synthetic oligonucleotide
cuuacaaacggagaaggga

SEQ ID NO: 1360665 - RNA, 19 nt, Artificial Sequence
  Description of Artificial Sequence: Synthetic oligonucleotide
agauugggaccgaauaacg

SEQ ID NO: 1360666 - RNA, 19 nt, Artificial Sequence
  Description of Artificial Sequence: Synthetic oligonucleotide
ucacaaguguccuggcagc

SEQ ID NO: 1360667 - RNA, 19 nt, Artificial Sequence
  Description of Artificial Sequence: Synthetic oligonucleotide
uggucccuaucucauggag

SEQ ID NO: 1360668 - RNA, 19 nt, Artificial Sequence
  Description of Artificial Sequence: Synthetic oligonucleotide
agagauucgguaucuuuaa

SEQ ID NO: 1360669 - RNA, 19 nt, Artificial Sequence
  Description of Artificial Sequence: Synthetic oligonucleotide
aggagaacaggcagguccc

SEQ ID NO: 1360670 - RNA, 19 nt, Artificial Sequence
  Description of Artificial Sequence: Synthetic oligonucleotide
agcgggaccgcagugaaag

SEQ ID NO: 1360671 - RNA, 19 nt, Artificial Sequence
  Description of Artificial Sequence: Synthetic oligonucleotide
aagccuagcuccagacacc

SEQ ID NO: 1360672 - RNA, 19 nt, Artificial Sequence
  Description of Artificial Sequence: Synthetic oligonucleotide
cauggagcuaucagaugag

SEQ ID NO: 1360673 - RNA, 19 nt, Artificial Sequence
  Description of Artificial Sequence: Synthetic oligonucleotide
ggcagcguuucaaagauag

SEQ ID NO: 1360674 - RNA, 19 nt, Artificial Sequence
  Description of Artificial Sequence: Synthetic oligonucleotide
uucaugcaguggcacagac

SEQ ID NO: 1360675 - RNA, 19 nt, Artificial Sequence
  Description of Artificial Sequence: Synthetic oligonucleotide
uucaugcugcacaucucca

SEQ ID NO: 1360676 - RNA, 19 nt, Artificial Sequence
  Description of Artificial Sequence: Synthetic oligonucleotide
agccuagcuccagacaccc

SEQ ID NO: 1360677 - RNA, 19 nt, Artificial Sequence
  Description of Artificial Sequence: Synthetic oligonucleotide
agagucuugagcacguuga

SEQ ID NO: 1360678 - RNA, 19 nt, Artificial Sequence
  Description of Artificial Sequence: Synthetic oligonucleotide
ugguacuccuucucccggg

SEQ ID NO: 1360679 - RNA, 19 nt, Artificial Sequence
  Description of Artificial Sequence: Synthetic oligonucleotide
uucagcugcgccuggucgc

SEQ ID NO: 1360680 - RNA, 19 nt, Artificial Sequence
  Description of Artificial Sequence: Synthetic oligonucleotide
aagcagcgaaaccggaggu

SEQ ID NO: 1360681 - RNA, 19 nt, Artificial Sequence
  Description of Artificial Sequence: Synthetic oligonucleotide
uuguuacucaugaggcccu

SEQ ID NO: 1360682 - RNA, 19 nt, Artificial Sequence
  Description of Artificial Sequence: Synthetic oligonucleotide
caggucguugcggagagcc

SEQ ID NO: 1360683 - RNA, 19 nt, Artificial Sequence
  Description of Artificial Sequence: Synthetic oligonucleotide
gacauggcaaucggagucc

SEQ ID NO: 1360684 - RNA, 19 nt, Artificial Sequence
  Description of Artificial Sequence: Synthetic oligonucleotide
aacggagaagggaggauca

SEQ ID NO: 1360685 - RNA, 19 nt, Artificial Sequence
  Description of Artificial Sequence: Synthetic oligonucleotide
caggaggcgaauaggcagc

SEQ ID NO: 1360686 - RNA, 19 nt, Artificial Sequence
  Description of Artificial Sequence: Synthetic oligonucleotide
gggauauccaggaagggug

SEQ ID NO: 1360687 - RNA, 19 nt, Artificial Sequence
  Description of Artificial Sequence: Synthetic oligonucleotide
acagagauucgguaucuuu

SEQ ID NO: 1360688 - RNA, 19 nt, Artificial Sequence
  Description of Artificial Sequence: Synthetic oligonucleotide
cuccauguacucgugcagg

SEQ ID NO: 1360689 - RNA, 19 nt, Artificial Sequence
  Description of Artificial Sequence: Synthetic oligonucleotide
ucguugaugcugagggcug

SEQ ID NO: 1360690 - RNA, 19 nt, Artificial Sequence
  Description of Artificial Sequence: Synthetic oligonucleotide
uccuggcagcguuucaaag

SEQ ID NO: 1360691 - RNA, 19 nt, Artificial Sequence
  Description of Artificial Sequence: Synthetic oligonucleotide
ucucccggguuuugaacag

SEQ ID NO: 1360692 - RNA, 19 nt, Artificial Sequence
  Description of Artificial Sequence: Synthetic oligonucleotide
gagagccauggcugcaggg

SEQ ID NO: 1360693 - RNA, 19 nt, Artificial Sequence
  Description of Artificial Sequence: Synthetic oligonucleotide
uccauguacucgugcaggu

SEQ ID NO: 1360694 - RNA, 19 nt, Artificial Sequence
  Description of Artificial Sequence: Synthetic oligonucleotide
cagucagagugaagaaggc

SEQ ID NO: 1360695 - RNA, 19 nt, Artificial Sequence
  Description of Artificial Sequence: Synthetic oligonucleotide
uaagcgggaccgcagugaa

SEQ ID NO: 1360696 - RNA, 19 nt, Artificial Sequence
  Description of Artificial Sequence: Synthetic oligonucleotide
cauuccuuacaaacggaga

SEQ ID NO: 1360697 - RNA, 19 nt, Artificial Sequence
  Description of Artificial Sequence: Synthetic oligonucleotide
gaugcgccggcagaugucc

SEQ ID NO: 1360698 - RNA, 19 nt, Artificial Sequence
  Description of Artificial Sequence: Synthetic oligonucleotide
gugcaccuuggcuaggaag

SEQ ID NO: 1360699 - RNA, 19 nt, Artificial Sequence
  Description of Artificial Sequence: Synthetic oligonucleotide
ggcauagccugagaaaucc

SEQ ID NO: 1360700 - RNA, 19 nt, Artificial Sequence
  Description of Artificial Sequence: Synthetic oligonucleotide
aucagaugagacauggcaa

SEQ ID NO: 1360701 - RNA, 19 nt, Artificial Sequence
  Description of Artificial Sequence: Synthetic oligonucleotide
uguacucgugcagguggcg

SEQ ID NO: 1360702 - RNA, 19 nt, Artificial Sequence
  Description of Artificial Sequence: Synthetic oligonucleotide
acaaacggagaagggagga

SEQ ID NO: 1360703 - RNA, 19 nt, Artificial Sequence
  Description of Artificial Sequence: Synthetic oligonucleotide
cuccagacacccagggagc

SEQ ID NO: 1360704 - RNA, 19 nt, Artificial Sequence
  Description of Artificial Sequence: Synthetic oligonucleotide
cagucuccucccaagucag

SEQ ID NO: 1360705 - RNA, 19 nt, Artificial Sequence
  Description of Artificial Sequence: Synthetic oligonucleotide
cugcuuacccuccucccag

SEQ ID NO: 1360706 - RNA, 19 nt, Artificial Sequence
  Description of Artificial Sequence: Synthetic oligonucleotide
auguacucgugcagguggc

SEQ ID NO: 1360707 - RNA, 19 nt, Artificial Sequence
  Description of Artificial Sequence: Synthetic oligonucleotide
uggggauauccaggaaggg

SEQ ID NO: 1360708 - RNA, 19 nt, Artificial Sequence
  Description of Artificial Sequence: Synthetic oligonucleotide
cugguacuccuucucccgg

SEQ ID NO: 1360709 - RNA, 19 nt, Artificial Sequence
  Description of Artificial Sequence: Synthetic oligonucleotide
cuuacccuccucccagagc

SEQ ID NO: 1360710 - RNA, 19 nt, Artificial Sequence
  Description of Artificial Sequence: Synthetic oligonucleotide
aggcccaggaggcgaauag

SEQ ID NO: 1360711 - RNA, 19 nt, Artificial Sequence
  Description of Artificial Sequence: Synthetic oligonucleotide
agggaggaucacaaguguc

SEQ ID NO: 1360712 - RNA, 19 nt, Artificial Sequence
  Description of Artificial Sequence: Synthetic oligonucleotide
ccaggaggcgaauaggcag

SEQ ID NO: 1360713 - RNA, 19 nt, Artificial Sequence
  Description of Artificial Sequence: Synthetic oligonucleotide
cagacacccagggagcccg

SEQ ID NO: 1360714 - RNA, 19 nt, Artificial Sequence
  Description of Artificial Sequence: Synthetic oligonucleotide
aagccccguuucaugcugc

SEQ ID NO: 1360715 - RNA, 19 nt, Artificial Sequence
  Description of Artificial Sequence: Synthetic oligonucleotide
gucccuaucucauggagcu

SEQ ID NO: 1360716 - RNA, 19 nt, Artificial Sequence
  Description of Artificial Sequence: Synthetic oligonucleotide
guugcggagagccauggcu

SEQ ID NO: 1360717 - RNA, 19 nt, Artificial Sequence
  Description of Artificial Sequence: Synthetic oligonucleotide
aguuucgcuuggcgcuggc

SEQ ID NO: 1360718 - RNA, 19 nt, Artificial Sequence
  Description of Artificial Sequence: Synthetic oligonucleotide
agucuugagcacguugaug

SEQ ID NO: 1360719 - RNA, 19 nt, Artificial Sequence
  Description of Artificial Sequence: Synthetic oligonucleotide
cucauggagcuaucagaug

SEQ ID NO: 1360720 - RNA, 19 nt, Artificial Sequence
  Description of Artificial Sequence: Synthetic oligonucleotide
uggcgguucaugucauucu

SEQ ID NO: 1360721 - RNA, 19 nt, Artificial Sequence
  Description of Artificial Sequence: Synthetic oligonucleotide
aguguccuggcagcguuuc

SEQ ID NO: 1360722 - RNA, 19 nt, Artificial Sequence
  Description of Artificial Sequence: Synthetic oligonucleotide
uggcaaucggaguccucag

SEQ ID NO: 1360723 - RNA, 19 nt, Artificial Sequence
  Description of Artificial Sequence: Synthetic oligonucleotide
ucagcugcgccuggucgcg

SEQ ID NO: 1360724 - RNA, 19 nt, Artificial Sequence
  Description of Artificial Sequence: Synthetic oligonucleotide
auauucccucagcuggcug

SEQ ID NO: 1360725 - RNA, 19 nt, Artificial Sequence
  Description of Artificial Sequence: Synthetic oligonucleotide
agucaggcugucacagucg

SEQ ID NO: 1360726 - RNA, 19 nt, Artificial Sequence
  Description of Artificial Sequence: Synthetic oligonucleotide
cauggcauagccugagaaa

SEQ ID NO: 1360727 - RNA, 19 nt, Artificial Sequence
  Description of Artificial Sequence: Synthetic oligonucleotide
gagaaguagcaaacaguca

SEQ ID NO: 1360728 - RNA, 19 nt, Artificial Sequence
  Description of Artificial Sequence: Synthetic oligonucleotide
cucggcuuucagcugcgcc

SEQ ID NO: 1360729 - RNA, 19 nt, Artificial Sequence
  Description of Artificial Sequence: Synthetic oligonucleotide
ucgcuaagcgggaccgcag

SEQ ID NO: 1360730 - RNA, 19 nt, Artificial Sequence
  Description of Artificial Sequence: Synthetic oligonucleotide
uggcauagccugagaaauc

SEQ ID NO: 1360731 - RNA, 19 nt, Artificial Sequence
  Description of Artificial Sequence: Synthetic oligonucleotide
ucaguuucgcuuggcgcug

SEQ ID NO: 1360732 - RNA, 19 nt, Artificial Sequence
  Description of Artificial Sequence: Synthetic oligonucleotide
guacucgugcagguggcgg

SEQ ID NO: 1360733 - RNA, 19 nt, Artificial Sequence
  Description of Artificial Sequence: Synthetic oligonucleotide
aucggaguccucaguuucg

SEQ ID NO: 1360734 - RNA, 19 nt, Artificial Sequence
  Description of Artificial Sequence: Synthetic oligonucleotide
caccgaggcaagcggagcc

SEQ ID NO: 1360735 - RNA, 19 nt, Artificial Sequence
  Description of Artificial Sequence: Synthetic oligonucleotide
uguccuggcagcguuucaa

SEQ ID NO: 1360736 - RNA, 19 nt, Artificial Sequence
  Description of Artificial Sequence: Synthetic oligonucleotide
ggauauccaggaagggugg

SEQ ID NO: 1360737 - RNA, 19 nt, Artificial Sequence
  Description of Artificial Sequence: Synthetic oligonucleotide
cacaaguguccuggcagcg

SEQ ID NO: 1360738 - RNA, 19 nt, Artificial Sequence
  Description of Artificial Sequence: Synthetic oligonucleotide
gguuccggcgcuccuagcc

SEQ ID NO: 1360739 - RNA, 19 nt, Artificial Sequence
  Description of Artificial Sequence: Synthetic oligonucleotide
ucguccucaaaaucauauu

SEQ ID NO: 1360740 - RNA, 19 nt, Artificial Sequence
  Description of Artificial Sequence: Synthetic oligonucleotide
gaacaggcaggucccacaa

SEQ ID NO: 1360741 - RNA, 19 nt, Artificial Sequence
  Description of Artificial Sequence: Synthetic oligonucleotide
ugggccaguuagcaccaga

SEQ ID NO: 1360742 - RNA, 19 nt, Artificial Sequence
  Description of Artificial Sequence: Synthetic oligonucleotide
cucaguuucgcuuggcgcu

SEQ ID NO: 1360743 - RNA, 19 nt, Artificial Sequence
  Description of Artificial Sequence: Synthetic oligonucleotide
agcugcgccuggucgcggc

SEQ ID NO: 1360744 - RNA, 19 nt, Artificial Sequence
  Description of Artificial Sequence: Synthetic oligonucleotide
gcacguugauguuggagcc

SEQ ID NO: 1360745 - RNA, 19 nt, Artificial Sequence
  Description of Artificial Sequence: Synthetic oligonucleotide
aggcuucaugcaguggcac

SEQ ID NO: 1360746 - RNA, 19 nt, Artificial Sequence
  Description of Artificial Sequence: Synthetic oligonucleotide
acguugauguuggagccca

SEQ ID NO: 1360747 - RNA, 19 nt, Artificial Sequence
  Description of Artificial Sequence: Synthetic oligonucleotide
ucuccgacagggagguguc

SEQ ID NO: 1360748 - RNA, 19 nt, Artificial Sequence
  Description of Artificial Sequence: Synthetic oligonucleotide
augucgaugcgccggcaga

SEQ ID NO: 1360749 - RNA, 19 nt, Artificial Sequence
  Description of Artificial Sequence: Synthetic oligonucleotide
ucauggggauauccaggaa

SEQ ID NO: 1360750 - RNA, 19 nt, Artificial Sequence
  Description of Artificial Sequence: Synthetic oligonucleotide
uccggcgcuccuagccucg

SEQ ID NO: 1360751 - RNA, 19 nt, Artificial Sequence
  Description of Artificial Sequence: Synthetic oligonucleotide
ccucaguuucgcuuggcgc

SEQ ID NO: 1360752 - RNA, 19 nt, Artificial Sequence
  Description of Artificial Sequence: Synthetic oligonucleotide
caggagugucccaauguca

SEQ ID NO: 1360753 - RNA, 19 nt, Artificial Sequence
  Description of Artificial Sequence: Synthetic oligonucleotide
caagccccguuucaugcug

SEQ ID NO: 1360754 - RNA, 19 nt, Artificial Sequence
  Description of Artificial Sequence: Synthetic oligonucleotide
aggcgaauaggcagcgggg

SEQ ID NO: 1360755 - RNA, 19 nt, Artificial Sequence
  Description of Artificial Sequence: Synthetic oligonucleotide
gcuaggaagcagcgaaacc

SEQ ID NO: 1360756 - RNA, 19 nt, Artificial Sequence
  Description of Artificial Sequence: Synthetic oligonucleotide
cacauuccuuacaaacgga

SEQ ID NO: 1360757 - RNA, 19 nt, Artificial Sequence
  Description of Artificial Sequence: Synthetic oligonucleotide
gagacauggcaaucggagu

SEQ ID NO: 1360758 - RNA, 19 nt, Artificial Sequence
  Description of Artificial Sequence: Synthetic oligonucleotide
cauggccgggaccagcuuc

SEQ ID NO: 1360759 - RNA, 19 nt, Artificial Sequence
  Description of Artificial Sequence: Synthetic oligonucleotide
agcgaaaccggagguucag

SEQ ID NO: 1360760 - RNA, 19 nt, Artificial Sequence
  Description of Artificial Sequence: Synthetic oligonucleotide
aggaggcgaauaggcagcg

SEQ ID NO: 1360761 - RNA, 19 nt, Artificial Sequence
  Description of Artificial Sequence: Synthetic oligonucleotide
uggcuaggaagcagcgaaa

SEQ ID NO: 1360762 - RNA, 19 nt, Artificial Sequence
  Description of Artificial Sequence: Synthetic oligonucleotide
cccgacugugugaugaggc

SEQ ID NO: 1360763 - RNA, 19 nt, Artificial Sequence
  Description of Artificial Sequence: Synthetic oligonucleotide
gguucagagucuugagcac

SEQ ID NO: 1360764 - RNA, 19 nt, Artificial Sequence
  Description of Artificial Sequence: Synthetic oligonucleotide
guccaagccccguuucaug

SEQ ID NO: 1360765 - RNA, 19 nt, Artificial Sequence
  Description of Artificial Sequence: Synthetic oligonucleotide
ggaagcagcgaaaccggag

SEQ ID NO: 1360766 - RNA, 19 nt, Artificial Sequence
  Description of Artificial Sequence: Synthetic oligonucleotide
acggagaagggaggaucac

SEQ ID NO: 1360767 - RNA, 19 nt, Artificial Sequence
  Description of Artificial Sequence: Synthetic oligonucleotide
ccaguuagcaccagaacaa

SEQ ID NO: 1360768 - RNA, 19 nt, Artificial Sequence
  Description of Artificial Sequence: Synthetic oligonucleotide
acugugugaugaggcggcg

SEQ ID NO: 1360769 - RNA, 19 nt, Artificial Sequence
  Description of Artificial Sequence: Synthetic oligonucleotide
ugcacguccaagccccguu

SEQ ID NO: 1360770 - RNA, 19 nt, Artificial Sequence
  Description of Artificial Sequence: Synthetic oligonucleotide
acguccaagccccguuuca

SEQ ID NO: 1360771 - RNA, 19 nt, Artificial Sequence
  Description of Artificial Sequence: Synthetic oligonucleotide
agugaaagcaggagacuuu

SEQ ID NO: 1360772 - RNA, 19 nt, Artificial Sequence
  Description of Artificial Sequence: Synthetic oligonucleotide
ggcacuggucccuaucuca

SEQ ID NO: 1360773 - RNA, 19 nt, Artificial Sequence
  Description of Artificial Sequence: Synthetic oligonucleotide
cacguugauguuggagccc

SEQ ID NO: 1360774 - RNA, 19 nt, Artificial Sequence
  Description of Artificial Sequence: Synthetic oligonucleotide
auggagcuaucagaugaga

SEQ ID NO: 1360775 - RNA, 19 nt, Artificial Sequence
  Description of Artificial Sequence: Synthetic oligonucleotide
cugugugaugaggcggcgg

SEQ ID NO: 1360776 - RNA, 19 nt, Artificial Sequence
  Description of Artificial Sequence: Synthetic oligonucleotide
ccaagucaggcugucacag

SEQ ID NO: 1360777 - RNA, 19 nt, Artificial Sequence
  Description of Artificial Sequence: Synthetic oligonucleotide
guggcgguucaugucauuc

SEQ ID NO: 1360778 - RNA, 19 nt, Artificial Sequence
  Description of Artificial Sequence: Synthetic oligonucleotide
ucgugcagguggcgguuca

SEQ ID NO: 1360779 - RNA, 19 nt, Artificial Sequence
  Description of Artificial Sequence: Synthetic oligonucleotide
gcaggagugucccaauguc

SEQ ID NO: 1360780 - RNA, 19 nt, Artificial Sequence
  Description of Artificial Sequence: Synthetic oligonucleotide
ugcuuacccuccucccaga

SEQ ID NO: 1360781 - RNA, 19 nt, Artificial Sequence
  Description of Artificial Sequence: Synthetic oligonucleotide
ccgacugugugaugaggcg

SEQ ID NO: 1360782 - RNA, 19 nt, Artificial Sequence
  Description of Artificial Sequence: Synthetic oligonucleotide
ggucccuaucucauggagc

SEQ ID NO: 1360783 - RNA, 19 nt, Artificial Sequence
  Description of Artificial Sequence: Synthetic oligonucleotide
cgaaaccggagguucagag

SEQ ID NO: 1360784 - RNA, 19 nt, Artificial Sequence
  Description of Artificial Sequence: Synthetic oligonucleotide
augaggcggcggcaggucu

SEQ ID NO: 1360785 - RNA, 19 nt, Artificial Sequence
  Description of Artificial Sequence: Synthetic oligonucleotide
ugaagaccaccagcucggc

SEQ ID NO: 1360786 - RNA, 19 nt, Artificial Sequence
  Description of Artificial Sequence: Synthetic oligonucleotide
ugucgaugcgccggcagau

SEQ ID NO: 1360787 - RNA, 19 nt, Artificial Sequence
  Description of Artificial Sequence: Synthetic oligonucleotide
ggcgcuccuagccucgugc

SEQ ID NO: 1360788 - RNA, 19 nt, Artificial Sequence
  Description of Artificial Sequence: Synthetic oligonucleotide
cagcuggcugagcaugcgc

SEQ ID NO: 1360789 - RNA, 19 nt, Artificial Sequence
  Description of Artificial Sequence: Synthetic oligonucleotide
ucgugcaccuuggcuagga

SEQ ID NO: 1360790 - RNA, 19 nt, Artificial Sequence
  Description of Artificial Sequence: Synthetic oligonucleotide
acaaguguccuggcagcgu

SEQ ID NO: 1360791 - RNA, 19 nt, Artificial Sequence
  Description of Artificial Sequence: Synthetic oligonucleotide
gaacagagauucgguaucu

SEQ ID NO: 1360792 - RNA, 19 nt, Artificial Sequence
  Description of Artificial Sequence: Synthetic oligonucleotide
cacuggucccuaucucaug

SEQ ID NO: 1360793 - RNA, 19 nt, Artificial Sequence
  Description of Artificial Sequence: Synthetic oligonucleotide
aaccggagguucagagucu

SEQ ID NO: 1360794 - RNA, 19 nt, Artificial Sequence
  Description of Artificial Sequence: Synthetic oligonucleotide
cuaagcgggaccgcaguga

SEQ ID NO: 1360795 - RNA, 19 nt, Artificial Sequence
  Description of Artificial Sequence: Synthetic oligonucleotide
cucguugaugcugagggcu

SEQ ID NO: 1360796 - RNA, 19 nt, Artificial Sequence
  Description of Artificial Sequence: Synthetic oligonucleotide
guuucaugcugcacaucuc

SEQ ID NO: 1360797 - RNA, 19 nt, Artificial Sequence
  Description of Artificial Sequence: Synthetic oligonucleotide
ggcggcgggucgcuaagcg

SEQ ID NO: 1360798 - RNA, 19 nt, Artificial Sequence
  Description of Artificial Sequence: Synthetic oligonucleotide
gcgaauaggcagcggggcc

SEQ ID NO: 1360799 - RNA, 19 nt, Artificial Sequence
  Description of Artificial Sequence: Synthetic oligonucleotide
gcugcacaucuccauguac

SEQ ID NO: 1360800 - RNA, 19 nt, Artificial Sequence
  Description of Artificial Sequence: Synthetic oligonucleotide
ggcagcggggcccaccgag

SEQ ID NO: 1360801 - RNA, 19 nt, Artificial Sequence
  Description of Artificial Sequence: Synthetic oligonucleotide
uagccucgugcaccuuggc

SEQ ID NO: 1360802 - RNA, 19 nt, Artificial Sequence
  Description of Artificial Sequence: Synthetic oligonucleotide
ugagcacguugauguugga

SEQ ID NO: 1360803 - RNA, 19 nt, Artificial Sequence
  Description of Artificial Sequence: Synthetic oligonucleotide
caggucuccaucugcacgu

SEQ ID NO: 1360804 - RNA, 19 nt, Artificial Sequence
  Description of Artificial Sequence: Synthetic oligonucleotide
ggagugucccaaugucaug

SEQ ID NO: 1360805 - RNA, 19 nt, Artificial Sequence
  Description of Artificial Sequence: Synthetic oligonucleotide
ccaagauagccaaggagaa

SEQ ID NO: 1360806 - RNA, 19 nt, Artificial Sequence
  Description of Artificial Sequence: Synthetic oligonucleotide
cugcacagugccugggcca

SEQ ID NO: 1360807 - RNA, 19 nt, Artificial Sequence
  Description of Artificial Sequence: Synthetic oligonucleotide
gcccaucacucuccgacag

SEQ ID NO: 1360808 - RNA, 19 nt, Artificial Sequence
  Description of Artificial Sequence: Synthetic oligonucleotide
cuggcagcguuucaaagau

SEQ ID NO: 1360809 - RNA, 19 nt, Artificial Sequence
  Description of Artificial Sequence: Synthetic oligonucleotide
uuccggcgcuccuagccuc

SEQ ID NO: 1360810 - RNA, 19 nt, Artificial Sequence
  Description of Artificial Sequence: Synthetic oligonucleotide
ccuggcagcguuucaaaga

SEQ ID NO: 1360811 - RNA, 19 nt, Artificial Sequence
  Description of Artificial Sequence: Synthetic oligonucleotide
gaugaggcggcggcagguc

SEQ ID NO: 1360812 - RNA, 19 nt, Artificial Sequence
  Description of Artificial Sequence: Synthetic oligonucleotide
ggcccaccgaggcaagcgg

SEQ ID NO: 1360813 - RNA, 19 nt, Artificial Sequence
  Description of Artificial Sequence: Synthetic oligonucleotide
gucgcuaagcgggaccgca

SEQ ID NO: 1360814 - RNA, 19 nt, Artificial Sequence
  Description of Artificial Sequence: Synthetic oligonucleotide
cacguccaagccccguuuc

SEQ ID NO: 1360815 - RNA, 19 nt, Artificial Sequence
  Description of Artificial Sequence: Synthetic oligonucleotide
gcagcgaaaccggagguuc

SEQ ID NO: 1360816 - RNA, 19 nt, Artificial Sequence
  Description of Artificial Sequence: Synthetic oligonucleotide
ggaccgcagugaaagcagg

SEQ ID NO: 1360817 - RNA, 19 nt, Artificial Sequence
  Description of Artificial Sequence: Synthetic oligonucleotide
gcuaagcgggaccgcagug

SEQ ID NO: 1360818 - RNA, 19 nt, Artificial Sequence
  Description of Artificial Sequence: Synthetic oligonucleotide
gaagagauugggaccgaau

SEQ ID NO: 1360819 - RNA, 19 nt, Artificial Sequence
  Description of Artificial Sequence: Synthetic oligonucleotide
ugcgccggcagauguccau

SEQ ID NO: 1360820 - RNA, 19 nt, Artificial Sequence
  Description of Artificial Sequence: Synthetic oligonucleotide
gagauucgguaucuuuaau

SEQ ID NO: 1360821 - RNA, 19 nt, Artificial Sequence
  Description of Artificial Sequence: Synthetic oligonucleotide
cuuggccgugaugucgaug

SEQ ID NO: 1360822 - RNA, 19 nt, Artificial Sequence
  Description of Artificial Sequence: Synthetic oligonucleotide
agggugggccaagccuagc

SEQ ID NO: 1360823 - RNA, 19 nt, Artificial Sequence
  Description of Artificial Sequence: Synthetic oligonucleotide
gucaggcugucacagucgu

SEQ ID NO: 1360824 - RNA, 19 nt, Artificial Sequence
  Description of Artificial Sequence: Synthetic oligonucleotide
gaugagucugcugcacagu

SEQ ID NO: 1360825 - RNA, 19 nt, Artificial Sequence
  Description of Artificial Sequence: Synthetic oligonucleotide
gccucgugcaccuuggcua

SEQ ID NO: 1360826 - RNA, 19 nt, Artificial Sequence
  Description of Artificial Sequence: Synthetic oligonucleotide
ugaugucgaugcgccggca

SEQ ID NO: 1360827 - RNA, 19 nt, Artificial Sequence
  Description of Artificial Sequence: Synthetic oligonucleotide
ggugggccaagccuagcuc

SEQ ID NO: 1360828 - RNA, 19 nt, Artificial Sequence
  Description of Artificial Sequence: Synthetic oligonucleotide
uggcagcguuucaaagaua

SEQ ID NO: 1360829 - RNA, 19 nt, Artificial Sequence
  Description of Artificial Sequence: Synthetic oligonucleotide
cuuggcuaggaagcagcga

SEQ ID NO: 1360830 - RNA, 19 nt, Artificial Sequence
  Description of Artificial Sequence: Synthetic oligonucleotide
ccuagccucgugcaccuug

SEQ ID NO: 1360831 - RNA, 19 nt, Artificial Sequence
  Description of Artificial Sequence: Synthetic oligonucleotide
caggagacuuucggucccc

SEQ ID NO: 1360832 - RNA, 19 nt, Artificial Sequence
  Description of Artificial Sequence: Synthetic oligonucleotide
cggcgggucgcuaagcggg

SEQ ID NO: 1360833 - RNA, 19 nt, Artificial Sequence
  Description of Artificial Sequence: Synthetic oligonucleotide
cuggcggcgggucgcuaag

SEQ ID NO: 1360834 - RNA, 19 nt, Artificial Sequence
  Description of Artificial Sequence: Synthetic oligonucleotide
gugccugggccaguuagca

SEQ ID NO: 1360835 - RNA, 19 nt, Artificial Sequence
  Description of Artificial Sequence: Synthetic oligonucleotide
gcgcugcugagccagguca

SEQ ID NO: 1360836 - RNA, 19 nt, Artificial Sequence
  Description of Artificial Sequence: Synthetic oligonucleotide
caucacucuccgacaggga

SEQ ID NO: 1360837 - RNA, 19 nt, Artificial Sequence
  Description of Artificial Sequence: Synthetic oligonucleotide
gucguugcggagagccaug

SEQ ID NO: 1360838 - RNA, 19 nt, Artificial Sequence
  Description of Artificial Sequence: Synthetic oligonucleotide
uguuacucaugaggcccuu

SEQ ID NO: 1360839 - RNA, 19 nt, Artificial Sequence
  Description of Artificial Sequence: Synthetic oligonucleotide
cagcgaaaccggagguuca

SEQ ID NO: 1360840 - RNA, 19 nt, Artificial Sequence
  Description of Artificial Sequence: Synthetic oligonucleotide
caguuucgcuuggcgcugg

SEQ ID NO: 1360841 - RNA, 19 nt, Artificial Sequence
  Description of Artificial Sequence: Synthetic oligonucleotide
agcagcgaaaccggagguu

SEQ ID NO: 1360842 - RNA, 19 nt, Artificial Sequence
  Description of Artificial Sequence: Synthetic oligonucleotide
gcggcgggucgcuaagcgg

SEQ ID NO: 1360843 - RNA, 19 nt, Artificial Sequence
  Description of Artificial Sequence: Synthetic oligonucleotide
gcggcaggucuccaucugc

SEQ ID NO: 1360844 - RNA, 19 nt, Artificial Sequence
  Description of Artificial Sequence: Synthetic oligonucleotide
guguccagcucuguuagau

SEQ ID NO: 1360845 - RNA, 19 nt, Artificial Sequence
  Description of Artificial Sequence: Synthetic oligonucleotide
ggccgugaugucgaugcgc

SEQ ID NO: 1360846 - RNA, 19 nt, Artificial Sequence
  Description of Artificial Sequence: Synthetic oligonucleotide
cgacugugugaugaggcgg

SEQ ID NO: 1360847 - RNA, 19 nt, Artificial Sequence
  Description of Artificial Sequence: Synthetic oligonucleotide
caaggagaacaggcagguc

SEQ ID NO: 1360848 - RNA, 19 nt, Artificial Sequence
  Description of Artificial Sequence: Synthetic oligonucleotide
cgaauaggcagcggggccc

SEQ ID NO: 1360849 - RNA, 19 nt, Artificial Sequence
  Description of Artificial Sequence: Synthetic oligonucleotide
cugugcucuccuccucguc

SEQ ID NO: 1360850 - RNA, 19 nt, Artificial Sequence
  Description of Artificial Sequence: Synthetic oligonucleotide
ccccguuucaugcugcaca

SEQ ID NO: 1360851 - RNA, 19 nt, Artificial Sequence
  Description of Artificial Sequence: Synthetic oligonucleotide
gggcccaccgaggcaagcg

SEQ ID NO: 1360852 - RNA, 19 nt, Artificial Sequence
  Description of Artificial Sequence: Synthetic oligonucleotide
caguuagcaccagaacaaa

SEQ ID NO: 1360853 - RNA, 19 nt, Artificial Sequence
  Description of Artificial Sequence: Synthetic oligonucleotide
gucgaugcgccggcagaug

SEQ ID NO: 1360854 - RNA, 19 nt, Artificial Sequence
  Description of Artificial Sequence: Synthetic oligonucleotide
agcggcccggccaagcccu

SEQ ID NO: 1360855 - RNA, 19 nt, Artificial Sequence
  Description of Artificial Sequence: Synthetic oligonucleotide
ucagagucuugagcacguu

SEQ ID NO: 1360856 - RNA, 19 nt, Artificial Sequence
  Description of Artificial Sequence: Synthetic oligonucleotide
ccggguuuugaacagagau

SEQ ID NO: 1360857 - RNA, 19 nt, Artificial Sequence
  Description of Artificial Sequence: Synthetic oligonucleotide
uggcggggcccaucacucu

SEQ ID NO: 1360858 - RNA, 19 nt, Artificial Sequence
  Description of Artificial Sequence: Synthetic oligonucleotide
ggcagauguccauguccac

SEQ ID NO: 1360859 - RNA, 19 nt, Artificial Sequence
  Description of Artificial Sequence: Synthetic oligonucleotide
ccugcccugcuuacccucc

SEQ ID NO: 1360860 - RNA, 19 nt, Artificial Sequence
  Description of Artificial Sequence: Synthetic oligonucleotide
ggcgaggagacagccccag

SEQ ID NO: 1360861 - RNA, 19 nt, Artificial Sequence
  Description of Artificial Sequence: Synthetic oligonucleotide
ccauggcauagccugagaa

SEQ ID NO: 1360862 - RNA, 19 nt, Artificial Sequence
  Description of Artificial Sequence: Synthetic oligonucleotide
guuccggcgcuccuagccu

SEQ ID NO: 1360863 - RNA, 19 nt, Artificial Sequence
  Description of Artificial Sequence: Synthetic oligonucleotide
ucccaaugucauggggaua

SEQ ID NO: 1360864 - RNA, 19 nt, Artificial Sequence
  Description of Artificial Sequence: Synthetic oligonucleotide
ggggauauccaggaagggu

SEQ ID NO: 1360865 - RNA, 19 nt, Artificial Sequence
  Description of Artificial Sequence: Synthetic oligonucleotide
accggagguucagagucuu

SEQ ID NO: 1360866 - RNA, 19 nt, Artificial Sequence
  Description of Artificial Sequence: Synthetic oligonucleotide
guccucaguuucgcuuggc

SEQ ID NO: 1360867 - RNA, 19 nt, Artificial Sequence
  Description of Artificial Sequence: Synthetic oligonucleotide
ggaggcgaauaggcagcgg

SEQ ID NO: 1360868 - RNA, 19 nt, Artificial Sequence
  Description of Artificial Sequence: Synthetic oligonucleotide
ccuaucucauggagcuauc

SEQ ID NO: 1360869 - RNA, 19 nt, Artificial Sequence
  Description of Artificial Sequence: Synthetic oligonucleotide
caaucggaguccucaguuu

SEQ ID NO: 1360870 - RNA, 19 nt, Artificial Sequence
  Description of Artificial Sequence: Synthetic oligonucleotide
cccggccaagcccugcugc

SEQ ID NO: 1360871 - RNA, 19 nt, Artificial Sequence
  Description of Artificial Sequence: Synthetic oligonucleotide
uuggcgcuggcggcggguc

SEQ ID NO: 1360872 - RNA, 19 nt, Artificial Sequence
  Description of Artificial Sequence: Synthetic oligonucleotide
caaguguccuggcagcguu

SEQ ID NO: 1360873 - RNA, 19 nt, Artificial Sequence
  Description of Artificial Sequence: Synthetic oligonucleotide
agucugcugcacagugccu

SEQ ID NO: 1360874 - RNA, 19 nt, Artificial Sequence
  Description of Artificial Sequence: Synthetic oligonucleotide
ccugcuuacccuccuccca

SEQ ID NO: 1360875 - RNA, 19 nt, Artificial Sequence
  Description of Artificial Sequence: Synthetic oligonucleotide
gcaggucccacaaucacau

SEQ ID NO: 1360876 - RNA, 19 nt, Artificial Sequence
  Description of Artificial Sequence: Synthetic oligonucleotide
gcugcgccuggucgcggcg

SEQ ID NO: 1360877 - RNA, 19 nt, Artificial Sequence
  Description of Artificial Sequence: Synthetic oligonucleotide
ccauguacucgugcaggug

SEQ ID NO: 1360878 - RNA, 19 nt, Artificial Sequence
  Description of Artificial Sequence: Synthetic oligonucleotide
cuggucgcggcgggccagg

SEQ ID NO: 1360879 - RNA, 19 nt, Artificial Sequence
  Description of Artificial Sequence: Synthetic oligonucleotide
ucccuaucucauggagcua

SEQ ID NO: 1360880 - RNA, 19 nt, Artificial Sequence
  Description of Artificial Sequence: Synthetic oligonucleotide
ggcggggcccaucacucuc

SEQ ID NO: 1360881 - RNA, 19 nt, Artificial Sequence
  Description of Artificial Sequence: Synthetic oligonucleotide
cauauucccucagcuggcu

SEQ ID NO: 1360882 - RNA, 19 nt, Artificial Sequence
  Description of Artificial Sequence: Synthetic oligonucleotide
gguccccucccagaggguc

SEQ ID NO: 1360883 - RNA, 19 nt, Artificial Sequence
  Description of Artificial Sequence: Synthetic oligonucleotide
agacacccagggagcccgg

SEQ ID NO: 1360884 - RNA, 19 nt, Artificial Sequence
  Description of Artificial Sequence: Synthetic oligonucleotide
cccaggaggcgaauaggca

SEQ ID NO: 1360885 - RNA, 19 nt, Artificial Sequence
  Description of Artificial Sequence: Synthetic oligonucleotide
uggcggcgggucgcuaagc

SEQ ID NO: 1360886 - RNA, 19 nt, Artificial Sequence
  Description of Artificial Sequence: Synthetic oligonucleotide
aggucguugcggagagcca

SEQ ID NO: 1360887 - RNA, 19 nt, Artificial Sequence
  Description of Artificial Sequence: Synthetic oligonucleotide
ccagcggcccggccaagcc

SEQ ID NO: 1360888 - RNA, 19 nt, Artificial Sequence
  Description of Artificial Sequence: Synthetic oligonucleotide
cccaagucaggcugucaca

SEQ ID NO: 1360889 - RNA, 19 nt, Artificial Sequence
  Description of Artificial Sequence: Synthetic oligonucleotide
gguguccagcucuguuaga

SEQ ID NO: 1360890 - RNA, 19 nt, Artificial Sequence
  Description of Artificial Sequence: Synthetic oligonucleotide
ccgguuccggcgcuccuag

SEQ ID NO: 1360891 - RNA, 19 nt, Artificial Sequence
  Description of Artificial Sequence: Synthetic oligonucleotide
ggcaaucggaguccucagu

SEQ ID NO: 1360892 - RNA, 19 nt, Artificial Sequence
  Description of Artificial Sequence: Synthetic oligonucleotide
cccaaugucauggggauau

SEQ ID NO: 1360893 - RNA, 19 nt, Artificial Sequence
  Description of Artificial Sequence: Synthetic oligonucleotide
ggcgguucaugucauucuu

SEQ ID NO: 1360894 - RNA, 19 nt, Artificial Sequence
  Description of Artificial Sequence: Synthetic oligonucleotide
ccccgacugugugaugagg

SEQ ID NO: 1360895 - RNA, 19 nt, Artificial Sequence
  Description of Artificial Sequence: Synthetic oligonucleotide
gcggcggcaggucuccauc

SEQ ID NO: 1360896 - RNA, 19 nt, Artificial Sequence
  Description of Artificial Sequence: Synthetic oligonucleotide
ggagcccgggcgaggagac

SEQ ID NO: 1360897 - RNA, 19 nt, Artificial Sequence
  Description of Artificial Sequence: Synthetic oligonucleotide
caaacggagaagggaggau

SEQ ID NO: 1360898 - RNA, 19 nt, Artificial Sequence
  Description of Artificial Sequence: Synthetic oligonucleotide
agguggcgguucaugucau

SEQ ID NO: 1360899 - RNA, 19 nt, Artificial Sequence
  Description of Artificial Sequence: Synthetic oligonucleotide
cucccggguuuugaacaga

SEQ ID NO: 1360900 - RNA, 19 nt, Artificial Sequence
  Description of Artificial Sequence: Synthetic oligonucleotide
ccgacagggagguguccuc

SEQ ID NO: 1360901 - RNA, 19 nt, Artificial Sequence
  Description of Artificial Sequence: Synthetic oligonucleotide
cucccaagucaggcuguca

SEQ ID NO: 1360902 - RNA, 19 nt, Artificial Sequence
  Description of Artificial Sequence: Synthetic oligonucleotide
gcgggaccgcagugaaagc

SEQ ID NO: 1360903 - RNA, 19 nt, Artificial Sequence
  Description of Artificial Sequence: Synthetic oligonucleotide
cgacagggagguguccucc

SEQ ID NO: 1360904 - RNA, 19 nt, Artificial Sequence
  Description of Artificial Sequence: Synthetic oligonucleotide
gccauggcauagccugaga

SEQ ID NO: 1360905 - RNA, 19 nt, Artificial Sequence
  Description of Artificial Sequence: Synthetic oligonucleotide
caguugcgcugcugagcca

SEQ ID NO: 1360906 - RNA, 19 nt, Artificial Sequence
  Description of Artificial Sequence: Synthetic oligonucleotide
cugggccaguuagcaccag

SEQ ID NO: 1360907 - RNA, 19 nt, Artificial Sequence
  Description of Artificial Sequence: Synthetic oligonucleotide
uggucgcggcgggccaggc

SEQ ID NO: 1360908 - RNA, 19 nt, Artificial Sequence
  Description of Artificial Sequence: Synthetic oligonucleotide
cccugcccugcuuacccuc

SEQ ID NO: 1360909 - RNA, 19 nt, Artificial Sequence
  Description of Artificial Sequence: Synthetic oligonucleotide
ggucgcuaagcgggaccgc

SEQ ID NO: 1360910 - RNA, 19 nt, Artificial Sequence
  Description of Artificial Sequence: Synthetic oligonucleotide
cgggucgcuaagcgggacc

SEQ ID NO: 1360911 - RNA, 19 nt, Artificial Sequence
  Description of Artificial Sequence: Synthetic oligonucleotide
ccggcaaagugguccccuc

SEQ ID NO: 1360912 - RNA, 19 nt, Artificial Sequence
  Description of Artificial Sequence: Synthetic oligonucleotide
accaggcccaggaggcgaa

SEQ ID NO: 1360913 - RNA, 19 nt, Artificial Sequence
  Description of Artificial Sequence: Synthetic oligonucleotide
aggcagcggggcccaccga

SEQ ID NO: 1360914 - RNA, 19 nt, Artificial Sequence
  Description of Artificial Sequence: Synthetic oligonucleotide
gcccaggucguugcggaga

SEQ ID NO: 1360915 - RNA, 19 nt, Artificial Sequence
  Description of Artificial Sequence: Synthetic oligonucleotide
caggcuggcggggcccauc

SEQ ID NO: 1360916 - RNA, 19 nt, Artificial Sequence
  Description of Artificial Sequence: Synthetic oligonucleotide
ggagccggaccaggcccag

SEQ ID NO: 1360917 - RNA, 19 nt, Artificial Sequence
  Description of Artificial Sequence: Synthetic oligonucleotide
cguugcggagagccauggc

SEQ ID NO: 1360918 - RNA, 19 nt, Artificial Sequence
  Description of Artificial Sequence: Synthetic oligonucleotide
gcgccggcagauguccaug

SEQ ID NO: 1360919 - RNA, 19 nt, Artificial Sequence
  Description of Artificial Sequence: Synthetic oligonucleotide
gcgaaaccggagguucaga

SEQ ID NO: 1360920 - RNA, 19 nt, Artificial Sequence
  Description of Artificial Sequence: Synthetic oligonucleotide
guacuccuucucccggguu

SEQ ID NO: 1360921 - RNA, 19 nt, Artificial Sequence
  Description of Artificial Sequence: Synthetic oligonucleotide
cucaggcuggcggggccca

SEQ ID NO: 1360922 - RNA, 19 nt, Artificial Sequence
  Description of Artificial Sequence: Synthetic oligonucleotide
augcgccggcagaugucca

SEQ ID NO: 1360923 - RNA, 19 nt, Artificial Sequence
  Description of Artificial Sequence: Synthetic oligonucleotide
cccuaucucauggagcuau

SEQ ID NO: 1360924 - RNA, 19 nt, Artificial Sequence
  Description of Artificial Sequence: Synthetic oligonucleotide
ccaaugucauggggauauc

SEQ ID NO: 1360925 - RNA, 19 nt, Artificial Sequence
  Description of Artificial Sequence: Synthetic oligonucleotide
cgaugcgccggcagauguc

SEQ ID NO: 1360926 - RNA, 19 nt, Artificial Sequence
  Description of Artificial Sequence: Synthetic oligonucleotide
cgggaccgcagugaaagca

SEQ ID NO: 1360927 - RNA, 19 nt, Artificial Sequence
  Description of Artificial Sequence: Synthetic oligonucleotide
gcggggcccaccgaggcaa

SEQ ID NO: 1360928 - RNA, 19 nt, Artificial Sequence
  Description of Artificial Sequence: Synthetic oligonucleotide
agccaggcacuggucccua

SEQ ID NO: 1360929 - RNA, 19 nt, Artificial Sequence
  Description of Artificial Sequence: Synthetic oligonucleotide
cccgcccugcccugcuuac

SEQ ID NO: 1360930 - RNA, 19 nt, Artificial Sequence
  Description of Artificial Sequence: Synthetic oligonucleotide
cccguuucaugcugcacau

SEQ ID NO: 1360931 - RNA, 19 nt, Artificial Sequence
  Description of Artificial Sequence: Synthetic oligonucleotide
cgcuccuagccucgugcac

SEQ ID NO: 1360932 - RNA, 19 nt, Artificial Sequence
  Description of Artificial Sequence: Synthetic oligonucleotide
gcccggccaagcccugcug

SEQ ID NO: 1360933 - RNA, 19 nt, Artificial Sequence
  Description of Artificial Sequence: Synthetic oligonucleotide
gagcccgggcgaggagaca

SEQ ID NO: 1360934 - RNA, 19 nt, Artificial Sequence
  Description of Artificial Sequence: Synthetic oligonucleotide
gcccaccgaggcaagcgga

SEQ ID NO: 1360935 - RNA, 19 nt, Artificial Sequence
  Description of Artificial Sequence: Synthetic oligonucleotide
uccuagccucgugcaccuu

SEQ ID NO: 1360936 - RNA, 19 nt, Artificial Sequence
  Description of Artificial Sequence: Synthetic oligonucleotide
ccccaccccggccucggug

SEQ ID NO: 1360937 - RNA, 19 nt, Artificial Sequence
  Description of Artificial Sequence: Synthetic oligonucleotide
gccccguuucaugcugcac

SEQ ID NO: 1360938 - RNA, 19 nt, Artificial Sequence
  Description of Artificial Sequence: Synthetic oligonucleotide
ggcgggucgcuaagcggga

SEQ ID NO: 1360939 - RNA, 19 nt, Artificial Sequence
  Description of Artificial Sequence: Synthetic oligonucleotide
ccaagccccguuucaugcu

SEQ ID NO: 1360940 - RNA, 19 nt, Artificial Sequence
  Description of Artificial Sequence: Synthetic oligonucleotide
gcggagagccauggcugca

SEQ ID NO: 1360941 - RNA, 19 nt, Artificial Sequence
  Description of Artificial Sequence: Synthetic oligonucleotide
ggggcccaucacucuccga

SEQ ID NO: 1360942 - RNA, 19 nt, Artificial Sequence
  Description of Artificial Sequence: Synthetic oligonucleotide
ccguuucaugcugcacauc

SEQ ID NO: 1360943 - RNA, 19 nt, Artificial Sequence
  Description of Artificial Sequence: Synthetic oligonucleotide
ccaccccggccucggugag

SEQ ID NO: 1360944 - RNA, 19 nt, Artificial Sequence
  Description of Artificial Sequence: Synthetic oligonucleotide
gccuggucgcggcgggcca

SEQ ID NO: 1360945 - RNA, 19 nt, Artificial Sequence
  Description of Artificial Sequence: Synthetic oligonucleotide
gcgggucgcuaagcgggac

SEQ ID NO: 1360946 - RNA, 19 nt, Artificial Sequence
  Description of Artificial Sequence: Synthetic oligonucleotide
gcuguaggaggaagagauu

SEQ ID NO: 1360947 - RNA, 19 nt, Artificial Sequence
  Description of Artificial Sequence: Synthetic oligonucleotide
ccgcccugcccugcuuacc

SEQ ID NO: 1360948 - RNA, 19 nt, Artificial Sequence
  Description of Artificial Sequence: Synthetic oligonucleotide
ccggccucggugagcucca

SEQ ID NO: 1360949 - RNA, 19 nt, Artificial Sequence
  Description of Artificial Sequence: Synthetic oligonucleotide
cugcacguccaagccccgu

SEQ ID NO: 1360950 - RNA, 19 nt, Artificial Sequence
  Description of Artificial Sequence: Synthetic oligonucleotide
gguggcgguucaugucauu

SEQ ID NO: 1360951 - RNA, 19 nt, Artificial Sequence
  Description of Artificial Sequence: Synthetic oligonucleotide
ccccggcaaaguggucccc

SEQ ID NO: 1360952 - RNA, 19 nt, Artificial Sequence
  Description of Artificial Sequence: Synthetic oligonucleotide
gcagccgguuccggcgcuc

SEQ ID NO: 1360953 - RNA, 19 nt, Artificial Sequence
  Description of Artificial Sequence: Synthetic oligonucleotide
gccgguuccggcgcuccua

SEQ ID NO: 1360954 - RNA, 19 nt, Artificial Sequence
  Description of Artificial Sequence: Synthetic oligonucleotide
cgcuaagcgggaccgcagu

SEQ ID NO: 1360955 - RNA, 19 nt, Artificial Sequence
  Description of Artificial Sequence: Synthetic oligonucleotide
gcgccuggucgcggcgggc

SEQ ID NO: 1360956 - RNA, 19 nt, Artificial Sequence
  Description of Artificial Sequence: Synthetic oligonucleotide
cggggcccaccgaggcaag

SEQ ID NO: 1360957 - RNA, 19 nt, Artificial Sequence
  Description of Artificial Sequence: Synthetic oligonucleotide
cguugaugcugagggcugu

SEQ ID NO: 1360958 - RNA, 19 nt, Artificial Sequence
  Description of Artificial Sequence: Synthetic oligonucleotide
cggcgcuccuagccucgug

SEQ ID NO: 1360959 - RNA, 19 nt, Artificial Sequence
  Description of Artificial Sequence: Synthetic oligonucleotide
ccccgcccugcccugcuua

SEQ ID NO: 1360960 - RNA, 19 nt, Artificial Sequence
  Description of Artificial Sequence: Synthetic oligonucleotide
cggaguccucaguuucgcu

SEQ ID NO: 1360961 - RNA, 19 nt, Artificial Sequence
  Description of Artificial Sequence: Synthetic oligonucleotide
cguccaagccccguuucau

SEQ ID NO: 1360962 - RNA, 19 nt, Artificial Sequence
  Description of Artificial Sequence: Synthetic oligonucleotide
ccagcucuaucuggucaau

SEQ ID NO: 1360963 - RNA, 19 nt, Artificial Sequence
  Description of Artificial Sequence: Synthetic oligonucleotide
cggcggcaggucuccaucu

SEQ ID NO: 1360964 - RNA, 19 nt, Artificial Sequence
  Description of Artificial Sequence: Synthetic oligonucleotide
ccauggccgggaccagcuu

SEQ ID NO: 1360965 - RNA, 19 nt, Artificial Sequence
  Description of Artificial Sequence: Synthetic oligonucleotide
cgugcagguggcgguucau

SEQ ID NO: 1360966 - RNA, 19 nt, Artificial Sequence
  Description of Artificial Sequence: Synthetic oligonucleotide
ccggcgcuccuagccucgu

SEQ ID NO: 1360967 - RNA, 19 nt, Artificial Sequence
  Description of Artificial Sequence: Synthetic oligonucleotide
aauacugggguccagcuuc

SEQ ID NO: 1360968 - RNA, 19 nt, Artificial Sequence
  Description of Artificial Sequence: Synthetic oligonucleotide
agcguuuggagacacaacc

SEQ ID NO: 1360969 - RNA, 19 nt, Artificial Sequence
  Description of Artificial Sequence: Synthetic oligonucleotide
aacucuguggcauaggugu

SEQ ID NO: 1360970 - RNA, 19 nt, Artificial Sequence
  Description of Artificial Sequence: Synthetic oligonucleotide
ucuacuaugacuccacaug

SEQ ID NO: 1360971 - RNA, 19 nt, Artificial Sequence
  Description of Artificial Sequence: Synthetic oligonucleotide
auaguuuugccauaaccac

SEQ ID NO: 1360972 - RNA, 19 nt, Artificial Sequence
  Description of Artificial Sequence: Synthetic oligonucleotide
uugaguauacuucacuacc

SEQ ID NO: 1360973 - RNA, 19 nt, Artificial Sequence
  Description of Artificial Sequence: Synthetic oligonucleotide
ugauaguuuugccauaacc

SEQ ID NO: 1360974 - RNA, 19 nt, Artificial Sequence
  Description of Artificial Sequence: Synthetic oligonucleotide
uucacuacccaccaucggg

SEQ ID NO: 1360975 - RNA, 19 nt, Artificial Sequence
  Description of Artificial Sequence: Synthetic oligonucleotide
aaagaguaccccaggaacc

SEQ ID NO: 1360976 - RNA, 19 nt, Artificial Sequence
  Description of Artificial Sequence: Synthetic oligonucleotide
uuuggagacacaaccggcg

SEQ ID NO: 1360977 - RNA, 19 nt, Artificial Sequence
  Description of Artificial Sequence: Synthetic oligonucleotide
ucauaaacuuccuuggucu

SEQ ID NO: 1360978 - RNA, 19 nt, Artificial Sequence
  Description of Artificial Sequence: Synthetic oligonucleotide
aaccaguucugcaacaccc

SEQ ID NO: 1360979 - RNA, 19 nt, Artificial Sequence
  Description of Artificial Sequence: Synthetic oligonucleotide
uguaaaucacaucuccagc

SEQ ID NO: 1360980 - RNA, 19 nt, Artificial Sequence
  Description of Artificial Sequence: Synthetic oligonucleotide
aguuuugagcccuaugauc

SEQ ID NO: 1360981 - RNA, 19 nt, Artificial Sequence
  Description of Artificial Sequence: Synthetic oligonucleotide
aguaagcucugucaccucc

SEQ ID NO: 1360982 - RNA, 19 nt, Artificial Sequence
  Description of Artificial Sequence: Synthetic oligonucleotide
aguuuugccauaaccaccc

SEQ ID NO: 1360983 - RNA, 19 nt, Artificial Sequence
  Description of Artificial Sequence: Synthetic oligonucleotide
uuauccguagcccaauggc

SEQ ID NO: 1360984 - RNA, 19 nt, Artificial Sequence
  Description of Artificial Sequence: Synthetic oligonucleotide
ucgauauccagcaugugga

SEQ ID NO: 1360985 - RNA, 19 nt, Artificial Sequence
  Description of Artificial Sequence: Synthetic oligonucleotide
aaagcacucgauauccagc

SEQ ID NO: 1360986 - RNA, 19 nt, Artificial Sequence
  Description of Artificial Sequence: Synthetic oligonucleotide
uauacuucacuacccacca

SEQ ID NO: 1360987 - RNA, 19 nt, Artificial Sequence
  Description of Artificial Sequence: Synthetic oligonucleotide
ugaguauacuucacuaccc

SEQ ID NO: 1360988 - RNA, 19 nt, Artificial Sequence
  Description of Artificial Sequence: Synthetic oligonucleotide
aguugccucgguuggaugc

SEQ ID NO: 1360989 - RNA, 19 nt, Artificial Sequence
  Description of Artificial Sequence: Synthetic oligonucleotide
aguauacuucacuacccac

SEQ ID NO: 1360990 - RNA, 19 nt, Artificial Sequence
  Description of Artificial Sequence: Synthetic oligonucleotide
gagcccuaugaucacaugg

SEQ ID NO: 1360991 - RNA, 19 nt, Artificial Sequence
  Description of Artificial Sequence: Synthetic oligonucleotide
ugauuaauucuacuaugac

SEQ ID NO: 1360992 - RNA, 19 nt, Artificial Sequence
  Description of Artificial Sequence: Synthetic oligonucleotide
uaaagcacucgauauccag

SEQ ID NO: 1360993 - RNA, 19 nt, Artificial Sequence
  Description of Artificial Sequence: Synthetic oligonucleotide
gauuaauucuacuaugacu

SEQ ID NO: 1360994 - RNA, 19 nt, Artificial Sequence
  Description of Artificial Sequence: Synthetic oligonucleotide
guacucuuccgcuucaagg

SEQ ID NO: 1360995 - RNA, 19 nt, Artificial Sequence
  Description of Artificial Sequence: Synthetic oligonucleotide
ucucaguugaguauacuuc

SEQ ID NO: 1360996 - RNA, 19 nt, Artificial Sequence
  Description of Artificial Sequence: Synthetic oligonucleotide
ugagcaauagccagagcca

SEQ ID NO: 1360997 - RNA, 19 nt, Artificial Sequence
  Description of Artificial Sequence: Synthetic oligonucleotide
cuacuaugacuccacaugc

SEQ ID NO: 1360998 - RNA, 19 nt, Artificial Sequence
  Description of Artificial Sequence: Synthetic oligonucleotide
uuugacgagcguuuggaga

SEQ ID NO: 1360999 - RNA, 19 nt, Artificial Sequence
  Description of Artificial Sequence: Synthetic oligonucleotide
aagcacucgauauccagca

SEQ ID NO: 1361000 - RNA, 19 nt, Artificial Sequence
  Description of Artificial Sequence: Synthetic oligonucleotide
acggaguaagcucugucac

SEQ ID NO: 1361001 - RNA, 19 nt, Artificial Sequence
  Description of Artificial Sequence: Synthetic oligonucleotide
gaugaucaucacccgaucc

SEQ ID NO: 1361002 - RNA, 19 nt, Artificial Sequence
  Description of Artificial Sequence: Synthetic oligonucleotide
uauccguagcccaauggcc

SEQ ID NO: 1361003 - RNA, 19 nt, Artificial Sequence
  Description of Artificial Sequence: Synthetic oligonucleotide
cucccuuuggcaaagggac

SEQ ID NO: 1361004 - RNA, 19 nt, Artificial Sequence
  Description of Artificial Sequence: Synthetic oligonucleotide
uacucuuccgcuucaaggu

SEQ ID NO: 1361005 - RNA, 19 nt, Artificial Sequence
  Description of Artificial Sequence: Synthetic oligonucleotide
ugcaaagcacgcuugacuc

SEQ ID NO: 1361006 - RNA, 19 nt, Artificial Sequence
  Description of Artificial Sequence: Synthetic oligonucleotide
agaaucuuggcagaggacu

SEQ ID NO: 1361007 - RNA, 19 nt, Artificial Sequence
  Description of Artificial Sequence: Synthetic oligonucleotide
gguguauacagcauggucc

SEQ ID NO: 1361008 - RNA, 19 nt, Artificial Sequence
  Description of Artificial Sequence: Synthetic oligonucleotide
uuuacugcccagcuccuga

SEQ ID NO: 1361009 - RNA, 19 nt, Artificial Sequence
  Description of Artificial Sequence: Synthetic oligonucleotide
agguaaagcacucgauauc

SEQ ID NO: 1361010 - RNA, 19 nt, Artificial Sequence
  Description of Artificial Sequence: Synthetic oligonucleotide
agcacgcuugacucaaggc

SEQ ID NO: 1361011 - RNA, 19 nt, Artificial Sequence
  Description of Artificial Sequence: Synthetic oligonucleotide
guccugaugaucaucaccc

SEQ ID NO: 1361012 - RNA, 19 nt, Artificial Sequence
  Description of Artificial Sequence: Synthetic oligonucleotide
gguucucugucucacacgg

SEQ ID NO: 1361013 - RNA, 19 nt, Artificial Sequence
  Description of Artificial Sequence: Synthetic oligonucleotide
guuuugagcccuaugauca

SEQ ID NO: 1361014 - RNA, 19 nt, Artificial Sequence
  Description of Artificial Sequence: Synthetic oligonucleotide
ucgucgacaaagaguaccc

SEQ ID NO: 1361015 - RNA, 19 nt, Artificial Sequence
  Description of Artificial Sequence: Synthetic oligonucleotide
uucauuuugacgagcguuu

SEQ ID NO: 1361016 - RNA, 19 nt, Artificial Sequence
  Description of Artificial Sequence: Synthetic oligonucleotide
guugaguauacuucacuac

SEQ ID NO: 1361017 - RNA, 19 nt, Artificial Sequence
  Description of Artificial Sequence: Synthetic oligonucleotide
aguugaguauacuucacua

SEQ ID NO: 1361018 - RNA, 19 nt, Artificial Sequence
  Description of Artificial Sequence: Synthetic oligonucleotide
cacgcuugacucaaggccc

SEQ ID NO: 1361019 - RNA, 19 nt, Artificial Sequence
  Description of Artificial Sequence: Synthetic oligonucleotide
ucacuacccaccaucgggc

SEQ ID NO: 1361020 - RNA, 19 nt, Artificial Sequence
  Description of Artificial Sequence: Synthetic oligonucleotide
guauacuucacuacccacc

SEQ ID NO: 1361021 - RNA, 19 nt, Artificial Sequence
  Description of Artificial Sequence: Synthetic oligonucleotide
uggacaggauaucuugccc

SEQ ID NO: 1361022 - RNA, 19 nt, Artificial Sequence
  Description of Artificial Sequence: Synthetic oligonucleotide
agcccuaugaucacauggc

SEQ ID NO: 1361023 - RNA, 19 nt, Artificial Sequence
  Description of Artificial Sequence: Synthetic oligonucleotide
gguaaagcacucgauaucc

SEQ ID NO: 1361024 - RNA, 19 nt, Artificial Sequence
  Description of Artificial Sequence: Synthetic oligonucleotide
uuuugacgagcguuuggag

SEQ ID NO: 1361025 - RNA, 19 nt, Artificial Sequence
  Description of Artificial Sequence: Synthetic oligonucleotide
ugcacaucucccuuuggca

SEQ ID NO: 1361026 - RNA, 19 nt, Artificial Sequence
  Description of Artificial Sequence: Synthetic oligonucleotide
uccgcuucaaggucaaacu

SEQ ID NO: 1361027 - RNA, 19 nt, Artificial Sequence
  Description of Artificial Sequence: Synthetic oligonucleotide
ucuccuuuauccguagccc

SEQ ID NO: 1361028 - RNA, 19 nt, Artificial Sequence
  Description of Artificial Sequence: Synthetic oligonucleotide
uuuggcaaagggacguacu

SEQ ID NO: 1361029 - RNA, 19 nt, Artificial Sequence
  Description of Artificial Sequence: Synthetic oligonucleotide
ugguguauacagcaugguc

SEQ ID NO: 1361030 - RNA, 19 nt, Artificial Sequence
  Description of Artificial Sequence: Synthetic oligonucleotide
agcugcacagaauaccuca

SEQ ID NO: 1361031 - RNA, 19 nt, Artificial Sequence
  Description of Artificial Sequence: Synthetic oligonucleotide
caucacccgauccagcagg

SEQ ID NO: 1361032 - RNA, 19 nt, Artificial Sequence
  Description of Artificial Sequence: Synthetic oligonucleotide
acacaguugccucgguugg

SEQ ID NO: 1361033 - RNA, 19 nt, Artificial Sequence
  Description of Artificial Sequence: Synthetic oligonucleotide
ucaccuccccuucauaaac

SEQ ID NO: 1361034 - RNA, 19 nt, Artificial Sequence
  Description of Artificial Sequence: Synthetic oligonucleotide
ucgguuggaugcaaagaug

SEQ ID NO: 1361035 - RNA, 19 nt, Artificial Sequence
  Description of Artificial Sequence: Synthetic oligonucleotide
aauaccucaguguggucuu

SEQ ID NO: 1361036 - RNA, 19 nt, Artificial Sequence
  Description of Artificial Sequence: Synthetic oligonucleotide
caaggucacauccuguaug

SEQ ID NO: 1361037 - RNA, 19 nt, Artificial Sequence
  Description of Artificial Sequence: Synthetic oligonucleotide
auccguagcccaauggccc

SEQ ID NO: 1361038 - RNA, 19 nt, Artificial Sequence
  Description of Artificial Sequence: Synthetic oligonucleotide
auuuugacgagcguuugga

SEQ ID NO: 1361039 - RNA, 19 nt, Artificial Sequence
  Description of Artificial Sequence: Synthetic oligonucleotide
uggaagauuccagggcucg

SEQ ID NO: 1361040 - RNA, 19 nt, Artificial Sequence
  Description of Artificial Sequence: Synthetic oligonucleotide
cucgucgacaaagaguacc

SEQ ID NO: 1361041 - RNA, 19 nt, Artificial Sequence
  Description of Artificial Sequence: Synthetic oligonucleotide
uuguugaucuccccucgca

SEQ ID NO: 1361042 - RNA, 19 nt, Artificial Sequence
  Description of Artificial Sequence: Synthetic oligonucleotide
uggcugauaguuuugccau

SEQ ID NO: 1361043 - RNA, 19 nt, Artificial Sequence
  Description of Artificial Sequence: Synthetic oligonucleotide
uuggcaaagggacguacuc

SEQ ID NO: 1361044 - RNA, 19 nt, Artificial Sequence
  Description of Artificial Sequence: Synthetic oligonucleotide
ucccuuuggcaaagggacg

SEQ ID NO: 1361045 - RNA, 19 nt, Artificial Sequence
  Description of Artificial Sequence: Synthetic oligonucleotide
agguagguaaagcacucga

SEQ ID NO: 1361046 - RNA, 19 nt, Artificial Sequence
  Description of Artificial Sequence: Synthetic oligonucleotide
gaaccaguucugcaacacc

SEQ ID NO: 1361047 - RNA, 19 nt, Artificial Sequence
  Description of Artificial Sequence: Synthetic oligonucleotide
uucuacuaugacuccacau

SEQ ID NO: 1361048 - RNA, 19 nt, Artificial Sequence
  Description of Artificial Sequence: Synthetic oligonucleotide
ugggaagcgaugcgcugcg

SEQ ID NO: 1361049 - RNA, 19 nt, Artificial Sequence
  Description of Artificial Sequence: Synthetic oligonucleotide
ggcgauggaagauuccagg

SEQ ID NO: 1361050 - RNA, 19 nt, Artificial Sequence
  Description of Artificial Sequence: Synthetic oligonucleotide
uccugagcaauagccagag

SEQ ID NO: 1361051 - RNA, 19 nt, Artificial Sequence
  Description of Artificial Sequence: Synthetic oligonucleotide
ugguuaagcgccuccucgc

SEQ ID NO: 1361052 - RNA, 19 nt, Artificial Sequence
  Description of Artificial Sequence: Synthetic oligonucleotide
ucaucacccgauccagcag

SEQ ID NO: 1361053 - RNA, 19 nt, Artificial Sequence
  Description of Artificial Sequence: Synthetic oligonucleotide
uuuugccauaaccacccau

SEQ ID NO: 1361054 - RNA, 19 nt, Artificial Sequence
  Description of Artificial Sequence: Synthetic oligonucleotide
ugucucacacggaguaagc

SEQ ID NO: 1361055 - RNA, 19 nt, Artificial Sequence
  Description of Artificial Sequence: Synthetic oligonucleotide
agaggacuuggcaucauag

SEQ ID NO: 1361056 - RNA, 19 nt, Artificial Sequence
  Description of Artificial Sequence: Synthetic oligonucleotide
uccugaugaucaucacccg

SEQ ID NO: 1361057 - RNA, 19 nt, Artificial Sequence
  Description of Artificial Sequence: Synthetic oligonucleotide
ucuucauuuugacgagcgu

SEQ ID NO: 1361058 - RNA, 19 nt, Artificial Sequence
  Description of Artificial Sequence: Synthetic oligonucleotide
ugcaaggucacauccugua

SEQ ID NO: 1361059 - RNA, 19 nt, Artificial Sequence
  Description of Artificial Sequence: Synthetic oligonucleotide
uuggagacacaaccggcgu

SEQ ID NO: 1361060 - RNA, 19 nt, Artificial Sequence
  Description of Artificial Sequence: Synthetic oligonucleotide
acacggaguaagcucuguc

SEQ ID NO: 1361061 - RNA, 19 nt, Artificial Sequence
  Description of Artificial Sequence: Synthetic oligonucleotide
cauggcugauaguuuugcc

SEQ ID NO: 1361062 - RNA, 19 nt, Artificial Sequence
  Description of Artificial Sequence: Synthetic oligonucleotide
ugaucucaguugaguauac

SEQ ID NO: 1361063 - RNA, 19 nt, Artificial Sequence
  Description of Artificial Sequence: Synthetic oligonucleotide
aaacucuguggcauaggug

SEQ ID NO: 1361064 - RNA, 19 nt, Artificial Sequence
  Description of Artificial Sequence: Synthetic oligonucleotide
uuccgcuucaaggucaaac

SEQ ID NO: 1361065 - RNA, 19 nt, Artificial Sequence
  Description of Artificial Sequence: Synthetic oligonucleotide
guacuuguccugcugguca

SEQ ID NO: 1361066 - RNA, 19 nt, Artificial Sequence
  Description of Artificial Sequence: Synthetic oligonucleotide
caucaacuggcccaucaug

SEQ ID NO: 1361067 - RNA, 19 nt, Artificial Sequence
  Description of Artificial Sequence: Synthetic oligonucleotide
gcacgcuugacucaaggcc

SEQ ID NO: 1361068 - RNA, 19 nt, Artificial Sequence
  Description of Artificial Sequence: Synthetic oligonucleotide
auagaagaguucgcugauc

SEQ ID NO: 1361069 - RNA, 19 nt, Artificial Sequence
  Description of Artificial Sequence: Synthetic oligonucleotide
ugaugaucaucacccgauc

SEQ ID NO: 1361070 - RNA, 19 nt, Artificial Sequence
  Description of Artificial Sequence: Synthetic oligonucleotide
gaagccgcuugcuuggcca

SEQ ID NO: 1361071 - RNA, 19 nt, Artificial Sequence
  Description of Artificial Sequence: Synthetic oligonucleotide
gucgacaaagaguacccca

SEQ ID NO: 1361072 - RNA, 19 nt, Artificial Sequence
  Description of Artificial Sequence: Synthetic oligonucleotide
acacaaccggcguggaaag

SEQ ID NO: 1361073 - RNA, 19 nt, Artificial Sequence
  Description of Artificial Sequence: Synthetic oligonucleotide
accucgucgacaaagagua

SEQ ID NO: 1361074 - RNA, 19 nt, Artificial Sequence
  Description of Artificial Sequence: Synthetic oligonucleotide
uagcccaauggcccugcgg

SEQ ID NO: 1361075 - RNA, 19 nt, Artificial Sequence
  Description of Artificial Sequence: Synthetic oligonucleotide
aguucgcugaucucuucca

SEQ ID NO: 1361076 - RNA, 19 nt, Artificial Sequence
  Description of Artificial Sequence: Synthetic oligonucleotide
gacacaaccggcguggaaa

SEQ ID NO: 1361077 - RNA, 19 nt, Artificial Sequence
  Description of Artificial Sequence: Synthetic oligonucleotide
acuguuugcuucaauguaa

SEQ ID NO: 1361078 - RNA, 19 nt, Artificial Sequence
  Description of Artificial Sequence: Synthetic oligonucleotide
gaucacauggcugauaguu

SEQ ID NO: 1361079 - RNA, 19 nt, Artificial Sequence
  Description of Artificial Sequence: Synthetic oligonucleotide
uuuugagcccuaugaucac

SEQ ID NO: 1361080 - RNA, 19 nt, Artificial Sequence
  Description of Artificial Sequence: Synthetic oligonucleotide
uucacguggcugugggaag

SEQ ID NO: 1361081 - RNA, 19 nt, Artificial Sequence
  Description of Artificial Sequence: Synthetic oligonucleotide
uuacugcccagcuccugag

SEQ ID NO: 1361082 - RNA, 19 nt, Artificial Sequence
  Description of Artificial Sequence: Synthetic oligonucleotide
gguccugaugaucaucacc

SEQ ID NO: 1361083 - RNA, 19 nt, Artificial Sequence
  Description of Artificial Sequence: Synthetic oligonucleotide
ccuaugaucacauggcuga

SEQ ID NO: 1361084 - RNA, 19 nt, Artificial Sequence
  Description of Artificial Sequence: Synthetic oligonucleotide
auucuacuaugacuccaca

SEQ ID NO: 1361085 - RNA, 19 nt, Artificial Sequence
  Description of Artificial Sequence: Synthetic oligonucleotide
cuucacuacccaccaucgg

SEQ ID NO: 1361086 - RNA, 19 nt, Artificial Sequence
  Description of Artificial Sequence: Synthetic oligonucleotide
ggagacacaaccggcgugg

SEQ ID NO: 1361087 - RNA, 19 nt, Artificial Sequence
  Description of Artificial Sequence: Synthetic oligonucleotide
agaguucgcugaucucuuc

SEQ ID NO: 1361088 - RNA, 19 nt, Artificial Sequence
  Description of Artificial Sequence: Synthetic oligonucleotide
uuugagcccuaugaucaca

SEQ ID NO: 1361089 - RNA, 19 nt, Artificial Sequence
  Description of Artificial Sequence: Synthetic oligonucleotide
cugucucacacggaguaag

SEQ ID NO: 1361090 - RNA, 19 nt, Artificial Sequence
  Description of Artificial Sequence: Synthetic oligonucleotide
ggaaagguaggaacugcgg

SEQ ID NO: 1361091 - RNA, 19 nt, Artificial Sequence
  Description of Artificial Sequence: Synthetic oligonucleotide
uugaucuccccucgcaguu

SEQ ID NO: 1361092 - RNA, 19 nt, Artificial Sequence
  Description of Artificial Sequence: Synthetic oligonucleotide
agggacguacucuuccgcu

SEQ ID NO: 1361093 - RNA, 19 nt, Artificial Sequence
  Description of Artificial Sequence: Synthetic oligonucleotide
ucucugucucacacggagu

SEQ ID NO: 1361094 - RNA, 19 nt, Artificial Sequence
  Description of Artificial Sequence: Synthetic oligonucleotide
gaugcgcugcgucuucgug

SEQ ID NO: 1361095 - RNA, 19 nt, Artificial Sequence
  Description of Artificial Sequence: Synthetic oligonucleotide
cacggaguaagcucuguca

SEQ ID NO: 1361096 - RNA, 19 nt, Artificial Sequence
  Description of Artificial Sequence: Synthetic oligonucleotide
aagccgcuugcuuggccag

SEQ ID NO: 1361097 - RNA, 19 nt, Artificial Sequence
  Description of Artificial Sequence: Synthetic oligonucleotide
uauacagcaugguccugau

SEQ ID NO: 1361098 - RNA, 19 nt, Artificial Sequence
  Description of Artificial Sequence: Synthetic oligonucleotide
uccccucgcaguuuaucug

SEQ ID NO: 1361099 - RNA, 19 nt, Artificial Sequence
  Description of Artificial Sequence: Synthetic oligonucleotide
cuuuauccguagcccaaug

SEQ ID NO: 1361100 - RNA, 19 nt, Artificial Sequence
  Description of Artificial Sequence: Synthetic oligonucleotide
acaaccggcguggaaaggu

SEQ ID NO: 1361101 - RNA, 19 nt, Artificial Sequence
  Description of Artificial Sequence: Synthetic oligonucleotide
ugcgcugcgucuucguggu

SEQ ID NO: 1361102 - RNA, 19 nt, Artificial Sequence
  Description of Artificial Sequence: Synthetic oligonucleotide
caauagccagagccaaggc

SEQ ID NO: 1361103 - RNA, 19 nt, Artificial Sequence
  Description of Artificial Sequence: Synthetic oligonucleotide
cacguccaggucaugcaag

SEQ ID NO: 1361104 - RNA, 19 nt, Artificial Sequence
  Description of Artificial Sequence: Synthetic oligonucleotide
caacaagacagcucuucca

SEQ ID NO: 1361105 - RNA, 19 nt, Artificial Sequence
  Description of Artificial Sequence: Synthetic oligonucleotide
caccaucgggcagaaaggg

SEQ ID NO: 1361106 - RNA, 19 nt, Artificial Sequence
  Description of Artificial Sequence: Synthetic oligonucleotide
ugccuugccucuucacagc

SEQ ID NO: 1361107 - RNA, 19 nt, Artificial Sequence
  Description of Artificial Sequence: Synthetic oligonucleotide
uggcaaagggacguacucu

SEQ ID NO: 1361108 - RNA, 19 nt, Artificial Sequence
  Description of Artificial Sequence: Synthetic oligonucleotide
guuaagcgccuccucgcug

SEQ ID NO: 1361109 - RNA, 19 nt, Artificial Sequence
  Description of Artificial Sequence: Synthetic oligonucleotide
ccaucgggcagaaagggac

SEQ ID NO: 1361110 - RNA, 19 nt, Artificial Sequence
  Description of Artificial Sequence: Synthetic oligonucleotide
ggaacugcggcacgccggg

SEQ ID NO: 1361111 - RNA, 19 nt, Artificial Sequence
  Description of Artificial Sequence: Synthetic oligonucleotide
aggccgcucucguccagcc

SEQ ID NO: 1361112 - RNA, 19 nt, Artificial Sequence
  Description of Artificial Sequence: Synthetic oligonucleotide
ucacacggaguaagcucug

SEQ ID NO: 1361113 - RNA, 19 nt, Artificial Sequence
  Description of Artificial Sequence: Synthetic oligonucleotide
ucggugccccugaugacac

SEQ ID NO: 1361114 - RNA, 19 nt, Artificial Sequence
  Description of Artificial Sequence: Synthetic oligonucleotide
ucuuccgcuucaaggucaa

SEQ ID NO: 1361115 - RNA, 19 nt, Artificial Sequence
  Description of Artificial Sequence: Synthetic oligonucleotide
ucucucgcguucuccuggc

SEQ ID NO: 1361116 - RNA, 19 nt, Artificial Sequence
  Description of Artificial Sequence: Synthetic oligonucleotide
agguaggaacugcggcacg

SEQ ID NO: 1361117 - RNA, 19 nt, Artificial Sequence
  Description of Artificial Sequence: Synthetic oligonucleotide
gaucaucacccgauccagc

SEQ ID NO: 1361118 - RNA, 19 nt, Artificial Sequence
  Description of Artificial Sequence: Synthetic oligonucleotide
ugagcccuaugaucacaug

SEQ ID NO: 1361119 - RNA, 19 nt, Artificial Sequence
  Description of Artificial Sequence: Synthetic oligonucleotide
ucgcucuuucugcaaacuu

SEQ ID NO: 1361120 - RNA, 19 nt, Artificial Sequence
  Description of Artificial Sequence: Synthetic oligonucleotide
cuccuuuauccguagccca

SEQ ID NO: 1361121 - RNA, 19 nt, Artificial Sequence
  Description of Artificial Sequence: Synthetic oligonucleotide
ugacacaguugccucgguu

SEQ ID NO: 1361122 - RNA, 19 nt, Artificial Sequence
  Description of Artificial Sequence: Synthetic oligonucleotide
aaccggcguggaaagguag

SEQ ID NO: 1361123 - RNA, 19 nt, Artificial Sequence
  Description of Artificial Sequence: Synthetic oligonucleotide
ggucaauguauuuguucac

SEQ ID NO: 1361124 - RNA, 19 nt, Artificial Sequence
  Description of Artificial Sequence: Synthetic oligonucleotide
gguccaaugggaugccgug

SEQ ID NO: 1361125 - RNA, 19 nt, Artificial Sequence
  Description of Artificial Sequence: Synthetic oligonucleotide
cugauaguuuugccauaac

SEQ ID NO: 1361126 - RNA, 19 nt, Artificial Sequence
  Description of Artificial Sequence: Synthetic oligonucleotide
uccguagcccaauggcccu

SEQ ID NO: 1361127 - RNA, 19 nt, Artificial Sequence
  Description of Artificial Sequence: Synthetic oligonucleotide
guucgcugaucucuuccac

SEQ ID NO: 1361128 - RNA, 19 nt, Artificial Sequence
  Description of Artificial Sequence: Synthetic oligonucleotide
caggugguuaagcgccucc

SEQ ID NO: 1361129 - RNA, 19 nt, Artificial Sequence
  Description of Artificial Sequence: Synthetic oligonucleotide
aagaguucgcugaucucuu

SEQ ID NO: 1361130 - RNA, 19 nt, Artificial Sequence
  Description of Artificial Sequence: Synthetic oligonucleotide
gcguuuggagacacaaccg

SEQ ID NO: 1361131 - RNA, 19 nt, Artificial Sequence
  Description of Artificial Sequence: Synthetic oligonucleotide
agcaauagccagagccaag

SEQ ID NO: 1361132 - RNA, 19 nt, Artificial Sequence
  Description of Artificial Sequence: Synthetic oligonucleotide
cucugucucacacggagua

SEQ ID NO: 1361133 - RNA, 19 nt, Artificial Sequence
  Description of Artificial Sequence: Synthetic oligonucleotide
cugaugaucaucacccgau

SEQ ID NO: 1361134 - RNA, 19 nt, Artificial Sequence
  Description of Artificial Sequence: Synthetic oligonucleotide
ccuuguugaucuccccucg

SEQ ID NO: 1361135 - RNA, 19 nt, Artificial Sequence
  Description of Artificial Sequence: Synthetic oligonucleotide
uggaugcaaagaugacaau

SEQ ID NO: 1361136 - RNA, 19 nt, Artificial Sequence
  Description of Artificial Sequence: Synthetic oligonucleotide
aggcccugccaacaagaca

SEQ ID NO: 1361137 - RNA, 19 nt, Artificial Sequence
  Description of Artificial Sequence: Synthetic oligonucleotide
gagcaauagccagagccaa

SEQ ID NO: 1361138 - RNA, 19 nt, Artificial Sequence
  Description of Artificial Sequence: Synthetic oligonucleotide
cccuaugaucacauggcug

SEQ ID NO: 1361139 - RNA, 19 nt, Artificial Sequence
  Description of Artificial Sequence: Synthetic oligonucleotide
cucgguuggaugcaaagau

SEQ ID NO: 1361140 - RNA, 19 nt, Artificial Sequence
  Description of Artificial Sequence: Synthetic oligonucleotide
gaugccguguggagaggug

SEQ ID NO: 1361141 - RNA, 19 nt, Artificial Sequence
  Description of Artificial Sequence: Synthetic oligonucleotide
accggcguggaaagguagg

SEQ ID NO: 1361142 - RNA, 19 nt, Artificial Sequence
  Description of Artificial Sequence: Synthetic oligonucleotide
ucugucucacacggaguaa

SEQ ID NO: 1361143 - RNA, 19 nt, Artificial Sequence
  Description of Artificial Sequence: Synthetic oligonucleotide
guaggaacugcggcacgcc

SEQ ID NO: 1361144 - RNA, 19 nt, Artificial Sequence
  Description of Artificial Sequence: Synthetic oligonucleotide
ggugccccugaugacacag

SEQ ID NO: 1361145 - RNA, 19 nt, Artificial Sequence
  Description of Artificial Sequence: Synthetic oligonucleotide
acacugcaaagcacgcuug

SEQ ID NO: 1361146 - RNA, 19 nt, Artificial Sequence
  Description of Artificial Sequence: Synthetic oligonucleotide
gacgagcguuuggagacac

SEQ ID NO: 1361147 - RNA, 19 nt, Artificial Sequence
  Description of Artificial Sequence: Synthetic oligonucleotide
gagcguuuggagacacaac

SEQ ID NO: 1361148 - RNA, 19 nt, Artificial Sequence
  Description of Artificial Sequence: Synthetic oligonucleotide
gaagauuccagggcucggu

SEQ ID NO: 1361149 - RNA, 19 nt, Artificial Sequence
  Description of Artificial Sequence: Synthetic oligonucleotide
gaccucgucgacaaagagu

SEQ ID NO: 1361150 - RNA, 19 nt, Artificial Sequence
  Description of Artificial Sequence: Synthetic oligonucleotide
ggaaccaguucugcaacac

SEQ ID NO: 1361151 - RNA, 19 nt, Artificial Sequence
  Description of Artificial Sequence: Synthetic oligonucleotide
acaguugccucgguuggau

SEQ ID NO: 1361152 - RNA, 19 nt, Artificial Sequence
  Description of Artificial Sequence: Synthetic oligonucleotide
agguccaaugggaugccgu

SEQ ID NO: 1361153 - RNA, 19 nt, Artificial Sequence
  Description of Artificial Sequence: Synthetic oligonucleotide
accaguucugcaacacccu

SEQ ID NO: 1361154 - RNA, 19 nt, Artificial Sequence
  Description of Artificial Sequence: Synthetic oligonucleotide
gaucuccccucgcaguuua

SEQ ID NO: 1361155 - RNA, 19 nt, Artificial Sequence
  Description of Artificial Sequence: Synthetic oligonucleotide
cuucauuuugacgagcguu

SEQ ID NO: 1361156 - RNA, 19 nt, Artificial Sequence
  Description of Artificial Sequence: Synthetic oligonucleotide
ggcugugggaagcgaugcg

SEQ ID NO: 1361157 - RNA, 19 nt, Artificial Sequence
  Description of Artificial Sequence: Synthetic oligonucleotide
aggugguuaagcgccuccu

SEQ ID NO: 1361158 - RNA, 19 nt, Artificial Sequence
  Description of Artificial Sequence: Synthetic oligonucleotide
ggaagcgaugcgcugcguc

SEQ ID NO: 1361159 - RNA, 19 nt, Artificial Sequence
  Description of Artificial Sequence: Synthetic oligonucleotide
ggaagauuccagggcucgg

SEQ ID NO: 1361160 - RNA, 19 nt, Artificial Sequence
  Description of Artificial Sequence: Synthetic oligonucleotide
caaugggaugccgugugga

SEQ ID NO: 1361161 - RNA, 19 nt, Artificial Sequence
  Description of Artificial Sequence: Synthetic oligonucleotide
gcucggugcagguagguaa

SEQ ID NO: 1361162 - RNA, 19 nt, Artificial Sequence
  Description of Artificial Sequence: Synthetic oligonucleotide
ggugucacaccugccuugc

SEQ ID NO: 1361163 - RNA, 19 nt, Artificial Sequence
  Description of Artificial Sequence: Synthetic oligonucleotide
gaggcccugccaacaagac

SEQ ID NO: 1361164 - RNA, 19 nt, Artificial Sequence
  Description of Artificial Sequence: Synthetic oligonucleotide
ucuccccucgcaguuuauc

SEQ ID NO: 1361165 - RNA, 19 nt, Artificial Sequence
  Description of Artificial Sequence: Synthetic oligonucleotide
caguugaguauacuucacu

SEQ ID NO: 1361166 - RNA, 19 nt, Artificial Sequence
  Description of Artificial Sequence: Synthetic oligonucleotide
ugacgagcguuuggagaca

SEQ ID NO: 1361167 - RNA, 19 nt, Artificial Sequence
  Description of Artificial Sequence: Synthetic oligonucleotide
ggacguacucuuccgcuuc

SEQ ID NO: 1361168 - RNA, 19 nt, Artificial Sequence
  Description of Artificial Sequence: Synthetic oligonucleotide
uuggcaguuuugagcccua

SEQ ID NO: 1361169 - RNA, 19 nt, Artificial Sequence
  Description of Artificial Sequence: Synthetic oligonucleotide
cgguuggaugcaaagauga

SEQ ID NO: 1361170 - RNA, 19 nt, Artificial Sequence
  Description of Artificial Sequence: Synthetic oligonucleotide
gcuuuugauuaauucuacu

SEQ ID NO: 1361171 - RNA, 19 nt, Artificial Sequence
  Description of Artificial Sequence: Synthetic oligonucleotide
ccgcgcauuggccacgucc

SEQ ID NO: 1361172 - RNA, 19 nt, Artificial Sequence
  Description of Artificial Sequence: Synthetic oligonucleotide
aagcgaugcgcugcgucuu

SEQ ID NO: 1361173 - RNA, 19 nt, Artificial Sequence
  Description of Artificial Sequence: Synthetic oligonucleotide
cacaaccggcguggaaagg

SEQ ID NO: 1361174 - RNA, 19 nt, Artificial Sequence
  Description of Artificial Sequence: Synthetic oligonucleotide
gcugauaguuuugccauaa

SEQ ID NO: 1361175 - RNA, 19 nt, Artificial Sequence
  Description of Artificial Sequence: Synthetic oligonucleotide
cagguccaaugggaugccg

SEQ ID NO: 1361176 - RNA, 19 nt, Artificial Sequence
  Description of Artificial Sequence: Synthetic oligonucleotide
ggggcgauggaagauucca

SEQ ID NO: 1361177 - RNA, 19 nt, Artificial Sequence
  Description of Artificial Sequence: Synthetic oligonucleotide
guuuugccauaaccaccca

SEQ ID NO: 1361178 - RNA, 19 nt, Artificial Sequence
  Description of Artificial Sequence: Synthetic oligonucleotide
uguggaccucgucgacaaa

SEQ ID NO: 1361179 - RNA, 19 nt, Artificial Sequence
  Description of Artificial Sequence: Synthetic oligonucleotide
ccacgagcccugaagccgc

SEQ ID NO: 1361180 - RNA, 19 nt, Artificial Sequence
  Description of Artificial Sequence: Synthetic oligonucleotide
cucgcaguuuaucugugau

SEQ ID NO: 1361181 - RNA, 19 nt, Artificial Sequence
  Description of Artificial Sequence: Synthetic oligonucleotide
cgacaaagaguaccccagg

SEQ ID NO: 1361182 - RNA, 19 nt, Artificial Sequence
  Description of Artificial Sequence: Synthetic oligonucleotide
ccugaugaucaucacccga

SEQ ID NO: 1361183 - RNA, 19 nt, Artificial Sequence
  Description of Artificial Sequence: Synthetic oligonucleotide
cuccccucgcaguuuaucu

SEQ ID NO: 1361184 - RNA, 19 nt, Artificial Sequence
  Description of Artificial Sequence: Synthetic oligonucleotide
caguuuugagcccuaugau

SEQ ID NO: 1361185 - RNA, 19 nt, Artificial Sequence
  Description of Artificial Sequence: Synthetic oligonucleotide
gaucucaguugaguauacu

SEQ ID NO: 1361186 - RNA, 19 nt, Artificial Sequence
  Description of Artificial Sequence: Synthetic oligonucleotide
gggcgauggaagauuccag

SEQ ID NO: 1361187 - RNA, 19 nt, Artificial Sequence
  Description of Artificial Sequence: Synthetic oligonucleotide
auaccucaguguggucuug

SEQ ID NO: 1361188 - RNA, 19 nt, Artificial Sequence
  Description of Artificial Sequence: Synthetic oligonucleotide
gcagguagguaaagcacuc

SEQ ID NO: 1361189 - RNA, 19 nt, Artificial Sequence
  Description of Artificial Sequence: Synthetic oligonucleotide
cucucgcguucuccuggcc

SEQ ID NO: 1361190 - RNA, 19 nt, Artificial Sequence
  Description of Artificial Sequence: Synthetic oligonucleotide
cccaucauggacaggauau

SEQ ID NO: 1361191 - RNA, 19 nt, Artificial Sequence
  Description of Artificial Sequence: Synthetic oligonucleotide
gugucacaccugccuugcc

SEQ ID NO: 1361192 - RNA, 19 nt, Artificial Sequence
  Description of Artificial Sequence: Synthetic oligonucleotide
ccgcuucaaggucaaacuc

SEQ ID NO: 1361193 - RNA, 19 nt, Artificial Sequence
  Description of Artificial Sequence: Synthetic oligonucleotide
cagagccaaggccgucuug

SEQ ID NO: 1361194 - RNA, 19 nt, Artificial Sequence
  Description of Artificial Sequence: Synthetic oligonucleotide
aucacccgauccagcaggu

SEQ ID NO: 1361195 - RNA, 19 nt, Artificial Sequence
  Description of Artificial Sequence: Synthetic oligonucleotide
gucucacacggaguaagcu

SEQ ID NO: 1361196 - RNA, 19 nt, Artificial Sequence
  Description of Artificial Sequence: Synthetic oligonucleotide
ggcaaagggacguacucuu

SEQ ID NO: 1361197 - RNA, 19 nt, Artificial Sequence
  Description of Artificial Sequence: Synthetic oligonucleotide
cugaagccgcuugcuuggc

SEQ ID NO: 1361198 - RNA, 19 nt, Artificial Sequence
  Description of Artificial Sequence: Synthetic oligonucleotide
gcccacgagcccugaagcc

SEQ ID NO: 1361199 - RNA, 19 nt, Artificial Sequence
  Description of Artificial Sequence: Synthetic oligonucleotide
acgccgggcacccggguua

SEQ ID NO: 1361200 - RNA, 19 nt, Artificial Sequence
  Description of Artificial Sequence: Synthetic oligonucleotide
cgcuugcuuggccaggccg

SEQ ID NO: 1361201 - RNA, 19 nt, Artificial Sequence
  Description of Artificial Sequence: Synthetic oligonucleotide
acgcuugacucaaggcccu

SEQ ID NO: 1361202 - RNA, 19 nt, Artificial Sequence
  Description of Artificial Sequence: Synthetic oligonucleotide
agggcucggugcagguagg

SEQ ID NO: 1361203 - RNA, 19 nt, Artificial Sequence
  Description of Artificial Sequence: Synthetic oligonucleotide
gagaggugauguccucggu

SEQ ID NO: 1361204 - RNA, 19 nt, Artificial Sequence
  Description of Artificial Sequence: Synthetic oligonucleotide
ggcucggaucuuaaugauc

SEQ ID NO: 1361205 - RNA, 19 nt, Artificial Sequence
  Description of Artificial Sequence: Synthetic oligonucleotide
caggccgcucucguccagc

SEQ ID NO: 1361206 - RNA, 19 nt, Artificial Sequence
  Description of Artificial Sequence: Synthetic oligonucleotide
cagaggacuuggcaucaua

SEQ ID NO: 1361207 - RNA, 19 nt, Artificial Sequence
  Description of Artificial Sequence: Synthetic oligonucleotide
caucgggcagaaagggacu

SEQ ID NO: 1361208 - RNA, 19 nt, Artificial Sequence
  Description of Artificial Sequence: Synthetic oligonucleotide
cuugugcacaucucccuuu

SEQ ID NO: 1361209 - RNA, 19 nt, Artificial Sequence
  Description of Artificial Sequence: Synthetic oligonucleotide
cccguugaucuuugccagc

SEQ ID NO: 1361210 - RNA, 19 nt, Artificial Sequence
  Description of Artificial Sequence: Synthetic oligonucleotide
caaccggcguggaaaggua

SEQ ID NO: 1361211 - RNA, 19 nt, Artificial Sequence
  Description of Artificial Sequence: Synthetic oligonucleotide
ucgggcagaaagggacuuu

SEQ ID NO: 1361212 - RNA, 19 nt, Artificial Sequence
  Description of Artificial Sequence: Synthetic oligonucleotide
ccagcccaauguuacuuca

SEQ ID NO: 1361213 - RNA, 19 nt, Artificial Sequence
  Description of Artificial Sequence: Synthetic oligonucleotide
gguuaagcgccuccucgcu

SEQ ID NO: 1361214 - RNA, 19 nt, Artificial Sequence
  Description of Artificial Sequence: Synthetic oligonucleotide
ucacccgauccagcagguc

SEQ ID NO: 1361215 - RNA, 19 nt, Artificial Sequence
  Description of Artificial Sequence: Synthetic oligonucleotide
guucucugucucacacgga

SEQ ID NO: 1361216 - RNA, 19 nt, Artificial Sequence
  Description of Artificial Sequence: Synthetic oligonucleotide
caccuccccuucauaaacu

SEQ ID NO: 1361217 - RNA, 19 nt, Artificial Sequence
  Description of Artificial Sequence: Synthetic oligonucleotide
ccaucauggacaggauauc

SEQ ID NO: 1361218 - RNA, 19 nt, Artificial Sequence
  Description of Artificial Sequence: Synthetic oligonucleotide
gaacugcggcacgccgggc

SEQ ID NO: 1361219 - RNA, 19 nt, Artificial Sequence
  Description of Artificial Sequence: Synthetic oligonucleotide
aggccgcgcauuggccacg

SEQ ID NO: 1361220 - RNA, 19 nt, Artificial Sequence
  Description of Artificial Sequence: Synthetic oligonucleotide
cacaguugccucgguugga

SEQ ID NO: 1361221 - RNA, 19 nt, Artificial Sequence
  Description of Artificial Sequence: Synthetic oligonucleotide
cgcugcgucuucguggugc

SEQ ID NO: 1361222 - RNA, 19 nt, Artificial Sequence
  Description of Artificial Sequence: Synthetic oligonucleotide
acguacucuuccgcuucaa

SEQ ID NO: 1361223 - RNA, 19 nt, Artificial Sequence
  Description of Artificial Sequence: Synthetic oligonucleotide
ccguugaucuuugccagca

SEQ ID NO: 1361224 - RNA, 19 nt, Artificial Sequence
  Description of Artificial Sequence: Synthetic oligonucleotide
gcguggaaagguaggaacu

SEQ ID NO: 1361225 - RNA, 19 nt, Artificial Sequence
  Description of Artificial Sequence: Synthetic oligonucleotide
gcccuaugaucacauggcu

SEQ ID NO: 1361226 - RNA, 19 nt, Artificial Sequence
  Description of Artificial Sequence: Synthetic oligonucleotide
ucgcguucuccuggcccac

SEQ ID NO: 1361227 - RNA, 19 nt, Artificial Sequence
  Description of Artificial Sequence: Synthetic oligonucleotide
ggcugauaguuuugccaua

SEQ ID NO: 1361228 - RNA, 19 nt, Artificial Sequence
  Description of Artificial Sequence: Synthetic oligonucleotide
gcgaugcgcugcgucuucg

SEQ ID NO: 1361229 - RNA, 19 nt, Artificial Sequence
  Description of Artificial Sequence: Synthetic oligonucleotide
cccucgcaguuuaucugug

SEQ ID NO: 1361230 - RNA, 19 nt, Artificial Sequence
  Description of Artificial Sequence: Synthetic oligonucleotide
guccaaugggaugccgugu

SEQ ID NO: 1361231 - RNA, 19 nt, Artificial Sequence
  Description of Artificial Sequence: Synthetic oligonucleotide
ggucuguccucugggugca

SEQ ID NO: 1361232 - RNA, 19 nt, Artificial Sequence
  Description of Artificial Sequence: Synthetic oligonucleotide
cuggcccaucauggacagg

SEQ ID NO: 1361233 - RNA, 19 nt, Artificial Sequence
  Description of Artificial Sequence: Synthetic oligonucleotide
ccucgguuggaugcaaaga

SEQ ID NO: 1361234 - RNA, 19 nt, Artificial Sequence
  Description of Artificial Sequence: Synthetic oligonucleotide
cuuccgucugggcucggau

SEQ ID NO: 1361235 - RNA, 19 nt, Artificial Sequence
  Description of Artificial Sequence: Synthetic oligonucleotide
gccguguggagaggugaug

SEQ ID NO: 1361236 - RNA, 19 nt, Artificial Sequence
  Description of Artificial Sequence: Synthetic oligonucleotide
ccucgcaguuuaucuguga

SEQ ID NO: 1361237 - RNA, 19 nt, Artificial Sequence
  Description of Artificial Sequence: Synthetic oligonucleotide
cagcccaauguuacuucau

SEQ ID NO: 1361238 - RNA, 19 nt, Artificial Sequence
  Description of Artificial Sequence: Synthetic oligonucleotide
cucccagcccaauguuacu

SEQ ID NO: 1361239 - RNA, 19 nt, Artificial Sequence
  Description of Artificial Sequence: Synthetic oligonucleotide
gguguggggucuguccucu

SEQ ID NO: 1361240 - RNA, 19 nt, Artificial Sequence
  Description of Artificial Sequence: Synthetic oligonucleotide
gggacguacucuuccgcuu

SEQ ID NO: 1361241 - RNA, 19 nt, Artificial Sequence
  Description of Artificial Sequence: Synthetic oligonucleotide
ccacaugccucucucgcgu

SEQ ID NO: 1361242 - RNA, 19 nt, Artificial Sequence
  Description of Artificial Sequence: Synthetic oligonucleotide
gggcucggaucuuaaugau

SEQ ID NO: 1361243 - RNA, 19 nt, Artificial Sequence
  Description of Artificial Sequence: Synthetic oligonucleotide
ggaugccguguggagaggu

SEQ ID NO: 1361244 - RNA, 19 nt, Artificial Sequence
  Description of Artificial Sequence: Synthetic oligonucleotide
ccccucgcaguuuaucugu

SEQ ID NO: 1361245 - RNA, 19 nt, Artificial Sequence
  Description of Artificial Sequence: Synthetic oligonucleotide
gcugcgucuucguggugcu

SEQ ID NO: 1361246 - RNA, 19 nt, Artificial Sequence
  Description of Artificial Sequence: Synthetic oligonucleotide
ccaggaggcccugccaaca

SEQ ID NO: 1361247 - RNA, 19 nt, Artificial Sequence
  Description of Artificial Sequence: Synthetic oligonucleotide
cugcgucuucguggugcuc

SEQ ID NO: 1361248 - RNA, 19 nt, Artificial Sequence
  Description of Artificial Sequence: Synthetic oligonucleotide
ccgcuugcuuggccaggcc

SEQ ID NO: 1361249 - RNA, 19 nt, Artificial Sequence
  Description of Artificial Sequence: Synthetic oligonucleotide
cggcacgccgggcacccgg

SEQ ID NO: 1361250 - RNA, 19 nt, Artificial Sequence
  Description of Artificial Sequence: Synthetic oligonucleotide
gccccuucacguggcugug

SEQ ID NO: 1361251 - RNA, 19 nt, Artificial Sequence
  Description of Artificial Sequence: Synthetic oligonucleotide
acgagcccugaagccgcuu

SEQ ID NO: 1361252 - RNA, 19 nt, Artificial Sequence
  Description of Artificial Sequence: Synthetic oligonucleotide
cacaugccucucucgcguu

SEQ ID NO: 1361253 - RNA, 19 nt, Artificial Sequence
  Description of Artificial Sequence: Synthetic oligonucleotide
ggcucggugcagguaggua

SEQ ID NO: 1361254 - RNA, 19 nt, Artificial Sequence
  Description of Artificial Sequence: Synthetic oligonucleotide
ccaggccgcucucguccag

SEQ ID NO: 1361255 - RNA, 19 nt, Artificial Sequence
  Description of Artificial Sequence: Synthetic oligonucleotide
ccgggcacccggguuacca

SEQ ID NO: 1361256 - RNA, 19 nt, Artificial Sequence
  Description of Artificial Sequence: Synthetic oligonucleotide
cuuccgcuucaaggucaaa

SEQ ID NO: 1361257 - RNA, 19 nt, Artificial Sequence
  Description of Artificial Sequence: Synthetic oligonucleotide
ccguagcccaauggcccug

SEQ ID NO: 1361258 - RNA, 19 nt, Artificial Sequence
  Description of Artificial Sequence: Synthetic oligonucleotide
ccuuuauccguagcccaau

SEQ ID NO: 1361259 - RNA, 19 nt, Artificial Sequence
  Description of Artificial Sequence: Synthetic oligonucleotide
ccuuccgucugggcucgga

SEQ ID NO: 1361260 - RNA, 19 nt, Artificial Sequence
  Description of Artificial Sequence: Synthetic oligonucleotide
gcgcugcgucuucguggug

SEQ ID NO: 1361261 - RNA, 19 nt, Artificial Sequence
  Description of Artificial Sequence: Synthetic oligonucleotide
gggcucggugcagguaggu

SEQ ID NO: 1361262 - RNA, 19 nt, Artificial Sequence
  Description of Artificial Sequence: Synthetic oligonucleotide
gcgucuucguggugcucuu

SEQ ID NO: 1361263 - RNA, 19 nt, Artificial Sequence
  Description of Artificial Sequence: Synthetic oligonucleotide
cugcaacacccuggucaau

SEQ ID NO: 1361264 - RNA, 19 nt, Artificial Sequence
  Description of Artificial Sequence: Synthetic oligonucleotide
gccgcgcauuggccacguc

SEQ ID NO: 1361265 - RNA, 19 nt, Artificial Sequence
  Description of Artificial Sequence: Synthetic oligonucleotide
gggaagcgaugcgcugcgu

SEQ ID NO: 1361266 - RNA, 19 nt, Artificial Sequence
  Description of Artificial Sequence: Synthetic oligonucleotide
gccgggcacccggguuacc

SEQ ID NO: 1361267 - RNA, 19 nt, Artificial Sequence
  Description of Artificial Sequence: Synthetic oligonucleotide
cgaugcgcugcgucuucgu

SEQ ID NO: 1361268 - RNA, 19 nt, Artificial Sequence
  Description of Artificial Sequence: Synthetic oligonucleotide
gcacgccgggcacccgggu

SEQ ID NO: 1361269 - RNA, 19 nt, Artificial Sequence
  Description of Artificial Sequence: Synthetic oligonucleotide
ggccgcgcauuggccacgu

SEQ ID NO: 1361270 - RNA, 19 nt, Artificial Sequence
  Description of Artificial Sequence: Synthetic oligonucleotide
cggugccccugaugacaca

SEQ ID NO: 1361271 - RNA, 19 nt, Artificial Sequence
  Description of Artificial Sequence: Synthetic oligonucleotide
ccgucugggcucggaucuu

SEQ ID NO: 1361272 - RNA, 19 nt, Artificial Sequence
  Description of Artificial Sequence: Synthetic oligonucleotide
aaagacauuacucauguuc

SEQ ID NO: 1361273 - RNA, 19 nt, Artificial Sequence
  Description of Artificial Sequence: Synthetic oligonucleotide
gauaugaagaauuaauggg

SEQ ID NO: 1361274 - RNA, 19 nt, Artificial Sequence
  Description of Artificial Sequence: Synthetic oligonucleotide
aaugcaaauucucuguagg

SEQ ID NO: 1361275 - RNA, 19 nt, Artificial Sequence
  Description of Artificial Sequence: Synthetic oligonucleotide
uucaaaaucacauacucug

SEQ ID NO: 1361276 - RNA, 19 nt, Artificial Sequence
  Description of Artificial Sequence: Synthetic oligonucleotide
aauuucaaaccuuucagug

SEQ ID NO: 1361277 - RNA, 19 nt, Artificial Sequence
  Description of Artificial Sequence: Synthetic oligonucleotide
agaauuaaugggaagaugc

SEQ ID NO: 1361278 - RNA, 19 nt, Artificial Sequence
  Description of Artificial Sequence: Synthetic oligonucleotide
auaauguggaguuuacagc

SEQ ID NO: 1361279 - RNA, 19 nt, Artificial Sequence
  Description of Artificial Sequence: Synthetic oligonucleotide
ucaagugugacacugagau

SEQ ID NO: 1361280 - RNA, 19 nt, Artificial Sequence
  Description of Artificial Sequence: Synthetic oligonucleotide
uggacuaagacauuguccc

SEQ ID NO: 1361281 - RNA, 19 nt, Artificial Sequence
  Description of Artificial Sequence: Synthetic oligonucleotide
aagugugacacugagauca

SEQ ID NO: 1361282 - RNA, 19 nt, Artificial Sequence
  Description of Artificial Sequence: Synthetic oligonucleotide
uaauguggaguuuacagca

SEQ ID NO: 1361283 - RNA, 19 nt, Artificial Sequence
  Description of Artificial Sequence: Synthetic oligonucleotide
uuaaaacauguaauggccc

SEQ ID NO: 1361284 - RNA, 19 nt, Artificial Sequence
  Description of Artificial Sequence: Synthetic oligonucleotide
ugaagaauuaaugggaaga

SEQ ID NO: 1361285 - RNA, 19 nt, Artificial Sequence
  Description of Artificial Sequence: Synthetic oligonucleotide
auugguauccuugaugacg

SEQ ID NO: 1361286 - RNA, 19 nt, Artificial Sequence
  Description of Artificial Sequence: Synthetic oligonucleotide
aauuccgagucgcuuuggc

SEQ ID NO: 1361287 - RNA, 19 nt, Artificial Sequence
  Description of Artificial Sequence: Synthetic oligonucleotide
acauugguauccuugauga

SEQ ID NO: 1361288 - RNA, 19 nt, Artificial Sequence
  Description of Artificial Sequence: Synthetic oligonucleotide
aacuguggcauuaucuggc

SEQ ID NO: 1361289 - RNA, 19 nt, Artificial Sequence
  Description of Artificial Sequence: Synthetic oligonucleotide
gacauugucccucugugag

SEQ ID NO: 1361290 - RNA, 19 nt, Artificial Sequence
  Description of Artificial Sequence: Synthetic oligonucleotide
uuuggcaaacauuuuguca

SEQ ID NO: 1361291 - RNA, 19 nt, Artificial Sequence
  Description of Artificial Sequence: Synthetic oligonucleotide
acauacagcucgaugaugc

SEQ ID NO: 1361292 - RNA, 19 nt, Artificial Sequence
  Description of Artificial Sequence: Synthetic oligonucleotide
aagacauugucccucugug

SEQ ID NO: 1361293 - RNA, 19 nt, Artificial Sequence
  Description of Artificial Sequence: Synthetic oligonucleotide
acgaccuuuagcuugaccu

SEQ ID NO: 1361294 - RNA, 19 nt, Artificial Sequence
  Description of Artificial Sequence: Synthetic oligonucleotide
uuaaccgcucucccgaccg

SEQ ID NO: 1361295 - RNA, 19 nt, Artificial Sequence
  Description of Artificial Sequence: Synthetic oligonucleotide
aacaaaacgcugcacaauu

SEQ ID NO: 1361296 - RNA, 19 nt, Artificial Sequence
  Description of Artificial Sequence: Synthetic oligonucleotide
aggacgcucacccuguacc

SEQ ID NO: 1361297 - RNA, 19 nt, Artificial Sequence
  Description of Artificial Sequence: Synthetic oligonucleotide
uagagugauaugaagaauu

SEQ ID NO: 1361298 - RNA, 19 nt, Artificial Sequence
  Description of Artificial Sequence: Synthetic oligonucleotide
uggaguuuacagcaagucc

SEQ ID NO: 1361299 - RNA, 19 nt, Artificial Sequence
  Description of Artificial Sequence: Synthetic oligonucleotide
uuucaggaaauuccgaguc

SEQ ID NO: 1361300 - RNA, 19 nt, Artificial Sequence
  Description of Artificial Sequence: Synthetic oligonucleotide
gaggagacagaauucaaac

SEQ ID NO: 1361301 - RNA, 19 nt, Artificial Sequence
  Description of Artificial Sequence: Synthetic oligonucleotide
cuugaugacggucccaucc

SEQ ID NO: 1361302 - RNA, 19 nt, Artificial Sequence
  Description of Artificial Sequence: Synthetic oligonucleotide
ugugagaacgucucccagg

SEQ ID NO: 1361303 - RNA, 19 nt, Artificial Sequence
  Description of Artificial Sequence: Synthetic oligonucleotide
agcaguugcagcuuaucag

SEQ ID NO: 1361304 - RNA, 19 nt, Artificial Sequence
  Description of Artificial Sequence: Synthetic oligonucleotide
uuucacauacagcucgaug

SEQ ID NO: 1361305 - RNA, 19 nt, Artificial Sequence
  Description of Artificial Sequence: Synthetic oligonucleotide
ugaccuuccccaccaaccg

SEQ ID NO: 1361306 - RNA, 19 nt, Artificial Sequence
  Description of Artificial Sequence: Synthetic oligonucleotide
cuggacuaagacauugucc

SEQ ID NO: 1361307 - RNA, 19 nt, Artificial Sequence
  Description of Artificial Sequence: Synthetic oligonucleotide
uauuucacgaagucugacu

SEQ ID NO: 1361308 - RNA, 19 nt, Artificial Sequence
  Description of Artificial Sequence: Synthetic oligonucleotide
ucauucaagugugacacug

SEQ ID NO: 1361309 - RNA, 19 nt, Artificial Sequence
  Description of Artificial Sequence: Synthetic oligonucleotide
auucaagugugacacugag

SEQ ID NO: 1361310 - RNA, 19 nt, Artificial Sequence
  Description of Artificial Sequence: Synthetic oligonucleotide
ucgaugaugccacaggcaa

SEQ ID NO: 1361311 - RNA, 19 nt, Artificial Sequence
  Description of Artificial Sequence: Synthetic oligonucleotide
cauccuguuucacauacag

SEQ ID NO: 1361312 - RNA, 19 nt, Artificial Sequence
  Description of Artificial Sequence: Synthetic oligonucleotide
agaugcaagaguucuucag

SEQ ID NO: 1361313 - RNA, 19 nt, Artificial Sequence
  Description of Artificial Sequence: Synthetic oligonucleotide
aagaauuaaugggaagaug

SEQ ID NO: 1361314 - RNA, 19 nt, Artificial Sequence
  Description of Artificial Sequence: Synthetic oligonucleotide
acugagaucagguccccuc

SEQ ID NO: 1361315 - RNA, 19 nt, Artificial Sequence
  Description of Artificial Sequence: Synthetic oligonucleotide
aaccacuggacuaagacau

SEQ ID NO: 1361316 - RNA, 19 nt, Artificial Sequence
  Description of Artificial Sequence: Synthetic oligonucleotide
aauuaaugggaagaugcaa

SEQ ID NO: 1361317 - RNA, 19 nt, Artificial Sequence
  Description of Artificial Sequence: Synthetic oligonucleotide
agugauaugaagaauuaau

SEQ ID NO: 1361318 - RNA, 19 nt, Artificial Sequence
  Description of Artificial Sequence: Synthetic oligonucleotide
uggauccccaccaagcccc

SEQ ID NO: 1361319 - RNA, 19 nt, Artificial Sequence
  Description of Artificial Sequence: Synthetic oligonucleotide
agagcgacccuccaccacg

SEQ ID NO: 1361320 - RNA, 19 nt, Artificial Sequence
  Description of Artificial Sequence: Synthetic oligonucleotide
gugagaacgucucccaggg

SEQ ID NO: 1361321 - RNA, 19 nt, Artificial Sequence
  Description of Artificial Sequence: Synthetic oligonucleotide
guugcagcuuaucagaguc

SEQ ID NO: 1361322 - RNA, 19 nt, Artificial Sequence
  Description of Artificial Sequence: Synthetic oligonucleotide
ucuagcaccugcuguagca

SEQ ID NO: 1361323 - RNA, 19 nt, Artificial Sequence
  Description of Artificial Sequence: Synthetic oligonucleotide
acuuagagugauaugaaga

SEQ ID NO: 1361324 - RNA, 19 nt, Artificial Sequence
  Description of Artificial Sequence: Synthetic oligonucleotide
cauccugcgggccaggacg

SEQ ID NO: 1361325 - RNA, 19 nt, Artificial Sequence
  Description of Artificial Sequence: Synthetic oligonucleotide
agagucauucaagugugac

SEQ ID NO: 1361326 - RNA, 19 nt, Artificial Sequence
  Description of Artificial Sequence: Synthetic oligonucleotide
uugucccucugugagaacg

SEQ ID NO: 1361327 - RNA, 19 nt, Artificial Sequence
  Description of Artificial Sequence: Synthetic oligonucleotide
guuguccagacuuaaccgc

SEQ ID NO: 1361328 - RNA, 19 nt, Artificial Sequence
  Description of Artificial Sequence: Synthetic oligonucleotide
aaccucuuucaggaaauuc

SEQ ID NO: 1361329 - RNA, 19 nt, Artificial Sequence
  Description of Artificial Sequence: Synthetic oligonucleotide
aaccguccccgacugcucc

SEQ ID NO: 1361330 - RNA, 19 nt, Artificial Sequence
  Description of Artificial Sequence: Synthetic oligonucleotide
cuuagagugauaugaagaa

SEQ ID NO: 1361331 - RNA, 19 nt, Artificial Sequence
  Description of Artificial Sequence: Synthetic oligonucleotide
gguuguccagacuuaaccg

SEQ ID NO: 1361332 - RNA, 19 nt, Artificial Sequence
  Description of Artificial Sequence: Synthetic oligonucleotide
acauggauaauguggaguu

SEQ ID NO: 1361333 - RNA, 19 nt, Artificial Sequence
  Description of Artificial Sequence: Synthetic oligonucleotide
uuccaaacgaagagcgacc

SEQ ID NO: 1361334 - RNA, 19 nt, Artificial Sequence
  Description of Artificial Sequence: Synthetic oligonucleotide
agacuuaaccgcucucccg

SEQ ID NO: 1361335 - RNA, 19 nt, Artificial Sequence
  Description of Artificial Sequence: Synthetic oligonucleotide
gaaauuccgagucgcuuug

SEQ ID NO: 1361336 - RNA, 19 nt, Artificial Sequence
  Description of Artificial Sequence: Synthetic oligonucleotide
uccagcgucaaccucuuuc

SEQ ID NO: 1361337 - RNA, 19 nt, Artificial Sequence
  Description of Artificial Sequence: Synthetic oligonucleotide
ucccaagacaaugucagca

SEQ ID NO: 1361338 - RNA, 19 nt, Artificial Sequence
  Description of Artificial Sequence: Synthetic oligonucleotide
uccaaguagacagagucaa

SEQ ID NO: 1361339 - RNA, 19 nt, Artificial Sequence
  Description of Artificial Sequence: Synthetic oligonucleotide
guauccuugaugacggucc

SEQ ID NO: 1361340 - RNA, 19 nt, Artificial Sequence
  Description of Artificial Sequence: Synthetic oligonucleotide
aagaugcaagaguucuuca

SEQ ID NO: 1361341 - RNA, 19 nt, Artificial Sequence
  Description of Artificial Sequence: Synthetic oligonucleotide
uccaucgccaagauagccu

SEQ ID NO: 1361342 - RNA, 19 nt, Artificial Sequence
  Description of Artificial Sequence: Synthetic oligonucleotide
aaaacgcugcacaauuuca

SEQ ID NO: 1361343 - RNA, 19 nt, Artificial Sequence
  Description of Artificial Sequence: Synthetic oligonucleotide
aagagcgacccuccaccac

SEQ ID NO: 1361344 - RNA, 19 nt, Artificial Sequence
  Description of Artificial Sequence: Synthetic oligonucleotide
uuucacgaagucugacucc

SEQ ID NO: 1361345 - RNA, 19 nt, Artificial Sequence
  Description of Artificial Sequence: Synthetic oligonucleotide
uguggaguuuacagcaagu

SEQ ID NO: 1361346 - RNA, 19 nt, Artificial Sequence
  Description of Artificial Sequence: Synthetic oligonucleotide
auauuucacgaagucugac

SEQ ID NO: 1361347 - RNA, 19 nt, Artificial Sequence
  Description of Artificial Sequence: Synthetic oligonucleotide
uaauggcccauccugggaa

SEQ ID NO: 1361348 - RNA, 19 nt, Artificial Sequence
  Description of Artificial Sequence: Synthetic oligonucleotide
uuguccagacuuaaccgcu

SEQ ID NO: 1361349 - RNA, 19 nt, Artificial Sequence
  Description of Artificial Sequence: Synthetic oligonucleotide
ugucagguucagauuaccu

SEQ ID NO: 1361350 - RNA, 19 nt, Artificial Sequence
  Description of Artificial Sequence: Synthetic oligonucleotide
ucaaccucuuucaggaaau

SEQ ID NO: 1361351 - RNA, 19 nt, Artificial Sequence
  Description of Artificial Sequence: Synthetic oligonucleotide
cauugcugacaccugcacg

SEQ ID NO: 1361352 - RNA, 19 nt, Artificial Sequence
  Description of Artificial Sequence: Synthetic oligonucleotide
caaaacgcugcacaauuuc

SEQ ID NO: 1361353 - RNA, 19 nt, Artificial Sequence
  Description of Artificial Sequence: Synthetic oligonucleotide
gcagguaacacugcaaagg

SEQ ID NO: 1361354 - RNA, 19 nt, Artificial Sequence
  Description of Artificial Sequence: Synthetic oligonucleotide
gacuuaaccgcucucccga

SEQ ID NO: 1361355 - RNA, 19 nt, Artificial Sequence
  Description of Artificial Sequence: Synthetic oligonucleotide
uuugucagguucagauuac

SEQ ID NO: 1361356 - RNA, 19 nt, Artificial Sequence
  Description of Artificial Sequence: Synthetic oligonucleotide
uccgcaggguuccaaacga

SEQ ID NO: 1361357 - RNA, 19 nt, Artificial Sequence
  Description of Artificial Sequence: Synthetic oligonucleotide
auguggaguuuacagcaag

SEQ ID NO: 1361358 - RNA, 19 nt, Artificial Sequence
  Description of Artificial Sequence: Synthetic oligonucleotide
uucacgaagucugacucca

SEQ ID NO: 1361359 - RNA, 19 nt, Artificial Sequence
  Description of Artificial Sequence: Synthetic oligonucleotide
caggguuccaaacgaagag

SEQ ID NO: 1361360 - RNA, 19 nt, Artificial Sequence
  Description of Artificial Sequence: Synthetic oligonucleotide
uucaagugugacacugaga

SEQ ID NO: 1361361 - RNA, 19 nt, Artificial Sequence
  Description of Artificial Sequence: Synthetic oligonucleotide
aguuccucaucaaacagga

SEQ ID NO: 1361362 - RNA, 19 nt, Artificial Sequence
  Description of Artificial Sequence: Synthetic oligonucleotide
uguuucacauacagcucga

SEQ ID NO: 1361363 - RNA, 19 nt, Artificial Sequence
  Description of Artificial Sequence: Synthetic oligonucleotide
uguggcauuaucuggcauu

SEQ ID NO: 1361364 - RNA, 19 nt, Artificial Sequence
  Description of Artificial Sequence: Synthetic oligonucleotide
guuccaaacgaagagcgac

SEQ ID NO: 1361365 - RNA, 19 nt, Artificial Sequence
  Description of Artificial Sequence: Synthetic oligonucleotide
aaauucucuguaggccagg

SEQ ID NO: 1361366 - RNA, 19 nt, Artificial Sequence
  Description of Artificial Sequence: Synthetic oligonucleotide
uggauaauguggaguuuac

SEQ ID NO: 1361367 - RNA, 19 nt, Artificial Sequence
  Description of Artificial Sequence: Synthetic oligonucleotide
ugggaagagaucucuugac

SEQ ID NO: 1361368 - RNA, 19 nt, Artificial Sequence
  Description of Artificial Sequence: Synthetic oligonucleotide
acagcacacacuuccgugu

SEQ ID NO: 1361369 - RNA, 19 nt, Artificial Sequence
  Description of Artificial Sequence: Synthetic oligonucleotide
cacaggaccucguuccucc

SEQ ID NO: 1361370 - RNA, 19 nt, Artificial Sequence
  Description of Artificial Sequence: Synthetic oligonucleotide
uccaaacgaagagcgaccc

SEQ ID NO: 1361371 - RNA, 19 nt, Artificial Sequence
  Description of Artificial Sequence: Synthetic oligonucleotide
guagacagagucaacuuuc

SEQ ID NO: 1361372 - RNA, 19 nt, Artificial Sequence
  Description of Artificial Sequence: Synthetic oligonucleotide
ggcuguaagguccugcugc

SEQ ID NO: 1361373 - RNA, 19 nt, Artificial Sequence
  Description of Artificial Sequence: Synthetic oligonucleotide
gaguuuacagcaagucccc

SEQ ID NO: 1361374 - RNA, 19 nt, Artificial Sequence
  Description of Artificial Sequence: Synthetic oligonucleotide
auguaauggcccauccugg

SEQ ID NO: 1361375 - RNA, 19 nt, Artificial Sequence
  Description of Artificial Sequence: Synthetic oligonucleotide
uuagagugauaugaagaau

SEQ ID NO: 1361376 - RNA, 19 nt, Artificial Sequence
  Description of Artificial Sequence: Synthetic oligonucleotide
cagacuuaaccgcucuccc

SEQ ID NO: 1361377 - RNA, 19 nt, Artificial Sequence
  Description of Artificial Sequence: Synthetic oligonucleotide
uuucugcuagugcacugac

SEQ ID NO: 1361378 - RNA, 19 nt, Artificial Sequence
  Description of Artificial Sequence: Synthetic oligonucleotide
uacccugcaccccaccagc

SEQ ID NO: 1361379 - RNA, 19 nt, Artificial Sequence
  Description of Artificial Sequence: Synthetic oligonucleotide
acaugcucagacagcacac

SEQ ID NO: 1361380 - RNA, 19 nt, Artificial Sequence
  Description of Artificial Sequence: Synthetic oligonucleotide
gacuaagacauugucccuc

SEQ ID NO: 1361381 - RNA, 19 nt, Artificial Sequence
  Description of Artificial Sequence: Synthetic oligonucleotide
ccucuuucaggaaauuccg

SEQ ID NO: 1361382 - RNA, 19 nt, Artificial Sequence
  Description of Artificial Sequence: Synthetic oligonucleotide
cugagaucagguccccucc

SEQ ID NO: 1361383 - RNA, 19 nt, Artificial Sequence
  Description of Artificial Sequence: Synthetic oligonucleotide
acuuaaccgcucucccgac

SEQ ID NO: 1361384 - RNA, 19 nt, Artificial Sequence
  Description of Artificial Sequence: Synthetic oligonucleotide
cauacagcucgaugaugcc

SEQ ID NO: 1361385 - RNA, 19 nt, Artificial Sequence
  Description of Artificial Sequence: Synthetic oligonucleotide
acgguugcuuguuuuaaaa

SEQ ID NO: 1361386 - RNA, 19 nt, Artificial Sequence
  Description of Artificial Sequence: Synthetic oligonucleotide
caagauagccugugaggac

SEQ ID NO: 1361387 - RNA, 19 nt, Artificial Sequence
  Description of Artificial Sequence: Synthetic oligonucleotide
agcaccggguuguccagac

SEQ ID NO: 1361388 - RNA, 19 nt, Artificial Sequence
  Description of Artificial Sequence: Synthetic oligonucleotide
auuccgagucgcuuuggca

SEQ ID NO: 1361389 - RNA, 19 nt, Artificial Sequence
  Description of Artificial Sequence: Synthetic oligonucleotide
gcugcugacuaucugucag

SEQ ID NO: 1361390 - RNA, 19 nt, Artificial Sequence
  Description of Artificial Sequence: Synthetic oligonucleotide
ugagaucagguccccucca

SEQ ID NO: 1361391 - RNA, 19 nt, Artificial Sequence
  Description of Artificial Sequence: Synthetic oligonucleotide
gaagaacuguggcauuauc

SEQ ID NO: 1361392 - RNA, 19 nt, Artificial Sequence
  Description of Artificial Sequence: Synthetic oligonucleotide
cacccuguacccugcaccc

SEQ ID NO: 1361393 - RNA, 19 nt, Artificial Sequence
  Description of Artificial Sequence: Synthetic oligonucleotide
ugcaaagggauggaagcuc

SEQ ID NO: 1361394 - RNA, 19 nt, Artificial Sequence
  Description of Artificial Sequence: Synthetic oligonucleotide
aacgaagagcgacccucca

SEQ ID NO: 1361395 - RNA, 19 nt, Artificial Sequence
  Description of Artificial Sequence: Synthetic oligonucleotide
acgaagucugacuccacaa

SEQ ID NO: 1361396 - RNA, 19 nt, Artificial Sequence
  Description of Artificial Sequence: Synthetic oligonucleotide
accgcauccugaaugagcu

SEQ ID NO: 1361397 - RNA, 19 nt, Artificial Sequence
  Description of Artificial Sequence: Synthetic oligonucleotide
gaaggcuguaagguccugc

SEQ ID NO: 1361398 - RNA, 19 nt, Artificial Sequence
  Description of Artificial Sequence: Synthetic oligonucleotide
cauuucugcuagugcacug

SEQ ID NO: 1361399 - RNA, 19 nt, Artificial Sequence
  Description of Artificial Sequence: Synthetic oligonucleotide
cacaugcucagacagcaca

SEQ ID NO: 1361400 - RNA, 19 nt, Artificial Sequence
  Description of Artificial Sequence: Synthetic oligonucleotide
cacgaucuuggucuggauc

SEQ ID NO: 1361401 - RNA, 19 nt, Artificial Sequence
  Description of Artificial Sequence: Synthetic oligonucleotide
ucucccgaccgcauccuga

SEQ ID NO: 1361402 - RNA, 19 nt, Artificial Sequence
  Description of Artificial Sequence: Synthetic oligonucleotide
ugggaagaugcaagaguuc

SEQ ID NO: 1361403 - RNA, 19 nt, Artificial Sequence
  Description of Artificial Sequence: Synthetic oligonucleotide
aggaccucguuccuccucu

SEQ ID NO: 1361404 - RNA, 19 nt, Artificial Sequence
  Description of Artificial Sequence: Synthetic oligonucleotide
gucaaccucuuucaggaaa

SEQ ID NO: 1361405 - RNA, 19 nt, Artificial Sequence
  Description of Artificial Sequence: Synthetic oligonucleotide
acuccacaaccacuggacu

SEQ ID NO: 1361406 - RNA, 19 nt, Artificial Sequence
  Description of Artificial Sequence: Synthetic oligonucleotide
gcaguugcagcuuaucaga

SEQ ID NO: 1361407 - RNA, 19 nt, Artificial Sequence
  Description of Artificial Sequence: Synthetic oligonucleotide
ucccucugugagaacgucu

SEQ ID NO: 1361408 - RNA, 19 nt, Artificial Sequence
  Description of Artificial Sequence: Synthetic oligonucleotide
gaagaauuaaugggaagau

SEQ ID NO: 1361409 - RNA, 19 nt, Artificial Sequence
  Description of Artificial Sequence: Synthetic oligonucleotide
acgucucccagggugacag

SEQ ID NO: 1361410 - RNA, 19 nt, Artificial Sequence
  Description of Artificial Sequence: Synthetic oligonucleotide
cuuaaccgcucucccgacc

SEQ ID NO: 1361411 - RNA, 19 nt, Artificial Sequence
  Description of Artificial Sequence: Synthetic oligonucleotide
ugcacgaucuuggucugga

SEQ ID NO: 1361412 - RNA, 19 nt, Artificial Sequence
  Description of Artificial Sequence: Synthetic oligonucleotide
ucguuccuccucucuagca

SEQ ID NO: 1361413 - RNA, 19 nt, Artificial Sequence
  Description of Artificial Sequence: Synthetic oligonucleotide
ugucccucugugagaacgu

SEQ ID NO: 1361414 - RNA, 19 nt, Artificial Sequence
  Description of Artificial Sequence: Synthetic oligonucleotide
acauugucccucugugaga

SEQ ID NO: 1361415 - RNA, 19 nt, Artificial Sequence
  Description of Artificial Sequence: Synthetic oligonucleotide
aauguggaguuuacagcaa

SEQ ID NO: 1361416 - RNA, 19 nt, Artificial Sequence
  Description of Artificial Sequence: Synthetic oligonucleotide
gcgucaaccucuuucagga

SEQ ID NO: 1361417 - RNA, 19 nt, Artificial Sequence
  Description of Artificial Sequence: Synthetic oligonucleotide
cauugguauccuugaugac

SEQ ID NO: 1361418 - RNA, 19 nt, Artificial Sequence
  Description of Artificial Sequence: Synthetic oligonucleotide
uguccagacuuaaccgcuc

SEQ ID NO: 1361419 - RNA, 19 nt, Artificial Sequence
  Description of Artificial Sequence: Synthetic oligonucleotide
ucgaacuugcuuucauauu

SEQ ID NO: 1361420 - RNA, 19 nt, Artificial Sequence
  Description of Artificial Sequence: Synthetic oligonucleotide
guaacacugcaaagggaug

SEQ ID NO: 1361421 - RNA, 19 nt, Artificial Sequence
  Description of Artificial Sequence: Synthetic oligonucleotide
gaccuuuagcuugaccuuc

SEQ ID NO: 1361422 - RNA, 19 nt, Artificial Sequence
  Description of Artificial Sequence: Synthetic oligonucleotide
uggucacaaucuucugugu

SEQ ID NO: 1361423 - RNA, 19 nt, Artificial Sequence
  Description of Artificial Sequence: Synthetic oligonucleotide
cucucccaagacaauguca

SEQ ID NO: 1361424 - RNA, 19 nt, Artificial Sequence
  Description of Artificial Sequence: Synthetic oligonucleotide
ugcugcugacuaucuguca

SEQ ID NO: 1361425 - RNA, 19 nt, Artificial Sequence
  Description of Artificial Sequence: Synthetic oligonucleotide
gagugauaugaagaauuaa

SEQ ID NO: 1361426 - RNA, 19 nt, Artificial Sequence
  Description of Artificial Sequence: Synthetic oligonucleotide
aucgccaagauagccugug

SEQ ID NO: 1361427 - RNA, 19 nt, Artificial Sequence
  Description of Artificial Sequence: Synthetic oligonucleotide
auugucccucugugagaac

SEQ ID NO: 1361428 - RNA, 19 nt, Artificial Sequence
  Description of Artificial Sequence: Synthetic oligonucleotide
cccacuuagagugauauga

SEQ ID NO: 1361429 - RNA, 19 nt, Artificial Sequence
  Description of Artificial Sequence: Synthetic oligonucleotide
gaagagcgacccuccacca

SEQ ID NO: 1361430 - RNA, 19 nt, Artificial Sequence
  Description of Artificial Sequence: Synthetic oligonucleotide
uccccgacugcucccacuc

SEQ ID NO: 1361431 - RNA, 19 nt, Artificial Sequence
  Description of Artificial Sequence: Synthetic oligonucleotide
agcgccaucugcugcucug

SEQ ID NO: 1361432 - RNA, 19 nt, Artificial Sequence
  Description of Artificial Sequence: Synthetic oligonucleotide
uccagacuuaaccgcucuc

SEQ ID NO: 1361433 - RNA, 19 nt, Artificial Sequence
  Description of Artificial Sequence: Synthetic oligonucleotide
agcccacuuagagugauau

SEQ ID NO: 1361434 - RNA, 19 nt, Artificial Sequence
  Description of Artificial Sequence: Synthetic oligonucleotide
ugcucaaagccaccauguu

SEQ ID NO: 1361435 - RNA, 19 nt, Artificial Sequence
  Description of Artificial Sequence: Synthetic oligonucleotide
guaauggcccauccuggga

SEQ ID NO: 1361436 - RNA, 19 nt, Artificial Sequence
  Description of Artificial Sequence: Synthetic oligonucleotide
ggucacaaucuucuguguc

SEQ ID NO: 1361437 - RNA, 19 nt, Artificial Sequence
  Description of Artificial Sequence: Synthetic oligonucleotide
accguccccgacugcuccc

SEQ ID NO: 1361438 - RNA, 19 nt, Artificial Sequence
  Description of Artificial Sequence: Synthetic oligonucleotide
ucgccaagauagccuguga

SEQ ID NO: 1361439 - RNA, 19 nt, Artificial Sequence
  Description of Artificial Sequence: Synthetic oligonucleotide
guagcaccggguuguccag

SEQ ID NO: 1361440 - RNA, 19 nt, Artificial Sequence
  Description of Artificial Sequence: Synthetic oligonucleotide
acggucccauccuccauug

SEQ ID NO: 1361441 - RNA, 19 nt, Artificial Sequence
  Description of Artificial Sequence: Synthetic oligonucleotide
uccgagucgcuuuggcaaa

SEQ ID NO: 1361442 - RNA, 19 nt, Artificial Sequence
  Description of Artificial Sequence: Synthetic oligonucleotide
acgcucacccuguacccug

SEQ ID NO: 1361443 - RNA, 19 nt, Artificial Sequence
  Description of Artificial Sequence: Synthetic oligonucleotide
agaacgucucccaggguga

SEQ ID NO: 1361444 - RNA, 19 nt, Artificial Sequence
  Description of Artificial Sequence: Synthetic oligonucleotide
gguaacacugcaaagggau

SEQ ID NO: 1361445 - RNA, 19 nt, Artificial Sequence
  Description of Artificial Sequence: Synthetic oligonucleotide
ccagacuuaaccgcucucc

SEQ ID NO: 1361446 - RNA, 19 nt, Artificial Sequence
  Description of Artificial Sequence: Synthetic oligonucleotide
cgaagagcgacccuccacc

SEQ ID NO: 1361447 - RNA, 19 nt, Artificial Sequence
  Description of Artificial Sequence: Synthetic oligonucleotide
cacauacagcucgaugaug

SEQ ID NO: 1361448 - RNA, 19 nt, Artificial Sequence
  Description of Artificial Sequence: Synthetic oligonucleotide
accaaccguccccgacugc

SEQ ID NO: 1361449 - RNA, 19 nt, Artificial Sequence
  Description of Artificial Sequence: Synthetic oligonucleotide
caggaaguaggcuguugca

SEQ ID NO: 1361450 - RNA, 19 nt, Artificial Sequence
  Description of Artificial Sequence: Synthetic oligonucleotide
cauugucccucugugagaa

SEQ ID NO: 1361451 - RNA, 19 nt, Artificial Sequence
  Description of Artificial Sequence: Synthetic oligonucleotide
ugagaacgucucccagggu

SEQ ID NO: 1361452 - RNA, 19 nt, Artificial Sequence
  Description of Artificial Sequence: Synthetic oligonucleotide
cacgaccuuuagcuugacc

SEQ ID NO: 1361453 - RNA, 19 nt, Artificial Sequence
  Description of Artificial Sequence: Synthetic oligonucleotide
cagcacacacuuccgugug

SEQ ID NO: 1361454 - RNA, 19 nt, Artificial Sequence
  Description of Artificial Sequence: Synthetic oligonucleotide
auccugcgggccaggacgc

SEQ ID NO: 1361455 - RNA, 19 nt, Artificial Sequence
  Description of Artificial Sequence: Synthetic oligonucleotide
uaaccgcucucccgaccgc

SEQ ID NO: 1361456 - RNA, 19 nt, Artificial Sequence
  Description of Artificial Sequence: Synthetic oligonucleotide
agugugacacugagaucag

SEQ ID NO: 1361457 - RNA, 19 nt, Artificial Sequence
  Description of Artificial Sequence: Synthetic oligonucleotide
cuaagacauugucccucug

SEQ ID NO: 1361458 - RNA, 19 nt, Artificial Sequence
  Description of Artificial Sequence: Synthetic oligonucleotide
ugcugacaccugcacgauc

SEQ ID NO: 1361459 - RNA, 19 nt, Artificial Sequence
  Description of Artificial Sequence: Synthetic oligonucleotide
guguggucacaaucuucug

SEQ ID NO: 1361460 - RNA, 19 nt, Artificial Sequence
  Description of Artificial Sequence: Synthetic oligonucleotide
agguaacacugcaaaggga

SEQ ID NO: 1361461 - RNA, 19 nt, Artificial Sequence
  Description of Artificial Sequence: Synthetic oligonucleotide
accucguuccuccucucua

SEQ ID NO: 1361462 - RNA, 19 nt, Artificial Sequence
  Description of Artificial Sequence: Synthetic oligonucleotide
ggacgcucacccuguaccc

SEQ ID NO: 1361463 - RNA, 19 nt, Artificial Sequence
  Description of Artificial Sequence: Synthetic oligonucleotide
aaccgcucucccgaccgca

SEQ ID NO: 1361464 - RNA, 19 nt, Artificial Sequence
  Description of Artificial Sequence: Synthetic oligonucleotide
gcacauggauaauguggag

SEQ ID NO: 1361465 - RNA, 19 nt, Artificial Sequence
  Description of Artificial Sequence: Synthetic oligonucleotide
accuuucagugucucucaa

SEQ ID NO: 1361466 - RNA, 19 nt, Artificial Sequence
  Description of Artificial Sequence: Synthetic oligonucleotide
ggcagaacagcgccaucug

SEQ ID NO: 1361467 - RNA, 19 nt, Artificial Sequence
  Description of Artificial Sequence: Synthetic oligonucleotide
caccaaccguccccgacug

SEQ ID NO: 1361468 - RNA, 19 nt, Artificial Sequence
  Description of Artificial Sequence: Synthetic oligonucleotide
agugcagagcccacuuaga

SEQ ID NO: 1361469 - RNA, 19 nt, Artificial Sequence
  Description of Artificial Sequence: Synthetic oligonucleotide
gguauccuugaugacgguc

SEQ ID NO: 1361470 - RNA, 19 nt, Artificial Sequence
  Description of Artificial Sequence: Synthetic oligonucleotide
cacauggauaauguggagu

SEQ ID NO: 1361471 - RNA, 19 nt, Artificial Sequence
  Description of Artificial Sequence: Synthetic oligonucleotide
gcuuagagugcagagccca

SEQ ID NO: 1361472 - RNA, 19 nt, Artificial Sequence
  Description of Artificial Sequence: Synthetic oligonucleotide
accacgaccuuuagcuuga

SEQ ID NO: 1361473 - RNA, 19 nt, Artificial Sequence
  Description of Artificial Sequence: Synthetic oligonucleotide
acaaaacgcugcacaauuu

SEQ ID NO: 1361474 - RNA, 19 nt, Artificial Sequence
  Description of Artificial Sequence: Synthetic oligonucleotide
ucgcuuuggcaaacauuuu

SEQ ID NO: 1361475 - RNA, 19 nt, Artificial Sequence
  Description of Artificial Sequence: Synthetic oligonucleotide
agucgcuuuggcaaacauu

SEQ ID NO: 1361476 - RNA, 19 nt, Artificial Sequence
  Description of Artificial Sequence: Synthetic oligonucleotide
ggaggagacagaauucaaa

SEQ ID NO: 1361477 - RNA, 19 nt, Artificial Sequence
  Description of Artificial Sequence: Synthetic oligonucleotide
ugacggucccauccuccau

SEQ ID NO: 1361478 - RNA, 19 nt, Artificial Sequence
  Description of Artificial Sequence: Synthetic oligonucleotide
cccgaccgcauccugaaug

SEQ ID NO: 1361479 - RNA, 19 nt, Artificial Sequence
  Description of Artificial Sequence: Synthetic oligonucleotide
cucauguucucugcuuaga

SEQ ID NO: 1361480 - RNA, 19 nt, Artificial Sequence
  Description of Artificial Sequence: Synthetic oligonucleotide
ggauaauguggaguuuaca

SEQ ID NO: 1361481 - RNA, 19 nt, Artificial Sequence
  Description of Artificial Sequence: Synthetic oligonucleotide
agagcccacuuagagugau

SEQ ID NO: 1361482 - RNA, 19 nt, Artificial Sequence
  Description of Artificial Sequence: Synthetic oligonucleotide
ggaaauuccgagucgcuuu

SEQ ID NO: 1361483 - RNA, 19 nt, Artificial Sequence
  Description of Artificial Sequence: Synthetic oligonucleotide
ugguauccuugaugacggu

SEQ ID NO: 1361484 - RNA, 19 nt, Artificial Sequence
  Description of Artificial Sequence: Synthetic oligonucleotide
cagcucgaugaugccacag

SEQ ID NO: 1361485 - RNA, 19 nt, Artificial Sequence
  Description of Artificial Sequence: Synthetic oligonucleotide
caccugcacgaucuugguc

SEQ ID NO: 1361486 - RNA, 19 nt, Artificial Sequence
  Description of Artificial Sequence: Synthetic oligonucleotide
ggggucuucaaaaucacau

SEQ ID NO: 1361487 - RNA, 19 nt, Artificial Sequence
  Description of Artificial Sequence: Synthetic oligonucleotide
cacgguugcuuguuuuaaa

SEQ ID NO: 1361488 - RNA, 19 nt, Artificial Sequence
  Description of Artificial Sequence: Synthetic oligonucleotide
cacacuugcuccagggccu

SEQ ID NO: 1361489 - RNA, 19 nt, Artificial Sequence
  Description of Artificial Sequence: Synthetic oligonucleotide
ccacuggacuaagacauug

SEQ ID NO: 1361490 - RNA, 19 nt, Artificial Sequence
  Description of Artificial Sequence: Synthetic oligonucleotide
gacuaucugucagcuccuc

SEQ ID NO: 1361491 - RNA, 19 nt, Artificial Sequence
  Description of Artificial Sequence: Synthetic oligonucleotide
agggccuuaaggaguuccu

SEQ ID NO: 1361492 - RNA, 19 nt, Artificial Sequence
  Description of Artificial Sequence: Synthetic oligonucleotide
ccaaguagacagagucaac

SEQ ID NO: 1361493 - RNA, 19 nt, Artificial Sequence
  Description of Artificial Sequence: Synthetic oligonucleotide
ggcaaacaaaacgcugcac

SEQ ID NO: 1361494 - RNA, 19 nt, Artificial Sequence
  Description of Artificial Sequence: Synthetic oligonucleotide
cagagucauucaaguguga

SEQ ID NO: 1361495 - RNA, 19 nt, Artificial Sequence
  Description of Artificial Sequence: Synthetic oligonucleotide
acacugcaaagggauggaa

SEQ ID NO: 1361496 - RNA, 19 nt, Artificial Sequence
  Description of Artificial Sequence: Synthetic oligonucleotide
caaccguccccgacugcuc

SEQ ID NO: 1361497 - RNA, 19 nt, Artificial Sequence
  Description of Artificial Sequence: Synthetic oligonucleotide
cuguaagguccugcugcug

SEQ ID NO: 1361498 - RNA, 19 nt, Artificial Sequence
  Description of Artificial Sequence: Synthetic oligonucleotide
cacuggacuaagacauugu

SEQ ID NO: 1361499 - RNA, 19 nt, Artificial Sequence
  Description of Artificial Sequence: Synthetic oligonucleotide
gacggucccauccuccauu

SEQ ID NO: 1361500 - RNA, 19 nt, Artificial Sequence
  Description of Artificial Sequence: Synthetic oligonucleotide
uccuccucucuagcaccug

SEQ ID NO: 1361501 - RNA, 19 nt, Artificial Sequence
  Description of Artificial Sequence: Synthetic oligonucleotide
gcuagugcacugaccagga

SEQ ID NO: 1361502 - RNA, 19 nt, Artificial Sequence
  Description of Artificial Sequence: Synthetic oligonucleotide
uagcaccggguuguccaga

SEQ ID NO: 1361503 - RNA, 19 nt, Artificial Sequence
  Description of Artificial Sequence: Synthetic oligonucleotide
guccagacuuaaccgcucu

SEQ ID NO: 1361504 - RNA, 19 nt, Artificial Sequence
  Description of Artificial Sequence: Synthetic oligonucleotide
gguuccaaacgaagagcga

SEQ ID NO: 1361505 - RNA, 19 nt, Artificial Sequence
  Description of Artificial Sequence: Synthetic oligonucleotide
cguguggucacaaucuucu

SEQ ID NO: 1361506 - RNA, 19 nt, Artificial Sequence
  Description of Artificial Sequence: Synthetic oligonucleotide
gcccacuuagagugauaug

SEQ ID NO: 1361507 - RNA, 19 nt, Artificial Sequence
  Description of Artificial Sequence: Synthetic oligonucleotide
cucucccgaccgcauccug

SEQ ID NO: 1361508 - RNA, 19 nt, Artificial Sequence
  Description of Artificial Sequence: Synthetic oligonucleotide
caggaaauuccgagucgcu

SEQ ID NO: 1361509 - RNA, 19 nt, Artificial Sequence
  Description of Artificial Sequence: Synthetic oligonucleotide
ccguguggucacaaucuuc

SEQ ID NO: 1361510 - RNA, 19 nt, Artificial Sequence
  Description of Artificial Sequence: Synthetic oligonucleotide
cugcaaagggauggaagcu

SEQ ID NO: 1361511 - RNA, 19 nt, Artificial Sequence
  Description of Artificial Sequence: Synthetic oligonucleotide
ugcuuccgcaggguuccaa

SEQ ID NO: 1361512 - RNA, 19 nt, Artificial Sequence
  Description of Artificial Sequence: Synthetic oligonucleotide
cccgacugcucccacucac

SEQ ID NO: 1361513 - RNA, 19 nt, Artificial Sequence
  Description of Artificial Sequence: Synthetic oligonucleotide
gucccucugugagaacguc

SEQ ID NO: 1361514 - RNA, 19 nt, Artificial Sequence
  Description of Artificial Sequence: Synthetic oligonucleotide
gagcgacccuccaccacga

SEQ ID NO: 1361515 - RNA, 19 nt, Artificial Sequence
  Description of Artificial Sequence: Synthetic oligonucleotide
ucccgaccgcauccugaau

SEQ ID NO: 1361516 - RNA, 19 nt, Artificial Sequence
  Description of Artificial Sequence: Synthetic oligonucleotide
aggugcacgguugcuuguu

SEQ ID NO: 1361517 - RNA, 19 nt, Artificial Sequence
  Description of Artificial Sequence: Synthetic oligonucleotide
ggacuaagacauugucccu

SEQ ID NO: 1361518 - RNA, 19 nt, Artificial Sequence
  Description of Artificial Sequence: Synthetic oligonucleotide
ccgaccgcauccugaauga

SEQ ID NO: 1361519 - RNA, 19 nt, Artificial Sequence
  Description of Artificial Sequence: Synthetic oligonucleotide
cagcggggaucuccagcac

SEQ ID NO: 1361520 - RNA, 19 nt, Artificial Sequence
  Description of Artificial Sequence: Synthetic oligonucleotide
gacgcucacccuguacccu

SEQ ID NO: 1361521 - RNA, 19 nt, Artificial Sequence
  Description of Artificial Sequence: Synthetic oligonucleotide
cacagagcguggagcaggu

SEQ ID NO: 1361522 - RNA, 19 nt, Artificial Sequence
  Description of Artificial Sequence: Synthetic oligonucleotide
gggccuuaaggaguuccuc

SEQ ID NO: 1361523 - RNA, 19 nt, Artificial Sequence
  Description of Artificial Sequence: Synthetic oligonucleotide
cccaccaaccguccccgac

SEQ ID NO: 1361524 - RNA, 19 nt, Artificial Sequence
  Description of Artificial Sequence: Synthetic oligonucleotide
acacuuccguguggucaca

SEQ ID NO: 1361525 - RNA, 19 nt, Artificial Sequence
  Description of Artificial Sequence: Synthetic oligonucleotide
accacuggacuaagacauu

SEQ ID NO: 1361526 - RNA, 19 nt, Artificial Sequence
  Description of Artificial Sequence: Synthetic oligonucleotide
accggguuguccagacuua

SEQ ID NO: 1361527 - RNA, 19 nt, Artificial Sequence
  Description of Artificial Sequence: Synthetic oligonucleotide
gugcacgguugcuuguuuu

SEQ ID NO: 1361528 - RNA, 19 nt, Artificial Sequence
  Description of Artificial Sequence: Synthetic oligonucleotide
gcacgguugcuuguuuuaa

SEQ ID NO: 1361529 - RNA, 19 nt, Artificial Sequence
  Description of Artificial Sequence: Synthetic oligonucleotide
cucagcaguugcagcuuau

SEQ ID NO: 1361530 - RNA, 19 nt, Artificial Sequence
  Description of Artificial Sequence: Synthetic oligonucleotide
ggcccauccugggaagaga

SEQ ID NO: 1361531 - RNA, 19 nt, Artificial Sequence
  Description of Artificial Sequence: Synthetic oligonucleotide
gagcccacuuagagugaua

SEQ ID NO: 1361532 - RNA, 19 nt, Artificial Sequence
  Description of Artificial Sequence: Synthetic oligonucleotide
cacuuccguguggucacaa

SEQ ID NO: 1361533 - RNA, 19 nt, Artificial Sequence
  Description of Artificial Sequence: Synthetic oligonucleotide
accgcucucccgaccgcau

SEQ ID NO: 1361534 - RNA, 19 nt, Artificial Sequence
  Description of Artificial Sequence: Synthetic oligonucleotide
caggugcacgguugcuugu

SEQ ID NO: 1361535 - RNA, 19 nt, Artificial Sequence
  Description of Artificial Sequence: Synthetic oligonucleotide
ccgcauccugaaugagcug

SEQ ID NO: 1361536 - RNA, 19 nt, Artificial Sequence
  Description of Artificial Sequence: Synthetic oligonucleotide
guccccgacugcucccacu

SEQ ID NO: 1361537 - RNA, 19 nt, Artificial Sequence
  Description of Artificial Sequence: Synthetic oligonucleotide
ccaaccguccccgacugcu

SEQ ID NO: 1361538 - RNA, 19 nt, Artificial Sequence
  Description of Artificial Sequence: Synthetic oligonucleotide
ccaccaaccguccccgacu

SEQ ID NO: 1361539 - RNA, 19 nt, Artificial Sequence
  Description of Artificial Sequence: Synthetic oligonucleotide
ggugcacgguugcuuguuu

SEQ ID NO: 1361540 - RNA, 19 nt, Artificial Sequence
  Description of Artificial Sequence: Synthetic oligonucleotide
cacugagaucagguccccu

SEQ ID NO: 1361541 - RNA, 19 nt, Artificial Sequence
  Description of Artificial Sequence: Synthetic oligonucleotide
caaccucuuucaggaaauu

SEQ ID NO: 1361542 - RNA, 19 nt, Artificial Sequence
  Description of Artificial Sequence: Synthetic oligonucleotide
ccaaacgaagagcgacccu

SEQ ID NO: 1361543 - RNA, 19 nt, Artificial Sequence
  Description of Artificial Sequence: Synthetic oligonucleotide
cgaccgcauccugaaugag

SEQ ID NO: 1361544 - RNA, 19 nt, Artificial Sequence
  Description of Artificial Sequence: Synthetic oligonucleotide
ccgcaggguuccaaacgaa

SEQ ID NO: 1361545 - RNA, 19 nt, Artificial Sequence
  Description of Artificial Sequence: Synthetic oligonucleotide
cugacaccugcacgaucuu

SEQ ID NO: 1361546 - RNA, 19 nt, Artificial Sequence
  Description of Artificial Sequence: Synthetic oligonucleotide
ccggguuguccagacuuaa

SEQ ID NO: 1361547 - RNA, 19 nt, Artificial Sequence
  Description of Artificial Sequence: Synthetic oligonucleotide
ccagaagaacuguggcauu

SEQ ID NO: 1361548 - RNA, 19 nt, Artificial Sequence
  Description of Artificial Sequence: Synthetic oligonucleotide
cgaccuuuagcuugaccuu

SEQ ID NO: 1361549 - RNA, 19 nt, Artificial Sequence
  Description of Artificial Sequence: Synthetic oligonucleotide
ggagccaagguggggucuu

SEQ ID NO: 1361550 - RNA, 19 nt, Artificial Sequence
  Description of Artificial Sequence: Synthetic oligonucleotide
ggcacagcacauggauaau

SEQ ID NO: 1361551 - RNA, 19 nt, Artificial Sequence
  Description of Artificial Sequence: Synthetic oligonucleotide
cgucaaccucuuucaggaa

SEQ ID NO: 1361552 - RNA, 19 nt, Artificial Sequence
  Description of Artificial Sequence: Synthetic oligonucleotide
cugcuuccgcaggguucca

SEQ ID NO: 1361553 - RNA, 19 nt, Artificial Sequence
  Description of Artificial Sequence: Synthetic oligonucleotide
gcaccggguuguccagacu

SEQ ID NO: 1361554 - RNA, 19 nt, Artificial Sequence
  Description of Artificial Sequence: Synthetic oligonucleotide
cgagucgcuuuggcaaaca

SEQ ID NO: 1361555 - RNA, 19 nt, Artificial Sequence
  Description of Artificial Sequence: Synthetic oligonucleotide
ccacgaccuuuagcuugac

SEQ ID NO: 1361556 - RNA, 19 nt, Artificial Sequence
  Description of Artificial Sequence: Synthetic oligonucleotide
ccccgacugcucccacuca

SEQ ID NO: 1361557 - RNA, 19 nt, Artificial Sequence
  Description of Artificial Sequence: Synthetic oligonucleotide
cguccccgacugcucccac

SEQ ID NO: 1361558 - RNA, 19 nt, Artificial Sequence
  Description of Artificial Sequence: Synthetic oligonucleotide
ccaggacgcucacccugua

SEQ ID NO: 1361559 - RNA, 19 nt, Artificial Sequence
  Description of Artificial Sequence: Synthetic oligonucleotide
cuccagcgucaaccucuuu

SEQ ID NO: 1361560 - RNA, 19 nt, Artificial Sequence
  Description of Artificial Sequence: Synthetic oligonucleotide
ccccaccaaccguccccga

SEQ ID NO: 1361561 - RNA, 19 nt, Artificial Sequence
  Description of Artificial Sequence: Synthetic oligonucleotide
aaauacuuggcauagagac

SEQ ID NO: 1361562 - RNA, 19 nt, Artificial Sequence
  Description of Artificial Sequence: Synthetic oligonucleotide
agagauguaacuuagagac

SEQ ID NO: 1361563 - RNA, 19 nt, Artificial Sequence
  Description of Artificial Sequence: Synthetic oligonucleotide
aaagagauguaacuuagag

SEQ ID NO: 1361564 - RNA, 19 nt, Artificial Sequence
  Description of Artificial Sequence: Synthetic oligonucleotide
aauaaggauaugcugguuc

SEQ ID NO: 1361565 - RNA, 19 nt, Artificial Sequence
  Description of Artificial Sequence: Synthetic oligonucleotide
agacucagaagauaaagcc

SEQ ID NO: 1361566 - RNA, 19 nt, Artificial Sequence
  Description of Artificial Sequence: Synthetic oligonucleotide
ugugcgaucaguauuaucu

SEQ ID NO: 1361567 - RNA, 19 nt, Artificial Sequence
  Description of Artificial Sequence: Synthetic oligonucleotide
uaauuuacacaguugaugc

SEQ ID NO: 1361568 - RNA, 19 nt, Artificial Sequence
  Description of Artificial Sequence: Synthetic oligonucleotide
ugaauuguccaucacaggc

SEQ ID NO: 1361569 - RNA, 19 nt, Artificial Sequence
  Description of Artificial Sequence: Synthetic oligonucleotide
aguauguguaacuaaagag

SEQ ID NO: 1361570 - RNA, 19 nt, Artificial Sequence
  Description of Artificial Sequence: Synthetic oligonucleotide
auauccaaucacuagaguc

SEQ ID NO: 1361571 - RNA, 19 nt, Artificial Sequence
  Description of Artificial Sequence: Synthetic oligonucleotide
uauguguaacuaaagaggc

SEQ ID NO: 1361572 - RNA, 19 nt, Artificial Sequence
  Description of Artificial Sequence: Synthetic oligonucleotide
aaucacuagagucuaaugu

SEQ ID NO: 1361573 - RNA, 19 nt, Artificial Sequence
  Description of Artificial Sequence: Synthetic oligonucleotide
gauaauacugaucgcagag

SEQ ID NO: 1361574 - RNA, 19 nt, Artificial Sequence
  Description of Artificial Sequence: Synthetic oligonucleotide
agaaaucuuguucaaagag

SEQ ID NO: 1361575 - RNA, 19 nt, Artificial Sequence
  Description of Artificial Sequence: Synthetic oligonucleotide
aguacuuauuaguaaagag

SEQ ID NO: 1361576 - RNA, 19 nt, Artificial Sequence
  Description of Artificial Sequence: Synthetic oligonucleotide
agaaauucgguucauauaa

SEQ ID NO: 1361577 - RNA, 19 nt, Artificial Sequence
  Description of Artificial Sequence: Synthetic oligonucleotide
uucauauccaaucacuaga

SEQ ID NO: 1361578 - RNA, 19 nt, Artificial Sequence
  Description of Artificial Sequence: Synthetic oligonucleotide
aucacuagagucuaauguc

SEQ ID NO: 1361579 - RNA, 19 nt, Artificial Sequence
  Description of Artificial Sequence: Synthetic oligonucleotide
aaaauaaggauaugcuggu

SEQ ID NO: 1361580 - RNA, 19 nt, Artificial Sequence
  Description of Artificial Sequence: Synthetic oligonucleotide
agaguagagauucaggucu

SEQ ID NO: 1361581 - RNA, 19 nt, Artificial Sequence
  Description of Artificial Sequence: Synthetic oligonucleotide
caaaaguccacacacauuc

SEQ ID NO: 1361582 - RNA, 19 nt, Artificial Sequence
  Description of Artificial Sequence: Synthetic oligonucleotide
ucuaaugucucccaugggu

SEQ ID NO: 1361583 - RNA, 19 nt, Artificial Sequence
  Description of Artificial Sequence: Synthetic oligonucleotide
ucucauuggaucaaugucu

SEQ ID NO: 1361584 - RNA, 19 nt, Artificial Sequence
  Description of Artificial Sequence: Synthetic oligonucleotide
auagagacgagaaauuggc

SEQ ID NO: 1361585 - RNA, 19 nt, Artificial Sequence
  Description of Artificial Sequence: Synthetic oligonucleotide
uaguauuugucaauaaccu

SEQ ID NO: 1361586 - RNA, 19 nt, Artificial Sequence
  Description of Artificial Sequence: Synthetic oligonucleotide
agucuaaugucucccaugg

SEQ ID NO: 1361587 - RNA, 19 nt, Artificial Sequence
  Description of Artificial Sequence: Synthetic oligonucleotide
auagaguagagauucaggu

SEQ ID NO: 1361588 - RNA, 19 nt, Artificial Sequence
  Description of Artificial Sequence: Synthetic oligonucleotide
acuuugaucccauaaaggu

SEQ ID NO: 1361589 - RNA, 19 nt, Artificial Sequence
  Description of Artificial Sequence: Synthetic oligonucleotide
ucuaguauuugucaauaac

SEQ ID NO: 1361590 - RNA, 19 nt, Artificial Sequence
  Description of Artificial Sequence: Synthetic oligonucleotide
uguuucgaacuuuugauga

SEQ ID NO: 1361591 - RNA, 19 nt, Artificial Sequence
  Description of Artificial Sequence: Synthetic oligonucleotide
uauccaaucacuagagucu

SEQ ID NO: 1361592 - RNA, 19 nt, Artificial Sequence
  Description of Artificial Sequence: Synthetic oligonucleotide
uuugucaauaaccucgagu

SEQ ID NO: 1361593 - RNA, 19 nt, Artificial Sequence
  Description of Artificial Sequence: Synthetic oligonucleotide
aaugccuuagaucuuuggu

SEQ ID NO: 1361594 - RNA, 19 nt, Artificial Sequence
  Description of Artificial Sequence: Synthetic oligonucleotide
uaauacugaucgcagagca

SEQ ID NO: 1361595 - RNA, 19 nt, Artificial Sequence
  Description of Artificial Sequence: Synthetic oligonucleotide
uuuugcggaaacaaaaguc

SEQ ID NO: 1361596 - RNA, 19 nt, Artificial Sequence
  Description of Artificial Sequence: Synthetic oligonucleotide
uguuuugcggaaacaaaag

SEQ ID NO: 1361597 - RNA, 19 nt, Artificial Sequence
  Description of Artificial Sequence: Synthetic oligonucleotide
acauacacgauuaugaaug

SEQ ID NO: 1361598 - RNA, 19 nt, Artificial Sequence
  Description of Artificial Sequence: Synthetic oligonucleotide
aaagagcauaugaugaagg

SEQ ID NO: 1361599 - RNA, 19 nt, Artificial Sequence
  Description of Artificial Sequence: Synthetic oligonucleotide
aacugggucaacuguacag

SEQ ID NO: 1361600 - RNA, 19 nt, Artificial Sequence
  Description of Artificial Sequence: Synthetic oligonucleotide
aagagauguaacuuagaga

SEQ ID NO: 1361601 - RNA, 19 nt, Artificial Sequence
  Description of Artificial Sequence: Synthetic oligonucleotide
uauuaucuggcgaugucag

SEQ ID NO: 1361602 - RNA, 19 nt, Artificial Sequence
  Description of Artificial Sequence: Synthetic oligonucleotide
uugucaauaaccucgaguu

SEQ ID NO: 1361603 - RNA, 19 nt, Artificial Sequence
  Description of Artificial Sequence: Synthetic oligonucleotide
aagauuuugauugguaacu

SEQ ID NO: 1361604 - RNA, 19 nt, Artificial Sequence
  Description of Artificial Sequence: Synthetic oligonucleotide
ucagauaauacugaucgca

SEQ ID NO: 1361605 - RNA, 19 nt, Artificial Sequence
  Description of Artificial Sequence: Synthetic oligonucleotide
ucugauaguguuugaaggc

SEQ ID NO: 1361606 - RNA, 19 nt, Artificial Sequence
  Description of Artificial Sequence: Synthetic oligonucleotide
uucgaacuuuugaugagcg

SEQ ID NO: 1361607 - RNA, 19 nt, Artificial Sequence
  Description of Artificial Sequence: Synthetic oligonucleotide
cauagagacgagaaauugg

SEQ ID NO: 1361608 - RNA, 19 nt, Artificial Sequence
  Description of Artificial Sequence: Synthetic oligonucleotide
aauaaguuaagugggccug

SEQ ID NO: 1361609 - RNA, 19 nt, Artificial Sequence
  Description of Artificial Sequence: Synthetic oligonucleotide
acauucaugaagcagcacu

SEQ ID NO: 1361610 - RNA, 19 nt, Artificial Sequence
  Description of Artificial Sequence: Synthetic oligonucleotide
uguucaaagagcauaugau

SEQ ID NO: 1361611 - RNA, 19 nt, Artificial Sequence
  Description of Artificial Sequence: Synthetic oligonucleotide
ucuacaaagucugauagaa

SEQ ID NO: 1361612 - RNA, 19 nt, Artificial Sequence
  Description of Artificial Sequence: Synthetic oligonucleotide
uuuucugcacauaaccuac

SEQ ID NO: 1361613 - RNA, 19 nt, Artificial Sequence
  Description of Artificial Sequence: Synthetic oligonucleotide
gaugaaauuucaauaagga

SEQ ID NO: 1361614 - RNA, 19 nt, Artificial Sequence
  Description of Artificial Sequence: Synthetic oligonucleotide
uguagggaccacauuauga

SEQ ID NO: 1361615 - RNA, 19 nt, Artificial Sequence
  Description of Artificial Sequence: Synthetic oligonucleotide
uuugagucacugaaaauaa

SEQ ID NO: 1361616 - RNA, 19 nt, Artificial Sequence
  Description of Artificial Sequence: Synthetic oligonucleotide
ugcgaagggacauacacga

SEQ ID NO: 1361617 - RNA, 19 nt, Artificial Sequence
  Description of Artificial Sequence: Synthetic oligonucleotide
ucuuuauacucaaggauuc

SEQ ID NO: 1361618 - RNA, 19 nt, Artificial Sequence
  Description of Artificial Sequence: Synthetic oligonucleotide
gguuauuuaaccaaaugcc

SEQ ID NO: 1361619 - RNA, 19 nt, Artificial Sequence
  Description of Artificial Sequence: Synthetic oligonucleotide
cauagaguagagauucagg

SEQ ID NO: 1361620 - RNA, 19 nt, Artificial Sequence
  Description of Artificial Sequence: Synthetic oligonucleotide
acauuaugaugucuguuuc

SEQ ID NO: 1361621 - RNA, 19 nt, Artificial Sequence
  Description of Artificial Sequence: Synthetic oligonucleotide
agauguaacuuagagacug

SEQ ID NO: 1361622 - RNA, 19 nt, Artificial Sequence
  Description of Artificial Sequence: Synthetic oligonucleotide
ucagcauccgaguagaaau

SEQ ID NO: 1361623 - RNA, 19 nt, Artificial Sequence
  Description of Artificial Sequence: Synthetic oligonucleotide
aaauucgguucauauaaaa

SEQ ID NO: 1361624 - RNA, 19 nt, Artificial Sequence
  Description of Artificial Sequence: Synthetic oligonucleotide
ugacuuguuaaagacuggg

SEQ ID NO: 1361625 - RNA, 19 nt, Artificial Sequence
  Description of Artificial Sequence: Synthetic oligonucleotide
uuuacuugugcgaucagua

SEQ ID NO: 1361626 - RNA, 19 nt, Artificial Sequence
  Description of Artificial Sequence: Synthetic oligonucleotide
uuauuuaaccaaaugccuu

SEQ ID NO: 1361627 - RNA, 19 nt, Artificial Sequence
  Description of Artificial Sequence: Synthetic oligonucleotide
ucuguuucgaacuuuugau

SEQ ID NO: 1361628 - RNA, 19 nt, Artificial Sequence
  Description of Artificial Sequence: Synthetic oligonucleotide
gaugagcgcgucuacaaag

SEQ ID NO: 1361629 - RNA, 19 nt, Artificial Sequence
  Description of Artificial Sequence: Synthetic oligonucleotide
aguaaagagauguaacuua

SEQ ID NO: 1361630 - RNA, 19 nt, Artificial Sequence
  Description of Artificial Sequence: Synthetic oligonucleotide
uaauaaguuaagugggccu

SEQ ID NO: 1361631 - RNA, 19 nt, Artificial Sequence
  Description of Artificial Sequence: Synthetic oligonucleotide
aaguuaagugggccugggc

SEQ ID NO: 1361632 - RNA, 19 nt, Artificial Sequence
  Description of Artificial Sequence: Synthetic oligonucleotide
cuugggauacaccagucgc

SEQ ID NO: 1361633 - RNA, 19 nt, Artificial Sequence
  Description of Artificial Sequence: Synthetic oligonucleotide
cugcacauaaccuacagga

SEQ ID NO: 1361634 - RNA, 19 nt, Artificial Sequence
  Description of Artificial Sequence: Synthetic oligonucleotide
ucgguucauauaaaaccgg

SEQ ID NO: 1361635 - RNA, 19 nt, Artificial Sequence
  Description of Artificial Sequence: Synthetic oligonucleotide
cacuuugaucccauaaagg

SEQ ID NO: 1361636 - RNA, 19 nt, Artificial Sequence
  Description of Artificial Sequence: Synthetic oligonucleotide
uuuccauuuacuugugcga

SEQ ID NO: 1361637 - RNA, 19 nt, Artificial Sequence
  Description of Artificial Sequence: Synthetic oligonucleotide
uccucggucagaaaucuug

SEQ ID NO: 1361638 - RNA, 19 nt, Artificial Sequence
  Description of Artificial Sequence: Synthetic oligonucleotide
uggguucauaaauaccagg

SEQ ID NO: 1361639 - RNA, 19 nt, Artificial Sequence
  Description of Artificial Sequence: Synthetic oligonucleotide
ugcgaucaguauuaucugg

SEQ ID NO: 1361640 - RNA, 19 nt, Artificial Sequence
  Description of Artificial Sequence: Synthetic oligonucleotide
uguaacuuagagacugacu

SEQ ID NO: 1361641 - RNA, 19 nt, Artificial Sequence
  Description of Artificial Sequence: Synthetic oligonucleotide
uauuuaaccaaaugccuua

SEQ ID NO: 1361642 - RNA, 19 nt, Artificial Sequence
  Description of Artificial Sequence: Synthetic oligonucleotide
auacugaucgcagagcauc

SEQ ID NO: 1361643 - RNA, 19 nt, Artificial Sequence
  Description of Artificial Sequence: Synthetic oligonucleotide
auaaccucgaguucauucu

SEQ ID NO: 1361644 - RNA, 19 nt, Artificial Sequence
  Description of Artificial Sequence: Synthetic oligonucleotide
uacacgauuaugaaugguu

SEQ ID NO: 1361645 - RNA, 19 nt, Artificial Sequence
  Description of Artificial Sequence: Synthetic oligonucleotide
aagaggcggucagugaucc

SEQ ID NO: 1361646 - RNA, 19 nt, Artificial Sequence
  Description of Artificial Sequence: Synthetic oligonucleotide
guaaagagauguaacuuag

SEQ ID NO: 1361647 - RNA, 19 nt, Artificial Sequence
  Description of Artificial Sequence: Synthetic oligonucleotide
uaaagaggcggucagugau

SEQ ID NO: 1361648 - RNA, 19 nt, Artificial Sequence
  Description of Artificial Sequence: Synthetic oligonucleotide
cagacucagaagauaaagc

SEQ ID NO: 1361649 - RNA, 19 nt, Artificial Sequence
  Description of Artificial Sequence: Synthetic oligonucleotide
cauccgaguagaaauucgg

SEQ ID NO: 1361650 - RNA, 19 nt, Artificial Sequence
  Description of Artificial Sequence: Synthetic oligonucleotide
agagacgagaaauuggcaa

SEQ ID NO: 1361651 - RNA, 19 nt, Artificial Sequence
  Description of Artificial Sequence: Synthetic oligonucleotide
augaugaaggugcgaaggg

SEQ ID NO: 1361652 - RNA, 19 nt, Artificial Sequence
  Description of Artificial Sequence: Synthetic oligonucleotide
gaguauguguaacuaaaga

SEQ ID NO: 1361653 - RNA, 19 nt, Artificial Sequence
  Description of Artificial Sequence: Synthetic oligonucleotide
aucaguauuaucuggcgau

SEQ ID NO: 1361654 - RNA, 19 nt, Artificial Sequence
  Description of Artificial Sequence: Synthetic oligonucleotide
uguuuggguuauuuaacca

SEQ ID NO: 1361655 - RNA, 19 nt, Artificial Sequence
  Description of Artificial Sequence: Synthetic oligonucleotide
aaguacuuauuaguaaaga

SEQ ID NO: 1361656 - RNA, 19 nt, Artificial Sequence
  Description of Artificial Sequence: Synthetic oligonucleotide
cagauaauacugaucgcag

SEQ ID NO: 1361657 - RNA, 19 nt, Artificial Sequence
  Description of Artificial Sequence: Synthetic oligonucleotide
ugauaguguuugaaggcug

SEQ ID NO: 1361658 - RNA, 19 nt, Artificial Sequence
  Description of Artificial Sequence: Synthetic oligonucleotide
uuuauacucaaggauuccu

SEQ ID NO: 1361659 - RNA, 19 nt, Artificial Sequence
  Description of Artificial Sequence: Synthetic oligonucleotide
cacgauuaugaaugguugg

SEQ ID NO: 1361660 - RNA, 19 nt, Artificial Sequence
  Description of Artificial Sequence: Synthetic oligonucleotide
acaaccaagcuccaucucu

SEQ ID NO: 1361661 - RNA, 19 nt, Artificial Sequence
  Description of Artificial Sequence: Synthetic oligonucleotide
uuuucuaguauuugucaau

SEQ ID NO: 1361662 - RNA, 19 nt, Artificial Sequence
  Description of Artificial Sequence: Synthetic oligonucleotide
ugcacauucaaaggcaucu

SEQ ID NO: 1361663 - RNA, 19 nt, Artificial Sequence
  Description of Artificial Sequence: Synthetic oligonucleotide
cauucaugaagcagcacug

SEQ ID NO: 1361664 - RNA, 19 nt, Artificial Sequence
  Description of Artificial Sequence: Synthetic oligonucleotide
acaaguauuuauaugcaca

SEQ ID NO: 1361665 - RNA, 19 nt, Artificial Sequence
  Description of Artificial Sequence: Synthetic oligonucleotide
ucggucagaaaucuuguuc

SEQ ID NO: 1361666 - RNA, 19 nt, Artificial Sequence
  Description of Artificial Sequence: Synthetic oligonucleotide
ucaaugucuguccuagcgu

SEQ ID NO: 1361667 - RNA, 19 nt, Artificial Sequence
  Description of Artificial Sequence: Synthetic oligonucleotide
gauggcgucugucccauag

SEQ ID NO: 1361668 - RNA, 19 nt, Artificial Sequence
  Description of Artificial Sequence: Synthetic oligonucleotide
cauacacgauuaugaaugg

SEQ ID NO: 1361669 - RNA, 19 nt, Artificial Sequence
  Description of Artificial Sequence: Synthetic oligonucleotide
ugccuuagaucuuugguaa

SEQ ID NO: 1361670 - RNA, 19 nt, Artificial Sequence
  Description of Artificial Sequence: Synthetic oligonucleotide
uugggauacaccagucgcc

SEQ ID NO: 1361671 - RNA, 19 nt, Artificial Sequence
  Description of Artificial Sequence: Synthetic oligonucleotide
uaaagagauguaacuuaga

SEQ ID NO: 1361672 - RNA, 19 nt, Artificial Sequence
  Description of Artificial Sequence: Synthetic oligonucleotide
aggucacacaaccaagcuc

SEQ ID NO: 1361673 - RNA, 19 nt, Artificial Sequence
  Description of Artificial Sequence: Synthetic oligonucleotide
aaggugcgaagggacauac

SEQ ID NO: 1361674 - RNA, 19 nt, Artificial Sequence
  Description of Artificial Sequence: Synthetic oligonucleotide
aauaucauccacacauuaa

SEQ ID NO: 1361675 - RNA, 19 nt, Artificial Sequence
  Description of Artificial Sequence: Synthetic oligonucleotide
uuucgaacuuuugaugagc

SEQ ID NO: 1361676 - RNA, 19 nt, Artificial Sequence
  Description of Artificial Sequence: Synthetic oligonucleotide
uuaaguagaugauggcguc

SEQ ID NO: 1361677 - RNA, 19 nt, Artificial Sequence
  Description of Artificial Sequence: Synthetic oligonucleotide
acuaaagaggcggucagug

SEQ ID NO: 1361678 - RNA, 19 nt, Artificial Sequence
  Description of Artificial Sequence: Synthetic oligonucleotide
gaaugguugguccuggaaa

SEQ ID NO: 1361679 - RNA, 19 nt, Artificial Sequence
  Description of Artificial Sequence: Synthetic oligonucleotide
uccaauguggcuuggguuu

SEQ ID NO: 1361680 - RNA, 19 nt, Artificial Sequence
  Description of Artificial Sequence: Synthetic oligonucleotide
uuugguucucugcuuggga

SEQ ID NO: 1361681 - RNA, 19 nt, Artificial Sequence
  Description of Artificial Sequence: Synthetic oligonucleotide
gucaauaaccucgaguuca

SEQ ID NO: 1361682 - RNA, 19 nt, Artificial Sequence
  Description of Artificial Sequence: Synthetic oligonucleotide
uagaguagagauucagguc

SEQ ID NO: 1361683 - RNA, 19 nt, Artificial Sequence
  Description of Artificial Sequence: Synthetic oligonucleotide
cucucauuggaucaauguc

SEQ ID NO: 1361684 - RNA, 19 nt, Artificial Sequence
  Description of Artificial Sequence: Synthetic oligonucleotide
agauaauacugaucgcaga

SEQ ID NO: 1361685 - RNA, 19 nt, Artificial Sequence
  Description of Artificial Sequence: Synthetic oligonucleotide
acauagaguagagauucag

SEQ ID NO: 1361686 - RNA, 19 nt, Artificial Sequence
  Description of Artificial Sequence: Synthetic oligonucleotide
guuucgaacuuuugaugag

SEQ ID NO: 1361687 - RNA, 19 nt, Artificial Sequence
  Description of Artificial Sequence: Synthetic oligonucleotide
uagaaauucgguucauaua

SEQ ID NO: 1361688 - RNA, 19 nt, Artificial Sequence
  Description of Artificial Sequence: Synthetic oligonucleotide
gaccacauuaugaugucug

SEQ ID NO: 1361689 - RNA, 19 nt, Artificial Sequence
  Description of Artificial Sequence: Synthetic oligonucleotide
gaaggcugacuuguuaaag

SEQ ID NO: 1361690 - RNA, 19 nt, Artificial Sequence
  Description of Artificial Sequence: Synthetic oligonucleotide
uguccuagcguuuguauuu

SEQ ID NO: 1361691 - RNA, 19 nt, Artificial Sequence
  Description of Artificial Sequence: Synthetic oligonucleotide
cauuguagggaccacauua

SEQ ID NO: 1361692 - RNA, 19 nt, Artificial Sequence
  Description of Artificial Sequence: Synthetic oligonucleotide
cauuggaucaaugucuguc

SEQ ID NO: 1361693 - RNA, 19 nt, Artificial Sequence
  Description of Artificial Sequence: Synthetic oligonucleotide
ugagccauuguagggacca

SEQ ID NO: 1361694 - RNA, 19 nt, Artificial Sequence
  Description of Artificial Sequence: Synthetic oligonucleotide
uuaugaaugguugguccug

SEQ ID NO: 1361695 - RNA, 19 nt, Artificial Sequence
  Description of Artificial Sequence: Synthetic oligonucleotide
caagcuccaucucucauug

SEQ ID NO: 1361696 - RNA, 19 nt, Artificial Sequence
  Description of Artificial Sequence: Synthetic oligonucleotide
auacucaaggauuccuuga

SEQ ID NO: 1361697 - RNA, 19 nt, Artificial Sequence
  Description of Artificial Sequence: Synthetic oligonucleotide
uaaccucgaguucauucug

SEQ ID NO: 1361698 - RNA, 19 nt, Artificial Sequence
  Description of Artificial Sequence: Synthetic oligonucleotide
ugguaacugggucaacugu

SEQ ID NO: 1361699 - RNA, 19 nt, Artificial Sequence
  Description of Artificial Sequence: Synthetic oligonucleotide
gaucgcagagcaucuuugc

SEQ ID NO: 1361700 - RNA, 19 nt, Artificial Sequence
  Description of Artificial Sequence: Synthetic oligonucleotide
guuuggguuauuuaaccaa

SEQ ID NO: 1361701 - RNA, 19 nt, Artificial Sequence
  Description of Artificial Sequence: Synthetic oligonucleotide
uuucuaguauuugucaaua

SEQ ID NO: 1361702 - RNA, 19 nt, Artificial Sequence
  Description of Artificial Sequence: Synthetic oligonucleotide
agauccuaaagauuuucuu

SEQ ID NO: 1361703 - RNA, 19 nt, Artificial Sequence
  Description of Artificial Sequence: Synthetic oligonucleotide
uccuacauguuccccuuca

SEQ ID NO: 1361704 - RNA, 19 nt, Artificial Sequence
  Description of Artificial Sequence: Synthetic oligonucleotide
cacugcuaccacaucacag

SEQ ID NO: 1361705 - RNA, 19 nt, Artificial Sequence
  Description of Artificial Sequence: Synthetic oligonucleotide
gcuaccacaucacagcuug

SEQ ID NO: 1361706 - RNA, 19 nt, Artificial Sequence
  Description of Artificial Sequence: Synthetic oligonucleotide
cauagcccgacauagagua

SEQ ID NO: 1361707 - RNA, 19 nt, Artificial Sequence
  Description of Artificial Sequence: Synthetic oligonucleotide
acacaaccaagcuccaucu

SEQ ID NO: 1361708 - RNA, 19 nt, Artificial Sequence
  Description of Artificial Sequence: Synthetic oligonucleotide
auagacccacuuugauccc

SEQ ID NO: 1361709 - RNA, 19 nt, Artificial Sequence
  Description of Artificial Sequence: Synthetic oligonucleotide
cauaaagguuccuacaugu

SEQ ID NO: 1361710 - RNA, 19 nt, Artificial Sequence
  Description of Artificial Sequence: Synthetic oligonucleotide
uuggaucaaugucuguccu

SEQ ID NO: 1361711 - RNA, 19 nt, Artificial Sequence
  Description of Artificial Sequence: Synthetic oligonucleotide
uuguagggaccacauuaug

SEQ ID NO: 1361712 - RNA, 19 nt, Artificial Sequence
  Description of Artificial Sequence: Synthetic oligonucleotide
auuuaaccaaaugccuuag

SEQ ID NO: 1361713 - RNA, 19 nt, Artificial Sequence
  Description of Artificial Sequence: Synthetic oligonucleotide
ggugcgaagggacauacac

SEQ ID NO: 1361714 - RNA, 19 nt, Artificial Sequence
  Description of Artificial Sequence: Synthetic oligonucleotide
auaaguuaagugggccugg

SEQ ID NO: 1361715 - RNA, 19 nt, Artificial Sequence
  Description of Artificial Sequence: Synthetic oligonucleotide
uacuugugcgaucaguauu

SEQ ID NO: 1361716 - RNA, 19 nt, Artificial Sequence
  Description of Artificial Sequence: Synthetic oligonucleotide
uagagacgagaaauuggca

SEQ ID NO: 1361717 - RNA, 19 nt, Artificial Sequence
  Description of Artificial Sequence: Synthetic oligonucleotide
uaaguuaagugggccuggg

SEQ ID NO: 1361718 - RNA, 19 nt, Artificial Sequence
  Description of Artificial Sequence: Synthetic oligonucleotide
aacuuuugaugagcgcguc

SEQ ID NO: 1361719 - RNA, 19 nt, Artificial Sequence
  Description of Artificial Sequence: Synthetic oligonucleotide
uccgaguagaaauucgguu

SEQ ID NO: 1361720 - RNA, 19 nt, Artificial Sequence
  Description of Artificial Sequence: Synthetic oligonucleotide
cacacaaccaagcuccauc

SEQ ID NO: 1361721 - RNA, 19 nt, Artificial Sequence
  Description of Artificial Sequence: Synthetic oligonucleotide
caaucacuagagucuaaug

SEQ ID NO: 1361722 - RNA, 19 nt, Artificial Sequence
  Description of Artificial Sequence: Synthetic oligonucleotide
agauuuugauugguaacug

SEQ ID NO: 1361723 - RNA, 19 nt, Artificial Sequence
  Description of Artificial Sequence: Synthetic oligonucleotide
agaauguuuggguuauuua

SEQ ID NO: 1361724 - RNA, 19 nt, Artificial Sequence
  Description of Artificial Sequence: Synthetic oligonucleotide
auuccgugaauuguccauc

SEQ ID NO: 1361725 - RNA, 19 nt, Artificial Sequence
  Description of Artificial Sequence: Synthetic oligonucleotide
ugucaauaaccucgaguuc

SEQ ID NO: 1361726 - RNA, 19 nt, Artificial Sequence
  Description of Artificial Sequence: Synthetic oligonucleotide
cuacagacucagaagauaa

SEQ ID NO: 1361727 - RNA, 19 nt, Artificial Sequence
  Description of Artificial Sequence: Synthetic oligonucleotide
guaacuaaagaggcgguca

SEQ ID NO: 1361728 - RNA, 19 nt, Artificial Sequence
  Description of Artificial Sequence: Synthetic oligonucleotide
gucuuugagucacugaaaa

SEQ ID NO: 1361729 - RNA, 19 nt, Artificial Sequence
  Description of Artificial Sequence: Synthetic oligonucleotide
aaauuucaauaaggaagga

SEQ ID NO: 1361730 - RNA, 19 nt, Artificial Sequence
  Description of Artificial Sequence: Synthetic oligonucleotide
cuugagccauuguagggac

SEQ ID NO: 1361731 - RNA, 19 nt, Artificial Sequence
  Description of Artificial Sequence: Synthetic oligonucleotide
uuuugaugagcgcgucuac

SEQ ID NO: 1361732 - RNA, 19 nt, Artificial Sequence
  Description of Artificial Sequence: Synthetic oligonucleotide
acgauuaugaaugguuggu

SEQ ID NO: 1361733 - RNA, 19 nt, Artificial Sequence
  Description of Artificial Sequence: Synthetic oligonucleotide
acacgauuaugaaugguug

SEQ ID NO: 1361734 - RNA, 19 nt, Artificial Sequence
  Description of Artificial Sequence: Synthetic oligonucleotide
ugggucgaugcuuccaaug

SEQ ID NO: 1361735 - RNA, 19 nt, Artificial Sequence
  Description of Artificial Sequence: Synthetic oligonucleotide
ucuacagacucagaagaua

SEQ ID NO: 1361736 - RNA, 19 nt, Artificial Sequence
  Description of Artificial Sequence: Synthetic oligonucleotide
agcauccgaguagaaauuc

SEQ ID NO: 1361737 - RNA, 19 nt, Artificial Sequence
  Description of Artificial Sequence: Synthetic oligonucleotide
uaaugucucccauggguuc

SEQ ID NO: 1361738 - RNA, 19 nt, Artificial Sequence
  Description of Artificial Sequence: Synthetic oligonucleotide
uucuaguauuugucaauaa

SEQ ID NO: 1361739 - RNA, 19 nt, Artificial Sequence
  Description of Artificial Sequence: Synthetic oligonucleotide
ggaucaaugucuguccuag

SEQ ID NO: 1361740 - RNA, 19 nt, Artificial Sequence
  Description of Artificial Sequence: Synthetic oligonucleotide
auucugcauugccaaauga

SEQ ID NO: 1361741 - RNA, 19 nt, Artificial Sequence
  Description of Artificial Sequence: Synthetic oligonucleotide
auguguaacuaaagaggcg

SEQ ID NO: 1361742 - RNA, 19 nt, Artificial Sequence
  Description of Artificial Sequence: Synthetic oligonucleotide
ucgaacuuuugaugagcgc

SEQ ID NO: 1361743 - RNA, 19 nt, Artificial Sequence
  Description of Artificial Sequence: Synthetic oligonucleotide
uguaacuaaagaggcgguc

SEQ ID NO: 1361744 - RNA, 19 nt, Artificial Sequence
  Description of Artificial Sequence: Synthetic oligonucleotide
gcgucugucccauagcccg

SEQ ID NO: 1361745 - RNA, 19 nt, Artificial Sequence
  Description of Artificial Sequence: Synthetic oligonucleotide
caucuuggaccacugcuac

SEQ ID NO: 1361746 - RNA, 19 nt, Artificial Sequence
  Description of Artificial Sequence: Synthetic oligonucleotide
ucuuugagucacugaaaau

SEQ ID NO: 1361747 - RNA, 19 nt, Artificial Sequence
  Description of Artificial Sequence: Synthetic oligonucleotide
aagacuguuucaguuuaau

SEQ ID NO: 1361748 - RNA, 19 nt, Artificial Sequence
  Description of Artificial Sequence: Synthetic oligonucleotide
uuacuugugcgaucaguau

SEQ ID NO: 1361749 - RNA, 19 nt, Artificial Sequence
  Description of Artificial Sequence: Synthetic oligonucleotide
cuuguuaaagacugggagu

SEQ ID NO: 1361750 - RNA, 19 nt, Artificial Sequence
  Description of Artificial Sequence: Synthetic oligonucleotide
auuuugcuugguugguugu

SEQ ID NO: 1361751 - RNA, 19 nt, Artificial Sequence
  Description of Artificial Sequence: Synthetic oligonucleotide
ucuguccuagcguuuguau

SEQ ID NO: 1361752 - RNA, 19 nt, Artificial Sequence
  Description of Artificial Sequence: Synthetic oligonucleotide
uuccgugaauuguccauca

SEQ ID NO: 1361753 - RNA, 19 nt, Artificial Sequence
  Description of Artificial Sequence: Synthetic oligonucleotide
uacugaucgcagagcaucu

SEQ ID NO: 1361754 - RNA, 19 nt, Artificial Sequence
  Description of Artificial Sequence: Synthetic oligonucleotide
uaacugggucaacuguaca

SEQ ID NO: 1361755 - RNA, 19 nt, Artificial Sequence
  Description of Artificial Sequence: Synthetic oligonucleotide
accacauuaugaugucugu

SEQ ID NO: 1361756 - RNA, 19 nt, Artificial Sequence
  Description of Artificial Sequence: Synthetic oligonucleotide
gucagauaauacugaucgc

SEQ ID NO: 1361757 - RNA, 19 nt, Artificial Sequence
  Description of Artificial Sequence: Synthetic oligonucleotide
gauaguguuugaaggcuga

SEQ ID NO: 1361758 - RNA, 19 nt, Artificial Sequence
  Description of Artificial Sequence: Synthetic oligonucleotide
acaggugucuuuauacuca

SEQ ID NO: 1361759 - RNA, 19 nt, Artificial Sequence
  Description of Artificial Sequence: Synthetic oligonucleotide
uuccauuuacuugugcgau

SEQ ID NO: 1361760 - RNA, 19 nt, Artificial Sequence
  Description of Artificial Sequence: Synthetic oligonucleotide
cgaacuuuugaugagcgcg

SEQ ID NO: 1361761 - RNA, 19 nt, Artificial Sequence
  Description of Artificial Sequence: Synthetic oligonucleotide
cauucauauccaaucacua

SEQ ID NO: 1361762 - RNA, 19 nt, Artificial Sequence
  Description of Artificial Sequence: Synthetic oligonucleotide
ucccauggguucauaaaua

SEQ ID NO: 1361763 - RNA, 19 nt, Artificial Sequence
  Description of Artificial Sequence: Synthetic oligonucleotide
gggacauacacgauuauga

SEQ ID NO: 1361764 - RNA, 19 nt, Artificial Sequence
  Description of Artificial Sequence: Synthetic oligonucleotide
cugauagaacuuucugauc

SEQ ID NO: 1361765 - RNA, 19 nt, Artificial Sequence
  Description of Artificial Sequence: Synthetic oligonucleotide
auaugcugguucaucagca

SEQ ID NO: 1361766 - RNA, 19 nt, Artificial Sequence
  Description of Artificial Sequence: Synthetic oligonucleotide
aucgcagagcaucuuugca

SEQ ID NO: 1361767 - RNA, 19 nt, Artificial Sequence
  Description of Artificial Sequence: Synthetic oligonucleotide
agcgcgucuacaaagucug

SEQ ID NO: 1361768 - RNA, 19 nt, Artificial Sequence
  Description of Artificial Sequence: Synthetic oligonucleotide
ugaugagcgcgucuacaaa

SEQ ID NO: 1361769 - RNA, 19 nt, Artificial Sequence
  Description of Artificial Sequence: Synthetic oligonucleotide
agggacauacacgauuaug

SEQ ID NO: 1361770 - RNA, 19 nt, Artificial Sequence
  Description of Artificial Sequence: Synthetic oligonucleotide
uagcccgacauagaguaga

SEQ ID NO: 1361771 - RNA, 19 nt, Artificial Sequence
  Description of Artificial Sequence: Synthetic oligonucleotide
gaugucagauaauacugau

SEQ ID NO: 1361772 - RNA, 19 nt, Artificial Sequence
  Description of Artificial Sequence: Synthetic oligonucleotide
gcacauaaccuacaggaca

SEQ ID NO: 1361773 - RNA, 19 nt, Artificial Sequence
  Description of Artificial Sequence: Synthetic oligonucleotide
caaccaagcuccaucucuc

SEQ ID NO: 1361774 - RNA, 19 nt, Artificial Sequence
  Description of Artificial Sequence: Synthetic oligonucleotide
ucaggucuccuugaaaaua

SEQ ID NO: 1361775 - RNA, 19 nt, Artificial Sequence
  Description of Artificial Sequence: Synthetic oligonucleotide
acugccauagacccacuuu

SEQ ID NO: 1361776 - RNA, 19 nt, Artificial Sequence
  Description of Artificial Sequence: Synthetic oligonucleotide
aaaccagccaaaggggcau

SEQ ID NO: 1361777 - RNA, 19 nt, Artificial Sequence
  Description of Artificial Sequence: Synthetic oligonucleotide
aaacacagcucagaauguu

SEQ ID NO: 1361778 - RNA, 19 nt, Artificial Sequence
  Description of Artificial Sequence: Synthetic oligonucleotide
ccacuuugaucccauaaag

SEQ ID NO: 1361779 - RNA, 19 nt, Artificial Sequence
  Description of Artificial Sequence: Synthetic oligonucleotide
ccgaguagaaauucgguuc

SEQ ID NO: 1361780 - RNA, 19 nt, Artificial Sequence
  Description of Artificial Sequence: Synthetic oligonucleotide
gugcgaucaguauuaucug

SEQ ID NO: 1361781 - RNA, 19 nt, Artificial Sequence
  Description of Artificial Sequence: Synthetic oligonucleotide
aggggcauuccgugaauug

SEQ ID NO: 1361782 - RNA, 19 nt, Artificial Sequence
  Description of Artificial Sequence: Synthetic oligonucleotide
gcgaugucagauaauacug

SEQ ID NO: 1361783 - RNA, 19 nt, Artificial Sequence
  Description of Artificial Sequence: Synthetic oligonucleotide
caccguuuccuuugacagg

SEQ ID NO: 1361784 - RNA, 19 nt, Artificial Sequence
  Description of Artificial Sequence: Synthetic oligonucleotide
agagucuaaugucucccau

SEQ ID NO: 1361785 - RNA, 19 nt, Artificial Sequence
  Description of Artificial Sequence: Synthetic oligonucleotide
guuuugcggaaacaaaagu

SEQ ID NO: 1361786 - RNA, 19 nt, Artificial Sequence
  Description of Artificial Sequence: Synthetic oligonucleotide
gugcgaagggacauacacg

SEQ ID NO: 1361787 - RNA, 19 nt, Artificial Sequence
  Description of Artificial Sequence: Synthetic oligonucleotide
uccauuuacuugugcgauc

SEQ ID NO: 1361788 - RNA, 19 nt, Artificial Sequence
  Description of Artificial Sequence: Synthetic oligonucleotide
gcuugggauacaccagucg

SEQ ID NO: 1361789 - RNA, 19 nt, Artificial Sequence
  Description of Artificial Sequence: Synthetic oligonucleotide
gucuaaugucucccauggg

SEQ ID NO: 1361790 - RNA, 19 nt, Artificial Sequence
  Description of Artificial Sequence: Synthetic oligonucleotide
cuuagaucuuugguaaaca

SEQ ID NO: 1361791 - RNA, 19 nt, Artificial Sequence
  Description of Artificial Sequence: Synthetic oligonucleotide
aucuggcgaugucagauaa

SEQ ID NO: 1361792 - RNA, 19 nt, Artificial Sequence
  Description of Artificial Sequence: Synthetic oligonucleotide
aauacugaucgcagagcau

SEQ ID NO: 1361793 - RNA, 19 nt, Artificial Sequence
  Description of Artificial Sequence: Synthetic oligonucleotide
ugucccauagcccgacaua

SEQ ID NO: 1361794 - RNA, 19 nt, Artificial Sequence
  Description of Artificial Sequence: Synthetic oligonucleotide
aguggaguauguguaacua

SEQ ID NO: 1361795 - RNA, 19 nt, Artificial Sequence
  Description of Artificial Sequence: Synthetic oligonucleotide
ugagcgcgucuacaaaguc

SEQ ID NO: 1361796 - RNA, 19 nt, Artificial Sequence
  Description of Artificial Sequence: Synthetic oligonucleotide
aaauaaggauaugcugguu

SEQ ID NO: 1361797 - RNA, 19 nt, Artificial Sequence
  Description of Artificial Sequence: Synthetic oligonucleotide
acccacuuugaucccauaa

SEQ ID NO: 1361798 - RNA, 19 nt, Artificial Sequence
  Description of Artificial Sequence: Synthetic oligonucleotide
ggaguauguguaacuaaag

SEQ ID NO: 1361799 - RNA, 19 nt, Artificial Sequence
  Description of Artificial Sequence: Synthetic oligonucleotide
ugguaaacacaaguauuua

SEQ ID NO: 1361800 - RNA, 19 nt, Artificial Sequence
  Description of Artificial Sequence: Synthetic oligonucleotide
acuugugcgaucaguauua

SEQ ID NO: 1361801 - RNA, 19 nt, Artificial Sequence
  Description of Artificial Sequence: Synthetic oligonucleotide
guaacugggucaacuguac

SEQ ID NO: 1361802 - RNA, 19 nt, Artificial Sequence
  Description of Artificial Sequence: Synthetic oligonucleotide
gucuacaaagucugauaga

SEQ ID NO: 1361803 - RNA, 19 nt, Artificial Sequence
  Description of Artificial Sequence: Synthetic oligonucleotide
ggcauucauauccaaucac

SEQ ID NO: 1361804 - RNA, 19 nt, Artificial Sequence
  Description of Artificial Sequence: Synthetic oligonucleotide
gacucagaagauaaagccu

SEQ ID NO: 1361805 - RNA, 19 nt, Artificial Sequence
  Description of Artificial Sequence: Synthetic oligonucleotide
ugaaggugcgaagggacau

SEQ ID NO: 1361806 - RNA, 19 nt, Artificial Sequence
  Description of Artificial Sequence: Synthetic oligonucleotide
uugagccauuguagggacc

SEQ ID NO: 1361807 - RNA, 19 nt, Artificial Sequence
  Description of Artificial Sequence: Synthetic oligonucleotide
auuguagggaccacauuau

SEQ ID NO: 1361808 - RNA, 19 nt, Artificial Sequence
  Description of Artificial Sequence: Synthetic oligonucleotide
ccaaaugaggagcagguca

SEQ ID NO: 1361809 - RNA, 19 nt, Artificial Sequence
  Description of Artificial Sequence: Synthetic oligonucleotide
ccuagcguuuguauuuugc

SEQ ID NO: 1361810 - RNA, 19 nt, Artificial Sequence
  Description of Artificial Sequence: Synthetic oligonucleotide
gcguuuguauuuugcuugg

SEQ ID NO: 1361811 - RNA, 19 nt, Artificial Sequence
  Description of Artificial Sequence: Synthetic oligonucleotide
uaucuggcgaugucagaua

SEQ ID NO: 1361812 - RNA, 19 nt, Artificial Sequence
  Description of Artificial Sequence: Synthetic oligonucleotide
cuaaagaggcggucaguga

SEQ ID NO: 1361813 - RNA, 19 nt, Artificial Sequence
  Description of Artificial Sequence: Synthetic oligonucleotide
ggucagugauccucagagg

SEQ ID NO: 1361814 - RNA, 19 nt, Artificial Sequence
  Description of Artificial Sequence: Synthetic oligonucleotide
cacauuaugaugucuguuu

SEQ ID NO: 1361815 - RNA, 19 nt, Artificial Sequence
  Description of Artificial Sequence: Synthetic oligonucleotide
gauguaacuuagagacuga

SEQ ID NO: 1361816 - RNA, 19 nt, Artificial Sequence
  Description of Artificial Sequence: Synthetic oligonucleotide
ucggagcucaucugauagu

SEQ ID NO: 1361817 - RNA, 19 nt, Artificial Sequence
  Description of Artificial Sequence: Synthetic oligonucleotide
ccagucgccagcuucggag

SEQ ID NO: 1361818 - RNA, 19 nt, Artificial Sequence
  Description of Artificial Sequence: Synthetic oligonucleotide
accuccucggucagaaauc

SEQ ID NO: 1361819 - RNA, 19 nt, Artificial Sequence
  Description of Artificial Sequence: Synthetic oligonucleotide
ccauggguucauaaauacc

SEQ ID NO: 1361820 - RNA, 19 nt, Artificial Sequence
  Description of Artificial Sequence: Synthetic oligonucleotide
auacacgauuaugaauggu

SEQ ID NO: 1361821 - RNA, 19 nt, Artificial Sequence
  Description of Artificial Sequence: Synthetic oligonucleotide
gaaauucgguucauauaaa

SEQ ID NO: 1361822 - RNA, 19 nt, Artificial Sequence
  Description of Artificial Sequence: Synthetic oligonucleotide
acaggcguuggagcagugg

SEQ ID NO: 1361823 - RNA, 19 nt, Artificial Sequence
  Description of Artificial Sequence: Synthetic oligonucleotide
cagucgccagcuucggagc

SEQ ID NO: 1361824 - RNA, 19 nt, Artificial Sequence
  Description of Artificial Sequence: Synthetic oligonucleotide
uccuagcguuuguauuuug

SEQ ID NO: 1361825 - RNA, 19 nt, Artificial Sequence
  Description of Artificial Sequence: Synthetic oligonucleotide
cgacauagaguagagauuc

SEQ ID NO: 1361826 - RNA, 19 nt, Artificial Sequence
  Description of Artificial Sequence: Synthetic oligonucleotide
uugugcgaucaguauuauc

SEQ ID NO: 1361827 - RNA, 19 nt, Artificial Sequence
  Description of Artificial Sequence: Synthetic oligonucleotide
auccacacauuaauaaguu

SEQ ID NO: 1361828 - RNA, 19 nt, Artificial Sequence
  Description of Artificial Sequence: Synthetic oligonucleotide
cuaccacaucacagcuugg

SEQ ID NO: 1361829 - RNA, 19 nt, Artificial Sequence
  Description of Artificial Sequence: Synthetic oligonucleotide
cuuuugaugagcgcgucua

SEQ ID NO: 1361830 - RNA, 19 nt, Artificial Sequence
  Description of Artificial Sequence: Synthetic oligonucleotide
gcauccgaguagaaauucg

SEQ ID NO: 1361831 - RNA, 19 nt, Artificial Sequence
  Description of Artificial Sequence: Synthetic oligonucleotide
uccaaucacuagagucuaa

SEQ ID NO: 1361832 - RNA, 19 nt, Artificial Sequence
  Description of Artificial Sequence: Synthetic oligonucleotide
ggaagacuguuucaguuua

SEQ ID NO: 1361833 - RNA, 19 nt, Artificial Sequence
  Description of Artificial Sequence: Synthetic oligonucleotide
ggacauacacgauuaugaa

SEQ ID NO: 1361834 - RNA, 19 nt, Artificial Sequence
  Description of Artificial Sequence: Synthetic oligonucleotide
ucuggcgaugucagauaau

SEQ ID NO: 1361835 - RNA, 19 nt, Artificial Sequence
  Description of Artificial Sequence: Synthetic oligonucleotide
cuuugaucccauaaagguu

SEQ ID NO: 1361836 - RNA, 19 nt, Artificial Sequence
  Description of Artificial Sequence: Synthetic oligonucleotide
auccgaguagaaauucggu

SEQ ID NO: 1361837 - RNA, 19 nt, Artificial Sequence
  Description of Artificial Sequence: Synthetic oligonucleotide
caaaggggcauuccgugaa

SEQ ID NO: 1361838 - RNA, 19 nt, Artificial Sequence
  Description of Artificial Sequence: Synthetic oligonucleotide
gagauccuaaagauuuucu

SEQ ID NO: 1361839 - RNA, 19 nt, Artificial Sequence
  Description of Artificial Sequence: Synthetic oligonucleotide
gaacuuuugaugagcgcgu

SEQ ID NO: 1361840 - RNA, 19 nt, Artificial Sequence
  Description of Artificial Sequence: Synthetic oligonucleotide
guuaagugggccugggcau

SEQ ID NO: 1361841 - RNA, 19 nt, Artificial Sequence
  Description of Artificial Sequence: Synthetic oligonucleotide
cucgaguucauucugcauu

SEQ ID NO: 1361842 - RNA, 19 nt, Artificial Sequence
  Description of Artificial Sequence: Synthetic oligonucleotide
gggcauucauauccaauca

SEQ ID NO: 1361843 - RNA, 19 nt, Artificial Sequence
  Description of Artificial Sequence: Synthetic oligonucleotide
aaugucuguccuagcguuu

SEQ ID NO: 1361844 - RNA, 19 nt, Artificial Sequence
  Description of Artificial Sequence: Synthetic oligonucleotide
cuugggucgaugcuuccaa

SEQ ID NO: 1361845 - RNA, 19 nt, Artificial Sequence
  Description of Artificial Sequence: Synthetic oligonucleotide
augaaggugcgaagggaca

SEQ ID NO: 1361846 - RNA, 19 nt, Artificial Sequence
  Description of Artificial Sequence: Synthetic oligonucleotide
augagcgcgucuacaaagu

SEQ ID NO: 1361847 - RNA, 19 nt, Artificial Sequence
  Description of Artificial Sequence: Synthetic oligonucleotide
auccaaucacuagagucua

SEQ ID NO: 1361848 - RNA, 19 nt, Artificial Sequence
  Description of Artificial Sequence: Synthetic oligonucleotide
agugauccucagaggaaca

SEQ ID NO: 1361849 - RNA, 19 nt, Artificial Sequence
  Description of Artificial Sequence: Synthetic oligonucleotide
aucacagcuugggucgaug

SEQ ID NO: 1361850 - RNA, 19 nt, Artificial Sequence
  Description of Artificial Sequence: Synthetic oligonucleotide
uuaagugggccugggcauu

SEQ ID NO: 1361851 - RNA, 19 nt, Artificial Sequence
  Description of Artificial Sequence: Synthetic oligonucleotide
cugauaguguuugaaggcu

SEQ ID NO: 1361852 - RNA, 19 nt, Artificial Sequence
  Description of Artificial Sequence: Synthetic oligonucleotide
agccaaaggggcauuccgu

SEQ ID NO: 1361853 - RNA, 19 nt, Artificial Sequence
  Description of Artificial Sequence: Synthetic oligonucleotide
ggcauuccgugaauugucc

SEQ ID NO: 1361854 - RNA, 19 nt, Artificial Sequence
  Description of Artificial Sequence: Synthetic oligonucleotide
aggauuccuugagccauug

SEQ ID NO: 1361855 - RNA, 19 nt, Artificial Sequence
  Description of Artificial Sequence: Synthetic oligonucleotide
gguuccuacauguuccccu

SEQ ID NO: 1361856 - RNA, 19 nt, Artificial Sequence
  Description of Artificial Sequence: Synthetic oligonucleotide
guuaaagacugggaguuuu

SEQ ID NO: 1361857 - RNA, 19 nt, Artificial Sequence
  Description of Artificial Sequence: Synthetic oligonucleotide
uugggucgaugcuuccaau

SEQ ID NO: 1361858 - RNA, 19 nt, Artificial Sequence
  Description of Artificial Sequence: Synthetic oligonucleotide
cacaaccaagcuccaucuc

SEQ ID NO: 1361859 - RNA, 19 nt, Artificial Sequence
  Description of Artificial Sequence: Synthetic oligonucleotide
gguaacugggucaacugua

SEQ ID NO: 1361860 - RNA, 19 nt, Artificial Sequence
  Description of Artificial Sequence: Synthetic oligonucleotide
caggugucuuuauacucaa

SEQ ID NO: 1361861 - RNA, 19 nt, Artificial Sequence
  Description of Artificial Sequence: Synthetic oligonucleotide
cauuccgugaauuguccau

SEQ ID NO: 1361862 - RNA, 19 nt, Artificial Sequence
  Description of Artificial Sequence: Synthetic oligonucleotide
gucucccauggguucauaa

SEQ ID NO: 1361863 - RNA, 19 nt, Artificial Sequence
  Description of Artificial Sequence: Synthetic oligonucleotide
ccauuuacuugugcgauca

SEQ ID NO: 1361864 - RNA, 19 nt, Artificial Sequence
  Description of Artificial Sequence: Synthetic oligonucleotide
ugccggucuacuggagucu

SEQ ID NO: 1361865 - RNA, 19 nt, Artificial Sequence
  Description of Artificial Sequence: Synthetic oligonucleotide
cacauucaugaagcagcac

SEQ ID NO: 1361866 - RNA, 19 nt, Artificial Sequence
  Description of Artificial Sequence: Synthetic oligonucleotide
uaagugggccugggcauuc

SEQ ID NO: 1361867 - RNA, 19 nt, Artificial Sequence
  Description of Artificial Sequence: Synthetic oligonucleotide
auagcccgacauagaguag

SEQ ID NO: 1361868 - RNA, 19 nt, Artificial Sequence
  Description of Artificial Sequence: Synthetic oligonucleotide
cccgacauagaguagagau

SEQ ID NO: 1361869 - RNA, 19 nt, Artificial Sequence
  Description of Artificial Sequence: Synthetic oligonucleotide
gagauguaacuuagagacu

SEQ ID NO: 1361870 - RNA, 19 nt, Artificial Sequence
  Description of Artificial Sequence: Synthetic oligonucleotide
augauggcgucugucccau

SEQ ID NO: 1361871 - RNA, 19 nt, Artificial Sequence
  Description of Artificial Sequence: Synthetic oligonucleotide
cagcucagaauguuugggu

SEQ ID NO: 1361872 - RNA, 19 nt, Artificial Sequence
  Description of Artificial Sequence: Synthetic oligonucleotide
gcucagaauguuuggguua

SEQ ID NO: 1361873 - RNA, 19 nt, Artificial Sequence
  Description of Artificial Sequence: Synthetic oligonucleotide
gagcgcgucuacaaagucu

SEQ ID NO: 1361874 - RNA, 19 nt, Artificial Sequence
  Description of Artificial Sequence: Synthetic oligonucleotide
aggugucuuuauacucaag

SEQ ID NO: 1361875 - RNA, 19 nt, Artificial Sequence
  Description of Artificial Sequence: Synthetic oligonucleotide
ccgugaauuguccaucaca

SEQ ID NO: 1361876 - RNA, 19 nt, Artificial Sequence
  Description of Artificial Sequence: Synthetic oligonucleotide
gggaccacauuaugauguc

SEQ ID NO: 1361877 - RNA, 19 nt, Artificial Sequence
  Description of Artificial Sequence: Synthetic oligonucleotide
caguggaguauguguaacu

SEQ ID NO: 1361878 - RNA, 19 nt, Artificial Sequence
  Description of Artificial Sequence: Synthetic oligonucleotide
gcgucuacaaagucugaua

SEQ ID NO: 1361879 - RNA, 19 nt, Artificial Sequence
  Description of Artificial Sequence: Synthetic oligonucleotide
guagagauucaggucuccu

SEQ ID NO: 1361880 - RNA, 19 nt, Artificial Sequence
  Description of Artificial Sequence: Synthetic oligonucleotide
gcauuccgugaauugucca

SEQ ID NO: 1361881 - RNA, 19 nt, Artificial Sequence
  Description of Artificial Sequence: Synthetic oligonucleotide
gaaggugcgaagggacaua

SEQ ID NO: 1361882 - RNA, 19 nt, Artificial Sequence
  Description of Artificial Sequence: Synthetic oligonucleotide
gucaacuguacaggugucu

SEQ ID NO: 1361883 - RNA, 19 nt, Artificial Sequence
  Description of Artificial Sequence: Synthetic oligonucleotide
gggcauuccgugaauuguc

SEQ ID NO: 1361884 - RNA, 19 nt, Artificial Sequence
  Description of Artificial Sequence: Synthetic oligonucleotide
ggcccuccugacuucuccc

SEQ ID NO: 1361885 - RNA, 19 nt, Artificial Sequence
  Description of Artificial Sequence: Synthetic oligonucleotide
acaucacagcuugggucga

SEQ ID NO: 1361886 - RNA, 19 nt, Artificial Sequence
  Description of Artificial Sequence: Synthetic oligonucleotide
cugcuaccacaucacagcu

SEQ ID NO: 1361887 - RNA, 19 nt, Artificial Sequence
  Description of Artificial Sequence: Synthetic oligonucleotide
cucagaauguuuggguuau

SEQ ID NO: 1361888 - RNA, 19 nt, Artificial Sequence
  Description of Artificial Sequence: Synthetic oligonucleotide
caccugccggucuacugga

SEQ ID NO: 1361889 - RNA, 19 nt, Artificial Sequence
  Description of Artificial Sequence: Synthetic oligonucleotide
acugaucgcagagcaucuu

SEQ ID NO: 1361890 - RNA, 19 nt, Artificial Sequence
  Description of Artificial Sequence: Synthetic oligonucleotide
agaggcggucagugauccu

SEQ ID NO: 1361891 - RNA, 19 nt, Artificial Sequence
  Description of Artificial Sequence: Synthetic oligonucleotide
caguauuaucuggcgaugu

SEQ ID NO: 1361892 - RNA, 19 nt, Artificial Sequence
  Description of Artificial Sequence: Synthetic oligonucleotide
cgauuaugaaugguugguc

SEQ ID NO: 1361893 - RNA, 19 nt, Artificial Sequence
  Description of Artificial Sequence: Synthetic oligonucleotide
aggcggucagugauccuca

SEQ ID NO: 1361894 - RNA, 19 nt, Artificial Sequence
  Description of Artificial Sequence: Synthetic oligonucleotide
agacccacuuugaucccau

SEQ ID NO: 1361895 - RNA, 19 nt, Artificial Sequence
  Description of Artificial Sequence: Synthetic oligonucleotide
cuguccuagcguuuguauu

SEQ ID NO: 1361896 - RNA, 19 nt, Artificial Sequence
  Description of Artificial Sequence: Synthetic oligonucleotide
guguaacuaaagaggcggu

SEQ ID NO: 1361897 - RNA, 19 nt, Artificial Sequence
  Description of Artificial Sequence: Synthetic oligonucleotide
gagccauuguagggaccac

SEQ ID NO: 1361898 - RNA, 19 nt, Artificial Sequence
  Description of Artificial Sequence: Synthetic oligonucleotide
ccaaaggggcauuccguga

SEQ ID NO: 1361899 - RNA, 19 nt, Artificial Sequence
  Description of Artificial Sequence: Synthetic oligonucleotide
cugaucgcagagcaucuuu

SEQ ID NO: 1361900 - RNA, 19 nt, Artificial Sequence
  Description of Artificial Sequence: Synthetic oligonucleotide
cacaggcguuggagcagug

SEQ ID NO: 1361901 - RNA, 19 nt, Artificial Sequence
  Description of Artificial Sequence: Synthetic oligonucleotide
ggguuuccugucuuugagu

SEQ ID NO: 1361902 - RNA, 19 nt, Artificial Sequence
  Description of Artificial Sequence: Synthetic oligonucleotide
gucuguccuagcguuugua

SEQ ID NO: 1361903 - RNA, 19 nt, Artificial Sequence
  Description of Artificial Sequence: Synthetic oligonucleotide
ggggcauuccgugaauugu

SEQ ID NO: 1361904 - RNA, 19 nt, Artificial Sequence
  Description of Artificial Sequence: Synthetic oligonucleotide
gccaaaugaggagcagguc

SEQ ID NO: 1361905 - RNA, 19 nt, Artificial Sequence
  Description of Artificial Sequence: Synthetic oligonucleotide
gccuuagaucuuugguaaa

SEQ ID NO: 1361906 - RNA, 19 nt, Artificial Sequence
  Description of Artificial Sequence: Synthetic oligonucleotide
aggugcgaagggacauaca

SEQ ID NO: 1361907 - RNA, 19 nt, Artificial Sequence
  Description of Artificial Sequence: Synthetic oligonucleotide
cuggcccuccugacuucuc

SEQ ID NO: 1361908 - RNA, 19 nt, Artificial Sequence
  Description of Artificial Sequence: Synthetic oligonucleotide
gacccacuuugaucccaua

SEQ ID NO: 1361909 - RNA, 19 nt, Artificial Sequence
  Description of Artificial Sequence: Synthetic oligonucleotide
cagcauccgaguagaaauu

SEQ ID NO: 1361910 - RNA, 19 nt, Artificial Sequence
  Description of Artificial Sequence: Synthetic oligonucleotide
gcuugggucgaugcuucca

SEQ ID NO: 1361911 - RNA, 19 nt, Artificial Sequence
  Description of Artificial Sequence: Synthetic oligonucleotide
accugccggucuacuggag

SEQ ID NO: 1361912 - RNA, 19 nt, Artificial Sequence
  Description of Artificial Sequence: Synthetic oligonucleotide
cucggucagaaaucuuguu

SEQ ID NO: 1361913 - RNA, 19 nt, Artificial Sequence
  Description of Artificial Sequence: Synthetic oligonucleotide
gccauagacccacuuugau

SEQ ID NO: 1361914 - RNA, 19 nt, Artificial Sequence
  Description of Artificial Sequence: Synthetic oligonucleotide
gccggucuacuggagucug

SEQ ID NO: 1361915 - RNA, 19 nt, Artificial Sequence
  Description of Artificial Sequence: Synthetic oligonucleotide
ugucucccauggguucaua

SEQ ID NO: 1361916 - RNA, 19 nt, Artificial Sequence
  Description of Artificial Sequence: Synthetic oligonucleotide
ugauggcgucugucccaua

SEQ ID NO: 1361917 - RNA, 19 nt, Artificial Sequence
  Description of Artificial Sequence: Synthetic oligonucleotide
cgguucauauaaaaccggu

SEQ ID NO: 1361918 - RNA, 19 nt, Artificial Sequence
  Description of Artificial Sequence: Synthetic oligonucleotide
ccucggucagaaaucuugu

SEQ ID NO: 1361919 - RNA, 19 nt, Artificial Sequence
  Description of Artificial Sequence: Synthetic oligonucleotide
ggaccacauuaugaugucu

SEQ ID NO: 1361920 - RNA, 19 nt, Artificial Sequence
  Description of Artificial Sequence: Synthetic oligonucleotide
ccacugcuaccacaucaca

SEQ ID NO: 1361921 - RNA, 19 nt, Artificial Sequence
  Description of Artificial Sequence: Synthetic oligonucleotide
ccaaucacuagagucuaau

SEQ ID NO: 1361922 - RNA, 19 nt, Artificial Sequence
  Description of Artificial Sequence: Synthetic oligonucleotide
gccagcuucggagcucauc

SEQ ID NO: 1361923 - RNA, 19 nt, Artificial Sequence
  Description of Artificial Sequence: Synthetic oligonucleotide
guccuagcguuuguauuuu

SEQ ID NO: 1361924 - RNA, 19 nt, Artificial Sequence
  Description of Artificial Sequence: Synthetic oligonucleotide
cuugugcgaucaguauuau

SEQ ID NO: 1361925 - RNA, 19 nt, Artificial Sequence
  Description of Artificial Sequence: Synthetic oligonucleotide
gcccgacauagaguagaga

SEQ ID NO: 1361926 - RNA, 19 nt, Artificial Sequence
  Description of Artificial Sequence: Synthetic oligonucleotide
gcagagcaucuuugcacau

SEQ ID NO: 1361927 - RNA, 19 nt, Artificial Sequence
  Description of Artificial Sequence: Synthetic oligonucleotide
ccuccucggucagaaaucu

SEQ ID NO: 1361928 - RNA, 19 nt, Artificial Sequence
  Description of Artificial Sequence: Synthetic oligonucleotide
ccugccggucuacuggagu

SEQ ID NO: 1361929 - RNA, 19 nt, Artificial Sequence
  Description of Artificial Sequence: Synthetic oligonucleotide
ccacauuaugaugucuguu

SEQ ID NO: 1361930 - RNA, 19 nt, Artificial Sequence
  Description of Artificial Sequence: Synthetic oligonucleotide
ccucgaguucauucugcau

SEQ ID NO: 1361931 - RNA, 19 nt, Artificial Sequence
  Description of Artificial Sequence: Synthetic oligonucleotide
caucacagcuugggucgau

SEQ ID NO: 1361932 - RNA, 19 nt, Artificial Sequence
  Description of Artificial Sequence: Synthetic oligonucleotide
gcgcgucuacaaagucuga

SEQ ID NO: 1361933 - RNA, 19 nt, Artificial Sequence
  Description of Artificial Sequence: Synthetic oligonucleotide
gcgaagggacauacacgau

SEQ ID NO: 1361934 - RNA, 19 nt, Artificial Sequence
  Description of Artificial Sequence: Synthetic oligonucleotide
cgcgucuacaaagucugau

SEQ ID NO: 1361935 - RNA, 19 nt, Artificial Sequence
  Description of Artificial Sequence: Synthetic oligonucleotide
ccguuuccuuugacagguu

SEQ ID NO: 1361936 - RNA, 19 nt, Artificial Sequence
  Description of Artificial Sequence: Synthetic oligonucleotide
aauauuguauuucuacccc

SEQ ID NO: 1361937 - RNA, 19 nt, Artificial Sequence
  Description of Artificial Sequence: Synthetic oligonucleotide
caugauuaagaaaagaucg

SEQ ID NO: 1361938 - RNA, 19 nt, Artificial Sequence
  Description of Artificial Sequence: Synthetic oligonucleotide
uguacaauggcccauagag

SEQ ID NO: 1361939 - RNA, 19 nt, Artificial Sequence
  Description of Artificial Sequence: Synthetic oligonucleotide
aagaacuacuccuagcucc

SEQ ID NO: 1361940 - RNA, 19 nt, Artificial Sequence
  Description of Artificial Sequence: Synthetic oligonucleotide
acuuaaauaaacuaacuag

SEQ ID NO: 1361941 - RNA, 19 nt, Artificial Sequence
  Description of Artificial Sequence: Synthetic oligonucleotide
aauacuuaaauaaacuaac

SEQ ID NO: 1361942 - RNA, 19 nt, Artificial Sequence
  Description of Artificial Sequence: Synthetic oligonucleotide
aaugagagauuucaaauag

SEQ ID NO: 1361943 - RNA, 19 nt, Artificial Sequence
  Description of Artificial Sequence: Synthetic oligonucleotide
uuuauaaagcugaagagug

SEQ ID NO: 1361944 - RNA, 19 nt, Artificial Sequence
  Description of Artificial Sequence: Synthetic oligonucleotide
uguaccauagaaauaaaag

SEQ ID NO: 1361945 - RNA, 19 nt, Artificial Sequence
  Description of Artificial Sequence: Synthetic oligonucleotide
aaauaauguacaauggccc

SEQ ID NO: 1361946 - RNA, 19 nt, Artificial Sequence
  Description of Artificial Sequence: Synthetic oligonucleotide
auuacauguaucuuagccc

SEQ ID NO: 1361947 - RNA, 19 nt, Artificial Sequence
  Description of Artificial Sequence: Synthetic oligonucleotide
aaguauaauuccugcaacc

SEQ ID NO: 1361948 - RNA, 19 nt, Artificial Sequence
  Description of Artificial Sequence: Synthetic oligonucleotide
aucaauauuguauuucuac

SEQ ID NO: 1361949 - RNA, 19 nt, Artificial Sequence
  Description of Artificial Sequence: Synthetic oligonucleotide
aauaauaggugcacaagcc

SEQ ID NO: 1361950 - RNA, 19 nt, Artificial Sequence
  Description of Artificial Sequence: Synthetic oligonucleotide
ucuauucugaauuuuaaca

SEQ ID NO: 1361951 - RNA, 19 nt, Artificial Sequence
  Description of Artificial Sequence: Synthetic oligonucleotide
aaauaaaagucauuccuug

SEQ ID NO: 1361952 - RNA, 19 nt, Artificial Sequence
  Description of Artificial Sequence: Synthetic oligonucleotide
acaaguuauguuuauaaag

SEQ ID NO: 1361953 - RNA, 19 nt, Artificial Sequence
  Description of Artificial Sequence: Synthetic oligonucleotide
uuuagaauuagucaaugaa

SEQ ID NO: 1361954 - RNA, 19 nt, Artificial Sequence
  Description of Artificial Sequence: Synthetic oligonucleotide
ucuaccgauacccagaugu

SEQ ID NO: 1361955 - RNA, 19 nt, Artificial Sequence
  Description of Artificial Sequence: Synthetic oligonucleotide
aaaguuaaccucuaggcau

SEQ ID NO: 1361956 - RNA, 19 nt, Artificial Sequence
  Description of Artificial Sequence: Synthetic oligonucleotide
acaaaugggauacacggac

SEQ ID NO: 1361957 - RNA, 19 nt, Artificial Sequence
  Description of Artificial Sequence: Synthetic oligonucleotide
uuaaaggaguaucugagca

SEQ ID NO: 1361958 - RNA, 19 nt, Artificial Sequence
  Description of Artificial Sequence: Synthetic oligonucleotide
aaaugggauacacggacac

SEQ ID NO: 1361959 - RNA, 19 nt, Artificial Sequence
  Description of Artificial Sequence: Synthetic oligonucleotide
auaaaugaaggucuuguag

SEQ ID NO: 1361960 - RNA, 19 nt, Artificial Sequence
  Description of Artificial Sequence: Synthetic oligonucleotide
cuauaauucaguauucaag

SEQ ID NO: 1361961 - RNA, 19 nt, Artificial Sequence
  Description of Artificial Sequence: Synthetic oligonucleotide
uaaaccaaaguuaaccucu

SEQ ID NO: 1361962 - RNA, 19 nt, Artificial Sequence
  Description of Artificial Sequence: Synthetic oligonucleotide
aaaacauuaucuacccacc

SEQ ID NO: 1361963 - RNA, 19 nt, Artificial Sequence
  Description of Artificial Sequence: Synthetic oligonucleotide
cuacauauucuucugagcc

SEQ ID NO: 1361964 - RNA, 19 nt, Artificial Sequence
  Description of Artificial Sequence: Synthetic oligonucleotide
uuagaauuagucaaugaaa

SEQ ID NO: 1361965 - RNA, 19 nt, Artificial Sequence
  Description of Artificial Sequence: Synthetic oligonucleotide
aaauuagugaaaugaagau

SEQ ID NO: 1361966 - RNA, 19 nt, Artificial Sequence
  Description of Artificial Sequence: Synthetic oligonucleotide
aaaaucuaccgauacccag

SEQ ID NO: 1361967 - RNA, 19 nt, Artificial Sequence
  Description of Artificial Sequence: Synthetic oligonucleotide
ucuaaauucuggcagaaau

SEQ ID NO: 1361968 - RNA, 19 nt, Artificial Sequence
  Description of Artificial Sequence: Synthetic oligonucleotide
cauuacauguaucuuagcc

SEQ ID NO: 1361969 - RNA, 19 nt, Artificial Sequence
  Description of Artificial Sequence: Synthetic oligonucleotide
uagaacuaugaaaaguucc

SEQ ID NO: 1361970 - RNA, 19 nt, Artificial Sequence
  Description of Artificial Sequence: Synthetic oligonucleotide
uagaauuagucaaugaaaa

SEQ ID NO: 1361971 - RNA, 19 nt, Artificial Sequence
  Description of Artificial Sequence: Synthetic oligonucleotide
aaaggaguaucugagcaac

SEQ ID NO: 1361972 - RNA, 19 nt, Artificial Sequence
  Description of Artificial Sequence: Synthetic oligonucleotide
uaucuuagcccacacaggc

SEQ ID NO: 1361973 - RNA, 19 nt, Artificial Sequence
  Description of Artificial Sequence: Synthetic oligonucleotide
caauauuguauuucuaccc

SEQ ID NO: 1361974 - RNA, 19 nt, Artificial Sequence
  Description of Artificial Sequence: Synthetic oligonucleotide
uagaagaguauauugaaaa

SEQ ID NO: 1361975 - RNA, 19 nt, Artificial Sequence
  Description of Artificial Sequence: Synthetic oligonucleotide
agaagaguauauugaaaac

SEQ ID NO: 1361976 - RNA, 19 nt, Artificial Sequence
  Description of Artificial Sequence: Synthetic oligonucleotide
uuaucaauauuguauuucu

SEQ ID NO: 1361977 - RNA, 19 nt, Artificial Sequence
  Description of Artificial Sequence: Synthetic oligonucleotide
ugaaguauaauuccugcaa

SEQ ID NO: 1361978 - RNA, 19 nt, Artificial Sequence
  Description of Artificial Sequence: Synthetic oligonucleotide
acugcuagcgaucugaaca

SEQ ID NO: 1361979 - RNA, 19 nt, Artificial Sequence
  Description of Artificial Sequence: Synthetic oligonucleotide
uuugagaauaauaggugca

SEQ ID NO: 1361980 - RNA, 19 nt, Artificial Sequence
  Description of Artificial Sequence: Synthetic oligonucleotide
acaaaugcuaaguggaaag

SEQ ID NO: 1361981 - RNA, 19 nt, Artificial Sequence
  Description of Artificial Sequence: Synthetic oligonucleotide
ugaguugugacauuuuaga

SEQ ID NO: 1361982 - RNA, 19 nt, Artificial Sequence
  Description of Artificial Sequence: Synthetic oligonucleotide
gaguuuugagaauaauagg

SEQ ID NO: 1361983 - RNA, 19 nt, Artificial Sequence
  Description of Artificial Sequence: Synthetic oligonucleotide
uuuagaguuugcaugaaau

SEQ ID NO: 1361984 - RNA, 19 nt, Artificial Sequence
  Description of Artificial Sequence: Synthetic oligonucleotide
cuuacaagaguuugguucc

SEQ ID NO: 1361985 - RNA, 19 nt, Artificial Sequence
  Description of Artificial Sequence: Synthetic oligonucleotide
uauaauuccugcaaccggu

SEQ ID NO: 1361986 - RNA, 19 nt, Artificial Sequence
  Description of Artificial Sequence: Synthetic oligonucleotide
uaccauagaaauaaaaguu

SEQ ID NO: 1361987 - RNA, 19 nt, Artificial Sequence
  Description of Artificial Sequence: Synthetic oligonucleotide
acuagaauuacuaaguggu

SEQ ID NO: 1361988 - RNA, 19 nt, Artificial Sequence
  Description of Artificial Sequence: Synthetic oligonucleotide
aacuauagccuuuccuuuc

SEQ ID NO: 1361989 - RNA, 19 nt, Artificial Sequence
  Description of Artificial Sequence: Synthetic oligonucleotide
ucuucacucauuaugaguu

SEQ ID NO: 1361990 - RNA, 19 nt, Artificial Sequence
  Description of Artificial Sequence: Synthetic oligonucleotide
uugaucaugagacaucuau

SEQ ID NO: 1361991 - RNA, 19 nt, Artificial Sequence
  Description of Artificial Sequence: Synthetic oligonucleotide
uacuuaaauaaacuaacua

SEQ ID NO: 1361992 - RNA, 19 nt, Artificial Sequence
  Description of Artificial Sequence: Synthetic oligonucleotide
acuaacuagaaaucaguug

SEQ ID NO: 1361993 - RNA, 19 nt, Artificial Sequence
  Description of Artificial Sequence: Synthetic oligonucleotide
aauuuagaauuagucaaug

SEQ ID NO: 1361994 - RNA, 19 nt, Artificial Sequence
  Description of Artificial Sequence: Synthetic oligonucleotide
aaaaugacaacaaaugcua

SEQ ID NO: 1361995 - RNA, 19 nt, Artificial Sequence
  Description of Artificial Sequence: Synthetic oligonucleotide
gagguagaagaguauauug

SEQ ID NO: 1361996 - RNA, 19 nt, Artificial Sequence
  Description of Artificial Sequence: Synthetic oligonucleotide
aguauaauuccugcaaccg

SEQ ID NO: 1361997 - RNA, 19 nt, Artificial Sequence
  Description of Artificial Sequence: Synthetic oligonucleotide
aguugugacauuuuagagu

SEQ ID NO: 1361998 - RNA, 19 nt, Artificial Sequence
  Description of Artificial Sequence: Synthetic oligonucleotide
ugaucugaauugcaaaaca

SEQ ID NO: 1361999 - RNA, 19 nt, Artificial Sequence
  Description of Artificial Sequence: Synthetic oligonucleotide
acuauagccuuuccuuucc

SEQ ID NO: 1362000 - RNA, 19 nt, Artificial Sequence
  Description of Artificial Sequence: Synthetic oligonucleotide
ucaugagacaucuauugcu

SEQ ID NO: 1362001 - RNA, 19 nt, Artificial Sequence
  Description of Artificial Sequence: Synthetic oligonucleotide
aagaaacuauagccuuucc

SEQ ID NO: 1362002 - RNA, 19 nt, Artificial Sequence
  Description of Artificial Sequence: Synthetic oligonucleotide
aauuacuaagugguaauga

SEQ ID NO: 1362003 - RNA, 19 nt, Artificial Sequence
  Description of Artificial Sequence: Synthetic oligonucleotide
acuaacaaaugggauacac

SEQ ID NO: 1362004 - RNA, 19 nt, Artificial Sequence
  Description of Artificial Sequence: Synthetic oligonucleotide
uguuuaucaauauuguauu

SEQ ID NO: 1362005 - RNA, 19 nt, Artificial Sequence
  Description of Artificial Sequence: Synthetic oligonucleotide
uuacuaagugguaaugaga

SEQ ID NO: 1362006 - RNA, 19 nt, Artificial Sequence
  Description of Artificial Sequence: Synthetic oligonucleotide
uuauuagccuuucuuacaa

SEQ ID NO: 1362007 - RNA, 19 nt, Artificial Sequence
  Description of Artificial Sequence: Synthetic oligonucleotide
aauguuuaucaauauugua

SEQ ID NO: 1362008 - RNA, 19 nt, Artificial Sequence
  Description of Artificial Sequence: Synthetic oligonucleotide
auuagugaaaugaagauuu

SEQ ID NO: 1362009 - RNA, 19 nt, Artificial Sequence
  Description of Artificial Sequence: Synthetic oligonucleotide
aaucaacauuuaaacaagg

SEQ ID NO: 1362010 - RNA, 19 nt, Artificial Sequence
  Description of Artificial Sequence: Synthetic oligonucleotide
uucaaggugcauuacacaa

SEQ ID NO: 1362011 - RNA, 19 nt, Artificial Sequence
  Description of Artificial Sequence: Synthetic oligonucleotide
uauacaauuggaugggcaa

SEQ ID NO: 1362012 - RNA, 19 nt, Artificial Sequence
  Description of Artificial Sequence: Synthetic oligonucleotide
guuauguuuauaaagcuga

SEQ ID NO: 1362013 - RNA, 19 nt, Artificial Sequence
  Description of Artificial Sequence: Synthetic oligonucleotide
aaauguuuaucaauauugu

SEQ ID NO: 1362014 - RNA, 19 nt, Artificial Sequence
  Description of Artificial Sequence: Synthetic oligonucleotide
cuugacaugaacacgcauc

SEQ ID NO: 1362015 - RNA, 19 nt, Artificial Sequence
  Description of Artificial Sequence: Synthetic oligonucleotide
auaaacuaacuagaaauca

SEQ ID NO: 1362016 - RNA, 19 nt, Artificial Sequence
  Description of Artificial Sequence: Synthetic oligonucleotide
uucuaaguugcacuuuggc

SEQ ID NO: 1362017 - RNA, 19 nt, Artificial Sequence
  Description of Artificial Sequence: Synthetic oligonucleotide
aauuccuggguagucacag

SEQ ID NO: 1362018 - RNA, 19 nt, Artificial Sequence
  Description of Artificial Sequence: Synthetic oligonucleotide
gaaguauaauuccugcaac

SEQ ID NO: 1362019 - RNA, 19 nt, Artificial Sequence
  Description of Artificial Sequence: Synthetic oligonucleotide
uuaaaccaaaguuaaccuc

SEQ ID NO: 1362020 - RNA, 19 nt, Artificial Sequence
  Description of Artificial Sequence: Synthetic oligonucleotide
gaguugugacauuuuagag

SEQ ID NO: 1362021 - RNA, 19 nt, Artificial Sequence
  Description of Artificial Sequence: Synthetic oligonucleotide
auuacuuacaagaguuugg

SEQ ID NO: 1362022 - RNA, 19 nt, Artificial Sequence
  Description of Artificial Sequence: Synthetic oligonucleotide
aaacuaacuagaaaucagu

SEQ ID NO: 1362023 - RNA, 19 nt, Artificial Sequence
  Description of Artificial Sequence: Synthetic oligonucleotide
uuaucuacccaccuuuuau

SEQ ID NO: 1362024 - RNA, 19 nt, Artificial Sequence
  Description of Artificial Sequence: Synthetic oligonucleotide
guagauuucuguaccauag

SEQ ID NO: 1362025 - RNA, 19 nt, Artificial Sequence
  Description of Artificial Sequence: Synthetic oligonucleotide
ugacaacaaaugcuaagug

SEQ ID NO: 1362026 - RNA, 19 nt, Artificial Sequence
  Description of Artificial Sequence: Synthetic oligonucleotide
aggugcacaagccauucac

SEQ ID NO: 1362027 - RNA, 19 nt, Artificial Sequence
  Description of Artificial Sequence: Synthetic oligonucleotide
aaacauuaucuacccaccu

SEQ ID NO: 1362028 - RNA, 19 nt, Artificial Sequence
  Description of Artificial Sequence: Synthetic oligonucleotide
aauucaguauucaaguaaa

SEQ ID NO: 1362029 - RNA, 19 nt, Artificial Sequence
  Description of Artificial Sequence: Synthetic oligonucleotide
aaaugcuaaguggaaagcu

SEQ ID NO: 1362030 - RNA, 19 nt, Artificial Sequence
  Description of Artificial Sequence: Synthetic oligonucleotide
agaaacuauagccuuuccu

SEQ ID NO: 1362031 - RNA, 19 nt, Artificial Sequence
  Description of Artificial Sequence: Synthetic oligonucleotide
gaaauuucuaaguugcacu

SEQ ID NO: 1362032 - RNA, 19 nt, Artificial Sequence
  Description of Artificial Sequence: Synthetic oligonucleotide
uucacuuauuaaacacuag

SEQ ID NO: 1362033 - RNA, 19 nt, Artificial Sequence
  Description of Artificial Sequence: Synthetic oligonucleotide
uguauuucuaccccugcau

SEQ ID NO: 1362034 - RNA, 19 nt, Artificial Sequence
  Description of Artificial Sequence: Synthetic oligonucleotide
auaauaggugcacaagcca

SEQ ID NO: 1362035 - RNA, 19 nt, Artificial Sequence
  Description of Artificial Sequence: Synthetic oligonucleotide
acaacaaaugcuaagugga

SEQ ID NO: 1362036 - RNA, 19 nt, Artificial Sequence
  Description of Artificial Sequence: Synthetic oligonucleotide
ugcuaaguggaaagcuugg

SEQ ID NO: 1362037 - RNA, 19 nt, Artificial Sequence
  Description of Artificial Sequence: Synthetic oligonucleotide
uuaacagguuguuuaaaau

SEQ ID NO: 1362038 - RNA, 19 nt, Artificial Sequence
  Description of Artificial Sequence: Synthetic oligonucleotide
auguuaaaggaguaucuga

SEQ ID NO: 1362039 - RNA, 19 nt, Artificial Sequence
  Description of Artificial Sequence: Synthetic oligonucleotide
uucccaauuuauuaucugu

SEQ ID NO: 1362040 - RNA, 19 nt, Artificial Sequence
  Description of Artificial Sequence: Synthetic oligonucleotide
cauauggaggaaugggugc

SEQ ID NO: 1362041 - RNA, 19 nt, Artificial Sequence
  Description of Artificial Sequence: Synthetic oligonucleotide
uaauaggugcacaagccau

SEQ ID NO: 1362042 - RNA, 19 nt, Artificial Sequence
  Description of Artificial Sequence: Synthetic oligonucleotide
ugauuaagaaaagaucgaa

SEQ ID NO: 1362043 - RNA, 19 nt, Artificial Sequence
  Description of Artificial Sequence: Synthetic oligonucleotide
caaccggucuucaaggugc

SEQ ID NO: 1362044 - RNA, 19 nt, Artificial Sequence
  Description of Artificial Sequence: Synthetic oligonucleotide
aacauauggaggaaugggu

SEQ ID NO: 1362045 - RNA, 19 nt, Artificial Sequence
  Description of Artificial Sequence: Synthetic oligonucleotide
agaauuacuaagugguaau

SEQ ID NO: 1362046 - RNA, 19 nt, Artificial Sequence
  Description of Artificial Sequence: Synthetic oligonucleotide
aaacuauagccuuuccuuu

SEQ ID NO: 1362047 - RNA, 19 nt, Artificial Sequence
  Description of Artificial Sequence: Synthetic oligonucleotide
caagacuagaaaccaacac

SEQ ID NO: 1362048 - RNA, 19 nt, Artificial Sequence
  Description of Artificial Sequence: Synthetic oligonucleotide
agacuagaaaccaacaccu

SEQ ID NO: 1362049 - RNA, 19 nt, Artificial Sequence
  Description of Artificial Sequence: Synthetic oligonucleotide
acuggauucgaucccaaga

SEQ ID NO: 1362050 - RNA, 19 nt, Artificial Sequence
  Description of Artificial Sequence: Synthetic oligonucleotide
uuacuuacaagaguuuggu

SEQ ID NO: 1362051 - RNA, 19 nt, Artificial Sequence
  Description of Artificial Sequence: Synthetic oligonucleotide
caacauauggaggaauggg

SEQ ID NO: 1362052 - RNA, 19 nt, Artificial Sequence
  Description of Artificial Sequence: Synthetic oligonucleotide
ucccaauuuauuaucuguc

SEQ ID NO: 1362053 - RNA, 19 nt, Artificial Sequence
  Description of Artificial Sequence: Synthetic oligonucleotide
auuaucugucacucgucuc

SEQ ID NO: 1362054 - RNA, 19 nt, Artificial Sequence
  Description of Artificial Sequence: Synthetic oligonucleotide
cuagcgaucugaacagucc

SEQ ID NO: 1362055 - RNA, 19 nt, Artificial Sequence
  Description of Artificial Sequence: Synthetic oligonucleotide
uagaauuacuaagugguaa

SEQ ID NO: 1362056 - RNA, 19 nt, Artificial Sequence
  Description of Artificial Sequence: Synthetic oligonucleotide
guaccauagaaauaaaagu

SEQ ID NO: 1362057 - RNA, 19 nt, Artificial Sequence
  Description of Artificial Sequence: Synthetic oligonucleotide
aacauuaucuacccaccuu

SEQ ID NO: 1362058 - RNA, 19 nt, Artificial Sequence
  Description of Artificial Sequence: Synthetic oligonucleotide
acaucuauugcuauucaug

SEQ ID NO: 1362059 - RNA, 19 nt, Artificial Sequence
  Description of Artificial Sequence: Synthetic oligonucleotide
cuacccaccuuuuauuuac

SEQ ID NO: 1362060 - RNA, 19 nt, Artificial Sequence
  Description of Artificial Sequence: Synthetic oligonucleotide
uaaaagucauuccuugguu

SEQ ID NO: 1362061 - RNA, 19 nt, Artificial Sequence
  Description of Artificial Sequence: Synthetic oligonucleotide
aaaucuaccgauacccaga

SEQ ID NO: 1362062 - RNA, 19 nt, Artificial Sequence
  Description of Artificial Sequence: Synthetic oligonucleotide
auauuguauuucuaccccu

SEQ ID NO: 1362063 - RNA, 19 nt, Artificial Sequence
  Description of Artificial Sequence: Synthetic oligonucleotide
uccuuauuagccuuucuua

SEQ ID NO: 1362064 - RNA, 19 nt, Artificial Sequence
  Description of Artificial Sequence: Synthetic oligonucleotide
uuauguugcuuuaguuuca

SEQ ID NO: 1362065 - RNA, 19 nt, Artificial Sequence
  Description of Artificial Sequence: Synthetic oligonucleotide
uucuuacaagcaacaaucu

SEQ ID NO: 1362066 - RNA, 19 nt, Artificial Sequence
  Description of Artificial Sequence: Synthetic oligonucleotide
acauuaucuacccaccuuu

SEQ ID NO: 1362067 - RNA, 19 nt, Artificial Sequence
  Description of Artificial Sequence: Synthetic oligonucleotide
aacagagcaaccccacuaa

SEQ ID NO: 1362068 - RNA, 19 nt, Artificial Sequence
  Description of Artificial Sequence: Synthetic oligonucleotide
ucuuacaagcaacaaucua

SEQ ID NO: 1362069 - RNA, 19 nt, Artificial Sequence
  Description of Artificial Sequence: Synthetic oligonucleotide
agccauucacuuauuaaac

SEQ ID NO: 1362070 - RNA, 19 nt, Artificial Sequence
  Description of Artificial Sequence: Synthetic oligonucleotide
auacacggacaccaaaucu

SEQ ID NO: 1362071 - RNA, 19 nt, Artificial Sequence
  Description of Artificial Sequence: Synthetic oligonucleotide
uagcauuacauguaucuua

SEQ ID NO: 1362072 - RNA, 19 nt, Artificial Sequence
  Description of Artificial Sequence: Synthetic oligonucleotide
uaaccucuaggcauguuaa

SEQ ID NO: 1362073 - RNA, 19 nt, Artificial Sequence
  Description of Artificial Sequence: Synthetic oligonucleotide
agaguaagcuauaauucag

SEQ ID NO: 1362074 - RNA, 19 nt, Artificial Sequence
  Description of Artificial Sequence: Synthetic oligonucleotide
ucaguugaucugaauugca

SEQ ID NO: 1362075 - RNA, 19 nt, Artificial Sequence
  Description of Artificial Sequence: Synthetic oligonucleotide
agcauuacauguaucuuag

SEQ ID NO: 1362076 - RNA, 19 nt, Artificial Sequence
  Description of Artificial Sequence: Synthetic oligonucleotide
aaaucuauucugaauuuua

SEQ ID NO: 1362077 - RNA, 19 nt, Artificial Sequence
  Description of Artificial Sequence: Synthetic oligonucleotide
auacaauuggaugggcaac

SEQ ID NO: 1362078 - RNA, 19 nt, Artificial Sequence
  Description of Artificial Sequence: Synthetic oligonucleotide
ugcaaaugcugcuugcccu

SEQ ID NO: 1362079 - RNA, 19 nt, Artificial Sequence
  Description of Artificial Sequence: Synthetic oligonucleotide
uucgaucccaagaacuacu

SEQ ID NO: 1362080 - RNA, 19 nt, Artificial Sequence
  Description of Artificial Sequence: Synthetic oligonucleotide
acaacacauaaaugaaggu

SEQ ID NO: 1362081 - RNA, 19 nt, Artificial Sequence
  Description of Artificial Sequence: Synthetic oligonucleotide
uuggaugggcaacaugaca

SEQ ID NO: 1362082 - RNA, 19 nt, Artificial Sequence
  Description of Artificial Sequence: Synthetic oligonucleotide
uuccuuauuagccuuucuu

SEQ ID NO: 1362083 - RNA, 19 nt, Artificial Sequence
  Description of Artificial Sequence: Synthetic oligonucleotide
ugaaauuccuggguaguca

SEQ ID NO: 1362084 - RNA, 19 nt, Artificial Sequence
  Description of Artificial Sequence: Synthetic oligonucleotide
aaucuaccgauacccagau

SEQ ID NO: 1362085 - RNA, 19 nt, Artificial Sequence
  Description of Artificial Sequence: Synthetic oligonucleotide
uacacggacaccaaaucuu

SEQ ID NO: 1362086 - RNA, 19 nt, Artificial Sequence
  Description of Artificial Sequence: Synthetic oligonucleotide
gauacacggacaccaaauc

SEQ ID NO: 1362087 - RNA, 19 nt, Artificial Sequence
  Description of Artificial Sequence: Synthetic oligonucleotide
uuauguuuauaaagcugaa

SEQ ID NO: 1362088 - RNA, 19 nt, Artificial Sequence
  Description of Artificial Sequence: Synthetic oligonucleotide
aaguuuggagacaaguuau

SEQ ID NO: 1362089 - RNA, 19 nt, Artificial Sequence
  Description of Artificial Sequence: Synthetic oligonucleotide
aucuauugcuauucaugag

SEQ ID NO: 1362090 - RNA, 19 nt, Artificial Sequence
  Description of Artificial Sequence: Synthetic oligonucleotide
acucauuaugaguuucuca

SEQ ID NO: 1362091 - RNA, 19 nt, Artificial Sequence
  Description of Artificial Sequence: Synthetic oligonucleotide
agaguuugguuccuuauua

SEQ ID NO: 1362092 - RNA, 19 nt, Artificial Sequence
  Description of Artificial Sequence: Synthetic oligonucleotide
uugagaauaauaggugcac

SEQ ID NO: 1362093 - RNA, 19 nt, Artificial Sequence
  Description of Artificial Sequence: Synthetic oligonucleotide
aacaaaugcuaaguggaaa

SEQ ID NO: 1362094 - RNA, 19 nt, Artificial Sequence
  Description of Artificial Sequence: Synthetic oligonucleotide
guaaacugagguagaagag

SEQ ID NO: 1362095 - RNA, 19 nt, Artificial Sequence
  Description of Artificial Sequence: Synthetic oligonucleotide
uaaaggaguaucugagcaa

SEQ ID NO: 1362096 - RNA, 19 nt, Artificial Sequence
  Description of Artificial Sequence: Synthetic oligonucleotide
cauuaugaguuucucauaa

SEQ ID NO: 1362097 - RNA, 19 nt, Artificial Sequence
  Description of Artificial Sequence: Synthetic oligonucleotide
gacaaguuauguuuauaaa

SEQ ID NO: 1362098 - RNA, 19 nt, Artificial Sequence
  Description of Artificial Sequence: Synthetic oligonucleotide
auucgaucccaagaacuac

SEQ ID NO: 1362099 - RNA, 19 nt, Artificial Sequence
  Description of Artificial Sequence: Synthetic oligonucleotide
guaaugagagauuucaaau

SEQ ID NO: 1362100 - RNA, 19 nt, Artificial Sequence
  Description of Artificial Sequence: Synthetic oligonucleotide
uagcgaucugaacagucca

SEQ ID NO: 1362101 - RNA, 19 nt, Artificial Sequence
  Description of Artificial Sequence: Synthetic oligonucleotide
ucaaggugcauuacacaaa

SEQ ID NO: 1362102 - RNA, 19 nt, Artificial Sequence
  Description of Artificial Sequence: Synthetic oligonucleotide
uacaauuggaugggcaaca

SEQ ID NO: 1362103 - RNA, 19 nt, Artificial Sequence
  Description of Artificial Sequence: Synthetic oligonucleotide
cauguuaaaggaguaucug

SEQ ID NO: 1362104 - RNA, 19 nt, Artificial Sequence
  Description of Artificial Sequence: Synthetic oligonucleotide
guauucaaguaaacugagg

SEQ ID NO: 1362105 - RNA, 19 nt, Artificial Sequence
  Description of Artificial Sequence: Synthetic oligonucleotide
uagugaaaugaagauuucu

SEQ ID NO: 1362106 - RNA, 19 nt, Artificial Sequence
  Description of Artificial Sequence: Synthetic oligonucleotide
cuuauuagccuuucuuaca

SEQ ID NO: 1362107 - RNA, 19 nt, Artificial Sequence
  Description of Artificial Sequence: Synthetic oligonucleotide
auucuagcauuacauguau

SEQ ID NO: 1362108 - RNA, 19 nt, Artificial Sequence
  Description of Artificial Sequence: Synthetic oligonucleotide
caaaguuaaccucuaggca

SEQ ID NO: 1362109 - RNA, 19 nt, Artificial Sequence
  Description of Artificial Sequence: Synthetic oligonucleotide
ugagaauaauaggugcaca

SEQ ID NO: 1362110 - RNA, 19 nt, Artificial Sequence
  Description of Artificial Sequence: Synthetic oligonucleotide
uuccuggguagucacagaa

SEQ ID NO: 1362111 - RNA, 19 nt, Artificial Sequence
  Description of Artificial Sequence: Synthetic oligonucleotide
guugugacauuuuagaguu

SEQ ID NO: 1362112 - RNA, 19 nt, Artificial Sequence
  Description of Artificial Sequence: Synthetic oligonucleotide
cugcaaccggucuucaagg

SEQ ID NO: 1362113 - RNA, 19 nt, Artificial Sequence
  Description of Artificial Sequence: Synthetic oligonucleotide
acagagcaaccccacuaac

SEQ ID NO: 1362114 - RNA, 19 nt, Artificial Sequence
  Description of Artificial Sequence: Synthetic oligonucleotide
uuagugaaaugaagauuuc

SEQ ID NO: 1362115 - RNA, 19 nt, Artificial Sequence
  Description of Artificial Sequence: Synthetic oligonucleotide
uauuucuaccccugcauuu

SEQ ID NO: 1362116 - RNA, 19 nt, Artificial Sequence
  Description of Artificial Sequence: Synthetic oligonucleotide
guuuauaaagcugaagagu

SEQ ID NO: 1362117 - RNA, 19 nt, Artificial Sequence
  Description of Artificial Sequence: Synthetic oligonucleotide
aaggaacacuuagagaaaa

SEQ ID NO: 1362118 - RNA, 19 nt, Artificial Sequence
  Description of Artificial Sequence: Synthetic oligonucleotide
acuuuaaaccaaaguuaac

SEQ ID NO: 1362119 - RNA, 19 nt, Artificial Sequence
  Description of Artificial Sequence: Synthetic oligonucleotide
aacuaacuagaaaucaguu

SEQ ID NO: 1362120 - RNA, 19 nt, Artificial Sequence
  Description of Artificial Sequence: Synthetic oligonucleotide
uacuccuagcuccuugaca

SEQ ID NO: 1362121 - RNA, 19 nt, Artificial Sequence
  Description of Artificial Sequence: Synthetic oligonucleotide
accuuuuauuuacauuacu

SEQ ID NO: 1362122 - RNA, 19 nt, Artificial Sequence
  Description of Artificial Sequence: Synthetic oligonucleotide
accucuaggcauguuaaag

SEQ ID NO: 1362123 - RNA, 19 nt, Artificial Sequence
  Description of Artificial Sequence: Synthetic oligonucleotide
uaacuagaaaucaguugau

SEQ ID NO: 1362124 - RNA, 19 nt, Artificial Sequence
  Description of Artificial Sequence: Synthetic oligonucleotide
ugaacacgcaucugucccc

SEQ ID NO: 1362125 - RNA, 19 nt, Artificial Sequence
  Description of Artificial Sequence: Synthetic oligonucleotide
caaaugcuaaguggaaagc

SEQ ID NO: 1362126 - RNA, 19 nt, Artificial Sequence
  Description of Artificial Sequence: Synthetic oligonucleotide
gguaaugagagauuucaaa

SEQ ID NO: 1362127 - RNA, 19 nt, Artificial Sequence
  Description of Artificial Sequence: Synthetic oligonucleotide
cugcuagcgaucugaacag

SEQ ID NO: 1362128 - RNA, 19 nt, Artificial Sequence
  Description of Artificial Sequence: Synthetic oligonucleotide
aauuaacagguuguuuaaa

SEQ ID NO: 1362129 - RNA, 19 nt, Artificial Sequence
  Description of Artificial Sequence: Synthetic oligonucleotide
augaaauuccuggguaguc

SEQ ID NO: 1362130 - RNA, 19 nt, Artificial Sequence
  Description of Artificial Sequence: Synthetic oligonucleotide
agguagaagaguauauuga

SEQ ID NO: 1362131 - RNA, 19 nt, Artificial Sequence
  Description of Artificial Sequence: Synthetic oligonucleotide
uggauucgaucccaagaac

SEQ ID NO: 1362132 - RNA, 19 nt, Artificial Sequence
  Description of Artificial Sequence: Synthetic oligonucleotide
uaauuccugcaaccggucu

SEQ ID NO: 1362133 - RNA, 19 nt, Artificial Sequence
  Description of Artificial Sequence: Synthetic oligonucleotide
gaaaccaacuuuaauucua

SEQ ID NO: 1362134 - RNA, 19 nt, Artificial Sequence
  Description of Artificial Sequence: Synthetic oligonucleotide
augauuaagaaaagaucga

SEQ ID NO: 1362135 - RNA, 19 nt, Artificial Sequence
  Description of Artificial Sequence: Synthetic oligonucleotide
agccuuucuuacaagcaac

SEQ ID NO: 1362136 - RNA, 19 nt, Artificial Sequence
  Description of Artificial Sequence: Synthetic oligonucleotide
aaugaagauuucugccauu

SEQ ID NO: 1362137 - RNA, 19 nt, Artificial Sequence
  Description of Artificial Sequence: Synthetic oligonucleotide
acaugaacacgcaucuguc

SEQ ID NO: 1362138 - RNA, 19 nt, Artificial Sequence
  Description of Artificial Sequence: Synthetic oligonucleotide
gaucugaauugcaaaacaa

SEQ ID NO: 1362139 - RNA, 19 nt, Artificial Sequence
  Description of Artificial Sequence: Synthetic oligonucleotide
acuacuccuagcuccuuga

SEQ ID NO: 1362140 - RNA, 19 nt, Artificial Sequence
  Description of Artificial Sequence: Synthetic oligonucleotide
auuggaugggcaacaugac

SEQ ID NO: 1362141 - RNA, 19 nt, Artificial Sequence
  Description of Artificial Sequence: Synthetic oligonucleotide
uucaugaguugugacauuu

SEQ ID NO: 1362142 - RNA, 19 nt, Artificial Sequence
  Description of Artificial Sequence: Synthetic oligonucleotide
aaacauuaucuaccugcua

SEQ ID NO: 1362143 - RNA, 19 nt, Artificial Sequence
  Description of Artificial Sequence: Synthetic oligonucleotide
ugguuucuauucaacuuua

SEQ ID NO: 1362144 - RNA, 19 nt, Artificial Sequence
  Description of Artificial Sequence: Synthetic oligonucleotide
uaucuacccaccuuuuauu

SEQ ID NO: 1362145 - RNA, 19 nt, Artificial Sequence
  Description of Artificial Sequence: Synthetic oligonucleotide
ugguaaugagagauuucaa

SEQ ID NO: 1362146 - RNA, 19 nt, Artificial Sequence
  Description of Artificial Sequence: Synthetic oligonucleotide
ucauuaugaguuucucaua

SEQ ID NO: 1362147 - RNA, 19 nt, Artificial Sequence
  Description of Artificial Sequence: Synthetic oligonucleotide
auuaugaguuucucauaau

SEQ ID NO: 1362148 - RNA, 19 nt, Artificial Sequence
  Description of Artificial Sequence: Synthetic oligonucleotide
ccuuauuagccuuucuuac

SEQ ID NO: 1362149 - RNA, 19 nt, Artificial Sequence
  Description of Artificial Sequence: Synthetic oligonucleotide
caccuuuuauuuacauuac

SEQ ID NO: 1362150 - RNA, 19 nt, Artificial Sequence
  Description of Artificial Sequence: Synthetic oligonucleotide
ucauaauuaacagguuguu

SEQ ID NO: 1362151 - RNA, 19 nt, Artificial Sequence
  Description of Artificial Sequence: Synthetic oligonucleotide
uaccgauacccagaugucc

SEQ ID NO: 1362152 - RNA, 19 nt, Artificial Sequence
  Description of Artificial Sequence: Synthetic oligonucleotide
uacaagcaacaaucuacac

SEQ ID NO: 1362153 - RNA, 19 nt, Artificial Sequence
  Description of Artificial Sequence: Synthetic oligonucleotide
aauuucuaaguugcacuuu

SEQ ID NO: 1362154 - RNA, 19 nt, Artificial Sequence
  Description of Artificial Sequence: Synthetic oligonucleotide
uacccagauguccaaguua

SEQ ID NO: 1362155 - RNA, 19 nt, Artificial Sequence
  Description of Artificial Sequence: Synthetic oligonucleotide
gcaugaaauuccuggguag

SEQ ID NO: 1362156 - RNA, 19 nt, Artificial Sequence
  Description of Artificial Sequence: Synthetic oligonucleotide
auuaaacacuagaauuacu

SEQ ID NO: 1362157 - RNA, 19 nt, Artificial Sequence
  Description of Artificial Sequence: Synthetic oligonucleotide
agcaaccccacuaacaaau

SEQ ID NO: 1362158 - RNA, 19 nt, Artificial Sequence
  Description of Artificial Sequence: Synthetic oligonucleotide
agugguaaugagagauuuc

SEQ ID NO: 1362159 - RNA, 19 nt, Artificial Sequence
  Description of Artificial Sequence: Synthetic oligonucleotide
auuaucuacccaccuuuua

SEQ ID NO: 1362160 - RNA, 19 nt, Artificial Sequence
  Description of Artificial Sequence: Synthetic oligonucleotide
ucgaucccaagaacuacuc

SEQ ID NO: 1362161 - RNA, 19 nt, Artificial Sequence
  Description of Artificial Sequence: Synthetic oligonucleotide
gcuacauauucuucugagc

SEQ ID NO: 1362162 - RNA, 19 nt, Artificial Sequence
  Description of Artificial Sequence: Synthetic oligonucleotide
ucuacccaccuuuuauuua

SEQ ID NO: 1362163 - RNA, 19 nt, Artificial Sequence
  Description of Artificial Sequence: Synthetic oligonucleotide
ccccaauuauuuauguugc

SEQ ID NO: 1362164 - RNA, 19 nt, Artificial Sequence
  Description of Artificial Sequence: Synthetic oligonucleotide
caaggugcauuacacaaaa

SEQ ID NO: 1362165 - RNA, 19 nt, Artificial Sequence
  Description of Artificial Sequence: Synthetic oligonucleotide
cuaagugguaaugagagau

SEQ ID NO: 1362166 - RNA, 19 nt, Artificial Sequence
  Description of Artificial Sequence: Synthetic oligonucleotide
caugagacaucuauugcua

SEQ ID NO: 1362167 - RNA, 19 nt, Artificial Sequence
  Description of Artificial Sequence: Synthetic oligonucleotide
uucugccauuugaucauga

SEQ ID NO: 1362168 - RNA, 19 nt, Artificial Sequence
  Description of Artificial Sequence: Synthetic oligonucleotide
uucucauaauuaacagguu

SEQ ID NO: 1362169 - RNA, 19 nt, Artificial Sequence
  Description of Artificial Sequence: Synthetic oligonucleotide
cuggauucgaucccaagaa

SEQ ID NO: 1362170 - RNA, 19 nt, Artificial Sequence
  Description of Artificial Sequence: Synthetic oligonucleotide
uaggcauguuaaaggagua

SEQ ID NO: 1362171 - RNA, 19 nt, Artificial Sequence
  Description of Artificial Sequence: Synthetic oligonucleotide
uccuugacaugaacacgca

SEQ ID NO: 1362172 - RNA, 19 nt, Artificial Sequence
  Description of Artificial Sequence: Synthetic oligonucleotide
aucuacccaccuuuuauuu

SEQ ID NO: 1362173 - RNA, 19 nt, Artificial Sequence
  Description of Artificial Sequence: Synthetic oligonucleotide
uucuagcauuacauguauc

SEQ ID NO: 1362174 - RNA, 19 nt, Artificial Sequence
  Description of Artificial Sequence: Synthetic oligonucleotide
acaagacuagaaaccaaca

SEQ ID NO: 1362175 - RNA, 19 nt, Artificial Sequence
  Description of Artificial Sequence: Synthetic oligonucleotide
ccaccuuuuauuuacauua

SEQ ID NO: 1362176 - RNA, 19 nt, Artificial Sequence
  Description of Artificial Sequence: Synthetic oligonucleotide
caagaacuacuccuagcuc

SEQ ID NO: 1362177 - RNA, 19 nt, Artificial Sequence
  Description of Artificial Sequence: Synthetic oligonucleotide
aguggaaagcuugggaaaa

SEQ ID NO: 1362178 - RNA, 19 nt, Artificial Sequence
  Description of Artificial Sequence: Synthetic oligonucleotide
cuguaccauagaaauaaaa

SEQ ID NO: 1362179 - RNA, 19 nt, Artificial Sequence
  Description of Artificial Sequence: Synthetic oligonucleotide
aguaucugagcaacauaug

SEQ ID NO: 1362180 - RNA, 19 nt, Artificial Sequence
  Description of Artificial Sequence: Synthetic oligonucleotide
aauaggugcacaagccauu

SEQ ID NO: 1362181 - RNA, 19 nt, Artificial Sequence
  Description of Artificial Sequence: Synthetic oligonucleotide
cuucaaggugcauuacaca

SEQ ID NO: 1362182 - RNA, 19 nt, Artificial Sequence
  Description of Artificial Sequence: Synthetic oligonucleotide
cuagcuccuugacaugaac

SEQ ID NO: 1362183 - RNA, 19 nt, Artificial Sequence
  Description of Artificial Sequence: Synthetic oligonucleotide
gauucgaucccaagaacua

SEQ ID NO: 1362184 - RNA, 19 nt, Artificial Sequence
  Description of Artificial Sequence: Synthetic oligonucleotide
auguacaauggcccauaga

SEQ ID NO: 1362185 - RNA, 19 nt, Artificial Sequence
  Description of Artificial Sequence: Synthetic oligonucleotide
gauacccagauguccaagu

SEQ ID NO: 1362186 - RNA, 19 nt, Artificial Sequence
  Description of Artificial Sequence: Synthetic oligonucleotide
ucacucgucucugacugcu

SEQ ID NO: 1362187 - RNA, 19 nt, Artificial Sequence
  Description of Artificial Sequence: Synthetic oligonucleotide
caauuggaugggcaacaug

SEQ ID NO: 1362188 - RNA, 19 nt, Artificial Sequence
  Description of Artificial Sequence: Synthetic oligonucleotide
gcuauaauucaguauucaa

SEQ ID NO: 1362189 - RNA, 19 nt, Artificial Sequence
  Description of Artificial Sequence: Synthetic oligonucleotide
cagagcaaccccacuaaca

SEQ ID NO: 1362190 - RNA, 19 nt, Artificial Sequence
  Description of Artificial Sequence: Synthetic oligonucleotide
caaaugggauacacggaca

SEQ ID NO: 1362191 - RNA, 19 nt, Artificial Sequence
  Description of Artificial Sequence: Synthetic oligonucleotide
ugcaaccggucuucaaggu

SEQ ID NO: 1362192 - RNA, 19 nt, Artificial Sequence
  Description of Artificial Sequence: Synthetic oligonucleotide
ugagcaacauauggaggaa

SEQ ID NO: 1362193 - RNA, 19 nt, Artificial Sequence
  Description of Artificial Sequence: Synthetic oligonucleotide
aaggugcauuacacaaaag

SEQ ID NO: 1362194 - RNA, 19 nt, Artificial Sequence
  Description of Artificial Sequence: Synthetic oligonucleotide
aggaguaucugagcaacau

SEQ ID NO: 1362195 - RNA, 19 nt, Artificial Sequence
  Description of Artificial Sequence: Synthetic oligonucleotide
acagguuguuuaaaauacu

SEQ ID NO: 1362196 - RNA, 19 nt, Artificial Sequence
  Description of Artificial Sequence: Synthetic oligonucleotide
augagagauuucaaauaga

SEQ ID NO: 1362197 - RNA, 19 nt, Artificial Sequence
  Description of Artificial Sequence: Synthetic oligonucleotide
ccugcaaccggucuucaag

SEQ ID NO: 1362198 - RNA, 19 nt, Artificial Sequence
  Description of Artificial Sequence: Synthetic oligonucleotide
cuaccgauacccagauguc

SEQ ID NO: 1362199 - RNA, 19 nt, Artificial Sequence
  Description of Artificial Sequence: Synthetic oligonucleotide
aacacgcaucuguccccuc

SEQ ID NO: 1362200 - RNA, 19 nt, Artificial Sequence
  Description of Artificial Sequence: Synthetic oligonucleotide
ggcauguuaaaggaguauc

SEQ ID NO: 1362201 - RNA, 19 nt, Artificial Sequence
  Description of Artificial Sequence: Synthetic oligonucleotide
aaauuccuggguagucaca

SEQ ID NO: 1362202 - RNA, 19 nt, Artificial Sequence
  Description of Artificial Sequence: Synthetic oligonucleotide
accgauacccagaugucca

SEQ ID NO: 1362203 - RNA, 19 nt, Artificial Sequence
  Description of Artificial Sequence: Synthetic oligonucleotide
acacgcaucuguccccuca

SEQ ID NO: 1362204 - RNA, 19 nt, Artificial Sequence
  Description of Artificial Sequence: Synthetic oligonucleotide
cugacugcuagcgaucuga

SEQ ID NO: 1362205 - RNA, 19 nt, Artificial Sequence
  Description of Artificial Sequence: Synthetic oligonucleotide
gcuaaguggaaagcuuggg

SEQ ID NO: 1362206 - RNA, 19 nt, Artificial Sequence
  Description of Artificial Sequence: Synthetic oligonucleotide
caguugaucugaauugcaa

SEQ ID NO: 1362207 - RNA, 19 nt, Artificial Sequence
  Description of Artificial Sequence: Synthetic oligonucleotide
ugacugcuagcgaucugaa

SEQ ID NO: 1362208 - RNA, 19 nt, Artificial Sequence
  Description of Artificial Sequence: Synthetic oligonucleotide
gacugcuagcgaucugaac

SEQ ID NO: 1362209 - RNA, 19 nt, Artificial Sequence
  Description of Artificial Sequence: Synthetic oligonucleotide
caauuuagaauuagucaau

SEQ ID NO: 1362210 - RNA, 19 nt, Artificial Sequence
  Description of Artificial Sequence: Synthetic oligonucleotide
cacuggauucgaucccaag

SEQ ID NO: 1362211 - RNA, 19 nt, Artificial Sequence
  Description of Artificial Sequence: Synthetic oligonucleotide
aaggaguaucugagcaaca

SEQ ID NO: 1362212 - RNA, 19 nt, Artificial Sequence
  Description of Artificial Sequence: Synthetic oligonucleotide
ugacaugaacacgcaucug

SEQ ID NO: 1362213 - RNA, 19 nt, Artificial Sequence
  Description of Artificial Sequence: Synthetic oligonucleotide
gacaucuauugcuauucau

SEQ ID NO: 1362214 - RNA, 19 nt, Artificial Sequence
  Description of Artificial Sequence: Synthetic oligonucleotide
guagucacagaaauuucua

SEQ ID NO: 1362215 - RNA, 19 nt, Artificial Sequence
  Description of Artificial Sequence: Synthetic oligonucleotide
cugcuugcccuauccugcc

SEQ ID NO: 1362216 - RNA, 19 nt, Artificial Sequence
  Description of Artificial Sequence: Synthetic oligonucleotide
gacuagaaaccaacaccuc

SEQ ID NO: 1362217 - RNA, 19 nt, Artificial Sequence
  Description of Artificial Sequence: Synthetic oligonucleotide
cuauugcuauucaugaguu

SEQ ID NO: 1362218 - RNA, 19 nt, Artificial Sequence
  Description of Artificial Sequence: Synthetic oligonucleotide
cacgcaucuguccccucag

SEQ ID NO: 1362219 - RNA, 19 nt, Artificial Sequence
  Description of Artificial Sequence: Synthetic oligonucleotide
cuacuccuagcuccuugac

SEQ ID NO: 1362220 - RNA, 19 nt, Artificial Sequence
  Description of Artificial Sequence: Synthetic oligonucleotide
gaacaguccauuuguccau

SEQ ID NO: 1362221 - RNA, 19 nt, Artificial Sequence
  Description of Artificial Sequence: Synthetic oligonucleotide
gagacaaguuauguuuaua

SEQ ID NO: 1362222 - RNA, 19 nt, Artificial Sequence
  Description of Artificial Sequence: Synthetic oligonucleotide
gcaaccggucuucaaggug

SEQ ID NO: 1362223 - RNA, 19 nt, Artificial Sequence
  Description of Artificial Sequence: Synthetic oligonucleotide
ugguuccuuauuagccuuu

SEQ ID NO: 1362224 - RNA, 19 nt, Artificial Sequence
  Description of Artificial Sequence: Synthetic oligonucleotide
cugcuacauauucuucuga

SEQ ID NO: 1362225 - RNA, 19 nt, Artificial Sequence
  Description of Artificial Sequence: Synthetic oligonucleotide
acaauuggaugggcaacau

SEQ ID NO: 1362226 - RNA, 19 nt, Artificial Sequence
  Description of Artificial Sequence: Synthetic oligonucleotide
aucugucacucgucucuga

SEQ ID NO: 1362227 - RNA, 19 nt, Artificial Sequence
  Description of Artificial Sequence: Synthetic oligonucleotide
aucuaccgauacccagaug

SEQ ID NO: 1362228 - RNA, 19 nt, Artificial Sequence
  Description of Artificial Sequence: Synthetic oligonucleotide
uggcccauagaggaacuuu

SEQ ID NO: 1362229 - RNA, 19 nt, Artificial Sequence
  Description of Artificial Sequence: Synthetic oligonucleotide
ggauucgaucccaagaacu

SEQ ID NO: 1362230 - RNA, 19 nt, Artificial Sequence
  Description of Artificial Sequence: Synthetic oligonucleotide
aggcauguuaaaggaguau

SEQ ID NO: 1362231 - RNA, 19 nt, Artificial Sequence
  Description of Artificial Sequence: Synthetic oligonucleotide
aucuuagcccacacaggca

SEQ ID NO: 1362232 - RNA, 19 nt, Artificial Sequence
  Description of Artificial Sequence: Synthetic oligonucleotide
cccacuaacaaaugggaua

SEQ ID NO: 1362233 - RNA, 19 nt, Artificial Sequence
  Description of Artificial Sequence: Synthetic oligonucleotide
acacauaaaugaaggucuu

SEQ ID NO: 1362234 - RNA, 19 nt, Artificial Sequence
  Description of Artificial Sequence: Synthetic oligonucleotide
guauuucuaccccugcauu

SEQ ID NO: 1362235 - RNA, 19 nt, Artificial Sequence
  Description of Artificial Sequence: Synthetic oligonucleotide
acacggacaccaaaucuuu

SEQ ID NO: 1362236 - RNA, 19 nt, Artificial Sequence
  Description of Artificial Sequence: Synthetic oligonucleotide
cuccuagcuccuugacaug

SEQ ID NO: 1362237 - RNA, 19 nt, Artificial Sequence
  Description of Artificial Sequence: Synthetic oligonucleotide
aagcaacaaucuacacuau

SEQ ID NO: 1362238 - RNA, 19 nt, Artificial Sequence
  Description of Artificial Sequence: Synthetic oligonucleotide
ugcuagcgaucugaacagu

SEQ ID NO: 1362239 - RNA, 19 nt, Artificial Sequence
  Description of Artificial Sequence: Synthetic oligonucleotide
aaccggucuucaaggugca

SEQ ID NO: 1362240 - RNA, 19 nt, Artificial Sequence
  Description of Artificial Sequence: Synthetic oligonucleotide
caugaaauuccuggguagu

SEQ ID NO: 1362241 - RNA, 19 nt, Artificial Sequence
  Description of Artificial Sequence: Synthetic oligonucleotide
gccauuugaucaugagaca

SEQ ID NO: 1362242 - RNA, 19 nt, Artificial Sequence
  Description of Artificial Sequence: Synthetic oligonucleotide
gcacaagccauucacuuau

SEQ ID NO: 1362243 - RNA, 19 nt, Artificial Sequence
  Description of Artificial Sequence: Synthetic oligonucleotide
gcuagcgaucugaacaguc

SEQ ID NO: 1362244 - RNA, 19 nt, Artificial Sequence
  Description of Artificial Sequence: Synthetic oligonucleotide
cauuuugcucuugaaguau

SEQ ID NO: 1362245 - RNA, 19 nt, Artificial Sequence
  Description of Artificial Sequence: Synthetic oligonucleotide
agcgaucugaacaguccau

SEQ ID NO: 1362246 - RNA, 19 nt, Artificial Sequence
  Description of Artificial Sequence: Synthetic oligonucleotide
agcugaguuuugagaauaa

SEQ ID NO: 1362247 - RNA, 19 nt, Artificial Sequence
  Description of Artificial Sequence: Synthetic oligonucleotide
cauauucuucugagccaaa

SEQ ID NO: 1362248 - RNA, 19 nt, Artificial Sequence
  Description of Artificial Sequence: Synthetic oligonucleotide
cugcccaccccaauuauuu

SEQ ID NO: 1362249 - RNA, 19 nt, Artificial Sequence
  Description of Artificial Sequence: Synthetic oligonucleotide
cuuagcccacacaggcaaa

SEQ ID NO: 1362250 - RNA, 19 nt, Artificial Sequence
  Description of Artificial Sequence: Synthetic oligonucleotide
gaacacgcaucuguccccu

SEQ ID NO: 1362251 - RNA, 19 nt, Artificial Sequence
  Description of Artificial Sequence: Synthetic oligonucleotide
gggauacacggacaccaaa

SEQ ID NO: 1362252 - RNA, 19 nt, Artificial Sequence
  Description of Artificial Sequence: Synthetic oligonucleotide
ggauacacggacaccaaau

SEQ ID NO: 1362253 - RNA, 19 nt, Artificial Sequence
  Description of Artificial Sequence: Synthetic oligonucleotide
cgaucccaagaacuacucc

SEQ ID NO: 1362254 - RNA, 19 nt, Artificial Sequence
  Description of Artificial Sequence: Synthetic oligonucleotide
cauuaucuacccaccuuuu

SEQ ID NO: 1362255 - RNA, 19 nt, Artificial Sequence
  Description of Artificial Sequence: Synthetic oligonucleotide
cuagcauuacauguaucuu

SEQ ID NO: 1362256 - RNA, 19 nt, Artificial Sequence
  Description of Artificial Sequence: Synthetic oligonucleotide
ggaaggucacuggauucga

SEQ ID NO: 1362257 - RNA, 19 nt, Artificial Sequence
  Description of Artificial Sequence: Synthetic oligonucleotide
aucuguccccucagguacu

SEQ ID NO: 1362258 - RNA, 19 nt, Artificial Sequence
  Description of Artificial Sequence: Synthetic oligonucleotide
ccuggguagucacagaaau

SEQ ID NO: 1362259 - RNA, 19 nt, Artificial Sequence
  Description of Artificial Sequence: Synthetic oligonucleotide
aggcaaagaguaagcuaua

SEQ ID NO: 1362260 - RNA, 19 nt, Artificial Sequence
  Description of Artificial Sequence: Synthetic oligonucleotide
ggucuucaaggugcauuac

SEQ ID NO: 1362261 - RNA, 19 nt, Artificial Sequence
  Description of Artificial Sequence: Synthetic oligonucleotide
ggugcacaagccauucacu

SEQ ID NO: 1362262 - RNA, 19 nt, Artificial Sequence
  Description of Artificial Sequence: Synthetic oligonucleotide
caccccaauuauuuauguu

SEQ ID NO: 1362263 - RNA, 19 nt, Artificial Sequence
  Description of Artificial Sequence: Synthetic oligonucleotide
gcccaccccaauuauuuau

SEQ ID NO: 1362264 - RNA, 19 nt, Artificial Sequence
  Description of Artificial Sequence: Synthetic oligonucleotide
gaguggaaugaagcagguu

SEQ ID NO: 1362265 - RNA, 19 nt, Artificial Sequence
  Description of Artificial Sequence: Synthetic oligonucleotide
cacucgucucugacugcua

SEQ ID NO: 1362266 - RNA, 19 nt, Artificial Sequence
  Description of Artificial Sequence: Synthetic oligonucleotide
ccaccccaauuauuuaugu

SEQ ID NO: 1362267 - RNA, 19 nt, Artificial Sequence
  Description of Artificial Sequence: Synthetic oligonucleotide
cacggacaccaaaucuuuu

SEQ ID NO: 1362268 - RNA, 19 nt, Artificial Sequence
  Description of Artificial Sequence: Synthetic oligonucleotide
caacaccuccuuucccaau

SEQ ID NO: 1362269 - RNA, 19 nt, Artificial Sequence
  Description of Artificial Sequence: Synthetic oligonucleotide
accggucuucaaggugcau

SEQ ID NO: 1362270 - RNA, 19 nt, Artificial Sequence
  Description of Artificial Sequence: Synthetic oligonucleotide
cccaccuuuuauuuacauu

SEQ ID NO: 1362271 - RNA, 19 nt, Artificial Sequence
  Description of Artificial Sequence: Synthetic oligonucleotide
ccgauacccagauguccaa

SEQ ID NO: 1362272 - RNA, 19 nt, Artificial Sequence
  Description of Artificial Sequence: Synthetic oligonucleotide
gaacuacuccuagcuccuu

SEQ ID NO: 1362273 - RNA, 19 nt, Artificial Sequence
  Description of Artificial Sequence: Synthetic oligonucleotide
gcgaucugaacaguccauu

SEQ ID NO: 1362274 - RNA, 19 nt, Artificial Sequence
  Description of Artificial Sequence: Synthetic oligonucleotide
cgaucugaacaguccauuu

SEQ ID NO: 1362275 - RNA, 19 nt, Artificial Sequence
  Description of Artificial Sequence: Synthetic oligonucleotide
cgucucugacugcuagcga

SEQ ID NO: 1362276 - RNA, 19 nt, Artificial Sequence
  Description of Artificial Sequence: Synthetic oligonucleotide
uauauauauauauaaaugu

SEQ ID NO: 1362277 - RNA, 19 nt, Artificial Sequence
  Description of Artificial Sequence: Synthetic oligonucleotide
aauggcaacacucaaaacu

SEQ ID NO: 1362278 - RNA, 19 nt, Artificial Sequence
  Description of Artificial Sequence: Synthetic oligonucleotide
gaagcuaacaaccaagagg

SEQ ID NO: 1362279 - RNA, 19 nt, Artificial Sequence
  Description of Artificial Sequence: Synthetic oligonucleotide
uauauauauauauauauaa

SEQ ID NO: 1362280 - RNA, 19 nt, Artificial Sequence
  Description of Artificial Sequence: Synthetic oligonucleotide
agguguaaaacuucgaagc

SEQ ID NO: 1362281 - RNA, 19 nt, Artificial Sequence
  Description of Artificial Sequence: Synthetic oligonucleotide
uauauauauauauauauau

SEQ ID NO: 1362282 - RNA, 19 nt, Artificial Sequence
  Description of Artificial Sequence: Synthetic oligonucleotide
aaaucccuguccuauaagc

SEQ ID NO: 1362283 - RNA, 19 nt, Artificial Sequence
  Description of Artificial Sequence: Synthetic oligonucleotide
aaaugagccacucccaucg

SEQ ID NO: 1362284 - RNA, 19 nt, Artificial Sequence
  Description of Artificial Sequence: Synthetic oligonucleotide
aauccuaaaagugaauuac

SEQ ID NO: 1362285 - RNA, 19 nt, Artificial Sequence
  Description of Artificial Sequence: Synthetic oligonucleotide
uauauauauauauauaaau

SEQ ID NO: 1362286 - RNA, 19 nt, Artificial Sequence
  Description of Artificial Sequence: Synthetic oligonucleotide
aagaucuuugaucgaaccc

SEQ ID NO: 1362287 - RNA, 19 nt, Artificial Sequence
  Description of Artificial Sequence: Synthetic oligonucleotide
aaauaaccauaacaugccc

SEQ ID NO: 1362288 - RNA, 19 nt, Artificial Sequence
  Description of Artificial Sequence: Synthetic oligonucleotide
uauauauauauaaauguau

SEQ ID NO: 1362289 - RNA, 19 nt, Artificial Sequence
  Description of Artificial Sequence: Synthetic oligonucleotide
aaauguauaauacauucua

SEQ ID NO: 1362290 - RNA, 19 nt, Artificial Sequence
  Description of Artificial Sequence: Synthetic oligonucleotide
ugugcugacauuuuacagg

SEQ ID NO: 1362291 - RNA, 19 nt, Artificial Sequence
  Description of Artificial Sequence: Synthetic oligonucleotide
uacaccaguaauaacaucu

SEQ ID NO: 1362292 - RNA, 19 nt, Artificial Sequence
  Description of Artificial Sequence: Synthetic oligonucleotide
uguaaugcucaacagaacu

SEQ ID NO: 1362293 - RNA, 19 nt, Artificial Sequence
  Description of Artificial Sequence: Synthetic oligonucleotide
ucuacuguaaaagugaggu

SEQ ID NO: 1362294 - RNA, 19 nt, Artificial Sequence
  Description of Artificial Sequence: Synthetic oligonucleotide
uccuaaaagugaauuacgg

SEQ ID NO: 1362295 - RNA, 19 nt, Artificial Sequence
  Description of Artificial Sequence: Synthetic oligonucleotide
uguaaaacuucgaagcuug

SEQ ID NO: 1362296 - RNA, 19 nt, Artificial Sequence
  Description of Artificial Sequence: Synthetic oligonucleotide
acugcauaaaucccugucc

SEQ ID NO: 1362297 - RNA, 19 nt, Artificial Sequence
  Description of Artificial Sequence: Synthetic oligonucleotide
aaaacuucgaagcuuguau

SEQ ID NO: 1362298 - RNA, 19 nt, Artificial Sequence
  Description of Artificial Sequence: Synthetic oligonucleotide
guaacuacaaguuuuguuc

SEQ ID NO: 1362299 - RNA, 19 nt, Artificial Sequence
  Description of Artificial Sequence: Synthetic oligonucleotide
auauauauauauauaaaug

SEQ ID NO: 1362300 - RNA, 19 nt, Artificial Sequence
  Description of Artificial Sequence: Synthetic oligonucleotide
uguccuauaagccauaguu

SEQ ID NO: 1362301 - RNA, 19 nt, Artificial Sequence
  Description of Artificial Sequence: Synthetic oligonucleotide
aaccauaacaugcccguac

SEQ ID NO: 1362302 - RNA, 19 nt, Artificial Sequence
  Description of Artificial Sequence: Synthetic oligonucleotide
auacgugucccuuaaugcc

SEQ ID NO: 1362303 - RNA, 19 nt, Artificial Sequence
  Description of Artificial Sequence: Synthetic oligonucleotide
aagcuaacaaccaagaggu

SEQ ID NO: 1362304 - RNA, 19 nt, Artificial Sequence
  Description of Artificial Sequence: Synthetic oligonucleotide
ucugaagcuaacaaccaag

SEQ ID NO: 1362305 - RNA, 19 nt, Artificial Sequence
  Description of Artificial Sequence: Synthetic oligonucleotide
uauaugguuguugauaacc

SEQ ID NO: 1362306 - RNA, 19 nt, Artificial Sequence
  Description of Artificial Sequence: Synthetic oligonucleotide
aauaaccauaacaugcccg

SEQ ID NO: 1362307 - RNA, 19 nt, Artificial Sequence
  Description of Artificial Sequence: Synthetic oligonucleotide
uauauaugguuguugauaa

SEQ ID NO: 1362308 - RNA, 19 nt, Artificial Sequence
  Description of Artificial Sequence: Synthetic oligonucleotide
uccuauaagccauaguuca

SEQ ID NO: 1362309 - RNA, 19 nt, Artificial Sequence
  Description of Artificial Sequence: Synthetic oligonucleotide
uguauagauucaauagaag

SEQ ID NO: 1362310 - RNA, 19 nt, Artificial Sequence
  Description of Artificial Sequence: Synthetic oligonucleotide
uucuaucuuacccuaacca

SEQ ID NO: 1362311 - RNA, 19 nt, Artificial Sequence
  Description of Artificial Sequence: Synthetic oligonucleotide
uauacgugucccuuaaugc

SEQ ID NO: 1362312 - RNA, 19 nt, Artificial Sequence
  Description of Artificial Sequence: Synthetic oligonucleotide
uguccuaggacacuggugu

SEQ ID NO: 1362313 - RNA, 19 nt, Artificial Sequence
  Description of Artificial Sequence: Synthetic oligonucleotide
uucagcuauauauauauau

SEQ ID NO: 1362314 - RNA, 19 nt, Artificial Sequence
  Description of Artificial Sequence: Synthetic oligonucleotide
aaggggaagucauuaauca

SEQ ID NO: 1362315 - RNA, 19 nt, Artificial Sequence
  Description of Artificial Sequence: Synthetic oligonucleotide
ucaacagauaugcuaauuc

SEQ ID NO: 1362316 - RNA, 19 nt, Artificial Sequence
  Description of Artificial Sequence: Synthetic oligonucleotide
uaccgauagaccuugaaac

SEQ ID NO: 1362317 - RNA, 19 nt, Artificial Sequence
  Description of Artificial Sequence: Synthetic oligonucleotide
uaaauguauaauacauucu

SEQ ID NO: 1362318 - RNA, 19 nt, Artificial Sequence
  Description of Artificial Sequence: Synthetic oligonucleotide
uacggaauuggauaagcag

SEQ ID NO: 1362319 - RNA, 19 nt, Artificial Sequence
  Description of Artificial Sequence: Synthetic oligonucleotide
ugugaccaaaguuaaauaa

SEQ ID NO: 1362320 - RNA, 19 nt, Artificial Sequence
  Description of Artificial Sequence: Synthetic oligonucleotide
auucauuagacaaugauaa

SEQ ID NO: 1362321 - RNA, 19 nt, Artificial Sequence
  Description of Artificial Sequence: Synthetic oligonucleotide
cauuaaucaaucacaugcc

SEQ ID NO: 1362322 - RNA, 19 nt, Artificial Sequence
  Description of Artificial Sequence: Synthetic oligonucleotide
aagguuaugugcugaagga

SEQ ID NO: 1362323 - RNA, 19 nt, Artificial Sequence
  Description of Artificial Sequence: Synthetic oligonucleotide
cuaacaaccaagagguccc

SEQ ID NO: 1362324 - RNA, 19 nt, Artificial Sequence
  Description of Artificial Sequence: Synthetic oligonucleotide
auuacggaauuggauaagc

SEQ ID NO: 1362325 - RNA, 19 nt, Artificial Sequence
  Description of Artificial Sequence: Synthetic oligonucleotide
caagguuaugugcugaagg

SEQ ID NO: 1362326 - RNA, 19 nt, Artificial Sequence
  Description of Artificial Sequence: Synthetic oligonucleotide
ugggcucaacucaagaggg

SEQ ID NO: 1362327 - RNA, 19 nt, Artificial Sequence
  Description of Artificial Sequence: Synthetic oligonucleotide
uuaguuuaacugcauaaau

SEQ ID NO: 1362328 - RNA, 19 nt, Artificial Sequence
  Description of Artificial Sequence: Synthetic oligonucleotide
ucccacauugaaaacuccg

SEQ ID NO: 1362329 - RNA, 19 nt, Artificial Sequence
  Description of Artificial Sequence: Synthetic oligonucleotide
cuuccuaguaugaaaaguc

SEQ ID NO: 1362330 - RNA, 19 nt, Artificial Sequence
  Description of Artificial Sequence: Synthetic oligonucleotide
aacuacauggcaugaacau

SEQ ID NO: 1362331 - RNA, 19 nt, Artificial Sequence
  Description of Artificial Sequence: Synthetic oligonucleotide
aauagguaacuacaaguuu

SEQ ID NO: 1362332 - RNA, 19 nt, Artificial Sequence
  Description of Artificial Sequence: Synthetic oligonucleotide
uuuugguuacaucccagug

SEQ ID NO: 1362333 - RNA, 19 nt, Artificial Sequence
  Description of Artificial Sequence: Synthetic oligonucleotide
guaaucuggucccacauug

SEQ ID NO: 1362334 - RNA, 19 nt, Artificial Sequence
  Description of Artificial Sequence: Synthetic oligonucleotide
accauaacaugcccguacc

SEQ ID NO: 1362335 - RNA, 19 nt, Artificial Sequence
  Description of Artificial Sequence: Synthetic oligonucleotide
uuccuaguaugaaaagucc

SEQ ID NO: 1362336 - RNA, 19 nt, Artificial Sequence
  Description of Artificial Sequence: Synthetic oligonucleotide
uaucuuacccuaaccaugu

SEQ ID NO: 1362337 - RNA, 19 nt, Artificial Sequence
  Description of Artificial Sequence: Synthetic oligonucleotide
auaaccauaacaugcccgu

SEQ ID NO: 1362338 - RNA, 19 nt, Artificial Sequence
  Description of Artificial Sequence: Synthetic oligonucleotide
ucuuugaucgaacccagaa

SEQ ID NO: 1362339 - RNA, 19 nt, Artificial Sequence
  Description of Artificial Sequence: Synthetic oligonucleotide
ucagcuauauauauauaua

SEQ ID NO: 1362340 - RNA, 19 nt, Artificial Sequence
  Description of Artificial Sequence: Synthetic oligonucleotide
augcuaauucuuuuaaugu

SEQ ID NO: 1362341 - RNA, 19 nt, Artificial Sequence
  Description of Artificial Sequence: Synthetic oligonucleotide
uuauauaugguuguugaua

SEQ ID NO: 1362342 - RNA, 19 nt, Artificial Sequence
  Description of Artificial Sequence: Synthetic oligonucleotide
ucauucaccggucaacaga

SEQ ID NO: 1362343 - RNA, 19 nt, Artificial Sequence
  Description of Artificial Sequence: Synthetic oligonucleotide
uugaucgaacccagaaagg

SEQ ID NO: 1362344 - RNA, 19 nt, Artificial Sequence
  Description of Artificial Sequence: Synthetic oligonucleotide
uacuauucauuagacaaug

SEQ ID NO: 1362345 - RNA, 19 nt, Artificial Sequence
  Description of Artificial Sequence: Synthetic oligonucleotide
aagacaugugaacuacaug

SEQ ID NO: 1362346 - RNA, 19 nt, Artificial Sequence
  Description of Artificial Sequence: Synthetic oligonucleotide
cuaucuuacccuaaccaug

SEQ ID NO: 1362347 - RNA, 19 nt, Artificial Sequence
  Description of Artificial Sequence: Synthetic oligonucleotide
ucgaagcuuguauagauuc

SEQ ID NO: 1362348 - RNA, 19 nt, Artificial Sequence
  Description of Artificial Sequence: Synthetic oligonucleotide
aaauagguaacuacaaguu

SEQ ID NO: 1362349 - RNA, 19 nt, Artificial Sequence
  Description of Artificial Sequence: Synthetic oligonucleotide
guauacgugucccuuaaug

SEQ ID NO: 1362350 - RNA, 19 nt, Artificial Sequence
  Description of Artificial Sequence: Synthetic oligonucleotide
acccuaaccauguauacgu

SEQ ID NO: 1362351 - RNA, 19 nt, Artificial Sequence
  Description of Artificial Sequence: Synthetic oligonucleotide
ugcuaauucuuuuaauguc

SEQ ID NO: 1362352 - RNA, 19 nt, Artificial Sequence
  Description of Artificial Sequence: Synthetic oligonucleotide
ucuaucuuacccuaaccau

SEQ ID NO: 1362353 - RNA, 19 nt, Artificial Sequence
  Description of Artificial Sequence: Synthetic oligonucleotide
uagguaacuacaaguuuug

SEQ ID NO: 1362354 - RNA, 19 nt, Artificial Sequence
  Description of Artificial Sequence: Synthetic oligonucleotide
uugguugacaccaucuguc

SEQ ID NO: 1362355 - RNA, 19 nt, Artificial Sequence
  Description of Artificial Sequence: Synthetic oligonucleotide
aggaaaucguuacauucag

SEQ ID NO: 1362356 - RNA, 19 nt, Artificial Sequence
  Description of Artificial Sequence: Synthetic oligonucleotide
uguuggcgcauuaaacugc

SEQ ID NO: 1362357 - RNA, 19 nt, Artificial Sequence
  Description of Artificial Sequence: Synthetic oligonucleotide
aaaguccuauuguaaucug

SEQ ID NO: 1362358 - RNA, 19 nt, Artificial Sequence
  Description of Artificial Sequence: Synthetic oligonucleotide
ucccaaggugaguagaaag

SEQ ID NO: 1362359 - RNA, 19 nt, Artificial Sequence
  Description of Artificial Sequence: Synthetic oligonucleotide
uccuaguaugaaaaguccu

SEQ ID NO: 1362360 - RNA, 19 nt, Artificial Sequence
  Description of Artificial Sequence: Synthetic oligonucleotide
cagguguaaaacuucgaag

SEQ ID NO: 1362361 - RNA, 19 nt, Artificial Sequence
  Description of Artificial Sequence: Synthetic oligonucleotide
gacggcuucagacugcagc

SEQ ID NO: 1362362 - RNA, 19 nt, Artificial Sequence
  Description of Artificial Sequence: Synthetic oligonucleotide
uugcaagacagccuuagau

SEQ ID NO: 1362363 - RNA, 19 nt, Artificial Sequence
  Description of Artificial Sequence: Synthetic oligonucleotide
ugagccacucccaucgaag

SEQ ID NO: 1362364 - RNA, 19 nt, Artificial Sequence
  Description of Artificial Sequence: Synthetic oligonucleotide
aacauggccaucugaaguu

SEQ ID NO: 1362365 - RNA, 19 nt, Artificial Sequence
  Description of Artificial Sequence: Synthetic oligonucleotide
cuacauggcaugaacauga

SEQ ID NO: 1362366 - RNA, 19 nt, Artificial Sequence
  Description of Artificial Sequence: Synthetic oligonucleotide
aaguccuauuguaaucugg

SEQ ID NO: 1362367 - RNA, 19 nt, Artificial Sequence
  Description of Artificial Sequence: Synthetic oligonucleotide
auauauauauauaaaugua

SEQ ID NO: 1362368 - RNA, 19 nt, Artificial Sequence
  Description of Artificial Sequence: Synthetic oligonucleotide
auaacaugcccguaccugu

SEQ ID NO: 1362369 - RNA, 19 nt, Artificial Sequence
  Description of Artificial Sequence: Synthetic oligonucleotide
auauauauauauauauaaa

SEQ ID NO: 1362370 - RNA, 19 nt, Artificial Sequence
  Description of Artificial Sequence: Synthetic oligonucleotide
uguguugaucugaagcuaa

SEQ ID NO: 1362371 - RNA, 19 nt, Artificial Sequence
  Description of Artificial Sequence: Synthetic oligonucleotide
cauggauucagcuauauau

SEQ ID NO: 1362372 - RNA, 19 nt, Artificial Sequence
  Description of Artificial Sequence: Synthetic oligonucleotide
aaguuaaauaaaauaggua

SEQ ID NO: 1362373 - RNA, 19 nt, Artificial Sequence
  Description of Artificial Sequence: Synthetic oligonucleotide
uuacggaauuggauaagca

SEQ ID NO: 1362374 - RNA, 19 nt, Artificial Sequence
  Description of Artificial Sequence: Synthetic oligonucleotide
ugaucgaacccagaaaggu

SEQ ID NO: 1362375 - RNA, 19 nt, Artificial Sequence
  Description of Artificial Sequence: Synthetic oligonucleotide
ucuuccuaguaugaaaagu

SEQ ID NO: 1362376 - RNA, 19 nt, Artificial Sequence
  Description of Artificial Sequence: Synthetic oligonucleotide
auauaugguuguugauaac

SEQ ID NO: 1362377 - RNA, 19 nt, Artificial Sequence
  Description of Artificial Sequence: Synthetic oligonucleotide
ucuagugcaagaccucagu

SEQ ID NO: 1362378 - RNA, 19 nt, Artificial Sequence
  Description of Artificial Sequence: Synthetic oligonucleotide
aauuacggaauuggauaag

SEQ ID NO: 1362379 - RNA, 19 nt, Artificial Sequence
  Description of Artificial Sequence: Synthetic oligonucleotide
aaacuucgaagcuuguaua

SEQ ID NO: 1362380 - RNA, 19 nt, Artificial Sequence
  Description of Artificial Sequence: Synthetic oligonucleotide
cuauauauauauauauaua

SEQ ID NO: 1362381 - RNA, 19 nt, Artificial Sequence
  Description of Artificial Sequence: Synthetic oligonucleotide
ccuauuguaaucugguccc

SEQ ID NO: 1362382 - RNA, 19 nt, Artificial Sequence
  Description of Artificial Sequence: Synthetic oligonucleotide
cauaaagagggucagccga

SEQ ID NO: 1362383 - RNA, 19 nt, Artificial Sequence
  Description of Artificial Sequence: Synthetic oligonucleotide
uggcgcauuaaacugccca

SEQ ID NO: 1362384 - RNA, 19 nt, Artificial Sequence
  Description of Artificial Sequence: Synthetic oligonucleotide
ucuuacccuaaccauguau

SEQ ID NO: 1362385 - RNA, 19 nt, Artificial Sequence
  Description of Artificial Sequence: Synthetic oligonucleotide
ucagccgauguguugauau

SEQ ID NO: 1362386 - RNA, 19 nt, Artificial Sequence
  Description of Artificial Sequence: Synthetic oligonucleotide
ucuugcaagacagccuuag

SEQ ID NO: 1362387 - RNA, 19 nt, Artificial Sequence
  Description of Artificial Sequence: Synthetic oligonucleotide
uacccuaaccauguauacg

SEQ ID NO: 1362388 - RNA, 19 nt, Artificial Sequence
  Description of Artificial Sequence: Synthetic oligonucleotide
auuaguuuaacugcauaaa

SEQ ID NO: 1362389 - RNA, 19 nt, Artificial Sequence
  Description of Artificial Sequence: Synthetic oligonucleotide
uucuuccuaguaugaaaag

SEQ ID NO: 1362390 - RNA, 19 nt, Artificial Sequence
  Description of Artificial Sequence: Synthetic oligonucleotide
aggagguaaagcuuucgcu

SEQ ID NO: 1362391 - RNA, 19 nt, Artificial Sequence
  Description of Artificial Sequence: Synthetic oligonucleotide
ugcaagacagccuuagauu

SEQ ID NO: 1362392 - RNA, 19 nt, Artificial Sequence
  Description of Artificial Sequence: Synthetic oligonucleotide
uguuacuguaaguaccgau

SEQ ID NO: 1362393 - RNA, 19 nt, Artificial Sequence
  Description of Artificial Sequence: Synthetic oligonucleotide
auccuaaaagugaauuacg

SEQ ID NO: 1362394 - RNA, 19 nt, Artificial Sequence
  Description of Artificial Sequence: Synthetic oligonucleotide
uacauucagaaauaaccuu

SEQ ID NO: 1362395 - RNA, 19 nt, Artificial Sequence
  Description of Artificial Sequence: Synthetic oligonucleotide
acaacauggccaucugaag

SEQ ID NO: 1362396 - RNA, 19 nt, Artificial Sequence
  Description of Artificial Sequence: Synthetic oligonucleotide
gauagaccuugaaacagug

SEQ ID NO: 1362397 - RNA, 19 nt, Artificial Sequence
  Description of Artificial Sequence: Synthetic oligonucleotide
auauauauauauauauaua

SEQ ID NO: 1362398 - RNA, 19 nt, Artificial Sequence
  Description of Artificial Sequence: Synthetic oligonucleotide
auaaaauagguaacuacaa

SEQ ID NO: 1362399 - RNA, 19 nt, Artificial Sequence
  Description of Artificial Sequence: Synthetic oligonucleotide
gagguuagaaggucccuug

SEQ ID NO: 1362400 - RNA, 19 nt, Artificial Sequence
  Description of Artificial Sequence: Synthetic oligonucleotide
auggcaacacucaaaacug

SEQ ID NO: 1362401 - RNA, 19 nt, Artificial Sequence
  Description of Artificial Sequence: Synthetic oligonucleotide
auaaccuuggaaaguucac

SEQ ID NO: 1362402 - RNA, 19 nt, Artificial Sequence
  Description of Artificial Sequence: Synthetic oligonucleotide
auuguaaucuggucccaca

SEQ ID NO: 1362403 - RNA, 19 nt, Artificial Sequence
  Description of Artificial Sequence: Synthetic oligonucleotide
uuacccuaaccauguauac

SEQ ID NO: 1362404 - RNA, 19 nt, Artificial Sequence
  Description of Artificial Sequence: Synthetic oligonucleotide
cuguuggcgcauuaaacug

SEQ ID NO: 1362405 - RNA, 19 nt, Artificial Sequence
  Description of Artificial Sequence: Synthetic oligonucleotide
accgauagaccuugaaaca

SEQ ID NO: 1362406 - RNA, 19 nt, Artificial Sequence
  Description of Artificial Sequence: Synthetic oligonucleotide
uucuagugcaagaccucag

SEQ ID NO: 1362407 - RNA, 19 nt, Artificial Sequence
  Description of Artificial Sequence: Synthetic oligonucleotide
ucagcaucgugcuggaaaa

SEQ ID NO: 1362408 - RNA, 19 nt, Artificial Sequence
  Description of Artificial Sequence: Synthetic oligonucleotide
gacaaugauaaauaaccau

SEQ ID NO: 1362409 - RNA, 19 nt, Artificial Sequence
  Description of Artificial Sequence: Synthetic oligonucleotide
gcuauauauauauauauau

SEQ ID NO: 1362410 - RNA, 19 nt, Artificial Sequence
  Description of Artificial Sequence: Synthetic oligonucleotide
uuucuagugcaagaccuca

SEQ ID NO: 1362411 - RNA, 19 nt, Artificial Sequence
  Description of Artificial Sequence: Synthetic oligonucleotide
ucaauagaagagguucucu

SEQ ID NO: 1362412 - RNA, 19 nt, Artificial Sequence
  Description of Artificial Sequence: Synthetic oligonucleotide
gacaugugaacuacauggc

SEQ ID NO: 1362413 - RNA, 19 nt, Artificial Sequence
  Description of Artificial Sequence: Synthetic oligonucleotide
agguuagaaggucccuugg

SEQ ID NO: 1362414 - RNA, 19 nt, Artificial Sequence
  Description of Artificial Sequence: Synthetic oligonucleotide
uccgcuguuacuguaagua

SEQ ID NO: 1362415 - RNA, 19 nt, Artificial Sequence
  Description of Artificial Sequence: Synthetic oligonucleotide
augccuuugguugacacca

SEQ ID NO: 1362416 - RNA, 19 nt, Artificial Sequence
  Description of Artificial Sequence: Synthetic oligonucleotide
uuccacacaccauggauuc

SEQ ID NO: 1362417 - RNA, 19 nt, Artificial Sequence
  Description of Artificial Sequence: Synthetic oligonucleotide
aaugccucuacuauucauu

SEQ ID NO: 1362418 - RNA, 19 nt, Artificial Sequence
  Description of Artificial Sequence: Synthetic oligonucleotide
gcuaacaaccaagaggucc

SEQ ID NO: 1362419 - RNA, 19 nt, Artificial Sequence
  Description of Artificial Sequence: Synthetic oligonucleotide
uugcauugauucugauggg

SEQ ID NO: 1362420 - RNA, 19 nt, Artificial Sequence
  Description of Artificial Sequence: Synthetic oligonucleotide
ucugacuacaugugcugac

SEQ ID NO: 1362421 - RNA, 19 nt, Artificial Sequence
  Description of Artificial Sequence: Synthetic oligonucleotide
acggaauuggauaagcagu

SEQ ID NO: 1362422 - RNA, 19 nt, Artificial Sequence
  Description of Artificial Sequence: Synthetic oligonucleotide
gucauuaaucaaucacaug

SEQ ID NO: 1362423 - RNA, 19 nt, Artificial Sequence
  Description of Artificial Sequence: Synthetic oligonucleotide
uaccuguaaugcucaacag

SEQ ID NO: 1362424 - RNA, 19 nt, Artificial Sequence
  Description of Artificial Sequence: Synthetic oligonucleotide
caccggucaacagauaugc

SEQ ID NO: 1362425 - RNA, 19 nt, Artificial Sequence
  Description of Artificial Sequence: Synthetic oligonucleotide
cauaacaugcccguaccug

SEQ ID NO: 1362426 - RNA, 19 nt, Artificial Sequence
  Description of Artificial Sequence: Synthetic oligonucleotide
uucauucaccggucaacag

SEQ ID NO: 1362427 - RNA, 19 nt, Artificial Sequence
  Description of Artificial Sequence: Synthetic oligonucleotide
uggaagcucgaugcaaagg

SEQ ID NO: 1362428 - RNA, 19 nt, Artificial Sequence
  Description of Artificial Sequence: Synthetic oligonucleotide
gaucuuugaucgaacccag

SEQ ID NO: 1362429 - RNA, 19 nt, Artificial Sequence
  Description of Artificial Sequence: Synthetic oligonucleotide
ucuguccuaggacacuggu

SEQ ID NO: 1362430 - RNA, 19 nt, Artificial Sequence
  Description of Artificial Sequence: Synthetic oligonucleotide
uguccgcuguuacuguaag

SEQ ID NO: 1362431 - RNA, 19 nt, Artificial Sequence
  Description of Artificial Sequence: Synthetic oligonucleotide
guugacaccaucuguccuc

SEQ ID NO: 1362432 - RNA, 19 nt, Artificial Sequence
  Description of Artificial Sequence: Synthetic oligonucleotide
ugaaaacuccguuccaguu

SEQ ID NO: 1362433 - RNA, 19 nt, Artificial Sequence
  Description of Artificial Sequence: Synthetic oligonucleotide
caguuucuagugcaagacc

SEQ ID NO: 1362434 - RNA, 19 nt, Artificial Sequence
  Description of Artificial Sequence: Synthetic oligonucleotide
caggagguaaagcuuucgc

SEQ ID NO: 1362435 - RNA, 19 nt, Artificial Sequence
  Description of Artificial Sequence: Synthetic oligonucleotide
auucgaauccacugcuaca

SEQ ID NO: 1362436 - RNA, 19 nt, Artificial Sequence
  Description of Artificial Sequence: Synthetic oligonucleotide
uugugaccaaaguuaaaua

SEQ ID NO: 1362437 - RNA, 19 nt, Artificial Sequence
  Description of Artificial Sequence: Synthetic oligonucleotide
cuuacccuaaccauguaua

SEQ ID NO: 1362438 - RNA, 19 nt, Artificial Sequence
  Description of Artificial Sequence: Synthetic oligonucleotide
agucauuaaucaaucacau

SEQ ID NO: 1362439 - RNA, 19 nt, Artificial Sequence
  Description of Artificial Sequence: Synthetic oligonucleotide
auaguucacagguguaaaa

SEQ ID NO: 1362440 - RNA, 19 nt, Artificial Sequence
  Description of Artificial Sequence: Synthetic oligonucleotide
acuacauggcaugaacaug

SEQ ID NO: 1362441 - RNA, 19 nt, Artificial Sequence
  Description of Artificial Sequence: Synthetic oligonucleotide
caagaggucccaaggugag

SEQ ID NO: 1362442 - RNA, 19 nt, Artificial Sequence
  Description of Artificial Sequence: Synthetic oligonucleotide
accuguuggcgcauuaaac

SEQ ID NO: 1362443 - RNA, 19 nt, Artificial Sequence
  Description of Artificial Sequence: Synthetic oligonucleotide
aaugucugauuugcaaaau

SEQ ID NO: 1362444 - RNA, 19 nt, Artificial Sequence
  Description of Artificial Sequence: Synthetic oligonucleotide
aggaaagacaugugaacua

SEQ ID NO: 1362445 - RNA, 19 nt, Artificial Sequence
  Description of Artificial Sequence: Synthetic oligonucleotide
guuagggccaggccuuggg

SEQ ID NO: 1362446 - RNA, 19 nt, Artificial Sequence
  Description of Artificial Sequence: Synthetic oligonucleotide
ucccuuaaugccucuacua

SEQ ID NO: 1362447 - RNA, 19 nt, Artificial Sequence
  Description of Artificial Sequence: Synthetic oligonucleotide
cacaacauggccaucugaa

SEQ ID NO: 1362448 - RNA, 19 nt, Artificial Sequence
  Description of Artificial Sequence: Synthetic oligonucleotide
uggucccacauugaaaacu

SEQ ID NO: 1362449 - RNA, 19 nt, Artificial Sequence
  Description of Artificial Sequence: Synthetic oligonucleotide
uucaauagaagagguucuc

SEQ ID NO: 1362450 - RNA, 19 nt, Artificial Sequence
  Description of Artificial Sequence: Synthetic oligonucleotide
auucagaaauaaccuugga

SEQ ID NO: 1362451 - RNA, 19 nt, Artificial Sequence
  Description of Artificial Sequence: Synthetic oligonucleotide
agguuaugugcugaaggag

SEQ ID NO: 1362452 - RNA, 19 nt, Artificial Sequence
  Description of Artificial Sequence: Synthetic oligonucleotide
agugaauuacggaauugga

SEQ ID NO: 1362453 - RNA, 19 nt, Artificial Sequence
  Description of Artificial Sequence: Synthetic oligonucleotide
agccacucccaucgaagac

SEQ ID NO: 1362454 - RNA, 19 nt, Artificial Sequence
  Description of Artificial Sequence: Synthetic oligonucleotide
ucuuucagagugcuuccua

SEQ ID NO: 1362455 - RNA, 19 nt, Artificial Sequence
  Description of Artificial Sequence: Synthetic oligonucleotide
cugaagcuaacaaccaaga

SEQ ID NO: 1362456 - RNA, 19 nt, Artificial Sequence
  Description of Artificial Sequence: Synthetic oligonucleotide
uguaaucuggucccacauu

SEQ ID NO: 1362457 - RNA, 19 nt, Artificial Sequence
  Description of Artificial Sequence: Synthetic oligonucleotide
gcuaccauucauucaccgg

SEQ ID NO: 1362458 - RNA, 19 nt, Artificial Sequence
  Description of Artificial Sequence: Synthetic oligonucleotide
cugaaguuagggccaggcc

SEQ ID NO: 1362459 - RNA, 19 nt, Artificial Sequence
  Description of Artificial Sequence: Synthetic oligonucleotide
uucuuggaagcucgaugca

SEQ ID NO: 1362460 - RNA, 19 nt, Artificial Sequence
  Description of Artificial Sequence: Synthetic oligonucleotide
ugugaacuacauggcauga

SEQ ID NO: 1362461 - RNA, 19 nt, Artificial Sequence
  Description of Artificial Sequence: Synthetic oligonucleotide
ugccucuacuauucauuag

SEQ ID NO: 1362462 - RNA, 19 nt, Artificial Sequence
  Description of Artificial Sequence: Synthetic oligonucleotide
uaaugccucuacuauucau

SEQ ID NO: 1362463 - RNA, 19 nt, Artificial Sequence
  Description of Artificial Sequence: Synthetic oligonucleotide
uaaaacuucgaagcuugua

SEQ ID NO: 1362464 - RNA, 19 nt, Artificial Sequence
  Description of Artificial Sequence: Synthetic oligonucleotide
guaccgauagaccuugaaa

SEQ ID NO: 1362465 - RNA, 19 nt, Artificial Sequence
  Description of Artificial Sequence: Synthetic oligonucleotide
auagaccuugaaacagugg

SEQ ID NO: 1362466 - RNA, 19 nt, Artificial Sequence
  Description of Artificial Sequence: Synthetic oligonucleotide
aucugaagcuaacaaccaa

SEQ ID NO: 1362467 - RNA, 19 nt, Artificial Sequence
  Description of Artificial Sequence: Synthetic oligonucleotide
gccauaaagagggucagcc

SEQ ID NO: 1362468 - RNA, 19 nt, Artificial Sequence
  Description of Artificial Sequence: Synthetic oligonucleotide
guuacuguaaguaccgaua

SEQ ID NO: 1362469 - RNA, 19 nt, Artificial Sequence
  Description of Artificial Sequence: Synthetic oligonucleotide
ugcccauuuccuucagagc

SEQ ID NO: 1362470 - RNA, 19 nt, Artificial Sequence
  Description of Artificial Sequence: Synthetic oligonucleotide
uucgaagcuuguauagauu

SEQ ID NO: 1362471 - RNA, 19 nt, Artificial Sequence
  Description of Artificial Sequence: Synthetic oligonucleotide
ucuuggaagcucgaugcaa

SEQ ID NO: 1362472 - RNA, 19 nt, Artificial Sequence
  Description of Artificial Sequence: Synthetic oligonucleotide
uaguaugaaaaguccuauu

SEQ ID NO: 1362473 - RNA, 19 nt, Artificial Sequence
  Description of Artificial Sequence: Synthetic oligonucleotide
agcuauauauauauauaua

SEQ ID NO: 1362474 - RNA, 19 nt, Artificial Sequence
  Description of Artificial Sequence: Synthetic oligonucleotide
agcaucgugcuggaaaaug

SEQ ID NO: 1362475 - RNA, 19 nt, Artificial Sequence
  Description of Artificial Sequence: Synthetic oligonucleotide
cuaccauucauucaccggu

SEQ ID NO: 1362476 - RNA, 19 nt, Artificial Sequence
  Description of Artificial Sequence: Synthetic oligonucleotide
agagggucagccgaugugu

SEQ ID NO: 1362477 - RNA, 19 nt, Artificial Sequence
  Description of Artificial Sequence: Synthetic oligonucleotide
uaccauucauucaccgguc

SEQ ID NO: 1362478 - RNA, 19 nt, Artificial Sequence
  Description of Artificial Sequence: Synthetic oligonucleotide
aguaccgauagaccuugaa

SEQ ID NO: 1362479 - RNA, 19 nt, Artificial Sequence
  Description of Artificial Sequence: Synthetic oligonucleotide
cagcuauauauauauauau

SEQ ID NO: 1362480 - RNA, 19 nt, Artificial Sequence
  Description of Artificial Sequence: Synthetic oligonucleotide
ggaaagacaugugaacuac

SEQ ID NO: 1362481 - RNA, 19 nt, Artificial Sequence
  Description of Artificial Sequence: Synthetic oligonucleotide
aacaugcccguaccuguaa

SEQ ID NO: 1362482 - RNA, 19 nt, Artificial Sequence
  Description of Artificial Sequence: Synthetic oligonucleotide
guagggcucacuccaccag

SEQ ID NO: 1362483 - RNA, 19 nt, Artificial Sequence
  Description of Artificial Sequence: Synthetic oligonucleotide
caugcccguaccuguaaug

SEQ ID NO: 1362484 - RNA, 19 nt, Artificial Sequence
  Description of Artificial Sequence: Synthetic oligonucleotide
aaugagccacucccaucga

SEQ ID NO: 1362485 - RNA, 19 nt, Artificial Sequence
  Description of Artificial Sequence: Synthetic oligonucleotide
ggcuaccauucauucaccg

SEQ ID NO: 1362486 - RNA, 19 nt, Artificial Sequence
  Description of Artificial Sequence: Synthetic oligonucleotide
gccucuacuauucauuaga

SEQ ID NO: 1362487 - RNA, 19 nt, Artificial Sequence
  Description of Artificial Sequence: Synthetic oligonucleotide
caagagggcccugagucag

SEQ ID NO: 1362488 - RNA, 19 nt, Artificial Sequence
  Description of Artificial Sequence: Synthetic oligonucleotide
cuuugaucgaacccagaaa

SEQ ID NO: 1362489 - RNA, 19 nt, Artificial Sequence
  Description of Artificial Sequence: Synthetic oligonucleotide
augccucuacuauucauua

SEQ ID NO: 1362490 - RNA, 19 nt, Artificial Sequence
  Description of Artificial Sequence: Synthetic oligonucleotide
cuuggaagcucgaugcaaa

SEQ ID NO: 1362491 - RNA, 19 nt, Artificial Sequence
  Description of Artificial Sequence: Synthetic oligonucleotide
gaaagacaugugaacuaca

SEQ ID NO: 1362492 - RNA, 19 nt, Artificial Sequence
  Description of Artificial Sequence: Synthetic oligonucleotide
cuguccuaggacacuggug

SEQ ID NO: 1362493 - RNA, 19 nt, Artificial Sequence
  Description of Artificial Sequence: Synthetic oligonucleotide
gcaucgugcuggaaaaugg

SEQ ID NO: 1362494 - RNA, 19 nt, Artificial Sequence
  Description of Artificial Sequence: Synthetic oligonucleotide
uaaagagggucagccgaug

SEQ ID NO: 1362495 - RNA, 19 nt, Artificial Sequence
  Description of Artificial Sequence: Synthetic oligonucleotide
ugcauaaaucccuguccua

SEQ ID NO: 1362496 - RNA, 19 nt, Artificial Sequence
  Description of Artificial Sequence: Synthetic oligonucleotide
ucguuacauucagaaauaa

SEQ ID NO: 1362497 - RNA, 19 nt, Artificial Sequence
  Description of Artificial Sequence: Synthetic oligonucleotide
ccauaaagagggucagccg

SEQ ID NO: 1362498 - RNA, 19 nt, Artificial Sequence
  Description of Artificial Sequence: Synthetic oligonucleotide
auggauucagcuauauaua

SEQ ID NO: 1362499 - RNA, 19 nt, Artificial Sequence
  Description of Artificial Sequence: Synthetic oligonucleotide
ggucuugugaccaaaguua

SEQ ID NO: 1362500 - RNA, 19 nt, Artificial Sequence
  Description of Artificial Sequence: Synthetic oligonucleotide
ugagguuagaaggucccuu

SEQ ID NO: 1362501 - RNA, 19 nt, Artificial Sequence
  Description of Artificial Sequence: Synthetic oligonucleotide
gaggucccaaggugaguag

SEQ ID NO: 1362502 - RNA, 19 nt, Artificial Sequence
  Description of Artificial Sequence: Synthetic oligonucleotide
uaacaugcccguaccugua

SEQ ID NO: 1362503 - RNA, 19 nt, Artificial Sequence
  Description of Artificial Sequence: Synthetic oligonucleotide
caugugaacuacauggcau

SEQ ID NO: 1362504 - RNA, 19 nt, Artificial Sequence
  Description of Artificial Sequence: Synthetic oligonucleotide
agaggucccaaggugagua

SEQ ID NO: 1362505 - RNA, 19 nt, Artificial Sequence
  Description of Artificial Sequence: Synthetic oligonucleotide
cugcuacaccuguuggcgc

SEQ ID NO: 1362506 - RNA, 19 nt, Artificial Sequence
  Description of Artificial Sequence: Synthetic oligonucleotide
ucgaugcaaaggcuaccau

SEQ ID NO: 1362507 - RNA, 19 nt, Artificial Sequence
  Description of Artificial Sequence: Synthetic oligonucleotide
ggaaaguucaccaaagguu

SEQ ID NO: 1362508 - RNA, 19 nt, Artificial Sequence
  Description of Artificial Sequence: Synthetic oligonucleotide
aucgugcuggaaaauggca

SEQ ID NO: 1362509 - RNA, 19 nt, Artificial Sequence
  Description of Artificial Sequence: Synthetic oligonucleotide
aggcuaccauucauucacc

SEQ ID NO: 1362510 - RNA, 19 nt, Artificial Sequence
  Description of Artificial Sequence: Synthetic oligonucleotide
acacuggugucugacuaca

SEQ ID NO: 1362511 - RNA, 19 nt, Artificial Sequence
  Description of Artificial Sequence: Synthetic oligonucleotide
cuucgaagcuuguauagau

SEQ ID NO: 1362512 - RNA, 19 nt, Artificial Sequence
  Description of Artificial Sequence: Synthetic oligonucleotide
auaaagagggucagccgau

SEQ ID NO: 1362513 - RNA, 19 nt, Artificial Sequence
  Description of Artificial Sequence: Synthetic oligonucleotide
gguuguugauaaccacccc

SEQ ID NO: 1362514 - RNA, 19 nt, Artificial Sequence
  Description of Artificial Sequence: Synthetic oligonucleotide
aucgaagaccuggauccug

SEQ ID NO: 1362515 - RNA, 19 nt, Artificial Sequence
  Description of Artificial Sequence: Synthetic oligonucleotide
cauucaccggucaacagau

SEQ ID NO: 1362516 - RNA, 19 nt, Artificial Sequence
  Description of Artificial Sequence: Synthetic oligonucleotide
ccgauagaccuugaaacag

SEQ ID NO: 1362517 - RNA, 19 nt, Artificial Sequence
  Description of Artificial Sequence: Synthetic oligonucleotide
ccuauaagccauaguucac

SEQ ID NO: 1362518 - RNA, 19 nt, Artificial Sequence
  Description of Artificial Sequence: Synthetic oligonucleotide
cucgaugcaaaggcuacca

SEQ ID NO: 1362519 - RNA, 19 nt, Artificial Sequence
  Description of Artificial Sequence: Synthetic oligonucleotide
gagguaaagcuuucgcuuu

SEQ ID NO: 1362520 - RNA, 19 nt, Artificial Sequence
  Description of Artificial Sequence: Synthetic oligonucleotide
cugcauaaaucccuguccu

SEQ ID NO: 1362521 - RNA, 19 nt, Artificial Sequence
  Description of Artificial Sequence: Synthetic oligonucleotide
cuacuauucauuagacaau

SEQ ID NO: 1362522 - RNA, 19 nt, Artificial Sequence
  Description of Artificial Sequence: Synthetic oligonucleotide
gugaauuacggaauuggau

SEQ ID NO: 1362523 - RNA, 19 nt, Artificial Sequence
  Description of Artificial Sequence: Synthetic oligonucleotide
gucuugugaccaaaguuaa

SEQ ID NO: 1362524 - RNA, 19 nt, Artificial Sequence
  Description of Artificial Sequence: Synthetic oligonucleotide
caaagguucuuccuaguau

SEQ ID NO: 1362525 - RNA, 19 nt, Artificial Sequence
  Description of Artificial Sequence: Synthetic oligonucleotide
caucugaaguuagggccag

SEQ ID NO: 1362526 - RNA, 19 nt, Artificial Sequence
  Description of Artificial Sequence: Synthetic oligonucleotide
ccaguuucuagugcaagac

SEQ ID NO: 1362527 - RNA, 19 nt, Artificial Sequence
  Description of Artificial Sequence: Synthetic oligonucleotide
ucgcuuucaugauguggaa

SEQ ID NO: 1362528 - RNA, 19 nt, Artificial Sequence
  Description of Artificial Sequence: Synthetic oligonucleotide
cuggucccacauugaaaac

SEQ ID NO: 1362529 - RNA, 19 nt, Artificial Sequence
  Description of Artificial Sequence: Synthetic oligonucleotide
aagaggucccaaggugagu

SEQ ID NO: 1362530 - RNA, 19 nt, Artificial Sequence
  Description of Artificial Sequence: Synthetic oligonucleotide
uacaccuguuggcgcauua

SEQ ID NO: 1362531 - RNA, 19 nt, Artificial Sequence
  Description of Artificial Sequence: Synthetic oligonucleotide
gguaacuacaaguuuuguu

SEQ ID NO: 1362532 - RNA, 19 nt, Artificial Sequence
  Description of Artificial Sequence: Synthetic oligonucleotide
cuaaggggaagucauuaau

SEQ ID NO: 1362533 - RNA, 19 nt, Artificial Sequence
  Description of Artificial Sequence: Synthetic oligonucleotide
augagccacucccaucgaa

SEQ ID NO: 1362534 - RNA, 19 nt, Artificial Sequence
  Description of Artificial Sequence: Synthetic oligonucleotide
aaguuagggccaggccuug

SEQ ID NO: 1362535 - RNA, 19 nt, Artificial Sequence
  Description of Artificial Sequence: Synthetic oligonucleotide
agggguguccgcuguuacu

SEQ ID NO: 1362536 - RNA, 19 nt, Artificial Sequence
  Description of Artificial Sequence: Synthetic oligonucleotide
agguaacuacaaguuuugu

SEQ ID NO: 1362537 - RNA, 19 nt, Artificial Sequence
  Description of Artificial Sequence: Synthetic oligonucleotide
gccacucccaucgaagacc

SEQ ID NO: 1362538 - RNA, 19 nt, Artificial Sequence
  Description of Artificial Sequence: Synthetic oligonucleotide
caguaauaacaucuacugu

SEQ ID NO: 1362539 - RNA, 19 nt, Artificial Sequence
  Description of Artificial Sequence: Synthetic oligonucleotide
gggguguccgcuguuacug

SEQ ID NO: 1362540 - RNA, 19 nt, Artificial Sequence
  Description of Artificial Sequence: Synthetic oligonucleotide
ccuaguaugaaaaguccua

SEQ ID NO: 1362541 - RNA, 19 nt, Artificial Sequence
  Description of Artificial Sequence: Synthetic oligonucleotide
cuaguaugaaaaguccuau

SEQ ID NO: 1362542 - RNA, 19 nt, Artificial Sequence
  Description of Artificial Sequence: Synthetic oligonucleotide
gcaagacagccuuagauuu

SEQ ID NO: 1362543 - RNA, 19 nt, Artificial Sequence
  Description of Artificial Sequence: Synthetic oligonucleotide
agcuaacaaccaagagguc

SEQ ID NO: 1362544 - RNA, 19 nt, Artificial Sequence
  Description of Artificial Sequence: Synthetic oligonucleotide
uaaccauaacaugcccgua

SEQ ID NO: 1362545 - RNA, 19 nt, Artificial Sequence
  Description of Artificial Sequence: Synthetic oligonucleotide
ccacacaccauggauucag

SEQ ID NO: 1362546 - RNA, 19 nt, Artificial Sequence
  Description of Artificial Sequence: Synthetic oligonucleotide
gucugacuacaugugcuga

SEQ ID NO: 1362547 - RNA, 19 nt, Artificial Sequence
  Description of Artificial Sequence: Synthetic oligonucleotide
ggggccauaaagaggguca

SEQ ID NO: 1362548 - RNA, 19 nt, Artificial Sequence
  Description of Artificial Sequence: Synthetic oligonucleotide
accauggauucagcuauau

SEQ ID NO: 1362549 - RNA, 19 nt, Artificial Sequence
  Description of Artificial Sequence: Synthetic oligonucleotide
ccuguuggcgcauuaaacu

SEQ ID NO: 1362550 - RNA, 19 nt, Artificial Sequence
  Description of Artificial Sequence: Synthetic oligonucleotide
auucagcuauauauauaua

SEQ ID NO: 1362551 - RNA, 19 nt, Artificial Sequence
  Description of Artificial Sequence: Synthetic oligonucleotide
guaaugcucaacagaacuu

SEQ ID NO: 1362552 - RNA, 19 nt, Artificial Sequence
  Description of Artificial Sequence: Synthetic oligonucleotide
gucaggcaucagcaucgug

SEQ ID NO: 1362553 - RNA, 19 nt, Artificial Sequence
  Description of Artificial Sequence: Synthetic oligonucleotide
gcucaacucaagagggccc

SEQ ID NO: 1362554 - RNA, 19 nt, Artificial Sequence
  Description of Artificial Sequence: Synthetic oligonucleotide
caccuguuggcgcauuaaa

SEQ ID NO: 1362555 - RNA, 19 nt, Artificial Sequence
  Description of Artificial Sequence: Synthetic oligonucleotide
ccgcuguuacuguaaguac

SEQ ID NO: 1362556 - RNA, 19 nt, Artificial Sequence
  Description of Artificial Sequence: Synthetic oligonucleotide
gugaacuacauggcaugaa

SEQ ID NO: 1362557 - RNA, 19 nt, Artificial Sequence
  Description of Artificial Sequence: Synthetic oligonucleotide
ugccuuugguugacaccau

SEQ ID NO: 1362558 - RNA, 19 nt, Artificial Sequence
  Description of Artificial Sequence: Synthetic oligonucleotide
guaaguaccgauagaccuu

SEQ ID NO: 1362559 - RNA, 19 nt, Artificial Sequence
  Description of Artificial Sequence: Synthetic oligonucleotide
aucuuugaucgaacccaga

SEQ ID NO: 1362560 - RNA, 19 nt, Artificial Sequence
  Description of Artificial Sequence: Synthetic oligonucleotide
ggcugcuuauggcucucug

SEQ ID NO: 1362561 - RNA, 19 nt, Artificial Sequence
  Description of Artificial Sequence: Synthetic oligonucleotide
ggaaaucguuacauucaga

SEQ ID NO: 1362562 - RNA, 19 nt, Artificial Sequence
  Description of Artificial Sequence: Synthetic oligonucleotide
ggauucagcuauauauaua

SEQ ID NO: 1362563 - RNA, 19 nt, Artificial Sequence
  Description of Artificial Sequence: Synthetic oligonucleotide
caaucacaugccuuugguu

SEQ ID NO: 1362564 - RNA, 19 nt, Artificial Sequence
  Description of Artificial Sequence: Synthetic oligonucleotide
gcauaaaucccuguccuau

SEQ ID NO: 1362565 - RNA, 19 nt, Artificial Sequence
  Description of Artificial Sequence: Synthetic oligonucleotide
ccuaggacacuggugucug

SEQ ID NO: 1362566 - RNA, 19 nt, Artificial Sequence
  Description of Artificial Sequence: Synthetic oligonucleotide
agucaggcaucagcaucgu

SEQ ID NO: 1362567 - RNA, 19 nt, Artificial Sequence
  Description of Artificial Sequence: Synthetic oligonucleotide
cagcaagguuaugugcuga

SEQ ID NO: 1362568 - RNA, 19 nt, Artificial Sequence
  Description of Artificial Sequence: Synthetic oligonucleotide
ccuguccuauaagccauag

SEQ ID NO: 1362569 - RNA, 19 nt, Artificial Sequence
  Description of Artificial Sequence: Synthetic oligonucleotide
cuguuacuguaaguaccga

SEQ ID NO: 1362570 - RNA, 19 nt, Artificial Sequence
  Description of Artificial Sequence: Synthetic oligonucleotide
cccuaaccauguauacgug

SEQ ID NO: 1362571 - RNA, 19 nt, Artificial Sequence
  Description of Artificial Sequence: Synthetic oligonucleotide
cucaacucaagagggcccu

SEQ ID NO: 1362572 - RNA, 19 nt, Artificial Sequence
  Description of Artificial Sequence: Synthetic oligonucleotide
cuaggacacuggugucuga

SEQ ID NO: 1362573 - RNA, 19 nt, Artificial Sequence
  Description of Artificial Sequence: Synthetic oligonucleotide
ccuaaccauguauacgugu

SEQ ID NO: 1362574 - RNA, 19 nt, Artificial Sequence
  Description of Artificial Sequence: Synthetic oligonucleotide
gcccguaccuguaaugcuc

SEQ ID NO: 1362575 - RNA, 19 nt, Artificial Sequence
  Description of Artificial Sequence: Synthetic oligonucleotide
ggcgcauuaaacugcccau

SEQ ID NO: 1362576 - RNA, 19 nt, Artificial Sequence
  Description of Artificial Sequence: Synthetic oligonucleotide
cgaagcuuguauagauuca

SEQ ID NO: 1362577 - RNA, 19 nt, Artificial Sequence
  Description of Artificial Sequence: Synthetic oligonucleotide
cccacauugaaaacuccgu

SEQ ID NO: 1362578 - RNA, 19 nt, Artificial Sequence
  Description of Artificial Sequence: Synthetic oligonucleotide
cagccgauguguugauaua

SEQ ID NO: 1362579 - RNA, 19 nt, Artificial Sequence
  Description of Artificial Sequence: Synthetic oligonucleotide
cccguaccuguaaugcuca

SEQ ID NO: 1362580 - RNA, 19 nt, Artificial Sequence
  Description of Artificial Sequence: Synthetic oligonucleotide
cuguccuauaagccauagu

SEQ ID NO: 1362581 - RNA, 19 nt, Artificial Sequence
  Description of Artificial Sequence: Synthetic oligonucleotide
guccgcuguuacuguaagu

SEQ ID NO: 1362582 - RNA, 19 nt, Artificial Sequence
  Description of Artificial Sequence: Synthetic oligonucleotide
ccauucauucaccggucaa

SEQ ID NO: 1362583 - RNA, 19 nt, Artificial Sequence
  Description of Artificial Sequence: Synthetic oligonucleotide
ccuuaaugccucuacuauu

SEQ ID NO: 1362584 - RNA, 19 nt, Artificial Sequence
  Description of Artificial Sequence: Synthetic oligonucleotide
cccuuaaugccucuacuau

SEQ ID NO: 1362585 - RNA, 19 nt, Artificial Sequence
  Description of Artificial Sequence: Synthetic oligonucleotide
caccauggauucagcuaua

SEQ ID NO: 1362586 - RNA, 19 nt, Artificial Sequence
  Description of Artificial Sequence: Synthetic oligonucleotide
auucaccggucaacagaua

SEQ ID NO: 1362587 - RNA, 19 nt, Artificial Sequence
  Description of Artificial Sequence: Synthetic oligonucleotide
cgauagaccuugaaacagu

SEQ ID NO: 1362588 - RNA, 19 nt, Artificial Sequence
  Description of Artificial Sequence: Synthetic oligonucleotide
ccauggauucagcuauaua

SEQ ID NO: 1362589 - RNA, 19 nt, Artificial Sequence
  Description of Artificial Sequence: Synthetic oligonucleotide
ggaauuggauaagcaguuu

SEQ ID NO: 1362590 - RNA, 19 nt, Artificial Sequence
  Description of Artificial Sequence: Synthetic oligonucleotide
caucgaagaccuggauccu

SEQ ID NO: 1362591 - RNA, 19 nt, Artificial Sequence
  Description of Artificial Sequence: Synthetic oligonucleotide
cggaauuggauaagcaguu

SEQ ID NO: 1362592 - RNA, 19 nt, Artificial Sequence
  Description of Artificial Sequence: Synthetic oligonucleotide
ccacucccaucgaagaccu

SEQ ID NO: 1362593 - RNA, 19 nt, Artificial Sequence
  Description of Artificial Sequence: Synthetic oligonucleotide
ccauaacaugcccguaccu

SEQ ID NO: 1362594 - RNA, 19 nt, Artificial Sequence
  Description of Artificial Sequence: Synthetic oligonucleotide
cacuggugucugacuacau

SEQ ID NO: 1362595 - RNA, 19 nt, Artificial Sequence
  Description of Artificial Sequence: Synthetic oligonucleotide
ggacggcuucagacugcag

SEQ ID NO: 1362596 - RNA, 19 nt, Artificial Sequence
  Description of Artificial Sequence: Synthetic oligonucleotide
ggguguccgcuguuacugu

SEQ ID NO: 1362597 - RNA, 19 nt, Artificial Sequence
  Description of Artificial Sequence: Synthetic oligonucleotide
gcgcauuaaacugcccauu

SEQ ID NO: 1362598 - RNA, 19 nt, Artificial Sequence
  Description of Artificial Sequence: Synthetic oligonucleotide
cagcaucgugcuggaaaau

SEQ ID NO: 1362599 - RNA, 19 nt, Artificial Sequence
  Description of Artificial Sequence: Synthetic oligonucleotide
ccguaccuguaaugcucaa

SEQ ID NO: 1362600 - RNA, 19 nt, Artificial Sequence
  Description of Artificial Sequence: Synthetic oligonucleotide
cuacaccuguuggcgcauu

SEQ ID NO: 1362601 - RNA, 19 nt, Artificial Sequence
  Description of Artificial Sequence: Synthetic oligonucleotide
cauuauaaaaccaaagccc

SEQ ID NO: 1362602 - RNA, 19 nt, Artificial Sequence
  Description of Artificial Sequence: Synthetic oligonucleotide
aguaccaaaauaugggucc

SEQ ID NO: 1362603 - RNA, 19 nt, Artificial Sequence
  Description of Artificial Sequence: Synthetic oligonucleotide
aaaauauggguccucagag

SEQ ID NO: 1362604 - RNA, 19 nt, Artificial Sequence
  Description of Artificial Sequence: Synthetic oligonucleotide
cuuaaauagguacagacag

SEQ ID NO: 1362605 - RNA, 19 nt, Artificial Sequence
  Description of Artificial Sequence: Synthetic oligonucleotide
aauagguacagacagacaa

SEQ ID NO: 1362606 - RNA, 19 nt, Artificial Sequence
  Description of Artificial Sequence: Synthetic oligonucleotide
agaccuagaaaacauacac

SEQ ID NO: 1362607 - RNA, 19 nt, Artificial Sequence
  Description of Artificial Sequence: Synthetic oligonucleotide
aacuaauucaggccgaguc

SEQ ID NO: 1362608 - RNA, 19 nt, Artificial Sequence
  Description of Artificial Sequence: Synthetic oligonucleotide
uaacucuucgcuaucagag

SEQ ID NO: 1362609 - RNA, 19 nt, Artificial Sequence
  Description of Artificial Sequence: Synthetic oligonucleotide
ucuccaaucaaaacugagg

SEQ ID NO: 1362610 - RNA, 19 nt, Artificial Sequence
  Description of Artificial Sequence: Synthetic oligonucleotide
cuagaaacuaagcaggugc

SEQ ID NO: 1362611 - RNA, 19 nt, Artificial Sequence
  Description of Artificial Sequence: Synthetic oligonucleotide
ucauuuugcuaccauaccc

SEQ ID NO: 1362612 - RNA, 19 nt, Artificial Sequence
  Description of Artificial Sequence: Synthetic oligonucleotide
agucauacugcacaugugg

SEQ ID NO: 1362613 - RNA, 19 nt, Artificial Sequence
  Description of Artificial Sequence: Synthetic oligonucleotide
aaguauaccacaccccaag

SEQ ID NO: 1362614 - RNA, 19 nt, Artificial Sequence
  Description of Artificial Sequence: Synthetic oligonucleotide
aaauauggguccucagagg

SEQ ID NO: 1362615 - RNA, 19 nt, Artificial Sequence
  Description of Artificial Sequence: Synthetic oligonucleotide
uauaccacaccccaagaca

SEQ ID NO: 1362616 - RNA, 19 nt, Artificial Sequence
  Description of Artificial Sequence: Synthetic oligonucleotide
uuugcuaccauaccccacc

SEQ ID NO: 1362617 - RNA, 19 nt, Artificial Sequence
  Description of Artificial Sequence: Synthetic oligonucleotide
ucaacugaaacauggagau

SEQ ID NO: 1362618 - RNA, 19 nt, Artificial Sequence
  Description of Artificial Sequence: Synthetic oligonucleotide
aaacuaagcaggugcuugg

SEQ ID NO: 1362619 - RNA, 19 nt, Artificial Sequence
  Description of Artificial Sequence: Synthetic oligonucleotide
ugcaccuuggauaaucaag

SEQ ID NO: 1362620 - RNA, 19 nt, Artificial Sequence
  Description of Artificial Sequence: Synthetic oligonucleotide
uagagucuagccaugcuag

SEQ ID NO: 1362621 - RNA, 19 nt, Artificial Sequence
  Description of Artificial Sequence: Synthetic oligonucleotide
accuuggauaaucaagcgc

SEQ ID NO: 1362622 - RNA, 19 nt, Artificial Sequence
  Description of Artificial Sequence: Synthetic oligonucleotide
gaaaguauaccacacccca

SEQ ID NO: 1362623 - RNA, 19 nt, Artificial Sequence
  Description of Artificial Sequence: Synthetic oligonucleotide
acacuacccagucagaaag

SEQ ID NO: 1362624 - RNA, 19 nt, Artificial Sequence
  Description of Artificial Sequence: Synthetic oligonucleotide
uggucuccaaucaaaacug

SEQ ID NO: 1362625 - RNA, 19 nt, Artificial Sequence
  Description of Artificial Sequence: Synthetic oligonucleotide
cuagauucaggcugaaggc

SEQ ID NO: 1362626 - RNA, 19 nt, Artificial Sequence
  Description of Artificial Sequence: Synthetic oligonucleotide
aacucuucgcuaucagagg

SEQ ID NO: 1362627 - RNA, 19 nt, Artificial Sequence
  Description of Artificial Sequence: Synthetic oligonucleotide
acacuagaaacuaagcagg

SEQ ID NO: 1362628 - RNA, 19 nt, Artificial Sequence
  Description of Artificial Sequence: Synthetic oligonucleotide
agcgacgaaggacucaggc

SEQ ID NO: 1362629 - RNA, 19 nt, Artificial Sequence
  Description of Artificial Sequence: Synthetic oligonucleotide
aauucaggccgagucaagg

SEQ ID NO: 1362630 - RNA, 19 nt, Artificial Sequence
  Description of Artificial Sequence: Synthetic oligonucleotide
agagggaccccacacuacc

SEQ ID NO: 1362631 - RNA, 19 nt, Artificial Sequence
  Description of Artificial Sequence: Synthetic oligonucleotide
gagacagucauacugcaca

SEQ ID NO: 1362632 - RNA, 19 nt, Artificial Sequence
  Description of Artificial Sequence: Synthetic oligonucleotide
acugaaauacaugguacac

SEQ ID NO: 1362633 - RNA, 19 nt, Artificial Sequence
  Description of Artificial Sequence: Synthetic oligonucleotide
agagucuaagacaaagugg

SEQ ID NO: 1362634 - RNA, 19 nt, Artificial Sequence
  Description of Artificial Sequence: Synthetic oligonucleotide
acagucauacugcacaugu

SEQ ID NO: 1362635 - RNA, 19 nt, Artificial Sequence
  Description of Artificial Sequence: Synthetic oligonucleotide
auaaucaagcgcccauugg

SEQ ID NO: 1362636 - RNA, 19 nt, Artificial Sequence
  Description of Artificial Sequence: Synthetic oligonucleotide
caacaguucaagugcaagg

SEQ ID NO: 1362637 - RNA, 19 nt, Artificial Sequence
  Description of Artificial Sequence: Synthetic oligonucleotide
uuuucacaguaccaaugag

SEQ ID NO: 1362638 - RNA, 19 nt, Artificial Sequence
  Description of Artificial Sequence: Synthetic oligonucleotide
ccuaguaccaaaauauggg

SEQ ID NO: 1362639 - RNA, 19 nt, Artificial Sequence
  Description of Artificial Sequence: Synthetic oligonucleotide
gauaaucaagcgcccauug

SEQ ID NO: 1362640 - RNA, 19 nt, Artificial Sequence
  Description of Artificial Sequence: Synthetic oligonucleotide
ucacaaaccuucaacaguu

SEQ ID NO: 1362641 - RNA, 19 nt, Artificial Sequence
  Description of Artificial Sequence: Synthetic oligonucleotide
aagaauacugccugccccu

SEQ ID NO: 1362642 - RNA, 19 nt, Artificial Sequence
  Description of Artificial Sequence: Synthetic oligonucleotide
agaaaguauaccacacccc

SEQ ID NO: 1362643 - RNA, 19 nt, Artificial Sequence
  Description of Artificial Sequence: Synthetic oligonucleotide
aacaguucaagugcaagga

SEQ ID NO: 1362644 - RNA, 19 nt, Artificial Sequence
  Description of Artificial Sequence: Synthetic oligonucleotide
ccuuggauaaucaagcgcc

SEQ ID NO: 1362645 - RNA, 19 nt, Artificial Sequence
  Description of Artificial Sequence: Synthetic oligonucleotide
cagagucuaagacaaagug

SEQ ID NO: 1362646 - RNA, 19 nt, Artificial Sequence
  Description of Artificial Sequence: Synthetic oligonucleotide
aguggucuccaaucaaaac

SEQ ID NO: 1362647 - RNA, 19 nt, Artificial Sequence
  Description of Artificial Sequence: Synthetic oligonucleotide
gaaacuaagcaggugcuug

SEQ ID NO: 1362648 - RNA, 19 nt, Artificial Sequence
  Description of Artificial Sequence: Synthetic oligonucleotide
aaacuaaaguaguuuugau

SEQ ID NO: 1362649 - RNA, 19 nt, Artificial Sequence
  Description of Artificial Sequence: Synthetic oligonucleotide
ucuaagacaaaguggucuc

SEQ ID NO: 1362650 - RNA, 19 nt, Artificial Sequence
  Description of Artificial Sequence: Synthetic oligonucleotide
aauguggucagagcuaggu

SEQ ID NO: 1362651 - RNA, 19 nt, Artificial Sequence
  Description of Artificial Sequence: Synthetic oligonucleotide
aaaccaggcuucugcagag

SEQ ID NO: 1362652 - RNA, 19 nt, Artificial Sequence
  Description of Artificial Sequence: Synthetic oligonucleotide
aggacuagagucuagccau

SEQ ID NO: 1362653 - RNA, 19 nt, Artificial Sequence
  Description of Artificial Sequence: Synthetic oligonucleotide
aaacuuuccucucugccuu

SEQ ID NO: 1362654 - RNA, 19 nt, Artificial Sequence
  Description of Artificial Sequence: Synthetic oligonucleotide
aacgugcaggaaccggggc

SEQ ID NO: 1362655 - RNA, 19 nt, Artificial Sequence
  Description of Artificial Sequence: Synthetic oligonucleotide
ucagagucuaagacaaagu

SEQ ID NO: 1362656 - RNA, 19 nt, Artificial Sequence
  Description of Artificial Sequence: Synthetic oligonucleotide
aaccggugaggaaaggggc

SEQ ID NO: 1362657 - RNA, 19 nt, Artificial Sequence
  Description of Artificial Sequence: Synthetic oligonucleotide
uugacaacagaaggcagag

SEQ ID NO: 1362658 - RNA, 19 nt, Artificial Sequence
  Description of Artificial Sequence: Synthetic oligonucleotide
uccugcuuaaauagguaca

SEQ ID NO: 1362659 - RNA, 19 nt, Artificial Sequence
  Description of Artificial Sequence: Synthetic oligonucleotide
aaacugaggcauaugccuc

SEQ ID NO: 1362660 - RNA, 19 nt, Artificial Sequence
  Description of Artificial Sequence: Synthetic oligonucleotide
auggagauugcugggaagg

SEQ ID NO: 1362661 - RNA, 19 nt, Artificial Sequence
  Description of Artificial Sequence: Synthetic oligonucleotide
ucaacaguucaagugcaag

SEQ ID NO: 1362662 - RNA, 19 nt, Artificial Sequence
  Description of Artificial Sequence: Synthetic oligonucleotide
acuggaguccaacccuugc

SEQ ID NO: 1362663 - RNA, 19 nt, Artificial Sequence
  Description of Artificial Sequence: Synthetic oligonucleotide
caaccggugaggaaagggg

SEQ ID NO: 1362664 - RNA, 19 nt, Artificial Sequence
  Description of Artificial Sequence: Synthetic oligonucleotide
uacccagucagaaaguaua

SEQ ID NO: 1362665 - RNA, 19 nt, Artificial Sequence
  Description of Artificial Sequence: Synthetic oligonucleotide
uuucacugaaauacauggu

SEQ ID NO: 1362666 - RNA, 19 nt, Artificial Sequence
  Description of Artificial Sequence: Synthetic oligonucleotide
cuugucagagucuaagaca

SEQ ID NO: 1362667 - RNA, 19 nt, Artificial Sequence
  Description of Artificial Sequence: Synthetic oligonucleotide
ugaaauguggucagagcua

SEQ ID NO: 1362668 - RNA, 19 nt, Artificial Sequence
  Description of Artificial Sequence: Synthetic oligonucleotide
uucugauguccccacacac

SEQ ID NO: 1362669 - RNA, 19 nt, Artificial Sequence
  Description of Artificial Sequence: Synthetic oligonucleotide
ugaggaaaggggcaacggu

SEQ ID NO: 1362670 - RNA, 19 nt, Artificial Sequence
  Description of Artificial Sequence: Synthetic oligonucleotide
aggaacacuagaaacuaag

SEQ ID NO: 1362671 - RNA, 19 nt, Artificial Sequence
  Description of Artificial Sequence: Synthetic oligonucleotide
aucaagcgcccauugguuc

SEQ ID NO: 1362672 - RNA, 19 nt, Artificial Sequence
  Description of Artificial Sequence: Synthetic oligonucleotide
cugaaauacaugguacacc

SEQ ID NO: 1362673 - RNA, 19 nt, Artificial Sequence
  Description of Artificial Sequence: Synthetic oligonucleotide
uccuggaacgugcaggaac

SEQ ID NO: 1362674 - RNA, 19 nt, Artificial Sequence
  Description of Artificial Sequence: Synthetic oligonucleotide
ugggacuaggauuuggcaa

SEQ ID NO: 1362675 - RNA, 19 nt, Artificial Sequence
  Description of Artificial Sequence: Synthetic oligonucleotide
gagucuaagacaaaguggu

SEQ ID NO: 1362676 - RNA, 19 nt, Artificial Sequence
  Description of Artificial Sequence: Synthetic oligonucleotide
gaggacacagucaagcgac

SEQ ID NO: 1362677 - RNA, 19 nt, Artificial Sequence
  Description of Artificial Sequence: Synthetic oligonucleotide
ggauuuggcaaauggaaac

SEQ ID NO: 1362678 - RNA, 19 nt, Artificial Sequence
  Description of Artificial Sequence: Synthetic oligonucleotide
aguuuaaauuucccaggcu

SEQ ID NO: 1362679 - RNA, 19 nt, Artificial Sequence
  Description of Artificial Sequence: Synthetic oligonucleotide
acagugguuacauuauaaa

SEQ ID NO: 1362680 - RNA, 19 nt, Artificial Sequence
  Description of Artificial Sequence: Synthetic oligonucleotide
auaccccuguuccuggaac

SEQ ID NO: 1362681 - RNA, 19 nt, Artificial Sequence
  Description of Artificial Sequence: Synthetic oligonucleotide
cugaggacacagucaagcg

SEQ ID NO: 1362682 - RNA, 19 nt, Artificial Sequence
  Description of Artificial Sequence: Synthetic oligonucleotide
acagacaaaccaaggcacc

SEQ ID NO: 1362683 - RNA, 19 nt, Artificial Sequence
  Description of Artificial Sequence: Synthetic oligonucleotide
ucuucgcuaucagaggucc

SEQ ID NO: 1362684 - RNA, 19 nt, Artificial Sequence
  Description of Artificial Sequence: Synthetic oligonucleotide
cuccugcuuaaauagguac

SEQ ID NO: 1362685 - RNA, 19 nt, Artificial Sequence
  Description of Artificial Sequence: Synthetic oligonucleotide
caaaauauggguccucaga

SEQ ID NO: 1362686 - RNA, 19 nt, Artificial Sequence
  Description of Artificial Sequence: Synthetic oligonucleotide
acucuucgcuaucagaggu

SEQ ID NO: 1362687 - RNA, 19 nt, Artificial Sequence
  Description of Artificial Sequence: Synthetic oligonucleotide
uaaaguaguuuugauuuua

SEQ ID NO: 1362688 - RNA, 19 nt, Artificial Sequence
  Description of Artificial Sequence: Synthetic oligonucleotide
cuuggauaaucaagcgccc

SEQ ID NO: 1362689 - RNA, 19 nt, Artificial Sequence
  Description of Artificial Sequence: Synthetic oligonucleotide
cucccauuaccccaacucc

SEQ ID NO: 1362690 - RNA, 19 nt, Artificial Sequence
  Description of Artificial Sequence: Synthetic oligonucleotide
cuugggaaagccaaguuua

SEQ ID NO: 1362691 - RNA, 19 nt, Artificial Sequence
  Description of Artificial Sequence: Synthetic oligonucleotide
ucccauuaccccaacuccu

SEQ ID NO: 1362692 - RNA, 19 nt, Artificial Sequence
  Description of Artificial Sequence: Synthetic oligonucleotide
auuuugcuaccauacccca

SEQ ID NO: 1362693 - RNA, 19 nt, Artificial Sequence
  Description of Artificial Sequence: Synthetic oligonucleotide
cuugacaacagaaggcaga

SEQ ID NO: 1362694 - RNA, 19 nt, Artificial Sequence
  Description of Artificial Sequence: Synthetic oligonucleotide
cuaggauuuggcaaaugga

SEQ ID NO: 1362695 - RNA, 19 nt, Artificial Sequence
  Description of Artificial Sequence: Synthetic oligonucleotide
ucugcaccuuggauaauca

SEQ ID NO: 1362696 - RNA, 19 nt, Artificial Sequence
  Description of Artificial Sequence: Synthetic oligonucleotide
acgguaacucgggagaagg

SEQ ID NO: 1362697 - RNA, 19 nt, Artificial Sequence
  Description of Artificial Sequence: Synthetic oligonucleotide
aaccggggcuaacucuucg

SEQ ID NO: 1362698 - RNA, 19 nt, Artificial Sequence
  Description of Artificial Sequence: Synthetic oligonucleotide
uaccccuguuccuggaacg

SEQ ID NO: 1362699 - RNA, 19 nt, Artificial Sequence
  Description of Artificial Sequence: Synthetic oligonucleotide
uggauaaucaagcgcccau

SEQ ID NO: 1362700 - RNA, 19 nt, Artificial Sequence
  Description of Artificial Sequence: Synthetic oligonucleotide
cccuaguaccaaaauaugg

SEQ ID NO: 1362701 - RNA, 19 nt, Artificial Sequence
  Description of Artificial Sequence: Synthetic oligonucleotide
uucaagugcaaggaacacu

SEQ ID NO: 1362702 - RNA, 19 nt, Artificial Sequence
  Description of Artificial Sequence: Synthetic oligonucleotide
aguucaagugcaaggaaca

SEQ ID NO: 1362703 - RNA, 19 nt, Artificial Sequence
  Description of Artificial Sequence: Synthetic oligonucleotide
guauaccacaccccaagac

SEQ ID NO: 1362704 - RNA, 19 nt, Artificial Sequence
  Description of Artificial Sequence: Synthetic oligonucleotide
cugcaggaguaaaaggaag

SEQ ID NO: 1362705 - RNA, 19 nt, Artificial Sequence
  Description of Artificial Sequence: Synthetic oligonucleotide
ucagagggaccccacacua

SEQ ID NO: 1362706 - RNA, 19 nt, Artificial Sequence
  Description of Artificial Sequence: Synthetic oligonucleotide
cuagccaugcuagauucag

SEQ ID NO: 1362707 - RNA, 19 nt, Artificial Sequence
  Description of Artificial Sequence: Synthetic oligonucleotide
ucaagcgcccauugguuca

SEQ ID NO: 1362708 - RNA, 19 nt, Artificial Sequence
  Description of Artificial Sequence: Synthetic oligonucleotide
ucaugggacuaggauuugg

SEQ ID NO: 1362709 - RNA, 19 nt, Artificial Sequence
  Description of Artificial Sequence: Synthetic oligonucleotide
uuuugcuaccauaccccac

SEQ ID NO: 1362710 - RNA, 19 nt, Artificial Sequence
  Description of Artificial Sequence: Synthetic oligonucleotide
agcuaaucuucccucuucu

SEQ ID NO: 1362711 - RNA, 19 nt, Artificial Sequence
  Description of Artificial Sequence: Synthetic oligonucleotide
gacagaucaugggacuagg

SEQ ID NO: 1362712 - RNA, 19 nt, Artificial Sequence
  Description of Artificial Sequence: Synthetic oligonucleotide
guggucuccaaucaaaacu

SEQ ID NO: 1362713 - RNA, 19 nt, Artificial Sequence
  Description of Artificial Sequence: Synthetic oligonucleotide
uaauucaggccgagucaag

SEQ ID NO: 1362714 - RNA, 19 nt, Artificial Sequence
  Description of Artificial Sequence: Synthetic oligonucleotide
gucuagccaugcuagauuc

SEQ ID NO: 1362715 - RNA, 19 nt, Artificial Sequence
  Description of Artificial Sequence: Synthetic oligonucleotide
auggagacccugucuugac

SEQ ID NO: 1362716 - RNA, 19 nt, Artificial Sequence
  Description of Artificial Sequence: Synthetic oligonucleotide
caagcgacgaaggacucag

SEQ ID NO: 1362717 - RNA, 19 nt, Artificial Sequence
  Description of Artificial Sequence: Synthetic oligonucleotide
cugaaauguggucagagcu

SEQ ID NO: 1362718 - RNA, 19 nt, Artificial Sequence
  Description of Artificial Sequence: Synthetic oligonucleotide
uucgcuaucagaggucccu

SEQ ID NO: 1362719 - RNA, 19 nt, Artificial Sequence
  Description of Artificial Sequence: Synthetic oligonucleotide
ucucuggcuggucauuuuc

SEQ ID NO: 1362720 - RNA, 19 nt, Artificial Sequence
  Description of Artificial Sequence: Synthetic oligonucleotide
cuggucauuuucacaguac

SEQ ID NO: 1362721 - RNA, 19 nt, Artificial Sequence
  Description of Artificial Sequence: Synthetic oligonucleotide
cauggagauugcugggaag

SEQ ID NO: 1362722 - RNA, 19 nt, Artificial Sequence
  Description of Artificial Sequence: Synthetic oligonucleotide
aaauagguacagacagaca

SEQ ID NO: 1362723 - RNA, 19 nt, Artificial Sequence
  Description of Artificial Sequence: Synthetic oligonucleotide
ugaggaacccagggaaugc

SEQ ID NO: 1362724 - RNA, 19 nt, Artificial Sequence
  Description of Artificial Sequence: Synthetic oligonucleotide
gaccuagaaaacauacaca

SEQ ID NO: 1362725 - RNA, 19 nt, Artificial Sequence
  Description of Artificial Sequence: Synthetic oligonucleotide
ucuagccaugcuagauuca

SEQ ID NO: 1362726 - RNA, 19 nt, Artificial Sequence
  Description of Artificial Sequence: Synthetic oligonucleotide
cagagcuagguccccacag

SEQ ID NO: 1362727 - RNA, 19 nt, Artificial Sequence
  Description of Artificial Sequence: Synthetic oligonucleotide
caugcuagauucaggcuga

SEQ ID NO: 1362728 - RNA, 19 nt, Artificial Sequence
  Description of Artificial Sequence: Synthetic oligonucleotide
aacgguaacucgggagaag

SEQ ID NO: 1362729 - RNA, 19 nt, Artificial Sequence
  Description of Artificial Sequence: Synthetic oligonucleotide
cuucaacaguucaagugca

SEQ ID NO: 1362730 - RNA, 19 nt, Artificial Sequence
  Description of Artificial Sequence: Synthetic oligonucleotide
cuaagacaaaguggucucc

SEQ ID NO: 1362731 - RNA, 19 nt, Artificial Sequence
  Description of Artificial Sequence: Synthetic oligonucleotide
gguaacucgggagaaggcc

SEQ ID NO: 1362732 - RNA, 19 nt, Artificial Sequence
  Description of Artificial Sequence: Synthetic oligonucleotide
uuggauaaucaagcgccca

SEQ ID NO: 1362733 - RNA, 19 nt, Artificial Sequence
  Description of Artificial Sequence: Synthetic oligonucleotide
acuagagucuagccaugcu

SEQ ID NO: 1362734 - RNA, 19 nt, Artificial Sequence
  Description of Artificial Sequence: Synthetic oligonucleotide
acaggccccucccaccugg

SEQ ID NO: 1362735 - RNA, 19 nt, Artificial Sequence
  Description of Artificial Sequence: Synthetic oligonucleotide
uaccauaccccaccccacu

SEQ ID NO: 1362736 - RNA, 19 nt, Artificial Sequence
  Description of Artificial Sequence: Synthetic oligonucleotide
acaguucaagugcaaggaa

SEQ ID NO: 1362737 - RNA, 19 nt, Artificial Sequence
  Description of Artificial Sequence: Synthetic oligonucleotide
cagauaccccuguuccugg

SEQ ID NO: 1362738 - RNA, 19 nt, Artificial Sequence
  Description of Artificial Sequence: Synthetic oligonucleotide
uggagacccugucuugaca

SEQ ID NO: 1362739 - RNA, 19 nt, Artificial Sequence
  Description of Artificial Sequence: Synthetic oligonucleotide
acccagucagaaaguauac

SEQ ID NO: 1362740 - RNA, 19 nt, Artificial Sequence
  Description of Artificial Sequence: Synthetic oligonucleotide
agucuagccaugcuagauu

SEQ ID NO: 1362741 - RNA, 19 nt, Artificial Sequence
  Description of Artificial Sequence: Synthetic oligonucleotide
uccugugcaaccuggccau

SEQ ID NO: 1362742 - RNA, 19 nt, Artificial Sequence
  Description of Artificial Sequence: Synthetic oligonucleotide
gacuagagucuagccaugc

SEQ ID NO: 1362743 - RNA, 19 nt, Artificial Sequence
  Description of Artificial Sequence: Synthetic oligonucleotide
gaccagcuaaucuucccuc

SEQ ID NO: 1362744 - RNA, 19 nt, Artificial Sequence
  Description of Artificial Sequence: Synthetic oligonucleotide
ggcaacgguaacucgggag

SEQ ID NO: 1362745 - RNA, 19 nt, Artificial Sequence
  Description of Artificial Sequence: Synthetic oligonucleotide
aaaguauaccacaccccaa

SEQ ID NO: 1362746 - RNA, 19 nt, Artificial Sequence
  Description of Artificial Sequence: Synthetic oligonucleotide
aaucaagcgcccauugguu

SEQ ID NO: 1362747 - RNA, 19 nt, Artificial Sequence
  Description of Artificial Sequence: Synthetic oligonucleotide
ucuaggcagggagacaguc

SEQ ID NO: 1362748 - RNA, 19 nt, Artificial Sequence
  Description of Artificial Sequence: Synthetic oligonucleotide
gcuagguccccacagcacc

SEQ ID NO: 1362749 - RNA, 19 nt, Artificial Sequence
  Description of Artificial Sequence: Synthetic oligonucleotide
auccccuaguaccaaaaua

SEQ ID NO: 1362750 - RNA, 19 nt, Artificial Sequence
  Description of Artificial Sequence: Synthetic oligonucleotide
caggacuagagucuagcca

SEQ ID NO: 1362751 - RNA, 19 nt, Artificial Sequence
  Description of Artificial Sequence: Synthetic oligonucleotide
ccuggaacgugcaggaacc

SEQ ID NO: 1362752 - RNA, 19 nt, Artificial Sequence
  Description of Artificial Sequence: Synthetic oligonucleotide
aagcccauggccucccauu

SEQ ID NO: 1362753 - RNA, 19 nt, Artificial Sequence
  Description of Artificial Sequence: Synthetic oligonucleotide
gucuaagacaaaguggucu

SEQ ID NO: 1362754 - RNA, 19 nt, Artificial Sequence
  Description of Artificial Sequence: Synthetic oligonucleotide
cuagagucuagccaugcua

SEQ ID NO: 1362755 - RNA, 19 nt, Artificial Sequence
  Description of Artificial Sequence: Synthetic oligonucleotide
ggaguccaacccuugcagg

SEQ ID NO: 1362756 - RNA, 19 nt, Artificial Sequence
  Description of Artificial Sequence: Synthetic oligonucleotide
gauggagacccugucuuga

SEQ ID NO: 1362757 - RNA, 19 nt, Artificial Sequence
  Description of Artificial Sequence: Synthetic oligonucleotide
aaguggucuccaaucaaaa

SEQ ID NO: 1362758 - RNA, 19 nt, Artificial Sequence
  Description of Artificial Sequence: Synthetic oligonucleotide
aggaaccggggcuaacucu

SEQ ID NO: 1362759 - RNA, 19 nt, Artificial Sequence
  Description of Artificial Sequence: Synthetic oligonucleotide
uggagauugcugggaaggc

SEQ ID NO: 1362760 - RNA, 19 nt, Artificial Sequence
  Description of Artificial Sequence: Synthetic oligonucleotide
agucuaagacaaagugguc

SEQ ID NO: 1362761 - RNA, 19 nt, Artificial Sequence
  Description of Artificial Sequence: Synthetic oligonucleotide
ccucacaaaccuucaacag

SEQ ID NO: 1362762 - RNA, 19 nt, Artificial Sequence
  Description of Artificial Sequence: Synthetic oligonucleotide
guaacucgggagaaggcca

SEQ ID NO: 1362763 - RNA, 19 nt, Artificial Sequence
  Description of Artificial Sequence: Synthetic oligonucleotide
uuccugaucuucugauguc

SEQ ID NO: 1362764 - RNA, 19 nt, Artificial Sequence
  Description of Artificial Sequence: Synthetic oligonucleotide
agagucuagccaugcuaga

SEQ ID NO: 1362765 - RNA, 19 nt, Artificial Sequence
  Description of Artificial Sequence: Synthetic oligonucleotide
cugaggaacccagggaaug

SEQ ID NO: 1362766 - RNA, 19 nt, Artificial Sequence
  Description of Artificial Sequence: Synthetic oligonucleotide
caaccuggccauuucucuc

SEQ ID NO: 1362767 - RNA, 19 nt, Artificial Sequence
  Description of Artificial Sequence: Synthetic oligonucleotide
aguuuugauuuuauugaua

SEQ ID NO: 1362768 - RNA, 19 nt, Artificial Sequence
  Description of Artificial Sequence: Synthetic oligonucleotide
cuaccauaccccaccccac

SEQ ID NO: 1362769 - RNA, 19 nt, Artificial Sequence
  Description of Artificial Sequence: Synthetic oligonucleotide
uaacucgggagaaggccau

SEQ ID NO: 1362770 - RNA, 19 nt, Artificial Sequence
  Description of Artificial Sequence: Synthetic oligonucleotide
aguaccaaugaggccagau

SEQ ID NO: 1362771 - RNA, 19 nt, Artificial Sequence
  Description of Artificial Sequence: Synthetic oligonucleotide
gcaacgguaacucgggaga

SEQ ID NO: 1362772 - RNA, 19 nt, Artificial Sequence
  Description of Artificial Sequence: Synthetic oligonucleotide
ccugcuuaaauagguacag

SEQ ID NO: 1362773 - RNA, 19 nt, Artificial Sequence
  Description of Artificial Sequence: Synthetic oligonucleotide
cuaauucaggccgagucaa

SEQ ID NO: 1362774 - RNA, 19 nt, Artificial Sequence
  Description of Artificial Sequence: Synthetic oligonucleotide
cagucauacugcacaugug

SEQ ID NO: 1362775 - RNA, 19 nt, Artificial Sequence
  Description of Artificial Sequence: Synthetic oligonucleotide
gacagucauacugcacaug

SEQ ID NO: 1362776 - RNA, 19 nt, Artificial Sequence
  Description of Artificial Sequence: Synthetic oligonucleotide
ucaagcgacgaaggacuca

SEQ ID NO: 1362777 - RNA, 19 nt, Artificial Sequence
  Description of Artificial Sequence: Synthetic oligonucleotide
gcaggaguaaaaggaaggc

SEQ ID NO: 1362778 - RNA, 19 nt, Artificial Sequence
  Description of Artificial Sequence: Synthetic oligonucleotide
cucuucgcuaucagagguc

SEQ ID NO: 1362779 - RNA, 19 nt, Artificial Sequence
  Description of Artificial Sequence: Synthetic oligonucleotide
gcuaacucuucgcuaucag

SEQ ID NO: 1362780 - RNA, 19 nt, Artificial Sequence
  Description of Artificial Sequence: Synthetic oligonucleotide
caugaggauugggagccag

SEQ ID NO: 1362781 - RNA, 19 nt, Artificial Sequence
  Description of Artificial Sequence: Synthetic oligonucleotide
gugcaaggaacacuagaaa

SEQ ID NO: 1362782 - RNA, 19 nt, Artificial Sequence
  Description of Artificial Sequence: Synthetic oligonucleotide
guggucagagcuagguccc

SEQ ID NO: 1362783 - RNA, 19 nt, Artificial Sequence
  Description of Artificial Sequence: Synthetic oligonucleotide
aggcuccauccccuaguac

SEQ ID NO: 1362784 - RNA, 19 nt, Artificial Sequence
  Description of Artificial Sequence: Synthetic oligonucleotide
guaccaaugaggccagaua

SEQ ID NO: 1362785 - RNA, 19 nt, Artificial Sequence
  Description of Artificial Sequence: Synthetic oligonucleotide
aaauggcacuuagggauuu

SEQ ID NO: 1362786 - RNA, 19 nt, Artificial Sequence
  Description of Artificial Sequence: Synthetic oligonucleotide
caccaaccggugaggaaag

SEQ ID NO: 1362787 - RNA, 19 nt, Artificial Sequence
  Description of Artificial Sequence: Synthetic oligonucleotide
cauuaccccaacuccucca

SEQ ID NO: 1362788 - RNA, 19 nt, Artificial Sequence
  Description of Artificial Sequence: Synthetic oligonucleotide
auacugccugccccuucgg

SEQ ID NO: 1362789 - RNA, 19 nt, Artificial Sequence
  Description of Artificial Sequence: Synthetic oligonucleotide
cucccucgcucccacagug

SEQ ID NO: 1362790 - RNA, 19 nt, Artificial Sequence
  Description of Artificial Sequence: Synthetic oligonucleotide
cuucgcuaucagagguccc

SEQ ID NO: 1362791 - RNA, 19 nt, Artificial Sequence
  Description of Artificial Sequence: Synthetic oligonucleotide
cacaaaccuucaacaguuc

SEQ ID NO: 1362792 - RNA, 19 nt, Artificial Sequence
  Description of Artificial Sequence: Synthetic oligonucleotide
cacuccugugcaaccuggc

SEQ ID NO: 1362793 - RNA, 19 nt, Artificial Sequence
  Description of Artificial Sequence: Synthetic oligonucleotide
gaauacugccugccccuuc

SEQ ID NO: 1362794 - RNA, 19 nt, Artificial Sequence
  Description of Artificial Sequence: Synthetic oligonucleotide
cuucugauguccccacaca

SEQ ID NO: 1362795 - RNA, 19 nt, Artificial Sequence
  Description of Artificial Sequence: Synthetic oligonucleotide
agcgcccauugguucauca

SEQ ID NO: 1362796 - RNA, 19 nt, Artificial Sequence
  Description of Artificial Sequence: Synthetic oligonucleotide
gcuaaucuucccucuucug

SEQ ID NO: 1362797 - RNA, 19 nt, Artificial Sequence
  Description of Artificial Sequence: Synthetic oligonucleotide
ccaagacacaagcugagga

SEQ ID NO: 1362798 - RNA, 19 nt, Artificial Sequence
  Description of Artificial Sequence: Synthetic oligonucleotide
uccauccccuaguaccaaa

SEQ ID NO: 1362799 - RNA, 19 nt, Artificial Sequence
  Description of Artificial Sequence: Synthetic oligonucleotide
gauaccccuguuccuggaa

SEQ ID NO: 1362800 - RNA, 19 nt, Artificial Sequence
  Description of Artificial Sequence: Synthetic oligonucleotide
cagagggaccccacacuac

SEQ ID NO: 1362801 - RNA, 19 nt, Artificial Sequence
  Description of Artificial Sequence: Synthetic oligonucleotide
ggacagaucaugggacuag

SEQ ID NO: 1362802 - RNA, 19 nt, Artificial Sequence
  Description of Artificial Sequence: Synthetic oligonucleotide
gugguacagggagccaggg

SEQ ID NO: 1362803 - RNA, 19 nt, Artificial Sequence
  Description of Artificial Sequence: Synthetic oligonucleotide
agauaccccuguuccugga

SEQ ID NO: 1362804 - RNA, 19 nt, Artificial Sequence
  Description of Artificial Sequence: Synthetic oligonucleotide
ccaggacuagagucuagcc

SEQ ID NO: 1362805 - RNA, 19 nt, Artificial Sequence
  Description of Artificial Sequence: Synthetic oligonucleotide
ggcuucaugaggauuggga

SEQ ID NO: 1362806 - RNA, 19 nt, Artificial Sequence
  Description of Artificial Sequence: Synthetic oligonucleotide
cacacuacccagucagaaa

SEQ ID NO: 1362807 - RNA, 19 nt, Artificial Sequence
  Description of Artificial Sequence: Synthetic oligonucleotide
caggaaccggggcuaacuc

SEQ ID NO: 1362808 - RNA, 19 nt, Artificial Sequence
  Description of Artificial Sequence: Synthetic oligonucleotide
gagggaccccacacuaccc

SEQ ID NO: 1362809 - RNA, 19 nt, Artificial Sequence
  Description of Artificial Sequence: Synthetic oligonucleotide
accaacuaauucaggccga

SEQ ID NO: 1362810 - RNA, 19 nt, Artificial Sequence
  Description of Artificial Sequence: Synthetic oligonucleotide
ccaaccggugaggaaaggg

SEQ ID NO: 1362811 - RNA, 19 nt, Artificial Sequence
  Description of Artificial Sequence: Synthetic oligonucleotide
uggccucccauuaccccaa

SEQ ID NO: 1362812 - RNA, 19 nt, Artificial Sequence
  Description of Artificial Sequence: Synthetic oligonucleotide
ggggcaacgguaacucggg

SEQ ID NO: 1362813 - RNA, 19 nt, Artificial Sequence
  Description of Artificial Sequence: Synthetic oligonucleotide
cuggaacgugcaggaaccg

SEQ ID NO: 1362814 - RNA, 19 nt, Artificial Sequence
  Description of Artificial Sequence: Synthetic oligonucleotide
cagaucaugggacuaggau

SEQ ID NO: 1362815 - RNA, 19 nt, Artificial Sequence
  Description of Artificial Sequence: Synthetic oligonucleotide
aagcgacgaaggacucagg

SEQ ID NO: 1362816 - RNA, 19 nt, Artificial Sequence
  Description of Artificial Sequence: Synthetic oligonucleotide
ggcaguaccaagccagaaa

SEQ ID NO: 1362817 - RNA, 19 nt, Artificial Sequence
  Description of Artificial Sequence: Synthetic oligonucleotide
aacucgggagaaggccaug

SEQ ID NO: 1362818 - RNA, 19 nt, Artificial Sequence
  Description of Artificial Sequence: Synthetic oligonucleotide
ggccgagucaaggaggcug

SEQ ID NO: 1362819 - RNA, 19 nt, Artificial Sequence
  Description of Artificial Sequence: Synthetic oligonucleotide
uccaacccuugcaggcuuc

SEQ ID NO: 1362820 - RNA, 19 nt, Artificial Sequence
  Description of Artificial Sequence: Synthetic oligonucleotide
agcccauggccucccauua

SEQ ID NO: 1362821 - RNA, 19 nt, Artificial Sequence
  Description of Artificial Sequence: Synthetic oligonucleotide
cagagaccuagaaaacaua

SEQ ID NO: 1362822 - RNA, 19 nt, Artificial Sequence
  Description of Artificial Sequence: Synthetic oligonucleotide
ccagauaccccuguuccug

SEQ ID NO: 1362823 - RNA, 19 nt, Artificial Sequence
  Description of Artificial Sequence: Synthetic oligonucleotide
accggugaggaaaggggca

SEQ ID NO: 1362824 - RNA, 19 nt, Artificial Sequence
  Description of Artificial Sequence: Synthetic oligonucleotide
ccccuaguaccaaaauaug

SEQ ID NO: 1362825 - RNA, 19 nt, Artificial Sequence
  Description of Artificial Sequence: Synthetic oligonucleotide
acuuagggauuuggcacaa

SEQ ID NO: 1362826 - RNA, 19 nt, Artificial Sequence
  Description of Artificial Sequence: Synthetic oligonucleotide
ggaaggagacuuggcuggg

SEQ ID NO: 1362827 - RNA, 19 nt, Artificial Sequence
  Description of Artificial Sequence: Synthetic oligonucleotide
ggugcuugggccccugcuc

SEQ ID NO: 1362828 - RNA, 19 nt, Artificial Sequence
  Description of Artificial Sequence: Synthetic oligonucleotide
accaaccggugaggaaagg

SEQ ID NO: 1362829 - RNA, 19 nt, Artificial Sequence
  Description of Artificial Sequence: Synthetic oligonucleotide
caccccacuccugugcaac

SEQ ID NO: 1362830 - RNA, 19 nt, Artificial Sequence
  Description of Artificial Sequence: Synthetic oligonucleotide
ccauuaccccaacuccucc

SEQ ID NO: 1362831 - RNA, 19 nt, Artificial Sequence
  Description of Artificial Sequence: Synthetic oligonucleotide
aggcaccaacuaauucagg

SEQ ID NO: 1362832 - RNA, 19 nt, Artificial Sequence
  Description of Artificial Sequence: Synthetic oligonucleotide
cucgcucccacagugguua

SEQ ID NO: 1362833 - RNA, 19 nt, Artificial Sequence
  Description of Artificial Sequence: Synthetic oligonucleotide
guacaccacccucccucgc

SEQ ID NO: 1362834 - RNA, 19 nt, Artificial Sequence
  Description of Artificial Sequence: Synthetic oligonucleotide
ugccugccccuucgguacc

SEQ ID NO: 1362835 - RNA, 19 nt, Artificial Sequence
  Description of Artificial Sequence: Synthetic oligonucleotide
gagucuagccaugcuagau

SEQ ID NO: 1362836 - RNA, 19 nt, Artificial Sequence
  Description of Artificial Sequence: Synthetic oligonucleotide
cuaccucacaaaccuucaa

SEQ ID NO: 1362837 - RNA, 19 nt, Artificial Sequence
  Description of Artificial Sequence: Synthetic oligonucleotide
cccagucagaaaguauacc

SEQ ID NO: 1362838 - RNA, 19 nt, Artificial Sequence
  Description of Artificial Sequence: Synthetic oligonucleotide
accaaggcaccaacuaauu

SEQ ID NO: 1362839 - RNA, 19 nt, Artificial Sequence
  Description of Artificial Sequence: Synthetic oligonucleotide
cccauuaccccaacuccuc

SEQ ID NO: 1362840 - RNA, 19 nt, Artificial Sequence
  Description of Artificial Sequence: Synthetic oligonucleotide
aagcgcccauugguucauc

SEQ ID NO: 1362841 - RNA, 19 nt, Artificial Sequence
  Description of Artificial Sequence: Synthetic oligonucleotide
ccaacuaauucaggccgag

SEQ ID NO: 1362842 - RNA, 19 nt, Artificial Sequence
  Description of Artificial Sequence: Synthetic oligonucleotide
ggagacagucauacugcac

SEQ ID NO: 1362843 - RNA, 19 nt, Artificial Sequence
  Description of Artificial Sequence: Synthetic oligonucleotide
ggaccagcuaaucuucccu

SEQ ID NO: 1362844 - RNA, 19 nt, Artificial Sequence
  Description of Artificial Sequence: Synthetic oligonucleotide
accccuguuccuggaacgu

SEQ ID NO: 1362845 - RNA, 19 nt, Artificial Sequence
  Description of Artificial Sequence: Synthetic oligonucleotide
ggggaucugaggagcuggg

SEQ ID NO: 1362846 - RNA, 19 nt, Artificial Sequence
  Description of Artificial Sequence: Synthetic oligonucleotide
agacuggaguccaacccuu

SEQ ID NO: 1362847 - RNA, 19 nt, Artificial Sequence
  Description of Artificial Sequence: Synthetic oligonucleotide
cugcaccuuggauaaucaa

SEQ ID NO: 1362848 - RNA, 19 nt, Artificial Sequence
  Description of Artificial Sequence: Synthetic oligonucleotide
ggggcuaacucuucgcuau

SEQ ID NO: 1362849 - RNA, 19 nt, Artificial Sequence
  Description of Artificial Sequence: Synthetic oligonucleotide
cgcccauugguucaucaac

SEQ ID NO: 1362850 - RNA, 19 nt, Artificial Sequence
  Description of Artificial Sequence: Synthetic oligonucleotide
cuacccagucagaaaguau

SEQ ID NO: 1362851 - RNA, 19 nt, Artificial Sequence
  Description of Artificial Sequence: Synthetic oligonucleotide
caaauggcacuuagggauu

SEQ ID NO: 1362852 - RNA, 19 nt, Artificial Sequence
  Description of Artificial Sequence: Synthetic oligonucleotide
ggcuaacucuucgcuauca

SEQ ID NO: 1362853 - RNA, 19 nt, Artificial Sequence
  Description of Artificial Sequence: Synthetic oligonucleotide
gaaccggggcuaacucuuc

SEQ ID NO: 1362854 - RNA, 19 nt, Artificial Sequence
  Description of Artificial Sequence: Synthetic oligonucleotide
aggcaguaccaagccagaa

SEQ ID NO: 1362855 - RNA, 19 nt, Artificial Sequence
  Description of Artificial Sequence: Synthetic oligonucleotide
ucgcuaucagaggucccuu

SEQ ID NO: 1362856 - RNA, 19 nt, Artificial Sequence
  Description of Artificial Sequence: Synthetic oligonucleotide
ggacuagagucuagccaug

SEQ ID NO: 1362857 - RNA, 19 nt, Artificial Sequence
  Description of Artificial Sequence: Synthetic oligonucleotide
cuagguccccacagcaccu

SEQ ID NO: 1362858 - RNA, 19 nt, Artificial Sequence
  Description of Artificial Sequence: Synthetic oligonucleotide
uuccuggaacgugcaggaa

SEQ ID NO: 1362859 - RNA, 19 nt, Artificial Sequence
  Description of Artificial Sequence: Synthetic oligonucleotide
ggucuccaaucaaaacuga

SEQ ID NO: 1362860 - RNA, 19 nt, Artificial Sequence
  Description of Artificial Sequence: Synthetic oligonucleotide
caggugcuugggccccugc

SEQ ID NO: 1362861 - RNA, 19 nt, Artificial Sequence
  Description of Artificial Sequence: Synthetic oligonucleotide
ccaccaaccggugaggaaa

SEQ ID NO: 1362862 - RNA, 19 nt, Artificial Sequence
  Description of Artificial Sequence: Synthetic oligonucleotide
agccaggacuagagucuag

SEQ ID NO: 1362863 - RNA, 19 nt, Artificial Sequence
  Description of Artificial Sequence: Synthetic oligonucleotide
ucgcucccacagugguuac

SEQ ID NO: 1362864 - RNA, 19 nt, Artificial Sequence
  Description of Artificial Sequence: Synthetic oligonucleotide
cacuacccagucagaaagu

SEQ ID NO: 1362865 - RNA, 19 nt, Artificial Sequence
  Description of Artificial Sequence: Synthetic oligonucleotide
cgguaacucgggagaaggc

SEQ ID NO: 1362866 - RNA, 19 nt, Artificial Sequence
  Description of Artificial Sequence: Synthetic oligonucleotide
cauccccuaguaccaaaau

SEQ ID NO: 1362867 - RNA, 19 nt, Artificial Sequence
  Description of Artificial Sequence: Synthetic oligonucleotide
gcaaggacagaaagagacu

SEQ ID NO: 1362868 - RNA, 19 nt, Artificial Sequence
  Description of Artificial Sequence: Synthetic oligonucleotide
gggcuaacucuucgcuauc

SEQ ID NO: 1362869 - RNA, 19 nt, Artificial Sequence
  Description of Artificial Sequence: Synthetic oligonucleotide
ggucagagcuaggucccca

SEQ ID NO: 1362870 - RNA, 19 nt, Artificial Sequence
  Description of Artificial Sequence: Synthetic oligonucleotide
gaccagugcugaggacaca

SEQ ID NO: 1362871 - RNA, 19 nt, Artificial Sequence
  Description of Artificial Sequence: Synthetic oligonucleotide
caacuaauucaggccgagu

SEQ ID NO: 1362872 - RNA, 19 nt, Artificial Sequence
  Description of Artificial Sequence: Synthetic oligonucleotide
gccccugcucuaggcaggg

SEQ ID NO: 1362873 - RNA, 19 nt, Artificial Sequence
  Description of Artificial Sequence: Synthetic oligonucleotide
ggaaccggggcuaacucuu

SEQ ID NO: 1362874 - RNA, 19 nt, Artificial Sequence
  Description of Artificial Sequence: Synthetic oligonucleotide
ccacacuacccagucagaa

SEQ ID NO: 1362875 - RNA, 19 nt, Artificial Sequence
  Description of Artificial Sequence: Synthetic oligonucleotide
gcgcccauugguucaucaa

SEQ ID NO: 1362876 - RNA, 19 nt, Artificial Sequence
  Description of Artificial Sequence: Synthetic oligonucleotide
gggcaacgguaacucggga

SEQ ID NO: 1362877 - RNA, 19 nt, Artificial Sequence
  Description of Artificial Sequence: Synthetic oligonucleotide
aggccgagucaaggaggcu

SEQ ID NO: 1362878 - RNA, 19 nt, Artificial Sequence
  Description of Artificial Sequence: Synthetic oligonucleotide
guccaacccuugcaggcuu

SEQ ID NO: 1362879 - RNA, 19 nt, Artificial Sequence
  Description of Artificial Sequence: Synthetic oligonucleotide
cuccauccccuaguaccaa

SEQ ID NO: 1362880 - RNA, 19 nt, Artificial Sequence
  Description of Artificial Sequence: Synthetic oligonucleotide
cccacacuacccagucaga

SEQ ID NO: 1362881 - RNA, 19 nt, Artificial Sequence
  Description of Artificial Sequence: Synthetic oligonucleotide
cucucuggcuggucauuuu

SEQ ID NO: 1362882 - RNA, 19 nt, Artificial Sequence
  Description of Artificial Sequence: Synthetic oligonucleotide
caacugaaacauggagauu

SEQ ID NO: 1362883 - RNA, 19 nt, Artificial Sequence
  Description of Artificial Sequence: Synthetic oligonucleotide
gccugccccuucgguaccc

SEQ ID NO: 1362884 - RNA, 19 nt, Artificial Sequence
  Description of Artificial Sequence: Synthetic oligonucleotide
caguaccaaugaggccaga

SEQ ID NO: 1362885 - RNA, 19 nt, Artificial Sequence
  Description of Artificial Sequence: Synthetic oligonucleotide
ggaccccacacuacccagu

SEQ ID NO: 1362886 - RNA, 19 nt, Artificial Sequence
  Description of Artificial Sequence: Synthetic oligonucleotide
caagcgcccauugguucau

SEQ ID NO: 1362887 - RNA, 19 nt, Artificial Sequence
  Description of Artificial Sequence: Synthetic oligonucleotide
cggggcuaacucuucgcua

SEQ ID NO: 1362888 - RNA, 19 nt, Artificial Sequence
  Description of Artificial Sequence: Synthetic oligonucleotide
ccucgcucccacagugguu

SEQ ID NO: 1362889 - RNA, 19 nt, Artificial Sequence
  Description of Artificial Sequence: Synthetic oligonucleotide
ccccugcucuaggcaggga

SEQ ID NO: 1362890 - RNA, 19 nt, Artificial Sequence
  Description of Artificial Sequence: Synthetic oligonucleotide
aagguagccauauagaauc

SEQ ID NO: 1362891 - RNA, 19 nt, Artificial Sequence
  Description of Artificial Sequence: Synthetic oligonucleotide
aagauuucguaccucagcc

SEQ ID NO: 1362892 - RNA, 19 nt, Artificial Sequence
  Description of Artificial Sequence: Synthetic oligonucleotide
aacgcuuguucucagcugc

SEQ ID NO: 1362893 - RNA, 19 nt, Artificial Sequence
  Description of Artificial Sequence: Synthetic oligonucleotide
agccauauagaauccaugc

SEQ ID NO: 1362894 - RNA, 19 nt, Artificial Sequence
  Description of Artificial Sequence: Synthetic oligonucleotide
ugucaguucaguuacaagu

SEQ ID NO: 1362895 - RNA, 19 nt, Artificial Sequence
  Description of Artificial Sequence: Synthetic oligonucleotide
uucaguuacaaguagccgc

SEQ ID NO: 1362896 - RNA, 19 nt, Artificial Sequence
  Description of Artificial Sequence: Synthetic oligonucleotide
agagaagguagccauauag

SEQ ID NO: 1362897 - RNA, 19 nt, Artificial Sequence
  Description of Artificial Sequence: Synthetic oligonucleotide
gguaauaucgucugggccg

SEQ ID NO: 1362898 - RNA, 19 nt, Artificial Sequence
  Description of Artificial Sequence: Synthetic oligonucleotide
uguaagauuucguaccuca

SEQ ID NO: 1362899 - RNA, 19 nt, Artificial Sequence
  Description of Artificial Sequence: Synthetic oligonucleotide
gauauggaaaccaggaggc

SEQ ID NO: 1362900 - RNA, 19 nt, Artificial Sequence
  Description of Artificial Sequence: Synthetic oligonucleotide
uacgugucagacaaaaucu

SEQ ID NO: 1362901 - RNA, 19 nt, Artificial Sequence
  Description of Artificial Sequence: Synthetic oligonucleotide
auaguaguccacaagcagc

SEQ ID NO: 1362902 - RNA, 19 nt, Artificial Sequence
  Description of Artificial Sequence: Synthetic oligonucleotide
aggacuugaaaguuguguc

SEQ ID NO: 1362903 - RNA, 19 nt, Artificial Sequence
  Description of Artificial Sequence: Synthetic oligonucleotide
cucuguaagauuucguacc

SEQ ID NO: 1362904 - RNA, 19 nt, Artificial Sequence
  Description of Artificial Sequence: Synthetic oligonucleotide
gcuuaagccacuuucaucc

SEQ ID NO: 1362905 - RNA, 19 nt, Artificial Sequence
  Description of Artificial Sequence: Synthetic oligonucleotide
aaacacauguacccauauc

SEQ ID NO: 1362906 - RNA, 19 nt, Artificial Sequence
  Description of Artificial Sequence: Synthetic oligonucleotide
ucuuuugccagggugaggc

SEQ ID NO: 1362907 - RNA, 19 nt, Artificial Sequence
  Description of Artificial Sequence: Synthetic oligonucleotide
aaacggucccuaaugagac

SEQ ID NO: 1362908 - RNA, 19 nt, Artificial Sequence
  Description of Artificial Sequence: Synthetic oligonucleotide
gaugcugugagagacuaag

SEQ ID NO: 1362909 - RNA, 19 nt, Artificial Sequence
  Description of Artificial Sequence: Synthetic oligonucleotide
ucaacuuaguggcuaggcc

SEQ ID NO: 1362910 - RNA, 19 nt, Artificial Sequence
  Description of Artificial Sequence: Synthetic oligonucleotide
uuaaguccuagcagugagg

SEQ ID NO: 1362911 - RNA, 19 nt, Artificial Sequence
  Description of Artificial Sequence: Synthetic oligonucleotide
ugucagacaaaaucuucag

SEQ ID NO: 1362912 - RNA, 19 nt, Artificial Sequence
  Description of Artificial Sequence: Synthetic oligonucleotide
guacccauaucccuuacag

SEQ ID NO: 1362913 - RNA, 19 nt, Artificial Sequence
  Description of Artificial Sequence: Synthetic oligonucleotide
uuuugucuuccgauguuag

SEQ ID NO: 1362914 - RNA, 19 nt, Artificial Sequence
  Description of Artificial Sequence: Synthetic oligonucleotide
ucaguuacaaguagccgcu

SEQ ID NO: 1362915 - RNA, 19 nt, Artificial Sequence
  Description of Artificial Sequence: Synthetic oligonucleotide
ucgagagcaaaccugcaca

SEQ ID NO: 1362916 - RNA, 19 nt, Artificial Sequence
  Description of Artificial Sequence: Synthetic oligonucleotide
agcaaaccugcacagcucg

SEQ ID NO: 1362917 - RNA, 19 nt, Artificial Sequence
  Description of Artificial Sequence: Synthetic oligonucleotide
guugugucaguucaguuac

SEQ ID NO: 1362918 - RNA, 19 nt, Artificial Sequence
  Description of Artificial Sequence: Synthetic oligonucleotide
cugugagagacuaagcaac

SEQ ID NO: 1362919 - RNA, 19 nt, Artificial Sequence
  Description of Artificial Sequence: Synthetic oligonucleotide
uuuaaacacauguacccau

SEQ ID NO: 1362920 - RNA, 19 nt, Artificial Sequence
  Description of Artificial Sequence: Synthetic oligonucleotide
cuuaaguccuagcagugag

SEQ ID NO: 1362921 - RNA, 19 nt, Artificial Sequence
  Description of Artificial Sequence: Synthetic oligonucleotide
guacgugucagacaaaauc

SEQ ID NO: 1362922 - RNA, 19 nt, Artificial Sequence
  Description of Artificial Sequence: Synthetic oligonucleotide
ugguaauaucgucugggcc

SEQ ID NO: 1362923 - RNA, 19 nt, Artificial Sequence
  Description of Artificial Sequence: Synthetic oligonucleotide
caugcugucuuaugcagcc

SEQ ID NO: 1362924 - RNA, 19 nt, Artificial Sequence
  Description of Artificial Sequence: Synthetic oligonucleotide
aaaugcggguucuggauca

SEQ ID NO: 1362925 - RNA, 19 nt, Artificial Sequence
  Description of Artificial Sequence: Synthetic oligonucleotide
uucaagggucucaugaaac

SEQ ID NO: 1362926 - RNA, 19 nt, Artificial Sequence
  Description of Artificial Sequence: Synthetic oligonucleotide
uccgauagucuccacaccu

SEQ ID NO: 1362927 - RNA, 19 nt, Artificial Sequence
  Description of Artificial Sequence: Synthetic oligonucleotide
aagaccuccgauagucucc

SEQ ID NO: 1362928 - RNA, 19 nt, Artificial Sequence
  Description of Artificial Sequence: Synthetic oligonucleotide
aguccuaagggcgagcgcg

SEQ ID NO: 1362929 - RNA, 19 nt, Artificial Sequence
  Description of Artificial Sequence: Synthetic oligonucleotide
acacacuugcuguaguauc

SEQ ID NO: 1362930 - RNA, 19 nt, Artificial Sequence
  Description of Artificial Sequence: Synthetic oligonucleotide
gguguauuccuucacuagg

SEQ ID NO: 1362931 - RNA, 19 nt, Artificial Sequence
  Description of Artificial Sequence: Synthetic oligonucleotide
aaguagccgcuguucaagg

SEQ ID NO: 1362932 - RNA, 19 nt, Artificial Sequence
  Description of Artificial Sequence: Synthetic oligonucleotide
uacaaguagccgcuguuca

SEQ ID NO: 1362933 - RNA, 19 nt, Artificial Sequence
  Description of Artificial Sequence: Synthetic oligonucleotide
augcagccgaacuucauuc

SEQ ID NO: 1362934 - RNA, 19 nt, Artificial Sequence
  Description of Artificial Sequence: Synthetic oligonucleotide
ucuuguaggcgaauggcuc

SEQ ID NO: 1362935 - RNA, 19 nt, Artificial Sequence
  Description of Artificial Sequence: Synthetic oligonucleotide
ugugagagacuaagcaaca

SEQ ID NO: 1362936 - RNA, 19 nt, Artificial Sequence
  Description of Artificial Sequence: Synthetic oligonucleotide
acacauguacccauauccc

SEQ ID NO: 1362937 - RNA, 19 nt, Artificial Sequence
  Description of Artificial Sequence: Synthetic oligonucleotide
uugguaauaucgucugggc

SEQ ID NO: 1362938 - RNA, 19 nt, Artificial Sequence
  Description of Artificial Sequence: Synthetic oligonucleotide
aguccuagcagugagggca

SEQ ID NO: 1362939 - RNA, 19 nt, Artificial Sequence
  Description of Artificial Sequence: Synthetic oligonucleotide
agacuaagcaacagcuugc

SEQ ID NO: 1362940 - RNA, 19 nt, Artificial Sequence
  Description of Artificial Sequence: Synthetic oligonucleotide
auagcacugcacuugauuu

SEQ ID NO: 1362941 - RNA, 19 nt, Artificial Sequence
  Description of Artificial Sequence: Synthetic oligonucleotide
aguggagguagucuguuga

SEQ ID NO: 1362942 - RNA, 19 nt, Artificial Sequence
  Description of Artificial Sequence: Synthetic oligonucleotide
gaucauagcacugcacuug

SEQ ID NO: 1362943 - RNA, 19 nt, Artificial Sequence
  Description of Artificial Sequence: Synthetic oligonucleotide
cuuguaggcgaauggcucc

SEQ ID NO: 1362944 - RNA, 19 nt, Artificial Sequence
  Description of Artificial Sequence: Synthetic oligonucleotide
agagugaagcacuuccucu

SEQ ID NO: 1362945 - RNA, 19 nt, Artificial Sequence
  Description of Artificial Sequence: Synthetic oligonucleotide
ucccuuacaguggagguag

SEQ ID NO: 1362946 - RNA, 19 nt, Artificial Sequence
  Description of Artificial Sequence: Synthetic oligonucleotide
ucaagggucucaugaaacu

SEQ ID NO: 1362947 - RNA, 19 nt, Artificial Sequence
  Description of Artificial Sequence: Synthetic oligonucleotide
ucucgcaccaagaccuccg

SEQ ID NO: 1362948 - RNA, 19 nt, Artificial Sequence
  Description of Artificial Sequence: Synthetic oligonucleotide
aguugugucaguucaguua

SEQ ID NO: 1362949 - RNA, 19 nt, Artificial Sequence
  Description of Artificial Sequence: Synthetic oligonucleotide
uccaaacggucccuaauga

SEQ ID NO: 1362950 - RNA, 19 nt, Artificial Sequence
  Description of Artificial Sequence: Synthetic oligonucleotide
uugaggaucauagcacugc

SEQ ID NO: 1362951 - RNA, 19 nt, Artificial Sequence
  Description of Artificial Sequence: Synthetic oligonucleotide
uuucguaccucagccaugc

SEQ ID NO: 1362952 - RNA, 19 nt, Artificial Sequence
  Description of Artificial Sequence: Synthetic oligonucleotide
aaggucggccuucuuaagu

SEQ ID NO: 1362953 - RNA, 19 nt, Artificial Sequence
  Description of Artificial Sequence: Synthetic oligonucleotide
cauguccugcucuuguagg

SEQ ID NO: 1362954 - RNA, 19 nt, Artificial Sequence
  Description of Artificial Sequence: Synthetic oligonucleotide
ucguaccucagccaugcug

SEQ ID NO: 1362955 - RNA, 19 nt, Artificial Sequence
  Description of Artificial Sequence: Synthetic oligonucleotide
ugaggaucauagcacugca

SEQ ID NO: 1362956 - RNA, 19 nt, Artificial Sequence
  Description of Artificial Sequence: Synthetic oligonucleotide
aaaucuccagaugccaucu

SEQ ID NO: 1362957 - RNA, 19 nt, Artificial Sequence
  Description of Artificial Sequence: Synthetic oligonucleotide
caguucaguuacaaguagc

SEQ ID NO: 1362958 - RNA, 19 nt, Artificial Sequence
  Description of Artificial Sequence: Synthetic oligonucleotide
ucuuaugcagccgaacuuc

SEQ ID NO: 1362959 - RNA, 19 nt, Artificial Sequence
  Description of Artificial Sequence: Synthetic oligonucleotide
aguggcuaggccuugcuaa

SEQ ID NO: 1362960 - RNA, 19 nt, Artificial Sequence
  Description of Artificial Sequence: Synthetic oligonucleotide
caccuuugcagcuuucagc

SEQ ID NO: 1362961 - RNA, 19 nt, Artificial Sequence
  Description of Artificial Sequence: Synthetic oligonucleotide
gaugcgguccagcucagac

SEQ ID NO: 1362962 - RNA, 19 nt, Artificial Sequence
  Description of Artificial Sequence: Synthetic oligonucleotide
uaucucuaccccuucucca

SEQ ID NO: 1362963 - RNA, 19 nt, Artificial Sequence
  Description of Artificial Sequence: Synthetic oligonucleotide
gacucucuguaagauuucg

SEQ ID NO: 1362964 - RNA, 19 nt, Artificial Sequence
  Description of Artificial Sequence: Synthetic oligonucleotide
acgucgagagcaaaccugc

SEQ ID NO: 1362965 - RNA, 19 nt, Artificial Sequence
  Description of Artificial Sequence: Synthetic oligonucleotide
acgguguacuuccacuuuc

SEQ ID NO: 1362966 - RNA, 19 nt, Artificial Sequence
  Description of Artificial Sequence: Synthetic oligonucleotide
ccacacucaacuuaguggc

SEQ ID NO: 1362967 - RNA, 19 nt, Artificial Sequence
  Description of Artificial Sequence: Synthetic oligonucleotide
agaaggucggccuucuuaa

SEQ ID NO: 1362968 - RNA, 19 nt, Artificial Sequence
  Description of Artificial Sequence: Synthetic oligonucleotide
aacggucccuaaugagacg

SEQ ID NO: 1362969 - RNA, 19 nt, Artificial Sequence
  Description of Artificial Sequence: Synthetic oligonucleotide
ugcugucuuaugcagccga

SEQ ID NO: 1362970 - RNA, 19 nt, Artificial Sequence
  Description of Artificial Sequence: Synthetic oligonucleotide
caaacggucccuaaugaga

SEQ ID NO: 1362971 - RNA, 19 nt, Artificial Sequence
  Description of Artificial Sequence: Synthetic oligonucleotide
uaucccuuacaguggaggu

SEQ ID NO: 1362972 - RNA, 19 nt, Artificial Sequence
  Description of Artificial Sequence: Synthetic oligonucleotide
uguucaagggucucaugaa

SEQ ID NO: 1362973 - RNA, 19 nt, Artificial Sequence
  Description of Artificial Sequence: Synthetic oligonucleotide
uccaggugcgcagaaaucu

SEQ ID NO: 1362974 - RNA, 19 nt, Artificial Sequence
  Description of Artificial Sequence: Synthetic oligonucleotide
uucagcguuuccccgucag

SEQ ID NO: 1362975 - RNA, 19 nt, Artificial Sequence
  Description of Artificial Sequence: Synthetic oligonucleotide
ucuuccgauguuagauuug

SEQ ID NO: 1362976 - RNA, 19 nt, Artificial Sequence
  Description of Artificial Sequence: Synthetic oligonucleotide
uucucagcacuguacgugu

SEQ ID NO: 1362977 - RNA, 19 nt, Artificial Sequence
  Description of Artificial Sequence: Synthetic oligonucleotide
acggucccuaaugagacgg

SEQ ID NO: 1362978 - RNA, 19 nt, Artificial Sequence
  Description of Artificial Sequence: Synthetic oligonucleotide
gaaaugcggguucuggauc

SEQ ID NO: 1362979 - RNA, 19 nt, Artificial Sequence
  Description of Artificial Sequence: Synthetic oligonucleotide
uaugcagccgaacuucauu

SEQ ID NO: 1362980 - RNA, 19 nt, Artificial Sequence
  Description of Artificial Sequence: Synthetic oligonucleotide
aguuacaaguagccgcugu

SEQ ID NO: 1362981 - RNA, 19 nt, Artificial Sequence
  Description of Artificial Sequence: Synthetic oligonucleotide
uguacccauaucccuuaca

SEQ ID NO: 1362982 - RNA, 19 nt, Artificial Sequence
  Description of Artificial Sequence: Synthetic oligonucleotide
uccagaugccaucugguuu

SEQ ID NO: 1362983 - RNA, 19 nt, Artificial Sequence
  Description of Artificial Sequence: Synthetic oligonucleotide
cucaacuuaguggcuaggc

SEQ ID NO: 1362984 - RNA, 19 nt, Artificial Sequence
  Description of Artificial Sequence: Synthetic oligonucleotide
uuacacagggcugaugcaa

SEQ ID NO: 1362985 - RNA, 19 nt, Artificial Sequence
  Description of Artificial Sequence: Synthetic oligonucleotide
augacucucuguaagauuu

SEQ ID NO: 1362986 - RNA, 19 nt, Artificial Sequence
  Description of Artificial Sequence: Synthetic oligonucleotide
gagaagguagccauauaga

SEQ ID NO: 1362987 - RNA, 19 nt, Artificial Sequence
  Description of Artificial Sequence: Synthetic oligonucleotide
ugcggguucuggaucaggu

SEQ ID NO: 1362988 - RNA, 19 nt, Artificial Sequence
  Description of Artificial Sequence: Synthetic oligonucleotide
cugcccacacucaacuuag

SEQ ID NO: 1362989 - RNA, 19 nt, Artificial Sequence
  Description of Artificial Sequence: Synthetic oligonucleotide
agauuucguaccucagcca

SEQ ID NO: 1362990 - RNA, 19 nt, Artificial Sequence
  Description of Artificial Sequence: Synthetic oligonucleotide
uaaugagacgguguacuuc

SEQ ID NO: 1362991 - RNA, 19 nt, Artificial Sequence
  Description of Artificial Sequence: Synthetic oligonucleotide
ugagacgguguacuuccac

SEQ ID NO: 1362992 - RNA, 19 nt, Artificial Sequence
  Description of Artificial Sequence: Synthetic oligonucleotide
agucuucagccgguguucc

SEQ ID NO: 1362993 - RNA, 19 nt, Artificial Sequence
  Description of Artificial Sequence: Synthetic oligonucleotide
ugcagccgaacuucauucc

SEQ ID NO: 1362994 - RNA, 19 nt, Artificial Sequence
  Description of Artificial Sequence: Synthetic oligonucleotide
caagaccuccgauagucuc

SEQ ID NO: 1362995 - RNA, 19 nt, Artificial Sequence
  Description of Artificial Sequence: Synthetic oligonucleotide
uggguguauuccuucacua

SEQ ID NO: 1362996 - RNA, 19 nt, Artificial Sequence
  Description of Artificial Sequence: Synthetic oligonucleotide
guaagauuucguaccucag

SEQ ID NO: 1362997 - RNA, 19 nt, Artificial Sequence
  Description of Artificial Sequence: Synthetic oligonucleotide
uaguaucucuaccccuucu

SEQ ID NO: 1362998 - RNA, 19 nt, Artificial Sequence
  Description of Artificial Sequence: Synthetic oligonucleotide
gauuucguaccucagccau

SEQ ID NO: 1362999 - RNA, 19 nt, Artificial Sequence
  Description of Artificial Sequence: Synthetic oligonucleotide
caggugcgcagaaaucucc

SEQ ID NO: 1363000 - RNA, 19 nt, Artificial Sequence
  Description of Artificial Sequence: Synthetic oligonucleotide
acagcucgccgccggagcg

SEQ ID NO: 1363001 - RNA, 19 nt, Artificial Sequence
  Description of Artificial Sequence: Synthetic oligonucleotide
gcuguaguaucucuacccc

SEQ ID NO: 1363002 - RNA, 19 nt, Artificial Sequence
  Description of Artificial Sequence: Synthetic oligonucleotide
gguacugggcauugaugcg

SEQ ID NO: 1363003 - RNA, 19 nt, Artificial Sequence
  Description of Artificial Sequence: Synthetic oligonucleotide
uguacgugucagacaaaau

SEQ ID NO: 1363004 - RNA, 19 nt, Artificial Sequence
  Description of Artificial Sequence: Synthetic oligonucleotide
uuaguggcuaggccuugcu

SEQ ID NO: 1363005 - RNA, 19 nt, Artificial Sequence
  Description of Artificial Sequence: Synthetic oligonucleotide
uggagguagucuguugagc

SEQ ID NO: 1363006 - RNA, 19 nt, Artificial Sequence
  Description of Artificial Sequence: Synthetic oligonucleotide
ggagguagucuguugagca

SEQ ID NO: 1363007 - RNA, 19 nt, Artificial Sequence
  Description of Artificial Sequence: Synthetic oligonucleotide
gugucaguucaguuacaag

SEQ ID NO: 1363008 - RNA, 19 nt, Artificial Sequence
  Description of Artificial Sequence: Synthetic oligonucleotide
uuugccagggugaggcuua

SEQ ID NO: 1363009 - RNA, 19 nt, Artificial Sequence
  Description of Artificial Sequence: Synthetic oligonucleotide
gucuguugagcagggagag

SEQ ID NO: 1363010 - RNA, 19 nt, Artificial Sequence
  Description of Artificial Sequence: Synthetic oligonucleotide
agagcccaacgcuuguucu

SEQ ID NO: 1363011 - RNA, 19 nt, Artificial Sequence
  Description of Artificial Sequence: Synthetic oligonucleotide
gcuaaacuccuggagagcc

SEQ ID NO: 1363012 - RNA, 19 nt, Artificial Sequence
  Description of Artificial Sequence: Synthetic oligonucleotide
agguagccauauagaaucc

SEQ ID NO: 1363013 - RNA, 19 nt, Artificial Sequence
  Description of Artificial Sequence: Synthetic oligonucleotide
cagagugaagcacuuccuc

SEQ ID NO: 1363014 - RNA, 19 nt, Artificial Sequence
  Description of Artificial Sequence: Synthetic oligonucleotide
aauaucgucugggccgcca

SEQ ID NO: 1363015 - RNA, 19 nt, Artificial Sequence
  Description of Artificial Sequence: Synthetic oligonucleotide
gucgagagcaaaccugcac

SEQ ID NO: 1363016 - RNA, 19 nt, Artificial Sequence
  Description of Artificial Sequence: Synthetic oligonucleotide
agccgaacuucauuccaug

SEQ ID NO: 1363017 - RNA, 19 nt, Artificial Sequence
  Description of Artificial Sequence: Synthetic oligonucleotide
agcucgcggacgucgagag

SEQ ID NO: 1363018 - RNA, 19 nt, Artificial Sequence
  Description of Artificial Sequence: Synthetic oligonucleotide
gaaggucggccuucuuaag

SEQ ID NO: 1363019 - RNA, 19 nt, Artificial Sequence
  Description of Artificial Sequence: Synthetic oligonucleotide
auguacccauaucccuuac

SEQ ID NO: 1363020 - RNA, 19 nt, Artificial Sequence
  Description of Artificial Sequence: Synthetic oligonucleotide
caacuuaguggcuaggccu

SEQ ID NO: 1363021 - RNA, 19 nt, Artificial Sequence
  Description of Artificial Sequence: Synthetic oligonucleotide
ugucuuccgauguuagauu

SEQ ID NO: 1363022 - RNA, 19 nt, Artificial Sequence
  Description of Artificial Sequence: Synthetic oligonucleotide
aaggaguccuaagggcgag

SEQ ID NO: 1363023 - RNA, 19 nt, Artificial Sequence
  Description of Artificial Sequence: Synthetic oligonucleotide
ggguguauuccuucacuag

SEQ ID NO: 1363024 - RNA, 19 nt, Artificial Sequence
  Description of Artificial Sequence: Synthetic oligonucleotide
uaucgucugggccgccaag

SEQ ID NO: 1363025 - RNA, 19 nt, Artificial Sequence
  Description of Artificial Sequence: Synthetic oligonucleotide
aucgucugggccgccaagg

SEQ ID NO: 1363026 - RNA, 19 nt, Artificial Sequence
  Description of Artificial Sequence: Synthetic oligonucleotide
uuccgauguuagauuugug

SEQ ID NO: 1363027 - RNA, 19 nt, Artificial Sequence
  Description of Artificial Sequence: Synthetic oligonucleotide
agucuguugagcagggaga

SEQ ID NO: 1363028 - RNA, 19 nt, Artificial Sequence
  Description of Artificial Sequence: Synthetic oligonucleotide
ucugguuuucuugguaaua

SEQ ID NO: 1363029 - RNA, 19 nt, Artificial Sequence
  Description of Artificial Sequence: Synthetic oligonucleotide
aacuuaguggcuaggccuu

SEQ ID NO: 1363030 - RNA, 19 nt, Artificial Sequence
  Description of Artificial Sequence: Synthetic oligonucleotide
gagccgagcucucauccac

SEQ ID NO: 1363031 - RNA, 19 nt, Artificial Sequence
  Description of Artificial Sequence: Synthetic oligonucleotide
gccagggugaggcuuaagc

SEQ ID NO: 1363032 - RNA, 19 nt, Artificial Sequence
  Description of Artificial Sequence: Synthetic oligonucleotide
ggacuugaaaguuguguca

SEQ ID NO: 1363033 - RNA, 19 nt, Artificial Sequence
  Description of Artificial Sequence: Synthetic oligonucleotide
acaaguagccgcuguucaa

SEQ ID NO: 1363034 - RNA, 19 nt, Artificial Sequence
  Description of Artificial Sequence: Synthetic oligonucleotide
cugaaaugcggguucugga

SEQ ID NO: 1363035 - RNA, 19 nt, Artificial Sequence
  Description of Artificial Sequence: Synthetic oligonucleotide
gugagagacuaagcaacag

SEQ ID NO: 1363036 - RNA, 19 nt, Artificial Sequence
  Description of Artificial Sequence: Synthetic oligonucleotide
uuaugcagccgaacuucau

SEQ ID NO: 1363037 - RNA, 19 nt, Artificial Sequence
  Description of Artificial Sequence: Synthetic oligonucleotide
cuuaugcagccgaacuuca

SEQ ID NO: 1363038 - RNA, 19 nt, Artificial Sequence
  Description of Artificial Sequence: Synthetic oligonucleotide
ccgaacuucauuccaugcc

SEQ ID NO: 1363039 - RNA, 19 nt, Artificial Sequence
  Description of Artificial Sequence: Synthetic oligonucleotide
agcguuuccccgucagugu

SEQ ID NO: 1363040 - RNA, 19 nt, Artificial Sequence
  Description of Artificial Sequence: Synthetic oligonucleotide
caacgcuuguucucagcug

SEQ ID NO: 1363041 - RNA, 19 nt, Artificial Sequence
  Description of Artificial Sequence: Synthetic oligonucleotide
ucagcguuuccccgucagu

SEQ ID NO: 1363042 - RNA, 19 nt, Artificial Sequence
  Description of Artificial Sequence: Synthetic oligonucleotide
cccauaucccuuacagugg

SEQ ID NO: 1363043 - RNA, 19 nt, Artificial Sequence
  Description of Artificial Sequence: Synthetic oligonucleotide
aggcgaauggcucccucca

SEQ ID NO: 1363044 - RNA, 19 nt, Artificial Sequence
  Description of Artificial Sequence: Synthetic oligonucleotide
acucaacuuaguggcuagg

SEQ ID NO: 1363045 - RNA, 19 nt, Artificial Sequence
  Description of Artificial Sequence: Synthetic oligonucleotide
gaagguggcaucagcucca

SEQ ID NO: 1363046 - RNA, 19 nt, Artificial Sequence
  Description of Artificial Sequence: Synthetic oligonucleotide
cucgcggacgucgagagca

SEQ ID NO: 1363047 - RNA, 19 nt, Artificial Sequence
  Description of Artificial Sequence: Synthetic oligonucleotide
aaugcggguucuggaucag

SEQ ID NO: 1363048 - RNA, 19 nt, Artificial Sequence
  Description of Artificial Sequence: Synthetic oligonucleotide
ccuccgauagucuccacac

SEQ ID NO: 1363049 - RNA, 19 nt, Artificial Sequence
  Description of Artificial Sequence: Synthetic oligonucleotide
gagacgguguacuuccacu

SEQ ID NO: 1363050 - RNA, 19 nt, Artificial Sequence
  Description of Artificial Sequence: Synthetic oligonucleotide
ucgucugggccgccaagga

SEQ ID NO: 1363051 - RNA, 19 nt, Artificial Sequence
  Description of Artificial Sequence: Synthetic oligonucleotide
gcugugagagacuaagcaa

SEQ ID NO: 1363052 - RNA, 19 nt, Artificial Sequence
  Description of Artificial Sequence: Synthetic oligonucleotide
gcagaaaucuccagaugcc

SEQ ID NO: 1363053 - RNA, 19 nt, Artificial Sequence
  Description of Artificial Sequence: Synthetic oligonucleotide
cuuucagcguuuccccguc

SEQ ID NO: 1363054 - RNA, 19 nt, Artificial Sequence
  Description of Artificial Sequence: Synthetic oligonucleotide
gaagucuuugcagcaaggu

SEQ ID NO: 1363055 - RNA, 19 nt, Artificial Sequence
  Description of Artificial Sequence: Synthetic oligonucleotide
uuccccgucagugucugaa

SEQ ID NO: 1363056 - RNA, 19 nt, Artificial Sequence
  Description of Artificial Sequence: Synthetic oligonucleotide
gacugccggggauggacgc

SEQ ID NO: 1363057 - RNA, 19 nt, Artificial Sequence
  Description of Artificial Sequence: Synthetic oligonucleotide
gagcccaacgcuuguucuc

SEQ ID NO: 1363058 - RNA, 19 nt, Artificial Sequence
  Description of Artificial Sequence: Synthetic oligonucleotide
cuuaguggcuaggccuugc

SEQ ID NO: 1363059 - RNA, 19 nt, Artificial Sequence
  Description of Artificial Sequence: Synthetic oligonucleotide
cuccgauagucuccacacc

SEQ ID NO: 1363060 - RNA, 19 nt, Artificial Sequence
  Description of Artificial Sequence: Synthetic oligonucleotide
ucugggccgccaaggaguc

SEQ ID NO: 1363061 - RNA, 19 nt, Artificial Sequence
  Description of Artificial Sequence: Synthetic oligonucleotide
auauggaaaccaggaggcu

SEQ ID NO: 1363062 - RNA, 19 nt, Artificial Sequence
  Description of Artificial Sequence: Synthetic oligonucleotide
gugucuugugccuucacau

SEQ ID NO: 1363063 - RNA, 19 nt, Artificial Sequence
  Description of Artificial Sequence: Synthetic oligonucleotide
acauguacccauaucccuu

SEQ ID NO: 1363064 - RNA, 19 nt, Artificial Sequence
  Description of Artificial Sequence: Synthetic oligonucleotide
uuucagcguuuccccguca

SEQ ID NO: 1363065 - RNA, 19 nt, Artificial Sequence
  Description of Artificial Sequence: Synthetic oligonucleotide
cagaaaucuccagaugcca

SEQ ID NO: 1363066 - RNA, 19 nt, Artificial Sequence
  Description of Artificial Sequence: Synthetic oligonucleotide
cuuacaguggagguagucu

SEQ ID NO: 1363067 - RNA, 19 nt, Artificial Sequence
  Description of Artificial Sequence: Synthetic oligonucleotide
gcucuuguaggcgaauggc

SEQ ID NO: 1363068 - RNA, 19 nt, Artificial Sequence
  Description of Artificial Sequence: Synthetic oligonucleotide
uaguggcuaggccuugcua

SEQ ID NO: 1363069 - RNA, 19 nt, Artificial Sequence
  Description of Artificial Sequence: Synthetic oligonucleotide
ggcuuaagccacuuucauc

SEQ ID NO: 1363070 - RNA, 19 nt, Artificial Sequence
  Description of Artificial Sequence: Synthetic oligonucleotide
cuguacgugucagacaaaa

SEQ ID NO: 1363071 - RNA, 19 nt, Artificial Sequence
  Description of Artificial Sequence: Synthetic oligonucleotide
ccgccaaggaguccuaagg

SEQ ID NO: 1363072 - RNA, 19 nt, Artificial Sequence
  Description of Artificial Sequence: Synthetic oligonucleotide
auuucguaccucagccaug

SEQ ID NO: 1363073 - RNA, 19 nt, Artificial Sequence
  Description of Artificial Sequence: Synthetic oligonucleotide
ggugcgcagaaaucuccag

SEQ ID NO: 1363074 - RNA, 19 nt, Artificial Sequence
  Description of Artificial Sequence: Synthetic oligonucleotide
cacauguacccauaucccu

SEQ ID NO: 1363075 - RNA, 19 nt, Artificial Sequence
  Description of Artificial Sequence: Synthetic oligonucleotide
aaacugcuugucacacacu

SEQ ID NO: 1363076 - RNA, 19 nt, Artificial Sequence
  Description of Artificial Sequence: Synthetic oligonucleotide
guagccgcuguucaagggu

SEQ ID NO: 1363077 - RNA, 19 nt, Artificial Sequence
  Description of Artificial Sequence: Synthetic oligonucleotide
auaucgucugggccgccaa

SEQ ID NO: 1363078 - RNA, 19 nt, Artificial Sequence
  Description of Artificial Sequence: Synthetic oligonucleotide
agcccaacgcuuguucuca

SEQ ID NO: 1363079 - RNA, 19 nt, Artificial Sequence
  Description of Artificial Sequence: Synthetic oligonucleotide
gccgaacuucauuccaugc

SEQ ID NO: 1363080 - RNA, 19 nt, Artificial Sequence
  Description of Artificial Sequence: Synthetic oligonucleotide
agaccuccgauagucucca

SEQ ID NO: 1363081 - RNA, 19 nt, Artificial Sequence
  Description of Artificial Sequence: Synthetic oligonucleotide
cucuuguaggcgaauggcu

SEQ ID NO: 1363082 - RNA, 19 nt, Artificial Sequence
  Description of Artificial Sequence: Synthetic oligonucleotide
gacgcucccgccagcuuag

SEQ ID NO: 1363083 - RNA, 19 nt, Artificial Sequence
  Description of Artificial Sequence: Synthetic oligonucleotide
ggauggacgcucccgccag

SEQ ID NO: 1363084 - RNA, 19 nt, Artificial Sequence
  Description of Artificial Sequence: Synthetic oligonucleotide
gcaagcagauauggaaacc

SEQ ID NO: 1363085 - RNA, 19 nt, Artificial Sequence
  Description of Artificial Sequence: Synthetic oligonucleotide
cauguacccauaucccuua

SEQ ID NO: 1363086 - RNA, 19 nt, Artificial Sequence
  Description of Artificial Sequence: Synthetic oligonucleotide
gggucaugguagcacagca

SEQ ID NO: 1363087 - RNA, 19 nt, Artificial Sequence
  Description of Artificial Sequence: Synthetic oligonucleotide
gcccacacucaacuuagug

SEQ ID NO: 1363088 - RNA, 19 nt, Artificial Sequence
  Description of Artificial Sequence: Synthetic oligonucleotide
gacuaagcaacagcuugcu

SEQ ID NO: 1363089 - RNA, 19 nt, Artificial Sequence
  Description of Artificial Sequence: Synthetic oligonucleotide
augcugucuuaugcagccg

SEQ ID NO: 1363090 - RNA, 19 nt, Artificial Sequence
  Description of Artificial Sequence: Synthetic oligonucleotide
guccuaagggcgagcgcgg

SEQ ID NO: 1363091 - RNA, 19 nt, Artificial Sequence
  Description of Artificial Sequence: Synthetic oligonucleotide
ucggccuucuuaaguccua

SEQ ID NO: 1363092 - RNA, 19 nt, Artificial Sequence
  Description of Artificial Sequence: Synthetic oligonucleotide
aguuugagcuggguguauu

SEQ ID NO: 1363093 - RNA, 19 nt, Artificial Sequence
  Description of Artificial Sequence: Synthetic oligonucleotide
gcuaggccuugcuaaacuc

SEQ ID NO: 1363094 - RNA, 19 nt, Artificial Sequence
  Description of Artificial Sequence: Synthetic oligonucleotide
cgugucagacaaaaucuuc

SEQ ID NO: 1363095 - RNA, 19 nt, Artificial Sequence
  Description of Artificial Sequence: Synthetic oligonucleotide
uccuaagggcgagcgcggc

SEQ ID NO: 1363096 - RNA, 19 nt, Artificial Sequence
  Description of Artificial Sequence: Synthetic oligonucleotide
auggcucccuccaaacggu

SEQ ID NO: 1363097 - RNA, 19 nt, Artificial Sequence
  Description of Artificial Sequence: Synthetic oligonucleotide
gucuuccgauguuagauuu

SEQ ID NO: 1363098 - RNA, 19 nt, Artificial Sequence
  Description of Artificial Sequence: Synthetic oligonucleotide
cuguaguaucucuaccccu

SEQ ID NO: 1363099 - RNA, 19 nt, Artificial Sequence
  Description of Artificial Sequence: Synthetic oligonucleotide
uggcuaggccuugcuaaac

SEQ ID NO: 1363100 - RNA, 19 nt, Artificial Sequence
  Description of Artificial Sequence: Synthetic oligonucleotide
acgugucagacaaaaucuu

SEQ ID NO: 1363101 - RNA, 19 nt, Artificial Sequence
  Description of Artificial Sequence: Synthetic oligonucleotide
gguguacuuccacuuucuc

SEQ ID NO: 1363102 - RNA, 19 nt, Artificial Sequence
  Description of Artificial Sequence: Synthetic oligonucleotide
cuucagccgguguuccuga

SEQ ID NO: 1363103 - RNA, 19 nt, Artificial Sequence
  Description of Artificial Sequence: Synthetic oligonucleotide
gagagaagguagccauaua

SEQ ID NO: 1363104 - RNA, 19 nt, Artificial Sequence
  Description of Artificial Sequence: Synthetic oligonucleotide
caugguagcacagcagagu

SEQ ID NO: 1363105 - RNA, 19 nt, Artificial Sequence
  Description of Artificial Sequence: Synthetic oligonucleotide
guggcuaggccuugcuaaa

SEQ ID NO: 1363106 - RNA, 19 nt, Artificial Sequence
  Description of Artificial Sequence: Synthetic oligonucleotide
ggaaacugcuugucacaca

SEQ ID NO: 1363107 - RNA, 19 nt, Artificial Sequence
  Description of Artificial Sequence: Synthetic oligonucleotide
ggucccuaaugagacggug

SEQ ID NO: 1363108 - RNA, 19 nt, Artificial Sequence
  Description of Artificial Sequence: Synthetic oligonucleotide
aggugcgcagaaaucucca

SEQ ID NO: 1363109 - RNA, 19 nt, Artificial Sequence
  Description of Artificial Sequence: Synthetic oligonucleotide
gguagccauauagaaucca

SEQ ID NO: 1363110 - RNA, 19 nt, Artificial Sequence
  Description of Artificial Sequence: Synthetic oligonucleotide
guaggcgaauggcucccuc

SEQ ID NO: 1363111 - RNA, 19 nt, Artificial Sequence
  Description of Artificial Sequence: Synthetic oligonucleotide
uucguaccucagccaugcu

SEQ ID NO: 1363112 - RNA, 19 nt, Artificial Sequence
  Description of Artificial Sequence: Synthetic oligonucleotide
ccauauagaauccaugcuu

SEQ ID NO: 1363113 - RNA, 19 nt, Artificial Sequence
  Description of Artificial Sequence: Synthetic oligonucleotide
uguaggcgaauggcucccu

SEQ ID NO: 1363114 - RNA, 19 nt, Artificial Sequence
  Description of Artificial Sequence: Synthetic oligonucleotide
ugccggggauggacgcucc

SEQ ID NO: 1363115 - RNA, 19 nt, Artificial Sequence
  Description of Artificial Sequence: Synthetic oligonucleotide
uuccaugccugagccugcu

SEQ ID NO: 1363116 - RNA, 19 nt, Artificial Sequence
  Description of Artificial Sequence: Synthetic oligonucleotide
cuggguguauuccuucacu

SEQ ID NO: 1363117 - RNA, 19 nt, Artificial Sequence
  Description of Artificial Sequence: Synthetic oligonucleotide
uaauaucgucugggccgcc

SEQ ID NO: 1363118 - RNA, 19 nt, Artificial Sequence
  Description of Artificial Sequence: Synthetic oligonucleotide
gucugggccgccaaggagu

SEQ ID NO: 1363119 - RNA, 19 nt, Artificial Sequence
  Description of Artificial Sequence: Synthetic oligonucleotide
gccgccaaggaguccuaag

SEQ ID NO: 1363120 - RNA, 19 nt, Artificial Sequence
  Description of Artificial Sequence: Synthetic oligonucleotide
ccauaucccuuacagugga

SEQ ID NO: 1363121 - RNA, 19 nt, Artificial Sequence
  Description of Artificial Sequence: Synthetic oligonucleotide
caggaccagucuugacuuc

SEQ ID NO: 1363122 - RNA, 19 nt, Artificial Sequence
  Description of Artificial Sequence: Synthetic oligonucleotide
ggacugccggggauggacg

SEQ ID NO: 1363123 - RNA, 19 nt, Artificial Sequence
  Description of Artificial Sequence: Synthetic oligonucleotide
gcgcagaaaucuccagaug

SEQ ID NO: 1363124 - RNA, 19 nt, Artificial Sequence
  Description of Artificial Sequence: Synthetic oligonucleotide
gcuguucaagggucucaug

SEQ ID NO: 1363125 - RNA, 19 nt, Artificial Sequence
  Description of Artificial Sequence: Synthetic oligonucleotide
gucacacacuugcuguagu

SEQ ID NO: 1363126 - RNA, 19 nt, Artificial Sequence
  Description of Artificial Sequence: Synthetic oligonucleotide
gggacugccggggauggac

SEQ ID NO: 1363127 - RNA, 19 nt, Artificial Sequence
  Description of Artificial Sequence: Synthetic oligonucleotide
cuaaugagacgguguacuu

SEQ ID NO: 1363128 - RNA, 19 nt, Artificial Sequence
  Description of Artificial Sequence: Synthetic oligonucleotide
caguuacaaguagccgcug

SEQ ID NO: 1363129 - RNA, 19 nt, Artificial Sequence
  Description of Artificial Sequence: Synthetic oligonucleotide
gacgguguacuuccacuuu

SEQ ID NO: 1363130 - RNA, 19 nt, Artificial Sequence
  Description of Artificial Sequence: Synthetic oligonucleotide
ccuaaugagacgguguacu

SEQ ID NO: 1363131 - RNA, 19 nt, Artificial Sequence
  Description of Artificial Sequence: Synthetic oligonucleotide
uccgcgcgagcucgcggac

SEQ ID NO: 1363132 - RNA, 19 nt, Artificial Sequence
  Description of Artificial Sequence: Synthetic oligonucleotide
ccaggugcgcagaaaucuc

SEQ ID NO: 1363133 - RNA, 19 nt, Artificial Sequence
  Description of Artificial Sequence: Synthetic oligonucleotide
gggauggacgcucccgcca

SEQ ID NO: 1363134 - RNA, 19 nt, Artificial Sequence
  Description of Artificial Sequence: Synthetic oligonucleotide
gcaaggugaggcagcggag

SEQ ID NO: 1363135 - RNA, 19 nt, Artificial Sequence
  Description of Artificial Sequence: Synthetic oligonucleotide
gagcgcggaggccggggac

SEQ ID NO: 1363136 - RNA, 19 nt, Artificial Sequence
  Description of Artificial Sequence: Synthetic oligonucleotide
ucgcggacgucgagagcaa

SEQ ID NO: 1363137 - RNA, 19 nt, Artificial Sequence
  Description of Artificial Sequence: Synthetic oligonucleotide
gccgagcucucauccacac

SEQ ID NO: 1363138 - RNA, 19 nt, Artificial Sequence
  Description of Artificial Sequence: Synthetic oligonucleotide
ggcgagcgcggccuccgcg

SEQ ID NO: 1363139 - RNA, 19 nt, Artificial Sequence
  Description of Artificial Sequence: Synthetic oligonucleotide
cccaacgcuuguucucagc

SEQ ID NO: 1363140 - RNA, 19 nt, Artificial Sequence
  Description of Artificial Sequence: Synthetic oligonucleotide
ccuaagggcgagcgcggcc

SEQ ID NO: 1363141 - RNA, 19 nt, Artificial Sequence
  Description of Artificial Sequence: Synthetic oligonucleotide
cuaagggcgagcgcggccu

SEQ ID NO: 1363142 - RNA, 19 nt, Artificial Sequence
  Description of Artificial Sequence: Synthetic oligonucleotide
gcguuuccccgucaguguc

SEQ ID NO: 1363143 - RNA, 19 nt, Artificial Sequence
  Description of Artificial Sequence: Synthetic oligonucleotide
gcacuguacgugucagaca

SEQ ID NO: 1363144 - RNA, 19 nt, Artificial Sequence
  Description of Artificial Sequence: Synthetic oligonucleotide
ggagccgagcucucaucca

SEQ ID NO: 1363145 - RNA, 19 nt, Artificial Sequence
  Description of Artificial Sequence: Synthetic oligonucleotide
cggacgucgagagcaaacc

SEQ ID NO: 1363146 - RNA, 19 nt, Artificial Sequence
  Description of Artificial Sequence: Synthetic oligonucleotide
ggaucauagcacugcacuu

SEQ ID NO: 1363147 - RNA, 19 nt, Artificial Sequence
  Description of Artificial Sequence: Synthetic oligonucleotide
guagucuguugagcaggga

SEQ ID NO: 1363148 - RNA, 19 nt, Artificial Sequence
  Description of Artificial Sequence: Synthetic oligonucleotide
cugccggggauggacgcuc

SEQ ID NO: 1363149 - RNA, 19 nt, Artificial Sequence
  Description of Artificial Sequence: Synthetic oligonucleotide
cacacucaacuuaguggcu

SEQ ID NO: 1363150 - RNA, 19 nt, Artificial Sequence
  Description of Artificial Sequence: Synthetic oligonucleotide
ggcuaggccuugcuaaacu

SEQ ID NO: 1363151 - RNA, 19 nt, Artificial Sequence
  Description of Artificial Sequence: Synthetic oligonucleotide
ccgguguuccugaagaagu

SEQ ID NO: 1363152 - RNA, 19 nt, Artificial Sequence
  Description of Artificial Sequence: Synthetic oligonucleotide
cgaacuucauuccaugccu

SEQ ID NO: 1363153 - RNA, 19 nt, Artificial Sequence
  Description of Artificial Sequence: Synthetic oligonucleotide
ggacgcucccgccagcuua

SEQ ID NO: 1363154 - RNA, 19 nt, Artificial Sequence
  Description of Artificial Sequence: Synthetic oligonucleotide
gcgagcgcggccuccgcgc

SEQ ID NO: 1363155 - RNA, 19 nt, Artificial Sequence
  Description of Artificial Sequence: Synthetic oligonucleotide
cucuaccccuucuccaggu

SEQ ID NO: 1363156 - RNA, 19 nt, Artificial Sequence
  Description of Artificial Sequence: Synthetic oligonucleotide
ggacgucgagagcaaaccu

SEQ ID NO: 1363157 - RNA, 19 nt, Artificial Sequence
  Description of Artificial Sequence: Synthetic oligonucleotide
ccaacgcuuguucucagcu

SEQ ID NO: 1363158 - RNA, 19 nt, Artificial Sequence
  Description of Artificial Sequence: Synthetic oligonucleotide
gcaaaccugcacagcucgc

SEQ ID NO: 1363159 - RNA, 19 nt, Artificial Sequence
  Description of Artificial Sequence: Synthetic oligonucleotide
cccuaaugagacgguguac

SEQ ID NO: 1363160 - RNA, 19 nt, Artificial Sequence
  Description of Artificial Sequence: Synthetic oligonucleotide
agccgcuguucaagggucu

SEQ ID NO: 1363161 - RNA, 19 nt, Artificial Sequence
  Description of Artificial Sequence: Synthetic oligonucleotide
gcggacgucgagagcaaac

SEQ ID NO: 1363162 - RNA, 19 nt, Artificial Sequence
  Description of Artificial Sequence: Synthetic oligonucleotide
ucccuccaaacggucccua

SEQ ID NO: 1363163 - RNA, 19 nt, Artificial Sequence
  Description of Artificial Sequence: Synthetic oligonucleotide
gucggccuucuuaaguccu

SEQ ID NO: 1363164 - RNA, 19 nt, Artificial Sequence
  Description of Artificial Sequence: Synthetic oligonucleotide
acuguacgugucagacaaa

SEQ ID NO: 1363165 - RNA, 19 nt, Artificial Sequence
  Description of Artificial Sequence: Synthetic oligonucleotide
cgguguuccugaagaaguc

SEQ ID NO: 1363166 - RNA, 19 nt, Artificial Sequence
  Description of Artificial Sequence: Synthetic oligonucleotide
ccuucacuagguucucaaa

SEQ ID NO: 1363167 - RNA, 19 nt, Artificial Sequence
  Description of Artificial Sequence: Synthetic oligonucleotide
cuuuugccagggugaggcu

SEQ ID NO: 1363168 - RNA, 19 nt, Artificial Sequence
  Description of Artificial Sequence: Synthetic oligonucleotide
gcccaacgcuuguucucag

SEQ ID NO: 1363169 - RNA, 19 nt, Artificial Sequence
  Description of Artificial Sequence: Synthetic oligonucleotide
cggggauggacgcucccgc

SEQ ID NO: 1363170 - RNA, 19 nt, Artificial Sequence
  Description of Artificial Sequence: Synthetic oligonucleotide
ccaugccugagccugcucu

SEQ ID NO: 1363171 - RNA, 19 nt, Artificial Sequence
  Description of Artificial Sequence: Synthetic oligonucleotide
cgcgagcucgcggacgucg

SEQ ID NO: 1363172 - RNA, 19 nt, Artificial Sequence
  Description of Artificial Sequence: Synthetic oligonucleotide
ggcgaauggcucccuccaa

SEQ ID NO: 1363173 - RNA, 19 nt, Artificial Sequence
  Description of Artificial Sequence: Synthetic oligonucleotide
ccugcacagcucgccgccg

SEQ ID NO: 1363174 - RNA, 19 nt, Artificial Sequence
  Description of Artificial Sequence: Synthetic oligonucleotide
gcucgcggacgucgagagc

SEQ ID NO: 1363175 - RNA, 19 nt, Artificial Sequence
  Description of Artificial Sequence: Synthetic oligonucleotide
cucgccgccggagcgcgga

SEQ ID NO: 1363176 - RNA, 19 nt, Artificial Sequence
  Description of Artificial Sequence: Synthetic oligonucleotide
gugaggcuuaagccacuuu

SEQ ID NO: 1363177 - RNA, 19 nt, Artificial Sequence
  Description of Artificial Sequence: Synthetic oligonucleotide
gggagagaagguagccaua

SEQ ID NO: 1363178 - RNA, 19 nt, Artificial Sequence
  Description of Artificial Sequence: Synthetic oligonucleotide
gccggggauggacgcuccc

SEQ ID NO: 1363179 - RNA, 19 nt, Artificial Sequence
  Description of Artificial Sequence: Synthetic oligonucleotide
gccgcuguucaagggucuc

SEQ ID NO: 1363180 - RNA, 19 nt, Artificial Sequence
  Description of Artificial Sequence: Synthetic oligonucleotide
ccggggacugccggggaug

SEQ ID NO: 1363181 - RNA, 19 nt, Artificial Sequence
  Description of Artificial Sequence: Synthetic oligonucleotide
cgagcgcggccuccgcgcg

SEQ ID NO: 1363182 - RNA, 19 nt, Artificial Sequence
  Description of Artificial Sequence: Synthetic oligonucleotide
gcacugcacuugauuucca

SEQ ID NO: 1363183 - RNA, 19 nt, Artificial Sequence
  Description of Artificial Sequence: Synthetic oligonucleotide
cgagcucgcggacgucgag

SEQ ID NO: 1363184 - RNA, 19 nt, Artificial Sequence
  Description of Artificial Sequence: Synthetic oligonucleotide
ccgagcucucauccacaca

SEQ ID NO: 1363185 - RNA, 19 nt, Artificial Sequence
  Description of Artificial Sequence: Synthetic oligonucleotide
cgucgagagcaaaccugca

SEQ ID NO: 1363186 - RNA, 19 nt, Artificial Sequence
  Description of Artificial Sequence: Synthetic oligonucleotide
ccccgucagugucugaacu

SEQ ID NO: 1363187 - RNA, 19 nt, Artificial Sequence
  Description of Artificial Sequence: Synthetic oligonucleotide
caccuggaaguagguggcu

SEQ ID NO: 1363188 - RNA, 19 nt, Artificial Sequence
  Description of Artificial Sequence: Synthetic oligonucleotide
ccgcgcgagcucgcggacg

SEQ ID NO: 1363189 - RNA, 19 nt, Artificial Sequence
  Description of Artificial Sequence: Synthetic oligonucleotide
cucccuccaaacggucccu

SEQ ID NO: 1363190 - RNA, 19 nt, Artificial Sequence
  Description of Artificial Sequence: Synthetic oligonucleotide
ccucaucuugaggaucaua

SEQ ID NO: 1363191 - RNA, 19 nt, Artificial Sequence
  Description of Artificial Sequence: Synthetic oligonucleotide
caguuugagcuggguguau

SEQ ID NO: 1363192 - RNA, 19 nt, Artificial Sequence
  Description of Artificial Sequence: Synthetic oligonucleotide
ccgauagucuccacaccuu

SEQ ID NO: 1363193 - RNA, 19 nt, Artificial Sequence
  Description of Artificial Sequence: Synthetic oligonucleotide
gcgagcucgcggacgucga

SEQ ID NO: 1363194 - RNA, 19 nt, Artificial Sequence
  Description of Artificial Sequence: Synthetic oligonucleotide
ccuuugcagcuuucagcgu

SEQ ID NO: 1363195 - RNA, 19 nt, Artificial Sequence
  Description of Artificial Sequence: Synthetic oligonucleotide
ccgcuguucaagggucuca

SEQ ID NO: 1363196 - RNA, 19 nt, Artificial Sequence
  Description of Artificial Sequence: Synthetic oligonucleotide
ggccgccaaggaguccuaa

SEQ ID NO: 1363197 - RNA, 19 nt, Artificial Sequence
  Description of Artificial Sequence: Synthetic oligonucleotide
ggggacugccggggaugga

SEQ ID NO: 1363198 - RNA, 19 nt, Artificial Sequence
  Description of Artificial Sequence: Synthetic oligonucleotide
cccuuacaguggagguagu

SEQ ID NO: 1363199 - RNA, 19 nt, Artificial Sequence
  Description of Artificial Sequence: Synthetic oligonucleotide
cgcuguucaagggucucau

SEQ ID NO: 1363200 - RNA, 19 nt, Artificial Sequence
  Description of Artificial Sequence: Synthetic oligonucleotide
cgcgcgagcucgcggacgu

SEQ ID NO: 1363201 - RNA, 19 nt, Artificial Sequence
  Description of Artificial Sequence: Synthetic oligonucleotide
cggucccuaaugagacggu

SEQ ID NO: 1363202 - RNA, 19 nt, Artificial Sequence
  Description of Artificial Sequence: Synthetic oligonucleotide
gcgcgagcucgcggacguc

SEQ ID NO: 1363203 - RNA, 19 nt, Artificial Sequence
  Description of Artificial Sequence: Synthetic oligonucleotide
gggccgccaaggaguccua

SEQ ID NO: 1363204 - RNA, 19 nt, Artificial Sequence
  Description of Artificial Sequence: Synthetic oligonucleotide
cgcggacgucgagagcaaa

SEQ ID NO: 1363205 - RNA, 19 nt, Artificial Sequence
  Description of Artificial Sequence: Synthetic oligonucleotide
aaaauaugaauauucaugg

SEQ ID NO: 1363206 - RNA, 19 nt, Artificial Sequence
  Description of Artificial Sequence: Synthetic oligonucleotide
ugaucuuaaagauagaugg

SEQ ID NO: 1363207 - RNA, 19 nt, Artificial Sequence
  Description of Artificial Sequence: Synthetic oligonucleotide
acagauagaaaccaugugc

SEQ ID NO: 1363208 - RNA, 19 nt, Artificial Sequence
  Description of Artificial Sequence: Synthetic oligonucleotide
uuuaucucacaacugaugg

SEQ ID NO: 1363209 - RNA, 19 nt, Artificial Sequence
  Description of Artificial Sequence: Synthetic oligonucleotide
aaugccaaaacccaaagaa

SEQ ID NO: 1363210 - RNA, 19 nt, Artificial Sequence
  Description of Artificial Sequence: Synthetic oligonucleotide
ugugucguaacacuuauag

SEQ ID NO: 1363211 - RNA, 19 nt, Artificial Sequence
  Description of Artificial Sequence: Synthetic oligonucleotide
ucugaaaucugaccgaagg

SEQ ID NO: 1363212 - RNA, 19 nt, Artificial Sequence
  Description of Artificial Sequence: Synthetic oligonucleotide
uccaucauaacuuacaguc

SEQ ID NO: 1363213 - RNA, 19 nt, Artificial Sequence
  Description of Artificial Sequence: Synthetic oligonucleotide
cauaagaacaugcuaaugc

SEQ ID NO: 1363214 - RNA, 19 nt, Artificial Sequence
  Description of Artificial Sequence: Synthetic oligonucleotide
ucuucuacaagcuacuccc

SEQ ID NO: 1363215 - RNA, 19 nt, Artificial Sequence
  Description of Artificial Sequence: Synthetic oligonucleotide
cauauuugaguuuaguuac

SEQ ID NO: 1363216 - RNA, 19 nt, Artificial Sequence
  Description of Artificial Sequence: Synthetic oligonucleotide
uuuaugcaagcuaagauaa

SEQ ID NO: 1363217 - RNA, 19 nt, Artificial Sequence
  Description of Artificial Sequence: Synthetic oligonucleotide
auaacuuacaguccuaucu

SEQ ID NO: 1363218 - RNA, 19 nt, Artificial Sequence
  Description of Artificial Sequence: Synthetic oligonucleotide
gaggucugaaaucugaccg

SEQ ID NO: 1363219 - RNA, 19 nt, Artificial Sequence
  Description of Artificial Sequence: Synthetic oligonucleotide
aguuuccacacuaugaucc

SEQ ID NO: 1363220 - RNA, 19 nt, Artificial Sequence
  Description of Artificial Sequence: Synthetic oligonucleotide
agaaugcugaaauccaccc

SEQ ID NO: 1363221 - RNA, 19 nt, Artificial Sequence
  Description of Artificial Sequence: Synthetic oligonucleotide
aaagcgauacuccugaaau

SEQ ID NO: 1363222 - RNA, 19 nt, Artificial Sequence
  Description of Artificial Sequence: Synthetic oligonucleotide
uuagaauacacauuucacu

SEQ ID NO: 1363223 - RNA, 19 nt, Artificial Sequence
  Description of Artificial Sequence: Synthetic oligonucleotide
aaugagacaacauuuccau

SEQ ID NO: 1363224 - RNA, 19 nt, Artificial Sequence
  Description of Artificial Sequence: Synthetic oligonucleotide
aaggacauuucucacaaca

SEQ ID NO: 1363225 - RNA, 19 nt, Artificial Sequence
  Description of Artificial Sequence: Synthetic oligonucleotide
aagaguuugguucugucca

SEQ ID NO: 1363226 - RNA, 19 nt, Artificial Sequence
  Description of Artificial Sequence: Synthetic oligonucleotide
uauguaagucaccuaacag

SEQ ID NO: 1363227 - RNA, 19 nt, Artificial Sequence
  Description of Artificial Sequence: Synthetic oligonucleotide
gaucucaaaauccaaugag

SEQ ID NO: 1363228 - RNA, 19 nt, Artificial Sequence
  Description of Artificial Sequence: Synthetic oligonucleotide
uaagauaaagacuggggug

SEQ ID NO: 1363229 - RNA, 19 nt, Artificial Sequence
  Description of Artificial Sequence: Synthetic oligonucleotide
guuaccaagaauauguaag

SEQ ID NO: 1363230 - RNA, 19 nt, Artificial Sequence
  Description of Artificial Sequence: Synthetic oligonucleotide
uaugucuacaguucuaucu

SEQ ID NO: 1363231 - RNA, 19 nt, Artificial Sequence
  Description of Artificial Sequence: Synthetic oligonucleotide
uuaaagauagauggcaaag

SEQ ID NO: 1363232 - RNA, 19 nt, Artificial Sequence
  Description of Artificial Sequence: Synthetic oligonucleotide
ucuacaccccauaagaaca

SEQ ID NO: 1363233 - RNA, 19 nt, Artificial Sequence
  Description of Artificial Sequence: Synthetic oligonucleotide
ugaauauucaugguaagcu

SEQ ID NO: 1363234 - RNA, 19 nt, Artificial Sequence
  Description of Artificial Sequence: Synthetic oligonucleotide
ugagacaacauuuccauaa

SEQ ID NO: 1363235 - RNA, 19 nt, Artificial Sequence
  Description of Artificial Sequence: Synthetic oligonucleotide
uaugaauucgguuucuacu

SEQ ID NO: 1363236 - RNA, 19 nt, Artificial Sequence
  Description of Artificial Sequence: Synthetic oligonucleotide
cacacuaugaucccuaaag

SEQ ID NO: 1363237 - RNA, 19 nt, Artificial Sequence
  Description of Artificial Sequence: Synthetic oligonucleotide
uugaguuuaguuaccaaga

SEQ ID NO: 1363238 - RNA, 19 nt, Artificial Sequence
  Description of Artificial Sequence: Synthetic oligonucleotide
acaguucuaucuuaggauc

SEQ ID NO: 1363239 - RNA, 19 nt, Artificial Sequence
  Description of Artificial Sequence: Synthetic oligonucleotide
caaguucguacucaaaugg

SEQ ID NO: 1363240 - RNA, 19 nt, Artificial Sequence
  Description of Artificial Sequence: Synthetic oligonucleotide
ugagugacugguaucaccc

SEQ ID NO: 1363241 - RNA, 19 nt, Artificial Sequence
  Description of Artificial Sequence: Synthetic oligonucleotide
agcgauacuccugaaaugc

SEQ ID NO: 1363242 - RNA, 19 nt, Artificial Sequence
  Description of Artificial Sequence: Synthetic oligonucleotide
acaacugauggaaacauac

SEQ ID NO: 1363243 - RNA, 19 nt, Artificial Sequence
  Description of Artificial Sequence: Synthetic oligonucleotide
aacaugcuaaugcuuauga

SEQ ID NO: 1363244 - RNA, 19 nt, Artificial Sequence
  Description of Artificial Sequence: Synthetic oligonucleotide
aauggguaucucuucucac

SEQ ID NO: 1363245 - RNA, 19 nt, Artificial Sequence
  Description of Artificial Sequence: Synthetic oligonucleotide
uggaaacauacaaacaaga

SEQ ID NO: 1363246 - RNA, 19 nt, Artificial Sequence
  Description of Artificial Sequence: Synthetic oligonucleotide
uaugcaagcuaagauaaag

SEQ ID NO: 1363247 - RNA, 19 nt, Artificial Sequence
  Description of Artificial Sequence: Synthetic oligonucleotide
aucuacaccccauaagaac

SEQ ID NO: 1363248 - RNA, 19 nt, Artificial Sequence
  Description of Artificial Sequence: Synthetic oligonucleotide
auuagaauacacauuucac

SEQ ID NO: 1363249 - RNA, 19 nt, Artificial Sequence
  Description of Artificial Sequence: Synthetic oligonucleotide
gugaaaugaagaugggucg

SEQ ID NO: 1363250 - RNA, 19 nt, Artificial Sequence
  Description of Artificial Sequence: Synthetic oligonucleotide
aaccuuacaggacagugca

SEQ ID NO: 1363251 - RNA, 19 nt, Artificial Sequence
  Description of Artificial Sequence: Synthetic oligonucleotide
aaaccuuacaggacagugc

SEQ ID NO: 1363252 - RNA, 19 nt, Artificial Sequence
  Description of Artificial Sequence: Synthetic oligonucleotide
aaccugauuaaugacagca

SEQ ID NO: 1363253 - RNA, 19 nt, Artificial Sequence
  Description of Artificial Sequence: Synthetic oligonucleotide
gaacauaugugauagcgga

SEQ ID NO: 1363254 - RNA, 19 nt, Artificial Sequence
  Description of Artificial Sequence: Synthetic oligonucleotide
agauaacucagucugagaa

SEQ ID NO: 1363255 - RNA, 19 nt, Artificial Sequence
  Description of Artificial Sequence: Synthetic oligonucleotide
auguaagucaccuaacagu

SEQ ID NO: 1363256 - RNA, 19 nt, Artificial Sequence
  Description of Artificial Sequence: Synthetic oligonucleotide
aauauguaagucaccuaac

SEQ ID NO: 1363257 - RNA, 19 nt, Artificial Sequence
  Description of Artificial Sequence: Synthetic oligonucleotide
uguaagucaccuaacaguu

SEQ ID NO: 1363258 - RNA, 19 nt, Artificial Sequence
  Description of Artificial Sequence: Synthetic oligonucleotide
ucuaucuuaggaucuacac

SEQ ID NO: 1363259 - RNA, 19 nt, Artificial Sequence
  Description of Artificial Sequence: Synthetic oligonucleotide
aagauaaagacuggggugu

SEQ ID NO: 1363260 - RNA, 19 nt, Artificial Sequence
  Description of Artificial Sequence: Synthetic oligonucleotide
aaauucuacguccucacua

SEQ ID NO: 1363261 - RNA, 19 nt, Artificial Sequence
  Description of Artificial Sequence: Synthetic oligonucleotide
uccuaucuuuuccuaaagg

SEQ ID NO: 1363262 - RNA, 19 nt, Artificial Sequence
  Description of Artificial Sequence: Synthetic oligonucleotide
aaugcuuaugaauucgguu

SEQ ID NO: 1363263 - RNA, 19 nt, Artificial Sequence
  Description of Artificial Sequence: Synthetic oligonucleotide
ucuacguccucacuaagcu

SEQ ID NO: 1363264 - RNA, 19 nt, Artificial Sequence
  Description of Artificial Sequence: Synthetic oligonucleotide
accaagaauauguaaguca

SEQ ID NO: 1363265 - RNA, 19 nt, Artificial Sequence
  Description of Artificial Sequence: Synthetic oligonucleotide
uaucaaacccuagaguuag

SEQ ID NO: 1363266 - RNA, 19 nt, Artificial Sequence
  Description of Artificial Sequence: Synthetic oligonucleotide
aaauccacccaagucauug

SEQ ID NO: 1363267 - RNA, 19 nt, Artificial Sequence
  Description of Artificial Sequence: Synthetic oligonucleotide
ugucuuucggaccuguccc

SEQ ID NO: 1363268 - RNA, 19 nt, Artificial Sequence
  Description of Artificial Sequence: Synthetic oligonucleotide
auaacucagucugagaaag

SEQ ID NO: 1363269 - RNA, 19 nt, Artificial Sequence
  Description of Artificial Sequence: Synthetic oligonucleotide
uuacagugacuuaaagaag

SEQ ID NO: 1363270 - RNA, 19 nt, Artificial Sequence
  Description of Artificial Sequence: Synthetic oligonucleotide
cuaucuuaggaucuacacc

SEQ ID NO: 1363271 - RNA, 19 nt, Artificial Sequence
  Description of Artificial Sequence: Synthetic oligonucleotide
uuaccaagaauauguaagu

SEQ ID NO: 1363272 - RNA, 19 nt, Artificial Sequence
  Description of Artificial Sequence: Synthetic oligonucleotide
cauuucacuguacauacac

SEQ ID NO: 1363273 - RNA, 19 nt, Artificial Sequence
  Description of Artificial Sequence: Synthetic oligonucleotide
uaugaauauucaugguaag

SEQ ID NO: 1363274 - RNA, 19 nt, Artificial Sequence
  Description of Artificial Sequence: Synthetic oligonucleotide
uauagacaacauauuugag

SEQ ID NO: 1363275 - RNA, 19 nt, Artificial Sequence
  Description of Artificial Sequence: Synthetic oligonucleotide
aauucuacguccucacuaa

SEQ ID NO: 1363276 - RNA, 19 nt, Artificial Sequence
  Description of Artificial Sequence: Synthetic oligonucleotide
uucguacucaaauggagug

SEQ ID NO: 1363277 - RNA, 19 nt, Artificial Sequence
  Description of Artificial Sequence: Synthetic oligonucleotide
uacguccucacuaagcucu

SEQ ID NO: 1363278 - RNA, 19 nt, Artificial Sequence
  Description of Artificial Sequence: Synthetic oligonucleotide
acuccugaucucaaaaucc

SEQ ID NO: 1363279 - RNA, 19 nt, Artificial Sequence
  Description of Artificial Sequence: Synthetic oligonucleotide
cuaaugcuuaugaauucgg

SEQ ID NO: 1363280 - RNA, 19 nt, Artificial Sequence
  Description of Artificial Sequence: Synthetic oligonucleotide
acuggguugcuuuugaggu

SEQ ID NO: 1363281 - RNA, 19 nt, Artificial Sequence
  Description of Artificial Sequence: Synthetic oligonucleotide
acccagaaaugacugacac

SEQ ID NO: 1363282 - RNA, 19 nt, Artificial Sequence
  Description of Artificial Sequence: Synthetic oligonucleotide
ucuuaaagauagauggcaa

SEQ ID NO: 1363283 - RNA, 19 nt, Artificial Sequence
  Description of Artificial Sequence: Synthetic oligonucleotide
auauguaagucaccuaaca

SEQ ID NO: 1363284 - RNA, 19 nt, Artificial Sequence
  Description of Artificial Sequence: Synthetic oligonucleotide
uuacaguccuaucuuuucc

SEQ ID NO: 1363285 - RNA, 19 nt, Artificial Sequence
  Description of Artificial Sequence: Synthetic oligonucleotide
ucucacaacagaguuaugu

SEQ ID NO: 1363286 - RNA, 19 nt, Artificial Sequence
  Description of Artificial Sequence: Synthetic oligonucleotide
gaagauaacucagucugag

SEQ ID NO: 1363287 - RNA, 19 nt, Artificial Sequence
  Description of Artificial Sequence: Synthetic oligonucleotide
ugugcuuacagugacucug

SEQ ID NO: 1363288 - RNA, 19 nt, Artificial Sequence
  Description of Artificial Sequence: Synthetic oligonucleotide
uuuaguuaccaagaauaug

SEQ ID NO: 1363289 - RNA, 19 nt, Artificial Sequence
  Description of Artificial Sequence: Synthetic oligonucleotide
aauccacccaagucauugg

SEQ ID NO: 1363290 - RNA, 19 nt, Artificial Sequence
  Description of Artificial Sequence: Synthetic oligonucleotide
ucuguccaagacaaaaccu

SEQ ID NO: 1363291 - RNA, 19 nt, Artificial Sequence
  Description of Artificial Sequence: Synthetic oligonucleotide
aaggggucaguucgcuucc

SEQ ID NO: 1363292 - RNA, 19 nt, Artificial Sequence
  Description of Artificial Sequence: Synthetic oligonucleotide
ucugugguaaaagcgauac

SEQ ID NO: 1363293 - RNA, 19 nt, Artificial Sequence
  Description of Artificial Sequence: Synthetic oligonucleotide
uaugugauagcggaugucu

SEQ ID NO: 1363294 - RNA, 19 nt, Artificial Sequence
  Description of Artificial Sequence: Synthetic oligonucleotide
uacaguucuaucuuaggau

SEQ ID NO: 1363295 - RNA, 19 nt, Artificial Sequence
  Description of Artificial Sequence: Synthetic oligonucleotide
uacagauagaaaccaugug

SEQ ID NO: 1363296 - RNA, 19 nt, Artificial Sequence
  Description of Artificial Sequence: Synthetic oligonucleotide
uucuacuauuagaauacac

SEQ ID NO: 1363297 - RNA, 19 nt, Artificial Sequence
  Description of Artificial Sequence: Synthetic oligonucleotide
uccaagacaaaaccuuaca

SEQ ID NO: 1363298 - RNA, 19 nt, Artificial Sequence
  Description of Artificial Sequence: Synthetic oligonucleotide
ugugauagcggaugucugc

SEQ ID NO: 1363299 - RNA, 19 nt, Artificial Sequence
  Description of Artificial Sequence: Synthetic oligonucleotide
ugacuuaaagaagcaacag

SEQ ID NO: 1363300 - RNA, 19 nt, Artificial Sequence
  Description of Artificial Sequence: Synthetic oligonucleotide
auacacaugccuuuaugca

SEQ ID NO: 1363301 - RNA, 19 nt, Artificial Sequence
  Description of Artificial Sequence: Synthetic oligonucleotide
agaguuaugucuacaguuc

SEQ ID NO: 1363302 - RNA, 19 nt, Artificial Sequence
  Description of Artificial Sequence: Synthetic oligonucleotide
aucuuaaagauagauggca

SEQ ID NO: 1363303 - RNA, 19 nt, Artificial Sequence
  Description of Artificial Sequence: Synthetic oligonucleotide
guaaaagcgauacuccuga

SEQ ID NO: 1363304 - RNA, 19 nt, Artificial Sequence
  Description of Artificial Sequence: Synthetic oligonucleotide
uucuacguccucacuaagc

SEQ ID NO: 1363305 - RNA, 19 nt, Artificial Sequence
  Description of Artificial Sequence: Synthetic oligonucleotide
uaucucacaacugauggaa

SEQ ID NO: 1363306 - RNA, 19 nt, Artificial Sequence
  Description of Artificial Sequence: Synthetic oligonucleotide
cuacaagcuacucccaagc

SEQ ID NO: 1363307 - RNA, 19 nt, Artificial Sequence
  Description of Artificial Sequence: Synthetic oligonucleotide
ggagugaccacuucaaggc

SEQ ID NO: 1363308 - RNA, 19 nt, Artificial Sequence
  Description of Artificial Sequence: Synthetic oligonucleotide
cacacugcgaacauaugug

SEQ ID NO: 1363309 - RNA, 19 nt, Artificial Sequence
  Description of Artificial Sequence: Synthetic oligonucleotide
auaugaauauucaugguaa

SEQ ID NO: 1363310 - RNA, 19 nt, Artificial Sequence
  Description of Artificial Sequence: Synthetic oligonucleotide
uggacaagcaggucgguga

SEQ ID NO: 1363311 - RNA, 19 nt, Artificial Sequence
  Description of Artificial Sequence: Synthetic oligonucleotide
cuuuaugcaagcuaagaua

SEQ ID NO: 1363312 - RNA, 19 nt, Artificial Sequence
  Description of Artificial Sequence: Synthetic oligonucleotide
cuagaguuagcaguacagg

SEQ ID NO: 1363313 - RNA, 19 nt, Artificial Sequence
  Description of Artificial Sequence: Synthetic oligonucleotide
ucugcugucaggucucccc

SEQ ID NO: 1363314 - RNA, 19 nt, Artificial Sequence
  Description of Artificial Sequence: Synthetic oligonucleotide
agcuaagauaaagacuggg

SEQ ID NO: 1363315 - RNA, 19 nt, Artificial Sequence
  Description of Artificial Sequence: Synthetic oligonucleotide
ugguaaaagcgauacuccu

SEQ ID NO: 1363316 - RNA, 19 nt, Artificial Sequence
  Description of Artificial Sequence: Synthetic oligonucleotide
aagcgauacuccugaaaug

SEQ ID NO: 1363317 - RNA, 19 nt, Artificial Sequence
  Description of Artificial Sequence: Synthetic oligonucleotide
uauuugaguuuaguuacca

SEQ ID NO: 1363318 - RNA, 19 nt, Artificial Sequence
  Description of Artificial Sequence: Synthetic oligonucleotide
uucuaucuuaggaucuaca

SEQ ID NO: 1363319 - RNA, 19 nt, Artificial Sequence
  Description of Artificial Sequence: Synthetic oligonucleotide
acauaugugauagcggaug

SEQ ID NO: 1363320 - RNA, 19 nt, Artificial Sequence
  Description of Artificial Sequence: Synthetic oligonucleotide
auauuugaguuuaguuacc

SEQ ID NO: 1363321 - RNA, 19 nt, Artificial Sequence
  Description of Artificial Sequence: Synthetic oligonucleotide
augaauucgguuucuacua

SEQ ID NO: 1363322 - RNA, 19 nt, Artificial Sequence
  Description of Artificial Sequence: Synthetic oligonucleotide
aagauaacucagucugaga

SEQ ID NO: 1363323 - RNA, 19 nt, Artificial Sequence
  Description of Artificial Sequence: Synthetic oligonucleotide
gaaggggucaguucgcuuc

SEQ ID NO: 1363324 - RNA, 19 nt, Artificial Sequence
  Description of Artificial Sequence: Synthetic oligonucleotide
agugacugguaucacccag

SEQ ID NO: 1363325 - RNA, 19 nt, Artificial Sequence
  Description of Artificial Sequence: Synthetic oligonucleotide
aaaugaagaugggucggag

SEQ ID NO: 1363326 - RNA, 19 nt, Artificial Sequence
  Description of Artificial Sequence: Synthetic oligonucleotide
agugaucuuaaagauagau

SEQ ID NO: 1363327 - RNA, 19 nt, Artificial Sequence
  Description of Artificial Sequence: Synthetic oligonucleotide
acauacacaugccuuuaug

SEQ ID NO: 1363328 - RNA, 19 nt, Artificial Sequence
  Description of Artificial Sequence: Synthetic oligonucleotide
uuaucucacaacugaugga

SEQ ID NO: 1363329 - RNA, 19 nt, Artificial Sequence
  Description of Artificial Sequence: Synthetic oligonucleotide
aggaucuacaccccauaag

SEQ ID NO: 1363330 - RNA, 19 nt, Artificial Sequence
  Description of Artificial Sequence: Synthetic oligonucleotide
ugauuaaugacagcaucaa

SEQ ID NO: 1363331 - RNA, 19 nt, Artificial Sequence
  Description of Artificial Sequence: Synthetic oligonucleotide
agcaucaauggguaucucu

SEQ ID NO: 1363332 - RNA, 19 nt, Artificial Sequence
  Description of Artificial Sequence: Synthetic oligonucleotide
ugcuuaugaauucgguuuc

SEQ ID NO: 1363333 - RNA, 19 nt, Artificial Sequence
  Description of Artificial Sequence: Synthetic oligonucleotide
gauagcggaugucugcgug

SEQ ID NO: 1363334 - RNA, 19 nt, Artificial Sequence
  Description of Artificial Sequence: Synthetic oligonucleotide
acacuaugaucccuaaagu

SEQ ID NO: 1363335 - RNA, 19 nt, Artificial Sequence
  Description of Artificial Sequence: Synthetic oligonucleotide
gugaucuuaaagauagaug

SEQ ID NO: 1363336 - RNA, 19 nt, Artificial Sequence
  Description of Artificial Sequence: Synthetic oligonucleotide
uugagcacuaguguaaaau

SEQ ID NO: 1363337 - RNA, 19 nt, Artificial Sequence
  Description of Artificial Sequence: Synthetic oligonucleotide
ucaaacccuagaguuagca

SEQ ID NO: 1363338 - RNA, 19 nt, Artificial Sequence
  Description of Artificial Sequence: Synthetic oligonucleotide
auuuaucucacaacugaug

SEQ ID NO: 1363339 - RNA, 19 nt, Artificial Sequence
  Description of Artificial Sequence: Synthetic oligonucleotide
ucuuaggaucuacacccca

SEQ ID NO: 1363340 - RNA, 19 nt, Artificial Sequence
  Description of Artificial Sequence: Synthetic oligonucleotide
ggaucuacaccccauaaga

SEQ ID NO: 1363341 - RNA, 19 nt, Artificial Sequence
  Description of Artificial Sequence: Synthetic oligonucleotide
cugcgaacauaugugauag

SEQ ID NO: 1363342 - RNA, 19 nt, Artificial Sequence
  Description of Artificial Sequence: Synthetic oligonucleotide
aguucguacucaaauggag

SEQ ID NO: 1363343 - RNA, 19 nt, Artificial Sequence
  Description of Artificial Sequence: Synthetic oligonucleotide
gcuaagauaaagacugggg

SEQ ID NO: 1363344 - RNA, 19 nt, Artificial Sequence
  Description of Artificial Sequence: Synthetic oligonucleotide
gugucguaacacuuauagg

SEQ ID NO: 1363345 - RNA, 19 nt, Artificial Sequence
  Description of Artificial Sequence: Synthetic oligonucleotide
gaauauucaugguaagcua

SEQ ID NO: 1363346 - RNA, 19 nt, Artificial Sequence
  Description of Artificial Sequence: Synthetic oligonucleotide
acagaguuaugucuacagu

SEQ ID NO: 1363347 - RNA, 19 nt, Artificial Sequence
  Description of Artificial Sequence: Synthetic oligonucleotide
uguccaagacaaaaccuua

SEQ ID NO: 1363348 - RNA, 19 nt, Artificial Sequence
  Description of Artificial Sequence: Synthetic oligonucleotide
gaacccagaaaugacugac

SEQ ID NO: 1363349 - RNA, 19 nt, Artificial Sequence
  Description of Artificial Sequence: Synthetic oligonucleotide
uggugagugacugguauca

SEQ ID NO: 1363350 - RNA, 19 nt, Artificial Sequence
  Description of Artificial Sequence: Synthetic oligonucleotide
cuaagauaaagacuggggu

SEQ ID NO: 1363351 - RNA, 19 nt, Artificial Sequence
  Description of Artificial Sequence: Synthetic oligonucleotide
ucucagcauccccaauagg

SEQ ID NO: 1363352 - RNA, 19 nt, Artificial Sequence
  Description of Artificial Sequence: Synthetic oligonucleotide
gcuaaugcuuaugaauucg

SEQ ID NO: 1363353 - RNA, 19 nt, Artificial Sequence
  Description of Artificial Sequence: Synthetic oligonucleotide
ugcuaaugcuuaugaauuc

SEQ ID NO: 1363354 - RNA, 19 nt, Artificial Sequence
  Description of Artificial Sequence: Synthetic oligonucleotide
ucgcuuucaggauucuucu

SEQ ID NO: 1363355 - RNA, 19 nt, Artificial Sequence
  Description of Artificial Sequence: Synthetic oligonucleotide
ugacugguaucacccagcu

SEQ ID NO: 1363356 - RNA, 19 nt, Artificial Sequence
  Description of Artificial Sequence: Synthetic oligonucleotide
ucguaacacuuauaggguc

SEQ ID NO: 1363357 - RNA, 19 nt, Artificial Sequence
  Description of Artificial Sequence: Synthetic oligonucleotide
gugauagcggaugucugcg

SEQ ID NO: 1363358 - RNA, 19 nt, Artificial Sequence
  Description of Artificial Sequence: Synthetic oligonucleotide
uguggcccuaucaaacccu

SEQ ID NO: 1363359 - RNA, 19 nt, Artificial Sequence
  Description of Artificial Sequence: Synthetic oligonucleotide
ggggcaagugaucuuaaag

SEQ ID NO: 1363360 - RNA, 19 nt, Artificial Sequence
  Description of Artificial Sequence: Synthetic oligonucleotide
aauucgguuucuacuauua

SEQ ID NO: 1363361 - RNA, 19 nt, Artificial Sequence
  Description of Artificial Sequence: Synthetic oligonucleotide
uuaggaucuacaccccaua

SEQ ID NO: 1363362 - RNA, 19 nt, Artificial Sequence
  Description of Artificial Sequence: Synthetic oligonucleotide
aaguucguacucaaaugga

SEQ ID NO: 1363363 - RNA, 19 nt, Artificial Sequence
  Description of Artificial Sequence: Synthetic oligonucleotide
acacugcgaacauauguga

SEQ ID NO: 1363364 - RNA, 19 nt, Artificial Sequence
  Description of Artificial Sequence: Synthetic oligonucleotide
gugagugacugguaucacc

SEQ ID NO: 1363365 - RNA, 19 nt, Artificial Sequence
  Description of Artificial Sequence: Synthetic oligonucleotide
ugucacuggugagugacug

SEQ ID NO: 1363366 - RNA, 19 nt, Artificial Sequence
  Description of Artificial Sequence: Synthetic oligonucleotide
gacaauggaccuaacuguc

SEQ ID NO: 1363367 - RNA, 19 nt, Artificial Sequence
  Description of Artificial Sequence: Synthetic oligonucleotide
acacaugccuuuaugcaag

SEQ ID NO: 1363368 - RNA, 19 nt, Artificial Sequence
  Description of Artificial Sequence: Synthetic oligonucleotide
gucugcguggacuucuuug

SEQ ID NO: 1363369 - RNA, 19 nt, Artificial Sequence
  Description of Artificial Sequence: Synthetic oligonucleotide
acugcgaacauaugugaua

SEQ ID NO: 1363370 - RNA, 19 nt, Artificial Sequence
  Description of Artificial Sequence: Synthetic oligonucleotide
caugcuaaugcuuaugaau

SEQ ID NO: 1363371 - RNA, 19 nt, Artificial Sequence
  Description of Artificial Sequence: Synthetic oligonucleotide
ccuagaguuagcaguacag

SEQ ID NO: 1363372 - RNA, 19 nt, Artificial Sequence
  Description of Artificial Sequence: Synthetic oligonucleotide
cauaacuuacaguccuauc

SEQ ID NO: 1363373 - RNA, 19 nt, Artificial Sequence
  Description of Artificial Sequence: Synthetic oligonucleotide
ugccuuuaugcaagcuaag

SEQ ID NO: 1363374 - RNA, 19 nt, Artificial Sequence
  Description of Artificial Sequence: Synthetic oligonucleotide
gaaugcugaaauccaccca

SEQ ID NO: 1363375 - RNA, 19 nt, Artificial Sequence
  Description of Artificial Sequence: Synthetic oligonucleotide
ucauaacuuacaguccuau

SEQ ID NO: 1363376 - RNA, 19 nt, Artificial Sequence
  Description of Artificial Sequence: Synthetic oligonucleotide
ucacuggugagugacuggu

SEQ ID NO: 1363377 - RNA, 19 nt, Artificial Sequence
  Description of Artificial Sequence: Synthetic oligonucleotide
auuugaguuuaguuaccaa

SEQ ID NO: 1363378 - RNA, 19 nt, Artificial Sequence
  Description of Artificial Sequence: Synthetic oligonucleotide
uccuaaaggcaguuuccac

SEQ ID NO: 1363379 - RNA, 19 nt, Artificial Sequence
  Description of Artificial Sequence: Synthetic oligonucleotide
ucacuccugaucucaaaau

SEQ ID NO: 1363380 - RNA, 19 nt, Artificial Sequence
  Description of Artificial Sequence: Synthetic oligonucleotide
uuaugucuacaguucuauc

SEQ ID NO: 1363381 - RNA, 19 nt, Artificial Sequence
  Description of Artificial Sequence: Synthetic oligonucleotide
auaugugauagcggauguc

SEQ ID NO: 1363382 - RNA, 19 nt, Artificial Sequence
  Description of Artificial Sequence: Synthetic oligonucleotide
aguuugguucuguccaaga

SEQ ID NO: 1363383 - RNA, 19 nt, Artificial Sequence
  Description of Artificial Sequence: Synthetic oligonucleotide
cccaauaggcucuucagac

SEQ ID NO: 1363384 - RNA, 19 nt, Artificial Sequence
  Description of Artificial Sequence: Synthetic oligonucleotide
uaccaagaauauguaaguc

SEQ ID NO: 1363385 - RNA, 19 nt, Artificial Sequence
  Description of Artificial Sequence: Synthetic oligonucleotide
cacuuacagugacuuaaag

SEQ ID NO: 1363386 - RNA, 19 nt, Artificial Sequence
  Description of Artificial Sequence: Synthetic oligonucleotide
auucuacguccucacuaag

SEQ ID NO: 1363387 - RNA, 19 nt, Artificial Sequence
  Description of Artificial Sequence: Synthetic oligonucleotide
aggucugaaaucugaccga

SEQ ID NO: 1363388 - RNA, 19 nt, Artificial Sequence
  Description of Artificial Sequence: Synthetic oligonucleotide
guccuaucuuuuccuaaag

SEQ ID NO: 1363389 - RNA, 19 nt, Artificial Sequence
  Description of Artificial Sequence: Synthetic oligonucleotide
caaacaagaguuugguucu

SEQ ID NO: 1363390 - RNA, 19 nt, Artificial Sequence
  Description of Artificial Sequence: Synthetic oligonucleotide
ccaaugagacaacauuucc

SEQ ID NO: 1363391 - RNA, 19 nt, Artificial Sequence
  Description of Artificial Sequence: Synthetic oligonucleotide
uccugaucucaaaauccaa

SEQ ID NO: 1363392 - RNA, 19 nt, Artificial Sequence
  Description of Artificial Sequence: Synthetic oligonucleotide
auauucaugguaagcuaca

SEQ ID NO: 1363393 - RNA, 19 nt, Artificial Sequence
  Description of Artificial Sequence: Synthetic oligonucleotide
uuccacacuaugaucccua

SEQ ID NO: 1363394 - RNA, 19 nt, Artificial Sequence
  Description of Artificial Sequence: Synthetic oligonucleotide
acaugcuaaugcuuaugaa

SEQ ID NO: 1363395 - RNA, 19 nt, Artificial Sequence
  Description of Artificial Sequence: Synthetic oligonucleotide
ucguacucaaauggaguga

SEQ ID NO: 1363396 - RNA, 19 nt, Artificial Sequence
  Description of Artificial Sequence: Synthetic oligonucleotide
gguaaaagcgauacuccug

SEQ ID NO: 1363397 - RNA, 19 nt, Artificial Sequence
  Description of Artificial Sequence: Synthetic oligonucleotide
gaaaugaagaugggucgga

SEQ ID NO: 1363398 - RNA, 19 nt, Artificial Sequence
  Description of Artificial Sequence: Synthetic oligonucleotide
uauucaugguaagcuacau

SEQ ID NO: 1363399 - RNA, 19 nt, Artificial Sequence
  Description of Artificial Sequence: Synthetic oligonucleotide
augcaagcuaagauaaaga

SEQ ID NO: 1363400 - RNA, 19 nt, Artificial Sequence
  Description of Artificial Sequence: Synthetic oligonucleotide
  modified_base (8)..(8): a, c, u, g, unknown or other
ucccgugnggguuucuggu

SEQ ID NO: 1363401 - RNA, 19 nt, Artificial Sequence
  Description of Artificial Sequence: Synthetic oligonucleotide
augguaagcuacauuuugu

SEQ ID NO: 1363402 - RNA, 19 nt, Artificial Sequence
  Description of Artificial Sequence: Synthetic oligonucleotide
aggagaaugcugaaaucca

SEQ ID NO: 1363403 - RNA, 19 nt, Artificial Sequence
  Description of Artificial Sequence: Synthetic oligonucleotide
guguggcccuaucaaaccc

SEQ ID NO: 1363404 - RNA, 19 nt, Artificial Sequence
  Description of Artificial Sequence: Synthetic oligonucleotide
caagcuacucccaagcagu

SEQ ID NO: 1363405 - RNA, 19 nt, Artificial Sequence
  Description of Artificial Sequence: Synthetic oligonucleotide
  modified_base (9)..(9): a, c, u, g, unknown or other
cucccgugnggguuucugg

SEQ ID NO: 1363406 - RNA, 19 nt, Artificial Sequence
  Description of Artificial Sequence: Synthetic oligonucleotide
aagcuacucccaagcaguc

SEQ ID NO: 1363407 - RNA, 19 nt, Artificial Sequence
  Description of Artificial Sequence: Synthetic oligonucleotide
aacauaugugauagcggau

SEQ ID NO: 1363408 - RNA, 19 nt, Artificial Sequence
  Description of Artificial Sequence: Synthetic oligonucleotide
cucuucgcuuucaggauuc

SEQ ID NO: 1363409 - RNA, 19 nt, Artificial Sequence
  Description of Artificial Sequence: Synthetic oligonucleotide
uuuucacuggguugcuuuu

SEQ ID NO: 1363410 - RNA, 19 nt, Artificial Sequence
  Description of Artificial Sequence: Synthetic oligonucleotide
ugcgacaggugggagcucc

SEQ ID NO: 1363411 - RNA, 19 nt, Artificial Sequence
  Description of Artificial Sequence: Synthetic oligonucleotide
ccaaguucguacucaaaug

SEQ ID NO: 1363412 - RNA, 19 nt, Artificial Sequence
  Description of Artificial Sequence: Synthetic oligonucleotide
uuucggaccuguccccacu

SEQ ID NO: 1363413 - RNA, 19 nt, Artificial Sequence
  Description of Artificial Sequence: Synthetic oligonucleotide
gcuacucccaagcagucac

SEQ ID NO: 1363414 - RNA, 19 nt, Artificial Sequence
  Description of Artificial Sequence: Synthetic oligonucleotide
caguuuccacacuaugauc

SEQ ID NO: 1363415 - RNA, 19 nt, Artificial Sequence
  Description of Artificial Sequence: Synthetic oligonucleotide
  modified_base (14)..(14): a, c, u, g, unknown or other
ucugucucccgugnggguu

SEQ ID NO: 1363416 - RNA, 19 nt, Artificial Sequence
  Description of Artificial Sequence: Synthetic oligonucleotide
agcacuaguguaaaauuuu

SEQ ID NO: 1363417 - RNA, 19 nt, Artificial Sequence
  Description of Artificial Sequence: Synthetic oligonucleotide
uggaccuaacuguccaguc

SEQ ID NO: 1363418 - RNA, 19 nt, Artificial Sequence
  Description of Artificial Sequence: Synthetic oligonucleotide
agaaaccaugugcucugcu

SEQ ID NO: 1363419 - RNA, 19 nt, Artificial Sequence
  Description of Artificial Sequence: Synthetic oligonucleotide
augccuuuaugcaagcuaa

SEQ ID NO: 1363420 - RNA, 19 nt, Artificial Sequence
  Description of Artificial Sequence: Synthetic oligonucleotide
auuucacuguacauacaca

SEQ ID NO: 1363421 - RNA, 19 nt, Artificial Sequence
  Description of Artificial Sequence: Synthetic oligonucleotide
  modified_base (10)..(10): a, c, u, g, unknown or other
ucucccgugnggguuucug

SEQ ID NO: 1363422 - RNA, 19 nt, Artificial Sequence
  Description of Artificial Sequence: Synthetic oligonucleotide
aaaggacaauggaccuaac

SEQ ID NO: 1363423 - RNA, 19 nt, Artificial Sequence
  Description of Artificial Sequence: Synthetic oligonucleotide
aacccagaaaugacugaca

SEQ ID NO: 1363424 - RNA, 19 nt, Artificial Sequence
  Description of Artificial Sequence: Synthetic oligonucleotide
gcccuaucaaacccuagag

SEQ ID NO: 1363425 - RNA, 19 nt, Artificial Sequence
  Description of Artificial Sequence: Synthetic oligonucleotide
gaaaucugaccgaaggccu

SEQ ID NO: 1363426 - RNA, 19 nt, Artificial Sequence
  Description of Artificial Sequence: Synthetic oligonucleotide
cgaacauaugugauagcgg

SEQ ID NO: 1363427 - RNA, 19 nt, Artificial Sequence
  Description of Artificial Sequence: Synthetic oligonucleotide
cugaaaugccaaaacccaa

SEQ ID NO: 1363428 - RNA, 19 nt, Artificial Sequence
  Description of Artificial Sequence: Synthetic oligonucleotide
ugcgaacauaugugauagc

SEQ ID NO: 1363429 - RNA, 19 nt, Artificial Sequence
  Description of Artificial Sequence: Synthetic oligonucleotide
caugccuuuaugcaagcua

SEQ ID NO: 1363430 - RNA, 19 nt, Artificial Sequence
  Description of Artificial Sequence: Synthetic oligonucleotide
caguucgcuuccuacuuuc

SEQ ID NO: 1363431 - RNA, 19 nt, Artificial Sequence
  Description of Artificial Sequence: Synthetic oligonucleotide
guacagauagaaaccaugu

SEQ ID NO: 1363432 - RNA, 19 nt, Artificial Sequence
  Description of Artificial Sequence: Synthetic oligonucleotide
ugccgauugaggucugaaa

SEQ ID NO: 1363433 - RNA, 19 nt, Artificial Sequence
  Description of Artificial Sequence: Synthetic oligonucleotide
accccauaagaacaugcua

SEQ ID NO: 1363434 - RNA, 19 nt, Artificial Sequence
  Description of Artificial Sequence: Synthetic oligonucleotide
uuuccacacuaugaucccu

SEQ ID NO: 1363435 - RNA, 19 nt, Artificial Sequence
  Description of Artificial Sequence: Synthetic oligonucleotide
uaugaucccuaaagugauu

SEQ ID NO: 1363436 - RNA, 19 nt, Artificial Sequence
  Description of Artificial Sequence: Synthetic oligonucleotide
cuguccagucauuuaucuc

SEQ ID NO: 1363437 - RNA, 19 nt, Artificial Sequence
  Description of Artificial Sequence: Synthetic oligonucleotide
gaucuacaccccauaagaa

SEQ ID NO: 1363438 - RNA, 19 nt, Artificial Sequence
  Description of Artificial Sequence: Synthetic oligonucleotide
uaaaagcgauacuccugaa

SEQ ID NO: 1363439 - RNA, 19 nt, Artificial Sequence
  Description of Artificial Sequence: Synthetic oligonucleotide
cagaguuaugucuacaguu

SEQ ID NO: 1363440 - RNA, 19 nt, Artificial Sequence
  Description of Artificial Sequence: Synthetic oligonucleotide
ucaguucgcuuccuacuuu

SEQ ID NO: 1363441 - RNA, 19 nt, Artificial Sequence
  Description of Artificial Sequence: Synthetic oligonucleotide
ugauagcggaugucugcgu

SEQ ID NO: 1363442 - RNA, 19 nt, Artificial Sequence
  Description of Artificial Sequence: Synthetic oligonucleotide
ugcaggcuugagcacuagu

SEQ ID NO: 1363443 - RNA, 19 nt, Artificial Sequence
  Description of Artificial Sequence: Synthetic oligonucleotide
gucuuucggaccugucccc

SEQ ID NO: 1363444 - RNA, 19 nt, Artificial Sequence
  Description of Artificial Sequence: Synthetic oligonucleotide
aggugcugucuucuacaag

SEQ ID NO: 1363445 - RNA, 19 nt, Artificial Sequence
  Description of Artificial Sequence: Synthetic oligonucleotide
  modified_base (3)..(3): a, c, u, g, unknown or other
ugnggguuucuggugccga

SEQ ID NO: 1363446 - RNA, 19 nt, Artificial Sequence
  Description of Artificial Sequence: Synthetic oligonucleotide
gaccuaacuguccagucau

SEQ ID NO: 1363447 - RNA, 19 nt, Artificial Sequence
  Description of Artificial Sequence: Synthetic oligonucleotide
gugacugguaucacccagc

SEQ ID NO: 1363448 - RNA, 19 nt, Artificial Sequence
  Description of Artificial Sequence: Synthetic oligonucleotide
ucuuucggaccugucccca

SEQ ID NO: 1363449 - RNA, 19 nt, Artificial Sequence
  Description of Artificial Sequence: Synthetic oligonucleotide
agauaaagacuggggugug

SEQ ID NO: 1363450 - RNA, 19 nt, Artificial Sequence
  Description of Artificial Sequence: Synthetic oligonucleotide
auggaccuaacuguccagu

SEQ ID NO: 1363451 - RNA, 19 nt, Artificial Sequence
  Description of Artificial Sequence: Synthetic oligonucleotide
cucacuccugaucucaaaa

SEQ ID NO: 1363452 - RNA, 19 nt, Artificial Sequence
  Description of Artificial Sequence: Synthetic oligonucleotide
guccaagacaaaaccuuac

SEQ ID NO: 1363453 - RNA, 19 nt, Artificial Sequence
  Description of Artificial Sequence: Synthetic oligonucleotide
aucaaacccuagaguuagc

SEQ ID NO: 1363454 - RNA, 19 nt, Artificial Sequence
  Description of Artificial Sequence: Synthetic oligonucleotide
uccacacuaugaucccuaa

SEQ ID NO: 1363455 - RNA, 19 nt, Artificial Sequence
  Description of Artificial Sequence: Synthetic oligonucleotide
cuacguccucacuaagcuc

SEQ ID NO: 1363456 - RNA, 19 nt, Artificial Sequence
  Description of Artificial Sequence: Synthetic oligonucleotide
aucacccagcugugcuuac

SEQ ID NO: 1363457 - RNA, 19 nt, Artificial Sequence
  Description of Artificial Sequence: Synthetic oligonucleotide
cuaacuguccagucauuua

SEQ ID NO: 1363458 - RNA, 19 nt, Artificial Sequence
  Description of Artificial Sequence: Synthetic oligonucleotide
aaaucugaccgaaggccuu

SEQ ID NO: 1363459 - RNA, 19 nt, Artificial Sequence
  Description of Artificial Sequence: Synthetic oligonucleotide
guucuaucuuaggaucuac

SEQ ID NO: 1363460 - RNA, 19 nt, Artificial Sequence
  Description of Artificial Sequence: Synthetic oligonucleotide
cacccaagucauuggcuac

SEQ ID NO: 1363461 - RNA, 19 nt, Artificial Sequence
  Description of Artificial Sequence: Synthetic oligonucleotide
cuacuuucauuccaucaua

SEQ ID NO: 1363462 - RNA, 19 nt, Artificial Sequence
  Description of Artificial Sequence: Synthetic oligonucleotide
augagacaacauuuccaua

SEQ ID NO: 1363463 - RNA, 19 nt, Artificial Sequence
  Description of Artificial Sequence: Synthetic oligonucleotide
uaucacccagcugugcuua

SEQ ID NO: 1363464 - RNA, 19 nt, Artificial Sequence
  Description of Artificial Sequence: Synthetic oligonucleotide
aaucugaccgaaggccuuu

SEQ ID NO: 1363465 - RNA, 19 nt, Artificial Sequence
  Description of Artificial Sequence: Synthetic oligonucleotide
uuacagugacucuguggua

SEQ ID NO: 1363466 - RNA, 19 nt, Artificial Sequence
  Description of Artificial Sequence: Synthetic oligonucleotide
guuaugucuacaguucuau

SEQ ID NO: 1363467 - RNA, 19 nt, Artificial Sequence
  Description of Artificial Sequence: Synthetic oligonucleotide
caauaggcucuucagacau

SEQ ID NO: 1363468 - RNA, 19 nt, Artificial Sequence
  Description of Artificial Sequence: Synthetic oligonucleotide
ccccauaagaacaugcuaa

SEQ ID NO: 1363469 - RNA, 19 nt, Artificial Sequence
  Description of Artificial Sequence: Synthetic oligonucleotide
augugauagcggaugucug

SEQ ID NO: 1363470 - RNA, 19 nt, Artificial Sequence
  Description of Artificial Sequence: Synthetic oligonucleotide
guuagcaguacaggggcaa

SEQ ID NO: 1363471 - RNA, 19 nt, Artificial Sequence
  Description of Artificial Sequence: Synthetic oligonucleotide
acuuacaguccuaucuuuu

SEQ ID NO: 1363472 - RNA, 19 nt, Artificial Sequence
  Description of Artificial Sequence: Synthetic oligonucleotide
aguucuaucuuaggaucua

SEQ ID NO: 1363473 - RNA, 19 nt, Artificial Sequence
  Description of Artificial Sequence: Synthetic oligonucleotide
aagugaucuuaaagauaga

SEQ ID NO: 1363474 - RNA, 19 nt, Artificial Sequence
  Description of Artificial Sequence: Synthetic oligonucleotide
uucucacaacagaguuaug

SEQ ID NO: 1363475 - RNA, 19 nt, Artificial Sequence
  Description of Artificial Sequence: Synthetic oligonucleotide
gucaccuaacaguuaaaau

SEQ ID NO: 1363476 - RNA, 19 nt, Artificial Sequence
  Description of Artificial Sequence: Synthetic oligonucleotide
gagugacugguaucaccca

SEQ ID NO: 1363477 - RNA, 19 nt, Artificial Sequence
  Description of Artificial Sequence: Synthetic oligonucleotide
agaaaggacaauggaccua

SEQ ID NO: 1363478 - RNA, 19 nt, Artificial Sequence
  Description of Artificial Sequence: Synthetic oligonucleotide
  modified_base (4)..(4): a, c, u, g, unknown or other
gugnggguuucuggugccg

SEQ ID NO: 1363479 - RNA, 19 nt, Artificial Sequence
  Description of Artificial Sequence: Synthetic oligonucleotide
uagcggaugucugcgugga

SEQ ID NO: 1363480 - RNA, 19 nt, Artificial Sequence
  Description of Artificial Sequence: Synthetic oligonucleotide
acccuagaguuagcaguac

SEQ ID NO: 1363481 - RNA, 19 nt, Artificial Sequence
  Description of Artificial Sequence: Synthetic oligonucleotide
ucccugaaggggucaguuc

SEQ ID NO: 1363482 - RNA, 19 nt, Artificial Sequence
  Description of Artificial Sequence: Synthetic oligonucleotide
ggaccuaacuguccaguca

SEQ ID NO: 1363483 - RNA, 19 nt, Artificial Sequence
  Description of Artificial Sequence: Synthetic oligonucleotide
cugacccacucuucugcug

SEQ ID NO: 1363484 - RNA, 19 nt, Artificial Sequence
  Description of Artificial Sequence: Synthetic oligonucleotide
ugguaucacccagcugugc

SEQ ID NO: 1363485 - RNA, 19 nt, Artificial Sequence
  Description of Artificial Sequence: Synthetic oligonucleotide
ggcccuaucaaacccuaga

SEQ ID NO: 1363486 - RNA, 19 nt, Artificial Sequence
  Description of Artificial Sequence: Synthetic oligonucleotide
guucguacucaaauggagu

SEQ ID NO: 1363487 - RNA, 19 nt, Artificial Sequence
  Description of Artificial Sequence: Synthetic oligonucleotide
cuguccaagacaaaaccuu

SEQ ID NO: 1363488 - RNA, 19 nt, Artificial Sequence
  Description of Artificial Sequence: Synthetic oligonucleotide
agcggaugucugcguggac

SEQ ID NO: 1363489 - RNA, 19 nt, Artificial Sequence
  Description of Artificial Sequence: Synthetic oligonucleotide
cauaugugauagcggaugu

SEQ ID NO: 1363490 - RNA, 19 nt, Artificial Sequence
  Description of Artificial Sequence: Synthetic oligonucleotide
cuucuacaagcuacuccca

SEQ ID NO: 1363491 - RNA, 19 nt, Artificial Sequence
  Description of Artificial Sequence: Synthetic oligonucleotide
ccgauugaggucugaaauc

SEQ ID NO: 1363492 - RNA, 19 nt, Artificial Sequence
  Description of Artificial Sequence: Synthetic oligonucleotide
gacaagcaggucggugacc

SEQ ID NO: 1363493 - RNA, 19 nt, Artificial Sequence
  Description of Artificial Sequence: Synthetic oligonucleotide
accugauuaaugacagcau

SEQ ID NO: 1363494 - RNA, 19 nt, Artificial Sequence
  Description of Artificial Sequence: Synthetic oligonucleotide
acccaagucauuggcuaca

SEQ ID NO: 1363495 - RNA, 19 nt, Artificial Sequence
  Description of Artificial Sequence: Synthetic oligonucleotide
augcugaaauccacccaag

SEQ ID NO: 1363496 - RNA, 19 nt, Artificial Sequence
  Description of Artificial Sequence: Synthetic oligonucleotide
ugaaggggucaguucgcuu

SEQ ID NO: 1363497 - RNA, 19 nt, Artificial Sequence
  Description of Artificial Sequence: Synthetic oligonucleotide
aagcuacauuuuguacaga

SEQ ID NO: 1363498 - RNA, 19 nt, Artificial Sequence
  Description of Artificial Sequence: Synthetic oligonucleotide
guccagucauuuaucucac

SEQ ID NO: 1363499 - RNA, 19 nt, Artificial Sequence
  Description of Artificial Sequence: Synthetic oligonucleotide
caguucuaucuuaggaucu

SEQ ID NO: 1363500 - RNA, 19 nt, Artificial Sequence
  Description of Artificial Sequence: Synthetic oligonucleotide
uccccgcugugucguaaca

SEQ ID NO: 1363501 - RNA, 19 nt, Artificial Sequence
  Description of Artificial Sequence: Synthetic oligonucleotide
gguaucacccagcugugcu

SEQ ID NO: 1363502 - RNA, 19 nt, Artificial Sequence
  Description of Artificial Sequence: Synthetic oligonucleotide
ccagucauuuaucucacaa

SEQ ID NO: 1363503 - RNA, 19 nt, Artificial Sequence
  Description of Artificial Sequence: Synthetic oligonucleotide
gucuccccacugucuuucg

SEQ ID NO: 1363504 - RNA, 19 nt, Artificial Sequence
  Description of Artificial Sequence: Synthetic oligonucleotide
cuuaggaucuacaccccau

SEQ ID NO: 1363505 - RNA, 19 nt, Artificial Sequence
  Description of Artificial Sequence: Synthetic oligonucleotide
uucggaccuguccccacuu

SEQ ID NO: 1363506 - RNA, 19 nt, Artificial Sequence
  Description of Artificial Sequence: Synthetic oligonucleotide
gcaguuuccacacuaugau

SEQ ID NO: 1363507 - RNA, 19 nt, Artificial Sequence
  Description of Artificial Sequence: Synthetic oligonucleotide
  modified_base (6)..(6): a, c, u, g, unknown or other
ccgugnggguuucuggugc

SEQ ID NO: 1363508 - RNA, 19 nt, Artificial Sequence
  Description of Artificial Sequence: Synthetic oligonucleotide
uacaggggcaagugaucuu

SEQ ID NO: 1363509 - RNA, 19 nt, Artificial Sequence
  Description of Artificial Sequence: Synthetic oligonucleotide
agaugggucggaggugcug

SEQ ID NO: 1363510 - RNA, 19 nt, Artificial Sequence
  Description of Artificial Sequence: Synthetic oligonucleotide
ggacaagcaggucggugac

SEQ ID NO: 1363511 - RNA, 19 nt, Artificial Sequence
  Description of Artificial Sequence: Synthetic oligonucleotide
aguuagcaguacaggggca

SEQ ID NO: 1363512 - RNA, 19 nt, Artificial Sequence
  Description of Artificial Sequence: Synthetic oligonucleotide
acauuucacuguacauaca

SEQ ID NO: 1363513 - RNA, 19 nt, Artificial Sequence
  Description of Artificial Sequence: Synthetic oligonucleotide
gaugggucggaggugcugu

SEQ ID NO: 1363514 - RNA, 19 nt, Artificial Sequence
  Description of Artificial Sequence: Synthetic oligonucleotide
cugucuucuacaagcuacu

SEQ ID NO: 1363515 - RNA, 19 nt, Artificial Sequence
  Description of Artificial Sequence: Synthetic oligonucleotide
ggguguggcccuaucaaac

SEQ ID NO: 1363516 - RNA, 19 nt, Artificial Sequence
  Description of Artificial Sequence: Synthetic oligonucleotide
gccgauugaggucugaaau

SEQ ID NO: 1363517 - RNA, 19 nt, Artificial Sequence
  Description of Artificial Sequence: Synthetic oligonucleotide
cguacucaaauggagugac

SEQ ID NO: 1363518 - RNA, 19 nt, Artificial Sequence
  Description of Artificial Sequence: Synthetic oligonucleotide
cuugagcacuaguguaaaa

SEQ ID NO: 1363519 - RNA, 19 nt, Artificial Sequence
  Description of Artificial Sequence: Synthetic oligonucleotide
guacaggggcaagugaucu

SEQ ID NO: 1363520 - RNA, 19 nt, Artificial Sequence
  Description of Artificial Sequence: Synthetic oligonucleotide
caacagaguuaugucuaca

SEQ ID NO: 1363521 - RNA, 19 nt, Artificial Sequence
  Description of Artificial Sequence: Synthetic oligonucleotide
caacauauuugaguuuagu

SEQ ID NO: 1363522 - RNA, 19 nt, Artificial Sequence
  Description of Artificial Sequence: Synthetic oligonucleotide
caccccauaagaacaugcu

SEQ ID NO: 1363523 - RNA, 19 nt, Artificial Sequence
  Description of Artificial Sequence: Synthetic oligonucleotide
ucuucgcuuucaggauucu

SEQ ID NO: 1363524 - RNA, 19 nt, Artificial Sequence
  Description of Artificial Sequence: Synthetic oligonucleotide
aguucgcuuccuacuuuca

SEQ ID NO: 1363525 - RNA, 19 nt, Artificial Sequence
  Description of Artificial Sequence: Synthetic oligonucleotide
ggggugaaaugaagauggg

SEQ ID NO: 1363526 - RNA, 19 nt, Artificial Sequence
  Description of Artificial Sequence: Synthetic oligonucleotide
ugggucggaggugcugucu

SEQ ID NO: 1363527 - RNA, 19 nt, Artificial Sequence
  Description of Artificial Sequence: Synthetic oligonucleotide
aagaugggucggaggugcu

SEQ ID NO: 1363528 - RNA, 19 nt, Artificial Sequence
  Description of Artificial Sequence: Synthetic oligonucleotide
gucaguucgcuuccuacuu

SEQ ID NO: 1363529 - RNA, 19 nt, Artificial Sequence
  Description of Artificial Sequence: Synthetic oligonucleotide
gacccacucuucugcuguc

SEQ ID NO: 1363530 - RNA, 19 nt, Artificial Sequence
  Description of Artificial Sequence: Synthetic oligonucleotide
ggucaguucgcuuccuacu

SEQ ID NO: 1363531 - RNA, 19 nt, Artificial Sequence
  Description of Artificial Sequence: Synthetic oligonucleotide
cuccccgcugugucguaac

SEQ ID NO: 1363532 - RNA, 19 nt, Artificial Sequence
  Description of Artificial Sequence: Synthetic oligonucleotide
cucugugguaaaagcgaua

SEQ ID NO: 1363533 - RNA, 19 nt, Artificial Sequence
  Description of Artificial Sequence: Synthetic oligonucleotide
cugcuccaaguucguacuc

SEQ ID NO: 1363534 - RNA, 19 nt, Artificial Sequence
  Description of Artificial Sequence: Synthetic oligonucleotide
caaauucuacguccucacu

SEQ ID NO: 1363535 - RNA, 19 nt, Artificial Sequence
  Description of Artificial Sequence: Synthetic oligonucleotide
gcgauacuccugaaaugcc

SEQ ID NO: 1363536 - RNA, 19 nt, Artificial Sequence
  Description of Artificial Sequence: Synthetic oligonucleotide
cuccucgcacucguacggc

SEQ ID NO: 1363537 - RNA, 19 nt, Artificial Sequence
  Description of Artificial Sequence: Synthetic oligonucleotide
  modified_base (7)..(7): a, c, u, g, unknown or other
cccgugnggguuucuggug

SEQ ID NO: 1363538 - RNA, 19 nt, Artificial Sequence
  Description of Artificial Sequence: Synthetic oligonucleotide
ggucugaaaucugaccgaa

SEQ ID NO: 1363539 - RNA, 19 nt, Artificial Sequence
  Description of Artificial Sequence: Synthetic oligonucleotide
guaagucaccuaacaguua

SEQ ID NO: 1363540 - RNA, 19 nt, Artificial Sequence
  Description of Artificial Sequence: Synthetic oligonucleotide
ucggaccuguccccacuuu

SEQ ID NO: 1363541 - RNA, 19 nt, Artificial Sequence
  Description of Artificial Sequence: Synthetic oligonucleotide
ccuuuaugcaagcuaagau

SEQ ID NO: 1363542 - RNA, 19 nt, Artificial Sequence
  Description of Artificial Sequence: Synthetic oligonucleotide
ggcuugagcacuaguguaa

SEQ ID NO: 1363543 - RNA, 19 nt, Artificial Sequence
  Description of Artificial Sequence: Synthetic oligonucleotide
aggcccuaggagugguuuu

SEQ ID NO: 1363544 - RNA, 19 nt, Artificial Sequence
  Description of Artificial Sequence: Synthetic oligonucleotide
cuacaccccauaagaacau

SEQ ID NO: 1363545 - RNA, 19 nt, Artificial Sequence
  Description of Artificial Sequence: Synthetic oligonucleotide
cacugcgaacauaugugau

SEQ ID NO: 1363546 - RNA, 19 nt, Artificial Sequence
  Description of Artificial Sequence: Synthetic oligonucleotide
ucuccccgcugugucguaa

SEQ ID NO: 1363547 - RNA, 19 nt, Artificial Sequence
  Description of Artificial Sequence: Synthetic oligonucleotide
ccugaucucaaaauccaau

SEQ ID NO: 1363548 - RNA, 19 nt, Artificial Sequence
  Description of Artificial Sequence: Synthetic oligonucleotide
  modified_base (2)..(2): a, c, u, g, unknown or other
gnggguuucuggugccgau

SEQ ID NO: 1363549 - RNA, 19 nt, Artificial Sequence
  Description of Artificial Sequence: Synthetic oligonucleotide
guaucacccagcugugcuu

SEQ ID NO: 1363550 - RNA, 19 nt, Artificial Sequence
  Description of Artificial Sequence: Synthetic oligonucleotide
  modified_base (5)..(5): a, c, u, g, unknown or other
cgugnggguuucuggugcc

SEQ ID NO: 1363551 - RNA, 19 nt, Artificial Sequence
  Description of Artificial Sequence: Synthetic oligonucleotide
gaguccgcuggugcugcga

SEQ ID NO: 1363552 - RNA, 19 nt, Artificial Sequence
  Description of Artificial Sequence: Synthetic oligonucleotide
gcuugagcacuaguguaaa

SEQ ID NO: 1363553 - RNA, 19 nt, Artificial Sequence
  Description of Artificial Sequence: Synthetic oligonucleotide
  modified_base (12)..(12): a, c, u, g, unknown or other
ugucucccgugnggguuuc

SEQ ID NO: 1363554 - RNA, 19 nt, Artificial Sequence
  Description of Artificial Sequence: Synthetic oligonucleotide
cauuggcuacacugauaua

SEQ ID NO: 1363555 - RNA, 19 nt, Artificial Sequence
  Description of Artificial Sequence: Synthetic oligonucleotide
cccuagaguuagcaguaca

SEQ ID NO: 1363556 - RNA, 19 nt, Artificial Sequence
  Description of Artificial Sequence: Synthetic oligonucleotide
cugugguaaaagcgauacu

SEQ ID NO: 1363557 - RNA, 19 nt, Artificial Sequence
  Description of Artificial Sequence: Synthetic oligonucleotide
gcugcgacaggugggagcu

SEQ ID NO: 1363558 - RNA, 19 nt, Artificial Sequence
  Description of Artificial Sequence: Synthetic oligonucleotide
cagugcaggcuugagcacu

SEQ ID NO: 1363559 - RNA, 19 nt, Artificial Sequence
  Description of Artificial Sequence: Synthetic oligonucleotide
cugugcuuacagugacucu

SEQ ID NO: 1363560 - RNA, 19 nt, Artificial Sequence
  Description of Artificial Sequence: Synthetic oligonucleotide
cgcuuccuacuuucauucc

SEQ ID NO: 1363561 - RNA, 19 nt, Artificial Sequence
  Description of Artificial Sequence: Synthetic oligonucleotide
cuacucccaagcagucacu

SEQ ID NO: 1363562 - RNA, 19 nt, Artificial Sequence
  Description of Artificial Sequence: Synthetic oligonucleotide
guggcccuaucaaacccua

SEQ ID NO: 1363563 - RNA, 19 nt, Artificial Sequence
  Description of Artificial Sequence: Synthetic oligonucleotide
cacuggugagugacuggua

SEQ ID NO: 1363564 - RNA, 19 nt, Artificial Sequence
  Description of Artificial Sequence: Synthetic oligonucleotide
guccgcuggugcugcgaca

SEQ ID NO: 1363565 - RNA, 19 nt, Artificial Sequence
  Description of Artificial Sequence: Synthetic oligonucleotide
cccuaucaaacccuagagu

SEQ ID NO: 1363566 - RNA, 19 nt, Artificial Sequence
  Description of Artificial Sequence: Synthetic oligonucleotide
cgauugaggucugaaaucu

SEQ ID NO: 1363567 - RNA, 19 nt, Artificial Sequence
  Description of Artificial Sequence: Synthetic oligonucleotide
cccauaagaacaugcuaau

SEQ ID NO: 1363568 - RNA, 19 nt, Artificial Sequence
  Description of Artificial Sequence: Synthetic oligonucleotide
gcggaugucugcguggacu

SEQ ID NO: 1363569 - RNA, 19 nt, Artificial Sequence
  Description of Artificial Sequence: Synthetic oligonucleotide
accuaacuguccagucauu

SEQ ID NO: 1363570 - RNA, 19 nt, Artificial Sequence
  Description of Artificial Sequence: Synthetic oligonucleotide
cagugacucugugguaaaa

SEQ ID NO: 1363571 - RNA, 19 nt, Artificial Sequence
  Description of Artificial Sequence: Synthetic oligonucleotide
cuggguugcuuuugagguu

SEQ ID NO: 1363572 - RNA, 19 nt, Artificial Sequence
  Description of Artificial Sequence: Synthetic oligonucleotide
gcgacaggugggagcuccg

SEQ ID NO: 1363573 - RNA, 19 nt, Artificial Sequence
  Description of Artificial Sequence: Synthetic oligonucleotide
cggaccuguccccacuuuc

SEQ ID NO: 1363574 - RNA, 19 nt, Artificial Sequence
  Description of Artificial Sequence: Synthetic oligonucleotide
cccgcugugucguaacacu

SEQ ID NO: 1363575 - RNA, 19 nt, Artificial Sequence
  Description of Artificial Sequence: Synthetic oligonucleotide
  modified_base (13)..(13): a, c, u, g, unknown or other
cugucucccgugnggguuu

SEQ ID NO: 1363576 - RNA, 19 nt, Artificial Sequence
  Description of Artificial Sequence: Synthetic oligonucleotide
ccccgcugugucguaacac

SEQ ID NO: 1363577 - RNA, 19 nt, Artificial Sequence
  Description of Artificial Sequence: Synthetic oligonucleotide
ccuaacuguccagucauuu

SEQ ID NO: 1363578 - RNA, 19 nt, Artificial Sequence
  Description of Artificial Sequence: Synthetic oligonucleotide
cuucccugaaggggucagu

SEQ ID NO: 1363579 - RNA, 19 nt, Artificial Sequence
  Description of Artificial Sequence: Synthetic oligonucleotide
cugcgacaggugggagcuc

SEQ ID NO: 1363580 - RNA, 19 nt, Artificial Sequence
  Description of Artificial Sequence: Synthetic oligonucleotide
cgguuucuacuauuagaau

SEQ ID NO: 1363581 - RNA, 19 nt, Artificial Sequence
  Description of Artificial Sequence: Synthetic oligonucleotide
ccgcugugucguaacacuu

SEQ ID NO: 1363582 - RNA, 19 nt, Artificial Sequence
  Description of Artificial Sequence: Synthetic oligonucleotide
  modified_base (11)..(11): a, c, u, g, unknown or other
gucucccgugnggguuucu

SEQ ID NO: 1363583 - RNA, 19 nt, Artificial Sequence
  Description of Artificial Sequence: Synthetic oligonucleotide
ucauuauaaauccagaucu

SEQ ID NO: 1363584 - RNA, 19 nt, Artificial Sequence
  Description of Artificial Sequence: Synthetic oligonucleotide
aacagagcccuucugaucc

SEQ ID NO: 1363585 - RNA, 19 nt, Artificial Sequence
  Description of Artificial Sequence: Synthetic oligonucleotide
agcacuguccaacagauac

SEQ ID NO: 1363586 - RNA, 19 nt, Artificial Sequence
  Description of Artificial Sequence: Synthetic oligonucleotide
uaagguucuugccugaugg

SEQ ID NO: 1363587 - RNA, 19 nt, Artificial Sequence
  Description of Artificial Sequence: Synthetic oligonucleotide
accuuaaccuucuaggugc

SEQ ID NO: 1363588 - RNA, 19 nt, Artificial Sequence
  Description of Artificial Sequence: Synthetic oligonucleotide
uaaacuguggaucuaacac

SEQ ID NO: 1363589 - RNA, 19 nt, Artificial Sequence
  Description of Artificial Sequence: Synthetic oligonucleotide
aaccuagugaauuauguug

SEQ ID NO: 1363590 - RNA, 19 nt, Artificial Sequence
  Description of Artificial Sequence: Synthetic oligonucleotide
uuuaucuguaucuucaaug

SEQ ID NO: 1363591 - RNA, 19 nt, Artificial Sequence
  Description of Artificial Sequence: Synthetic oligonucleotide
uugaaaaucauacccagcu

SEQ ID NO: 1363592 - RNA, 19 nt, Artificial Sequence
  Description of Artificial Sequence: Synthetic oligonucleotide
aaaugguccauucuguuug

SEQ ID NO: 1363593 - RNA, 19 nt, Artificial Sequence
  Description of Artificial Sequence: Synthetic oligonucleotide
ucuuccucaauucaacacg

SEQ ID NO: 1363594 - RNA, 19 nt, Artificial Sequence
  Description of Artificial Sequence: Synthetic oligonucleotide
uuauuuaucaaauggucca

SEQ ID NO: 1363595 - RNA, 19 nt, Artificial Sequence
  Description of Artificial Sequence: Synthetic oligonucleotide
ucauuaagcaccuugauuu

SEQ ID NO: 1363596 - RNA, 19 nt, Artificial Sequence
  Description of Artificial Sequence: Synthetic oligonucleotide
ugugacaaaaccuagugaa

SEQ ID NO: 1363597 - RNA, 19 nt, Artificial Sequence
  Description of Artificial Sequence: Synthetic oligonucleotide
gaagugguaucccaaacgg

SEQ ID NO: 1363598 - RNA, 19 nt, Artificial Sequence
  Description of Artificial Sequence: Synthetic oligonucleotide
uguacuaauagacccaacu

SEQ ID NO: 1363599 - RNA, 19 nt, Artificial Sequence
  Description of Artificial Sequence: Synthetic oligonucleotide
uggacuucgaguaaaacgu

SEQ ID NO: 1363600 - RNA, 19 nt, Artificial Sequence
  Description of Artificial Sequence: Synthetic oligonucleotide
uccaaauaccacuugaaug

SEQ ID NO: 1363601 - RNA, 19 nt, Artificial Sequence
  Description of Artificial Sequence: Synthetic oligonucleotide
ucuacuaagguucuugccu

SEQ ID NO: 1363602 - RNA, 19 nt, Artificial Sequence
  Description of Artificial Sequence: Synthetic oligonucleotide
cauauuaaaggcauguuuc

SEQ ID NO: 1363603 - RNA, 19 nt, Artificial Sequence
  Description of Artificial Sequence: Synthetic oligonucleotide
aaauccagaucugaguugg

SEQ ID NO: 1363604 - RNA, 19 nt, Artificial Sequence
  Description of Artificial Sequence: Synthetic oligonucleotide
cuucaggagauccauaugg

SEQ ID NO: 1363605 - RNA, 19 nt, Artificial Sequence
  Description of Artificial Sequence: Synthetic oligonucleotide
uuaagcagcaccaagccuc

SEQ ID NO: 1363606 - RNA, 19 nt, Artificial Sequence
  Description of Artificial Sequence: Synthetic oligonucleotide
uacuaauagacccaacucu

SEQ ID NO: 1363607 - RNA, 19 nt, Artificial Sequence
  Description of Artificial Sequence: Synthetic oligonucleotide
aggucauugaaauacuguc

SEQ ID NO: 1363608 - RNA, 19 nt, Artificial Sequence
  Description of Artificial Sequence: Synthetic oligonucleotide
gaguaaaacgugcagcccg

SEQ ID NO: 1363609 - RNA, 19 nt, Artificial Sequence
  Description of Artificial Sequence: Synthetic oligonucleotide
uggguuuguacuaauagac

SEQ ID NO: 1363610 - RNA, 19 nt, Artificial Sequence
  Description of Artificial Sequence: Synthetic oligonucleotide
agcaccuugauuuauguca

SEQ ID NO: 1363611 - RNA, 19 nt, Artificial Sequence
  Description of Artificial Sequence: Synthetic oligonucleotide
cuggacuucgaguaaaacg

SEQ ID NO: 1363612 - RNA, 19 nt, Artificial Sequence
  Description of Artificial Sequence: Synthetic oligonucleotide
ucaaaucaggucuuaaaga

SEQ ID NO: 1363613 - RNA, 19 nt, Artificial Sequence
  Description of Artificial Sequence: Synthetic oligonucleotide
uguucauugcaaacaagcc

SEQ ID NO: 1363614 - RNA, 19 nt, Artificial Sequence
  Description of Artificial Sequence: Synthetic oligonucleotide
caucuaaccagacaugugc

SEQ ID NO: 1363615 - RNA, 19 nt, Artificial Sequence
  Description of Artificial Sequence: Synthetic oligonucleotide
aaucauacccagcucggag

SEQ ID NO: 1363616 - RNA, 19 nt, Artificial Sequence
  Description of Artificial Sequence: Synthetic oligonucleotide
uuucugguagcccaggucu

SEQ ID NO: 1363617 - RNA, 19 nt, Artificial Sequence
  Description of Artificial Sequence: Synthetic oligonucleotide
aauagacccaacucuucag

SEQ ID NO: 1363618 - RNA, 19 nt, Artificial Sequence
  Description of Artificial Sequence: Synthetic oligonucleotide
aaacuguggaucuaacacu

SEQ ID NO: 1363619 - RNA, 19 nt, Artificial Sequence
  Description of Artificial Sequence: Synthetic oligonucleotide
uccaaggucauugaaauac

SEQ ID NO: 1363620 - RNA, 19 nt, Artificial Sequence
  Description of Artificial Sequence: Synthetic oligonucleotide
uucuaggugccacuguugg

SEQ ID NO: 1363621 - RNA, 19 nt, Artificial Sequence
  Description of Artificial Sequence: Synthetic oligonucleotide
ugaagaucgaguuucugac

SEQ ID NO: 1363622 - RNA, 19 nt, Artificial Sequence
  Description of Artificial Sequence: Synthetic oligonucleotide
accuuauaggugcaguagc

SEQ ID NO: 1363623 - RNA, 19 nt, Artificial Sequence
  Description of Artificial Sequence: Synthetic oligonucleotide
ucgaguaaaacgugcagcc

SEQ ID NO: 1363624 - RNA, 19 nt, Artificial Sequence
  Description of Artificial Sequence: Synthetic oligonucleotide
acguccuucauuaagcacc

SEQ ID NO: 1363625 - RNA, 19 nt, Artificial Sequence
  Description of Artificial Sequence: Synthetic oligonucleotide
gauuauuuaucaaaugguc

SEQ ID NO: 1363626 - RNA, 19 nt, Artificial Sequence
  Description of Artificial Sequence: Synthetic oligonucleotide
cauauggacgccuuuuccg

SEQ ID NO: 1363627 - RNA, 19 nt, Artificial Sequence
  Description of Artificial Sequence: Synthetic oligonucleotide
ugucaggugugacaaaacc

SEQ ID NO: 1363628 - RNA, 19 nt, Artificial Sequence
  Description of Artificial Sequence: Synthetic oligonucleotide
cuaaaucccacuugaagug

SEQ ID NO: 1363629 - RNA, 19 nt, Artificial Sequence
  Description of Artificial Sequence: Synthetic oligonucleotide
uuugcuuuaaacuguggau

SEQ ID NO: 1363630 - RNA, 19 nt, Artificial Sequence
  Description of Artificial Sequence: Synthetic oligonucleotide
uagugaauuauguuguccu

SEQ ID NO: 1363631 - RNA, 19 nt, Artificial Sequence
  Description of Artificial Sequence: Synthetic oligonucleotide
ucacguucauugaaaauca

SEQ ID NO: 1363632 - RNA, 19 nt, Artificial Sequence
  Description of Artificial Sequence: Synthetic oligonucleotide
uccagauccgaaaugagau

SEQ ID NO: 1363633 - RNA, 19 nt, Artificial Sequence
  Description of Artificial Sequence: Synthetic oligonucleotide
gguuuguacuaauagaccc

SEQ ID NO: 1363634 - RNA, 19 nt, Artificial Sequence
  Description of Artificial Sequence: Synthetic oligonucleotide
uuuaugucaggugugacaa

SEQ ID NO: 1363635 - RNA, 19 nt, Artificial Sequence
  Description of Artificial Sequence: Synthetic oligonucleotide
aaaaucauacccagcucgg

SEQ ID NO: 1363636 - RNA, 19 nt, Artificial Sequence
  Description of Artificial Sequence: Synthetic oligonucleotide
ggagccaucacaaauagcc

SEQ ID NO: 1363637 - RNA, 19 nt, Artificial Sequence
  Description of Artificial Sequence: Synthetic oligonucleotide
aauguguccuacucuugag

SEQ ID NO: 1363638 - RNA, 19 nt, Artificial Sequence
  Description of Artificial Sequence: Synthetic oligonucleotide
auauggacgccuuuuccgg

SEQ ID NO: 1363639 - RNA, 19 nt, Artificial Sequence
  Description of Artificial Sequence: Synthetic oligonucleotide
uuucugacaugucaaggca

SEQ ID NO: 1363640 - RNA, 19 nt, Artificial Sequence
  Description of Artificial Sequence: Synthetic oligonucleotide
uccaacagauacuugguac

SEQ ID NO: 1363641 - RNA, 19 nt, Artificial Sequence
  Description of Artificial Sequence: Synthetic oligonucleotide
uugaaugauugacagccca

SEQ ID NO: 1363642 - RNA, 19 nt, Artificial Sequence
  Description of Artificial Sequence: Synthetic oligonucleotide
agauacuugguacagccga

SEQ ID NO: 1363643 - RNA, 19 nt, Artificial Sequence
  Description of Artificial Sequence: Synthetic oligonucleotide
gaaauaaccugagucccgg

SEQ ID NO: 1363644 - RNA, 19 nt, Artificial Sequence
  Description of Artificial Sequence: Synthetic oligonucleotide
uguguccuacucuugagca

SEQ ID NO: 1363645 - RNA, 19 nt, Artificial Sequence
  Description of Artificial Sequence: Synthetic oligonucleotide
aaucaggucuuaaagaaaa

SEQ ID NO: 1363646 - RNA, 19 nt, Artificial Sequence
  Description of Artificial Sequence: Synthetic oligonucleotide
aacgguuacuaauaagcau

SEQ ID NO: 1363647 - RNA, 19 nt, Artificial Sequence
  Description of Artificial Sequence: Synthetic oligonucleotide
uugauuuaugucaggugug

SEQ ID NO: 1363648 - RNA, 19 nt, Artificial Sequence
  Description of Artificial Sequence: Synthetic oligonucleotide
ucaagcacuguccaacaga

SEQ ID NO: 1363649 - RNA, 19 nt, Artificial Sequence
  Description of Artificial Sequence: Synthetic oligonucleotide
uuuuccggaaaaugugucc

SEQ ID NO: 1363650 - RNA, 19 nt, Artificial Sequence
  Description of Artificial Sequence: Synthetic oligonucleotide
aagcauauuaaaggcaugu

SEQ ID NO: 1363651 - RNA, 19 nt, Artificial Sequence
  Description of Artificial Sequence: Synthetic oligonucleotide
gacaugucaaggcaaagga

SEQ ID NO: 1363652 - RNA, 19 nt, Artificial Sequence
  Description of Artificial Sequence: Synthetic oligonucleotide
auuuaugucaggugugaca

SEQ ID NO: 1363653 - RNA, 19 nt, Artificial Sequence
  Description of Artificial Sequence: Synthetic oligonucleotide
uguccaaggucauugaaau

SEQ ID NO: 1363654 - RNA, 19 nt, Artificial Sequence
  Description of Artificial Sequence: Synthetic oligonucleotide
gaucuaacacucgaccugg

SEQ ID NO: 1363655 - RNA, 19 nt, Artificial Sequence
  Description of Artificial Sequence: Synthetic oligonucleotide
aucauacccagcucggagg

SEQ ID NO: 1363656 - RNA, 19 nt, Artificial Sequence
  Description of Artificial Sequence: Synthetic oligonucleotide
agugaauuauguuguccuc

SEQ ID NO: 1363657 - RNA, 19 nt, Artificial Sequence
  Description of Artificial Sequence: Synthetic oligonucleotide
cauuucaugagucggggug

SEQ ID NO: 1363658 - RNA, 19 nt, Artificial Sequence
  Description of Artificial Sequence: Synthetic oligonucleotide
aggugcaguagcuccaucg

SEQ ID NO: 1363659 - RNA, 19 nt, Artificial Sequence
  Description of Artificial Sequence: Synthetic oligonucleotide
auugaaaaucauacccagc

SEQ ID NO: 1363660 - RNA, 19 nt, Artificial Sequence
  Description of Artificial Sequence: Synthetic oligonucleotide
ugacccauggcauuucaug

SEQ ID NO: 1363661 - RNA, 19 nt, Artificial Sequence
  Description of Artificial Sequence: Synthetic oligonucleotide
ucaauuccugaucacguuc

SEQ ID NO: 1363662 - RNA, 19 nt, Artificial Sequence
  Description of Artificial Sequence: Synthetic oligonucleotide
uucgaguaaaacgugcagc

SEQ ID NO: 1363663 - RNA, 19 nt, Artificial Sequence
  Description of Artificial Sequence: Synthetic oligonucleotide
cuuccucaauucaacacgc

SEQ ID NO: 1363664 - RNA, 19 nt, Artificial Sequence
  Description of Artificial Sequence: Synthetic oligonucleotide
uucauuaagcaccuugauu

SEQ ID NO: 1363665 - RNA, 19 nt, Artificial Sequence
  Description of Artificial Sequence: Synthetic oligonucleotide
caaaucaggucuuaaagaa

SEQ ID NO: 1363666 - RNA, 19 nt, Artificial Sequence
  Description of Artificial Sequence: Synthetic oligonucleotide
agcaacguccuucauuaag

SEQ ID NO: 1363667 - RNA, 19 nt, Artificial Sequence
  Description of Artificial Sequence: Synthetic oligonucleotide
aacacgcucacugauauuu

SEQ ID NO: 1363668 - RNA, 19 nt, Artificial Sequence
  Description of Artificial Sequence: Synthetic oligonucleotide
aaaccuagugaauuauguu

SEQ ID NO: 1363669 - RNA, 19 nt, Artificial Sequence
  Description of Artificial Sequence: Synthetic oligonucleotide
ucaacacgcucacugauau

SEQ ID NO: 1363670 - RNA, 19 nt, Artificial Sequence
  Description of Artificial Sequence: Synthetic oligonucleotide
aacucuucaguaauuauuu

SEQ ID NO: 1363671 - RNA, 19 nt, Artificial Sequence
  Description of Artificial Sequence: Synthetic oligonucleotide
aagguucuugccugauggg

SEQ ID NO: 1363672 - RNA, 19 nt, Artificial Sequence
  Description of Artificial Sequence: Synthetic oligonucleotide
cauuauaaauccagaucug

SEQ ID NO: 1363673 - RNA, 19 nt, Artificial Sequence
  Description of Artificial Sequence: Synthetic oligonucleotide
aaacgguuacuaauaagca

SEQ ID NO: 1363674 - RNA, 19 nt, Artificial Sequence
  Description of Artificial Sequence: Synthetic oligonucleotide
aguuucugacaugucaagg

SEQ ID NO: 1363675 - RNA, 19 nt, Artificial Sequence
  Description of Artificial Sequence: Synthetic oligonucleotide
auaagcauauuaaaggcau

SEQ ID NO: 1363676 - RNA, 19 nt, Artificial Sequence
  Description of Artificial Sequence: Synthetic oligonucleotide
ugucuguucauugcaaaca

SEQ ID NO: 1363677 - RNA, 19 nt, Artificial Sequence
  Description of Artificial Sequence: Synthetic oligonucleotide
cagaaauaaccugaguccc

SEQ ID NO: 1363678 - RNA, 19 nt, Artificial Sequence
  Description of Artificial Sequence: Synthetic oligonucleotide
uagucacaggccuuaagca

SEQ ID NO: 1363679 - RNA, 19 nt, Artificial Sequence
  Description of Artificial Sequence: Synthetic oligonucleotide
uguccuacucuugagcaag

SEQ ID NO: 1363680 - RNA, 19 nt, Artificial Sequence
  Description of Artificial Sequence: Synthetic oligonucleotide
uaagcauauuaaaggcaug

SEQ ID NO: 1363681 - RNA, 19 nt, Artificial Sequence
  Description of Artificial Sequence: Synthetic oligonucleotide
aaacgugcagcccgggaug

SEQ ID NO: 1363682 - RNA, 19 nt, Artificial Sequence
  Description of Artificial Sequence: Synthetic oligonucleotide
uggaucuaacacucgaccu

SEQ ID NO: 1363683 - RNA, 19 nt, Artificial Sequence
  Description of Artificial Sequence: Synthetic oligonucleotide
gaguugucgugucccaugg

SEQ ID NO: 1363684 - RNA, 19 nt, Artificial Sequence
  Description of Artificial Sequence: Synthetic oligonucleotide
ugaaaaucauacccagcuc

SEQ ID NO: 1363685 - RNA, 19 nt, Artificial Sequence
  Description of Artificial Sequence: Synthetic oligonucleotide
ugaaauacugucuguucau

SEQ ID NO: 1363686 - RNA, 19 nt, Artificial Sequence
  Description of Artificial Sequence: Synthetic oligonucleotide
uucuacuaagguucuugcc

SEQ ID NO: 1363687 - RNA, 19 nt, Artificial Sequence
  Description of Artificial Sequence: Synthetic oligonucleotide
uccuuguacucaucuaacc

SEQ ID NO: 1363688 - RNA, 19 nt, Artificial Sequence
  Description of Artificial Sequence: Synthetic oligonucleotide
guacuaauagacccaacuc

SEQ ID NO: 1363689 - RNA, 19 nt, Artificial Sequence
  Description of Artificial Sequence: Synthetic oligonucleotide
uugcuuuaaacuguggauc

SEQ ID NO: 1363690 - RNA, 19 nt, Artificial Sequence
  Description of Artificial Sequence: Synthetic oligonucleotide
uguggaucuaacacucgac

SEQ ID NO: 1363691 - RNA, 19 nt, Artificial Sequence
  Description of Artificial Sequence: Synthetic oligonucleotide
auaaccugagucccgguga

SEQ ID NO: 1363692 - RNA, 19 nt, Artificial Sequence
  Description of Artificial Sequence: Synthetic oligonucleotide
ucuccguagucacaggccu

SEQ ID NO: 1363693 - RNA, 19 nt, Artificial Sequence
  Description of Artificial Sequence: Synthetic oligonucleotide
ucaucuaaccagacaugug

SEQ ID NO: 1363694 - RNA, 19 nt, Artificial Sequence
  Description of Artificial Sequence: Synthetic oligonucleotide
ucugacaugucaaggcaaa

SEQ ID NO: 1363695 - RNA, 19 nt, Artificial Sequence
  Description of Artificial Sequence: Synthetic oligonucleotide
cucucaauuccugaucacg

SEQ ID NO: 1363696 - RNA, 19 nt, Artificial Sequence
  Description of Artificial Sequence: Synthetic oligonucleotide
cuagugaauuauguugucc

SEQ ID NO: 1363697 - RNA, 19 nt, Artificial Sequence
  Description of Artificial Sequence: Synthetic oligonucleotide
uaacacucgaccuggacuu

SEQ ID NO: 1363698 - RNA, 19 nt, Artificial Sequence
  Description of Artificial Sequence: Synthetic oligonucleotide
guugucgugucccauggug

SEQ ID NO: 1363699 - RNA, 19 nt, Artificial Sequence
  Description of Artificial Sequence: Synthetic oligonucleotide
uaagcaccuugauuuaugu

SEQ ID NO: 1363700 - RNA, 19 nt, Artificial Sequence
  Description of Artificial Sequence: Synthetic oligonucleotide
ucaggagauccauauggac

SEQ ID NO: 1363701 - RNA, 19 nt, Artificial Sequence
  Description of Artificial Sequence: Synthetic oligonucleotide
ucgaccuggacuucgagua

SEQ ID NO: 1363702 - RNA, 19 nt, Artificial Sequence
  Description of Artificial Sequence: Synthetic oligonucleotide
uaugucaggugugacaaaa

SEQ ID NO: 1363703 - RNA, 19 nt, Artificial Sequence
  Description of Artificial Sequence: Synthetic oligonucleotide
ucuaaccagacaugugcca

SEQ ID NO: 1363704 - RNA, 19 nt, Artificial Sequence
  Description of Artificial Sequence: Synthetic oligonucleotide
ugauuuaugucagguguga

SEQ ID NO: 1363705 - RNA, 19 nt, Artificial Sequence
  Description of Artificial Sequence: Synthetic oligonucleotide
caaaaccuagugaauuaug

SEQ ID NO: 1363706 - RNA, 19 nt, Artificial Sequence
  Description of Artificial Sequence: Synthetic oligonucleotide
accugagucccggugaagc

SEQ ID NO: 1363707 - RNA, 19 nt, Artificial Sequence
  Description of Artificial Sequence: Synthetic oligonucleotide
uuuguacuaauagacccaa

SEQ ID NO: 1363708 - RNA, 19 nt, Artificial Sequence
  Description of Artificial Sequence: Synthetic oligonucleotide
gauccgaaaugagauuucc

SEQ ID NO: 1363709 - RNA, 19 nt, Artificial Sequence
  Description of Artificial Sequence: Synthetic oligonucleotide
cucaauucaacacgcucac

SEQ ID NO: 1363710 - RNA, 19 nt, Artificial Sequence
  Description of Artificial Sequence: Synthetic oligonucleotide
ugaucacguucauugaaaa

SEQ ID NO: 1363711 - RNA, 19 nt, Artificial Sequence
  Description of Artificial Sequence: Synthetic oligonucleotide
ucccaaauguccacugcug

SEQ ID NO: 1363712 - RNA, 19 nt, Artificial Sequence
  Description of Artificial Sequence: Synthetic oligonucleotide
ucauugaaauacugucugu

SEQ ID NO: 1363713 - RNA, 19 nt, Artificial Sequence
  Description of Artificial Sequence: Synthetic oligonucleotide
ugguacagccgauuguucu

SEQ ID NO: 1363714 - RNA, 19 nt, Artificial Sequence
  Description of Artificial Sequence: Synthetic oligonucleotide
ugaguugucgugucccaug

SEQ ID NO: 1363715 - RNA, 19 nt, Artificial Sequence
  Description of Artificial Sequence: Synthetic oligonucleotide
ugacaaaaccuagugaauu

SEQ ID NO: 1363716 - RNA, 19 nt, Artificial Sequence
  Description of Artificial Sequence: Synthetic oligonucleotide
auacugucuguucauugca

SEQ ID NO: 1363717 - RNA, 19 nt, Artificial Sequence
  Description of Artificial Sequence: Synthetic oligonucleotide
ucuaacacucgaccuggac

SEQ ID NO: 1363718 - RNA, 19 nt, Artificial Sequence
  Description of Artificial Sequence: Synthetic oligonucleotide
gaccuuauaggugcaguag

SEQ ID NO: 1363719 - RNA, 19 nt, Artificial Sequence
  Description of Artificial Sequence: Synthetic oligonucleotide
uuaaccuucuaggugccac

SEQ ID NO: 1363720 - RNA, 19 nt, Artificial Sequence
  Description of Artificial Sequence: Synthetic oligonucleotide
agaaauaaccugagucccg

SEQ ID NO: 1363721 - RNA, 19 nt, Artificial Sequence
  Description of Artificial Sequence: Synthetic oligonucleotide
cuucgaguaaaacgugcag

SEQ ID NO: 1363722 - RNA, 19 nt, Artificial Sequence
  Description of Artificial Sequence: Synthetic oligonucleotide
aucccaaacgguuacuaau

SEQ ID NO: 1363723 - RNA, 19 nt, Artificial Sequence
  Description of Artificial Sequence: Synthetic oligonucleotide
cugaguugggucuccguag

SEQ ID NO: 1363724 - RNA, 19 nt, Artificial Sequence
  Description of Artificial Sequence: Synthetic oligonucleotide
cuuuuccggaaaauguguc

SEQ ID NO: 1363725 - RNA, 19 nt, Artificial Sequence
  Description of Artificial Sequence: Synthetic oligonucleotide
ucccaccuuaaccuucuag

SEQ ID NO: 1363726 - RNA, 19 nt, Artificial Sequence
  Description of Artificial Sequence: Synthetic oligonucleotide
acagccgauuguucuuccc

SEQ ID NO: 1363727 - RNA, 19 nt, Artificial Sequence
  Description of Artificial Sequence: Synthetic oligonucleotide
ucucuggauaaacaagauu

SEQ ID NO: 1363728 - RNA, 19 nt, Artificial Sequence
  Description of Artificial Sequence: Synthetic oligonucleotide
ucccaaacgguuacuaaua

SEQ ID NO: 1363729 - RNA, 19 nt, Artificial Sequence
  Description of Artificial Sequence: Synthetic oligonucleotide
gacuucgaguaaaacgugc

SEQ ID NO: 1363730 - RNA, 19 nt, Artificial Sequence
  Description of Artificial Sequence: Synthetic oligonucleotide
uugucgugucccauggugu

SEQ ID NO: 1363731 - RNA, 19 nt, Artificial Sequence
  Description of Artificial Sequence: Synthetic oligonucleotide
gacccauggcauuucauga

SEQ ID NO: 1363732 - RNA, 19 nt, Artificial Sequence
  Description of Artificial Sequence: Synthetic oligonucleotide
gacaaaaccuagugaauua

SEQ ID NO: 1363733 - RNA, 19 nt, Artificial Sequence
  Description of Artificial Sequence: Synthetic oligonucleotide
aagagcuucccaccacaca

SEQ ID NO: 1363734 - RNA, 19 nt, Artificial Sequence
  Description of Artificial Sequence: Synthetic oligonucleotide
aaaauguguccuacucuug

SEQ ID NO: 1363735 - RNA, 19 nt, Artificial Sequence
  Description of Artificial Sequence: Synthetic oligonucleotide
ucccggugaagcauguucu

SEQ ID NO: 1363736 - RNA, 19 nt, Artificial Sequence
  Description of Artificial Sequence: Synthetic oligonucleotide
ucgagaggccuuuaucugu

SEQ ID NO: 1363737 - RNA, 19 nt, Artificial Sequence
  Description of Artificial Sequence: Synthetic oligonucleotide
guucauugcaaacaagccu

SEQ ID NO: 1363738 - RNA, 19 nt, Artificial Sequence
  Description of Artificial Sequence: Synthetic oligonucleotide
ggaucuaacacucgaccug

SEQ ID NO: 1363739 - RNA, 19 nt, Artificial Sequence
  Description of Artificial Sequence: Synthetic oligonucleotide
ugucccauggugucuuggc

SEQ ID NO: 1363740 - RNA, 19 nt, Artificial Sequence
  Description of Artificial Sequence: Synthetic oligonucleotide
ugaguugggucuccguagu

SEQ ID NO: 1363741 - RNA, 19 nt, Artificial Sequence
  Description of Artificial Sequence: Synthetic oligonucleotide
uaaccagacaugugccagc

SEQ ID NO: 1363742 - RNA, 19 nt, Artificial Sequence
  Description of Artificial Sequence: Synthetic oligonucleotide
cuugagcaagggaugauga

SEQ ID NO: 1363743 - RNA, 19 nt, Artificial Sequence
  Description of Artificial Sequence: Synthetic oligonucleotide
ccaccacacauccagaucc

SEQ ID NO: 1363744 - RNA, 19 nt, Artificial Sequence
  Description of Artificial Sequence: Synthetic oligonucleotide
gauaaacaagauucucuua

SEQ ID NO: 1363745 - RNA, 19 nt, Artificial Sequence
  Description of Artificial Sequence: Synthetic oligonucleotide
uucucuggauaaacaagau

SEQ ID NO: 1363746 - RNA, 19 nt, Artificial Sequence
  Description of Artificial Sequence: Synthetic oligonucleotide
cacgcucacugauauuucc

SEQ ID NO: 1363747 - RNA, 19 nt, Artificial Sequence
  Description of Artificial Sequence: Synthetic oligonucleotide
gcauguucuacuaagguuc

SEQ ID NO: 1363748 - RNA, 19 nt, Artificial Sequence
  Description of Artificial Sequence: Synthetic oligonucleotide
ucggaggaggacuucgaga

SEQ ID NO: 1363749 - RNA, 19 nt, Artificial Sequence
  Description of Artificial Sequence: Synthetic oligonucleotide
caccuuaaccuucuaggug

SEQ ID NO: 1363750 - RNA, 19 nt, Artificial Sequence
  Description of Artificial Sequence: Synthetic oligonucleotide
cagguaucugcaucucagg

SEQ ID NO: 1363751 - RNA, 19 nt, Artificial Sequence
  Description of Artificial Sequence: Synthetic oligonucleotide
acgguuacuaauaagcaua

SEQ ID NO: 1363752 - RNA, 19 nt, Artificial Sequence
  Description of Artificial Sequence: Synthetic oligonucleotide
cacgcagaaggacucuggg

SEQ ID NO: 1363753 - RNA, 19 nt, Artificial Sequence
  Description of Artificial Sequence: Synthetic oligonucleotide
uaucccaaacgguuacuaa

SEQ ID NO: 1363754 - RNA, 19 nt, Artificial Sequence
  Description of Artificial Sequence: Synthetic oligonucleotide
cuggguuuguacuaauaga

SEQ ID NO: 1363755 - RNA, 19 nt, Artificial Sequence
  Description of Artificial Sequence: Synthetic oligonucleotide
uucaacacgcucacugaua

SEQ ID NO: 1363756 - RNA, 19 nt, Artificial Sequence
  Description of Artificial Sequence: Synthetic oligonucleotide
acuaauagacccaacucuu

SEQ ID NO: 1363757 - RNA, 19 nt, Artificial Sequence
  Description of Artificial Sequence: Synthetic oligonucleotide
guaggugaccuuauaggug

SEQ ID NO: 1363758 - RNA, 19 nt, Artificial Sequence
  Description of Artificial Sequence: Synthetic oligonucleotide
aaaucauacccagcucgga

SEQ ID NO: 1363759 - RNA, 19 nt, Artificial Sequence
  Description of Artificial Sequence: Synthetic oligonucleotide
ugaccuuauaggugcagua

SEQ ID NO: 1363760 - RNA, 19 nt, Artificial Sequence
  Description of Artificial Sequence: Synthetic oligonucleotide
agugguaucccaaacgguu

SEQ ID NO: 1363761 - RNA, 19 nt, Artificial Sequence
  Description of Artificial Sequence: Synthetic oligonucleotide
cuccuuguacucaucuaac

SEQ ID NO: 1363762 - RNA, 19 nt, Artificial Sequence
  Description of Artificial Sequence: Synthetic oligonucleotide
agcagcucagaaauaaccu

SEQ ID NO: 1363763 - RNA, 19 nt, Artificial Sequence
  Description of Artificial Sequence: Synthetic oligonucleotide
ggcacuaaaucccacuuga

SEQ ID NO: 1363764 - RNA, 19 nt, Artificial Sequence
  Description of Artificial Sequence: Synthetic oligonucleotide
aaaucccacuugaagugca

SEQ ID NO: 1363765 - RNA, 19 nt, Artificial Sequence
  Description of Artificial Sequence: Synthetic oligonucleotide
aucaaaugguccauucugu

SEQ ID NO: 1363766 - RNA, 19 nt, Artificial Sequence
  Description of Artificial Sequence: Synthetic oligonucleotide
caauuccugaucacguuca

SEQ ID NO: 1363767 - RNA, 19 nt, Artificial Sequence
  Description of Artificial Sequence: Synthetic oligonucleotide
guuuguacuaauagaccca

SEQ ID NO: 1363768 - RNA, 19 nt, Artificial Sequence
  Description of Artificial Sequence: Synthetic oligonucleotide
gugaauuauguuguccuca

SEQ ID NO: 1363769 - RNA, 19 nt, Artificial Sequence
  Description of Artificial Sequence: Synthetic oligonucleotide
aggcacuaaaucccacuug

SEQ ID NO: 1363770 - RNA, 19 nt, Artificial Sequence
  Description of Artificial Sequence: Synthetic oligonucleotide
uccuacucuugagcaaggg

SEQ ID NO: 1363771 - RNA, 19 nt, Artificial Sequence
  Description of Artificial Sequence: Synthetic oligonucleotide
uauggacgccuuuuccgga

SEQ ID NO: 1363772 - RNA, 19 nt, Artificial Sequence
  Description of Artificial Sequence: Synthetic oligonucleotide
accccggacacacagcccu

SEQ ID NO: 1363773 - RNA, 19 nt, Artificial Sequence
  Description of Artificial Sequence: Synthetic oligonucleotide
gugguauagccguccacgc

SEQ ID NO: 1363774 - RNA, 19 nt, Artificial Sequence
  Description of Artificial Sequence: Synthetic oligonucleotide
aaccuucuaggugccacug

SEQ ID NO: 1363775 - RNA, 19 nt, Artificial Sequence
  Description of Artificial Sequence: Synthetic oligonucleotide
uaaccugagucccggugaa

SEQ ID NO: 1363776 - RNA, 19 nt, Artificial Sequence
  Description of Artificial Sequence: Synthetic oligonucleotide
gcaacguccuucauuaagc

SEQ ID NO: 1363777 - RNA, 19 nt, Artificial Sequence
  Description of Artificial Sequence: Synthetic oligonucleotide
ccagguaucugcaucucag

SEQ ID NO: 1363778 - RNA, 19 nt, Artificial Sequence
  Description of Artificial Sequence: Synthetic oligonucleotide
agauccgaaaugagauuuc

SEQ ID NO: 1363779 - RNA, 19 nt, Artificial Sequence
  Description of Artificial Sequence: Synthetic oligonucleotide
gaucgaguuucugacaugu

SEQ ID NO: 1363780 - RNA, 19 nt, Artificial Sequence
  Description of Artificial Sequence: Synthetic oligonucleotide
ugucgugucccaugguguc

SEQ ID NO: 1363781 - RNA, 19 nt, Artificial Sequence
  Description of Artificial Sequence: Synthetic oligonucleotide
ucucucaauuccugaucac

SEQ ID NO: 1363782 - RNA, 19 nt, Artificial Sequence
  Description of Artificial Sequence: Synthetic oligonucleotide
aagugguaucccaaacggu

SEQ ID NO: 1363783 - RNA, 19 nt, Artificial Sequence
  Description of Artificial Sequence: Synthetic oligonucleotide
agaucgaguuucugacaug

SEQ ID NO: 1363784 - RNA, 19 nt, Artificial Sequence
  Description of Artificial Sequence: Synthetic oligonucleotide
gacuacggaccccggacac

SEQ ID NO: 1363785 - RNA, 19 nt, Artificial Sequence
  Description of Artificial Sequence: Synthetic oligonucleotide
cugaucacguucauugaaa

SEQ ID NO: 1363786 - RNA, 19 nt, Artificial Sequence
  Description of Artificial Sequence: Synthetic oligonucleotide
caccacacauccagauccg

SEQ ID NO: 1363787 - RNA, 19 nt, Artificial Sequence
  Description of Artificial Sequence: Synthetic oligonucleotide
uuccucaauucaacacgcu

SEQ ID NO: 1363788 - RNA, 19 nt, Artificial Sequence
  Description of Artificial Sequence: Synthetic oligonucleotide
cuaacacucgaccuggacu

SEQ ID NO: 1363789 - RNA, 19 nt, Artificial Sequence
  Description of Artificial Sequence: Synthetic oligonucleotide
cucaagcacuguccaacag

SEQ ID NO: 1363790 - RNA, 19 nt, Artificial Sequence
  Description of Artificial Sequence: Synthetic oligonucleotide
auccagauccgaaaugaga

SEQ ID NO: 1363791 - RNA, 19 nt, Artificial Sequence
  Description of Artificial Sequence: Synthetic oligonucleotide
ggcauuucaugagucgggg

SEQ ID NO: 1363792 - RNA, 19 nt, Artificial Sequence
  Description of Artificial Sequence: Synthetic oligonucleotide
augucaggugugacaaaac

SEQ ID NO: 1363793 - RNA, 19 nt, Artificial Sequence
  Description of Artificial Sequence: Synthetic oligonucleotide
aacacucgaccuggacuuc

SEQ ID NO: 1363794 - RNA, 19 nt, Artificial Sequence
  Description of Artificial Sequence: Synthetic oligonucleotide
gucccggugaagcauguuc

SEQ ID NO: 1363795 - RNA, 19 nt, Artificial Sequence
  Description of Artificial Sequence: Synthetic oligonucleotide
agccgcacgagccgcggcg

SEQ ID NO: 1363796 - RNA, 19 nt, Artificial Sequence
  Description of Artificial Sequence: Synthetic oligonucleotide
augucaaggcaaaggaggu

SEQ ID NO: 1363797 - RNA, 19 nt, Artificial Sequence
  Description of Artificial Sequence: Synthetic oligonucleotide
gcccuucugauccaucagg

SEQ ID NO: 1363798 - RNA, 19 nt, Artificial Sequence
  Description of Artificial Sequence: Synthetic oligonucleotide
gcauguuucugguagccca

SEQ ID NO: 1363799 - RNA, 19 nt, Artificial Sequence
  Description of Artificial Sequence: Synthetic oligonucleotide
gauauccaugccacuguca

SEQ ID NO: 1363800 - RNA, 19 nt, Artificial Sequence
  Description of Artificial Sequence: Synthetic oligonucleotide
ccucaauucaacacgcuca

SEQ ID NO: 1363801 - RNA, 19 nt, Artificial Sequence
  Description of Artificial Sequence: Synthetic oligonucleotide
ggucuccguagucacaggc

SEQ ID NO: 1363802 - RNA, 19 nt, Artificial Sequence
  Description of Artificial Sequence: Synthetic oligonucleotide
cuguggaucuaacacucga

SEQ ID NO: 1363803 - RNA, 19 nt, Artificial Sequence
  Description of Artificial Sequence: Synthetic oligonucleotide
ggguuuguacuaauagacc

SEQ ID NO: 1363804 - RNA, 19 nt, Artificial Sequence
  Description of Artificial Sequence: Synthetic oligonucleotide
acgccuuuuccggaaaaug

SEQ ID NO: 1363805 - RNA, 19 nt, Artificial Sequence
  Description of Artificial Sequence: Synthetic oligonucleotide
cucuggggcgcuugggccc

SEQ ID NO: 1363806 - RNA, 19 nt, Artificial Sequence
  Description of Artificial Sequence: Synthetic oligonucleotide
cucggaggaggacuucgag

SEQ ID NO: 1363807 - RNA, 19 nt, Artificial Sequence
  Description of Artificial Sequence: Synthetic oligonucleotide
cuucaaugugauuauuuau

SEQ ID NO: 1363808 - RNA, 19 nt, Artificial Sequence
  Description of Artificial Sequence: Synthetic oligonucleotide
acucaucuaaccagacaug

SEQ ID NO: 1363809 - RNA, 19 nt, Artificial Sequence
  Description of Artificial Sequence: Synthetic oligonucleotide
gucaaggcaaaggagguua

SEQ ID NO: 1363810 - RNA, 19 nt, Artificial Sequence
  Description of Artificial Sequence: Synthetic oligonucleotide
gcaucuucgcuucccgccg

SEQ ID NO: 1363811 - RNA, 19 nt, Artificial Sequence
  Description of Artificial Sequence: Synthetic oligonucleotide
acacucgaccuggacuucg

SEQ ID NO: 1363812 - RNA, 19 nt, Artificial Sequence
  Description of Artificial Sequence: Synthetic oligonucleotide
auuuaucaaaugguccauu

SEQ ID NO: 1363813 - RNA, 19 nt, Artificial Sequence
  Description of Artificial Sequence: Synthetic oligonucleotide
gagguuauuuaaaaucaau

SEQ ID NO: 1363814 - RNA, 19 nt, Artificial Sequence
  Description of Artificial Sequence: Synthetic oligonucleotide
caacguccuucauuaagca

SEQ ID NO: 1363815 - RNA, 19 nt, Artificial Sequence
  Description of Artificial Sequence: Synthetic oligonucleotide
agccgauuguucuucccaa

SEQ ID NO: 1363816 - RNA, 19 nt, Artificial Sequence
  Description of Artificial Sequence: Synthetic oligonucleotide
cuacggaccccggacacac

SEQ ID NO: 1363817 - RNA, 19 nt, Artificial Sequence
  Description of Artificial Sequence: Synthetic oligonucleotide
ggauaaacaagauucucuu

SEQ ID NO: 1363818 - RNA, 19 nt, Artificial Sequence
  Description of Artificial Sequence: Synthetic oligonucleotide
gucuccguagucacaggcc

SEQ ID NO: 1363819 - RNA, 19 nt, Artificial Sequence
  Description of Artificial Sequence: Synthetic oligonucleotide
acucgaccuggacuucgag

SEQ ID NO: 1363820 - RNA, 19 nt, Artificial Sequence
  Description of Artificial Sequence: Synthetic oligonucleotide
caguugaagugguauccca

SEQ ID NO: 1363821 - RNA, 19 nt, Artificial Sequence
  Description of Artificial Sequence: Synthetic oligonucleotide
ucaauucaacacgcucacu

SEQ ID NO: 1363822 - RNA, 19 nt, Artificial Sequence
  Description of Artificial Sequence: Synthetic oligonucleotide
ggggugggucugaagaucg

SEQ ID NO: 1363823 - RNA, 19 nt, Artificial Sequence
  Description of Artificial Sequence: Synthetic oligonucleotide
uacccagcucggaggagga

SEQ ID NO: 1363824 - RNA, 19 nt, Artificial Sequence
  Description of Artificial Sequence: Synthetic oligonucleotide
uauagccguccacgcagaa

SEQ ID NO: 1363825 - RNA, 19 nt, Artificial Sequence
  Description of Artificial Sequence: Synthetic oligonucleotide
caggcauuuguuggucugc

SEQ ID NO: 1363826 - RNA, 19 nt, Artificial Sequence
  Description of Artificial Sequence: Synthetic oligonucleotide
agacaugugccagccucag

SEQ ID NO: 1363827 - RNA, 19 nt, Artificial Sequence
  Description of Artificial Sequence: Synthetic oligonucleotide
cugacaugucaaggcaaag

SEQ ID NO: 1363828 - RNA, 19 nt, Artificial Sequence
  Description of Artificial Sequence: Synthetic oligonucleotide
uaucugcaucucaggguaa

SEQ ID NO: 1363829 - RNA, 19 nt, Artificial Sequence
  Description of Artificial Sequence: Synthetic oligonucleotide
ccaacagauacuugguaca

SEQ ID NO: 1363830 - RNA, 19 nt, Artificial Sequence
  Description of Artificial Sequence: Synthetic oligonucleotide
gaucacguucauugaaaau

SEQ ID NO: 1363831 - RNA, 19 nt, Artificial Sequence
  Description of Artificial Sequence: Synthetic oligonucleotide
cccaguugaagugguaucc

SEQ ID NO: 1363832 - RNA, 19 nt, Artificial Sequence
  Description of Artificial Sequence: Synthetic oligonucleotide
gccuuuaucuguaucuuca

SEQ ID NO: 1363833 - RNA, 19 nt, Artificial Sequence
  Description of Artificial Sequence: Synthetic oligonucleotide
cucaucuaaccagacaugu

SEQ ID NO: 1363834 - RNA, 19 nt, Artificial Sequence
  Description of Artificial Sequence: Synthetic oligonucleotide
cagaaggacucuggggcgc

SEQ ID NO: 1363835 - RNA, 19 nt, Artificial Sequence
  Description of Artificial Sequence: Synthetic oligonucleotide
ugauggggucagcaacguc

SEQ ID NO: 1363836 - RNA, 19 nt, Artificial Sequence
  Description of Artificial Sequence: Synthetic oligonucleotide
ucggggugggucugaagau

SEQ ID NO: 1363837 - RNA, 19 nt, Artificial Sequence
  Description of Artificial Sequence: Synthetic oligonucleotide
acacgcucacugauauuuc

SEQ ID NO: 1363838 - RNA, 19 nt, Artificial Sequence
  Description of Artificial Sequence: Synthetic oligonucleotide
auggacgccuuuuccggaa

SEQ ID NO: 1363839 - RNA, 19 nt, Artificial Sequence
  Description of Artificial Sequence: Synthetic oligonucleotide
guccaaauaccacuugaau

SEQ ID NO: 1363840 - RNA, 19 nt, Artificial Sequence
  Description of Artificial Sequence: Synthetic oligonucleotide
gaaugauugacagcccaau

SEQ ID NO: 1363841 - RNA, 19 nt, Artificial Sequence
  Description of Artificial Sequence: Synthetic oligonucleotide
gcaaacaagccuccagcca

SEQ ID NO: 1363842 - RNA, 19 nt, Artificial Sequence
  Description of Artificial Sequence: Synthetic oligonucleotide
acucucaagcacuguccaa

SEQ ID NO: 1363843 - RNA, 19 nt, Artificial Sequence
  Description of Artificial Sequence: Synthetic oligonucleotide
gguaucugcaucucagggu

SEQ ID NO: 1363844 - RNA, 19 nt, Artificial Sequence
  Description of Artificial Sequence: Synthetic oligonucleotide
accuucuaggugccacugu

SEQ ID NO: 1363845 - RNA, 19 nt, Artificial Sequence
  Description of Artificial Sequence: Synthetic oligonucleotide
auccgaaaugagauuucca

SEQ ID NO: 1363846 - RNA, 19 nt, Artificial Sequence
  Description of Artificial Sequence: Synthetic oligonucleotide
aucgaguuucugacauguc

SEQ ID NO: 1363847 - RNA, 19 nt, Artificial Sequence
  Description of Artificial Sequence: Synthetic oligonucleotide
ggugaagcauguucuacua

SEQ ID NO: 1363848 - RNA, 19 nt, Artificial Sequence
  Description of Artificial Sequence: Synthetic oligonucleotide
cagccgauuguucuuccca

SEQ ID NO: 1363849 - RNA, 19 nt, Artificial Sequence
  Description of Artificial Sequence: Synthetic oligonucleotide
caucuucgcuucccgccgc

SEQ ID NO: 1363850 - RNA, 19 nt, Artificial Sequence
  Description of Artificial Sequence: Synthetic oligonucleotide
gugaagcauguucuacuaa

SEQ ID NO: 1363851 - RNA, 19 nt, Artificial Sequence
  Description of Artificial Sequence: Synthetic oligonucleotide
cugagauccuccugaccca

SEQ ID NO: 1363852 - RNA, 19 nt, Artificial Sequence
  Description of Artificial Sequence: Synthetic oligonucleotide
guccaccacucucaagcac

SEQ ID NO: 1363853 - RNA, 19 nt, Artificial Sequence
  Description of Artificial Sequence: Synthetic oligonucleotide
ugucaaggcaaaggagguu

SEQ ID NO: 1363854 - RNA, 19 nt, Artificial Sequence
  Description of Artificial Sequence: Synthetic oligonucleotide
aggcauuuguuggucugca

SEQ ID NO: 1363855 - RNA, 19 nt, Artificial Sequence
  Description of Artificial Sequence: Synthetic oligonucleotide
ggcauuuguuggucugcag

SEQ ID NO: 1363856 - RNA, 19 nt, Artificial Sequence
  Description of Artificial Sequence: Synthetic oligonucleotide
cuuaagcagcaccaagccu

SEQ ID NO: 1363857 - RNA, 19 nt, Artificial Sequence
  Description of Artificial Sequence: Synthetic oligonucleotide
guccuacucuugagcaagg

SEQ ID NO: 1363858 - RNA, 19 nt, Artificial Sequence
  Description of Artificial Sequence: Synthetic oligonucleotide
uggacgccuuuuccggaaa

SEQ ID NO: 1363859 - RNA, 19 nt, Artificial Sequence
  Description of Artificial Sequence: Synthetic oligonucleotide
gcgacuacggaccccggac

SEQ ID NO: 1363860 - RNA, 19 nt, Artificial Sequence
  Description of Artificial Sequence: Synthetic oligonucleotide
ccgaaaugagauuuccaga

SEQ ID NO: 1363861 - RNA, 19 nt, Artificial Sequence
  Description of Artificial Sequence: Synthetic oligonucleotide
acuaagguucuugccugau

SEQ ID NO: 1363862 - RNA, 19 nt, Artificial Sequence
  Description of Artificial Sequence: Synthetic oligonucleotide
cagccucagugaguugucg

SEQ ID NO: 1363863 - RNA, 19 nt, Artificial Sequence
  Description of Artificial Sequence: Synthetic oligonucleotide
guaucccaaacgguuacua

SEQ ID NO: 1363864 - RNA, 19 nt, Artificial Sequence
  Description of Artificial Sequence: Synthetic oligonucleotide
cggaaaauguguccuacuc

SEQ ID NO: 1363865 - RNA, 19 nt, Artificial Sequence
  Description of Artificial Sequence: Synthetic oligonucleotide
ccuuaaccuucuaggugcc

SEQ ID NO: 1363866 - RNA, 19 nt, Artificial Sequence
  Description of Artificial Sequence: Synthetic oligonucleotide
ggccuuuaucuguaucuuc

SEQ ID NO: 1363867 - RNA, 19 nt, Artificial Sequence
  Description of Artificial Sequence: Synthetic oligonucleotide
ccuagugaauuauguuguc

SEQ ID NO: 1363868 - RNA, 19 nt, Artificial Sequence
  Description of Artificial Sequence: Synthetic oligonucleotide
caaaugguccauucuguuu

SEQ ID NO: 1363869 - RNA, 19 nt, Artificial Sequence
  Description of Artificial Sequence: Synthetic oligonucleotide
cuugguacagccgauuguu

SEQ ID NO: 1363870 - RNA, 19 nt, Artificial Sequence
  Description of Artificial Sequence: Synthetic oligonucleotide
auacuugguacagccgauu

SEQ ID NO: 1363871 - RNA, 19 nt, Artificial Sequence
  Description of Artificial Sequence: Synthetic oligonucleotide
aggacuucgagaggccuuu

SEQ ID NO: 1363872 - RNA, 19 nt, Artificial Sequence
  Description of Artificial Sequence: Synthetic oligonucleotide
ggacuucgaguaaaacgug

SEQ ID NO: 1363873 - RNA, 19 nt, Artificial Sequence
  Description of Artificial Sequence: Synthetic oligonucleotide
ccacgcagaaggacucugg

SEQ ID NO: 1363874 - RNA, 19 nt, Artificial Sequence
  Description of Artificial Sequence: Synthetic oligonucleotide
guguccuacucuugagcaa

SEQ ID NO: 1363875 - RNA, 19 nt, Artificial Sequence
  Description of Artificial Sequence: Synthetic oligonucleotide
ggaggagccaucacaaaua

SEQ ID NO: 1363876 - RNA, 19 nt, Artificial Sequence
  Description of Artificial Sequence: Synthetic oligonucleotide
ggguaaauauuguccaaau

SEQ ID NO: 1363877 - RNA, 19 nt, Artificial Sequence
  Description of Artificial Sequence: Synthetic oligonucleotide
cauuugggccagguaucug

SEQ ID NO: 1363878 - RNA, 19 nt, Artificial Sequence
  Description of Artificial Sequence: Synthetic oligonucleotide
ggugaccuuauaggugcag

SEQ ID NO: 1363879 - RNA, 19 nt, Artificial Sequence
  Description of Artificial Sequence: Synthetic oligonucleotide
gauacuugguacagccgau

SEQ ID NO: 1363880 - RNA, 19 nt, Artificial Sequence
  Description of Artificial Sequence: Synthetic oligonucleotide
cuaccaggcauuuguuggu

SEQ ID NO: 1363881 - RNA, 19 nt, Artificial Sequence
  Description of Artificial Sequence: Synthetic oligonucleotide
ccagauuuucuccucccca

SEQ ID NO: 1363882 - RNA, 19 nt, Artificial Sequence
  Description of Artificial Sequence: Synthetic oligonucleotide
cagauccgaaaugagauuu

SEQ ID NO: 1363883 - RNA, 19 nt, Artificial Sequence
  Description of Artificial Sequence: Synthetic oligonucleotide
cauuguaggugaccuuaua

SEQ ID NO: 1363884 - RNA, 19 nt, Artificial Sequence
  Description of Artificial Sequence: Synthetic oligonucleotide
acuacggaccccggacaca

SEQ ID NO: 1363885 - RNA, 19 nt, Artificial Sequence
  Description of Artificial Sequence: Synthetic oligonucleotide
cgaaaugagauuuccagau

SEQ ID NO: 1363886 - RNA, 19 nt, Artificial Sequence
  Description of Artificial Sequence: Synthetic oligonucleotide
gcaggugguauagccgucc

SEQ ID NO: 1363887 - RNA, 19 nt, Artificial Sequence
  Description of Artificial Sequence: Synthetic oligonucleotide
ggcauuugggccagguauc

SEQ ID NO: 1363888 - RNA, 19 nt, Artificial Sequence
  Description of Artificial Sequence: Synthetic oligonucleotide
agccauuguaggugaccuu

SEQ ID NO: 1363889 - RNA, 19 nt, Artificial Sequence
  Description of Artificial Sequence: Synthetic oligonucleotide
cucgaccuggacuucgagu

SEQ ID NO: 1363890 - RNA, 19 nt, Artificial Sequence
  Description of Artificial Sequence: Synthetic oligonucleotide
gccauuguaggugaccuua

SEQ ID NO: 1363891 - RNA, 19 nt, Artificial Sequence
  Description of Artificial Sequence: Synthetic oligonucleotide
agccgcggcgcgcgacuac

SEQ ID NO: 1363892 - RNA, 19 nt, Artificial Sequence
  Description of Artificial Sequence: Synthetic oligonucleotide
ccaggucccaccuuaaccu

SEQ ID NO: 1363893 - RNA, 19 nt, Artificial Sequence
  Description of Artificial Sequence: Synthetic oligonucleotide
guccaaggucauugaaaua

SEQ ID NO: 1363894 - RNA, 19 nt, Artificial Sequence
  Description of Artificial Sequence: Synthetic oligonucleotide
gugaccuuauaggugcagu

SEQ ID NO: 1363895 - RNA, 19 nt, Artificial Sequence
  Description of Artificial Sequence: Synthetic oligonucleotide
guauagccguccacgcaga

SEQ ID NO: 1363896 - RNA, 19 nt, Artificial Sequence
  Description of Artificial Sequence: Synthetic oligonucleotide
ugggcccucuguugaugaa

SEQ ID NO: 1363897 - RNA, 19 nt, Artificial Sequence
  Description of Artificial Sequence: Synthetic oligonucleotide
uggagcggcccugggcuac

SEQ ID NO: 1363898 - RNA, 19 nt, Artificial Sequence
  Description of Artificial Sequence: Synthetic oligonucleotide
gcuggagcggcccugggcu

SEQ ID NO: 1363899 - RNA, 19 nt, Artificial Sequence
  Description of Artificial Sequence: Synthetic oligonucleotide
cucaauuccugaucacguu

SEQ ID NO: 1363900 - RNA, 19 nt, Artificial Sequence
  Description of Artificial Sequence: Synthetic oligonucleotide
caggugguauagccgucca

SEQ ID NO: 1363901 - RNA, 19 nt, Artificial Sequence
  Description of Artificial Sequence: Synthetic oligonucleotide
cuuaaccuucuaggugcca

SEQ ID NO: 1363902 - RNA, 19 nt, Artificial Sequence
  Description of Artificial Sequence: Synthetic oligonucleotide
gguucuugccugauggggu

SEQ ID NO: 1363903 - RNA, 19 nt, Artificial Sequence
  Description of Artificial Sequence: Synthetic oligonucleotide
cgaguaaaacgugcagccc

SEQ ID NO: 1363904 - RNA, 19 nt, Artificial Sequence
  Description of Artificial Sequence: Synthetic oligonucleotide
aucuaacacucgaccugga

SEQ ID NO: 1363905 - RNA, 19 nt, Artificial Sequence
  Description of Artificial Sequence: Synthetic oligonucleotide
ccuggacuucgaguaaaac

SEQ ID NO: 1363906 - RNA, 19 nt, Artificial Sequence
  Description of Artificial Sequence: Synthetic oligonucleotide
caaauaccacuugaaugau

SEQ ID NO: 1363907 - RNA, 19 nt, Artificial Sequence
  Description of Artificial Sequence: Synthetic oligonucleotide
acgagccgcggcgcgcgac

SEQ ID NO: 1363908 - RNA, 19 nt, Artificial Sequence
  Description of Artificial Sequence: Synthetic oligonucleotide
cccaccacacauccagauc

SEQ ID NO: 1363909 - RNA, 19 nt, Artificial Sequence
  Description of Artificial Sequence: Synthetic oligonucleotide
gguacagccgauuguucuu

SEQ ID NO: 1363910 - RNA, 19 nt, Artificial Sequence
  Description of Artificial Sequence: Synthetic oligonucleotide
ggauggcggcgcuccgggg

SEQ ID NO: 1363911 - RNA, 19 nt, Artificial Sequence
  Description of Artificial Sequence: Synthetic oligonucleotide
ccaccuuaaccuucuaggu

SEQ ID NO: 1363912 - RNA, 19 nt, Artificial Sequence
  Description of Artificial Sequence: Synthetic oligonucleotide
gcgcuugggcccucuguug

SEQ ID NO: 1363913 - RNA, 19 nt, Artificial Sequence
  Description of Artificial Sequence: Synthetic oligonucleotide
cccaaacgguuacuaauaa

SEQ ID NO: 1363914 - RNA, 19 nt, Artificial Sequence
  Description of Artificial Sequence: Synthetic oligonucleotide
ccugagucccggugaagca

SEQ ID NO: 1363915 - RNA, 19 nt, Artificial Sequence
  Description of Artificial Sequence: Synthetic oligonucleotide
ccggacacacagcccugcg

SEQ ID NO: 1363916 - RNA, 19 nt, Artificial Sequence
  Description of Artificial Sequence: Synthetic oligonucleotide
gcucagaaauaaccugagu

SEQ ID NO: 1363917 - RNA, 19 nt, Artificial Sequence
  Description of Artificial Sequence: Synthetic oligonucleotide
ugcugggguuuggcauuug

SEQ ID NO: 1363918 - RNA, 19 nt, Artificial Sequence
  Description of Artificial Sequence: Synthetic oligonucleotide
cacguucauugaaaaucau

SEQ ID NO: 1363919 - RNA, 19 nt, Artificial Sequence
  Description of Artificial Sequence: Synthetic oligonucleotide
cgcgcgacuacggaccccg

SEQ ID NO: 1363920 - RNA, 19 nt, Artificial Sequence
  Description of Artificial Sequence: Synthetic oligonucleotide
ggcgcgcgacuacggaccc

SEQ ID NO: 1363921 - RNA, 19 nt, Artificial Sequence
  Description of Artificial Sequence: Synthetic oligonucleotide
gagaggccuuuaucuguau

SEQ ID NO: 1363922 - RNA, 19 nt, Artificial Sequence
  Description of Artificial Sequence: Synthetic oligonucleotide
cggcgcgcgacuacggacc

SEQ ID NO: 1363923 - RNA, 19 nt, Artificial Sequence
  Description of Artificial Sequence: Synthetic oligonucleotide
gcggcgcgcgacuacggac

SEQ ID NO: 1363924 - RNA, 19 nt, Artificial Sequence
  Description of Artificial Sequence: Synthetic oligonucleotide
gcauuucaugagucggggu

SEQ ID NO: 1363925 - RNA, 19 nt, Artificial Sequence
  Description of Artificial Sequence: Synthetic oligonucleotide
gcacgagccgcggcgcgcg

SEQ ID NO: 1363926 - RNA, 19 nt, Artificial Sequence
  Description of Artificial Sequence: Synthetic oligonucleotide
gccgcggcgcgcgacuacg

SEQ ID NO: 1363927 - RNA, 19 nt, Artificial Sequence
  Description of Artificial Sequence: Synthetic oligonucleotide
gccuccagccauuguaggu

SEQ ID NO: 1363928 - RNA, 19 nt, Artificial Sequence
  Description of Artificial Sequence: Synthetic oligonucleotide
cugacccauggcauuucau

SEQ ID NO: 1363929 - RNA, 19 nt, Artificial Sequence
  Description of Artificial Sequence: Synthetic oligonucleotide
gcacuaaaucccacuugaa

SEQ ID NO: 1363930 - RNA, 19 nt, Artificial Sequence
  Description of Artificial Sequence: Synthetic oligonucleotide
cugagucccggugaagcau

SEQ ID NO: 1363931 - RNA, 19 nt, Artificial Sequence
  Description of Artificial Sequence: Synthetic oligonucleotide
cgccuuuuccggaaaaugu

SEQ ID NO: 1363932 - RNA, 19 nt, Artificial Sequence
  Description of Artificial Sequence: Synthetic oligonucleotide
agcccgggauggcggcgcu

SEQ ID NO: 1363933 - RNA, 19 nt, Artificial Sequence
  Description of Artificial Sequence: Synthetic oligonucleotide
gucgugucccauggugucu

SEQ ID NO: 1363934 - RNA, 19 nt, Artificial Sequence
  Description of Artificial Sequence: Synthetic oligonucleotide
cagcaacguccuucauuaa

SEQ ID NO: 1363935 - RNA, 19 nt, Artificial Sequence
  Description of Artificial Sequence: Synthetic oligonucleotide
cugauggggucagcaacgu

SEQ ID NO: 1363936 - RNA, 19 nt, Artificial Sequence
  Description of Artificial Sequence: Synthetic oligonucleotide
ccugacccauggcauuuca

SEQ ID NO: 1363937 - RNA, 19 nt, Artificial Sequence
  Description of Artificial Sequence: Synthetic oligonucleotide
gcccgggccgagccgcacg

SEQ ID NO: 1363938 - RNA, 19 nt, Artificial Sequence
  Description of Artificial Sequence: Synthetic oligonucleotide
cccauggcauuucaugagu

SEQ ID NO: 1363939 - RNA, 19 nt, Artificial Sequence
  Description of Artificial Sequence: Synthetic oligonucleotide
gguaucccaaacgguuacu

SEQ ID NO: 1363940 - RNA, 19 nt, Artificial Sequence
  Description of Artificial Sequence: Synthetic oligonucleotide
ccguccacgcagaaggacu

SEQ ID NO: 1363941 - RNA, 19 nt, Artificial Sequence
  Description of Artificial Sequence: Synthetic oligonucleotide
agucccggugaagcauguu

SEQ ID NO: 1363942 - RNA, 19 nt, Artificial Sequence
  Description of Artificial Sequence: Synthetic oligonucleotide
ccgagccgcacgagccgcg

SEQ ID NO: 1363943 - RNA, 19 nt, Artificial Sequence
  Description of Artificial Sequence: Synthetic oligonucleotide
ggcgcuugggcccucuguu

SEQ ID NO: 1363944 - RNA, 19 nt, Artificial Sequence
  Description of Artificial Sequence: Synthetic oligonucleotide
gagucccggugaagcaugu

SEQ ID NO: 1363945 - RNA, 19 nt, Artificial Sequence
  Description of Artificial Sequence: Synthetic oligonucleotide
gcagcccgggauggcggcg

SEQ ID NO: 1363946 - RNA, 19 nt, Artificial Sequence
  Description of Artificial Sequence: Synthetic oligonucleotide
cggugaagcauguucuacu

SEQ ID NO: 1363947 - RNA, 19 nt, Artificial Sequence
  Description of Artificial Sequence: Synthetic oligonucleotide
ccgauuguucuucccaaau

SEQ ID NO: 1363948 - RNA, 19 nt, Artificial Sequence
  Description of Artificial Sequence: Synthetic oligonucleotide
caggucccaccuuaaccuu

SEQ ID NO: 1363949 - RNA, 19 nt, Artificial Sequence
  Description of Artificial Sequence: Synthetic oligonucleotide
uggggcgcuugggcccucu

SEQ ID NO: 1363950 - RNA, 19 nt, Artificial Sequence
  Description of Artificial Sequence: Synthetic oligonucleotide
cagcucggaggaggacuuc

SEQ ID NO: 1363951 - RNA, 19 nt, Artificial Sequence
  Description of Artificial Sequence: Synthetic oligonucleotide
cgggccgagccgcacgagc

SEQ ID NO: 1363952 - RNA, 19 nt, Artificial Sequence
  Description of Artificial Sequence: Synthetic oligonucleotide
cgguuacuaauaagcauau

SEQ ID NO: 1363953 - RNA, 19 nt, Artificial Sequence
  Description of Artificial Sequence: Synthetic oligonucleotide
cgacuacggaccccggaca

SEQ ID NO: 1363954 - RNA, 19 nt, Artificial Sequence
  Description of Artificial Sequence: Synthetic oligonucleotide
gccgcacgagccgcggcgc

SEQ ID NO: 1363955 - RNA, 19 nt, Artificial Sequence
  Description of Artificial Sequence: Synthetic oligonucleotide
ccucagugaguugucgugu

SEQ ID NO: 1363956 - RNA, 19 nt, Artificial Sequence
  Description of Artificial Sequence: Synthetic oligonucleotide
ccagauccgaaaugagauu

SEQ ID NO: 1363957 - RNA, 19 nt, Artificial Sequence
  Description of Artificial Sequence: Synthetic oligonucleotide
ccccggacacacagcccug

SEQ ID NO: 1363958 - RNA, 19 nt, Artificial Sequence
  Description of Artificial Sequence: Synthetic oligonucleotide
ccgcacgagccgcggcgcg

SEQ ID NO: 1363959 - RNA, 19 nt, Artificial Sequence
  Description of Artificial Sequence: Synthetic oligonucleotide
gcuugggcccucuguugau

SEQ ID NO: 1363960 - RNA, 19 nt, Artificial Sequence
  Description of Artificial Sequence: Synthetic oligonucleotide
gaaggacucuggggcgcuu

SEQ ID NO: 1363961 - RNA, 19 nt, Artificial Sequence
  Description of Artificial Sequence: Synthetic oligonucleotide
gagccgcggcgcgcgacua

SEQ ID NO: 1363962 - RNA, 19 nt, Artificial Sequence
  Description of Artificial Sequence: Synthetic oligonucleotide
cagagcccuucugauccau

SEQ ID NO: 1363963 - RNA, 19 nt, Artificial Sequence
  Description of Artificial Sequence: Synthetic oligonucleotide
gcgcgacuacggaccccgg

SEQ ID NO: 1363964 - RNA, 19 nt, Artificial Sequence
  Description of Artificial Sequence: Synthetic oligonucleotide
cgcgacuacggaccccgga

SEQ ID NO: 1363965 - RNA, 19 nt, Artificial Sequence
  Description of Artificial Sequence: Synthetic oligonucleotide
cacgagccgcggcgcgcga

SEQ ID NO: 1363966 - RNA, 19 nt, Artificial Sequence
  Description of Artificial Sequence: Synthetic oligonucleotide
cgcgggcuguggcaucuuc

SEQ ID NO: 1363967 - RNA, 19 nt, Artificial Sequence
  Description of Artificial Sequence: Synthetic oligonucleotide
gcgcgcgacuacggacccc

SEQ ID NO: 1363968 - RNA, 19 nt, Artificial Sequence
  Description of Artificial Sequence: Synthetic oligonucleotide
cuggggcgcuugggcccuc

SEQ ID NO: 1363969 - RNA, 19 nt, Artificial Sequence
  Description of Artificial Sequence: Synthetic oligonucleotide
ccgggccgagccgcacgag

SEQ ID NO: 1363970 - RNA, 19 nt, Artificial Sequence
  Description of Artificial Sequence: Synthetic oligonucleotide
gcgcgggcuguggcaucuu

SEQ ID NO: 1363971 - RNA, 19 nt, Artificial Sequence
  Description of Artificial Sequence: Synthetic oligonucleotide
auauucaugucacugagag

SEQ ID NO: 1363972 - RNA, 19 nt, Artificial Sequence
  Description of Artificial Sequence: Synthetic oligonucleotide
uguugcaugaucuaacaug

SEQ ID NO: 1363973 - RNA, 19 nt, Artificial Sequence
  Description of Artificial Sequence: Synthetic oligonucleotide
ugaagauagcaucaucccg

SEQ ID NO: 1363974 - RNA, 19 nt, Artificial Sequence
  Description of Artificial Sequence: Synthetic oligonucleotide
ucuaaaauagaaaugccuu

SEQ ID NO: 1363975 - RNA, 19 nt, Artificial Sequence
  Description of Artificial Sequence: Synthetic oligonucleotide
augaagauagcaucauccc

SEQ ID NO: 1363976 - RNA, 19 nt, Artificial Sequence
  Description of Artificial Sequence: Synthetic oligonucleotide
aaaugccuucuucauauag

SEQ ID NO: 1363977 - RNA, 19 nt, Artificial Sequence
  Description of Artificial Sequence: Synthetic oligonucleotide
ugcaccuuguuacucaggg

SEQ ID NO: 1363978 - RNA, 19 nt, Artificial Sequence
  Description of Artificial Sequence: Synthetic oligonucleotide
ugauuaaaaggccaccgca

SEQ ID NO: 1363979 - RNA, 19 nt, Artificial Sequence
  Description of Artificial Sequence: Synthetic oligonucleotide
cuagaguccuguuaggucc

SEQ ID NO: 1363980 - RNA, 19 nt, Artificial Sequence
  Description of Artificial Sequence: Synthetic oligonucleotide
augcuguuuaggcagaagg

SEQ ID NO: 1363981 - RNA, 19 nt, Artificial Sequence
  Description of Artificial Sequence: Synthetic oligonucleotide
aucaccacgaagaagagag

SEQ ID NO: 1363982 - RNA, 19 nt, Artificial Sequence
  Description of Artificial Sequence: Synthetic oligonucleotide
agauaggugaguuccccgc

SEQ ID NO: 1363983 - RNA, 19 nt, Artificial Sequence
  Description of Artificial Sequence: Synthetic oligonucleotide
uucaaguagacucguagac

SEQ ID NO: 1363984 - RNA, 19 nt, Artificial Sequence
  Description of Artificial Sequence: Synthetic oligonucleotide
gaagauagcaucaucccgc

SEQ ID NO: 1363985 - RNA, 19 nt, Artificial Sequence
  Description of Artificial Sequence: Synthetic oligonucleotide
aaugccuucuucauauagg

SEQ ID NO: 1363986 - RNA, 19 nt, Artificial Sequence
  Description of Artificial Sequence: Synthetic oligonucleotide
guuaaggggaacuuagggc

SEQ ID NO: 1363987 - RNA, 19 nt, Artificial Sequence
  Description of Artificial Sequence: Synthetic oligonucleotide
gauuacaugcucccgguug

SEQ ID NO: 1363988 - RNA, 19 nt, Artificial Sequence
  Description of Artificial Sequence: Synthetic oligonucleotide
gauagcaucaucccgcaca

SEQ ID NO: 1363989 - RNA, 19 nt, Artificial Sequence
  Description of Artificial Sequence: Synthetic oligonucleotide
caaguagacucguagacac

SEQ ID NO: 1363990 - RNA, 19 nt, Artificial Sequence
  Description of Artificial Sequence: Synthetic oligonucleotide
auuaaaaggccaccgcaag

SEQ ID NO: 1363991 - RNA, 19 nt, Artificial Sequence
  Description of Artificial Sequence: Synthetic oligonucleotide
cauucaaguagacucguag

SEQ ID NO: 1363992 - RNA, 19 nt, Artificial Sequence
  Description of Artificial Sequence: Synthetic oligonucleotide
uaaaaggccaccgcaagag

SEQ ID NO: 1363993 - RNA, 19 nt, Artificial Sequence
  Description of Artificial Sequence: Synthetic oligonucleotide
ucuacuucccgguucagga

SEQ ID NO: 1363994 - RNA, 19 nt, Artificial Sequence
  Description of Artificial Sequence: Synthetic oligonucleotide
  modified_base (3)..(3): a, c, u, g, unknown or other
ucngcagcugaacacaggu

SEQ ID NO: 1363995 - RNA, 19 nt, Artificial Sequence
  Description of Artificial Sequence: Synthetic oligonucleotide
uuuagggcauuccugcuca

SEQ ID NO: 1363996 - RNA, 19 nt, Artificial Sequence
  Description of Artificial Sequence: Synthetic oligonucleotide
cuaaaauagaaaugccuuc

SEQ ID NO: 1363997 - RNA, 19 nt, Artificial Sequence
  Description of Artificial Sequence: Synthetic oligonucleotide
  modified_base (7)..(7): a, c, u, g, unknown or other
uguuucngcagcugaacac

SEQ ID NO: 1363998 - RNA, 19 nt, Artificial Sequence
  Description of Artificial Sequence: Synthetic oligonucleotide
ucuuucaagguucccuucc

SEQ ID NO: 1363999 - RNA, 19 nt, Artificial Sequence
  Description of Artificial Sequence: Synthetic oligonucleotide
gaacuuagggcagaccucg

SEQ ID NO: 1364000 - RNA, 19 nt, Artificial Sequence
  Description of Artificial Sequence: Synthetic oligonucleotide
ucguagacacaucuuguag

SEQ ID NO: 1364001 - RNA, 19 nt, Artificial Sequence
  Description of Artificial Sequence: Synthetic oligonucleotide
gacucguagacacaucuug

SEQ ID NO: 1364002 - RNA, 19 nt, Artificial Sequence
  Description of Artificial Sequence: Synthetic oligonucleotide
uacuucccgguucaggacg

SEQ ID NO: 1364003 - RNA, 19 nt, Artificial Sequence
  Description of Artificial Sequence: Synthetic oligonucleotide
cacauaggaauucuuggcc

SEQ ID NO: 1364004 - RNA, 19 nt, Artificial Sequence
  Description of Artificial Sequence: Synthetic oligonucleotide
guaguguaccuccaggucc

SEQ ID NO: 1364005 - RNA, 19 nt, Artificial Sequence
  Description of Artificial Sequence: Synthetic oligonucleotide
guagacacaucuuguagcc

SEQ ID NO: 1364006 - RNA, 19 nt, Artificial Sequence
  Description of Artificial Sequence: Synthetic oligonucleotide
ucguauucuuucaagguuc

SEQ ID NO: 1364007 - RNA, 19 nt, Artificial Sequence
  Description of Artificial Sequence: Synthetic oligonucleotide
cuucauauaggccuucaug

SEQ ID NO: 1364008 - RNA, 19 nt, Artificial Sequence
  Description of Artificial Sequence: Synthetic oligonucleotide
gacgcagacaauguucucg

SEQ ID NO: 1364009 - RNA, 19 nt, Artificial Sequence
  Description of Artificial Sequence: Synthetic oligonucleotide
cugaggaugcuguuuaggc

SEQ ID NO: 1364010 - RNA, 19 nt, Artificial Sequence
  Description of Artificial Sequence: Synthetic oligonucleotide
caguauggaaucugcacgg

SEQ ID NO: 1364011 - RNA, 19 nt, Artificial Sequence
  Description of Artificial Sequence: Synthetic oligonucleotide
uuaaaaggccaccgcaaga

SEQ ID NO: 1364012 - RNA, 19 nt, Artificial Sequence
  Description of Artificial Sequence: Synthetic oligonucleotide
ugaucuaacaugguccuga

SEQ ID NO: 1364013 - RNA, 19 nt, Artificial Sequence
  Description of Artificial Sequence: Synthetic oligonucleotide
gguuaaggggaacuuaggg

SEQ ID NO: 1364014 - RNA, 19 nt, Artificial Sequence
  Description of Artificial Sequence: Synthetic oligonucleotide
gucgauuacaugcucccgg

SEQ ID NO: 1364015 - RNA, 19 nt, Artificial Sequence
  Description of Artificial Sequence: Synthetic oligonucleotide
caccauuucagaacagccg

SEQ ID NO: 1364016 - RNA, 19 nt, Artificial Sequence
  Description of Artificial Sequence: Synthetic oligonucleotide
cuguuuaggcagaaggagc

SEQ ID NO: 1364017 - RNA, 19 nt, Artificial Sequence
  Description of Artificial Sequence: Synthetic oligonucleotide
ugcuauuccuaguaggggu

SEQ ID NO: 1364018 - RNA, 19 nt, Artificial Sequence
  Description of Artificial Sequence: Synthetic oligonucleotide
guggcuagaguccuguuag

SEQ ID NO: 1364019 - RNA, 19 nt, Artificial Sequence
  Description of Artificial Sequence: Synthetic oligonucleotide
acuggcgauauucauguca

SEQ ID NO: 1364020 - RNA, 19 nt, Artificial Sequence
  Description of Artificial Sequence: Synthetic oligonucleotide
acgaagaagagagauaggu

SEQ ID NO: 1364021 - RNA, 19 nt, Artificial Sequence
  Description of Artificial Sequence: Synthetic oligonucleotide
uccuguuagguccacaaua

SEQ ID NO: 1364022 - RNA, 19 nt, Artificial Sequence
  Description of Artificial Sequence: Synthetic oligonucleotide
agaacagccgacaguaugg

SEQ ID NO: 1364023 - RNA, 19 nt, Artificial Sequence
  Description of Artificial Sequence: Synthetic oligonucleotide
ugcuguuuaggcagaagga

SEQ ID NO: 1364024 - RNA, 19 nt, Artificial Sequence
  Description of Artificial Sequence: Synthetic oligonucleotide
auucaaguagacucguaga

SEQ ID NO: 1364025 - RNA, 19 nt, Artificial Sequence
  Description of Artificial Sequence: Synthetic oligonucleotide
acccuuguguggcagggcc

SEQ ID NO: 1364026 - RNA, 19 nt, Artificial Sequence
  Description of Artificial Sequence: Synthetic oligonucleotide
cagguuaaggggaacuuag

SEQ ID NO: 1364027 - RNA, 19 nt, Artificial Sequence
  Description of Artificial Sequence: Synthetic oligonucleotide
caggaaugagcucagcagc

SEQ ID NO: 1364028 - RNA, 19 nt, Artificial Sequence
  Description of Artificial Sequence: Synthetic oligonucleotide
  modified_base (5)..(5): a, c, u, g, unknown or other
uuucngcagcugaacacag

SEQ ID NO: 1364029 - RNA, 19 nt, Artificial Sequence
  Description of Artificial Sequence: Synthetic oligonucleotide
acauaggaauucuuggccu

SEQ ID NO: 1364030 - RNA, 19 nt, Artificial Sequence
  Description of Artificial Sequence: Synthetic oligonucleotide
cuuccaggugcauccaucg

SEQ ID NO: 1364031 - RNA, 19 nt, Artificial Sequence
  Description of Artificial Sequence: Synthetic oligonucleotide
cauauaggccuucauggac

SEQ ID NO: 1364032 - RNA, 19 nt, Artificial Sequence
  Description of Artificial Sequence: Synthetic oligonucleotide
caagagggcgucauugggg

SEQ ID NO: 1364033 - RNA, 19 nt, Artificial Sequence
  Description of Artificial Sequence: Synthetic oligonucleotide
cacaauagcuuugaugaag

SEQ ID NO: 1364034 - RNA, 19 nt, Artificial Sequence
  Description of Artificial Sequence: Synthetic oligonucleotide
caccauucaaguagacucg

SEQ ID NO: 1364035 - RNA, 19 nt, Artificial Sequence
  Description of Artificial Sequence: Synthetic oligonucleotide
acuuguugcaugaucuaac

SEQ ID NO: 1364036 - RNA, 19 nt, Artificial Sequence
  Description of Artificial Sequence: Synthetic oligonucleotide
ugaggaugcuguuuaggca

SEQ ID NO: 1364037 - RNA, 19 nt, Artificial Sequence
  Description of Artificial Sequence: Synthetic oligonucleotide
aagauagcaucaucccgca

SEQ ID NO: 1364038 - RNA, 19 nt, Artificial Sequence
  Description of Artificial Sequence: Synthetic oligonucleotide
uucauggcagcucucguau

SEQ ID NO: 1364039 - RNA, 19 nt, Artificial Sequence
  Description of Artificial Sequence: Synthetic oligonucleotide
ucaaguagacucguagaca

SEQ ID NO: 1364040 - RNA, 19 nt, Artificial Sequence
  Description of Artificial Sequence: Synthetic oligonucleotide
cuggcgauauucaugucac

SEQ ID NO: 1364041 - RNA, 19 nt, Artificial Sequence
  Description of Artificial Sequence: Synthetic oligonucleotide
auuacaugcucccgguugu

SEQ ID NO: 1364042 - RNA, 19 nt, Artificial Sequence
  Description of Artificial Sequence: Synthetic oligonucleotide
ugcgucgauuacaugcucc

SEQ ID NO: 1364043 - RNA, 19 nt, Artificial Sequence
  Description of Artificial Sequence: Synthetic oligonucleotide
augggcauaguccuucaug

SEQ ID NO: 1364044 - RNA, 19 nt, Artificial Sequence
  Description of Artificial Sequence: Synthetic oligonucleotide
gaaaggccgaacuacucuc

SEQ ID NO: 1364045 - RNA, 19 nt, Artificial Sequence
  Description of Artificial Sequence: Synthetic oligonucleotide
guuacucagggccucaauc

SEQ ID NO: 1364046 - RNA, 19 nt, Artificial Sequence
  Description of Artificial Sequence: Synthetic oligonucleotide
agcucaggcuccuuuuagg

SEQ ID NO: 1364047 - RNA, 19 nt, Artificial Sequence
  Description of Artificial Sequence: Synthetic oligonucleotide
ucaucccgcacauaggaau

SEQ ID NO: 1364048 - RNA, 19 nt, Artificial Sequence
  Description of Artificial Sequence: Synthetic oligonucleotide
agacacaucuuguagccau

SEQ ID NO: 1364049 - RNA, 19 nt, Artificial Sequence
  Description of Artificial Sequence: Synthetic oligonucleotide
uucaggacgcagacaaugu

SEQ ID NO: 1364050 - RNA, 19 nt, Artificial Sequence
  Description of Artificial Sequence: Synthetic oligonucleotide
cacucggugagcaggaaug

SEQ ID NO: 1364051 - RNA, 19 nt, Artificial Sequence
  Description of Artificial Sequence: Synthetic oligonucleotide
ucccguagcuucuucaccu

SEQ ID NO: 1364052 - RNA, 19 nt, Artificial Sequence
  Description of Artificial Sequence: Synthetic oligonucleotide
uacagggugccuugcagug

SEQ ID NO: 1364053 - RNA, 19 nt, Artificial Sequence
  Description of Artificial Sequence: Synthetic oligonucleotide
uuguagccauaucugcuug

SEQ ID NO: 1364054 - RNA, 19 nt, Artificial Sequence
  Description of Artificial Sequence: Synthetic oligonucleotide
ucguaguguaccuccaggu

SEQ ID NO: 1364055 - RNA, 19 nt, Artificial Sequence
  Description of Artificial Sequence: Synthetic oligonucleotide
agcuucuucaccucauggu

SEQ ID NO: 1364056 - RNA, 19 nt, Artificial Sequence
  Description of Artificial Sequence: Synthetic oligonucleotide
cucguaguguaccuccagg

SEQ ID NO: 1364057 - RNA, 19 nt, Artificial Sequence
  Description of Artificial Sequence: Synthetic oligonucleotide
agcguggugcuccuucucg

SEQ ID NO: 1364058 - RNA, 19 nt, Artificial Sequence
  Description of Artificial Sequence: Synthetic oligonucleotide
  modified_base (17)..(17): a, c, u, g, unknown or other
uccggcaggauguuucngc

SEQ ID NO: 1364059 - RNA, 19 nt, Artificial Sequence
  Description of Artificial Sequence: Synthetic oligonucleotide
acuacucucuaaaauagaa

SEQ ID NO: 1364060 - RNA, 19 nt, Artificial Sequence
  Description of Artificial Sequence: Synthetic oligonucleotide
  modified_base (9)..(9): a, c, u, g, unknown or other
gauguuucngcagcugaac

SEQ ID NO: 1364061 - RNA, 19 nt, Artificial Sequence
  Description of Artificial Sequence: Synthetic oligonucleotide
cucuaaaauagaaaugccu

SEQ ID NO: 1364062 - RNA, 19 nt, Artificial Sequence
  Description of Artificial Sequence: Synthetic oligonucleotide
gcaugaucuaacauggucc

SEQ ID NO: 1364063 - RNA, 19 nt, Artificial Sequence
  Description of Artificial Sequence: Synthetic oligonucleotide
uuacagggugccuugcagu

SEQ ID NO: 1364064 - RNA, 19 nt, Artificial Sequence
  Description of Artificial Sequence: Synthetic oligonucleotide
  modified_base (8)..(8): a, c, u, g, unknown or other
auguuucngcagcugaaca

SEQ ID NO: 1364065 - RNA, 19 nt, Artificial Sequence
  Description of Artificial Sequence: Synthetic oligonucleotide
cugaaacuucucccgagag

SEQ ID NO: 1364066 - RNA, 19 nt, Artificial Sequence
  Description of Artificial Sequence: Synthetic oligonucleotide
agauagcagguguccugcc

SEQ ID NO: 1364067 - RNA, 19 nt, Artificial Sequence
  Description of Artificial Sequence: Synthetic oligonucleotide
uuagguccacaauagcuuu

SEQ ID NO: 1364068 - RNA, 19 nt, Artificial Sequence
  Description of Artificial Sequence: Synthetic oligonucleotide
cuuguugcaugaucuaaca

SEQ ID NO: 1364069 - RNA, 19 nt, Artificial Sequence
  Description of Artificial Sequence: Synthetic oligonucleotide
gauuaaaaggccaccgcaa

SEQ ID NO: 1364070 - RNA, 19 nt, Artificial Sequence
  Description of Artificial Sequence: Synthetic oligonucleotide
ucgauuacaugcucccggu

SEQ ID NO: 1364071 - RNA, 19 nt, Artificial Sequence
  Description of Artificial Sequence: Synthetic oligonucleotide
auaucugcuuguguagaag

SEQ ID NO: 1364072 - RNA, 19 nt, Artificial Sequence
  Description of Artificial Sequence: Synthetic oligonucleotide
ggaccaggccuuuacaugc

SEQ ID NO: 1364073 - RNA, 19 nt, Artificial Sequence
  Description of Artificial Sequence: Synthetic oligonucleotide
cauaggaauucuuggccuc

SEQ ID NO: 1364074 - RNA, 19 nt, Artificial Sequence
  Description of Artificial Sequence: Synthetic oligonucleotide
uuucuggcgaagucugaga

SEQ ID NO: 1364075 - RNA, 19 nt, Artificial Sequence
  Description of Artificial Sequence: Synthetic oligonucleotide
aguagacucguagacacau

SEQ ID NO: 1364076 - RNA, 19 nt, Artificial Sequence
  Description of Artificial Sequence: Synthetic oligonucleotide
uuagggcagaccucguagu

SEQ ID NO: 1364077 - RNA, 19 nt, Artificial Sequence
  Description of Artificial Sequence: Synthetic oligonucleotide
ucgaagguggcugucuucu

SEQ ID NO: 1364078 - RNA, 19 nt, Artificial Sequence
  Description of Artificial Sequence: Synthetic oligonucleotide
ccuguuagguccacaauag

SEQ ID NO: 1364079 - RNA, 19 nt, Artificial Sequence
  Description of Artificial Sequence: Synthetic oligonucleotide
ccacgaagaagagagauag

SEQ ID NO: 1364080 - RNA, 19 nt, Artificial Sequence
  Description of Artificial Sequence: Synthetic oligonucleotide
aacuacucucuaaaauaga

SEQ ID NO: 1364081 - RNA, 19 nt, Artificial Sequence
  Description of Artificial Sequence: Synthetic oligonucleotide
aucguuggggcagacagcu

SEQ ID NO: 1364082 - RNA, 19 nt, Artificial Sequence
  Description of Artificial Sequence: Synthetic oligonucleotide
uccaucauagguggaugcc

SEQ ID NO: 1364083 - RNA, 19 nt, Artificial Sequence
  Description of Artificial Sequence: Synthetic oligonucleotide
caucauagguggaugccuc

SEQ ID NO: 1364084 - RNA, 19 nt, Artificial Sequence
  Description of Artificial Sequence: Synthetic oligonucleotide
uguaccuccagguccgcau

SEQ ID NO: 1364085 - RNA, 19 nt, Artificial Sequence
  Description of Artificial Sequence: Synthetic oligonucleotide
uuguugcaugaucuaacau

SEQ ID NO: 1364086 - RNA, 19 nt, Artificial Sequence
  Description of Artificial Sequence: Synthetic oligonucleotide
aggugcauccaucguuggg

SEQ ID NO: 1364087 - RNA, 19 nt, Artificial Sequence
  Description of Artificial Sequence: Synthetic oligonucleotide
augguuacagggugccuug

SEQ ID NO: 1364088 - RNA, 19 nt, Artificial Sequence
  Description of Artificial Sequence: Synthetic oligonucleotide
cuuucuggcgaagucugag

SEQ ID NO: 1364089 - RNA, 19 nt, Artificial Sequence
  Description of Artificial Sequence: Synthetic oligonucleotide
ggaaucugcacggaacccg

SEQ ID NO: 1364090 - RNA, 19 nt, Artificial Sequence
  Description of Artificial Sequence: Synthetic oligonucleotide
caucaucccgcacauagga

SEQ ID NO: 1364091 - RNA, 19 nt, Artificial Sequence
  Description of Artificial Sequence: Synthetic oligonucleotide
  modified_base (6)..(6): a, c, u, g, unknown or other
guuucngcagcugaacaca

SEQ ID NO: 1364092 - RNA, 19 nt, Artificial Sequence
  Description of Artificial Sequence: Synthetic oligonucleotide
gaacccgacacuuguugca

SEQ ID NO: 1364093 - RNA, 19 nt, Artificial Sequence
  Description of Artificial Sequence: Synthetic oligonucleotide
uguagccauaucugcuugu

SEQ ID NO: 1364094 - RNA, 19 nt, Artificial Sequence
  Description of Artificial Sequence: Synthetic oligonucleotide
uggaaaggccgaacuacuc

SEQ ID NO: 1364095 - RNA, 19 nt, Artificial Sequence
  Description of Artificial Sequence: Synthetic oligonucleotide
guagcgguggccacacugg

SEQ ID NO: 1364096 - RNA, 19 nt, Artificial Sequence
  Description of Artificial Sequence: Synthetic oligonucleotide
cacgaagaagagagauagg

SEQ ID NO: 1364097 - RNA, 19 nt, Artificial Sequence
  Description of Artificial Sequence: Synthetic oligonucleotide
acgcagacaauguucucga

SEQ ID NO: 1364098 - RNA, 19 nt, Artificial Sequence
  Description of Artificial Sequence: Synthetic oligonucleotide
cuauuccuaguaggggugg

SEQ ID NO: 1364099 - RNA, 19 nt, Artificial Sequence
  Description of Artificial Sequence: Synthetic oligonucleotide
uuaucuggaaaggccgaac

SEQ ID NO: 1364100 - RNA, 19 nt, Artificial Sequence
  Description of Artificial Sequence: Synthetic oligonucleotide
cugcuauuccuaguagggg

SEQ ID NO: 1364101 - RNA, 19 nt, Artificial Sequence
  Description of Artificial Sequence: Synthetic oligonucleotide
ggcgauauucaugucacug

SEQ ID NO: 1364102 - RNA, 19 nt, Artificial Sequence
  Description of Artificial Sequence: Synthetic oligonucleotide
acagccgacaguauggaau

SEQ ID NO: 1364103 - RNA, 19 nt, Artificial Sequence
  Description of Artificial Sequence: Synthetic oligonucleotide
ugaguuccccgcccagugc

SEQ ID NO: 1364104 - RNA, 19 nt, Artificial Sequence
  Description of Artificial Sequence: Synthetic oligonucleotide
agauagcaucaucccgcac

SEQ ID NO: 1364105 - RNA, 19 nt, Artificial Sequence
  Description of Artificial Sequence: Synthetic oligonucleotide
ucaugucacugagaggccu

SEQ ID NO: 1364106 - RNA, 19 nt, Artificial Sequence
  Description of Artificial Sequence: Synthetic oligonucleotide
aaugggcauaguccuucau

SEQ ID NO: 1364107 - RNA, 19 nt, Artificial Sequence
  Description of Artificial Sequence: Synthetic oligonucleotide
cagccgacaguauggaauc

SEQ ID NO: 1364108 - RNA, 19 nt, Artificial Sequence
  Description of Artificial Sequence: Synthetic oligonucleotide
cacgucaggccugaaugcg

SEQ ID NO: 1364109 - RNA, 19 nt, Artificial Sequence
  Description of Artificial Sequence: Synthetic oligonucleotide
ucaggacgcagacaauguu

SEQ ID NO: 1364110 - RNA, 19 nt, Artificial Sequence
  Description of Artificial Sequence: Synthetic oligonucleotide
ugaaugcgucgauuacaug

SEQ ID NO: 1364111 - RNA, 19 nt, Artificial Sequence
  Description of Artificial Sequence: Synthetic oligonucleotide
aggcggaccaggccuuuac

SEQ ID NO: 1364112 - RNA, 19 nt, Artificial Sequence
  Description of Artificial Sequence: Synthetic oligonucleotide
gcaagagggcgucauuggg

SEQ ID NO: 1364113 - RNA, 19 nt, Artificial Sequence
  Description of Artificial Sequence: Synthetic oligonucleotide
uacaagccucugcagucac

SEQ ID NO: 1364114 - RNA, 19 nt, Artificial Sequence
  Description of Artificial Sequence: Synthetic oligonucleotide
cauuaucuggaaaggccga

SEQ ID NO: 1364115 - RNA, 19 nt, Artificial Sequence
  Description of Artificial Sequence: Synthetic oligonucleotide
aaaggccgaacuacucucu

SEQ ID NO: 1364116 - RNA, 19 nt, Artificial Sequence
  Description of Artificial Sequence: Synthetic oligonucleotide
guagccauaucugcuugug

SEQ ID NO: 1364117 - RNA, 19 nt, Artificial Sequence
  Description of Artificial Sequence: Synthetic oligonucleotide
agguuaaggggaacuuagg

SEQ ID NO: 1364118 - RNA, 19 nt, Artificial Sequence
  Description of Artificial Sequence: Synthetic oligonucleotide
gugaguuccccgcccagug

SEQ ID NO: 1364119 - RNA, 19 nt, Artificial Sequence
  Description of Artificial Sequence: Synthetic oligonucleotide
aucugcacggaacccgaca

SEQ ID NO: 1364120 - RNA, 19 nt, Artificial Sequence
  Description of Artificial Sequence: Synthetic oligonucleotide
aacagccgacaguauggaa

SEQ ID NO: 1364121 - RNA, 19 nt, Artificial Sequence
  Description of Artificial Sequence: Synthetic oligonucleotide
aaucugcacggaacccgac

SEQ ID NO: 1364122 - RNA, 19 nt, Artificial Sequence
  Description of Artificial Sequence: Synthetic oligonucleotide
aucacagguuaaggggaac

SEQ ID NO: 1364123 - RNA, 19 nt, Artificial Sequence
  Description of Artificial Sequence: Synthetic oligonucleotide
ucuggcgaagucugagauc

SEQ ID NO: 1364124 - RNA, 19 nt, Artificial Sequence
  Description of Artificial Sequence: Synthetic oligonucleotide
augcgucgauuacaugcuc

SEQ ID NO: 1364125 - RNA, 19 nt, Artificial Sequence
  Description of Artificial Sequence: Synthetic oligonucleotide
caugaucuaacaugguccu

SEQ ID NO: 1364126 - RNA, 19 nt, Artificial Sequence
  Description of Artificial Sequence: Synthetic oligonucleotide
ggggccuuucaucaccacg

SEQ ID NO: 1364127 - RNA, 19 nt, Artificial Sequence
  Description of Artificial Sequence: Synthetic oligonucleotide
acuucccgguucaggacgc

SEQ ID NO: 1364128 - RNA, 19 nt, Artificial Sequence
  Description of Artificial Sequence: Synthetic oligonucleotide
uauuccuaguagggguggc

SEQ ID NO: 1364129 - RNA, 19 nt, Artificial Sequence
  Description of Artificial Sequence: Synthetic oligonucleotide
acuccaucauagguggaug

SEQ ID NO: 1364130 - RNA, 19 nt, Artificial Sequence
  Description of Artificial Sequence: Synthetic oligonucleotide
cuaguagggguggcuagag

SEQ ID NO: 1364131 - RNA, 19 nt, Artificial Sequence
  Description of Artificial Sequence: Synthetic oligonucleotide
cucgcugaggcggaccagg

SEQ ID NO: 1364132 - RNA, 19 nt, Artificial Sequence
  Description of Artificial Sequence: Synthetic oligonucleotide
uugcaugaucuaacauggu

SEQ ID NO: 1364133 - RNA, 19 nt, Artificial Sequence
  Description of Artificial Sequence: Synthetic oligonucleotide
uacaugcaggacacucggu

SEQ ID NO: 1364134 - RNA, 19 nt, Artificial Sequence
  Description of Artificial Sequence: Synthetic oligonucleotide
ggaacccgacacuuguugc

SEQ ID NO: 1364135 - RNA, 19 nt, Artificial Sequence
  Description of Artificial Sequence: Synthetic oligonucleotide
gugcauccaucguuggggc

SEQ ID NO: 1364136 - RNA, 19 nt, Artificial Sequence
  Description of Artificial Sequence: Synthetic oligonucleotide
acucguagacacaucuugu

SEQ ID NO: 1364137 - RNA, 19 nt, Artificial Sequence
  Description of Artificial Sequence: Synthetic oligonucleotide
aggaaugagcucagcagca

SEQ ID NO: 1364138 - RNA, 19 nt, Artificial Sequence
  Description of Artificial Sequence: Synthetic oligonucleotide
ucagcguggugcuccuucu

SEQ ID NO: 1364139 - RNA, 19 nt, Artificial Sequence
  Description of Artificial Sequence: Synthetic oligonucleotide
aaggccgaacuacucucua

SEQ ID NO: 1364140 - RNA, 19 nt, Artificial Sequence
  Description of Artificial Sequence: Synthetic oligonucleotide
gaaucugcacggaacccga

SEQ ID NO: 1364141 - RNA, 19 nt, Artificial Sequence
  Description of Artificial Sequence: Synthetic oligonucleotide
cucccgagagaucuucuuc

SEQ ID NO: 1364142 - RNA, 19 nt, Artificial Sequence
  Description of Artificial Sequence: Synthetic oligonucleotide
gcuacaagccucugcaguc

SEQ ID NO: 1364143 - RNA, 19 nt, Artificial Sequence
  Description of Artificial Sequence: Synthetic oligonucleotide
guuuaggcagaaggagcag

SEQ ID NO: 1364144 - RNA, 19 nt, Artificial Sequence
  Description of Artificial Sequence: Synthetic oligonucleotide
gaucuaacaugguccugaa

SEQ ID NO: 1364145 - RNA, 19 nt, Artificial Sequence
  Description of Artificial Sequence: Synthetic oligonucleotide
caccucaugguccugaagu

SEQ ID NO: 1364146 - RNA, 19 nt, Artificial Sequence
  Description of Artificial Sequence: Synthetic oligonucleotide
auuaucuggaaaggccgaa

SEQ ID NO: 1364147 - RNA, 19 nt, Artificial Sequence
  Description of Artificial Sequence: Synthetic oligonucleotide
uagacacaucuuguagcca

SEQ ID NO: 1364148 - RNA, 19 nt, Artificial Sequence
  Description of Artificial Sequence: Synthetic oligonucleotide
uaguagggguggcuagagu

SEQ ID NO: 1364149 - RNA, 19 nt, Artificial Sequence
  Description of Artificial Sequence: Synthetic oligonucleotide
ugcacggaacccgacacuu

SEQ ID NO: 1364150 - RNA, 19 nt, Artificial Sequence
  Description of Artificial Sequence: Synthetic oligonucleotide
aacccgacacuuguugcau

SEQ ID NO: 1364151 - RNA, 19 nt, Artificial Sequence
  Description of Artificial Sequence: Synthetic oligonucleotide
uggucuagccggugcugcc

SEQ ID NO: 1364152 - RNA, 19 nt, Artificial Sequence
  Description of Artificial Sequence: Synthetic oligonucleotide
accauucaaguagacucgu

SEQ ID NO: 1364153 - RNA, 19 nt, Artificial Sequence
  Description of Artificial Sequence: Synthetic oligonucleotide
cuggcgaagucugagaucu

SEQ ID NO: 1364154 - RNA, 19 nt, Artificial Sequence
  Description of Artificial Sequence: Synthetic oligonucleotide
uuagggcauuccugcucag

SEQ ID NO: 1364155 - RNA, 19 nt, Artificial Sequence
  Description of Artificial Sequence: Synthetic oligonucleotide
gagaccuucugcuccagau

SEQ ID NO: 1364156 - RNA, 19 nt, Artificial Sequence
  Description of Artificial Sequence: Synthetic oligonucleotide
aaguagacucguagacaca

SEQ ID NO: 1364157 - RNA, 19 nt, Artificial Sequence
  Description of Artificial Sequence: Synthetic oligonucleotide
gcuagaguccuguuagguc

SEQ ID NO: 1364158 - RNA, 19 nt, Artificial Sequence
  Description of Artificial Sequence: Synthetic oligonucleotide
ggggaaaagauagcaggug

SEQ ID NO: 1364159 - RNA, 19 nt, Artificial Sequence
  Description of Artificial Sequence: Synthetic oligonucleotide
gggaaaagauagcaggugu

SEQ ID NO: 1364160 - RNA, 19 nt, Artificial Sequence
  Description of Artificial Sequence: Synthetic oligonucleotide
gcgucgauuacaugcuccc

SEQ ID NO: 1364161 - RNA, 19 nt, Artificial Sequence
  Description of Artificial Sequence: Synthetic oligonucleotide
guauucuuucaagguuccc

SEQ ID NO: 1364162 - RNA, 19 nt, Artificial Sequence
  Description of Artificial Sequence: Synthetic oligonucleotide
acagguuaaggggaacuua

SEQ ID NO: 1364163 - RNA, 19 nt, Artificial Sequence
  Description of Artificial Sequence: Synthetic oligonucleotide
gcauccaucguuggggcag

SEQ ID NO: 1364164 - RNA, 19 nt, Artificial Sequence
  Description of Artificial Sequence: Synthetic oligonucleotide
uagggcauuccugcucagc

SEQ ID NO: 1364165 - RNA, 19 nt, Artificial Sequence
  Description of Artificial Sequence: Synthetic oligonucleotide
acuuagggcagaccucgua

SEQ ID NO: 1364166 - RNA, 19 nt, Artificial Sequence
  Description of Artificial Sequence: Synthetic oligonucleotide
auuccuaguagggguggcu

SEQ ID NO: 1364167 - RNA, 19 nt, Artificial Sequence
  Description of Artificial Sequence: Synthetic oligonucleotide
cucguagacacaucuugua

SEQ ID NO: 1364168 - RNA, 19 nt, Artificial Sequence
  Description of Artificial Sequence: Synthetic oligonucleotide
cugaaugcgucgauuacau

SEQ ID NO: 1364169 - RNA, 19 nt, Artificial Sequence
  Description of Artificial Sequence: Synthetic oligonucleotide
gaacagccgacaguaugga

SEQ ID NO: 1364170 - RNA, 19 nt, Artificial Sequence
  Description of Artificial Sequence: Synthetic oligonucleotide
gcuauuccuaguaggggug

SEQ ID NO: 1364171 - RNA, 19 nt, Artificial Sequence
  Description of Artificial Sequence: Synthetic oligonucleotide
cacaucuuguagccauauc

SEQ ID NO: 1364172 - RNA, 19 nt, Artificial Sequence
  Description of Artificial Sequence: Synthetic oligonucleotide
cuucauggcagcucucgua

SEQ ID NO: 1364173 - RNA, 19 nt, Artificial Sequence
  Description of Artificial Sequence: Synthetic oligonucleotide
aggugaguuccccgcccag

SEQ ID NO: 1364174 - RNA, 19 nt, Artificial Sequence
  Description of Artificial Sequence: Synthetic oligonucleotide
augaucuaacaugguccug

SEQ ID NO: 1364175 - RNA, 19 nt, Artificial Sequence
  Description of Artificial Sequence: Synthetic oligonucleotide
cucgaagguggcugucuuc

SEQ ID NO: 1364176 - RNA, 19 nt, Artificial Sequence
  Description of Artificial Sequence: Synthetic oligonucleotide
ggaaugagcucagcagcag

SEQ ID NO: 1364177 - RNA, 19 nt, Artificial Sequence
  Description of Artificial Sequence: Synthetic oligonucleotide
gccuuuacaugcaggacac

SEQ ID NO: 1364178 - RNA, 19 nt, Artificial Sequence
  Description of Artificial Sequence: Synthetic oligonucleotide
uacaugcucccgguuguuc

SEQ ID NO: 1364179 - RNA, 19 nt, Artificial Sequence
  Description of Artificial Sequence: Synthetic oligonucleotide
cagguccgcaugguuacag

SEQ ID NO: 1364180 - RNA, 19 nt, Artificial Sequence
  Description of Artificial Sequence: Synthetic oligonucleotide
uggcgauauucaugucacu

SEQ ID NO: 1364181 - RNA, 19 nt, Artificial Sequence
  Description of Artificial Sequence: Synthetic oligonucleotide
agccacuggcgauauucau

SEQ ID NO: 1364182 - RNA, 19 nt, Artificial Sequence
  Description of Artificial Sequence: Synthetic oligonucleotide
aggccgaacuacucucuaa

SEQ ID NO: 1364183 - RNA, 19 nt, Artificial Sequence
  Description of Artificial Sequence: Synthetic oligonucleotide
acccgacacuuguugcaug

SEQ ID NO: 1364184 - RNA, 19 nt, Artificial Sequence
  Description of Artificial Sequence: Synthetic oligonucleotide
caggacacucggugagcag

SEQ ID NO: 1364185 - RNA, 19 nt, Artificial Sequence
  Description of Artificial Sequence: Synthetic oligonucleotide
ccaggccuuuacaugcagg

SEQ ID NO: 1364186 - RNA, 19 nt, Artificial Sequence
  Description of Artificial Sequence: Synthetic oligonucleotide
uccaucguuggggcagaca

SEQ ID NO: 1364187 - RNA, 19 nt, Artificial Sequence
  Description of Artificial Sequence: Synthetic oligonucleotide
  modified_base (10)..(10): a, c, u, g, unknown or other
ggauguuucngcagcugaa

SEQ ID NO: 1364188 - RNA, 19 nt, Artificial Sequence
  Description of Artificial Sequence: Synthetic oligonucleotide
gccacuggcgauauucaug

SEQ ID NO: 1364189 - RNA, 19 nt, Artificial Sequence
  Description of Artificial Sequence: Synthetic oligonucleotide
ggccgaacuacucucuaaa

SEQ ID NO: 1364190 - RNA, 19 nt, Artificial Sequence
  Description of Artificial Sequence: Synthetic oligonucleotide
ggucuagccggugcugccg

SEQ ID NO: 1364191 - RNA, 19 nt, Artificial Sequence
  Description of Artificial Sequence: Synthetic oligonucleotide
ccauuucagaacagccgac

SEQ ID NO: 1364192 - RNA, 19 nt, Artificial Sequence
  Description of Artificial Sequence: Synthetic oligonucleotide
aacuuagggcagaccucgu

SEQ ID NO: 1364193 - RNA, 19 nt, Artificial Sequence
  Description of Artificial Sequence: Synthetic oligonucleotide
gcaccuuguuacucagggc

SEQ ID NO: 1364194 - RNA, 19 nt, Artificial Sequence
  Description of Artificial Sequence: Synthetic oligonucleotide
gguggcuagaguccuguua

SEQ ID NO: 1364195 - RNA, 19 nt, Artificial Sequence
  Description of Artificial Sequence: Synthetic oligonucleotide
accaagccugcccacccuu

SEQ ID NO: 1364196 - RNA, 19 nt, Artificial Sequence
  Description of Artificial Sequence: Synthetic oligonucleotide
cuuuuagggcauuccugcu

SEQ ID NO: 1364197 - RNA, 19 nt, Artificial Sequence
  Description of Artificial Sequence: Synthetic oligonucleotide
ggaacuuagggcagaccuc

SEQ ID NO: 1364198 - RNA, 19 nt, Artificial Sequence
  Description of Artificial Sequence: Synthetic oligonucleotide
cauagguggaugccuccaa

SEQ ID NO: 1364199 - RNA, 19 nt, Artificial Sequence
  Description of Artificial Sequence: Synthetic oligonucleotide
ucauggcagcucucguauu

SEQ ID NO: 1364200 - RNA, 19 nt, Artificial Sequence
  Description of Artificial Sequence: Synthetic oligonucleotide
gcaacaucaauguuaccuu

SEQ ID NO: 1364201 - RNA, 19 nt, Artificial Sequence
  Description of Artificial Sequence: Synthetic oligonucleotide
auguuaccuucugauuaaa

SEQ ID NO: 1364202 - RNA, 19 nt, Artificial Sequence
  Description of Artificial Sequence: Synthetic oligonucleotide
ggcgaagucugagaucuuc

SEQ ID NO: 1364203 - RNA, 19 nt, Artificial Sequence
  Description of Artificial Sequence: Synthetic oligonucleotide
ucucgcugaggcggaccag

SEQ ID NO: 1364204 - RNA, 19 nt, Artificial Sequence
  Description of Artificial Sequence: Synthetic oligonucleotide
ccggcuacaagccucugca

SEQ ID NO: 1364205 - RNA, 19 nt, Artificial Sequence
  Description of Artificial Sequence: Synthetic oligonucleotide
ggcuacaagccucugcagu

SEQ ID NO: 1364206 - RNA, 19 nt, Artificial Sequence
  Description of Artificial Sequence: Synthetic oligonucleotide
gcugaggcggaccaggccu

SEQ ID NO: 1364207 - RNA, 19 nt, Artificial Sequence
  Description of Artificial Sequence: Synthetic oligonucleotide
cuuguuacucagggccuca

SEQ ID NO: 1364208 - RNA, 19 nt, Artificial Sequence
  Description of Artificial Sequence: Synthetic oligonucleotide
gugcugccggcuacaagcc

SEQ ID NO: 1364209 - RNA, 19 nt, Artificial Sequence
  Description of Artificial Sequence: Synthetic oligonucleotide
guagacucguagacacauc

SEQ ID NO: 1364210 - RNA, 19 nt, Artificial Sequence
  Description of Artificial Sequence: Synthetic oligonucleotide
cacggaacccgacacuugu

SEQ ID NO: 1364211 - RNA, 19 nt, Artificial Sequence
  Description of Artificial Sequence: Synthetic oligonucleotide
gccugaaugcgucgauuac

SEQ ID NO: 1364212 - RNA, 19 nt, Artificial Sequence
  Description of Artificial Sequence: Synthetic oligonucleotide
ccugcgggcagcauuaucu

SEQ ID NO: 1364213 - RNA, 19 nt, Artificial Sequence
  Description of Artificial Sequence: Synthetic oligonucleotide
gccgacaguauggaaucug

SEQ ID NO: 1364214 - RNA, 19 nt, Artificial Sequence
  Description of Artificial Sequence: Synthetic oligonucleotide
acgucaggccugaaugcgu

SEQ ID NO: 1364215 - RNA, 19 nt, Artificial Sequence
  Description of Artificial Sequence: Synthetic oligonucleotide
guggcaccgcugcagcauc

SEQ ID NO: 1364216 - RNA, 19 nt, Artificial Sequence
  Description of Artificial Sequence: Synthetic oligonucleotide
cguaguguaccuccagguc

SEQ ID NO: 1364217 - RNA, 19 nt, Artificial Sequence
  Description of Artificial Sequence: Synthetic oligonucleotide
uuacaugcucccgguuguu

SEQ ID NO: 1364218 - RNA, 19 nt, Artificial Sequence
  Description of Artificial Sequence: Synthetic oligonucleotide
gccggcuacaagccucugc

SEQ ID NO: 1364219 - RNA, 19 nt, Artificial Sequence
  Description of Artificial Sequence: Synthetic oligonucleotide
  modified_base (16)..(16): a, c, u, g, unknown or other
ccggcaggauguuucngca

SEQ ID NO: 1364220 - RNA, 19 nt, Artificial Sequence
  Description of Artificial Sequence: Synthetic oligonucleotide
ccugaaacuucucccgaga

SEQ ID NO: 1364221 - RNA, 19 nt, Artificial Sequence
  Description of Artificial Sequence: Synthetic oligonucleotide
agacucguagacacaucuu

SEQ ID NO: 1364222 - RNA, 19 nt, Artificial Sequence
  Description of Artificial Sequence: Synthetic oligonucleotide
gcauuccugcucagcgugg

SEQ ID NO: 1364223 - RNA, 19 nt, Artificial Sequence
  Description of Artificial Sequence: Synthetic oligonucleotide
caugguuacagggugccuu

SEQ ID NO: 1364224 - RNA, 19 nt, Artificial Sequence
  Description of Artificial Sequence: Synthetic oligonucleotide
ccucucuacuucccgguuc

SEQ ID NO: 1364225 - RNA, 19 nt, Artificial Sequence
  Description of Artificial Sequence: Synthetic oligonucleotide
cggaacccgacacuuguug

SEQ ID NO: 1364226 - RNA, 19 nt, Artificial Sequence
  Description of Artificial Sequence: Synthetic oligonucleotide
cggaccaggccuuuacaug

SEQ ID NO: 1364227 - RNA, 19 nt, Artificial Sequence
  Description of Artificial Sequence: Synthetic oligonucleotide
accgcaagagggcgucauu

SEQ ID NO: 1364228 - RNA, 19 nt, Artificial Sequence
  Description of Artificial Sequence: Synthetic oligonucleotide
gccgaacuacucucuaaaa

SEQ ID NO: 1364229 - RNA, 19 nt, Artificial Sequence
  Description of Artificial Sequence: Synthetic oligonucleotide
ccgcaagagggcgucauug

SEQ ID NO: 1364230 - RNA, 19 nt, Artificial Sequence
  Description of Artificial Sequence: Synthetic oligonucleotide
cacccuuguguggcagggc

SEQ ID NO: 1364231 - RNA, 19 nt, Artificial Sequence
  Description of Artificial Sequence: Synthetic oligonucleotide
  modified_base (2)..(2): a, c, u, g, unknown or other
cngcagcugaacacaggua

SEQ ID NO: 1364232 - RNA, 19 nt, Artificial Sequence
  Description of Artificial Sequence: Synthetic oligonucleotide
cccgacacuuguugcauga

SEQ ID NO: 1364233 - RNA, 19 nt, Artificial Sequence
  Description of Artificial Sequence: Synthetic oligonucleotide
cagcguggugcuccuucuc

SEQ ID NO: 1364234 - RNA, 19 nt, Artificial Sequence
  Description of Artificial Sequence: Synthetic oligonucleotide
caucccgcacauaggaauu

SEQ ID NO: 1364235 - RNA, 19 nt, Artificial Sequence
  Description of Artificial Sequence: Synthetic oligonucleotide
aggugcucccguagcuucu

SEQ ID NO: 1364236 - RNA, 19 nt, Artificial Sequence
  Description of Artificial Sequence: Synthetic oligonucleotide
ggggaacuuagggcagacc

SEQ ID NO: 1364237 - RNA, 19 nt, Artificial Sequence
  Description of Artificial Sequence: Synthetic oligonucleotide
ccgaacuacucucuaaaau

SEQ ID NO: 1364238 - RNA, 19 nt, Artificial Sequence
  Description of Artificial Sequence: Synthetic oligonucleotide
gccuccggcaggauguuuc

SEQ ID NO: 1364239 - RNA, 19 nt, Artificial Sequence
  Description of Artificial Sequence: Synthetic oligonucleotide
gaggcccagagcugaggau

SEQ ID NO: 1364240 - RNA, 19 nt, Artificial Sequence
  Description of Artificial Sequence: Synthetic oligonucleotide
uggcgaagucugagaucuu

SEQ ID NO: 1364241 - RNA, 19 nt, Artificial Sequence
  Description of Artificial Sequence: Synthetic oligonucleotide
cgucgauuacaugcucccg

SEQ ID NO: 1364242 - RNA, 19 nt, Artificial Sequence
  Description of Artificial Sequence: Synthetic oligonucleotide
gacacucggugagcaggaa

SEQ ID NO: 1364243 - RNA, 19 nt, Artificial Sequence
  Description of Artificial Sequence: Synthetic oligonucleotide
ggacuccaggaaugagcuc

SEQ ID NO: 1364244 - RNA, 19 nt, Artificial Sequence
  Description of Artificial Sequence: Synthetic oligonucleotide
agguucccuuccaggugca

SEQ ID NO: 1364245 - RNA, 19 nt, Artificial Sequence
  Description of Artificial Sequence: Synthetic oligonucleotide
ugaggcggaccaggccuuu

SEQ ID NO: 1364246 - RNA, 19 nt, Artificial Sequence
  Description of Artificial Sequence: Synthetic oligonucleotide
ggucacgucaggccugaau

SEQ ID NO: 1364247 - RNA, 19 nt, Artificial Sequence
  Description of Artificial Sequence: Synthetic oligonucleotide
cacagguuaaggggaacuu

SEQ ID NO: 1364248 - RNA, 19 nt, Artificial Sequence
  Description of Artificial Sequence: Synthetic oligonucleotide
  modified_base (15)..(15): a, c, u, g, unknown or other
cggcaggauguuucngcag

SEQ ID NO: 1364249 - RNA, 19 nt, Artificial Sequence
  Description of Artificial Sequence: Synthetic oligonucleotide
ccuaguagggguggcuaga

SEQ ID NO: 1364250 - RNA, 19 nt, Artificial Sequence
  Description of Artificial Sequence: Synthetic oligonucleotide
cugccggcuacaagccucu

SEQ ID NO: 1364251 - RNA, 19 nt, Artificial Sequence
  Description of Artificial Sequence: Synthetic oligonucleotide
acggaacccgacacuuguu

SEQ ID NO: 1364252 - RNA, 19 nt, Artificial Sequence
  Description of Artificial Sequence: Synthetic oligonucleotide
ugccggcuacaagccucug

SEQ ID NO: 1364253 - RNA, 19 nt, Artificial Sequence
  Description of Artificial Sequence: Synthetic oligonucleotide
gcggaccaggccuuuacau

SEQ ID NO: 1364254 - RNA, 19 nt, Artificial Sequence
  Description of Artificial Sequence: Synthetic oligonucleotide
ggcgucauuggggccuuuc

SEQ ID NO: 1364255 - RNA, 19 nt, Artificial Sequence
  Description of Artificial Sequence: Synthetic oligonucleotide
cugcacggaacccgacacu

SEQ ID NO: 1364256 - RNA, 19 nt, Artificial Sequence
  Description of Artificial Sequence: Synthetic oligonucleotide
  modified_base (19)..(19): a, c, u, g, unknown or other
ccuccggcaggauguuucn

SEQ ID NO: 1364257 - RNA, 19 nt, Artificial Sequence
  Description of Artificial Sequence: Synthetic oligonucleotide
gccaccgcaagagggcguc

SEQ ID NO: 1364258 - RNA, 19 nt, Artificial Sequence
  Description of Artificial Sequence: Synthetic oligonucleotide
gcagguguccugccagcua

SEQ ID NO: 1364259 - RNA, 19 nt, Artificial Sequence
  Description of Artificial Sequence: Synthetic oligonucleotide
ggcagaccucguaguguac

SEQ ID NO: 1364260 - RNA, 19 nt, Artificial Sequence
  Description of Artificial Sequence: Synthetic oligonucleotide
gcgcuuucuggcgaagucu

SEQ ID NO: 1364261 - RNA, 19 nt, Artificial Sequence
  Description of Artificial Sequence: Synthetic oligonucleotide
cggcuacaagccucugcag

SEQ ID NO: 1364262 - RNA, 19 nt, Artificial Sequence
  Description of Artificial Sequence: Synthetic oligonucleotide
ccucuggaaggaggaugag

SEQ ID NO: 1364263 - RNA, 19 nt, Artificial Sequence
  Description of Artificial Sequence: Synthetic oligonucleotide
ggugaguuccccgcccagu

SEQ ID NO: 1364264 - RNA, 19 nt, Artificial Sequence
  Description of Artificial Sequence: Synthetic oligonucleotide
agggugccuugcagugcug

SEQ ID NO: 1364265 - RNA, 19 nt, Artificial Sequence
  Description of Artificial Sequence: Synthetic oligonucleotide
ucccugcgggcagcauuau

SEQ ID NO: 1364266 - RNA, 19 nt, Artificial Sequence
  Description of Artificial Sequence: Synthetic oligonucleotide
cuucccgguucaggacgca

SEQ ID NO: 1364267 - RNA, 19 nt, Artificial Sequence
  Description of Artificial Sequence: Synthetic oligonucleotide
agggcgucauuggggccuu

SEQ ID NO: 1364268 - RNA, 19 nt, Artificial Sequence
  Description of Artificial Sequence: Synthetic oligonucleotide
ccaaugcuccucucuaguu

SEQ ID NO: 1364269 - RNA, 19 nt, Artificial Sequence
  Description of Artificial Sequence: Synthetic oligonucleotide
cccugcgggcagcauuauc

SEQ ID NO: 1364270 - RNA, 19 nt, Artificial Sequence
  Description of Artificial Sequence: Synthetic oligonucleotide
ccuucauggcagcucucgu

SEQ ID NO: 1364271 - RNA, 19 nt, Artificial Sequence
  Description of Artificial Sequence: Synthetic oligonucleotide
ccuucucgcugaggcggac

SEQ ID NO: 1364272 - RNA, 19 nt, Artificial Sequence
  Description of Artificial Sequence: Synthetic oligonucleotide
caccgcaagagggcgucau

SEQ ID NO: 1364273 - RNA, 19 nt, Artificial Sequence
  Description of Artificial Sequence: Synthetic oligonucleotide
accucccugcgggcagcau

SEQ ID NO: 1364274 - RNA, 19 nt, Artificial Sequence
  Description of Artificial Sequence: Synthetic oligonucleotide
guuccccgcccagugccau

SEQ ID NO: 1364275 - RNA, 19 nt, Artificial Sequence
  Description of Artificial Sequence: Synthetic oligonucleotide
ccuugaggccaaugcuccu

SEQ ID NO: 1364276 - RNA, 19 nt, Artificial Sequence
  Description of Artificial Sequence: Synthetic oligonucleotide
caccucccugcgggcagca

SEQ ID NO: 1364277 - RNA, 19 nt, Artificial Sequence
  Description of Artificial Sequence: Synthetic oligonucleotide
gcaugguuacagggugccu

SEQ ID NO: 1364278 - RNA, 19 nt, Artificial Sequence
  Description of Artificial Sequence: Synthetic oligonucleotide
aggucacgucaggccugaa

SEQ ID NO: 1364279 - RNA, 19 nt, Artificial Sequence
  Description of Artificial Sequence: Synthetic oligonucleotide
cccgcacauaggaauucuu

SEQ ID NO: 1364280 - RNA, 19 nt, Artificial Sequence
  Description of Artificial Sequence: Synthetic oligonucleotide
ccagguccgcaugguuaca

SEQ ID NO: 1364281 - RNA, 19 nt, Artificial Sequence
  Description of Artificial Sequence: Synthetic oligonucleotide
ggguggcuagaguccuguu

SEQ ID NO: 1364282 - RNA, 19 nt, Artificial Sequence
  Description of Artificial Sequence: Synthetic oligonucleotide
cgauuacaugcucccgguu

SEQ ID NO: 1364283 - RNA, 19 nt, Artificial Sequence
  Description of Artificial Sequence: Synthetic oligonucleotide
cccucucuacuucccgguu

SEQ ID NO: 1364284 - RNA, 19 nt, Artificial Sequence
  Description of Artificial Sequence: Synthetic oligonucleotide
ccaccgcaagagggcguca

SEQ ID NO: 1364285 - RNA, 19 nt, Artificial Sequence
  Description of Artificial Sequence: Synthetic oligonucleotide
ccgacacuuguugcaugau

SEQ ID NO: 1364286 - RNA, 19 nt, Artificial Sequence
  Description of Artificial Sequence: Synthetic oligonucleotide
ggccuccggcaggauguuu

SEQ ID NO: 1364287 - RNA, 19 nt, Artificial Sequence
  Description of Artificial Sequence: Synthetic oligonucleotide
gggccuccggcaggauguu

SEQ ID NO: 1364288 - RNA, 19 nt, Artificial Sequence
  Description of Artificial Sequence: Synthetic oligonucleotide
agcguuauuaauuaccugc

SEQ ID NO: 1364289 - RNA, 19 nt, Artificial Sequence
  Description of Artificial Sequence: Synthetic oligonucleotide
ugcauaaaggacaagacag

SEQ ID NO: 1364290 - RNA, 19 nt, Artificial Sequence
  Description of Artificial Sequence: Synthetic oligonucleotide
uaaaggacaagacagacug

SEQ ID NO: 1364291 - RNA, 19 nt, Artificial Sequence
  Description of Artificial Sequence: Synthetic oligonucleotide
uggccauuaaauuaaaucg

SEQ ID NO: 1364292 - RNA, 19 nt, Artificial Sequence
  Description of Artificial Sequence: Synthetic oligonucleotide
aaauaauggaauuuggcca

SEQ ID NO: 1364293 - RNA, 19 nt, Artificial Sequence
  Description of Artificial Sequence: Synthetic oligonucleotide
aauuagaaacagaugaccc

SEQ ID NO: 1364294 - RNA, 19 nt, Artificial Sequence
  Description of Artificial Sequence: Synthetic oligonucleotide
uuuaaguaagaucugacac

SEQ ID NO: 1364295 - RNA, 19 nt, Artificial Sequence
  Description of Artificial Sequence: Synthetic oligonucleotide
aauaauggaauuuggccag

SEQ ID NO: 1364296 - RNA, 19 nt, Artificial Sequence
  Description of Artificial Sequence: Synthetic oligonucleotide
aguucaguaacacacuuac

SEQ ID NO: 1364297 - RNA, 19 nt, Artificial Sequence
  Description of Artificial Sequence: Synthetic oligonucleotide
uaaguggacaucucgaugg

SEQ ID NO: 1364298 - RNA, 19 nt, Artificial Sequence
  Description of Artificial Sequence: Synthetic oligonucleotide
auugcaugcaccuaaauca

SEQ ID NO: 1364299 - RNA, 19 nt, Artificial Sequence
  Description of Artificial Sequence: Synthetic oligonucleotide
aaauuggauauauuaagcu

SEQ ID NO: 1364300 - RNA, 19 nt, Artificial Sequence
  Description of Artificial Sequence: Synthetic oligonucleotide
auuccuuaguauuuaaugg

SEQ ID NO: 1364301 - RNA, 19 nt, Artificial Sequence
  Description of Artificial Sequence: Synthetic oligonucleotide
auauuuucgaucuuauauc

SEQ ID NO: 1364302 - RNA, 19 nt, Artificial Sequence
  Description of Artificial Sequence: Synthetic oligonucleotide
ucaauuaggauguuguuca

SEQ ID NO: 1364303 - RNA, 19 nt, Artificial Sequence
  Description of Artificial Sequence: Synthetic oligonucleotide
aguccugaaccacagagcc

SEQ ID NO: 1364304 - RNA, 19 nt, Artificial Sequence
  Description of Artificial Sequence: Synthetic oligonucleotide
auggccauuaaauuaaauc

SEQ ID NO: 1364305 - RNA, 19 nt, Artificial Sequence
  Description of Artificial Sequence: Synthetic oligonucleotide
aaauuaacccaugaacugg

SEQ ID NO: 1364306 - RNA, 19 nt, Artificial Sequence
  Description of Artificial Sequence: Synthetic oligonucleotide
aaauucaaacaucugcugu

SEQ ID NO: 1364307 - RNA, 19 nt, Artificial Sequence
  Description of Artificial Sequence: Synthetic oligonucleotide
acuacccugaucuguaucc

SEQ ID NO: 1364308 - RNA, 19 nt, Artificial Sequence
  Description of Artificial Sequence: Synthetic oligonucleotide
gacaauaaaaguauuacuc

SEQ ID NO: 1364309 - RNA, 19 nt, Artificial Sequence
  Description of Artificial Sequence: Synthetic oligonucleotide
ucuuauaucucuuuaacuu

SEQ ID NO: 1364310 - RNA, 19 nt, Artificial Sequence
  Description of Artificial Sequence: Synthetic oligonucleotide
uguaguuauguuuccagag

SEQ ID NO: 1364311 - RNA, 19 nt, Artificial Sequence
  Description of Artificial Sequence: Synthetic oligonucleotide
aaaacuuugggaaaauucu

SEQ ID NO: 1364312 - RNA, 19 nt, Artificial Sequence
  Description of Artificial Sequence: Synthetic oligonucleotide
aaguauuacucagaauagc

SEQ ID NO: 1364313 - RNA, 19 nt, Artificial Sequence
  Description of Artificial Sequence: Synthetic oligonucleotide
uaacacacuuacaauagcc

SEQ ID NO: 1364314 - RNA, 19 nt, Artificial Sequence
  Description of Artificial Sequence: Synthetic oligonucleotide
ucuacaaguggaauuaacu

SEQ ID NO: 1364315 - RNA, 19 nt, Artificial Sequence
  Description of Artificial Sequence: Synthetic oligonucleotide
ugaaaauagugcagcauag

SEQ ID NO: 1364316 - RNA, 19 nt, Artificial Sequence
  Description of Artificial Sequence: Synthetic oligonucleotide
uuuaaauucugacaauguc

SEQ ID NO: 1364317 - RNA, 19 nt, Artificial Sequence
  Description of Artificial Sequence: Synthetic oligonucleotide
uuaauuaccugcuuggcaa

SEQ ID NO: 1364318 - RNA, 19 nt, Artificial Sequence
  Description of Artificial Sequence: Synthetic oligonucleotide
uuaaugguuuccaugaaaa

SEQ ID NO: 1364319 - RNA, 19 nt, Artificial Sequence
  Description of Artificial Sequence: Synthetic oligonucleotide
aaccgaauccuuuaaugag

SEQ ID NO: 1364320 - RNA, 19 nt, Artificial Sequence
  Description of Artificial Sequence: Synthetic oligonucleotide
uaagaucugacacucaaaa

SEQ ID NO: 1364321 - RNA, 19 nt, Artificial Sequence
  Description of Artificial Sequence: Synthetic oligonucleotide
ucagaauagcuacagauua

SEQ ID NO: 1364322 - RNA, 19 nt, Artificial Sequence
  Description of Artificial Sequence: Synthetic oligonucleotide
uuaugcuuccuucugauau

SEQ ID NO: 1364323 - RNA, 19 nt, Artificial Sequence
  Description of Artificial Sequence: Synthetic oligonucleotide
uauuuucgaucuuauaucu

SEQ ID NO: 1364324 - RNA, 19 nt, Artificial Sequence
  Description of Artificial Sequence: Synthetic oligonucleotide
uuacuuguaguuauguuuc

SEQ ID NO: 1364325 - RNA, 19 nt, Artificial Sequence
  Description of Artificial Sequence: Synthetic oligonucleotide
aauucauacagccuuccau

SEQ ID NO: 1364326 - RNA, 19 nt, Artificial Sequence
  Description of Artificial Sequence: Synthetic oligonucleotide
uuaaguaagaucugacacu

SEQ ID NO: 1364327 - RNA, 19 nt, Artificial Sequence
  Description of Artificial Sequence: Synthetic oligonucleotide
uauauuaagcugacaauaa

SEQ ID NO: 1364328 - RNA, 19 nt, Artificial Sequence
  Description of Artificial Sequence: Synthetic oligonucleotide
acaagcguuauuaauuacc

SEQ ID NO: 1364329 - RNA, 19 nt, Artificial Sequence
  Description of Artificial Sequence: Synthetic oligonucleotide
aaauuaaaucgaauuucac

SEQ ID NO: 1364330 - RNA, 19 nt, Artificial Sequence
  Description of Artificial Sequence: Synthetic oligonucleotide
aaauauccucuucacuuag

SEQ ID NO: 1364331 - RNA, 19 nt, Artificial Sequence
  Description of Artificial Sequence: Synthetic oligonucleotide
uccauuaacuggaacauaa

SEQ ID NO: 1364332 - RNA, 19 nt, Artificial Sequence
  Description of Artificial Sequence: Synthetic oligonucleotide
cacugagucaauuaggaug

SEQ ID NO: 1364333 - RNA, 19 nt, Artificial Sequence
  Description of Artificial Sequence: Synthetic oligonucleotide
uacaaguggaauuaacugu

SEQ ID NO: 1364334 - RNA, 19 nt, Artificial Sequence
  Description of Artificial Sequence: Synthetic oligonucleotide
aaucgaauuucaccuucac

SEQ ID NO: 1364335 - RNA, 19 nt, Artificial Sequence
  Description of Artificial Sequence: Synthetic oligonucleotide
ucugucagauacaauggcc

SEQ ID NO: 1364336 - RNA, 19 nt, Artificial Sequence
  Description of Artificial Sequence: Synthetic oligonucleotide
ucuacuugcacuccucggc

SEQ ID NO: 1364337 - RNA, 19 nt, Artificial Sequence
  Description of Artificial Sequence: Synthetic oligonucleotide
gacugaauagcacuuaaca

SEQ ID NO: 1364338 - RNA, 19 nt, Artificial Sequence
  Description of Artificial Sequence: Synthetic oligonucleotide
acuuacaauagccugcgug

SEQ ID NO: 1364339 - RNA, 19 nt, Artificial Sequence
  Description of Artificial Sequence: Synthetic oligonucleotide
uuguaucaaauucaaacau

SEQ ID NO: 1364340 - RNA, 19 nt, Artificial Sequence
  Description of Artificial Sequence: Synthetic oligonucleotide
aguaccaagagcuuucaga

SEQ ID NO: 1364341 - RNA, 19 nt, Artificial Sequence
  Description of Artificial Sequence: Synthetic oligonucleotide
uauuuaauaugcucuacau

SEQ ID NO: 1364342 - RNA, 19 nt, Artificial Sequence
  Description of Artificial Sequence: Synthetic oligonucleotide
ugcaccuaaaucaauuggu

SEQ ID NO: 1364343 - RNA, 19 nt, Artificial Sequence
  Description of Artificial Sequence: Synthetic oligonucleotide
ugcacugagucaauuagga

SEQ ID NO: 1364344 - RNA, 19 nt, Artificial Sequence
  Description of Artificial Sequence: Synthetic oligonucleotide
uacaauggccauuaaauua

SEQ ID NO: 1364345 - RNA, 19 nt, Artificial Sequence
  Description of Artificial Sequence: Synthetic oligonucleotide
caaugucucuccuaagugg

SEQ ID NO: 1364346 - RNA, 19 nt, Artificial Sequence
  Description of Artificial Sequence: Synthetic oligonucleotide
agcuccauauuucuucuac

SEQ ID NO: 1364347 - RNA, 19 nt, Artificial Sequence
  Description of Artificial Sequence: Synthetic oligonucleotide
accuaaaucaauugguccu

SEQ ID NO: 1364348 - RNA, 19 nt, Artificial Sequence
  Description of Artificial Sequence: Synthetic oligonucleotide
caauuagaaacagaugacc

SEQ ID NO: 1364349 - RNA, 19 nt, Artificial Sequence
  Description of Artificial Sequence: Synthetic oligonucleotide
ugaauccaugcauaaagga

SEQ ID NO: 1364350 - RNA, 19 nt, Artificial Sequence
  Description of Artificial Sequence: Synthetic oligonucleotide
auuaauuaccugcuuggca

SEQ ID NO: 1364351 - RNA, 19 nt, Artificial Sequence
  Description of Artificial Sequence: Synthetic oligonucleotide
uuccuuaguauuuaauggu

SEQ ID NO: 1364352 - RNA, 19 nt, Artificial Sequence
  Description of Artificial Sequence: Synthetic oligonucleotide
aaauagugcagcauagugu

SEQ ID NO: 1364353 - RNA, 19 nt, Artificial Sequence
  Description of Artificial Sequence: Synthetic oligonucleotide
acuuaacacaguacuaccc

SEQ ID NO: 1364354 - RNA, 19 nt, Artificial Sequence
  Description of Artificial Sequence: Synthetic oligonucleotide
auucucagguucuaagcuc

SEQ ID NO: 1364355 - RNA, 19 nt, Artificial Sequence
  Description of Artificial Sequence: Synthetic oligonucleotide
uuaauaugcucuacaugca

SEQ ID NO: 1364356 - RNA, 19 nt, Artificial Sequence
  Description of Artificial Sequence: Synthetic oligonucleotide
cuuaguauuuaaugguuuc

SEQ ID NO: 1364357 - RNA, 19 nt, Artificial Sequence
  Description of Artificial Sequence: Synthetic oligonucleotide
ugucgaaucacaucugagu

SEQ ID NO: 1364358 - RNA, 19 nt, Artificial Sequence
  Description of Artificial Sequence: Synthetic oligonucleotide
ucuacaugcacaugaugca

SEQ ID NO: 1364359 - RNA, 19 nt, Artificial Sequence
  Description of Artificial Sequence: Synthetic oligonucleotide
ugagacaccacuccccggc

SEQ ID NO: 1364360 - RNA, 19 nt, Artificial Sequence
  Description of Artificial Sequence: Synthetic oligonucleotide
aguaacacacuuacaauag

SEQ ID NO: 1364361 - RNA, 19 nt, Artificial Sequence
  Description of Artificial Sequence: Synthetic oligonucleotide
ugacaaagugaaaagcauc

SEQ ID NO: 1364362 - RNA, 19 nt, Artificial Sequence
  Description of Artificial Sequence: Synthetic oligonucleotide
aucuuauaucucuuuaacu

SEQ ID NO: 1364363 - RNA, 19 nt, Artificial Sequence
  Description of Artificial Sequence: Synthetic oligonucleotide
augaaaauagugcagcaua

SEQ ID NO: 1364364 - RNA, 19 nt, Artificial Sequence
  Description of Artificial Sequence: Synthetic oligonucleotide
caugcauaaaggacaagac

SEQ ID NO: 1364365 - RNA, 19 nt, Artificial Sequence
  Description of Artificial Sequence: Synthetic oligonucleotide
gaauccaugcauaaaggac

SEQ ID NO: 1364366 - RNA, 19 nt, Artificial Sequence
  Description of Artificial Sequence: Synthetic oligonucleotide
ggauauauuaagcugacaa

SEQ ID NO: 1364367 - RNA, 19 nt, Artificial Sequence
  Description of Artificial Sequence: Synthetic oligonucleotide
uucacuuaguuuccugagc

SEQ ID NO: 1364368 - RNA, 19 nt, Artificial Sequence
  Description of Artificial Sequence: Synthetic oligonucleotide
aguauuacucagaauagcu

SEQ ID NO: 1364369 - RNA, 19 nt, Artificial Sequence
  Description of Artificial Sequence: Synthetic oligonucleotide
ugaucuguauccauggguu

SEQ ID NO: 1364370 - RNA, 19 nt, Artificial Sequence
  Description of Artificial Sequence: Synthetic oligonucleotide
gauacaauggccauuaaau

SEQ ID NO: 1364371 - RNA, 19 nt, Artificial Sequence
  Description of Artificial Sequence: Synthetic oligonucleotide
uuaacacaguacuacccug

SEQ ID NO: 1364372 - RNA, 19 nt, Artificial Sequence
  Description of Artificial Sequence: Synthetic oligonucleotide
aaggacaagacagacuggu

SEQ ID NO: 1364373 - RNA, 19 nt, Artificial Sequence
  Description of Artificial Sequence: Synthetic oligonucleotide
caccuaaaucaauuggucc

SEQ ID NO: 1364374 - RNA, 19 nt, Artificial Sequence
  Description of Artificial Sequence: Synthetic oligonucleotide
guuuaaguaagaucugaca

SEQ ID NO: 1364375 - RNA, 19 nt, Artificial Sequence
  Description of Artificial Sequence: Synthetic oligonucleotide
acccaguuuaaguaagauc

SEQ ID NO: 1364376 - RNA, 19 nt, Artificial Sequence
  Description of Artificial Sequence: Synthetic oligonucleotide
accgaauccuuuaaugagc

SEQ ID NO: 1364377 - RNA, 19 nt, Artificial Sequence
  Description of Artificial Sequence: Synthetic oligonucleotide
aucaaauaauggaauuugg

SEQ ID NO: 1364378 - RNA, 19 nt, Artificial Sequence
  Description of Artificial Sequence: Synthetic oligonucleotide
agguaguuaugcuuccuuc

SEQ ID NO: 1364379 - RNA, 19 nt, Artificial Sequence
  Description of Artificial Sequence: Synthetic oligonucleotide
agacagacugguacuaugc

SEQ ID NO: 1364380 - RNA, 19 nt, Artificial Sequence
  Description of Artificial Sequence: Synthetic oligonucleotide
uaacacaguacuacccuga

SEQ ID NO: 1364381 - RNA, 19 nt, Artificial Sequence
  Description of Artificial Sequence: Synthetic oligonucleotide
uaucucuuuaacuuuugua

SEQ ID NO: 1364382 - RNA, 19 nt, Artificial Sequence
  Description of Artificial Sequence: Synthetic oligonucleotide
aaugucucuccuaagugga

SEQ ID NO: 1364383 - RNA, 19 nt, Artificial Sequence
  Description of Artificial Sequence: Synthetic oligonucleotide
uccuaaguggacaucucga

SEQ ID NO: 1364384 - RNA, 19 nt, Artificial Sequence
  Description of Artificial Sequence: Synthetic oligonucleotide
ucuaauucauacagccuuc

SEQ ID NO: 1364385 - RNA, 19 nt, Artificial Sequence
  Description of Artificial Sequence: Synthetic oligonucleotide
uuuauuuaauaugcucuac

SEQ ID NO: 1364386 - RNA, 19 nt, Artificial Sequence
  Description of Artificial Sequence: Synthetic oligonucleotide
augcucuacaugcacauga

SEQ ID NO: 1364387 - RNA, 19 nt, Artificial Sequence
  Description of Artificial Sequence: Synthetic oligonucleotide
uuggauauauuaagcugac

SEQ ID NO: 1364388 - RNA, 19 nt, Artificial Sequence
  Description of Artificial Sequence: Synthetic oligonucleotide
uugucgaaucacaucugag

SEQ ID NO: 1364389 - RNA, 19 nt, Artificial Sequence
  Description of Artificial Sequence: Synthetic oligonucleotide
accucgugcucuccgaagc

SEQ ID NO: 1364390 - RNA, 19 nt, Artificial Sequence
  Description of Artificial Sequence: Synthetic oligonucleotide
aaguggacaucucgauggg

SEQ ID NO: 1364391 - RNA, 19 nt, Artificial Sequence
  Description of Artificial Sequence: Synthetic oligonucleotide
guggaauuaacuguuggug

SEQ ID NO: 1364392 - RNA, 19 nt, Artificial Sequence
  Description of Artificial Sequence: Synthetic oligonucleotide
uauuaauuaccugcuuggc

SEQ ID NO: 1364393 - RNA, 19 nt, Artificial Sequence
  Description of Artificial Sequence: Synthetic oligonucleotide
uucuaagcuccauauuucu

SEQ ID NO: 1364394 - RNA, 19 nt, Artificial Sequence
  Description of Artificial Sequence: Synthetic oligonucleotide
uuguaguuauguuuccaga

SEQ ID NO: 1364395 - RNA, 19 nt, Artificial Sequence
  Description of Artificial Sequence: Synthetic oligonucleotide
cacuuaacacaguacuacc

SEQ ID NO: 1364396 - RNA, 19 nt, Artificial Sequence
  Description of Artificial Sequence: Synthetic oligonucleotide
aauaugcucuacaugcaca

SEQ ID NO: 1364397 - RNA, 19 nt, Artificial Sequence
  Description of Artificial Sequence: Synthetic oligonucleotide
acugagucaauuaggaugu

SEQ ID NO: 1364398 - RNA, 19 nt, Artificial Sequence
  Description of Artificial Sequence: Synthetic oligonucleotide
aacacacuuacaauagccu

SEQ ID NO: 1364399 - RNA, 19 nt, Artificial Sequence
  Description of Artificial Sequence: Synthetic oligonucleotide
caauuccauaaugaaaggc

SEQ ID NO: 1364400 - RNA, 19 nt, Artificial Sequence
  Description of Artificial Sequence: Synthetic oligonucleotide
acaucugaguugcucaaug

SEQ ID NO: 1364401 - RNA, 19 nt, Artificial Sequence
  Description of Artificial Sequence: Synthetic oligonucleotide
ucgaaucacaucugaguug

SEQ ID NO: 1364402 - RNA, 19 nt, Artificial Sequence
  Description of Artificial Sequence: Synthetic oligonucleotide
aucuugauugcaugcaccu

SEQ ID NO: 1364403 - RNA, 19 nt, Artificial Sequence
  Description of Artificial Sequence: Synthetic oligonucleotide
cacaguacuacccugaucu

SEQ ID NO: 1364404 - RNA, 19 nt, Artificial Sequence
  Description of Artificial Sequence: Synthetic oligonucleotide
auauuaagcugacaauaaa

SEQ ID NO: 1364405 - RNA, 19 nt, Artificial Sequence
  Description of Artificial Sequence: Synthetic oligonucleotide
aagcguuauuaauuaccug

SEQ ID NO: 1364406 - RNA, 19 nt, Artificial Sequence
  Description of Artificial Sequence: Synthetic oligonucleotide
uuaacuguuggugcucugc

SEQ ID NO: 1364407 - RNA, 19 nt, Artificial Sequence
  Description of Artificial Sequence: Synthetic oligonucleotide
cuauaacuggucucacugc

SEQ ID NO: 1364408 - RNA, 19 nt, Artificial Sequence
  Description of Artificial Sequence: Synthetic oligonucleotide
caugcaccuaaaucaauug

SEQ ID NO: 1364409 - RNA, 19 nt, Artificial Sequence
  Description of Artificial Sequence: Synthetic oligonucleotide
ucagauacaauggccauua

SEQ ID NO: 1364410 - RNA, 19 nt, Artificial Sequence
  Description of Artificial Sequence: Synthetic oligonucleotide
ucuggaguccugaaccaca

SEQ ID NO: 1364411 - RNA, 19 nt, Artificial Sequence
  Description of Artificial Sequence: Synthetic oligonucleotide
gucgcuuuccaugagacac

SEQ ID NO: 1364412 - RNA, 19 nt, Artificial Sequence
  Description of Artificial Sequence: Synthetic oligonucleotide
aaacccgccgccgagcguc

SEQ ID NO: 1364413 - RNA, 19 nt, Artificial Sequence
  Description of Artificial Sequence: Synthetic oligonucleotide
uaacuggaacauaacugac

SEQ ID NO: 1364414 - RNA, 19 nt, Artificial Sequence
  Description of Artificial Sequence: Synthetic oligonucleotide
agauacaauggccauuaaa

SEQ ID NO: 1364415 - RNA, 19 nt, Artificial Sequence
  Description of Artificial Sequence: Synthetic oligonucleotide
uaguuaugcuuccuucuga

SEQ ID NO: 1364416 - RNA, 19 nt, Artificial Sequence
  Description of Artificial Sequence: Synthetic oligonucleotide
uccuuaguauuuaaugguu

SEQ ID NO: 1364417 - RNA, 19 nt, Artificial Sequence
  Description of Artificial Sequence: Synthetic oligonucleotide
uaauucauacagccuucca

SEQ ID NO: 1364418 - RNA, 19 nt, Artificial Sequence
  Description of Artificial Sequence: Synthetic oligonucleotide
acacuuacaauagccugcg

SEQ ID NO: 1364419 - RNA, 19 nt, Artificial Sequence
  Description of Artificial Sequence: Synthetic oligonucleotide
accuucacuauacuuuugu

SEQ ID NO: 1364420 - RNA, 19 nt, Artificial Sequence
  Description of Artificial Sequence: Synthetic oligonucleotide
ucggugaagaccccggggu

SEQ ID NO: 1364421 - RNA, 19 nt, Artificial Sequence
  Description of Artificial Sequence: Synthetic oligonucleotide
cuccuaaguggacaucucg

SEQ ID NO: 1364422 - RNA, 19 nt, Artificial Sequence
  Description of Artificial Sequence: Synthetic oligonucleotide
gacagacugguacuaugcc

SEQ ID NO: 1364423 - RNA, 19 nt, Artificial Sequence
  Description of Artificial Sequence: Synthetic oligonucleotide
acagacugguacuaugcca

SEQ ID NO: 1364424 - RNA, 19 nt, Artificial Sequence
  Description of Artificial Sequence: Synthetic oligonucleotide
cuucuacuugcacuccucg

SEQ ID NO: 1364425 - RNA, 19 nt, Artificial Sequence
  Description of Artificial Sequence: Synthetic oligonucleotide
augccaaacgugcacugag

SEQ ID NO: 1364426 - RNA, 19 nt, Artificial Sequence
  Description of Artificial Sequence: Synthetic oligonucleotide
ucgaucuuauaucucuuua

SEQ ID NO: 1364427 - RNA, 19 nt, Artificial Sequence
  Description of Artificial Sequence: Synthetic oligonucleotide
gauggguacaguucaguaa

SEQ ID NO: 1364428 - RNA, 19 nt, Artificial Sequence
  Description of Artificial Sequence: Synthetic oligonucleotide
aacuggaacauaacugaca

SEQ ID NO: 1364429 - RNA, 19 nt, Artificial Sequence
  Description of Artificial Sequence: Synthetic oligonucleotide
cuaaguggacaucucgaug

SEQ ID NO: 1364430 - RNA, 19 nt, Artificial Sequence
  Description of Artificial Sequence: Synthetic oligonucleotide
aucgaauuucaccuucacu

SEQ ID NO: 1364431 - RNA, 19 nt, Artificial Sequence
  Description of Artificial Sequence: Synthetic oligonucleotide
uaacuguuggugcucugcu

SEQ ID NO: 1364432 - RNA, 19 nt, Artificial Sequence
  Description of Artificial Sequence: Synthetic oligonucleotide
caucugaguugcucaaugc

SEQ ID NO: 1364433 - RNA, 19 nt, Artificial Sequence
  Description of Artificial Sequence: Synthetic oligonucleotide
acuguuggugcucugcuaa

SEQ ID NO: 1364434 - RNA, 19 nt, Artificial Sequence
  Description of Artificial Sequence: Synthetic oligonucleotide
acauaacugacaaagugaa

SEQ ID NO: 1364435 - RNA, 19 nt, Artificial Sequence
  Description of Artificial Sequence: Synthetic oligonucleotide
ugcacuugucgaaucacau

SEQ ID NO: 1364436 - RNA, 19 nt, Artificial Sequence
  Description of Artificial Sequence: Synthetic oligonucleotide
aguuaugcuuccuucugau

SEQ ID NO: 1364437 - RNA, 19 nt, Artificial Sequence
  Description of Artificial Sequence: Synthetic oligonucleotide
aauugguccuucucuuaau

SEQ ID NO: 1364438 - RNA, 19 nt, Artificial Sequence
  Description of Artificial Sequence: Synthetic oligonucleotide
caaccgaauccuuuaauga

SEQ ID NO: 1364439 - RNA, 19 nt, Artificial Sequence
  Description of Artificial Sequence: Synthetic oligonucleotide
agguuuuguuacuuguagu

SEQ ID NO: 1364440 - RNA, 19 nt, Artificial Sequence
  Description of Artificial Sequence: Synthetic oligonucleotide
gacaaugucucuccuaagu

SEQ ID NO: 1364441 - RNA, 19 nt, Artificial Sequence
  Description of Artificial Sequence: Synthetic oligonucleotide
cuaauucauacagccuucc

SEQ ID NO: 1364442 - RNA, 19 nt, Artificial Sequence
  Description of Artificial Sequence: Synthetic oligonucleotide
ucagguucuaagcuccaua

SEQ ID NO: 1364443 - RNA, 19 nt, Artificial Sequence
  Description of Artificial Sequence: Synthetic oligonucleotide
uuguuacuuguaguuaugu

SEQ ID NO: 1364444 - RNA, 19 nt, Artificial Sequence
  Description of Artificial Sequence: Synthetic oligonucleotide
uuuaugccacuuuuauuua

SEQ ID NO: 1364445 - RNA, 19 nt, Artificial Sequence
  Description of Artificial Sequence: Synthetic oligonucleotide
gcaaccgaauccuuuaaug

SEQ ID NO: 1364446 - RNA, 19 nt, Artificial Sequence
  Description of Artificial Sequence: Synthetic oligonucleotide
uguuacuuguaguuauguu

SEQ ID NO: 1364447 - RNA, 19 nt, Artificial Sequence
  Description of Artificial Sequence: Synthetic oligonucleotide
uuuguaacucagcuaucuu

SEQ ID NO: 1364448 - RNA, 19 nt, Artificial Sequence
  Description of Artificial Sequence: Synthetic oligonucleotide
cccaguuuaaguaagaucu

SEQ ID NO: 1364449 - RNA, 19 nt, Artificial Sequence
  Description of Artificial Sequence: Synthetic oligonucleotide
gacaucucgauggguacag

SEQ ID NO: 1364450 - RNA, 19 nt, Artificial Sequence
  Description of Artificial Sequence: Synthetic oligonucleotide
caguaacacacuuacaaua

SEQ ID NO: 1364451 - RNA, 19 nt, Artificial Sequence
  Description of Artificial Sequence: Synthetic oligonucleotide
ucaccuucacuauacuuuu

SEQ ID NO: 1364452 - RNA, 19 nt, Artificial Sequence
  Description of Artificial Sequence: Synthetic oligonucleotide
uuaacccaugaacuggcuu

SEQ ID NO: 1364453 - RNA, 19 nt, Artificial Sequence
  Description of Artificial Sequence: Synthetic oligonucleotide
ucauacagccuuccauuaa

SEQ ID NO: 1364454 - RNA, 19 nt, Artificial Sequence
  Description of Artificial Sequence: Synthetic oligonucleotide
cuacaugcacaugaugcag

SEQ ID NO: 1364455 - RNA, 19 nt, Artificial Sequence
  Description of Artificial Sequence: Synthetic oligonucleotide
ucuaagcuccauauuucuu

SEQ ID NO: 1364456 - RNA, 19 nt, Artificial Sequence
  Description of Artificial Sequence: Synthetic oligonucleotide
acagaugacccaguuuaag

SEQ ID NO: 1364457 - RNA, 19 nt, Artificial Sequence
  Description of Artificial Sequence: Synthetic oligonucleotide
uucauacagccuuccauua

SEQ ID NO: 1364458 - RNA, 19 nt, Artificial Sequence
  Description of Artificial Sequence: Synthetic oligonucleotide
augaacuggcuuuaacuuu

SEQ ID NO: 1364459 - RNA, 19 nt, Artificial Sequence
  Description of Artificial Sequence: Synthetic oligonucleotide
ccuuuaaugagcucgguga

SEQ ID NO: 1364460 - RNA, 19 nt, Artificial Sequence
  Description of Artificial Sequence: Synthetic oligonucleotide
cuuuccaugagacaccacu

SEQ ID NO: 1364461 - RNA, 19 nt, Artificial Sequence
  Description of Artificial Sequence: Synthetic oligonucleotide
cacuccccggcauugcucg

SEQ ID NO: 1364462 - RNA, 19 nt, Artificial Sequence
  Description of Artificial Sequence: Synthetic oligonucleotide
cauugcucgccauggcccg

SEQ ID NO: 1364463 - RNA, 19 nt, Artificial Sequence
  Description of Artificial Sequence: Synthetic oligonucleotide
auaaaggacaagacagacu

SEQ ID NO: 1364464 - RNA, 19 nt, Artificial Sequence
  Description of Artificial Sequence: Synthetic oligonucleotide
uaaugaaaggcagguaguu

SEQ ID NO: 1364465 - RNA, 19 nt, Artificial Sequence
  Description of Artificial Sequence: Synthetic oligonucleotide
auaacuggucucacugcac

SEQ ID NO: 1364466 - RNA, 19 nt, Artificial Sequence
  Description of Artificial Sequence: Synthetic oligonucleotide
acuaauccagucaucuuga

SEQ ID NO: 1364467 - RNA, 19 nt, Artificial Sequence
  Description of Artificial Sequence: Synthetic oligonucleotide
uuucaagucuggaguccug

SEQ ID NO: 1364468 - RNA, 19 nt, Artificial Sequence
  Description of Artificial Sequence: Synthetic oligonucleotide
ugacaaugucucuccuaag

SEQ ID NO: 1364469 - RNA, 19 nt, Artificial Sequence
  Description of Artificial Sequence: Synthetic oligonucleotide
cauaguguacacaggucca

SEQ ID NO: 1364470 - RNA, 19 nt, Artificial Sequence
  Description of Artificial Sequence: Synthetic oligonucleotide
gguccaaauauccucuuca

SEQ ID NO: 1364471 - RNA, 19 nt, Artificial Sequence
  Description of Artificial Sequence: Synthetic oligonucleotide
caaaacccgccgccgagcg

SEQ ID NO: 1364472 - RNA, 19 nt, Artificial Sequence
  Description of Artificial Sequence: Synthetic oligonucleotide
aguguacacagguccaaau

SEQ ID NO: 1364473 - RNA, 19 nt, Artificial Sequence
  Description of Artificial Sequence: Synthetic oligonucleotide
cugacaaugucucuccuaa

SEQ ID NO: 1364474 - RNA, 19 nt, Artificial Sequence
  Description of Artificial Sequence: Synthetic oligonucleotide
ucgcuuuccaugagacacc

SEQ ID NO: 1364475 - RNA, 19 nt, Artificial Sequence
  Description of Artificial Sequence: Synthetic oligonucleotide
ucugacaaugucucuccua

SEQ ID NO: 1364476 - RNA, 19 nt, Artificial Sequence
  Description of Artificial Sequence: Synthetic oligonucleotide
ugucucuccuaaguggaca

SEQ ID NO: 1364477 - RNA, 19 nt, Artificial Sequence
  Description of Artificial Sequence: Synthetic oligonucleotide
uggacaucucgauggguac

SEQ ID NO: 1364478 - RNA, 19 nt, Artificial Sequence
  Description of Artificial Sequence: Synthetic oligonucleotide
agcaaaacccgccgccgag

SEQ ID NO: 1364479 - RNA, 19 nt, Artificial Sequence
  Description of Artificial Sequence: Synthetic oligonucleotide
uuucgaucuuauaucucuu

SEQ ID NO: 1364480 - RNA, 19 nt, Artificial Sequence
  Description of Artificial Sequence: Synthetic oligonucleotide
guaccaagagcuuucagau

SEQ ID NO: 1364481 - RNA, 19 nt, Artificial Sequence
  Description of Artificial Sequence: Synthetic oligonucleotide
uuuggcugaugucuuugua

SEQ ID NO: 1364482 - RNA, 19 nt, Artificial Sequence
  Description of Artificial Sequence: Synthetic oligonucleotide
acuaugccaaacgugcacu

SEQ ID NO: 1364483 - RNA, 19 nt, Artificial Sequence
  Description of Artificial Sequence: Synthetic oligonucleotide
uggccagcacuuuuaugcc

SEQ ID NO: 1364484 - RNA, 19 nt, Artificial Sequence
  Description of Artificial Sequence: Synthetic oligonucleotide
aauuuggccagcacuuuua

SEQ ID NO: 1364485 - RNA, 19 nt, Artificial Sequence
  Description of Artificial Sequence: Synthetic oligonucleotide
uucgaucuuauaucucuuu

SEQ ID NO: 1364486 - RNA, 19 nt, Artificial Sequence
  Description of Artificial Sequence: Synthetic oligonucleotide
caagcguuauuaauuaccu

SEQ ID NO: 1364487 - RNA, 19 nt, Artificial Sequence
  Description of Artificial Sequence: Synthetic oligonucleotide
cuugucgaaucacaucuga

SEQ ID NO: 1364488 - RNA, 19 nt, Artificial Sequence
  Description of Artificial Sequence: Synthetic oligonucleotide
cagacugguacuaugccaa

SEQ ID NO: 1364489 - RNA, 19 nt, Artificial Sequence
  Description of Artificial Sequence: Synthetic oligonucleotide
gaguccugaaccacagagc

SEQ ID NO: 1364490 - RNA, 19 nt, Artificial Sequence
  Description of Artificial Sequence: Synthetic oligonucleotide
gugcacugagucaauuagg

SEQ ID NO: 1364491 - RNA, 19 nt, Artificial Sequence
  Description of Artificial Sequence: Synthetic oligonucleotide
agcacuuuuaugccacuuu

SEQ ID NO: 1364492 - RNA, 19 nt, Artificial Sequence
  Description of Artificial Sequence: Synthetic oligonucleotide
ucuuuguaacucagcuauc

SEQ ID NO: 1364493 - RNA, 19 nt, Artificial Sequence
  Description of Artificial Sequence: Synthetic oligonucleotide
cuaugccaaacgugcacug

SEQ ID NO: 1364494 - RNA, 19 nt, Artificial Sequence
  Description of Artificial Sequence: Synthetic oligonucleotide
cucggugaagaccccgggg

SEQ ID NO: 1364495 - RNA, 19 nt, Artificial Sequence
  Description of Artificial Sequence: Synthetic oligonucleotide
caaacgugcacugagucaa

SEQ ID NO: 1364496 - RNA, 19 nt, Artificial Sequence
  Description of Artificial Sequence: Synthetic oligonucleotide
uacuacccugaucuguauc

SEQ ID NO: 1364497 - RNA, 19 nt, Artificial Sequence
  Description of Artificial Sequence: Synthetic oligonucleotide
guucuaagcuccauauuuc

SEQ ID NO: 1364498 - RNA, 19 nt, Artificial Sequence
  Description of Artificial Sequence: Synthetic oligonucleotide
cacaagcguuauuaauuac

SEQ ID NO: 1364499 - RNA, 19 nt, Artificial Sequence
  Description of Artificial Sequence: Synthetic oligonucleotide
uggcacaagcguuauuaau

SEQ ID NO: 1364500 - RNA, 19 nt, Artificial Sequence
  Description of Artificial Sequence: Synthetic oligonucleotide
guaguuauguuuccagagu

SEQ ID NO: 1364501 - RNA, 19 nt, Artificial Sequence
  Description of Artificial Sequence: Synthetic oligonucleotide
ugcucuacaugcacaugau

SEQ ID NO: 1364502 - RNA, 19 nt, Artificial Sequence
  Description of Artificial Sequence: Synthetic oligonucleotide
ugugcacuugucgaaucac

SEQ ID NO: 1364503 - RNA, 19 nt, Artificial Sequence
  Description of Artificial Sequence: Synthetic oligonucleotide
uaugccaaacgugcacuga

SEQ ID NO: 1364504 - RNA, 19 nt, Artificial Sequence
  Description of Artificial Sequence: Synthetic oligonucleotide
agucaauuaggauguuguu

SEQ ID NO: 1364505 - RNA, 19 nt, Artificial Sequence
  Description of Artificial Sequence: Synthetic oligonucleotide
cuucacuauacuuuuguau

SEQ ID NO: 1364506 - RNA, 19 nt, Artificial Sequence
  Description of Artificial Sequence: Synthetic oligonucleotide
ugccaaacgugcacugagu

SEQ ID NO: 1364507 - RNA, 19 nt, Artificial Sequence
  Description of Artificial Sequence: Synthetic oligonucleotide
ugauugcaugcaccuaaau

SEQ ID NO: 1364508 - RNA, 19 nt, Artificial Sequence
  Description of Artificial Sequence: Synthetic oligonucleotide
uccuucugauauuuucgau

SEQ ID NO: 1364509 - RNA, 19 nt, Artificial Sequence
  Description of Artificial Sequence: Synthetic oligonucleotide
cuucugacugaauagcacu

SEQ ID NO: 1364510 - RNA, 19 nt, Artificial Sequence
  Description of Artificial Sequence: Synthetic oligonucleotide
augagacaccacuccccgg

SEQ ID NO: 1364511 - RNA, 19 nt, Artificial Sequence
  Description of Artificial Sequence: Synthetic oligonucleotide
aacuguuggugcucugcua

SEQ ID NO: 1364512 - RNA, 19 nt, Artificial Sequence
  Description of Artificial Sequence: Synthetic oligonucleotide
agcgucaaccccacgucac

SEQ ID NO: 1364513 - RNA, 19 nt, Artificial Sequence
  Description of Artificial Sequence: Synthetic oligonucleotide
gcacuuaacacaguacuac

SEQ ID NO: 1364514 - RNA, 19 nt, Artificial Sequence
  Description of Artificial Sequence: Synthetic oligonucleotide
uggauauauuaagcugaca

SEQ ID NO: 1364515 - RNA, 19 nt, Artificial Sequence
  Description of Artificial Sequence: Synthetic oligonucleotide
ucuccuaaguggacaucuc

SEQ ID NO: 1364516 - RNA, 19 nt, Artificial Sequence
  Description of Artificial Sequence: Synthetic oligonucleotide
ccgguugccacuugaaaag

SEQ ID NO: 1364517 - RNA, 19 nt, Artificial Sequence
  Description of Artificial Sequence: Synthetic oligonucleotide
cauggcccgggccacacac

SEQ ID NO: 1364518 - RNA, 19 nt, Artificial Sequence
  Description of Artificial Sequence: Synthetic oligonucleotide
acaguacuacccugaucug

SEQ ID NO: 1364519 - RNA, 19 nt, Artificial Sequence
  Description of Artificial Sequence: Synthetic oligonucleotide
uaugcucuacaugcacaug

SEQ ID NO: 1364520 - RNA, 19 nt, Artificial Sequence
  Description of Artificial Sequence: Synthetic oligonucleotide
aggucuuuagcaauuccau

SEQ ID NO: 1364521 - RNA, 19 nt, Artificial Sequence
  Description of Artificial Sequence: Synthetic oligonucleotide
caguuuaaguaagaucuga

SEQ ID NO: 1364522 - RNA, 19 nt, Artificial Sequence
  Description of Artificial Sequence: Synthetic oligonucleotide
cgaaucacaucugaguugc

SEQ ID NO: 1364523 - RNA, 19 nt, Artificial Sequence
  Description of Artificial Sequence: Synthetic oligonucleotide
uuguauccuuuucucuaua

SEQ ID NO: 1364524 - RNA, 19 nt, Artificial Sequence
  Description of Artificial Sequence: Synthetic oligonucleotide
guauuacucagaauagcua

SEQ ID NO: 1364525 - RNA, 19 nt, Artificial Sequence
  Description of Artificial Sequence: Synthetic oligonucleotide
cccugaucuguauccaugg

SEQ ID NO: 1364526 - RNA, 19 nt, Artificial Sequence
  Description of Artificial Sequence: Synthetic oligonucleotide
gucgaaucacaucugaguu

SEQ ID NO: 1364527 - RNA, 19 nt, Artificial Sequence
  Description of Artificial Sequence: Synthetic oligonucleotide
cuugcacuccucggcaacc

SEQ ID NO: 1364528 - RNA, 19 nt, Artificial Sequence
  Description of Artificial Sequence: Synthetic oligonucleotide
cucgauggguacaguucag

SEQ ID NO: 1364529 - RNA, 19 nt, Artificial Sequence
  Description of Artificial Sequence: Synthetic oligonucleotide
cuaaaucaauugguccuuc

SEQ ID NO: 1364530 - RNA, 19 nt, Artificial Sequence
  Description of Artificial Sequence: Synthetic oligonucleotide
cuuaauccaucuaauucau

SEQ ID NO: 1364531 - RNA, 19 nt, Artificial Sequence
  Description of Artificial Sequence: Synthetic oligonucleotide
caucaaaacuuugggaaaa

SEQ ID NO: 1364532 - RNA, 19 nt, Artificial Sequence
  Description of Artificial Sequence: Synthetic oligonucleotide
ggugaagaccccggggucg

SEQ ID NO: 1364533 - RNA, 19 nt, Artificial Sequence
  Description of Artificial Sequence: Synthetic oligonucleotide
guugugcacuugucgaauc

SEQ ID NO: 1364534 - RNA, 19 nt, Artificial Sequence
  Description of Artificial Sequence: Synthetic oligonucleotide
gacugguacuaugccaaac

SEQ ID NO: 1364535 - RNA, 19 nt, Artificial Sequence
  Description of Artificial Sequence: Synthetic oligonucleotide
caauugguccuucucuuaa

SEQ ID NO: 1364536 - RNA, 19 nt, Artificial Sequence
  Description of Artificial Sequence: Synthetic oligonucleotide
ucucuauaacuggucucac

SEQ ID NO: 1364537 - RNA, 19 nt, Artificial Sequence
  Description of Artificial Sequence: Synthetic oligonucleotide
ucccgguugccacuugaaa

SEQ ID NO: 1364538 - RNA, 19 nt, Artificial Sequence
  Description of Artificial Sequence: Synthetic oligonucleotide
cagaauagcuacagauuaa

SEQ ID NO: 1364539 - RNA, 19 nt, Artificial Sequence
  Description of Artificial Sequence: Synthetic oligonucleotide
cuacuugcacuccucggca

SEQ ID NO: 1364540 - RNA, 19 nt, Artificial Sequence
  Description of Artificial Sequence: Synthetic oligonucleotide
ccaugagacaccacucccc

SEQ ID NO: 1364541 - RNA, 19 nt, Artificial Sequence
  Description of Artificial Sequence: Synthetic oligonucleotide
cuguuggugcucugcuaag

SEQ ID NO: 1364542 - RNA, 19 nt, Artificial Sequence
  Description of Artificial Sequence: Synthetic oligonucleotide
aauagccugcguggcacaa

SEQ ID NO: 1364543 - RNA, 19 nt, Artificial Sequence
  Description of Artificial Sequence: Synthetic oligonucleotide
aaaacccgccgccgagcgu

SEQ ID NO: 1364544 - RNA, 19 nt, Artificial Sequence
  Description of Artificial Sequence: Synthetic oligonucleotide
cugaucuguauccaugggu

SEQ ID NO: 1364545 - RNA, 19 nt, Artificial Sequence
  Description of Artificial Sequence: Synthetic oligonucleotide
gguaguuaugcuuccuucu

SEQ ID NO: 1364546 - RNA, 19 nt, Artificial Sequence
  Description of Artificial Sequence: Synthetic oligonucleotide
gagcgucaaccccacguca

SEQ ID NO: 1364547 - RNA, 19 nt, Artificial Sequence
  Description of Artificial Sequence: Synthetic oligonucleotide
ugcacuccucggcaaccga

SEQ ID NO: 1364548 - RNA, 19 nt, Artificial Sequence
  Description of Artificial Sequence: Synthetic oligonucleotide
acgugcacugagucaauua

SEQ ID NO: 1364549 - RNA, 19 nt, Artificial Sequence
  Description of Artificial Sequence: Synthetic oligonucleotide
uaguguacacagguccaaa

SEQ ID NO: 1364550 - RNA, 19 nt, Artificial Sequence
  Description of Artificial Sequence: Synthetic oligonucleotide
gagcucggugaagaccccg

SEQ ID NO: 1364551 - RNA, 19 nt, Artificial Sequence
  Description of Artificial Sequence: Synthetic oligonucleotide
uacccugaucuguauccau

SEQ ID NO: 1364552 - RNA, 19 nt, Artificial Sequence
  Description of Artificial Sequence: Synthetic oligonucleotide
aacccaugaacuggcuuua

SEQ ID NO: 1364553 - RNA, 19 nt, Artificial Sequence
  Description of Artificial Sequence: Synthetic oligonucleotide
acccugaucuguauccaug

SEQ ID NO: 1364554 - RNA, 19 nt, Artificial Sequence
  Description of Artificial Sequence: Synthetic oligonucleotide
uccaugcauaaaggacaag

SEQ ID NO: 1364555 - RNA, 19 nt, Artificial Sequence
  Description of Artificial Sequence: Synthetic oligonucleotide
gcauugcucgccauggccc

SEQ ID NO: 1364556 - RNA, 19 nt, Artificial Sequence
  Description of Artificial Sequence: Synthetic oligonucleotide
caccucgugcucuccgaag

SEQ ID NO: 1364557 - RNA, 19 nt, Artificial Sequence
  Description of Artificial Sequence: Synthetic oligonucleotide
guaagaucugacacucaaa

SEQ ID NO: 1364558 - RNA, 19 nt, Artificial Sequence
  Description of Artificial Sequence: Synthetic oligonucleotide
auuaacccaugaacuggcu

SEQ ID NO: 1364559 - RNA, 19 nt, Artificial Sequence
  Description of Artificial Sequence: Synthetic oligonucleotide
guggacaucucgaugggua

SEQ ID NO: 1364560 - RNA, 19 nt, Artificial Sequence
  Description of Artificial Sequence: Synthetic oligonucleotide
gccaaacgugcacugaguc

SEQ ID NO: 1364561 - RNA, 19 nt, Artificial Sequence
  Description of Artificial Sequence: Synthetic oligonucleotide
caccuucacuauacuuuug

SEQ ID NO: 1364562 - RNA, 19 nt, Artificial Sequence
  Description of Artificial Sequence: Synthetic oligonucleotide
cggagcucagcaaaacccg

SEQ ID NO: 1364563 - RNA, 19 nt, Artificial Sequence
  Description of Artificial Sequence: Synthetic oligonucleotide
aagaccccggggucgcuuu

SEQ ID NO: 1364564 - RNA, 19 nt, Artificial Sequence
  Description of Artificial Sequence: Synthetic oligonucleotide
gcacaagcguuauuaauua

SEQ ID NO: 1364565 - RNA, 19 nt, Artificial Sequence
  Description of Artificial Sequence: Synthetic oligonucleotide
cacgccgccccacuccacc

SEQ ID NO: 1364566 - RNA, 19 nt, Artificial Sequence
  Description of Artificial Sequence: Synthetic oligonucleotide
aacgugcacugagucaauu

SEQ ID NO: 1364567 - RNA, 19 nt, Artificial Sequence
  Description of Artificial Sequence: Synthetic oligonucleotide
gcaccuaaaucaauugguc

SEQ ID NO: 1364568 - RNA, 19 nt, Artificial Sequence
  Description of Artificial Sequence: Synthetic oligonucleotide
ggcuuuaacuuuucaaaau

SEQ ID NO: 1364569 - RNA, 19 nt, Artificial Sequence
  Description of Artificial Sequence: Synthetic oligonucleotide
cagguucuaagcuccauau

SEQ ID NO: 1364570 - RNA, 19 nt, Artificial Sequence
  Description of Artificial Sequence: Synthetic oligonucleotide
auagccugcguggcacaag

SEQ ID NO: 1364571 - RNA, 19 nt, Artificial Sequence
  Description of Artificial Sequence: Synthetic oligonucleotide
agacugguacuaugccaaa

SEQ ID NO: 1364572 - RNA, 19 nt, Artificial Sequence
  Description of Artificial Sequence: Synthetic oligonucleotide
gcauaaaggacaagacaga

SEQ ID NO: 1364573 - RNA, 19 nt, Artificial Sequence
  Description of Artificial Sequence: Synthetic oligonucleotide
uccccggcauugcucgcca

SEQ ID NO: 1364574 - RNA, 19 nt, Artificial Sequence
  Description of Artificial Sequence: Synthetic oligonucleotide
gcacuugucgaaucacauc

SEQ ID NO: 1364575 - RNA, 19 nt, Artificial Sequence
  Description of Artificial Sequence: Synthetic oligonucleotide
auugcucgccauggcccgg

SEQ ID NO: 1364576 - RNA, 19 nt, Artificial Sequence
  Description of Artificial Sequence: Synthetic oligonucleotide
gugcacuugucgaaucaca

SEQ ID NO: 1364577 - RNA, 19 nt, Artificial Sequence
  Description of Artificial Sequence: Synthetic oligonucleotide
acaccacuccccggcauug

SEQ ID NO: 1364578 - RNA, 19 nt, Artificial Sequence
  Description of Artificial Sequence: Synthetic oligonucleotide
caauuaggauguuguucaa

SEQ ID NO: 1364579 - RNA, 19 nt, Artificial Sequence
  Description of Artificial Sequence: Synthetic oligonucleotide
gcucggugaagaccccggg

SEQ ID NO: 1364580 - RNA, 19 nt, Artificial Sequence
  Description of Artificial Sequence: Synthetic oligonucleotide
gcuaucuucuguucauaua

SEQ ID NO: 1364581 - RNA, 19 nt, Artificial Sequence
  Description of Artificial Sequence: Synthetic oligonucleotide
gcucagcaaaacccgccgc

SEQ ID NO: 1364582 - RNA, 19 nt, Artificial Sequence
  Description of Artificial Sequence: Synthetic oligonucleotide
agacaccacuccccggcau

SEQ ID NO: 1364583 - RNA, 19 nt, Artificial Sequence
  Description of Artificial Sequence: Synthetic oligonucleotide
ggcacaagcguuauuaauu

SEQ ID NO: 1364584 - RNA, 19 nt, Artificial Sequence
  Description of Artificial Sequence: Synthetic oligonucleotide
cuggaacauaacugacaaa

SEQ ID NO: 1364585 - RNA, 19 nt, Artificial Sequence
  Description of Artificial Sequence: Synthetic oligonucleotide
gccagcacuuuuaugccac

SEQ ID NO: 1364586 - RNA, 19 nt, Artificial Sequence
  Description of Artificial Sequence: Synthetic oligonucleotide
ccaaacgugcacugaguca

SEQ ID NO: 1364587 - RNA, 19 nt, Artificial Sequence
  Description of Artificial Sequence: Synthetic oligonucleotide
ccggcauugcucgccaugg

SEQ ID NO: 1364588 - RNA, 19 nt, Artificial Sequence
  Description of Artificial Sequence: Synthetic oligonucleotide
aaacgugcacugagucaau

SEQ ID NO: 1364589 - RNA, 19 nt, Artificial Sequence
  Description of Artificial Sequence: Synthetic oligonucleotide
cuacccugaucuguaucca

SEQ ID NO: 1364590 - RNA, 19 nt, Artificial Sequence
  Description of Artificial Sequence: Synthetic oligonucleotide
cuccccggcauugcucgcc

SEQ ID NO: 1364591 - RNA, 19 nt, Artificial Sequence
  Description of Artificial Sequence: Synthetic oligonucleotide
cacacacgccgccccacuc

SEQ ID NO: 1364592 - RNA, 19 nt, Artificial Sequence
  Description of Artificial Sequence: Synthetic oligonucleotide
ugcguggcacaagcguuau

SEQ ID NO: 1364593 - RNA, 19 nt, Artificial Sequence
  Description of Artificial Sequence: Synthetic oligonucleotide
gcgucaaccccacgucacc

SEQ ID NO: 1364594 - RNA, 19 nt, Artificial Sequence
  Description of Artificial Sequence: Synthetic oligonucleotide
cagcaaaacccgccgccga

SEQ ID NO: 1364595 - RNA, 19 nt, Artificial Sequence
  Description of Artificial Sequence: Synthetic oligonucleotide
gaccccggggucgcuuucc

SEQ ID NO: 1364596 - RNA, 19 nt, Artificial Sequence
  Description of Artificial Sequence: Synthetic oligonucleotide
agccugcguggcacaagcg

SEQ ID NO: 1364597 - RNA, 19 nt, Artificial Sequence
  Description of Artificial Sequence: Synthetic oligonucleotide
ggucgcuuuccaugagaca

SEQ ID NO: 1364598 - RNA, 19 nt, Artificial Sequence
  Description of Artificial Sequence: Synthetic oligonucleotide
gccgccccacuccaccucg

SEQ ID NO: 1364599 - RNA, 19 nt, Artificial Sequence
  Description of Artificial Sequence: Synthetic oligonucleotide
cugcguggcacaagcguua

SEQ ID NO: 1364600 - RNA, 19 nt, Artificial Sequence
  Description of Artificial Sequence: Synthetic oligonucleotide
gcaaaacccgccgccgagc

SEQ ID NO: 1364601 - RNA, 19 nt, Artificial Sequence
  Description of Artificial Sequence: Synthetic oligonucleotide
caguacuacccugaucugu

SEQ ID NO: 1364602 - RNA, 19 nt, Artificial Sequence
  Description of Artificial Sequence: Synthetic oligonucleotide
aggacaagacagacuggua

SEQ ID NO: 1364603 - RNA, 19 nt, Artificial Sequence
  Description of Artificial Sequence: Synthetic oligonucleotide
gcguuauuaauuaccugcu

SEQ ID NO: 1364604 - RNA, 19 nt, Artificial Sequence
  Description of Artificial Sequence: Synthetic oligonucleotide
gccgccgagcgucaacccc

SEQ ID NO: 1364605 - RNA, 19 nt, Artificial Sequence
  Description of Artificial Sequence: Synthetic oligonucleotide
cugaaccacagagccugca

SEQ ID NO: 1364606 - RNA, 19 nt, Artificial Sequence
  Description of Artificial Sequence: Synthetic oligonucleotide
gacaccacuccccggcauu

SEQ ID NO: 1364607 - RNA, 19 nt, Artificial Sequence
  Description of Artificial Sequence: Synthetic oligonucleotide
ccgaauccuuuaaugagcu

SEQ ID NO: 1364608 - RNA, 19 nt, Artificial Sequence
  Description of Artificial Sequence: Synthetic oligonucleotide
cucccgguugccacuugaa

SEQ ID NO: 1364609 - RNA, 19 nt, Artificial Sequence
  Description of Artificial Sequence: Synthetic oligonucleotide
cuaauccagucaucuugau

SEQ ID NO: 1364610 - RNA, 19 nt, Artificial Sequence
  Description of Artificial Sequence: Synthetic oligonucleotide
caccacuccccggcauugc

SEQ ID NO: 1364611 - RNA, 19 nt, Artificial Sequence
  Description of Artificial Sequence: Synthetic oligonucleotide
ccuuaguauuuaaugguuu

SEQ ID NO: 1364612 - RNA, 19 nt, Artificial Sequence
  Description of Artificial Sequence: Synthetic oligonucleotide
gucagauacaauggccauu

SEQ ID NO: 1364613 - RNA, 19 nt, Artificial Sequence
  Description of Artificial Sequence: Synthetic oligonucleotide
cguggcacaagcguuauua

SEQ ID NO: 1364614 - RNA, 19 nt, Artificial Sequence
  Description of Artificial Sequence: Synthetic oligonucleotide
gcaugcaccuaaaucaauu

SEQ ID NO: 1364615 - RNA, 19 nt, Artificial Sequence
  Description of Artificial Sequence: Synthetic oligonucleotide
cgagcgucaaccccacguc

SEQ ID NO: 1364616 - RNA, 19 nt, Artificial Sequence
  Description of Artificial Sequence: Synthetic oligonucleotide
ccuaaguggacaucucgau

SEQ ID NO: 1364617 - RNA, 19 nt, Artificial Sequence
  Description of Artificial Sequence: Synthetic oligonucleotide
cagauacaauggccauuaa

SEQ ID NO: 1364618 - RNA, 19 nt, Artificial Sequence
  Description of Artificial Sequence: Synthetic oligonucleotide
acccaugaacuggcuuuaa

SEQ ID NO: 1364619 - RNA, 19 nt, Artificial Sequence
  Description of Artificial Sequence: Synthetic oligonucleotide
cacuccucggcaaccgaau

SEQ ID NO: 1364620 - RNA, 19 nt, Artificial Sequence
  Description of Artificial Sequence: Synthetic oligonucleotide
cccggcauugcucgccaug

SEQ ID NO: 1364621 - RNA, 19 nt, Artificial Sequence
  Description of Artificial Sequence: Synthetic oligonucleotide
caugcacaugaugcaggua

SEQ ID NO: 1364622 - RNA, 19 nt, Artificial Sequence
  Description of Artificial Sequence: Synthetic oligonucleotide
agccuuccauuaacuggaa

SEQ ID NO: 1364623 - RNA, 19 nt, Artificial Sequence
  Description of Artificial Sequence: Synthetic oligonucleotide
gcacugagucaauuaggau

SEQ ID NO: 1364624 - RNA, 19 nt, Artificial Sequence
  Description of Artificial Sequence: Synthetic oligonucleotide
guccugaaccacagagccu

SEQ ID NO: 1364625 - RNA, 19 nt, Artificial Sequence
  Description of Artificial Sequence: Synthetic oligonucleotide
aacccgccgccgagcguca

SEQ ID NO: 1364626 - RNA, 19 nt, Artificial Sequence
  Description of Artificial Sequence: Synthetic oligonucleotide
ccgagcgucaaccccacgu

SEQ ID NO: 1364627 - RNA, 19 nt, Artificial Sequence
  Description of Artificial Sequence: Synthetic oligonucleotide
gcacuccucggcaaccgaa

SEQ ID NO: 1364628 - RNA, 19 nt, Artificial Sequence
  Description of Artificial Sequence: Synthetic oligonucleotide
gccgagcgucaaccccacg

SEQ ID NO: 1364629 - RNA, 19 nt, Artificial Sequence
  Description of Artificial Sequence: Synthetic oligonucleotide
cucagguucuaagcuccau

SEQ ID NO: 1364630 - RNA, 19 nt, Artificial Sequence
  Description of Artificial Sequence: Synthetic oligonucleotide
cacuuacaauagccugcgu

SEQ ID NO: 1364631 - RNA, 19 nt, Artificial Sequence
  Description of Artificial Sequence: Synthetic oligonucleotide
cggugaagaccccgggguc

SEQ ID NO: 1364632 - RNA, 19 nt, Artificial Sequence
  Description of Artificial Sequence: Synthetic oligonucleotide
ccugagcuuucuuugcauu

SEQ ID NO: 1364633 - RNA, 19 nt, Artificial Sequence
  Description of Artificial Sequence: Synthetic oligonucleotide
ccugcguggcacaagcguu

SEQ ID NO: 1364634 - RNA, 19 nt, Artificial Sequence
  Description of Artificial Sequence: Synthetic oligonucleotide
ccagaguaccaagagcuuu

SEQ ID NO: 1364635 - RNA, 19 nt, Artificial Sequence
  Description of Artificial Sequence: Synthetic oligonucleotide
cguuauuaauuaccugcuu

SEQ ID NO: 1364636 - RNA, 19 nt, Artificial Sequence
  Description of Artificial Sequence: Synthetic oligonucleotide
gccgcggagcucagcaaaa

SEQ ID NO: 1364637 - RNA, 19 nt, Artificial Sequence
  Description of Artificial Sequence: Synthetic oligonucleotide
cgccgccgagcgucaaccc

SEQ ID NO: 1364638 - RNA, 19 nt, Artificial Sequence
  Description of Artificial Sequence: Synthetic oligonucleotide
cgccgagcgucaaccccac

SEQ ID NO: 1364639 - RNA, 19 nt, Artificial Sequence
  Description of Artificial Sequence: Synthetic oligonucleotide
cugagucaauuaggauguu

SEQ ID NO: 1364640 - RNA, 19 nt, Artificial Sequence
  Description of Artificial Sequence: Synthetic oligonucleotide
gcguggcacaagcguuauu

SEQ ID NO: 1364641 - RNA, 19 nt, Artificial Sequence
  Description of Artificial Sequence: Synthetic oligonucleotide
cggccgcggagcucagcaa

SEQ ID NO: 1364642 - RNA, 19 nt, Artificial Sequence
  Description of Artificial Sequence: Synthetic oligonucleotide
ccgccccacuccaccucgu

SEQ ID NO: 1364643 - RNA, 19 nt, Artificial Sequence
  Description of Artificial Sequence: Synthetic oligonucleotide
ccccggcauugcucgccau

SEQ ID NO: 1364644 - RNA, 19 nt, Artificial Sequence
  Description of Artificial Sequence: Synthetic oligonucleotide
aguaucauaaagcagcuuc

SEQ ID NO: 1364645 - RNA, 19 nt, Artificial Sequence
  Description of Artificial Sequence: Synthetic oligonucleotide
auguucauaauuuuaauag

SEQ ID NO: 1364646 - RNA, 19 nt, Artificial Sequence
  Description of Artificial Sequence: Synthetic oligonucleotide
uauaaggagacaaaggaca

SEQ ID NO: 1364647 - RNA, 19 nt, Artificial Sequence
  Description of Artificial Sequence: Synthetic oligonucleotide
uucccaaugaaaauguugg

SEQ ID NO: 1364648 - RNA, 19 nt, Artificial Sequence
  Description of Artificial Sequence: Synthetic oligonucleotide
uuagaguccuucuugaagg

SEQ ID NO: 1364649 - RNA, 19 nt, Artificial Sequence
  Description of Artificial Sequence: Synthetic oligonucleotide
uagaguuugaucauguuca

SEQ ID NO: 1364650 - RNA, 19 nt, Artificial Sequence
  Description of Artificial Sequence: Synthetic oligonucleotide
uggcaaaacaaucaggacc

SEQ ID NO: 1364651 - RNA, 19 nt, Artificial Sequence
  Description of Artificial Sequence: Synthetic oligonucleotide
aagaaguauaauuuuauuu

SEQ ID NO: 1364652 - RNA, 19 nt, Artificial Sequence
  Description of Artificial Sequence: Synthetic oligonucleotide
uuuguugugagcugaagcc

SEQ ID NO: 1364653 - RNA, 19 nt, Artificial Sequence
  Description of Artificial Sequence: Synthetic oligonucleotide
auagaguuugaucauguuc

SEQ ID NO: 1364654 - RNA, 19 nt, Artificial Sequence
  Description of Artificial Sequence: Synthetic oligonucleotide
acagugaugggucuguuac

SEQ ID NO: 1364655 - RNA, 19 nt, Artificial Sequence
  Description of Artificial Sequence: Synthetic oligonucleotide
agaaguauaauuuuauuuu

SEQ ID NO: 1364656 - RNA, 19 nt, Artificial Sequence
  Description of Artificial Sequence: Synthetic oligonucleotide
uuuuguugugagcugaagc

SEQ ID NO: 1364657 - RNA, 19 nt, Artificial Sequence
  Description of Artificial Sequence: Synthetic oligonucleotide
agugacucuauccuuuggc

SEQ ID NO: 1364658 - RNA, 19 nt, Artificial Sequence
  Description of Artificial Sequence: Synthetic oligonucleotide
uuaaugaaggcauaacccu

SEQ ID NO: 1364659 - RNA, 19 nt, Artificial Sequence
  Description of Artificial Sequence: Synthetic oligonucleotide
aguuugaucauguucauaa

SEQ ID NO: 1364660 - RNA, 19 nt, Artificial Sequence
  Description of Artificial Sequence: Synthetic oligonucleotide
gaggcaaaauuaaugaagg

SEQ ID NO: 1364661 - RNA, 19 nt, Artificial Sequence
  Description of Artificial Sequence: Synthetic oligonucleotide
ucuugaaggcguaagacac

SEQ ID NO: 1364662 - RNA, 19 nt, Artificial Sequence
  Description of Artificial Sequence: Synthetic oligonucleotide
gaaggcguaagacacagug

SEQ ID NO: 1364663 - RNA, 19 nt, Artificial Sequence
  Description of Artificial Sequence: Synthetic oligonucleotide
uguucauaauuuuaauagc

SEQ ID NO: 1364664 - RNA, 19 nt, Artificial Sequence
  Description of Artificial Sequence: Synthetic oligonucleotide
aaaaugacauugaaauggg

SEQ ID NO: 1364665 - RNA, 19 nt, Artificial Sequence
  Description of Artificial Sequence: Synthetic oligonucleotide
gaugaggcauuccaggagg

SEQ ID NO: 1364666 - RNA, 19 nt, Artificial Sequence
  Description of Artificial Sequence: Synthetic oligonucleotide
gacagaguugccgagaggg

SEQ ID NO: 1364667 - RNA, 19 nt, Artificial Sequence
  Description of Artificial Sequence: Synthetic oligonucleotide
uccgaagcaucaaaggagg

SEQ ID NO: 1364668 - RNA, 19 nt, Artificial Sequence
  Description of Artificial Sequence: Synthetic oligonucleotide
uucucuauaauuguuuggc

SEQ ID NO: 1364669 - RNA, 19 nt, Artificial Sequence
  Description of Artificial Sequence: Synthetic oligonucleotide
aaaauguuggccccuacau

SEQ ID NO: 1364670 - RNA, 19 nt, Artificial Sequence
  Description of Artificial Sequence: Synthetic oligonucleotide
gcuauagcaacucugauug

SEQ ID NO: 1364671 - RNA, 19 nt, Artificial Sequence
  Description of Artificial Sequence: Synthetic oligonucleotide
uuuucucuauaauuguuug

SEQ ID NO: 1364672 - RNA, 19 nt, Artificial Sequence
  Description of Artificial Sequence: Synthetic oligonucleotide
agcauagucagcaucuucc

SEQ ID NO: 1364673 - RNA, 19 nt, Artificial Sequence
  Description of Artificial Sequence: Synthetic oligonucleotide
ugagcugaagccuuguuca

SEQ ID NO: 1364674 - RNA, 19 nt, Artificial Sequence
  Description of Artificial Sequence: Synthetic oligonucleotide
aaauguuggccccuacauc

SEQ ID NO: 1364675 - RNA, 19 nt, Artificial Sequence
  Description of Artificial Sequence: Synthetic oligonucleotide
gaaguauaauuuuauuuuc

SEQ ID NO: 1364676 - RNA, 19 nt, Artificial Sequence
  Description of Artificial Sequence: Synthetic oligonucleotide
uuguuuggcaaaacaauca

SEQ ID NO: 1364677 - RNA, 19 nt, Artificial Sequence
  Description of Artificial Sequence: Synthetic oligonucleotide
uuucucuauaauuguuugg

SEQ ID NO: 1364678 - RNA, 19 nt, Artificial Sequence
  Description of Artificial Sequence: Synthetic oligonucleotide
acaaaggacagcaauuuac

SEQ ID NO: 1364679 - RNA, 19 nt, Artificial Sequence
  Description of Artificial Sequence: Synthetic oligonucleotide
gaugaaaccacaggauugg

SEQ ID NO: 1364680 - RNA, 19 nt, Artificial Sequence
  Description of Artificial Sequence: Synthetic oligonucleotide
aggacggucagccugggac

SEQ ID NO: 1364681 - RNA, 19 nt, Artificial Sequence
  Description of Artificial Sequence: Synthetic oligonucleotide
aauugcugcauccgaagca

SEQ ID NO: 1364682 - RNA, 19 nt, Artificial Sequence
  Description of Artificial Sequence: Synthetic oligonucleotide
cuauccuuuggcauguggg

SEQ ID NO: 1364683 - RNA, 19 nt, Artificial Sequence
  Description of Artificial Sequence: Synthetic oligonucleotide
ucuauaauuguuuggcaaa

SEQ ID NO: 1364684 - RNA, 19 nt, Artificial Sequence
  Description of Artificial Sequence: Synthetic oligonucleotide
uugaaauggggacagaguu

SEQ ID NO: 1364685 - RNA, 19 nt, Artificial Sequence
  Description of Artificial Sequence: Synthetic oligonucleotide
gauacugagaggauauaag

SEQ ID NO: 1364686 - RNA, 19 nt, Artificial Sequence
  Description of Artificial Sequence: Synthetic oligonucleotide
cucaagaauucaacgaagc

SEQ ID NO: 1364687 - RNA, 19 nt, Artificial Sequence
  Description of Artificial Sequence: Synthetic oligonucleotide
auauaaggagacaaaggac

SEQ ID NO: 1364688 - RNA, 19 nt, Artificial Sequence
  Description of Artificial Sequence: Synthetic oligonucleotide
aaggagacaaaggacagca

SEQ ID NO: 1364689 - RNA, 19 nt, Artificial Sequence
  Description of Artificial Sequence: Synthetic oligonucleotide
ugagaggauauaaggagac

SEQ ID NO: 1364690 - RNA, 19 nt, Artificial Sequence
  Description of Artificial Sequence: Synthetic oligonucleotide
uguuacacagguacugccc

SEQ ID NO: 1364691 - RNA, 19 nt, Artificial Sequence
  Description of Artificial Sequence: Synthetic oligonucleotide
uucauaauuuuaauagcau

SEQ ID NO: 1364692 - RNA, 19 nt, Artificial Sequence
  Description of Artificial Sequence: Synthetic oligonucleotide
aauuguuuggcaaaacaau

SEQ ID NO: 1364693 - RNA, 19 nt, Artificial Sequence
  Description of Artificial Sequence: Synthetic oligonucleotide
aggcaaaauuaaugaaggc

SEQ ID NO: 1364694 - RNA, 19 nt, Artificial Sequence
  Description of Artificial Sequence: Synthetic oligonucleotide
aagucguucagcugcugag

SEQ ID NO: 1364695 - RNA, 19 nt, Artificial Sequence
  Description of Artificial Sequence: Synthetic oligonucleotide
ucaauugcugcauccgaag

SEQ ID NO: 1364696 - RNA, 19 nt, Artificial Sequence
  Description of Artificial Sequence: Synthetic oligonucleotide
ugaaauggggacagaguug

SEQ ID NO: 1364697 - RNA, 19 nt, Artificial Sequence
  Description of Artificial Sequence: Synthetic oligonucleotide
ucuuccucacucaagaauu

SEQ ID NO: 1364698 - RNA, 19 nt, Artificial Sequence
  Description of Artificial Sequence: Synthetic oligonucleotide
ucuauccuuuggcaugugg

SEQ ID NO: 1364699 - RNA, 19 nt, Artificial Sequence
  Description of Artificial Sequence: Synthetic oligonucleotide
caauuuacugaggaagugg

SEQ ID NO: 1364700 - RNA, 19 nt, Artificial Sequence
  Description of Artificial Sequence: Synthetic oligonucleotide
aaguauaauuuuauuuucu

SEQ ID NO: 1364701 - RNA, 19 nt, Artificial Sequence
  Description of Artificial Sequence: Synthetic oligonucleotide
aggauauaaggagacaaag

SEQ ID NO: 1364702 - RNA, 19 nt, Artificial Sequence
  Description of Artificial Sequence: Synthetic oligonucleotide
agugaugggucuguuacac

SEQ ID NO: 1364703 - RNA, 19 nt, Artificial Sequence
  Description of Artificial Sequence: Synthetic oligonucleotide
aaagagcucccacagcagu

SEQ ID NO: 1364704 - RNA, 19 nt, Artificial Sequence
  Description of Artificial Sequence: Synthetic oligonucleotide
aggcauaacccuuagaguu

SEQ ID NO: 1364705 - RNA, 19 nt, Artificial Sequence
  Description of Artificial Sequence: Synthetic oligonucleotide
cacauuagccaugacaagc

SEQ ID NO: 1364706 - RNA, 19 nt, Artificial Sequence
  Description of Artificial Sequence: Synthetic oligonucleotide
aaacaaucaggaccaacau

SEQ ID NO: 1364707 - RNA, 19 nt, Artificial Sequence
  Description of Artificial Sequence: Synthetic oligonucleotide
auuccguucggagaugggc

SEQ ID NO: 1364708 - RNA, 19 nt, Artificial Sequence
  Description of Artificial Sequence: Synthetic oligonucleotide
gacauugaaauggggacag

SEQ ID NO: 1364709 - RNA, 19 nt, Artificial Sequence
  Description of Artificial Sequence: Synthetic oligonucleotide
cauaggagauccaaaagga

SEQ ID NO: 1364710 - RNA, 19 nt, Artificial Sequence
  Description of Artificial Sequence: Synthetic oligonucleotide
gacucuauccuuuggcaug

SEQ ID NO: 1364711 - RNA, 19 nt, Artificial Sequence
  Description of Artificial Sequence: Synthetic oligonucleotide
gauggggcaucccaccugg

SEQ ID NO: 1364712 - RNA, 19 nt, Artificial Sequence
  Description of Artificial Sequence: Synthetic oligonucleotide
auggcgaagaggcucccgc

SEQ ID NO: 1364713 - RNA, 19 nt, Artificial Sequence
  Description of Artificial Sequence: Synthetic oligonucleotide
acaaucaggaccaacauuu

SEQ ID NO: 1364714 - RNA, 19 nt, Artificial Sequence
  Description of Artificial Sequence: Synthetic oligonucleotide
accugggugacccauagga

SEQ ID NO: 1364715 - RNA, 19 nt, Artificial Sequence
  Description of Artificial Sequence: Synthetic oligonucleotide
caaugaaaauguuggcccc

SEQ ID NO: 1364716 - RNA, 19 nt, Artificial Sequence
  Description of Artificial Sequence: Synthetic oligonucleotide
ucagggucccgcauaaucu

SEQ ID NO: 1364717 - RNA, 19 nt, Artificial Sequence
  Description of Artificial Sequence: Synthetic oligonucleotide
gaaugggugaggaugugag

SEQ ID NO: 1364718 - RNA, 19 nt, Artificial Sequence
  Description of Artificial Sequence: Synthetic oligonucleotide
agaccgcccacguacaccg

SEQ ID NO: 1364719 - RNA, 19 nt, Artificial Sequence
  Description of Artificial Sequence: Synthetic oligonucleotide
cucacuuucucgucuagac

SEQ ID NO: 1364720 - RNA, 19 nt, Artificial Sequence
  Description of Artificial Sequence: Synthetic oligonucleotide
aaaguaucauaaagcagcu

SEQ ID NO: 1364721 - RNA, 19 nt, Artificial Sequence
  Description of Artificial Sequence: Synthetic oligonucleotide
uugaaggcguaagacacag

SEQ ID NO: 1364722 - RNA, 19 nt, Artificial Sequence
  Description of Artificial Sequence: Synthetic oligonucleotide
uggguguugaccaccggcc

SEQ ID NO: 1364723 - RNA, 19 nt, Artificial Sequence
  Description of Artificial Sequence: Synthetic oligonucleotide
uuagccaugacaagcuaua

SEQ ID NO: 1364724 - RNA, 19 nt, Artificial Sequence
  Description of Artificial Sequence: Synthetic oligonucleotide
uuccguucggagaugggcc

SEQ ID NO: 1364725 - RNA, 19 nt, Artificial Sequence
  Description of Artificial Sequence: Synthetic oligonucleotide
cauugaaauggggacagag

SEQ ID NO: 1364726 - RNA, 19 nt, Artificial Sequence
  Description of Artificial Sequence: Synthetic oligonucleotide
uggaccacgagguggaacu

SEQ ID NO: 1364727 - RNA, 19 nt, Artificial Sequence
  Description of Artificial Sequence: Synthetic oligonucleotide
caagaauucaacgaagcca

SEQ ID NO: 1364728 - RNA, 19 nt, Artificial Sequence
  Description of Artificial Sequence: Synthetic oligonucleotide
aucauaaagcagcuucuca

SEQ ID NO: 1364729 - RNA, 19 nt, Artificial Sequence
  Description of Artificial Sequence: Synthetic oligonucleotide
guaugggcuucccauagag

SEQ ID NO: 1364730 - RNA, 19 nt, Artificial Sequence
  Description of Artificial Sequence: Synthetic oligonucleotide
uccgugaccaggaugccca

SEQ ID NO: 1364731 - RNA, 19 nt, Artificial Sequence
  Description of Artificial Sequence: Synthetic oligonucleotide
ggauauaaggagacaaagg

SEQ ID NO: 1364732 - RNA, 19 nt, Artificial Sequence
  Description of Artificial Sequence: Synthetic oligonucleotide
auggcgcucgccuuuagag

SEQ ID NO: 1364733 - RNA, 19 nt, Artificial Sequence
  Description of Artificial Sequence: Synthetic oligonucleotide
uauccuuuggcaugugggu

SEQ ID NO: 1364734 - RNA, 19 nt, Artificial Sequence
  Description of Artificial Sequence: Synthetic oligonucleotide
ucggagaugggcccggcag

SEQ ID NO: 1364735 - RNA, 19 nt, Artificial Sequence
  Description of Artificial Sequence: Synthetic oligonucleotide
gcguaagacacagugaugg

SEQ ID NO: 1364736 - RNA, 19 nt, Artificial Sequence
  Description of Artificial Sequence: Synthetic oligonucleotide
aggcguaagacacagugau

SEQ ID NO: 1364737 - RNA, 19 nt, Artificial Sequence
  Description of Artificial Sequence: Synthetic oligonucleotide
gaaaauguuggccccuaca

SEQ ID NO: 1364738 - RNA, 19 nt, Artificial Sequence
  Description of Artificial Sequence: Synthetic oligonucleotide
aaugaaaauguuggccccu

SEQ ID NO: 1364739 - RNA, 19 nt, Artificial Sequence
  Description of Artificial Sequence: Synthetic oligonucleotide
cuuguucacccguaugggc

SEQ ID NO: 1364740 - RNA, 19 nt, Artificial Sequence
  Description of Artificial Sequence: Synthetic oligonucleotide
gucuagaccgcccacguac

SEQ ID NO: 1364741 - RNA, 19 nt, Artificial Sequence
  Description of Artificial Sequence: Synthetic oligonucleotide
agaggauauaaggagacaa

SEQ ID NO: 1364742 - RNA, 19 nt, Artificial Sequence
  Description of Artificial Sequence: Synthetic oligonucleotide
cuucccauagaguuugauc

SEQ ID NO: 1364743 - RNA, 19 nt, Artificial Sequence
  Description of Artificial Sequence: Synthetic oligonucleotide
ucuguuacacagguacugc

SEQ ID NO: 1364744 - RNA, 19 nt, Artificial Sequence
  Description of Artificial Sequence: Synthetic oligonucleotide
aaucaggaccaacauuuua

SEQ ID NO: 1364745 - RNA, 19 nt, Artificial Sequence
  Description of Artificial Sequence: Synthetic oligonucleotide
gggucuguuacacagguac

SEQ ID NO: 1364746 - RNA, 19 nt, Artificial Sequence
  Description of Artificial Sequence: Synthetic oligonucleotide
auuuacugaggaagugggc

SEQ ID NO: 1364747 - RNA, 19 nt, Artificial Sequence
  Description of Artificial Sequence: Synthetic oligonucleotide
ugacauugaaauggggaca

SEQ ID NO: 1364748 - RNA, 19 nt, Artificial Sequence
  Description of Artificial Sequence: Synthetic oligonucleotide
auccgaagcaucaaaggag

SEQ ID NO: 1364749 - RNA, 19 nt, Artificial Sequence
  Description of Artificial Sequence: Synthetic oligonucleotide
gaaggagccaggaggaggc

SEQ ID NO: 1364750 - RNA, 19 nt, Artificial Sequence
  Description of Artificial Sequence: Synthetic oligonucleotide
cauuccaggagguggccgg

SEQ ID NO: 1364751 - RNA, 19 nt, Artificial Sequence
  Description of Artificial Sequence: Synthetic oligonucleotide
ugguucgcucacuuucucg

SEQ ID NO: 1364752 - RNA, 19 nt, Artificial Sequence
  Description of Artificial Sequence: Synthetic oligonucleotide
aacucugauugguccaaga

SEQ ID NO: 1364753 - RNA, 19 nt, Artificial Sequence
  Description of Artificial Sequence: Synthetic oligonucleotide
cuguuacacagguacugcc

SEQ ID NO: 1364754 - RNA, 19 nt, Artificial Sequence
  Description of Artificial Sequence: Synthetic oligonucleotide
ugauuccguucggagaugg

SEQ ID NO: 1364755 - RNA, 19 nt, Artificial Sequence
  Description of Artificial Sequence: Synthetic oligonucleotide
ugggaaugggugaggaugu

SEQ ID NO: 1364756 - RNA, 19 nt, Artificial Sequence
  Description of Artificial Sequence: Synthetic oligonucleotide
aagacacagugaugggucu

SEQ ID NO: 1364757 - RNA, 19 nt, Artificial Sequence
  Description of Artificial Sequence: Synthetic oligonucleotide
ugaagauacugagaggaua

SEQ ID NO: 1364758 - RNA, 19 nt, Artificial Sequence
  Description of Artificial Sequence: Synthetic oligonucleotide
uuuggcauguggguguuga

SEQ ID NO: 1364759 - RNA, 19 nt, Artificial Sequence
  Description of Artificial Sequence: Synthetic oligonucleotide
gaggggucagcacauuagc

SEQ ID NO: 1364760 - RNA, 19 nt, Artificial Sequence
  Description of Artificial Sequence: Synthetic oligonucleotide
ugcccauuggaggaggucc

SEQ ID NO: 1364761 - RNA, 19 nt, Artificial Sequence
  Description of Artificial Sequence: Synthetic oligonucleotide
guguccgugaccaggaugc

SEQ ID NO: 1364762 - RNA, 19 nt, Artificial Sequence
  Description of Artificial Sequence: Synthetic oligonucleotide
agcuauagcaacucugauu

SEQ ID NO: 1364763 - RNA, 19 nt, Artificial Sequence
  Description of Artificial Sequence: Synthetic oligonucleotide
cucuauaauuguuuggcaa

SEQ ID NO: 1364764 - RNA, 19 nt, Artificial Sequence
  Description of Artificial Sequence: Synthetic oligonucleotide
acaagcuauagcaacucug

SEQ ID NO: 1364765 - RNA, 19 nt, Artificial Sequence
  Description of Artificial Sequence: Synthetic oligonucleotide
ugaagccuuguucacccgu

SEQ ID NO: 1364766 - RNA, 19 nt, Artificial Sequence
  Description of Artificial Sequence: Synthetic oligonucleotide
uccugauuccguucggaga

SEQ ID NO: 1364767 - RNA, 19 nt, Artificial Sequence
  Description of Artificial Sequence: Synthetic oligonucleotide
cucaucgauuucugggucc

SEQ ID NO: 1364768 - RNA, 19 nt, Artificial Sequence
  Description of Artificial Sequence: Synthetic oligonucleotide
auagcaacucugauugguc

SEQ ID NO: 1364769 - RNA, 19 nt, Artificial Sequence
  Description of Artificial Sequence: Synthetic oligonucleotide
caauugcugcauccgaagc

SEQ ID NO: 1364770 - RNA, 19 nt, Artificial Sequence
  Description of Artificial Sequence: Synthetic oligonucleotide
acucaagaauucaacgaag

SEQ ID NO: 1364771 - RNA, 19 nt, Artificial Sequence
  Description of Artificial Sequence: Synthetic oligonucleotide
aagccauagccuuggugcu

SEQ ID NO: 1364772 - RNA, 19 nt, Artificial Sequence
  Description of Artificial Sequence: Synthetic oligonucleotide
gagauccaaaaggaggccc

SEQ ID NO: 1364773 - RNA, 19 nt, Artificial Sequence
  Description of Artificial Sequence: Synthetic oligonucleotide
uucgcucacuuucucgucu

SEQ ID NO: 1364774 - RNA, 19 nt, Artificial Sequence
  Description of Artificial Sequence: Synthetic oligonucleotide
ucccaaugaaaauguuggc

SEQ ID NO: 1364775 - RNA, 19 nt, Artificial Sequence
  Description of Artificial Sequence: Synthetic oligonucleotide
uccucacucaagaauucaa

SEQ ID NO: 1364776 - RNA, 19 nt, Artificial Sequence
  Description of Artificial Sequence: Synthetic oligonucleotide
ucgauuucuggguccaggu

SEQ ID NO: 1364777 - RNA, 19 nt, Artificial Sequence
  Description of Artificial Sequence: Synthetic oligonucleotide
auaggagauccaaaaggag

SEQ ID NO: 1364778 - RNA, 19 nt, Artificial Sequence
  Description of Artificial Sequence: Synthetic oligonucleotide
acccauaggagauccaaaa

SEQ ID NO: 1364779 - RNA, 19 nt, Artificial Sequence
  Description of Artificial Sequence: Synthetic oligonucleotide
auccugauuccguucggag

SEQ ID NO: 1364780 - RNA, 19 nt, Artificial Sequence
  Description of Artificial Sequence: Synthetic oligonucleotide
uucucgucuagaccgccca

SEQ ID NO: 1364781 - RNA, 19 nt, Artificial Sequence
  Description of Artificial Sequence: Synthetic oligonucleotide
cauccgaagcaucaaagga

SEQ ID NO: 1364782 - RNA, 19 nt, Artificial Sequence
  Description of Artificial Sequence: Synthetic oligonucleotide
ugacucuauccuuuggcau

SEQ ID NO: 1364783 - RNA, 19 nt, Artificial Sequence
  Description of Artificial Sequence: Synthetic oligonucleotide
uguugugagcugaagccuu

SEQ ID NO: 1364784 - RNA, 19 nt, Artificial Sequence
  Description of Artificial Sequence: Synthetic oligonucleotide
accguggcauccugauucc

SEQ ID NO: 1364785 - RNA, 19 nt, Artificial Sequence
  Description of Artificial Sequence: Synthetic oligonucleotide
ucucaucgauuucuggguc

SEQ ID NO: 1364786 - RNA, 19 nt, Artificial Sequence
  Description of Artificial Sequence: Synthetic oligonucleotide
guuacacagguacugccca

SEQ ID NO: 1364787 - RNA, 19 nt, Artificial Sequence
  Description of Artificial Sequence: Synthetic oligonucleotide
aucaggaccaacauuuuaa

SEQ ID NO: 1364788 - RNA, 19 nt, Artificial Sequence
  Description of Artificial Sequence: Synthetic oligonucleotide
aagcuauagcaacucugau

SEQ ID NO: 1364789 - RNA, 19 nt, Artificial Sequence
  Description of Artificial Sequence: Synthetic oligonucleotide
ugggugacccauaggagau

SEQ ID NO: 1364790 - RNA, 19 nt, Artificial Sequence
  Description of Artificial Sequence: Synthetic oligonucleotide
agauacugagaggauauaa

SEQ ID NO: 1364791 - RNA, 19 nt, Artificial Sequence
  Description of Artificial Sequence: Synthetic oligonucleotide
caugggaccugggugaccc

SEQ ID NO: 1364792 - RNA, 19 nt, Artificial Sequence
  Description of Artificial Sequence: Synthetic oligonucleotide
aguguccgugaccaggaug

SEQ ID NO: 1364793 - RNA, 19 nt, Artificial Sequence
  Description of Artificial Sequence: Synthetic oligonucleotide
uaucauaaagcagcuucuc

SEQ ID NO: 1364794 - RNA, 19 nt, Artificial Sequence
  Description of Artificial Sequence: Synthetic oligonucleotide
guggguguugaccaccggc

SEQ ID NO: 1364795 - RNA, 19 nt, Artificial Sequence
  Description of Artificial Sequence: Synthetic oligonucleotide
aggaggcaaaauuaaugaa

SEQ ID NO: 1364796 - RNA, 19 nt, Artificial Sequence
  Description of Artificial Sequence: Synthetic oligonucleotide
cagugguucgcucacuuuc

SEQ ID NO: 1364797 - RNA, 19 nt, Artificial Sequence
  Description of Artificial Sequence: Synthetic oligonucleotide
ucuagaccgcccacguaca

SEQ ID NO: 1364798 - RNA, 19 nt, Artificial Sequence
  Description of Artificial Sequence: Synthetic oligonucleotide
uggcauguggguguugacc

SEQ ID NO: 1364799 - RNA, 19 nt, Artificial Sequence
  Description of Artificial Sequence: Synthetic oligonucleotide
cacucaagaauucaacgaa

SEQ ID NO: 1364800 - RNA, 19 nt, Artificial Sequence
  Description of Artificial Sequence: Synthetic oligonucleotide
cuauagcaacucugauugg

SEQ ID NO: 1364801 - RNA, 19 nt, Artificial Sequence
  Description of Artificial Sequence: Synthetic oligonucleotide
ugaaaauguuggccccuac

SEQ ID NO: 1364802 - RNA, 19 nt, Artificial Sequence
  Description of Artificial Sequence: Synthetic oligonucleotide
gggguuuguaagaugaccc

SEQ ID NO: 1364803 - RNA, 19 nt, Artificial Sequence
  Description of Artificial Sequence: Synthetic oligonucleotide
augaugggccagcugcauc

SEQ ID NO: 1364804 - RNA, 19 nt, Artificial Sequence
  Description of Artificial Sequence: Synthetic oligonucleotide
ggaugaaaccacaggauug

SEQ ID NO: 1364805 - RNA, 19 nt, Artificial Sequence
  Description of Artificial Sequence: Synthetic oligonucleotide
agagcucccacagcagugg

SEQ ID NO: 1364806 - RNA, 19 nt, Artificial Sequence
  Description of Artificial Sequence: Synthetic oligonucleotide
gugacucuauccuuuggca

SEQ ID NO: 1364807 - RNA, 19 nt, Artificial Sequence
  Description of Artificial Sequence: Synthetic oligonucleotide
gugagcugaagccuuguuc

SEQ ID NO: 1364808 - RNA, 19 nt, Artificial Sequence
  Description of Artificial Sequence: Synthetic oligonucleotide
ucucggaggaccaguguau

SEQ ID NO: 1364809 - RNA, 19 nt, Artificial Sequence
  Description of Artificial Sequence: Synthetic oligonucleotide
agaguccuucuugaaggcg

SEQ ID NO: 1364810 - RNA, 19 nt, Artificial Sequence
  Description of Artificial Sequence: Synthetic oligonucleotide
uagcauagucagcaucuuc

SEQ ID NO: 1364811 - RNA, 19 nt, Artificial Sequence
  Description of Artificial Sequence: Synthetic oligonucleotide
ugaccaccggcccugccug

SEQ ID NO: 1364812 - RNA, 19 nt, Artificial Sequence
  Description of Artificial Sequence: Synthetic oligonucleotide
agacaaaggacagcaauuu

SEQ ID NO: 1364813 - RNA, 19 nt, Artificial Sequence
  Description of Artificial Sequence: Synthetic oligonucleotide
augacaagcuauagcaacu

SEQ ID NO: 1364814 - RNA, 19 nt, Artificial Sequence
  Description of Artificial Sequence: Synthetic oligonucleotide
ucaucgauuucugggucca

SEQ ID NO: 1364815 - RNA, 19 nt, Artificial Sequence
  Description of Artificial Sequence: Synthetic oligonucleotide
ggggcaucaacggaggagg

SEQ ID NO: 1364816 - RNA, 19 nt, Artificial Sequence
  Description of Artificial Sequence: Synthetic oligonucleotide
cugggugacccauaggaga

SEQ ID NO: 1364817 - RNA, 19 nt, Artificial Sequence
  Description of Artificial Sequence: Synthetic oligonucleotide
agaggggucagcacauuag

SEQ ID NO: 1364818 - RNA, 19 nt, Artificial Sequence
  Description of Artificial Sequence: Synthetic oligonucleotide
gucagggucccgcauaauc

SEQ ID NO: 1364819 - RNA, 19 nt, Artificial Sequence
  Description of Artificial Sequence: Synthetic oligonucleotide
gaagauacugagaggauau

SEQ ID NO: 1364820 - RNA, 19 nt, Artificial Sequence
  Description of Artificial Sequence: Synthetic oligonucleotide
caccuggugggaaugggug

SEQ ID NO: 1364821 - RNA, 19 nt, Artificial Sequence
  Description of Artificial Sequence: Synthetic oligonucleotide
aaggcguaagacacaguga

SEQ ID NO: 1364822 - RNA, 19 nt, Artificial Sequence
  Description of Artificial Sequence: Synthetic oligonucleotide
ucgucuagaccgcccacgu

SEQ ID NO: 1364823 - RNA, 19 nt, Artificial Sequence
  Description of Artificial Sequence: Synthetic oligonucleotide
aucugagacaucccuggau

SEQ ID NO: 1364824 - RNA, 19 nt, Artificial Sequence
  Description of Artificial Sequence: Synthetic oligonucleotide
cuggauggggcaucccacc

SEQ ID NO: 1364825 - RNA, 19 nt, Artificial Sequence
  Description of Artificial Sequence: Synthetic oligonucleotide
uguggguguugaccaccgg

SEQ ID NO: 1364826 - RNA, 19 nt, Artificial Sequence
  Description of Artificial Sequence: Synthetic oligonucleotide
ucgccuuuagaguccuucu

SEQ ID NO: 1364827 - RNA, 19 nt, Artificial Sequence
  Description of Artificial Sequence: Synthetic oligonucleotide
agaguugccgagagggguc

SEQ ID NO: 1364828 - RNA, 19 nt, Artificial Sequence
  Description of Artificial Sequence: Synthetic oligonucleotide
uacugcccauucauggccu

SEQ ID NO: 1364829 - RNA, 19 nt, Artificial Sequence
  Description of Artificial Sequence: Synthetic oligonucleotide
cuuccucacucaagaauuc

SEQ ID NO: 1364830 - RNA, 19 nt, Artificial Sequence
  Description of Artificial Sequence: Synthetic oligonucleotide
uacaccguggcauccugau

SEQ ID NO: 1364831 - RNA, 19 nt, Artificial Sequence
  Description of Artificial Sequence: Synthetic oligonucleotide
ggguuuguaagaugacccc

SEQ ID NO: 1364832 - RNA, 19 nt, Artificial Sequence
  Description of Artificial Sequence: Synthetic oligonucleotide
gaccacgagguggaacugg

SEQ ID NO: 1364833 - RNA, 19 nt, Artificial Sequence
  Description of Artificial Sequence: Synthetic oligonucleotide
augaaaccacaggauuggg

SEQ ID NO: 1364834 - RNA, 19 nt, Artificial Sequence
  Description of Artificial Sequence: Synthetic oligonucleotide
uagccaugacaagcuauag

SEQ ID NO: 1364835 - RNA, 19 nt, Artificial Sequence
  Description of Artificial Sequence: Synthetic oligonucleotide
accguguggaggcauggga

SEQ ID NO: 1364836 - RNA, 19 nt, Artificial Sequence
  Description of Artificial Sequence: Synthetic oligonucleotide
acagcuggugaggacgguc

SEQ ID NO: 1364837 - RNA, 19 nt, Artificial Sequence
  Description of Artificial Sequence: Synthetic oligonucleotide
acccguaugggcuucccau

SEQ ID NO: 1364838 - RNA, 19 nt, Artificial Sequence
  Description of Artificial Sequence: Synthetic oligonucleotide
auuagccaugacaagcuau

SEQ ID NO: 1364839 - RNA, 19 nt, Artificial Sequence
  Description of Artificial Sequence: Synthetic oligonucleotide
cauaccguguggaggcaug

SEQ ID NO: 1364840 - RNA, 19 nt, Artificial Sequence
  Description of Artificial Sequence: Synthetic oligonucleotide
agguucccaaugaaaaugu

SEQ ID NO: 1364841 - RNA, 19 nt, Artificial Sequence
  Description of Artificial Sequence: Synthetic oligonucleotide
ucaacggaggaggcccgcg

SEQ ID NO: 1364842 - RNA, 19 nt, Artificial Sequence
  Description of Artificial Sequence: Synthetic oligonucleotide
caaaggcgcugaaaguauc

SEQ ID NO: 1364843 - RNA, 19 nt, Artificial Sequence
  Description of Artificial Sequence: Synthetic oligonucleotide
cucgucuagaccgcccacg

SEQ ID NO: 1364844 - RNA, 19 nt, Artificial Sequence
  Description of Artificial Sequence: Synthetic oligonucleotide
caucaacggaggaggcccg

SEQ ID NO: 1364845 - RNA, 19 nt, Artificial Sequence
  Description of Artificial Sequence: Synthetic oligonucleotide
ucccauagaguuugaucau

SEQ ID NO: 1364846 - RNA, 19 nt, Artificial Sequence
  Description of Artificial Sequence: Synthetic oligonucleotide
gcaucaacggaggaggccc

SEQ ID NO: 1364847 - RNA, 19 nt, Artificial Sequence
  Description of Artificial Sequence: Synthetic oligonucleotide
agauccaaaaggaggcccu

SEQ ID NO: 1364848 - RNA, 19 nt, Artificial Sequence
  Description of Artificial Sequence: Synthetic oligonucleotide
cgcugaaaguaucauaaag

SEQ ID NO: 1364849 - RNA, 19 nt, Artificial Sequence
  Description of Artificial Sequence: Synthetic oligonucleotide
auaccguguggaggcaugg

SEQ ID NO: 1364850 - RNA, 19 nt, Artificial Sequence
  Description of Artificial Sequence: Synthetic oligonucleotide
gacagcggguucugggcug

SEQ ID NO: 1364851 - RNA, 19 nt, Artificial Sequence
  Description of Artificial Sequence: Synthetic oligonucleotide
caacgaagccauagccuug

SEQ ID NO: 1364852 - RNA, 19 nt, Artificial Sequence
  Description of Artificial Sequence: Synthetic oligonucleotide
acucuauccuuuggcaugu

SEQ ID NO: 1364853 - RNA, 19 nt, Artificial Sequence
  Description of Artificial Sequence: Synthetic oligonucleotide
accacgagguggaacuggg

SEQ ID NO: 1364854 - RNA, 19 nt, Artificial Sequence
  Description of Artificial Sequence: Synthetic oligonucleotide
ggcgcugaaaguaucauaa

SEQ ID NO: 1364855 - RNA, 19 nt, Artificial Sequence
  Description of Artificial Sequence: Synthetic oligonucleotide
agccuuguucacccguaug

SEQ ID NO: 1364856 - RNA, 19 nt, Artificial Sequence
  Description of Artificial Sequence: Synthetic oligonucleotide
uagaccgcccacguacacc

SEQ ID NO: 1364857 - RNA, 19 nt, Artificial Sequence
  Description of Artificial Sequence: Synthetic oligonucleotide
cuugaaggcguaagacaca

SEQ ID NO: 1364858 - RNA, 19 nt, Artificial Sequence
  Description of Artificial Sequence: Synthetic oligonucleotide
guuuguaagaugaccccaa

SEQ ID NO: 1364859 - RNA, 19 nt, Artificial Sequence
  Description of Artificial Sequence: Synthetic oligonucleotide
aaggcgcugaaaguaucau

SEQ ID NO: 1364860 - RNA, 19 nt, Artificial Sequence
  Description of Artificial Sequence: Synthetic oligonucleotide
cucgccuuuagaguccuuc

SEQ ID NO: 1364861 - RNA, 19 nt, Artificial Sequence
  Description of Artificial Sequence: Synthetic oligonucleotide
gaggcccgcgcauaccgug

SEQ ID NO: 1364862 - RNA, 19 nt, Artificial Sequence
  Description of Artificial Sequence: Synthetic oligonucleotide
gcgcauaccguguggaggc

SEQ ID NO: 1364863 - RNA, 19 nt, Artificial Sequence
  Description of Artificial Sequence: Synthetic oligonucleotide
agggaugaaaccacaggau

SEQ ID NO: 1364864 - RNA, 19 nt, Artificial Sequence
  Description of Artificial Sequence: Synthetic oligonucleotide
aucaacggaggaggcccgc

SEQ ID NO: 1364865 - RNA, 19 nt, Artificial Sequence
  Description of Artificial Sequence: Synthetic oligonucleotide
cacagcagugguucgcuca

SEQ ID NO: 1364866 - RNA, 19 nt, Artificial Sequence
  Description of Artificial Sequence: Synthetic oligonucleotide
uggcgcucgccuuuagagu

SEQ ID NO: 1364867 - RNA, 19 nt, Artificial Sequence
  Description of Artificial Sequence: Synthetic oligonucleotide
cugaagccuuguucacccg

SEQ ID NO: 1364868 - RNA, 19 nt, Artificial Sequence
  Description of Artificial Sequence: Synthetic oligonucleotide
aucccuggauggggcaucc

SEQ ID NO: 1364869 - RNA, 19 nt, Artificial Sequence
  Description of Artificial Sequence: Synthetic oligonucleotide
cuuucucgucuagaccgcc

SEQ ID NO: 1364870 - RNA, 19 nt, Artificial Sequence
  Description of Artificial Sequence: Synthetic oligonucleotide
gagaggauauaaggagaca

SEQ ID NO: 1364871 - RNA, 19 nt, Artificial Sequence
  Description of Artificial Sequence: Synthetic oligonucleotide
uaccguguggaggcauggg

SEQ ID NO: 1364872 - RNA, 19 nt, Artificial Sequence
  Description of Artificial Sequence: Synthetic oligonucleotide
ucucgucuagaccgcccac

SEQ ID NO: 1364873 - RNA, 19 nt, Artificial Sequence
  Description of Artificial Sequence: Synthetic oligonucleotide
agugguucgcucacuuucu

SEQ ID NO: 1364874 - RNA, 19 nt, Artificial Sequence
  Description of Artificial Sequence: Synthetic oligonucleotide
aaguaucauaaagcagcuu

SEQ ID NO: 1364875 - RNA, 19 nt, Artificial Sequence
  Description of Artificial Sequence: Synthetic oligonucleotide
ugaggaugugaguguccgu

SEQ ID NO: 1364876 - RNA, 19 nt, Artificial Sequence
  Description of Artificial Sequence: Synthetic oligonucleotide
gaccugggugacccauagg

SEQ ID NO: 1364877 - RNA, 19 nt, Artificial Sequence
  Description of Artificial Sequence: Synthetic oligonucleotide
gacaagcuauagcaacucu

SEQ ID NO: 1364878 - RNA, 19 nt, Artificial Sequence
  Description of Artificial Sequence: Synthetic oligonucleotide
ugaggaagugggccccgaa

SEQ ID NO: 1364879 - RNA, 19 nt, Artificial Sequence
  Description of Artificial Sequence: Synthetic oligonucleotide
gguaucccaggagggaggg

SEQ ID NO: 1364880 - RNA, 19 nt, Artificial Sequence
  Description of Artificial Sequence: Synthetic oligonucleotide
ggcauaacccuuagaguug

SEQ ID NO: 1364881 - RNA, 19 nt, Artificial Sequence
  Description of Artificial Sequence: Synthetic oligonucleotide
cgaacagcuggugaggacg

SEQ ID NO: 1364882 - RNA, 19 nt, Artificial Sequence
  Description of Artificial Sequence: Synthetic oligonucleotide
gguuuguaagaugacccca

SEQ ID NO: 1364883 - RNA, 19 nt, Artificial Sequence
  Description of Artificial Sequence: Synthetic oligonucleotide
ggcgcucgccuuuagaguc

SEQ ID NO: 1364884 - RNA, 19 nt, Artificial Sequence
  Description of Artificial Sequence: Synthetic oligonucleotide
ggaccaguguauccaugag

SEQ ID NO: 1364885 - RNA, 19 nt, Artificial Sequence
  Description of Artificial Sequence: Synthetic oligonucleotide
auuccaggagguggccggg

SEQ ID NO: 1364886 - RNA, 19 nt, Artificial Sequence
  Description of Artificial Sequence: Synthetic oligonucleotide
accgcccacguacaccgug

SEQ ID NO: 1364887 - RNA, 19 nt, Artificial Sequence
  Description of Artificial Sequence: Synthetic oligonucleotide
gagacaaaggacagcaauu

SEQ ID NO: 1364888 - RNA, 19 nt, Artificial Sequence
  Description of Artificial Sequence: Synthetic oligonucleotide
ggagacaaaggacagcaau

SEQ ID NO: 1364889 - RNA, 19 nt, Artificial Sequence
  Description of Artificial Sequence: Synthetic oligonucleotide
caggaccaacauuuuaaaa

SEQ ID NO: 1364890 - RNA, 19 nt, Artificial Sequence
  Description of Artificial Sequence: Synthetic oligonucleotide
ggaugugaguguccgugac

SEQ ID NO: 1364891 - RNA, 19 nt, Artificial Sequence
  Description of Artificial Sequence: Synthetic oligonucleotide
ccaaaaggaggcccucggg

SEQ ID NO: 1364892 - RNA, 19 nt, Artificial Sequence
  Description of Artificial Sequence: Synthetic oligonucleotide
ggucccgcauaaucuuggg

SEQ ID NO: 1364893 - RNA, 19 nt, Artificial Sequence
  Description of Artificial Sequence: Synthetic oligonucleotide
aggcgcugaaaguaucaua

SEQ ID NO: 1364894 - RNA, 19 nt, Artificial Sequence
  Description of Artificial Sequence: Synthetic oligonucleotide
guguugaccaccggcccug

SEQ ID NO: 1364895 - RNA, 19 nt, Artificial Sequence
  Description of Artificial Sequence: Synthetic oligonucleotide
augcccauuggaggagguc

SEQ ID NO: 1364896 - RNA, 19 nt, Artificial Sequence
  Description of Artificial Sequence: Synthetic oligonucleotide
cuagaccgcccacguacac

SEQ ID NO: 1364897 - RNA, 19 nt, Artificial Sequence
  Description of Artificial Sequence: Synthetic oligonucleotide
cucccacagcagugguucg

SEQ ID NO: 1364898 - RNA, 19 nt, Artificial Sequence
  Description of Artificial Sequence: Synthetic oligonucleotide
ccuuuagaguccuucuuga

SEQ ID NO: 1364899 - RNA, 19 nt, Artificial Sequence
  Description of Artificial Sequence: Synthetic oligonucleotide
guucgcucacuuucucguc

SEQ ID NO: 1364900 - RNA, 19 nt, Artificial Sequence
  Description of Artificial Sequence: Synthetic oligonucleotide
cguggagugggucugggug

SEQ ID NO: 1364901 - RNA, 19 nt, Artificial Sequence
  Description of Artificial Sequence: Synthetic oligonucleotide
gggguaucccaggagggag

SEQ ID NO: 1364902 - RNA, 19 nt, Artificial Sequence
  Description of Artificial Sequence: Synthetic oligonucleotide
cguaagacacagugauggg

SEQ ID NO: 1364903 - RNA, 19 nt, Artificial Sequence
  Description of Artificial Sequence: Synthetic oligonucleotide
gguucgcucacuuucucgu

SEQ ID NO: 1364904 - RNA, 19 nt, Artificial Sequence
  Description of Artificial Sequence: Synthetic oligonucleotide
ucgcucacuuucucgucua

SEQ ID NO: 1364905 - RNA, 19 nt, Artificial Sequence
  Description of Artificial Sequence: Synthetic oligonucleotide
ggugcaucugcgaacagcu

SEQ ID NO: 1364906 - RNA, 19 nt, Artificial Sequence
  Description of Artificial Sequence: Synthetic oligonucleotide
ugaggacggucagccuggg

SEQ ID NO: 1364907 - RNA, 19 nt, Artificial Sequence
  Description of Artificial Sequence: Synthetic oligonucleotide
ugggucuguuacacaggua

SEQ ID NO: 1364908 - RNA, 19 nt, Artificial Sequence
  Description of Artificial Sequence: Synthetic oligonucleotide
gggucccgcauaaucuugg

SEQ ID NO: 1364909 - RNA, 19 nt, Artificial Sequence
  Description of Artificial Sequence: Synthetic oligonucleotide
ugcccauucauggccucaa

SEQ ID NO: 1364910 - RNA, 19 nt, Artificial Sequence
  Description of Artificial Sequence: Synthetic oligonucleotide
gggcaugcccauuggagga

SEQ ID NO: 1364911 - RNA, 19 nt, Artificial Sequence
  Description of Artificial Sequence: Synthetic oligonucleotide
gggugcaucugcgaacagc

SEQ ID NO: 1364912 - RNA, 19 nt, Artificial Sequence
  Description of Artificial Sequence: Synthetic oligonucleotide
agccugggacagcggguuc

SEQ ID NO: 1364913 - RNA, 19 nt, Artificial Sequence
  Description of Artificial Sequence: Synthetic oligonucleotide
gacccauaggagauccaaa

SEQ ID NO: 1364914 - RNA, 19 nt, Artificial Sequence
  Description of Artificial Sequence: Synthetic oligonucleotide
ccguguggaggcaugggac

SEQ ID NO: 1364915 - RNA, 19 nt, Artificial Sequence
  Description of Artificial Sequence: Synthetic oligonucleotide
cgcugguagccauagggag

SEQ ID NO: 1364916 - RNA, 19 nt, Artificial Sequence
  Description of Artificial Sequence: Synthetic oligonucleotide
gcauccugauuccguucgg

SEQ ID NO: 1364917 - RNA, 19 nt, Artificial Sequence
  Description of Artificial Sequence: Synthetic oligonucleotide
guccgugaccaggaugccc

SEQ ID NO: 1364918 - RNA, 19 nt, Artificial Sequence
  Description of Artificial Sequence: Synthetic oligonucleotide
ccguaugggcuucccauag

SEQ ID NO: 1364919 - RNA, 19 nt, Artificial Sequence
  Description of Artificial Sequence: Synthetic oligonucleotide
cguguggaggcaugggacc

SEQ ID NO: 1364920 - RNA, 19 nt, Artificial Sequence
  Description of Artificial Sequence: Synthetic oligonucleotide
cucggaggaccaguguauc

SEQ ID NO: 1364921 - RNA, 19 nt, Artificial Sequence
  Description of Artificial Sequence: Synthetic oligonucleotide
uguccgugaccaggaugcc

SEQ ID NO: 1364922 - RNA, 19 nt, Artificial Sequence
  Description of Artificial Sequence: Synthetic oligonucleotide
ggcaucaacggaggaggcc

SEQ ID NO: 1364923 - RNA, 19 nt, Artificial Sequence
  Description of Artificial Sequence: Synthetic oligonucleotide
augaccccaaaggcgcuga

SEQ ID NO: 1364924 - RNA, 19 nt, Artificial Sequence
  Description of Artificial Sequence: Synthetic oligonucleotide
uucacccguaugggcuucc

SEQ ID NO: 1364925 - RNA, 19 nt, Artificial Sequence
  Description of Artificial Sequence: Synthetic oligonucleotide
agggucccgcauaaucuug

SEQ ID NO: 1364926 - RNA, 19 nt, Artificial Sequence
  Description of Artificial Sequence: Synthetic oligonucleotide
ggugaggaugugagugucc

SEQ ID NO: 1364927 - RNA, 19 nt, Artificial Sequence
  Description of Artificial Sequence: Synthetic oligonucleotide
gaguugccgagagggguca

SEQ ID NO: 1364928 - RNA, 19 nt, Artificial Sequence
  Description of Artificial Sequence: Synthetic oligonucleotide
acauugaaauggggacaga

SEQ ID NO: 1364929 - RNA, 19 nt, Artificial Sequence
  Description of Artificial Sequence: Synthetic oligonucleotide
ggacggucagccugggaca

SEQ ID NO: 1364930 - RNA, 19 nt, Artificial Sequence
  Description of Artificial Sequence: Synthetic oligonucleotide
cauccugauuccguucgga

SEQ ID NO: 1364931 - RNA, 19 nt, Artificial Sequence
  Description of Artificial Sequence: Synthetic oligonucleotide
guugaccaccggcccugcc

SEQ ID NO: 1364932 - RNA, 19 nt, Artificial Sequence
  Description of Artificial Sequence: Synthetic oligonucleotide
uguugaccaccggcccugc

SEQ ID NO: 1364933 - RNA, 19 nt, Artificial Sequence
  Description of Artificial Sequence: Synthetic oligonucleotide
ucacccguaugggcuuccc

SEQ ID NO: 1364934 - RNA, 19 nt, Artificial Sequence
  Description of Artificial Sequence: Synthetic oligonucleotide
accggcccugccuggagaa

SEQ ID NO: 1364935 - RNA, 19 nt, Artificial Sequence
  Description of Artificial Sequence: Synthetic oligonucleotide
cacagugaugggucuguua

SEQ ID NO: 1364936 - RNA, 19 nt, Artificial Sequence
  Description of Artificial Sequence: Synthetic oligonucleotide
cauggcgcucgccuuuaga

SEQ ID NO: 1364937 - RNA, 19 nt, Artificial Sequence
  Description of Artificial Sequence: Synthetic oligonucleotide
gaggaggcccgcgcauacc

SEQ ID NO: 1364938 - RNA, 19 nt, Artificial Sequence
  Description of Artificial Sequence: Synthetic oligonucleotide
gccauggcgaagaggcucc

SEQ ID NO: 1364939 - RNA, 19 nt, Artificial Sequence
  Description of Artificial Sequence: Synthetic oligonucleotide
ggcguaagacacagugaug

SEQ ID NO: 1364940 - RNA, 19 nt, Artificial Sequence
  Description of Artificial Sequence: Synthetic oligonucleotide
cugauuccguucggagaug

SEQ ID NO: 1364941 - RNA, 19 nt, Artificial Sequence
  Description of Artificial Sequence: Synthetic oligonucleotide
acggaggaggcccgcgcau

SEQ ID NO: 1364942 - RNA, 19 nt, Artificial Sequence
  Description of Artificial Sequence: Synthetic oligonucleotide
gaugggcccggcagccaug

SEQ ID NO: 1364943 - RNA, 19 nt, Artificial Sequence
  Description of Artificial Sequence: Synthetic oligonucleotide
ggaggaggcccgcgcauac

SEQ ID NO: 1364944 - RNA, 19 nt, Artificial Sequence
  Description of Artificial Sequence: Synthetic oligonucleotide
cauagaguuugaucauguu

SEQ ID NO: 1364945 - RNA, 19 nt, Artificial Sequence
  Description of Artificial Sequence: Synthetic oligonucleotide
acaccguggcauccugauu

SEQ ID NO: 1364946 - RNA, 19 nt, Artificial Sequence
  Description of Artificial Sequence: Synthetic oligonucleotide
ggccccuacauccagguuu

SEQ ID NO: 1364947 - RNA, 19 nt, Artificial Sequence
  Description of Artificial Sequence: Synthetic oligonucleotide
ggcaugcccauuggaggag

SEQ ID NO: 1364948 - RNA, 19 nt, Artificial Sequence
  Description of Artificial Sequence: Synthetic oligonucleotide
gggucagcacauuagccau

SEQ ID NO: 1364949 - RNA, 19 nt, Artificial Sequence
  Description of Artificial Sequence: Synthetic oligonucleotide
ccugauuccguucggagau

SEQ ID NO: 1364950 - RNA, 19 nt, Artificial Sequence
  Description of Artificial Sequence: Synthetic oligonucleotide
ccacgagguggaacugggg

SEQ ID NO: 1364951 - RNA, 19 nt, Artificial Sequence
  Description of Artificial Sequence: Synthetic oligonucleotide
cgcgcauaccguguggagg

SEQ ID NO: 1364952 - RNA, 19 nt, Artificial Sequence
  Description of Artificial Sequence: Synthetic oligonucleotide
ccgcccacguacaccgugg

SEQ ID NO: 1364953 - RNA, 19 nt, Artificial Sequence
  Description of Artificial Sequence: Synthetic oligonucleotide
aguccuucuugaaggcgua

SEQ ID NO: 1364954 - RNA, 19 nt, Artificial Sequence
  Description of Artificial Sequence: Synthetic oligonucleotide
ccaugacaagcuauagcaa

SEQ ID NO: 1364955 - RNA, 19 nt, Artificial Sequence
  Description of Artificial Sequence: Synthetic oligonucleotide
aguugccgagaggggucag

SEQ ID NO: 1364956 - RNA, 19 nt, Artificial Sequence
  Description of Artificial Sequence: Synthetic oligonucleotide
agaauucaacgaagccaua

SEQ ID NO: 1364957 - RNA, 19 nt, Artificial Sequence
  Description of Artificial Sequence: Synthetic oligonucleotide
ggccccgaaguggaccacg

SEQ ID NO: 1364958 - RNA, 19 nt, Artificial Sequence
  Description of Artificial Sequence: Synthetic oligonucleotide
guaucccaggagggagggc

SEQ ID NO: 1364959 - RNA, 19 nt, Artificial Sequence
  Description of Artificial Sequence: Synthetic oligonucleotide
gaggacggucagccuggga

SEQ ID NO: 1364960 - RNA, 19 nt, Artificial Sequence
  Description of Artificial Sequence: Synthetic oligonucleotide
gaagaggcucccgccgucu

SEQ ID NO: 1364961 - RNA, 19 nt, Artificial Sequence
  Description of Artificial Sequence: Synthetic oligonucleotide
cccaaaggcgcugaaagua

SEQ ID NO: 1364962 - RNA, 19 nt, Artificial Sequence
  Description of Artificial Sequence: Synthetic oligonucleotide
gguguugaccaccggcccu

SEQ ID NO: 1364963 - RNA, 19 nt, Artificial Sequence
  Description of Artificial Sequence: Synthetic oligonucleotide
uggccccuacauccagguu

SEQ ID NO: 1364964 - RNA, 19 nt, Artificial Sequence
  Description of Artificial Sequence: Synthetic oligonucleotide
caaucaggaccaacauuuu

SEQ ID NO: 1364965 - RNA, 19 nt, Artificial Sequence
  Description of Artificial Sequence: Synthetic oligonucleotide
gcaacucugauugguccaa

SEQ ID NO: 1364966 - RNA, 19 nt, Artificial Sequence
  Description of Artificial Sequence: Synthetic oligonucleotide
gccugguggaggaagccca

SEQ ID NO: 1364967 - RNA, 19 nt, Artificial Sequence
  Description of Artificial Sequence: Synthetic oligonucleotide
cacccguaugggcuuccca

SEQ ID NO: 1364968 - RNA, 19 nt, Artificial Sequence
  Description of Artificial Sequence: Synthetic oligonucleotide
guucggagaugggcccggc

SEQ ID NO: 1364969 - RNA, 19 nt, Artificial Sequence
  Description of Artificial Sequence: Synthetic oligonucleotide
guucacccguaugggcuuc

SEQ ID NO: 1364970 - RNA, 19 nt, Artificial Sequence
  Description of Artificial Sequence: Synthetic oligonucleotide
guguggaggcaugggaccu

SEQ ID NO: 1364971 - RNA, 19 nt, Artificial Sequence
  Description of Artificial Sequence: Synthetic oligonucleotide
ccgcugguagccauaggga

SEQ ID NO: 1364972 - RNA, 19 nt, Artificial Sequence
  Description of Artificial Sequence: Synthetic oligonucleotide
gcgcugaaaguaucauaaa

SEQ ID NO: 1364973 - RNA, 19 nt, Artificial Sequence
  Description of Artificial Sequence: Synthetic oligonucleotide
gaggcccggcauggggaug

SEQ ID NO: 1364974 - RNA, 19 nt, Artificial Sequence
  Description of Artificial Sequence: Synthetic oligonucleotide
gcccgcgcauaccgugugg

SEQ ID NO: 1364975 - RNA, 19 nt, Artificial Sequence
  Description of Artificial Sequence: Synthetic oligonucleotide
caugcccauuggaggaggu

SEQ ID NO: 1364976 - RNA, 19 nt, Artificial Sequence
  Description of Artificial Sequence: Synthetic oligonucleotide
ggcccggcagccauggcga

SEQ ID NO: 1364977 - RNA, 19 nt, Artificial Sequence
  Description of Artificial Sequence: Synthetic oligonucleotide
ggacagcggguucugggcu

SEQ ID NO: 1364978 - RNA, 19 nt, Artificial Sequence
  Description of Artificial Sequence: Synthetic oligonucleotide
gaguugccugugucagggu

SEQ ID NO: 1364979 - RNA, 19 nt, Artificial Sequence
  Description of Artificial Sequence: Synthetic oligonucleotide
ggaccacgagguggaacug

SEQ ID NO: 1364980 - RNA, 19 nt, Artificial Sequence
  Description of Artificial Sequence: Synthetic oligonucleotide
cugcccauucauggccuca

SEQ ID NO: 1364981 - RNA, 19 nt, Artificial Sequence
  Description of Artificial Sequence: Synthetic oligonucleotide
ggucuguuacacagguacu

SEQ ID NO: 1364982 - RNA, 19 nt, Artificial Sequence
  Description of Artificial Sequence: Synthetic oligonucleotide
ggcccgcgcauaccgugug

SEQ ID NO: 1364983 - RNA, 19 nt, Artificial Sequence
  Description of Artificial Sequence: Synthetic oligonucleotide
gggagggcuccagguggcg

SEQ ID NO: 1364984 - RNA, 19 nt, Artificial Sequence
  Description of Artificial Sequence: Synthetic oligonucleotide
ccgcgcauaccguguggag

SEQ ID NO: 1364985 - RNA, 19 nt, Artificial Sequence
  Description of Artificial Sequence: Synthetic oligonucleotide
aggcccgcgcauaccgugu

SEQ ID NO: 1364986 - RNA, 19 nt, Artificial Sequence
  Description of Artificial Sequence: Synthetic oligonucleotide
ccaaaggcgcugaaaguau

SEQ ID NO: 1364987 - RNA, 19 nt, Artificial Sequence
  Description of Artificial Sequence: Synthetic oligonucleotide
aguggaccacgagguggaa

SEQ ID NO: 1364988 - RNA, 19 nt, Artificial Sequence
  Description of Artificial Sequence: Synthetic oligonucleotide
ggggugcaucugcgaacag

SEQ ID NO: 1364989 - RNA, 19 nt, Artificial Sequence
  Description of Artificial Sequence: Synthetic oligonucleotide
agcucccacagcagugguu

SEQ ID NO: 1364990 - RNA, 19 nt, Artificial Sequence
  Description of Artificial Sequence: Synthetic oligonucleotide
gccccagguggcauaggug

SEQ ID NO: 1364991 - RNA, 19 nt, Artificial Sequence
  Description of Artificial Sequence: Synthetic oligonucleotide
caccggcccugccuggaga

SEQ ID NO: 1364992 - RNA, 19 nt, Artificial Sequence
  Description of Artificial Sequence: Synthetic oligonucleotide
ccguucggagaugggcccg

SEQ ID NO: 1364993 - RNA, 19 nt, Artificial Sequence
  Description of Artificial Sequence: Synthetic oligonucleotide
ccagguucccaaugaaaau

SEQ ID NO: 1364994 - RNA, 19 nt, Artificial Sequence
  Description of Artificial Sequence: Synthetic oligonucleotide
gcgcucgccuuuagagucc

SEQ ID NO: 1364995 - RNA, 19 nt, Artificial Sequence
  Description of Artificial Sequence: Synthetic oligonucleotide
ggucucggaggaccagugu

SEQ ID NO: 1364996 - RNA, 19 nt, Artificial Sequence
  Description of Artificial Sequence: Synthetic oligonucleotide
caugaugggccagcugcau

SEQ ID NO: 1364997 - RNA, 19 nt, Artificial Sequence
  Description of Artificial Sequence: Synthetic oligonucleotide
gcccacguacaccguggca

SEQ ID NO: 1364998 - RNA, 19 nt, Artificial Sequence
  Description of Artificial Sequence: Synthetic oligonucleotide
cccggcauggggauguccu

SEQ ID NO: 1364999 - RNA, 19 nt, Artificial Sequence
  Description of Artificial Sequence: Synthetic oligonucleotide
ccguggcauccugauuccg

SEQ ID NO: 1365000 - RNA, 19 nt, Artificial Sequence
  Description of Artificial Sequence: Synthetic oligonucleotide
cguucggagaugggcccgg

SEQ ID NO: 1365001 - RNA, 19 nt, Artificial Sequence
  Description of Artificial Sequence: Synthetic oligonucleotide
ccacagcagugguucgcuc

SEQ ID NO: 1365002 - RNA, 19 nt, Artificial Sequence
  Description of Artificial Sequence: Synthetic oligonucleotide
cccacguacaccguggcau

SEQ ID NO: 1365003 - RNA, 19 nt, Artificial Sequence
  Description of Artificial Sequence: Synthetic oligonucleotide
gggugacccauaggagauc

SEQ ID NO: 1365004 - RNA, 19 nt, Artificial Sequence
  Description of Artificial Sequence: Synthetic oligonucleotide
gcgaagaggcucccgccgu

SEQ ID NO: 1365005 - RNA, 19 nt, Artificial Sequence
  Description of Artificial Sequence: Synthetic oligonucleotide
ccgugaccaggaugcccag

SEQ ID NO: 1365006 - RNA, 19 nt, Artificial Sequence
  Description of Artificial Sequence: Synthetic oligonucleotide
auggggcaucccaccuggu

SEQ ID NO: 1365007 - RNA, 19 nt, Artificial Sequence
  Description of Artificial Sequence: Synthetic oligonucleotide
cccguaugggcuucccaua

SEQ ID NO: 1365008 - RNA, 19 nt, Artificial Sequence
  Description of Artificial Sequence: Synthetic oligonucleotide
cguaugggcuucccauaga

SEQ ID NO: 1365009 - RNA, 19 nt, Artificial Sequence
  Description of Artificial Sequence: Synthetic oligonucleotide
gcggcacuggaggugggaa

SEQ ID NO: 1365010 - RNA, 19 nt, Artificial Sequence
  Description of Artificial Sequence: Synthetic oligonucleotide
ccauggcgcucgccuuuag

SEQ ID NO: 1365011 - RNA, 19 nt, Artificial Sequence
  Description of Artificial Sequence: Synthetic oligonucleotide
cguggcauccugauuccgu

SEQ ID NO: 1365012 - RNA, 19 nt, Artificial Sequence
  Description of Artificial Sequence: Synthetic oligonucleotide
gguucccaaugaaaauguu

SEQ ID NO: 1365013 - RNA, 19 nt, Artificial Sequence
  Description of Artificial Sequence: Synthetic oligonucleotide
cgcccacguacaccguggc

SEQ ID NO: 1365014 - RNA, 19 nt, Artificial Sequence
  Description of Artificial Sequence: Synthetic oligonucleotide
ggggucucggaggaccagu

SEQ ID NO: 1365015 - RNA, 19 nt, Artificial Sequence
  Description of Artificial Sequence: Synthetic oligonucleotide
cccgcgcauaccgugugga

SEQ ID NO: 1365016 - RNA, 19 nt, Artificial Sequence
  Description of Artificial Sequence: Synthetic oligonucleotide
ccccgcugguagccauagg

SEQ ID NO: 1365017 - RNA, 19 nt, Artificial Sequence
  Description of Artificial Sequence: Synthetic oligonucleotide
gggaccugggugacccaua

SEQ ID NO: 1365018 - RNA, 19 nt, Artificial Sequence
  Description of Artificial Sequence: Synthetic oligonucleotide
gcauaccguguggaggcau

SEQ ID NO: 1365019 - RNA, 19 nt, Artificial Sequence
  Description of Artificial Sequence: Synthetic oligonucleotide
ccggcauggggauguccua

SEQ ID NO: 1365020 - RNA, 19 nt, Artificial Sequence
  Description of Artificial Sequence: Synthetic oligonucleotide
gccauggcgcucgccuuua

SEQ ID NO: 1365021 - RNA, 19 nt, Artificial Sequence
  Description of Artificial Sequence: Synthetic oligonucleotide
gaccgcccacguacaccgu

SEQ ID NO: 1365022 - RNA, 19 nt, Artificial Sequence
  Description of Artificial Sequence: Synthetic oligonucleotide
ggaggcccgcgcauaccgu

SEQ ID NO: 1365023 - RNA, 19 nt, Artificial Sequence
  Description of Artificial Sequence: Synthetic oligonucleotide
cgucuagaccgcccacgua

SEQ ID NO: 1365024 - RNA, 19 nt, Artificial Sequence
  Description of Artificial Sequence: Synthetic oligonucleotide
cgcauaccguguggaggca

SEQ ID NO: 1365025 - RNA, 19 nt, Artificial Sequence
  Description of Artificial Sequence: Synthetic oligonucleotide
cgcucgccuuuagaguccu

SEQ ID NO: 1365026 - RNA, 19 nt, Artificial Sequence
  Description of Artificial Sequence: Synthetic oligonucleotide
aauuaguacauacugugcc

SEQ ID NO: 1365027 - RNA, 19 nt, Artificial Sequence
  Description of Artificial Sequence: Synthetic oligonucleotide
aaagguuacagauucgggg

SEQ ID NO: 1365028 - RNA, 19 nt, Artificial Sequence
  Description of Artificial Sequence: Synthetic oligonucleotide
aguaauuucgcucuggcgg

SEQ ID NO: 1365029 - RNA, 19 nt, Artificial Sequence
  Description of Artificial Sequence: Synthetic oligonucleotide
acauaaagguuacagauuc

SEQ ID NO: 1365030 - RNA, 19 nt, Artificial Sequence
  Description of Artificial Sequence: Synthetic oligonucleotide
uaccaaaucuagaaaagcg

SEQ ID NO: 1365031 - RNA, 19 nt, Artificial Sequence
  Description of Artificial Sequence: Synthetic oligonucleotide
uccugaaauaguaauuucg

SEQ ID NO: 1365032 - RNA, 19 nt, Artificial Sequence
  Description of Artificial Sequence: Synthetic oligonucleotide
cauacauucgaguagcucc

SEQ ID NO: 1365033 - RNA, 19 nt, Artificial Sequence
  Description of Artificial Sequence: Synthetic oligonucleotide
cauaaagcuggucagacgg

SEQ ID NO: 1365034 - RNA, 19 nt, Artificial Sequence
  Description of Artificial Sequence: Synthetic oligonucleotide
ggagacaugcuuuagaagg

SEQ ID NO: 1365035 - RNA, 19 nt, Artificial Sequence
  Description of Artificial Sequence: Synthetic oligonucleotide
aggagaaauuaguacauac

SEQ ID NO: 1365036 - RNA, 19 nt, Artificial Sequence
  Description of Artificial Sequence: Synthetic oligonucleotide
aauagcacuuguguuaggg

SEQ ID NO: 1365037 - RNA, 19 nt, Artificial Sequence
  Description of Artificial Sequence: Synthetic oligonucleotide
auaguaauuucgcucuggc

SEQ ID NO: 1365038 - RNA, 19 nt, Artificial Sequence
  Description of Artificial Sequence: Synthetic oligonucleotide
aacauggucagauugccgu

SEQ ID NO: 1365039 - RNA, 19 nt, Artificial Sequence
  Description of Artificial Sequence: Synthetic oligonucleotide
aauaggagaguggagugac

SEQ ID NO: 1365040 - RNA, 19 nt, Artificial Sequence
  Description of Artificial Sequence: Synthetic oligonucleotide
aaacaaaucccucucugcu

SEQ ID NO: 1365041 - RNA, 19 nt, Artificial Sequence
  Description of Artificial Sequence: Synthetic oligonucleotide
ucgcaugugaugaacagag

SEQ ID NO: 1365042 - RNA, 19 nt, Artificial Sequence
  Description of Artificial Sequence: Synthetic oligonucleotide
uacacugaaccauuguagg

SEQ ID NO: 1365043 - RNA, 19 nt, Artificial Sequence
  Description of Artificial Sequence: Synthetic oligonucleotide
agcaacaaccacuugguuc

SEQ ID NO: 1365044 - RNA, 19 nt, Artificial Sequence
  Description of Artificial Sequence: Synthetic oligonucleotide
ucuguuauccucagugggg

SEQ ID NO: 1365045 - RNA, 19 nt, Artificial Sequence
  Description of Artificial Sequence: Synthetic oligonucleotide
uuagaccucacagagaccc

SEQ ID NO: 1365046 - RNA, 19 nt, Artificial Sequence
  Description of Artificial Sequence: Synthetic oligonucleotide
uggaugaauacuuugucca

SEQ ID NO: 1365047 - RNA, 19 nt, Artificial Sequence
  Description of Artificial Sequence: Synthetic oligonucleotide
gaaguaacgucuguuaucc

SEQ ID NO: 1365048 - RNA, 19 nt, Artificial Sequence
  Description of Artificial Sequence: Synthetic oligonucleotide
aguaacgucuguuauccuc

SEQ ID NO: 1365049 - RNA, 19 nt, Artificial Sequence
  Description of Artificial Sequence: Synthetic oligonucleotide
uuagacacgacaucaugag

SEQ ID NO: 1365050 - RNA, 19 nt, Artificial Sequence
  Description of Artificial Sequence: Synthetic oligonucleotide
uaaagguuacagauucggg

SEQ ID NO: 1365051 - RNA, 19 nt, Artificial Sequence
  Description of Artificial Sequence: Synthetic oligonucleotide
aggugcaaaagguggaacc

SEQ ID NO: 1365052 - RNA, 19 nt, Artificial Sequence
  Description of Artificial Sequence: Synthetic oligonucleotide
agggcuaguucauacauuc

SEQ ID NO: 1365053 - RNA, 19 nt, Artificial Sequence
  Description of Artificial Sequence: Synthetic oligonucleotide
gaggaaaguagccauacac

SEQ ID NO: 1365054 - RNA, 19 nt, Artificial Sequence
  Description of Artificial Sequence: Synthetic oligonucleotide
aguucauacauucgaguag

SEQ ID NO: 1365055 - RNA, 19 nt, Artificial Sequence
  Description of Artificial Sequence: Synthetic oligonucleotide
accaaaucuagaaaagcgc

SEQ ID NO: 1365056 - RNA, 19 nt, Artificial Sequence
  Description of Artificial Sequence: Synthetic oligonucleotide
uuaggaaugccauuuuaga

SEQ ID NO: 1365057 - RNA, 19 nt, Artificial Sequence
  Description of Artificial Sequence: Synthetic oligonucleotide
uaaaacucguccaucuucu

SEQ ID NO: 1365058 - RNA, 19 nt, Artificial Sequence
  Description of Artificial Sequence: Synthetic oligonucleotide
ugguacauaaagguuacag

SEQ ID NO: 1365059 - RNA, 19 nt, Artificial Sequence
  Description of Artificial Sequence: Synthetic oligonucleotide
aaaucuagaaaagcgccug

SEQ ID NO: 1365060 - RNA, 19 nt, Artificial Sequence
  Description of Artificial Sequence: Synthetic oligonucleotide
uguagaaugcuaccaaauc

SEQ ID NO: 1365061 - RNA, 19 nt, Artificial Sequence
  Description of Artificial Sequence: Synthetic oligonucleotide
aaaccuugaacuugccuca

SEQ ID NO: 1365062 - RNA, 19 nt, Artificial Sequence
  Description of Artificial Sequence: Synthetic oligonucleotide
ugugaccccaugaagggag

SEQ ID NO: 1365063 - RNA, 19 nt, Artificial Sequence
  Description of Artificial Sequence: Synthetic oligonucleotide
ugccauuuuagacacgaca

SEQ ID NO: 1365064 - RNA, 19 nt, Artificial Sequence
  Description of Artificial Sequence: Synthetic oligonucleotide
uucccauugucuuaucucc

SEQ ID NO: 1365065 - RNA, 19 nt, Artificial Sequence
  Description of Artificial Sequence: Synthetic oligonucleotide
cacgacaucaugaguaggg

SEQ ID NO: 1365066 - RNA, 19 nt, Artificial Sequence
  Description of Artificial Sequence: Synthetic oligonucleotide
acuuuguccacccuggaga

SEQ ID NO: 1365067 - RNA, 19 nt, Artificial Sequence
  Description of Artificial Sequence: Synthetic oligonucleotide
acgucuguuauccucagug

SEQ ID NO: 1365068 - RNA, 19 nt, Artificial Sequence
  Description of Artificial Sequence: Synthetic oligonucleotide
ugcuaccaaaucuagaaaa

SEQ ID NO: 1365069 - RNA, 19 nt, Artificial Sequence
  Description of Artificial Sequence: Synthetic oligonucleotide
gaagggaguagccaaacca

SEQ ID NO: 1365070 - RNA, 19 nt, Artificial Sequence
  Description of Artificial Sequence: Synthetic oligonucleotide
uagaaugcuaccaaaucua

SEQ ID NO: 1365071 - RNA, 19 nt, Artificial Sequence
  Description of Artificial Sequence: Synthetic oligonucleotide
ugcacuuuugagccgagga

SEQ ID NO: 1365072 - RNA, 19 nt, Artificial Sequence
  Description of Artificial Sequence: Synthetic oligonucleotide
uuuugagccgaggaugugg

SEQ ID NO: 1365073 - RNA, 19 nt, Artificial Sequence
  Description of Artificial Sequence: Synthetic oligonucleotide
cauucgaguagcuccaccc

SEQ ID NO: 1365074 - RNA, 19 nt, Artificial Sequence
  Description of Artificial Sequence: Synthetic oligonucleotide
acugugaccccaugaaggg

SEQ ID NO: 1365075 - RNA, 19 nt, Artificial Sequence
  Description of Artificial Sequence: Synthetic oligonucleotide
aaguccagaaguaacgucu

SEQ ID NO: 1365076 - RNA, 19 nt, Artificial Sequence
  Description of Artificial Sequence: Synthetic oligonucleotide
auaguagacauacacugaa

SEQ ID NO: 1365077 - RNA, 19 nt, Artificial Sequence
  Description of Artificial Sequence: Synthetic oligonucleotide
cuagaaguccagaaguaac

SEQ ID NO: 1365078 - RNA, 19 nt, Artificial Sequence
  Description of Artificial Sequence: Synthetic oligonucleotide
auuaguacauacugugccu

SEQ ID NO: 1365079 - RNA, 19 nt, Artificial Sequence
  Description of Artificial Sequence: Synthetic oligonucleotide
ugccauuauaaaauguaaa

SEQ ID NO: 1365080 - RNA, 19 nt, Artificial Sequence
  Description of Artificial Sequence: Synthetic oligonucleotide
auaucuuuccugaugaaca

SEQ ID NO: 1365081 - RNA, 19 nt, Artificial Sequence
  Description of Artificial Sequence: Synthetic oligonucleotide
ugagcuaaggcuguagaca

SEQ ID NO: 1365082 - RNA, 19 nt, Artificial Sequence
  Description of Artificial Sequence: Synthetic oligonucleotide
ugaacuugccucaggagaa

SEQ ID NO: 1365083 - RNA, 19 nt, Artificial Sequence
  Description of Artificial Sequence: Synthetic oligonucleotide
augaacauggucagauugc

SEQ ID NO: 1365084 - RNA, 19 nt, Artificial Sequence
  Description of Artificial Sequence: Synthetic oligonucleotide
uguagaacacgccucuuuc

SEQ ID NO: 1365085 - RNA, 19 nt, Artificial Sequence
  Description of Artificial Sequence: Synthetic oligonucleotide
ugacauucuuccagguggg

SEQ ID NO: 1365086 - RNA, 19 nt, Artificial Sequence
  Description of Artificial Sequence: Synthetic oligonucleotide
aaauaguaauuucgcucug

SEQ ID NO: 1365087 - RNA, 19 nt, Artificial Sequence
  Description of Artificial Sequence: Synthetic oligonucleotide
uuugcauuugccugucaug

SEQ ID NO: 1365088 - RNA, 19 nt, Artificial Sequence
  Description of Artificial Sequence: Synthetic oligonucleotide
guuaggaaugccauuuuag

SEQ ID NO: 1365089 - RNA, 19 nt, Artificial Sequence
  Description of Artificial Sequence: Synthetic oligonucleotide
uggagugacgucuucaauc

SEQ ID NO: 1365090 - RNA, 19 nt, Artificial Sequence
  Description of Artificial Sequence: Synthetic oligonucleotide
aguagccauacacccuucc

SEQ ID NO: 1365091 - RNA, 19 nt, Artificial Sequence
  Description of Artificial Sequence: Synthetic oligonucleotide
agguuacagauucggggcc

SEQ ID NO: 1365092 - RNA, 19 nt, Artificial Sequence
  Description of Artificial Sequence: Synthetic oligonucleotide
agcauaaagcuggucagac

SEQ ID NO: 1365093 - RNA, 19 nt, Artificial Sequence
  Description of Artificial Sequence: Synthetic oligonucleotide
ugucacucugucugggacg

SEQ ID NO: 1365094 - RNA, 19 nt, Artificial Sequence
  Description of Artificial Sequence: Synthetic oligonucleotide
uaguucauacauucgagua

SEQ ID NO: 1365095 - RNA, 19 nt, Artificial Sequence
  Description of Artificial Sequence: Synthetic oligonucleotide
ugucuuaucuccugaaaua

SEQ ID NO: 1365096 - RNA, 19 nt, Artificial Sequence
  Description of Artificial Sequence: Synthetic oligonucleotide
ccauaguagacauacacug

SEQ ID NO: 1365097 - RNA, 19 nt, Artificial Sequence
  Description of Artificial Sequence: Synthetic oligonucleotide
auccaauaucugcugacag

SEQ ID NO: 1365098 - RNA, 19 nt, Artificial Sequence
  Description of Artificial Sequence: Synthetic oligonucleotide
ucugagcuaaggcuguaga

SEQ ID NO: 1365099 - RNA, 19 nt, Artificial Sequence
  Description of Artificial Sequence: Synthetic oligonucleotide
agcaauagcacuuguguua

SEQ ID NO: 1365100 - RNA, 19 nt, Artificial Sequence
  Description of Artificial Sequence: Synthetic oligonucleotide
cuaccaaaucuagaaaagc

SEQ ID NO: 1365101 - RNA, 19 nt, Artificial Sequence
  Description of Artificial Sequence: Synthetic oligonucleotide
aaucuagaaaagcgccugu

SEQ ID NO: 1365102 - RNA, 19 nt, Artificial Sequence
  Description of Artificial Sequence: Synthetic oligonucleotide
ugaacauggucagauugcc

SEQ ID NO: 1365103 - RNA, 19 nt, Artificial Sequence
  Description of Artificial Sequence: Synthetic oligonucleotide
agcacuuguguuagggucc

SEQ ID NO: 1365104 - RNA, 19 nt, Artificial Sequence
  Description of Artificial Sequence: Synthetic oligonucleotide
uacauaaagguuacagauu

SEQ ID NO: 1365105 - RNA, 19 nt, Artificial Sequence
  Description of Artificial Sequence: Synthetic oligonucleotide
ucuccucuggacauggagu

SEQ ID NO: 1365106 - RNA, 19 nt, Artificial Sequence
  Description of Artificial Sequence: Synthetic oligonucleotide
ugcuuuagaaggaggucug

SEQ ID NO: 1365107 - RNA, 19 nt, Artificial Sequence
  Description of Artificial Sequence: Synthetic oligonucleotide
ccaaaucuagaaaagcgcc

SEQ ID NO: 1365108 - RNA, 19 nt, Artificial Sequence
  Description of Artificial Sequence: Synthetic oligonucleotide
augaacagaggguucucag

SEQ ID NO: 1365109 - RNA, 19 nt, Artificial Sequence
  Description of Artificial Sequence: Synthetic oligonucleotide
uuguguuagggucccauuc

SEQ ID NO: 1365110 - RNA, 19 nt, Artificial Sequence
  Description of Artificial Sequence: Synthetic oligonucleotide
agaaauuaguacauacugu

SEQ ID NO: 1365111 - RNA, 19 nt, Artificial Sequence
  Description of Artificial Sequence: Synthetic oligonucleotide
acauucgaguagcuccacc

SEQ ID NO: 1365112 - RNA, 19 nt, Artificial Sequence
  Description of Artificial Sequence: Synthetic oligonucleotide
ucuuaucuccugaaauagu

SEQ ID NO: 1365113 - RNA, 19 nt, Artificial Sequence
  Description of Artificial Sequence: Synthetic oligonucleotide
ugcaaaagguggaacccca

SEQ ID NO: 1365114 - RNA, 19 nt, Artificial Sequence
  Description of Artificial Sequence: Synthetic oligonucleotide
aaaccaagagaaguccucu

SEQ ID NO: 1365115 - RNA, 19 nt, Artificial Sequence
  Description of Artificial Sequence: Synthetic oligonucleotide
uugcauuugccugucaugu

SEQ ID NO: 1365116 - RNA, 19 nt, Artificial Sequence
  Description of Artificial Sequence: Synthetic oligonucleotide
agaaaagcgccugucuccg

SEQ ID NO: 1365117 - RNA, 19 nt, Artificial Sequence
  Description of Artificial Sequence: Synthetic oligonucleotide
uagccaaaccaagagaagu

SEQ ID NO: 1365118 - RNA, 19 nt, Artificial Sequence
  Description of Artificial Sequence: Synthetic oligonucleotide
uuugagccgaggauguggu

SEQ ID NO: 1365119 - RNA, 19 nt, Artificial Sequence
  Description of Artificial Sequence: Synthetic oligonucleotide
aagcaauagcacuuguguu

SEQ ID NO: 1365120 - RNA, 19 nt, Artificial Sequence
  Description of Artificial Sequence: Synthetic oligonucleotide
auugccgugaaaaucauuu

SEQ ID NO: 1365121 - RNA, 19 nt, Artificial Sequence
  Description of Artificial Sequence: Synthetic oligonucleotide
agucaguauuucuuuguca

SEQ ID NO: 1365122 - RNA, 19 nt, Artificial Sequence
  Description of Artificial Sequence: Synthetic oligonucleotide
agccauacacccuucccag

SEQ ID NO: 1365123 - RNA, 19 nt, Artificial Sequence
  Description of Artificial Sequence: Synthetic oligonucleotide
uucgaguagcuccacccug

SEQ ID NO: 1365124 - RNA, 19 nt, Artificial Sequence
  Description of Artificial Sequence: Synthetic oligonucleotide
cuuaucuccugaaauagua

SEQ ID NO: 1365125 - RNA, 19 nt, Artificial Sequence
  Description of Artificial Sequence: Synthetic oligonucleotide
ugcuugccauuauaaaaug

SEQ ID NO: 1365126 - RNA, 19 nt, Artificial Sequence
  Description of Artificial Sequence: Synthetic oligonucleotide
cacauggccacuugacagg

SEQ ID NO: 1365127 - RNA, 19 nt, Artificial Sequence
  Description of Artificial Sequence: Synthetic oligonucleotide
ugcuguagaacacgccucu

SEQ ID NO: 1365128 - RNA, 19 nt, Artificial Sequence
  Description of Artificial Sequence: Synthetic oligonucleotide
gacaugcuuuagaaggagg

SEQ ID NO: 1365129 - RNA, 19 nt, Artificial Sequence
  Description of Artificial Sequence: Synthetic oligonucleotide
gaacacgccucuuucugug

SEQ ID NO: 1365130 - RNA, 19 nt, Artificial Sequence
  Description of Artificial Sequence: Synthetic oligonucleotide
ccuuagaccucacagagac

SEQ ID NO: 1365131 - RNA, 19 nt, Artificial Sequence
  Description of Artificial Sequence: Synthetic oligonucleotide
uagggucccauucagccuc

SEQ ID NO: 1365132 - RNA, 19 nt, Artificial Sequence
  Description of Artificial Sequence: Synthetic oligonucleotide
gguggaaccccacucaccc

SEQ ID NO: 1365133 - RNA, 19 nt, Artificial Sequence
  Description of Artificial Sequence: Synthetic oligonucleotide
ugaaccauuguaggugagc

SEQ ID NO: 1365134 - RNA, 19 nt, Artificial Sequence
  Description of Artificial Sequence: Synthetic oligonucleotide
gagacagcgucccuugcug

SEQ ID NO: 1365135 - RNA, 19 nt, Artificial Sequence
  Description of Artificial Sequence: Synthetic oligonucleotide
uugccucaggagaaauuag

SEQ ID NO: 1365136 - RNA, 19 nt, Artificial Sequence
  Description of Artificial Sequence: Synthetic oligonucleotide
cauuugccugucauguccc

SEQ ID NO: 1365137 - RNA, 19 nt, Artificial Sequence
  Description of Artificial Sequence: Synthetic oligonucleotide
cucuucaccgcucaccuuc

SEQ ID NO: 1365138 - RNA, 19 nt, Artificial Sequence
  Description of Artificial Sequence: Synthetic oligonucleotide
ugccagaaaacaucauccu

SEQ ID NO: 1365139 - RNA, 19 nt, Artificial Sequence
  Description of Artificial Sequence: Synthetic oligonucleotide
cacugaaccauuguaggug

SEQ ID NO: 1365140 - RNA, 19 nt, Artificial Sequence
  Description of Artificial Sequence: Synthetic oligonucleotide
uaucuuuccugaugaacau

SEQ ID NO: 1365141 - RNA, 19 nt, Artificial Sequence
  Description of Artificial Sequence: Synthetic oligonucleotide
agaaugcuaccaaaucuag

SEQ ID NO: 1365142 - RNA, 19 nt, Artificial Sequence
  Description of Artificial Sequence: Synthetic oligonucleotide
acacugaaccauuguaggu

SEQ ID NO: 1365143 - RNA, 19 nt, Artificial Sequence
  Description of Artificial Sequence: Synthetic oligonucleotide
uguagacaugaagugcccc

SEQ ID NO: 1365144 - RNA, 19 nt, Artificial Sequence
  Description of Artificial Sequence: Synthetic oligonucleotide
cacuuuugagccgaggaug

SEQ ID NO: 1365145 - RNA, 19 nt, Artificial Sequence
  Description of Artificial Sequence: Synthetic oligonucleotide
cuugagcgugccaaccugc

SEQ ID NO: 1365146 - RNA, 19 nt, Artificial Sequence
  Description of Artificial Sequence: Synthetic oligonucleotide
aagcuggucagacgguaga

SEQ ID NO: 1365147 - RNA, 19 nt, Artificial Sequence
  Description of Artificial Sequence: Synthetic oligonucleotide
cugagcuaaggcuguagac

SEQ ID NO: 1365148 - RNA, 19 nt, Artificial Sequence
  Description of Artificial Sequence: Synthetic oligonucleotide
aucuagaaaagcgccuguc

SEQ ID NO: 1365149 - RNA, 19 nt, Artificial Sequence
  Description of Artificial Sequence: Synthetic oligonucleotide
auagcacuuguguuagggu

SEQ ID NO: 1365150 - RNA, 19 nt, Artificial Sequence
  Description of Artificial Sequence: Synthetic oligonucleotide
agccaaaccaagagaaguc

SEQ ID NO: 1365151 - RNA, 19 nt, Artificial Sequence
  Description of Artificial Sequence: Synthetic oligonucleotide
aaagcuggucagacgguag

SEQ ID NO: 1365152 - RNA, 19 nt, Artificial Sequence
  Description of Artificial Sequence: Synthetic oligonucleotide
uagacacgacaucaugagu

SEQ ID NO: 1365153 - RNA, 19 nt, Artificial Sequence
  Description of Artificial Sequence: Synthetic oligonucleotide
guagccauacacccuuccc

SEQ ID NO: 1365154 - RNA, 19 nt, Artificial Sequence
  Description of Artificial Sequence: Synthetic oligonucleotide
uuucugcacuuuugagccg

SEQ ID NO: 1365155 - RNA, 19 nt, Artificial Sequence
  Description of Artificial Sequence: Synthetic oligonucleotide
gaacauggucagauugccg

SEQ ID NO: 1365156 - RNA, 19 nt, Artificial Sequence
  Description of Artificial Sequence: Synthetic oligonucleotide
gagcgugccaaccugcuga

SEQ ID NO: 1365157 - RNA, 19 nt, Artificial Sequence
  Description of Artificial Sequence: Synthetic oligonucleotide
cauaguagacauacacuga

SEQ ID NO: 1365158 - RNA, 19 nt, Artificial Sequence
  Description of Artificial Sequence: Synthetic oligonucleotide
cuguuauccucaguggggc

SEQ ID NO: 1365159 - RNA, 19 nt, Artificial Sequence
  Description of Artificial Sequence: Synthetic oligonucleotide
acaugcuuuagaaggaggu

SEQ ID NO: 1365160 - RNA, 19 nt, Artificial Sequence
  Description of Artificial Sequence: Synthetic oligonucleotide
agacacgacaucaugagua

SEQ ID NO: 1365161 - RNA, 19 nt, Artificial Sequence
  Description of Artificial Sequence: Synthetic oligonucleotide
uggaggaaaguagccauac

SEQ ID NO: 1365162 - RNA, 19 nt, Artificial Sequence
  Description of Artificial Sequence: Synthetic oligonucleotide
aagggaguagccaaaccaa

SEQ ID NO: 1365163 - RNA, 19 nt, Artificial Sequence
  Description of Artificial Sequence: Synthetic oligonucleotide
gcuguagacaugaagugcc

SEQ ID NO: 1365164 - RNA, 19 nt, Artificial Sequence
  Description of Artificial Sequence: Synthetic oligonucleotide
agugacgucuucaaucuga

SEQ ID NO: 1365165 - RNA, 19 nt, Artificial Sequence
  Description of Artificial Sequence: Synthetic oligonucleotide
acgacaucaugaguagggg

SEQ ID NO: 1365166 - RNA, 19 nt, Artificial Sequence
  Description of Artificial Sequence: Synthetic oligonucleotide
augcuugccauuauaaaau

SEQ ID NO: 1365167 - RNA, 19 nt, Artificial Sequence
  Description of Artificial Sequence: Synthetic oligonucleotide
uucagccucacauggccac

SEQ ID NO: 1365168 - RNA, 19 nt, Artificial Sequence
  Description of Artificial Sequence: Synthetic oligonucleotide
guuauccucaguggggcag

SEQ ID NO: 1365169 - RNA, 19 nt, Artificial Sequence
  Description of Artificial Sequence: Synthetic oligonucleotide
auggcuugagcgugccaac

SEQ ID NO: 1365170 - RNA, 19 nt, Artificial Sequence
  Description of Artificial Sequence: Synthetic oligonucleotide
cuuuagaaggaggucugug

SEQ ID NO: 1365171 - RNA, 19 nt, Artificial Sequence
  Description of Artificial Sequence: Synthetic oligonucleotide
auucgaguagcuccacccu

SEQ ID NO: 1365172 - RNA, 19 nt, Artificial Sequence
  Description of Artificial Sequence: Synthetic oligonucleotide
gagccgaggaugugguucc

SEQ ID NO: 1365173 - RNA, 19 nt, Artificial Sequence
  Description of Artificial Sequence: Synthetic oligonucleotide
ugguuccuuuccuuagacc

SEQ ID NO: 1365174 - RNA, 19 nt, Artificial Sequence
  Description of Artificial Sequence: Synthetic oligonucleotide
ggacccauaguagacauac

SEQ ID NO: 1365175 - RNA, 19 nt, Artificial Sequence
  Description of Artificial Sequence: Synthetic oligonucleotide
aguggagugacgucuucaa

SEQ ID NO: 1365176 - RNA, 19 nt, Artificial Sequence
  Description of Artificial Sequence: Synthetic oligonucleotide
ugaauacuuuguccacccu

SEQ ID NO: 1365177 - RNA, 19 nt, Artificial Sequence
  Description of Artificial Sequence: Synthetic oligonucleotide
aaagcgccugucuccgcug

SEQ ID NO: 1365178 - RNA, 19 nt, Artificial Sequence
  Description of Artificial Sequence: Synthetic oligonucleotide
ucacagagacccagcgagc

SEQ ID NO: 1365179 - RNA, 19 nt, Artificial Sequence
  Description of Artificial Sequence: Synthetic oligonucleotide
ucauacauucgaguagcuc

SEQ ID NO: 1365180 - RNA, 19 nt, Artificial Sequence
  Description of Artificial Sequence: Synthetic oligonucleotide
uacagauucggggcccagg

SEQ ID NO: 1365181 - RNA, 19 nt, Artificial Sequence
  Description of Artificial Sequence: Synthetic oligonucleotide
gucauguccccaagggugg

SEQ ID NO: 1365182 - RNA, 19 nt, Artificial Sequence
  Description of Artificial Sequence: Synthetic oligonucleotide
acaugaagugccccagaga

SEQ ID NO: 1365183 - RNA, 19 nt, Artificial Sequence
  Description of Artificial Sequence: Synthetic oligonucleotide
uccuuagaccucacagaga

SEQ ID NO: 1365184 - RNA, 19 nt, Artificial Sequence
  Description of Artificial Sequence: Synthetic oligonucleotide
guaacgucuguuauccuca

SEQ ID NO: 1365185 - RNA, 19 nt, Artificial Sequence
  Description of Artificial Sequence: Synthetic oligonucleotide
acuugacagggagguaccc

SEQ ID NO: 1365186 - RNA, 19 nt, Artificial Sequence
  Description of Artificial Sequence: Synthetic oligonucleotide
agccgagcuccccaagaac

SEQ ID NO: 1365187 - RNA, 19 nt, Artificial Sequence
  Description of Artificial Sequence: Synthetic oligonucleotide
gcuaccaaaucuagaaaag

SEQ ID NO: 1365188 - RNA, 19 nt, Artificial Sequence
  Description of Artificial Sequence: Synthetic oligonucleotide
agguguagaaugcuaccaa

SEQ ID NO: 1365189 - RNA, 19 nt, Artificial Sequence
  Description of Artificial Sequence: Synthetic oligonucleotide
uuaguacauacugugccuu

SEQ ID NO: 1365190 - RNA, 19 nt, Artificial Sequence
  Description of Artificial Sequence: Synthetic oligonucleotide
auacacccuucccaggcug

SEQ ID NO: 1365191 - RNA, 19 nt, Artificial Sequence
  Description of Artificial Sequence: Synthetic oligonucleotide
uuccuauggcuugagcgug

SEQ ID NO: 1365192 - RNA, 19 nt, Artificial Sequence
  Description of Artificial Sequence: Synthetic oligonucleotide
augugaugaacagaggguu

SEQ ID NO: 1365193 - RNA, 19 nt, Artificial Sequence
  Description of Artificial Sequence: Synthetic oligonucleotide
ggcuaguucauacauucga

SEQ ID NO: 1365194 - RNA, 19 nt, Artificial Sequence
  Description of Artificial Sequence: Synthetic oligonucleotide
acauggucagauugccgug

SEQ ID NO: 1365195 - RNA, 19 nt, Artificial Sequence
  Description of Artificial Sequence: Synthetic oligonucleotide
ucccauugucuuaucuccu

SEQ ID NO: 1365196 - RNA, 19 nt, Artificial Sequence
  Description of Artificial Sequence: Synthetic oligonucleotide
gucagguguagaaugcuac

SEQ ID NO: 1365197 - RNA, 19 nt, Artificial Sequence
  Description of Artificial Sequence: Synthetic oligonucleotide
gagguacccagcuuuccca

SEQ ID NO: 1365198 - RNA, 19 nt, Artificial Sequence
  Description of Artificial Sequence: Synthetic oligonucleotide
cagucaguauuucuuuguc

SEQ ID NO: 1365199 - RNA, 19 nt, Artificial Sequence
  Description of Artificial Sequence: Synthetic oligonucleotide
aacacgccucuuucugugu

SEQ ID NO: 1365200 - RNA, 19 nt, Artificial Sequence
  Description of Artificial Sequence: Synthetic oligonucleotide
uccacuggaugaauacuuu

SEQ ID NO: 1365201 - RNA, 19 nt, Artificial Sequence
  Description of Artificial Sequence: Synthetic oligonucleotide
ugguaugcuugccauuaua

SEQ ID NO: 1365202 - RNA, 19 nt, Artificial Sequence
  Description of Artificial Sequence: Synthetic oligonucleotide
cauuguaggugagcagggg

SEQ ID NO: 1365203 - RNA, 19 nt, Artificial Sequence
  Description of Artificial Sequence: Synthetic oligonucleotide
aguacauacugugccuucu

SEQ ID NO: 1365204 - RNA, 19 nt, Artificial Sequence
  Description of Artificial Sequence: Synthetic oligonucleotide
cuuagaccucacagagacc

SEQ ID NO: 1365205 - RNA, 19 nt, Artificial Sequence
  Description of Artificial Sequence: Synthetic oligonucleotide
gcaauagcacuuguguuag

SEQ ID NO: 1365206 - RNA, 19 nt, Artificial Sequence
  Description of Artificial Sequence: Synthetic oligonucleotide
ggugcaaaagguggaaccc

SEQ ID NO: 1365207 - RNA, 19 nt, Artificial Sequence
  Description of Artificial Sequence: Synthetic oligonucleotide
uguuauccucaguggggca

SEQ ID NO: 1365208 - RNA, 19 nt, Artificial Sequence
  Description of Artificial Sequence: Synthetic oligonucleotide
gcauaaagcuggucagacg

SEQ ID NO: 1365209 - RNA, 19 nt, Artificial Sequence
  Description of Artificial Sequence: Synthetic oligonucleotide
agaguggagugacgucuuc

SEQ ID NO: 1365210 - RNA, 19 nt, Artificial Sequence
  Description of Artificial Sequence: Synthetic oligonucleotide
aaguaacgucuguuauccu

SEQ ID NO: 1365211 - RNA, 19 nt, Artificial Sequence
  Description of Artificial Sequence: Synthetic oligonucleotide
auacauucgaguagcucca

SEQ ID NO: 1365212 - RNA, 19 nt, Artificial Sequence
  Description of Artificial Sequence: Synthetic oligonucleotide
ugggacccauaguagacau

SEQ ID NO: 1365213 - RNA, 19 nt, Artificial Sequence
  Description of Artificial Sequence: Synthetic oligonucleotide
uugagcgugccaaccugcu

SEQ ID NO: 1365214 - RNA, 19 nt, Artificial Sequence
  Description of Artificial Sequence: Synthetic oligonucleotide
aacgucuguuauccucagu

SEQ ID NO: 1365215 - RNA, 19 nt, Artificial Sequence
  Description of Artificial Sequence: Synthetic oligonucleotide
uaguacauacugugccuuc

SEQ ID NO: 1365216 - RNA, 19 nt, Artificial Sequence
  Description of Artificial Sequence: Synthetic oligonucleotide
caugcuuuagaaggagguc

SEQ ID NO: 1365217 - RNA, 19 nt, Artificial Sequence
  Description of Artificial Sequence: Synthetic oligonucleotide
cuccagggcuaguucauac

SEQ ID NO: 1365218 - RNA, 19 nt, Artificial Sequence
  Description of Artificial Sequence: Synthetic oligonucleotide
cauggagucauccaggauu

SEQ ID NO: 1365219 - RNA, 19 nt, Artificial Sequence
  Description of Artificial Sequence: Synthetic oligonucleotide
agaccucacagagacccag

SEQ ID NO: 1365220 - RNA, 19 nt, Artificial Sequence
  Description of Artificial Sequence: Synthetic oligonucleotide
ggaugaauacuuuguccac

SEQ ID NO: 1365221 - RNA, 19 nt, Artificial Sequence
  Description of Artificial Sequence: Synthetic oligonucleotide
guuccuauggcuugagcgu

SEQ ID NO: 1365222 - RNA, 19 nt, Artificial Sequence
  Description of Artificial Sequence: Synthetic oligonucleotide
guagguguccuugcaggag

SEQ ID NO: 1365223 - RNA, 19 nt, Artificial Sequence
  Description of Artificial Sequence: Synthetic oligonucleotide
agagccgagcuccccaaga

SEQ ID NO: 1365224 - RNA, 19 nt, Artificial Sequence
  Description of Artificial Sequence: Synthetic oligonucleotide
uugccugucauguccccaa

SEQ ID NO: 1365225 - RNA, 19 nt, Artificial Sequence
  Description of Artificial Sequence: Synthetic oligonucleotide
gagcucccaaaccuugaac

SEQ ID NO: 1365226 - RNA, 19 nt, Artificial Sequence
  Description of Artificial Sequence: Synthetic oligonucleotide
agggugguaugcuugccau

SEQ ID NO: 1365227 - RNA, 19 nt, Artificial Sequence
  Description of Artificial Sequence: Synthetic oligonucleotide
ugaugaacauggucagauu

SEQ ID NO: 1365228 - RNA, 19 nt, Artificial Sequence
  Description of Artificial Sequence: Synthetic oligonucleotide
ggcagaauaggagagugga

SEQ ID NO: 1365229 - RNA, 19 nt, Artificial Sequence
  Description of Artificial Sequence: Synthetic oligonucleotide
gagcuaaggcuguagacau

SEQ ID NO: 1365230 - RNA, 19 nt, Artificial Sequence
  Description of Artificial Sequence: Synthetic oligonucleotide
ggagguacccagcuuuccc

SEQ ID NO: 1365231 - RNA, 19 nt, Artificial Sequence
  Description of Artificial Sequence: Synthetic oligonucleotide
agggaguagccaaaccaag

SEQ ID NO: 1365232 - RNA, 19 nt, Artificial Sequence
  Description of Artificial Sequence: Synthetic oligonucleotide
gucagacgguagauguucg

SEQ ID NO: 1365233 - RNA, 19 nt, Artificial Sequence
  Description of Artificial Sequence: Synthetic oligonucleotide
caaaucuagaaaagcgccu

SEQ ID NO: 1365234 - RNA, 19 nt, Artificial Sequence
  Description of Artificial Sequence: Synthetic oligonucleotide
cuugccucaggagaaauua

SEQ ID NO: 1365235 - RNA, 19 nt, Artificial Sequence
  Description of Artificial Sequence: Synthetic oligonucleotide
guaauuucgcucuggcggu

SEQ ID NO: 1365236 - RNA, 19 nt, Artificial Sequence
  Description of Artificial Sequence: Synthetic oligonucleotide
acacgacaucaugaguagg

SEQ ID NO: 1365237 - RNA, 19 nt, Artificial Sequence
  Description of Artificial Sequence: Synthetic oligonucleotide
uuucgcucuggcgguuugg

SEQ ID NO: 1365238 - RNA, 19 nt, Artificial Sequence
  Description of Artificial Sequence: Synthetic oligonucleotide
acccagcgagcucccaaac

SEQ ID NO: 1365239 - RNA, 19 nt, Artificial Sequence
  Description of Artificial Sequence: Synthetic oligonucleotide
caauagcacuuguguuagg

SEQ ID NO: 1365240 - RNA, 19 nt, Artificial Sequence
  Description of Artificial Sequence: Synthetic oligonucleotide
aaguagccauacacccuuc

SEQ ID NO: 1365241 - RNA, 19 nt, Artificial Sequence
  Description of Artificial Sequence: Synthetic oligonucleotide
ccauacacccuucccaggc

SEQ ID NO: 1365242 - RNA, 19 nt, Artificial Sequence
  Description of Artificial Sequence: Synthetic oligonucleotide
agguggggcucccaaccag

SEQ ID NO: 1365243 - RNA, 19 nt, Artificial Sequence
  Description of Artificial Sequence: Synthetic oligonucleotide
uagaccucacagagaccca

SEQ ID NO: 1365244 - RNA, 19 nt, Artificial Sequence
  Description of Artificial Sequence: Synthetic oligonucleotide
auuucgcucuggcgguuug

SEQ ID NO: 1365245 - RNA, 19 nt, Artificial Sequence
  Description of Artificial Sequence: Synthetic oligonucleotide
cugucugggacgugaauaa

SEQ ID NO: 1365246 - RNA, 19 nt, Artificial Sequence
  Description of Artificial Sequence: Synthetic oligonucleotide
cacgccucuuucuguguag

SEQ ID NO: 1365247 - RNA, 19 nt, Artificial Sequence
  Description of Artificial Sequence: Synthetic oligonucleotide
cauugucuuaucuccugaa

SEQ ID NO: 1365248 - RNA, 19 nt, Artificial Sequence
  Description of Artificial Sequence: Synthetic oligonucleotide
gagugacgucuucaaucug

SEQ ID NO: 1365249 - RNA, 19 nt, Artificial Sequence
  Description of Artificial Sequence: Synthetic oligonucleotide
uugccgugaaaaucauuuu

SEQ ID NO: 1365250 - RNA, 19 nt, Artificial Sequence
  Description of Artificial Sequence: Synthetic oligonucleotide
gguaugcuugccauuauaa

SEQ ID NO: 1365251 - RNA, 19 nt, Artificial Sequence
  Description of Artificial Sequence: Synthetic oligonucleotide
caucaugaguaggggcucc

SEQ ID NO: 1365252 - RNA, 19 nt, Artificial Sequence
  Description of Artificial Sequence: Synthetic oligonucleotide
ucgcucuggcgguuuggag

SEQ ID NO: 1365253 - RNA, 19 nt, Artificial Sequence
  Description of Artificial Sequence: Synthetic oligonucleotide
uggcuugagcgugccaacc

SEQ ID NO: 1365254 - RNA, 19 nt, Artificial Sequence
  Description of Artificial Sequence: Synthetic oligonucleotide
cagguguagaaugcuacca

SEQ ID NO: 1365255 - RNA, 19 nt, Artificial Sequence
  Description of Artificial Sequence: Synthetic oligonucleotide
gaguaggggcuccaagcaa

SEQ ID NO: 1365256 - RNA, 19 nt, Artificial Sequence
  Description of Artificial Sequence: Synthetic oligonucleotide
auaaagcuggucagacggu

SEQ ID NO: 1365257 - RNA, 19 nt, Artificial Sequence
  Description of Artificial Sequence: Synthetic oligonucleotide
auggagucauccaggauuu

SEQ ID NO: 1365258 - RNA, 19 nt, Artificial Sequence
  Description of Artificial Sequence: Synthetic oligonucleotide
uuacagauucggggcccag

SEQ ID NO: 1365259 - RNA, 19 nt, Artificial Sequence
  Description of Artificial Sequence: Synthetic oligonucleotide
ggaugugguuccuccggcc

SEQ ID NO: 1365260 - RNA, 19 nt, Artificial Sequence
  Description of Artificial Sequence: Synthetic oligonucleotide
cgguuuggaggaaaguagc

SEQ ID NO: 1365261 - RNA, 19 nt, Artificial Sequence
  Description of Artificial Sequence: Synthetic oligonucleotide
agacccagcgagcucccaa

SEQ ID NO: 1365262 - RNA, 19 nt, Artificial Sequence
  Description of Artificial Sequence: Synthetic oligonucleotide
cgucuguuauccucagugg

SEQ ID NO: 1365263 - RNA, 19 nt, Artificial Sequence
  Description of Artificial Sequence: Synthetic oligonucleotide
gguuacagauucggggccc

SEQ ID NO: 1365264 - RNA, 19 nt, Artificial Sequence
  Description of Artificial Sequence: Synthetic oligonucleotide
caggugcaaaagguggaac

SEQ ID NO: 1365265 - RNA, 19 nt, Artificial Sequence
  Description of Artificial Sequence: Synthetic oligonucleotide
agagagccgagcuccccaa

SEQ ID NO: 1365266 - RNA, 19 nt, Artificial Sequence
  Description of Artificial Sequence: Synthetic oligonucleotide
gaccucacagagacccagc

SEQ ID NO: 1365267 - RNA, 19 nt, Artificial Sequence
  Description of Artificial Sequence: Synthetic oligonucleotide
agagacccagcgagcuccc

SEQ ID NO: 1365268 - RNA, 19 nt, Artificial Sequence
  Description of Artificial Sequence: Synthetic oligonucleotide
cugagcaaagcaggcugug

SEQ ID NO: 1365269 - RNA, 19 nt, Artificial Sequence
  Description of Artificial Sequence: Synthetic oligonucleotide
uggucagauugccgugaaa

SEQ ID NO: 1365270 - RNA, 19 nt, Artificial Sequence
  Description of Artificial Sequence: Synthetic oligonucleotide
gucgcaugugaugaacaga

SEQ ID NO: 1365271 - RNA, 19 nt, Artificial Sequence
  Description of Artificial Sequence: Synthetic oligonucleotide
auggucagauugccgugaa

SEQ ID NO: 1365272 - RNA, 19 nt, Artificial Sequence
  Description of Artificial Sequence: Synthetic oligonucleotide
accgcucaccuuccaguca

SEQ ID NO: 1365273 - RNA, 19 nt, Artificial Sequence
  Description of Artificial Sequence: Synthetic oligonucleotide
ucuggcgguuuggaggaaa

SEQ ID NO: 1365274 - RNA, 19 nt, Artificial Sequence
  Description of Artificial Sequence: Synthetic oligonucleotide
uacauucgaguagcuccac

SEQ ID NO: 1365275 - RNA, 19 nt, Artificial Sequence
  Description of Artificial Sequence: Synthetic oligonucleotide
gcagaauaggagaguggag

SEQ ID NO: 1365276 - RNA, 19 nt, Artificial Sequence
  Description of Artificial Sequence: Synthetic oligonucleotide
caagggugguaugcuugcc

SEQ ID NO: 1365277 - RNA, 19 nt, Artificial Sequence
  Description of Artificial Sequence: Synthetic oligonucleotide
cauggucagauugccguga

SEQ ID NO: 1365278 - RNA, 19 nt, Artificial Sequence
  Description of Artificial Sequence: Synthetic oligonucleotide
ggugguaugcuugccauua

SEQ ID NO: 1365279 - RNA, 19 nt, Artificial Sequence
  Description of Artificial Sequence: Synthetic oligonucleotide
cuuuugagccgaggaugug

SEQ ID NO: 1365280 - RNA, 19 nt, Artificial Sequence
  Description of Artificial Sequence: Synthetic oligonucleotide
gccugugcuguagaacacg

SEQ ID NO: 1365281 - RNA, 19 nt, Artificial Sequence
  Description of Artificial Sequence: Synthetic oligonucleotide
cgacaucaugaguaggggc

SEQ ID NO: 1365282 - RNA, 19 nt, Artificial Sequence
  Description of Artificial Sequence: Synthetic oligonucleotide
acacgccucuuucugugua

SEQ ID NO: 1365283 - RNA, 19 nt, Artificial Sequence
  Description of Artificial Sequence: Synthetic oligonucleotide
cagaaguaacgucuguuau

SEQ ID NO: 1365284 - RNA, 19 nt, Artificial Sequence
  Description of Artificial Sequence: Synthetic oligonucleotide
gucagauugccgugaaaau

SEQ ID NO: 1365285 - RNA, 19 nt, Artificial Sequence
  Description of Artificial Sequence: Synthetic oligonucleotide
agucagguguagaaugcua

SEQ ID NO: 1365286 - RNA, 19 nt, Artificial Sequence
  Description of Artificial Sequence: Synthetic oligonucleotide
cacucugucugggacguga

SEQ ID NO: 1365287 - RNA, 19 nt, Artificial Sequence
  Description of Artificial Sequence: Synthetic oligonucleotide
gcucuggcgguuuggagga

SEQ ID NO: 1365288 - RNA, 19 nt, Artificial Sequence
  Description of Artificial Sequence: Synthetic oligonucleotide
auguccccaagggugguau

SEQ ID NO: 1365289 - RNA, 19 nt, Artificial Sequence
  Description of Artificial Sequence: Synthetic oligonucleotide
guuacagauucggggccca

SEQ ID NO: 1365290 - RNA, 19 nt, Artificial Sequence
  Description of Artificial Sequence: Synthetic oligonucleotide
ccagaaguaacgucuguua

SEQ ID NO: 1365291 - RNA, 19 nt, Artificial Sequence
  Description of Artificial Sequence: Synthetic oligonucleotide
cuuuguccacccuggagau

SEQ ID NO: 1365292 - RNA, 19 nt, Artificial Sequence
  Description of Artificial Sequence: Synthetic oligonucleotide
uggcgguuuggaggaaagu

SEQ ID NO: 1365293 - RNA, 19 nt, Artificial Sequence
  Description of Artificial Sequence: Synthetic oligonucleotide
ucauguccccaaggguggu

SEQ ID NO: 1365294 - RNA, 19 nt, Artificial Sequence
  Description of Artificial Sequence: Synthetic oligonucleotide
ccccaugaagggaguagcc

SEQ ID NO: 1365295 - RNA, 19 nt, Artificial Sequence
  Description of Artificial Sequence: Synthetic oligonucleotide
aggguccagcccagguuac

SEQ ID NO: 1365296 - RNA, 19 nt, Artificial Sequence
  Description of Artificial Sequence: Synthetic oligonucleotide
cucuggacauggagucauc

SEQ ID NO: 1365297 - RNA, 19 nt, Artificial Sequence
  Description of Artificial Sequence: Synthetic oligonucleotide
cgucgcaugugaugaacag

SEQ ID NO: 1365298 - RNA, 19 nt, Artificial Sequence
  Description of Artificial Sequence: Synthetic oligonucleotide
ggcgguuuggaggaaagua

SEQ ID NO: 1365299 - RNA, 19 nt, Artificial Sequence
  Description of Artificial Sequence: Synthetic oligonucleotide
cagcauaaagcuggucaga

SEQ ID NO: 1365300 - RNA, 19 nt, Artificial Sequence
  Description of Artificial Sequence: Synthetic oligonucleotide
gcuggucagacgguagaug

SEQ ID NO: 1365301 - RNA, 19 nt, Artificial Sequence
  Description of Artificial Sequence: Synthetic oligonucleotide
agauugccgugaaaaucau

SEQ ID NO: 1365302 - RNA, 19 nt, Artificial Sequence
  Description of Artificial Sequence: Synthetic oligonucleotide
acgccucuuucuguguagu

SEQ ID NO: 1365303 - RNA, 19 nt, Artificial Sequence
  Description of Artificial Sequence: Synthetic oligonucleotide
gguggggcucccaaccagc

SEQ ID NO: 1365304 - RNA, 19 nt, Artificial Sequence
  Description of Artificial Sequence: Synthetic oligonucleotide
acuugccucaggagaaauu

SEQ ID NO: 1365305 - RNA, 19 nt, Artificial Sequence
  Description of Artificial Sequence: Synthetic oligonucleotide
gucacucugucugggacgu

SEQ ID NO: 1365306 - RNA, 19 nt, Artificial Sequence
  Description of Artificial Sequence: Synthetic oligonucleotide
cccauaguagacauacacu

SEQ ID NO: 1365307 - RNA, 19 nt, Artificial Sequence
  Description of Artificial Sequence: Synthetic oligonucleotide
gcacuuguguuaggguccc

SEQ ID NO: 1365308 - RNA, 19 nt, Artificial Sequence
  Description of Artificial Sequence: Synthetic oligonucleotide
ggaaccccacucacccagg

SEQ ID NO: 1365309 - RNA, 19 nt, Artificial Sequence
  Description of Artificial Sequence: Synthetic oligonucleotide
uccggccgucgcaugugau

SEQ ID NO: 1365310 - RNA, 19 nt, Artificial Sequence
  Description of Artificial Sequence: Synthetic oligonucleotide
cauacacccuucccaggcu

SEQ ID NO: 1365311 - RNA, 19 nt, Artificial Sequence
  Description of Artificial Sequence: Synthetic oligonucleotide
gggagguacccagcuuucc

SEQ ID NO: 1365312 - RNA, 19 nt, Artificial Sequence
  Description of Artificial Sequence: Synthetic oligonucleotide
cugugaccccaugaaggga

SEQ ID NO: 1365313 - RNA, 19 nt, Artificial Sequence
  Description of Artificial Sequence: Synthetic oligonucleotide
cuuguguuagggucccauu

SEQ ID NO: 1365314 - RNA, 19 nt, Artificial Sequence
  Description of Artificial Sequence: Synthetic oligonucleotide
gcacuuuugagccgaggau

SEQ ID NO: 1365315 - RNA, 19 nt, Artificial Sequence
  Description of Artificial Sequence: Synthetic oligonucleotide
ggccacuugacagggaggu

SEQ ID NO: 1365316 - RNA, 19 nt, Artificial Sequence
  Description of Artificial Sequence: Synthetic oligonucleotide
cugguacauaaagguuaca

SEQ ID NO: 1365317 - RNA, 19 nt, Artificial Sequence
  Description of Artificial Sequence: Synthetic oligonucleotide
ccggccgucgcaugugaug

SEQ ID NO: 1365318 - RNA, 19 nt, Artificial Sequence
  Description of Artificial Sequence: Synthetic oligonucleotide
gccgucgcaugugaugaac

SEQ ID NO: 1365319 - RNA, 19 nt, Artificial Sequence
  Description of Artificial Sequence: Synthetic oligonucleotide
cccuagaaguccagaagua

SEQ ID NO: 1365320 - RNA, 19 nt, Artificial Sequence
  Description of Artificial Sequence: Synthetic oligonucleotide
agcgccugucuccgcugaa

SEQ ID NO: 1365321 - RNA, 19 nt, Artificial Sequence
  Description of Artificial Sequence: Synthetic oligonucleotide
cuucaccgcucaccuucca

SEQ ID NO: 1365322 - RNA, 19 nt, Artificial Sequence
  Description of Artificial Sequence: Synthetic oligonucleotide
gcgucccuugcugggaccc

SEQ ID NO: 1365323 - RNA, 19 nt, Artificial Sequence
  Description of Artificial Sequence: Synthetic oligonucleotide
ccgucgcaugugaugaaca

SEQ ID NO: 1365324 - RNA, 19 nt, Artificial Sequence
  Description of Artificial Sequence: Synthetic oligonucleotide
cacucacccaggucaggcu

SEQ ID NO: 1365325 - RNA, 19 nt, Artificial Sequence
  Description of Artificial Sequence: Synthetic oligonucleotide
gagaguggagugacgucuu

SEQ ID NO: 1365326 - RNA, 19 nt, Artificial Sequence
  Description of Artificial Sequence: Synthetic oligonucleotide
cucaccuuccagucagcuu

SEQ ID NO: 1365327 - RNA, 19 nt, Artificial Sequence
  Description of Artificial Sequence: Synthetic oligonucleotide
gcuccaagcaauagcacuu

SEQ ID NO: 1365328 - RNA, 19 nt, Artificial Sequence
  Description of Artificial Sequence: Synthetic oligonucleotide
gcgccugucuccgcugaag

SEQ ID NO: 1365329 - RNA, 19 nt, Artificial Sequence
  Description of Artificial Sequence: Synthetic oligonucleotide
gugguaugcuugccauuau

SEQ ID NO: 1365330 - RNA, 19 nt, Artificial Sequence
  Description of Artificial Sequence: Synthetic oligonucleotide
cagggcuaguucauacauu

SEQ ID NO: 1365331 - RNA, 19 nt, Artificial Sequence
  Description of Artificial Sequence: Synthetic oligonucleotide
cuccggccgucgcauguga

SEQ ID NO: 1365332 - RNA, 19 nt, Artificial Sequence
  Description of Artificial Sequence: Synthetic oligonucleotide
ccagagagccgagcucccc

SEQ ID NO: 1365333 - RNA, 19 nt, Artificial Sequence
  Description of Artificial Sequence: Synthetic oligonucleotide
gagacccagcgagcuccca

SEQ ID NO: 1365334 - RNA, 19 nt, Artificial Sequence
  Description of Artificial Sequence: Synthetic oligonucleotide
agccgaggaugugguuccu

SEQ ID NO: 1365335 - RNA, 19 nt, Artificial Sequence
  Description of Artificial Sequence: Synthetic oligonucleotide
gcuuuagaaggaggucugu

SEQ ID NO: 1365336 - RNA, 19 nt, Artificial Sequence
  Description of Artificial Sequence: Synthetic oligonucleotide
ccaggugcaaaagguggaa

SEQ ID NO: 1365337 - RNA, 19 nt, Artificial Sequence
  Description of Artificial Sequence: Synthetic oligonucleotide
cgugccaaccugcugacau

SEQ ID NO: 1365338 - RNA, 19 nt, Artificial Sequence
  Description of Artificial Sequence: Synthetic oligonucleotide
cgagcucccaaaccuugaa

SEQ ID NO: 1365339 - RNA, 19 nt, Artificial Sequence
  Description of Artificial Sequence: Synthetic oligonucleotide
cggccgucgcaugugauga

SEQ ID NO: 1365340 - RNA, 19 nt, Artificial Sequence
  Description of Artificial Sequence: Synthetic oligonucleotide
ccuccggccgucgcaugug

SEQ ID NO: 1365341 - RNA, 19 nt, Artificial Sequence
  Description of Artificial Sequence: Synthetic oligonucleotide
gucccuugcugggacccau

SEQ ID NO: 1365342 - RNA, 19 nt, Artificial Sequence
  Description of Artificial Sequence: Synthetic oligonucleotide
gggacccauaguagacaua

SEQ ID NO: 1365343 - RNA, 19 nt, Artificial Sequence
  Description of Artificial Sequence: Synthetic oligonucleotide
ccucuggacauggagucau

SEQ ID NO: 1365344 - RNA, 19 nt, Artificial Sequence
  Description of Artificial Sequence: Synthetic oligonucleotide
gggucccauucagccucac

SEQ ID NO: 1365345 - RNA, 19 nt, Artificial Sequence
  Description of Artificial Sequence: Synthetic oligonucleotide
cucuggcgguuuggaggaa

SEQ ID NO: 1365346 - RNA, 19 nt, Artificial Sequence
  Description of Artificial Sequence: Synthetic oligonucleotide
ccgagcuccccaagaacuu

SEQ ID NO: 1365347 - RNA, 19 nt, Artificial Sequence
  Description of Artificial Sequence: Synthetic oligonucleotide
gcgugccaaccugcugaca

SEQ ID NO: 1365348 - RNA, 19 nt, Artificial Sequence
  Description of Artificial Sequence: Synthetic oligonucleotide
cacccuggugcagguucau

SEQ ID NO: 1365349 - RNA, 19 nt, Artificial Sequence
  Description of Artificial Sequence: Synthetic oligonucleotide
uguaaacaaagacaguagg

SEQ ID NO: 1365350 - RNA, 19 nt, Artificial Sequence
  Description of Artificial Sequence: Synthetic oligonucleotide
uguagagcuucuaagaucc

SEQ ID NO: 1365351 - RNA, 19 nt, Artificial Sequence
  Description of Artificial Sequence: Synthetic oligonucleotide
uacaaucagaauaugauac

SEQ ID NO: 1365352 - RNA, 19 nt, Artificial Sequence
  Description of Artificial Sequence: Synthetic oligonucleotide
aaaggucucacagaucucc

SEQ ID NO: 1365353 - RNA, 19 nt, Artificial Sequence
  Description of Artificial Sequence: Synthetic oligonucleotide
aaggauuucuauuauaguu

SEQ ID NO: 1365354 - RNA, 19 nt, Artificial Sequence
  Description of Artificial Sequence: Synthetic oligonucleotide
gaaaggauuucuauuauag

SEQ ID NO: 1365355 - RNA, 19 nt, Artificial Sequence
  Description of Artificial Sequence: Synthetic oligonucleotide
gauaccaacacuucaugcc

SEQ ID NO: 1365356 - RNA, 19 nt, Artificial Sequence
  Description of Artificial Sequence: Synthetic oligonucleotide
auagcugagagccucuagc

SEQ ID NO: 1365357 - RNA, 19 nt, Artificial Sequence
  Description of Artificial Sequence: Synthetic oligonucleotide
ucuaaugggcuauuuacag

SEQ ID NO: 1365358 - RNA, 19 nt, Artificial Sequence
  Description of Artificial Sequence: Synthetic oligonucleotide
uaagauccgauucaauucc

SEQ ID NO: 1365359 - RNA, 19 nt, Artificial Sequence
  Description of Artificial Sequence: Synthetic oligonucleotide
auuauaguugacuguacag

SEQ ID NO: 1365360 - RNA, 19 nt, Artificial Sequence
  Description of Artificial Sequence: Synthetic oligonucleotide
aauaugauacguuucccau

SEQ ID NO: 1365361 - RNA, 19 nt, Artificial Sequence
  Description of Artificial Sequence: Synthetic oligonucleotide
uacguuucccaucugcugg

SEQ ID NO: 1365362 - RNA, 19 nt, Artificial Sequence
  Description of Artificial Sequence: Synthetic oligonucleotide
  modified_base (3)..(3): a, c, u, g, unknown or other
ganaccccuggauugaggg

SEQ ID NO: 1365363 - RNA, 19 nt, Artificial Sequence
  Description of Artificial Sequence: Synthetic oligonucleotide
aaaucucagagucaaaguu

SEQ ID NO: 1365364 - RNA, 19 nt, Artificial Sequence
  Description of Artificial Sequence: Synthetic oligonucleotide
uauuauaguugacuguaca

SEQ ID NO: 1365365 - RNA, 19 nt, Artificial Sequence
  Description of Artificial Sequence: Synthetic oligonucleotide
uacaagugcuccacaaugg

SEQ ID NO: 1365366 - RNA, 19 nt, Artificial Sequence
  Description of Artificial Sequence: Synthetic oligonucleotide
ucacgugagucccacaccg

SEQ ID NO: 1365367 - RNA, 19 nt, Artificial Sequence
  Description of Artificial Sequence: Synthetic oligonucleotide
uuaggaggcggauaaagug

SEQ ID NO: 1365368 - RNA, 19 nt, Artificial Sequence
  Description of Artificial Sequence: Synthetic oligonucleotide
aagucaacugggucaggcc

SEQ ID NO: 1365369 - RNA, 19 nt, Artificial Sequence
  Description of Artificial Sequence: Synthetic oligonucleotide
uagccaagaacguacaggc

SEQ ID NO: 1365370 - RNA, 19 nt, Artificial Sequence
  Description of Artificial Sequence: Synthetic oligonucleotide
caaugaacuauugagcucc

SEQ ID NO: 1365371 - RNA, 19 nt, Artificial Sequence
  Description of Artificial Sequence: Synthetic oligonucleotide
uguaacaccuuccagcaaa

SEQ ID NO: 1365372 - RNA, 19 nt, Artificial Sequence
  Description of Artificial Sequence: Synthetic oligonucleotide
uacaguagaaggagguggg

SEQ ID NO: 1365373 - RNA, 19 nt, Artificial Sequence
  Description of Artificial Sequence: Synthetic oligonucleotide
cuauugagcuccaucaggc

SEQ ID NO: 1365374 - RNA, 19 nt, Artificial Sequence
  Description of Artificial Sequence: Synthetic oligonucleotide
uguguaacaccuuccagca

SEQ ID NO: 1365375 - RNA, 19 nt, Artificial Sequence
  Description of Artificial Sequence: Synthetic oligonucleotide
aaaggauuucuauuauagu

SEQ ID NO: 1365376 - RNA, 19 nt, Artificial Sequence
  Description of Artificial Sequence: Synthetic oligonucleotide
ucaauguagauuccuggca

SEQ ID NO: 1365377 - RNA, 19 nt, Artificial Sequence
  Description of Artificial Sequence: Synthetic oligonucleotide
ucuaagauccgauucaauu

SEQ ID NO: 1365378 - RNA, 19 nt, Artificial Sequence
  Description of Artificial Sequence: Synthetic oligonucleotide
aggaauagaaagauguccg

SEQ ID NO: 1365379 - RNA, 19 nt, Artificial Sequence
  Description of Artificial Sequence: Synthetic oligonucleotide
agcuucuaagauccgauuc

SEQ ID NO: 1365380 - RNA, 19 nt, Artificial Sequence
  Description of Artificial Sequence: Synthetic oligonucleotide
cuaagauccgauucaauuc

SEQ ID NO: 1365381 - RNA, 19 nt, Artificial Sequence
  Description of Artificial Sequence: Synthetic oligonucleotide
ucuauuauaguugacugua

SEQ ID NO: 1365382 - RNA, 19 nt, Artificial Sequence
  Description of Artificial Sequence: Synthetic oligonucleotide
agagaaaggauuucuauua

SEQ ID NO: 1365383 - RNA, 19 nt, Artificial Sequence
  Description of Artificial Sequence: Synthetic oligonucleotide
aacuauugagcuccaucag

SEQ ID NO: 1365384 - RNA, 19 nt, Artificial Sequence
  Description of Artificial Sequence: Synthetic oligonucleotide
ugauacguuucccaucugc

SEQ ID NO: 1365385 - RNA, 19 nt, Artificial Sequence
  Description of Artificial Sequence: Synthetic oligonucleotide
guaaguguaaacaaagaca

SEQ ID NO: 1365386 - RNA, 19 nt, Artificial Sequence
  Description of Artificial Sequence: Synthetic oligonucleotide
uuacaguagagaaaggauu

SEQ ID NO: 1365387 - RNA, 19 nt, Artificial Sequence
  Description of Artificial Sequence: Synthetic oligonucleotide
uuugcuacuaucaggggua

SEQ ID NO: 1365388 - RNA, 19 nt, Artificial Sequence
  Description of Artificial Sequence: Synthetic oligonucleotide
uaaugggcuauuuacagua

SEQ ID NO: 1365389 - RNA, 19 nt, Artificial Sequence
  Description of Artificial Sequence: Synthetic oligonucleotide
auguagagcuucuaagauc

SEQ ID NO: 1365390 - RNA, 19 nt, Artificial Sequence
  Description of Artificial Sequence: Synthetic oligonucleotide
  modified_base (2)..(2): a, c, u, g, unknown or other
anaccccuggauugagggc

SEQ ID NO: 1365391 - RNA, 19 nt, Artificial Sequence
  Description of Artificial Sequence: Synthetic oligonucleotide
guguguaacaccuuccagc

SEQ ID NO: 1365392 - RNA, 19 nt, Artificial Sequence
  Description of Artificial Sequence: Synthetic oligonucleotide
uucuaaugggcuauuuaca

SEQ ID NO: 1365393 - RNA, 19 nt, Artificial Sequence
  Description of Artificial Sequence: Synthetic oligonucleotide
uuauaguugacuguacagu

SEQ ID NO: 1365394 - RNA, 19 nt, Artificial Sequence
  Description of Artificial Sequence: Synthetic oligonucleotide
agaacguacaggcugauuu

SEQ ID NO: 1365395 - RNA, 19 nt, Artificial Sequence
  Description of Artificial Sequence: Synthetic oligonucleotide
agguauaccagacugccca

SEQ ID NO: 1365396 - RNA, 19 nt, Artificial Sequence
  Description of Artificial Sequence: Synthetic oligonucleotide
auuuacaguagagaaagga

SEQ ID NO: 1365397 - RNA, 19 nt, Artificial Sequence
  Description of Artificial Sequence: Synthetic oligonucleotide
agaauaugauacguuuccc

SEQ ID NO: 1365398 - RNA, 19 nt, Artificial Sequence
  Description of Artificial Sequence: Synthetic oligonucleotide
auaugauacguuucccauc

SEQ ID NO: 1365399 - RNA, 19 nt, Artificial Sequence
  Description of Artificial Sequence: Synthetic oligonucleotide
aggcggauaaagugcagcc

SEQ ID NO: 1365400 - RNA, 19 nt, Artificial Sequence
  Description of Artificial Sequence: Synthetic oligonucleotide
uaggaggcggauaaagugc

SEQ ID NO: 1365401 - RNA, 19 nt, Artificial Sequence
  Description of Artificial Sequence: Synthetic oligonucleotide
aacuccaaugaacuauuga

SEQ ID NO: 1365402 - RNA, 19 nt, Artificial Sequence
  Description of Artificial Sequence: Synthetic oligonucleotide
gaauaugauacguuuccca

SEQ ID NO: 1365403 - RNA, 19 nt, Artificial Sequence
  Description of Artificial Sequence: Synthetic oligonucleotide
aguguaaacaaagacagua

SEQ ID NO: 1365404 - RNA, 19 nt, Artificial Sequence
  Description of Artificial Sequence: Synthetic oligonucleotide
guugagugcaucucgggag

SEQ ID NO: 1365405 - RNA, 19 nt, Artificial Sequence
  Description of Artificial Sequence: Synthetic oligonucleotide
cucauguagagcuucuaag

SEQ ID NO: 1365406 - RNA, 19 nt, Artificial Sequence
  Description of Artificial Sequence: Synthetic oligonucleotide
uagaaucugagguuugcug

SEQ ID NO: 1365407 - RNA, 19 nt, Artificial Sequence
  Description of Artificial Sequence: Synthetic oligonucleotide
gguaaguguaaacaaagac

SEQ ID NO: 1365408 - RNA, 19 nt, Artificial Sequence
  Description of Artificial Sequence: Synthetic oligonucleotide
agacaguaggaacacagca

SEQ ID NO: 1365409 - RNA, 19 nt, Artificial Sequence
  Description of Artificial Sequence: Synthetic oligonucleotide
aacaccuuccagcaaaguu

SEQ ID NO: 1365410 - RNA, 19 nt, Artificial Sequence
  Description of Artificial Sequence: Synthetic oligonucleotide
uauaccagacugcccauca

SEQ ID NO: 1365411 - RNA, 19 nt, Artificial Sequence
  Description of Artificial Sequence: Synthetic oligonucleotide
ugacuguacaguagaagga

SEQ ID NO: 1365412 - RNA, 19 nt, Artificial Sequence
  Description of Artificial Sequence: Synthetic oligonucleotide
ucagggguaaguguaaaca

SEQ ID NO: 1365413 - RNA, 19 nt, Artificial Sequence
  Description of Artificial Sequence: Synthetic oligonucleotide
gguagugcuggucugagag

SEQ ID NO: 1365414 - RNA, 19 nt, Artificial Sequence
  Description of Artificial Sequence: Synthetic oligonucleotide
uuuugauagccaaagccuu

SEQ ID NO: 1365415 - RNA, 19 nt, Artificial Sequence
  Description of Artificial Sequence: Synthetic oligonucleotide
agggcaugcaaacacggag

SEQ ID NO: 1365416 - RNA, 19 nt, Artificial Sequence
  Description of Artificial Sequence: Synthetic oligonucleotide
ugagguuugcugucgcagg

SEQ ID NO: 1365417 - RNA, 19 nt, Artificial Sequence
  Description of Artificial Sequence: Synthetic oligonucleotide
uucuauuauaguugacugu

SEQ ID NO: 1365418 - RNA, 19 nt, Artificial Sequence
  Description of Artificial Sequence: Synthetic oligonucleotide
ucagcuacgcugagcaugc

SEQ ID NO: 1365419 - RNA, 19 nt, Artificial Sequence
  Description of Artificial Sequence: Synthetic oligonucleotide
gauucugcuccauuggaca

SEQ ID NO: 1365420 - RNA, 19 nt, Artificial Sequence
  Description of Artificial Sequence: Synthetic oligonucleotide
aggauuucuauuauaguug

SEQ ID NO: 1365421 - RNA, 19 nt, Artificial Sequence
  Description of Artificial Sequence: Synthetic oligonucleotide
gauagggcaugcaaacacg

SEQ ID NO: 1365422 - RNA, 19 nt, Artificial Sequence
  Description of Artificial Sequence: Synthetic oligonucleotide
uucaugcccagcucgaucu

SEQ ID NO: 1365423 - RNA, 19 nt, Artificial Sequence
  Description of Artificial Sequence: Synthetic oligonucleotide
ucugagacuacaccgcaaa

SEQ ID NO: 1365424 - RNA, 19 nt, Artificial Sequence
  Description of Artificial Sequence: Synthetic oligonucleotide
cauuaaugagcuuguugag

SEQ ID NO: 1365425 - RNA, 19 nt, Artificial Sequence
  Description of Artificial Sequence: Synthetic oligonucleotide
gguguagccgagcaaaggg

SEQ ID NO: 1365426 - RNA, 19 nt, Artificial Sequence
  Description of Artificial Sequence: Synthetic oligonucleotide
uccuugugacuccacacgc

SEQ ID NO: 1365427 - RNA, 19 nt, Artificial Sequence
  Description of Artificial Sequence: Synthetic oligonucleotide
uguagccgagcaaagggcu

SEQ ID NO: 1365428 - RNA, 19 nt, Artificial Sequence
  Description of Artificial Sequence: Synthetic oligonucleotide
uuugcugucgcaggauagg

SEQ ID NO: 1365429 - RNA, 19 nt, Artificial Sequence
  Description of Artificial Sequence: Synthetic oligonucleotide
cagaucuccgcccaguggc

SEQ ID NO: 1365430 - RNA, 19 nt, Artificial Sequence
  Description of Artificial Sequence: Synthetic oligonucleotide
ugucgggcauagcugagag

SEQ ID NO: 1365431 - RNA, 19 nt, Artificial Sequence
  Description of Artificial Sequence: Synthetic oligonucleotide
agcuacgcugagcaugccc

SEQ ID NO: 1365432 - RNA, 19 nt, Artificial Sequence
  Description of Artificial Sequence: Synthetic oligonucleotide
aguagggacacuucaacuu

SEQ ID NO: 1365433 - RNA, 19 nt, Artificial Sequence
  Description of Artificial Sequence: Synthetic oligonucleotide
uaugguccugcacuggcca

SEQ ID NO: 1365434 - RNA, 19 nt, Artificial Sequence
  Description of Artificial Sequence: Synthetic oligonucleotide
aguuaggaggcggauaaag

SEQ ID NO: 1365435 - RNA, 19 nt, Artificial Sequence
  Description of Artificial Sequence: Synthetic oligonucleotide
aucagggguaaguguaaac

SEQ ID NO: 1365436 - RNA, 19 nt, Artificial Sequence
  Description of Artificial Sequence: Synthetic oligonucleotide
aguggcuguugucuaagag

SEQ ID NO: 1365437 - RNA, 19 nt, Artificial Sequence
  Description of Artificial Sequence: Synthetic oligonucleotide
gagacuacaccgcaaaucu

SEQ ID NO: 1365438 - RNA, 19 nt, Artificial Sequence
  Description of Artificial Sequence: Synthetic oligonucleotide
gaugagcuugaugggaggg

SEQ ID NO: 1365439 - RNA, 19 nt, Artificial Sequence
  Description of Artificial Sequence: Synthetic oligonucleotide
caugcaucccgaguaaagg

SEQ ID NO: 1365440 - RNA, 19 nt, Artificial Sequence
  Description of Artificial Sequence: Synthetic oligonucleotide
ugguguguaacaccuucca

SEQ ID NO: 1365441 - RNA, 19 nt, Artificial Sequence
  Description of Artificial Sequence: Synthetic oligonucleotide
acugcuaugaauguccuua

SEQ ID NO: 1365442 - RNA, 19 nt, Artificial Sequence
  Description of Artificial Sequence: Synthetic oligonucleotide
ucugguguagccgagcaaa

SEQ ID NO: 1365443 - RNA, 19 nt, Artificial Sequence
  Description of Artificial Sequence: Synthetic oligonucleotide
cuugguguguaacaccuuc

SEQ ID NO: 1365444 - RNA, 19 nt, Artificial Sequence
  Description of Artificial Sequence: Synthetic oligonucleotide
ugaacuccaaugaacuauu

SEQ ID NO: 1365445 - RNA, 19 nt, Artificial Sequence
  Description of Artificial Sequence: Synthetic oligonucleotide
caggauagggcaugcaaac

SEQ ID NO: 1365446 - RNA, 19 nt, Artificial Sequence
  Description of Artificial Sequence: Synthetic oligonucleotide
ugagacuacaccgcaaauc

SEQ ID NO: 1365447 - RNA, 19 nt, Artificial Sequence
  Description of Artificial Sequence: Synthetic oligonucleotide
aggucucacagaucuccgc

SEQ ID NO: 1365448 - RNA, 19 nt, Artificial Sequence
  Description of Artificial Sequence: Synthetic oligonucleotide
ccauuaaugagcuuguuga

SEQ ID NO: 1365449 - RNA, 19 nt, Artificial Sequence
  Description of Artificial Sequence: Synthetic oligonucleotide
acugaaagccccagcaggg

SEQ ID NO: 1365450 - RNA, 19 nt, Artificial Sequence
  Description of Artificial Sequence: Synthetic oligonucleotide
uugagugcaucucgggaga

SEQ ID NO: 1365451 - RNA, 19 nt, Artificial Sequence
  Description of Artificial Sequence: Synthetic oligonucleotide
cuccuagccaagaacguac

SEQ ID NO: 1365452 - RNA, 19 nt, Artificial Sequence
  Description of Artificial Sequence: Synthetic oligonucleotide
cuggauucugcuccauugg

SEQ ID NO: 1365453 - RNA, 19 nt, Artificial Sequence
  Description of Artificial Sequence: Synthetic oligonucleotide
ugcccauaggucaggaacu

SEQ ID NO: 1365454 - RNA, 19 nt, Artificial Sequence
  Description of Artificial Sequence: Synthetic oligonucleotide
uguacaguagaaggaggug

SEQ ID NO: 1365455 - RNA, 19 nt, Artificial Sequence
  Description of Artificial Sequence: Synthetic oligonucleotide
agaugagcuugaugggagg

SEQ ID NO: 1365456 - RNA, 19 nt, Artificial Sequence
  Description of Artificial Sequence: Synthetic oligonucleotide
uacuaucagggguaagugu

SEQ ID NO: 1365457 - RNA, 19 nt, Artificial Sequence
  Description of Artificial Sequence: Synthetic oligonucleotide
uuugucgagcucccucucc

SEQ ID NO: 1365458 - RNA, 19 nt, Artificial Sequence
  Description of Artificial Sequence: Synthetic oligonucleotide
ugugacuccacacgccagu

SEQ ID NO: 1365459 - RNA, 19 nt, Artificial Sequence
  Description of Artificial Sequence: Synthetic oligonucleotide
acagaucuccgcccagugg

SEQ ID NO: 1365460 - RNA, 19 nt, Artificial Sequence
  Description of Artificial Sequence: Synthetic oligonucleotide
auagggcaugcaaacacgg

SEQ ID NO: 1365461 - RNA, 19 nt, Artificial Sequence
  Description of Artificial Sequence: Synthetic oligonucleotide
gccuuugcuacuaucaggg

SEQ ID NO: 1365462 - RNA, 19 nt, Artificial Sequence
  Description of Artificial Sequence: Synthetic oligonucleotide
aaguuccuuacaaucagaa

SEQ ID NO: 1365463 - RNA, 19 nt, Artificial Sequence
  Description of Artificial Sequence: Synthetic oligonucleotide
  modified_base (7)..(7): a, c, u, g, unknown or other
gcugganaccccuggauug

SEQ ID NO: 1365464 - RNA, 19 nt, Artificial Sequence
  Description of Artificial Sequence: Synthetic oligonucleotide
gaagugucgggcauagcug

SEQ ID NO: 1365465 - RNA, 19 nt, Artificial Sequence
  Description of Artificial Sequence: Synthetic oligonucleotide
ucuguucgcaguguugccc

SEQ ID NO: 1365466 - RNA, 19 nt, Artificial Sequence
  Description of Artificial Sequence: Synthetic oligonucleotide
gcggauaaagugcagccgg

SEQ ID NO: 1365467 - RNA, 19 nt, Artificial Sequence
  Description of Artificial Sequence: Synthetic oligonucleotide
uuugauagccaaagccuuu

SEQ ID NO: 1365468 - RNA, 19 nt, Artificial Sequence
  Description of Artificial Sequence: Synthetic oligonucleotide
auagggugacuucuccaag

SEQ ID NO: 1365469 - RNA, 19 nt, Artificial Sequence
  Description of Artificial Sequence: Synthetic oligonucleotide
aacguacaggcugauuuca

SEQ ID NO: 1365470 - RNA, 19 nt, Artificial Sequence
  Description of Artificial Sequence: Synthetic oligonucleotide
gacguggccacagaugagc

SEQ ID NO: 1365471 - RNA, 19 nt, Artificial Sequence
  Description of Artificial Sequence: Synthetic oligonucleotide
aaccgcagguauaccagac

SEQ ID NO: 1365472 - RNA, 19 nt, Artificial Sequence
  Description of Artificial Sequence: Synthetic oligonucleotide
agaaaggauuucuauuaua

SEQ ID NO: 1365473 - RNA, 19 nt, Artificial Sequence
  Description of Artificial Sequence: Synthetic oligonucleotide
aguucuaaugggcuauuua

SEQ ID NO: 1365474 - RNA, 19 nt, Artificial Sequence
  Description of Artificial Sequence: Synthetic oligonucleotide
gccaagaacguacaggcug

SEQ ID NO: 1365475 - RNA, 19 nt, Artificial Sequence
  Description of Artificial Sequence: Synthetic oligonucleotide
ugcuaugaauguccuuaug

SEQ ID NO: 1365476 - RNA, 19 nt, Artificial Sequence
  Description of Artificial Sequence: Synthetic oligonucleotide
ugccugacugagcaggcca

SEQ ID NO: 1365477 - RNA, 19 nt, Artificial Sequence
  Description of Artificial Sequence: Synthetic oligonucleotide
gccuagugaagucaacugg

SEQ ID NO: 1365478 - RNA, 19 nt, Artificial Sequence
  Description of Artificial Sequence: Synthetic oligonucleotide
aguaggaacacagcagcca

SEQ ID NO: 1365479 - RNA, 19 nt, Artificial Sequence
  Description of Artificial Sequence: Synthetic oligonucleotide
aaugggcuauuuacaguag

SEQ ID NO: 1365480 - RNA, 19 nt, Artificial Sequence
  Description of Artificial Sequence: Synthetic oligonucleotide
acaguagagaaaggauuuc

SEQ ID NO: 1365481 - RNA, 19 nt, Artificial Sequence
  Description of Artificial Sequence: Synthetic oligonucleotide
agguccacauucaauguag

SEQ ID NO: 1365482 - RNA, 19 nt, Artificial Sequence
  Description of Artificial Sequence: Synthetic oligonucleotide
gaacguacaggcugauuuc

SEQ ID NO: 1365483 - RNA, 19 nt, Artificial Sequence
  Description of Artificial Sequence: Synthetic oligonucleotide
agugauaccaacacuucau

SEQ ID NO: 1365484 - RNA, 19 nt, Artificial Sequence
  Description of Artificial Sequence: Synthetic oligonucleotide
augcaucccgaguaaaggu

SEQ ID NO: 1365485 - RNA, 19 nt, Artificial Sequence
  Description of Artificial Sequence: Synthetic oligonucleotide
auugagggcaggaauagaa

SEQ ID NO: 1365486 - RNA, 19 nt, Artificial Sequence
  Description of Artificial Sequence: Synthetic oligonucleotide
uccacacaugcacacugcu

SEQ ID NO: 1365487 - RNA, 19 nt, Artificial Sequence
  Description of Artificial Sequence: Synthetic oligonucleotide
ggauagggcaugcaaacac

SEQ ID NO: 1365488 - RNA, 19 nt, Artificial Sequence
  Description of Artificial Sequence: Synthetic oligonucleotide
  modified_base (11)..(11): a, c, u, g, unknown or other
cacagcugganaccccugg

SEQ ID NO: 1365489 - RNA, 19 nt, Artificial Sequence
  Description of Artificial Sequence: Synthetic oligonucleotide
caucaggauccacuggagc

SEQ ID NO: 1365490 - RNA, 19 nt, Artificial Sequence
  Description of Artificial Sequence: Synthetic oligonucleotide
ucucgggagaugacguggc

SEQ ID NO: 1365491 - RNA, 19 nt, Artificial Sequence
  Description of Artificial Sequence: Synthetic oligonucleotide
ccgaguaaaggucucacag

SEQ ID NO: 1365492 - RNA, 19 nt, Artificial Sequence
  Description of Artificial Sequence: Synthetic oligonucleotide
ugguacaagugcuccacaa

SEQ ID NO: 1365493 - RNA, 19 nt, Artificial Sequence
  Description of Artificial Sequence: Synthetic oligonucleotide
guagugcuggucugagagg

SEQ ID NO: 1365494 - RNA, 19 nt, Artificial Sequence
  Description of Artificial Sequence: Synthetic oligonucleotide
ugguguagccgagcaaagg

SEQ ID NO: 1365495 - RNA, 19 nt, Artificial Sequence
  Description of Artificial Sequence: Synthetic oligonucleotide
cucagcuacgcugagcaug

SEQ ID NO: 1365496 - RNA, 19 nt, Artificial Sequence
  Description of Artificial Sequence: Synthetic oligonucleotide
uccaagcccaaccgcaggu

SEQ ID NO: 1365497 - RNA, 19 nt, Artificial Sequence
  Description of Artificial Sequence: Synthetic oligonucleotide
acuaucagggguaagugua

SEQ ID NO: 1365498 - RNA, 19 nt, Artificial Sequence
  Description of Artificial Sequence: Synthetic oligonucleotide
acucgggagacacugcuau

SEQ ID NO: 1365499 - RNA, 19 nt, Artificial Sequence
  Description of Artificial Sequence: Synthetic oligonucleotide
gacuuugucgagcucccuc

SEQ ID NO: 1365500 - RNA, 19 nt, Artificial Sequence
  Description of Artificial Sequence: Synthetic oligonucleotide
cauuggacaguagggacac

SEQ ID NO: 1365501 - RNA, 19 nt, Artificial Sequence
  Description of Artificial Sequence: Synthetic oligonucleotide
aguuccuuacaaucagaau

SEQ ID NO: 1365502 - RNA, 19 nt, Artificial Sequence
  Description of Artificial Sequence: Synthetic oligonucleotide
cuacuaucagggguaagug

SEQ ID NO: 1365503 - RNA, 19 nt, Artificial Sequence
  Description of Artificial Sequence: Synthetic oligonucleotide
caaacacggagugauacca

SEQ ID NO: 1365504 - RNA, 19 nt, Artificial Sequence
  Description of Artificial Sequence: Synthetic oligonucleotide
uccuagccaagaacguaca

SEQ ID NO: 1365505 - RNA, 19 nt, Artificial Sequence
  Description of Artificial Sequence: Synthetic oligonucleotide
cacauucaauguagauucc

SEQ ID NO: 1365506 - RNA, 19 nt, Artificial Sequence
  Description of Artificial Sequence: Synthetic oligonucleotide
aggacuuugucgagcuccc

SEQ ID NO: 1365507 - RNA, 19 nt, Artificial Sequence
  Description of Artificial Sequence: Synthetic oligonucleotide
cgcaucugagacuacaccg

SEQ ID NO: 1365508 - RNA, 19 nt, Artificial Sequence
  Description of Artificial Sequence: Synthetic oligonucleotide
uagggcaugcaaacacgga

SEQ ID NO: 1365509 - RNA, 19 nt, Artificial Sequence
  Description of Artificial Sequence: Synthetic oligonucleotide
uguagauuccuggcacagc

SEQ ID NO: 1365510 - RNA, 19 nt, Artificial Sequence
  Description of Artificial Sequence: Synthetic oligonucleotide
cuugugacuccacacgcca

SEQ ID NO: 1365511 - RNA, 19 nt, Artificial Sequence
  Description of Artificial Sequence: Synthetic oligonucleotide
agggcaggaauagaaagau

SEQ ID NO: 1365512 - RNA, 19 nt, Artificial Sequence
  Description of Artificial Sequence: Synthetic oligonucleotide
ggucucacagaucuccgcc

SEQ ID NO: 1365513 - RNA, 19 nt, Artificial Sequence
  Description of Artificial Sequence: Synthetic oligonucleotide
ucccacaccgcaucugaga

SEQ ID NO: 1365514 - RNA, 19 nt, Artificial Sequence
  Description of Artificial Sequence: Synthetic oligonucleotide
ucgagcucccucuccacac

SEQ ID NO: 1365515 - RNA, 19 nt, Artificial Sequence
  Description of Artificial Sequence: Synthetic oligonucleotide
acaugcaucccgaguaaag

SEQ ID NO: 1365516 - RNA, 19 nt, Artificial Sequence
  Description of Artificial Sequence: Synthetic oligonucleotide
guagagaaaggauuucuau

SEQ ID NO: 1365517 - RNA, 19 nt, Artificial Sequence
  Description of Artificial Sequence: Synthetic oligonucleotide
uccccuccuagccaagaac

SEQ ID NO: 1365518 - RNA, 19 nt, Artificial Sequence
  Description of Artificial Sequence: Synthetic oligonucleotide
gagcaaagggcuggaagug

SEQ ID NO: 1365519 - RNA, 19 nt, Artificial Sequence
  Description of Artificial Sequence: Synthetic oligonucleotide
cauagcugagagccucuag

SEQ ID NO: 1365520 - RNA, 19 nt, Artificial Sequence
  Description of Artificial Sequence: Synthetic oligonucleotide
agcuugaugggaggguuag

SEQ ID NO: 1365521 - RNA, 19 nt, Artificial Sequence
  Description of Artificial Sequence: Synthetic oligonucleotide
  modified_base (8)..(8): a, c, u, g, unknown or other
agcugganaccccuggauu

SEQ ID NO: 1365522 - RNA, 19 nt, Artificial Sequence
  Description of Artificial Sequence: Synthetic oligonucleotide
acgugagucccacaccgca

SEQ ID NO: 1365523 - RNA, 19 nt, Artificial Sequence
  Description of Artificial Sequence: Synthetic oligonucleotide
uugaugggaggguuagaau

SEQ ID NO: 1365524 - RNA, 19 nt, Artificial Sequence
  Description of Artificial Sequence: Synthetic oligonucleotide
aguguugcccauaggucag

SEQ ID NO: 1365525 - RNA, 19 nt, Artificial Sequence
  Description of Artificial Sequence: Synthetic oligonucleotide
aguccugccgccaaggcaa

SEQ ID NO: 1365526 - RNA, 19 nt, Artificial Sequence
  Description of Artificial Sequence: Synthetic oligonucleotide
ccccuccuagccaagaacg

SEQ ID NO: 1365527 - RNA, 19 nt, Artificial Sequence
  Description of Artificial Sequence: Synthetic oligonucleotide
gagguuugcugucgcagga

SEQ ID NO: 1365528 - RNA, 19 nt, Artificial Sequence
  Description of Artificial Sequence: Synthetic oligonucleotide
cagguauaccagacugccc

SEQ ID NO: 1365529 - RNA, 19 nt, Artificial Sequence
  Description of Artificial Sequence: Synthetic oligonucleotide
guaacaccuuccagcaaag

SEQ ID NO: 1365530 - RNA, 19 nt, Artificial Sequence
  Description of Artificial Sequence: Synthetic oligonucleotide
cuuugcuacuaucaggggu

SEQ ID NO: 1365531 - RNA, 19 nt, Artificial Sequence
  Description of Artificial Sequence: Synthetic oligonucleotide
accgcaucugagacuacac

SEQ ID NO: 1365532 - RNA, 19 nt, Artificial Sequence
  Description of Artificial Sequence: Synthetic oligonucleotide
ucucucugguguagccgag

SEQ ID NO: 1365533 - RNA, 19 nt, Artificial Sequence
  Description of Artificial Sequence: Synthetic oligonucleotide
aagauccgauucaauucca

SEQ ID NO: 1365534 - RNA, 19 nt, Artificial Sequence
  Description of Artificial Sequence: Synthetic oligonucleotide
gacugagcaggccaggccu

SEQ ID NO: 1365535 - RNA, 19 nt, Artificial Sequence
  Description of Artificial Sequence: Synthetic oligonucleotide
ccuuacaaucagaauauga

SEQ ID NO: 1365536 - RNA, 19 nt, Artificial Sequence
  Description of Artificial Sequence: Synthetic oligonucleotide
aguagagaaaggauuucua

SEQ ID NO: 1365537 - RNA, 19 nt, Artificial Sequence
  Description of Artificial Sequence: Synthetic oligonucleotide
uccuuacaaucagaauaug

SEQ ID NO: 1365538 - RNA, 19 nt, Artificial Sequence
  Description of Artificial Sequence: Synthetic oligonucleotide
guguagccgagcaaagggc

SEQ ID NO: 1365539 - RNA, 19 nt, Artificial Sequence
  Description of Artificial Sequence: Synthetic oligonucleotide
gcaauagggugacuucucc

SEQ ID NO: 1365540 - RNA, 19 nt, Artificial Sequence
  Description of Artificial Sequence: Synthetic oligonucleotide
caauagggugacuucucca

SEQ ID NO: 1365541 - RNA, 19 nt, Artificial Sequence
  Description of Artificial Sequence: Synthetic oligonucleotide
gcucgaucucaauuggcag

SEQ ID NO: 1365542 - RNA, 19 nt, Artificial Sequence
  Description of Artificial Sequence: Synthetic oligonucleotide
ugucgcaggauagggcaug

SEQ ID NO: 1365543 - RNA, 19 nt, Artificial Sequence
  Description of Artificial Sequence: Synthetic oligonucleotide
ggcgcugccgaugagagac

SEQ ID NO: 1365544 - RNA, 19 nt, Artificial Sequence
  Description of Artificial Sequence: Synthetic oligonucleotide
  modified_base (5)..(5): a, c, u, g, unknown or other
ugganaccccuggauugag

SEQ ID NO: 1365545 - RNA, 19 nt, Artificial Sequence
  Description of Artificial Sequence: Synthetic oligonucleotide
gaacaugcaucccgaguaa

SEQ ID NO: 1365546 - RNA, 19 nt, Artificial Sequence
  Description of Artificial Sequence: Synthetic oligonucleotide
  modified_base (17)..(17): a, c, u, g, unknown or other
gugggccacagcugganac

SEQ ID NO: 1365547 - RNA, 19 nt, Artificial Sequence
  Description of Artificial Sequence: Synthetic oligonucleotide
ggauugagggcaggaauag

SEQ ID NO: 1365548 - RNA, 19 nt, Artificial Sequence
  Description of Artificial Sequence: Synthetic oligonucleotide
aacaugcaucccgaguaaa

SEQ ID NO: 1365549 - RNA, 19 nt, Artificial Sequence
  Description of Artificial Sequence: Synthetic oligonucleotide
acuacaccgcaaaucucag

SEQ ID NO: 1365550 - RNA, 19 nt, Artificial Sequence
  Description of Artificial Sequence: Synthetic oligonucleotide
cagggguaaguguaaacaa

SEQ ID NO: 1365551 - RNA, 19 nt, Artificial Sequence
  Description of Artificial Sequence: Synthetic oligonucleotide
gcaaacacggagugauacc

SEQ ID NO: 1365552 - RNA, 19 nt, Artificial Sequence
  Description of Artificial Sequence: Synthetic oligonucleotide
cuuccagcaaaguuccuua

SEQ ID NO: 1365553 - RNA, 19 nt, Artificial Sequence
  Description of Artificial Sequence: Synthetic oligonucleotide
gccaaggcaagccuuggug

SEQ ID NO: 1365554 - RNA, 19 nt, Artificial Sequence
  Description of Artificial Sequence: Synthetic oligonucleotide
ugagcuugaugggaggguu

SEQ ID NO: 1365555 - RNA, 19 nt, Artificial Sequence
  Description of Artificial Sequence: Synthetic oligonucleotide
gagaaaggauuucuauuau

SEQ ID NO: 1365556 - RNA, 19 nt, Artificial Sequence
  Description of Artificial Sequence: Synthetic oligonucleotide
gcgccacacagccagaagc

SEQ ID NO: 1365557 - RNA, 19 nt, Artificial Sequence
  Description of Artificial Sequence: Synthetic oligonucleotide
accgcagguauaccagacu

SEQ ID NO: 1365558 - RNA, 19 nt, Artificial Sequence
  Description of Artificial Sequence: Synthetic oligonucleotide
acguacaggcugauuucac

SEQ ID NO: 1365559 - RNA, 19 nt, Artificial Sequence
  Description of Artificial Sequence: Synthetic oligonucleotide
uaucagggguaaguguaaa

SEQ ID NO: 1365560 - RNA, 19 nt, Artificial Sequence
  Description of Artificial Sequence: Synthetic oligonucleotide
aacaagcauucaguucuaa

SEQ ID NO: 1365561 - RNA, 19 nt, Artificial Sequence
  Description of Artificial Sequence: Synthetic oligonucleotide
agacuacaccgcaaaucuc

SEQ ID NO: 1365562 - RNA, 19 nt, Artificial Sequence
  Description of Artificial Sequence: Synthetic oligonucleotide
agggguaaguguaaacaaa

SEQ ID NO: 1365563 - RNA, 19 nt, Artificial Sequence
  Description of Artificial Sequence: Synthetic oligonucleotide
acguuucccaucugcugga

SEQ ID NO: 1365564 - RNA, 19 nt, Artificial Sequence
  Description of Artificial Sequence: Synthetic oligonucleotide
gcucuguucgcaguguugc

SEQ ID NO: 1365565 - RNA, 19 nt, Artificial Sequence
  Description of Artificial Sequence: Synthetic oligonucleotide
ccaaccgcagguauaccag

SEQ ID NO: 1365566 - RNA, 19 nt, Artificial Sequence
  Description of Artificial Sequence: Synthetic oligonucleotide
agcaaagggcuggaagugu

SEQ ID NO: 1365567 - RNA, 19 nt, Artificial Sequence
  Description of Artificial Sequence: Synthetic oligonucleotide
gcaucugagacuacaccgc

SEQ ID NO: 1365568 - RNA, 19 nt, Artificial Sequence
  Description of Artificial Sequence: Synthetic oligonucleotide
cuguucgcaguguugccca

SEQ ID NO: 1365569 - RNA, 19 nt, Artificial Sequence
  Description of Artificial Sequence: Synthetic oligonucleotide
aggaggcggauaaagugca

SEQ ID NO: 1365570 - RNA, 19 nt, Artificial Sequence
  Description of Artificial Sequence: Synthetic oligonucleotide
ugcaggucccaggucuugc

SEQ ID NO: 1365571 - RNA, 19 nt, Artificial Sequence
  Description of Artificial Sequence: Synthetic oligonucleotide
aggauagggcaugcaaaca

SEQ ID NO: 1365572 - RNA, 19 nt, Artificial Sequence
  Description of Artificial Sequence: Synthetic oligonucleotide
cuaaugggcuauuuacagu

SEQ ID NO: 1365573 - RNA, 19 nt, Artificial Sequence
  Description of Artificial Sequence: Synthetic oligonucleotide
cuaucagggguaaguguaa

SEQ ID NO: 1365574 - RNA, 19 nt, Artificial Sequence
  Description of Artificial Sequence: Synthetic oligonucleotide
gcccacauagugcagcaac

SEQ ID NO: 1365575 - RNA, 19 nt, Artificial Sequence
  Description of Artificial Sequence: Synthetic oligonucleotide
augagcuugaugggagggu

SEQ ID NO: 1365576 - RNA, 19 nt, Artificial Sequence
  Description of Artificial Sequence: Synthetic oligonucleotide
gauugagggcaggaauaga

SEQ ID NO: 1365577 - RNA, 19 nt, Artificial Sequence
  Description of Artificial Sequence: Synthetic oligonucleotide
ccaaugaacuauugagcuc

SEQ ID NO: 1365578 - RNA, 19 nt, Artificial Sequence
  Description of Artificial Sequence: Synthetic oligonucleotide
cuucucacgugagucccac

SEQ ID NO: 1365579 - RNA, 19 nt, Artificial Sequence
  Description of Artificial Sequence: Synthetic oligonucleotide
augcacacugcuccaugau

SEQ ID NO: 1365580 - RNA, 19 nt, Artificial Sequence
  Description of Artificial Sequence: Synthetic oligonucleotide
ugucgagcucccucuccac

SEQ ID NO: 1365581 - RNA, 19 nt, Artificial Sequence
  Description of Artificial Sequence: Synthetic oligonucleotide
  modified_base (4)..(4): a, c, u, g, unknown or other
gganaccccuggauugagg

SEQ ID NO: 1365582 - RNA, 19 nt, Artificial Sequence
  Description of Artificial Sequence: Synthetic oligonucleotide
cuagugaagucaacugggu

SEQ ID NO: 1365583 - RNA, 19 nt, Artificial Sequence
  Description of Artificial Sequence: Synthetic oligonucleotide
gagaugacguggccacaga

SEQ ID NO: 1365584 - RNA, 19 nt, Artificial Sequence
  Description of Artificial Sequence: Synthetic oligonucleotide
cucgggagaugacguggcc

SEQ ID NO: 1365585 - RNA, 19 nt, Artificial Sequence
  Description of Artificial Sequence: Synthetic oligonucleotide
cuuugucgagcucccucuc

SEQ ID NO: 1365586 - RNA, 19 nt, Artificial Sequence
  Description of Artificial Sequence: Synthetic oligonucleotide
ccgauucaauuccaagaag

SEQ ID NO: 1365587 - RNA, 19 nt, Artificial Sequence
  Description of Artificial Sequence: Synthetic oligonucleotide
acuccacacgccagugcac

SEQ ID NO: 1365588 - RNA, 19 nt, Artificial Sequence
  Description of Artificial Sequence: Synthetic oligonucleotide
cacaccgcaucugagacua

SEQ ID NO: 1365589 - RNA, 19 nt, Artificial Sequence
  Description of Artificial Sequence: Synthetic oligonucleotide
cuacgcugagcaugcccug

SEQ ID NO: 1365590 - RNA, 19 nt, Artificial Sequence
  Description of Artificial Sequence: Synthetic oligonucleotide
guuaggaggcggauaaagu

SEQ ID NO: 1365591 - RNA, 19 nt, Artificial Sequence
  Description of Artificial Sequence: Synthetic oligonucleotide
ccgagcaaagggcuggaag

SEQ ID NO: 1365592 - RNA, 19 nt, Artificial Sequence
  Description of Artificial Sequence: Synthetic oligonucleotide
auaccagacugcccaucau

SEQ ID NO: 1365593 - RNA, 19 nt, Artificial Sequence
  Description of Artificial Sequence: Synthetic oligonucleotide
guagccgagcaaagggcug

SEQ ID NO: 1365594 - RNA, 19 nt, Artificial Sequence
  Description of Artificial Sequence: Synthetic oligonucleotide
gguuagaaucugagguuug

SEQ ID NO: 1365595 - RNA, 19 nt, Artificial Sequence
  Description of Artificial Sequence: Synthetic oligonucleotide
gcuacuaucagggguaagu

SEQ ID NO: 1365596 - RNA, 19 nt, Artificial Sequence
  Description of Artificial Sequence: Synthetic oligonucleotide
gaucuccgcccaguggcug

SEQ ID NO: 1365597 - RNA, 19 nt, Artificial Sequence
  Description of Artificial Sequence: Synthetic oligonucleotide
uccaucaggcgcugccgau

SEQ ID NO: 1365598 - RNA, 19 nt, Artificial Sequence
  Description of Artificial Sequence: Synthetic oligonucleotide
ccuuugcuacuaucagggg

SEQ ID NO: 1365599 - RNA, 19 nt, Artificial Sequence
  Description of Artificial Sequence: Synthetic oligonucleotide
caaccgcagguauaccaga

SEQ ID NO: 1365600 - RNA, 19 nt, Artificial Sequence
  Description of Artificial Sequence: Synthetic oligonucleotide
ucccaucugcuggauucug

SEQ ID NO: 1365601 - RNA, 19 nt, Artificial Sequence
  Description of Artificial Sequence: Synthetic oligonucleotide
cccacaccgcaucugagac

SEQ ID NO: 1365602 - RNA, 19 nt, Artificial Sequence
  Description of Artificial Sequence: Synthetic oligonucleotide
agccagaagcgaagcugac

SEQ ID NO: 1365603 - RNA, 19 nt, Artificial Sequence
  Description of Artificial Sequence: Synthetic oligonucleotide
gggcuauuuacaguagaga

SEQ ID NO: 1365604 - RNA, 19 nt, Artificial Sequence
  Description of Artificial Sequence: Synthetic oligonucleotide
ccaagaacguacaggcuga

SEQ ID NO: 1365605 - RNA, 19 nt, Artificial Sequence
  Description of Artificial Sequence: Synthetic oligonucleotide
gucgagcucccucuccaca

SEQ ID NO: 1365606 - RNA, 19 nt, Artificial Sequence
  Description of Artificial Sequence: Synthetic oligonucleotide
ucaguucuaaugggcuauu

SEQ ID NO: 1365607 - RNA, 19 nt, Artificial Sequence
  Description of Artificial Sequence: Synthetic oligonucleotide
cuacaccgcaaaucucaga

SEQ ID NO: 1365608 - RNA, 19 nt, Artificial Sequence
  Description of Artificial Sequence: Synthetic oligonucleotide
caguagagaaaggauuucu

SEQ ID NO: 1365609 - RNA, 19 nt, Artificial Sequence
  Description of Artificial Sequence: Synthetic oligonucleotide
agugucgggcauagcugag

SEQ ID NO: 1365610 - RNA, 19 nt, Artificial Sequence
  Description of Artificial Sequence: Synthetic oligonucleotide
uugcuacuaucagggguaa

SEQ ID NO: 1365611 - RNA, 19 nt, Artificial Sequence
  Description of Artificial Sequence: Synthetic oligonucleotide
gagucccacaccgcaucug

SEQ ID NO: 1365612 - RNA, 19 nt, Artificial Sequence
  Description of Artificial Sequence: Synthetic oligonucleotide
cuggauugagggcaggaau

SEQ ID NO: 1365613 - RNA, 19 nt, Artificial Sequence
  Description of Artificial Sequence: Synthetic oligonucleotide
  modified_base (6)..(6): a, c, u, g, unknown or other
cugganaccccuggauuga

SEQ ID NO: 1365614 - RNA, 19 nt, Artificial Sequence
  Description of Artificial Sequence: Synthetic oligonucleotide
ccgcaucugagacuacacc

SEQ ID NO: 1365615 - RNA, 19 nt, Artificial Sequence
  Description of Artificial Sequence: Synthetic oligonucleotide
caguccugccgccaaggca

SEQ ID NO: 1365616 - RNA, 19 nt, Artificial Sequence
  Description of Artificial Sequence: Synthetic oligonucleotide
aucccgaguaaaggucuca

SEQ ID NO: 1365617 - RNA, 19 nt, Artificial Sequence
  Description of Artificial Sequence: Synthetic oligonucleotide
cagguccacauucaaugua

SEQ ID NO: 1365618 - RNA, 19 nt, Artificial Sequence
  Description of Artificial Sequence: Synthetic oligonucleotide
gucgcaggauagggcaugc

SEQ ID NO: 1365619 - RNA, 19 nt, Artificial Sequence
  Description of Artificial Sequence: Synthetic oligonucleotide
guccacauucaauguagau

SEQ ID NO: 1365620 - RNA, 19 nt, Artificial Sequence
  Description of Artificial Sequence: Synthetic oligonucleotide
uguucgcaguguugcccau

SEQ ID NO: 1365621 - RNA, 19 nt, Artificial Sequence
  Description of Artificial Sequence: Synthetic oligonucleotide
gcaucaggauccacuggag

SEQ ID NO: 1365622 - RNA, 19 nt, Artificial Sequence
  Description of Artificial Sequence: Synthetic oligonucleotide
guugcccauaggucaggaa

SEQ ID NO: 1365623 - RNA, 19 nt, Artificial Sequence
  Description of Artificial Sequence: Synthetic oligonucleotide
agccaagaacguacaggcu

SEQ ID NO: 1365624 - RNA, 19 nt, Artificial Sequence
  Description of Artificial Sequence: Synthetic oligonucleotide
ccauaggucaggaacuugu

SEQ ID NO: 1365625 - RNA, 19 nt, Artificial Sequence
  Description of Artificial Sequence: Synthetic oligonucleotide
cccaaccgcagguauacca

SEQ ID NO: 1365626 - RNA, 19 nt, Artificial Sequence
  Description of Artificial Sequence: Synthetic oligonucleotide
uuugcccacucgggagaca

SEQ ID NO: 1365627 - RNA, 19 nt, Artificial Sequence
  Description of Artificial Sequence: Synthetic oligonucleotide
gagcuucuaagauccgauu

SEQ ID NO: 1365628 - RNA, 19 nt, Artificial Sequence
  Description of Artificial Sequence: Synthetic oligonucleotide
aucugagacuacaccgcaa

SEQ ID NO: 1365629 - RNA, 19 nt, Artificial Sequence
  Description of Artificial Sequence: Synthetic oligonucleotide
ggcaauagggugacuucuc

SEQ ID NO: 1365630 - RNA, 19 nt, Artificial Sequence
  Description of Artificial Sequence: Synthetic oligonucleotide
ugcccacucgggagacacu

SEQ ID NO: 1365631 - RNA, 19 nt, Artificial Sequence
  Description of Artificial Sequence: Synthetic oligonucleotide
gguacaagugcuccacaau

SEQ ID NO: 1365632 - RNA, 19 nt, Artificial Sequence
  Description of Artificial Sequence: Synthetic oligonucleotide
agguuugcugucgcaggau

SEQ ID NO: 1365633 - RNA, 19 nt, Artificial Sequence
  Description of Artificial Sequence: Synthetic oligonucleotide
caccgcaucugagacuaca

SEQ ID NO: 1365634 - RNA, 19 nt, Artificial Sequence
  Description of Artificial Sequence: Synthetic oligonucleotide
gucccacaccgcaucugag

SEQ ID NO: 1365635 - RNA, 19 nt, Artificial Sequence
  Description of Artificial Sequence: Synthetic oligonucleotide
augaacuauugagcuccau

SEQ ID NO: 1365636 - RNA, 19 nt, Artificial Sequence
  Description of Artificial Sequence: Synthetic oligonucleotide
cugaaagccccagcaggga

SEQ ID NO: 1365637 - RNA, 19 nt, Artificial Sequence
  Description of Artificial Sequence: Synthetic oligonucleotide
aguccccuccuagccaaga

SEQ ID NO: 1365638 - RNA, 19 nt, Artificial Sequence
  Description of Artificial Sequence: Synthetic oligonucleotide
gcccacucgggagacacug

SEQ ID NO: 1365639 - RNA, 19 nt, Artificial Sequence
  Description of Artificial Sequence: Synthetic oligonucleotide
  modified_base (19)..(19): a, c, u, g, unknown or other
aggugggccacagcuggan

SEQ ID NO: 1365640 - RNA, 19 nt, Artificial Sequence
  Description of Artificial Sequence: Synthetic oligonucleotide
ucgcaggauagggcaugca

SEQ ID NO: 1365641 - RNA, 19 nt, Artificial Sequence
  Description of Artificial Sequence: Synthetic oligonucleotide
ggcucuguucgcaguguug

SEQ ID NO: 1365642 - RNA, 19 nt, Artificial Sequence
  Description of Artificial Sequence: Synthetic oligonucleotide
cauuccagugcagguccca

SEQ ID NO: 1365643 - RNA, 19 nt, Artificial Sequence
  Description of Artificial Sequence: Synthetic oligonucleotide
gugucgggcauagcugaga

SEQ ID NO: 1365644 - RNA, 19 nt, Artificial Sequence
  Description of Artificial Sequence: Synthetic oligonucleotide
gguggcaauagggugacuu

SEQ ID NO: 1365645 - RNA, 19 nt, Artificial Sequence
  Description of Artificial Sequence: Synthetic oligonucleotide
gcuacgcugagcaugcccu

SEQ ID NO: 1365646 - RNA, 19 nt, Artificial Sequence
  Description of Artificial Sequence: Synthetic oligonucleotide
caguccccuccuagccaag

SEQ ID NO: 1365647 - RNA, 19 nt, Artificial Sequence
  Description of Artificial Sequence: Synthetic oligonucleotide
gguccacauucaauguaga

SEQ ID NO: 1365648 - RNA, 19 nt, Artificial Sequence
  Description of Artificial Sequence: Synthetic oligonucleotide
guccccuccuagccaagaa

SEQ ID NO: 1365649 - RNA, 19 nt, Artificial Sequence
  Description of Artificial Sequence: Synthetic oligonucleotide
ccauuccagugcagguccc

SEQ ID NO: 1365650 - RNA, 19 nt, Artificial Sequence
  Description of Artificial Sequence: Synthetic oligonucleotide
ggaggcggauaaagugcag

SEQ ID NO: 1365651 - RNA, 19 nt, Artificial Sequence
  Description of Artificial Sequence: Synthetic oligonucleotide
cugcuaugaauguccuuau

SEQ ID NO: 1365652 - RNA, 19 nt, Artificial Sequence
  Description of Artificial Sequence: Synthetic oligonucleotide
ccaaggcaagccuuggugu

SEQ ID NO: 1365653 - RNA, 19 nt, Artificial Sequence
  Description of Artificial Sequence: Synthetic oligonucleotide
ccacacgccagugcacugc

SEQ ID NO: 1365654 - RNA, 19 nt, Artificial Sequence
  Description of Artificial Sequence: Synthetic oligonucleotide
caagcccaaccgcagguau

SEQ ID NO: 1365655 - RNA, 19 nt, Artificial Sequence
  Description of Artificial Sequence: Synthetic oligonucleotide
cacucgggagacacugcua

SEQ ID NO: 1365656 - RNA, 19 nt, Artificial Sequence
  Description of Artificial Sequence: Synthetic oligonucleotide
gggcaugcaaacacggagu

SEQ ID NO: 1365657 - RNA, 19 nt, Artificial Sequence
  Description of Artificial Sequence: Synthetic oligonucleotide
agccgagcaaagggcugga

SEQ ID NO: 1365658 - RNA, 19 nt, Artificial Sequence
  Description of Artificial Sequence: Synthetic oligonucleotide
ccgcaaaucucagagucaa

SEQ ID NO: 1365659 - RNA, 19 nt, Artificial Sequence
  Description of Artificial Sequence: Synthetic oligonucleotide
cccgaguaaaggucucaca

SEQ ID NO: 1365660 - RNA, 19 nt, Artificial Sequence
  Description of Artificial Sequence: Synthetic oligonucleotide
cccacucgggagacacugc

SEQ ID NO: 1365661 - RNA, 19 nt, Artificial Sequence
  Description of Artificial Sequence: Synthetic oligonucleotide
cugagacuacaccgcaaau

SEQ ID NO: 1365662 - RNA, 19 nt, Artificial Sequence
  Description of Artificial Sequence: Synthetic oligonucleotide
ccaccaguuaggaggcgga

SEQ ID NO: 1365663 - RNA, 19 nt, Artificial Sequence
  Description of Artificial Sequence: Synthetic oligonucleotide
ccuccauuaaugagcuugu

SEQ ID NO: 1365664 - RNA, 19 nt, Artificial Sequence
  Description of Artificial Sequence: Synthetic oligonucleotide
ccaguccccuccuagccaa

SEQ ID NO: 1365665 - RNA, 19 nt, Artificial Sequence
  Description of Artificial Sequence: Synthetic oligonucleotide
  modified_base (9)..(9): a, c, u, g, unknown or other
cagcugganaccccuggau

SEQ ID NO: 1365666 - RNA, 19 nt, Artificial Sequence
  Description of Artificial Sequence: Synthetic oligonucleotide
guucgcaguguugcccaua

SEQ ID NO: 1365667 - RNA, 19 nt, Artificial Sequence
  Description of Artificial Sequence: Synthetic oligonucleotide
cagcuacgcugagcaugcc

SEQ ID NO: 1365668 - RNA, 19 nt, Artificial Sequence
  Description of Artificial Sequence: Synthetic oligonucleotide
accuuccagcaaaguuccu

SEQ ID NO: 1365669 - RNA, 19 nt, Artificial Sequence
  Description of Artificial Sequence: Synthetic oligonucleotide
cugucgcaggauagggcau

SEQ ID NO: 1365670 - RNA, 19 nt, Artificial Sequence
  Description of Artificial Sequence: Synthetic oligonucleotide
caggcugauuucacagcuu

SEQ ID NO: 1365671 - RNA, 19 nt, Artificial Sequence
  Description of Artificial Sequence: Synthetic oligonucleotide
caguuaggaggcggauaaa

SEQ ID NO: 1365672 - RNA, 19 nt, Artificial Sequence
  Description of Artificial Sequence: Synthetic oligonucleotide
ccgccaaggcaagccuugg

SEQ ID NO: 1365673 - RNA, 19 nt, Artificial Sequence
  Description of Artificial Sequence: Synthetic oligonucleotide
cagcgccacacagccagaa

SEQ ID NO: 1365674 - RNA, 19 nt, Artificial Sequence
  Description of Artificial Sequence: Synthetic oligonucleotide
gcuugaugggaggguuaga

SEQ ID NO: 1365675 - RNA, 19 nt, Artificial Sequence
  Description of Artificial Sequence: Synthetic oligonucleotide
cacugcuaugaauguccuu

SEQ ID NO: 1365676 - RNA, 19 nt, Artificial Sequence
  Description of Artificial Sequence: Synthetic oligonucleotide
ccuccuagccaagaacgua

SEQ ID NO: 1365677 - RNA, 19 nt, Artificial Sequence
  Description of Artificial Sequence: Synthetic oligonucleotide
agguggcaauagggugacu

SEQ ID NO: 1365678 - RNA, 19 nt, Artificial Sequence
  Description of Artificial Sequence: Synthetic oligonucleotide
ccacucgggagacacugcu

SEQ ID NO: 1365679 - RNA, 19 nt, Artificial Sequence
  Description of Artificial Sequence: Synthetic oligonucleotide
gcccagcucgaucucaauu

SEQ ID NO: 1365680 - RNA, 19 nt, Artificial Sequence
  Description of Artificial Sequence: Synthetic oligonucleotide
ggcaagccuugguguguaa

SEQ ID NO: 1365681 - RNA, 19 nt, Artificial Sequence
  Description of Artificial Sequence: Synthetic oligonucleotide
caguucuaaugggcuauuu

SEQ ID NO: 1365682 - RNA, 19 nt, Artificial Sequence
  Description of Artificial Sequence: Synthetic oligonucleotide
gcauagcugagagccucua

SEQ ID NO: 1365683 - RNA, 19 nt, Artificial Sequence
  Description of Artificial Sequence: Synthetic oligonucleotide
ccgcccaguggcuguuguc

SEQ ID NO: 1365684 - RNA, 19 nt, Artificial Sequence
  Description of Artificial Sequence: Synthetic oligonucleotide
caccaguuaggaggcggau

SEQ ID NO: 1365685 - RNA, 19 nt, Artificial Sequence
  Description of Artificial Sequence: Synthetic oligonucleotide
ggcccacauagugcagcaa

SEQ ID NO: 1365686 - RNA, 19 nt, Artificial Sequence
  Description of Artificial Sequence: Synthetic oligonucleotide
ccaagcccaaccgcaggua

SEQ ID NO: 1365687 - RNA, 19 nt, Artificial Sequence
  Description of Artificial Sequence: Synthetic oligonucleotide
ggacuuugucgagcucccu

SEQ ID NO: 1365688 - RNA, 19 nt, Artificial Sequence
  Description of Artificial Sequence: Synthetic oligonucleotide
gcccauaggucaggaacuu

SEQ ID NO: 1365689 - RNA, 19 nt, Artificial Sequence
  Description of Artificial Sequence: Synthetic oligonucleotide
cgccaaggcaagccuuggu

SEQ ID NO: 1365690 - RNA, 19 nt, Artificial Sequence
  Description of Artificial Sequence: Synthetic oligonucleotide
  modified_base (1)..(1): a, c, u, g, unknown or other
naccccuggauugagggca

SEQ ID NO: 1365691 - RNA, 19 nt, Artificial Sequence
  Description of Artificial Sequence: Synthetic oligonucleotide
aauaauucgaugguggggc

SEQ ID NO: 1365692 - RNA, 19 nt, Artificial Sequence
  Description of Artificial Sequence: Synthetic oligonucleotide
uuaagaucuaccaacgagg

SEQ ID NO: 1365693 - RNA, 19 nt, Artificial Sequence
  Description of Artificial Sequence: Synthetic oligonucleotide
aacuaaucugaccucaagc

SEQ ID NO: 1365694 - RNA, 19 nt, Artificial Sequence
  Description of Artificial Sequence: Synthetic oligonucleotide
aaauccacaagguacaugu

SEQ ID NO: 1365695 - RNA, 19 nt, Artificial Sequence
  Description of Artificial Sequence: Synthetic oligonucleotide
cuucugaugacacaaaugg

SEQ ID NO: 1365696 - RNA, 19 nt, Artificial Sequence
  Description of Artificial Sequence: Synthetic oligonucleotide
uuuaagaucuaccaacgag

SEQ ID NO: 1365697 - RNA, 19 nt, Artificial Sequence
  Description of Artificial Sequence: Synthetic oligonucleotide
augacuucuacuuugcugg

SEQ ID NO: 1365698 - RNA, 19 nt, Artificial Sequence
  Description of Artificial Sequence: Synthetic oligonucleotide
aauucuuuuccucgguccc

SEQ ID NO: 1365699 - RNA, 19 nt, Artificial Sequence
  Description of Artificial Sequence: Synthetic oligonucleotide
aaagacaugaaacucaguu

SEQ ID NO: 1365700 - RNA, 19 nt, Artificial Sequence
  Description of Artificial Sequence: Synthetic oligonucleotide
agcuuuaagaucuaccaac

SEQ ID NO: 1365701 - RNA, 19 nt, Artificial Sequence
  Description of Artificial Sequence: Synthetic oligonucleotide
aagcauaugcauucuaggg

SEQ ID NO: 1365702 - RNA, 19 nt, Artificial Sequence
  Description of Artificial Sequence: Synthetic oligonucleotide
uuuucauauaauuuggccu

SEQ ID NO: 1365703 - RNA, 19 nt, Artificial Sequence
  Description of Artificial Sequence: Synthetic oligonucleotide
ugacccacaaaauaauucg

SEQ ID NO: 1365704 - RNA, 19 nt, Artificial Sequence
  Description of Artificial Sequence: Synthetic oligonucleotide
aaagcucaguaacaucucc

SEQ ID NO: 1365705 - RNA, 19 nt, Artificial Sequence
  Description of Artificial Sequence: Synthetic oligonucleotide
aagauaucauaucaucuag

SEQ ID NO: 1365706 - RNA, 19 nt, Artificial Sequence
  Description of Artificial Sequence: Synthetic oligonucleotide
aacaccagcauucugcuug

SEQ ID NO: 1365707 - RNA, 19 nt, Artificial Sequence
  Description of Artificial Sequence: Synthetic oligonucleotide
gauaucauaucaucuagug

SEQ ID NO: 1365708 - RNA, 19 nt, Artificial Sequence
  Description of Artificial Sequence: Synthetic oligonucleotide
auggcaaaagcucaguaac

SEQ ID NO: 1365709 - RNA, 19 nt, Artificial Sequence
  Description of Artificial Sequence: Synthetic oligonucleotide
auacccaacaccaaguugc

SEQ ID NO: 1365710 - RNA, 19 nt, Artificial Sequence
  Description of Artificial Sequence: Synthetic oligonucleotide
uacuaaaaggaccaguucu

SEQ ID NO: 1365711 - RNA, 19 nt, Artificial Sequence
  Description of Artificial Sequence: Synthetic oligonucleotide
uuauccaucuccaauagau

SEQ ID NO: 1365712 - RNA, 19 nt, Artificial Sequence
  Description of Artificial Sequence: Synthetic oligonucleotide
uauaauaagauaucauauc

SEQ ID NO: 1365713 - RNA, 19 nt, Artificial Sequence
  Description of Artificial Sequence: Synthetic oligonucleotide
ucuaacauagccuuucgcu

SEQ ID NO: 1365714 - RNA, 19 nt, Artificial Sequence
  Description of Artificial Sequence: Synthetic oligonucleotide
auaauuuggccuuuucuuc

SEQ ID NO: 1365715 - RNA, 19 nt, Artificial Sequence
  Description of Artificial Sequence: Synthetic oligonucleotide
agaagaaagacaugaaacu

SEQ ID NO: 1365716 - RNA, 19 nt, Artificial Sequence
  Description of Artificial Sequence: Synthetic oligonucleotide
ucaucuaguguuuggaaag

SEQ ID NO: 1365717 - RNA, 19 nt, Artificial Sequence
  Description of Artificial Sequence: Synthetic oligonucleotide
auccacaagguacaugucc

SEQ ID NO: 1365718 - RNA, 19 nt, Artificial Sequence
  Description of Artificial Sequence: Synthetic oligonucleotide
aauuccccaagucacucgg

SEQ ID NO: 1365719 - RNA, 19 nt, Artificial Sequence
  Description of Artificial Sequence: Synthetic oligonucleotide
ugugacuuguuuauaauaa

SEQ ID NO: 1365720 - RNA, 19 nt, Artificial Sequence
  Description of Artificial Sequence: Synthetic oligonucleotide
aaauaauucgauggugggg

SEQ ID NO: 1365721 - RNA, 19 nt, Artificial Sequence
  Description of Artificial Sequence: Synthetic oligonucleotide
uucauuagcaggacuaaca

SEQ ID NO: 1365722 - RNA, 19 nt, Artificial Sequence
  Description of Artificial Sequence: Synthetic oligonucleotide
uuucgagaaucucuagugg

SEQ ID NO: 1365723 - RNA, 19 nt, Artificial Sequence
  Description of Artificial Sequence: Synthetic oligonucleotide
gaggcuguaacauccagag

SEQ ID NO: 1365724 - RNA, 19 nt, Artificial Sequence
  Description of Artificial Sequence: Synthetic oligonucleotide
ucguuuuauucucugaucu

SEQ ID NO: 1365725 - RNA, 19 nt, Artificial Sequence
  Description of Artificial Sequence: Synthetic oligonucleotide
uagauaugugugaagagcu

SEQ ID NO: 1365726 - RNA, 19 nt, Artificial Sequence
  Description of Artificial Sequence: Synthetic oligonucleotide
uauaauuuggccuuuucuu

SEQ ID NO: 1365727 - RNA, 19 nt, Artificial Sequence
  Description of Artificial Sequence: Synthetic oligonucleotide
acuaaucugaccucaagca

SEQ ID NO: 1365728 - RNA, 19 nt, Artificial Sequence
  Description of Artificial Sequence: Synthetic oligonucleotide
uuuuauccaucuccaauag

SEQ ID NO: 1365729 - RNA, 19 nt, Artificial Sequence
  Description of Artificial Sequence: Synthetic oligonucleotide
ucuauaaucuucuguguga

SEQ ID NO: 1365730 - RNA, 19 nt, Artificial Sequence
  Description of Artificial Sequence: Synthetic oligonucleotide
ucgaccaguauccaaagga

SEQ ID NO: 1365731 - RNA, 19 nt, Artificial Sequence
  Description of Artificial Sequence: Synthetic oligonucleotide
uuucgcuugucuauaaucu

SEQ ID NO: 1365732 - RNA, 19 nt, Artificial Sequence
  Description of Artificial Sequence: Synthetic oligonucleotide
ucacgaagcaucucuaaag

SEQ ID NO: 1365733 - RNA, 19 nt, Artificial Sequence
  Description of Artificial Sequence: Synthetic oligonucleotide
uguuucuucgaccaguauc

SEQ ID NO: 1365734 - RNA, 19 nt, Artificial Sequence
  Description of Artificial Sequence: Synthetic oligonucleotide
ucucgcuucuaacauagcc

SEQ ID NO: 1365735 - RNA, 19 nt, Artificial Sequence
  Description of Artificial Sequence: Synthetic oligonucleotide
ggcuguaacauccagaggc

SEQ ID NO: 1365736 - RNA, 19 nt, Artificial Sequence
  Description of Artificial Sequence: Synthetic oligonucleotide
gauaugugugaagagcugg

SEQ ID NO: 1365737 - RNA, 19 nt, Artificial Sequence
  Description of Artificial Sequence: Synthetic oligonucleotide
uaauggaugggccccauug

SEQ ID NO: 1365738 - RNA, 19 nt, Artificial Sequence
  Description of Artificial Sequence: Synthetic oligonucleotide
ucuaaaguuuucauuugcu

SEQ ID NO: 1365739 - RNA, 19 nt, Artificial Sequence
  Description of Artificial Sequence: Synthetic oligonucleotide
uuuggaaagugacugugga

SEQ ID NO: 1365740 - RNA, 19 nt, Artificial Sequence
  Description of Artificial Sequence: Synthetic oligonucleotide
aauacccaacaccaaguug

SEQ ID NO: 1365741 - RNA, 19 nt, Artificial Sequence
  Description of Artificial Sequence: Synthetic oligonucleotide
cuuuucaaggucaugugac

SEQ ID NO: 1365742 - RNA, 19 nt, Artificial Sequence
  Description of Artificial Sequence: Synthetic oligonucleotide
aguggcaccgagcaccucc

SEQ ID NO: 1365743 - RNA, 19 nt, Artificial Sequence
  Description of Artificial Sequence: Synthetic oligonucleotide
augccaacuaaucugaccu

SEQ ID NO: 1365744 - RNA, 19 nt, Artificial Sequence
  Description of Artificial Sequence: Synthetic oligonucleotide
aauagaucuggcaaguccu

SEQ ID NO: 1365745 - RNA, 19 nt, Artificial Sequence
  Description of Artificial Sequence: Synthetic oligonucleotide
guuucgagaaucucuagug

SEQ ID NO: 1365746 - RNA, 19 nt, Artificial Sequence
  Description of Artificial Sequence: Synthetic oligonucleotide
uaagaucuaccaacgagga

SEQ ID NO: 1365747 - RNA, 19 nt, Artificial Sequence
  Description of Artificial Sequence: Synthetic oligonucleotide
ugaugacacaaauggaacc

SEQ ID NO: 1365748 - RNA, 19 nt, Artificial Sequence
  Description of Artificial Sequence: Synthetic oligonucleotide
uguagauaugugugaagag

SEQ ID NO: 1365749 - RNA, 19 nt, Artificial Sequence
  Description of Artificial Sequence: Synthetic oligonucleotide
uggaaagucuccuuuaguc

SEQ ID NO: 1365750 - RNA, 19 nt, Artificial Sequence
  Description of Artificial Sequence: Synthetic oligonucleotide
uucgagaaucucuaguggc

SEQ ID NO: 1365751 - RNA, 19 nt, Artificial Sequence
  Description of Artificial Sequence: Synthetic oligonucleotide
uugucuaaagucuucugcu

SEQ ID NO: 1365752 - RNA, 19 nt, Artificial Sequence
  Description of Artificial Sequence: Synthetic oligonucleotide
ucgggcaaaggcaaaauac

SEQ ID NO: 1365753 - RNA, 19 nt, Artificial Sequence
  Description of Artificial Sequence: Synthetic oligonucleotide
cauucuagggaaaagacaa

SEQ ID NO: 1365754 - RNA, 19 nt, Artificial Sequence
  Description of Artificial Sequence: Synthetic oligonucleotide
guuucuucgaccaguaucc

SEQ ID NO: 1365755 - RNA, 19 nt, Artificial Sequence
  Description of Artificial Sequence: Synthetic oligonucleotide
caagcauaugcauucuagg

SEQ ID NO: 1365756 - RNA, 19 nt, Artificial Sequence
  Description of Artificial Sequence: Synthetic oligonucleotide
uuguuuauaauaagauauc

SEQ ID NO: 1365757 - RNA, 19 nt, Artificial Sequence
  Description of Artificial Sequence: Synthetic oligonucleotide
gaagagcucagcuuuaaga

SEQ ID NO: 1365758 - RNA, 19 nt, Artificial Sequence
  Description of Artificial Sequence: Synthetic oligonucleotide
auuagcaggacuaacaaaa

SEQ ID NO: 1365759 - RNA, 19 nt, Artificial Sequence
  Description of Artificial Sequence: Synthetic oligonucleotide
ugucuguucacgaagcauc

SEQ ID NO: 1365760 - RNA, 19 nt, Artificial Sequence
  Description of Artificial Sequence: Synthetic oligonucleotide
aaguccuuucucaugcagc

SEQ ID NO: 1365761 - RNA, 19 nt, Artificial Sequence
  Description of Artificial Sequence: Synthetic oligonucleotide
cuaguguuuggaaagugac

SEQ ID NO: 1365762 - RNA, 19 nt, Artificial Sequence
  Description of Artificial Sequence: Synthetic oligonucleotide
ugcauucuagggaaaagac

SEQ ID NO: 1365763 - RNA, 19 nt, Artificial Sequence
  Description of Artificial Sequence: Synthetic oligonucleotide
uguuucgagaaucucuagu

SEQ ID NO: 1365764 - RNA, 19 nt, Artificial Sequence
  Description of Artificial Sequence: Synthetic oligonucleotide
uguugucuguucacgaagc

SEQ ID NO: 1365765 - RNA, 19 nt, Artificial Sequence
  Description of Artificial Sequence: Synthetic oligonucleotide
uccuuucucaugcagcgcc

SEQ ID NO: 1365766 - RNA, 19 nt, Artificial Sequence
  Description of Artificial Sequence: Synthetic oligonucleotide
aguauccaaaggaaaauuc

SEQ ID NO: 1365767 - RNA, 19 nt, Artificial Sequence
  Description of Artificial Sequence: Synthetic oligonucleotide
ucuucgaccaguauccaaa

SEQ ID NO: 1365768 - RNA, 19 nt, Artificial Sequence
  Description of Artificial Sequence: Synthetic oligonucleotide
guagauaugugugaagagc

SEQ ID NO: 1365769 - RNA, 19 nt, Artificial Sequence
  Description of Artificial Sequence: Synthetic oligonucleotide
ucgacuggaaacaccagca

SEQ ID NO: 1365770 - RNA, 19 nt, Artificial Sequence
  Description of Artificial Sequence: Synthetic oligonucleotide
ucauuagcaggacuaacaa

SEQ ID NO: 1365771 - RNA, 19 nt, Artificial Sequence
  Description of Artificial Sequence: Synthetic oligonucleotide
agucccaucuuccuuugac

SEQ ID NO: 1365772 - RNA, 19 nt, Artificial Sequence
  Description of Artificial Sequence: Synthetic oligonucleotide
auaauccacccauuccucg

SEQ ID NO: 1365773 - RNA, 19 nt, Artificial Sequence
  Description of Artificial Sequence: Synthetic oligonucleotide
ucuuucaguaaguuucucu

SEQ ID NO: 1365774 - RNA, 19 nt, Artificial Sequence
  Description of Artificial Sequence: Synthetic oligonucleotide
uuuucgcuugucuauaauc

SEQ ID NO: 1365775 - RNA, 19 nt, Artificial Sequence
  Description of Artificial Sequence: Synthetic oligonucleotide
cuucauaauggaugggccc

SEQ ID NO: 1365776 - RNA, 19 nt, Artificial Sequence
  Description of Artificial Sequence: Synthetic oligonucleotide
ucugauggcaaaagcucag

SEQ ID NO: 1365777 - RNA, 19 nt, Artificial Sequence
  Description of Artificial Sequence: Synthetic oligonucleotide
uuuagucaucuuuucauau

SEQ ID NO: 1365778 - RNA, 19 nt, Artificial Sequence
  Description of Artificial Sequence: Synthetic oligonucleotide
aaaauacccaacaccaagu

SEQ ID NO: 1365779 - RNA, 19 nt, Artificial Sequence
  Description of Artificial Sequence: Synthetic oligonucleotide
ugcucgacuggaaacacca

SEQ ID NO: 1365780 - RNA, 19 nt, Artificial Sequence
  Description of Artificial Sequence: Synthetic oligonucleotide
gauguagauaugugugaag

SEQ ID NO: 1365781 - RNA, 19 nt, Artificial Sequence
  Description of Artificial Sequence: Synthetic oligonucleotide
gauacuuggcuucuuauua

SEQ ID NO: 1365782 - RNA, 19 nt, Artificial Sequence
  Description of Artificial Sequence: Synthetic oligonucleotide
ucuaccaacgaggaggcug

SEQ ID NO: 1365783 - RNA, 19 nt, Artificial Sequence
  Description of Artificial Sequence: Synthetic oligonucleotide
ucuucuuguuuucggaaga

SEQ ID NO: 1365784 - RNA, 19 nt, Artificial Sequence
  Description of Artificial Sequence: Synthetic oligonucleotide
uguguuucgagaaucucua

SEQ ID NO: 1365785 - RNA, 19 nt, Artificial Sequence
  Description of Artificial Sequence: Synthetic oligonucleotide
auaagauaucauaucaucu

SEQ ID NO: 1365786 - RNA, 19 nt, Artificial Sequence
  Description of Artificial Sequence: Synthetic oligonucleotide
uucuuauuaguugucuuug

SEQ ID NO: 1365787 - RNA, 19 nt, Artificial Sequence
  Description of Artificial Sequence: Synthetic oligonucleotide
uuucugucgaagcuuggca

SEQ ID NO: 1365788 - RNA, 19 nt, Artificial Sequence
  Description of Artificial Sequence: Synthetic oligonucleotide
uaaucugaccucaagcaua

SEQ ID NO: 1365789 - RNA, 19 nt, Artificial Sequence
  Description of Artificial Sequence: Synthetic oligonucleotide
ucuacuuugcuggucuggg

SEQ ID NO: 1365790 - RNA, 19 nt, Artificial Sequence
  Description of Artificial Sequence: Synthetic oligonucleotide
cuuggcuucuuauuaguug

SEQ ID NO: 1365791 - RNA, 19 nt, Artificial Sequence
  Description of Artificial Sequence: Synthetic oligonucleotide
uucucaacucuuugucucg

SEQ ID NO: 1365792 - RNA, 19 nt, Artificial Sequence
  Description of Artificial Sequence: Synthetic oligonucleotide
ucucguuuuauucucugau

SEQ ID NO: 1365793 - RNA, 19 nt, Artificial Sequence
  Description of Artificial Sequence: Synthetic oligonucleotide
uuauuaguugucuuugguu

SEQ ID NO: 1365794 - RNA, 19 nt, Artificial Sequence
  Description of Artificial Sequence: Synthetic oligonucleotide
uccaugccaacuaaucuga

SEQ ID NO: 1365795 - RNA, 19 nt, Artificial Sequence
  Description of Artificial Sequence: Synthetic oligonucleotide
ucaugugacuuguuuauaa

SEQ ID NO: 1365796 - RNA, 19 nt, Artificial Sequence
  Description of Artificial Sequence: Synthetic oligonucleotide
cuuugucucgggcaaaggc

SEQ ID NO: 1365797 - RNA, 19 nt, Artificial Sequence
  Description of Artificial Sequence: Synthetic oligonucleotide
uucauaauggaugggcccc

SEQ ID NO: 1365798 - RNA, 19 nt, Artificial Sequence
  Description of Artificial Sequence: Synthetic oligonucleotide
ucaacucuuugucucgggc

SEQ ID NO: 1365799 - RNA, 19 nt, Artificial Sequence
  Description of Artificial Sequence: Synthetic oligonucleotide
cugaugacacaaauggaac

SEQ ID NO: 1365800 - RNA, 19 nt, Artificial Sequence
  Description of Artificial Sequence: Synthetic oligonucleotide
auacuuggcuucuuauuag

SEQ ID NO: 1365801 - RNA, 19 nt, Artificial Sequence
  Description of Artificial Sequence: Synthetic oligonucleotide
aacucaguucugucaugac

SEQ ID NO: 1365802 - RNA, 19 nt, Artificial Sequence
  Description of Artificial Sequence: Synthetic oligonucleotide
agaaucucuaguggcaccg

SEQ ID NO: 1365803 - RNA, 19 nt, Artificial Sequence
  Description of Artificial Sequence: Synthetic oligonucleotide
agaucuggcaaguccuuuc

SEQ ID NO: 1365804 - RNA, 19 nt, Artificial Sequence
  Description of Artificial Sequence: Synthetic oligonucleotide
uucaaggucaugugacuug

SEQ ID NO: 1365805 - RNA, 19 nt, Artificial Sequence
  Description of Artificial Sequence: Synthetic oligonucleotide
ucugucgaagcuuggcaag

SEQ ID NO: 1365806 - RNA, 19 nt, Artificial Sequence
  Description of Artificial Sequence: Synthetic oligonucleotide
aaaagcucaguaacaucuc

SEQ ID NO: 1365807 - RNA, 19 nt, Artificial Sequence
  Description of Artificial Sequence: Synthetic oligonucleotide
aagaucuaccaacgaggag

SEQ ID NO: 1365808 - RNA, 19 nt, Artificial Sequence
  Description of Artificial Sequence: Synthetic oligonucleotide
auguagauaugugugaaga

SEQ ID NO: 1365809 - RNA, 19 nt, Artificial Sequence
  Description of Artificial Sequence: Synthetic oligonucleotide
aaauacccaacaccaaguu

SEQ ID NO: 1365810 - RNA, 19 nt, Artificial Sequence
  Description of Artificial Sequence: Synthetic oligonucleotide
cacauaauccacccauucc

SEQ ID NO: 1365811 - RNA, 19 nt, Artificial Sequence
  Description of Artificial Sequence: Synthetic oligonucleotide
uuucuuuucgcuugucuau

SEQ ID NO: 1365812 - RNA, 19 nt, Artificial Sequence
  Description of Artificial Sequence: Synthetic oligonucleotide
aaacucaguucugucauga

SEQ ID NO: 1365813 - RNA, 19 nt, Artificial Sequence
  Description of Artificial Sequence: Synthetic oligonucleotide
gugacuuguuuauaauaag

SEQ ID NO: 1365814 - RNA, 19 nt, Artificial Sequence
  Description of Artificial Sequence: Synthetic oligonucleotide
ugacacaaauggaaccagc

SEQ ID NO: 1365815 - RNA, 19 nt, Artificial Sequence
  Description of Artificial Sequence: Synthetic oligonucleotide
uuuucaaggucaugugacu

SEQ ID NO: 1365816 - RNA, 19 nt, Artificial Sequence
  Description of Artificial Sequence: Synthetic oligonucleotide
uucugaugacacaaaugga

SEQ ID NO: 1365817 - RNA, 19 nt, Artificial Sequence
  Description of Artificial Sequence: Synthetic oligonucleotide
gauggcaaaagcucaguaa

SEQ ID NO: 1365818 - RNA, 19 nt, Artificial Sequence
  Description of Artificial Sequence: Synthetic oligonucleotide
caugccaacuaaucugacc

SEQ ID NO: 1365819 - RNA, 19 nt, Artificial Sequence
  Description of Artificial Sequence: Synthetic oligonucleotide
ugucuauaaucuucugugu

SEQ ID NO: 1365820 - RNA, 19 nt, Artificial Sequence
  Description of Artificial Sequence: Synthetic oligonucleotide
uaugcauucuagggaaaag

SEQ ID NO: 1365821 - RNA, 19 nt, Artificial Sequence
  Description of Artificial Sequence: Synthetic oligonucleotide
uuuauccaucuccaauaga

SEQ ID NO: 1365822 - RNA, 19 nt, Artificial Sequence
  Description of Artificial Sequence: Synthetic oligonucleotide
aucaucuaguguuuggaaa

SEQ ID NO: 1365823 - RNA, 19 nt, Artificial Sequence
  Description of Artificial Sequence: Synthetic oligonucleotide
gaugguggggcaaacucag

SEQ ID NO: 1365824 - RNA, 19 nt, Artificial Sequence
  Description of Artificial Sequence: Synthetic oligonucleotide
ucaugacuucugaugacac

SEQ ID NO: 1365825 - RNA, 19 nt, Artificial Sequence
  Description of Artificial Sequence: Synthetic oligonucleotide
ggaaacaccagcauucugc

SEQ ID NO: 1365826 - RNA, 19 nt, Artificial Sequence
  Description of Artificial Sequence: Synthetic oligonucleotide
uucgaccaguauccaaagg

SEQ ID NO: 1365827 - RNA, 19 nt, Artificial Sequence
  Description of Artificial Sequence: Synthetic oligonucleotide
uucacgaagcaucucuaaa

SEQ ID NO: 1365828 - RNA, 19 nt, Artificial Sequence
  Description of Artificial Sequence: Synthetic oligonucleotide
uaauccacccauuccucgc

SEQ ID NO: 1365829 - RNA, 19 nt, Artificial Sequence
  Description of Artificial Sequence: Synthetic oligonucleotide
ugguucugauggcaaaagc

SEQ ID NO: 1365830 - RNA, 19 nt, Artificial Sequence
  Description of Artificial Sequence: Synthetic oligonucleotide
cuggcuacuaaaaggacca

SEQ ID NO: 1365831 - RNA, 19 nt, Artificial Sequence
  Description of Artificial Sequence: Synthetic oligonucleotide
uaguguuuggaaagugacu

SEQ ID NO: 1365832 - RNA, 19 nt, Artificial Sequence
  Description of Artificial Sequence: Synthetic oligonucleotide
acuguggaugcuugugagg

SEQ ID NO: 1365833 - RNA, 19 nt, Artificial Sequence
  Description of Artificial Sequence: Synthetic oligonucleotide
cucgacuggaaacaccagc

SEQ ID NO: 1365834 - RNA, 19 nt, Artificial Sequence
  Description of Artificial Sequence: Synthetic oligonucleotide
ugucgcugaaguucuuucc

SEQ ID NO: 1365835 - RNA, 19 nt, Artificial Sequence
  Description of Artificial Sequence: Synthetic oligonucleotide
ugcuuuucaaggucaugug

SEQ ID NO: 1365836 - RNA, 19 nt, Artificial Sequence
  Description of Artificial Sequence: Synthetic oligonucleotide
cuucuaacauagccuuucg

SEQ ID NO: 1365837 - RNA, 19 nt, Artificial Sequence
  Description of Artificial Sequence: Synthetic oligonucleotide
uuucucaugcagcgccggg

SEQ ID NO: 1365838 - RNA, 19 nt, Artificial Sequence
  Description of Artificial Sequence: Synthetic oligonucleotide
ggcaaaauacccaacacca

SEQ ID NO: 1365839 - RNA, 19 nt, Artificial Sequence
  Description of Artificial Sequence: Synthetic oligonucleotide
aauccacccauuccucgcu

SEQ ID NO: 1365840 - RNA, 19 nt, Artificial Sequence
  Description of Artificial Sequence: Synthetic oligonucleotide
auaucaucuaguguuugga

SEQ ID NO: 1365841 - RNA, 19 nt, Artificial Sequence
  Description of Artificial Sequence: Synthetic oligonucleotide
ugucuaaagucuucugcuc

SEQ ID NO: 1365842 - RNA, 19 nt, Artificial Sequence
  Description of Artificial Sequence: Synthetic oligonucleotide
guuuggaaagugacugugg

SEQ ID NO: 1365843 - RNA, 19 nt, Artificial Sequence
  Description of Artificial Sequence: Synthetic oligonucleotide
uucuacuuugcuggucugg

SEQ ID NO: 1365844 - RNA, 19 nt, Artificial Sequence
  Description of Artificial Sequence: Synthetic oligonucleotide
auaugugugaagagcuggg

SEQ ID NO: 1365845 - RNA, 19 nt, Artificial Sequence
  Description of Artificial Sequence: Synthetic oligonucleotide
augacuucugaugacacaa

SEQ ID NO: 1365846 - RNA, 19 nt, Artificial Sequence
  Description of Artificial Sequence: Synthetic oligonucleotide
ucgcuuuuccuuuauguuu

SEQ ID NO: 1365847 - RNA, 19 nt, Artificial Sequence
  Description of Artificial Sequence: Synthetic oligonucleotide
agucucgcuucuaacauag

SEQ ID NO: 1365848 - RNA, 19 nt, Artificial Sequence
  Description of Artificial Sequence: Synthetic oligonucleotide
uccuccaugccaacuaauc

SEQ ID NO: 1365849 - RNA, 19 nt, Artificial Sequence
  Description of Artificial Sequence: Synthetic oligonucleotide
uuccccaagucacucggug

SEQ ID NO: 1365850 - RNA, 19 nt, Artificial Sequence
  Description of Artificial Sequence: Synthetic oligonucleotide
ucugggccacaugaggugg

SEQ ID NO: 1365851 - RNA, 19 nt, Artificial Sequence
  Description of Artificial Sequence: Synthetic oligonucleotide
gcuuuaagaucuaccaacg

SEQ ID NO: 1365852 - RNA, 19 nt, Artificial Sequence
  Description of Artificial Sequence: Synthetic oligonucleotide
uucgcuuuuccuuuauguu

SEQ ID NO: 1365853 - RNA, 19 nt, Artificial Sequence
  Description of Artificial Sequence: Synthetic oligonucleotide
uccaauagaucuggcaagu

SEQ ID NO: 1365854 - RNA, 19 nt, Artificial Sequence
  Description of Artificial Sequence: Synthetic oligonucleotide
uuuucauuagcaggacuaa

SEQ ID NO: 1365855 - RNA, 19 nt, Artificial Sequence
  Description of Artificial Sequence: Synthetic oligonucleotide
guucugauggcaaaagcuc

SEQ ID NO: 1365856 - RNA, 19 nt, Artificial Sequence
  Description of Artificial Sequence: Synthetic oligonucleotide
gagaaucucuaguggcacc

SEQ ID NO: 1365857 - RNA, 19 nt, Artificial Sequence
  Description of Artificial Sequence: Synthetic oligonucleotide
uucucguuuuauucucuga

SEQ ID NO: 1365858 - RNA, 19 nt, Artificial Sequence
  Description of Artificial Sequence: Synthetic oligonucleotide
cucguuuuauucucugauc

SEQ ID NO: 1365859 - RNA, 19 nt, Artificial Sequence
  Description of Artificial Sequence: Synthetic oligonucleotide
ucucugcucgacuggaaac

SEQ ID NO: 1365860 - RNA, 19 nt, Artificial Sequence
  Description of Artificial Sequence: Synthetic oligonucleotide
aucucuaguggcaccgagc

SEQ ID NO: 1365861 - RNA, 19 nt, Artificial Sequence
  Description of Artificial Sequence: Synthetic oligonucleotide
cuacuaaaaggaccaguuc

SEQ ID NO: 1365862 - RNA, 19 nt, Artificial Sequence
  Description of Artificial Sequence: Synthetic oligonucleotide
caauuccccaagucacucg

SEQ ID NO: 1365863 - RNA, 19 nt, Artificial Sequence
  Description of Artificial Sequence: Synthetic oligonucleotide
ugcuugguccagauacuug

SEQ ID NO: 1365864 - RNA, 19 nt, Artificial Sequence
  Description of Artificial Sequence: Synthetic oligonucleotide
acuucugaugacacaaaug

SEQ ID NO: 1365865 - RNA, 19 nt, Artificial Sequence
  Description of Artificial Sequence: Synthetic oligonucleotide
ucgaagcuuggcaagucuc

SEQ ID NO: 1365866 - RNA, 19 nt, Artificial Sequence
  Description of Artificial Sequence: Synthetic oligonucleotide
ucgcuucuaacauagccuu

SEQ ID NO: 1365867 - RNA, 19 nt, Artificial Sequence
  Description of Artificial Sequence: Synthetic oligonucleotide
agauacuuggcuucuuauu

SEQ ID NO: 1365868 - RNA, 19 nt, Artificial Sequence
  Description of Artificial Sequence: Synthetic oligonucleotide
uuucauuagcaggacuaac

SEQ ID NO: 1365869 - RNA, 19 nt, Artificial Sequence
  Description of Artificial Sequence: Synthetic oligonucleotide
uuccucgucuggaaagucu

SEQ ID NO: 1365870 - RNA, 19 nt, Artificial Sequence
  Description of Artificial Sequence: Synthetic oligonucleotide
aaucugaccucaagcauau

SEQ ID NO: 1365871 - RNA, 19 nt, Artificial Sequence
  Description of Artificial Sequence: Synthetic oligonucleotide
aagcuuggcaagucucgcu

SEQ ID NO: 1365872 - RNA, 19 nt, Artificial Sequence
  Description of Artificial Sequence: Synthetic oligonucleotide
ucaagcuucuguucagcau

SEQ ID NO: 1365873 - RNA, 19 nt, Artificial Sequence
  Description of Artificial Sequence: Synthetic oligonucleotide
acgaggaggcuguaacauc

SEQ ID NO: 1365874 - RNA, 19 nt, Artificial Sequence
  Description of Artificial Sequence: Synthetic oligonucleotide
caacuaaucugaccucaag

SEQ ID NO: 1365875 - RNA, 19 nt, Artificial Sequence
  Description of Artificial Sequence: Synthetic oligonucleotide
ggaaagugacuguggaugc

SEQ ID NO: 1365876 - RNA, 19 nt, Artificial Sequence
  Description of Artificial Sequence: Synthetic oligonucleotide
agccuuugguucugauggc

SEQ ID NO: 1365877 - RNA, 19 nt, Artificial Sequence
  Description of Artificial Sequence: Synthetic oligonucleotide
augcauucuagggaaaaga

SEQ ID NO: 1365878 - RNA, 19 nt, Artificial Sequence
  Description of Artificial Sequence: Synthetic oligonucleotide
uccucgucuggaaagucuc

SEQ ID NO: 1365879 - RNA, 19 nt, Artificial Sequence
  Description of Artificial Sequence: Synthetic oligonucleotide
uggaaacaccagcauucug

SEQ ID NO: 1365880 - RNA, 19 nt, Artificial Sequence
  Description of Artificial Sequence: Synthetic oligonucleotide
uguucacgaagcaucucua

SEQ ID NO: 1365881 - RNA, 19 nt, Artificial Sequence
  Description of Artificial Sequence: Synthetic oligonucleotide
cuucgaccaguauccaaag

SEQ ID NO: 1365882 - RNA, 19 nt, Artificial Sequence
  Description of Artificial Sequence: Synthetic oligonucleotide
uacccaacaccaaguugcc

SEQ ID NO: 1365883 - RNA, 19 nt, Artificial Sequence
  Description of Artificial Sequence: Synthetic oligonucleotide
aagcucaguaacaucucca

SEQ ID NO: 1365884 - RNA, 19 nt, Artificial Sequence
  Description of Artificial Sequence: Synthetic oligonucleotide
agcucaguaacaucuccau

SEQ ID NO: 1365885 - RNA, 19 nt, Artificial Sequence
  Description of Artificial Sequence: Synthetic oligonucleotide
ugucaugacuucugaugac

SEQ ID NO: 1365886 - RNA, 19 nt, Artificial Sequence
  Description of Artificial Sequence: Synthetic oligonucleotide
aaagugacuguggaugcuu

SEQ ID NO: 1365887 - RNA, 19 nt, Artificial Sequence
  Description of Artificial Sequence: Synthetic oligonucleotide
aacauagccuuucgcuuuu

SEQ ID NO: 1365888 - RNA, 19 nt, Artificial Sequence
  Description of Artificial Sequence: Synthetic oligonucleotide
ugcuuugucuaaagucuuc

SEQ ID NO: 1365889 - RNA, 19 nt, Artificial Sequence
  Description of Artificial Sequence: Synthetic oligonucleotide
agauguagauaugugugaa

SEQ ID NO: 1365890 - RNA, 19 nt, Artificial Sequence
  Description of Artificial Sequence: Synthetic oligonucleotide
agauaucauaucaucuagu

SEQ ID NO: 1365891 - RNA, 19 nt, Artificial Sequence
  Description of Artificial Sequence: Synthetic oligonucleotide
agguacauguccuccacuu

SEQ ID NO: 1365892 - RNA, 19 nt, Artificial Sequence
  Description of Artificial Sequence: Synthetic oligonucleotide
aauucgaugguggggcaaa

SEQ ID NO: 1365893 - RNA, 19 nt, Artificial Sequence
  Description of Artificial Sequence: Synthetic oligonucleotide
gacuuguuuauaauaagau

SEQ ID NO: 1365894 - RNA, 19 nt, Artificial Sequence
  Description of Artificial Sequence: Synthetic oligonucleotide
uggaugggccccauuggcu

SEQ ID NO: 1365895 - RNA, 19 nt, Artificial Sequence
  Description of Artificial Sequence: Synthetic oligonucleotide
ugacuguuucuucgaccag

SEQ ID NO: 1365896 - RNA, 19 nt, Artificial Sequence
  Description of Artificial Sequence: Synthetic oligonucleotide
auuuucccgaaugucuuca

SEQ ID NO: 1365897 - RNA, 19 nt, Artificial Sequence
  Description of Artificial Sequence: Synthetic oligonucleotide
cagauguagauauguguga

SEQ ID NO: 1365898 - RNA, 19 nt, Artificial Sequence
  Description of Artificial Sequence: Synthetic oligonucleotide
aggucaugugacuuguuua

SEQ ID NO: 1365899 - RNA, 19 nt, Artificial Sequence
  Description of Artificial Sequence: Synthetic oligonucleotide
uuaguugucuuugguuuuc

SEQ ID NO: 1365900 - RNA, 19 nt, Artificial Sequence
  Description of Artificial Sequence: Synthetic oligonucleotide
ucuuugucucgggcaaagg

SEQ ID NO: 1365901 - RNA, 19 nt, Artificial Sequence
  Description of Artificial Sequence: Synthetic oligonucleotide
uuucaaggucaugugacuu

SEQ ID NO: 1365902 - RNA, 19 nt, Artificial Sequence
  Description of Artificial Sequence: Synthetic oligonucleotide
ucugaucuguugucuguuc

SEQ ID NO: 1365903 - RNA, 19 nt, Artificial Sequence
  Description of Artificial Sequence: Synthetic oligonucleotide
ucccuugcuuugucuaaag

SEQ ID NO: 1365904 - RNA, 19 nt, Artificial Sequence
  Description of Artificial Sequence: Synthetic oligonucleotide
gaaaauucuuuuccucggu

SEQ ID NO: 1365905 - RNA, 19 nt, Artificial Sequence
  Description of Artificial Sequence: Synthetic oligonucleotide
ucucaugcagcgccgggau

SEQ ID NO: 1365906 - RNA, 19 nt, Artificial Sequence
  Description of Artificial Sequence: Synthetic oligonucleotide
aagucucgcuucuaacaua

SEQ ID NO: 1365907 - RNA, 19 nt, Artificial Sequence
  Description of Artificial Sequence: Synthetic oligonucleotide
auaauucgaugguggggca

SEQ ID NO: 1365908 - RNA, 19 nt, Artificial Sequence
  Description of Artificial Sequence: Synthetic oligonucleotide
cuuuaagaucuaccaacga

SEQ ID NO: 1365909 - RNA, 19 nt, Artificial Sequence
  Description of Artificial Sequence: Synthetic oligonucleotide
gcauaugcauucuagggaa

SEQ ID NO: 1365910 - RNA, 19 nt, Artificial Sequence
  Description of Artificial Sequence: Synthetic oligonucleotide
uggcaaguccuuucucaug

SEQ ID NO: 1365911 - RNA, 19 nt, Artificial Sequence
  Description of Artificial Sequence: Synthetic oligonucleotide
uucgcuugucuauaaucuu

SEQ ID NO: 1365912 - RNA, 19 nt, Artificial Sequence
  Description of Artificial Sequence: Synthetic oligonucleotide
cccaacaccaaguugccug

SEQ ID NO: 1365913 - RNA, 19 nt, Artificial Sequence
  Description of Artificial Sequence: Synthetic oligonucleotide
guauccaaaggaaaauucu

SEQ ID NO: 1365914 - RNA, 19 nt, Artificial Sequence
  Description of Artificial Sequence: Synthetic oligonucleotide
uucuucgaccaguauccaa

SEQ ID NO: 1365915 - RNA, 19 nt, Artificial Sequence
  Description of Artificial Sequence: Synthetic oligonucleotide
acccauuccucgcuggggu

SEQ ID NO: 1365916 - RNA, 19 nt, Artificial Sequence
  Description of Artificial Sequence: Synthetic oligonucleotide
ucucgcucagcccggaguu

SEQ ID NO: 1365917 - RNA, 19 nt, Artificial Sequence
  Description of Artificial Sequence: Synthetic oligonucleotide
caacucuuugucucgggca

SEQ ID NO: 1365918 - RNA, 19 nt, Artificial Sequence
  Description of Artificial Sequence: Synthetic oligonucleotide
auaugcauucuagggaaaa

SEQ ID NO: 1365919 - RNA, 19 nt, Artificial Sequence
  Description of Artificial Sequence: Synthetic oligonucleotide
acucucggauguguggcac

SEQ ID NO: 1365920 - RNA, 19 nt, Artificial Sequence
  Description of Artificial Sequence: Synthetic oligonucleotide
cuuauuaguugucuuuggu

SEQ ID NO: 1365921 - RNA, 19 nt, Artificial Sequence
  Description of Artificial Sequence: Synthetic oligonucleotide
agauaugugugaagagcug

SEQ ID NO: 1365922 - RNA, 19 nt, Artificial Sequence
  Description of Artificial Sequence: Synthetic oligonucleotide
agugacuguggaugcuugu

SEQ ID NO: 1365923 - RNA, 19 nt, Artificial Sequence
  Description of Artificial Sequence: Synthetic oligonucleotide
uucugucaugacuucugau

SEQ ID NO: 1365924 - RNA, 19 nt, Artificial Sequence
  Description of Artificial Sequence: Synthetic oligonucleotide
uuuccucggucccacucuc

SEQ ID NO: 1365925 - RNA, 19 nt, Artificial Sequence
  Description of Artificial Sequence: Synthetic oligonucleotide
cagcccggaguucugacug

SEQ ID NO: 1365926 - RNA, 19 nt, Artificial Sequence
  Description of Artificial Sequence: Synthetic oligonucleotide
guguuucgagaaucucuag

SEQ ID NO: 1365927 - RNA, 19 nt, Artificial Sequence
  Description of Artificial Sequence: Synthetic oligonucleotide
aucucgcucagcccggagu

SEQ ID NO: 1365928 - RNA, 19 nt, Artificial Sequence
  Description of Artificial Sequence: Synthetic oligonucleotide
cugucgcugaaguucuuuc

SEQ ID NO: 1365929 - RNA, 19 nt, Artificial Sequence
  Description of Artificial Sequence: Synthetic oligonucleotide
gcuggcuacuaaaaggacc

SEQ ID NO: 1365930 - RNA, 19 nt, Artificial Sequence
  Description of Artificial Sequence: Synthetic oligonucleotide
ucuuugggaggagguaugu

SEQ ID NO: 1365931 - RNA, 19 nt, Artificial Sequence
  Description of Artificial Sequence: Synthetic oligonucleotide
gggcaaaggcaaaauaccc

SEQ ID NO: 1365932 - RNA, 19 nt, Artificial Sequence
  Description of Artificial Sequence: Synthetic oligonucleotide
cucgcuucuaacauagccu

SEQ ID NO: 1365933 - RNA, 19 nt, Artificial Sequence
  Description of Artificial Sequence: Synthetic oligonucleotide
cuuucucaugcagcgccgg

SEQ ID NO: 1365934 - RNA, 19 nt, Artificial Sequence
  Description of Artificial Sequence: Synthetic oligonucleotide
ucggugcugaucccacucu

SEQ ID NO: 1365935 - RNA, 19 nt, Artificial Sequence
  Description of Artificial Sequence: Synthetic oligonucleotide
ucugcucgacuggaaacac

SEQ ID NO: 1365936 - RNA, 19 nt, Artificial Sequence
  Description of Artificial Sequence: Synthetic oligonucleotide
cuguguuucgagaaucucu

SEQ ID NO: 1365937 - RNA, 19 nt, Artificial Sequence
  Description of Artificial Sequence: Synthetic oligonucleotide
uucuuuuccucggucccac

SEQ ID NO: 1365938 - RNA, 19 nt, Artificial Sequence
  Description of Artificial Sequence: Synthetic oligonucleotide
ucagcccggaguucugacu

SEQ ID NO: 1365939 - RNA, 19 nt, Artificial Sequence
  Description of Artificial Sequence: Synthetic oligonucleotide
cauuagcaggacuaacaaa

SEQ ID NO: 1365940 - RNA, 19 nt, Artificial Sequence
  Description of Artificial Sequence: Synthetic oligonucleotide
cucaagcuucuguucagca

SEQ ID NO: 1365941 - RNA, 19 nt, Artificial Sequence
  Description of Artificial Sequence: Synthetic oligonucleotide
cucgcuggggucuuuggga

SEQ ID NO: 1365942 - RNA, 19 nt, Artificial Sequence
  Description of Artificial Sequence: Synthetic oligonucleotide
cuaaaguuuucauuugcuu

SEQ ID NO: 1365943 - RNA, 19 nt, Artificial Sequence
  Description of Artificial Sequence: Synthetic oligonucleotide
cugcucgacuggaaacacc

SEQ ID NO: 1365944 - RNA, 19 nt, Artificial Sequence
  Description of Artificial Sequence: Synthetic oligonucleotide
ccaacgaggaggcuguaac

SEQ ID NO: 1365945 - RNA, 19 nt, Artificial Sequence
  Description of Artificial Sequence: Synthetic oligonucleotide
guccacauaauccacccau

SEQ ID NO: 1365946 - RNA, 19 nt, Artificial Sequence
  Description of Artificial Sequence: Synthetic oligonucleotide
cgggcaaaggcaaaauacc

SEQ ID NO: 1365947 - RNA, 19 nt, Artificial Sequence
  Description of Artificial Sequence: Synthetic oligonucleotide
cuaacauagccuuucgcuu

SEQ ID NO: 1365948 - RNA, 19 nt, Artificial Sequence
  Description of Artificial Sequence: Synthetic oligonucleotide
ccgggaucggcccaaagag

SEQ ID NO: 1365949 - RNA, 19 nt, Artificial Sequence
  Description of Artificial Sequence: Synthetic oligonucleotide
gaucggcccaaagagucca

SEQ ID NO: 1365950 - RNA, 19 nt, Artificial Sequence
  Description of Artificial Sequence: Synthetic oligonucleotide
ugccaacuaaucugaccuc

SEQ ID NO: 1365951 - RNA, 19 nt, Artificial Sequence
  Description of Artificial Sequence: Synthetic oligonucleotide
ggccucauuuucccgaaug

SEQ ID NO: 1365952 - RNA, 19 nt, Artificial Sequence
  Description of Artificial Sequence: Synthetic oligonucleotide
auucgaugguggggcaaac

SEQ ID NO: 1365953 - RNA, 19 nt, Artificial Sequence
  Description of Artificial Sequence: Synthetic oligonucleotide
ggaagagcucagcuuuaag

SEQ ID NO: 1365954 - RNA, 19 nt, Artificial Sequence
  Description of Artificial Sequence: Synthetic oligonucleotide
cuucuacuuugcuggucug

SEQ ID NO: 1365955 - RNA, 19 nt, Artificial Sequence
  Description of Artificial Sequence: Synthetic oligonucleotide
uaauucgaugguggggcaa

SEQ ID NO: 1365956 - RNA, 19 nt, Artificial Sequence
  Description of Artificial Sequence: Synthetic oligonucleotide
gaccaguauccaaaggaaa

SEQ ID NO: 1365957 - RNA, 19 nt, Artificial Sequence
  Description of Artificial Sequence: Synthetic oligonucleotide
acuuccucgucuggaaagu

SEQ ID NO: 1365958 - RNA, 19 nt, Artificial Sequence
  Description of Artificial Sequence: Synthetic oligonucleotide
uuucuucgaccaguaucca

SEQ ID NO: 1365959 - RNA, 19 nt, Artificial Sequence
  Description of Artificial Sequence: Synthetic oligonucleotide
accgagcaccuccauuucu

SEQ ID NO: 1365960 - RNA, 19 nt, Artificial Sequence
  Description of Artificial Sequence: Synthetic oligonucleotide
cuguucacgaagcaucucu

SEQ ID NO: 1365961 - RNA, 19 nt, Artificial Sequence
  Description of Artificial Sequence: Synthetic oligonucleotide
guucacgaagcaucucuaa

SEQ ID NO: 1365962 - RNA, 19 nt, Artificial Sequence
  Description of Artificial Sequence: Synthetic oligonucleotide
ucauauaauuuggccuuuu

SEQ ID NO: 1365963 - RNA, 19 nt, Artificial Sequence
  Description of Artificial Sequence: Synthetic oligonucleotide
cagagccagauguagauau

SEQ ID NO: 1365964 - RNA, 19 nt, Artificial Sequence
  Description of Artificial Sequence: Synthetic oligonucleotide
cuugugaggggcugucaga

SEQ ID NO: 1365965 - RNA, 19 nt, Artificial Sequence
  Description of Artificial Sequence: Synthetic oligonucleotide
guccuuccuuuccuggaug

SEQ ID NO: 1365966 - RNA, 19 nt, Artificial Sequence
  Description of Artificial Sequence: Synthetic oligonucleotide
cacgaagcaucucuaaagu

SEQ ID NO: 1365967 - RNA, 19 nt, Artificial Sequence
  Description of Artificial Sequence: Synthetic oligonucleotide
cccgaaugucuucauaaug

SEQ ID NO: 1365968 - RNA, 19 nt, Artificial Sequence
  Description of Artificial Sequence: Synthetic oligonucleotide
agccagauguagauaugug

SEQ ID NO: 1365969 - RNA, 19 nt, Artificial Sequence
  Description of Artificial Sequence: Synthetic oligonucleotide
agcaauuccccaagucacu

SEQ ID NO: 1365970 - RNA, 19 nt, Artificial Sequence
  Description of Artificial Sequence: Synthetic oligonucleotide
cuggaugaugacuucuacu

SEQ ID NO: 1365971 - RNA, 19 nt, Artificial Sequence
  Description of Artificial Sequence: Synthetic oligonucleotide
gagccagauguagauaugu

SEQ ID NO: 1365972 - RNA, 19 nt, Artificial Sequence
  Description of Artificial Sequence: Synthetic oligonucleotide
gaucucgcucagcccggag

SEQ ID NO: 1365973 - RNA, 19 nt, Artificial Sequence
  Description of Artificial Sequence: Synthetic oligonucleotide
cuaaucugaccucaagcau

SEQ ID NO: 1365974 - RNA, 19 nt, Artificial Sequence
  Description of Artificial Sequence: Synthetic oligonucleotide
ucggaagagcucagcuuua

SEQ ID NO: 1365975 - RNA, 19 nt, Artificial Sequence
  Description of Artificial Sequence: Synthetic oligonucleotide
uucccuugcuuugucuaaa

SEQ ID NO: 1365976 - RNA, 19 nt, Artificial Sequence
  Description of Artificial Sequence: Synthetic oligonucleotide
ucagagccagauguagaua

SEQ ID NO: 1365977 - RNA, 19 nt, Artificial Sequence
  Description of Artificial Sequence: Synthetic oligonucleotide
ugucgaagcuuggcaaguc

SEQ ID NO: 1365978 - RNA, 19 nt, Artificial Sequence
  Description of Artificial Sequence: Synthetic oligonucleotide
cacucggugcugaucccac

SEQ ID NO: 1365979 - RNA, 19 nt, Artificial Sequence
  Description of Artificial Sequence: Synthetic oligonucleotide
uggcuacuaaaaggaccag

SEQ ID NO: 1365980 - RNA, 19 nt, Artificial Sequence
  Description of Artificial Sequence: Synthetic oligonucleotide
gcauucuagggaaaagaca

SEQ ID NO: 1365981 - RNA, 19 nt, Artificial Sequence
  Description of Artificial Sequence: Synthetic oligonucleotide
ucgucuggaaagucuccuu

SEQ ID NO: 1365982 - RNA, 19 nt, Artificial Sequence
  Description of Artificial Sequence: Synthetic oligonucleotide
gggaucggcccaaagaguc

SEQ ID NO: 1365983 - RNA, 19 nt, Artificial Sequence
  Description of Artificial Sequence: Synthetic oligonucleotide
cucaugucuucagauaaua

SEQ ID NO: 1365984 - RNA, 19 nt, Artificial Sequence
  Description of Artificial Sequence: Synthetic oligonucleotide
cucagcccggaguucugac

SEQ ID NO: 1365985 - RNA, 19 nt, Artificial Sequence
  Description of Artificial Sequence: Synthetic oligonucleotide
ucgcucagcccggaguucu

SEQ ID NO: 1365986 - RNA, 19 nt, Artificial Sequence
  Description of Artificial Sequence: Synthetic oligonucleotide
ugucucgggcaaaggcaaa

SEQ ID NO: 1365987 - RNA, 19 nt, Artificial Sequence
  Description of Artificial Sequence: Synthetic oligonucleotide
gacuucuacuuugcugguc

SEQ ID NO: 1365988 - RNA, 19 nt, Artificial Sequence
  Description of Artificial Sequence: Synthetic oligonucleotide
ucucgggcaaaggcaaaau

SEQ ID NO: 1365989 - RNA, 19 nt, Artificial Sequence
  Description of Artificial Sequence: Synthetic oligonucleotide
gccagauguagauaugugu

SEQ ID NO: 1365990 - RNA, 19 nt, Artificial Sequence
  Description of Artificial Sequence: Synthetic oligonucleotide
cuaccaacgaggaggcugu

SEQ ID NO: 1365991 - RNA, 19 nt, Artificial Sequence
  Description of Artificial Sequence: Synthetic oligonucleotide
caccuccauuucuuuucgc

SEQ ID NO: 1365992 - RNA, 19 nt, Artificial Sequence
  Description of Artificial Sequence: Synthetic oligonucleotide
ggucaugugacuuguuuau

SEQ ID NO: 1365993 - RNA, 19 nt, Artificial Sequence
  Description of Artificial Sequence: Synthetic oligonucleotide
ccuuucucaugcagcgccg

SEQ ID NO: 1365994 - RNA, 19 nt, Artificial Sequence
  Description of Artificial Sequence: Synthetic oligonucleotide
caagucucgcuucuaacau

SEQ ID NO: 1365995 - RNA, 19 nt, Artificial Sequence
  Description of Artificial Sequence: Synthetic oligonucleotide
ugggaggagguaugucuuu

SEQ ID NO: 1365996 - RNA, 19 nt, Artificial Sequence
  Description of Artificial Sequence: Synthetic oligonucleotide
ucggcccaaagaguccaca

SEQ ID NO: 1365997 - RNA, 19 nt, Artificial Sequence
  Description of Artificial Sequence: Synthetic oligonucleotide
cguuuuauucucugaucug

SEQ ID NO: 1365998 - RNA, 19 nt, Artificial Sequence
  Description of Artificial Sequence: Synthetic oligonucleotide
ugugaagagcuggguuccu

SEQ ID NO: 1365999 - RNA, 19 nt, Artificial Sequence
  Description of Artificial Sequence: Synthetic oligonucleotide
gucacucggugcugauccc

SEQ ID NO: 1366000 - RNA, 19 nt, Artificial Sequence
  Description of Artificial Sequence: Synthetic oligonucleotide
cacuccaggcuuggugucc

SEQ ID NO: 1366001 - RNA, 19 nt, Artificial Sequence
  Description of Artificial Sequence: Synthetic oligonucleotide
gaaucucuaguggcaccga

SEQ ID NO: 1366002 - RNA, 19 nt, Artificial Sequence
  Description of Artificial Sequence: Synthetic oligonucleotide
cuuugcuggucugggccac

SEQ ID NO: 1366003 - RNA, 19 nt, Artificial Sequence
  Description of Artificial Sequence: Synthetic oligonucleotide
ggugcugaucccacucugc

SEQ ID NO: 1366004 - RNA, 19 nt, Artificial Sequence
  Description of Artificial Sequence: Synthetic oligonucleotide
gccaacuaaucugaccuca

SEQ ID NO: 1366005 - RNA, 19 nt, Artificial Sequence
  Description of Artificial Sequence: Synthetic oligonucleotide
acucggugcugaucccacu

SEQ ID NO: 1366006 - RNA, 19 nt, Artificial Sequence
  Description of Artificial Sequence: Synthetic oligonucleotide
gaaagugacuguggaugcu

SEQ ID NO: 1366007 - RNA, 19 nt, Artificial Sequence
  Description of Artificial Sequence: Synthetic oligonucleotide
auagaucuggcaaguccuu

SEQ ID NO: 1366008 - RNA, 19 nt, Artificial Sequence
  Description of Artificial Sequence: Synthetic oligonucleotide
uuccucgcuggggucuuug

SEQ ID NO: 1366009 - RNA, 19 nt, Artificial Sequence
  Description of Artificial Sequence: Synthetic oligonucleotide
cuuccucgucuggaaaguc

SEQ ID NO: 1366010 - RNA, 19 nt, Artificial Sequence
  Description of Artificial Sequence: Synthetic oligonucleotide
gcucaguaacaucuccauc

SEQ ID NO: 1366011 - RNA, 19 nt, Artificial Sequence
  Description of Artificial Sequence: Synthetic oligonucleotide
cucgggcaaaggcaaaaua

SEQ ID NO: 1366012 - RNA, 19 nt, Artificial Sequence
  Description of Artificial Sequence: Synthetic oligonucleotide
uuugcuggucugggccaca

SEQ ID NO: 1366013 - RNA, 19 nt, Artificial Sequence
  Description of Artificial Sequence: Synthetic oligonucleotide
gcuacuaaaaggaccaguu

SEQ ID NO: 1366014 - RNA, 19 nt, Artificial Sequence
  Description of Artificial Sequence: Synthetic oligonucleotide
ggaggcuguaacauccaga

SEQ ID NO: 1366015 - RNA, 19 nt, Artificial Sequence
  Description of Artificial Sequence: Synthetic oligonucleotide
caacaccaaguugccuggc

SEQ ID NO: 1366016 - RNA, 19 nt, Artificial Sequence
  Description of Artificial Sequence: Synthetic oligonucleotide
ccacucucggauguguggc

SEQ ID NO: 1366017 - RNA, 19 nt, Artificial Sequence
  Description of Artificial Sequence: Synthetic oligonucleotide
caugcagcgccgggaucgg

SEQ ID NO: 1366018 - RNA, 19 nt, Artificial Sequence
  Description of Artificial Sequence: Synthetic oligonucleotide
cucggauguguggcacucc

SEQ ID NO: 1366019 - RNA, 19 nt, Artificial Sequence
  Description of Artificial Sequence: Synthetic oligonucleotide
ccucgcuggggucuuuggg

SEQ ID NO: 1366020 - RNA, 19 nt, Artificial Sequence
  Description of Artificial Sequence: Synthetic oligonucleotide
cagauacuuggcuucuuau

SEQ ID NO: 1366021 - RNA, 19 nt, Artificial Sequence
  Description of Artificial Sequence: Synthetic oligonucleotide
cuggaaagucuccuuuagu

SEQ ID NO: 1366022 - RNA, 19 nt, Artificial Sequence
  Description of Artificial Sequence: Synthetic oligonucleotide
gccgggaucggcccaaaga

SEQ ID NO: 1366023 - RNA, 19 nt, Artificial Sequence
  Description of Artificial Sequence: Synthetic oligonucleotide
gaugcuugugaggggcugu

SEQ ID NO: 1366024 - RNA, 19 nt, Artificial Sequence
  Description of Artificial Sequence: Synthetic oligonucleotide
ggcaaaagcucaguaacau

SEQ ID NO: 1366025 - RNA, 19 nt, Artificial Sequence
  Description of Artificial Sequence: Synthetic oligonucleotide
ggaucggcccaaagagucc

SEQ ID NO: 1366026 - RNA, 19 nt, Artificial Sequence
  Description of Artificial Sequence: Synthetic oligonucleotide
caccgagcaccuccauuuc

SEQ ID NO: 1366027 - RNA, 19 nt, Artificial Sequence
  Description of Artificial Sequence: Synthetic oligonucleotide
accaacgaggaggcuguaa

SEQ ID NO: 1366028 - RNA, 19 nt, Artificial Sequence
  Description of Artificial Sequence: Synthetic oligonucleotide
cucaugcagcgccgggauc

SEQ ID NO: 1366029 - RNA, 19 nt, Artificial Sequence
  Description of Artificial Sequence: Synthetic oligonucleotide
ccuggccucauuuucccga

SEQ ID NO: 1366030 - RNA, 19 nt, Artificial Sequence
  Description of Artificial Sequence: Synthetic oligonucleotide
ggaugcuugugaggggcug

SEQ ID NO: 1366031 - RNA, 19 nt, Artificial Sequence
  Description of Artificial Sequence: Synthetic oligonucleotide
uggccucauuuucccgaau

SEQ ID NO: 1366032 - RNA, 19 nt, Artificial Sequence
  Description of Artificial Sequence: Synthetic oligonucleotide
gucaugugacuuguuuaua

SEQ ID NO: 1366033 - RNA, 19 nt, Artificial Sequence
  Description of Artificial Sequence: Synthetic oligonucleotide
gucucgggcaaaggcaaaa

SEQ ID NO: 1366034 - RNA, 19 nt, Artificial Sequence
  Description of Artificial Sequence: Synthetic oligonucleotide
cuucucugcucgacuggaa

SEQ ID NO: 1366035 - RNA, 19 nt, Artificial Sequence
  Description of Artificial Sequence: Synthetic oligonucleotide
uccagauacuuggcuucuu

SEQ ID NO: 1366036 - RNA, 19 nt, Artificial Sequence
  Description of Artificial Sequence: Synthetic oligonucleotide
acccaacaccaaguugccu

SEQ ID NO: 1366037 - RNA, 19 nt, Artificial Sequence
  Description of Artificial Sequence: Synthetic oligonucleotide
cuuuucgcuugucuauaau

SEQ ID NO: 1366038 - RNA, 19 nt, Artificial Sequence
  Description of Artificial Sequence: Synthetic oligonucleotide
cgagaaucucuaguggcac

SEQ ID NO: 1366039 - RNA, 19 nt, Artificial Sequence
  Description of Artificial Sequence: Synthetic oligonucleotide
cucggucccacucucggau

SEQ ID NO: 1366040 - RNA, 19 nt, Artificial Sequence
  Description of Artificial Sequence: Synthetic oligonucleotide
gucucgcuucuaacauagc

SEQ ID NO: 1366041 - RNA, 19 nt, Artificial Sequence
  Description of Artificial Sequence: Synthetic oligonucleotide
gcagcgccgggaucggccc

SEQ ID NO: 1366042 - RNA, 19 nt, Artificial Sequence
  Description of Artificial Sequence: Synthetic oligonucleotide
gcuucuuauuaguugucuu

SEQ ID NO: 1366043 - RNA, 19 nt, Artificial Sequence
  Description of Artificial Sequence: Synthetic oligonucleotide
ggcuggcuacuaaaaggac

SEQ ID NO: 1366044 - RNA, 19 nt, Artificial Sequence
  Description of Artificial Sequence: Synthetic oligonucleotide
gcuugguguccuuccuuuc

SEQ ID NO: 1366045 - RNA, 19 nt, Artificial Sequence
  Description of Artificial Sequence: Synthetic oligonucleotide
cugggccacaugaggugga

SEQ ID NO: 1366046 - RNA, 19 nt, Artificial Sequence
  Description of Artificial Sequence: Synthetic oligonucleotide
ggcuucuuauuaguugucu

SEQ ID NO: 1366047 - RNA, 19 nt, Artificial Sequence
  Description of Artificial Sequence: Synthetic oligonucleotide
gccuuugguucugauggca

SEQ ID NO: 1366048 - RNA, 19 nt, Artificial Sequence
  Description of Artificial Sequence: Synthetic oligonucleotide
ggcuacuaaaaggaccagu

SEQ ID NO: 1366049 - RNA, 19 nt, Artificial Sequence
  Description of Artificial Sequence: Synthetic oligonucleotide
ggucuuugggaggagguau

SEQ ID NO: 1366050 - RNA, 19 nt, Artificial Sequence
  Description of Artificial Sequence: Synthetic oligonucleotide
cccauugcugucgcugaag

SEQ ID NO: 1366051 - RNA, 19 nt, Artificial Sequence
  Description of Artificial Sequence: Synthetic oligonucleotide
cgaugguggggcaaacuca

SEQ ID NO: 1366052 - RNA, 19 nt, Artificial Sequence
  Description of Artificial Sequence: Synthetic oligonucleotide
ccaacuaaucugaccucaa

SEQ ID NO: 1366053 - RNA, 19 nt, Artificial Sequence
  Description of Artificial Sequence: Synthetic oligonucleotide
ccuccaugccaacuaaucu

SEQ ID NO: 1366054 - RNA, 19 nt, Artificial Sequence
  Description of Artificial Sequence: Synthetic oligonucleotide
gaugggccccauuggcuuu

SEQ ID NO: 1366055 - RNA, 19 nt, Artificial Sequence
  Description of Artificial Sequence: Synthetic oligonucleotide
gcucgacuggaaacaccag

SEQ ID NO: 1366056 - RNA, 19 nt, Artificial Sequence
  Description of Artificial Sequence: Synthetic oligonucleotide
cugauggcaaaagcucagu

SEQ ID NO: 1366057 - RNA, 19 nt, Artificial Sequence
  Description of Artificial Sequence: Synthetic oligonucleotide
ccauggcuggcuacuaaaa

SEQ ID NO: 1366058 - RNA, 19 nt, Artificial Sequence
  Description of Artificial Sequence: Synthetic oligonucleotide
ccagauacuuggcuucuua

SEQ ID NO: 1366059 - RNA, 19 nt, Artificial Sequence
  Description of Artificial Sequence: Synthetic oligonucleotide
cucgcucagcccggaguuc

SEQ ID NO: 1366060 - RNA, 19 nt, Artificial Sequence
  Description of Artificial Sequence: Synthetic oligonucleotide
cugucgaagcuuggcaagu

SEQ ID NO: 1366061 - RNA, 19 nt, Artificial Sequence
  Description of Artificial Sequence: Synthetic oligonucleotide
cuggggucuuugggaggag

SEQ ID NO: 1366062 - RNA, 19 nt, Artificial Sequence
  Description of Artificial Sequence: Synthetic oligonucleotide
caguucugucaugacuucu

SEQ ID NO: 1366063 - RNA, 19 nt, Artificial Sequence
  Description of Artificial Sequence: Synthetic oligonucleotide
ggcuugguguccuuccuuu

SEQ ID NO: 1366064 - RNA, 19 nt, Artificial Sequence
  Description of Artificial Sequence: Synthetic oligonucleotide
cucucggauguguggcacu

SEQ ID NO: 1366065 - RNA, 19 nt, Artificial Sequence
  Description of Artificial Sequence: Synthetic oligonucleotide
ggucccacucucggaugug

SEQ ID NO: 1366066 - RNA, 19 nt, Artificial Sequence
  Description of Artificial Sequence: Synthetic oligonucleotide
cccauuccucgcugggguc

SEQ ID NO: 1366067 - RNA, 19 nt, Artificial Sequence
  Description of Artificial Sequence: Synthetic oligonucleotide
augggccccauuggcuuuu

SEQ ID NO: 1366068 - RNA, 19 nt, Artificial Sequence
  Description of Artificial Sequence: Synthetic oligonucleotide
agcgccgggaucggcccaa

SEQ ID NO: 1366069 - RNA, 19 nt, Artificial Sequence
  Description of Artificial Sequence: Synthetic oligonucleotide
uaccaacgaggaggcugua

SEQ ID NO: 1366070 - RNA, 19 nt, Artificial Sequence
  Description of Artificial Sequence: Synthetic oligonucleotide
cugcuugguccagauacuu

SEQ ID NO: 1366071 - RNA, 19 nt, Artificial Sequence
  Description of Artificial Sequence: Synthetic oligonucleotide
uaguggcaccgagcaccuc

SEQ ID NO: 1366072 - RNA, 19 nt, Artificial Sequence
  Description of Artificial Sequence: Synthetic oligonucleotide
caaggucaugugacuuguu

SEQ ID NO: 1366073 - RNA, 19 nt, Artificial Sequence
  Description of Artificial Sequence: Synthetic oligonucleotide
agccuucccugaagauuuu

SEQ ID NO: 1366074 - RNA, 19 nt, Artificial Sequence
  Description of Artificial Sequence: Synthetic oligonucleotide
ggaucucgcucagcccgga

SEQ ID NO: 1366075 - RNA, 19 nt, Artificial Sequence
  Description of Artificial Sequence: Synthetic oligonucleotide
cccaaagaguccacauaau

SEQ ID NO: 1366076 - RNA, 19 nt, Artificial Sequence
  Description of Artificial Sequence: Synthetic oligonucleotide
gggaggagguaugucuuuu

SEQ ID NO: 1366077 - RNA, 19 nt, Artificial Sequence
  Description of Artificial Sequence: Synthetic oligonucleotide
cccuugcuuugucuaaagu

SEQ ID NO: 1366078 - RNA, 19 nt, Artificial Sequence
  Description of Artificial Sequence: Synthetic oligonucleotide
ccgagcaccuccauuucuu

SEQ ID NO: 1366079 - RNA, 19 nt, Artificial Sequence
  Description of Artificial Sequence: Synthetic oligonucleotide
ccagagcaauuccccaagu

SEQ ID NO: 1366080 - RNA, 19 nt, Artificial Sequence
  Description of Artificial Sequence: Synthetic oligonucleotide
ccauuccucgcuggggucu

SEQ ID NO: 1366081 - RNA, 19 nt, Artificial Sequence
  Description of Artificial Sequence: Synthetic oligonucleotide
ccucaagcauaugcauucu

SEQ ID NO: 1366082 - RNA, 19 nt, Artificial Sequence
  Description of Artificial Sequence: Synthetic oligonucleotide
cgggaucggcccaaagagu

SEQ ID NO: 1366083 - RNA, 19 nt, Artificial Sequence
  Description of Artificial Sequence: Synthetic oligonucleotide
cgccgggaucggcccaaag

SEQ ID NO: 1366084 - RNA, 19 nt, Artificial Sequence
  Description of Artificial Sequence: Synthetic oligonucleotide
cggucccacucucggaugu

SEQ ID NO: 1366085 - RNA, 19 nt, Artificial Sequence
  Description of Artificial Sequence: Synthetic oligonucleotide
cgagcaccuccauuucuuu

SEQ ID NO: 1366086 - RNA, 19 nt, Artificial Sequence
  Description of Artificial Sequence: Synthetic oligonucleotide
cccggaguucugacuguuu

SEQ ID NO: 1366087 - RNA, 19 nt, Artificial Sequence
  Description of Artificial Sequence: Synthetic oligonucleotide
gcccggaguucugacuguu

SEQ ID NO: 1366088 - RNA, 19 nt, Artificial Sequence
  Description of Artificial Sequence: Synthetic oligonucleotide
aaagcaaccagguacgugc

SEQ ID NO: 1366089 - RNA, 19 nt, Artificial Sequence
  Description of Artificial Sequence: Synthetic oligonucleotide
uaaauaacuacuuacugcc

SEQ ID NO: 1366090 - RNA, 19 nt, Artificial Sequence
  Description of Artificial Sequence: Synthetic oligonucleotide
gacacuaagaaauaaaaca

SEQ ID NO: 1366091 - RNA, 19 nt, Artificial Sequence
  Description of Artificial Sequence: Synthetic oligonucleotide
gaaacaagugaguugaucc

SEQ ID NO: 1366092 - RNA, 19 nt, Artificial Sequence
  Description of Artificial Sequence: Synthetic oligonucleotide
uggguauugaauuucaaag

SEQ ID NO: 1366093 - RNA, 19 nt, Artificial Sequence
  Description of Artificial Sequence: Synthetic oligonucleotide
gauucuuugacauccacug

SEQ ID NO: 1366094 - RNA, 19 nt, Artificial Sequence
  Description of Artificial Sequence: Synthetic oligonucleotide
  modified_base (4)..(4): a, c, u, g, unknown or other
aacnuaauugggccugagc

SEQ ID NO: 1366095 - RNA, 19 nt, Artificial Sequence
  Description of Artificial Sequence: Synthetic oligonucleotide
uuuugauaaaauucaagga

SEQ ID NO: 1366096 - RNA, 19 nt, Artificial Sequence
  Description of Artificial Sequence: Synthetic oligonucleotide
cuuuguugaaacaagugag

SEQ ID NO: 1366097 - RNA, 19 nt, Artificial Sequence
  Description of Artificial Sequence: Synthetic oligonucleotide
uucuggagcaauuauauac

SEQ ID NO: 1366098 - RNA, 19 nt, Artificial Sequence
  Description of Artificial Sequence: Synthetic oligonucleotide
  modified_base (3)..(3): a, c, u, g, unknown or other
acnuaauugggccugagcu

SEQ ID NO: 1366099 - RNA, 19 nt, Artificial Sequence
  Description of Artificial Sequence: Synthetic oligonucleotide
aagaggaaugaccagccuc

SEQ ID NO: 1366100 - RNA, 19 nt, Artificial Sequence
  Description of Artificial Sequence: Synthetic oligonucleotide
gguauaggagcccagaugg

SEQ ID NO: 1366101 - RNA, 19 nt, Artificial Sequence
  Description of Artificial Sequence: Synthetic oligonucleotide
aguugucagugcuacagcc

SEQ ID NO: 1366102 - RNA, 19 nt, Artificial Sequence
  Description of Artificial Sequence: Synthetic oligonucleotide
aauaaguccuucuucugca

SEQ ID NO: 1366103 - RNA, 19 nt, Artificial Sequence
  Description of Artificial Sequence: Synthetic oligonucleotide
cuacuuacugccuaaagac

SEQ ID NO: 1366104 - RNA, 19 nt, Artificial Sequence
  Description of Artificial Sequence: Synthetic oligonucleotide
ugaccaaucagcaaccugu

SEQ ID NO: 1366105 - RNA, 19 nt, Artificial Sequence
  Description of Artificial Sequence: Synthetic oligonucleotide
uaauaaguccuucuucugc

SEQ ID NO: 1366106 - RNA, 19 nt, Artificial Sequence
  Description of Artificial Sequence: Synthetic oligonucleotide
uauugaauuucaaaguaau

SEQ ID NO: 1366107 - RNA, 19 nt, Artificial Sequence
  Description of Artificial Sequence: Synthetic oligonucleotide
aaugcgccuuuguugaaac

SEQ ID NO: 1366108 - RNA, 19 nt, Artificial Sequence
  Description of Artificial Sequence: Synthetic oligonucleotide
ucaaagaaugucuggaccu

SEQ ID NO: 1366109 - RNA, 19 nt, Artificial Sequence
  Description of Artificial Sequence: Synthetic oligonucleotide
uuacuagaacuccuaacag

SEQ ID NO: 1366110 - RNA, 19 nt, Artificial Sequence
  Description of Artificial Sequence: Synthetic oligonucleotide
gacaaaugcgccuuuguug

SEQ ID NO: 1366111 - RNA, 19 nt, Artificial Sequence
  Description of Artificial Sequence: Synthetic oligonucleotide
uggaccucagacaaaugcg

SEQ ID NO: 1366112 - RNA, 19 nt, Artificial Sequence
  Description of Artificial Sequence: Synthetic oligonucleotide
ugagcgaugauuuuaguua

SEQ ID NO: 1366113 - RNA, 19 nt, Artificial Sequence
  Description of Artificial Sequence: Synthetic oligonucleotide
aacuccuaacagugaaagc

SEQ ID NO: 1366114 - RNA, 19 nt, Artificial Sequence
  Description of Artificial Sequence: Synthetic oligonucleotide
acuuugaacacagugagca

SEQ ID NO: 1366115 - RNA, 19 nt, Artificial Sequence
  Description of Artificial Sequence: Synthetic oligonucleotide
ucagcaaccuguaaauaug

SEQ ID NO: 1366116 - RNA, 19 nt, Artificial Sequence
  Description of Artificial Sequence: Synthetic oligonucleotide
acauccaauugucaaacag

SEQ ID NO: 1366117 - RNA, 19 nt, Artificial Sequence
  Description of Artificial Sequence: Synthetic oligonucleotide
auacaggugaauuauaauu

SEQ ID NO: 1366118 - RNA, 19 nt, Artificial Sequence
  Description of Artificial Sequence: Synthetic oligonucleotide
acuacuuacugccuaaaga

SEQ ID NO: 1366119 - RNA, 19 nt, Artificial Sequence
  Description of Artificial Sequence: Synthetic oligonucleotide
uuuguguguccaaagaaaa

SEQ ID NO: 1366120 - RNA, 19 nt, Artificial Sequence
  Description of Artificial Sequence: Synthetic oligonucleotide
ugaaugacuuccaaagccu

SEQ ID NO: 1366121 - RNA, 19 nt, Artificial Sequence
  Description of Artificial Sequence: Synthetic oligonucleotide
uggacacuaagaaauaaaa

SEQ ID NO: 1366122 - RNA, 19 nt, Artificial Sequence
  Description of Artificial Sequence: Synthetic oligonucleotide
ucaugagcgaugauuuuag

SEQ ID NO: 1366123 - RNA, 19 nt, Artificial Sequence
  Description of Artificial Sequence: Synthetic oligonucleotide
cuuacuagaacuccuaaca

SEQ ID NO: 1366124 - RNA, 19 nt, Artificial Sequence
  Description of Artificial Sequence: Synthetic oligonucleotide
uuuguugaaacaagugagu

SEQ ID NO: 1366125 - RNA, 19 nt, Artificial Sequence
  Description of Artificial Sequence: Synthetic oligonucleotide
aauaacuacuuacugccua

SEQ ID NO: 1366126 - RNA, 19 nt, Artificial Sequence
  Description of Artificial Sequence: Synthetic oligonucleotide
uaagcgacaacuucugugu

SEQ ID NO: 1366127 - RNA, 19 nt, Artificial Sequence
  Description of Artificial Sequence: Synthetic oligonucleotide
uguggguacaggcaaauuc

SEQ ID NO: 1366128 - RNA, 19 nt, Artificial Sequence
  Description of Artificial Sequence: Synthetic oligonucleotide
aaacaagugaguugaucca

SEQ ID NO: 1366129 - RNA, 19 nt, Artificial Sequence
  Description of Artificial Sequence: Synthetic oligonucleotide
auuguaaccagauuaccaa

SEQ ID NO: 1366130 - RNA, 19 nt, Artificial Sequence
  Description of Artificial Sequence: Synthetic oligonucleotide
uguucggaugauaucacca

SEQ ID NO: 1366131 - RNA, 19 nt, Artificial Sequence
  Description of Artificial Sequence: Synthetic oligonucleotide
agcaacgauacuuuguaug

SEQ ID NO: 1366132 - RNA, 19 nt, Artificial Sequence
  Description of Artificial Sequence: Synthetic oligonucleotide
ucaguugucagugcuacag

SEQ ID NO: 1366133 - RNA, 19 nt, Artificial Sequence
  Description of Artificial Sequence: Synthetic oligonucleotide
uacaggugaauuauaauuu

SEQ ID NO: 1366134 - RNA, 19 nt, Artificial Sequence
  Description of Artificial Sequence: Synthetic oligonucleotide
acuccuaacagugaaagca

SEQ ID NO: 1366135 - RNA, 19 nt, Artificial Sequence
  Description of Artificial Sequence: Synthetic oligonucleotide
aacuacuuacugccuaaag

SEQ ID NO: 1366136 - RNA, 19 nt, Artificial Sequence
  Description of Artificial Sequence: Synthetic oligonucleotide
gauaucaccaucaaggcua

SEQ ID NO: 1366137 - RNA, 19 nt, Artificial Sequence
  Description of Artificial Sequence: Synthetic oligonucleotide
ucuuaaguggguauugaau

SEQ ID NO: 1366138 - RNA, 19 nt, Artificial Sequence
  Description of Artificial Sequence: Synthetic oligonucleotide
acagugaaagcagacagag

SEQ ID NO: 1366139 - RNA, 19 nt, Artificial Sequence
  Description of Artificial Sequence: Synthetic oligonucleotide
ggagcaauuauauacucug

SEQ ID NO: 1366140 - RNA, 19 nt, Artificial Sequence
  Description of Artificial Sequence: Synthetic oligonucleotide
ugauaagcgacaacuucug

SEQ ID NO: 1366141 - RNA, 19 nt, Artificial Sequence
  Description of Artificial Sequence: Synthetic oligonucleotide
acugccuaaagacauuuca

SEQ ID NO: 1366142 - RNA, 19 nt, Artificial Sequence
  Description of Artificial Sequence: Synthetic oligonucleotide
aaugaccagccucucucgg

SEQ ID NO: 1366143 - RNA, 19 nt, Artificial Sequence
  Description of Artificial Sequence: Synthetic oligonucleotide
auauagaaaccaggguucc

SEQ ID NO: 1366144 - RNA, 19 nt, Artificial Sequence
  Description of Artificial Sequence: Synthetic oligonucleotide
uuaauaaguccuucuucug

SEQ ID NO: 1366145 - RNA, 19 nt, Artificial Sequence
  Description of Artificial Sequence: Synthetic oligonucleotide
gaacuccuaacagugaaag

SEQ ID NO: 1366146 - RNA, 19 nt, Artificial Sequence
  Description of Artificial Sequence: Synthetic oligonucleotide
augguugguauacagguga

SEQ ID NO: 1366147 - RNA, 19 nt, Artificial Sequence
  Description of Artificial Sequence: Synthetic oligonucleotide
gaaugucuggaccucagac

SEQ ID NO: 1366148 - RNA, 19 nt, Artificial Sequence
  Description of Artificial Sequence: Synthetic oligonucleotide
ugccuaaagacauuucaga

SEQ ID NO: 1366149 - RNA, 19 nt, Artificial Sequence
  Description of Artificial Sequence: Synthetic oligonucleotide
uacgugcucauuuucacac

SEQ ID NO: 1366150 - RNA, 19 nt, Artificial Sequence
  Description of Artificial Sequence: Synthetic oligonucleotide
uuaguuaaccaauuuucua

SEQ ID NO: 1366151 - RNA, 19 nt, Artificial Sequence
  Description of Artificial Sequence: Synthetic oligonucleotide
ugagcaugacauccguagg

SEQ ID NO: 1366152 - RNA, 19 nt, Artificial Sequence
  Description of Artificial Sequence: Synthetic oligonucleotide
cuggaccucagacaaaugc

SEQ ID NO: 1366153 - RNA, 19 nt, Artificial Sequence
  Description of Artificial Sequence: Synthetic oligonucleotide
uaagcaggcccaauuuucc

SEQ ID NO: 1366154 - RNA, 19 nt, Artificial Sequence
  Description of Artificial Sequence: Synthetic oligonucleotide
uuauauacucugugaaagu

SEQ ID NO: 1366155 - RNA, 19 nt, Artificial Sequence
  Description of Artificial Sequence: Synthetic oligonucleotide
ugcuacagccacaauguca

SEQ ID NO: 1366156 - RNA, 19 nt, Artificial Sequence
  Description of Artificial Sequence: Synthetic oligonucleotide
guagaugguugguauacag

SEQ ID NO: 1366157 - RNA, 19 nt, Artificial Sequence
  Description of Artificial Sequence: Synthetic oligonucleotide
gcaacgauacuuuguaugg

SEQ ID NO: 1366158 - RNA, 19 nt, Artificial Sequence
  Description of Artificial Sequence: Synthetic oligonucleotide
gacugaugacuucuuaggc

SEQ ID NO: 1366159 - RNA, 19 nt, Artificial Sequence
  Description of Artificial Sequence: Synthetic oligonucleotide
gcauauauagaaaccaggg

SEQ ID NO: 1366160 - RNA, 19 nt, Artificial Sequence
  Description of Artificial Sequence: Synthetic oligonucleotide
ucauuaaccaguagaguuu

SEQ ID NO: 1366161 - RNA, 19 nt, Artificial Sequence
  Description of Artificial Sequence: Synthetic oligonucleotide
aacgauacuuuguauggua

SEQ ID NO: 1366162 - RNA, 19 nt, Artificial Sequence
  Description of Artificial Sequence: Synthetic oligonucleotide
uagaacuccuaacagugaa

SEQ ID NO: 1366163 - RNA, 19 nt, Artificial Sequence
  Description of Artificial Sequence: Synthetic oligonucleotide
ugagcuuacuagaacuccu

SEQ ID NO: 1366164 - RNA, 19 nt, Artificial Sequence
  Description of Artificial Sequence: Synthetic oligonucleotide
aacuuugaacacagugagc

SEQ ID NO: 1366165 - RNA, 19 nt, Artificial Sequence
  Description of Artificial Sequence: Synthetic oligonucleotide
uuucugguacagcauauau

SEQ ID NO: 1366166 - RNA, 19 nt, Artificial Sequence
  Description of Artificial Sequence: Synthetic oligonucleotide
uaucugcuacugaagaacu

SEQ ID NO: 1366167 - RNA, 19 nt, Artificial Sequence
  Description of Artificial Sequence: Synthetic oligonucleotide
gcuacuuuucauuaaccag

SEQ ID NO: 1366168 - RNA, 19 nt, Artificial Sequence
  Description of Artificial Sequence: Synthetic oligonucleotide
gagcaugacauccguaggc

SEQ ID NO: 1366169 - RNA, 19 nt, Artificial Sequence
  Description of Artificial Sequence: Synthetic oligonucleotide
cuuaauaaguccuucuucu

SEQ ID NO: 1366170 - RNA, 19 nt, Artificial Sequence
  Description of Artificial Sequence: Synthetic oligonucleotide
uguguccaaggcaugguga

SEQ ID NO: 1366171 - RNA, 19 nt, Artificial Sequence
  Description of Artificial Sequence: Synthetic oligonucleotide
gauggcaugcccucaucag

SEQ ID NO: 1366172 - RNA, 19 nt, Artificial Sequence
  Description of Artificial Sequence: Synthetic oligonucleotide
uccccuacaaugaaagcaa

SEQ ID NO: 1366173 - RNA, 19 nt, Artificial Sequence
  Description of Artificial Sequence: Synthetic oligonucleotide
uucuguguucggaugauau

SEQ ID NO: 1366174 - RNA, 19 nt, Artificial Sequence
  Description of Artificial Sequence: Synthetic oligonucleotide
ucucggaacguaagcaggc

SEQ ID NO: 1366175 - RNA, 19 nt, Artificial Sequence
  Description of Artificial Sequence: Synthetic oligonucleotide
ucccaugccagcaaguguc

SEQ ID NO: 1366176 - RNA, 19 nt, Artificial Sequence
  Description of Artificial Sequence: Synthetic oligonucleotide
cauuguaaccagauuacca

SEQ ID NO: 1366177 - RNA, 19 nt, Artificial Sequence
  Description of Artificial Sequence: Synthetic oligonucleotide
agucaguugucagugcuac

SEQ ID NO: 1366178 - RNA, 19 nt, Artificial Sequence
  Description of Artificial Sequence: Synthetic oligonucleotide
ugacugauuuucaaagaau

SEQ ID NO: 1366179 - RNA, 19 nt, Artificial Sequence
  Description of Artificial Sequence: Synthetic oligonucleotide
cugccuaaagacauuucag

SEQ ID NO: 1366180 - RNA, 19 nt, Artificial Sequence
  Description of Artificial Sequence: Synthetic oligonucleotide
uggagcaauuauauacucu

SEQ ID NO: 1366181 - RNA, 19 nt, Artificial Sequence
  Description of Artificial Sequence: Synthetic oligonucleotide
uauauacucugugaaagua

SEQ ID NO: 1366182 - RNA, 19 nt, Artificial Sequence
  Description of Artificial Sequence: Synthetic oligonucleotide
cagcaaccuguaaauaugg

SEQ ID NO: 1366183 - RNA, 19 nt, Artificial Sequence
  Description of Artificial Sequence: Synthetic oligonucleotide
ggacugaugacuucuuagg

SEQ ID NO: 1366184 - RNA, 19 nt, Artificial Sequence
  Description of Artificial Sequence: Synthetic oligonucleotide
cuucucggaacguaagcag

SEQ ID NO: 1366185 - RNA, 19 nt, Artificial Sequence
  Description of Artificial Sequence: Synthetic oligonucleotide
cuucccacgguucugauga

SEQ ID NO: 1366186 - RNA, 19 nt, Artificial Sequence
  Description of Artificial Sequence: Synthetic oligonucleotide
agugcuacagccacaaugu

SEQ ID NO: 1366187 - RNA, 19 nt, Artificial Sequence
  Description of Artificial Sequence: Synthetic oligonucleotide
ugauccagcaacgauacuu

SEQ ID NO: 1366188 - RNA, 19 nt, Artificial Sequence
  Description of Artificial Sequence: Synthetic oligonucleotide
ucuucucggaacguaagca

SEQ ID NO: 1366189 - RNA, 19 nt, Artificial Sequence
  Description of Artificial Sequence: Synthetic oligonucleotide
cuccuaacagugaaagcag

SEQ ID NO: 1366190 - RNA, 19 nt, Artificial Sequence
  Description of Artificial Sequence: Synthetic oligonucleotide
ccagauggaacuuauguac

SEQ ID NO: 1366191 - RNA, 19 nt, Artificial Sequence
  Description of Artificial Sequence: Synthetic oligonucleotide
uuguagaugguugguauac

SEQ ID NO: 1366192 - RNA, 19 nt, Artificial Sequence
  Description of Artificial Sequence: Synthetic oligonucleotide
acauguuuaagaggaauga

SEQ ID NO: 1366193 - RNA, 19 nt, Artificial Sequence
  Description of Artificial Sequence: Synthetic oligonucleotide
gauggaacuuauguacaag

SEQ ID NO: 1366194 - RNA, 19 nt, Artificial Sequence
  Description of Artificial Sequence: Synthetic oligonucleotide
aaucccaugccagcaagug

SEQ ID NO: 1366195 - RNA, 19 nt, Artificial Sequence
  Description of Artificial Sequence: Synthetic oligonucleotide
agagcuuccaguauuuugu

SEQ ID NO: 1366196 - RNA, 19 nt, Artificial Sequence
  Description of Artificial Sequence: Synthetic oligonucleotide
cugaguuccauuugaugac

SEQ ID NO: 1366197 - RNA, 19 nt, Artificial Sequence
  Description of Artificial Sequence: Synthetic oligonucleotide
aacguaagcaggcccaauu

SEQ ID NO: 1366198 - RNA, 19 nt, Artificial Sequence
  Description of Artificial Sequence: Synthetic oligonucleotide
ugacauccaauugucaaac

SEQ ID NO: 1366199 - RNA, 19 nt, Artificial Sequence
  Description of Artificial Sequence: Synthetic oligonucleotide
ccaauugucaaacagcauc

SEQ ID NO: 1366200 - RNA, 19 nt, Artificial Sequence
  Description of Artificial Sequence: Synthetic oligonucleotide
agcagacuuuccuugguug

SEQ ID NO: 1366201 - RNA, 19 nt, Artificial Sequence
  Description of Artificial Sequence: Synthetic oligonucleotide
acgguucugaugauaagcg

SEQ ID NO: 1366202 - RNA, 19 nt, Artificial Sequence
  Description of Artificial Sequence: Synthetic oligonucleotide
aauuucuuaaguggguauu

SEQ ID NO: 1366203 - RNA, 19 nt, Artificial Sequence
  Description of Artificial Sequence: Synthetic oligonucleotide
cacuaagaaauaaaacaga

SEQ ID NO: 1366204 - RNA, 19 nt, Artificial Sequence
  Description of Artificial Sequence: Synthetic oligonucleotide
uguaugguauaggagccca

SEQ ID NO: 1366205 - RNA, 19 nt, Artificial Sequence
  Description of Artificial Sequence: Synthetic oligonucleotide
aguuguguccaaggcaugg

SEQ ID NO: 1366206 - RNA, 19 nt, Artificial Sequence
  Description of Artificial Sequence: Synthetic oligonucleotide
augauuuuaguuaaccaau

SEQ ID NO: 1366207 - RNA, 19 nt, Artificial Sequence
  Description of Artificial Sequence: Synthetic oligonucleotide
acgcaaagccuucauuuag

SEQ ID NO: 1366208 - RNA, 19 nt, Artificial Sequence
  Description of Artificial Sequence: Synthetic oligonucleotide
uuuagccacaggucauucc

SEQ ID NO: 1366209 - RNA, 19 nt, Artificial Sequence
  Description of Artificial Sequence: Synthetic oligonucleotide
agcgacaacuucuguguuc

SEQ ID NO: 1366210 - RNA, 19 nt, Artificial Sequence
  Description of Artificial Sequence: Synthetic oligonucleotide
uugguauacaggugaauua

SEQ ID NO: 1366211 - RNA, 19 nt, Artificial Sequence
  Description of Artificial Sequence: Synthetic oligonucleotide
uccuuaauaaguccuucuu

SEQ ID NO: 1366212 - RNA, 19 nt, Artificial Sequence
  Description of Artificial Sequence: Synthetic oligonucleotide
auuucuuaaguggguauug

SEQ ID NO: 1366213 - RNA, 19 nt, Artificial Sequence
  Description of Artificial Sequence: Synthetic oligonucleotide
auccaauugucaaacagca

SEQ ID NO: 1366214 - RNA, 19 nt, Artificial Sequence
  Description of Artificial Sequence: Synthetic oligonucleotide
uuucauuaaccaguagagu

SEQ ID NO: 1366215 - RNA, 19 nt, Artificial Sequence
  Description of Artificial Sequence: Synthetic oligonucleotide
caaccuguaaauauggugu

SEQ ID NO: 1366216 - RNA, 19 nt, Artificial Sequence
  Description of Artificial Sequence: Synthetic oligonucleotide
cacgguucugaugauaagc

SEQ ID NO: 1366217 - RNA, 19 nt, Artificial Sequence
  Description of Artificial Sequence: Synthetic oligonucleotide
cagaagagucucuucucgg

SEQ ID NO: 1366218 - RNA, 19 nt, Artificial Sequence
  Description of Artificial Sequence: Synthetic oligonucleotide
aggcaaauuccagcaaggc

SEQ ID NO: 1366219 - RNA, 19 nt, Artificial Sequence
  Description of Artificial Sequence: Synthetic oligonucleotide
ucggaacguaagcaggccc

SEQ ID NO: 1366220 - RNA, 19 nt, Artificial Sequence
  Description of Artificial Sequence: Synthetic oligonucleotide
agauuaccaaaccacugau

SEQ ID NO: 1366221 - RNA, 19 nt, Artificial Sequence
  Description of Artificial Sequence: Synthetic oligonucleotide
uucuuaaguggguauugaa

SEQ ID NO: 1366222 - RNA, 19 nt, Artificial Sequence
  Description of Artificial Sequence: Synthetic oligonucleotide
ucugaugauaagcgacaac

SEQ ID NO: 1366223 - RNA, 19 nt, Artificial Sequence
  Description of Artificial Sequence: Synthetic oligonucleotide
uguguucggaugauaucac

SEQ ID NO: 1366224 - RNA, 19 nt, Artificial Sequence
  Description of Artificial Sequence: Synthetic oligonucleotide
uucucuggacacuaagaaa

SEQ ID NO: 1366225 - RNA, 19 nt, Artificial Sequence
  Description of Artificial Sequence: Synthetic oligonucleotide
guacaggcaaauuccagca

SEQ ID NO: 1366226 - RNA, 19 nt, Artificial Sequence
  Description of Artificial Sequence: Synthetic oligonucleotide
uucugguacagcauauaua

SEQ ID NO: 1366227 - RNA, 19 nt, Artificial Sequence
  Description of Artificial Sequence: Synthetic oligonucleotide
gcaaccuguaaauauggug

SEQ ID NO: 1366228 - RNA, 19 nt, Artificial Sequence
  Description of Artificial Sequence: Synthetic oligonucleotide
guugauccagcaacgauac

SEQ ID NO: 1366229 - RNA, 19 nt, Artificial Sequence
  Description of Artificial Sequence: Synthetic oligonucleotide
cauguuuaagaggaaugac

SEQ ID NO: 1366230 - RNA, 19 nt, Artificial Sequence
  Description of Artificial Sequence: Synthetic oligonucleotide
uccuaacagugaaagcaga

SEQ ID NO: 1366231 - RNA, 19 nt, Artificial Sequence
  Description of Artificial Sequence: Synthetic oligonucleotide
ugguacaguucucuaggcu

SEQ ID NO: 1366232 - RNA, 19 nt, Artificial Sequence
  Description of Artificial Sequence: Synthetic oligonucleotide
uaugguauaggagcccaga

SEQ ID NO: 1366233 - RNA, 19 nt, Artificial Sequence
  Description of Artificial Sequence: Synthetic oligonucleotide
uuguaaccagauuaccaaa

SEQ ID NO: 1366234 - RNA, 19 nt, Artificial Sequence
  Description of Artificial Sequence: Synthetic oligonucleotide
acuuuguaugguauaggag

SEQ ID NO: 1366235 - RNA, 19 nt, Artificial Sequence
  Description of Artificial Sequence: Synthetic oligonucleotide
uuucuuaaguggguauuga

SEQ ID NO: 1366236 - RNA, 19 nt, Artificial Sequence
  Description of Artificial Sequence: Synthetic oligonucleotide
ugguugcacuaucagaaau

SEQ ID NO: 1366237 - RNA, 19 nt, Artificial Sequence
  Description of Artificial Sequence: Synthetic oligonucleotide
ugugccaacucaugagcga

SEQ ID NO: 1366238 - RNA, 19 nt, Artificial Sequence
  Description of Artificial Sequence: Synthetic oligonucleotide
gcaauuauauacucuguga

SEQ ID NO: 1366239 - RNA, 19 nt, Artificial Sequence
  Description of Artificial Sequence: Synthetic oligonucleotide
aaauaacuacuuacugccu

SEQ ID NO: 1366240 - RNA, 19 nt, Artificial Sequence
  Description of Artificial Sequence: Synthetic oligonucleotide
uucggaugauaucaccauc

SEQ ID NO: 1366241 - RNA, 19 nt, Artificial Sequence
  Description of Artificial Sequence: Synthetic oligonucleotide
auacucugugaaaguacgc

SEQ ID NO: 1366242 - RNA, 19 nt, Artificial Sequence
  Description of Artificial Sequence: Synthetic oligonucleotide
  modified_base (5)..(5): a, c, u, g, unknown or other
aaacnuaauugggccugag

SEQ ID NO: 1366243 - RNA, 19 nt, Artificial Sequence
  Description of Artificial Sequence: Synthetic oligonucleotide
uuguugaaacaagugaguu

SEQ ID NO: 1366244 - RNA, 19 nt, Artificial Sequence
  Description of Artificial Sequence: Synthetic oligonucleotide
agaggaaugaccagccucu

SEQ ID NO: 1366245 - RNA, 19 nt, Artificial Sequence
  Description of Artificial Sequence: Synthetic oligonucleotide
ucccgcuucaaagucagga

SEQ ID NO: 1366246 - RNA, 19 nt, Artificial Sequence
  Description of Artificial Sequence: Synthetic oligonucleotide
  modified_base (6)..(6): a, c, u, g, unknown or other
aaaacnuaauugggccuga

SEQ ID NO: 1366247 - RNA, 19 nt, Artificial Sequence
  Description of Artificial Sequence: Synthetic oligonucleotide
aauugucaaacagcaucgu

SEQ ID NO: 1366248 - RNA, 19 nt, Artificial Sequence
  Description of Artificial Sequence: Synthetic oligonucleotide
acacaccgaagcugcaagg

SEQ ID NO: 1366249 - RNA, 19 nt, Artificial Sequence
  Description of Artificial Sequence: Synthetic oligonucleotide
aagaaugucuggaccucag

SEQ ID NO: 1366250 - RNA, 19 nt, Artificial Sequence
  Description of Artificial Sequence: Synthetic oligonucleotide
acaguuguguccaaggcau

SEQ ID NO: 1366251 - RNA, 19 nt, Artificial Sequence
  Description of Artificial Sequence: Synthetic oligonucleotide
cugagcuuacuagaacucc

SEQ ID NO: 1366252 - RNA, 19 nt, Artificial Sequence
  Description of Artificial Sequence: Synthetic oligonucleotide
uucucuaggcuguggguac

SEQ ID NO: 1366253 - RNA, 19 nt, Artificial Sequence
  Description of Artificial Sequence: Synthetic oligonucleotide
guugcacuaucagaaauuc

SEQ ID NO: 1366254 - RNA, 19 nt, Artificial Sequence
  Description of Artificial Sequence: Synthetic oligonucleotide
cucucucgguucuugcucc

SEQ ID NO: 1366255 - RNA, 19 nt, Artificial Sequence
  Description of Artificial Sequence: Synthetic oligonucleotide
cuguguucggaugauauca

SEQ ID NO: 1366256 - RNA, 19 nt, Artificial Sequence
  Description of Artificial Sequence: Synthetic oligonucleotide
uuucagauucuuugacauc

SEQ ID NO: 1366257 - RNA, 19 nt, Artificial Sequence
  Description of Artificial Sequence: Synthetic oligonucleotide
cugaugauaagcgacaacu

SEQ ID NO: 1366258 - RNA, 19 nt, Artificial Sequence
  Description of Artificial Sequence: Synthetic oligonucleotide
aggagcuuuacaguugugu

SEQ ID NO: 1366259 - RNA, 19 nt, Artificial Sequence
  Description of Artificial Sequence: Synthetic oligonucleotide
cucuucucggaacguaagc

SEQ ID NO: 1366260 - RNA, 19 nt, Artificial Sequence
  Description of Artificial Sequence: Synthetic oligonucleotide
cagucaagucugcugcugg

SEQ ID NO: 1366261 - RNA, 19 nt, Artificial Sequence
  Description of Artificial Sequence: Synthetic oligonucleotide
cuuaaguggguauugaauu

SEQ ID NO: 1366262 - RNA, 19 nt, Artificial Sequence
  Description of Artificial Sequence: Synthetic oligonucleotide
cauuaaccaguagaguuuc

SEQ ID NO: 1366263 - RNA, 19 nt, Artificial Sequence
  Description of Artificial Sequence: Synthetic oligonucleotide
aguugauccagcaacgaua

SEQ ID NO: 1366264 - RNA, 19 nt, Artificial Sequence
  Description of Artificial Sequence: Synthetic oligonucleotide
gaaagcaaccagguacgug

SEQ ID NO: 1366265 - RNA, 19 nt, Artificial Sequence
  Description of Artificial Sequence: Synthetic oligonucleotide
ugcuccaacuuugaacaca

SEQ ID NO: 1366266 - RNA, 19 nt, Artificial Sequence
  Description of Artificial Sequence: Synthetic oligonucleotide
agacaaaugcgccuuuguu

SEQ ID NO: 1366267 - RNA, 19 nt, Artificial Sequence
  Description of Artificial Sequence: Synthetic oligonucleotide
auugcauuguaaccagauu

SEQ ID NO: 1366268 - RNA, 19 nt, Artificial Sequence
  Description of Artificial Sequence: Synthetic oligonucleotide
augugccaacucaugagcg

SEQ ID NO: 1366269 - RNA, 19 nt, Artificial Sequence
  Description of Artificial Sequence: Synthetic oligonucleotide
auggcaugcccucaucagu

SEQ ID NO: 1366270 - RNA, 19 nt, Artificial Sequence
  Description of Artificial Sequence: Synthetic oligonucleotide
gaaaguacgcaaagccuuc

SEQ ID NO: 1366271 - RNA, 19 nt, Artificial Sequence
  Description of Artificial Sequence: Synthetic oligonucleotide
aguucucuaggcugugggu

SEQ ID NO: 1366272 - RNA, 19 nt, Artificial Sequence
  Description of Artificial Sequence: Synthetic oligonucleotide
cuuuacaguuguguccaag

SEQ ID NO: 1366273 - RNA, 19 nt, Artificial Sequence
  Description of Artificial Sequence: Synthetic oligonucleotide
uguagaugguugguauaca

SEQ ID NO: 1366274 - RNA, 19 nt, Artificial Sequence
  Description of Artificial Sequence: Synthetic oligonucleotide
ggagcuuuacaguuguguc

SEQ ID NO: 1366275 - RNA, 19 nt, Artificial Sequence
  Description of Artificial Sequence: Synthetic oligonucleotide
ccaacuuugaacacaguga

SEQ ID NO: 1366276 - RNA, 19 nt, Artificial Sequence
  Description of Artificial Sequence: Synthetic oligonucleotide
agacagagccaugggcacc

SEQ ID NO: 1366277 - RNA, 19 nt, Artificial Sequence
  Description of Artificial Sequence: Synthetic oligonucleotide
uauagaaaccaggguucca

SEQ ID NO: 1366278 - RNA, 19 nt, Artificial Sequence
  Description of Artificial Sequence: Synthetic oligonucleotide
gaccucagacaaaugcgcc

SEQ ID NO: 1366279 - RNA, 19 nt, Artificial Sequence
  Description of Artificial Sequence: Synthetic oligonucleotide
aaaugcgccuuuguugaaa

SEQ ID NO: 1366280 - RNA, 19 nt, Artificial Sequence
  Description of Artificial Sequence: Synthetic oligonucleotide
ggcuacuuuucauuaacca

SEQ ID NO: 1366281 - RNA, 19 nt, Artificial Sequence
  Description of Artificial Sequence: Synthetic oligonucleotide
uccagcaaggcugaccgaa

SEQ ID NO: 1366282 - RNA, 19 nt, Artificial Sequence
  Description of Artificial Sequence: Synthetic oligonucleotide
guguucggaugauaucacc

SEQ ID NO: 1366283 - RNA, 19 nt, Artificial Sequence
  Description of Artificial Sequence: Synthetic oligonucleotide
cagauggaacuuauguaca

SEQ ID NO: 1366284 - RNA, 19 nt, Artificial Sequence
  Description of Artificial Sequence: Synthetic oligonucleotide
gcgacaacuucuguguucg

SEQ ID NO: 1366285 - RNA, 19 nt, Artificial Sequence
  Description of Artificial Sequence: Synthetic oligonucleotide
uccaauugucaaacagcau

SEQ ID NO: 1366286 - RNA, 19 nt, Artificial Sequence
  Description of Artificial Sequence: Synthetic oligonucleotide
caccauugcauuguaacca

SEQ ID NO: 1366287 - RNA, 19 nt, Artificial Sequence
  Description of Artificial Sequence: Synthetic oligonucleotide
ggacacuaagaaauaaaac

SEQ ID NO: 1366288 - RNA, 19 nt, Artificial Sequence
  Description of Artificial Sequence: Synthetic oligonucleotide
cugaugugccaacucauga

SEQ ID NO: 1366289 - RNA, 19 nt, Artificial Sequence
  Description of Artificial Sequence: Synthetic oligonucleotide
aguacgcaaagccuucauu

SEQ ID NO: 1366290 - RNA, 19 nt, Artificial Sequence
  Description of Artificial Sequence: Synthetic oligonucleotide
guucugaugauaagcgaca

SEQ ID NO: 1366291 - RNA, 19 nt, Artificial Sequence
  Description of Artificial Sequence: Synthetic oligonucleotide
caaauuccagcaaggcuga

SEQ ID NO: 1366292 - RNA, 19 nt, Artificial Sequence
  Description of Artificial Sequence: Synthetic oligonucleotide
uuacugccuaaagacauuu

SEQ ID NO: 1366293 - RNA, 19 nt, Artificial Sequence
  Description of Artificial Sequence: Synthetic oligonucleotide
cagugaaagcagacagagc

SEQ ID NO: 1366294 - RNA, 19 nt, Artificial Sequence
  Description of Artificial Sequence: Synthetic oligonucleotide
cucauccuuaauaaguccu

SEQ ID NO: 1366295 - RNA, 19 nt, Artificial Sequence
  Description of Artificial Sequence: Synthetic oligonucleotide
agcuuacuagaacuccuaa

SEQ ID NO: 1366296 - RNA, 19 nt, Artificial Sequence
  Description of Artificial Sequence: Synthetic oligonucleotide
gcuuacuagaacuccuaac

SEQ ID NO: 1366297 - RNA, 19 nt, Artificial Sequence
  Description of Artificial Sequence: Synthetic oligonucleotide
aaucagcaaccuguaaaua

SEQ ID NO: 1366298 - RNA, 19 nt, Artificial Sequence
  Description of Artificial Sequence: Synthetic oligonucleotide
ccuuaauaaguccuucuuc

SEQ ID NO: 1366299 - RNA, 19 nt, Artificial Sequence
  Description of Artificial Sequence: Synthetic oligonucleotide
agucaagucugcugcugga

SEQ ID NO: 1366300 - RNA, 19 nt, Artificial Sequence
  Description of Artificial Sequence: Synthetic oligonucleotide
caguugucagugcuacagc

SEQ ID NO: 1366301 - RNA, 19 nt, Artificial Sequence
  Description of Artificial Sequence: Synthetic oligonucleotide
ucuggaccucagacaaaug

SEQ ID NO: 1366302 - RNA, 19 nt, Artificial Sequence
  Description of Artificial Sequence: Synthetic oligonucleotide
uucugaugauaagcgacaa

SEQ ID NO: 1366303 - RNA, 19 nt, Artificial Sequence
  Description of Artificial Sequence: Synthetic oligonucleotide
ugguugguauacaggugaa

SEQ ID NO: 1366304 - RNA, 19 nt, Artificial Sequence
  Description of Artificial Sequence: Synthetic oligonucleotide
gguacgugcucauuuucac

SEQ ID NO: 1366305 - RNA, 19 nt, Artificial Sequence
  Description of Artificial Sequence: Synthetic oligonucleotide
ccuaacagugaaagcagac

SEQ ID NO: 1366306 - RNA, 19 nt, Artificial Sequence
  Description of Artificial Sequence: Synthetic oligonucleotide
gcgaugauuuuaguuaacc

SEQ ID NO: 1366307 - RNA, 19 nt, Artificial Sequence
  Description of Artificial Sequence: Synthetic oligonucleotide
guacgcaaagccuucauuu

SEQ ID NO: 1366308 - RNA, 19 nt, Artificial Sequence
  Description of Artificial Sequence: Synthetic oligonucleotide
acugaugugccaacucaug

SEQ ID NO: 1366309 - RNA, 19 nt, Artificial Sequence
  Description of Artificial Sequence: Synthetic oligonucleotide
caaagaaugucuggaccuc

SEQ ID NO: 1366310 - RNA, 19 nt, Artificial Sequence
  Description of Artificial Sequence: Synthetic oligonucleotide
ugacauccacuggauauuc

SEQ ID NO: 1366311 - RNA, 19 nt, Artificial Sequence
  Description of Artificial Sequence: Synthetic oligonucleotide
acagcugaccaaucagcaa

SEQ ID NO: 1366312 - RNA, 19 nt, Artificial Sequence
  Description of Artificial Sequence: Synthetic oligonucleotide
aucccaugccagcaagugu

SEQ ID NO: 1366313 - RNA, 19 nt, Artificial Sequence
  Description of Artificial Sequence: Synthetic oligonucleotide
uugcucccgcuucaaaguc

SEQ ID NO: 1366314 - RNA, 19 nt, Artificial Sequence
  Description of Artificial Sequence: Synthetic oligonucleotide
ucuaggcuguggguacagg

SEQ ID NO: 1366315 - RNA, 19 nt, Artificial Sequence
  Description of Artificial Sequence: Synthetic oligonucleotide
cauccuuaauaaguccuuc

SEQ ID NO: 1366316 - RNA, 19 nt, Artificial Sequence
  Description of Artificial Sequence: Synthetic oligonucleotide
acguaagcaggcccaauuu

SEQ ID NO: 1366317 - RNA, 19 nt, Artificial Sequence
  Description of Artificial Sequence: Synthetic oligonucleotide
agcgaugauuuuaguuaac

SEQ ID NO: 1366318 - RNA, 19 nt, Artificial Sequence
  Description of Artificial Sequence: Synthetic oligonucleotide
agcaaccagguacgugcuc

SEQ ID NO: 1366319 - RNA, 19 nt, Artificial Sequence
  Description of Artificial Sequence: Synthetic oligonucleotide
uacugccuaaagacauuuc

SEQ ID NO: 1366320 - RNA, 19 nt, Artificial Sequence
  Description of Artificial Sequence: Synthetic oligonucleotide
ucgguucuugcuccaacuu

SEQ ID NO: 1366321 - RNA, 19 nt, Artificial Sequence
  Description of Artificial Sequence: Synthetic oligonucleotide
uaauugggccugagcuuac

SEQ ID NO: 1366322 - RNA, 19 nt, Artificial Sequence
  Description of Artificial Sequence: Synthetic oligonucleotide
caggaauggccaccaaauc

SEQ ID NO: 1366323 - RNA, 19 nt, Artificial Sequence
  Description of Artificial Sequence: Synthetic oligonucleotide
ugaaagcaaccagguacgu

SEQ ID NO: 1366324 - RNA, 19 nt, Artificial Sequence
  Description of Artificial Sequence: Synthetic oligonucleotide
aauugggccugagcuuacu

SEQ ID NO: 1366325 - RNA, 19 nt, Artificial Sequence
  Description of Artificial Sequence: Synthetic oligonucleotide
uaacuacuuacugccuaaa

SEQ ID NO: 1366326 - RNA, 19 nt, Artificial Sequence
  Description of Artificial Sequence: Synthetic oligonucleotide
agguacgugcucauuuuca

SEQ ID NO: 1366327 - RNA, 19 nt, Artificial Sequence
  Description of Artificial Sequence: Synthetic oligonucleotide
gugaaaguacgcaaagccu

SEQ ID NO: 1366328 - RNA, 19 nt, Artificial Sequence
  Description of Artificial Sequence: Synthetic oligonucleotide
ggcaccgaaagucaguugu

SEQ ID NO: 1366329 - RNA, 19 nt, Artificial Sequence
  Description of Artificial Sequence: Synthetic oligonucleotide
cucggaacguaagcaggcc

SEQ ID NO: 1366330 - RNA, 19 nt, Artificial Sequence
  Description of Artificial Sequence: Synthetic oligonucleotide
agcccauggaggaauacau

SEQ ID NO: 1366331 - RNA, 19 nt, Artificial Sequence
  Description of Artificial Sequence: Synthetic oligonucleotide
aggcucugaguuccauuug

SEQ ID NO: 1366332 - RNA, 19 nt, Artificial Sequence
  Description of Artificial Sequence: Synthetic oligonucleotide
cagguacgugcucauuuuc

SEQ ID NO: 1366333 - RNA, 19 nt, Artificial Sequence
  Description of Artificial Sequence: Synthetic oligonucleotide
gcauuguaaccagauuacc

SEQ ID NO: 1366334 - RNA, 19 nt, Artificial Sequence
  Description of Artificial Sequence: Synthetic oligonucleotide
guaugguauaggagcccag

SEQ ID NO: 1366335 - RNA, 19 nt, Artificial Sequence
  Description of Artificial Sequence: Synthetic oligonucleotide
acgugcucauuuucacacu

SEQ ID NO: 1366336 - RNA, 19 nt, Artificial Sequence
  Description of Artificial Sequence: Synthetic oligonucleotide
aagcaaccagguacgugcu

SEQ ID NO: 1366337 - RNA, 19 nt, Artificial Sequence
  Description of Artificial Sequence: Synthetic oligonucleotide
uugcuccaacuuugaacac

SEQ ID NO: 1366338 - RNA, 19 nt, Artificial Sequence
  Description of Artificial Sequence: Synthetic oligonucleotide
gguacagcauauauagaaa

SEQ ID NO: 1366339 - RNA, 19 nt, Artificial Sequence
  Description of Artificial Sequence: Synthetic oligonucleotide
cucaugagcgaugauuuua

SEQ ID NO: 1366340 - RNA, 19 nt, Artificial Sequence
  Description of Artificial Sequence: Synthetic oligonucleotide
cauggaggaauacauguuu

SEQ ID NO: 1366341 - RNA, 19 nt, Artificial Sequence
  Description of Artificial Sequence: Synthetic oligonucleotide
caagucugcugcuggaucu

SEQ ID NO: 1366342 - RNA, 19 nt, Artificial Sequence
  Description of Artificial Sequence: Synthetic oligonucleotide
aagucaguugucagugcua

SEQ ID NO: 1366343 - RNA, 19 nt, Artificial Sequence
  Description of Artificial Sequence: Synthetic oligonucleotide
gaguugauccagcaacgau

SEQ ID NO: 1366344 - RNA, 19 nt, Artificial Sequence
  Description of Artificial Sequence: Synthetic oligonucleotide
guucggaugauaucaccau

SEQ ID NO: 1366345 - RNA, 19 nt, Artificial Sequence
  Description of Artificial Sequence: Synthetic oligonucleotide
caaggagcuuuacaguugu

SEQ ID NO: 1366346 - RNA, 19 nt, Artificial Sequence
  Description of Artificial Sequence: Synthetic oligonucleotide
agcaaccuguaaauauggu

SEQ ID NO: 1366347 - RNA, 19 nt, Artificial Sequence
  Description of Artificial Sequence: Synthetic oligonucleotide
cgcuucaaagucaggaaug

SEQ ID NO: 1366348 - RNA, 19 nt, Artificial Sequence
  Description of Artificial Sequence: Synthetic oligonucleotide
  modified_base (2)..(2): a, c, u, g, unknown or other
cnuaauugggccugagcuu

SEQ ID NO: 1366349 - RNA, 19 nt, Artificial Sequence
  Description of Artificial Sequence: Synthetic oligonucleotide
gguuccucaucuccccuac

SEQ ID NO: 1366350 - RNA, 19 nt, Artificial Sequence
  Description of Artificial Sequence: Synthetic oligonucleotide
ucggagcccauggaggaau

SEQ ID NO: 1366351 - RNA, 19 nt, Artificial Sequence
  Description of Artificial Sequence: Synthetic oligonucleotide
guucuggagcaauuauaua

SEQ ID NO: 1366352 - RNA, 19 nt, Artificial Sequence
  Description of Artificial Sequence: Synthetic oligonucleotide
auuaaccaguagaguuucu

SEQ ID NO: 1366353 - RNA, 19 nt, Artificial Sequence
  Description of Artificial Sequence: Synthetic oligonucleotide
caccgaaagucaguuguca

SEQ ID NO: 1366354 - RNA, 19 nt, Artificial Sequence
  Description of Artificial Sequence: Synthetic oligonucleotide
ggguacaggcaaauuccag

SEQ ID NO: 1366355 - RNA, 19 nt, Artificial Sequence
  Description of Artificial Sequence: Synthetic oligonucleotide
gagcuuacuagaacuccua

SEQ ID NO: 1366356 - RNA, 19 nt, Artificial Sequence
  Description of Artificial Sequence: Synthetic oligonucleotide
augcgccuuuguugaaaca

SEQ ID NO: 1366357 - RNA, 19 nt, Artificial Sequence
  Description of Artificial Sequence: Synthetic oligonucleotide
cgaugauuuuaguuaacca

SEQ ID NO: 1366358 - RNA, 19 nt, Artificial Sequence
  Description of Artificial Sequence: Synthetic oligonucleotide
agucucuucucggaacgua

SEQ ID NO: 1366359 - RNA, 19 nt, Artificial Sequence
  Description of Artificial Sequence: Synthetic oligonucleotide
ccagcaacgauacuuugua

SEQ ID NO: 1366360 - RNA, 19 nt, Artificial Sequence
  Description of Artificial Sequence: Synthetic oligonucleotide
gugcuacagccacaauguc

SEQ ID NO: 1366361 - RNA, 19 nt, Artificial Sequence
  Description of Artificial Sequence: Synthetic oligonucleotide
gucaguugucagugcuaca

SEQ ID NO: 1366362 - RNA, 19 nt, Artificial Sequence
  Description of Artificial Sequence: Synthetic oligonucleotide
guauaggagcccagaugga

SEQ ID NO: 1366363 - RNA, 19 nt, Artificial Sequence
  Description of Artificial Sequence: Synthetic oligonucleotide
ggccugagcuuacuagaac

SEQ ID NO: 1366364 - RNA, 19 nt, Artificial Sequence
  Description of Artificial Sequence: Synthetic oligonucleotide
gcgccuuuguugaaacaag

SEQ ID NO: 1366365 - RNA, 19 nt, Artificial Sequence
  Description of Artificial Sequence: Synthetic oligonucleotide
gaccaaucagcaaccugua

SEQ ID NO: 1366366 - RNA, 19 nt, Artificial Sequence
  Description of Artificial Sequence: Synthetic oligonucleotide
caggcucugaguuccauuu

SEQ ID NO: 1366367 - RNA, 19 nt, Artificial Sequence
  Description of Artificial Sequence: Synthetic oligonucleotide
cagauggcaugcccucauc

SEQ ID NO: 1366368 - RNA, 19 nt, Artificial Sequence
  Description of Artificial Sequence: Synthetic oligonucleotide
augggcaccgaaagucagu

SEQ ID NO: 1366369 - RNA, 19 nt, Artificial Sequence
  Description of Artificial Sequence: Synthetic oligonucleotide
ccucucucgguucuugcuc

SEQ ID NO: 1366370 - RNA, 19 nt, Artificial Sequence
  Description of Artificial Sequence: Synthetic oligonucleotide
uucggagcccauggaggaa

SEQ ID NO: 1366371 - RNA, 19 nt, Artificial Sequence
  Description of Artificial Sequence: Synthetic oligonucleotide
ccagcaaggcugaccgaag

SEQ ID NO: 1366372 - RNA, 19 nt, Artificial Sequence
  Description of Artificial Sequence: Synthetic oligonucleotide
cucccgcuucaaagucagg

SEQ ID NO: 1366373 - RNA, 19 nt, Artificial Sequence
  Description of Artificial Sequence: Synthetic oligonucleotide
ggugaacuugaccaauuuu

SEQ ID NO: 1366374 - RNA, 19 nt, Artificial Sequence
  Description of Artificial Sequence: Synthetic oligonucleotide
cauccguaggcaggcucug

SEQ ID NO: 1366375 - RNA, 19 nt, Artificial Sequence
  Description of Artificial Sequence: Synthetic oligonucleotide
gguauacaggugaauuaua

SEQ ID NO: 1366376 - RNA, 19 nt, Artificial Sequence
  Description of Artificial Sequence: Synthetic oligonucleotide
cccacgguucugaugauaa

SEQ ID NO: 1366377 - RNA, 19 nt, Artificial Sequence
  Description of Artificial Sequence: Synthetic oligonucleotide
cuuacugccuaaagacauu

SEQ ID NO: 1366378 - RNA, 19 nt, Artificial Sequence
  Description of Artificial Sequence: Synthetic oligonucleotide
aaccagguacgugcucauu

SEQ ID NO: 1366379 - RNA, 19 nt, Artificial Sequence
  Description of Artificial Sequence: Synthetic oligonucleotide
ucccacgguucugaugaua

SEQ ID NO: 1366380 - RNA, 19 nt, Artificial Sequence
  Description of Artificial Sequence: Synthetic oligonucleotide
cccagauggaacuuaugua

SEQ ID NO: 1366381 - RNA, 19 nt, Artificial Sequence
  Description of Artificial Sequence: Synthetic oligonucleotide
ugacauccguaggcaggcu

SEQ ID NO: 1366382 - RNA, 19 nt, Artificial Sequence
  Description of Artificial Sequence: Synthetic oligonucleotide
ggguuccauuuacauccug

SEQ ID NO: 1366383 - RNA, 19 nt, Artificial Sequence
  Description of Artificial Sequence: Synthetic oligonucleotide
ccucugacugauuuucaaa

SEQ ID NO: 1366384 - RNA, 19 nt, Artificial Sequence
  Description of Artificial Sequence: Synthetic oligonucleotide
ccccuacaaugaaagcaac

SEQ ID NO: 1366385 - RNA, 19 nt, Artificial Sequence
  Description of Artificial Sequence: Synthetic oligonucleotide
cagaaauucucuggacacu

SEQ ID NO: 1366386 - RNA, 19 nt, Artificial Sequence
  Description of Artificial Sequence: Synthetic oligonucleotide
caaaugcgccuuuguugaa

SEQ ID NO: 1366387 - RNA, 19 nt, Artificial Sequence
  Description of Artificial Sequence: Synthetic oligonucleotide
caugagcgaugauuuuagu

SEQ ID NO: 1366388 - RNA, 19 nt, Artificial Sequence
  Description of Artificial Sequence: Synthetic oligonucleotide
caacgauacuuuguauggu

SEQ ID NO: 1366389 - RNA, 19 nt, Artificial Sequence
  Description of Artificial Sequence: Synthetic oligonucleotide
gcccauggaggaauacaug

SEQ ID NO: 1366390 - RNA, 19 nt, Artificial Sequence
  Description of Artificial Sequence: Synthetic oligonucleotide
gguugcacuaucagaaauu

SEQ ID NO: 1366391 - RNA, 19 nt, Artificial Sequence
  Description of Artificial Sequence: Synthetic oligonucleotide
uucccacgguucugaugau

SEQ ID NO: 1366392 - RNA, 19 nt, Artificial Sequence
  Description of Artificial Sequence: Synthetic oligonucleotide
auccguaggcaggcucuga

SEQ ID NO: 1366393 - RNA, 19 nt, Artificial Sequence
  Description of Artificial Sequence: Synthetic oligonucleotide
gggcaccgaaagucaguug

SEQ ID NO: 1366394 - RNA, 19 nt, Artificial Sequence
  Description of Artificial Sequence: Synthetic oligonucleotide
gugccaacucaugagcgau

SEQ ID NO: 1366395 - RNA, 19 nt, Artificial Sequence
  Description of Artificial Sequence: Synthetic oligonucleotide
cggaacguaagcaggccca

SEQ ID NO: 1366396 - RNA, 19 nt, Artificial Sequence
  Description of Artificial Sequence: Synthetic oligonucleotide
gcagggacugaugacuucu

SEQ ID NO: 1366397 - RNA, 19 nt, Artificial Sequence
  Description of Artificial Sequence: Synthetic oligonucleotide
cugcuucggagcccaugga

SEQ ID NO: 1366398 - RNA, 19 nt, Artificial Sequence
  Description of Artificial Sequence: Synthetic oligonucleotide
cuucuguguucggaugaua

SEQ ID NO: 1366399 - RNA, 19 nt, Artificial Sequence
  Description of Artificial Sequence: Synthetic oligonucleotide
gcaccgaaagucaguuguc

SEQ ID NO: 1366400 - RNA, 19 nt, Artificial Sequence
  Description of Artificial Sequence: Synthetic oligonucleotide
ggaacguaagcaggcccaa

SEQ ID NO: 1366401 - RNA, 19 nt, Artificial Sequence
  Description of Artificial Sequence: Synthetic oligonucleotide
cagcaacgauacuuuguau

SEQ ID NO: 1366402 - RNA, 19 nt, Artificial Sequence
  Description of Artificial Sequence: Synthetic oligonucleotide
gaacguaagcaggcccaau

SEQ ID NO: 1366403 - RNA, 19 nt, Artificial Sequence
  Description of Artificial Sequence: Synthetic oligonucleotide
ggagcccagauggaacuua

SEQ ID NO: 1366404 - RNA, 19 nt, Artificial Sequence
  Description of Artificial Sequence: Synthetic oligonucleotide
cagagccaugggcaccgaa

SEQ ID NO: 1366405 - RNA, 19 nt, Artificial Sequence
  Description of Artificial Sequence: Synthetic oligonucleotide
cgguucugaugauaagcga

SEQ ID NO: 1366406 - RNA, 19 nt, Artificial Sequence
  Description of Artificial Sequence: Synthetic oligonucleotide
cuccaacuuugaacacagu

SEQ ID NO: 1366407 - RNA, 19 nt, Artificial Sequence
  Description of Artificial Sequence: Synthetic oligonucleotide
gcaagagcuuccaguauuu

SEQ ID NO: 1366408 - RNA, 19 nt, Artificial Sequence
  Description of Artificial Sequence: Synthetic oligonucleotide
cuacagccacaaugucagu

SEQ ID NO: 1366409 - RNA, 19 nt, Artificial Sequence
  Description of Artificial Sequence: Synthetic oligonucleotide
cggaugauaucaccaucaa

SEQ ID NO: 1366410 - RNA, 19 nt, Artificial Sequence
  Description of Artificial Sequence: Synthetic oligonucleotide
caagagcuuccaguauuuu

SEQ ID NO: 1366411 - RNA, 19 nt, Artificial Sequence
  Description of Artificial Sequence: Synthetic oligonucleotide
gcugaccaaucagcaaccu

SEQ ID NO: 1366412 - RNA, 19 nt, Artificial Sequence
  Description of Artificial Sequence: Synthetic oligonucleotide
ccagguacgugcucauuuu

SEQ ID NO: 1366413 - RNA, 19 nt, Artificial Sequence
  Description of Artificial Sequence: Synthetic oligonucleotide
cgguucuugcuccaacuuu

SEQ ID NO: 1366414 - RNA, 19 nt, Artificial Sequence
  Description of Artificial Sequence: Synthetic oligonucleotide
  modified_base (1)..(1): a, c, u, g, unknown or other
nuaauugggccugagcuua

SEQ ID NO: 1366415 - RNA, 19 nt, Artificial Sequence
  Description of Artificial Sequence: Synthetic oligonucleotide
aaaauaguuacccagagac

SEQ ID NO: 1366416 - RNA, 19 nt, Artificial Sequence
  Description of Artificial Sequence: Synthetic oligonucleotide
aaugaaaauaguuacccag

SEQ ID NO: 1366417 - RNA, 19 nt, Artificial Sequence
  Description of Artificial Sequence: Synthetic oligonucleotide
uguaagaugaggcagguac

SEQ ID NO: 1366418 - RNA, 19 nt, Artificial Sequence
  Description of Artificial Sequence: Synthetic oligonucleotide
aauaguuacccagagacag

SEQ ID NO: 1366419 - RNA, 19 nt, Artificial Sequence
  Description of Artificial Sequence: Synthetic oligonucleotide
acaaugaaaauaguuaccc

SEQ ID NO: 1366420 - RNA, 19 nt, Artificial Sequence
  Description of Artificial Sequence: Synthetic oligonucleotide
auauccagcagcuucacac

SEQ ID NO: 1366421 - RNA, 19 nt, Artificial Sequence
  Description of Artificial Sequence: Synthetic oligonucleotide
aagacauagaaaucccugg

SEQ ID NO: 1366422 - RNA, 19 nt, Artificial Sequence
  Description of Artificial Sequence: Synthetic oligonucleotide
agauauauccagcagcuuc

SEQ ID NO: 1366423 - RNA, 19 nt, Artificial Sequence
  Description of Artificial Sequence: Synthetic oligonucleotide
uuacaaugaaaauaguuac

SEQ ID NO: 1366424 - RNA, 19 nt, Artificial Sequence
  Description of Artificial Sequence: Synthetic oligonucleotide
aauacucauaucauuuuac

SEQ ID NO: 1366425 - RNA, 19 nt, Artificial Sequence
  Description of Artificial Sequence: Synthetic oligonucleotide
ucuaaagucuuucuccucc

SEQ ID NO: 1366426 - RNA, 19 nt, Artificial Sequence
  Description of Artificial Sequence: Synthetic oligonucleotide
cuugaucuggaucacaucc

SEQ ID NO: 1366427 - RNA, 19 nt, Artificial Sequence
  Description of Artificial Sequence: Synthetic oligonucleotide
cacuguuauacauaggugc

SEQ ID NO: 1366428 - RNA, 19 nt, Artificial Sequence
  Description of Artificial Sequence: Synthetic oligonucleotide
uucgggaugccuuugagag

SEQ ID NO: 1366429 - RNA, 19 nt, Artificial Sequence
  Description of Artificial Sequence: Synthetic oligonucleotide
agacauagaaaucccuggc

SEQ ID NO: 1366430 - RNA, 19 nt, Artificial Sequence
  Description of Artificial Sequence: Synthetic oligonucleotide
ucuacuagcaugguggugc

SEQ ID NO: 1366431 - RNA, 19 nt, Artificial Sequence
  Description of Artificial Sequence: Synthetic oligonucleotide
uaguucaucucgaacacug

SEQ ID NO: 1366432 - RNA, 19 nt, Artificial Sequence
  Description of Artificial Sequence: Synthetic oligonucleotide
acauagaaaucccuggcag

SEQ ID NO: 1366433 - RNA, 19 nt, Artificial Sequence
  Description of Artificial Sequence: Synthetic oligonucleotide
cucagauauauccagcagc

SEQ ID NO: 1366434 - RNA, 19 nt, Artificial Sequence
  Description of Artificial Sequence: Synthetic oligonucleotide
aaagacauagaaaucccug

SEQ ID NO: 1366435 - RNA, 19 nt, Artificial Sequence
  Description of Artificial Sequence: Synthetic oligonucleotide
ucagaggcgagguaggugc

SEQ ID NO: 1366436 - RNA, 19 nt, Artificial Sequence
  Description of Artificial Sequence: Synthetic oligonucleotide
ucuugaaucguguccacug

SEQ ID NO: 1366437 - RNA, 19 nt, Artificial Sequence
  Description of Artificial Sequence: Synthetic oligonucleotide
guuuaaacugagcuggcag

SEQ ID NO: 1366438 - RNA, 19 nt, Artificial Sequence
  Description of Artificial Sequence: Synthetic oligonucleotide
acuguuauacauaggugcc

SEQ ID NO: 1366439 - RNA, 19 nt, Artificial Sequence
  Description of Artificial Sequence: Synthetic oligonucleotide
aaucguguccacuggcccg

SEQ ID NO: 1366440 - RNA, 19 nt, Artificial Sequence
  Description of Artificial Sequence: Synthetic oligonucleotide
cuuuguuuaaacugagcug

SEQ ID NO: 1366441 - RNA, 19 nt, Artificial Sequence
  Description of Artificial Sequence: Synthetic oligonucleotide
gcagguaacuuguagaggg

SEQ ID NO: 1366442 - RNA, 19 nt, Artificial Sequence
  Description of Artificial Sequence: Synthetic oligonucleotide
uuugagagggguuguagug

SEQ ID NO: 1366443 - RNA, 19 nt, Artificial Sequence
  Description of Artificial Sequence: Synthetic oligonucleotide
uggcucacuauucaaagac

SEQ ID NO: 1366444 - RNA, 19 nt, Artificial Sequence
  Description of Artificial Sequence: Synthetic oligonucleotide
ucuugugagggacagguuc

SEQ ID NO: 1366445 - RNA, 19 nt, Artificial Sequence
  Description of Artificial Sequence: Synthetic oligonucleotide
auggguucucucgagaacc

SEQ ID NO: 1366446 - RNA, 19 nt, Artificial Sequence
  Description of Artificial Sequence: Synthetic oligonucleotide
cagucaguaacagugaggc

SEQ ID NO: 1366447 - RNA, 19 nt, Artificial Sequence
  Description of Artificial Sequence: Synthetic oligonucleotide
agaaccagccaugaagccc

SEQ ID NO: 1366448 - RNA, 19 nt, Artificial Sequence
  Description of Artificial Sequence: Synthetic oligonucleotide
guaacagugaggcugguca

SEQ ID NO: 1366449 - RNA, 19 nt, Artificial Sequence
  Description of Artificial Sequence: Synthetic oligonucleotide
gaaauguuuacaacuguac

SEQ ID NO: 1366450 - RNA, 19 nt, Artificial Sequence
  Description of Artificial Sequence: Synthetic oligonucleotide
agcaguacuugucuucugg

SEQ ID NO: 1366451 - RNA, 19 nt, Artificial Sequence
  Description of Artificial Sequence: Synthetic oligonucleotide
ugugucuaaagucuuucuc

SEQ ID NO: 1366452 - RNA, 19 nt, Artificial Sequence
  Description of Artificial Sequence: Synthetic oligonucleotide
agcugaaaaugcuucacug

SEQ ID NO: 1366453 - RNA, 19 nt, Artificial Sequence
  Description of Artificial Sequence: Synthetic oligonucleotide
uauacauaggugcccuuug

SEQ ID NO: 1366454 - RNA, 19 nt, Artificial Sequence
  Description of Artificial Sequence: Synthetic oligonucleotide
uucaucucgaacacugugu

SEQ ID NO: 1366455 - RNA, 19 nt, Artificial Sequence
  Description of Artificial Sequence: Synthetic oligonucleotide
ugucuaaagucuuucuccu

SEQ ID NO: 1366456 - RNA, 19 nt, Artificial Sequence
  Description of Artificial Sequence: Synthetic oligonucleotide
uuagguugcugcugaacag

SEQ ID NO: 1366457 - RNA, 19 nt, Artificial Sequence
  Description of Artificial Sequence: Synthetic oligonucleotide
uccgcuucagcugaaaaug

SEQ ID NO: 1366458 - RNA, 19 nt, Artificial Sequence
  Description of Artificial Sequence: Synthetic oligonucleotide
ugaaucguguccacuggcc

SEQ ID NO: 1366459 - RNA, 19 nt, Artificial Sequence
  Description of Artificial Sequence: Synthetic oligonucleotide
ucagcagcggagauggccc

SEQ ID NO: 1366460 - RNA, 19 nt, Artificial Sequence
  Description of Artificial Sequence: Synthetic oligonucleotide
ugcccuuuguuuaaacuga

SEQ ID NO: 1366461 - RNA, 19 nt, Artificial Sequence
  Description of Artificial Sequence: Synthetic oligonucleotide
uacucauaucauuuuacaa

SEQ ID NO: 1366462 - RNA, 19 nt, Artificial Sequence
  Description of Artificial Sequence: Synthetic oligonucleotide
aucuguucucuugugaggg

SEQ ID NO: 1366463 - RNA, 19 nt, Artificial Sequence
  Description of Artificial Sequence: Synthetic oligonucleotide
ucugugugcucgcugagcu

SEQ ID NO: 1366464 - RNA, 19 nt, Artificial Sequence
  Description of Artificial Sequence: Synthetic oligonucleotide
cuuggcgugaaauggcacc

SEQ ID NO: 1366465 - RNA, 19 nt, Artificial Sequence
  Description of Artificial Sequence: Synthetic oligonucleotide
aaggcaugcacaagcagag

SEQ ID NO: 1366466 - RNA, 19 nt, Artificial Sequence
  Description of Artificial Sequence: Synthetic oligonucleotide
ucuguguggacaccaggcc

SEQ ID NO: 1366467 - RNA, 19 nt, Artificial Sequence
  Description of Artificial Sequence: Synthetic oligonucleotide
guaguguccaucuugcgga

SEQ ID NO: 1366468 - RNA, 19 nt, Artificial Sequence
  Description of Artificial Sequence: Synthetic oligonucleotide
auuugucaugggcuuguac

SEQ ID NO: 1366469 - RNA, 19 nt, Artificial Sequence
  Description of Artificial Sequence: Synthetic oligonucleotide
ggucacuuagcauagccag

SEQ ID NO: 1366470 - RNA, 19 nt, Artificial Sequence
  Description of Artificial Sequence: Synthetic oligonucleotide
cacugugucuacuagcaug

SEQ ID NO: 1366471 - RNA, 19 nt, Artificial Sequence
  Description of Artificial Sequence: Synthetic oligonucleotide
ucaucucgaacacuguguc

SEQ ID NO: 1366472 - RNA, 19 nt, Artificial Sequence
  Description of Artificial Sequence: Synthetic oligonucleotide
gaacuggggauguaagaug

SEQ ID NO: 1366473 - RNA, 19 nt, Artificial Sequence
  Description of Artificial Sequence: Synthetic oligonucleotide
acuucugugucuaaagucu

SEQ ID NO: 1366474 - RNA, 19 nt, Artificial Sequence
  Description of Artificial Sequence: Synthetic oligonucleotide
uguuauacauaggugcccu

SEQ ID NO: 1366475 - RNA, 19 nt, Artificial Sequence
  Description of Artificial Sequence: Synthetic oligonucleotide
ucucucgagaaccagccau

SEQ ID NO: 1366476 - RNA, 19 nt, Artificial Sequence
  Description of Artificial Sequence: Synthetic oligonucleotide
gauauauccagcagcuuca

SEQ ID NO: 1366477 - RNA, 19 nt, Artificial Sequence
  Description of Artificial Sequence: Synthetic oligonucleotide
cuugaaucguguccacugg

SEQ ID NO: 1366478 - RNA, 19 nt, Artificial Sequence
  Description of Artificial Sequence: Synthetic oligonucleotide
gaaucguguccacuggccc

SEQ ID NO: 1366479 - RNA, 19 nt, Artificial Sequence
  Description of Artificial Sequence: Synthetic oligonucleotide
uaguuacccagagacaggc

SEQ ID NO: 1366480 - RNA, 19 nt, Artificial Sequence
  Description of Artificial Sequence: Synthetic oligonucleotide
guagagggcagguaacuug

SEQ ID NO: 1366481 - RNA, 19 nt, Artificial Sequence
  Description of Artificial Sequence: Synthetic oligonucleotide
guuguaguguccaucuugc

SEQ ID NO: 1366482 - RNA, 19 nt, Artificial Sequence
  Description of Artificial Sequence: Synthetic oligonucleotide
uaagaugaggcagguacca

SEQ ID NO: 1366483 - RNA, 19 nt, Artificial Sequence
  Description of Artificial Sequence: Synthetic oligonucleotide
cuuagguugcugcugaaca

SEQ ID NO: 1366484 - RNA, 19 nt, Artificial Sequence
  Description of Artificial Sequence: Synthetic oligonucleotide
cuggaaggugguauugggg

SEQ ID NO: 1366485 - RNA, 19 nt, Artificial Sequence
  Description of Artificial Sequence: Synthetic oligonucleotide
ugugugcucgcugagcuug

SEQ ID NO: 1366486 - RNA, 19 nt, Artificial Sequence
  Description of Artificial Sequence: Synthetic oligonucleotide
gaaggcaugcacaagcaga

SEQ ID NO: 1366487 - RNA, 19 nt, Artificial Sequence
  Description of Artificial Sequence: Synthetic oligonucleotide
cacuucugugucuaaaguc

SEQ ID NO: 1366488 - RNA, 19 nt, Artificial Sequence
  Description of Artificial Sequence: Synthetic oligonucleotide
aaauaguuacccagagaca

SEQ ID NO: 1366489 - RNA, 19 nt, Artificial Sequence
  Description of Artificial Sequence: Synthetic oligonucleotide
aggaugagggccuucucug

SEQ ID NO: 1366490 - RNA, 19 nt, Artificial Sequence
  Description of Artificial Sequence: Synthetic oligonucleotide
uuguuuaaacugagcuggc

SEQ ID NO: 1366491 - RNA, 19 nt, Artificial Sequence
  Description of Artificial Sequence: Synthetic oligonucleotide
uguagagggaagugcuggc

SEQ ID NO: 1366492 - RNA, 19 nt, Artificial Sequence
  Description of Artificial Sequence: Synthetic oligonucleotide
caggucacuuagcauagcc

SEQ ID NO: 1366493 - RNA, 19 nt, Artificial Sequence
  Description of Artificial Sequence: Synthetic oligonucleotide
cucaguggacuucuguagc

SEQ ID NO: 1366494 - RNA, 19 nt, Artificial Sequence
  Description of Artificial Sequence: Synthetic oligonucleotide
gagggcagguaacuuguag

SEQ ID NO: 1366495 - RNA, 19 nt, Artificial Sequence
  Description of Artificial Sequence: Synthetic oligonucleotide
aguagccugugaaugacag

SEQ ID NO: 1366496 - RNA, 19 nt, Artificial Sequence
  Description of Artificial Sequence: Synthetic oligonucleotide
agugcuggcucacuauuca

SEQ ID NO: 1366497 - RNA, 19 nt, Artificial Sequence
  Description of Artificial Sequence: Synthetic oligonucleotide
ggcaguguaggacuugggg

SEQ ID NO: 1366498 - RNA, 19 nt, Artificial Sequence
  Description of Artificial Sequence: Synthetic oligonucleotide
cuguauucagcucagauau

SEQ ID NO: 1366499 - RNA, 19 nt, Artificial Sequence
  Description of Artificial Sequence: Synthetic oligonucleotide
uccaucuugcggagcagcc

SEQ ID NO: 1366500 - RNA, 19 nt, Artificial Sequence
  Description of Artificial Sequence: Synthetic oligonucleotide
auagccagcaguacuuguc

SEQ ID NO: 1366501 - RNA, 19 nt, Artificial Sequence
  Description of Artificial Sequence: Synthetic oligonucleotide
uggugggacuucugaaggg

SEQ ID NO: 1366502 - RNA, 19 nt, Artificial Sequence
  Description of Artificial Sequence: Synthetic oligonucleotide
uuguaguguccaucuugcg

SEQ ID NO: 1366503 - RNA, 19 nt, Artificial Sequence
  Description of Artificial Sequence: Synthetic oligonucleotide
uucgguaucugcucagguc

SEQ ID NO: 1366504 - RNA, 19 nt, Artificial Sequence
  Description of Artificial Sequence: Synthetic oligonucleotide
cuuagcauagccagcagua

SEQ ID NO: 1366505 - RNA, 19 nt, Artificial Sequence
  Description of Artificial Sequence: Synthetic oligonucleotide
uguucucuugugagggaca

SEQ ID NO: 1366506 - RNA, 19 nt, Artificial Sequence
  Description of Artificial Sequence: Synthetic oligonucleotide
uggcccuuaggacacauuu

SEQ ID NO: 1366507 - RNA, 19 nt, Artificial Sequence
  Description of Artificial Sequence: Synthetic oligonucleotide
aggcagguaccacacuggg

SEQ ID NO: 1366508 - RNA, 19 nt, Artificial Sequence
  Description of Artificial Sequence: Synthetic oligonucleotide
ugcacaagcagagaacuuu

SEQ ID NO: 1366509 - RNA, 19 nt, Artificial Sequence
  Description of Artificial Sequence: Synthetic oligonucleotide
guaggugucagaggcgagg

SEQ ID NO: 1366510 - RNA, 19 nt, Artificial Sequence
  Description of Artificial Sequence: Synthetic oligonucleotide
gaugaggcagguaccacac

SEQ ID NO: 1366511 - RNA, 19 nt, Artificial Sequence
  Description of Artificial Sequence: Synthetic oligonucleotide
aagugcuggcucacuauuc

SEQ ID NO: 1366512 - RNA, 19 nt, Artificial Sequence
  Description of Artificial Sequence: Synthetic oligonucleotide
guagcaguucugcucggag

SEQ ID NO: 1366513 - RNA, 19 nt, Artificial Sequence
  Description of Artificial Sequence: Synthetic oligonucleotide
gagaaccagccaugaagcc

SEQ ID NO: 1366514 - RNA, 19 nt, Artificial Sequence
  Description of Artificial Sequence: Synthetic oligonucleotide
aggugucaccuuugguccc

SEQ ID NO: 1366515 - RNA, 19 nt, Artificial Sequence
  Description of Artificial Sequence: Synthetic oligonucleotide
ggacacauuugucaugggc

SEQ ID NO: 1366516 - RNA, 19 nt, Artificial Sequence
  Description of Artificial Sequence: Synthetic oligonucleotide
caaugaaaauaguuaccca

SEQ ID NO: 1366517 - RNA, 19 nt, Artificial Sequence
  Description of Artificial Sequence: Synthetic oligonucleotide
uuccgcuucagcugaaaau

SEQ ID NO: 1366518 - RNA, 19 nt, Artificial Sequence
  Description of Artificial Sequence: Synthetic oligonucleotide
gcagugguguccuggaagg

SEQ ID NO: 1366519 - RNA, 19 nt, Artificial Sequence
  Description of Artificial Sequence: Synthetic oligonucleotide
ugccaggugucaccuuugg

SEQ ID NO: 1366520 - RNA, 19 nt, Artificial Sequence
  Description of Artificial Sequence: Synthetic oligonucleotide
auacauaggugcccuuugu

SEQ ID NO: 1366521 - RNA, 19 nt, Artificial Sequence
  Description of Artificial Sequence: Synthetic oligonucleotide
caguguaggacuuggggca

SEQ ID NO: 1366522 - RNA, 19 nt, Artificial Sequence
  Description of Artificial Sequence: Synthetic oligonucleotide
ggccgagugaccuuguuug

SEQ ID NO: 1366523 - RNA, 19 nt, Artificial Sequence
  Description of Artificial Sequence: Synthetic oligonucleotide
uuggcgugaaauggcaccc

SEQ ID NO: 1366524 - RNA, 19 nt, Artificial Sequence
  Description of Artificial Sequence: Synthetic oligonucleotide
guaagaugaggcagguacc

SEQ ID NO: 1366525 - RNA, 19 nt, Artificial Sequence
  Description of Artificial Sequence: Synthetic oligonucleotide
ugcuggcucacuauucaaa

SEQ ID NO: 1366526 - RNA, 19 nt, Artificial Sequence
  Description of Artificial Sequence: Synthetic oligonucleotide
aaaucccuggcagucagua

SEQ ID NO: 1366527 - RNA, 19 nt, Artificial Sequence
  Description of Artificial Sequence: Synthetic oligonucleotide
gcuugaaauguuuacaacu

SEQ ID NO: 1366528 - RNA, 19 nt, Artificial Sequence
  Description of Artificial Sequence: Synthetic oligonucleotide
auauauccagcagcuucac

SEQ ID NO: 1366529 - RNA, 19 nt, Artificial Sequence
  Description of Artificial Sequence: Synthetic oligonucleotide
agugaccuuguuugccguc

SEQ ID NO: 1366530 - RNA, 19 nt, Artificial Sequence
  Description of Artificial Sequence: Synthetic oligonucleotide
uggagcacauccuucggua

SEQ ID NO: 1366531 - RNA, 19 nt, Artificial Sequence
  Description of Artificial Sequence: Synthetic oligonucleotide
gcguaguucaucucgaaca

SEQ ID NO: 1366532 - RNA, 19 nt, Artificial Sequence
  Description of Artificial Sequence: Synthetic oligonucleotide
cuguuauacauaggugccc

SEQ ID NO: 1366533 - RNA, 19 nt, Artificial Sequence
  Description of Artificial Sequence: Synthetic oligonucleotide
uuuccgcuucagcugaaaa

SEQ ID NO: 1366534 - RNA, 19 nt, Artificial Sequence
  Description of Artificial Sequence: Synthetic oligonucleotide
auaguuacccagagacagg

SEQ ID NO: 1366535 - RNA, 19 nt, Artificial Sequence
  Description of Artificial Sequence: Synthetic oligonucleotide
ugucuacuagcaugguggu

SEQ ID NO: 1366536 - RNA, 19 nt, Artificial Sequence
  Description of Artificial Sequence: Synthetic oligonucleotide
ucgggaugccuuugagagg

SEQ ID NO: 1366537 - RNA, 19 nt, Artificial Sequence
  Description of Artificial Sequence: Synthetic oligonucleotide
gggauguaagaugaggcag

SEQ ID NO: 1366538 - RNA, 19 nt, Artificial Sequence
  Description of Artificial Sequence: Synthetic oligonucleotide
uuagcauagccagcaguac

SEQ ID NO: 1366539 - RNA, 19 nt, Artificial Sequence
  Description of Artificial Sequence: Synthetic oligonucleotide
ucgaacacugugucuacua

SEQ ID NO: 1366540 - RNA, 19 nt, Artificial Sequence
  Description of Artificial Sequence: Synthetic oligonucleotide
uuggugggcuuuuccacca

SEQ ID NO: 1366541 - RNA, 19 nt, Artificial Sequence
  Description of Artificial Sequence: Synthetic oligonucleotide
aguggacuucuguagcagu

SEQ ID NO: 1366542 - RNA, 19 nt, Artificial Sequence
  Description of Artificial Sequence: Synthetic oligonucleotide
uggucggcuggcuucccgg

SEQ ID NO: 1366543 - RNA, 19 nt, Artificial Sequence
  Description of Artificial Sequence: Synthetic oligonucleotide
aguaacagugaggcugguc

SEQ ID NO: 1366544 - RNA, 19 nt, Artificial Sequence
  Description of Artificial Sequence: Synthetic oligonucleotide
gcucacuauucaaagaccc

SEQ ID NO: 1366545 - RNA, 19 nt, Artificial Sequence
  Description of Artificial Sequence: Synthetic oligonucleotide
acacauuugucaugggcuu

SEQ ID NO: 1366546 - RNA, 19 nt, Artificial Sequence
  Description of Artificial Sequence: Synthetic oligonucleotide
aucucgaacacugugucua

SEQ ID NO: 1366547 - RNA, 19 nt, Artificial Sequence
  Description of Artificial Sequence: Synthetic oligonucleotide
ucacgcccuagccugccag

SEQ ID NO: 1366548 - RNA, 19 nt, Artificial Sequence
  Description of Artificial Sequence: Synthetic oligonucleotide
agaguggcacucuuggguu

SEQ ID NO: 1366549 - RNA, 19 nt, Artificial Sequence
  Description of Artificial Sequence: Synthetic oligonucleotide
augccuuugagagggguug

SEQ ID NO: 1366550 - RNA, 19 nt, Artificial Sequence
  Description of Artificial Sequence: Synthetic oligonucleotide
aguguaggacuuggggcac

SEQ ID NO: 1366551 - RNA, 19 nt, Artificial Sequence
  Description of Artificial Sequence: Synthetic oligonucleotide
cauccuucgguaucugcuc

SEQ ID NO: 1366552 - RNA, 19 nt, Artificial Sequence
  Description of Artificial Sequence: Synthetic oligonucleotide
ucggagaguggcacucuug

SEQ ID NO: 1366553 - RNA, 19 nt, Artificial Sequence
  Description of Artificial Sequence: Synthetic oligonucleotide
aggugcccuuuguuuaaac

SEQ ID NO: 1366554 - RNA, 19 nt, Artificial Sequence
  Description of Artificial Sequence: Synthetic oligonucleotide
guaguaggugucagaggcg

SEQ ID NO: 1366555 - RNA, 19 nt, Artificial Sequence
  Description of Artificial Sequence: Synthetic oligonucleotide
aaggugguauugggguccg

SEQ ID NO: 1366556 - RNA, 19 nt, Artificial Sequence
  Description of Artificial Sequence: Synthetic oligonucleotide
uugggcagauccucugugu

SEQ ID NO: 1366557 - RNA, 19 nt, Artificial Sequence
  Description of Artificial Sequence: Synthetic oligonucleotide
cuucuuagguugcugcuga

SEQ ID NO: 1366558 - RNA, 19 nt, Artificial Sequence
  Description of Artificial Sequence: Synthetic oligonucleotide
ggguccgguucccagaggg

SEQ ID NO: 1366559 - RNA, 19 nt, Artificial Sequence
  Description of Artificial Sequence: Synthetic oligonucleotide
cagauccucugugugcucg

SEQ ID NO: 1366560 - RNA, 19 nt, Artificial Sequence
  Description of Artificial Sequence: Synthetic oligonucleotide
uggcaguguaggacuuggg

SEQ ID NO: 1366561 - RNA, 19 nt, Artificial Sequence
  Description of Artificial Sequence: Synthetic oligonucleotide
gagauggcccuuaggacac

SEQ ID NO: 1366562 - RNA, 19 nt, Artificial Sequence
  Description of Artificial Sequence: Synthetic oligonucleotide
ucccuggcagucaguaaca

SEQ ID NO: 1366563 - RNA, 19 nt, Artificial Sequence
  Description of Artificial Sequence: Synthetic oligonucleotide
cauaggugcccuuuguuua

SEQ ID NO: 1366564 - RNA, 19 nt, Artificial Sequence
  Description of Artificial Sequence: Synthetic oligonucleotide
gguguagcugggcucaggc

SEQ ID NO: 1366565 - RNA, 19 nt, Artificial Sequence
  Description of Artificial Sequence: Synthetic oligonucleotide
uggguucucucgagaacca

SEQ ID NO: 1366566 - RNA, 19 nt, Artificial Sequence
  Description of Artificial Sequence: Synthetic oligonucleotide
auaggugcccuuuguuuaa

SEQ ID NO: 1366567 - RNA, 19 nt, Artificial Sequence
  Description of Artificial Sequence: Synthetic oligonucleotide
ccuuaggacacauuuguca

SEQ ID NO: 1366568 - RNA, 19 nt, Artificial Sequence
  Description of Artificial Sequence: Synthetic oligonucleotide
cucacuauucaaagaccca

SEQ ID NO: 1366569 - RNA, 19 nt, Artificial Sequence
  Description of Artificial Sequence: Synthetic oligonucleotide
acauuugucaugggcuugu

SEQ ID NO: 1366570 - RNA, 19 nt, Artificial Sequence
  Description of Artificial Sequence: Synthetic oligonucleotide
cuuaggacacauuugucau

SEQ ID NO: 1366571 - RNA, 19 nt, Artificial Sequence
  Description of Artificial Sequence: Synthetic oligonucleotide
aaucccuggcagucaguaa

SEQ ID NO: 1366572 - RNA, 19 nt, Artificial Sequence
  Description of Artificial Sequence: Synthetic oligonucleotide
uucucucgagaaccagcca

SEQ ID NO: 1366573 - RNA, 19 nt, Artificial Sequence
  Description of Artificial Sequence: Synthetic oligonucleotide
gguaacuuguagagggaag

SEQ ID NO: 1366574 - RNA, 19 nt, Artificial Sequence
  Description of Artificial Sequence: Synthetic oligonucleotide
ucucgaacacugugucuac

SEQ ID NO: 1366575 - RNA, 19 nt, Artificial Sequence
  Description of Artificial Sequence: Synthetic oligonucleotide
cuggccgucugccuugggc

SEQ ID NO: 1366576 - RNA, 19 nt, Artificial Sequence
  Description of Artificial Sequence: Synthetic oligonucleotide
ucucgagaaccagccauga

SEQ ID NO: 1366577 - RNA, 19 nt, Artificial Sequence
  Description of Artificial Sequence: Synthetic oligonucleotide
ugagggucagcagcggaga

SEQ ID NO: 1366578 - RNA, 19 nt, Artificial Sequence
  Description of Artificial Sequence: Synthetic oligonucleotide
aguguccaucuugcggagc

SEQ ID NO: 1366579 - RNA, 19 nt, Artificial Sequence
  Description of Artificial Sequence: Synthetic oligonucleotide
uaacagugaggcuggucau

SEQ ID NO: 1366580 - RNA, 19 nt, Artificial Sequence
  Description of Artificial Sequence: Synthetic oligonucleotide
gcucaggucacuuagcaua

SEQ ID NO: 1366581 - RNA, 19 nt, Artificial Sequence
  Description of Artificial Sequence: Synthetic oligonucleotide
gcggagauggcccuuagga

SEQ ID NO: 1366582 - RNA, 19 nt, Artificial Sequence
  Description of Artificial Sequence: Synthetic oligonucleotide
cuguucucuugugagggac

SEQ ID NO: 1366583 - RNA, 19 nt, Artificial Sequence
  Description of Artificial Sequence: Synthetic oligonucleotide
ggcuugaaauguuuacaac

SEQ ID NO: 1366584 - RNA, 19 nt, Artificial Sequence
  Description of Artificial Sequence: Synthetic oligonucleotide
auccuucgguaucugcuca

SEQ ID NO: 1366585 - RNA, 19 nt, Artificial Sequence
  Description of Artificial Sequence: Synthetic oligonucleotide
cuagcaugguggugcugcc

SEQ ID NO: 1366586 - RNA, 19 nt, Artificial Sequence
  Description of Artificial Sequence: Synthetic oligonucleotide
ggaaggcaugcacaagcag

SEQ ID NO: 1366587 - RNA, 19 nt, Artificial Sequence
  Description of Artificial Sequence: Synthetic oligonucleotide
ggaugagggccuucucugg

SEQ ID NO: 1366588 - RNA, 19 nt, Artificial Sequence
  Description of Artificial Sequence: Synthetic oligonucleotide
ugucucuuccuuggugggc

SEQ ID NO: 1366589 - RNA, 19 nt, Artificial Sequence
  Description of Artificial Sequence: Synthetic oligonucleotide
gucucaguggacuucugua

SEQ ID NO: 1366590 - RNA, 19 nt, Artificial Sequence
  Description of Artificial Sequence: Synthetic oligonucleotide
gcucaggccacuguuauac

SEQ ID NO: 1366591 - RNA, 19 nt, Artificial Sequence
  Description of Artificial Sequence: Synthetic oligonucleotide
gucugcggggccaccaugg

SEQ ID NO: 1366592 - RNA, 19 nt, Artificial Sequence
  Description of Artificial Sequence: Synthetic oligonucleotide
guuucuguguggacaccag

SEQ ID NO: 1366593 - RNA, 19 nt, Artificial Sequence
  Description of Artificial Sequence: Synthetic oligonucleotide
gucacuuagcauagccagc

SEQ ID NO: 1366594 - RNA, 19 nt, Artificial Sequence
  Description of Artificial Sequence: Synthetic oligonucleotide
guucugcucggagaguggc

SEQ ID NO: 1366595 - RNA, 19 nt, Artificial Sequence
  Description of Artificial Sequence: Synthetic oligonucleotide
uguagcaguucugcucgga

SEQ ID NO: 1366596 - RNA, 19 nt, Artificial Sequence
  Description of Artificial Sequence: Synthetic oligonucleotide
ggcgugaaauggcaccccg

SEQ ID NO: 1366597 - RNA, 19 nt, Artificial Sequence
  Description of Artificial Sequence: Synthetic oligonucleotide
gcaguacuugucuucuggc

SEQ ID NO: 1366598 - RNA, 19 nt, Artificial Sequence
  Description of Artificial Sequence: Synthetic oligonucleotide
gaccuuguuugccgucuug

SEQ ID NO: 1366599 - RNA, 19 nt, Artificial Sequence
  Description of Artificial Sequence: Synthetic oligonucleotide
ggggauguaagaugaggca

SEQ ID NO: 1366600 - RNA, 19 nt, Artificial Sequence
  Description of Artificial Sequence: Synthetic oligonucleotide
agguggucggcuggcuucc

SEQ ID NO: 1366601 - RNA, 19 nt, Artificial Sequence
  Description of Artificial Sequence: Synthetic oligonucleotide
agcuugaucuggaucacau

SEQ ID NO: 1366602 - RNA, 19 nt, Artificial Sequence
  Description of Artificial Sequence: Synthetic oligonucleotide
cuucgggaugccuuugaga

SEQ ID NO: 1366603 - RNA, 19 nt, Artificial Sequence
  Description of Artificial Sequence: Synthetic oligonucleotide
ugcucaggucacuuagcau

SEQ ID NO: 1366604 - RNA, 19 nt, Artificial Sequence
  Description of Artificial Sequence: Synthetic oligonucleotide
caggcuugaaauguuuaca

SEQ ID NO: 1366605 - RNA, 19 nt, Artificial Sequence
  Description of Artificial Sequence: Synthetic oligonucleotide
gaggcgagguaggugcugc

SEQ ID NO: 1366606 - RNA, 19 nt, Artificial Sequence
  Description of Artificial Sequence: Synthetic oligonucleotide
uuugccucucggccagcac

SEQ ID NO: 1366607 - RNA, 19 nt, Artificial Sequence
  Description of Artificial Sequence: Synthetic oligonucleotide
gacagguucuucuuagguu

SEQ ID NO: 1366608 - RNA, 19 nt, Artificial Sequence
  Description of Artificial Sequence: Synthetic oligonucleotide
agguaacuuguagagggaa

SEQ ID NO: 1366609 - RNA, 19 nt, Artificial Sequence
  Description of Artificial Sequence: Synthetic oligonucleotide
uguccuggaaggugguauu

SEQ ID NO: 1366610 - RNA, 19 nt, Artificial Sequence
  Description of Artificial Sequence: Synthetic oligonucleotide
guguagcugggcucaggcc

SEQ ID NO: 1366611 - RNA, 19 nt, Artificial Sequence
  Description of Artificial Sequence: Synthetic oligonucleotide
agcauagucagggguggca

SEQ ID NO: 1366612 - RNA, 19 nt, Artificial Sequence
  Description of Artificial Sequence: Synthetic oligonucleotide
gguggagcacauccuucgg

SEQ ID NO: 1366613 - RNA, 19 nt, Artificial Sequence
  Description of Artificial Sequence: Synthetic oligonucleotide
ggugccugggucugcgggg

SEQ ID NO: 1366614 - RNA, 19 nt, Artificial Sequence
  Description of Artificial Sequence: Synthetic oligonucleotide
aggucacuuagcauagcca

SEQ ID NO: 1366615 - RNA, 19 nt, Artificial Sequence
  Description of Artificial Sequence: Synthetic oligonucleotide
gguucucucgagaaccagc

SEQ ID NO: 1366616 - RNA, 19 nt, Artificial Sequence
  Description of Artificial Sequence: Synthetic oligonucleotide
uaucugcucaggucacuua

SEQ ID NO: 1366617 - RNA, 19 nt, Artificial Sequence
  Description of Artificial Sequence: Synthetic oligonucleotide
gggugaggggcccagcgag

SEQ ID NO: 1366618 - RNA, 19 nt, Artificial Sequence
  Description of Artificial Sequence: Synthetic oligonucleotide
cauagaaaucccuggcagu

SEQ ID NO: 1366619 - RNA, 19 nt, Artificial Sequence
  Description of Artificial Sequence: Synthetic oligonucleotide
caugcacaagcagagaacu

SEQ ID NO: 1366620 - RNA, 19 nt, Artificial Sequence
  Description of Artificial Sequence: Synthetic oligonucleotide
auagucagggguggcauuu

SEQ ID NO: 1366621 - RNA, 19 nt, Artificial Sequence
  Description of Artificial Sequence: Synthetic oligonucleotide
uuggcuucgggaugccuuu

SEQ ID NO: 1366622 - RNA, 19 nt, Artificial Sequence
  Description of Artificial Sequence: Synthetic oligonucleotide
gaggggcccagcgagggug

SEQ ID NO: 1366623 - RNA, 19 nt, Artificial Sequence
  Description of Artificial Sequence: Synthetic oligonucleotide
cagggguggcauuuucaac

SEQ ID NO: 1366624 - RNA, 19 nt, Artificial Sequence
  Description of Artificial Sequence: Synthetic oligonucleotide
cuuugagagggguuguagu

SEQ ID NO: 1366625 - RNA, 19 nt, Artificial Sequence
  Description of Artificial Sequence: Synthetic oligonucleotide
gggacagguucuucuuagg

SEQ ID NO: 1366626 - RNA, 19 nt, Artificial Sequence
  Description of Artificial Sequence: Synthetic oligonucleotide
uggccgagugaccuuguuu

SEQ ID NO: 1366627 - RNA, 19 nt, Artificial Sequence
  Description of Artificial Sequence: Synthetic oligonucleotide
cuugugagggacagguucu

SEQ ID NO: 1366628 - RNA, 19 nt, Artificial Sequence
  Description of Artificial Sequence: Synthetic oligonucleotide
guuacccagagacaggcuu

SEQ ID NO: 1366629 - RNA, 19 nt, Artificial Sequence
  Description of Artificial Sequence: Synthetic oligonucleotide
cuggcucacuauucaaaga

SEQ ID NO: 1366630 - RNA, 19 nt, Artificial Sequence
  Description of Artificial Sequence: Synthetic oligonucleotide
cacauuugucaugggcuug

SEQ ID NO: 1366631 - RNA, 19 nt, Artificial Sequence
  Description of Artificial Sequence: Synthetic oligonucleotide
gauguaagaugaggcaggu

SEQ ID NO: 1366632 - RNA, 19 nt, Artificial Sequence
  Description of Artificial Sequence: Synthetic oligonucleotide
cgagugaccuuguuugccg

SEQ ID NO: 1366633 - RNA, 19 nt, Artificial Sequence
  Description of Artificial Sequence: Synthetic oligonucleotide
ggcguaguucaucucgaac

SEQ ID NO: 1366634 - RNA, 19 nt, Artificial Sequence
  Description of Artificial Sequence: Synthetic oligonucleotide
ggcucacuauucaaagacc

SEQ ID NO: 1366635 - RNA, 19 nt, Artificial Sequence
  Description of Artificial Sequence: Synthetic oligonucleotide
cucugugugcucgcugagc

SEQ ID NO: 1366636 - RNA, 19 nt, Artificial Sequence
  Description of Artificial Sequence: Synthetic oligonucleotide
cacgcccuagccugccagg

SEQ ID NO: 1366637 - RNA, 19 nt, Artificial Sequence
  Description of Artificial Sequence: Synthetic oligonucleotide
uucuggccugaugaggguc

SEQ ID NO: 1366638 - RNA, 19 nt, Artificial Sequence
  Description of Artificial Sequence: Synthetic oligonucleotide
gucagaggcgagguaggug

SEQ ID NO: 1366639 - RNA, 19 nt, Artificial Sequence
  Description of Artificial Sequence: Synthetic oligonucleotide
ucaggucacuuagcauagc

SEQ ID NO: 1366640 - RNA, 19 nt, Artificial Sequence
  Description of Artificial Sequence: Synthetic oligonucleotide
uguuccgggcauggguucu

SEQ ID NO: 1366641 - RNA, 19 nt, Artificial Sequence
  Description of Artificial Sequence: Synthetic oligonucleotide
ccgggcauggguucucucg

SEQ ID NO: 1366642 - RNA, 19 nt, Artificial Sequence
  Description of Artificial Sequence: Synthetic oligonucleotide
cguaguucaucucgaacac

SEQ ID NO: 1366643 - RNA, 19 nt, Artificial Sequence
  Description of Artificial Sequence: Synthetic oligonucleotide
gaagugcuggcucacuauu

SEQ ID NO: 1366644 - RNA, 19 nt, Artificial Sequence
  Description of Artificial Sequence: Synthetic oligonucleotide
cagguaacuuguagaggga

SEQ ID NO: 1366645 - RNA, 19 nt, Artificial Sequence
  Description of Artificial Sequence: Synthetic oligonucleotide
caccccggcacuucucuuc

SEQ ID NO: 1366646 - RNA, 19 nt, Artificial Sequence
  Description of Artificial Sequence: Synthetic oligonucleotide
uagcaugguggugcugccc

SEQ ID NO: 1366647 - RNA, 19 nt, Artificial Sequence
  Description of Artificial Sequence: Synthetic oligonucleotide
agggucagcagcggagaug

SEQ ID NO: 1366648 - RNA, 19 nt, Artificial Sequence
  Description of Artificial Sequence: Synthetic oligonucleotide
cucuggccgagugaccuug

SEQ ID NO: 1366649 - RNA, 19 nt, Artificial Sequence
  Description of Artificial Sequence: Synthetic oligonucleotide
uggcgugaaauggcacccc

SEQ ID NO: 1366650 - RNA, 19 nt, Artificial Sequence
  Description of Artificial Sequence: Synthetic oligonucleotide
aucguguccacuggcccgu

SEQ ID NO: 1366651 - RNA, 19 nt, Artificial Sequence
  Description of Artificial Sequence: Synthetic oligonucleotide
gcuucgggaugccuuugag

SEQ ID NO: 1366652 - RNA, 19 nt, Artificial Sequence
  Description of Artificial Sequence: Synthetic oligonucleotide
aguaggaguggcagcugga

SEQ ID NO: 1366653 - RNA, 19 nt, Artificial Sequence
  Description of Artificial Sequence: Synthetic oligonucleotide
augaggcagguaccacacu

SEQ ID NO: 1366654 - RNA, 19 nt, Artificial Sequence
  Description of Artificial Sequence: Synthetic oligonucleotide
caggccacuguuauacaua

SEQ ID NO: 1366655 - RNA, 19 nt, Artificial Sequence
  Description of Artificial Sequence: Synthetic oligonucleotide
gucuacuagcaugguggug

SEQ ID NO: 1366656 - RNA, 19 nt, Artificial Sequence
  Description of Artificial Sequence: Synthetic oligonucleotide
ggccugaugagggucagca

SEQ ID NO: 1366657 - RNA, 19 nt, Artificial Sequence
  Description of Artificial Sequence: Synthetic oligonucleotide
uccacuggcccguggcgua

SEQ ID NO: 1366658 - RNA, 19 nt, Artificial Sequence
  Description of Artificial Sequence: Synthetic oligonucleotide
ggguuuccgcuucagcuga

SEQ ID NO: 1366659 - RNA, 19 nt, Artificial Sequence
  Description of Artificial Sequence: Synthetic oligonucleotide
gcccuuaggacacauuugu

SEQ ID NO: 1366660 - RNA, 19 nt, Artificial Sequence
  Description of Artificial Sequence: Synthetic oligonucleotide
gagggaagugcuggcucac

SEQ ID NO: 1366661 - RNA, 19 nt, Artificial Sequence
  Description of Artificial Sequence: Synthetic oligonucleotide
caguagccugugaaugaca

SEQ ID NO: 1366662 - RNA, 19 nt, Artificial Sequence
  Description of Artificial Sequence: Synthetic oligonucleotide
ggugcccuuuguuuaaacu

SEQ ID NO: 1366663 - RNA, 19 nt, Artificial Sequence
  Description of Artificial Sequence: Synthetic oligonucleotide
cugugucuaaagucuuucu

SEQ ID NO: 1366664 - RNA, 19 nt, Artificial Sequence
  Description of Artificial Sequence: Synthetic oligonucleotide
gagcuugaucuggaucaca

SEQ ID NO: 1366665 - RNA, 19 nt, Artificial Sequence
  Description of Artificial Sequence: Synthetic oligonucleotide
aguuacccagagacaggcu

SEQ ID NO: 1366666 - RNA, 19 nt, Artificial Sequence
  Description of Artificial Sequence: Synthetic oligonucleotide
ccccucacgcccuagccug

SEQ ID NO: 1366667 - RNA, 19 nt, Artificial Sequence
  Description of Artificial Sequence: Synthetic oligonucleotide
ugguccccucagccucagg

SEQ ID NO: 1366668 - RNA, 19 nt, Artificial Sequence
  Description of Artificial Sequence: Synthetic oligonucleotide
cugggcugucucaguggac

SEQ ID NO: 1366669 - RNA, 19 nt, Artificial Sequence
  Description of Artificial Sequence: Synthetic oligonucleotide
guggagcacauccuucggu

SEQ ID NO: 1366670 - RNA, 19 nt, Artificial Sequence
  Description of Artificial Sequence: Synthetic oligonucleotide
ggcccuuaggacacauuug

SEQ ID NO: 1366671 - RNA, 19 nt, Artificial Sequence
  Description of Artificial Sequence: Synthetic oligonucleotide
ggaggaguaguagguguca

SEQ ID NO: 1366672 - RNA, 19 nt, Artificial Sequence
  Description of Artificial Sequence: Synthetic oligonucleotide
cugucucaguggacuucug

SEQ ID NO: 1366673 - RNA, 19 nt, Artificial Sequence
  Description of Artificial Sequence: Synthetic oligonucleotide
uaggugcccuuuguuuaaa

SEQ ID NO: 1366674 - RNA, 19 nt, Artificial Sequence
  Description of Artificial Sequence: Synthetic oligonucleotide
gccgagugaccuuguuugc

SEQ ID NO: 1366675 - RNA, 19 nt, Artificial Sequence
  Description of Artificial Sequence: Synthetic oligonucleotide
ccaguagccugugaaugac

SEQ ID NO: 1366676 - RNA, 19 nt, Artificial Sequence
  Description of Artificial Sequence: Synthetic oligonucleotide
ggcauggguucucucgaga

SEQ ID NO: 1366677 - RNA, 19 nt, Artificial Sequence
  Description of Artificial Sequence: Synthetic oligonucleotide
gcgugaaauggcaccccgg

SEQ ID NO: 1366678 - RNA, 19 nt, Artificial Sequence
  Description of Artificial Sequence: Synthetic oligonucleotide
ggacuucuguagcaguucu

SEQ ID NO: 1366679 - RNA, 19 nt, Artificial Sequence
  Description of Artificial Sequence: Synthetic oligonucleotide
gugcuggcucacuauucaa

SEQ ID NO: 1366680 - RNA, 19 nt, Artificial Sequence
  Description of Artificial Sequence: Synthetic oligonucleotide
ccgagugaccuuguuugcc

SEQ ID NO: 1366681 - RNA, 19 nt, Artificial Sequence
  Description of Artificial Sequence: Synthetic oligonucleotide
cagcauagucagggguggc

SEQ ID NO: 1366682 - RNA, 19 nt, Artificial Sequence
  Description of Artificial Sequence: Synthetic oligonucleotide
guagagggaagugcuggcu

SEQ ID NO: 1366683 - RNA, 19 nt, Artificial Sequence
  Description of Artificial Sequence: Synthetic oligonucleotide
ccuuggcgugaaauggcac

SEQ ID NO: 1366684 - RNA, 19 nt, Artificial Sequence
  Description of Artificial Sequence: Synthetic oligonucleotide
ggcgagguaggugcugcag

SEQ ID NO: 1366685 - RNA, 19 nt, Artificial Sequence
  Description of Artificial Sequence: Synthetic oligonucleotide
ccuucgguaucugcucagg

SEQ ID NO: 1366686 - RNA, 19 nt, Artificial Sequence
  Description of Artificial Sequence: Synthetic oligonucleotide
cccggcacuucucuucagc

SEQ ID NO: 1366687 - RNA, 19 nt, Artificial Sequence
  Description of Artificial Sequence: Synthetic oligonucleotide
gaugccuuugagagggguu

SEQ ID NO: 1366688 - RNA, 19 nt, Artificial Sequence
  Description of Artificial Sequence: Synthetic oligonucleotide
cagcaaacaucuguucucu

SEQ ID NO: 1366689 - RNA, 19 nt, Artificial Sequence
  Description of Artificial Sequence: Synthetic oligonucleotide
gguccgguucccagagggg

SEQ ID NO: 1366690 - RNA, 19 nt, Artificial Sequence
  Description of Artificial Sequence: Synthetic oligonucleotide
cuucgguaucugcucaggu

SEQ ID NO: 1366691 - RNA, 19 nt, Artificial Sequence
  Description of Artificial Sequence: Synthetic oligonucleotide
ggccgucugccuugggcag

SEQ ID NO: 1366692 - RNA, 19 nt, Artificial Sequence
  Description of Artificial Sequence: Synthetic oligonucleotide
uggcuucgggaugccuuug

SEQ ID NO: 1366693 - RNA, 19 nt, Artificial Sequence
  Description of Artificial Sequence: Synthetic oligonucleotide
aaccagccaugaagcccag

SEQ ID NO: 1366694 - RNA, 19 nt, Artificial Sequence
  Description of Artificial Sequence: Synthetic oligonucleotide
cuuguacuucuugaaucgu

SEQ ID NO: 1366695 - RNA, 19 nt, Artificial Sequence
  Description of Artificial Sequence: Synthetic oligonucleotide
guaguucaucucgaacacu

SEQ ID NO: 1366696 - RNA, 19 nt, Artificial Sequence
  Description of Artificial Sequence: Synthetic oligonucleotide
gggcccaguagccugugaa

SEQ ID NO: 1366697 - RNA, 19 nt, Artificial Sequence
  Description of Artificial Sequence: Synthetic oligonucleotide
auguaagaugaggcaggua

SEQ ID NO: 1366698 - RNA, 19 nt, Artificial Sequence
  Description of Artificial Sequence: Synthetic oligonucleotide
uuccgggcauggguucucu

SEQ ID NO: 1366699 - RNA, 19 nt, Artificial Sequence
  Description of Artificial Sequence: Synthetic oligonucleotide
ggguucucucgagaaccag

SEQ ID NO: 1366700 - RNA, 19 nt, Artificial Sequence
  Description of Artificial Sequence: Synthetic oligonucleotide
cccaaguuucuguguggac

SEQ ID NO: 1366701 - RNA, 19 nt, Artificial Sequence
  Description of Artificial Sequence: Synthetic oligonucleotide
cucgagaaccagccaugaa

SEQ ID NO: 1366702 - RNA, 19 nt, Artificial Sequence
  Description of Artificial Sequence: Synthetic oligonucleotide
uccgggcauggguucucuc

SEQ ID NO: 1366703 - RNA, 19 nt, Artificial Sequence
  Description of Artificial Sequence: Synthetic oligonucleotide
guguccuggaaggugguau

SEQ ID NO: 1366704 - RNA, 19 nt, Artificial Sequence
  Description of Artificial Sequence: Synthetic oligonucleotide
acgcccuagccugccaggu

SEQ ID NO: 1366705 - RNA, 19 nt, Artificial Sequence
  Description of Artificial Sequence: Synthetic oligonucleotide
uggccugaugagggucagc

SEQ ID NO: 1366706 - RNA, 19 nt, Artificial Sequence
  Description of Artificial Sequence: Synthetic oligonucleotide
cagcggagauggcccuuag

SEQ ID NO: 1366707 - RNA, 19 nt, Artificial Sequence
  Description of Artificial Sequence: Synthetic oligonucleotide
ggucugcggggccaccaug

SEQ ID NO: 1366708 - RNA, 19 nt, Artificial Sequence
  Description of Artificial Sequence: Synthetic oligonucleotide
ggccacuguuauacauagg

SEQ ID NO: 1366709 - RNA, 19 nt, Artificial Sequence
  Description of Artificial Sequence: Synthetic oligonucleotide
augcacaagcagagaacuu

SEQ ID NO: 1366710 - RNA, 19 nt, Artificial Sequence
  Description of Artificial Sequence: Synthetic oligonucleotide
guuauacauaggugcccuu

SEQ ID NO: 1366711 - RNA, 19 nt, Artificial Sequence
  Description of Artificial Sequence: Synthetic oligonucleotide
ugugcucgcugagcuugau

SEQ ID NO: 1366712 - RNA, 19 nt, Artificial Sequence
  Description of Artificial Sequence: Synthetic oligonucleotide
cuacuagcaugguggugcu

SEQ ID NO: 1366713 - RNA, 19 nt, Artificial Sequence
  Description of Artificial Sequence: Synthetic oligonucleotide
ccagcaccaacuguauuca

SEQ ID NO: 1366714 - RNA, 19 nt, Artificial Sequence
  Description of Artificial Sequence: Synthetic oligonucleotide
gugguauugggguccgguu

SEQ ID NO: 1366715 - RNA, 19 nt, Artificial Sequence
  Description of Artificial Sequence: Synthetic oligonucleotide
ggguggcauuuucaacaac

SEQ ID NO: 1366716 - RNA, 19 nt, Artificial Sequence
  Description of Artificial Sequence: Synthetic oligonucleotide
guuuccgcuucagcugaaa

SEQ ID NO: 1366717 - RNA, 19 nt, Artificial Sequence
  Description of Artificial Sequence: Synthetic oligonucleotide
guaucugcucaggucacuu

SEQ ID NO: 1366718 - RNA, 19 nt, Artificial Sequence
  Description of Artificial Sequence: Synthetic oligonucleotide
ggcuucgggaugccuuuga

SEQ ID NO: 1366719 - RNA, 19 nt, Artificial Sequence
  Description of Artificial Sequence: Synthetic oligonucleotide
ggugguauugggguccggu

SEQ ID NO: 1366720 - RNA, 19 nt, Artificial Sequence
  Description of Artificial Sequence: Synthetic oligonucleotide
cccuuggcgugaaauggca

SEQ ID NO: 1366721 - RNA, 19 nt, Artificial Sequence
  Description of Artificial Sequence: Synthetic oligonucleotide
gauccucugugugcucgcu

SEQ ID NO: 1366722 - RNA, 19 nt, Artificial Sequence
  Description of Artificial Sequence: Synthetic oligonucleotide
gagggucagcagcggagau

SEQ ID NO: 1366723 - RNA, 19 nt, Artificial Sequence
  Description of Artificial Sequence: Synthetic oligonucleotide
cuucuggccugaugagggu

SEQ ID NO: 1366724 - RNA, 19 nt, Artificial Sequence
  Description of Artificial Sequence: Synthetic oligonucleotide
ccuuucuuucugcaguggu

SEQ ID NO: 1366725 - RNA, 19 nt, Artificial Sequence
  Description of Artificial Sequence: Synthetic oligonucleotide
acuggcccguggcguaguu

SEQ ID NO: 1366726 - RNA, 19 nt, Artificial Sequence
  Description of Artificial Sequence: Synthetic oligonucleotide
gcaguaggaguggcagcug

SEQ ID NO: 1366727 - RNA, 19 nt, Artificial Sequence
  Description of Artificial Sequence: Synthetic oligonucleotide
gcccuagccugccaggugu

SEQ ID NO: 1366728 - RNA, 19 nt, Artificial Sequence
  Description of Artificial Sequence: Synthetic oligonucleotide
ggagcacauccuucgguau

SEQ ID NO: 1366729 - RNA, 19 nt, Artificial Sequence
  Description of Artificial Sequence: Synthetic oligonucleotide
guuccgggcauggguucuc

SEQ ID NO: 1366730 - RNA, 19 nt, Artificial Sequence
  Description of Artificial Sequence: Synthetic oligonucleotide
ggugggcuuuuccaccacu

SEQ ID NO: 1366731 - RNA, 19 nt, Artificial Sequence
  Description of Artificial Sequence: Synthetic oligonucleotide
ucguguccacuggcccgug

SEQ ID NO: 1366732 - RNA, 19 nt, Artificial Sequence
  Description of Artificial Sequence: Synthetic oligonucleotide
agagggcagguaacuugua

SEQ ID NO: 1366733 - RNA, 19 nt, Artificial Sequence
  Description of Artificial Sequence: Synthetic oligonucleotide
ccacuucugugucuaaagu

SEQ ID NO: 1366734 - RNA, 19 nt, Artificial Sequence
  Description of Artificial Sequence: Synthetic oligonucleotide
cugggcucaggccacuguu

SEQ ID NO: 1366735 - RNA, 19 nt, Artificial Sequence
  Description of Artificial Sequence: Synthetic oligonucleotide
cucacgcccuagccugcca

SEQ ID NO: 1366736 - RNA, 19 nt, Artificial Sequence
  Description of Artificial Sequence: Synthetic oligonucleotide
ccucagguggucggcuggc

SEQ ID NO: 1366737 - RNA, 19 nt, Artificial Sequence
  Description of Artificial Sequence: Synthetic oligonucleotide
cucgaacacugugucuacu

SEQ ID NO: 1366738 - RNA, 19 nt, Artificial Sequence
  Description of Artificial Sequence: Synthetic oligonucleotide
gggaugccuuugagagggg

SEQ ID NO: 1366739 - RNA, 19 nt, Artificial Sequence
  Description of Artificial Sequence: Synthetic oligonucleotide
guccacuggcccguggcgu

SEQ ID NO: 1366740 - RNA, 19 nt, Artificial Sequence
  Description of Artificial Sequence: Synthetic oligonucleotide
cauuugucaugggcuugua

SEQ ID NO: 1366741 - RNA, 19 nt, Artificial Sequence
  Description of Artificial Sequence: Synthetic oligonucleotide
cccagcgagggugguuagg

SEQ ID NO: 1366742 - RNA, 19 nt, Artificial Sequence
  Description of Artificial Sequence: Synthetic oligonucleotide
ggcccagcgagggugguua

SEQ ID NO: 1366743 - RNA, 19 nt, Artificial Sequence
  Description of Artificial Sequence: Synthetic oligonucleotide
gggcucaggccacuguuau

SEQ ID NO: 1366744 - RNA, 19 nt, Artificial Sequence
  Description of Artificial Sequence: Synthetic oligonucleotide
agcagcggagauggcccuu

SEQ ID NO: 1366745 - RNA, 19 nt, Artificial Sequence
  Description of Artificial Sequence: Synthetic oligonucleotide
ggaugccuuugagaggggu

SEQ ID NO: 1366746 - RNA, 19 nt, Artificial Sequence
  Description of Artificial Sequence: Synthetic oligonucleotide
auggcccuuaggacacauu

SEQ ID NO: 1366747 - RNA, 19 nt, Artificial Sequence
  Description of Artificial Sequence: Synthetic oligonucleotide
cccucacgcccuagccugc

SEQ ID NO: 1366748 - RNA, 19 nt, Artificial Sequence
  Description of Artificial Sequence: Synthetic oligonucleotide
gguagagggcagguaacuu

SEQ ID NO: 1366749 - RNA, 19 nt, Artificial Sequence
  Description of Artificial Sequence: Synthetic oligonucleotide
cccguggcguaguucaucu

SEQ ID NO: 1366750 - RNA, 19 nt, Artificial Sequence
  Description of Artificial Sequence: Synthetic oligonucleotide
gcccagcgagggugguuag

SEQ ID NO: 1366751 - RNA, 19 nt, Artificial Sequence
  Description of Artificial Sequence: Synthetic oligonucleotide
gcacaagcagagaacuuuu

SEQ ID NO: 1366752 - RNA, 19 nt, Artificial Sequence
  Description of Artificial Sequence: Synthetic oligonucleotide
ggcucaggccacuguuaua

SEQ ID NO: 1366753 - RNA, 19 nt, Artificial Sequence
  Description of Artificial Sequence: Synthetic oligonucleotide
cguguccacuggcccgugg

SEQ ID NO: 1366754 - RNA, 19 nt, Artificial Sequence
  Description of Artificial Sequence: Synthetic oligonucleotide
cugcucggagaguggcacu

SEQ ID NO: 1366755 - RNA, 19 nt, Artificial Sequence
  Description of Artificial Sequence: Synthetic oligonucleotide
cucggagaguggcacucuu

SEQ ID NO: 1366756 - RNA, 19 nt, Artificial Sequence
  Description of Artificial Sequence: Synthetic oligonucleotide
cccuagccugccagguguc

SEQ ID NO: 1366757 - RNA, 19 nt, Artificial Sequence
  Description of Artificial Sequence: Synthetic oligonucleotide
ccucacgcccuagccugcc

SEQ ID NO: 1366758 - RNA, 19 nt, Artificial Sequence
  Description of Artificial Sequence: Synthetic oligonucleotide
gccaggugucaccuuuggu

SEQ ID NO: 1366759 - RNA, 19 nt, Artificial Sequence
  Description of Artificial Sequence: Synthetic oligonucleotide
guguaggacuuggggcacu

SEQ ID NO: 1366760 - RNA, 19 nt, Artificial Sequence
  Description of Artificial Sequence: Synthetic oligonucleotide
ggggcugaagacgcugggu

SEQ ID NO: 1366761 - RNA, 19 nt, Artificial Sequence
  Description of Artificial Sequence: Synthetic oligonucleotide
gguggucggcuggcuuccc

SEQ ID NO: 1366762 - RNA, 19 nt, Artificial Sequence
  Description of Artificial Sequence: Synthetic oligonucleotide
cugugugcucgcugagcuu

SEQ ID NO: 1366763 - RNA, 19 nt, Artificial Sequence
  Description of Artificial Sequence: Synthetic oligonucleotide
ggugcugcccuggccgucu

SEQ ID NO: 1366764 - RNA, 19 nt, Artificial Sequence
  Description of Artificial Sequence: Synthetic oligonucleotide
cugugucuacuagcauggu

SEQ ID NO: 1366765 - RNA, 19 nt, Artificial Sequence
  Description of Artificial Sequence: Synthetic oligonucleotide
ccuugggcagauccucugu

SEQ ID NO: 1366766 - RNA, 19 nt, Artificial Sequence
  Description of Artificial Sequence: Synthetic oligonucleotide
ccguggcguaguucaucuc

SEQ ID NO: 1366767 - RNA, 19 nt, Artificial Sequence
  Description of Artificial Sequence: Synthetic oligonucleotide
gcagcggagauggcccuua

SEQ ID NO: 1366768 - RNA, 19 nt, Artificial Sequence
  Description of Artificial Sequence: Synthetic oligonucleotide
gccuuugagagggguugua

SEQ ID NO: 1366769 - RNA, 19 nt, Artificial Sequence
  Description of Artificial Sequence: Synthetic oligonucleotide
gguuuccgcuucagcugaa

SEQ ID NO: 1366770 - RNA, 19 nt, Artificial Sequence
  Description of Artificial Sequence: Synthetic oligonucleotide
gcggggccaccauggccac

SEQ ID NO: 1366771 - RNA, 19 nt, Artificial Sequence
  Description of Artificial Sequence: Synthetic oligonucleotide
ccuagccugccagguguca

SEQ ID NO: 1366772 - RNA, 19 nt, Artificial Sequence
  Description of Artificial Sequence: Synthetic oligonucleotide
ccuggccgucugccuuggg

SEQ ID NO: 1366773 - RNA, 19 nt, Artificial Sequence
  Description of Artificial Sequence: Synthetic oligonucleotide
gccgucugccuugggcaga

SEQ ID NO: 1366774 - RNA, 19 nt, Artificial Sequence
  Description of Artificial Sequence: Synthetic oligonucleotide
cgcccuagccugccaggug

SEQ ID NO: 1366775 - RNA, 19 nt, Artificial Sequence
  Description of Artificial Sequence: Synthetic oligonucleotide
gguucccagaggggcugaa

SEQ ID NO: 1366776 - RNA, 19 nt, Artificial Sequence
  Description of Artificial Sequence: Synthetic oligonucleotide
gggcugucucaguggacuu

SEQ ID NO: 1366777 - RNA, 19 nt, Artificial Sequence
  Description of Artificial Sequence: Synthetic oligonucleotide
cuggccgagugaccuuguu

SEQ ID NO: 1366778 - RNA, 19 nt, Artificial Sequence
  Description of Artificial Sequence: Synthetic oligonucleotide
gcuuggcuucgggaugccu

SEQ ID NO: 1366779 - RNA, 19 nt, Artificial Sequence
  Description of Artificial Sequence: Synthetic oligonucleotide
gcucggagaguggcacucu

SEQ ID NO: 1366780 - RNA, 19 nt, Artificial Sequence
  Description of Artificial Sequence: Synthetic oligonucleotide
cacuggcccguggcguagu

SEQ ID NO: 1366781 - RNA, 19 nt, Artificial Sequence
  Description of Artificial Sequence: Synthetic oligonucleotide
ccggcccuuggcgugaaau

SEQ ID NO: 1366782 - RNA, 19 nt, Artificial Sequence
  Description of Artificial Sequence: Synthetic oligonucleotide
gcaccccggcacuucucuu

SEQ ID NO: 1366783 - RNA, 19 nt, Artificial Sequence
  Description of Artificial Sequence: Synthetic oligonucleotide
ggcccguggcguaguucau

SEQ ID NO: 1366784 - RNA, 19 nt, Artificial Sequence
  Description of Artificial Sequence: Synthetic oligonucleotide
cgucugccuugggcagauc

SEQ ID NO: 1366785 - RNA, 19 nt, Artificial Sequence
  Description of Artificial Sequence: Synthetic oligonucleotide
cccggcccuuggcgugaaa

SEQ ID NO: 1366786 - RNA, 19 nt, Artificial Sequence
  Description of Artificial Sequence: Synthetic oligonucleotide
aagagcaugaccaacaagc

SEQ ID NO: 1366787 - RNA, 19 nt, Artificial Sequence
  Description of Artificial Sequence: Synthetic oligonucleotide
uguaauuguagccacaggc

SEQ ID NO: 1366788 - RNA, 19 nt, Artificial Sequence
  Description of Artificial Sequence: Synthetic oligonucleotide
aacagcgucucccucaacc

SEQ ID NO: 1366789 - RNA, 19 nt, Artificial Sequence
  Description of Artificial Sequence: Synthetic oligonucleotide
aaagacggagcacagguag

SEQ ID NO: 1366790 - RNA, 19 nt, Artificial Sequence
  Description of Artificial Sequence: Synthetic oligonucleotide
aagggguacagcaaaagcc

SEQ ID NO: 1366791 - RNA, 19 nt, Artificial Sequence
  Description of Artificial Sequence: Synthetic oligonucleotide
aguucgugcaaaaugaugc

SEQ ID NO: 1366792 - RNA, 19 nt, Artificial Sequence
  Description of Artificial Sequence: Synthetic oligonucleotide
uggaccaagagcaugacca

SEQ ID NO: 1366793 - RNA, 19 nt, Artificial Sequence
  Description of Artificial Sequence: Synthetic oligonucleotide
aaguugaucacggagauga

SEQ ID NO: 1366794 - RNA, 19 nt, Artificial Sequence
  Description of Artificial Sequence: Synthetic oligonucleotide
gaccgcacagcuuagaagg

SEQ ID NO: 1366795 - RNA, 19 nt, Artificial Sequence
  Description of Artificial Sequence: Synthetic oligonucleotide
aaauggacggaagauaguc

SEQ ID NO: 1366796 - RNA, 19 nt, Artificial Sequence
  Description of Artificial Sequence: Synthetic oligonucleotide
aaauuugcgguggaagccc

SEQ ID NO: 1366797 - RNA, 19 nt, Artificial Sequence
  Description of Artificial Sequence: Synthetic oligonucleotide
uguaggaugaacagcaagu

SEQ ID NO: 1366798 - RNA, 19 nt, Artificial Sequence
  Description of Artificial Sequence: Synthetic oligonucleotide
gaaaauggacggaagauag

SEQ ID NO: 1366799 - RNA, 19 nt, Artificial Sequence
  Description of Artificial Sequence: Synthetic oligonucleotide
aauaucagaggcaacacga

SEQ ID NO: 1366800 - RNA, 19 nt, Artificial Sequence
  Description of Artificial Sequence: Synthetic oligonucleotide
aaaguuccaagcugagaac

SEQ ID NO: 1366801 - RNA, 19 nt, Artificial Sequence
  Description of Artificial Sequence: Synthetic oligonucleotide
uuugagcucggaaaugagg

SEQ ID NO: 1366802 - RNA, 19 nt, Artificial Sequence
  Description of Artificial Sequence: Synthetic oligonucleotide
ucuaacgaggugaugaacu

SEQ ID NO: 1366803 - RNA, 19 nt, Artificial Sequence
  Description of Artificial Sequence: Synthetic oligonucleotide
uugagcucggaaaugaggc

SEQ ID NO: 1366804 - RNA, 19 nt, Artificial Sequence
  Description of Artificial Sequence: Synthetic oligonucleotide
caaaaccucaucaggaacc

SEQ ID NO: 1366805 - RNA, 19 nt, Artificial Sequence
  Description of Artificial Sequence: Synthetic oligonucleotide
ugcaguucgugcaaaauga

SEQ ID NO: 1366806 - RNA, 19 nt, Artificial Sequence
  Description of Artificial Sequence: Synthetic oligonucleotide
aagaaauuugcgguggaag

SEQ ID NO: 1366807 - RNA, 19 nt, Artificial Sequence
  Description of Artificial Sequence: Synthetic oligonucleotide
guagaugagccccaaaacc

SEQ ID NO: 1366808 - RNA, 19 nt, Artificial Sequence
  Description of Artificial Sequence: Synthetic oligonucleotide
uugaauaucagaggcaaca

SEQ ID NO: 1366809 - RNA, 19 nt, Artificial Sequence
  Description of Artificial Sequence: Synthetic oligonucleotide
aaaaugaugcgcuggcgca

SEQ ID NO: 1366810 - RNA, 19 nt, Artificial Sequence
  Description of Artificial Sequence: Synthetic oligonucleotide
ucuaucuggcguuugagcu

SEQ ID NO: 1366811 - RNA, 19 nt, Artificial Sequence
  Description of Artificial Sequence: Synthetic oligonucleotide
uugaucacggagaugaaaa

SEQ ID NO: 1366812 - RNA, 19 nt, Artificial Sequence
  Description of Artificial Sequence: Synthetic oligonucleotide
gaucaggacgaucuggcgg

SEQ ID NO: 1366813 - RNA, 19 nt, Artificial Sequence
  Description of Artificial Sequence: Synthetic oligonucleotide
ugaucagagguaguaaagg

SEQ ID NO: 1366814 - RNA, 19 nt, Artificial Sequence
  Description of Artificial Sequence: Synthetic oligonucleotide
ucaacccggacaccgagcg

SEQ ID NO: 1366815 - RNA, 19 nt, Artificial Sequence
  Description of Artificial Sequence: Synthetic oligonucleotide
acggagaugaaaauggacg

SEQ ID NO: 1366816 - RNA, 19 nt, Artificial Sequence
  Description of Artificial Sequence: Synthetic oligonucleotide
guccguaagaguuagccag

SEQ ID NO: 1366817 - RNA, 19 nt, Artificial Sequence
  Description of Artificial Sequence: Synthetic oligonucleotide
uaauuguagccacaggccu

SEQ ID NO: 1366818 - RNA, 19 nt, Artificial Sequence
  Description of Artificial Sequence: Synthetic oligonucleotide
aucacggagaugaaaaugg

SEQ ID NO: 1366819 - RNA, 19 nt, Artificial Sequence
  Description of Artificial Sequence: Synthetic oligonucleotide
gaaggugggaucaagaaga

SEQ ID NO: 1366820 - RNA, 19 nt, Artificial Sequence
  Description of Artificial Sequence: Synthetic oligonucleotide
ucuaaguaacccucucccg

SEQ ID NO: 1366821 - RNA, 19 nt, Artificial Sequence
  Description of Artificial Sequence: Synthetic oligonucleotide
uuauucuucgcuuccgucu

SEQ ID NO: 1366822 - RNA, 19 nt, Artificial Sequence
  Description of Artificial Sequence: Synthetic oligonucleotide
aaugaggcguccguaagag

SEQ ID NO: 1366823 - RNA, 19 nt, Artificial Sequence
  Description of Artificial Sequence: Synthetic oligonucleotide
ucucccgagagcaaguuga

SEQ ID NO: 1366824 - RNA, 19 nt, Artificial Sequence
  Description of Artificial Sequence: Synthetic oligonucleotide
ucuguaauuguagccacag

SEQ ID NO: 1366825 - RNA, 19 nt, Artificial Sequence
  Description of Artificial Sequence: Synthetic oligonucleotide
caaaaugaugcgcuggcgc

SEQ ID NO: 1366826 - RNA, 19 nt, Artificial Sequence
  Description of Artificial Sequence: Synthetic oligonucleotide
agacgagucucccagcacg

SEQ ID NO: 1366827 - RNA, 19 nt, Artificial Sequence
  Description of Artificial Sequence: Synthetic oligonucleotide
uuggacaagggauuccucc

SEQ ID NO: 1366828 - RNA, 19 nt, Artificial Sequence
  Description of Artificial Sequence: Synthetic oligonucleotide
ugcgcuuccccgcagaggc

SEQ ID NO: 1366829 - RNA, 19 nt, Artificial Sequence
  Description of Artificial Sequence: Synthetic oligonucleotide
uauaggaaccgcaggguga

SEQ ID NO: 1366830 - RNA, 19 nt, Artificial Sequence
  Description of Artificial Sequence: Synthetic oligonucleotide
aaaagaaauuugcggugga

SEQ ID NO: 1366831 - RNA, 19 nt, Artificial Sequence
  Description of Artificial Sequence: Synthetic oligonucleotide
gaguaucaggaacuuggcg

SEQ ID NO: 1366832 - RNA, 19 nt, Artificial Sequence
  Description of Artificial Sequence: Synthetic oligonucleotide
uaaguaacccucucccgag

SEQ ID NO: 1366833 - RNA, 19 nt, Artificial Sequence
  Description of Artificial Sequence: Synthetic oligonucleotide
gaaauuugcgguggaagcc

SEQ ID NO: 1366834 - RNA, 19 nt, Artificial Sequence
  Description of Artificial Sequence: Synthetic oligonucleotide
aaaugaggcguccguaaga

SEQ ID NO: 1366835 - RNA, 19 nt, Artificial Sequence
  Description of Artificial Sequence: Synthetic oligonucleotide
ggcaacacgaaguugauca

SEQ ID NO: 1366836 - RNA, 19 nt, Artificial Sequence
  Description of Artificial Sequence: Synthetic oligonucleotide
agaguaucuuccuaggaaa

SEQ ID NO: 1366837 - RNA, 19 nt, Artificial Sequence
  Description of Artificial Sequence: Synthetic oligonucleotide
gugaucugauuccacagag

SEQ ID NO: 1366838 - RNA, 19 nt, Artificial Sequence
  Description of Artificial Sequence: Synthetic oligonucleotide
ucacggugaacccuguggc

SEQ ID NO: 1366839 - RNA, 19 nt, Artificial Sequence
  Description of Artificial Sequence: Synthetic oligonucleotide
gaaaguucugggcggacug

SEQ ID NO: 1366840 - RNA, 19 nt, Artificial Sequence
  Description of Artificial Sequence: Synthetic oligonucleotide
uucuucagacagaagagua

SEQ ID NO: 1366841 - RNA, 19 nt, Artificial Sequence
  Description of Artificial Sequence: Synthetic oligonucleotide
ucgugcaaaaugaugcgcu

SEQ ID NO: 1366842 - RNA, 19 nt, Artificial Sequence
  Description of Artificial Sequence: Synthetic oligonucleotide
guaauuguagccacaggcc

SEQ ID NO: 1366843 - RNA, 19 nt, Artificial Sequence
  Description of Artificial Sequence: Synthetic oligonucleotide
uuccuaggaaacuggacca

SEQ ID NO: 1366844 - RNA, 19 nt, Artificial Sequence
  Description of Artificial Sequence: Synthetic oligonucleotide
gaaaugaggcguccguaag

SEQ ID NO: 1366845 - RNA, 19 nt, Artificial Sequence
  Description of Artificial Sequence: Synthetic oligonucleotide
uggaauggaccgcacagcu

SEQ ID NO: 1366846 - RNA, 19 nt, Artificial Sequence
  Description of Artificial Sequence: Synthetic oligonucleotide
guucugggcggacugaggg

SEQ ID NO: 1366847 - RNA, 19 nt, Artificial Sequence
  Description of Artificial Sequence: Synthetic oligonucleotide
uaggggacggccagguucg

SEQ ID NO: 1366848 - RNA, 19 nt, Artificial Sequence
  Description of Artificial Sequence: Synthetic oligonucleotide
ugaggcguccguaagaguu

SEQ ID NO: 1366849 - RNA, 19 nt, Artificial Sequence
  Description of Artificial Sequence: Synthetic oligonucleotide
uccguaagaguuagccagg

SEQ ID NO: 1366850 - RNA, 19 nt, Artificial Sequence
  Description of Artificial Sequence: Synthetic oligonucleotide
guucgugcaaaaugaugcg

SEQ ID NO: 1366851 - RNA, 19 nt, Artificial Sequence
  Description of Artificial Sequence: Synthetic oligonucleotide
cacgaaguugaucacggag

SEQ ID NO: 1366852 - RNA, 19 nt, Artificial Sequence
  Description of Artificial Sequence: Synthetic oligonucleotide
agagcaugaccaacaagcc

SEQ ID NO: 1366853 - RNA, 19 nt, Artificial Sequence
  Description of Artificial Sequence: Synthetic oligonucleotide
aauggacaucuucccuugg

SEQ ID NO: 1366854 - RNA, 19 nt, Artificial Sequence
  Description of Artificial Sequence: Synthetic oligonucleotide
auggacggaagauagucca

SEQ ID NO: 1366855 - RNA, 19 nt, Artificial Sequence
  Description of Artificial Sequence: Synthetic oligonucleotide
ugagcucggaaaugaggcg

SEQ ID NO: 1366856 - RNA, 19 nt, Artificial Sequence
  Description of Artificial Sequence: Synthetic oligonucleotide
acggucugagcguagauga

SEQ ID NO: 1366857 - RNA, 19 nt, Artificial Sequence
  Description of Artificial Sequence: Synthetic oligonucleotide
aacgaggugaugaacuuga

SEQ ID NO: 1366858 - RNA, 19 nt, Artificial Sequence
  Description of Artificial Sequence: Synthetic oligonucleotide
uacuguagagcaccgggac

SEQ ID NO: 1366859 - RNA, 19 nt, Artificial Sequence
  Description of Artificial Sequence: Synthetic oligonucleotide
gagauugccagccccaaga

SEQ ID NO: 1366860 - RNA, 19 nt, Artificial Sequence
  Description of Artificial Sequence: Synthetic oligonucleotide
uggaacuccagagucccgg

SEQ ID NO: 1366861 - RNA, 19 nt, Artificial Sequence
  Description of Artificial Sequence: Synthetic oligonucleotide
agaggcaacacgaaguuga

SEQ ID NO: 1366862 - RNA, 19 nt, Artificial Sequence
  Description of Artificial Sequence: Synthetic oligonucleotide
ugaaaauggacggaagaua

SEQ ID NO: 1366863 - RNA, 19 nt, Artificial Sequence
  Description of Artificial Sequence: Synthetic oligonucleotide
aacacccgguggcuguagc

SEQ ID NO: 1366864 - RNA, 19 nt, Artificial Sequence
  Description of Artificial Sequence: Synthetic oligonucleotide
aggccuugcaucccucugc

SEQ ID NO: 1366865 - RNA, 19 nt, Artificial Sequence
  Description of Artificial Sequence: Synthetic oligonucleotide
aggacgaucuggcggcugc

SEQ ID NO: 1366866 - RNA, 19 nt, Artificial Sequence
  Description of Artificial Sequence: Synthetic oligonucleotide
gaauggaccgcacagcuua

SEQ ID NO: 1366867 - RNA, 19 nt, Artificial Sequence
  Description of Artificial Sequence: Synthetic oligonucleotide
agcgguguaggaugaacag

SEQ ID NO: 1366868 - RNA, 19 nt, Artificial Sequence
  Description of Artificial Sequence: Synthetic oligonucleotide
uuuauucuucgcuuccguc

SEQ ID NO: 1366869 - RNA, 19 nt, Artificial Sequence
  Description of Artificial Sequence: Synthetic oligonucleotide
agaguaucaggaacuuggc

SEQ ID NO: 1366870 - RNA, 19 nt, Artificial Sequence
  Description of Artificial Sequence: Synthetic oligonucleotide
acggugaacccuguggccc

SEQ ID NO: 1366871 - RNA, 19 nt, Artificial Sequence
  Description of Artificial Sequence: Synthetic oligonucleotide
accgggacagcagagauug

SEQ ID NO: 1366872 - RNA, 19 nt, Artificial Sequence
  Description of Artificial Sequence: Synthetic oligonucleotide
cucuaucuggcguuugagc

SEQ ID NO: 1366873 - RNA, 19 nt, Artificial Sequence
  Description of Artificial Sequence: Synthetic oligonucleotide
guauaggaaccgcagggug

SEQ ID NO: 1366874 - RNA, 19 nt, Artificial Sequence
  Description of Artificial Sequence: Synthetic oligonucleotide
aggugaugaacuugaauau

SEQ ID NO: 1366875 - RNA, 19 nt, Artificial Sequence
  Description of Artificial Sequence: Synthetic oligonucleotide
ucucuguaauuguagccac

SEQ ID NO: 1366876 - RNA, 19 nt, Artificial Sequence
  Description of Artificial Sequence: Synthetic oligonucleotide
gagcgcgaggaucagcagg

SEQ ID NO: 1366877 - RNA, 19 nt, Artificial Sequence
  Description of Artificial Sequence: Synthetic oligonucleotide
ugaauaucagaggcaacac

SEQ ID NO: 1366878 - RNA, 19 nt, Artificial Sequence
  Description of Artificial Sequence: Synthetic oligonucleotide
ugaucugauuccacagaga

SEQ ID NO: 1366879 - RNA, 19 nt, Artificial Sequence
  Description of Artificial Sequence: Synthetic oligonucleotide
agaggaucagaagggguac

SEQ ID NO: 1366880 - RNA, 19 nt, Artificial Sequence
  Description of Artificial Sequence: Synthetic oligonucleotide
aagauacuguagagcaccg

SEQ ID NO: 1366881 - RNA, 19 nt, Artificial Sequence
  Description of Artificial Sequence: Synthetic oligonucleotide
aguaacccucucccgagag

SEQ ID NO: 1366882 - RNA, 19 nt, Artificial Sequence
  Description of Artificial Sequence: Synthetic oligonucleotide
acuuuauucuucgcuuccg

SEQ ID NO: 1366883 - RNA, 19 nt, Artificial Sequence
  Description of Artificial Sequence: Synthetic oligonucleotide
aggguuucgauggacuccg

SEQ ID NO: 1366884 - RNA, 19 nt, Artificial Sequence
  Description of Artificial Sequence: Synthetic oligonucleotide
aaaugaugcgcuggcgcag

SEQ ID NO: 1366885 - RNA, 19 nt, Artificial Sequence
  Description of Artificial Sequence: Synthetic oligonucleotide
gucagaaccuccgacucgg

SEQ ID NO: 1366886 - RNA, 19 nt, Artificial Sequence
  Description of Artificial Sequence: Synthetic oligonucleotide
gacuccgggauguggaccc

SEQ ID NO: 1366887 - RNA, 19 nt, Artificial Sequence
  Description of Artificial Sequence: Synthetic oligonucleotide
ugcguccccagaaaguaga

SEQ ID NO: 1366888 - RNA, 19 nt, Artificial Sequence
  Description of Artificial Sequence: Synthetic oligonucleotide
agcugagaacacccggugg

SEQ ID NO: 1366889 - RNA, 19 nt, Artificial Sequence
  Description of Artificial Sequence: Synthetic oligonucleotide
cuaaguaacccucucccga

SEQ ID NO: 1366890 - RNA, 19 nt, Artificial Sequence
  Description of Artificial Sequence: Synthetic oligonucleotide
cugagcguagaugagcccc

SEQ ID NO: 1366891 - RNA, 19 nt, Artificial Sequence
  Description of Artificial Sequence: Synthetic oligonucleotide
uucgugcaaaaugaugcgc

SEQ ID NO: 1366892 - RNA, 19 nt, Artificial Sequence
  Description of Artificial Sequence: Synthetic oligonucleotide
ucugggcggacugagggag

SEQ ID NO: 1366893 - RNA, 19 nt, Artificial Sequence
  Description of Artificial Sequence: Synthetic oligonucleotide
caacacgaaguugaucacg

SEQ ID NO: 1366894 - RNA, 19 nt, Artificial Sequence
  Description of Artificial Sequence: Synthetic oligonucleotide
aggccaaaguuccaagcug

SEQ ID NO: 1366895 - RNA, 19 nt, Artificial Sequence
  Description of Artificial Sequence: Synthetic oligonucleotide
cacggagaugaaaauggac

SEQ ID NO: 1366896 - RNA, 19 nt, Artificial Sequence
  Description of Artificial Sequence: Synthetic oligonucleotide
ucccucaacccggacaccg

SEQ ID NO: 1366897 - RNA, 19 nt, Artificial Sequence
  Description of Artificial Sequence: Synthetic oligonucleotide
uagcccucuaacgagguga

SEQ ID NO: 1366898 - RNA, 19 nt, Artificial Sequence
  Description of Artificial Sequence: Synthetic oligonucleotide
acagaguaucuuccuagga

SEQ ID NO: 1366899 - RNA, 19 nt, Artificial Sequence
  Description of Artificial Sequence: Synthetic oligonucleotide
caguucgugcaaaaugaug

SEQ ID NO: 1366900 - RNA, 19 nt, Artificial Sequence
  Description of Artificial Sequence: Synthetic oligonucleotide
ucggaaaugaggcguccgu

SEQ ID NO: 1366901 - RNA, 19 nt, Artificial Sequence
  Description of Artificial Sequence: Synthetic oligonucleotide
gguguagcccucuaacgag

SEQ ID NO: 1366902 - RNA, 19 nt, Artificial Sequence
  Description of Artificial Sequence: Synthetic oligonucleotide
acagcuuagaaggugggau

SEQ ID NO: 1366903 - RNA, 19 nt, Artificial Sequence
  Description of Artificial Sequence: Synthetic oligonucleotide
aaccgcagggugaggagac

SEQ ID NO: 1366904 - RNA, 19 nt, Artificial Sequence
  Description of Artificial Sequence: Synthetic oligonucleotide
guaggggacggccagguuc

SEQ ID NO: 1366905 - RNA, 19 nt, Artificial Sequence
  Description of Artificial Sequence: Synthetic oligonucleotide
uggacccaaauggacaucu

SEQ ID NO: 1366906 - RNA, 19 nt, Artificial Sequence
  Description of Artificial Sequence: Synthetic oligonucleotide
aucgggguggguagaaccc

SEQ ID NO: 1366907 - RNA, 19 nt, Artificial Sequence
  Description of Artificial Sequence: Synthetic oligonucleotide
acgaaguugaucacggaga

SEQ ID NO: 1366908 - RNA, 19 nt, Artificial Sequence
  Description of Artificial Sequence: Synthetic oligonucleotide
agcaaguugaagagcuggg

SEQ ID NO: 1366909 - RNA, 19 nt, Artificial Sequence
  Description of Artificial Sequence: Synthetic oligonucleotide
uuccgucucuaucuggcgu

SEQ ID NO: 1366910 - RNA, 19 nt, Artificial Sequence
  Description of Artificial Sequence: Synthetic oligonucleotide
ugagcguagaugagcccca

SEQ ID NO: 1366911 - RNA, 19 nt, Artificial Sequence
  Description of Artificial Sequence: Synthetic oligonucleotide
uguagcccucuaacgaggu

SEQ ID NO: 1366912 - RNA, 19 nt, Artificial Sequence
  Description of Artificial Sequence: Synthetic oligonucleotide
acggaagauaguccaccag

SEQ ID NO: 1366913 - RNA, 19 nt, Artificial Sequence
  Description of Artificial Sequence: Synthetic oligonucleotide
ugggcuaggaagacuuuau

SEQ ID NO: 1366914 - RNA, 19 nt, Artificial Sequence
  Description of Artificial Sequence: Synthetic oligonucleotide
guucgaucgggguggguag

SEQ ID NO: 1366915 - RNA, 19 nt, Artificial Sequence
  Description of Artificial Sequence: Synthetic oligonucleotide
gucugagcguagaugagcc

SEQ ID NO: 1366916 - RNA, 19 nt, Artificial Sequence
  Description of Artificial Sequence: Synthetic oligonucleotide
gcugagaacacccgguggc

SEQ ID NO: 1366917 - RNA, 19 nt, Artificial Sequence
  Description of Artificial Sequence: Synthetic oligonucleotide
cacaguccgaagcaggauc

SEQ ID NO: 1366918 - RNA, 19 nt, Artificial Sequence
  Description of Artificial Sequence: Synthetic oligonucleotide
ugaucacggagaugaaaau

SEQ ID NO: 1366919 - RNA, 19 nt, Artificial Sequence
  Description of Artificial Sequence: Synthetic oligonucleotide
caagggauuccuccugcag

SEQ ID NO: 1366920 - RNA, 19 nt, Artificial Sequence
  Description of Artificial Sequence: Synthetic oligonucleotide
cuaucuggcguuugagcuc

SEQ ID NO: 1366921 - RNA, 19 nt, Artificial Sequence
  Description of Artificial Sequence: Synthetic oligonucleotide
gaucaaagaucacaaguuu

SEQ ID NO: 1366922 - RNA, 19 nt, Artificial Sequence
  Description of Artificial Sequence: Synthetic oligonucleotide
aggaacuuggcgguguuga

SEQ ID NO: 1366923 - RNA, 19 nt, Artificial Sequence
  Description of Artificial Sequence: Synthetic oligonucleotide
uggaccgcacagcuuagaa

SEQ ID NO: 1366924 - RNA, 19 nt, Artificial Sequence
  Description of Artificial Sequence: Synthetic oligonucleotide
aaguaacccucucccgaga

SEQ ID NO: 1366925 - RNA, 19 nt, Artificial Sequence
  Description of Artificial Sequence: Synthetic oligonucleotide
gaggguuucgauggacucc

SEQ ID NO: 1366926 - RNA, 19 nt, Artificial Sequence
  Description of Artificial Sequence: Synthetic oligonucleotide
agcuuagaaggugggauca

SEQ ID NO: 1366927 - RNA, 19 nt, Artificial Sequence
  Description of Artificial Sequence: Synthetic oligonucleotide
gaucacaaguuuguacauc

SEQ ID NO: 1366928 - RNA, 19 nt, Artificial Sequence
  Description of Artificial Sequence: Synthetic oligonucleotide
agagauugccagccccaag

SEQ ID NO: 1366929 - RNA, 19 nt, Artificial Sequence
  Description of Artificial Sequence: Synthetic oligonucleotide
agauacuguagagcaccgg

SEQ ID NO: 1366930 - RNA, 19 nt, Artificial Sequence
  Description of Artificial Sequence: Synthetic oligonucleotide
ggaccauucuaaguaaccc

SEQ ID NO: 1366931 - RNA, 19 nt, Artificial Sequence
  Description of Artificial Sequence: Synthetic oligonucleotide
aggaucagaagggguacag

SEQ ID NO: 1366932 - RNA, 19 nt, Artificial Sequence
  Description of Artificial Sequence: Synthetic oligonucleotide
ucugagcguagaugagccc

SEQ ID NO: 1366933 - RNA, 19 nt, Artificial Sequence
  Description of Artificial Sequence: Synthetic oligonucleotide
ggccagacgacccacugcc

SEQ ID NO: 1366934 - RNA, 19 nt, Artificial Sequence
  Description of Artificial Sequence: Synthetic oligonucleotide
aguccgaagcaggaucagg

SEQ ID NO: 1366935 - RNA, 19 nt, Artificial Sequence
  Description of Artificial Sequence: Synthetic oligonucleotide
cagggugaggagacguuag

SEQ ID NO: 1366936 - RNA, 19 nt, Artificial Sequence
  Description of Artificial Sequence: Synthetic oligonucleotide
ccagaccacggucugagcg

SEQ ID NO: 1366937 - RNA, 19 nt, Artificial Sequence
  Description of Artificial Sequence: Synthetic oligonucleotide
aaaguucugggcggacuga

SEQ ID NO: 1366938 - RNA, 19 nt, Artificial Sequence
  Description of Artificial Sequence: Synthetic oligonucleotide
uggacggaagauaguccac

SEQ ID NO: 1366939 - RNA, 19 nt, Artificial Sequence
  Description of Artificial Sequence: Synthetic oligonucleotide
aauuguagccacaggccuu

SEQ ID NO: 1366940 - RNA, 19 nt, Artificial Sequence
  Description of Artificial Sequence: Synthetic oligonucleotide
uccccagaaaguagagaaa

SEQ ID NO: 1366941 - RNA, 19 nt, Artificial Sequence
  Description of Artificial Sequence: Synthetic oligonucleotide
caccgagcgguguaggaug

SEQ ID NO: 1366942 - RNA, 19 nt, Artificial Sequence
  Description of Artificial Sequence: Synthetic oligonucleotide
ggcuauuguaaacaccauc

SEQ ID NO: 1366943 - RNA, 19 nt, Artificial Sequence
  Description of Artificial Sequence: Synthetic oligonucleotide
gcggccggugaguagaugg

SEQ ID NO: 1366944 - RNA, 19 nt, Artificial Sequence
  Description of Artificial Sequence: Synthetic oligonucleotide
cagcuuagaaggugggauc

SEQ ID NO: 1366945 - RNA, 19 nt, Artificial Sequence
  Description of Artificial Sequence: Synthetic oligonucleotide
cuggaccaagagcaugacc

SEQ ID NO: 1366946 - RNA, 19 nt, Artificial Sequence
  Description of Artificial Sequence: Synthetic oligonucleotide
gggguauaggaaccgcagg

SEQ ID NO: 1366947 - RNA, 19 nt, Artificial Sequence
  Description of Artificial Sequence: Synthetic oligonucleotide
gagaggaucagaaggggua

SEQ ID NO: 1366948 - RNA, 19 nt, Artificial Sequence
  Description of Artificial Sequence: Synthetic oligonucleotide
cagagucccggccagacga

SEQ ID NO: 1366949 - RNA, 19 nt, Artificial Sequence
  Description of Artificial Sequence: Synthetic oligonucleotide
cacggugaacccuguggcc

SEQ ID NO: 1366950 - RNA, 19 nt, Artificial Sequence
  Description of Artificial Sequence: Synthetic oligonucleotide
guagcuggucagaaccucc

SEQ ID NO: 1366951 - RNA, 19 nt, Artificial Sequence
  Description of Artificial Sequence: Synthetic oligonucleotide
cagaaccuccgacucggcc

SEQ ID NO: 1366952 - RNA, 19 nt, Artificial Sequence
  Description of Artificial Sequence: Synthetic oligonucleotide
guaucaggaacuuggcggu

SEQ ID NO: 1366953 - RNA, 19 nt, Artificial Sequence
  Description of Artificial Sequence: Synthetic oligonucleotide
gagaagaguguuaucuucu

SEQ ID NO: 1366954 - RNA, 19 nt, Artificial Sequence
  Description of Artificial Sequence: Synthetic oligonucleotide
ggacggccagguucgaucg

SEQ ID NO: 1366955 - RNA, 19 nt, Artificial Sequence
  Description of Artificial Sequence: Synthetic oligonucleotide
agccugcguccccagaaag

SEQ ID NO: 1366956 - RNA, 19 nt, Artificial Sequence
  Description of Artificial Sequence: Synthetic oligonucleotide
ggaucaggacgaucuggcg

SEQ ID NO: 1366957 - RNA, 19 nt, Artificial Sequence
  Description of Artificial Sequence: Synthetic oligonucleotide
gaaguugaucacggagaug

SEQ ID NO: 1366958 - RNA, 19 nt, Artificial Sequence
  Description of Artificial Sequence: Synthetic oligonucleotide
cucaacccggacaccgagc

SEQ ID NO: 1366959 - RNA, 19 nt, Artificial Sequence
  Description of Artificial Sequence: Synthetic oligonucleotide
aauggaccgcacagcuuag

SEQ ID NO: 1366960 - RNA, 19 nt, Artificial Sequence
  Description of Artificial Sequence: Synthetic oligonucleotide
ggucagaaccuccgacucg

SEQ ID NO: 1366961 - RNA, 19 nt, Artificial Sequence
  Description of Artificial Sequence: Synthetic oligonucleotide
agcacggaaguucucugua

SEQ ID NO: 1366962 - RNA, 19 nt, Artificial Sequence
  Description of Artificial Sequence: Synthetic oligonucleotide
uuugcgguggaagcccgga

SEQ ID NO: 1366963 - RNA, 19 nt, Artificial Sequence
  Description of Artificial Sequence: Synthetic oligonucleotide
ugggcggacugagggaggg

SEQ ID NO: 1366964 - RNA, 19 nt, Artificial Sequence
  Description of Artificial Sequence: Synthetic oligonucleotide
agagaggaucagaaggggu

SEQ ID NO: 1366965 - RNA, 19 nt, Artificial Sequence
  Description of Artificial Sequence: Synthetic oligonucleotide
cucggaaaugaggcguccg

SEQ ID NO: 1366966 - RNA, 19 nt, Artificial Sequence
  Description of Artificial Sequence: Synthetic oligonucleotide
uucugggcggacugaggga

SEQ ID NO: 1366967 - RNA, 19 nt, Artificial Sequence
  Description of Artificial Sequence: Synthetic oligonucleotide
augccguagaaggccgccc

SEQ ID NO: 1366968 - RNA, 19 nt, Artificial Sequence
  Description of Artificial Sequence: Synthetic oligonucleotide
uucccuuggaauggaccgc

SEQ ID NO: 1366969 - RNA, 19 nt, Artificial Sequence
  Description of Artificial Sequence: Synthetic oligonucleotide
ucccuuggaauggaccgca

SEQ ID NO: 1366970 - RNA, 19 nt, Artificial Sequence
  Description of Artificial Sequence: Synthetic oligonucleotide
ugagccccaaaaccucauc

SEQ ID NO: 1366971 - RNA, 19 nt, Artificial Sequence
  Description of Artificial Sequence: Synthetic oligonucleotide
gagcgguguaggaugaaca

SEQ ID NO: 1366972 - RNA, 19 nt, Artificial Sequence
  Description of Artificial Sequence: Synthetic oligonucleotide
ucgcuuccgucucuaucug

SEQ ID NO: 1366973 - RNA, 19 nt, Artificial Sequence
  Description of Artificial Sequence: Synthetic oligonucleotide
auacuguagagcaccggga

SEQ ID NO: 1366974 - RNA, 19 nt, Artificial Sequence
  Description of Artificial Sequence: Synthetic oligonucleotide
acaguccgaagcaggauca

SEQ ID NO: 1366975 - RNA, 19 nt, Artificial Sequence
  Description of Artificial Sequence: Synthetic oligonucleotide
ggaccgcacagcuuagaag

SEQ ID NO: 1366976 - RNA, 19 nt, Artificial Sequence
  Description of Artificial Sequence: Synthetic oligonucleotide
agagaaaguucugggcgga

SEQ ID NO: 1366977 - RNA, 19 nt, Artificial Sequence
  Description of Artificial Sequence: Synthetic oligonucleotide
ggcgguguugaucagaggu

SEQ ID NO: 1366978 - RNA, 19 nt, Artificial Sequence
  Description of Artificial Sequence: Synthetic oligonucleotide
acggccagguucgaucggg

SEQ ID NO: 1366979 - RNA, 19 nt, Artificial Sequence
  Description of Artificial Sequence: Synthetic oligonucleotide
ggguguagcccucuaacga

SEQ ID NO: 1366980 - RNA, 19 nt, Artificial Sequence
  Description of Artificial Sequence: Synthetic oligonucleotide
uccgucucuaucuggcguu

SEQ ID NO: 1366981 - RNA, 19 nt, Artificial Sequence
  Description of Artificial Sequence: Synthetic oligonucleotide
gacgaucuggcggcugcgg

SEQ ID NO: 1366982 - RNA, 19 nt, Artificial Sequence
  Description of Artificial Sequence: Synthetic oligonucleotide
cuccgacucggccaacagc

SEQ ID NO: 1366983 - RNA, 19 nt, Artificial Sequence
  Description of Artificial Sequence: Synthetic oligonucleotide
cccgagagcaaguugaaga

SEQ ID NO: 1366984 - RNA, 19 nt, Artificial Sequence
  Description of Artificial Sequence: Synthetic oligonucleotide
gcguccguaagaguuagcc

SEQ ID NO: 1366985 - RNA, 19 nt, Artificial Sequence
  Description of Artificial Sequence: Synthetic oligonucleotide
ggaaaugaggcguccguaa

SEQ ID NO: 1366986 - RNA, 19 nt, Artificial Sequence
  Description of Artificial Sequence: Synthetic oligonucleotide
guaggaugaacagcaagua

SEQ ID NO: 1366987 - RNA, 19 nt, Artificial Sequence
  Description of Artificial Sequence: Synthetic oligonucleotide
cucuaacgaggugaugaac

SEQ ID NO: 1366988 - RNA, 19 nt, Artificial Sequence
  Description of Artificial Sequence: Synthetic oligonucleotide
ucagaaccuccgacucggc

SEQ ID NO: 1366989 - RNA, 19 nt, Artificial Sequence
  Description of Artificial Sequence: Synthetic oligonucleotide
ggaagacuuuauucuucgc

SEQ ID NO: 1366990 - RNA, 19 nt, Artificial Sequence
  Description of Artificial Sequence: Synthetic oligonucleotide
gcgguggaagcccggaagg

SEQ ID NO: 1366991 - RNA, 19 nt, Artificial Sequence
  Description of Artificial Sequence: Synthetic oligonucleotide
ggucugagcguagaugagc

SEQ ID NO: 1366992 - RNA, 19 nt, Artificial Sequence
  Description of Artificial Sequence: Synthetic oligonucleotide
gggaccauucuaaguaacc

SEQ ID NO: 1366993 - RNA, 19 nt, Artificial Sequence
  Description of Artificial Sequence: Synthetic oligonucleotide
guugaucacggagaugaaa

SEQ ID NO: 1366994 - RNA, 19 nt, Artificial Sequence
  Description of Artificial Sequence: Synthetic oligonucleotide
gcaaaaugaugcgcuggcg

SEQ ID NO: 1366995 - RNA, 19 nt, Artificial Sequence
  Description of Artificial Sequence: Synthetic oligonucleotide
agcgcgaggaucagcaggu

SEQ ID NO: 1366996 - RNA, 19 nt, Artificial Sequence
  Description of Artificial Sequence: Synthetic oligonucleotide
cacggucugagcguagaug

SEQ ID NO: 1366997 - RNA, 19 nt, Artificial Sequence
  Description of Artificial Sequence: Synthetic oligonucleotide
caaauggacaucuucccuu

SEQ ID NO: 1366998 - RNA, 19 nt, Artificial Sequence
  Description of Artificial Sequence: Synthetic oligonucleotide
ggacggaagauaguccacc

SEQ ID NO: 1366999 - RNA, 19 nt, Artificial Sequence
  Description of Artificial Sequence: Synthetic oligonucleotide
cugcguccccagaaaguag

SEQ ID NO: 1367000 - RNA, 19 nt, Artificial Sequence
  Description of Artificial Sequence: Synthetic oligonucleotide
aggcaacacgaaguugauc

SEQ ID NO: 1367001 - RNA, 19 nt, Artificial Sequence
  Description of Artificial Sequence: Synthetic oligonucleotide
agcucggaaaugaggcguc

SEQ ID NO: 1367002 - RNA, 19 nt, Artificial Sequence
  Description of Artificial Sequence: Synthetic oligonucleotide
agcgucacggugaacccug

SEQ ID NO: 1367003 - RNA, 19 nt, Artificial Sequence
  Description of Artificial Sequence: Synthetic oligonucleotide
auaucagaggcaacacgaa

SEQ ID NO: 1367004 - RNA, 19 nt, Artificial Sequence
  Description of Artificial Sequence: Synthetic oligonucleotide
gaaccuccgacucggccaa

SEQ ID NO: 1367005 - RNA, 19 nt, Artificial Sequence
  Description of Artificial Sequence: Synthetic oligonucleotide
ugcggguguagcccucuaa

SEQ ID NO: 1367006 - RNA, 19 nt, Artificial Sequence
  Description of Artificial Sequence: Synthetic oligonucleotide
guguugaucagagguagua

SEQ ID NO: 1367007 - RNA, 19 nt, Artificial Sequence
  Description of Artificial Sequence: Synthetic oligonucleotide
gcccagacgagucucccag

SEQ ID NO: 1367008 - RNA, 19 nt, Artificial Sequence
  Description of Artificial Sequence: Synthetic oligonucleotide
gacggccagguucgaucgg

SEQ ID NO: 1367009 - RNA, 19 nt, Artificial Sequence
  Description of Artificial Sequence: Synthetic oligonucleotide
ccuugcaucccucugccuc

SEQ ID NO: 1367010 - RNA, 19 nt, Artificial Sequence
  Description of Artificial Sequence: Synthetic oligonucleotide
acacccgguggcuguagcu

SEQ ID NO: 1367011 - RNA, 19 nt, Artificial Sequence
  Description of Artificial Sequence: Synthetic oligonucleotide
cucuguaauuguagccaca

SEQ ID NO: 1367012 - RNA, 19 nt, Artificial Sequence
  Description of Artificial Sequence: Synthetic oligonucleotide
agcacggcccucagcgccc

SEQ ID NO: 1367013 - RNA, 19 nt, Artificial Sequence
  Description of Artificial Sequence: Synthetic oligonucleotide
caagcugagaacacccggu

SEQ ID NO: 1367014 - RNA, 19 nt, Artificial Sequence
  Description of Artificial Sequence: Synthetic oligonucleotide
uccuaggaaacuggaccaa

SEQ ID NO: 1367015 - RNA, 19 nt, Artificial Sequence
  Description of Artificial Sequence: Synthetic oligonucleotide
gaaccgcagggugaggaga

SEQ ID NO: 1367016 - RNA, 19 nt, Artificial Sequence
  Description of Artificial Sequence: Synthetic oligonucleotide
agagcaaguugaagagcug

SEQ ID NO: 1367017 - RNA, 19 nt, Artificial Sequence
  Description of Artificial Sequence: Synthetic oligonucleotide
cucucccgagagcaaguug

SEQ ID NO: 1367018 - RNA, 19 nt, Artificial Sequence
  Description of Artificial Sequence: Synthetic oligonucleotide
cuggcccagacgagucucc

SEQ ID NO: 1367019 - RNA, 19 nt, Artificial Sequence
  Description of Artificial Sequence: Synthetic oligonucleotide
guagcccucuaacgaggug

SEQ ID NO: 1367020 - RNA, 19 nt, Artificial Sequence
  Description of Artificial Sequence: Synthetic oligonucleotide
agcacggcgccugaccaug

SEQ ID NO: 1367021 - RNA, 19 nt, Artificial Sequence
  Description of Artificial Sequence: Synthetic oligonucleotide
ucgggguggguagaaccca

SEQ ID NO: 1367022 - RNA, 19 nt, Artificial Sequence
  Description of Artificial Sequence: Synthetic oligonucleotide
ggaugcaagagaggaucag

SEQ ID NO: 1367023 - RNA, 19 nt, Artificial Sequence
  Description of Artificial Sequence: Synthetic oligonucleotide
cuuuauucuucgcuuccgu

SEQ ID NO: 1367024 - RNA, 19 nt, Artificial Sequence
  Description of Artificial Sequence: Synthetic oligonucleotide
ccagacgacccacugcccc

SEQ ID NO: 1367025 - RNA, 19 nt, Artificial Sequence
  Description of Artificial Sequence: Synthetic oligonucleotide
gagaacacccgguggcugu

SEQ ID NO: 1367026 - RNA, 19 nt, Artificial Sequence
  Description of Artificial Sequence: Synthetic oligonucleotide
aggcguccguaagaguuag

SEQ ID NO: 1367027 - RNA, 19 nt, Artificial Sequence
  Description of Artificial Sequence: Synthetic oligonucleotide
augaggcguccguaagagu

SEQ ID NO: 1367028 - RNA, 19 nt, Artificial Sequence
  Description of Artificial Sequence: Synthetic oligonucleotide
cucgcuggcccagcguccg

SEQ ID NO: 1367029 - RNA, 19 nt, Artificial Sequence
  Description of Artificial Sequence: Synthetic oligonucleotide
ggccuugcaucccucugcc

SEQ ID NO: 1367030 - RNA, 19 nt, Artificial Sequence
  Description of Artificial Sequence: Synthetic oligonucleotide
auuugcgguggaagcccgg

SEQ ID NO: 1367031 - RNA, 19 nt, Artificial Sequence
  Description of Artificial Sequence: Synthetic oligonucleotide
uugcgguggaagcccggaa

SEQ ID NO: 1367032 - RNA, 19 nt, Artificial Sequence
  Description of Artificial Sequence: Synthetic oligonucleotide
cagaggcaacacgaaguug

SEQ ID NO: 1367033 - RNA, 19 nt, Artificial Sequence
  Description of Artificial Sequence: Synthetic oligonucleotide
gcggguguagcccucuaac

SEQ ID NO: 1367034 - RNA, 19 nt, Artificial Sequence
  Description of Artificial Sequence: Synthetic oligonucleotide
ggaucagaagggguacagc

SEQ ID NO: 1367035 - RNA, 19 nt, Artificial Sequence
  Description of Artificial Sequence: Synthetic oligonucleotide
cugggcggacugagggagg

SEQ ID NO: 1367036 - RNA, 19 nt, Artificial Sequence
  Description of Artificial Sequence: Synthetic oligonucleotide
gcaacacgaaguugaucac

SEQ ID NO: 1367037 - RNA, 19 nt, Artificial Sequence
  Description of Artificial Sequence: Synthetic oligonucleotide
agagucccggccagacgac

SEQ ID NO: 1367038 - RNA, 19 nt, Artificial Sequence
  Description of Artificial Sequence: Synthetic oligonucleotide
uucgaucgggguggguaga

SEQ ID NO: 1367039 - RNA, 19 nt, Artificial Sequence
  Description of Artificial Sequence: Synthetic oligonucleotide
gggacggccagguucgauc

SEQ ID NO: 1367040 - RNA, 19 nt, Artificial Sequence
  Description of Artificial Sequence: Synthetic oligonucleotide
gcgcccacaccuuggcucg

SEQ ID NO: 1367041 - RNA, 19 nt, Artificial Sequence
  Description of Artificial Sequence: Synthetic oligonucleotide
caacccggacaccgagcgg

SEQ ID NO: 1367042 - RNA, 19 nt, Artificial Sequence
  Description of Artificial Sequence: Synthetic oligonucleotide
gagcucagagccacagcuc

SEQ ID NO: 1367043 - RNA, 19 nt, Artificial Sequence
  Description of Artificial Sequence: Synthetic oligonucleotide
cacccgguggcuguagcug

SEQ ID NO: 1367044 - RNA, 19 nt, Artificial Sequence
  Description of Artificial Sequence: Synthetic oligonucleotide
gacgacccacugccccagg

SEQ ID NO: 1367045 - RNA, 19 nt, Artificial Sequence
  Description of Artificial Sequence: Synthetic oligonucleotide
ggauguggacccaaaugga

SEQ ID NO: 1367046 - RNA, 19 nt, Artificial Sequence
  Description of Artificial Sequence: Synthetic oligonucleotide
agacgacccacugccccag

SEQ ID NO: 1367047 - RNA, 19 nt, Artificial Sequence
  Description of Artificial Sequence: Synthetic oligonucleotide
caaagacggagcacaggua

SEQ ID NO: 1367048 - RNA, 19 nt, Artificial Sequence
  Description of Artificial Sequence: Synthetic oligonucleotide
gaacacccgguggcuguag

SEQ ID NO: 1367049 - RNA, 19 nt, Artificial Sequence
  Description of Artificial Sequence: Synthetic oligonucleotide
ccuaggaaacuggaccaag

SEQ ID NO: 1367050 - RNA, 19 nt, Artificial Sequence
  Description of Artificial Sequence: Synthetic oligonucleotide
cuuggcgguguugaucaga

SEQ ID NO: 1367051 - RNA, 19 nt, Artificial Sequence
  Description of Artificial Sequence: Synthetic oligonucleotide
cucgcugggcuaggaagac

SEQ ID NO: 1367052 - RNA, 19 nt, Artificial Sequence
  Description of Artificial Sequence: Synthetic oligonucleotide
cuaacgaggugaugaacuu

SEQ ID NO: 1367053 - RNA, 19 nt, Artificial Sequence
  Description of Artificial Sequence: Synthetic oligonucleotide
cggguguagcccucuaacg

SEQ ID NO: 1367054 - RNA, 19 nt, Artificial Sequence
  Description of Artificial Sequence: Synthetic oligonucleotide
gagucccggccagacgacc

SEQ ID NO: 1367055 - RNA, 19 nt, Artificial Sequence
  Description of Artificial Sequence: Synthetic oligonucleotide
gcgguguaggaugaacagc

SEQ ID NO: 1367056 - RNA, 19 nt, Artificial Sequence
  Description of Artificial Sequence: Synthetic oligonucleotide
accacggucugagcguaga

SEQ ID NO: 1367057 - RNA, 19 nt, Artificial Sequence
  Description of Artificial Sequence: Synthetic oligonucleotide
uccgcagcacggcgccuga

SEQ ID NO: 1367058 - RNA, 19 nt, Artificial Sequence
  Description of Artificial Sequence: Synthetic oligonucleotide
agcccggaaggugccggcg

SEQ ID NO: 1367059 - RNA, 19 nt, Artificial Sequence
  Description of Artificial Sequence: Synthetic oligonucleotide
gugcgcuuccccgcagagg

SEQ ID NO: 1367060 - RNA, 19 nt, Artificial Sequence
  Description of Artificial Sequence: Synthetic oligonucleotide
ccacaccuuggcucgcugg

SEQ ID NO: 1367061 - RNA, 19 nt, Artificial Sequence
  Description of Artificial Sequence: Synthetic oligonucleotide
ucgaucgggguggguagaa

SEQ ID NO: 1367062 - RNA, 19 nt, Artificial Sequence
  Description of Artificial Sequence: Synthetic oligonucleotide
gguucgaucggggugggua

SEQ ID NO: 1367063 - RNA, 19 nt, Artificial Sequence
  Description of Artificial Sequence: Synthetic oligonucleotide
cgugcaaaaugaugcgcug

SEQ ID NO: 1367064 - RNA, 19 nt, Artificial Sequence
  Description of Artificial Sequence: Synthetic oligonucleotide
acacaguccgaagcaggau

SEQ ID NO: 1367065 - RNA, 19 nt, Artificial Sequence
  Description of Artificial Sequence: Synthetic oligonucleotide
ccguaagaguuagccaggg

SEQ ID NO: 1367066 - RNA, 19 nt, Artificial Sequence
  Description of Artificial Sequence: Synthetic oligonucleotide
accgcagggugaggagacg

SEQ ID NO: 1367067 - RNA, 19 nt, Artificial Sequence
  Description of Artificial Sequence: Synthetic oligonucleotide
caguccgaagcaggaucag

SEQ ID NO: 1367068 - RNA, 19 nt, Artificial Sequence
  Description of Artificial Sequence: Synthetic oligonucleotide
acgugcgcuuccccgcaga

SEQ ID NO: 1367069 - RNA, 19 nt, Artificial Sequence
  Description of Artificial Sequence: Synthetic oligonucleotide
ccucaacccggacaccgag

SEQ ID NO: 1367070 - RNA, 19 nt, Artificial Sequence
  Description of Artificial Sequence: Synthetic oligonucleotide
cagaccacggucugagcgu

SEQ ID NO: 1367071 - RNA, 19 nt, Artificial Sequence
  Description of Artificial Sequence: Synthetic oligonucleotide
cacggcgccugaccauggc

SEQ ID NO: 1367072 - RNA, 19 nt, Artificial Sequence
  Description of Artificial Sequence: Synthetic oligonucleotide
ggacugagggaggguuucg

SEQ ID NO: 1367073 - RNA, 19 nt, Artificial Sequence
  Description of Artificial Sequence: Synthetic oligonucleotide
ggagcgcgaggaucagcag

SEQ ID NO: 1367074 - RNA, 19 nt, Artificial Sequence
  Description of Artificial Sequence: Synthetic oligonucleotide
gguauaggaaccgcagggu

SEQ ID NO: 1367075 - RNA, 19 nt, Artificial Sequence
  Description of Artificial Sequence: Synthetic oligonucleotide
gaggcguccguaagaguua

SEQ ID NO: 1367076 - RNA, 19 nt, Artificial Sequence
  Description of Artificial Sequence: Synthetic oligonucleotide
aaccuccgacucggccaac

SEQ ID NO: 1367077 - RNA, 19 nt, Artificial Sequence
  Description of Artificial Sequence: Synthetic oligonucleotide
cuuggcucgcuggcccagc

SEQ ID NO: 1367078 - RNA, 19 nt, Artificial Sequence
  Description of Artificial Sequence: Synthetic oligonucleotide
cacggaaguucucuguaau

SEQ ID NO: 1367079 - RNA, 19 nt, Artificial Sequence
  Description of Artificial Sequence: Synthetic oligonucleotide
ggccggugaguagauggag

SEQ ID NO: 1367080 - RNA, 19 nt, Artificial Sequence
  Description of Artificial Sequence: Synthetic oligonucleotide
accgcacagcuuagaaggu

SEQ ID NO: 1367081 - RNA, 19 nt, Artificial Sequence
  Description of Artificial Sequence: Synthetic oligonucleotide
ggacuccgggauguggacc

SEQ ID NO: 1367082 - RNA, 19 nt, Artificial Sequence
  Description of Artificial Sequence: Synthetic oligonucleotide
cguaagaguuagccagggc

SEQ ID NO: 1367083 - RNA, 19 nt, Artificial Sequence
  Description of Artificial Sequence: Synthetic oligonucleotide
caggagcgcgaggaucagc

SEQ ID NO: 1367084 - RNA, 19 nt, Artificial Sequence
  Description of Artificial Sequence: Synthetic oligonucleotide
aguugaucacggagaugaa

SEQ ID NO: 1367085 - RNA, 19 nt, Artificial Sequence
  Description of Artificial Sequence: Synthetic oligonucleotide
accgagcgguguaggauga

SEQ ID NO: 1367086 - RNA, 19 nt, Artificial Sequence
  Description of Artificial Sequence: Synthetic oligonucleotide
cugggcuaggaagacuuua

SEQ ID NO: 1367087 - RNA, 19 nt, Artificial Sequence
  Description of Artificial Sequence: Synthetic oligonucleotide
agaccacggucugagcgua

SEQ ID NO: 1367088 - RNA, 19 nt, Artificial Sequence
  Description of Artificial Sequence: Synthetic oligonucleotide
ccgcacgugcgcuuccccg

SEQ ID NO: 1367089 - RNA, 19 nt, Artificial Sequence
  Description of Artificial Sequence: Synthetic oligonucleotide
ccagagucccggccagacg

SEQ ID NO: 1367090 - RNA, 19 nt, Artificial Sequence
  Description of Artificial Sequence: Synthetic oligonucleotide
gaccacggucugagcguag

SEQ ID NO: 1367091 - RNA, 19 nt, Artificial Sequence
  Description of Artificial Sequence: Synthetic oligonucleotide
ccggugaguagauggagaa

SEQ ID NO: 1367092 - RNA, 19 nt, Artificial Sequence
  Description of Artificial Sequence: Synthetic oligonucleotide
agaguuagccagggcuauu

SEQ ID NO: 1367093 - RNA, 19 nt, Artificial Sequence
  Description of Artificial Sequence: Synthetic oligonucleotide
cucccgagagcaaguugaa

SEQ ID NO: 1367094 - RNA, 19 nt, Artificial Sequence
  Description of Artificial Sequence: Synthetic oligonucleotide
agcccucuaacgaggugau

SEQ ID NO: 1367095 - RNA, 19 nt, Artificial Sequence
  Description of Artificial Sequence: Synthetic oligonucleotide
ggacgaucuggcggcugcg

SEQ ID NO: 1367096 - RNA, 19 nt, Artificial Sequence
  Description of Artificial Sequence: Synthetic oligonucleotide
acgagucucccagcacgga

SEQ ID NO: 1367097 - RNA, 19 nt, Artificial Sequence
  Description of Artificial Sequence: Synthetic oligonucleotide
guacagcaaaagccugcgu

SEQ ID NO: 1367098 - RNA, 19 nt, Artificial Sequence
  Description of Artificial Sequence: Synthetic oligonucleotide
caugaccaacaagcccauc

SEQ ID NO: 1367099 - RNA, 19 nt, Artificial Sequence
  Description of Artificial Sequence: Synthetic oligonucleotide
cacgugcgcuuccccgcag

SEQ ID NO: 1367100 - RNA, 19 nt, Artificial Sequence
  Description of Artificial Sequence: Synthetic oligonucleotide
aucuggcggcugcgggugu

SEQ ID NO: 1367101 - RNA, 19 nt, Artificial Sequence
  Description of Artificial Sequence: Synthetic oligonucleotide
gcucggaaaugaggcgucc

SEQ ID NO: 1367102 - RNA, 19 nt, Artificial Sequence
  Description of Artificial Sequence: Synthetic oligonucleotide
cagagauugccagccccaa

SEQ ID NO: 1367103 - RNA, 19 nt, Artificial Sequence
  Description of Artificial Sequence: Synthetic oligonucleotide
caacagcgucucccucaac

SEQ ID NO: 1367104 - RNA, 19 nt, Artificial Sequence
  Description of Artificial Sequence: Synthetic oligonucleotide
gaggcaacacgaaguugau

SEQ ID NO: 1367105 - RNA, 19 nt, Artificial Sequence
  Description of Artificial Sequence: Synthetic oligonucleotide
cccagacgagucucccagc

SEQ ID NO: 1367106 - RNA, 19 nt, Artificial Sequence
  Description of Artificial Sequence: Synthetic oligonucleotide
acggcccucagcgcccaca

SEQ ID NO: 1367107 - RNA, 19 nt, Artificial Sequence
  Description of Artificial Sequence: Synthetic oligonucleotide
acgaggugaugaacuugaa

SEQ ID NO: 1367108 - RNA, 19 nt, Artificial Sequence
  Description of Artificial Sequence: Synthetic oligonucleotide
gcguccccagaaaguagag

SEQ ID NO: 1367109 - RNA, 19 nt, Artificial Sequence
  Description of Artificial Sequence: Synthetic oligonucleotide
gaaggugccggcggccggu

SEQ ID NO: 1367110 - RNA, 19 nt, Artificial Sequence
  Description of Artificial Sequence: Synthetic oligonucleotide
cgcuuccgucucuaucugg

SEQ ID NO: 1367111 - RNA, 19 nt, Artificial Sequence
  Description of Artificial Sequence: Synthetic oligonucleotide
cguccguaagaguuagcca

SEQ ID NO: 1367112 - RNA, 19 nt, Artificial Sequence
  Description of Artificial Sequence: Synthetic oligonucleotide
gguguaggaugaacagcaa

SEQ ID NO: 1367113 - RNA, 19 nt, Artificial Sequence
  Description of Artificial Sequence: Synthetic oligonucleotide
ggugaacccuguggcccag

SEQ ID NO: 1367114 - RNA, 19 nt, Artificial Sequence
  Description of Artificial Sequence: Synthetic oligonucleotide
gagcguagaugagccccaa

SEQ ID NO: 1367115 - RNA, 19 nt, Artificial Sequence
  Description of Artificial Sequence: Synthetic oligonucleotide
ggaaggugaccaggcccug

SEQ ID NO: 1367116 - RNA, 19 nt, Artificial Sequence
  Description of Artificial Sequence: Synthetic oligonucleotide
ccgcacagcuuagaaggug

SEQ ID NO: 1367117 - RNA, 19 nt, Artificial Sequence
  Description of Artificial Sequence: Synthetic oligonucleotide
ggcgccugaccauggccuc

SEQ ID NO: 1367118 - RNA, 19 nt, Artificial Sequence
  Description of Artificial Sequence: Synthetic oligonucleotide
ccugcguccccagaaagua

SEQ ID NO: 1367119 - RNA, 19 nt, Artificial Sequence
  Description of Artificial Sequence: Synthetic oligonucleotide
ggcccagacgagucuccca

SEQ ID NO: 1367120 - RNA, 19 nt, Artificial Sequence
  Description of Artificial Sequence: Synthetic oligonucleotide
acuccgggauguggaccca

SEQ ID NO: 1367121 - RNA, 19 nt, Artificial Sequence
  Description of Artificial Sequence: Synthetic oligonucleotide
cgagcgguguaggaugaac

SEQ ID NO: 1367122 - RNA, 19 nt, Artificial Sequence
  Description of Artificial Sequence: Synthetic oligonucleotide
cggucugagcguagaugag

SEQ ID NO: 1367123 - RNA, 19 nt, Artificial Sequence
  Description of Artificial Sequence: Synthetic oligonucleotide
gcgguguugaucagaggua

SEQ ID NO: 1367124 - RNA, 19 nt, Artificial Sequence
  Description of Artificial Sequence: Synthetic oligonucleotide
gcuggcgcagccgcacgug

SEQ ID NO: 1367125 - RNA, 19 nt, Artificial Sequence
  Description of Artificial Sequence: Synthetic oligonucleotide
ccaacagcgucucccucaa

SEQ ID NO: 1367126 - RNA, 19 nt, Artificial Sequence
  Description of Artificial Sequence: Synthetic oligonucleotide
cagcguccgcuccgcagca

SEQ ID NO: 1367127 - RNA, 19 nt, Artificial Sequence
  Description of Artificial Sequence: Synthetic oligonucleotide
gccgcacgugcgcuucccc

SEQ ID NO: 1367128 - RNA, 19 nt, Artificial Sequence
  Description of Artificial Sequence: Synthetic oligonucleotide
gcaccgggacagcagagau

SEQ ID NO: 1367129 - RNA, 19 nt, Artificial Sequence
  Description of Artificial Sequence: Synthetic oligonucleotide
cgacucggccaacagcguc

SEQ ID NO: 1367130 - RNA, 19 nt, Artificial Sequence
  Description of Artificial Sequence: Synthetic oligonucleotide
gcacgugcgcuuccccgca

SEQ ID NO: 1367131 - RNA, 19 nt, Artificial Sequence
  Description of Artificial Sequence: Synthetic oligonucleotide
cgugcgcuuccccgcagag

SEQ ID NO: 1367132 - RNA, 19 nt, Artificial Sequence
  Description of Artificial Sequence: Synthetic oligonucleotide
agguucgaucggggugggu

SEQ ID NO: 1367133 - RNA, 19 nt, Artificial Sequence
  Description of Artificial Sequence: Synthetic oligonucleotide
cggccagacgacccacugc

SEQ ID NO: 1367134 - RNA, 19 nt, Artificial Sequence
  Description of Artificial Sequence: Synthetic oligonucleotide
gcacggcgccugaccaugg

SEQ ID NO: 1367135 - RNA, 19 nt, Artificial Sequence
  Description of Artificial Sequence: Synthetic oligonucleotide
cccacaccuuggcucgcug

SEQ ID NO: 1367136 - RNA, 19 nt, Artificial Sequence
  Description of Artificial Sequence: Synthetic oligonucleotide
gcaguucgugcaaaaugau

SEQ ID NO: 1367137 - RNA, 19 nt, Artificial Sequence
  Description of Artificial Sequence: Synthetic oligonucleotide
ggcguccguaagaguuagc

SEQ ID NO: 1367138 - RNA, 19 nt, Artificial Sequence
  Description of Artificial Sequence: Synthetic oligonucleotide
gugaacccuguggcccaga

SEQ ID NO: 1367139 - RNA, 19 nt, Artificial Sequence
  Description of Artificial Sequence: Synthetic oligonucleotide
cggacugagggaggguuuc

SEQ ID NO: 1367140 - RNA, 19 nt, Artificial Sequence
  Description of Artificial Sequence: Synthetic oligonucleotide
ccggaaggugccggcggcc

SEQ ID NO: 1367141 - RNA, 19 nt, Artificial Sequence
  Description of Artificial Sequence: Synthetic oligonucleotide
cggacaccgagcgguguag

SEQ ID NO: 1367142 - RNA, 19 nt, Artificial Sequence
  Description of Artificial Sequence: Synthetic oligonucleotide
ccgggacagcagagauugc

SEQ ID NO: 1367143 - RNA, 19 nt, Artificial Sequence
  Description of Artificial Sequence: Synthetic oligonucleotide
cccucaacccggacaccga

SEQ ID NO: 1367144 - RNA, 19 nt, Artificial Sequence
  Description of Artificial Sequence: Synthetic oligonucleotide
cuccgggauguggacccaa

SEQ ID NO: 1367145 - RNA, 19 nt, Artificial Sequence
  Description of Artificial Sequence: Synthetic oligonucleotide
caccgggacagcagagauu

SEQ ID NO: 1367146 - RNA, 19 nt, Artificial Sequence
  Description of Artificial Sequence: Synthetic oligonucleotide
ccggcggccggugaguaga

SEQ ID NO: 1367147 - RNA, 19 nt, Artificial Sequence
  Description of Artificial Sequence: Synthetic oligonucleotide
cagcgucacggugaacccu

SEQ ID NO: 1367148 - RNA, 19 nt, Artificial Sequence
  Description of Artificial Sequence: Synthetic oligonucleotide
ggcggacugagggaggguu

SEQ ID NO: 1367149 - RNA, 19 nt, Artificial Sequence
  Description of Artificial Sequence: Synthetic oligonucleotide
ggcggccggugaguagaug

SEQ ID NO: 1367150 - RNA, 19 nt, Artificial Sequence
  Description of Artificial Sequence: Synthetic oligonucleotide
cuuccccgcagaggccaaa

SEQ ID NO: 1367151 - RNA, 19 nt, Artificial Sequence
  Description of Artificial Sequence: Synthetic oligonucleotide
gccugcguccccagaaagu

SEQ ID NO: 1367152 - RNA, 19 nt, Artificial Sequence
  Description of Artificial Sequence: Synthetic oligonucleotide
ccaccaggagcuugaguau

SEQ ID NO: 1367153 - RNA, 19 nt, Artificial Sequence
  Description of Artificial Sequence: Synthetic oligonucleotide
cgucucuaucuggcguuug

SEQ ID NO: 1367154 - RNA, 19 nt, Artificial Sequence
  Description of Artificial Sequence: Synthetic oligonucleotide
cgaucgggguggguagaac

SEQ ID NO: 1367155 - RNA, 19 nt, Artificial Sequence
  Description of Artificial Sequence: Synthetic oligonucleotide
cugcggguguagcccucua

SEQ ID NO: 1367156 - RNA, 19 nt, Artificial Sequence
  Description of Artificial Sequence: Synthetic oligonucleotide
gggguggguagaacccaua

SEQ ID NO: 1367157 - RNA, 19 nt, Artificial Sequence
  Description of Artificial Sequence: Synthetic oligonucleotide
gcgcuuccccgcagaggcc

SEQ ID NO: 1367158 - RNA, 19 nt, Artificial Sequence
  Description of Artificial Sequence: Synthetic oligonucleotide
ccccgcagaggccaaaguu

SEQ ID NO: 1367159 - RNA, 19 nt, Artificial Sequence
  Description of Artificial Sequence: Synthetic oligonucleotide
ccugcaguucgugcaaaau

SEQ ID NO: 1367160 - RNA, 19 nt, Artificial Sequence
  Description of Artificial Sequence: Synthetic oligonucleotide
ccggacaccgagcggugua

SEQ ID NO: 1367161 - RNA, 19 nt, Artificial Sequence
  Description of Artificial Sequence: Synthetic oligonucleotide
gcgucucccucaacccgga

SEQ ID NO: 1367162 - RNA, 19 nt, Artificial Sequence
  Description of Artificial Sequence: Synthetic oligonucleotide
cggaaaugaggcguccgua

SEQ ID NO: 1367163 - RNA, 19 nt, Artificial Sequence
  Description of Artificial Sequence: Synthetic oligonucleotide
gguaggggacggccagguu

SEQ ID NO: 1367164 - RNA, 19 nt, Artificial Sequence
  Description of Artificial Sequence: Synthetic oligonucleotide
ccccacaugugaucugauu

SEQ ID NO: 1367165 - RNA, 19 nt, Artificial Sequence
  Description of Artificial Sequence: Synthetic oligonucleotide
gcggacugagggaggguuu

SEQ ID NO: 1367166 - RNA, 19 nt, Artificial Sequence
  Description of Artificial Sequence: Synthetic oligonucleotide
gcugggcuaggaagacuuu

SEQ ID NO: 1367167 - RNA, 19 nt, Artificial Sequence
  Description of Artificial Sequence: Synthetic oligonucleotide
ccgcagcacggcgccugac

SEQ ID NO: 1367168 - RNA, 19 nt, Artificial Sequence
  Description of Artificial Sequence: Synthetic oligonucleotide
ggggacggccagguucgau

SEQ ID NO: 1367169 - RNA, 19 nt, Artificial Sequence
  Description of Artificial Sequence: Synthetic oligonucleotide
gcccacaccuuggcucgcu

SEQ ID NO: 1367170 - RNA, 19 nt, Artificial Sequence
  Description of Artificial Sequence: Synthetic oligonucleotide
cgcccacaccuuggcucgc

SEQ ID NO: 1367171 - RNA, 19 nt, Artificial Sequence
  Description of Artificial Sequence: Synthetic oligonucleotide
cgguggaagcccggaaggu

SEQ ID NO: 1367172 - RNA, 19 nt, Artificial Sequence
  Description of Artificial Sequence: Synthetic oligonucleotide
ccgagcgguguaggaugaa

SEQ ID NO: 1367173 - RNA, 19 nt, Artificial Sequence
  Description of Artificial Sequence: Synthetic oligonucleotide
ccgucucuaucuggcguuu

SEQ ID NO: 1367174 - RNA, 19 nt, Artificial Sequence
  Description of Artificial Sequence: Synthetic oligonucleotide
cccggacaccgagcggugu

SEQ ID NO: 1367175 - RNA, 19 nt, Artificial Sequence
  Description of Artificial Sequence: Synthetic oligonucleotide
gcgcgaggaucagcagguu

SEQ ID NO: 1367176 - RNA, 19 nt, Artificial Sequence
  Description of Artificial Sequence: Synthetic oligonucleotide
aaagauuccuuauuaaucc

SEQ ID NO: 1367177 - RNA, 19 nt, Artificial Sequence
  Description of Artificial Sequence: Synthetic oligonucleotide
auuaagaauauaaagaucc

SEQ ID NO: 1367178 - RNA, 19 nt, Artificial Sequence
  Description of Artificial Sequence: Synthetic oligonucleotide
auuaguauaaaguguaucc

SEQ ID NO: 1367179 - RNA, 19 nt, Artificial Sequence
  Description of Artificial Sequence: Synthetic oligonucleotide
aauauaaagauccacugug

SEQ ID NO: 1367180 - RNA, 19 nt, Artificial Sequence
  Description of Artificial Sequence: Synthetic oligonucleotide
gaugauuaagaauauaaag

SEQ ID NO: 1367181 - RNA, 19 nt, Artificial Sequence
  Description of Artificial Sequence: Synthetic oligonucleotide
uauauuaucaggcaggccu

SEQ ID NO: 1367182 - RNA, 19 nt, Artificial Sequence
  Description of Artificial Sequence: Synthetic oligonucleotide
aagauuuccagauacgauc

SEQ ID NO: 1367183 - RNA, 19 nt, Artificial Sequence
  Description of Artificial Sequence: Synthetic oligonucleotide
uuugcaauaaugauaacug

SEQ ID NO: 1367184 - RNA, 19 nt, Artificial Sequence
  Description of Artificial Sequence: Synthetic oligonucleotide
aagguguagauuuucacac

SEQ ID NO: 1367185 - RNA, 19 nt, Artificial Sequence
  Description of Artificial Sequence: Synthetic oligonucleotide
agugaggugauccaauucc

SEQ ID NO: 1367186 - RNA, 19 nt, Artificial Sequence
  Description of Artificial Sequence: Synthetic oligonucleotide
ugauuugcaauaaugauaa

SEQ ID NO: 1367187 - RNA, 19 nt, Artificial Sequence
  Description of Artificial Sequence: Synthetic oligonucleotide
uuucacacggcaaugauug

SEQ ID NO: 1367188 - RNA, 19 nt, Artificial Sequence
  Description of Artificial Sequence: Synthetic oligonucleotide
ugauuaagaauauaaagau

SEQ ID NO: 1367189 - RNA, 19 nt, Artificial Sequence
  Description of Artificial Sequence: Synthetic oligonucleotide
uuuaguaugcucauacuca

SEQ ID NO: 1367190 - RNA, 19 nt, Artificial Sequence
  Description of Artificial Sequence: Synthetic oligonucleotide
aacuagcauagauaucucc

SEQ ID NO: 1367191 - RNA, 19 nt, Artificial Sequence
  Description of Artificial Sequence: Synthetic oligonucleotide
aaugauuuccaugucaaug

SEQ ID NO: 1367192 - RNA, 19 nt, Artificial Sequence
  Description of Artificial Sequence: Synthetic oligonucleotide
guugaaucgaaucuucugg

SEQ ID NO: 1367193 - RNA, 19 nt, Artificial Sequence
  Description of Artificial Sequence: Synthetic oligonucleotide
aauuaguauaaaguguauc

SEQ ID NO: 1367194 - RNA, 19 nt, Artificial Sequence
  Description of Artificial Sequence: Synthetic oligonucleotide
uaaagauuccuuauuaauc

SEQ ID NO: 1367195 - RNA, 19 nt, Artificial Sequence
  Description of Artificial Sequence: Synthetic oligonucleotide
uaguauaaaguguauccgg

SEQ ID NO: 1367196 - RNA, 19 nt, Artificial Sequence
  Description of Artificial Sequence: Synthetic oligonucleotide
uauaaaguguauccggcag

SEQ ID NO: 1367197 - RNA, 19 nt, Artificial Sequence
  Description of Artificial Sequence: Synthetic oligonucleotide
cauuugagaaucuuagagg

SEQ ID NO: 1367198 - RNA, 19 nt, Artificial Sequence
  Description of Artificial Sequence: Synthetic oligonucleotide
ugaaccuugguaaaggaac

SEQ ID NO: 1367199 - RNA, 19 nt, Artificial Sequence
  Description of Artificial Sequence: Synthetic oligonucleotide
uucuaacugaauaacauuc

SEQ ID NO: 1367200 - RNA, 19 nt, Artificial Sequence
  Description of Artificial Sequence: Synthetic oligonucleotide
agaauauaaagauccacug

SEQ ID NO: 1367201 - RNA, 19 nt, Artificial Sequence
  Description of Artificial Sequence: Synthetic oligonucleotide
uuaguauaaaguguauccg

SEQ ID NO: 1367202 - RNA, 19 nt, Artificial Sequence
  Description of Artificial Sequence: Synthetic oligonucleotide
aaaacgacuccuuggaaca

SEQ ID NO: 1367203 - RNA, 19 nt, Artificial Sequence
  Description of Artificial Sequence: Synthetic oligonucleotide
aaucgaaucuucuggaggu

SEQ ID NO: 1367204 - RNA, 19 nt, Artificial Sequence
  Description of Artificial Sequence: Synthetic oligonucleotide
ucagguauacuuucaaacc

SEQ ID NO: 1367205 - RNA, 19 nt, Artificial Sequence
  Description of Artificial Sequence: Synthetic oligonucleotide
ucuuagugauccaagauuc

SEQ ID NO: 1367206 - RNA, 19 nt, Artificial Sequence
  Description of Artificial Sequence: Synthetic oligonucleotide
uuaaccaaggguacuguag

SEQ ID NO: 1367207 - RNA, 19 nt, Artificial Sequence
  Description of Artificial Sequence: Synthetic oligonucleotide
aggucucuggauuuuaccc

SEQ ID NO: 1367208 - RNA, 19 nt, Artificial Sequence
  Description of Artificial Sequence: Synthetic oligonucleotide
cagaagauauauuaucagg

SEQ ID NO: 1367209 - RNA, 19 nt, Artificial Sequence
  Description of Artificial Sequence: Synthetic oligonucleotide
caaagauccugcauuaagg

SEQ ID NO: 1367210 - RNA, 19 nt, Artificial Sequence
  Description of Artificial Sequence: Synthetic oligonucleotide
ucaaagauccugcauuaag

SEQ ID NO: 1367211 - RNA, 19 nt, Artificial Sequence
  Description of Artificial Sequence: Synthetic oligonucleotide
gaaucgaaucuucuggagg

SEQ ID NO: 1367212 - RNA, 19 nt, Artificial Sequence
  Description of Artificial Sequence: Synthetic oligonucleotide
auaaaguguauccggcagc

SEQ ID NO: 1367213 - RNA, 19 nt, Artificial Sequence
  Description of Artificial Sequence: Synthetic oligonucleotide
aaauguucaauuugcugca

SEQ ID NO: 1367214 - RNA, 19 nt, Artificial Sequence
  Description of Artificial Sequence: Synthetic oligonucleotide
augauuaagaauauaaaga

SEQ ID NO: 1367215 - RNA, 19 nt, Artificial Sequence
  Description of Artificial Sequence: Synthetic oligonucleotide
cuuauuaauccucggauac

SEQ ID NO: 1367216 - RNA, 19 nt, Artificial Sequence
  Description of Artificial Sequence: Synthetic oligonucleotide
uaugauauagcuuccgaaa

SEQ ID NO: 1367217 - RNA, 19 nt, Artificial Sequence
  Description of Artificial Sequence: Synthetic oligonucleotide
agaaggucccuuuucuugc

SEQ ID NO: 1367218 - RNA, 19 nt, Artificial Sequence
  Description of Artificial Sequence: Synthetic oligonucleotide
acuuuuagggccuuugcag

SEQ ID NO: 1367219 - RNA, 19 nt, Artificial Sequence
  Description of Artificial Sequence: Synthetic oligonucleotide
uaugcucauacucauguga

SEQ ID NO: 1367220 - RNA, 19 nt, Artificial Sequence
  Description of Artificial Sequence: Synthetic oligonucleotide
aagagggacaucuguauug

SEQ ID NO: 1367221 - RNA, 19 nt, Artificial Sequence
  Description of Artificial Sequence: Synthetic oligonucleotide
acaagcaagagaucugacg

SEQ ID NO: 1367222 - RNA, 19 nt, Artificial Sequence
  Description of Artificial Sequence: Synthetic oligonucleotide
aguauaaaguguauccggc

SEQ ID NO: 1367223 - RNA, 19 nt, Artificial Sequence
  Description of Artificial Sequence: Synthetic oligonucleotide
uguuuaacccauaauuagu

SEQ ID NO: 1367224 - RNA, 19 nt, Artificial Sequence
  Description of Artificial Sequence: Synthetic oligonucleotide
uaacccauaauuaguauaa

SEQ ID NO: 1367225 - RNA, 19 nt, Artificial Sequence
  Description of Artificial Sequence: Synthetic oligonucleotide
accauugaguuucaccacc

SEQ ID NO: 1367226 - RNA, 19 nt, Artificial Sequence
  Description of Artificial Sequence: Synthetic oligonucleotide
auugagugaguguuccacc

SEQ ID NO: 1367227 - RNA, 19 nt, Artificial Sequence
  Description of Artificial Sequence: Synthetic oligonucleotide
ugauugaagguguagauuu

SEQ ID NO: 1367228 - RNA, 19 nt, Artificial Sequence
  Description of Artificial Sequence: Synthetic oligonucleotide
agauauauuaucaggcagg

SEQ ID NO: 1367229 - RNA, 19 nt, Artificial Sequence
  Description of Artificial Sequence: Synthetic oligonucleotide
ucucgaaacuuuuaauugc

SEQ ID NO: 1367230 - RNA, 19 nt, Artificial Sequence
  Description of Artificial Sequence: Synthetic oligonucleotide
uccagaaacagugagguga

SEQ ID NO: 1367231 - RNA, 19 nt, Artificial Sequence
  Description of Artificial Sequence: Synthetic oligonucleotide
gauaucuccauguccuggg

SEQ ID NO: 1367232 - RNA, 19 nt, Artificial Sequence
  Description of Artificial Sequence: Synthetic oligonucleotide
aguaugcucauacucaugu

SEQ ID NO: 1367233 - RNA, 19 nt, Artificial Sequence
  Description of Artificial Sequence: Synthetic oligonucleotide
aagauucgaagauuuccag

SEQ ID NO: 1367234 - RNA, 19 nt, Artificial Sequence
  Description of Artificial Sequence: Synthetic oligonucleotide
ggaacauuaauaccuaaag

SEQ ID NO: 1367235 - RNA, 19 nt, Artificial Sequence
  Description of Artificial Sequence: Synthetic oligonucleotide
gaaacuagcauagauaucu

SEQ ID NO: 1367236 - RNA, 19 nt, Artificial Sequence
  Description of Artificial Sequence: Synthetic oligonucleotide
ccuuagguaaucuugaacc

SEQ ID NO: 1367237 - RNA, 19 nt, Artificial Sequence
  Description of Artificial Sequence: Synthetic oligonucleotide
gauuccuuauuaauccucg

SEQ ID NO: 1367238 - RNA, 19 nt, Artificial Sequence
  Description of Artificial Sequence: Synthetic oligonucleotide
ucaacaugugcuuuuggca

SEQ ID NO: 1367239 - RNA, 19 nt, Artificial Sequence
  Description of Artificial Sequence: Synthetic oligonucleotide
cuacaggaaguaaagauuc

SEQ ID NO: 1367240 - RNA, 19 nt, Artificial Sequence
  Description of Artificial Sequence: Synthetic oligonucleotide
uuagagguacauuuuauua

SEQ ID NO: 1367241 - RNA, 19 nt, Artificial Sequence
  Description of Artificial Sequence: Synthetic oligonucleotide
auaaugauaacuguucccu

SEQ ID NO: 1367242 - RNA, 19 nt, Artificial Sequence
  Description of Artificial Sequence: Synthetic oligonucleotide
uuaauccucggauaccugc

SEQ ID NO: 1367243 - RNA, 19 nt, Artificial Sequence
  Description of Artificial Sequence: Synthetic oligonucleotide
aaggugucgagcaagcccg

SEQ ID NO: 1367244 - RNA, 19 nt, Artificial Sequence
  Description of Artificial Sequence: Synthetic oligonucleotide
cauagauaucuccaugucc

SEQ ID NO: 1367245 - RNA, 19 nt, Artificial Sequence
  Description of Artificial Sequence: Synthetic oligonucleotide
gaagauauauuaucaggca

SEQ ID NO: 1367246 - RNA, 19 nt, Artificial Sequence
  Description of Artificial Sequence: Synthetic oligonucleotide
uagguaaucuugaaccuug

SEQ ID NO: 1367247 - RNA, 19 nt, Artificial Sequence
  Description of Artificial Sequence: Synthetic oligonucleotide
ucuuuuaacugcugcaaga

SEQ ID NO: 1367248 - RNA, 19 nt, Artificial Sequence
  Description of Artificial Sequence: Synthetic oligonucleotide
uaaaguguauccggcagcg

SEQ ID NO: 1367249 - RNA, 19 nt, Artificial Sequence
  Description of Artificial Sequence: Synthetic oligonucleotide
gagguuugacaucacaagc

SEQ ID NO: 1367250 - RNA, 19 nt, Artificial Sequence
  Description of Artificial Sequence: Synthetic oligonucleotide
auaggguugaaucgaaucu

SEQ ID NO: 1367251 - RNA, 19 nt, Artificial Sequence
  Description of Artificial Sequence: Synthetic oligonucleotide
ugucaauucugucaccaug

SEQ ID NO: 1367252 - RNA, 19 nt, Artificial Sequence
  Description of Artificial Sequence: Synthetic oligonucleotide
cuuaucuuagugauccaag

SEQ ID NO: 1367253 - RNA, 19 nt, Artificial Sequence
  Description of Artificial Sequence: Synthetic oligonucleotide
agagguacauuuuauuaca

SEQ ID NO: 1367254 - RNA, 19 nt, Artificial Sequence
  Description of Artificial Sequence: Synthetic oligonucleotide
ggaacuuccuaauuuaacc

SEQ ID NO: 1367255 - RNA, 19 nt, Artificial Sequence
  Description of Artificial Sequence: Synthetic oligonucleotide
agguauucucauuucuuac

SEQ ID NO: 1367256 - RNA, 19 nt, Artificial Sequence
  Description of Artificial Sequence: Synthetic oligonucleotide
uacuguaggaaacucccgc

SEQ ID NO: 1367257 - RNA, 19 nt, Artificial Sequence
  Description of Artificial Sequence: Synthetic oligonucleotide
aauucucgaaacuuuuaau

SEQ ID NO: 1367258 - RNA, 19 nt, Artificial Sequence
  Description of Artificial Sequence: Synthetic oligonucleotide
ucuugaaccuugguaaagg

SEQ ID NO: 1367259 - RNA, 19 nt, Artificial Sequence
  Description of Artificial Sequence: Synthetic oligonucleotide
uuaucuuagugauccaaga

SEQ ID NO: 1367260 - RNA, 19 nt, Artificial Sequence
  Description of Artificial Sequence: Synthetic oligonucleotide
aaguguauccggcagcgcu

SEQ ID NO: 1367261 - RNA, 19 nt, Artificial Sequence
  Description of Artificial Sequence: Synthetic oligonucleotide
uccgaaauccaucaaguau

SEQ ID NO: 1367262 - RNA, 19 nt, Artificial Sequence
  Description of Artificial Sequence: Synthetic oligonucleotide
ugcaauaaugauaacuguu

SEQ ID NO: 1367263 - RNA, 19 nt, Artificial Sequence
  Description of Artificial Sequence: Synthetic oligonucleotide
ucuaugauauagcuuccga

SEQ ID NO: 1367264 - RNA, 19 nt, Artificial Sequence
  Description of Artificial Sequence: Synthetic oligonucleotide
gucagguauacuuucaaac

SEQ ID NO: 1367265 - RNA, 19 nt, Artificial Sequence
  Description of Artificial Sequence: Synthetic oligonucleotide
acccauaauuaguauaaag

SEQ ID NO: 1367266 - RNA, 19 nt, Artificial Sequence
  Description of Artificial Sequence: Synthetic oligonucleotide
guauuguuagcuuuuguuc

SEQ ID NO: 1367267 - RNA, 19 nt, Artificial Sequence
  Description of Artificial Sequence: Synthetic oligonucleotide
uucaacacagaagauauau

SEQ ID NO: 1367268 - RNA, 19 nt, Artificial Sequence
  Description of Artificial Sequence: Synthetic oligonucleotide
cuccuuggaacauuaauac

SEQ ID NO: 1367269 - RNA, 19 nt, Artificial Sequence
  Description of Artificial Sequence: Synthetic oligonucleotide
aaacucccgcuuuucacuc

SEQ ID NO: 1367270 - RNA, 19 nt, Artificial Sequence
  Description of Artificial Sequence: Synthetic oligonucleotide
ucucaguuugccuucauau

SEQ ID NO: 1367271 - RNA, 19 nt, Artificial Sequence
  Description of Artificial Sequence: Synthetic oligonucleotide
aguacuugcucauuugaga

SEQ ID NO: 1367272 - RNA, 19 nt, Artificial Sequence
  Description of Artificial Sequence: Synthetic oligonucleotide
agcauagauaucuccaugu

SEQ ID NO: 1367273 - RNA, 19 nt, Artificial Sequence
  Description of Artificial Sequence: Synthetic oligonucleotide
aaucuaugauauagcuucc

SEQ ID NO: 1367274 - RNA, 19 nt, Artificial Sequence
  Description of Artificial Sequence: Synthetic oligonucleotide
ugcuacaggaaguaaagau

SEQ ID NO: 1367275 - RNA, 19 nt, Artificial Sequence
  Description of Artificial Sequence: Synthetic oligonucleotide
cauccuuugcuacaggaag

SEQ ID NO: 1367276 - RNA, 19 nt, Artificial Sequence
  Description of Artificial Sequence: Synthetic oligonucleotide
auucucgaaacuuuuaauu

SEQ ID NO: 1367277 - RNA, 19 nt, Artificial Sequence
  Description of Artificial Sequence: Synthetic oligonucleotide
agacuuuuagggccuuugc

SEQ ID NO: 1367278 - RNA, 19 nt, Artificial Sequence
  Description of Artificial Sequence: Synthetic oligonucleotide
aacuuccuaauuuaaccaa

SEQ ID NO: 1367279 - RNA, 19 nt, Artificial Sequence
  Description of Artificial Sequence: Synthetic oligonucleotide
uccguguuaaaagaguuca

SEQ ID NO: 1367280 - RNA, 19 nt, Artificial Sequence
  Description of Artificial Sequence: Synthetic oligonucleotide
uuugauugaagguguagau

SEQ ID NO: 1367281 - RNA, 19 nt, Artificial Sequence
  Description of Artificial Sequence: Synthetic oligonucleotide
uauuaauccucggauaccu

SEQ ID NO: 1367282 - RNA, 19 nt, Artificial Sequence
  Description of Artificial Sequence: Synthetic oligonucleotide
gguuaucuauguuagaaac

SEQ ID NO: 1367283 - RNA, 19 nt, Artificial Sequence
  Description of Artificial Sequence: Synthetic oligonucleotide
uggauuuuaccccagucua

SEQ ID NO: 1367284 - RNA, 19 nt, Artificial Sequence
  Description of Artificial Sequence: Synthetic oligonucleotide
uuccuuauuaauccucgga

SEQ ID NO: 1367285 - RNA, 19 nt, Artificial Sequence
  Description of Artificial Sequence: Synthetic oligonucleotide
uuaucaggcaggccucugg

SEQ ID NO: 1367286 - RNA, 19 nt, Artificial Sequence
  Description of Artificial Sequence: Synthetic oligonucleotide
ugaaucgaaucuucuggag

SEQ ID NO: 1367287 - RNA, 19 nt, Artificial Sequence
  Description of Artificial Sequence: Synthetic oligonucleotide
ucucuaacacugcuccagg

SEQ ID NO: 1367288 - RNA, 19 nt, Artificial Sequence
  Description of Artificial Sequence: Synthetic oligonucleotide
uccagauacgaucuuguuc

SEQ ID NO: 1367289 - RNA, 19 nt, Artificial Sequence
  Description of Artificial Sequence: Synthetic oligonucleotide
caacaugugcuuuuggcac

SEQ ID NO: 1367290 - RNA, 19 nt, Artificial Sequence
  Description of Artificial Sequence: Synthetic oligonucleotide
ucuucuagaaaggugucga

SEQ ID NO: 1367291 - RNA, 19 nt, Artificial Sequence
  Description of Artificial Sequence: Synthetic oligonucleotide
uugaaucgaaucuucugga

SEQ ID NO: 1367292 - RNA, 19 nt, Artificial Sequence
  Description of Artificial Sequence: Synthetic oligonucleotide
accaguuuguucaacacag

SEQ ID NO: 1367293 - RNA, 19 nt, Artificial Sequence
  Description of Artificial Sequence: Synthetic oligonucleotide
ugauauagcuuccgaaauc

SEQ ID NO: 1367294 - RNA, 19 nt, Artificial Sequence
  Description of Artificial Sequence: Synthetic oligonucleotide
uggaacauuaauaccuaaa

SEQ ID NO: 1367295 - RNA, 19 nt, Artificial Sequence
  Description of Artificial Sequence: Synthetic oligonucleotide
uuucaaaccuccuuaggua

SEQ ID NO: 1367296 - RNA, 19 nt, Artificial Sequence
  Description of Artificial Sequence: Synthetic oligonucleotide
uuuccagauacgaucuugu

SEQ ID NO: 1367297 - RNA, 19 nt, Artificial Sequence
  Description of Artificial Sequence: Synthetic oligonucleotide
aagagaucugacguggucu

SEQ ID NO: 1367298 - RNA, 19 nt, Artificial Sequence
  Description of Artificial Sequence: Synthetic oligonucleotide
gaaucuuagagguacauuu

SEQ ID NO: 1367299 - RNA, 19 nt, Artificial Sequence
  Description of Artificial Sequence: Synthetic oligonucleotide
uacuuucaaaccuccuuag

SEQ ID NO: 1367300 - RNA, 19 nt, Artificial Sequence
  Description of Artificial Sequence: Synthetic oligonucleotide
cauauugagugaguguucc

SEQ ID NO: 1367301 - RNA, 19 nt, Artificial Sequence
  Description of Artificial Sequence: Synthetic oligonucleotide
uuuuaccccagucuacaga

SEQ ID NO: 1367302 - RNA, 19 nt, Artificial Sequence
  Description of Artificial Sequence: Synthetic oligonucleotide
ucauccguguuaaaagagu

SEQ ID NO: 1367303 - RNA, 19 nt, Artificial Sequence
  Description of Artificial Sequence: Synthetic oligonucleotide
uuucauaggguugaaucga

SEQ ID NO: 1367304 - RNA, 19 nt, Artificial Sequence
  Description of Artificial Sequence: Synthetic oligonucleotide
ugaauaacauucaggccuc

SEQ ID NO: 1367305 - RNA, 19 nt, Artificial Sequence
  Description of Artificial Sequence: Synthetic oligonucleotide
agcguuucccauugggugg

SEQ ID NO: 1367306 - RNA, 19 nt, Artificial Sequence
  Description of Artificial Sequence: Synthetic oligonucleotide
uaucuuagugauccaagau

SEQ ID NO: 1367307 - RNA, 19 nt, Artificial Sequence
  Description of Artificial Sequence: Synthetic oligonucleotide
cacccuuuacaucugcucg

SEQ ID NO: 1367308 - RNA, 19 nt, Artificial Sequence
  Description of Artificial Sequence: Synthetic oligonucleotide
agguacauuuuauuacaag

SEQ ID NO: 1367309 - RNA, 19 nt, Artificial Sequence
  Description of Artificial Sequence: Synthetic oligonucleotide
cacagaagauauauuauca

SEQ ID NO: 1367310 - RNA, 19 nt, Artificial Sequence
  Description of Artificial Sequence: Synthetic oligonucleotide
uuuuagggccuuugcagcc

SEQ ID NO: 1367311 - RNA, 19 nt, Artificial Sequence
  Description of Artificial Sequence: Synthetic oligonucleotide
uuacaagaaacuguuuaac

SEQ ID NO: 1367312 - RNA, 19 nt, Artificial Sequence
  Description of Artificial Sequence: Synthetic oligonucleotide
agcaagagaucugacgugg

SEQ ID NO: 1367313 - RNA, 19 nt, Artificial Sequence
  Description of Artificial Sequence: Synthetic oligonucleotide
ucgaaacuuuuaauugcag

SEQ ID NO: 1367314 - RNA, 19 nt, Artificial Sequence
  Description of Artificial Sequence: Synthetic oligonucleotide
aucuuagugauccaagauu

SEQ ID NO: 1367315 - RNA, 19 nt, Artificial Sequence
  Description of Artificial Sequence: Synthetic oligonucleotide
cauaauuaguauaaagugu

SEQ ID NO: 1367316 - RNA, 19 nt, Artificial Sequence
  Description of Artificial Sequence: Synthetic oligonucleotide
gaggugauccaauuccagc

SEQ ID NO: 1367317 - RNA, 19 nt, Artificial Sequence
  Description of Artificial Sequence: Synthetic oligonucleotide
caccaaucagacuuuuagg

SEQ ID NO: 1367318 - RNA, 19 nt, Artificial Sequence
  Description of Artificial Sequence: Synthetic oligonucleotide
ugaggugauccaauuccag

SEQ ID NO: 1367319 - RNA, 19 nt, Artificial Sequence
  Description of Artificial Sequence: Synthetic oligonucleotide
ucuuagagguacauuuuau

SEQ ID NO: 1367320 - RNA, 19 nt, Artificial Sequence
  Description of Artificial Sequence: Synthetic oligonucleotide
uauugagugaguguuccac

SEQ ID NO: 1367321 - RNA, 19 nt, Artificial Sequence
  Description of Artificial Sequence: Synthetic oligonucleotide
uuaguaugcucauacucau

SEQ ID NO: 1367322 - RNA, 19 nt, Artificial Sequence
  Description of Artificial Sequence: Synthetic oligonucleotide
uccuuagguaaucuugaac

SEQ ID NO: 1367323 - RNA, 19 nt, Artificial Sequence
  Description of Artificial Sequence: Synthetic oligonucleotide
gaaacuguuuaacccauaa

SEQ ID NO: 1367324 - RNA, 19 nt, Artificial Sequence
  Description of Artificial Sequence: Synthetic oligonucleotide
uuagugauccaagauucga

SEQ ID NO: 1367325 - RNA, 19 nt, Artificial Sequence
  Description of Artificial Sequence: Synthetic oligonucleotide
aagcaagagaucugacgug

SEQ ID NO: 1367326 - RNA, 19 nt, Artificial Sequence
  Description of Artificial Sequence: Synthetic oligonucleotide
auagcuuccgaaauccauc

SEQ ID NO: 1367327 - RNA, 19 nt, Artificial Sequence
  Description of Artificial Sequence: Synthetic oligonucleotide
aaguacuugcucauuugag

SEQ ID NO: 1367328 - RNA, 19 nt, Artificial Sequence
  Description of Artificial Sequence: Synthetic oligonucleotide
uagcauagauaucuccaug

SEQ ID NO: 1367329 - RNA, 19 nt, Artificial Sequence
  Description of Artificial Sequence: Synthetic oligonucleotide
auacuuucaaaccuccuua

SEQ ID NO: 1367330 - RNA, 19 nt, Artificial Sequence
  Description of Artificial Sequence: Synthetic oligonucleotide
caagcuucuguacuuuccc

SEQ ID NO: 1367331 - RNA, 19 nt, Artificial Sequence
  Description of Artificial Sequence: Synthetic oligonucleotide
uugcaauaaugauaacugu

SEQ ID NO: 1367332 - RNA, 19 nt, Artificial Sequence
  Description of Artificial Sequence: Synthetic oligonucleotide
uccuuggaacauuaauacc

SEQ ID NO: 1367333 - RNA, 19 nt, Artificial Sequence
  Description of Artificial Sequence: Synthetic oligonucleotide
ucguguuuuauuugugacu

SEQ ID NO: 1367334 - RNA, 19 nt, Artificial Sequence
  Description of Artificial Sequence: Synthetic oligonucleotide
ugcucauacucaugugagg

SEQ ID NO: 1367335 - RNA, 19 nt, Artificial Sequence
  Description of Artificial Sequence: Synthetic oligonucleotide
aacaugugcuuuuggcacu

SEQ ID NO: 1367336 - RNA, 19 nt, Artificial Sequence
  Description of Artificial Sequence: Synthetic oligonucleotide
ccuaauuuaaccaagggua

SEQ ID NO: 1367337 - RNA, 19 nt, Artificial Sequence
  Description of Artificial Sequence: Synthetic oligonucleotide
uucccuuuaaugaaacauu

SEQ ID NO: 1367338 - RNA, 19 nt, Artificial Sequence
  Description of Artificial Sequence: Synthetic oligonucleotide
agauccauagguuguuugu

SEQ ID NO: 1367339 - RNA, 19 nt, Artificial Sequence
  Description of Artificial Sequence: Synthetic oligonucleotide
uuauuaauccucggauacc

SEQ ID NO: 1367340 - RNA, 19 nt, Artificial Sequence
  Description of Artificial Sequence: Synthetic oligonucleotide
agaaaggugucgagcaagc

SEQ ID NO: 1367341 - RNA, 19 nt, Artificial Sequence
  Description of Artificial Sequence: Synthetic oligonucleotide
ucuggauuuuaccccaguc

SEQ ID NO: 1367342 - RNA, 19 nt, Artificial Sequence
  Description of Artificial Sequence: Synthetic oligonucleotide
aauccaucaaguaucuuuu

SEQ ID NO: 1367343 - RNA, 19 nt, Artificial Sequence
  Description of Artificial Sequence: Synthetic oligonucleotide
gaauauaaagauccacugu

SEQ ID NO: 1367344 - RNA, 19 nt, Artificial Sequence
  Description of Artificial Sequence: Synthetic oligonucleotide
gaugucaauucugucacca

SEQ ID NO: 1367345 - RNA, 19 nt, Artificial Sequence
  Description of Artificial Sequence: Synthetic oligonucleotide
gcagaaaacgacuccuugg

SEQ ID NO: 1367346 - RNA, 19 nt, Artificial Sequence
  Description of Artificial Sequence: Synthetic oligonucleotide
gagauccauagguuguuug

SEQ ID NO: 1367347 - RNA, 19 nt, Artificial Sequence
  Description of Artificial Sequence: Synthetic oligonucleotide
ucugcucguguuuuauuug

SEQ ID NO: 1367348 - RNA, 19 nt, Artificial Sequence
  Description of Artificial Sequence: Synthetic oligonucleotide
aggaacuuccuaauuuaac

SEQ ID NO: 1367349 - RNA, 19 nt, Artificial Sequence
  Description of Artificial Sequence: Synthetic oligonucleotide
gggacaucuguauuguuag

SEQ ID NO: 1367350 - RNA, 19 nt, Artificial Sequence
  Description of Artificial Sequence: Synthetic oligonucleotide
gguucauuagaugauuaag

SEQ ID NO: 1367351 - RNA, 19 nt, Artificial Sequence
  Description of Artificial Sequence: Synthetic oligonucleotide
gugcuuuuggcacuugagc

SEQ ID NO: 1367352 - RNA, 19 nt, Artificial Sequence
  Description of Artificial Sequence: Synthetic oligonucleotide
cauacugguucccaaacca

SEQ ID NO: 1367353 - RNA, 19 nt, Artificial Sequence
  Description of Artificial Sequence: Synthetic oligonucleotide
uuuucacacggcaaugauu

SEQ ID NO: 1367354 - RNA, 19 nt, Artificial Sequence
  Description of Artificial Sequence: Synthetic oligonucleotide
auagagguuugacaucaca

SEQ ID NO: 1367355 - RNA, 19 nt, Artificial Sequence
  Description of Artificial Sequence: Synthetic oligonucleotide
uucuguacuuuccccugag

SEQ ID NO: 1367356 - RNA, 19 nt, Artificial Sequence
  Description of Artificial Sequence: Synthetic oligonucleotide
gucuuuuaacugcugcaag

SEQ ID NO: 1367357 - RNA, 19 nt, Artificial Sequence
  Description of Artificial Sequence: Synthetic oligonucleotide
cacacggcaaugauuguac

SEQ ID NO: 1367358 - RNA, 19 nt, Artificial Sequence
  Description of Artificial Sequence: Synthetic oligonucleotide
gacuuuuagggccuuugca

SEQ ID NO: 1367359 - RNA, 19 nt, Artificial Sequence
  Description of Artificial Sequence: Synthetic oligonucleotide
gacacauccuuugcuacag

SEQ ID NO: 1367360 - RNA, 19 nt, Artificial Sequence
  Description of Artificial Sequence: Synthetic oligonucleotide
uacgaucuuguucucuaac

SEQ ID NO: 1367361 - RNA, 19 nt, Artificial Sequence
  Description of Artificial Sequence: Synthetic oligonucleotide
aaauuuugacacagacuug

SEQ ID NO: 1367362 - RNA, 19 nt, Artificial Sequence
  Description of Artificial Sequence: Synthetic oligonucleotide
aaacuagcauagauaucuc

SEQ ID NO: 1367363 - RNA, 19 nt, Artificial Sequence
  Description of Artificial Sequence: Synthetic oligonucleotide
augauuugcaauaaugaua

SEQ ID NO: 1367364 - RNA, 19 nt, Artificial Sequence
  Description of Artificial Sequence: Synthetic oligonucleotide
aaaguguauccggcagcgc

SEQ ID NO: 1367365 - RNA, 19 nt, Artificial Sequence
  Description of Artificial Sequence: Synthetic oligonucleotide
gguacuguaggaaacuccc

SEQ ID NO: 1367366 - RNA, 19 nt, Artificial Sequence
  Description of Artificial Sequence: Synthetic oligonucleotide
agguauacuuucaaaccuc

SEQ ID NO: 1367367 - RNA, 19 nt, Artificial Sequence
  Description of Artificial Sequence: Synthetic oligonucleotide
gauuuuaccccagucuaca

SEQ ID NO: 1367368 - RNA, 19 nt, Artificial Sequence
  Description of Artificial Sequence: Synthetic oligonucleotide
auuuuaccccagucuacag

SEQ ID NO: 1367369 - RNA, 19 nt, Artificial Sequence
  Description of Artificial Sequence: Synthetic oligonucleotide
cuauagagguuugacauca

SEQ ID NO: 1367370 - RNA, 19 nt, Artificial Sequence
  Description of Artificial Sequence: Synthetic oligonucleotide
gauacgaucuuguucucua

SEQ ID NO: 1367371 - RNA, 19 nt, Artificial Sequence
  Description of Artificial Sequence: Synthetic oligonucleotide
aaagguauucucauuucuu

SEQ ID NO: 1367372 - RNA, 19 nt, Artificial Sequence
  Description of Artificial Sequence: Synthetic oligonucleotide
aagauccacuguggcaccc

SEQ ID NO: 1367373 - RNA, 19 nt, Artificial Sequence
  Description of Artificial Sequence: Synthetic oligonucleotide
aucuaugauauagcuuccg

SEQ ID NO: 1367374 - RNA, 19 nt, Artificial Sequence
  Description of Artificial Sequence: Synthetic oligonucleotide
aguguuccacccuuuacau

SEQ ID NO: 1367375 - RNA, 19 nt, Artificial Sequence
  Description of Artificial Sequence: Synthetic oligonucleotide
aguuucuaacugaauaaca

SEQ ID NO: 1367376 - RNA, 19 nt, Artificial Sequence
  Description of Artificial Sequence: Synthetic oligonucleotide
auuugcugcacaguuagau

SEQ ID NO: 1367377 - RNA, 19 nt, Artificial Sequence
  Description of Artificial Sequence: Synthetic oligonucleotide
cauuggguggguucauuag

SEQ ID NO: 1367378 - RNA, 19 nt, Artificial Sequence
  Description of Artificial Sequence: Synthetic oligonucleotide
ugaguguuccacccuuuac

SEQ ID NO: 1367379 - RNA, 19 nt, Artificial Sequence
  Description of Artificial Sequence: Synthetic oligonucleotide
uuuguucaacacagaagau

SEQ ID NO: 1367380 - RNA, 19 nt, Artificial Sequence
  Description of Artificial Sequence: Synthetic oligonucleotide
guacuugcucauuugagaa

SEQ ID NO: 1367381 - RNA, 19 nt, Artificial Sequence
  Description of Artificial Sequence: Synthetic oligonucleotide
cucgaaacuuuuaauugca

SEQ ID NO: 1367382 - RNA, 19 nt, Artificial Sequence
  Description of Artificial Sequence: Synthetic oligonucleotide
guauaaaguguauccggca

SEQ ID NO: 1367383 - RNA, 19 nt, Artificial Sequence
  Description of Artificial Sequence: Synthetic oligonucleotide
agaugauuaagaauauaaa

SEQ ID NO: 1367384 - RNA, 19 nt, Artificial Sequence
  Description of Artificial Sequence: Synthetic oligonucleotide
ugucgagcaagcccgaguu

SEQ ID NO: 1367385 - RNA, 19 nt, Artificial Sequence
  Description of Artificial Sequence: Synthetic oligonucleotide
gcucauuugagaaucuuag

SEQ ID NO: 1367386 - RNA, 19 nt, Artificial Sequence
  Description of Artificial Sequence: Synthetic oligonucleotide
agauuuccagauacgaucu

SEQ ID NO: 1367387 - RNA, 19 nt, Artificial Sequence
  Description of Artificial Sequence: Synthetic oligonucleotide
uuaaggcuauagagguuug

SEQ ID NO: 1367388 - RNA, 19 nt, Artificial Sequence
  Description of Artificial Sequence: Synthetic oligonucleotide
cacagcguuucccauuggg

SEQ ID NO: 1367389 - RNA, 19 nt, Artificial Sequence
  Description of Artificial Sequence: Synthetic oligonucleotide
ugucagguauacuuucaaa

SEQ ID NO: 1367390 - RNA, 19 nt, Artificial Sequence
  Description of Artificial Sequence: Synthetic oligonucleotide
guaaagauuccuuauuaau

SEQ ID NO: 1367391 - RNA, 19 nt, Artificial Sequence
  Description of Artificial Sequence: Synthetic oligonucleotide
ugccuucauauugagugag

SEQ ID NO: 1367392 - RNA, 19 nt, Artificial Sequence
  Description of Artificial Sequence: Synthetic oligonucleotide
cucuaacacugcuccaggg

SEQ ID NO: 1367393 - RNA, 19 nt, Artificial Sequence
  Description of Artificial Sequence: Synthetic oligonucleotide
gguugaaucgaaucuucug

SEQ ID NO: 1367394 - RNA, 19 nt, Artificial Sequence
  Description of Artificial Sequence: Synthetic oligonucleotide
uucauaggguugaaucgaa

SEQ ID NO: 1367395 - RNA, 19 nt, Artificial Sequence
  Description of Artificial Sequence: Synthetic oligonucleotide
aggcuauagagguuugaca

SEQ ID NO: 1367396 - RNA, 19 nt, Artificial Sequence
  Description of Artificial Sequence: Synthetic oligonucleotide
agguuaucuauguuagaaa

SEQ ID NO: 1367397 - RNA, 19 nt, Artificial Sequence
  Description of Artificial Sequence: Synthetic oligonucleotide
ccgaaauccaucaaguauc

SEQ ID NO: 1367398 - RNA, 19 nt, Artificial Sequence
  Description of Artificial Sequence: Synthetic oligonucleotide
aucuuagagguacauuuua

SEQ ID NO: 1367399 - RNA, 19 nt, Artificial Sequence
  Description of Artificial Sequence: Synthetic oligonucleotide
auuuucacacggcaaugau

SEQ ID NO: 1367400 - RNA, 19 nt, Artificial Sequence
  Description of Artificial Sequence: Synthetic oligonucleotide
cuaugauauagcuuccgaa

SEQ ID NO: 1367401 - RNA, 19 nt, Artificial Sequence
  Description of Artificial Sequence: Synthetic oligonucleotide
cuuugauugaagguguaga

SEQ ID NO: 1367402 - RNA, 19 nt, Artificial Sequence
  Description of Artificial Sequence: Synthetic oligonucleotide
uguggcacccagguuaucu

SEQ ID NO: 1367403 - RNA, 19 nt, Artificial Sequence
  Description of Artificial Sequence: Synthetic oligonucleotide
ucggauaccugcuuugauu

SEQ ID NO: 1367404 - RNA, 19 nt, Artificial Sequence
  Description of Artificial Sequence: Synthetic oligonucleotide
agguuugacaucacaagca

SEQ ID NO: 1367405 - RNA, 19 nt, Artificial Sequence
  Description of Artificial Sequence: Synthetic oligonucleotide
caguuucuaacugaauaac

SEQ ID NO: 1367406 - RNA, 19 nt, Artificial Sequence
  Description of Artificial Sequence: Synthetic oligonucleotide
cuucuagaaaggugucgag

SEQ ID NO: 1367407 - RNA, 19 nt, Artificial Sequence
  Description of Artificial Sequence: Synthetic oligonucleotide
gcaauaaugauaacuguuc

SEQ ID NO: 1367408 - RNA, 19 nt, Artificial Sequence
  Description of Artificial Sequence: Synthetic oligonucleotide
acguggucuucacaggcag

SEQ ID NO: 1367409 - RNA, 19 nt, Artificial Sequence
  Description of Artificial Sequence: Synthetic oligonucleotide
aucugcucguguuuuauuu

SEQ ID NO: 1367410 - RNA, 19 nt, Artificial Sequence
  Description of Artificial Sequence: Synthetic oligonucleotide
gguauucucauuucuuaca

SEQ ID NO: 1367411 - RNA, 19 nt, Artificial Sequence
  Description of Artificial Sequence: Synthetic oligonucleotide
agauccugcauuaaggcua

SEQ ID NO: 1367412 - RNA, 19 nt, Artificial Sequence
  Description of Artificial Sequence: Synthetic oligonucleotide
ucgagcaagcccgaguugu

SEQ ID NO: 1367413 - RNA, 19 nt, Artificial Sequence
  Description of Artificial Sequence: Synthetic oligonucleotide
ccaaucagacuuuuagggc

SEQ ID NO: 1367414 - RNA, 19 nt, Artificial Sequence
  Description of Artificial Sequence: Synthetic oligonucleotide
cuucacaggcagaaaacga

SEQ ID NO: 1367415 - RNA, 19 nt, Artificial Sequence
  Description of Artificial Sequence: Synthetic oligonucleotide
aguuucaccaccaccaguu

SEQ ID NO: 1367416 - RNA, 19 nt, Artificial Sequence
  Description of Artificial Sequence: Synthetic oligonucleotide
uuuggcacuugagcaaucu

SEQ ID NO: 1367417 - RNA, 19 nt, Artificial Sequence
  Description of Artificial Sequence: Synthetic oligonucleotide
aaucuuagagguacauuuu

SEQ ID NO: 1367418 - RNA, 19 nt, Artificial Sequence
  Description of Artificial Sequence: Synthetic oligonucleotide
uccggcagcgcuuaucuua

SEQ ID NO: 1367419 - RNA, 19 nt, Artificial Sequence
  Description of Artificial Sequence: Synthetic oligonucleotide
agaaacuagcauagauauc

SEQ ID NO: 1367420 - RNA, 19 nt, Artificial Sequence
  Description of Artificial Sequence: Synthetic oligonucleotide
uggguucauuagaugauua

SEQ ID NO: 1367421 - RNA, 19 nt, Artificial Sequence
  Description of Artificial Sequence: Synthetic oligonucleotide
ugauaacuguucccuuuaa

SEQ ID NO: 1367422 - RNA, 19 nt, Artificial Sequence
  Description of Artificial Sequence: Synthetic oligonucleotide
acuccuuggaacauuaaua

SEQ ID NO: 1367423 - RNA, 19 nt, Artificial Sequence
  Description of Artificial Sequence: Synthetic oligonucleotide
uuggaacauuaauaccuaa

SEQ ID NO: 1367424 - RNA, 19 nt, Artificial Sequence
  Description of Artificial Sequence: Synthetic oligonucleotide
uuagguaaucuugaaccuu

SEQ ID NO: 1367425 - RNA, 19 nt, Artificial Sequence
  Description of Artificial Sequence: Synthetic oligonucleotide
cugacguggucuucacagg

SEQ ID NO: 1367426 - RNA, 19 nt, Artificial Sequence
  Description of Artificial Sequence: Synthetic oligonucleotide
uaaugauaacuguucccuu

SEQ ID NO: 1367427 - RNA, 19 nt, Artificial Sequence
  Description of Artificial Sequence: Synthetic oligonucleotide
aggguugaaucgaaucuuc

SEQ ID NO: 1367428 - RNA, 19 nt, Artificial Sequence
  Description of Artificial Sequence: Synthetic oligonucleotide
gcgcuuaucuuagugaucc

SEQ ID NO: 1367429 - RNA, 19 nt, Artificial Sequence
  Description of Artificial Sequence: Synthetic oligonucleotide
gaaguaaagauuccuuauu

SEQ ID NO: 1367430 - RNA, 19 nt, Artificial Sequence
  Description of Artificial Sequence: Synthetic oligonucleotide
gacaucuguauuguuagcu

SEQ ID NO: 1367431 - RNA, 19 nt, Artificial Sequence
  Description of Artificial Sequence: Synthetic oligonucleotide
aaaccuccuuagguaaucu

SEQ ID NO: 1367432 - RNA, 19 nt, Artificial Sequence
  Description of Artificial Sequence: Synthetic oligonucleotide
cgaaacuuuuaauugcagc

SEQ ID NO: 1367433 - RNA, 19 nt, Artificial Sequence
  Description of Artificial Sequence: Synthetic oligonucleotide
gguauacuuucaaaccucc

SEQ ID NO: 1367434 - RNA, 19 nt, Artificial Sequence
  Description of Artificial Sequence: Synthetic oligonucleotide
uccaaagucuuuggauuca

SEQ ID NO: 1367435 - RNA, 19 nt, Artificial Sequence
  Description of Artificial Sequence: Synthetic oligonucleotide
uuuagggccuuugcagccc

SEQ ID NO: 1367436 - RNA, 19 nt, Artificial Sequence
  Description of Artificial Sequence: Synthetic oligonucleotide
aaggaacuuccuaauuuaa

SEQ ID NO: 1367437 - RNA, 19 nt, Artificial Sequence
  Description of Artificial Sequence: Synthetic oligonucleotide
cuugaaccuugguaaagga

SEQ ID NO: 1367438 - RNA, 19 nt, Artificial Sequence
  Description of Artificial Sequence: Synthetic oligonucleotide
gcagucuuuuaacugcugc

SEQ ID NO: 1367439 - RNA, 19 nt, Artificial Sequence
  Description of Artificial Sequence: Synthetic oligonucleotide
auccguguuaaaagaguuc

SEQ ID NO: 1367440 - RNA, 19 nt, Artificial Sequence
  Description of Artificial Sequence: Synthetic oligonucleotide
guaugcucauacucaugug

SEQ ID NO: 1367441 - RNA, 19 nt, Artificial Sequence
  Description of Artificial Sequence: Synthetic oligonucleotide
agaaaacgacuccuuggaa

SEQ ID NO: 1367442 - RNA, 19 nt, Artificial Sequence
  Description of Artificial Sequence: Synthetic oligonucleotide
cuacagaaggucccuuuuc

SEQ ID NO: 1367443 - RNA, 19 nt, Artificial Sequence
  Description of Artificial Sequence: Synthetic oligonucleotide
auauugagugaguguucca

SEQ ID NO: 1367444 - RNA, 19 nt, Artificial Sequence
  Description of Artificial Sequence: Synthetic oligonucleotide
uccauagguuguuuguguu

SEQ ID NO: 1367445 - RNA, 19 nt, Artificial Sequence
  Description of Artificial Sequence: Synthetic oligonucleotide
gauccacuguggcacccag

SEQ ID NO: 1367446 - RNA, 19 nt, Artificial Sequence
  Description of Artificial Sequence: Synthetic oligonucleotide
uuccgaaauccaucaagua

SEQ ID NO: 1367447 - RNA, 19 nt, Artificial Sequence
  Description of Artificial Sequence: Synthetic oligonucleotide
ucauaggguugaaucgaau

SEQ ID NO: 1367448 - RNA, 19 nt, Artificial Sequence
  Description of Artificial Sequence: Synthetic oligonucleotide
gauuguacuucugaaguau

SEQ ID NO: 1367449 - RNA, 19 nt, Artificial Sequence
  Description of Artificial Sequence: Synthetic oligonucleotide
gcaguuucuaacugaauaa

SEQ ID NO: 1367450 - RNA, 19 nt, Artificial Sequence
  Description of Artificial Sequence: Synthetic oligonucleotide
cuuccgaaauccaucaagu

SEQ ID NO: 1367451 - RNA, 19 nt, Artificial Sequence
  Description of Artificial Sequence: Synthetic oligonucleotide
guacuguaggaaacucccg

SEQ ID NO: 1367452 - RNA, 19 nt, Artificial Sequence
  Description of Artificial Sequence: Synthetic oligonucleotide
ccagauacgaucuuguucu

SEQ ID NO: 1367453 - RNA, 19 nt, Artificial Sequence
  Description of Artificial Sequence: Synthetic oligonucleotide
ccgaguuguagaaacuagc

SEQ ID NO: 1367454 - RNA, 19 nt, Artificial Sequence
  Description of Artificial Sequence: Synthetic oligonucleotide
cuuggaacauuaauaccua

SEQ ID NO: 1367455 - RNA, 19 nt, Artificial Sequence
  Description of Artificial Sequence: Synthetic oligonucleotide
agcaagcccgaguuguaga

SEQ ID NO: 1367456 - RNA, 19 nt, Artificial Sequence
  Description of Artificial Sequence: Synthetic oligonucleotide
aucacaagcaagagaucug

SEQ ID NO: 1367457 - RNA, 19 nt, Artificial Sequence
  Description of Artificial Sequence: Synthetic oligonucleotide
ggcagaaaacgacuccuug

SEQ ID NO: 1367458 - RNA, 19 nt, Artificial Sequence
  Description of Artificial Sequence: Synthetic oligonucleotide
uucccauuggguggguuca

SEQ ID NO: 1367459 - RNA, 19 nt, Artificial Sequence
  Description of Artificial Sequence: Synthetic oligonucleotide
ugcugcaagagagauccau

SEQ ID NO: 1367460 - RNA, 19 nt, Artificial Sequence
  Description of Artificial Sequence: Synthetic oligonucleotide
uuagggccuuugcagccca

SEQ ID NO: 1367461 - RNA, 19 nt, Artificial Sequence
  Description of Artificial Sequence: Synthetic oligonucleotide
ggcuauagagguuugacau

SEQ ID NO: 1367462 - RNA, 19 nt, Artificial Sequence
  Description of Artificial Sequence: Synthetic oligonucleotide
cuuagguaaucuugaaccu

SEQ ID NO: 1367463 - RNA, 19 nt, Artificial Sequence
  Description of Artificial Sequence: Synthetic oligonucleotide
uucuuacaccaaucagacu

SEQ ID NO: 1367464 - RNA, 19 nt, Artificial Sequence
  Description of Artificial Sequence: Synthetic oligonucleotide
caccauugaguuucaccac

SEQ ID NO: 1367465 - RNA, 19 nt, Artificial Sequence
  Description of Artificial Sequence: Synthetic oligonucleotide
caguuugccuucauauuga

SEQ ID NO: 1367466 - RNA, 19 nt, Artificial Sequence
  Description of Artificial Sequence: Synthetic oligonucleotide
uuggcacuugagcaaucuc

SEQ ID NO: 1367467 - RNA, 19 nt, Artificial Sequence
  Description of Artificial Sequence: Synthetic oligonucleotide
acagugaggugauccaauu

SEQ ID NO: 1367468 - RNA, 19 nt, Artificial Sequence
  Description of Artificial Sequence: Synthetic oligonucleotide
uauuaucaggcaggccucu

SEQ ID NO: 1367469 - RNA, 19 nt, Artificial Sequence
  Description of Artificial Sequence: Synthetic oligonucleotide
cagguauacuuucaaaccu

SEQ ID NO: 1367470 - RNA, 19 nt, Artificial Sequence
  Description of Artificial Sequence: Synthetic oligonucleotide
guagauuuucacacggcaa

SEQ ID NO: 1367471 - RNA, 19 nt, Artificial Sequence
  Description of Artificial Sequence: Synthetic oligonucleotide
cacaagcaagagaucugac

SEQ ID NO: 1367472 - RNA, 19 nt, Artificial Sequence
  Description of Artificial Sequence: Synthetic oligonucleotide
aacccauaauuaguauaaa

SEQ ID NO: 1367473 - RNA, 19 nt, Artificial Sequence
  Description of Artificial Sequence: Synthetic oligonucleotide
gguuugacaucacaagcaa

SEQ ID NO: 1367474 - RNA, 19 nt, Artificial Sequence
  Description of Artificial Sequence: Synthetic oligonucleotide
aacucccgcuuuucacuca

SEQ ID NO: 1367475 - RNA, 19 nt, Artificial Sequence
  Description of Artificial Sequence: Synthetic oligonucleotide
agauacgaucuuguucucu

SEQ ID NO: 1367476 - RNA, 19 nt, Artificial Sequence
  Description of Artificial Sequence: Synthetic oligonucleotide
cagacuuuuagggccuuug

SEQ ID NO: 1367477 - RNA, 19 nt, Artificial Sequence
  Description of Artificial Sequence: Synthetic oligonucleotide
ccgcuuuucacucaugguc

SEQ ID NO: 1367478 - RNA, 19 nt, Artificial Sequence
  Description of Artificial Sequence: Synthetic oligonucleotide
cuggauuuuaccccagucu

SEQ ID NO: 1367479 - RNA, 19 nt, Artificial Sequence
  Description of Artificial Sequence: Synthetic oligonucleotide
agaaucuuagagguacauu

SEQ ID NO: 1367480 - RNA, 19 nt, Artificial Sequence
  Description of Artificial Sequence: Synthetic oligonucleotide
auccaagauucgaagauuu

SEQ ID NO: 1367481 - RNA, 19 nt, Artificial Sequence
  Description of Artificial Sequence: Synthetic oligonucleotide
gacuccuuggaacauuaau

SEQ ID NO: 1367482 - RNA, 19 nt, Artificial Sequence
  Description of Artificial Sequence: Synthetic oligonucleotide
gguucccaaaccaccauug

SEQ ID NO: 1367483 - RNA, 19 nt, Artificial Sequence
  Description of Artificial Sequence: Synthetic oligonucleotide
auacgaucuuguucucuaa

SEQ ID NO: 1367484 - RNA, 19 nt, Artificial Sequence
  Description of Artificial Sequence: Synthetic oligonucleotide
cuugagcaaucuccaccag

SEQ ID NO: 1367485 - RNA, 19 nt, Artificial Sequence
  Description of Artificial Sequence: Synthetic oligonucleotide
caaaccuccuuagguaauc

SEQ ID NO: 1367486 - RNA, 19 nt, Artificial Sequence
  Description of Artificial Sequence: Synthetic oligonucleotide
gaagauuuccagauacgau

SEQ ID NO: 1367487 - RNA, 19 nt, Artificial Sequence
  Description of Artificial Sequence: Synthetic oligonucleotide
auuaauccucggauaccug

SEQ ID NO: 1367488 - RNA, 19 nt, Artificial Sequence
  Description of Artificial Sequence: Synthetic oligonucleotide
agcgcuuaucuuagugauc

SEQ ID NO: 1367489 - RNA, 19 nt, Artificial Sequence
  Description of Artificial Sequence: Synthetic oligonucleotide
ccuucauauugagugagug

SEQ ID NO: 1367490 - RNA, 19 nt, Artificial Sequence
  Description of Artificial Sequence: Synthetic oligonucleotide
gcuccugcagucuuuuaac

SEQ ID NO: 1367491 - RNA, 19 nt, Artificial Sequence
  Description of Artificial Sequence: Synthetic oligonucleotide
cggauaccugcuuugauug

SEQ ID NO: 1367492 - RNA, 19 nt, Artificial Sequence
  Description of Artificial Sequence: Synthetic oligonucleotide
acacggcaaugauuguacu

SEQ ID NO: 1367493 - RNA, 19 nt, Artificial Sequence
  Description of Artificial Sequence: Synthetic oligonucleotide
agaauucucgaaacuuuua

SEQ ID NO: 1367494 - RNA, 19 nt, Artificial Sequence
  Description of Artificial Sequence: Synthetic oligonucleotide
gaaccuugguaaaggaacu

SEQ ID NO: 1367495 - RNA, 19 nt, Artificial Sequence
  Description of Artificial Sequence: Synthetic oligonucleotide
gcuuugauugaagguguag

SEQ ID NO: 1367496 - RNA, 19 nt, Artificial Sequence
  Description of Artificial Sequence: Synthetic oligonucleotide
gagguacauuuuauuacaa

SEQ ID NO: 1367497 - RNA, 19 nt, Artificial Sequence
  Description of Artificial Sequence: Synthetic oligonucleotide
uucacacggcaaugauugu

SEQ ID NO: 1367498 - RNA, 19 nt, Artificial Sequence
  Description of Artificial Sequence: Synthetic oligonucleotide
gcuauagagguuugacauc

SEQ ID NO: 1367499 - RNA, 19 nt, Artificial Sequence
  Description of Artificial Sequence: Synthetic oligonucleotide
aaacgacuccuuggaacau

SEQ ID NO: 1367500 - RNA, 19 nt, Artificial Sequence
  Description of Artificial Sequence: Synthetic oligonucleotide
gcaugucagguauacuuuc

SEQ ID NO: 1367501 - RNA, 19 nt, Artificial Sequence
  Description of Artificial Sequence: Synthetic oligonucleotide
acauccuuugcuacaggaa

SEQ ID NO: 1367502 - RNA, 19 nt, Artificial Sequence
  Description of Artificial Sequence: Synthetic oligonucleotide
caaucuccaccagucucag

SEQ ID NO: 1367503 - RNA, 19 nt, Artificial Sequence
  Description of Artificial Sequence: Synthetic oligonucleotide
uuccccugaggaagacaca

SEQ ID NO: 1367504 - RNA, 19 nt, Artificial Sequence
  Description of Artificial Sequence: Synthetic oligonucleotide
gcagcgcuuaucuuaguga

SEQ ID NO: 1367505 - RNA, 19 nt, Artificial Sequence
  Description of Artificial Sequence: Synthetic oligonucleotide
gcucguguuuuauuuguga

SEQ ID NO: 1367506 - RNA, 19 nt, Artificial Sequence
  Description of Artificial Sequence: Synthetic oligonucleotide
auagguuguuuguguuaaa

SEQ ID NO: 1367507 - RNA, 19 nt, Artificial Sequence
  Description of Artificial Sequence: Synthetic oligonucleotide
cgaucuuguucucuaacac

SEQ ID NO: 1367508 - RNA, 19 nt, Artificial Sequence
  Description of Artificial Sequence: Synthetic oligonucleotide
guaaaggaacuuccuaauu

SEQ ID NO: 1367509 - RNA, 19 nt, Artificial Sequence
  Description of Artificial Sequence: Synthetic oligonucleotide
cuagaaaggugucgagcaa

SEQ ID NO: 1367510 - RNA, 19 nt, Artificial Sequence
  Description of Artificial Sequence: Synthetic oligonucleotide
gcuuuuggcacuugagcaa

SEQ ID NO: 1367511 - RNA, 19 nt, Artificial Sequence
  Description of Artificial Sequence: Synthetic oligonucleotide
cgaguuguagaaacuagca

SEQ ID NO: 1367512 - RNA, 19 nt, Artificial Sequence
  Description of Artificial Sequence: Synthetic oligonucleotide
uuacaccaaucagacuuuu

SEQ ID NO: 1367513 - RNA, 19 nt, Artificial Sequence
  Description of Artificial Sequence: Synthetic oligonucleotide
uugcucauuugagaaucuu

SEQ ID NO: 1367514 - RNA, 19 nt, Artificial Sequence
  Description of Artificial Sequence: Synthetic oligonucleotide
auccucggauaccugcuuu

SEQ ID NO: 1367515 - RNA, 19 nt, Artificial Sequence
  Description of Artificial Sequence: Synthetic oligonucleotide
gucgagcaagcccgaguug

SEQ ID NO: 1367516 - RNA, 19 nt, Artificial Sequence
  Description of Artificial Sequence: Synthetic oligonucleotide
ggaugucaauucugucacc

SEQ ID NO: 1367517 - RNA, 19 nt, Artificial Sequence
  Description of Artificial Sequence: Synthetic oligonucleotide
ccuccuuagguaaucuuga

SEQ ID NO: 1367518 - RNA, 19 nt, Artificial Sequence
  Description of Artificial Sequence: Synthetic oligonucleotide
caagagagauccauagguu

SEQ ID NO: 1367519 - RNA, 19 nt, Artificial Sequence
  Description of Artificial Sequence: Synthetic oligonucleotide
cauccguguuaaaagaguu

SEQ ID NO: 1367520 - RNA, 19 nt, Artificial Sequence
  Description of Artificial Sequence: Synthetic oligonucleotide
cagauacgaucuuguucuc

SEQ ID NO: 1367521 - RNA, 19 nt, Artificial Sequence
  Description of Artificial Sequence: Synthetic oligonucleotide
uugugacuuccaugacaaa

SEQ ID NO: 1367522 - RNA, 19 nt, Artificial Sequence
  Description of Artificial Sequence: Synthetic oligonucleotide
cugcucguguuuuauuugu

SEQ ID NO: 1367523 - RNA, 19 nt, Artificial Sequence
  Description of Artificial Sequence: Synthetic oligonucleotide
ccuuauuaauccucggaua

SEQ ID NO: 1367524 - RNA, 19 nt, Artificial Sequence
  Description of Artificial Sequence: Synthetic oligonucleotide
aaaccaccauugaguuuca

SEQ ID NO: 1367525 - RNA, 19 nt, Artificial Sequence
  Description of Artificial Sequence: Synthetic oligonucleotide
cuccuuagguaaucuugaa

SEQ ID NO: 1367526 - RNA, 19 nt, Artificial Sequence
  Description of Artificial Sequence: Synthetic oligonucleotide
ccacccuuuacaucugcuc

SEQ ID NO: 1367527 - RNA, 19 nt, Artificial Sequence
  Description of Artificial Sequence: Synthetic oligonucleotide
gagugaguguuccacccuu

SEQ ID NO: 1367528 - RNA, 19 nt, Artificial Sequence
  Description of Artificial Sequence: Synthetic oligonucleotide
aguguauccggcagcgcuu

SEQ ID NO: 1367529 - RNA, 19 nt, Artificial Sequence
  Description of Artificial Sequence: Synthetic oligonucleotide
ccaaggguacuguaggaaa

SEQ ID NO: 1367530 - RNA, 19 nt, Artificial Sequence
  Description of Artificial Sequence: Synthetic oligonucleotide
cagcgcuuaucuuagugau

SEQ ID NO: 1367531 - RNA, 19 nt, Artificial Sequence
  Description of Artificial Sequence: Synthetic oligonucleotide
ugucuucauccguguuaaa

SEQ ID NO: 1367532 - RNA, 19 nt, Artificial Sequence
  Description of Artificial Sequence: Synthetic oligonucleotide
guauccggcagcgcuuauc

SEQ ID NO: 1367533 - RNA, 19 nt, Artificial Sequence
  Description of Artificial Sequence: Synthetic oligonucleotide
acuguggcacccagguuau

SEQ ID NO: 1367534 - RNA, 19 nt, Artificial Sequence
  Description of Artificial Sequence: Synthetic oligonucleotide
ccagucucaguuugccuuc

SEQ ID NO: 1367535 - RNA, 19 nt, Artificial Sequence
  Description of Artificial Sequence: Synthetic oligonucleotide
gcguuucccauuggguggg

SEQ ID NO: 1367536 - RNA, 19 nt, Artificial Sequence
  Description of Artificial Sequence: Synthetic oligonucleotide
cucaguuugccuucauauu

SEQ ID NO: 1367537 - RNA, 19 nt, Artificial Sequence
  Description of Artificial Sequence: Synthetic oligonucleotide
guauacuuucaaaccuccu

SEQ ID NO: 1367538 - RNA, 19 nt, Artificial Sequence
  Description of Artificial Sequence: Synthetic oligonucleotide
gcaagcccgaguuguagaa

SEQ ID NO: 1367539 - RNA, 19 nt, Artificial Sequence
  Description of Artificial Sequence: Synthetic oligonucleotide
gcuacaggaaguaaagauu

SEQ ID NO: 1367540 - RNA, 19 nt, Artificial Sequence
  Description of Artificial Sequence: Synthetic oligonucleotide
guaggaaacucccgcuuuu

SEQ ID NO: 1367541 - RNA, 19 nt, Artificial Sequence
  Description of Artificial Sequence: Synthetic oligonucleotide
gauugaagguguagauuuu

SEQ ID NO: 1367542 - RNA, 19 nt, Artificial Sequence
  Description of Artificial Sequence: Synthetic oligonucleotide
gauccugcauuaaggcuau

SEQ ID NO: 1367543 - RNA, 19 nt, Artificial Sequence
  Description of Artificial Sequence: Synthetic oligonucleotide
agcccgaguuguagaaacu

SEQ ID NO: 1367544 - RNA, 19 nt, Artificial Sequence
  Description of Artificial Sequence: Synthetic oligonucleotide
gugucgagcaagcccgagu

SEQ ID NO: 1367545 - RNA, 19 nt, Artificial Sequence
  Description of Artificial Sequence: Synthetic oligonucleotide
agugaguguuccacccuuu

SEQ ID NO: 1367546 - RNA, 19 nt, Artificial Sequence
  Description of Artificial Sequence: Synthetic oligonucleotide
cacggcaaugauuguacuu

SEQ ID NO: 1367547 - RNA, 19 nt, Artificial Sequence
  Description of Artificial Sequence: Synthetic oligonucleotide
ccauagguuguuuguguua

SEQ ID NO: 1367548 - RNA, 19 nt, Artificial Sequence
  Description of Artificial Sequence: Synthetic oligonucleotide
guggguucauuagaugauu

SEQ ID NO: 1367549 - RNA, 19 nt, Artificial Sequence
  Description of Artificial Sequence: Synthetic oligonucleotide
ccaguuuguucaacacaga

SEQ ID NO: 1367550 - RNA, 19 nt, Artificial Sequence
  Description of Artificial Sequence: Synthetic oligonucleotide
gguggguucauuagaugau

SEQ ID NO: 1367551 - RNA, 19 nt, Artificial Sequence
  Description of Artificial Sequence: Synthetic oligonucleotide
caauggcauucugcuccug

SEQ ID NO: 1367552 - RNA, 19 nt, Artificial Sequence
  Description of Artificial Sequence: Synthetic oligonucleotide
ucccauuggguggguucau

SEQ ID NO: 1367553 - RNA, 19 nt, Artificial Sequence
  Description of Artificial Sequence: Synthetic oligonucleotide
aucagacuuuuagggccuu

SEQ ID NO: 1367554 - RNA, 19 nt, Artificial Sequence
  Description of Artificial Sequence: Synthetic oligonucleotide
guguauccggcagcgcuua

SEQ ID NO: 1367555 - RNA, 19 nt, Artificial Sequence
  Description of Artificial Sequence: Synthetic oligonucleotide
auccggcagcgcuuaucuu

SEQ ID NO: 1367556 - RNA, 19 nt, Artificial Sequence
  Description of Artificial Sequence: Synthetic oligonucleotide
caccagucucaguuugccu

SEQ ID NO: 1367557 - RNA, 19 nt, Artificial Sequence
  Description of Artificial Sequence: Synthetic oligonucleotide
cucaugugagguugcuguu

SEQ ID NO: 1367558 - RNA, 19 nt, Artificial Sequence
  Description of Artificial Sequence: Synthetic oligonucleotide
cucggauaccugcuuugau

SEQ ID NO: 1367559 - RNA, 19 nt, Artificial Sequence
  Description of Artificial Sequence: Synthetic oligonucleotide
cagucucaguuugccuuca

SEQ ID NO: 1367560 - RNA, 19 nt, Artificial Sequence
  Description of Artificial Sequence: Synthetic oligonucleotide
ggguugaaucgaaucuucu

SEQ ID NO: 1367561 - RNA, 19 nt, Artificial Sequence
  Description of Artificial Sequence: Synthetic oligonucleotide
gcccgaguuguagaaacua

SEQ ID NO: 1367562 - RNA, 19 nt, Artificial Sequence
  Description of Artificial Sequence: Synthetic oligonucleotide
ccccugaggaagacacauc

SEQ ID NO: 1367563 - RNA, 19 nt, Artificial Sequence
  Description of Artificial Sequence: Synthetic oligonucleotide
aggugucgagcaagcccga

SEQ ID NO: 1367564 - RNA, 19 nt, Artificial Sequence
  Description of Artificial Sequence: Synthetic oligonucleotide
ccucggauaccugcuuuga

SEQ ID NO: 1367565 - RNA, 19 nt, Artificial Sequence
  Description of Artificial Sequence: Synthetic oligonucleotide
gcaagagaucugacguggu

SEQ ID NO: 1367566 - RNA, 19 nt, Artificial Sequence
  Description of Artificial Sequence: Synthetic oligonucleotide
cuguggcacccagguuauc

SEQ ID NO: 1367567 - RNA, 19 nt, Artificial Sequence
  Description of Artificial Sequence: Synthetic oligonucleotide
gccuucauauugagugagu

SEQ ID NO: 1367568 - RNA, 19 nt, Artificial Sequence
  Description of Artificial Sequence: Synthetic oligonucleotide
cacccagguuaucuauguu

SEQ ID NO: 1367569 - RNA, 19 nt, Artificial Sequence
  Description of Artificial Sequence: Synthetic oligonucleotide
guuucccauuggguggguu

SEQ ID NO: 1367570 - RNA, 19 nt, Artificial Sequence
  Description of Artificial Sequence: Synthetic oligonucleotide
ccguguuaaaagaguucau

SEQ ID NO: 1367571 - RNA, 19 nt, Artificial Sequence
  Description of Artificial Sequence: Synthetic oligonucleotide
ccuuuacaucugcucgugu

SEQ ID NO: 1367572 - RNA, 19 nt, Artificial Sequence
  Description of Artificial Sequence: Synthetic oligonucleotide
cgcuuaucuuagugaucca

SEQ ID NO: 1367573 - RNA, 19 nt, Artificial Sequence
  Description of Artificial Sequence: Synthetic oligonucleotide
acauaugugguccaaaacc

SEQ ID NO: 1367574 - RNA, 19 nt, Artificial Sequence
  Description of Artificial Sequence: Synthetic oligonucleotide
aagcuuaucggcuacaggg

SEQ ID NO: 1367575 - RNA, 19 nt, Artificial Sequence
  Description of Artificial Sequence: Synthetic oligonucleotide
acaggcucuagcuugaucc

SEQ ID NO: 1367576 - RNA, 19 nt, Artificial Sequence
  Description of Artificial Sequence: Synthetic oligonucleotide
uuuuauauucugaucagca

SEQ ID NO: 1367577 - RNA, 19 nt, Artificial Sequence
  Description of Artificial Sequence: Synthetic oligonucleotide
cauaguauggggaaguccg

SEQ ID NO: 1367578 - RNA, 19 nt, Artificial Sequence
  Description of Artificial Sequence: Synthetic oligonucleotide
acaaaugugaggccgauuc

SEQ ID NO: 1367579 - RNA, 19 nt, Artificial Sequence
  Description of Artificial Sequence: Synthetic oligonucleotide
aaagcaaggaaaaguauac

SEQ ID NO: 1367580 - RNA, 19 nt, Artificial Sequence
  Description of Artificial Sequence: Synthetic oligonucleotide
aguggauugguccuggagc

SEQ ID NO: 1367581 - RNA, 19 nt, Artificial Sequence
  Description of Artificial Sequence: Synthetic oligonucleotide
uacucuaggucuaauaggc

SEQ ID NO: 1367582 - RNA, 19 nt, Artificial Sequence
  Description of Artificial Sequence: Synthetic oligonucleotide
aauuccauaguaccggucu

SEQ ID NO: 1367583 - RNA, 19 nt, Artificial Sequence
  Description of Artificial Sequence: Synthetic oligonucleotide
guauauaaggguuuucucc

SEQ ID NO: 1367584 - RNA, 19 nt, Artificial Sequence
  Description of Artificial Sequence: Synthetic oligonucleotide
uaccauggaaacuacaaag

SEQ ID NO: 1367585 - RNA, 19 nt, Artificial Sequence
  Description of Artificial Sequence: Synthetic oligonucleotide
aacgaaacacugugaaugg

SEQ ID NO: 1367586 - RNA, 19 nt, Artificial Sequence
  Description of Artificial Sequence: Synthetic oligonucleotide
auuaauuccauaguaccgg

SEQ ID NO: 1367587 - RNA, 19 nt, Artificial Sequence
  Description of Artificial Sequence: Synthetic oligonucleotide
uguaguauggugugguccg

SEQ ID NO: 1367588 - RNA, 19 nt, Artificial Sequence
  Description of Artificial Sequence: Synthetic oligonucleotide
ugcaucacgaacuuggaug

SEQ ID NO: 1367589 - RNA, 19 nt, Artificial Sequence
  Description of Artificial Sequence: Synthetic oligonucleotide
gauuguucggaucucgccg

SEQ ID NO: 1367590 - RNA, 19 nt, Artificial Sequence
  Description of Artificial Sequence: Synthetic oligonucleotide
aaaaguauacguaucccag

SEQ ID NO: 1367591 - RNA, 19 nt, Artificial Sequence
  Description of Artificial Sequence: Synthetic oligonucleotide
uucacgaugagcuuguuaa

SEQ ID NO: 1367592 - RNA, 19 nt, Artificial Sequence
  Description of Artificial Sequence: Synthetic oligonucleotide
cauacucuaggucuaauag

SEQ ID NO: 1367593 - RNA, 19 nt, Artificial Sequence
  Description of Artificial Sequence: Synthetic oligonucleotide
agggucauuaauuccauag

SEQ ID NO: 1367594 - RNA, 19 nt, Artificial Sequence
  Description of Artificial Sequence: Synthetic oligonucleotide
acugugaauggucuggcac

SEQ ID NO: 1367595 - RNA, 19 nt, Artificial Sequence
  Description of Artificial Sequence: Synthetic oligonucleotide
uugacaucugauuugggca

SEQ ID NO: 1367596 - RNA, 19 nt, Artificial Sequence
  Description of Artificial Sequence: Synthetic oligonucleotide
auacucuaggucuaauagg

SEQ ID NO: 1367597 - RNA, 19 nt, Artificial Sequence
  Description of Artificial Sequence: Synthetic oligonucleotide
uaucccaggauucauuuac

SEQ ID NO: 1367598 - RNA, 19 nt, Artificial Sequence
  Description of Artificial Sequence: Synthetic oligonucleotide
agaccacccacauaaagag

SEQ ID NO: 1367599 - RNA, 19 nt, Artificial Sequence
  Description of Artificial Sequence: Synthetic oligonucleotide
uggauaaaggcacacugcu

SEQ ID NO: 1367600 - RNA, 19 nt, Artificial Sequence
  Description of Artificial Sequence: Synthetic oligonucleotide
agcaaggaaaaguauacgu

SEQ ID NO: 1367601 - RNA, 19 nt, Artificial Sequence
  Description of Artificial Sequence: Synthetic oligonucleotide
uguaauauucuuuguugac

SEQ ID NO: 1367602 - RNA, 19 nt, Artificial Sequence
  Description of Artificial Sequence: Synthetic oligonucleotide
guugacaucugauuugggc

SEQ ID NO: 1367603 - RNA, 19 nt, Artificial Sequence
  Description of Artificial Sequence: Synthetic oligonucleotide
agaucuguuucaguaaugg

SEQ ID NO: 1367604 - RNA, 19 nt, Artificial Sequence
  Description of Artificial Sequence: Synthetic oligonucleotide
gagaagucgccauaucggg

SEQ ID NO: 1367605 - RNA, 19 nt, Artificial Sequence
  Description of Artificial Sequence: Synthetic oligonucleotide
agauguagcuuuucccagc

SEQ ID NO: 1367606 - RNA, 19 nt, Artificial Sequence
  Description of Artificial Sequence: Synthetic oligonucleotide
gaagucgccauaucgggag

SEQ ID NO: 1367607 - RNA, 19 nt, Artificial Sequence
  Description of Artificial Sequence: Synthetic oligonucleotide
caacgaaacacugugaaug

SEQ ID NO: 1367608 - RNA, 19 nt, Artificial Sequence
  Description of Artificial Sequence: Synthetic oligonucleotide
aggucuaauaggcaggucu

SEQ ID NO: 1367609 - RNA, 19 nt, Artificial Sequence
  Description of Artificial Sequence: Synthetic oligonucleotide
ucuuuggucauucguauau

SEQ ID NO: 1367610 - RNA, 19 nt, Artificial Sequence
  Description of Artificial Sequence: Synthetic oligonucleotide
ugaagcccgcuuuagaagc

SEQ ID NO: 1367611 - RNA, 19 nt, Artificial Sequence
  Description of Artificial Sequence: Synthetic oligonucleotide
uuucacauugagucugcgg

SEQ ID NO: 1367612 - RNA, 19 nt, Artificial Sequence
  Description of Artificial Sequence: Synthetic oligonucleotide
cagagaagucgccauaucg

SEQ ID NO: 1367613 - RNA, 19 nt, Artificial Sequence
  Description of Artificial Sequence: Synthetic oligonucleotide
ucaugaaaggagguggcgg

SEQ ID NO: 1367614 - RNA, 19 nt, Artificial Sequence
  Description of Artificial Sequence: Synthetic oligonucleotide
uauacguaucccaggauuc

SEQ ID NO: 1367615 - RNA, 19 nt, Artificial Sequence
  Description of Artificial Sequence: Synthetic oligonucleotide
uccgaacacauucagcuac

SEQ ID NO: 1367616 - RNA, 19 nt, Artificial Sequence
  Description of Artificial Sequence: Synthetic oligonucleotide
auaaagaguggugaugguc

SEQ ID NO: 1367617 - RNA, 19 nt, Artificial Sequence
  Description of Artificial Sequence: Synthetic oligonucleotide
ugacaauccugcaucacga

SEQ ID NO: 1367618 - RNA, 19 nt, Artificial Sequence
  Description of Artificial Sequence: Synthetic oligonucleotide
uuaaaggacuucucagcag

SEQ ID NO: 1367619 - RNA, 19 nt, Artificial Sequence
  Description of Artificial Sequence: Synthetic oligonucleotide
ucuagcuugaucccagagu

SEQ ID NO: 1367620 - RNA, 19 nt, Artificial Sequence
  Description of Artificial Sequence: Synthetic oligonucleotide
uauaaggguuuucuccaag

SEQ ID NO: 1367621 - RNA, 19 nt, Artificial Sequence
  Description of Artificial Sequence: Synthetic oligonucleotide
caagacacgucugacauag

SEQ ID NO: 1367622 - RNA, 19 nt, Artificial Sequence
  Description of Artificial Sequence: Synthetic oligonucleotide
acacacuucagucuucuug

SEQ ID NO: 1367623 - RNA, 19 nt, Artificial Sequence
  Description of Artificial Sequence: Synthetic oligonucleotide
acaauccugcaucacgaac

SEQ ID NO: 1367624 - RNA, 19 nt, Artificial Sequence
  Description of Artificial Sequence: Synthetic oligonucleotide
gaucucgccgaacugguag

SEQ ID NO: 1367625 - RNA, 19 nt, Artificial Sequence
  Description of Artificial Sequence: Synthetic oligonucleotide
ucuuccccauuucacauug

SEQ ID NO: 1367626 - RNA, 19 nt, Artificial Sequence
  Description of Artificial Sequence: Synthetic oligonucleotide
ucuuacauucuccuuucac

SEQ ID NO: 1367627 - RNA, 19 nt, Artificial Sequence
  Description of Artificial Sequence: Synthetic oligonucleotide
ucugacauaguauggggaa

SEQ ID NO: 1367628 - RNA, 19 nt, Artificial Sequence
  Description of Artificial Sequence: Synthetic oligonucleotide
guuuugggcccacugaucc

SEQ ID NO: 1367629 - RNA, 19 nt, Artificial Sequence
  Description of Artificial Sequence: Synthetic oligonucleotide
acacgucugacauaguaug

SEQ ID NO: 1367630 - RNA, 19 nt, Artificial Sequence
  Description of Artificial Sequence: Synthetic oligonucleotide
ucauucguauauaaggguu

SEQ ID NO: 1367631 - RNA, 19 nt, Artificial Sequence
  Description of Artificial Sequence: Synthetic oligonucleotide
uguggggaagcauagcugu

SEQ ID NO: 1367632 - RNA, 19 nt, Artificial Sequence
  Description of Artificial Sequence: Synthetic oligonucleotide
uguuggaacccagagaagu

SEQ ID NO: 1367633 - RNA, 19 nt, Artificial Sequence
  Description of Artificial Sequence: Synthetic oligonucleotide
ccaggauucauuuacuggg

SEQ ID NO: 1367634 - RNA, 19 nt, Artificial Sequence
  Description of Artificial Sequence: Synthetic oligonucleotide
auucagcuaccauggaaac

SEQ ID NO: 1367635 - RNA, 19 nt, Artificial Sequence
  Description of Artificial Sequence: Synthetic oligonucleotide
aaacuggauaaaggcacac

SEQ ID NO: 1367636 - RNA, 19 nt, Artificial Sequence
  Description of Artificial Sequence: Synthetic oligonucleotide
gacgaggcauaguugaagc

SEQ ID NO: 1367637 - RNA, 19 nt, Artificial Sequence
  Description of Artificial Sequence: Synthetic oligonucleotide
cucucaugaaaggaggugg

SEQ ID NO: 1367638 - RNA, 19 nt, Artificial Sequence
  Description of Artificial Sequence: Synthetic oligonucleotide
acauaguauggggaagucc

SEQ ID NO: 1367639 - RNA, 19 nt, Artificial Sequence
  Description of Artificial Sequence: Synthetic oligonucleotide
aguauggugugguccgggc

SEQ ID NO: 1367640 - RNA, 19 nt, Artificial Sequence
  Description of Artificial Sequence: Synthetic oligonucleotide
ugagaucuguuucaguaau

SEQ ID NO: 1367641 - RNA, 19 nt, Artificial Sequence
  Description of Artificial Sequence: Synthetic oligonucleotide
ucguauauaaggguuuucu

SEQ ID NO: 1367642 - RNA, 19 nt, Artificial Sequence
  Description of Artificial Sequence: Synthetic oligonucleotide
gaagugauuucugagaucu

SEQ ID NO: 1367643 - RNA, 19 nt, Artificial Sequence
  Description of Artificial Sequence: Synthetic oligonucleotide
uugaagcccgcuuuagaag

SEQ ID NO: 1367644 - RNA, 19 nt, Artificial Sequence
  Description of Artificial Sequence: Synthetic oligonucleotide
ucuagacgaggcauaguug

SEQ ID NO: 1367645 - RNA, 19 nt, Artificial Sequence
  Description of Artificial Sequence: Synthetic oligonucleotide
ucucaugaaaggagguggc

SEQ ID NO: 1367646 - RNA, 19 nt, Artificial Sequence
  Description of Artificial Sequence: Synthetic oligonucleotide
uguucaccacugcuggagg

SEQ ID NO: 1367647 - RNA, 19 nt, Artificial Sequence
  Description of Artificial Sequence: Synthetic oligonucleotide
gaagcuuaucggcuacagg

SEQ ID NO: 1367648 - RNA, 19 nt, Artificial Sequence
  Description of Artificial Sequence: Synthetic oligonucleotide
uuuggucauucguauauaa

SEQ ID NO: 1367649 - RNA, 19 nt, Artificial Sequence
  Description of Artificial Sequence: Synthetic oligonucleotide
ugauuguucggaucucgcc

SEQ ID NO: 1367650 - RNA, 19 nt, Artificial Sequence
  Description of Artificial Sequence: Synthetic oligonucleotide
guaccggucuuuuauauuc

SEQ ID NO: 1367651 - RNA, 19 nt, Artificial Sequence
  Description of Artificial Sequence: Synthetic oligonucleotide
aacuggucguguuccauca

SEQ ID NO: 1367652 - RNA, 19 nt, Artificial Sequence
  Description of Artificial Sequence: Synthetic oligonucleotide
ugagaaggguaguggauug

SEQ ID NO: 1367653 - RNA, 19 nt, Artificial Sequence
  Description of Artificial Sequence: Synthetic oligonucleotide
ucaguaauggugucuccca

SEQ ID NO: 1367654 - RNA, 19 nt, Artificial Sequence
  Description of Artificial Sequence: Synthetic oligonucleotide
uucaguaauggugucuccc

SEQ ID NO: 1367655 - RNA, 19 nt, Artificial Sequence
  Description of Artificial Sequence: Synthetic oligonucleotide
uggaucgguaggcuucucg

SEQ ID NO: 1367656 - RNA, 19 nt, Artificial Sequence
  Description of Artificial Sequence: Synthetic oligonucleotide
acgaggcauaguugaagcc

SEQ ID NO: 1367657 - RNA, 19 nt, Artificial Sequence
  Description of Artificial Sequence: Synthetic oligonucleotide
aacuacaaagcaaggaaaa

SEQ ID NO: 1367658 - RNA, 19 nt, Artificial Sequence
  Description of Artificial Sequence: Synthetic oligonucleotide
cuagacgaggcauaguuga

SEQ ID NO: 1367659 - RNA, 19 nt, Artificial Sequence
  Description of Artificial Sequence: Synthetic oligonucleotide
uuuuagagcgcccuuucuu

SEQ ID NO: 1367660 - RNA, 19 nt, Artificial Sequence
  Description of Artificial Sequence: Synthetic oligonucleotide
agaagugauuucugagauc

SEQ ID NO: 1367661 - RNA, 19 nt, Artificial Sequence
  Description of Artificial Sequence: Synthetic oligonucleotide
uuaauuccauaguaccggu

SEQ ID NO: 1367662 - RNA, 19 nt, Artificial Sequence
  Description of Artificial Sequence: Synthetic oligonucleotide
ggucauucguauauaaggg

SEQ ID NO: 1367663 - RNA, 19 nt, Artificial Sequence
  Description of Artificial Sequence: Synthetic oligonucleotide
uggucguguuccaucagag

SEQ ID NO: 1367664 - RNA, 19 nt, Artificial Sequence
  Description of Artificial Sequence: Synthetic oligonucleotide
auaaggguuuucuccaaga

SEQ ID NO: 1367665 - RNA, 19 nt, Artificial Sequence
  Description of Artificial Sequence: Synthetic oligonucleotide
ugauguugugcuaggggcu

SEQ ID NO: 1367666 - RNA, 19 nt, Artificial Sequence
  Description of Artificial Sequence: Synthetic oligonucleotide
acuacaaagcaaggaaaag

SEQ ID NO: 1367667 - RNA, 19 nt, Artificial Sequence
  Description of Artificial Sequence: Synthetic oligonucleotide
uuagaagcuuaucggcuac

SEQ ID NO: 1367668 - RNA, 19 nt, Artificial Sequence
  Description of Artificial Sequence: Synthetic oligonucleotide
agguuugacacacuucagu

SEQ ID NO: 1367669 - RNA, 19 nt, Artificial Sequence
  Description of Artificial Sequence: Synthetic oligonucleotide
accaacgaaacacugugaa

SEQ ID NO: 1367670 - RNA, 19 nt, Artificial Sequence
  Description of Artificial Sequence: Synthetic oligonucleotide
uaguggauugguccuggag

SEQ ID NO: 1367671 - RNA, 19 nt, Artificial Sequence
  Description of Artificial Sequence: Synthetic oligonucleotide
ugguagaagugauuucuga

SEQ ID NO: 1367672 - RNA, 19 nt, Artificial Sequence
  Description of Artificial Sequence: Synthetic oligonucleotide
cauaucgggagucccgagg

SEQ ID NO: 1367673 - RNA, 19 nt, Artificial Sequence
  Description of Artificial Sequence: Synthetic oligonucleotide
ugugguccgggccaauuug

SEQ ID NO: 1367674 - RNA, 19 nt, Artificial Sequence
  Description of Artificial Sequence: Synthetic oligonucleotide
agugauuguucggaucucg

SEQ ID NO: 1367675 - RNA, 19 nt, Artificial Sequence
  Description of Artificial Sequence: Synthetic oligonucleotide
gagucugcggccauucacg

SEQ ID NO: 1367676 - RNA, 19 nt, Artificial Sequence
  Description of Artificial Sequence: Synthetic oligonucleotide
gcuuuagaagcuuaucggc

SEQ ID NO: 1367677 - RNA, 19 nt, Artificial Sequence
  Description of Artificial Sequence: Synthetic oligonucleotide
ggugauguugugcuagggg

SEQ ID NO: 1367678 - RNA, 19 nt, Artificial Sequence
  Description of Artificial Sequence: Synthetic oligonucleotide
aggccgauuccuuuuguag

SEQ ID NO: 1367679 - RNA, 19 nt, Artificial Sequence
  Description of Artificial Sequence: Synthetic oligonucleotide
accacccacauaaagagug

SEQ ID NO: 1367680 - RNA, 19 nt, Artificial Sequence
  Description of Artificial Sequence: Synthetic oligonucleotide
gaacauaugugguccaaaa

SEQ ID NO: 1367681 - RNA, 19 nt, Artificial Sequence
  Description of Artificial Sequence: Synthetic oligonucleotide
cuacagggucauuaauucc

SEQ ID NO: 1367682 - RNA, 19 nt, Artificial Sequence
  Description of Artificial Sequence: Synthetic oligonucleotide
uguagguguuggaacccag

SEQ ID NO: 1367683 - RNA, 19 nt, Artificial Sequence
  Description of Artificial Sequence: Synthetic oligonucleotide
ggucuuauccucugguggg

SEQ ID NO: 1367684 - RNA, 19 nt, Artificial Sequence
  Description of Artificial Sequence: Synthetic oligonucleotide
uauggggaaguccgcgucc

SEQ ID NO: 1367685 - RNA, 19 nt, Artificial Sequence
  Description of Artificial Sequence: Synthetic oligonucleotide
uggucuggcacagauuuug

SEQ ID NO: 1367686 - RNA, 19 nt, Artificial Sequence
  Description of Artificial Sequence: Synthetic oligonucleotide
uaguauggggaaguccgcg

SEQ ID NO: 1367687 - RNA, 19 nt, Artificial Sequence
  Description of Artificial Sequence: Synthetic oligonucleotide
uguugacaucugauuuggg

SEQ ID NO: 1367688 - RNA, 19 nt, Artificial Sequence
  Description of Artificial Sequence: Synthetic oligonucleotide
guagcuuuucccagcaugc

SEQ ID NO: 1367689 - RNA, 19 nt, Artificial Sequence
  Description of Artificial Sequence: Synthetic oligonucleotide
acgucugacauaguauggg

SEQ ID NO: 1367690 - RNA, 19 nt, Artificial Sequence
  Description of Artificial Sequence: Synthetic oligonucleotide
caaagcaaggaaaaguaua

SEQ ID NO: 1367691 - RNA, 19 nt, Artificial Sequence
  Description of Artificial Sequence: Synthetic oligonucleotide
cacaacagugauuguucgg

SEQ ID NO: 1367692 - RNA, 19 nt, Artificial Sequence
  Description of Artificial Sequence: Synthetic oligonucleotide
ugugcuaggggcugcugug

SEQ ID NO: 1367693 - RNA, 19 nt, Artificial Sequence
  Description of Artificial Sequence: Synthetic oligonucleotide
ucgccgaacugguagaagu

SEQ ID NO: 1367694 - RNA, 19 nt, Artificial Sequence
  Description of Artificial Sequence: Synthetic oligonucleotide
ugggaucuuccccauuuca

SEQ ID NO: 1367695 - RNA, 19 nt, Artificial Sequence
  Description of Artificial Sequence: Synthetic oligonucleotide
ugacaucugauuugggcau

SEQ ID NO: 1367696 - RNA, 19 nt, Artificial Sequence
  Description of Artificial Sequence: Synthetic oligonucleotide
ugacauaguauggggaagu

SEQ ID NO: 1367697 - RNA, 19 nt, Artificial Sequence
  Description of Artificial Sequence: Synthetic oligonucleotide
cacgucugacauaguaugg

SEQ ID NO: 1367698 - RNA, 19 nt, Artificial Sequence
  Description of Artificial Sequence: Synthetic oligonucleotide
aguaauggugucucccaga

SEQ ID NO: 1367699 - RNA, 19 nt, Artificial Sequence
  Description of Artificial Sequence: Synthetic oligonucleotide
auuguucggaucucgccga

SEQ ID NO: 1367700 - RNA, 19 nt, Artificial Sequence
  Description of Artificial Sequence: Synthetic oligonucleotide
cauccgaacacauucagcu

SEQ ID NO: 1367701 - RNA, 19 nt, Artificial Sequence
  Description of Artificial Sequence: Synthetic oligonucleotide
aauguucaccacugcugga

SEQ ID NO: 1367702 - RNA, 19 nt, Artificial Sequence
  Description of Artificial Sequence: Synthetic oligonucleotide
ucuaauaggcaggucugac

SEQ ID NO: 1367703 - RNA, 19 nt, Artificial Sequence
  Description of Artificial Sequence: Synthetic oligonucleotide
ugauccucugacacaugug

SEQ ID NO: 1367704 - RNA, 19 nt, Artificial Sequence
  Description of Artificial Sequence: Synthetic oligonucleotide
uguucauagcagcuuguuu

SEQ ID NO: 1367705 - RNA, 19 nt, Artificial Sequence
  Description of Artificial Sequence: Synthetic oligonucleotide
uguuucaguaauggugucu

SEQ ID NO: 1367706 - RNA, 19 nt, Artificial Sequence
  Description of Artificial Sequence: Synthetic oligonucleotide
acauccgaacacauucagc

SEQ ID NO: 1367707 - RNA, 19 nt, Artificial Sequence
  Description of Artificial Sequence: Synthetic oligonucleotide
aauccugcaucacgaacuu

SEQ ID NO: 1367708 - RNA, 19 nt, Artificial Sequence
  Description of Artificial Sequence: Synthetic oligonucleotide
auugagucugcggccauuc

SEQ ID NO: 1367709 - RNA, 19 nt, Artificial Sequence
  Description of Artificial Sequence: Synthetic oligonucleotide
guuucaguaauggugucuc

SEQ ID NO: 1367710 - RNA, 19 nt, Artificial Sequence
  Description of Artificial Sequence: Synthetic oligonucleotide
uccagcaugagcucccauc

SEQ ID NO: 1367711 - RNA, 19 nt, Artificial Sequence
  Description of Artificial Sequence: Synthetic oligonucleotide
aguaguuggcagaugccuc

SEQ ID NO: 1367712 - RNA, 19 nt, Artificial Sequence
  Description of Artificial Sequence: Synthetic oligonucleotide
cauuucacauugagucugc

SEQ ID NO: 1367713 - RNA, 19 nt, Artificial Sequence
  Description of Artificial Sequence: Synthetic oligonucleotide
ugagcuuguuaaaggacuu

SEQ ID NO: 1367714 - RNA, 19 nt, Artificial Sequence
  Description of Artificial Sequence: Synthetic oligonucleotide
ugccugguggcaaacugga

SEQ ID NO: 1367715 - RNA, 19 nt, Artificial Sequence
  Description of Artificial Sequence: Synthetic oligonucleotide
caaaugugaggccgauucc

SEQ ID NO: 1367716 - RNA, 19 nt, Artificial Sequence
  Description of Artificial Sequence: Synthetic oligonucleotide
auaguauggggaaguccgc

SEQ ID NO: 1367717 - RNA, 19 nt, Artificial Sequence
  Description of Artificial Sequence: Synthetic oligonucleotide
ucauagcagcuuguuuugg

SEQ ID NO: 1367718 - RNA, 19 nt, Artificial Sequence
  Description of Artificial Sequence: Synthetic oligonucleotide
acgaacuuggauggguagg

SEQ ID NO: 1367719 - RNA, 19 nt, Artificial Sequence
  Description of Artificial Sequence: Synthetic oligonucleotide
auuuuagagcgcccuuucu

SEQ ID NO: 1367720 - RNA, 19 nt, Artificial Sequence
  Description of Artificial Sequence: Synthetic oligonucleotide
uuucaguaauggugucucc

SEQ ID NO: 1367721 - RNA, 19 nt, Artificial Sequence
  Description of Artificial Sequence: Synthetic oligonucleotide
gaucgguaggcuucucgug

SEQ ID NO: 1367722 - RNA, 19 nt, Artificial Sequence
  Description of Artificial Sequence: Synthetic oligonucleotide
cucgugucuguauggacac

SEQ ID NO: 1367723 - RNA, 19 nt, Artificial Sequence
  Description of Artificial Sequence: Synthetic oligonucleotide
ucguguuccaucagaguua

SEQ ID NO: 1367724 - RNA, 19 nt, Artificial Sequence
  Description of Artificial Sequence: Synthetic oligonucleotide
aacuggauaaaggcacacu

SEQ ID NO: 1367725 - RNA, 19 nt, Artificial Sequence
  Description of Artificial Sequence: Synthetic oligonucleotide
cacauaaagaguggugaug

SEQ ID NO: 1367726 - RNA, 19 nt, Artificial Sequence
  Description of Artificial Sequence: Synthetic oligonucleotide
cacauccgaacacauucag

SEQ ID NO: 1367727 - RNA, 19 nt, Artificial Sequence
  Description of Artificial Sequence: Synthetic oligonucleotide
ccgcuuuagaagcuuaucg

SEQ ID NO: 1367728 - RNA, 19 nt, Artificial Sequence
  Description of Artificial Sequence: Synthetic oligonucleotide
aguugaagcccgcuuuaga

SEQ ID NO: 1367729 - RNA, 19 nt, Artificial Sequence
  Description of Artificial Sequence: Synthetic oligonucleotide
aucuggaucgguaggcuuc

SEQ ID NO: 1367730 - RNA, 19 nt, Artificial Sequence
  Description of Artificial Sequence: Synthetic oligonucleotide
aguauggggaaguccgcgu

SEQ ID NO: 1367731 - RNA, 19 nt, Artificial Sequence
  Description of Artificial Sequence: Synthetic oligonucleotide
gcaccaacgaaacacugug

SEQ ID NO: 1367732 - RNA, 19 nt, Artificial Sequence
  Description of Artificial Sequence: Synthetic oligonucleotide
uaauuccauaguaccgguc

SEQ ID NO: 1367733 - RNA, 19 nt, Artificial Sequence
  Description of Artificial Sequence: Synthetic oligonucleotide
gcuacagggucauuaauuc

SEQ ID NO: 1367734 - RNA, 19 nt, Artificial Sequence
  Description of Artificial Sequence: Synthetic oligonucleotide
ugggauuuuagagcgcccu

SEQ ID NO: 1367735 - RNA, 19 nt, Artificial Sequence
  Description of Artificial Sequence: Synthetic oligonucleotide
ggaaaaguauacguauccc

SEQ ID NO: 1367736 - RNA, 19 nt, Artificial Sequence
  Description of Artificial Sequence: Synthetic oligonucleotide
guggcggucccauugggug

SEQ ID NO: 1367737 - RNA, 19 nt, Artificial Sequence
  Description of Artificial Sequence: Synthetic oligonucleotide
uaguaccggucuuuuauau

SEQ ID NO: 1367738 - RNA, 19 nt, Artificial Sequence
  Description of Artificial Sequence: Synthetic oligonucleotide
cugguagaagugauuucug

SEQ ID NO: 1367739 - RNA, 19 nt, Artificial Sequence
  Description of Artificial Sequence: Synthetic oligonucleotide
caucagaguuagaaauuuc

SEQ ID NO: 1367740 - RNA, 19 nt, Artificial Sequence
  Description of Artificial Sequence: Synthetic oligonucleotide
gagguggcggucccauugg

SEQ ID NO: 1367741 - RNA, 19 nt, Artificial Sequence
  Description of Artificial Sequence: Synthetic oligonucleotide
uucauuuacugggauuuua

SEQ ID NO: 1367742 - RNA, 19 nt, Artificial Sequence
  Description of Artificial Sequence: Synthetic oligonucleotide
gagaaggguaguggauugg

SEQ ID NO: 1367743 - RNA, 19 nt, Artificial Sequence
  Description of Artificial Sequence: Synthetic oligonucleotide
agacgaggcauaguugaag

SEQ ID NO: 1367744 - RNA, 19 nt, Artificial Sequence
  Description of Artificial Sequence: Synthetic oligonucleotide
uucggaucucgccgaacug

SEQ ID NO: 1367745 - RNA, 19 nt, Artificial Sequence
  Description of Artificial Sequence: Synthetic oligonucleotide
cuuuagaagcuuaucggcu

SEQ ID NO: 1367746 - RNA, 19 nt, Artificial Sequence
  Description of Artificial Sequence: Synthetic oligonucleotide
cacgaacuuggauggguag

SEQ ID NO: 1367747 - RNA, 19 nt, Artificial Sequence
  Description of Artificial Sequence: Synthetic oligonucleotide
ucacgaacuuggaugggua

SEQ ID NO: 1367748 - RNA, 19 nt, Artificial Sequence
  Description of Artificial Sequence: Synthetic oligonucleotide
uaguauggugugguccggg

SEQ ID NO: 1367749 - RNA, 19 nt, Artificial Sequence
  Description of Artificial Sequence: Synthetic oligonucleotide
gucaucuggaucgguaggc

SEQ ID NO: 1367750 - RNA, 19 nt, Artificial Sequence
  Description of Artificial Sequence: Synthetic oligonucleotide
caauccugcaucacgaacu

SEQ ID NO: 1367751 - RNA, 19 nt, Artificial Sequence
  Description of Artificial Sequence: Synthetic oligonucleotide
auaguugaagcccgcuuua

SEQ ID NO: 1367752 - RNA, 19 nt, Artificial Sequence
  Description of Artificial Sequence: Synthetic oligonucleotide
uaccggucuuuuauauucu

SEQ ID NO: 1367753 - RNA, 19 nt, Artificial Sequence
  Description of Artificial Sequence: Synthetic oligonucleotide
auuucacauugagucugcg

SEQ ID NO: 1367754 - RNA, 19 nt, Artificial Sequence
  Description of Artificial Sequence: Synthetic oligonucleotide
auauaaggguuuucuccaa

SEQ ID NO: 1367755 - RNA, 19 nt, Artificial Sequence
  Description of Artificial Sequence: Synthetic oligonucleotide
ugguccgggccaauuugag

SEQ ID NO: 1367756 - RNA, 19 nt, Artificial Sequence
  Description of Artificial Sequence: Synthetic oligonucleotide
ugccaacuggucguguucc

SEQ ID NO: 1367757 - RNA, 19 nt, Artificial Sequence
  Description of Artificial Sequence: Synthetic oligonucleotide
uucucgugucuguauggac

SEQ ID NO: 1367758 - RNA, 19 nt, Artificial Sequence
  Description of Artificial Sequence: Synthetic oligonucleotide
gaaguccgcguccucccag

SEQ ID NO: 1367759 - RNA, 19 nt, Artificial Sequence
  Description of Artificial Sequence: Synthetic oligonucleotide
cuuaucggcuacaggguca

SEQ ID NO: 1367760 - RNA, 19 nt, Artificial Sequence
  Description of Artificial Sequence: Synthetic oligonucleotide
guauggugugguccgggcc

SEQ ID NO: 1367761 - RNA, 19 nt, Artificial Sequence
  Description of Artificial Sequence: Synthetic oligonucleotide
uggugauguugugcuaggg

SEQ ID NO: 1367762 - RNA, 19 nt, Artificial Sequence
  Description of Artificial Sequence: Synthetic oligonucleotide
caguaauggugucucccag

SEQ ID NO: 1367763 - RNA, 19 nt, Artificial Sequence
  Description of Artificial Sequence: Synthetic oligonucleotide
auaguaccggucuuuuaua

SEQ ID NO: 1367764 - RNA, 19 nt, Artificial Sequence
  Description of Artificial Sequence: Synthetic oligonucleotide
ggaaacuacaaagcaagga

SEQ ID NO: 1367765 - RNA, 19 nt, Artificial Sequence
  Description of Artificial Sequence: Synthetic oligonucleotide
uuugggcaugucaucuuua

SEQ ID NO: 1367766 - RNA, 19 nt, Artificial Sequence
  Description of Artificial Sequence: Synthetic oligonucleotide
cccacauccgaacacauuc

SEQ ID NO: 1367767 - RNA, 19 nt, Artificial Sequence
  Description of Artificial Sequence: Synthetic oligonucleotide
agaaggguaguggauuggu

SEQ ID NO: 1367768 - RNA, 19 nt, Artificial Sequence
  Description of Artificial Sequence: Synthetic oligonucleotide
aggauucauuuacugggau

SEQ ID NO: 1367769 - RNA, 19 nt, Artificial Sequence
  Description of Artificial Sequence: Synthetic oligonucleotide
aucacgaacuuggaugggu

SEQ ID NO: 1367770 - RNA, 19 nt, Artificial Sequence
  Description of Artificial Sequence: Synthetic oligonucleotide
agagcgcccuuucuuccuc

SEQ ID NO: 1367771 - RNA, 19 nt, Artificial Sequence
  Description of Artificial Sequence: Synthetic oligonucleotide
auggguaggccauacucua

SEQ ID NO: 1367772 - RNA, 19 nt, Artificial Sequence
  Description of Artificial Sequence: Synthetic oligonucleotide
cauaguaccggucuuuuau

SEQ ID NO: 1367773 - RNA, 19 nt, Artificial Sequence
  Description of Artificial Sequence: Synthetic oligonucleotide
ucggcuacagggucauuaa

SEQ ID NO: 1367774 - RNA, 19 nt, Artificial Sequence
  Description of Artificial Sequence: Synthetic oligonucleotide
caaacuggauaaaggcaca

SEQ ID NO: 1367775 - RNA, 19 nt, Artificial Sequence
  Description of Artificial Sequence: Synthetic oligonucleotide
ugucucccagaccacccac

SEQ ID NO: 1367776 - RNA, 19 nt, Artificial Sequence
  Description of Artificial Sequence: Synthetic oligonucleotide
cuuuguugacaucugauuu

SEQ ID NO: 1367777 - RNA, 19 nt, Artificial Sequence
  Description of Artificial Sequence: Synthetic oligonucleotide
ccuuuuguaguauggugug

SEQ ID NO: 1367778 - RNA, 19 nt, Artificial Sequence
  Description of Artificial Sequence: Synthetic oligonucleotide
uggggaagcauagcugugu

SEQ ID NO: 1367779 - RNA, 19 nt, Artificial Sequence
  Description of Artificial Sequence: Synthetic oligonucleotide
ccagcaugagcucccaucc

SEQ ID NO: 1367780 - RNA, 19 nt, Artificial Sequence
  Description of Artificial Sequence: Synthetic oligonucleotide
gcuucucgugucuguaugg

SEQ ID NO: 1367781 - RNA, 19 nt, Artificial Sequence
  Description of Artificial Sequence: Synthetic oligonucleotide
uacugggauuuuagagcgc

SEQ ID NO: 1367782 - RNA, 19 nt, Artificial Sequence
  Description of Artificial Sequence: Synthetic oligonucleotide
cagguuugacacacuucag

SEQ ID NO: 1367783 - RNA, 19 nt, Artificial Sequence
  Description of Artificial Sequence: Synthetic oligonucleotide
guuugacacacuucagucu

SEQ ID NO: 1367784 - RNA, 19 nt, Artificial Sequence
  Description of Artificial Sequence: Synthetic oligonucleotide
gucauucguauauaagggu

SEQ ID NO: 1367785 - RNA, 19 nt, Artificial Sequence
  Description of Artificial Sequence: Synthetic oligonucleotide
aaguccgcguccucccagu

SEQ ID NO: 1367786 - RNA, 19 nt, Artificial Sequence
  Description of Artificial Sequence: Synthetic oligonucleotide
caacuggucguguuccauc

SEQ ID NO: 1367787 - RNA, 19 nt, Artificial Sequence
  Description of Artificial Sequence: Synthetic oligonucleotide
guauacguaucccaggauu

SEQ ID NO: 1367788 - RNA, 19 nt, Artificial Sequence
  Description of Artificial Sequence: Synthetic oligonucleotide
ucaucuggaucgguaggcu

SEQ ID NO: 1367789 - RNA, 19 nt, Artificial Sequence
  Description of Artificial Sequence: Synthetic oligonucleotide
aguaccggucuuuuauauu

SEQ ID NO: 1367790 - RNA, 19 nt, Artificial Sequence
  Description of Artificial Sequence: Synthetic oligonucleotide
gaagcauagcuguguucuc

SEQ ID NO: 1367791 - RNA, 19 nt, Artificial Sequence
  Description of Artificial Sequence: Synthetic oligonucleotide
auucacgaugagcuuguua

SEQ ID NO: 1367792 - RNA, 19 nt, Artificial Sequence
  Description of Artificial Sequence: Synthetic oligonucleotide
gcaugucaucuuuaaauga

SEQ ID NO: 1367793 - RNA, 19 nt, Artificial Sequence
  Description of Artificial Sequence: Synthetic oligonucleotide
ugacugcccacauccgaac

SEQ ID NO: 1367794 - RNA, 19 nt, Artificial Sequence
  Description of Artificial Sequence: Synthetic oligonucleotide
auacguaucccaggauuca

SEQ ID NO: 1367795 - RNA, 19 nt, Artificial Sequence
  Description of Artificial Sequence: Synthetic oligonucleotide
uggcagaugccuccucuuc

SEQ ID NO: 1367796 - RNA, 19 nt, Artificial Sequence
  Description of Artificial Sequence: Synthetic oligonucleotide
aagucgccauaucgggagu

SEQ ID NO: 1367797 - RNA, 19 nt, Artificial Sequence
  Description of Artificial Sequence: Synthetic oligonucleotide
gucguguuccaucagaguu

SEQ ID NO: 1367798 - RNA, 19 nt, Artificial Sequence
  Description of Artificial Sequence: Synthetic oligonucleotide
uugggaucuuccccauuuc

SEQ ID NO: 1367799 - RNA, 19 nt, Artificial Sequence
  Description of Artificial Sequence: Synthetic oligonucleotide
cauguggggaagcauagcu

SEQ ID NO: 1367800 - RNA, 19 nt, Artificial Sequence
  Description of Artificial Sequence: Synthetic oligonucleotide
gauggguaggccauacucu

SEQ ID NO: 1367801 - RNA, 19 nt, Artificial Sequence
  Description of Artificial Sequence: Synthetic oligonucleotide
cucugacugcccacauccg

SEQ ID NO: 1367802 - RNA, 19 nt, Artificial Sequence
  Description of Artificial Sequence: Synthetic oligonucleotide
caggauucauuuacuggga

SEQ ID NO: 1367803 - RNA, 19 nt, Artificial Sequence
  Description of Artificial Sequence: Synthetic oligonucleotide
cugggauuuuagagcgccc

SEQ ID NO: 1367804 - RNA, 19 nt, Artificial Sequence
  Description of Artificial Sequence: Synthetic oligonucleotide
gucuagacgaggcauaguu

SEQ ID NO: 1367805 - RNA, 19 nt, Artificial Sequence
  Description of Artificial Sequence: Synthetic oligonucleotide
ggagguggcggucccauug

SEQ ID NO: 1367806 - RNA, 19 nt, Artificial Sequence
  Description of Artificial Sequence: Synthetic oligonucleotide
gugauuguucggaucucgc

SEQ ID NO: 1367807 - RNA, 19 nt, Artificial Sequence
  Description of Artificial Sequence: Synthetic oligonucleotide
uacaggcucuagcuugauc

SEQ ID NO: 1367808 - RNA, 19 nt, Artificial Sequence
  Description of Artificial Sequence: Synthetic oligonucleotide
auucguauauaaggguuuu

SEQ ID NO: 1367809 - RNA, 19 nt, Artificial Sequence
  Description of Artificial Sequence: Synthetic oligonucleotide
ucuggaucgguaggcuucu

SEQ ID NO: 1367810 - RNA, 19 nt, Artificial Sequence
  Description of Artificial Sequence: Synthetic oligonucleotide
agucugcggccauucacga

SEQ ID NO: 1367811 - RNA, 19 nt, Artificial Sequence
  Description of Artificial Sequence: Synthetic oligonucleotide
agucgccauaucgggaguc

SEQ ID NO: 1367812 - RNA, 19 nt, Artificial Sequence
  Description of Artificial Sequence: Synthetic oligonucleotide
gacauaguauggggaaguc

SEQ ID NO: 1367813 - RNA, 19 nt, Artificial Sequence
  Description of Artificial Sequence: Synthetic oligonucleotide
uucguauauaaggguuuuc

SEQ ID NO: 1367814 - RNA, 19 nt, Artificial Sequence
  Description of Artificial Sequence: Synthetic oligonucleotide
aucucgccgaacugguaga

SEQ ID NO: 1367815 - RNA, 19 nt, Artificial Sequence
  Description of Artificial Sequence: Synthetic oligonucleotide
uauggacacuccucuccuc

SEQ ID NO: 1367816 - RNA, 19 nt, Artificial Sequence
  Description of Artificial Sequence: Synthetic oligonucleotide
guuggaacccagagaaguc

SEQ ID NO: 1367817 - RNA, 19 nt, Artificial Sequence
  Description of Artificial Sequence: Synthetic oligonucleotide
acuggucguguuccaucag

SEQ ID NO: 1367818 - RNA, 19 nt, Artificial Sequence
  Description of Artificial Sequence: Synthetic oligonucleotide
uuaucggcuacagggucau

SEQ ID NO: 1367819 - RNA, 19 nt, Artificial Sequence
  Description of Artificial Sequence: Synthetic oligonucleotide
gggcaugucaucuuuaaau

SEQ ID NO: 1367820 - RNA, 19 nt, Artificial Sequence
  Description of Artificial Sequence: Synthetic oligonucleotide
uuggauggguaggccauac

SEQ ID NO: 1367821 - RNA, 19 nt, Artificial Sequence
  Description of Artificial Sequence: Synthetic oligonucleotide
cucugaggguccugagaag

SEQ ID NO: 1367822 - RNA, 19 nt, Artificial Sequence
  Description of Artificial Sequence: Synthetic oligonucleotide
ucacugguagauguagcuu

SEQ ID NO: 1367823 - RNA, 19 nt, Artificial Sequence
  Description of Artificial Sequence: Synthetic oligonucleotide
guaguauggugugguccgg

SEQ ID NO: 1367824 - RNA, 19 nt, Artificial Sequence
  Description of Artificial Sequence: Synthetic oligonucleotide
caugagcucccauccucug

SEQ ID NO: 1367825 - RNA, 19 nt, Artificial Sequence
  Description of Artificial Sequence: Synthetic oligonucleotide
aucggcuacagggucauua

SEQ ID NO: 1367826 - RNA, 19 nt, Artificial Sequence
  Description of Artificial Sequence: Synthetic oligonucleotide
uagaagcuuaucggcuaca

SEQ ID NO: 1367827 - RNA, 19 nt, Artificial Sequence
  Description of Artificial Sequence: Synthetic oligonucleotide
uggauggguaggccauacu

SEQ ID NO: 1367828 - RNA, 19 nt, Artificial Sequence
  Description of Artificial Sequence: Synthetic oligonucleotide
gacaauccugcaucacgaa

SEQ ID NO: 1367829 - RNA, 19 nt, Artificial Sequence
  Description of Artificial Sequence: Synthetic oligonucleotide
ucccagagucugugguucc

SEQ ID NO: 1367830 - RNA, 19 nt, Artificial Sequence
  Description of Artificial Sequence: Synthetic oligonucleotide
uggaacauaugugguccaa

SEQ ID NO: 1367831 - RNA, 19 nt, Artificial Sequence
  Description of Artificial Sequence: Synthetic oligonucleotide
caauuuacugcagguuuga

SEQ ID NO: 1367832 - RNA, 19 nt, Artificial Sequence
  Description of Artificial Sequence: Synthetic oligonucleotide
ggucccauuggguggaaca

SEQ ID NO: 1367833 - RNA, 19 nt, Artificial Sequence
  Description of Artificial Sequence: Synthetic oligonucleotide
ucuuauccucugguggguc

SEQ ID NO: 1367834 - RNA, 19 nt, Artificial Sequence
  Description of Artificial Sequence: Synthetic oligonucleotide
ggcuucucgugucuguaug

SEQ ID NO: 1367835 - RNA, 19 nt, Artificial Sequence
  Description of Artificial Sequence: Synthetic oligonucleotide
agaagucgccauaucggga

SEQ ID NO: 1367836 - RNA, 19 nt, Artificial Sequence
  Description of Artificial Sequence: Synthetic oligonucleotide
guucggaucucgccgaacu

SEQ ID NO: 1367837 - RNA, 19 nt, Artificial Sequence
  Description of Artificial Sequence: Synthetic oligonucleotide
uccauaguaccggucuuuu

SEQ ID NO: 1367838 - RNA, 19 nt, Artificial Sequence
  Description of Artificial Sequence: Synthetic oligonucleotide
aacaaaugugaggccgauu

SEQ ID NO: 1367839 - RNA, 19 nt, Artificial Sequence
  Description of Artificial Sequence: Synthetic oligonucleotide
uccuuucacccagaaggaa

SEQ ID NO: 1367840 - RNA, 19 nt, Artificial Sequence
  Description of Artificial Sequence: Synthetic oligonucleotide
gccauucacgaugagcuug

SEQ ID NO: 1367841 - RNA, 19 nt, Artificial Sequence
  Description of Artificial Sequence: Synthetic oligonucleotide
uacguaucccaggauucau

SEQ ID NO: 1367842 - RNA, 19 nt, Artificial Sequence
  Description of Artificial Sequence: Synthetic oligonucleotide
ccggcuuccgauucgggag

SEQ ID NO: 1367843 - RNA, 19 nt, Artificial Sequence
  Description of Artificial Sequence: Synthetic oligonucleotide
cuggucguguuccaucaga

SEQ ID NO: 1367844 - RNA, 19 nt, Artificial Sequence
  Description of Artificial Sequence: Synthetic oligonucleotide
aggcauaguugaagcccgc

SEQ ID NO: 1367845 - RNA, 19 nt, Artificial Sequence
  Description of Artificial Sequence: Synthetic oligonucleotide
ucgccauaucgggaguccc

SEQ ID NO: 1367846 - RNA, 19 nt, Artificial Sequence
  Description of Artificial Sequence: Synthetic oligonucleotide
cgaggcauaguugaagccc

SEQ ID NO: 1367847 - RNA, 19 nt, Artificial Sequence
  Description of Artificial Sequence: Synthetic oligonucleotide
guauggacacuccucuccu

SEQ ID NO: 1367848 - RNA, 19 nt, Artificial Sequence
  Description of Artificial Sequence: Synthetic oligonucleotide
cauaguugaagcccgcuuu

SEQ ID NO: 1367849 - RNA, 19 nt, Artificial Sequence
  Description of Artificial Sequence: Synthetic oligonucleotide
caucacgaacuuggauggg

SEQ ID NO: 1367850 - RNA, 19 nt, Artificial Sequence
  Description of Artificial Sequence: Synthetic oligonucleotide
guugaaguaguuggcagau

SEQ ID NO: 1367851 - RNA, 19 nt, Artificial Sequence
  Description of Artificial Sequence: Synthetic oligonucleotide
aucuuccccauuucacauu

SEQ ID NO: 1367852 - RNA, 19 nt, Artificial Sequence
  Description of Artificial Sequence: Synthetic oligonucleotide
cauucguauauaaggguuu

SEQ ID NO: 1367853 - RNA, 19 nt, Artificial Sequence
  Description of Artificial Sequence: Synthetic oligonucleotide
gacacgucugacauaguau

SEQ ID NO: 1367854 - RNA, 19 nt, Artificial Sequence
  Description of Artificial Sequence: Synthetic oligonucleotide
gccaauuugagcagcaugu

SEQ ID NO: 1367855 - RNA, 19 nt, Artificial Sequence
  Description of Artificial Sequence: Synthetic oligonucleotide
acucuaggucuaauaggca

SEQ ID NO: 1367856 - RNA, 19 nt, Artificial Sequence
  Description of Artificial Sequence: Synthetic oligonucleotide
ccacccacauaaagagugg

SEQ ID NO: 1367857 - RNA, 19 nt, Artificial Sequence
  Description of Artificial Sequence: Synthetic oligonucleotide
gucgccauaucgggagucc

SEQ ID NO: 1367858 - RNA, 19 nt, Artificial Sequence
  Description of Artificial Sequence: Synthetic oligonucleotide
uuguucggaucucgccgaa

SEQ ID NO: 1367859 - RNA, 19 nt, Artificial Sequence
  Description of Artificial Sequence: Synthetic oligonucleotide
aagaguggugauggucuua

SEQ ID NO: 1367860 - RNA, 19 nt, Artificial Sequence
  Description of Artificial Sequence: Synthetic oligonucleotide
gaggccgauuccuuuugua

SEQ ID NO: 1367861 - RNA, 19 nt, Artificial Sequence
  Description of Artificial Sequence: Synthetic oligonucleotide
gucuaauaggcaggucuga

SEQ ID NO: 1367862 - RNA, 19 nt, Artificial Sequence
  Description of Artificial Sequence: Synthetic oligonucleotide
cagcuaccauggaaacuac

SEQ ID NO: 1367863 - RNA, 19 nt, Artificial Sequence
  Description of Artificial Sequence: Synthetic oligonucleotide
ugcuaggggcugcuguguu

SEQ ID NO: 1367864 - RNA, 19 nt, Artificial Sequence
  Description of Artificial Sequence: Synthetic oligonucleotide
ccgaacacauucagcuacc

SEQ ID NO: 1367865 - RNA, 19 nt, Artificial Sequence
  Description of Artificial Sequence: Synthetic oligonucleotide
caccaacgaaacacuguga

SEQ ID NO: 1367866 - RNA, 19 nt, Artificial Sequence
  Description of Artificial Sequence: Synthetic oligonucleotide
uguucggaucucgccgaac

SEQ ID NO: 1367867 - RNA, 19 nt, Artificial Sequence
  Description of Artificial Sequence: Synthetic oligonucleotide
ggaacaaaugugaggccga

SEQ ID NO: 1367868 - RNA, 19 nt, Artificial Sequence
  Description of Artificial Sequence: Synthetic oligonucleotide
gggucuagacgaggcauag

SEQ ID NO: 1367869 - RNA, 19 nt, Artificial Sequence
  Description of Artificial Sequence: Synthetic oligonucleotide
aucccaggauucauuuacu

SEQ ID NO: 1367870 - RNA, 19 nt, Artificial Sequence
  Description of Artificial Sequence: Synthetic oligonucleotide
gggucauuaauuccauagu

SEQ ID NO: 1367871 - RNA, 19 nt, Artificial Sequence
  Description of Artificial Sequence: Synthetic oligonucleotide
ucucgccgaacugguagaa

SEQ ID NO: 1367872 - RNA, 19 nt, Artificial Sequence
  Description of Artificial Sequence: Synthetic oligonucleotide
cucgccgaacugguagaag

SEQ ID NO: 1367873 - RNA, 19 nt, Artificial Sequence
  Description of Artificial Sequence: Synthetic oligonucleotide
agcuaccauggaaacuaca

SEQ ID NO: 1367874 - RNA, 19 nt, Artificial Sequence
  Description of Artificial Sequence: Synthetic oligonucleotide
cgaacuuggauggguaggc

SEQ ID NO: 1367875 - RNA, 19 nt, Artificial Sequence
  Description of Artificial Sequence: Synthetic oligonucleotide
augcggaccccggggcacc

SEQ ID NO: 1367876 - RNA, 19 nt, Artificial Sequence
  Description of Artificial Sequence: Synthetic oligonucleotide
gauuugggcaugucaucuu

SEQ ID NO: 1367877 - RNA, 19 nt, Artificial Sequence
  Description of Artificial Sequence: Synthetic oligonucleotide
cacugugaauggucuggca

SEQ ID NO: 1367878 - RNA, 19 nt, Artificial Sequence
  Description of Artificial Sequence: Synthetic oligonucleotide
ugcggccauucacgaugag

SEQ ID NO: 1367879 - RNA, 19 nt, Artificial Sequence
  Description of Artificial Sequence: Synthetic oligonucleotide
cuaggucuaauaggcaggu

SEQ ID NO: 1367880 - RNA, 19 nt, Artificial Sequence
  Description of Artificial Sequence: Synthetic oligonucleotide
ggaucgguaggcuucucgu

SEQ ID NO: 1367881 - RNA, 19 nt, Artificial Sequence
  Description of Artificial Sequence: Synthetic oligonucleotide
caugcggaccccggggcac

SEQ ID NO: 1367882 - RNA, 19 nt, Artificial Sequence
  Description of Artificial Sequence: Synthetic oligonucleotide
gcggccauucacgaugagc

SEQ ID NO: 1367883 - RNA, 19 nt, Artificial Sequence
  Description of Artificial Sequence: Synthetic oligonucleotide
cagcaugccaacuggucgu

SEQ ID NO: 1367884 - RNA, 19 nt, Artificial Sequence
  Description of Artificial Sequence: Synthetic oligonucleotide
aagcccgcuuuagaagcuu

SEQ ID NO: 1367885 - RNA, 19 nt, Artificial Sequence
  Description of Artificial Sequence: Synthetic oligonucleotide
gagucccgaggcagcgccg

SEQ ID NO: 1367886 - RNA, 19 nt, Artificial Sequence
  Description of Artificial Sequence: Synthetic oligonucleotide
cucuuacauucuccuuuca

SEQ ID NO: 1367887 - RNA, 19 nt, Artificial Sequence
  Description of Artificial Sequence: Synthetic oligonucleotide
gccgauuccuuuuguagua

SEQ ID NO: 1367888 - RNA, 19 nt, Artificial Sequence
  Description of Artificial Sequence: Synthetic oligonucleotide
cggggcaccaacgaaacac

SEQ ID NO: 1367889 - RNA, 19 nt, Artificial Sequence
  Description of Artificial Sequence: Synthetic oligonucleotide
ggccgauuccuuuuguagu

SEQ ID NO: 1367890 - RNA, 19 nt, Artificial Sequence
  Description of Artificial Sequence: Synthetic oligonucleotide
ggaacauaugugguccaaa

SEQ ID NO: 1367891 - RNA, 19 nt, Artificial Sequence
  Description of Artificial Sequence: Synthetic oligonucleotide
cacauucagcuaccaugga

SEQ ID NO: 1367892 - RNA, 19 nt, Artificial Sequence
  Description of Artificial Sequence: Synthetic oligonucleotide
cagugauuguucggaucuc

SEQ ID NO: 1367893 - RNA, 19 nt, Artificial Sequence
  Description of Artificial Sequence: Synthetic oligonucleotide
gaguggugauguugugcua

SEQ ID NO: 1367894 - RNA, 19 nt, Artificial Sequence
  Description of Artificial Sequence: Synthetic oligonucleotide
ggauucauuuacugggauu

SEQ ID NO: 1367895 - RNA, 19 nt, Artificial Sequence
  Description of Artificial Sequence: Synthetic oligonucleotide
aagacacgucugacauagu

SEQ ID NO: 1367896 - RNA, 19 nt, Artificial Sequence
  Description of Artificial Sequence: Synthetic oligonucleotide
cgccauaucgggagucccg

SEQ ID NO: 1367897 - RNA, 19 nt, Artificial Sequence
  Description of Artificial Sequence: Synthetic oligonucleotide
ccauacucuaggucuaaua

SEQ ID NO: 1367898 - RNA, 19 nt, Artificial Sequence
  Description of Artificial Sequence: Synthetic oligonucleotide
ccacauccgaacacauuca

SEQ ID NO: 1367899 - RNA, 19 nt, Artificial Sequence
  Description of Artificial Sequence: Synthetic oligonucleotide
cccggggcaccaacgaaac

SEQ ID NO: 1367900 - RNA, 19 nt, Artificial Sequence
  Description of Artificial Sequence: Synthetic oligonucleotide
accccggggcaccaacgaa

SEQ ID NO: 1367901 - RNA, 19 nt, Artificial Sequence
  Description of Artificial Sequence: Synthetic oligonucleotide
ccauaucgggagucccgag

SEQ ID NO: 1367902 - RNA, 19 nt, Artificial Sequence
  Description of Artificial Sequence: Synthetic oligonucleotide
ggguaguggauugguccug

SEQ ID NO: 1367903 - RNA, 19 nt, Artificial Sequence
  Description of Artificial Sequence: Synthetic oligonucleotide
gaccacccacauaaagagu

SEQ ID NO: 1367904 - RNA, 19 nt, Artificial Sequence
  Description of Artificial Sequence: Synthetic oligonucleotide
ggaccccggggcaccaacg

SEQ ID NO: 1367905 - RNA, 19 nt, Artificial Sequence
  Description of Artificial Sequence: Synthetic oligonucleotide
caugccaacuggucguguu

SEQ ID NO: 1367906 - RNA, 19 nt, Artificial Sequence
  Description of Artificial Sequence: Synthetic oligonucleotide
gccauaucgggagucccga

SEQ ID NO: 1367907 - RNA, 19 nt, Artificial Sequence
  Description of Artificial Sequence: Synthetic oligonucleotide
aggccauacucuaggucua

SEQ ID NO: 1367908 - RNA, 19 nt, Artificial Sequence
  Description of Artificial Sequence: Synthetic oligonucleotide
aguccgcguccucccaguu

SEQ ID NO: 1367909 - RNA, 19 nt, Artificial Sequence
  Description of Artificial Sequence: Synthetic oligonucleotide
cagggucauuaauuccaua

SEQ ID NO: 1367910 - RNA, 19 nt, Artificial Sequence
  Description of Artificial Sequence: Synthetic oligonucleotide
cagcgccggcuuccgauuc

SEQ ID NO: 1367911 - RNA, 19 nt, Artificial Sequence
  Description of Artificial Sequence: Synthetic oligonucleotide
ggucguguuccaucagagu

SEQ ID NO: 1367912 - RNA, 19 nt, Artificial Sequence
  Description of Artificial Sequence: Synthetic oligonucleotide
gucuuauccucuggugggu

SEQ ID NO: 1367913 - RNA, 19 nt, Artificial Sequence
  Description of Artificial Sequence: Synthetic oligonucleotide
caucuggaucgguaggcuu

SEQ ID NO: 1367914 - RNA, 19 nt, Artificial Sequence
  Description of Artificial Sequence: Synthetic oligonucleotide
cacccacauaaagaguggu

SEQ ID NO: 1367915 - RNA, 19 nt, Artificial Sequence
  Description of Artificial Sequence: Synthetic oligonucleotide
ggauuuuagagcgcccuuu

SEQ ID NO: 1367916 - RNA, 19 nt, Artificial Sequence
  Description of Artificial Sequence: Synthetic oligonucleotide
guguucauagcagcuuguu

SEQ ID NO: 1367917 - RNA, 19 nt, Artificial Sequence
  Description of Artificial Sequence: Synthetic oligonucleotide
cuaggggcugcuguguuuu

SEQ ID NO: 1367918 - RNA, 19 nt, Artificial Sequence
  Description of Artificial Sequence: Synthetic oligonucleotide
ccauucacgaugagcuugu

SEQ ID NO: 1367919 - RNA, 19 nt, Artificial Sequence
  Description of Artificial Sequence: Synthetic oligonucleotide
ggggucaucuggaucggua

SEQ ID NO: 1367920 - RNA, 19 nt, Artificial Sequence
  Description of Artificial Sequence: Synthetic oligonucleotide
cgcaugcggaccccggggc

SEQ ID NO: 1367921 - RNA, 19 nt, Artificial Sequence
  Description of Artificial Sequence: Synthetic oligonucleotide
agcccgcuuuagaagcuua

SEQ ID NO: 1367922 - RNA, 19 nt, Artificial Sequence
  Description of Artificial Sequence: Synthetic oligonucleotide
ugcggaccccggggcacca

SEQ ID NO: 1367923 - RNA, 19 nt, Artificial Sequence
  Description of Artificial Sequence: Synthetic oligonucleotide
ccaacgaaacacugugaau

SEQ ID NO: 1367924 - RNA, 19 nt, Artificial Sequence
  Description of Artificial Sequence: Synthetic oligonucleotide
ccaucagaguuagaaauuu

SEQ ID NO: 1367925 - RNA, 19 nt, Artificial Sequence
  Description of Artificial Sequence: Synthetic oligonucleotide
gggauuuuagagcgcccuu

SEQ ID NO: 1367926 - RNA, 19 nt, Artificial Sequence
  Description of Artificial Sequence: Synthetic oligonucleotide
ggcauaguugaagcccgcu

SEQ ID NO: 1367927 - RNA, 19 nt, Artificial Sequence
  Description of Artificial Sequence: Synthetic oligonucleotide
gugcuaggggcugcugugu

SEQ ID NO: 1367928 - RNA, 19 nt, Artificial Sequence
  Description of Artificial Sequence: Synthetic oligonucleotide
ccccggggcaccaacgaaa

SEQ ID NO: 1367929 - RNA, 19 nt, Artificial Sequence
  Description of Artificial Sequence: Synthetic oligonucleotide
cuggaucgguaggcuucuc

SEQ ID NO: 1367930 - RNA, 19 nt, Artificial Sequence
  Description of Artificial Sequence: Synthetic oligonucleotide
ccauaguaccggucuuuua

SEQ ID NO: 1367931 - RNA, 19 nt, Artificial Sequence
  Description of Artificial Sequence: Synthetic oligonucleotide
gucugcggccauucacgau

SEQ ID NO: 1367932 - RNA, 19 nt, Artificial Sequence
  Description of Artificial Sequence: Synthetic oligonucleotide
ccgaacugguagaagugau

SEQ ID NO: 1367933 - RNA, 19 nt, Artificial Sequence
  Description of Artificial Sequence: Synthetic oligonucleotide
ggccauacucuaggucuaa

SEQ ID NO: 1367934 - RNA, 19 nt, Artificial Sequence
  Description of Artificial Sequence: Synthetic oligonucleotide
gguggcggucccauugggu

SEQ ID NO: 1367935 - RNA, 19 nt, Artificial Sequence
  Description of Artificial Sequence: Synthetic oligonucleotide
ggucuagacgaggcauagu

SEQ ID NO: 1367936 - RNA, 19 nt, Artificial Sequence
  Description of Artificial Sequence: Synthetic oligonucleotide
cauugagucugcggccauu

SEQ ID NO: 1367937 - RNA, 19 nt, Artificial Sequence
  Description of Artificial Sequence: Synthetic oligonucleotide
ggaucucgccgaacuggua

SEQ ID NO: 1367938 - RNA, 19 nt, Artificial Sequence
  Description of Artificial Sequence: Synthetic oligonucleotide
cccagagaagucgccauau

SEQ ID NO: 1367939 - RNA, 19 nt, Artificial Sequence
  Description of Artificial Sequence: Synthetic oligonucleotide
cgccggcuuccgauucggg

SEQ ID NO: 1367940 - RNA, 19 nt, Artificial Sequence
  Description of Artificial Sequence: Synthetic oligonucleotide
ggugugguccgggccaauu

SEQ ID NO: 1367941 - RNA, 19 nt, Artificial Sequence
  Description of Artificial Sequence: Synthetic oligonucleotide
gccauacucuaggucuaau

SEQ ID NO: 1367942 - RNA, 19 nt, Artificial Sequence
  Description of Artificial Sequence: Synthetic oligonucleotide
gcagcgccggcuuccgauu

SEQ ID NO: 1367943 - RNA, 19 nt, Artificial Sequence
  Description of Artificial Sequence: Synthetic oligonucleotide
gcuugggaucuuccccauu

SEQ ID NO: 1367944 - RNA, 19 nt, Artificial Sequence
  Description of Artificial Sequence: Synthetic oligonucleotide
ccggggcaccaacgaaaca

SEQ ID NO: 1367945 - RNA, 19 nt, Artificial Sequence
  Description of Artificial Sequence: Synthetic oligonucleotide
cauucacgaugagcuuguu

SEQ ID NO: 1367946 - RNA, 19 nt, Artificial Sequence
  Description of Artificial Sequence: Synthetic oligonucleotide
gcaugccaacuggucgugu

SEQ ID NO: 1367947 - RNA, 19 nt, Artificial Sequence
  Description of Artificial Sequence: Synthetic oligonucleotide
ccaacuggucguguuccau

SEQ ID NO: 1367948 - RNA, 19 nt, Artificial Sequence
  Description of Artificial Sequence: Synthetic oligonucleotide
gcccgcuuuagaagcuuau

SEQ ID NO: 1367949 - RNA, 19 nt, Artificial Sequence
  Description of Artificial Sequence: Synthetic oligonucleotide
ccgauuccuuuuguaguau

SEQ ID NO: 1367950 - RNA, 19 nt, Artificial Sequence
  Description of Artificial Sequence: Synthetic oligonucleotide
cgguaggcuucucgugucu

SEQ ID NO: 1367951 - RNA, 19 nt, Artificial Sequence
  Description of Artificial Sequence: Synthetic oligonucleotide
gcggucccauuggguggaa

SEQ ID NO: 1367952 - RNA, 19 nt, Artificial Sequence
  Description of Artificial Sequence: Synthetic oligonucleotide
aaguauaucagcuaacagc

SEQ ID NO: 1367953 - RNA, 19 nt, Artificial Sequence
  Description of Artificial Sequence: Synthetic oligonucleotide
aauaaacuccugcaaaucc

SEQ ID NO: 1367954 - RNA, 19 nt, Artificial Sequence
  Description of Artificial Sequence: Synthetic oligonucleotide
aaaacgguaacauaaagca

SEQ ID NO: 1367955 - RNA, 19 nt, Artificial Sequence
  Description of Artificial Sequence: Synthetic oligonucleotide
aauacuaagagcuaggaaa

SEQ ID NO: 1367956 - RNA, 19 nt, Artificial Sequence
  Description of Artificial Sequence: Synthetic oligonucleotide
auuauugacaguuuagucg

SEQ ID NO: 1367957 - RNA, 19 nt, Artificial Sequence
  Description of Artificial Sequence: Synthetic oligonucleotide
aagugaauguuucucaccc

SEQ ID NO: 1367958 - RNA, 19 nt, Artificial Sequence
  Description of Artificial Sequence: Synthetic oligonucleotide
ucgauuuaacauuaaaacg

SEQ ID NO: 1367959 - RNA, 19 nt, Artificial Sequence
  Description of Artificial Sequence: Synthetic oligonucleotide
uucgauuuaacauuaaaac

SEQ ID NO: 1367960 - RNA, 19 nt, Artificial Sequence
  Description of Artificial Sequence: Synthetic oligonucleotide
auagcuauugcaccaaagc

SEQ ID NO: 1367961 - RNA, 19 nt, Artificial Sequence
  Description of Artificial Sequence: Synthetic oligonucleotide
aaagcuacgguauaagcug

SEQ ID NO: 1367962 - RNA, 19 nt, Artificial Sequence
  Description of Artificial Sequence: Synthetic oligonucleotide
uauagcuugaagaauaaac

SEQ ID NO: 1367963 - RNA, 19 nt, Artificial Sequence
  Description of Artificial Sequence: Synthetic oligonucleotide
aaguucacaaauugagagc

SEQ ID NO: 1367964 - RNA, 19 nt, Artificial Sequence
  Description of Artificial Sequence: Synthetic oligonucleotide
uaucuuaagauuccaauca

SEQ ID NO: 1367965 - RNA, 19 nt, Artificial Sequence
  Description of Artificial Sequence: Synthetic oligonucleotide
aguucacaaauugagagcc

SEQ ID NO: 1367966 - RNA, 19 nt, Artificial Sequence
  Description of Artificial Sequence: Synthetic oligonucleotide
uaauaauggacucugcucu

SEQ ID NO: 1367967 - RNA, 19 nt, Artificial Sequence
  Description of Artificial Sequence: Synthetic oligonucleotide
uguuuaagcuaccaucugg

SEQ ID NO: 1367968 - RNA, 19 nt, Artificial Sequence
  Description of Artificial Sequence: Synthetic oligonucleotide
aaguauaaaagcgacuuag

SEQ ID NO: 1367969 - RNA, 19 nt, Artificial Sequence
  Description of Artificial Sequence: Synthetic oligonucleotide
uuagcuaaaaguccaacac

SEQ ID NO: 1367970 - RNA, 19 nt, Artificial Sequence
  Description of Artificial Sequence: Synthetic oligonucleotide
uaaauggcacaaaauacag

SEQ ID NO: 1367971 - RNA, 19 nt, Artificial Sequence
  Description of Artificial Sequence: Synthetic oligonucleotide
  modified_base (2)..(2): a, c, u, g, unknown or other
gnuaaaagcagcuagauuu

SEQ ID NO: 1367972 - RNA, 19 nt, Artificial Sequence
  Description of Artificial Sequence: Synthetic oligonucleotide
aagaaaguauaaaagcgac

SEQ ID NO: 1367973 - RNA, 19 nt, Artificial Sequence
  Description of Artificial Sequence: Synthetic oligonucleotide
uugauauuguuuaagcuac

SEQ ID NO: 1367974 - RNA, 19 nt, Artificial Sequence
  Description of Artificial Sequence: Synthetic oligonucleotide
gauauauggaaaugcauac

SEQ ID NO: 1367975 - RNA, 19 nt, Artificial Sequence
  Description of Artificial Sequence: Synthetic oligonucleotide
acaaguaugaccccaccac

SEQ ID NO: 1367976 - RNA, 19 nt, Artificial Sequence
  Description of Artificial Sequence: Synthetic oligonucleotide
uauauggaaaugcauacaa

SEQ ID NO: 1367977 - RNA, 19 nt, Artificial Sequence
  Description of Artificial Sequence: Synthetic oligonucleotide
uauuguuuaagcuaccauc

SEQ ID NO: 1367978 - RNA, 19 nt, Artificial Sequence
  Description of Artificial Sequence: Synthetic oligonucleotide
aauacagcaauagcuauug

SEQ ID NO: 1367979 - RNA, 19 nt, Artificial Sequence
  Description of Artificial Sequence: Synthetic oligonucleotide
uauaaaagcgacuuagaaa

SEQ ID NO: 1367980 - RNA, 19 nt, Artificial Sequence
  Description of Artificial Sequence: Synthetic oligonucleotide
  modified_base (6)..(6): a, c, u, g, unknown or other
cuuugnuaaaagcagcuag

SEQ ID NO: 1367981 - RNA, 19 nt, Artificial Sequence
  Description of Artificial Sequence: Synthetic oligonucleotide
acuuuauaacuucugugac

SEQ ID NO: 1367982 - RNA, 19 nt, Artificial Sequence
  Description of Artificial Sequence: Synthetic oligonucleotide
  modified_base (5)..(5): a, c, u, g, unknown or other
uuugnuaaaagcagcuaga

SEQ ID NO: 1367983 - RNA, 19 nt, Artificial Sequence
  Description of Artificial Sequence: Synthetic oligonucleotide
uuguguaucuuaaagcuac

SEQ ID NO: 1367984 - RNA, 19 nt, Artificial Sequence
  Description of Artificial Sequence: Synthetic oligonucleotide
aacuuuuguagcuugugcu

SEQ ID NO: 1367985 - RNA, 19 nt, Artificial Sequence
  Description of Artificial Sequence: Synthetic oligonucleotide
aauagguucucuuauucau

SEQ ID NO: 1367986 - RNA, 19 nt, Artificial Sequence
  Description of Artificial Sequence: Synthetic oligonucleotide
aagcaguauagcuugaaga

SEQ ID NO: 1367987 - RNA, 19 nt, Artificial Sequence
  Description of Artificial Sequence: Synthetic oligonucleotide
ugaacgagagaacagugug

SEQ ID NO: 1367988 - RNA, 19 nt, Artificial Sequence
  Description of Artificial Sequence: Synthetic oligonucleotide
aaggcuaagcuuccccucc

SEQ ID NO: 1367989 - RNA, 19 nt, Artificial Sequence
  Description of Artificial Sequence: Synthetic oligonucleotide
gauccuuaaugccauacag

SEQ ID NO: 1367990 - RNA, 19 nt, Artificial Sequence
  Description of Artificial Sequence: Synthetic oligonucleotide
gacaguuuagucguuauag

SEQ ID NO: 1367991 - RNA, 19 nt, Artificial Sequence
  Description of Artificial Sequence: Synthetic oligonucleotide
uuccccguuaacauuauag

SEQ ID NO: 1367992 - RNA, 19 nt, Artificial Sequence
  Description of Artificial Sequence: Synthetic oligonucleotide
agugauggcacacuuaacu

SEQ ID NO: 1367993 - RNA, 19 nt, Artificial Sequence
  Description of Artificial Sequence: Synthetic oligonucleotide
aaauccagagcacaauaca

SEQ ID NO: 1367994 - RNA, 19 nt, Artificial Sequence
  Description of Artificial Sequence: Synthetic oligonucleotide
aaacccauguaauuugcug

SEQ ID NO: 1367995 - RNA, 19 nt, Artificial Sequence
  Description of Artificial Sequence: Synthetic oligonucleotide
acuaagagcuaggaaagcc

SEQ ID NO: 1367996 - RNA, 19 nt, Artificial Sequence
  Description of Artificial Sequence: Synthetic oligonucleotide
uuauaggaguaucuuaaga

SEQ ID NO: 1367997 - RNA, 19 nt, Artificial Sequence
  Description of Artificial Sequence: Synthetic oligonucleotide
uguaucuuaaagcuacggu

SEQ ID NO: 1367998 - RNA, 19 nt, Artificial Sequence
  Description of Artificial Sequence: Synthetic oligonucleotide
aguauaucagcuaacagca

SEQ ID NO: 1367999 - RNA, 19 nt, Artificial Sequence
  Description of Artificial Sequence: Synthetic oligonucleotide
uuaaaucuacccaaacuuc

SEQ ID NO: 1368000 - RNA, 19 nt, Artificial Sequence
  Description of Artificial Sequence: Synthetic oligonucleotide
agaugccuuaaaucuaccc

SEQ ID NO: 1368001 - RNA, 19 nt, Artificial Sequence
  Description of Artificial Sequence: Synthetic oligonucleotide
caguugauagguaaccugg

SEQ ID NO: 1368002 - RNA, 19 nt, Artificial Sequence
  Description of Artificial Sequence: Synthetic oligonucleotide
aacccauguaauuugcuga

SEQ ID NO: 1368003 - RNA, 19 nt, Artificial Sequence
  Description of Artificial Sequence: Synthetic oligonucleotide
uagagauauauggaaaugc

SEQ ID NO: 1368004 - RNA, 19 nt, Artificial Sequence
  Description of Artificial Sequence: Synthetic oligonucleotide
aacagcauacaccagugau

SEQ ID NO: 1368005 - RNA, 19 nt, Artificial Sequence
  Description of Artificial Sequence: Synthetic oligonucleotide
  modified_base (9)..(9): a, c, u, g, unknown or other
ucacuuugnuaaaagcagc

SEQ ID NO: 1368006 - RNA, 19 nt, Artificial Sequence
  Description of Artificial Sequence: Synthetic oligonucleotide
ugaguguucgauuuaacau

SEQ ID NO: 1368007 - RNA, 19 nt, Artificial Sequence
  Description of Artificial Sequence: Synthetic oligonucleotide
aagaacaauggcugcagcu

SEQ ID NO: 1368008 - RNA, 19 nt, Artificial Sequence
  Description of Artificial Sequence: Synthetic oligonucleotide
aaaguacuauccaugaacu

SEQ ID NO: 1368009 - RNA, 19 nt, Artificial Sequence
  Description of Artificial Sequence: Synthetic oligonucleotide
auuccaaucacacaccaau

SEQ ID NO: 1368010 - RNA, 19 nt, Artificial Sequence
  Description of Artificial Sequence: Synthetic oligonucleotide
aaucuacccaaacuuccag

SEQ ID NO: 1368011 - RNA, 19 nt, Artificial Sequence
  Description of Artificial Sequence: Synthetic oligonucleotide
ucugggguugacuuaaggc

SEQ ID NO: 1368012 - RNA, 19 nt, Artificial Sequence
  Description of Artificial Sequence: Synthetic oligonucleotide
uauuauugacaguuuaguc

SEQ ID NO: 1368013 - RNA, 19 nt, Artificial Sequence
  Description of Artificial Sequence: Synthetic oligonucleotide
gaacuggacaacaaggaag

SEQ ID NO: 1368014 - RNA, 19 nt, Artificial Sequence
  Description of Artificial Sequence: Synthetic oligonucleotide
cuaauaauggacucugcuc

SEQ ID NO: 1368015 - RNA, 19 nt, Artificial Sequence
  Description of Artificial Sequence: Synthetic oligonucleotide
uacuacagggacaaaguac

SEQ ID NO: 1368016 - RNA, 19 nt, Artificial Sequence
  Description of Artificial Sequence: Synthetic oligonucleotide
acauuauagaaauauuuua

SEQ ID NO: 1368017 - RNA, 19 nt, Artificial Sequence
  Description of Artificial Sequence: Synthetic oligonucleotide
uagguaaccugguauacug

SEQ ID NO: 1368018 - RNA, 19 nt, Artificial Sequence
  Description of Artificial Sequence: Synthetic oligonucleotide
gaugccuuaaaucuaccca

SEQ ID NO: 1368019 - RNA, 19 nt, Artificial Sequence
  Description of Artificial Sequence: Synthetic oligonucleotide
uugauagguaaccugguau

SEQ ID NO: 1368020 - RNA, 19 nt, Artificial Sequence
  Description of Artificial Sequence: Synthetic oligonucleotide
guuuaagcuaccaucuggg

SEQ ID NO: 1368021 - RNA, 19 nt, Artificial Sequence
  Description of Artificial Sequence: Synthetic oligonucleotide
uccaacacuuaucaguaac

SEQ ID NO: 1368022 - RNA, 19 nt, Artificial Sequence
  Description of Artificial Sequence: Synthetic oligonucleotide
auaaacugacauuuucucu

SEQ ID NO: 1368023 - RNA, 19 nt, Artificial Sequence
  Description of Artificial Sequence: Synthetic oligonucleotide
uuucucaccccaaagggaa

SEQ ID NO: 1368024 - RNA, 19 nt, Artificial Sequence
  Description of Artificial Sequence: Synthetic oligonucleotide
cauguuauucugaacagca

SEQ ID NO: 1368025 - RNA, 19 nt, Artificial Sequence
  Description of Artificial Sequence: Synthetic oligonucleotide
auagcuugaagaauaaacu

SEQ ID NO: 1368026 - RNA, 19 nt, Artificial Sequence
  Description of Artificial Sequence: Synthetic oligonucleotide
uuccauuguacaaguauga

SEQ ID NO: 1368027 - RNA, 19 nt, Artificial Sequence
  Description of Artificial Sequence: Synthetic oligonucleotide
uaacccauagagauauaug

SEQ ID NO: 1368028 - RNA, 19 nt, Artificial Sequence
  Description of Artificial Sequence: Synthetic oligonucleotide
agugaauguuucucacccc

SEQ ID NO: 1368029 - RNA, 19 nt, Artificial Sequence
  Description of Artificial Sequence: Synthetic oligonucleotide
agcaaugguagaaagaaca

SEQ ID NO: 1368030 - RNA, 19 nt, Artificial Sequence
  Description of Artificial Sequence: Synthetic oligonucleotide
aacugacauuuucucucgc

SEQ ID NO: 1368031 - RNA, 19 nt, Artificial Sequence
  Description of Artificial Sequence: Synthetic oligonucleotide
aguacagggaaucuucagu

SEQ ID NO: 1368032 - RNA, 19 nt, Artificial Sequence
  Description of Artificial Sequence: Synthetic oligonucleotide
guaucuuaagauuccaauc

SEQ ID NO: 1368033 - RNA, 19 nt, Artificial Sequence
  Description of Artificial Sequence: Synthetic oligonucleotide
aguuuagucguuauaggag

SEQ ID NO: 1368034 - RNA, 19 nt, Artificial Sequence
  Description of Artificial Sequence: Synthetic oligonucleotide
uuucacuuaaagaugccuu

SEQ ID NO: 1368035 - RNA, 19 nt, Artificial Sequence
  Description of Artificial Sequence: Synthetic oligonucleotide
gacgcgccggccuagauag

SEQ ID NO: 1368036 - RNA, 19 nt, Artificial Sequence
  Description of Artificial Sequence: Synthetic oligonucleotide
acugccaagcaguauagcu

SEQ ID NO: 1368037 - RNA, 19 nt, Artificial Sequence
  Description of Artificial Sequence: Synthetic oligonucleotide
aacaaggaaggcuaagcuu

SEQ ID NO: 1368038 - RNA, 19 nt, Artificial Sequence
  Description of Artificial Sequence: Synthetic oligonucleotide
uugaauauuguaguuucac

SEQ ID NO: 1368039 - RNA, 19 nt, Artificial Sequence
  Description of Artificial Sequence: Synthetic oligonucleotide
uuacccagacagaagucag

SEQ ID NO: 1368040 - RNA, 19 nt, Artificial Sequence
  Description of Artificial Sequence: Synthetic oligonucleotide
uguguaucuuaaagcuacg

SEQ ID NO: 1368041 - RNA, 19 nt, Artificial Sequence
  Description of Artificial Sequence: Synthetic oligonucleotide
ucuuaaaccuugauugaau

SEQ ID NO: 1368042 - RNA, 19 nt, Artificial Sequence
  Description of Artificial Sequence: Synthetic oligonucleotide
guaucuuaaagcuacggua

SEQ ID NO: 1368043 - RNA, 19 nt, Artificial Sequence
  Description of Artificial Sequence: Synthetic oligonucleotide
ugaacuggacaacaaggaa

SEQ ID NO: 1368044 - RNA, 19 nt, Artificial Sequence
  Description of Artificial Sequence: Synthetic oligonucleotide
auaagcugcagccaccaga

SEQ ID NO: 1368045 - RNA, 19 nt, Artificial Sequence
  Description of Artificial Sequence: Synthetic oligonucleotide
auacuaagagcuaggaaag

SEQ ID NO: 1368046 - RNA, 19 nt, Artificial Sequence
  Description of Artificial Sequence: Synthetic oligonucleotide
uuaaggcucuaauuuauua

SEQ ID NO: 1368047 - RNA, 19 nt, Artificial Sequence
  Description of Artificial Sequence: Synthetic oligonucleotide
uaaagaugccuuaaaucua

SEQ ID NO: 1368048 - RNA, 19 nt, Artificial Sequence
  Description of Artificial Sequence: Synthetic oligonucleotide
guuauaggaguaucuuaag

SEQ ID NO: 1368049 - RNA, 19 nt, Artificial Sequence
  Description of Artificial Sequence: Synthetic oligonucleotide
uguacaaguaugaccccac

SEQ ID NO: 1368050 - RNA, 19 nt, Artificial Sequence
  Description of Artificial Sequence: Synthetic oligonucleotide
auaggaguaucuuaagauu

SEQ ID NO: 1368051 - RNA, 19 nt, Artificial Sequence
  Description of Artificial Sequence: Synthetic oligonucleotide
ugauccuuaaugccauaca

SEQ ID NO: 1368052 - RNA, 19 nt, Artificial Sequence
  Description of Artificial Sequence: Synthetic oligonucleotide
caaaggaaaguguuaucug

SEQ ID NO: 1368053 - RNA, 19 nt, Artificial Sequence
  Description of Artificial Sequence: Synthetic oligonucleotide
auccagagcacaauacagc

SEQ ID NO: 1368054 - RNA, 19 nt, Artificial Sequence
  Description of Artificial Sequence: Synthetic oligonucleotide
agcgacuuagaaaauuuuc

SEQ ID NO: 1368055 - RNA, 19 nt, Artificial Sequence
  Description of Artificial Sequence: Synthetic oligonucleotide
aagcuacgguauaagcugc

SEQ ID NO: 1368056 - RNA, 19 nt, Artificial Sequence
  Description of Artificial Sequence: Synthetic oligonucleotide
uugacuuaaggcucuaauu

SEQ ID NO: 1368057 - RNA, 19 nt, Artificial Sequence
  Description of Artificial Sequence: Synthetic oligonucleotide
ugauagguaaccugguaua

SEQ ID NO: 1368058 - RNA, 19 nt, Artificial Sequence
  Description of Artificial Sequence: Synthetic oligonucleotide
acagggaaucuucaguuga

SEQ ID NO: 1368059 - RNA, 19 nt, Artificial Sequence
  Description of Artificial Sequence: Synthetic oligonucleotide
cuucaguugauagguaacc

SEQ ID NO: 1368060 - RNA, 19 nt, Artificial Sequence
  Description of Artificial Sequence: Synthetic oligonucleotide
  modified_base (4)..(4): a, c, u, g, unknown or other
uugnuaaaagcagcuagau

SEQ ID NO: 1368061 - RNA, 19 nt, Artificial Sequence
  Description of Artificial Sequence: Synthetic oligonucleotide
uccccguuaacauuauaga

SEQ ID NO: 1368062 - RNA, 19 nt, Artificial Sequence
  Description of Artificial Sequence: Synthetic oligonucleotide
cuugauugaauauuguagu

SEQ ID NO: 1368063 - RNA, 19 nt, Artificial Sequence
  Description of Artificial Sequence: Synthetic oligonucleotide
cucgccugagccauggugc

SEQ ID NO: 1368064 - RNA, 19 nt, Artificial Sequence
  Description of Artificial Sequence: Synthetic oligonucleotide
  modified_base (3)..(3): a, c, u, g, unknown or other
ugnuaaaagcagcuagauu

SEQ ID NO: 1368065 - RNA, 19 nt, Artificial Sequence
  Description of Artificial Sequence: Synthetic oligonucleotide
ugauauuguuuaagcuacc

SEQ ID NO: 1368066 - RNA, 19 nt, Artificial Sequence
  Description of Artificial Sequence: Synthetic oligonucleotide
ugguugaaaaguagaguuc

SEQ ID NO: 1368067 - RNA, 19 nt, Artificial Sequence
  Description of Artificial Sequence: Synthetic oligonucleotide
ucucuuauucauucuucac

SEQ ID NO: 1368068 - RNA, 19 nt, Artificial Sequence
  Description of Artificial Sequence: Synthetic oligonucleotide
acccauguaauuugcugag

SEQ ID NO: 1368069 - RNA, 19 nt, Artificial Sequence
  Description of Artificial Sequence: Synthetic oligonucleotide
augccuuaaaucuacccaa

SEQ ID NO: 1368070 - RNA, 19 nt, Artificial Sequence
  Description of Artificial Sequence: Synthetic oligonucleotide
agagauagccugcggaacu

SEQ ID NO: 1368071 - RNA, 19 nt, Artificial Sequence
  Description of Artificial Sequence: Synthetic oligonucleotide
gguauacugcuccaaauac

SEQ ID NO: 1368072 - RNA, 19 nt, Artificial Sequence
  Description of Artificial Sequence: Synthetic oligonucleotide
auauuguuuaagcuaccau

SEQ ID NO: 1368073 - RNA, 19 nt, Artificial Sequence
  Description of Artificial Sequence: Synthetic oligonucleotide
ugauugaauauuguaguuu

SEQ ID NO: 1368074 - RNA, 19 nt, Artificial Sequence
  Description of Artificial Sequence: Synthetic oligonucleotide
gauauuguuuaagcuacca

SEQ ID NO: 1368075 - RNA, 19 nt, Artificial Sequence
  Description of Artificial Sequence: Synthetic oligonucleotide
aaagcgacuuagaaaauuu

SEQ ID NO: 1368076 - RNA, 19 nt, Artificial Sequence
  Description of Artificial Sequence: Synthetic oligonucleotide
cuuaaaucuacccaaacuu

SEQ ID NO: 1368077 - RNA, 19 nt, Artificial Sequence
  Description of Artificial Sequence: Synthetic oligonucleotide
uaccugaacgagagaacag

SEQ ID NO: 1368078 - RNA, 19 nt, Artificial Sequence
  Description of Artificial Sequence: Synthetic oligonucleotide
gaaaaguauaucagcuaac

SEQ ID NO: 1368079 - RNA, 19 nt, Artificial Sequence
  Description of Artificial Sequence: Synthetic oligonucleotide
auacagcaauagcuauugc

SEQ ID NO: 1368080 - RNA, 19 nt, Artificial Sequence
  Description of Artificial Sequence: Synthetic oligonucleotide
uugauugaauauuguaguu

SEQ ID NO: 1368081 - RNA, 19 nt, Artificial Sequence
  Description of Artificial Sequence: Synthetic oligonucleotide
aauaauggacucugcucua

SEQ ID NO: 1368082 - RNA, 19 nt, Artificial Sequence
  Description of Artificial Sequence: Synthetic oligonucleotide
aguuucaccugauguucuc

SEQ ID NO: 1368083 - RNA, 19 nt, Artificial Sequence
  Description of Artificial Sequence: Synthetic oligonucleotide
ucuacccaaacuuccaguu

SEQ ID NO: 1368084 - RNA, 19 nt, Artificial Sequence
  Description of Artificial Sequence: Synthetic oligonucleotide
ugguaccugaacgagagaa

SEQ ID NO: 1368085 - RNA, 19 nt, Artificial Sequence
  Description of Artificial Sequence: Synthetic oligonucleotide
aagaugccuuaaaucuacc

SEQ ID NO: 1368086 - RNA, 19 nt, Artificial Sequence
  Description of Artificial Sequence: Synthetic oligonucleotide
guaugaccccaccacacag

SEQ ID NO: 1368087 - RNA, 19 nt, Artificial Sequence
  Description of Artificial Sequence: Synthetic oligonucleotide
ugggguugacuuaaggcuc

SEQ ID NO: 1368088 - RNA, 19 nt, Artificial Sequence
  Description of Artificial Sequence: Synthetic oligonucleotide
caagcaguauagcuugaag

SEQ ID NO: 1368089 - RNA, 19 nt, Artificial Sequence
  Description of Artificial Sequence: Synthetic oligonucleotide
acuugaaccuucagauacc

SEQ ID NO: 1368090 - RNA, 19 nt, Artificial Sequence
  Description of Artificial Sequence: Synthetic oligonucleotide
ucucgccugagccauggug

SEQ ID NO: 1368091 - RNA, 19 nt, Artificial Sequence
  Description of Artificial Sequence: Synthetic oligonucleotide
caguuuagucguuauagga

SEQ ID NO: 1368092 - RNA, 19 nt, Artificial Sequence
  Description of Artificial Sequence: Synthetic oligonucleotide
acuauccaugaacuggaca

SEQ ID NO: 1368093 - RNA, 19 nt, Artificial Sequence
  Description of Artificial Sequence: Synthetic oligonucleotide
cuaccacaacuuuuguagc

SEQ ID NO: 1368094 - RNA, 19 nt, Artificial Sequence
  Description of Artificial Sequence: Synthetic oligonucleotide
gauagguaaccugguauac

SEQ ID NO: 1368095 - RNA, 19 nt, Artificial Sequence
  Description of Artificial Sequence: Synthetic oligonucleotide
uggacagaaauggcuuugg

SEQ ID NO: 1368096 - RNA, 19 nt, Artificial Sequence
  Description of Artificial Sequence: Synthetic oligonucleotide
ucuuaaagcuacgguauaa

SEQ ID NO: 1368097 - RNA, 19 nt, Artificial Sequence
  Description of Artificial Sequence: Synthetic oligonucleotide
uuuagucguuauaggagua

SEQ ID NO: 1368098 - RNA, 19 nt, Artificial Sequence
  Description of Artificial Sequence: Synthetic oligonucleotide
agggacaaaguacuaucca

SEQ ID NO: 1368099 - RNA, 19 nt, Artificial Sequence
  Description of Artificial Sequence: Synthetic oligonucleotide
guguaucuuaaagcuacgg

SEQ ID NO: 1368100 - RNA, 19 nt, Artificial Sequence
  Description of Artificial Sequence: Synthetic oligonucleotide
cuacgguauaagcugcagc

SEQ ID NO: 1368101 - RNA, 19 nt, Artificial Sequence
  Description of Artificial Sequence: Synthetic oligonucleotide
uuguacaaguaugacccca

SEQ ID NO: 1368102 - RNA, 19 nt, Artificial Sequence
  Description of Artificial Sequence: Synthetic oligonucleotide
agccugcggaacuaccgcc

SEQ ID NO: 1368103 - RNA, 19 nt, Artificial Sequence
  Description of Artificial Sequence: Synthetic oligonucleotide
gugaauguuucucacccca

SEQ ID NO: 1368104 - RNA, 19 nt, Artificial Sequence
  Description of Artificial Sequence: Synthetic oligonucleotide
cugaguguucgauuuaaca

SEQ ID NO: 1368105 - RNA, 19 nt, Artificial Sequence
  Description of Artificial Sequence: Synthetic oligonucleotide
aucugggguugacuuaagg

SEQ ID NO: 1368106 - RNA, 19 nt, Artificial Sequence
  Description of Artificial Sequence: Synthetic oligonucleotide
ggaacuaccgccccugcag

SEQ ID NO: 1368107 - RNA, 19 nt, Artificial Sequence
  Description of Artificial Sequence: Synthetic oligonucleotide
aauuugcugaguguucgau

SEQ ID NO: 1368108 - RNA, 19 nt, Artificial Sequence
  Description of Artificial Sequence: Synthetic oligonucleotide
uugccuggguaacccauag

SEQ ID NO: 1368109 - RNA, 19 nt, Artificial Sequence
  Description of Artificial Sequence: Synthetic oligonucleotide
ucguuauaggaguaucuua

SEQ ID NO: 1368110 - RNA, 19 nt, Artificial Sequence
  Description of Artificial Sequence: Synthetic oligonucleotide
uucaguugauagguaaccu

SEQ ID NO: 1368111 - RNA, 19 nt, Artificial Sequence
  Description of Artificial Sequence: Synthetic oligonucleotide
auauauggaaaugcauaca

SEQ ID NO: 1368112 - RNA, 19 nt, Artificial Sequence
  Description of Artificial Sequence: Synthetic oligonucleotide
auagccugcggaacuaccg

SEQ ID NO: 1368113 - RNA, 19 nt, Artificial Sequence
  Description of Artificial Sequence: Synthetic oligonucleotide
acggcugugguugaaaagu

SEQ ID NO: 1368114 - RNA, 19 nt, Artificial Sequence
  Description of Artificial Sequence: Synthetic oligonucleotide
caugaaauagguucucuua

SEQ ID NO: 1368115 - RNA, 19 nt, Artificial Sequence
  Description of Artificial Sequence: Synthetic oligonucleotide
gacuuaaggcucuaauuua

SEQ ID NO: 1368116 - RNA, 19 nt, Artificial Sequence
  Description of Artificial Sequence: Synthetic oligonucleotide
aguaugaccccaccacaca

SEQ ID NO: 1368117 - RNA, 19 nt, Artificial Sequence
  Description of Artificial Sequence: Synthetic oligonucleotide
uauuguaguuucaccugau

SEQ ID NO: 1368118 - RNA, 19 nt, Artificial Sequence
  Description of Artificial Sequence: Synthetic oligonucleotide
caguauagcuugaagaaua

SEQ ID NO: 1368119 - RNA, 19 nt, Artificial Sequence
  Description of Artificial Sequence: Synthetic oligonucleotide
agguaaccauacuuuauaa

SEQ ID NO: 1368120 - RNA, 19 nt, Artificial Sequence
  Description of Artificial Sequence: Synthetic oligonucleotide
cuagauagcccgccgcccc

SEQ ID NO: 1368121 - RNA, 19 nt, Artificial Sequence
  Description of Artificial Sequence: Synthetic oligonucleotide
cagguagugucuugccugg

SEQ ID NO: 1368122 - RNA, 19 nt, Artificial Sequence
  Description of Artificial Sequence: Synthetic oligonucleotide
augcauacaagaagagcuc

SEQ ID NO: 1368123 - RNA, 19 nt, Artificial Sequence
  Description of Artificial Sequence: Synthetic oligonucleotide
aguauaaaagcgacuuaga

SEQ ID NO: 1368124 - RNA, 19 nt, Artificial Sequence
  Description of Artificial Sequence: Synthetic oligonucleotide
ugaauguuucucaccccaa

SEQ ID NO: 1368125 - RNA, 19 nt, Artificial Sequence
  Description of Artificial Sequence: Synthetic oligonucleotide
aucuacccaaacuuccagu

SEQ ID NO: 1368126 - RNA, 19 nt, Artificial Sequence
  Description of Artificial Sequence: Synthetic oligonucleotide
uauaagcugcagccaccag

SEQ ID NO: 1368127 - RNA, 19 nt, Artificial Sequence
  Description of Artificial Sequence: Synthetic oligonucleotide
ugucuugccuggguaaccc

SEQ ID NO: 1368128 - RNA, 19 nt, Artificial Sequence
  Description of Artificial Sequence: Synthetic oligonucleotide
cacuuaacuucaucaguuc

SEQ ID NO: 1368129 - RNA, 19 nt, Artificial Sequence
  Description of Artificial Sequence: Synthetic oligonucleotide
gaaggcuaagcuuccccuc

SEQ ID NO: 1368130 - RNA, 19 nt, Artificial Sequence
  Description of Artificial Sequence: Synthetic oligonucleotide
ucacuuaaagaugccuuaa

SEQ ID NO: 1368131 - RNA, 19 nt, Artificial Sequence
  Description of Artificial Sequence: Synthetic oligonucleotide
agguaaccugguauacugc

SEQ ID NO: 1368132 - RNA, 19 nt, Artificial Sequence
  Description of Artificial Sequence: Synthetic oligonucleotide
guaccugaacgagagaaca

SEQ ID NO: 1368133 - RNA, 19 nt, Artificial Sequence
  Description of Artificial Sequence: Synthetic oligonucleotide
ugcuggauuuccccguuaa

SEQ ID NO: 1368134 - RNA, 19 nt, Artificial Sequence
  Description of Artificial Sequence: Synthetic oligonucleotide
uacuaagagcuaggaaagc

SEQ ID NO: 1368135 - RNA, 19 nt, Artificial Sequence
  Description of Artificial Sequence: Synthetic oligonucleotide
acacuuaacuucaucaguu

SEQ ID NO: 1368136 - RNA, 19 nt, Artificial Sequence
  Description of Artificial Sequence: Synthetic oligonucleotide
ugccuuaaaucuacccaaa

SEQ ID NO: 1368137 - RNA, 19 nt, Artificial Sequence
  Description of Artificial Sequence: Synthetic oligonucleotide
gaacuaccgccccugcagc

SEQ ID NO: 1368138 - RNA, 19 nt, Artificial Sequence
  Description of Artificial Sequence: Synthetic oligonucleotide
agcauacaccagugauggc

SEQ ID NO: 1368139 - RNA, 19 nt, Artificial Sequence
  Description of Artificial Sequence: Synthetic oligonucleotide
caaagccuaauaauggacu

SEQ ID NO: 1368140 - RNA, 19 nt, Artificial Sequence
  Description of Artificial Sequence: Synthetic oligonucleotide
cucuuauucauucuucacu

SEQ ID NO: 1368141 - RNA, 19 nt, Artificial Sequence
  Description of Artificial Sequence: Synthetic oligonucleotide
acgagagaacaguguggac

SEQ ID NO: 1368142 - RNA, 19 nt, Artificial Sequence
  Description of Artificial Sequence: Synthetic oligonucleotide
uuaaugccauacaguaauu

SEQ ID NO: 1368143 - RNA, 19 nt, Artificial Sequence
  Description of Artificial Sequence: Synthetic oligonucleotide
caguacagggaaucuucag

SEQ ID NO: 1368144 - RNA, 19 nt, Artificial Sequence
  Description of Artificial Sequence: Synthetic oligonucleotide
ugacaguuuagucguuaua

SEQ ID NO: 1368145 - RNA, 19 nt, Artificial Sequence
  Description of Artificial Sequence: Synthetic oligonucleotide
gaguguucgauuuaacauu

SEQ ID NO: 1368146 - RNA, 19 nt, Artificial Sequence
  Description of Artificial Sequence: Synthetic oligonucleotide
uaaugccauacaguaauuu

SEQ ID NO: 1368147 - RNA, 19 nt, Artificial Sequence
  Description of Artificial Sequence: Synthetic oligonucleotide
  modified_base (7)..(7): a, c, u, g, unknown or other
acuuugnuaaaagcagcua

SEQ ID NO: 1368148 - RNA, 19 nt, Artificial Sequence
  Description of Artificial Sequence: Synthetic oligonucleotide
accugaacgagagaacagu

SEQ ID NO: 1368149 - RNA, 19 nt, Artificial Sequence
  Description of Artificial Sequence: Synthetic oligonucleotide
auagguaaccugguauacu

SEQ ID NO: 1368150 - RNA, 19 nt, Artificial Sequence
  Description of Artificial Sequence: Synthetic oligonucleotide
uauugcaccaaagccuaau

SEQ ID NO: 1368151 - RNA, 19 nt, Artificial Sequence
  Description of Artificial Sequence: Synthetic oligonucleotide
uuagucguuauaggaguau

SEQ ID NO: 1368152 - RNA, 19 nt, Artificial Sequence
  Description of Artificial Sequence: Synthetic oligonucleotide
uucuuguugaaugcaggua

SEQ ID NO: 1368153 - RNA, 19 nt, Artificial Sequence
  Description of Artificial Sequence: Synthetic oligonucleotide
acugaagcaaugguagaaa

SEQ ID NO: 1368154 - RNA, 19 nt, Artificial Sequence
  Description of Artificial Sequence: Synthetic oligonucleotide
ccaaagccuaauaauggac

SEQ ID NO: 1368155 - RNA, 19 nt, Artificial Sequence
  Description of Artificial Sequence: Synthetic oligonucleotide
uccugcaaauccagagcac

SEQ ID NO: 1368156 - RNA, 19 nt, Artificial Sequence
  Description of Artificial Sequence: Synthetic oligonucleotide
agucguuauaggaguaucu

SEQ ID NO: 1368157 - RNA, 19 nt, Artificial Sequence
  Description of Artificial Sequence: Synthetic oligonucleotide
caaguaugaccccaccaca

SEQ ID NO: 1368158 - RNA, 19 nt, Artificial Sequence
  Description of Artificial Sequence: Synthetic oligonucleotide
aguguucgauuuaacauua

SEQ ID NO: 1368159 - RNA, 19 nt, Artificial Sequence
  Description of Artificial Sequence: Synthetic oligonucleotide
uagucguuauaggaguauc

SEQ ID NO: 1368160 - RNA, 19 nt, Artificial Sequence
  Description of Artificial Sequence: Synthetic oligonucleotide
cuuguguaucuuaaagcua

SEQ ID NO: 1368161 - RNA, 19 nt, Artificial Sequence
  Description of Artificial Sequence: Synthetic oligonucleotide
cagccauagagacgcgccg

SEQ ID NO: 1368162 - RNA, 19 nt, Artificial Sequence
  Description of Artificial Sequence: Synthetic oligonucleotide
ugcugaguguucgauuuaa

SEQ ID NO: 1368163 - RNA, 19 nt, Artificial Sequence
  Description of Artificial Sequence: Synthetic oligonucleotide
uggguaacccauagagaua

SEQ ID NO: 1368164 - RNA, 19 nt, Artificial Sequence
  Description of Artificial Sequence: Synthetic oligonucleotide
ggcacuugaaccuucagau

SEQ ID NO: 1368165 - RNA, 19 nt, Artificial Sequence
  Description of Artificial Sequence: Synthetic oligonucleotide
gagagcccaacagguaacc

SEQ ID NO: 1368166 - RNA, 19 nt, Artificial Sequence
  Description of Artificial Sequence: Synthetic oligonucleotide
agguucucuuauucauucu

SEQ ID NO: 1368167 - RNA, 19 nt, Artificial Sequence
  Description of Artificial Sequence: Synthetic oligonucleotide
gaacagcauacaccaguga

SEQ ID NO: 1368168 - RNA, 19 nt, Artificial Sequence
  Description of Artificial Sequence: Synthetic oligonucleotide
aguauagcuugaagaauaa

SEQ ID NO: 1368169 - RNA, 19 nt, Artificial Sequence
  Description of Artificial Sequence: Synthetic oligonucleotide
cgacuuagaaaauuuucug

SEQ ID NO: 1368170 - RNA, 19 nt, Artificial Sequence
  Description of Artificial Sequence: Synthetic oligonucleotide
guugauagguaaccuggua

SEQ ID NO: 1368171 - RNA, 19 nt, Artificial Sequence
  Description of Artificial Sequence: Synthetic oligonucleotide
guugacuuaaggcucuaau

SEQ ID NO: 1368172 - RNA, 19 nt, Artificial Sequence
  Description of Artificial Sequence: Synthetic oligonucleotide
guauaagcugcagccacca

SEQ ID NO: 1368173 - RNA, 19 nt, Artificial Sequence
  Description of Artificial Sequence: Synthetic oligonucleotide
  modified_base (8)..(8): a, c, u, g, unknown or other
cacuuugnuaaaagcagcu

SEQ ID NO: 1368174 - RNA, 19 nt, Artificial Sequence
  Description of Artificial Sequence: Synthetic oligonucleotide
uugaaccuucagauaccaa

SEQ ID NO: 1368175 - RNA, 19 nt, Artificial Sequence
  Description of Artificial Sequence: Synthetic oligonucleotide
aguugauagguaaccuggu

SEQ ID NO: 1368176 - RNA, 19 nt, Artificial Sequence
  Description of Artificial Sequence: Synthetic oligonucleotide
uagauagcccgccgcccca

SEQ ID NO: 1368177 - RNA, 19 nt, Artificial Sequence
  Description of Artificial Sequence: Synthetic oligonucleotide
ugcggaacuaccgccccug

SEQ ID NO: 1368178 - RNA, 19 nt, Artificial Sequence
  Description of Artificial Sequence: Synthetic oligonucleotide
aagcaguacagggaaucuu

SEQ ID NO: 1368179 - RNA, 19 nt, Artificial Sequence
  Description of Artificial Sequence: Synthetic oligonucleotide
auaccaaaucuuaaaccuu

SEQ ID NO: 1368180 - RNA, 19 nt, Artificial Sequence
  Description of Artificial Sequence: Synthetic oligonucleotide
cccguuaacauuauagaaa

SEQ ID NO: 1368181 - RNA, 19 nt, Artificial Sequence
  Description of Artificial Sequence: Synthetic oligonucleotide
ccuuguguaucuuaaagcu

SEQ ID NO: 1368182 - RNA, 19 nt, Artificial Sequence
  Description of Artificial Sequence: Synthetic oligonucleotide
cuucuuguugaaugcaggu

SEQ ID NO: 1368183 - RNA, 19 nt, Artificial Sequence
  Description of Artificial Sequence: Synthetic oligonucleotide
aagcgacuuagaaaauuuu

SEQ ID NO: 1368184 - RNA, 19 nt, Artificial Sequence
  Description of Artificial Sequence: Synthetic oligonucleotide
auuuaacauuaaaacggua

SEQ ID NO: 1368185 - RNA, 19 nt, Artificial Sequence
  Description of Artificial Sequence: Synthetic oligonucleotide
ccugaacgagagaacagug

SEQ ID NO: 1368186 - RNA, 19 nt, Artificial Sequence
  Description of Artificial Sequence: Synthetic oligonucleotide
cagagauagccugcggaac

SEQ ID NO: 1368187 - RNA, 19 nt, Artificial Sequence
  Description of Artificial Sequence: Synthetic oligonucleotide
guaauccaaacagcaucac

SEQ ID NO: 1368188 - RNA, 19 nt, Artificial Sequence
  Description of Artificial Sequence: Synthetic oligonucleotide
cagugucugagccaugaaa

SEQ ID NO: 1368189 - RNA, 19 nt, Artificial Sequence
  Description of Artificial Sequence: Synthetic oligonucleotide
cuccugguaccugaacgag

SEQ ID NO: 1368190 - RNA, 19 nt, Artificial Sequence
  Description of Artificial Sequence: Synthetic oligonucleotide
cguuauaggaguaucuuaa

SEQ ID NO: 1368191 - RNA, 19 nt, Artificial Sequence
  Description of Artificial Sequence: Synthetic oligonucleotide
auagagacgcgccggccua

SEQ ID NO: 1368192 - RNA, 19 nt, Artificial Sequence
  Description of Artificial Sequence: Synthetic oligonucleotide
uucaccugauguucucauu

SEQ ID NO: 1368193 - RNA, 19 nt, Artificial Sequence
  Description of Artificial Sequence: Synthetic oligonucleotide
cacuuaaagaugccuuaaa

SEQ ID NO: 1368194 - RNA, 19 nt, Artificial Sequence
  Description of Artificial Sequence: Synthetic oligonucleotide
auagguucucuuauucauu

SEQ ID NO: 1368195 - RNA, 19 nt, Artificial Sequence
  Description of Artificial Sequence: Synthetic oligonucleotide
gguaaccugguauacugcu

SEQ ID NO: 1368196 - RNA, 19 nt, Artificial Sequence
  Description of Artificial Sequence: Synthetic oligonucleotide
cugaacgagagaacagugu

SEQ ID NO: 1368197 - RNA, 19 nt, Artificial Sequence
  Description of Artificial Sequence: Synthetic oligonucleotide
cagugauggcacacuuaac

SEQ ID NO: 1368198 - RNA, 19 nt, Artificial Sequence
  Description of Artificial Sequence: Synthetic oligonucleotide
gagcccaacagguaaccau

SEQ ID NO: 1368199 - RNA, 19 nt, Artificial Sequence
  Description of Artificial Sequence: Synthetic oligonucleotide
ccauagagauauauggaaa

SEQ ID NO: 1368200 - RNA, 19 nt, Artificial Sequence
  Description of Artificial Sequence: Synthetic oligonucleotide
cagcaucacugaagcaaug

SEQ ID NO: 1368201 - RNA, 19 nt, Artificial Sequence
  Description of Artificial Sequence: Synthetic oligonucleotide
uuuccccguuaacauuaua

SEQ ID NO: 1368202 - RNA, 19 nt, Artificial Sequence
  Description of Artificial Sequence: Synthetic oligonucleotide
gcagccauagagacgcgcc

SEQ ID NO: 1368203 - RNA, 19 nt, Artificial Sequence
  Description of Artificial Sequence: Synthetic oligonucleotide
gccuagauagcccgccgcc

SEQ ID NO: 1368204 - RNA, 19 nt, Artificial Sequence
  Description of Artificial Sequence: Synthetic oligonucleotide
guauagcuugaagaauaaa

SEQ ID NO: 1368205 - RNA, 19 nt, Artificial Sequence
  Description of Artificial Sequence: Synthetic oligonucleotide
caagacguuuucacuuaaa

SEQ ID NO: 1368206 - RNA, 19 nt, Artificial Sequence
  Description of Artificial Sequence: Synthetic oligonucleotide
auugagagcccaacaggua

SEQ ID NO: 1368207 - RNA, 19 nt, Artificial Sequence
  Description of Artificial Sequence: Synthetic oligonucleotide
gguaccugaacgagagaac

SEQ ID NO: 1368208 - RNA, 19 nt, Artificial Sequence
  Description of Artificial Sequence: Synthetic oligonucleotide
ccacaacuuuuguagcuug

SEQ ID NO: 1368209 - RNA, 19 nt, Artificial Sequence
  Description of Artificial Sequence: Synthetic oligonucleotide
gcgacuuagaaaauuuucu

SEQ ID NO: 1368210 - RNA, 19 nt, Artificial Sequence
  Description of Artificial Sequence: Synthetic oligonucleotide
agcuugugcugguuuccau

SEQ ID NO: 1368211 - RNA, 19 nt, Artificial Sequence
  Description of Artificial Sequence: Synthetic oligonucleotide
cuccaaauacuaagagcua

SEQ ID NO: 1368212 - RNA, 19 nt, Artificial Sequence
  Description of Artificial Sequence: Synthetic oligonucleotide
acgguaacauaaagcagua

SEQ ID NO: 1368213 - RNA, 19 nt, Artificial Sequence
  Description of Artificial Sequence: Synthetic oligonucleotide
caauacagcaauagcuauu

SEQ ID NO: 1368214 - RNA, 19 nt, Artificial Sequence
  Description of Artificial Sequence: Synthetic oligonucleotide
agacgcgccggccuagaua

SEQ ID NO: 1368215 - RNA, 19 nt, Artificial Sequence
  Description of Artificial Sequence: Synthetic oligonucleotide
uagagacgcgccggccuag

SEQ ID NO: 1368216 - RNA, 19 nt, Artificial Sequence
  Description of Artificial Sequence: Synthetic oligonucleotide
agguagugucuugccuggg

SEQ ID NO: 1368217 - RNA, 19 nt, Artificial Sequence
  Description of Artificial Sequence: Synthetic oligonucleotide
gcuacgguauaagcugcag

SEQ ID NO: 1368218 - RNA, 19 nt, Artificial Sequence
  Description of Artificial Sequence: Synthetic oligonucleotide
agggaaucuucaguugaua

SEQ ID NO: 1368219 - RNA, 19 nt, Artificial Sequence
  Description of Artificial Sequence: Synthetic oligonucleotide
uugcuggauuuccccguua

SEQ ID NO: 1368220 - RNA, 19 nt, Artificial Sequence
  Description of Artificial Sequence: Synthetic oligonucleotide
ggccuagauagcccgccgc

SEQ ID NO: 1368221 - RNA, 19 nt, Artificial Sequence
  Description of Artificial Sequence: Synthetic oligonucleotide
cugccaagcaguauagcuu

SEQ ID NO: 1368222 - RNA, 19 nt, Artificial Sequence
  Description of Artificial Sequence: Synthetic oligonucleotide
ccccguuaacauuauagaa

SEQ ID NO: 1368223 - RNA, 19 nt, Artificial Sequence
  Description of Artificial Sequence: Synthetic oligonucleotide
gucguuauaggaguaucuu

SEQ ID NO: 1368224 - RNA, 19 nt, Artificial Sequence
  Description of Artificial Sequence: Synthetic oligonucleotide
agcuacgguauaagcugca

SEQ ID NO: 1368225 - RNA, 19 nt, Artificial Sequence
  Description of Artificial Sequence: Synthetic oligonucleotide
cgccccugcagccauagag

SEQ ID NO: 1368226 - RNA, 19 nt, Artificial Sequence
  Description of Artificial Sequence: Synthetic oligonucleotide
cuugccuggguaacccaua

SEQ ID NO: 1368227 - RNA, 19 nt, Artificial Sequence
  Description of Artificial Sequence: Synthetic oligonucleotide
ccugcaaauccagagcaca

SEQ ID NO: 1368228 - RNA, 19 nt, Artificial Sequence
  Description of Artificial Sequence: Synthetic oligonucleotide
gucuugccuggguaaccca

SEQ ID NO: 1368229 - RNA, 19 nt, Artificial Sequence
  Description of Artificial Sequence: Synthetic oligonucleotide
cucagucauuacccagaca

SEQ ID NO: 1368230 - RNA, 19 nt, Artificial Sequence
  Description of Artificial Sequence: Synthetic oligonucleotide
cuacagggacaaaguacua

SEQ ID NO: 1368231 - RNA, 19 nt, Artificial Sequence
  Description of Artificial Sequence: Synthetic oligonucleotide
accgccccugcagccauag

SEQ ID NO: 1368232 - RNA, 19 nt, Artificial Sequence
  Description of Artificial Sequence: Synthetic oligonucleotide
ccuagauagcccgccgccc

SEQ ID NO: 1368233 - RNA, 19 nt, Artificial Sequence
  Description of Artificial Sequence: Synthetic oligonucleotide
ccaacagguaaccauacuu

SEQ ID NO: 1368234 - RNA, 19 nt, Artificial Sequence
  Description of Artificial Sequence: Synthetic oligonucleotide
gcaguacagggaaucuuca

SEQ ID NO: 1368235 - RNA, 19 nt, Artificial Sequence
  Description of Artificial Sequence: Synthetic oligonucleotide
ccugguauacugcuccaaa

SEQ ID NO: 1368236 - RNA, 19 nt, Artificial Sequence
  Description of Artificial Sequence: Synthetic oligonucleotide
gcuaaaaguccaacacuua

SEQ ID NO: 1368237 - RNA, 19 nt, Artificial Sequence
  Description of Artificial Sequence: Synthetic oligonucleotide
gcugaguguucgauuuaac

SEQ ID NO: 1368238 - RNA, 19 nt, Artificial Sequence
  Description of Artificial Sequence: Synthetic oligonucleotide
cagggaaucuucaguugau

SEQ ID NO: 1368239 - RNA, 19 nt, Artificial Sequence
  Description of Artificial Sequence: Synthetic oligonucleotide
gcuaccaucugggguugac

SEQ ID NO: 1368240 - RNA, 19 nt, Artificial Sequence
  Description of Artificial Sequence: Synthetic oligonucleotide
gccugcggaacuaccgccc

SEQ ID NO: 1368241 - RNA, 19 nt, Artificial Sequence
  Description of Artificial Sequence: Synthetic oligonucleotide
cugcucuaccacaacuuuu

SEQ ID NO: 1368242 - RNA, 19 nt, Artificial Sequence
  Description of Artificial Sequence: Synthetic oligonucleotide
cuacccaaacuuccaguuu

SEQ ID NO: 1368243 - RNA, 19 nt, Artificial Sequence
  Description of Artificial Sequence: Synthetic oligonucleotide
guguucgauuuaacauuaa

SEQ ID NO: 1368244 - RNA, 19 nt, Artificial Sequence
  Description of Artificial Sequence: Synthetic oligonucleotide
gcaguauagcuugaagaau

SEQ ID NO: 1368245 - RNA, 19 nt, Artificial Sequence
  Description of Artificial Sequence: Synthetic oligonucleotide
gcccaacagguaaccauac

SEQ ID NO: 1368246 - RNA, 19 nt, Artificial Sequence
  Description of Artificial Sequence: Synthetic oligonucleotide
cgccggccuagauagcccg

SEQ ID NO: 1368247 - RNA, 19 nt, Artificial Sequence
  Description of Artificial Sequence: Synthetic oligonucleotide
ggcuccccaagacguuuuc

SEQ ID NO: 1368248 - RNA, 19 nt, Artificial Sequence
  Description of Artificial Sequence: Synthetic oligonucleotide
ccggccuagauagcccgcc

SEQ ID NO: 1368249 - RNA, 19 nt, Artificial Sequence
  Description of Artificial Sequence: Synthetic oligonucleotide
gguugacuuaaggcucuaa

SEQ ID NO: 1368250 - RNA, 19 nt, Artificial Sequence
  Description of Artificial Sequence: Synthetic oligonucleotide
gcggaacuaccgccccugc

SEQ ID NO: 1368251 - RNA, 19 nt, Artificial Sequence
  Description of Artificial Sequence: Synthetic oligonucleotide
cucaccccaaagggaagua

SEQ ID NO: 1368252 - RNA, 19 nt, Artificial Sequence
  Description of Artificial Sequence: Synthetic oligonucleotide
cgcgccggccuagauagcc

SEQ ID NO: 1368253 - RNA, 19 nt, Artificial Sequence
  Description of Artificial Sequence: Synthetic oligonucleotide
acgcgccggccuagauagc

SEQ ID NO: 1368254 - RNA, 19 nt, Artificial Sequence
  Description of Artificial Sequence: Synthetic oligonucleotide
gggguugacuuaaggcucu

SEQ ID NO: 1368255 - RNA, 19 nt, Artificial Sequence
  Description of Artificial Sequence: Synthetic oligonucleotide
ccccaagacguuuucacuu

SEQ ID NO: 1368256 - RNA, 19 nt, Artificial Sequence
  Description of Artificial Sequence: Synthetic oligonucleotide
cugagccauggugcagaga

SEQ ID NO: 1368257 - RNA, 19 nt, Artificial Sequence
  Description of Artificial Sequence: Synthetic oligonucleotide
cgguaacauaaagcaguac

SEQ ID NO: 1368258 - RNA, 19 nt, Artificial Sequence
  Description of Artificial Sequence: Synthetic oligonucleotide
cggccuagauagcccgccg

SEQ ID NO: 1368259 - RNA, 19 nt, Artificial Sequence
  Description of Artificial Sequence: Synthetic oligonucleotide
gagacgcgccggccuagau

SEQ ID NO: 1368260 - RNA, 19 nt, Artificial Sequence
  Description of Artificial Sequence: Synthetic oligonucleotide
gcgccggccuagauagccc

SEQ ID NO: 1368261 - RNA, 19 nt, Artificial Sequence
  Description of Artificial Sequence: Synthetic oligonucleotide
gccggccuagauagcccgc

SEQ ID NO: 1368262 - RNA, 19 nt, Artificial Sequence
  Description of Artificial Sequence: Synthetic oligonucleotide
cuaccgccccugcagccau

SEQ ID NO: 1368263 - RNA, 19 nt, Artificial Sequence
  Description of Artificial Sequence: Synthetic oligonucleotide
cccaacagguaaccauacu

SEQ ID NO: 1368264 - RNA, 19 nt, Artificial Sequence
  Description of Artificial Sequence: Synthetic oligonucleotide
cucucgccugagccauggu

SEQ ID NO: 1368265 - RNA, 19 nt, Artificial Sequence
  Description of Artificial Sequence: Synthetic oligonucleotide
gggcuccccaagacguuuu

SEQ ID NO: 1368266 - RNA, 19 nt, Artificial Sequence
  Description of Artificial Sequence: Synthetic oligonucleotide
aauggugaaaauuucaccc

SEQ ID NO: 1368267 - RNA, 19 nt, Artificial Sequence
  Description of Artificial Sequence: Synthetic oligonucleotide
uguaucuacauuaaaauac

SEQ ID NO: 1368268 - RNA, 19 nt, Artificial Sequence
  Description of Artificial Sequence: Synthetic oligonucleotide
aaauuagauccauauacac

SEQ ID NO: 1368269 - RNA, 19 nt, Artificial Sequence
  Description of Artificial Sequence: Synthetic oligonucleotide
ugauccaauauuauuaggg

SEQ ID NO: 1368270 - RNA, 19 nt, Artificial Sequence
  Description of Artificial Sequence: Synthetic oligonucleotide
uuuacauccaaaaugacaa

SEQ ID NO: 1368271 - RNA, 19 nt, Artificial Sequence
  Description of Artificial Sequence: Synthetic oligonucleotide
aaaucauaggaacaagagg

SEQ ID NO: 1368272 - RNA, 19 nt, Artificial Sequence
  Description of Artificial Sequence: Synthetic oligonucleotide
acaauaauuauucuuuagg

SEQ ID NO: 1368273 - RNA, 19 nt, Artificial Sequence
  Description of Artificial Sequence: Synthetic oligonucleotide
aauuucacccuccuaauag

SEQ ID NO: 1368274 - RNA, 19 nt, Artificial Sequence
  Description of Artificial Sequence: Synthetic oligonucleotide
acaguaaaaucauaggaac

SEQ ID NO: 1368275 - RNA, 19 nt, Artificial Sequence
  Description of Artificial Sequence: Synthetic oligonucleotide
aacuacaaucaacugcucc

SEQ ID NO: 1368276 - RNA, 19 nt, Artificial Sequence
  Description of Artificial Sequence: Synthetic oligonucleotide
uacaauaugauacaauguc

SEQ ID NO: 1368277 - RNA, 19 nt, Artificial Sequence
  Description of Artificial Sequence: Synthetic oligonucleotide
uacaagauaugucauaaca

SEQ ID NO: 1368278 - RNA, 19 nt, Artificial Sequence
  Description of Artificial Sequence: Synthetic oligonucleotide
gacauuacaagauauguca

SEQ ID NO: 1368279 - RNA, 19 nt, Artificial Sequence
  Description of Artificial Sequence: Synthetic oligonucleotide
auuagauccauauacacaa

SEQ ID NO: 1368280 - RNA, 19 nt, Artificial Sequence
  Description of Artificial Sequence: Synthetic oligonucleotide
uguuaaguagcucauuagc

SEQ ID NO: 1368281 - RNA, 19 nt, Artificial Sequence
  Description of Artificial Sequence: Synthetic oligonucleotide
auuauuaggguuccacagc

SEQ ID NO: 1368282 - RNA, 19 nt, Artificial Sequence
  Description of Artificial Sequence: Synthetic oligonucleotide
aauaucccagcuucagacc

SEQ ID NO: 1368283 - RNA, 19 nt, Artificial Sequence
  Description of Artificial Sequence: Synthetic oligonucleotide
gaaauuauggcuuguguac

SEQ ID NO: 1368284 - RNA, 19 nt, Artificial Sequence
  Description of Artificial Sequence: Synthetic oligonucleotide
aaauuauggcuuguguacc

SEQ ID NO: 1368285 - RNA, 19 nt, Artificial Sequence
  Description of Artificial Sequence: Synthetic oligonucleotide
gaaguucaaauacagguug

SEQ ID NO: 1368286 - RNA, 19 nt, Artificial Sequence
  Description of Artificial Sequence: Synthetic oligonucleotide
aagcaaaacaaccagggau

SEQ ID NO: 1368287 - RNA, 19 nt, Artificial Sequence
  Description of Artificial Sequence: Synthetic oligonucleotide
uaagccacaaguaaacucu

SEQ ID NO: 1368288 - RNA, 19 nt, Artificial Sequence
  Description of Artificial Sequence: Synthetic oligonucleotide
uucuuaucaacagaagugg

SEQ ID NO: 1368289 - RNA, 19 nt, Artificial Sequence
  Description of Artificial Sequence: Synthetic oligonucleotide
aauagcauacgugugacca

SEQ ID NO: 1368290 - RNA, 19 nt, Artificial Sequence
  Description of Artificial Sequence: Synthetic oligonucleotide
agugguuauauuuuacauc

SEQ ID NO: 1368291 - RNA, 19 nt, Artificial Sequence
  Description of Artificial Sequence: Synthetic oligonucleotide
aacacuauacaccuccuga

SEQ ID NO: 1368292 - RNA, 19 nt, Artificial Sequence
  Description of Artificial Sequence: Synthetic oligonucleotide
aggauuacagaaauuaugg

SEQ ID NO: 1368293 - RNA, 19 nt, Artificial Sequence
  Description of Artificial Sequence: Synthetic oligonucleotide
uuauuaggguuccacagcc

SEQ ID NO: 1368294 - RNA, 19 nt, Artificial Sequence
  Description of Artificial Sequence: Synthetic oligonucleotide
acaguuugaucccaugagc

SEQ ID NO: 1368295 - RNA, 19 nt, Artificial Sequence
  Description of Artificial Sequence: Synthetic oligonucleotide
aacagaagugguuauauuu

SEQ ID NO: 1368296 - RNA, 19 nt, Artificial Sequence
  Description of Artificial Sequence: Synthetic oligonucleotide
ucacaaauuauauacgauc

SEQ ID NO: 1368297 - RNA, 19 nt, Artificial Sequence
  Description of Artificial Sequence: Synthetic oligonucleotide
uauacgaucaagaaacaua

SEQ ID NO: 1368298 - RNA, 19 nt, Artificial Sequence
  Description of Artificial Sequence: Synthetic oligonucleotide
cauauuuuaguccuuuuac

SEQ ID NO: 1368299 - RNA, 19 nt, Artificial Sequence
  Description of Artificial Sequence: Synthetic oligonucleotide
aaauuauauacgaucaaga

SEQ ID NO: 1368300 - RNA, 19 nt, Artificial Sequence
  Description of Artificial Sequence: Synthetic oligonucleotide
uuaaaucucaguacauaug

SEQ ID NO: 1368301 - RNA, 19 nt, Artificial Sequence
  Description of Artificial Sequence: Synthetic oligonucleotide
cuuaaaacuuauuucaaca

SEQ ID NO: 1368302 - RNA, 19 nt, Artificial Sequence
  Description of Artificial Sequence: Synthetic oligonucleotide
ugucacaaauuauauacga

SEQ ID NO: 1368303 - RNA, 19 nt, Artificial Sequence
  Description of Artificial Sequence: Synthetic oligonucleotide
augaaauauauuacugucc

SEQ ID NO: 1368304 - RNA, 19 nt, Artificial Sequence
  Description of Artificial Sequence: Synthetic oligonucleotide
aaucuacuaacuuccauau

SEQ ID NO: 1368305 - RNA, 19 nt, Artificial Sequence
  Description of Artificial Sequence: Synthetic oligonucleotide
uuguauuuacaccagucac

SEQ ID NO: 1368306 - RNA, 19 nt, Artificial Sequence
  Description of Artificial Sequence: Synthetic oligonucleotide
uucaaauacagguugucgu

SEQ ID NO: 1368307 - RNA, 19 nt, Artificial Sequence
  Description of Artificial Sequence: Synthetic oligonucleotide
uguuucuagaagcggauca

SEQ ID NO: 1368308 - RNA, 19 nt, Artificial Sequence
  Description of Artificial Sequence: Synthetic oligonucleotide
agccucucaaacuacaauc

SEQ ID NO: 1368309 - RNA, 19 nt, Artificial Sequence
  Description of Artificial Sequence: Synthetic oligonucleotide
aguaguuaauguuuucuug

SEQ ID NO: 1368310 - RNA, 19 nt, Artificial Sequence
  Description of Artificial Sequence: Synthetic oligonucleotide
ucguacauuccuuaagucc

SEQ ID NO: 1368311 - RNA, 19 nt, Artificial Sequence
  Description of Artificial Sequence: Synthetic oligonucleotide
gggucauagaucuuuaugg

SEQ ID NO: 1368312 - RNA, 19 nt, Artificial Sequence
  Description of Artificial Sequence: Synthetic oligonucleotide
uaaaugacacuuucgugcc

SEQ ID NO: 1368313 - RNA, 19 nt, Artificial Sequence
  Description of Artificial Sequence: Synthetic oligonucleotide
uuuuaguccuuuuacaaua

SEQ ID NO: 1368314 - RNA, 19 nt, Artificial Sequence
  Description of Artificial Sequence: Synthetic oligonucleotide
acuacaaucaacugcuccu

SEQ ID NO: 1368315 - RNA, 19 nt, Artificial Sequence
  Description of Artificial Sequence: Synthetic oligonucleotide
auacgaucaagaaacauag

SEQ ID NO: 1368316 - RNA, 19 nt, Artificial Sequence
  Description of Artificial Sequence: Synthetic oligonucleotide
guccuuuuacaauacagag

SEQ ID NO: 1368317 - RNA, 19 nt, Artificial Sequence
  Description of Artificial Sequence: Synthetic oligonucleotide
gagacugagaucuaagcca

SEQ ID NO: 1368318 - RNA, 19 nt, Artificial Sequence
  Description of Artificial Sequence: Synthetic oligonucleotide
auacgugugaccaagaagu

SEQ ID NO: 1368319 - RNA, 19 nt, Artificial Sequence
  Description of Artificial Sequence: Synthetic oligonucleotide
caauaauuauucuuuagga

SEQ ID NO: 1368320 - RNA, 19 nt, Artificial Sequence
  Description of Artificial Sequence: Synthetic oligonucleotide
uucucauuguauuuacacc

SEQ ID NO: 1368321 - RNA, 19 nt, Artificial Sequence
  Description of Artificial Sequence: Synthetic oligonucleotide
aauuagauccauauacaca

SEQ ID NO: 1368322 - RNA, 19 nt, Artificial Sequence
  Description of Artificial Sequence: Synthetic oligonucleotide
agcagcauaucuuaaccag

SEQ ID NO: 1368323 - RNA, 19 nt, Artificial Sequence
  Description of Artificial Sequence: Synthetic oligonucleotide
aucucaguacauaugaagg

SEQ ID NO: 1368324 - RNA, 19 nt, Artificial Sequence
  Description of Artificial Sequence: Synthetic oligonucleotide
aagugguuauauuuuacau

SEQ ID NO: 1368325 - RNA, 19 nt, Artificial Sequence
  Description of Artificial Sequence: Synthetic oligonucleotide
ucucaguacauaugaaggc

SEQ ID NO: 1368326 - RNA, 19 nt, Artificial Sequence
  Description of Artificial Sequence: Synthetic oligonucleotide
ugucguacauuccuuaagu

SEQ ID NO: 1368327 - RNA, 19 nt, Artificial Sequence
  Description of Artificial Sequence: Synthetic oligonucleotide
gagauaacauuuuaauaga

SEQ ID NO: 1368328 - RNA, 19 nt, Artificial Sequence
  Description of Artificial Sequence: Synthetic oligonucleotide
uuaaccaggaacugugaga

SEQ ID NO: 1368329 - RNA, 19 nt, Artificial Sequence
  Description of Artificial Sequence: Synthetic oligonucleotide
uuguguaccaggcuuacaa

SEQ ID NO: 1368330 - RNA, 19 nt, Artificial Sequence
  Description of Artificial Sequence: Synthetic oligonucleotide
acauaugaaggccugauuu

SEQ ID NO: 1368331 - RNA, 19 nt, Artificial Sequence
  Description of Artificial Sequence: Synthetic oligonucleotide
gauaccacaaguuguucac

SEQ ID NO: 1368332 - RNA, 19 nt, Artificial Sequence
  Description of Artificial Sequence: Synthetic oligonucleotide
cacaaauuauauacgauca

SEQ ID NO: 1368333 - RNA, 19 nt, Artificial Sequence
  Description of Artificial Sequence: Synthetic oligonucleotide
acuauacaccuccugagug

SEQ ID NO: 1368334 - RNA, 19 nt, Artificial Sequence
  Description of Artificial Sequence: Synthetic oligonucleotide
aauuauggcuuguguacca

SEQ ID NO: 1368335 - RNA, 19 nt, Artificial Sequence
  Description of Artificial Sequence: Synthetic oligonucleotide
aauagacauuacaagauau

SEQ ID NO: 1368336 - RNA, 19 nt, Artificial Sequence
  Description of Artificial Sequence: Synthetic oligonucleotide
uuguuaaguagcucauuag

SEQ ID NO: 1368337 - RNA, 19 nt, Artificial Sequence
  Description of Artificial Sequence: Synthetic oligonucleotide
ugauucuuaucaacagaag

SEQ ID NO: 1368338 - RNA, 19 nt, Artificial Sequence
  Description of Artificial Sequence: Synthetic oligonucleotide
acgaucaagaaacauaguu

SEQ ID NO: 1368339 - RNA, 19 nt, Artificial Sequence
  Description of Artificial Sequence: Synthetic oligonucleotide
gaaauggugaaaauuucac

SEQ ID NO: 1368340 - RNA, 19 nt, Artificial Sequence
  Description of Artificial Sequence: Synthetic oligonucleotide
ucuuuaugguuucauccca

SEQ ID NO: 1368341 - RNA, 19 nt, Artificial Sequence
  Description of Artificial Sequence: Synthetic oligonucleotide
uugauccaauauuauuagg

SEQ ID NO: 1368342 - RNA, 19 nt, Artificial Sequence
  Description of Artificial Sequence: Synthetic oligonucleotide
aacauaguuuauuuugauu

SEQ ID NO: 1368343 - RNA, 19 nt, Artificial Sequence
  Description of Artificial Sequence: Synthetic oligonucleotide
uucuagaagcggaucaggc

SEQ ID NO: 1368344 - RNA, 19 nt, Artificial Sequence
  Description of Artificial Sequence: Synthetic oligonucleotide
aguaaaaucauaggaacaa

SEQ ID NO: 1368345 - RNA, 19 nt, Artificial Sequence
  Description of Artificial Sequence: Synthetic oligonucleotide
cuuucgugcccucuaaagg

SEQ ID NO: 1368346 - RNA, 19 nt, Artificial Sequence
  Description of Artificial Sequence: Synthetic oligonucleotide
uuucgugcccucuaaaggu

SEQ ID NO: 1368347 - RNA, 19 nt, Artificial Sequence
  Description of Artificial Sequence: Synthetic oligonucleotide
aguuggaucccacacuuug

SEQ ID NO: 1368348 - RNA, 19 nt, Artificial Sequence
  Description of Artificial Sequence: Synthetic oligonucleotide
agaaauuauggcuugugua

SEQ ID NO: 1368349 - RNA, 19 nt, Artificial Sequence
  Description of Artificial Sequence: Synthetic oligonucleotide
uaauagacauuacaagaua

SEQ ID NO: 1368350 - RNA, 19 nt, Artificial Sequence
  Description of Artificial Sequence: Synthetic oligonucleotide
gaagugguuauauuuuaca

SEQ ID NO: 1368351 - RNA, 19 nt, Artificial Sequence
  Description of Artificial Sequence: Synthetic oligonucleotide
gagacaaacggggucauag

SEQ ID NO: 1368352 - RNA, 19 nt, Artificial Sequence
  Description of Artificial Sequence: Synthetic oligonucleotide
gagucugaucaccugaggc

SEQ ID NO: 1368353 - RNA, 19 nt, Artificial Sequence
  Description of Artificial Sequence: Synthetic oligonucleotide
agaucuaagccacaaguaa

SEQ ID NO: 1368354 - RNA, 19 nt, Artificial Sequence
  Description of Artificial Sequence: Synthetic oligonucleotide
uacagguugucguacauuc

SEQ ID NO: 1368355 - RNA, 19 nt, Artificial Sequence
  Description of Artificial Sequence: Synthetic oligonucleotide
ucaguacauaugaaggccu

SEQ ID NO: 1368356 - RNA, 19 nt, Artificial Sequence
  Description of Artificial Sequence: Synthetic oligonucleotide
cagguaacaucaaacaauc

SEQ ID NO: 1368357 - RNA, 19 nt, Artificial Sequence
  Description of Artificial Sequence: Synthetic oligonucleotide
uuaggauuacagaaauuau

SEQ ID NO: 1368358 - RNA, 19 nt, Artificial Sequence
  Description of Artificial Sequence: Synthetic oligonucleotide
aacaguuggaucccacacu

SEQ ID NO: 1368359 - RNA, 19 nt, Artificial Sequence
  Description of Artificial Sequence: Synthetic oligonucleotide
aaauacagguugucguaca

SEQ ID NO: 1368360 - RNA, 19 nt, Artificial Sequence
  Description of Artificial Sequence: Synthetic oligonucleotide
aaucuuacaguaaaaucau

SEQ ID NO: 1368361 - RNA, 19 nt, Artificial Sequence
  Description of Artificial Sequence: Synthetic oligonucleotide
uuaucaacagaagugguua

SEQ ID NO: 1368362 - RNA, 19 nt, Artificial Sequence
  Description of Artificial Sequence: Synthetic oligonucleotide
auugugcuguaaaugacac

SEQ ID NO: 1368363 - RNA, 19 nt, Artificial Sequence
  Description of Artificial Sequence: Synthetic oligonucleotide
aaacaauccaucacuccag

SEQ ID NO: 1368364 - RNA, 19 nt, Artificial Sequence
  Description of Artificial Sequence: Synthetic oligonucleotide
auguggggagaccagauug

SEQ ID NO: 1368365 - RNA, 19 nt, Artificial Sequence
  Description of Artificial Sequence: Synthetic oligonucleotide
ccaaucaacacuauacacc

SEQ ID NO: 1368366 - RNA, 19 nt, Artificial Sequence
  Description of Artificial Sequence: Synthetic oligonucleotide
aguaaacucugugugaugu

SEQ ID NO: 1368367 - RNA, 19 nt, Artificial Sequence
  Description of Artificial Sequence: Synthetic oligonucleotide
acuuucgugcccucuaaag

SEQ ID NO: 1368368 - RNA, 19 nt, Artificial Sequence
  Description of Artificial Sequence: Synthetic oligonucleotide
aaacuuauuucaacauaag

SEQ ID NO: 1368369 - RNA, 19 nt, Artificial Sequence
  Description of Artificial Sequence: Synthetic oligonucleotide
uggaaucacaauccggacu

SEQ ID NO: 1368370 - RNA, 19 nt, Artificial Sequence
  Description of Artificial Sequence: Synthetic oligonucleotide
uguaccaggcuuacaauau

SEQ ID NO: 1368371 - RNA, 19 nt, Artificial Sequence
  Description of Artificial Sequence: Synthetic oligonucleotide
cucucaaacuacaaucaac

SEQ ID NO: 1368372 - RNA, 19 nt, Artificial Sequence
  Description of Artificial Sequence: Synthetic oligonucleotide
uauauacgaucaagaaaca

SEQ ID NO: 1368373 - RNA, 19 nt, Artificial Sequence
  Description of Artificial Sequence: Synthetic oligonucleotide
uggagacugagaucuaagc

SEQ ID NO: 1368374 - RNA, 19 nt, Artificial Sequence
  Description of Artificial Sequence: Synthetic oligonucleotide
aggaacaagaggccagcac

SEQ ID NO: 1368375 - RNA, 19 nt, Artificial Sequence
  Description of Artificial Sequence: Synthetic oligonucleotide
caaacaauccaucacucca

SEQ ID NO: 1368376 - RNA, 19 nt, Artificial Sequence
  Description of Artificial Sequence: Synthetic oligonucleotide
uacggggagaacucggcgg

SEQ ID NO: 1368377 - RNA, 19 nt, Artificial Sequence
  Description of Artificial Sequence: Synthetic oligonucleotide
cauaucuuaaccaggaacu

SEQ ID NO: 1368378 - RNA, 19 nt, Artificial Sequence
  Description of Artificial Sequence: Synthetic oligonucleotide
uuccuuaagucccagccuc

SEQ ID NO: 1368379 - RNA, 19 nt, Artificial Sequence
  Description of Artificial Sequence: Synthetic oligonucleotide
agucugaucaccugaggcu

SEQ ID NO: 1368380 - RNA, 19 nt, Artificial Sequence
  Description of Artificial Sequence: Synthetic oligonucleotide
cauacgugugaccaagaag

SEQ ID NO: 1368381 - RNA, 19 nt, Artificial Sequence
  Description of Artificial Sequence: Synthetic oligonucleotide
uuucacccuccuaauagca

SEQ ID NO: 1368382 - RNA, 19 nt, Artificial Sequence
  Description of Artificial Sequence: Synthetic oligonucleotide
uuucuagaagcggaucagg

SEQ ID NO: 1368383 - RNA, 19 nt, Artificial Sequence
  Description of Artificial Sequence: Synthetic oligonucleotide
agauaccacaaguuguuca

SEQ ID NO: 1368384 - RNA, 19 nt, Artificial Sequence
  Description of Artificial Sequence: Synthetic oligonucleotide
ucuagaagcggaucaggcu

SEQ ID NO: 1368385 - RNA, 19 nt, Artificial Sequence
  Description of Artificial Sequence: Synthetic oligonucleotide
ugaccaagaaguucaaaua

SEQ ID NO: 1368386 - RNA, 19 nt, Artificial Sequence
  Description of Artificial Sequence: Synthetic oligonucleotide
ucaaauacagguugucgua

SEQ ID NO: 1368387 - RNA, 19 nt, Artificial Sequence
  Description of Artificial Sequence: Synthetic oligonucleotide
aacaaccagggaugugggg

SEQ ID NO: 1368388 - RNA, 19 nt, Artificial Sequence
  Description of Artificial Sequence: Synthetic oligonucleotide
uaccaggcuuacaauauga

SEQ ID NO: 1368389 - RNA, 19 nt, Artificial Sequence
  Description of Artificial Sequence: Synthetic oligonucleotide
uuauagacuuggaggggcc

SEQ ID NO: 1368390 - RNA, 19 nt, Artificial Sequence
  Description of Artificial Sequence: Synthetic oligonucleotide
agcaaaacaaccagggaug

SEQ ID NO: 1368391 - RNA, 19 nt, Artificial Sequence
  Description of Artificial Sequence: Synthetic oligonucleotide
uccuaauagcauacgugug

SEQ ID NO: 1368392 - RNA, 19 nt, Artificial Sequence
  Description of Artificial Sequence: Synthetic oligonucleotide
ugugugauguuccacuguu

SEQ ID NO: 1368393 - RNA, 19 nt, Artificial Sequence
  Description of Artificial Sequence: Synthetic oligonucleotide
uaacuuccauauuuuaguc

SEQ ID NO: 1368394 - RNA, 19 nt, Artificial Sequence
  Description of Artificial Sequence: Synthetic oligonucleotide
acaauaugauacaaugucu

SEQ ID NO: 1368395 - RNA, 19 nt, Artificial Sequence
  Description of Artificial Sequence: Synthetic oligonucleotide
cauaugaaggccugauuuc

SEQ ID NO: 1368396 - RNA, 19 nt, Artificial Sequence
  Description of Artificial Sequence: Synthetic oligonucleotide
agaagugguuauauuuuac

SEQ ID NO: 1368397 - RNA, 19 nt, Artificial Sequence
  Description of Artificial Sequence: Synthetic oligonucleotide
auggugaaaauuucacccu

SEQ ID NO: 1368398 - RNA, 19 nt, Artificial Sequence
  Description of Artificial Sequence: Synthetic oligonucleotide
ggagacugagaucuaagcc

SEQ ID NO: 1368399 - RNA, 19 nt, Artificial Sequence
  Description of Artificial Sequence: Synthetic oligonucleotide
aauccggacuccugcgguc

SEQ ID NO: 1368400 - RNA, 19 nt, Artificial Sequence
  Description of Artificial Sequence: Synthetic oligonucleotide
aaguaaacucugugugaug

SEQ ID NO: 1368401 - RNA, 19 nt, Artificial Sequence
  Description of Artificial Sequence: Synthetic oligonucleotide
cuaacuuccauauuuuagu

SEQ ID NO: 1368402 - RNA, 19 nt, Artificial Sequence
  Description of Artificial Sequence: Synthetic oligonucleotide
uuaguccuuuuacaauaca

SEQ ID NO: 1368403 - RNA, 19 nt, Artificial Sequence
  Description of Artificial Sequence: Synthetic oligonucleotide
gauccaauauuauuagggu

SEQ ID NO: 1368404 - RNA, 19 nt, Artificial Sequence
  Description of Artificial Sequence: Synthetic oligonucleotide
ucagcugccuuaaaacuua

SEQ ID NO: 1368405 - RNA, 19 nt, Artificial Sequence
  Description of Artificial Sequence: Synthetic oligonucleotide
aacucggcggcguagccgu

SEQ ID NO: 1368406 - RNA, 19 nt, Artificial Sequence
  Description of Artificial Sequence: Synthetic oligonucleotide
augucauaacaauaauuau

SEQ ID NO: 1368407 - RNA, 19 nt, Artificial Sequence
  Description of Artificial Sequence: Synthetic oligonucleotide
uaccacaaguuguucaccu

SEQ ID NO: 1368408 - RNA, 19 nt, Artificial Sequence
  Description of Artificial Sequence: Synthetic oligonucleotide
augucacaaauuauauacg

SEQ ID NO: 1368409 - RNA, 19 nt, Artificial Sequence
  Description of Artificial Sequence: Synthetic oligonucleotide
ucuuaaaucucaguacaua

SEQ ID NO: 1368410 - RNA, 19 nt, Artificial Sequence
  Description of Artificial Sequence: Synthetic oligonucleotide
auagacauuacaagauaug

SEQ ID NO: 1368411 - RNA, 19 nt, Artificial Sequence
  Description of Artificial Sequence: Synthetic oligonucleotide
aucuuaaccaggaacugug

SEQ ID NO: 1368412 - RNA, 19 nt, Artificial Sequence
  Description of Artificial Sequence: Synthetic oligonucleotide
agaccagagcagcauaucu

SEQ ID NO: 1368413 - RNA, 19 nt, Artificial Sequence
  Description of Artificial Sequence: Synthetic oligonucleotide
cuaauagcauacgugugac

SEQ ID NO: 1368414 - RNA, 19 nt, Artificial Sequence
  Description of Artificial Sequence: Synthetic oligonucleotide
cguacauuccuuaaguccc

SEQ ID NO: 1368415 - RNA, 19 nt, Artificial Sequence
  Description of Artificial Sequence: Synthetic oligonucleotide
cucauuagccaauauccca

SEQ ID NO: 1368416 - RNA, 19 nt, Artificial Sequence
  Description of Artificial Sequence: Synthetic oligonucleotide
ugaguguguucuuuauaga

SEQ ID NO: 1368417 - RNA, 19 nt, Artificial Sequence
  Description of Artificial Sequence: Synthetic oligonucleotide
gcauaucuuaaccaggaac

SEQ ID NO: 1368418 - RNA, 19 nt, Artificial Sequence
  Description of Artificial Sequence: Synthetic oligonucleotide
acuacaggugacaaggaca

SEQ ID NO: 1368419 - RNA, 19 nt, Artificial Sequence
  Description of Artificial Sequence: Synthetic oligonucleotide
uaucuuaaccaggaacugu

SEQ ID NO: 1368420 - RNA, 19 nt, Artificial Sequence
  Description of Artificial Sequence: Synthetic oligonucleotide
acaauccggacuccugcgg

SEQ ID NO: 1368421 - RNA, 19 nt, Artificial Sequence
  Description of Artificial Sequence: Synthetic oligonucleotide
aguccuuuuacaauacaga

SEQ ID NO: 1368422 - RNA, 19 nt, Artificial Sequence
  Description of Artificial Sequence: Synthetic oligonucleotide
acuccugcggucuucacaa

SEQ ID NO: 1368423 - RNA, 19 nt, Artificial Sequence
  Description of Artificial Sequence: Synthetic oligonucleotide
auaccacaaguuguucacc

SEQ ID NO: 1368424 - RNA, 19 nt, Artificial Sequence
  Description of Artificial Sequence: Synthetic oligonucleotide
acaagauaugucauaacaa

SEQ ID NO: 1368425 - RNA, 19 nt, Artificial Sequence
  Description of Artificial Sequence: Synthetic oligonucleotide
ugaaaauuucacccuccua

SEQ ID NO: 1368426 - RNA, 19 nt, Artificial Sequence
  Description of Artificial Sequence: Synthetic oligonucleotide
aguuaauguuuucuuguua

SEQ ID NO: 1368427 - RNA, 19 nt, Artificial Sequence
  Description of Artificial Sequence: Synthetic oligonucleotide
ugauguuccacuguuucua

SEQ ID NO: 1368428 - RNA, 19 nt, Artificial Sequence
  Description of Artificial Sequence: Synthetic oligonucleotide
ggauuacagaaauuauggc

SEQ ID NO: 1368429 - RNA, 19 nt, Artificial Sequence
  Description of Artificial Sequence: Synthetic oligonucleotide
aagcggaucaggcuuugaa

SEQ ID NO: 1368430 - RNA, 19 nt, Artificial Sequence
  Description of Artificial Sequence: Synthetic oligonucleotide
acaaacggggucauagauc

SEQ ID NO: 1368431 - RNA, 19 nt, Artificial Sequence
  Description of Artificial Sequence: Synthetic oligonucleotide
uagcauacgugugaccaag

SEQ ID NO: 1368432 - RNA, 19 nt, Artificial Sequence
  Description of Artificial Sequence: Synthetic oligonucleotide
uaauagcauacgugugacc

SEQ ID NO: 1368433 - RNA, 19 nt, Artificial Sequence
  Description of Artificial Sequence: Synthetic oligonucleotide
cacagagaauuuccaacag

SEQ ID NO: 1368434 - RNA, 19 nt, Artificial Sequence
  Description of Artificial Sequence: Synthetic oligonucleotide
aggcaacugcauuaggaug

SEQ ID NO: 1368435 - RNA, 19 nt, Artificial Sequence
  Description of Artificial Sequence: Synthetic oligonucleotide
caguaaaaucauaggaaca

SEQ ID NO: 1368436 - RNA, 19 nt, Artificial Sequence
  Description of Artificial Sequence: Synthetic oligonucleotide
agcuguaucuacauuaaaa

SEQ ID NO: 1368437 - RNA, 19 nt, Artificial Sequence
  Description of Artificial Sequence: Synthetic oligonucleotide
aggcuuacaauaugauaca

SEQ ID NO: 1368438 - RNA, 19 nt, Artificial Sequence
  Description of Artificial Sequence: Synthetic oligonucleotide
auaucuuaaccaggaacug

SEQ ID NO: 1368439 - RNA, 19 nt, Artificial Sequence
  Description of Artificial Sequence: Synthetic oligonucleotide
uaggguuccacagcccgcg

SEQ ID NO: 1368440 - RNA, 19 nt, Artificial Sequence
  Description of Artificial Sequence: Synthetic oligonucleotide
agaacucggcggcguagcc

SEQ ID NO: 1368441 - RNA, 19 nt, Artificial Sequence
  Description of Artificial Sequence: Synthetic oligonucleotide
acauaaguuugaaaauucu

SEQ ID NO: 1368442 - RNA, 19 nt, Artificial Sequence
  Description of Artificial Sequence: Synthetic oligonucleotide
gaggcugaagcaaaacaac

SEQ ID NO: 1368443 - RNA, 19 nt, Artificial Sequence
  Description of Artificial Sequence: Synthetic oligonucleotide
cuuaaaucucaguacauau

SEQ ID NO: 1368444 - RNA, 19 nt, Artificial Sequence
  Description of Artificial Sequence: Synthetic oligonucleotide
guuucuagaagcggaucag

SEQ ID NO: 1368445 - RNA, 19 nt, Artificial Sequence
  Description of Artificial Sequence: Synthetic oligonucleotide
uuaggguuccacagcccgc

SEQ ID NO: 1368446 - RNA, 19 nt, Artificial Sequence
  Description of Artificial Sequence: Synthetic oligonucleotide
caaacggggucauagaucu

SEQ ID NO: 1368447 - RNA, 19 nt, Artificial Sequence
  Description of Artificial Sequence: Synthetic oligonucleotide
uuuccaacaguuggauccc

SEQ ID NO: 1368448 - RNA, 19 nt, Artificial Sequence
  Description of Artificial Sequence: Synthetic oligonucleotide
ucagaccagagcagcauau

SEQ ID NO: 1368449 - RNA, 19 nt, Artificial Sequence
  Description of Artificial Sequence: Synthetic oligonucleotide
aaguucaaauacagguugu

SEQ ID NO: 1368450 - RNA, 19 nt, Artificial Sequence
  Description of Artificial Sequence: Synthetic oligonucleotide
uaguuaauguuuucuuguu

SEQ ID NO: 1368451 - RNA, 19 nt, Artificial Sequence
  Description of Artificial Sequence: Synthetic oligonucleotide
caauacagagauaacauuu

SEQ ID NO: 1368452 - RNA, 19 nt, Artificial Sequence
  Description of Artificial Sequence: Synthetic oligonucleotide
cagagcagcauaucuuaac

SEQ ID NO: 1368453 - RNA, 19 nt, Artificial Sequence
  Description of Artificial Sequence: Synthetic oligonucleotide
cacaauccggacuccugcg

SEQ ID NO: 1368454 - RNA, 19 nt, Artificial Sequence
  Description of Artificial Sequence: Synthetic oligonucleotide
auacagagauaacauuuua

SEQ ID NO: 1368455 - RNA, 19 nt, Artificial Sequence
  Description of Artificial Sequence: Synthetic oligonucleotide
acaaucccaaauucucaga

SEQ ID NO: 1368456 - RNA, 19 nt, Artificial Sequence
  Description of Artificial Sequence: Synthetic oligonucleotide
ccuuaaaacuuauuucaac

SEQ ID NO: 1368457 - RNA, 19 nt, Artificial Sequence
  Description of Artificial Sequence: Synthetic oligonucleotide
aaucacaauccggacuccu

SEQ ID NO: 1368458 - RNA, 19 nt, Artificial Sequence
  Description of Artificial Sequence: Synthetic oligonucleotide
caagauaugucauaacaau

SEQ ID NO: 1368459 - RNA, 19 nt, Artificial Sequence
  Description of Artificial Sequence: Synthetic oligonucleotide
uucaguaguuaauguuuuc

SEQ ID NO: 1368460 - RNA, 19 nt, Artificial Sequence
  Description of Artificial Sequence: Synthetic oligonucleotide
aacggggucauagaucuuu

SEQ ID NO: 1368461 - RNA, 19 nt, Artificial Sequence
  Description of Artificial Sequence: Synthetic oligonucleotide
ucccaugagccagauacca

SEQ ID NO: 1368462 - RNA, 19 nt, Artificial Sequence
  Description of Artificial Sequence: Synthetic oligonucleotide
auauauuacuguccaugua

SEQ ID NO: 1368463 - RNA, 19 nt, Artificial Sequence
  Description of Artificial Sequence: Synthetic oligonucleotide
guaguccagauugauuuug

SEQ ID NO: 1368464 - RNA, 19 nt, Artificial Sequence
  Description of Artificial Sequence: Synthetic oligonucleotide
cuccuaauagcauacgugu

SEQ ID NO: 1368465 - RNA, 19 nt, Artificial Sequence
  Description of Artificial Sequence: Synthetic oligonucleotide
ucacccuccuaauagcaua

SEQ ID NO: 1368466 - RNA, 19 nt, Artificial Sequence
  Description of Artificial Sequence: Synthetic oligonucleotide
cuguaucuacauuaaaaua

SEQ ID NO: 1368467 - RNA, 19 nt, Artificial Sequence
  Description of Artificial Sequence: Synthetic oligonucleotide
ggaaagagucucgaggaag

SEQ ID NO: 1368468 - RNA, 19 nt, Artificial Sequence
  Description of Artificial Sequence: Synthetic oligonucleotide
guacggggagaacucggcg

SEQ ID NO: 1368469 - RNA, 19 nt, Artificial Sequence
  Description of Artificial Sequence: Synthetic oligonucleotide
uacauaugaaggccugauu

SEQ ID NO: 1368470 - RNA, 19 nt, Artificial Sequence
  Description of Artificial Sequence: Synthetic oligonucleotide
gcuguaaaugacacuuucg

SEQ ID NO: 1368471 - RNA, 19 nt, Artificial Sequence
  Description of Artificial Sequence: Synthetic oligonucleotide
gugcuggaaucacaauccg

SEQ ID NO: 1368472 - RNA, 19 nt, Artificial Sequence
  Description of Artificial Sequence: Synthetic oligonucleotide
cacuacaggugacaaggac

SEQ ID NO: 1368473 - RNA, 19 nt, Artificial Sequence
  Description of Artificial Sequence: Synthetic oligonucleotide
auauacgaucaagaaacau

SEQ ID NO: 1368474 - RNA, 19 nt, Artificial Sequence
  Description of Artificial Sequence: Synthetic oligonucleotide
auuauggcuuguguaccag

SEQ ID NO: 1368475 - RNA, 19 nt, Artificial Sequence
  Description of Artificial Sequence: Synthetic oligonucleotide
uacgaucaagaaacauagu

SEQ ID NO: 1368476 - RNA, 19 nt, Artificial Sequence
  Description of Artificial Sequence: Synthetic oligonucleotide
acagguugucguacauucc

SEQ ID NO: 1368477 - RNA, 19 nt, Artificial Sequence
  Description of Artificial Sequence: Synthetic oligonucleotide
uuagauccauauacacaau

SEQ ID NO: 1368478 - RNA, 19 nt, Artificial Sequence
  Description of Artificial Sequence: Synthetic oligonucleotide
uauagacuuggaggggccc

SEQ ID NO: 1368479 - RNA, 19 nt, Artificial Sequence
  Description of Artificial Sequence: Synthetic oligonucleotide
acgugugaccaagaaguuc

SEQ ID NO: 1368480 - RNA, 19 nt, Artificial Sequence
  Description of Artificial Sequence: Synthetic oligonucleotide
ggggucauagaucuuuaug

SEQ ID NO: 1368481 - RNA, 19 nt, Artificial Sequence
  Description of Artificial Sequence: Synthetic oligonucleotide
uguguaccaggcuuacaau

SEQ ID NO: 1368482 - RNA, 19 nt, Artificial Sequence
  Description of Artificial Sequence: Synthetic oligonucleotide
agcggaucaggcuuugaaa

SEQ ID NO: 1368483 - RNA, 19 nt, Artificial Sequence
  Description of Artificial Sequence: Synthetic oligonucleotide
ugcggucuucacaauccca

SEQ ID NO: 1368484 - RNA, 19 nt, Artificial Sequence
  Description of Artificial Sequence: Synthetic oligonucleotide
gucugaucaccugaggcug

SEQ ID NO: 1368485 - RNA, 19 nt, Artificial Sequence
  Description of Artificial Sequence: Synthetic oligonucleotide
cuguaguccagauugauuu

SEQ ID NO: 1368486 - RNA, 19 nt, Artificial Sequence
  Description of Artificial Sequence: Synthetic oligonucleotide
gcccucuaaagguacacag

SEQ ID NO: 1368487 - RNA, 19 nt, Artificial Sequence
  Description of Artificial Sequence: Synthetic oligonucleotide
agacaaacggggucauaga

SEQ ID NO: 1368488 - RNA, 19 nt, Artificial Sequence
  Description of Artificial Sequence: Synthetic oligonucleotide
uccaacaguuggaucccac

SEQ ID NO: 1368489 - RNA, 19 nt, Artificial Sequence
  Description of Artificial Sequence: Synthetic oligonucleotide
uucacccuccuaauagcau

SEQ ID NO: 1368490 - RNA, 19 nt, Artificial Sequence
  Description of Artificial Sequence: Synthetic oligonucleotide
gccacaaguaaacucugug

SEQ ID NO: 1368491 - RNA, 19 nt, Artificial Sequence
  Description of Artificial Sequence: Synthetic oligonucleotide
gaacucggcggcguagccg

SEQ ID NO: 1368492 - RNA, 19 nt, Artificial Sequence
  Description of Artificial Sequence: Synthetic oligonucleotide
uguaguccagauugauuuu

SEQ ID NO: 1368493 - RNA, 19 nt, Artificial Sequence
  Description of Artificial Sequence: Synthetic oligonucleotide
gucguacauuccuuaaguc

SEQ ID NO: 1368494 - RNA, 19 nt, Artificial Sequence
  Description of Artificial Sequence: Synthetic oligonucleotide
caacacuauacaccuccug

SEQ ID NO: 1368495 - RNA, 19 nt, Artificial Sequence
  Description of Artificial Sequence: Synthetic oligonucleotide
uccugcggucuucacaauc

SEQ ID NO: 1368496 - RNA, 19 nt, Artificial Sequence
  Description of Artificial Sequence: Synthetic oligonucleotide
cugugagacaaacgggguc

SEQ ID NO: 1368497 - RNA, 19 nt, Artificial Sequence
  Description of Artificial Sequence: Synthetic oligonucleotide
auagcauacgugugaccaa

SEQ ID NO: 1368498 - RNA, 19 nt, Artificial Sequence
  Description of Artificial Sequence: Synthetic oligonucleotide
cacccuccuaauagcauac

SEQ ID NO: 1368499 - RNA, 19 nt, Artificial Sequence
  Description of Artificial Sequence: Synthetic oligonucleotide
aucccaugagccagauacc

SEQ ID NO: 1368500 - RNA, 19 nt, Artificial Sequence
  Description of Artificial Sequence: Synthetic oligonucleotide
aguacauaugaaggccuga

SEQ ID NO: 1368501 - RNA, 19 nt, Artificial Sequence
  Description of Artificial Sequence: Synthetic oligonucleotide
ggugaaaauuucacccucc

SEQ ID NO: 1368502 - RNA, 19 nt, Artificial Sequence
  Description of Artificial Sequence: Synthetic oligonucleotide
ccugcggucuucacaaucc

SEQ ID NO: 1368503 - RNA, 19 nt, Artificial Sequence
  Description of Artificial Sequence: Synthetic oligonucleotide
gacaaacggggucauagau

SEQ ID NO: 1368504 - RNA, 19 nt, Artificial Sequence
  Description of Artificial Sequence: Synthetic oligonucleotide
ucgugcccucuaaagguac

SEQ ID NO: 1368505 - RNA, 19 nt, Artificial Sequence
  Description of Artificial Sequence: Synthetic oligonucleotide
uucgugcccucuaaaggua

SEQ ID NO: 1368506 - RNA, 19 nt, Artificial Sequence
  Description of Artificial Sequence: Synthetic oligonucleotide
uccauauuuuaguccuuuu

SEQ ID NO: 1368507 - RNA, 19 nt, Artificial Sequence
  Description of Artificial Sequence: Synthetic oligonucleotide
gcuguaucuacauuaaaau

SEQ ID NO: 1368508 - RNA, 19 nt, Artificial Sequence
  Description of Artificial Sequence: Synthetic oligonucleotide
uuggaggggcccuguagcu

SEQ ID NO: 1368509 - RNA, 19 nt, Artificial Sequence
  Description of Artificial Sequence: Synthetic oligonucleotide
ggcggcguagccgugacgg

SEQ ID NO: 1368510 - RNA, 19 nt, Artificial Sequence
  Description of Artificial Sequence: Synthetic oligonucleotide
guugucguacauuccuuaa

SEQ ID NO: 1368511 - RNA, 19 nt, Artificial Sequence
  Description of Artificial Sequence: Synthetic oligonucleotide
ccuaauagcauacguguga

SEQ ID NO: 1368512 - RNA, 19 nt, Artificial Sequence
  Description of Artificial Sequence: Synthetic oligonucleotide
guguguucuuuauagacuu

SEQ ID NO: 1368513 - RNA, 19 nt, Artificial Sequence
  Description of Artificial Sequence: Synthetic oligonucleotide
uagaagcggaucaggcuuu

SEQ ID NO: 1368514 - RNA, 19 nt, Artificial Sequence
  Description of Artificial Sequence: Synthetic oligonucleotide
uacgugugaccaagaaguu

SEQ ID NO: 1368515 - RNA, 19 nt, Artificial Sequence
  Description of Artificial Sequence: Synthetic oligonucleotide
aucagcugccuuaaaacuu

SEQ ID NO: 1368516 - RNA, 19 nt, Artificial Sequence
  Description of Artificial Sequence: Synthetic oligonucleotide
ccagauugugcuguaaaug

SEQ ID NO: 1368517 - RNA, 19 nt, Artificial Sequence
  Description of Artificial Sequence: Synthetic oligonucleotide
ucaccacuacaggugacaa

SEQ ID NO: 1368518 - RNA, 19 nt, Artificial Sequence
  Description of Artificial Sequence: Synthetic oligonucleotide
guccgcgccgcgcucaucc

SEQ ID NO: 1368519 - RNA, 19 nt, Artificial Sequence
  Description of Artificial Sequence: Synthetic oligonucleotide
caccacuacaggugacaag

SEQ ID NO: 1368520 - RNA, 19 nt, Artificial Sequence
  Description of Artificial Sequence: Synthetic oligonucleotide
cgugugaccaagaaguuca

SEQ ID NO: 1368521 - RNA, 19 nt, Artificial Sequence
  Description of Artificial Sequence: Synthetic oligonucleotide
aucacaauccggacuccug

SEQ ID NO: 1368522 - RNA, 19 nt, Artificial Sequence
  Description of Artificial Sequence: Synthetic oligonucleotide
ucuuguuaaguagcucauu

SEQ ID NO: 1368523 - RNA, 19 nt, Artificial Sequence
  Description of Artificial Sequence: Synthetic oligonucleotide
cuagaagcggaucaggcuu

SEQ ID NO: 1368524 - RNA, 19 nt, Artificial Sequence
  Description of Artificial Sequence: Synthetic oligonucleotide
agguacggggagaacucgg

SEQ ID NO: 1368525 - RNA, 19 nt, Artificial Sequence
  Description of Artificial Sequence: Synthetic oligonucleotide
cugcggucuucacaauccc

SEQ ID NO: 1368526 - RNA, 19 nt, Artificial Sequence
  Description of Artificial Sequence: Synthetic oligonucleotide
uaggaacaagaggccagca

SEQ ID NO: 1368527 - RNA, 19 nt, Artificial Sequence
  Description of Artificial Sequence: Synthetic oligonucleotide
guaaucuacuaacuuccau

SEQ ID NO: 1368528 - RNA, 19 nt, Artificial Sequence
  Description of Artificial Sequence: Synthetic oligonucleotide
gcggaucaggcuuugaaaa

SEQ ID NO: 1368529 - RNA, 19 nt, Artificial Sequence
  Description of Artificial Sequence: Synthetic oligonucleotide
acacuuucgugcccucuaa

SEQ ID NO: 1368530 - RNA, 19 nt, Artificial Sequence
  Description of Artificial Sequence: Synthetic oligonucleotide
aucuguaguccagauugau

SEQ ID NO: 1368531 - RNA, 19 nt, Artificial Sequence
  Description of Artificial Sequence: Synthetic oligonucleotide
guagugcugcgccgcggcg

SEQ ID NO: 1368532 - RNA, 19 nt, Artificial Sequence
  Description of Artificial Sequence: Synthetic oligonucleotide
gucccagccucucaaacua

SEQ ID NO: 1368533 - RNA, 19 nt, Artificial Sequence
  Description of Artificial Sequence: Synthetic oligonucleotide
caucccguccgccggcccg

SEQ ID NO: 1368534 - RNA, 19 nt, Artificial Sequence
  Description of Artificial Sequence: Synthetic oligonucleotide
cagguacggggagaacucg

SEQ ID NO: 1368535 - RNA, 19 nt, Artificial Sequence
  Description of Artificial Sequence: Synthetic oligonucleotide
aucaacagaagugguuaua

SEQ ID NO: 1368536 - RNA, 19 nt, Artificial Sequence
  Description of Artificial Sequence: Synthetic oligonucleotide
agugcugcgccgcggcgca

SEQ ID NO: 1368537 - RNA, 19 nt, Artificial Sequence
  Description of Artificial Sequence: Synthetic oligonucleotide
cagugagccaucaccacua

SEQ ID NO: 1368538 - RNA, 19 nt, Artificial Sequence
  Description of Artificial Sequence: Synthetic oligonucleotide
uagugcugcgccgcggcgc

SEQ ID NO: 1368539 - RNA, 19 nt, Artificial Sequence
  Description of Artificial Sequence: Synthetic oligonucleotide
ccagucaaagcuucuaaaa

SEQ ID NO: 1368540 - RNA, 19 nt, Artificial Sequence
  Description of Artificial Sequence: Synthetic oligonucleotide
cuguuucuagaagcggauc

SEQ ID NO: 1368541 - RNA, 19 nt, Artificial Sequence
  Description of Artificial Sequence: Synthetic oligonucleotide
cacacuuugacaguuugau

SEQ ID NO: 1368542 - RNA, 19 nt, Artificial Sequence
  Description of Artificial Sequence: Synthetic oligonucleotide
uguucaccucugguuuggc

SEQ ID NO: 1368543 - RNA, 19 nt, Artificial Sequence
  Description of Artificial Sequence: Synthetic oligonucleotide
caaguaaacucugugugau

SEQ ID NO: 1368544 - RNA, 19 nt, Artificial Sequence
  Description of Artificial Sequence: Synthetic oligonucleotide
guagccgugacggcccggc

SEQ ID NO: 1368545 - RNA, 19 nt, Artificial Sequence
  Description of Artificial Sequence: Synthetic oligonucleotide
acccuccuaauagcauacg

SEQ ID NO: 1368546 - RNA, 19 nt, Artificial Sequence
  Description of Artificial Sequence: Synthetic oligonucleotide
ggcaacugcauuaggaugu

SEQ ID NO: 1368547 - RNA, 19 nt, Artificial Sequence
  Description of Artificial Sequence: Synthetic oligonucleotide
cuacuaacuuccauauuuu

SEQ ID NO: 1368548 - RNA, 19 nt, Artificial Sequence
  Description of Artificial Sequence: Synthetic oligonucleotide
gucacaaauuauauacgau

SEQ ID NO: 1368549 - RNA, 19 nt, Artificial Sequence
  Description of Artificial Sequence: Synthetic oligonucleotide
gugacggcccggcacccgc

SEQ ID NO: 1368550 - RNA, 19 nt, Artificial Sequence
  Description of Artificial Sequence: Synthetic oligonucleotide
gguacggggagaacucggc

SEQ ID NO: 1368551 - RNA, 19 nt, Artificial Sequence
  Description of Artificial Sequence: Synthetic oligonucleotide
guuucaucccaggagcagu

SEQ ID NO: 1368552 - RNA, 19 nt, Artificial Sequence
  Description of Artificial Sequence: Synthetic oligonucleotide
caguaguuaauguuuucuu

SEQ ID NO: 1368553 - RNA, 19 nt, Artificial Sequence
  Description of Artificial Sequence: Synthetic oligonucleotide
cuaaagguacacagagaau

SEQ ID NO: 1368554 - RNA, 19 nt, Artificial Sequence
  Description of Artificial Sequence: Synthetic oligonucleotide
ucaucccguccgccggccc

SEQ ID NO: 1368555 - RNA, 19 nt, Artificial Sequence
  Description of Artificial Sequence: Synthetic oligonucleotide
uuccaacaguuggauccca

SEQ ID NO: 1368556 - RNA, 19 nt, Artificial Sequence
  Description of Artificial Sequence: Synthetic oligonucleotide
accaggcuuacaauaugau

SEQ ID NO: 1368557 - RNA, 19 nt, Artificial Sequence
  Description of Artificial Sequence: Synthetic oligonucleotide
cacuauacaccuccugagu

SEQ ID NO: 1368558 - RNA, 19 nt, Artificial Sequence
  Description of Artificial Sequence: Synthetic oligonucleotide
aaccagggauguggggaga

SEQ ID NO: 1368559 - RNA, 19 nt, Artificial Sequence
  Description of Artificial Sequence: Synthetic oligonucleotide
gguugucguacauuccuua

SEQ ID NO: 1368560 - RNA, 19 nt, Artificial Sequence
  Description of Artificial Sequence: Synthetic oligonucleotide
agaagcggaucaggcuuug

SEQ ID NO: 1368561 - RNA, 19 nt, Artificial Sequence
  Description of Artificial Sequence: Synthetic oligonucleotide
aucccguccgccggcccgc

SEQ ID NO: 1368562 - RNA, 19 nt, Artificial Sequence
  Description of Artificial Sequence: Synthetic oligonucleotide
guacauaugaaggccugau

SEQ ID NO: 1368563 - RNA, 19 nt, Artificial Sequence
  Description of Artificial Sequence: Synthetic oligonucleotide
agccacaaguaaacucugu

SEQ ID NO: 1368564 - RNA, 19 nt, Artificial Sequence
  Description of Artificial Sequence: Synthetic oligonucleotide
gacggcccggcacccgcag

SEQ ID NO: 1368565 - RNA, 19 nt, Artificial Sequence
  Description of Artificial Sequence: Synthetic oligonucleotide
aucuuacaguaaaaucaua

SEQ ID NO: 1368566 - RNA, 19 nt, Artificial Sequence
  Description of Artificial Sequence: Synthetic oligonucleotide
gugagccaucaccacuaca

SEQ ID NO: 1368567 - RNA, 19 nt, Artificial Sequence
  Description of Artificial Sequence: Synthetic oligonucleotide
gauguggggagaccagauu

SEQ ID NO: 1368568 - RNA, 19 nt, Artificial Sequence
  Description of Artificial Sequence: Synthetic oligonucleotide
auccggacuccugcggucu

SEQ ID NO: 1368569 - RNA, 19 nt, Artificial Sequence
  Description of Artificial Sequence: Synthetic oligonucleotide
gcauacgugugaccaagaa

SEQ ID NO: 1368570 - RNA, 19 nt, Artificial Sequence
  Description of Artificial Sequence: Synthetic oligonucleotide
acagcccgcgaugccguag

SEQ ID NO: 1368571 - RNA, 19 nt, Artificial Sequence
  Description of Artificial Sequence: Synthetic oligonucleotide
ugacggcccggcacccgca

SEQ ID NO: 1368572 - RNA, 19 nt, Artificial Sequence
  Description of Artificial Sequence: Synthetic oligonucleotide
gcgcucaucccguccgccg

SEQ ID NO: 1368573 - RNA, 19 nt, Artificial Sequence
  Description of Artificial Sequence: Synthetic oligonucleotide
agcauacgugugaccaaga

SEQ ID NO: 1368574 - RNA, 19 nt, Artificial Sequence
  Description of Artificial Sequence: Synthetic oligonucleotide
ugagacaaacggggucaua

SEQ ID NO: 1368575 - RNA, 19 nt, Artificial Sequence
  Description of Artificial Sequence: Synthetic oligonucleotide
gccgugacggcccggcacc

SEQ ID NO: 1368576 - RNA, 19 nt, Artificial Sequence
  Description of Artificial Sequence: Synthetic oligonucleotide
ccaacaguuggaucccaca

SEQ ID NO: 1368577 - RNA, 19 nt, Artificial Sequence
  Description of Artificial Sequence: Synthetic oligonucleotide
caccaaguucucauuguau

SEQ ID NO: 1368578 - RNA, 19 nt, Artificial Sequence
  Description of Artificial Sequence: Synthetic oligonucleotide
gacugagaucuaagccaca

SEQ ID NO: 1368579 - RNA, 19 nt, Artificial Sequence
  Description of Artificial Sequence: Synthetic oligonucleotide
ccaucaccacuacagguga

SEQ ID NO: 1368580 - RNA, 19 nt, Artificial Sequence
  Description of Artificial Sequence: Synthetic oligonucleotide
ccaggcuuacaauaugaua

SEQ ID NO: 1368581 - RNA, 19 nt, Artificial Sequence
  Description of Artificial Sequence: Synthetic oligonucleotide
cccucuaaagguacacaga

SEQ ID NO: 1368582 - RNA, 19 nt, Artificial Sequence
  Description of Artificial Sequence: Synthetic oligonucleotide
uagccgugacggcccggca

SEQ ID NO: 1368583 - RNA, 19 nt, Artificial Sequence
  Description of Artificial Sequence: Synthetic oligonucleotide
cugucugaugugcuggaau

SEQ ID NO: 1368584 - RNA, 19 nt, Artificial Sequence
  Description of Artificial Sequence: Synthetic oligonucleotide
guaaacucugugugauguu

SEQ ID NO: 1368585 - RNA, 19 nt, Artificial Sequence
  Description of Artificial Sequence: Synthetic oligonucleotide
cacagcucaggaucucugu

SEQ ID NO: 1368586 - RNA, 19 nt, Artificial Sequence
  Description of Artificial Sequence: Synthetic oligonucleotide
agguugucguacauuccuu

SEQ ID NO: 1368587 - RNA, 19 nt, Artificial Sequence
  Description of Artificial Sequence: Synthetic oligonucleotide
ggcguagccgugacggccc

SEQ ID NO: 1368588 - RNA, 19 nt, Artificial Sequence
  Description of Artificial Sequence: Synthetic oligonucleotide
cucaucccguccgccggcc

SEQ ID NO: 1368589 - RNA, 19 nt, Artificial Sequence
  Description of Artificial Sequence: Synthetic oligonucleotide
caauccggacuccugcggu

SEQ ID NO: 1368590 - RNA, 19 nt, Artificial Sequence
  Description of Artificial Sequence: Synthetic oligonucleotide
gaagcggaucaggcuuuga

SEQ ID NO: 1368591 - RNA, 19 nt, Artificial Sequence
  Description of Artificial Sequence: Synthetic oligonucleotide
cgcgaugccguagugcugc

SEQ ID NO: 1368592 - RNA, 19 nt, Artificial Sequence
  Description of Artificial Sequence: Synthetic oligonucleotide
gcagugagccaucaccacu

SEQ ID NO: 1368593 - RNA, 19 nt, Artificial Sequence
  Description of Artificial Sequence: Synthetic oligonucleotide
ggcuccaaucaacacuaua

SEQ ID NO: 1368594 - RNA, 19 nt, Artificial Sequence
  Description of Artificial Sequence: Synthetic oligonucleotide
cacuuucgugcccucuaaa

SEQ ID NO: 1368595 - RNA, 19 nt, Artificial Sequence
  Description of Artificial Sequence: Synthetic oligonucleotide
auacaccuccugagugugu

SEQ ID NO: 1368596 - RNA, 19 nt, Artificial Sequence
  Description of Artificial Sequence: Synthetic oligonucleotide
cguagugcugcgccgcggc

SEQ ID NO: 1368597 - RNA, 19 nt, Artificial Sequence
  Description of Artificial Sequence: Synthetic oligonucleotide
gccguagugcugcgccgcg

SEQ ID NO: 1368598 - RNA, 19 nt, Artificial Sequence
  Description of Artificial Sequence: Synthetic oligonucleotide
agcccgcgaugccguagug

SEQ ID NO: 1368599 - RNA, 19 nt, Artificial Sequence
  Description of Artificial Sequence: Synthetic oligonucleotide
ccucucaaacuacaaucaa

SEQ ID NO: 1368600 - RNA, 19 nt, Artificial Sequence
  Description of Artificial Sequence: Synthetic oligonucleotide
gacuuggaggggcccugua

SEQ ID NO: 1368601 - RNA, 19 nt, Artificial Sequence
  Description of Artificial Sequence: Synthetic oligonucleotide
gggauguggggagaccaga

SEQ ID NO: 1368602 - RNA, 19 nt, Artificial Sequence
  Description of Artificial Sequence: Synthetic oligonucleotide
cagccucucaaacuacaau

SEQ ID NO: 1368603 - RNA, 19 nt, Artificial Sequence
  Description of Artificial Sequence: Synthetic oligonucleotide
uccggacuccugcggucuu

SEQ ID NO: 1368604 - RNA, 19 nt, Artificial Sequence
  Description of Artificial Sequence: Synthetic oligonucleotide
aaacggggucauagaucuu

SEQ ID NO: 1368605 - RNA, 19 nt, Artificial Sequence
  Description of Artificial Sequence: Synthetic oligonucleotide
cccggcacccgcagcgucc

SEQ ID NO: 1368606 - RNA, 19 nt, Artificial Sequence
  Description of Artificial Sequence: Synthetic oligonucleotide
acggggucauagaucuuua

SEQ ID NO: 1368607 - RNA, 19 nt, Artificial Sequence
  Description of Artificial Sequence: Synthetic oligonucleotide
cuuccauauuuuaguccuu

SEQ ID NO: 1368608 - RNA, 19 nt, Artificial Sequence
  Description of Artificial Sequence: Synthetic oligonucleotide
cugaucaccugaggcugaa

SEQ ID NO: 1368609 - RNA, 19 nt, Artificial Sequence
  Description of Artificial Sequence: Synthetic oligonucleotide
gcgaugccguagugcugcg

SEQ ID NO: 1368610 - RNA, 19 nt, Artificial Sequence
  Description of Artificial Sequence: Synthetic oligonucleotide
cccgcgaugccguagugcu

SEQ ID NO: 1368611 - RNA, 19 nt, Artificial Sequence
  Description of Artificial Sequence: Synthetic oligonucleotide
ccacuacaggugacaagga

SEQ ID NO: 1368612 - RNA, 19 nt, Artificial Sequence
  Description of Artificial Sequence: Synthetic oligonucleotide
gccggcccgcagcuucucg

SEQ ID NO: 1368613 - RNA, 19 nt, Artificial Sequence
  Description of Artificial Sequence: Synthetic oligonucleotide
gcccgcgaugccguagugc

SEQ ID NO: 1368614 - RNA, 19 nt, Artificial Sequence
  Description of Artificial Sequence: Synthetic oligonucleotide
ggcggcccggcagguacgg

SEQ ID NO: 1368615 - RNA, 19 nt, Artificial Sequence
  Description of Artificial Sequence: Synthetic oligonucleotide
cccuccuaauagcauacgu

SEQ ID NO: 1368616 - RNA, 19 nt, Artificial Sequence
  Description of Artificial Sequence: Synthetic oligonucleotide
gcggcguagccgugacggc

SEQ ID NO: 1368617 - RNA, 19 nt, Artificial Sequence
  Description of Artificial Sequence: Synthetic oligonucleotide
cuaccucaguggggcucug

SEQ ID NO: 1368618 - RNA, 19 nt, Artificial Sequence
  Description of Artificial Sequence: Synthetic oligonucleotide
ggacuccugcggucuucac

SEQ ID NO: 1368619 - RNA, 19 nt, Artificial Sequence
  Description of Artificial Sequence: Synthetic oligonucleotide
ggauguggggagaccagau

SEQ ID NO: 1368620 - RNA, 19 nt, Artificial Sequence
  Description of Artificial Sequence: Synthetic oligonucleotide
cggcguagccgugacggcc

SEQ ID NO: 1368621 - RNA, 19 nt, Artificial Sequence
  Description of Artificial Sequence: Synthetic oligonucleotide
ggccugauuucuaucuuuu

SEQ ID NO: 1368622 - RNA, 19 nt, Artificial Sequence
  Description of Artificial Sequence: Synthetic oligonucleotide
ccguagugcugcgccgcgg

SEQ ID NO: 1368623 - RNA, 19 nt, Artificial Sequence
  Description of Artificial Sequence: Synthetic oligonucleotide
ccggcacccgcagcguccg

SEQ ID NO: 1368624 - RNA, 19 nt, Artificial Sequence
  Description of Artificial Sequence: Synthetic oligonucleotide
caguuggaucccacacuuu

SEQ ID NO: 1368625 - RNA, 19 nt, Artificial Sequence
  Description of Artificial Sequence: Synthetic oligonucleotide
cgugcccucuaaagguaca

SEQ ID NO: 1368626 - RNA, 19 nt, Artificial Sequence
  Description of Artificial Sequence: Synthetic oligonucleotide
ccgcgaugccguagugcug

SEQ ID NO: 1368627 - RNA, 19 nt, Artificial Sequence
  Description of Artificial Sequence: Synthetic oligonucleotide
cagcguccgcgccgcgcuc

SEQ ID NO: 1368628 - RNA, 19 nt, Artificial Sequence
  Description of Artificial Sequence: Synthetic oligonucleotide
ccggcagguacggggagaa

SEQ ID NO: 1368629 - RNA, 19 nt, Artificial Sequence
  Description of Artificial Sequence: Synthetic oligonucleotide
gcccggcacccgcagcguc

SEQ ID NO: 1368630 - RNA, 19 nt, Artificial Sequence
  Description of Artificial Sequence: Synthetic oligonucleotide
cgcgcucaucccguccgcc

SEQ ID NO: 1368631 - RNA, 19 nt, Artificial Sequence
  Description of Artificial Sequence: Synthetic oligonucleotide
cgugacggcccggcacccg

SEQ ID NO: 1368632 - RNA, 19 nt, Artificial Sequence
  Description of Artificial Sequence: Synthetic oligonucleotide
ccggacuccugcggucuuc

SEQ ID NO: 1368633 - RNA, 19 nt, Artificial Sequence
  Description of Artificial Sequence: Synthetic oligonucleotide
ccgugacggcccggcaccc

SEQ ID NO: 1368634 - RNA, 19 nt, Artificial Sequence
  Description of Artificial Sequence: Synthetic oligonucleotide
cguagccgugacggcccgg

SEQ ID NO: 1368635 - RNA, 19 nt, Artificial Sequence
  Description of Artificial Sequence: Synthetic oligonucleotide
cggcggcguagccgugacg

SEQ ID NO: 1368636 - RNA, 19 nt, Artificial Sequence
  Description of Artificial Sequence: Synthetic oligonucleotide
gcgccgcgcucaucccguc

SEQ ID NO: 1368637 - RNA, 19 nt, Artificial Sequence
  Description of Artificial Sequence: Synthetic oligonucleotide
cggcagguacggggagaac

SEQ ID NO: 1368638 - RNA, 19 nt, Artificial Sequence
  Description of Artificial Sequence: Synthetic oligonucleotide
cgcgccgcgcucaucccgu

SEQ ID NO: 1368639 - RNA, 19 nt, Artificial Sequence
  Description of Artificial Sequence: Synthetic oligonucleotide
ggcccggcacccgcagcgu

SEQ ID NO: 1368640 - RNA, 19 nt, Artificial Sequence
  Description of Artificial Sequence: Synthetic oligonucleotide
cggcacccgcagcguccgc

SEQ ID NO: 1368641 - RNA, 19 nt, Artificial Sequence
  Description of Artificial Sequence: Synthetic oligonucleotide
gcguccgcgccgcgcucau

SEQ ID NO: 1368642 - RNA, 19 nt, Artificial Sequence
  Description of Artificial Sequence: Synthetic oligonucleotide
cguccgcgccgcgcucauc

SEQ ID NO: 1368643 - RNA, 19 nt, Artificial Sequence
  Description of Artificial Sequence: Synthetic oligonucleotide
aagaacaacauauagaggu

SEQ ID NO: 1368644 - RNA, 19 nt, Artificial Sequence
  Description of Artificial Sequence: Synthetic oligonucleotide
ugugcuaagaggaagaccc

SEQ ID NO: 1368645 - RNA, 19 nt, Artificial Sequence
  Description of Artificial Sequence: Synthetic oligonucleotide
aauggcugucauuauaggc

SEQ ID NO: 1368646 - RNA, 19 nt, Artificial Sequence
  Description of Artificial Sequence: Synthetic oligonucleotide
aacauauagagguucuugg

SEQ ID NO: 1368647 - RNA, 19 nt, Artificial Sequence
  Description of Artificial Sequence: Synthetic oligonucleotide
cuaggaaucacccuuaccc

SEQ ID NO: 1368648 - RNA, 19 nt, Artificial Sequence
  Description of Artificial Sequence: Synthetic oligonucleotide
ucaguaaugaaggugaucc

SEQ ID NO: 1368649 - RNA, 19 nt, Artificial Sequence
  Description of Artificial Sequence: Synthetic oligonucleotide
aaaugcacccacucgggcc

SEQ ID NO: 1368650 - RNA, 19 nt, Artificial Sequence
  Description of Artificial Sequence: Synthetic oligonucleotide
aagaguccaauacaugagg

SEQ ID NO: 1368651 - RNA, 19 nt, Artificial Sequence
  Description of Artificial Sequence: Synthetic oligonucleotide
augaaggugauccagagca

SEQ ID NO: 1368652 - RNA, 19 nt, Artificial Sequence
  Description of Artificial Sequence: Synthetic oligonucleotide
uccaaaugcacccacucgg

SEQ ID NO: 1368653 - RNA, 19 nt, Artificial Sequence
  Description of Artificial Sequence: Synthetic oligonucleotide
uguuguacggagcaagagg

SEQ ID NO: 1368654 - RNA, 19 nt, Artificial Sequence
  Description of Artificial Sequence: Synthetic oligonucleotide
aaaggacugccuuuuagag

SEQ ID NO: 1368655 - RNA, 19 nt, Artificial Sequence
  Description of Artificial Sequence: Synthetic oligonucleotide
caugcacccaccaaaaggg

SEQ ID NO: 1368656 - RNA, 19 nt, Artificial Sequence
  Description of Artificial Sequence: Synthetic oligonucleotide
caugcaauggccagaaggg

SEQ ID NO: 1368657 - RNA, 19 nt, Artificial Sequence
  Description of Artificial Sequence: Synthetic oligonucleotide
gaagacccgagauaggccg

SEQ ID NO: 1368658 - RNA, 19 nt, Artificial Sequence
  Description of Artificial Sequence: Synthetic oligonucleotide
aguuauaaggccugccaac

SEQ ID NO: 1368659 - RNA, 19 nt, Artificial Sequence
  Description of Artificial Sequence: Synthetic oligonucleotide
aggacugccuuuuagagug

SEQ ID NO: 1368660 - RNA, 19 nt, Artificial Sequence
  Description of Artificial Sequence: Synthetic oligonucleotide
cuaaguucccguuccaugg

SEQ ID NO: 1368661 - RNA, 19 nt, Artificial Sequence
  Description of Artificial Sequence: Synthetic oligonucleotide
auggcugucauuauaggcc

SEQ ID NO: 1368662 - RNA, 19 nt, Artificial Sequence
  Description of Artificial Sequence: Synthetic oligonucleotide
uguaaagcaaugccaagac

SEQ ID NO: 1368663 - RNA, 19 nt, Artificial Sequence
  Description of Artificial Sequence: Synthetic oligonucleotide
gagaguguaaagcaaugcc

SEQ ID NO: 1368664 - RNA, 19 nt, Artificial Sequence
  Description of Artificial Sequence: Synthetic oligonucleotide
gaaauggcugucauuauag

SEQ ID NO: 1368665 - RNA, 19 nt, Artificial Sequence
  Description of Artificial Sequence: Synthetic oligonucleotide
acauauagagguucuuggg

SEQ ID NO: 1368666 - RNA, 19 nt, Artificial Sequence
  Description of Artificial Sequence: Synthetic oligonucleotide
aacuggugaaccuggacug

SEQ ID NO: 1368667 - RNA, 19 nt, Artificial Sequence
  Description of Artificial Sequence: Synthetic oligonucleotide
aaaggugacccagagccac

SEQ ID NO: 1368668 - RNA, 19 nt, Artificial Sequence
  Description of Artificial Sequence: Synthetic oligonucleotide
gaagcuaaguucccguucc

SEQ ID NO: 1368669 - RNA, 19 nt, Artificial Sequence
  Description of Artificial Sequence: Synthetic oligonucleotide
uauaaggccugccaacacc

SEQ ID NO: 1368670 - RNA, 19 nt, Artificial Sequence
  Description of Artificial Sequence: Synthetic oligonucleotide
ccgacugccaauaagaagg

SEQ ID NO: 1368671 - RNA, 19 nt, Artificial Sequence
  Description of Artificial Sequence: Synthetic oligonucleotide
gauggaccaggaaagaucc

SEQ ID NO: 1368672 - RNA, 19 nt, Artificial Sequence
  Description of Artificial Sequence: Synthetic oligonucleotide
aaugugcuaagaggaagac

SEQ ID NO: 1368673 - RNA, 19 nt, Artificial Sequence
  Description of Artificial Sequence: Synthetic oligonucleotide
aaagaguccaauacaugag

SEQ ID NO: 1368674 - RNA, 19 nt, Artificial Sequence
  Description of Artificial Sequence: Synthetic oligonucleotide
aucaagaggagugaauggg

SEQ ID NO: 1368675 - RNA, 19 nt, Artificial Sequence
  Description of Artificial Sequence: Synthetic oligonucleotide
ucagugaggcaaagggucg

SEQ ID NO: 1368676 - RNA, 19 nt, Artificial Sequence
  Description of Artificial Sequence: Synthetic oligonucleotide
uguacggagcaagaggagg

SEQ ID NO: 1368677 - RNA, 19 nt, Artificial Sequence
  Description of Artificial Sequence: Synthetic oligonucleotide
cucgguacuacccaccggg

SEQ ID NO: 1368678 - RNA, 19 nt, Artificial Sequence
  Description of Artificial Sequence: Synthetic oligonucleotide
agaagcuaaguucccguuc

SEQ ID NO: 1368679 - RNA, 19 nt, Artificial Sequence
  Description of Artificial Sequence: Synthetic oligonucleotide
gaaucuguuguacggagca

SEQ ID NO: 1368680 - RNA, 19 nt, Artificial Sequence
  Description of Artificial Sequence: Synthetic oligonucleotide
uugggaucgccuagaaagg

SEQ ID NO: 1368681 - RNA, 19 nt, Artificial Sequence
  Description of Artificial Sequence: Synthetic oligonucleotide
acaucaagaggagugaaug

SEQ ID NO: 1368682 - RNA, 19 nt, Artificial Sequence
  Description of Artificial Sequence: Synthetic oligonucleotide
ucuaaaccaagccccgccc

SEQ ID NO: 1368683 - RNA, 19 nt, Artificial Sequence
  Description of Artificial Sequence: Synthetic oligonucleotide
caucaagaggagugaaugg

SEQ ID NO: 1368684 - RNA, 19 nt, Artificial Sequence
  Description of Artificial Sequence: Synthetic oligonucleotide
ugaggcaaagggucgacug

SEQ ID NO: 1368685 - RNA, 19 nt, Artificial Sequence
  Description of Artificial Sequence: Synthetic oligonucleotide
ucaagaggagugaaugggu

SEQ ID NO: 1368686 - RNA, 19 nt, Artificial Sequence
  Description of Artificial Sequence: Synthetic oligonucleotide
aaggugauccagagcacgc

SEQ ID NO: 1368687 - RNA, 19 nt, Artificial Sequence
  Description of Artificial Sequence: Synthetic oligonucleotide
auagagguucuugggaucg

SEQ ID NO: 1368688 - RNA, 19 nt, Artificial Sequence
  Description of Artificial Sequence: Synthetic oligonucleotide
gaggguguauuugaggaag

SEQ ID NO: 1368689 - RNA, 19 nt, Artificial Sequence
  Description of Artificial Sequence: Synthetic oligonucleotide
auagaagcuaaguucccgu

SEQ ID NO: 1368690 - RNA, 19 nt, Artificial Sequence
  Description of Artificial Sequence: Synthetic oligonucleotide
ucgccuagaaaggugaccc

SEQ ID NO: 1368691 - RNA, 19 nt, Artificial Sequence
  Description of Artificial Sequence: Synthetic oligonucleotide
ucuuugggcaagagagcgg

SEQ ID NO: 1368692 - RNA, 19 nt, Artificial Sequence
  Description of Artificial Sequence: Synthetic oligonucleotide
aguguaaagcaaugccaag

SEQ ID NO: 1368693 - RNA, 19 nt, Artificial Sequence
  Description of Artificial Sequence: Synthetic oligonucleotide
gaaucacccuuacccaggg

SEQ ID NO: 1368694 - RNA, 19 nt, Artificial Sequence
  Description of Artificial Sequence: Synthetic oligonucleotide
uaggccgcggggaagaaca

SEQ ID NO: 1368695 - RNA, 19 nt, Artificial Sequence
  Description of Artificial Sequence: Synthetic oligonucleotide
cacauauucucuagcccgg

SEQ ID NO: 1368696 - RNA, 19 nt, Artificial Sequence
  Description of Artificial Sequence: Synthetic oligonucleotide
agggcaguucccgagacac

SEQ ID NO: 1368697 - RNA, 19 nt, Artificial Sequence
  Description of Artificial Sequence: Synthetic oligonucleotide
gaaggugcaauaagccagg

SEQ ID NO: 1368698 - RNA, 19 nt, Artificial Sequence
  Description of Artificial Sequence: Synthetic oligonucleotide
agacacggcucagugaggc

SEQ ID NO: 1368699 - RNA, 19 nt, Artificial Sequence
  Description of Artificial Sequence: Synthetic oligonucleotide
agaggggaacuggugaacc

SEQ ID NO: 1368700 - RNA, 19 nt, Artificial Sequence
  Description of Artificial Sequence: Synthetic oligonucleotide
cauagaagcuaaguucccg

SEQ ID NO: 1368701 - RNA, 19 nt, Artificial Sequence
  Description of Artificial Sequence: Synthetic oligonucleotide
aggaaucacccuuacccag

SEQ ID NO: 1368702 - RNA, 19 nt, Artificial Sequence
  Description of Artificial Sequence: Synthetic oligonucleotide
ucuagagcccacccuuucc

SEQ ID NO: 1368703 - RNA, 19 nt, Artificial Sequence
  Description of Artificial Sequence: Synthetic oligonucleotide
uaggaaucacccuuaccca

SEQ ID NO: 1368704 - RNA, 19 nt, Artificial Sequence
  Description of Artificial Sequence: Synthetic oligonucleotide
ccacauauucucuagcccg

SEQ ID NO: 1368705 - RNA, 19 nt, Artificial Sequence
  Description of Artificial Sequence: Synthetic oligonucleotide
ucuguuguacggagcaaga

SEQ ID NO: 1368706 - RNA, 19 nt, Artificial Sequence
  Description of Artificial Sequence: Synthetic oligonucleotide
ugucauuauaggccagaga

SEQ ID NO: 1368707 - RNA, 19 nt, Artificial Sequence
  Description of Artificial Sequence: Synthetic oligonucleotide
uguccaaaugcacccacuc

SEQ ID NO: 1368708 - RNA, 19 nt, Artificial Sequence
  Description of Artificial Sequence: Synthetic oligonucleotide
ucucacaagaagaggggaa

SEQ ID NO: 1368709 - RNA, 19 nt, Artificial Sequence
  Description of Artificial Sequence: Synthetic oligonucleotide
gcucacaccacuuggaagc

SEQ ID NO: 1368710 - RNA, 19 nt, Artificial Sequence
  Description of Artificial Sequence: Synthetic oligonucleotide
agaguguaaagcaaugcca

SEQ ID NO: 1368711 - RNA, 19 nt, Artificial Sequence
  Description of Artificial Sequence: Synthetic oligonucleotide
uaucuggccauaacaggga

SEQ ID NO: 1368712 - RNA, 19 nt, Artificial Sequence
  Description of Artificial Sequence: Synthetic oligonucleotide
gcuggaaucuguuguacgg

SEQ ID NO: 1368713 - RNA, 19 nt, Artificial Sequence
  Description of Artificial Sequence: Synthetic oligonucleotide
agagcagucaacccauaga

SEQ ID NO: 1368714 - RNA, 19 nt, Artificial Sequence
  Description of Artificial Sequence: Synthetic oligonucleotide
guaaagcaaugccaagacc

SEQ ID NO: 1368715 - RNA, 19 nt, Artificial Sequence
  Description of Artificial Sequence: Synthetic oligonucleotide
cauauagagguucuuggga

SEQ ID NO: 1368716 - RNA, 19 nt, Artificial Sequence
  Description of Artificial Sequence: Synthetic oligonucleotide
ugucuuugggcaagagagc

SEQ ID NO: 1368717 - RNA, 19 nt, Artificial Sequence
  Description of Artificial Sequence: Synthetic oligonucleotide
augugcuaagaggaagacc

SEQ ID NO: 1368718 - RNA, 19 nt, Artificial Sequence
  Description of Artificial Sequence: Synthetic oligonucleotide
aagaggggaacuggugaac

SEQ ID NO: 1368719 - RNA, 19 nt, Artificial Sequence
  Description of Artificial Sequence: Synthetic oligonucleotide
gaaguucccugugagccgg

SEQ ID NO: 1368720 - RNA, 19 nt, Artificial Sequence
  Description of Artificial Sequence: Synthetic oligonucleotide
ggggaagaacaacauauag

SEQ ID NO: 1368721 - RNA, 19 nt, Artificial Sequence
  Description of Artificial Sequence: Synthetic oligonucleotide
agagcccacccuuuccggc

SEQ ID NO: 1368722 - RNA, 19 nt, Artificial Sequence
  Description of Artificial Sequence: Synthetic oligonucleotide
ugcccagucggcgagaggc

SEQ ID NO: 1368723 - RNA, 19 nt, Artificial Sequence
  Description of Artificial Sequence: Synthetic oligonucleotide
aaagccuccuugggaacac

SEQ ID NO: 1368724 - RNA, 19 nt, Artificial Sequence
  Description of Artificial Sequence: Synthetic oligonucleotide
uagaaaggugacccagagc

SEQ ID NO: 1368725 - RNA, 19 nt, Artificial Sequence
  Description of Artificial Sequence: Synthetic oligonucleotide
uuauaaggccugccaacac

SEQ ID NO: 1368726 - RNA, 19 nt, Artificial Sequence
  Description of Artificial Sequence: Synthetic oligonucleotide
guuguacggagcaagagga

SEQ ID NO: 1368727 - RNA, 19 nt, Artificial Sequence
  Description of Artificial Sequence: Synthetic oligonucleotide
agccauaagccagccaagc

SEQ ID NO: 1368728 - RNA, 19 nt, Artificial Sequence
  Description of Artificial Sequence: Synthetic oligonucleotide
gaagacgagguugagccac

SEQ ID NO: 1368729 - RNA, 19 nt, Artificial Sequence
  Description of Artificial Sequence: Synthetic oligonucleotide
gugaucaugcaauggccag

SEQ ID NO: 1368730 - RNA, 19 nt, Artificial Sequence
  Description of Artificial Sequence: Synthetic oligonucleotide
ugcaauaagccaggcuagg

SEQ ID NO: 1368731 - RNA, 19 nt, Artificial Sequence
  Description of Artificial Sequence: Synthetic oligonucleotide
caacauauagagguucuug

SEQ ID NO: 1368732 - RNA, 19 nt, Artificial Sequence
  Description of Artificial Sequence: Synthetic oligonucleotide
uaacagggagaguguaaag

SEQ ID NO: 1368733 - RNA, 19 nt, Artificial Sequence
  Description of Artificial Sequence: Synthetic oligonucleotide
gccuuuuagaguguggugg

SEQ ID NO: 1368734 - RNA, 19 nt, Artificial Sequence
  Description of Artificial Sequence: Synthetic oligonucleotide
aaaccaagccccgccccgc

SEQ ID NO: 1368735 - RNA, 19 nt, Artificial Sequence
  Description of Artificial Sequence: Synthetic oligonucleotide
aaagcaaugccaagaccca

SEQ ID NO: 1368736 - RNA, 19 nt, Artificial Sequence
  Description of Artificial Sequence: Synthetic oligonucleotide
aaagggucgacuguccaaa

SEQ ID NO: 1368737 - RNA, 19 nt, Artificial Sequence
  Description of Artificial Sequence: Synthetic oligonucleotide
aagauccaggcccagugua

SEQ ID NO: 1368738 - RNA, 19 nt, Artificial Sequence
  Description of Artificial Sequence: Synthetic oligonucleotide
uaggccgacugccaauaag

SEQ ID NO: 1368739 - RNA, 19 nt, Artificial Sequence
  Description of Artificial Sequence: Synthetic oligonucleotide
uggcaaacaacaagccgcu

SEQ ID NO: 1368740 - RNA, 19 nt, Artificial Sequence
  Description of Artificial Sequence: Synthetic oligonucleotide
guacggagcaagaggaggg

SEQ ID NO: 1368741 - RNA, 19 nt, Artificial Sequence
  Description of Artificial Sequence: Synthetic oligonucleotide
aucgccuagaaaggugacc

SEQ ID NO: 1368742 - RNA, 19 nt, Artificial Sequence
  Description of Artificial Sequence: Synthetic oligonucleotide
gucuaaaccaagccccgcc

SEQ ID NO: 1368743 - RNA, 19 nt, Artificial Sequence
  Description of Artificial Sequence: Synthetic oligonucleotide
agccgggccaauuuuggag

SEQ ID NO: 1368744 - RNA, 19 nt, Artificial Sequence
  Description of Artificial Sequence: Synthetic oligonucleotide
aggcugauggaccaggaaa

SEQ ID NO: 1368745 - RNA, 19 nt, Artificial Sequence
  Description of Artificial Sequence: Synthetic oligonucleotide
aaggugcaauaagccaggc

SEQ ID NO: 1368746 - RNA, 19 nt, Artificial Sequence
  Description of Artificial Sequence: Synthetic oligonucleotide
gggucgacuguccaaaugc

SEQ ID NO: 1368747 - RNA, 19 nt, Artificial Sequence
  Description of Artificial Sequence: Synthetic oligonucleotide
ugagucuggggcccucuag

SEQ ID NO: 1368748 - RNA, 19 nt, Artificial Sequence
  Description of Artificial Sequence: Synthetic oligonucleotide
uuguacggagcaagaggag

SEQ ID NO: 1368749 - RNA, 19 nt, Artificial Sequence
  Description of Artificial Sequence: Synthetic oligonucleotide
auaacagggagaguguaaa

SEQ ID NO: 1368750 - RNA, 19 nt, Artificial Sequence
  Description of Artificial Sequence: Synthetic oligonucleotide
agggaggcaagagacauca

SEQ ID NO: 1368751 - RNA, 19 nt, Artificial Sequence
  Description of Artificial Sequence: Synthetic oligonucleotide
cauauucucuagcccgggg

SEQ ID NO: 1368752 - RNA, 19 nt, Artificial Sequence
  Description of Artificial Sequence: Synthetic oligonucleotide
ggccauaacagggagagug

SEQ ID NO: 1368753 - RNA, 19 nt, Artificial Sequence
  Description of Artificial Sequence: Synthetic oligonucleotide
ggaguguugucuuugggca

SEQ ID NO: 1368754 - RNA, 19 nt, Artificial Sequence
  Description of Artificial Sequence: Synthetic oligonucleotide
caagccgcuaccugcuugc

SEQ ID NO: 1368755 - RNA, 19 nt, Artificial Sequence
  Description of Artificial Sequence: Synthetic oligonucleotide
gggaaaugugcuaagagga

SEQ ID NO: 1368756 - RNA, 19 nt, Artificial Sequence
  Description of Artificial Sequence: Synthetic oligonucleotide
guagaagaggcugaucuga

SEQ ID NO: 1368757 - RNA, 19 nt, Artificial Sequence
  Description of Artificial Sequence: Synthetic oligonucleotide
augcccgccguaucuggcc

SEQ ID NO: 1368758 - RNA, 19 nt, Artificial Sequence
  Description of Artificial Sequence: Synthetic oligonucleotide
agaaaccacuugaagacga

SEQ ID NO: 1368759 - RNA, 19 nt, Artificial Sequence
  Description of Artificial Sequence: Synthetic oligonucleotide
ggagccauaagccagccaa

SEQ ID NO: 1368760 - RNA, 19 nt, Artificial Sequence
  Description of Artificial Sequence: Synthetic oligonucleotide
uggaguacccagacucaug

SEQ ID NO: 1368761 - RNA, 19 nt, Artificial Sequence
  Description of Artificial Sequence: Synthetic oligonucleotide
ugagggaaaugugcuaaga

SEQ ID NO: 1368762 - RNA, 19 nt, Artificial Sequence
  Description of Artificial Sequence: Synthetic oligonucleotide
ucgguacuacccaccgggg

SEQ ID NO: 1368763 - RNA, 19 nt, Artificial Sequence
  Description of Artificial Sequence: Synthetic oligonucleotide
agcaaugccaagacccagg

SEQ ID NO: 1368764 - RNA, 19 nt, Artificial Sequence
  Description of Artificial Sequence: Synthetic oligonucleotide
gcaaacaacaagccgcuac

SEQ ID NO: 1368765 - RNA, 19 nt, Artificial Sequence
  Description of Artificial Sequence: Synthetic oligonucleotide
ucuggccauaacagggaga

SEQ ID NO: 1368766 - RNA, 19 nt, Artificial Sequence
  Description of Artificial Sequence: Synthetic oligonucleotide
gcagguacugcuuccuacg

SEQ ID NO: 1368767 - RNA, 19 nt, Artificial Sequence
  Description of Artificial Sequence: Synthetic oligonucleotide
guguaaagcaaugccaaga

SEQ ID NO: 1368768 - RNA, 19 nt, Artificial Sequence
  Description of Artificial Sequence: Synthetic oligonucleotide
gaaaccacuugaagacgag

SEQ ID NO: 1368769 - RNA, 19 nt, Artificial Sequence
  Description of Artificial Sequence: Synthetic oligonucleotide
caaaugcacccacucgggc

SEQ ID NO: 1368770 - RNA, 19 nt, Artificial Sequence
  Description of Artificial Sequence: Synthetic oligonucleotide
uucccagguaugcccgccg

SEQ ID NO: 1368771 - RNA, 19 nt, Artificial Sequence
  Description of Artificial Sequence: Synthetic oligonucleotide
ugcuaagaggaagacccga

SEQ ID NO: 1368772 - RNA, 19 nt, Artificial Sequence
  Description of Artificial Sequence: Synthetic oligonucleotide
agcaccaguuauaaggccu

SEQ ID NO: 1368773 - RNA, 19 nt, Artificial Sequence
  Description of Artificial Sequence: Synthetic oligonucleotide
cauguggagccauaagcca

SEQ ID NO: 1368774 - RNA, 19 nt, Artificial Sequence
  Description of Artificial Sequence: Synthetic oligonucleotide
gauagaaaugaaguucccu

SEQ ID NO: 1368775 - RNA, 19 nt, Artificial Sequence
  Description of Artificial Sequence: Synthetic oligonucleotide
ggggucuaaaccaagcccc

SEQ ID NO: 1368776 - RNA, 19 nt, Artificial Sequence
  Description of Artificial Sequence: Synthetic oligonucleotide
ggcuucgggaccgagaugc

SEQ ID NO: 1368777 - RNA, 19 nt, Artificial Sequence
  Description of Artificial Sequence: Synthetic oligonucleotide
gguguauuugaggaaguug

SEQ ID NO: 1368778 - RNA, 19 nt, Artificial Sequence
  Description of Artificial Sequence: Synthetic oligonucleotide
ugguggucaaggaguguug

SEQ ID NO: 1368779 - RNA, 19 nt, Artificial Sequence
  Description of Artificial Sequence: Synthetic oligonucleotide
aggcaaagggucgacuguc

SEQ ID NO: 1368780 - RNA, 19 nt, Artificial Sequence
  Description of Artificial Sequence: Synthetic oligonucleotide
guaugcccgccguaucugg

SEQ ID NO: 1368781 - RNA, 19 nt, Artificial Sequence
  Description of Artificial Sequence: Synthetic oligonucleotide
ucggcgagaggcguaguag

SEQ ID NO: 1368782 - RNA, 19 nt, Artificial Sequence
  Description of Artificial Sequence: Synthetic oligonucleotide
agguaugcccgccguaucu

SEQ ID NO: 1368783 - RNA, 19 nt, Artificial Sequence
  Description of Artificial Sequence: Synthetic oligonucleotide
agccgcuaccugcuugccc

SEQ ID NO: 1368784 - RNA, 19 nt, Artificial Sequence
  Description of Artificial Sequence: Synthetic oligonucleotide
gagguugagccacucagua

SEQ ID NO: 1368785 - RNA, 19 nt, Artificial Sequence
  Description of Artificial Sequence: Synthetic oligonucleotide
uaugcccgccguaucuggc

SEQ ID NO: 1368786 - RNA, 19 nt, Artificial Sequence
  Description of Artificial Sequence: Synthetic oligonucleotide
aagacccagggcaguuccc

SEQ ID NO: 1368787 - RNA, 19 nt, Artificial Sequence
  Description of Artificial Sequence: Synthetic oligonucleotide
acaagccgcuaccugcuug

SEQ ID NO: 1368788 - RNA, 19 nt, Artificial Sequence
  Description of Artificial Sequence: Synthetic oligonucleotide
gcuaaguucccguuccaug

SEQ ID NO: 1368789 - RNA, 19 nt, Artificial Sequence
  Description of Artificial Sequence: Synthetic oligonucleotide
agcauaagggccagagcag

SEQ ID NO: 1368790 - RNA, 19 nt, Artificial Sequence
  Description of Artificial Sequence: Synthetic oligonucleotide
acauauucucuagcccggg

SEQ ID NO: 1368791 - RNA, 19 nt, Artificial Sequence
  Description of Artificial Sequence: Synthetic oligonucleotide
ucccgugaucaugcaaugg

SEQ ID NO: 1368792 - RNA, 19 nt, Artificial Sequence
  Description of Artificial Sequence: Synthetic oligonucleotide
gugcaauaagccaggcuag

SEQ ID NO: 1368793 - RNA, 19 nt, Artificial Sequence
  Description of Artificial Sequence: Synthetic oligonucleotide
aagcuaaguucccguucca

SEQ ID NO: 1368794 - RNA, 19 nt, Artificial Sequence
  Description of Artificial Sequence: Synthetic oligonucleotide
gggaagaacaacauauaga

SEQ ID NO: 1368795 - RNA, 19 nt, Artificial Sequence
  Description of Artificial Sequence: Synthetic oligonucleotide
ugugagccgggccaauuuu

SEQ ID NO: 1368796 - RNA, 19 nt, Artificial Sequence
  Description of Artificial Sequence: Synthetic oligonucleotide
gaucaugcaauggccagaa

SEQ ID NO: 1368797 - RNA, 19 nt, Artificial Sequence
  Description of Artificial Sequence: Synthetic oligonucleotide
ccguaucuggccauaacag

SEQ ID NO: 1368798 - RNA, 19 nt, Artificial Sequence
  Description of Artificial Sequence: Synthetic oligonucleotide
ggcugauggaccaggaaag

SEQ ID NO: 1368799 - RNA, 19 nt, Artificial Sequence
  Description of Artificial Sequence: Synthetic oligonucleotide
caccguagccccuggcacg

SEQ ID NO: 1368800 - RNA, 19 nt, Artificial Sequence
  Description of Artificial Sequence: Synthetic oligonucleotide
uagaagcuaaguucccguu

SEQ ID NO: 1368801 - RNA, 19 nt, Artificial Sequence
  Description of Artificial Sequence: Synthetic oligonucleotide
agggucgacuguccaaaug

SEQ ID NO: 1368802 - RNA, 19 nt, Artificial Sequence
  Description of Artificial Sequence: Synthetic oligonucleotide
ggagaguguaaagcaaugc

SEQ ID NO: 1368803 - RNA, 19 nt, Artificial Sequence
  Description of Artificial Sequence: Synthetic oligonucleotide
gguucuugggaucgccuag

SEQ ID NO: 1368804 - RNA, 19 nt, Artificial Sequence
  Description of Artificial Sequence: Synthetic oligonucleotide
cuaagaggaagacccgaga

SEQ ID NO: 1368805 - RNA, 19 nt, Artificial Sequence
  Description of Artificial Sequence: Synthetic oligonucleotide
cauggugagucuggggccc

SEQ ID NO: 1368806 - RNA, 19 nt, Artificial Sequence
  Description of Artificial Sequence: Synthetic oligonucleotide
cccgugaucaugcaauggc

SEQ ID NO: 1368807 - RNA, 19 nt, Artificial Sequence
  Description of Artificial Sequence: Synthetic oligonucleotide
aggugcaauaagccaggcu

SEQ ID NO: 1368808 - RNA, 19 nt, Artificial Sequence
  Description of Artificial Sequence: Synthetic oligonucleotide
ggaaucacccuuacccagg

SEQ ID NO: 1368809 - RNA, 19 nt, Artificial Sequence
  Description of Artificial Sequence: Synthetic oligonucleotide
gaguccaauacaugaggcu

SEQ ID NO: 1368810 - RNA, 19 nt, Artificial Sequence
  Description of Artificial Sequence: Synthetic oligonucleotide
cagcaccaguuauaaggcc

SEQ ID NO: 1368811 - RNA, 19 nt, Artificial Sequence
  Description of Artificial Sequence: Synthetic oligonucleotide
cuguuguacggagcaagag

SEQ ID NO: 1368812 - RNA, 19 nt, Artificial Sequence
  Description of Artificial Sequence: Synthetic oligonucleotide
cgagacacggcucagugag

SEQ ID NO: 1368813 - RNA, 19 nt, Artificial Sequence
  Description of Artificial Sequence: Synthetic oligonucleotide
cucaugcacccaccaaaag

SEQ ID NO: 1368814 - RNA, 19 nt, Artificial Sequence
  Description of Artificial Sequence: Synthetic oligonucleotide
aggccgacugccaauaaga

SEQ ID NO: 1368815 - RNA, 19 nt, Artificial Sequence
  Description of Artificial Sequence: Synthetic oligonucleotide
acccgagauaggccgacug

SEQ ID NO: 1368816 - RNA, 19 nt, Artificial Sequence
  Description of Artificial Sequence: Synthetic oligonucleotide
aacaccuggugagggaaau

SEQ ID NO: 1368817 - RNA, 19 nt, Artificial Sequence
  Description of Artificial Sequence: Synthetic oligonucleotide
ccaaaugcacccacucggg

SEQ ID NO: 1368818 - RNA, 19 nt, Artificial Sequence
  Description of Artificial Sequence: Synthetic oligonucleotide
cauaacagggagaguguaa

SEQ ID NO: 1368819 - RNA, 19 nt, Artificial Sequence
  Description of Artificial Sequence: Synthetic oligonucleotide
ggggcuaaaauuacagaac

SEQ ID NO: 1368820 - RNA, 19 nt, Artificial Sequence
  Description of Artificial Sequence: Synthetic oligonucleotide
aggaaaaggacugccuuuu

SEQ ID NO: 1368821 - RNA, 19 nt, Artificial Sequence
  Description of Artificial Sequence: Synthetic oligonucleotide
augcacccaccaaaagggc

SEQ ID NO: 1368822 - RNA, 19 nt, Artificial Sequence
  Description of Artificial Sequence: Synthetic oligonucleotide
guucccgagacacggcuca

SEQ ID NO: 1368823 - RNA, 19 nt, Artificial Sequence
  Description of Artificial Sequence: Synthetic oligonucleotide
cacaagggccaagaccagg

SEQ ID NO: 1368824 - RNA, 19 nt, Artificial Sequence
  Description of Artificial Sequence: Synthetic oligonucleotide
cguaucuggccauaacagg

SEQ ID NO: 1368825 - RNA, 19 nt, Artificial Sequence
  Description of Artificial Sequence: Synthetic oligonucleotide
gagauaggccgacugccaa

SEQ ID NO: 1368826 - RNA, 19 nt, Artificial Sequence
  Description of Artificial Sequence: Synthetic oligonucleotide
agaacaacauauagagguu

SEQ ID NO: 1368827 - RNA, 19 nt, Artificial Sequence
  Description of Artificial Sequence: Synthetic oligonucleotide
aagccgcuaccugcuugcc

SEQ ID NO: 1368828 - RNA, 19 nt, Artificial Sequence
  Description of Artificial Sequence: Synthetic oligonucleotide
ugggaucgccuagaaaggu

SEQ ID NO: 1368829 - RNA, 19 nt, Artificial Sequence
  Description of Artificial Sequence: Synthetic oligonucleotide
ccagaggguguauuugagg

SEQ ID NO: 1368830 - RNA, 19 nt, Artificial Sequence
  Description of Artificial Sequence: Synthetic oligonucleotide
uaccugcuugcccucuaga

SEQ ID NO: 1368831 - RNA, 19 nt, Artificial Sequence
  Description of Artificial Sequence: Synthetic oligonucleotide
uauaggccagagagcugcu

SEQ ID NO: 1368832 - RNA, 19 nt, Artificial Sequence
  Description of Artificial Sequence: Synthetic oligonucleotide
gggccagucucacaagaag

SEQ ID NO: 1368833 - RNA, 19 nt, Artificial Sequence
  Description of Artificial Sequence: Synthetic oligonucleotide
caguuauaaggccugccaa

SEQ ID NO: 1368834 - RNA, 19 nt, Artificial Sequence
  Description of Artificial Sequence: Synthetic oligonucleotide
gaugcccagucggcgagag

SEQ ID NO: 1368835 - RNA, 19 nt, Artificial Sequence
  Description of Artificial Sequence: Synthetic oligonucleotide
gagccauaagccagccaag

SEQ ID NO: 1368836 - RNA, 19 nt, Artificial Sequence
  Description of Artificial Sequence: Synthetic oligonucleotide
agauaggccgacugccaau

SEQ ID NO: 1368837 - RNA, 19 nt, Artificial Sequence
  Description of Artificial Sequence: Synthetic oligonucleotide
gguugagccacucaguaau

SEQ ID NO: 1368838 - RNA, 19 nt, Artificial Sequence
  Description of Artificial Sequence: Synthetic oligonucleotide
agaggcguaguaggccgcg

SEQ ID NO: 1368839 - RNA, 19 nt, Artificial Sequence
  Description of Artificial Sequence: Synthetic oligonucleotide
ugacccagagccacauauu

SEQ ID NO: 1368840 - RNA, 19 nt, Artificial Sequence
  Description of Artificial Sequence: Synthetic oligonucleotide
gccguaucuggccauaaca

SEQ ID NO: 1368841 - RNA, 19 nt, Artificial Sequence
  Description of Artificial Sequence: Synthetic oligonucleotide
ggcaagagagcggcaaggg

SEQ ID NO: 1368842 - RNA, 19 nt, Artificial Sequence
  Description of Artificial Sequence: Synthetic oligonucleotide
gccgacugccaauaagaag

SEQ ID NO: 1368843 - RNA, 19 nt, Artificial Sequence
  Description of Artificial Sequence: Synthetic oligonucleotide
agguugagccacucaguaa

SEQ ID NO: 1368844 - RNA, 19 nt, Artificial Sequence
  Description of Artificial Sequence: Synthetic oligonucleotide
caaugccaagacccagggc

SEQ ID NO: 1368845 - RNA, 19 nt, Artificial Sequence
  Description of Artificial Sequence: Synthetic oligonucleotide
agggagaguguaaagcaau

SEQ ID NO: 1368846 - RNA, 19 nt, Artificial Sequence
  Description of Artificial Sequence: Synthetic oligonucleotide
gcuaagaggaagacccgag

SEQ ID NO: 1368847 - RNA, 19 nt, Artificial Sequence
  Description of Artificial Sequence: Synthetic oligonucleotide
cuaccugcuugcccucuag

SEQ ID NO: 1368848 - RNA, 19 nt, Artificial Sequence
  Description of Artificial Sequence: Synthetic oligonucleotide
agacccgagauaggccgac

SEQ ID NO: 1368849 - RNA, 19 nt, Artificial Sequence
  Description of Artificial Sequence: Synthetic oligonucleotide
acgcagaugcccagucggc

SEQ ID NO: 1368850 - RNA, 19 nt, Artificial Sequence
  Description of Artificial Sequence: Synthetic oligonucleotide
ccgugaucaugcaauggcc

SEQ ID NO: 1368851 - RNA, 19 nt, Artificial Sequence
  Description of Artificial Sequence: Synthetic oligonucleotide
uucuggccguuucccaggu

SEQ ID NO: 1368852 - RNA, 19 nt, Artificial Sequence
  Description of Artificial Sequence: Synthetic oligonucleotide
uacggagcaagaggaggga

SEQ ID NO: 1368853 - RNA, 19 nt, Artificial Sequence
  Description of Artificial Sequence: Synthetic oligonucleotide
ugugugcaccagccagggc

SEQ ID NO: 1368854 - RNA, 19 nt, Artificial Sequence
  Description of Artificial Sequence: Synthetic oligonucleotide
gugcuaagaggaagacccg

SEQ ID NO: 1368855 - RNA, 19 nt, Artificial Sequence
  Description of Artificial Sequence: Synthetic oligonucleotide
ugcucccgugaucaugcaa

SEQ ID NO: 1368856 - RNA, 19 nt, Artificial Sequence
  Description of Artificial Sequence: Synthetic oligonucleotide
cucccgugaucaugcaaug

SEQ ID NO: 1368857 - RNA, 19 nt, Artificial Sequence
  Description of Artificial Sequence: Synthetic oligonucleotide
auaggccagagagcugcuc

SEQ ID NO: 1368858 - RNA, 19 nt, Artificial Sequence
  Description of Artificial Sequence: Synthetic oligonucleotide
uggagccauaagccagcca

SEQ ID NO: 1368859 - RNA, 19 nt, Artificial Sequence
  Description of Artificial Sequence: Synthetic oligonucleotide
aucaugcaauggccagaag

SEQ ID NO: 1368860 - RNA, 19 nt, Artificial Sequence
  Description of Artificial Sequence: Synthetic oligonucleotide
gucucacaagaagagggga

SEQ ID NO: 1368861 - RNA, 19 nt, Artificial Sequence
  Description of Artificial Sequence: Synthetic oligonucleotide
ggcguaguaggccgcgggg

SEQ ID NO: 1368862 - RNA, 19 nt, Artificial Sequence
  Description of Artificial Sequence: Synthetic oligonucleotide
gacgagguugagccacuca

SEQ ID NO: 1368863 - RNA, 19 nt, Artificial Sequence
  Description of Artificial Sequence: Synthetic oligonucleotide
gauaggccgacugccaaua

SEQ ID NO: 1368864 - RNA, 19 nt, Artificial Sequence
  Description of Artificial Sequence: Synthetic oligonucleotide
aguucccgagacacggcuc

SEQ ID NO: 1368865 - RNA, 19 nt, Artificial Sequence
  Description of Artificial Sequence: Synthetic oligonucleotide
caguaaugaaggugaucca

SEQ ID NO: 1368866 - RNA, 19 nt, Artificial Sequence
  Description of Artificial Sequence: Synthetic oligonucleotide
cgagaggcguaguaggccg

SEQ ID NO: 1368867 - RNA, 19 nt, Artificial Sequence
  Description of Artificial Sequence: Synthetic oligonucleotide
agacaucaagaggagugaa

SEQ ID NO: 1368868 - RNA, 19 nt, Artificial Sequence
  Description of Artificial Sequence: Synthetic oligonucleotide
ucgggaccgagaugccacc

SEQ ID NO: 1368869 - RNA, 19 nt, Artificial Sequence
  Description of Artificial Sequence: Synthetic oligonucleotide
cuuuuagaguguggugguc

SEQ ID NO: 1368870 - RNA, 19 nt, Artificial Sequence
  Description of Artificial Sequence: Synthetic oligonucleotide
ucccagguaugcccgccgu

SEQ ID NO: 1368871 - RNA, 19 nt, Artificial Sequence
  Description of Artificial Sequence: Synthetic oligonucleotide
gagacacggcucagugagg

SEQ ID NO: 1368872 - RNA, 19 nt, Artificial Sequence
  Description of Artificial Sequence: Synthetic oligonucleotide
gccuagaaaggugacccag

SEQ ID NO: 1368873 - RNA, 19 nt, Artificial Sequence
  Description of Artificial Sequence: Synthetic oligonucleotide
caaagggucgacuguccaa

SEQ ID NO: 1368874 - RNA, 19 nt, Artificial Sequence
  Description of Artificial Sequence: Synthetic oligonucleotide
ggugagggaaaugugcuaa

SEQ ID NO: 1368875 - RNA, 19 nt, Artificial Sequence
  Description of Artificial Sequence: Synthetic oligonucleotide
gccaauuuuggagcccagg

SEQ ID NO: 1368876 - RNA, 19 nt, Artificial Sequence
  Description of Artificial Sequence: Synthetic oligonucleotide
gaggcaaagggucgacugu

SEQ ID NO: 1368877 - RNA, 19 nt, Artificial Sequence
  Description of Artificial Sequence: Synthetic oligonucleotide
guaguaggccgcggggaag

SEQ ID NO: 1368878 - RNA, 19 nt, Artificial Sequence
  Description of Artificial Sequence: Synthetic oligonucleotide
gaccgagaugccaccugag

SEQ ID NO: 1368879 - RNA, 19 nt, Artificial Sequence
  Description of Artificial Sequence: Synthetic oligonucleotide
gcgccaguugggcuggugg

SEQ ID NO: 1368880 - RNA, 19 nt, Artificial Sequence
  Description of Artificial Sequence: Synthetic oligonucleotide
gaucgccuagaaaggugac

SEQ ID NO: 1368881 - RNA, 19 nt, Artificial Sequence
  Description of Artificial Sequence: Synthetic oligonucleotide
gggucuaaaccaagccccg

SEQ ID NO: 1368882 - RNA, 19 nt, Artificial Sequence
  Description of Artificial Sequence: Synthetic oligonucleotide
ccagucucacaagaagagg

SEQ ID NO: 1368883 - RNA, 19 nt, Artificial Sequence
  Description of Artificial Sequence: Synthetic oligonucleotide
gugagccgggccaauuuug

SEQ ID NO: 1368884 - RNA, 19 nt, Artificial Sequence
  Description of Artificial Sequence: Synthetic oligonucleotide
aagacgagguugagccacu

SEQ ID NO: 1368885 - RNA, 19 nt, Artificial Sequence
  Description of Artificial Sequence: Synthetic oligonucleotide
ggaucgccuagaaagguga

SEQ ID NO: 1368886 - RNA, 19 nt, Artificial Sequence
  Description of Artificial Sequence: Synthetic oligonucleotide
ccaguuauaaggccugcca

SEQ ID NO: 1368887 - RNA, 19 nt, Artificial Sequence
  Description of Artificial Sequence: Synthetic oligonucleotide
agccauggcgaugcccgcg

SEQ ID NO: 1368888 - RNA, 19 nt, Artificial Sequence
  Description of Artificial Sequence: Synthetic oligonucleotide
guggucaaggaguguuguc

SEQ ID NO: 1368889 - RNA, 19 nt, Artificial Sequence
  Description of Artificial Sequence: Synthetic oligonucleotide
gggagaguguaaagcaaug

SEQ ID NO: 1368890 - RNA, 19 nt, Artificial Sequence
  Description of Artificial Sequence: Synthetic oligonucleotide
gggcaagagagcggcaagg

SEQ ID NO: 1368891 - RNA, 19 nt, Artificial Sequence
  Description of Artificial Sequence: Synthetic oligonucleotide
cagacucaugcacccacca

SEQ ID NO: 1368892 - RNA, 19 nt, Artificial Sequence
  Description of Artificial Sequence: Synthetic oligonucleotide
aagacccgagauaggccga

SEQ ID NO: 1368893 - RNA, 19 nt, Artificial Sequence
  Description of Artificial Sequence: Synthetic oligonucleotide
aggugauccagagcacgca

SEQ ID NO: 1368894 - RNA, 19 nt, Artificial Sequence
  Description of Artificial Sequence: Synthetic oligonucleotide
ucacaccacuuggaagcca

SEQ ID NO: 1368895 - RNA, 19 nt, Artificial Sequence
  Description of Artificial Sequence: Synthetic oligonucleotide
acccuuacccaggggcuuc

SEQ ID NO: 1368896 - RNA, 19 nt, Artificial Sequence
  Description of Artificial Sequence: Synthetic oligonucleotide
ccaauaagaaggugcaaua

SEQ ID NO: 1368897 - RNA, 19 nt, Artificial Sequence
  Description of Artificial Sequence: Synthetic oligonucleotide
uugcccucuagagcccacc

SEQ ID NO: 1368898 - RNA, 19 nt, Artificial Sequence
  Description of Artificial Sequence: Synthetic oligonucleotide
aguucccguuccaugggca

SEQ ID NO: 1368899 - RNA, 19 nt, Artificial Sequence
  Description of Artificial Sequence: Synthetic oligonucleotide
agcuaaguucccguuccau

SEQ ID NO: 1368900 - RNA, 19 nt, Artificial Sequence
  Description of Artificial Sequence: Synthetic oligonucleotide
agacgagguugagccacuc

SEQ ID NO: 1368901 - RNA, 19 nt, Artificial Sequence
  Description of Artificial Sequence: Synthetic oligonucleotide
gaggcguaguaggccgcgg

SEQ ID NO: 1368902 - RNA, 19 nt, Artificial Sequence
  Description of Artificial Sequence: Synthetic oligonucleotide
ccgagauaggccgacugcc

SEQ ID NO: 1368903 - RNA, 19 nt, Artificial Sequence
  Description of Artificial Sequence: Synthetic oligonucleotide
gagaggcguaguaggccgc

SEQ ID NO: 1368904 - RNA, 19 nt, Artificial Sequence
  Description of Artificial Sequence: Synthetic oligonucleotide
uacaugaggcuggcaccca

SEQ ID NO: 1368905 - RNA, 19 nt, Artificial Sequence
  Description of Artificial Sequence: Synthetic oligonucleotide
augccaccugagaagaaau

SEQ ID NO: 1368906 - RNA, 19 nt, Artificial Sequence
  Description of Artificial Sequence: Synthetic oligonucleotide
uggcacgcgccaguugggc

SEQ ID NO: 1368907 - RNA, 19 nt, Artificial Sequence
  Description of Artificial Sequence: Synthetic oligonucleotide
caggcuaggaaucacccuu

SEQ ID NO: 1368908 - RNA, 19 nt, Artificial Sequence
  Description of Artificial Sequence: Synthetic oligonucleotide
ucccguuccaugggcacau

SEQ ID NO: 1368909 - RNA, 19 nt, Artificial Sequence
  Description of Artificial Sequence: Synthetic oligonucleotide
aggguguauuugaggaagu

SEQ ID NO: 1368910 - RNA, 19 nt, Artificial Sequence
  Description of Artificial Sequence: Synthetic oligonucleotide
ggaaaugugcuaagaggaa

SEQ ID NO: 1368911 - RNA, 19 nt, Artificial Sequence
  Description of Artificial Sequence: Synthetic oligonucleotide
gacaucaagaggagugaau

SEQ ID NO: 1368912 - RNA, 19 nt, Artificial Sequence
  Description of Artificial Sequence: Synthetic oligonucleotide
cacucgggccgcucacacc

SEQ ID NO: 1368913 - RNA, 19 nt, Artificial Sequence
  Description of Artificial Sequence: Synthetic oligonucleotide
aaguucccugugagccggg

SEQ ID NO: 1368914 - RNA, 19 nt, Artificial Sequence
  Description of Artificial Sequence: Synthetic oligonucleotide
ggaccgagaugccaccuga

SEQ ID NO: 1368915 - RNA, 19 nt, Artificial Sequence
  Description of Artificial Sequence: Synthetic oligonucleotide
auaggccgacugccaauaa

SEQ ID NO: 1368916 - RNA, 19 nt, Artificial Sequence
  Description of Artificial Sequence: Synthetic oligonucleotide
cuugcccucuagagcccac

SEQ ID NO: 1368917 - RNA, 19 nt, Artificial Sequence
  Description of Artificial Sequence: Synthetic oligonucleotide
cagucggcgagaggcguag

SEQ ID NO: 1368918 - RNA, 19 nt, Artificial Sequence
  Description of Artificial Sequence: Synthetic oligonucleotide
ccagacucaugcacccacc

SEQ ID NO: 1368919 - RNA, 19 nt, Artificial Sequence
  Description of Artificial Sequence: Synthetic oligonucleotide
acaccuggugagggaaaug

SEQ ID NO: 1368920 - RNA, 19 nt, Artificial Sequence
  Description of Artificial Sequence: Synthetic oligonucleotide
gggaucgccuagaaaggug

SEQ ID NO: 1368921 - RNA, 19 nt, Artificial Sequence
  Description of Artificial Sequence: Synthetic oligonucleotide
ccuggacacugaaugugug

SEQ ID NO: 1368922 - RNA, 19 nt, Artificial Sequence
  Description of Artificial Sequence: Synthetic oligonucleotide
augcccagucggcgagagg

SEQ ID NO: 1368923 - RNA, 19 nt, Artificial Sequence
  Description of Artificial Sequence: Synthetic oligonucleotide
cccgagauaggccgacugc

SEQ ID NO: 1368924 - RNA, 19 nt, Artificial Sequence
  Description of Artificial Sequence: Synthetic oligonucleotide
gcacgcgccaguugggcug

SEQ ID NO: 1368925 - RNA, 19 nt, Artificial Sequence
  Description of Artificial Sequence: Synthetic oligonucleotide
gguaugcccgccguaucug

SEQ ID NO: 1368926 - RNA, 19 nt, Artificial Sequence
  Description of Artificial Sequence: Synthetic oligonucleotide
cagguaugcccgccguauc

SEQ ID NO: 1368927 - RNA, 19 nt, Artificial Sequence
  Description of Artificial Sequence: Synthetic oligonucleotide
ggcccucuaggcuggaauc

SEQ ID NO: 1368928 - RNA, 19 nt, Artificial Sequence
  Description of Artificial Sequence: Synthetic oligonucleotide
gcaaagggucgacugucca

SEQ ID NO: 1368929 - RNA, 19 nt, Artificial Sequence
  Description of Artificial Sequence: Synthetic oligonucleotide
ggccguuucccagguaugc

SEQ ID NO: 1368930 - RNA, 19 nt, Artificial Sequence
  Description of Artificial Sequence: Synthetic oligonucleotide
uucccgagacacggcucag

SEQ ID NO: 1368931 - RNA, 19 nt, Artificial Sequence
  Description of Artificial Sequence: Synthetic oligonucleotide
acucaguaaugaaggugau

SEQ ID NO: 1368932 - RNA, 19 nt, Artificial Sequence
  Description of Artificial Sequence: Synthetic oligonucleotide
gcggggaagaacaacauau

SEQ ID NO: 1368933 - RNA, 19 nt, Artificial Sequence
  Description of Artificial Sequence: Synthetic oligonucleotide
ggcgagaggcguaguaggc

SEQ ID NO: 1368934 - RNA, 19 nt, Artificial Sequence
  Description of Artificial Sequence: Synthetic oligonucleotide
ggucuaaaccaagccccgc

SEQ ID NO: 1368935 - RNA, 19 nt, Artificial Sequence
  Description of Artificial Sequence: Synthetic oligonucleotide
gcaauaagccaggcuagga

SEQ ID NO: 1368936 - RNA, 19 nt, Artificial Sequence
  Description of Artificial Sequence: Synthetic oligonucleotide
ccuagaaaggugacccaga

SEQ ID NO: 1368937 - RNA, 19 nt, Artificial Sequence
  Description of Artificial Sequence: Synthetic oligonucleotide
gcucgguacuacccaccgg

SEQ ID NO: 1368938 - RNA, 19 nt, Artificial Sequence
  Description of Artificial Sequence: Synthetic oligonucleotide
cuggccguuucccagguau

SEQ ID NO: 1368939 - RNA, 19 nt, Artificial Sequence
  Description of Artificial Sequence: Synthetic oligonucleotide
ggcuaggaaucacccuuac

SEQ ID NO: 1368940 - RNA, 19 nt, Artificial Sequence
  Description of Artificial Sequence: Synthetic oligonucleotide
cacgcgccaguugggcugg

SEQ ID NO: 1368941 - RNA, 19 nt, Artificial Sequence
  Description of Artificial Sequence: Synthetic oligonucleotide
gcugucauuauaggccaga

SEQ ID NO: 1368942 - RNA, 19 nt, Artificial Sequence
  Description of Artificial Sequence: Synthetic oligonucleotide
ugggcacauguggagccau

SEQ ID NO: 1368943 - RNA, 19 nt, Artificial Sequence
  Description of Artificial Sequence: Synthetic oligonucleotide
cggcgagaggcguaguagg

SEQ ID NO: 1368944 - RNA, 19 nt, Artificial Sequence
  Description of Artificial Sequence: Synthetic oligonucleotide
gcgagaggcguaguaggcc

SEQ ID NO: 1368945 - RNA, 19 nt, Artificial Sequence
  Description of Artificial Sequence: Synthetic oligonucleotide
ccaccguagccccuggcac

SEQ ID NO: 1368946 - RNA, 19 nt, Artificial Sequence
  Description of Artificial Sequence: Synthetic oligonucleotide
caaaagggccugucuccaa

SEQ ID NO: 1368947 - RNA, 19 nt, Artificial Sequence
  Description of Artificial Sequence: Synthetic oligonucleotide
gccauggcgaugcccgcgc

SEQ ID NO: 1368948 - RNA, 19 nt, Artificial Sequence
  Description of Artificial Sequence: Synthetic oligonucleotide
cuucgggaccgagaugcca

SEQ ID NO: 1368949 - RNA, 19 nt, Artificial Sequence
  Description of Artificial Sequence: Synthetic oligonucleotide
gccgcggggaagaacaaca

SEQ ID NO: 1368950 - RNA, 19 nt, Artificial Sequence
  Description of Artificial Sequence: Synthetic oligonucleotide
gccgcuaccugcuugcccu

SEQ ID NO: 1368951 - RNA, 19 nt, Artificial Sequence
  Description of Artificial Sequence: Synthetic oligonucleotide
guggguggcccagccauuc

SEQ ID NO: 1368952 - RNA, 19 nt, Artificial Sequence
  Description of Artificial Sequence: Synthetic oligonucleotide
cgcucacaccacuuggaag

SEQ ID NO: 1368953 - RNA, 19 nt, Artificial Sequence
  Description of Artificial Sequence: Synthetic oligonucleotide
ccgggccaauuuuggagcc

SEQ ID NO: 1368954 - RNA, 19 nt, Artificial Sequence
  Description of Artificial Sequence: Synthetic oligonucleotide
gggccaauuuuggagccca

SEQ ID NO: 1368955 - RNA, 19 nt, Artificial Sequence
  Description of Artificial Sequence: Synthetic oligonucleotide
caguucccgagacacggcu

SEQ ID NO: 1368956 - RNA, 19 nt, Artificial Sequence
  Description of Artificial Sequence: Synthetic oligonucleotide
caccaccguagccccuggc

SEQ ID NO: 1368957 - RNA, 19 nt, Artificial Sequence
  Description of Artificial Sequence: Synthetic oligonucleotide
gccguuucccagguaugcc

SEQ ID NO: 1368958 - RNA, 19 nt, Artificial Sequence
  Description of Artificial Sequence: Synthetic oligonucleotide
guaggccgcggggaagaac

SEQ ID NO: 1368959 - RNA, 19 nt, Artificial Sequence
  Description of Artificial Sequence: Synthetic oligonucleotide
ccaagccccgccccgcccg

SEQ ID NO: 1368960 - RNA, 19 nt, Artificial Sequence
  Description of Artificial Sequence: Synthetic oligonucleotide
gggccgcucacaccacuug

SEQ ID NO: 1368961 - RNA, 19 nt, Artificial Sequence
  Description of Artificial Sequence: Synthetic oligonucleotide
gcuggaguacccagacuca

SEQ ID NO: 1368962 - RNA, 19 nt, Artificial Sequence
  Description of Artificial Sequence: Synthetic oligonucleotide
cacggcucagugaggcaaa

SEQ ID NO: 1368963 - RNA, 19 nt, Artificial Sequence
  Description of Artificial Sequence: Synthetic oligonucleotide
ggggcuucgggaccgagau

SEQ ID NO: 1368964 - RNA, 19 nt, Artificial Sequence
  Description of Artificial Sequence: Synthetic oligonucleotide
ggccugccaacaccuggug

SEQ ID NO: 1368965 - RNA, 19 nt, Artificial Sequence
  Description of Artificial Sequence: Synthetic oligonucleotide
ccuuuuagagugugguggu

SEQ ID NO: 1368966 - RNA, 19 nt, Artificial Sequence
  Description of Artificial Sequence: Synthetic oligonucleotide
cagggcaguucccgagaca

SEQ ID NO: 1368967 - RNA, 19 nt, Artificial Sequence
  Description of Artificial Sequence: Synthetic oligonucleotide
gguggucaaggaguguugu

SEQ ID NO: 1368968 - RNA, 19 nt, Artificial Sequence
  Description of Artificial Sequence: Synthetic oligonucleotide
gcucccgugaucaugcaau

SEQ ID NO: 1368969 - RNA, 19 nt, Artificial Sequence
  Description of Artificial Sequence: Synthetic oligonucleotide
gccugccaacaccugguga

SEQ ID NO: 1368970 - RNA, 19 nt, Artificial Sequence
  Description of Artificial Sequence: Synthetic oligonucleotide
cacccacucgggccgcuca

SEQ ID NO: 1368971 - RNA, 19 nt, Artificial Sequence
  Description of Artificial Sequence: Synthetic oligonucleotide
ccggcucgguacuacccac

SEQ ID NO: 1368972 - RNA, 19 nt, Artificial Sequence
  Description of Artificial Sequence: Synthetic oligonucleotide
gcacccaccaaaagggccu

SEQ ID NO: 1368973 - RNA, 19 nt, Artificial Sequence
  Description of Artificial Sequence: Synthetic oligonucleotide
cuugggaacacagguccuu

SEQ ID NO: 1368974 - RNA, 19 nt, Artificial Sequence
  Description of Artificial Sequence: Synthetic oligonucleotide
gcguaguaggccgcgggga

SEQ ID NO: 1368975 - RNA, 19 nt, Artificial Sequence
  Description of Artificial Sequence: Synthetic oligonucleotide
cgagauaggccgacugcca

SEQ ID NO: 1368976 - RNA, 19 nt, Artificial Sequence
  Description of Artificial Sequence: Synthetic oligonucleotide
agcuaucuucuggccguuu

SEQ ID NO: 1368977 - RNA, 19 nt, Artificial Sequence
  Description of Artificial Sequence: Synthetic oligonucleotide
ggccgacugccaauaagaa

SEQ ID NO: 1368978 - RNA, 19 nt, Artificial Sequence
  Description of Artificial Sequence: Synthetic oligonucleotide
cuggaguacccagacucau

SEQ ID NO: 1368979 - RNA, 19 nt, Artificial Sequence
  Description of Artificial Sequence: Synthetic oligonucleotide
caggggcuucgggaccgag

SEQ ID NO: 1368980 - RNA, 19 nt, Artificial Sequence
  Description of Artificial Sequence: Synthetic oligonucleotide
cugugagccgggccaauuu

SEQ ID NO: 1368981 - RNA, 19 nt, Artificial Sequence
  Description of Artificial Sequence: Synthetic oligonucleotide
ccauaacagggagagugua

SEQ ID NO: 1368982 - RNA, 19 nt, Artificial Sequence
  Description of Artificial Sequence: Synthetic oligonucleotide
ccgagacacggcucaguga

SEQ ID NO: 1368983 - RNA, 19 nt, Artificial Sequence
  Description of Artificial Sequence: Synthetic oligonucleotide
gagcacgcagaugcccagu

SEQ ID NO: 1368984 - RNA, 19 nt, Artificial Sequence
  Description of Artificial Sequence: Synthetic oligonucleotide
cugcucccgugaucaugca

SEQ ID NO: 1368985 - RNA, 19 nt, Artificial Sequence
  Description of Artificial Sequence: Synthetic oligonucleotide
gcuucgggaccgagaugcc

SEQ ID NO: 1368986 - RNA, 19 nt, Artificial Sequence
  Description of Artificial Sequence: Synthetic oligonucleotide
cggcucgguacuacccacc

SEQ ID NO: 1368987 - RNA, 19 nt, Artificial Sequence
  Description of Artificial Sequence: Synthetic oligonucleotide
cccuuacccaggggcuucg

SEQ ID NO: 1368988 - RNA, 19 nt, Artificial Sequence
  Description of Artificial Sequence: Synthetic oligonucleotide
cauggacuccauggugagu

SEQ ID NO: 1368989 - RNA, 19 nt, Artificial Sequence
  Description of Artificial Sequence: Synthetic oligonucleotide
ggccgcggggaagaacaac

SEQ ID NO: 1368990 - RNA, 19 nt, Artificial Sequence
  Description of Artificial Sequence: Synthetic oligonucleotide
cccggcucgguacuaccca

SEQ ID NO: 1368991 - RNA, 19 nt, Artificial Sequence
  Description of Artificial Sequence: Synthetic oligonucleotide
gggcccucuaggcuggaau

SEQ ID NO: 1368992 - RNA, 19 nt, Artificial Sequence
  Description of Artificial Sequence: Synthetic oligonucleotide
ggcacgcgccaguugggcu

SEQ ID NO: 1368993 - RNA, 19 nt, Artificial Sequence
  Description of Artificial Sequence: Synthetic oligonucleotide
ccuuacccaggggcuucgg

SEQ ID NO: 1368994 - RNA, 19 nt, Artificial Sequence
  Description of Artificial Sequence: Synthetic oligonucleotide
cggggaagaacaacauaua

SEQ ID NO: 1368995 - RNA, 19 nt, Artificial Sequence
  Description of Artificial Sequence: Synthetic oligonucleotide
gcuaccugcuugcccucua

SEQ ID NO: 1368996 - RNA, 19 nt, Artificial Sequence
  Description of Artificial Sequence: Synthetic oligonucleotide
gacccgagauaggccgacu

SEQ ID NO: 1368997 - RNA, 19 nt, Artificial Sequence
  Description of Artificial Sequence: Synthetic oligonucleotide
ccgcucacaccacuuggaa

SEQ ID NO: 1368998 - RNA, 19 nt, Artificial Sequence
  Description of Artificial Sequence: Synthetic oligonucleotide
ccucuaggcuggaaucugu

SEQ ID NO: 1368999 - RNA, 19 nt, Artificial Sequence
  Description of Artificial Sequence: Synthetic oligonucleotide
acccagcauaagggccaga

SEQ ID NO: 1369000 - RNA, 19 nt, Artificial Sequence
  Description of Artificial Sequence: Synthetic oligonucleotide
ccaggcuaggaaucacccu

SEQ ID NO: 1369001 - RNA, 19 nt, Artificial Sequence
  Description of Artificial Sequence: Synthetic oligonucleotide
cgccguaucuggccauaac

SEQ ID NO: 1369002 - RNA, 19 nt, Artificial Sequence
  Description of Artificial Sequence: Synthetic oligonucleotide
gcccucuaggcuggaaucu

SEQ ID NO: 1369003 - RNA, 19 nt, Artificial Sequence
  Description of Artificial Sequence: Synthetic oligonucleotide
gccagagagcugcucccgu

SEQ ID NO: 1369004 - RNA, 19 nt, Artificial Sequence
  Description of Artificial Sequence: Synthetic oligonucleotide
cgggccaauuuuggagccc

SEQ ID NO: 1369005 - RNA, 19 nt, Artificial Sequence
  Description of Artificial Sequence: Synthetic oligonucleotide
ccgccccaccaccguagcc

SEQ ID NO: 1369006 - RNA, 19 nt, Artificial Sequence
  Description of Artificial Sequence: Synthetic oligonucleotide
ggcaaacaacaagccgcua

SEQ ID NO: 1369007 - RNA, 19 nt, Artificial Sequence
  Description of Artificial Sequence: Synthetic oligonucleotide
aggccgcggggaagaacaa

SEQ ID NO: 1369008 - RNA, 19 nt, Artificial Sequence
  Description of Artificial Sequence: Synthetic oligonucleotide
cgagguugagccacucagu

SEQ ID NO: 1369009 - RNA, 19 nt, Artificial Sequence
  Description of Artificial Sequence: Synthetic oligonucleotide
ggugagucuggggcccucu

SEQ ID NO: 1369010 - RNA, 19 nt, Artificial Sequence
  Description of Artificial Sequence: Synthetic oligonucleotide
ccagggcacaagggccaag

SEQ ID NO: 1369011 - RNA, 19 nt, Artificial Sequence
  Description of Artificial Sequence: Synthetic oligonucleotide
gccccgcccgccccgcccc

SEQ ID NO: 1369012 - RNA, 19 nt, Artificial Sequence
  Description of Artificial Sequence: Synthetic oligonucleotide
cgccuagaaaggugaccca

SEQ ID NO: 1369013 - RNA, 19 nt, Artificial Sequence
  Description of Artificial Sequence: Synthetic oligonucleotide
ccguuccaugggcacaugu

SEQ ID NO: 1369014 - RNA, 19 nt, Artificial Sequence
  Description of Artificial Sequence: Synthetic oligonucleotide
ccagucggcgagaggcgua

SEQ ID NO: 1369015 - RNA, 19 nt, Artificial Sequence
  Description of Artificial Sequence: Synthetic oligonucleotide
cgcuucagccauggcgaug

SEQ ID NO: 1369016 - RNA, 19 nt, Artificial Sequence
  Description of Artificial Sequence: Synthetic oligonucleotide
ccgcuaccugcuugcccuc

SEQ ID NO: 1369017 - RNA, 19 nt, Artificial Sequence
  Description of Artificial Sequence: Synthetic oligonucleotide
cgcggggaagaacaacaua

SEQ ID NO: 1369018 - RNA, 19 nt, Artificial Sequence
  Description of Artificial Sequence: Synthetic oligonucleotide
ccagagcagucaacccaua

SEQ ID NO: 1369019 - RNA, 19 nt, Artificial Sequence
  Description of Artificial Sequence: Synthetic oligonucleotide
gggcacauguggagccaua

SEQ ID NO: 1369020 - RNA, 19 nt, Artificial Sequence
  Description of Artificial Sequence: Synthetic oligonucleotide
cccagguaugcccgccgua

SEQ ID NO: 1369021 - RNA, 19 nt, Artificial Sequence
  Description of Artificial Sequence: Synthetic oligonucleotide
ggacugccuuuuagagugu

SEQ ID NO: 1369022 - RNA, 19 nt, Artificial Sequence
  Description of Artificial Sequence: Synthetic oligonucleotide
gccccgccccgcccgcccc

SEQ ID NO: 1369023 - RNA, 19 nt, Artificial Sequence
  Description of Artificial Sequence: Synthetic oligonucleotide
ccguagccccuggcacgcg

SEQ ID NO: 1369024 - RNA, 19 nt, Artificial Sequence
  Description of Artificial Sequence: Synthetic oligonucleotide
ccccgccccgcccgccccg

SEQ ID NO: 1369025 - RNA, 19 nt, Artificial Sequence
  Description of Artificial Sequence: Synthetic oligonucleotide
gcgcuucagccauggcgau

SEQ ID NO: 1369026 - RNA, 19 nt, Artificial Sequence
  Description of Artificial Sequence: Synthetic oligonucleotide
acgcgccaguugggcuggu

SEQ ID NO: 1369027 - RNA, 19 nt, Artificial Sequence
  Description of Artificial Sequence: Synthetic oligonucleotide
ggggcccucuaggcuggaa

SEQ ID NO: 1369028 - RNA, 19 nt, Artificial Sequence
  Description of Artificial Sequence: Synthetic oligonucleotide
cccagucggcgagaggcgu

SEQ ID NO: 1369029 - RNA, 19 nt, Artificial Sequence
  Description of Artificial Sequence: Synthetic oligonucleotide
cuagcccggggagccgcuu

SEQ ID NO: 1369030 - RNA, 19 nt, Artificial Sequence
  Description of Artificial Sequence: Synthetic oligonucleotide
cgcgccaguugggcuggug

SEQ ID NO: 1369031 - RNA, 19 nt, Artificial Sequence
  Description of Artificial Sequence: Synthetic oligonucleotide
ccgccguaucuggccauaa

SEQ ID NO: 1369032 - RNA, 19 nt, Artificial Sequence
  Description of Artificial Sequence: Synthetic oligonucleotide
ccugugagccgggccaauu

SEQ ID NO: 1369033 - RNA, 19 nt, Artificial Sequence
  Description of Artificial Sequence: Synthetic oligonucleotide
ccauggcgaugcccgcgcu

SEQ ID NO: 1369034 - RNA, 19 nt, Artificial Sequence
  Description of Artificial Sequence: Synthetic oligonucleotide
gcccgccguaucuggccau

SEQ ID NO: 1369035 - RNA, 19 nt, Artificial Sequence
  Description of Artificial Sequence: Synthetic oligonucleotide
cccgccguaucuggccaua

SEQ ID NO: 1369036 - RNA, 19 nt, Artificial Sequence
  Description of Artificial Sequence: Synthetic oligonucleotide
cgggccgcucacaccacuu

SEQ ID NO: 1369037 - RNA, 19 nt, Artificial Sequence
  Description of Artificial Sequence: Synthetic oligonucleotide
cgggaccgagaugccaccu

SEQ ID NO: 1369038 - RNA, 19 nt, Artificial Sequence
  Description of Artificial Sequence: Synthetic oligonucleotide
cgcuaccugcuugcccucu

SEQ ID NO: 1369039 - RNA, 19 nt, Artificial Sequence
  Description of Artificial Sequence: Synthetic oligonucleotide
caaagaaucacucauaccc

SEQ ID NO: 1369040 - RNA, 19 nt, Artificial Sequence
  Description of Artificial Sequence: Synthetic oligonucleotide
aacaaagaaucacucauac

SEQ ID NO: 1369041 - RNA, 19 nt, Artificial Sequence
  Description of Artificial Sequence: Synthetic oligonucleotide
aauucuuagccaaagaagg

SEQ ID NO: 1369042 - RNA, 19 nt, Artificial Sequence
  Description of Artificial Sequence: Synthetic oligonucleotide
uguaggaaguucaacaaag

SEQ ID NO: 1369043 - RNA, 19 nt, Artificial Sequence
  Description of Artificial Sequence: Synthetic oligonucleotide
aguauaggcauacagucgg

SEQ ID NO: 1369044 - RNA, 19 nt, Artificial Sequence
  Description of Artificial Sequence: Synthetic oligonucleotide
aacuccuguagauuccugc

SEQ ID NO: 1369045 - RNA, 19 nt, Artificial Sequence
  Description of Artificial Sequence: Synthetic oligonucleotide
aacaagcccgaacucacgc

SEQ ID NO: 1369046 - RNA, 19 nt, Artificial Sequence
  Description of Artificial Sequence: Synthetic oligonucleotide
aaguucaacaaagaaucac

SEQ ID NO: 1369047 - RNA, 19 nt, Artificial Sequence
  Description of Artificial Sequence: Synthetic oligonucleotide
gaaagagagaaucucuacc

SEQ ID NO: 1369048 - RNA, 19 nt, Artificial Sequence
  Description of Artificial Sequence: Synthetic oligonucleotide
augggauugaggaugaggc

SEQ ID NO: 1369049 - RNA, 19 nt, Artificial Sequence
  Description of Artificial Sequence: Synthetic oligonucleotide
aaauucggagaccacugag

SEQ ID NO: 1369050 - RNA, 19 nt, Artificial Sequence
  Description of Artificial Sequence: Synthetic oligonucleotide
aauucggagaccacugagc

SEQ ID NO: 1369051 - RNA, 19 nt, Artificial Sequence
  Description of Artificial Sequence: Synthetic oligonucleotide
uacaagguggcucuccagg

SEQ ID NO: 1369052 - RNA, 19 nt, Artificial Sequence
  Description of Artificial Sequence: Synthetic oligonucleotide
aaaacaagcccgaacucac

SEQ ID NO: 1369053 - RNA, 19 nt, Artificial Sequence
  Description of Artificial Sequence: Synthetic oligonucleotide
gauucggagguucuggcgg

SEQ ID NO: 1369054 - RNA, 19 nt, Artificial Sequence
  Description of Artificial Sequence: Synthetic oligonucleotide
aaugucucgcauuggcuuc

SEQ ID NO: 1369055 - RNA, 19 nt, Artificial Sequence
  Description of Artificial Sequence: Synthetic oligonucleotide
acaaagaaucacucauacc

SEQ ID NO: 1369056 - RNA, 19 nt, Artificial Sequence
  Description of Artificial Sequence: Synthetic oligonucleotide
gucuguuugagcaucaccg

SEQ ID NO: 1369057 - RNA, 19 nt, Artificial Sequence
  Description of Artificial Sequence: Synthetic oligonucleotide
uccacgacaaugaagccug

SEQ ID NO: 1369058 - RNA, 19 nt, Artificial Sequence
  Description of Artificial Sequence: Synthetic oligonucleotide
uucucgaacaccagcacgc

SEQ ID NO: 1369059 - RNA, 19 nt, Artificial Sequence
  Description of Artificial Sequence: Synthetic oligonucleotide
aacugguuauacaggacgc

SEQ ID NO: 1369060 - RNA, 19 nt, Artificial Sequence
  Description of Artificial Sequence: Synthetic oligonucleotide
aaucagagccaaugucucg

SEQ ID NO: 1369061 - RNA, 19 nt, Artificial Sequence
  Description of Artificial Sequence: Synthetic oligonucleotide
auacaagcggucaagcacc

SEQ ID NO: 1369062 - RNA, 19 nt, Artificial Sequence
  Description of Artificial Sequence: Synthetic oligonucleotide
auacuugucaagugagggg

SEQ ID NO: 1369063 - RNA, 19 nt, Artificial Sequence
  Description of Artificial Sequence: Synthetic oligonucleotide
cauacuugucaagugaggg

SEQ ID NO: 1369064 - RNA, 19 nt, Artificial Sequence
  Description of Artificial Sequence: Synthetic oligonucleotide
acucaguauaggcauacag

SEQ ID NO: 1369065 - RNA, 19 nt, Artificial Sequence
  Description of Artificial Sequence: Synthetic oligonucleotide
agcaucaccggaugggccc

SEQ ID NO: 1369066 - RNA, 19 nt, Artificial Sequence
  Description of Artificial Sequence: Synthetic oligonucleotide
accggaugggcccuggucc

SEQ ID NO: 1369067 - RNA, 19 nt, Artificial Sequence
  Description of Artificial Sequence: Synthetic oligonucleotide
ucacucauacccucuacag

SEQ ID NO: 1369068 - RNA, 19 nt, Artificial Sequence
  Description of Artificial Sequence: Synthetic oligonucleotide
aaaacggugggagaaccag

SEQ ID NO: 1369069 - RNA, 19 nt, Artificial Sequence
  Description of Artificial Sequence: Synthetic oligonucleotide
uuccgugaaacgaagucug

SEQ ID NO: 1369070 - RNA, 19 nt, Artificial Sequence
  Description of Artificial Sequence: Synthetic oligonucleotide
uuugagcaucaccggaugg

SEQ ID NO: 1369071 - RNA, 19 nt, Artificial Sequence
  Description of Artificial Sequence: Synthetic oligonucleotide
aaagcauccgcaucaccca

SEQ ID NO: 1369072 - RNA, 19 nt, Artificial Sequence
  Description of Artificial Sequence: Synthetic oligonucleotide
agaggaaagagagaaucuc

SEQ ID NO: 1369073 - RNA, 19 nt, Artificial Sequence
  Description of Artificial Sequence: Synthetic oligonucleotide
uaauuggucuccacgacaa

SEQ ID NO: 1369074 - RNA, 19 nt, Artificial Sequence
  Description of Artificial Sequence: Synthetic oligonucleotide
cagcagaagugauacaagg

SEQ ID NO: 1369075 - RNA, 19 nt, Artificial Sequence
  Description of Artificial Sequence: Synthetic oligonucleotide
gaugggauugaggaugagg

SEQ ID NO: 1369076 - RNA, 19 nt, Artificial Sequence
  Description of Artificial Sequence: Synthetic oligonucleotide
ccggaugagagauugaugg

SEQ ID NO: 1369077 - RNA, 19 nt, Artificial Sequence
  Description of Artificial Sequence: Synthetic oligonucleotide
auccgcaucacccaauucu

SEQ ID NO: 1369078 - RNA, 19 nt, Artificial Sequence
  Description of Artificial Sequence: Synthetic oligonucleotide
uuucaugagcccagccugg

SEQ ID NO: 1369079 - RNA, 19 nt, Artificial Sequence
  Description of Artificial Sequence: Synthetic oligonucleotide
agguucagcacuuuucaug

SEQ ID NO: 1369080 - RNA, 19 nt, Artificial Sequence
  Description of Artificial Sequence: Synthetic oligonucleotide
uacuugucaagugagggga

SEQ ID NO: 1369081 - RNA, 19 nt, Artificial Sequence
  Description of Artificial Sequence: Synthetic oligonucleotide
uaaucagagccaaugucuc

SEQ ID NO: 1369082 - RNA, 19 nt, Artificial Sequence
  Description of Artificial Sequence: Synthetic oligonucleotide
caguauaggcauacagucg

SEQ ID NO: 1369083 - RNA, 19 nt, Artificial Sequence
  Description of Artificial Sequence: Synthetic oligonucleotide
guagauuccugcauuguag

SEQ ID NO: 1369084 - RNA, 19 nt, Artificial Sequence
  Description of Artificial Sequence: Synthetic oligonucleotide
agaagggcgauucggaggu

SEQ ID NO: 1369085 - RNA, 19 nt, Artificial Sequence
  Description of Artificial Sequence: Synthetic oligonucleotide
auucggagaccacugagca

SEQ ID NO: 1369086 - RNA, 19 nt, Artificial Sequence
  Description of Artificial Sequence: Synthetic oligonucleotide
caagcggucaagcaccccg

SEQ ID NO: 1369087 - RNA, 19 nt, Artificial Sequence
  Description of Artificial Sequence: Synthetic oligonucleotide
gaaaagugcgaugagcgca

SEQ ID NO: 1369088 - RNA, 19 nt, Artificial Sequence
  Description of Artificial Sequence: Synthetic oligonucleotide
aucaccccgggucacgagc

SEQ ID NO: 1369089 - RNA, 19 nt, Artificial Sequence
  Description of Artificial Sequence: Synthetic oligonucleotide
uguuugagcaucaccggau

SEQ ID NO: 1369090 - RNA, 19 nt, Artificial Sequence
  Description of Artificial Sequence: Synthetic oligonucleotide
ucaagugaggggacguccc

SEQ ID NO: 1369091 - RNA, 19 nt, Artificial Sequence
  Description of Artificial Sequence: Synthetic oligonucleotide
aggcgugugggguaguaac

SEQ ID NO: 1369092 - RNA, 19 nt, Artificial Sequence
  Description of Artificial Sequence: Synthetic oligonucleotide
ucaguccaccccuugcagg

SEQ ID NO: 1369093 - RNA, 19 nt, Artificial Sequence
  Description of Artificial Sequence: Synthetic oligonucleotide
acugguuauacaggacgcc

SEQ ID NO: 1369094 - RNA, 19 nt, Artificial Sequence
  Description of Artificial Sequence: Synthetic oligonucleotide
gagccaaugucucgcauug

SEQ ID NO: 1369095 - RNA, 19 nt, Artificial Sequence
  Description of Artificial Sequence: Synthetic oligonucleotide
ucggagaccacugagcagu

SEQ ID NO: 1369096 - RNA, 19 nt, Artificial Sequence
  Description of Artificial Sequence: Synthetic oligonucleotide
gugaaacgaagucuguccc

SEQ ID NO: 1369097 - RNA, 19 nt, Artificial Sequence
  Description of Artificial Sequence: Synthetic oligonucleotide
uccgacucaguauaggcau

SEQ ID NO: 1369098 - RNA, 19 nt, Artificial Sequence
  Description of Artificial Sequence: Synthetic oligonucleotide
gaagucugucccuuuccag

SEQ ID NO: 1369099 - RNA, 19 nt, Artificial Sequence
  Description of Artificial Sequence: Synthetic oligonucleotide
cuuagccaaagaagggagc

SEQ ID NO: 1369100 - RNA, 19 nt, Artificial Sequence
  Description of Artificial Sequence: Synthetic oligonucleotide
uguaggugugcucgguuca

SEQ ID NO: 1369101 - RNA, 19 nt, Artificial Sequence
  Description of Artificial Sequence: Synthetic oligonucleotide
aguucaaaguccacuugcg

SEQ ID NO: 1369102 - RNA, 19 nt, Artificial Sequence
  Description of Artificial Sequence: Synthetic oligonucleotide
aggaaguucaacaaagaau

SEQ ID NO: 1369103 - RNA, 19 nt, Artificial Sequence
  Description of Artificial Sequence: Synthetic oligonucleotide
cauguuggggaaccgguag

SEQ ID NO: 1369104 - RNA, 19 nt, Artificial Sequence
  Description of Artificial Sequence: Synthetic oligonucleotide
cagaagggcgauucggagg

SEQ ID NO: 1369105 - RNA, 19 nt, Artificial Sequence
  Description of Artificial Sequence: Synthetic oligonucleotide
gacaccggaugagagauug

SEQ ID NO: 1369106 - RNA, 19 nt, Artificial Sequence
  Description of Artificial Sequence: Synthetic oligonucleotide
acugggagagcccaccaug

SEQ ID NO: 1369107 - RNA, 19 nt, Artificial Sequence
  Description of Artificial Sequence: Synthetic oligonucleotide
agcaucucagagaaaagug

SEQ ID NO: 1369108 - RNA, 19 nt, Artificial Sequence
  Description of Artificial Sequence: Synthetic oligonucleotide
ugaaacgaagucugucccu

SEQ ID NO: 1369109 - RNA, 19 nt, Artificial Sequence
  Description of Artificial Sequence: Synthetic oligonucleotide
uguagcuccgacucaguau

SEQ ID NO: 1369110 - RNA, 19 nt, Artificial Sequence
  Description of Artificial Sequence: Synthetic oligonucleotide
aagugcgaugagcgcaauc

SEQ ID NO: 1369111 - RNA, 19 nt, Artificial Sequence
  Description of Artificial Sequence: Synthetic oligonucleotide
gauacaagguggcucucca

SEQ ID NO: 1369112 - RNA, 19 nt, Artificial Sequence
  Description of Artificial Sequence: Synthetic oligonucleotide
uaggcauacagucgguaau

SEQ ID NO: 1369113 - RNA, 19 nt, Artificial Sequence
  Description of Artificial Sequence: Synthetic oligonucleotide
auaggcauacagucgguaa

SEQ ID NO: 1369114 - RNA, 19 nt, Artificial Sequence
  Description of Artificial Sequence: Synthetic oligonucleotide
uacaggacgccuuccguga

SEQ ID NO: 1369115 - RNA, 19 nt, Artificial Sequence
  Description of Artificial Sequence: Synthetic oligonucleotide
cuggaaaacaagcccgaac

SEQ ID NO: 1369116 - RNA, 19 nt, Artificial Sequence
  Description of Artificial Sequence: Synthetic oligonucleotide
ugggauugaggaugaggcc

SEQ ID NO: 1369117 - RNA, 19 nt, Artificial Sequence
  Description of Artificial Sequence: Synthetic oligonucleotide
ugcgacaggaacugguuau

SEQ ID NO: 1369118 - RNA, 19 nt, Artificial Sequence
  Description of Artificial Sequence: Synthetic oligonucleotide
ugaucuccaucaccccggg

SEQ ID NO: 1369119 - RNA, 19 nt, Artificial Sequence
  Description of Artificial Sequence: Synthetic oligonucleotide
aaacaagcccgaacucacg

SEQ ID NO: 1369120 - RNA, 19 nt, Artificial Sequence
  Description of Artificial Sequence: Synthetic oligonucleotide
aagggcgauucggagguuc

SEQ ID NO: 1369121 - RNA, 19 nt, Artificial Sequence
  Description of Artificial Sequence: Synthetic oligonucleotide
agagacaccggaugagaga

SEQ ID NO: 1369122 - RNA, 19 nt, Artificial Sequence
  Description of Artificial Sequence: Synthetic oligonucleotide
aaccgguagagcaucucag

SEQ ID NO: 1369123 - RNA, 19 nt, Artificial Sequence
  Description of Artificial Sequence: Synthetic oligonucleotide
aggugugcucgguucaguc

SEQ ID NO: 1369124 - RNA, 19 nt, Artificial Sequence
  Description of Artificial Sequence: Synthetic oligonucleotide
ggaugagagauugauggcc

SEQ ID NO: 1369125 - RNA, 19 nt, Artificial Sequence
  Description of Artificial Sequence: Synthetic oligonucleotide
ggcgucaccaccaucagcc

SEQ ID NO: 1369126 - RNA, 19 nt, Artificial Sequence
  Description of Artificial Sequence: Synthetic oligonucleotide
acuugugucaucagaccag

SEQ ID NO: 1369127 - RNA, 19 nt, Artificial Sequence
  Description of Artificial Sequence: Synthetic oligonucleotide
ugccgcuuccaaaagcgcu

SEQ ID NO: 1369128 - RNA, 19 nt, Artificial Sequence
  Description of Artificial Sequence: Synthetic oligonucleotide
caagcccgaacucacgcag

SEQ ID NO: 1369129 - RNA, 19 nt, Artificial Sequence
  Description of Artificial Sequence: Synthetic oligonucleotide
ugagcaucaccggaugggc

SEQ ID NO: 1369130 - RNA, 19 nt, Artificial Sequence
  Description of Artificial Sequence: Synthetic oligonucleotide
aagugaggggacgucccgg

SEQ ID NO: 1369131 - RNA, 19 nt, Artificial Sequence
  Description of Artificial Sequence: Synthetic oligonucleotide
gaaccgguagagcaucuca

SEQ ID NO: 1369132 - RNA, 19 nt, Artificial Sequence
  Description of Artificial Sequence: Synthetic oligonucleotide
ugcacacucucccggguca

SEQ ID NO: 1369133 - RNA, 19 nt, Artificial Sequence
  Description of Artificial Sequence: Synthetic oligonucleotide
cuugucaagugaggggacg

SEQ ID NO: 1369134 - RNA, 19 nt, Artificial Sequence
  Description of Artificial Sequence: Synthetic oligonucleotide
cagagacaccggaugagag

SEQ ID NO: 1369135 - RNA, 19 nt, Artificial Sequence
  Description of Artificial Sequence: Synthetic oligonucleotide
ugauacaagguggcucucc

SEQ ID NO: 1369136 - RNA, 19 nt, Artificial Sequence
  Description of Artificial Sequence: Synthetic oligonucleotide
cuugcccaaaguagagaag

SEQ ID NO: 1369137 - RNA, 19 nt, Artificial Sequence
  Description of Artificial Sequence: Synthetic oligonucleotide
ucgcauuggcuucuggaaa

SEQ ID NO: 1369138 - RNA, 19 nt, Artificial Sequence
  Description of Artificial Sequence: Synthetic oligonucleotide
caugaagugcaggaccacc

SEQ ID NO: 1369139 - RNA, 19 nt, Artificial Sequence
  Description of Artificial Sequence: Synthetic oligonucleotide
caggcaaguggcugggugc

SEQ ID NO: 1369140 - RNA, 19 nt, Artificial Sequence
  Description of Artificial Sequence: Synthetic oligonucleotide
ggaaagagagaaucucuac

SEQ ID NO: 1369141 - RNA, 19 nt, Artificial Sequence
  Description of Artificial Sequence: Synthetic oligonucleotide
aaaagugcgaugagcgcaa

SEQ ID NO: 1369142 - RNA, 19 nt, Artificial Sequence
  Description of Artificial Sequence: Synthetic oligonucleotide
caucagaccaggccuugcc

SEQ ID NO: 1369143 - RNA, 19 nt, Artificial Sequence
  Description of Artificial Sequence: Synthetic oligonucleotide
guagcuccgacucaguaua

SEQ ID NO: 1369144 - RNA, 19 nt, Artificial Sequence
  Description of Artificial Sequence: Synthetic oligonucleotide
ggagcugugcuucugccgc

SEQ ID NO: 1369145 - RNA, 19 nt, Artificial Sequence
  Description of Artificial Sequence: Synthetic oligonucleotide
aaagcgcuugacgucgcug

SEQ ID NO: 1369146 - RNA, 19 nt, Artificial Sequence
  Description of Artificial Sequence: Synthetic oligonucleotide
augagagauugauggccag

SEQ ID NO: 1369147 - RNA, 19 nt, Artificial Sequence
  Description of Artificial Sequence: Synthetic oligonucleotide
uacaagcggucaagcaccc

SEQ ID NO: 1369148 - RNA, 19 nt, Artificial Sequence
  Description of Artificial Sequence: Synthetic oligonucleotide
uucggagaccacugagcag

SEQ ID NO: 1369149 - RNA, 19 nt, Artificial Sequence
  Description of Artificial Sequence: Synthetic oligonucleotide
cucaguauaggcauacagu

SEQ ID NO: 1369150 - RNA, 19 nt, Artificial Sequence
  Description of Artificial Sequence: Synthetic oligonucleotide
aaaagcgcuugacgucgcu

SEQ ID NO: 1369151 - RNA, 19 nt, Artificial Sequence
  Description of Artificial Sequence: Synthetic oligonucleotide
gagagaaucucuaccaggu

SEQ ID NO: 1369152 - RNA, 19 nt, Artificial Sequence
  Description of Artificial Sequence: Synthetic oligonucleotide
gacgccuuccgugaaacga

SEQ ID NO: 1369153 - RNA, 19 nt, Artificial Sequence
  Description of Artificial Sequence: Synthetic oligonucleotide
cgugaaacgaagucugucc

SEQ ID NO: 1369154 - RNA, 19 nt, Artificial Sequence
  Description of Artificial Sequence: Synthetic oligonucleotide
acucacgcagguguuguag

SEQ ID NO: 1369155 - RNA, 19 nt, Artificial Sequence
  Description of Artificial Sequence: Synthetic oligonucleotide
ugagccuugcugaacucuu

SEQ ID NO: 1369156 - RNA, 19 nt, Artificial Sequence
  Description of Artificial Sequence: Synthetic oligonucleotide
agcagaagugauacaaggu

SEQ ID NO: 1369157 - RNA, 19 nt, Artificial Sequence
  Description of Artificial Sequence: Synthetic oligonucleotide
ugguuauacaggacgccuu

SEQ ID NO: 1369158 - RNA, 19 nt, Artificial Sequence
  Description of Artificial Sequence: Synthetic oligonucleotide
gcugggugcccauacaagc

SEQ ID NO: 1369159 - RNA, 19 nt, Artificial Sequence
  Description of Artificial Sequence: Synthetic oligonucleotide
agagccaaugucucgcauu

SEQ ID NO: 1369160 - RNA, 19 nt, Artificial Sequence
  Description of Artificial Sequence: Synthetic oligonucleotide
ccgucgcuuaaucagagcc

SEQ ID NO: 1369161 - RNA, 19 nt, Artificial Sequence
  Description of Artificial Sequence: Synthetic oligonucleotide
acccagaagggcgauucgg

SEQ ID NO: 1369162 - RNA, 19 nt, Artificial Sequence
  Description of Artificial Sequence: Synthetic oligonucleotide
ugggugugccaaauucgga

SEQ ID NO: 1369163 - RNA, 19 nt, Artificial Sequence
  Description of Artificial Sequence: Synthetic oligonucleotide
ucuccacgacaaugaagcc

SEQ ID NO: 1369164 - RNA, 19 nt, Artificial Sequence
  Description of Artificial Sequence: Synthetic oligonucleotide
caagugaggggacgucccg

SEQ ID NO: 1369165 - RNA, 19 nt, Artificial Sequence
  Description of Artificial Sequence: Synthetic oligonucleotide
ccaaauucggagaccacug

SEQ ID NO: 1369166 - RNA, 19 nt, Artificial Sequence
  Description of Artificial Sequence: Synthetic oligonucleotide
ccaaaagcgcuugacgucg

SEQ ID NO: 1369167 - RNA, 19 nt, Artificial Sequence
  Description of Artificial Sequence: Synthetic oligonucleotide
ugcucgguucaguccaccc

SEQ ID NO: 1369168 - RNA, 19 nt, Artificial Sequence
  Description of Artificial Sequence: Synthetic oligonucleotide
agcgcaaucuguagcuccg

SEQ ID NO: 1369169 - RNA, 19 nt, Artificial Sequence
  Description of Artificial Sequence: Synthetic oligonucleotide
accgguagagcaucucaga

SEQ ID NO: 1369170 - RNA, 19 nt, Artificial Sequence
  Description of Artificial Sequence: Synthetic oligonucleotide
guaguccuugcccaaagua

SEQ ID NO: 1369171 - RNA, 19 nt, Artificial Sequence
  Description of Artificial Sequence: Synthetic oligonucleotide
ggaaauggaugaucugcug

SEQ ID NO: 1369172 - RNA, 19 nt, Artificial Sequence
  Description of Artificial Sequence: Synthetic oligonucleotide
gccaaugucucgcauuggc

SEQ ID NO: 1369173 - RNA, 19 nt, Artificial Sequence
  Description of Artificial Sequence: Synthetic oligonucleotide
guuauacaggacgccuucc

SEQ ID NO: 1369174 - RNA, 19 nt, Artificial Sequence
  Description of Artificial Sequence: Synthetic oligonucleotide
acaagcccgaacucacgca

SEQ ID NO: 1369175 - RNA, 19 nt, Artificial Sequence
  Description of Artificial Sequence: Synthetic oligonucleotide
aacgccgggacuuccucuu

SEQ ID NO: 1369176 - RNA, 19 nt, Artificial Sequence
  Description of Artificial Sequence: Synthetic oligonucleotide
uauaggcauacagucggua

SEQ ID NO: 1369177 - RNA, 19 nt, Artificial Sequence
  Description of Artificial Sequence: Synthetic oligonucleotide
cuguaauggugggaggcag

SEQ ID NO: 1369178 - RNA, 19 nt, Artificial Sequence
  Description of Artificial Sequence: Synthetic oligonucleotide
uugucaagugaggggacgu

SEQ ID NO: 1369179 - RNA, 19 nt, Artificial Sequence
  Description of Artificial Sequence: Synthetic oligonucleotide
gcuccgacucaguauaggc

SEQ ID NO: 1369180 - RNA, 19 nt, Artificial Sequence
  Description of Artificial Sequence: Synthetic oligonucleotide
auguuggggaaccgguaga

SEQ ID NO: 1369181 - RNA, 19 nt, Artificial Sequence
  Description of Artificial Sequence: Synthetic oligonucleotide
acuugucaagugaggggac

SEQ ID NO: 1369182 - RNA, 19 nt, Artificial Sequence
  Description of Artificial Sequence: Synthetic oligonucleotide
ugcccauacaagcggucaa

SEQ ID NO: 1369183 - RNA, 19 nt, Artificial Sequence
  Description of Artificial Sequence: Synthetic oligonucleotide
aguaccagagcugggccga

SEQ ID NO: 1369184 - RNA, 19 nt, Artificial Sequence
  Description of Artificial Sequence: Synthetic oligonucleotide
gggagagcccaccaugaag

SEQ ID NO: 1369185 - RNA, 19 nt, Artificial Sequence
  Description of Artificial Sequence: Synthetic oligonucleotide
gaaucacucauacccucua

SEQ ID NO: 1369186 - RNA, 19 nt, Artificial Sequence
  Description of Artificial Sequence: Synthetic oligonucleotide
gguuauacaggacgccuuc

SEQ ID NO: 1369187 - RNA, 19 nt, Artificial Sequence
  Description of Artificial Sequence: Synthetic oligonucleotide
auucggagguucuggcgga

SEQ ID NO: 1369188 - RNA, 19 nt, Artificial Sequence
  Description of Artificial Sequence: Synthetic oligonucleotide
cucgcauuggcuucuggaa

SEQ ID NO: 1369189 - RNA, 19 nt, Artificial Sequence
  Description of Artificial Sequence: Synthetic oligonucleotide
ucucccgggucaccugugc

SEQ ID NO: 1369190 - RNA, 19 nt, Artificial Sequence
  Description of Artificial Sequence: Synthetic oligonucleotide
aagcccgaacucacgcagg

SEQ ID NO: 1369191 - RNA, 19 nt, Artificial Sequence
  Description of Artificial Sequence: Synthetic oligonucleotide
acuugcgacaggaacuggu

SEQ ID NO: 1369192 - RNA, 19 nt, Artificial Sequence
  Description of Artificial Sequence: Synthetic oligonucleotide
ucaugagcccagccuggcu

SEQ ID NO: 1369193 - RNA, 19 nt, Artificial Sequence
  Description of Artificial Sequence: Synthetic oligonucleotide
ccaauucuuagccaaagaa

SEQ ID NO: 1369194 - RNA, 19 nt, Artificial Sequence
  Description of Artificial Sequence: Synthetic oligonucleotide
aaacgaagucugucccuuu

SEQ ID NO: 1369195 - RNA, 19 nt, Artificial Sequence
  Description of Artificial Sequence: Synthetic oligonucleotide
cugggcggucugcagauac

SEQ ID NO: 1369196 - RNA, 19 nt, Artificial Sequence
  Description of Artificial Sequence: Synthetic oligonucleotide
cuguuugagcaucaccgga

SEQ ID NO: 1369197 - RNA, 19 nt, Artificial Sequence
  Description of Artificial Sequence: Synthetic oligonucleotide
gguucaguccaccccuugc

SEQ ID NO: 1369198 - RNA, 19 nt, Artificial Sequence
  Description of Artificial Sequence: Synthetic oligonucleotide
agcuccgacucaguauagg

SEQ ID NO: 1369199 - RNA, 19 nt, Artificial Sequence
  Description of Artificial Sequence: Synthetic oligonucleotide
uucaugagcccagccuggc

SEQ ID NO: 1369200 - RNA, 19 nt, Artificial Sequence
  Description of Artificial Sequence: Synthetic oligonucleotide
aggaaagagagaaucucua

SEQ ID NO: 1369201 - RNA, 19 nt, Artificial Sequence
  Description of Artificial Sequence: Synthetic oligonucleotide
cuccgacucaguauaggca

SEQ ID NO: 1369202 - RNA, 19 nt, Artificial Sequence
  Description of Artificial Sequence: Synthetic oligonucleotide
agccgcuuggccgaguucu

SEQ ID NO: 1369203 - RNA, 19 nt, Artificial Sequence
  Description of Artificial Sequence: Synthetic oligonucleotide
uagcuccgacucaguauag

SEQ ID NO: 1369204 - RNA, 19 nt, Artificial Sequence
  Description of Artificial Sequence: Synthetic oligonucleotide
cuuggccgaguucucgaac

SEQ ID NO: 1369205 - RNA, 19 nt, Artificial Sequence
  Description of Artificial Sequence: Synthetic oligonucleotide
ggugugcucgguucagucc

SEQ ID NO: 1369206 - RNA, 19 nt, Artificial Sequence
  Description of Artificial Sequence: Synthetic oligonucleotide
uccuugcccaaaguagaga

SEQ ID NO: 1369207 - RNA, 19 nt, Artificial Sequence
  Description of Artificial Sequence: Synthetic oligonucleotide
agcggucaagcaccccggg

SEQ ID NO: 1369208 - RNA, 19 nt, Artificial Sequence
  Description of Artificial Sequence: Synthetic oligonucleotide
uggucuccacgacaaugaa

SEQ ID NO: 1369209 - RNA, 19 nt, Artificial Sequence
  Description of Artificial Sequence: Synthetic oligonucleotide
uaacgccgggacuuccucu

SEQ ID NO: 1369210 - RNA, 19 nt, Artificial Sequence
  Description of Artificial Sequence: Synthetic oligonucleotide
caaauucggagaccacuga

SEQ ID NO: 1369211 - RNA, 19 nt, Artificial Sequence
  Description of Artificial Sequence: Synthetic oligonucleotide
acgagccgucgcuuaauca

SEQ ID NO: 1369212 - RNA, 19 nt, Artificial Sequence
  Description of Artificial Sequence: Synthetic oligonucleotide
agcccgaacucacgcaggu

SEQ ID NO: 1369213 - RNA, 19 nt, Artificial Sequence
  Description of Artificial Sequence: Synthetic oligonucleotide
ucaucagaccaggccuugc

SEQ ID NO: 1369214 - RNA, 19 nt, Artificial Sequence
  Description of Artificial Sequence: Synthetic oligonucleotide
gggguaguaacgccgggac

SEQ ID NO: 1369215 - RNA, 19 nt, Artificial Sequence
  Description of Artificial Sequence: Synthetic oligonucleotide
ccuguagauuccugcauug

SEQ ID NO: 1369216 - RNA, 19 nt, Artificial Sequence
  Description of Artificial Sequence: Synthetic oligonucleotide
cgagccgucgcuuaaucag

SEQ ID NO: 1369217 - RNA, 19 nt, Artificial Sequence
  Description of Artificial Sequence: Synthetic oligonucleotide
cuaccagguccaugccccg

SEQ ID NO: 1369218 - RNA, 19 nt, Artificial Sequence
  Description of Artificial Sequence: Synthetic oligonucleotide
gugcgaugagcgcaaucug

SEQ ID NO: 1369219 - RNA, 19 nt, Artificial Sequence
  Description of Artificial Sequence: Synthetic oligonucleotide
ugccaaauucggagaccac

SEQ ID NO: 1369220 - RNA, 19 nt, Artificial Sequence
  Description of Artificial Sequence: Synthetic oligonucleotide
gucgcuuaaucagagccaa

SEQ ID NO: 1369221 - RNA, 19 nt, Artificial Sequence
  Description of Artificial Sequence: Synthetic oligonucleotide
cugccgcuuccaaaagcgc

SEQ ID NO: 1369222 - RNA, 19 nt, Artificial Sequence
  Description of Artificial Sequence: Synthetic oligonucleotide
guguuguaggaaguucaac

SEQ ID NO: 1369223 - RNA, 19 nt, Artificial Sequence
  Description of Artificial Sequence: Synthetic oligonucleotide
cugggagagcccaccauga

SEQ ID NO: 1369224 - RNA, 19 nt, Artificial Sequence
  Description of Artificial Sequence: Synthetic oligonucleotide
acaagcggucaagcacccc

SEQ ID NO: 1369225 - RNA, 19 nt, Artificial Sequence
  Description of Artificial Sequence: Synthetic oligonucleotide
ugugcucgguucaguccac

SEQ ID NO: 1369226 - RNA, 19 nt, Artificial Sequence
  Description of Artificial Sequence: Synthetic oligonucleotide
ccuuccgugaaacgaaguc

SEQ ID NO: 1369227 - RNA, 19 nt, Artificial Sequence
  Description of Artificial Sequence: Synthetic oligonucleotide
guaggugugcucgguucag

SEQ ID NO: 1369228 - RNA, 19 nt, Artificial Sequence
  Description of Artificial Sequence: Synthetic oligonucleotide
gcugugaugccgcuggcga

SEQ ID NO: 1369229 - RNA, 19 nt, Artificial Sequence
  Description of Artificial Sequence: Synthetic oligonucleotide
accggaugagagauugaug

SEQ ID NO: 1369230 - RNA, 19 nt, Artificial Sequence
  Description of Artificial Sequence: Synthetic oligonucleotide
ccgguagagcaucucagag

SEQ ID NO: 1369231 - RNA, 19 nt, Artificial Sequence
  Description of Artificial Sequence: Synthetic oligonucleotide
ugggcggucugcagauacu

SEQ ID NO: 1369232 - RNA, 19 nt, Artificial Sequence
  Description of Artificial Sequence: Synthetic oligonucleotide
agagcugggccgacguguc

SEQ ID NO: 1369233 - RNA, 19 nt, Artificial Sequence
  Description of Artificial Sequence: Synthetic oligonucleotide
aacucacgcagguguugua

SEQ ID NO: 1369234 - RNA, 19 nt, Artificial Sequence
  Description of Artificial Sequence: Synthetic oligonucleotide
guaacgccgggacuuccuc

SEQ ID NO: 1369235 - RNA, 19 nt, Artificial Sequence
  Description of Artificial Sequence: Synthetic oligonucleotide
guucuggcggaagauggga

SEQ ID NO: 1369236 - RNA, 19 nt, Artificial Sequence
  Description of Artificial Sequence: Synthetic oligonucleotide
cacccagaagggcgauucg

SEQ ID NO: 1369237 - RNA, 19 nt, Artificial Sequence
  Description of Artificial Sequence: Synthetic oligonucleotide
caaugucucgcauuggcuu

SEQ ID NO: 1369238 - RNA, 19 nt, Artificial Sequence
  Description of Artificial Sequence: Synthetic oligonucleotide
gcucgguucaguccacccc

SEQ ID NO: 1369239 - RNA, 19 nt, Artificial Sequence
  Description of Artificial Sequence: Synthetic oligonucleotide
gaagugauacaagguggcu

SEQ ID NO: 1369240 - RNA, 19 nt, Artificial Sequence
  Description of Artificial Sequence: Synthetic oligonucleotide
gcacuuuucaugagcccag

SEQ ID NO: 1369241 - RNA, 19 nt, Artificial Sequence
  Description of Artificial Sequence: Synthetic oligonucleotide
aguaacgccgggacuuccu

SEQ ID NO: 1369242 - RNA, 19 nt, Artificial Sequence
  Description of Artificial Sequence: Synthetic oligonucleotide
ucggagguucuggcggaag

SEQ ID NO: 1369243 - RNA, 19 nt, Artificial Sequence
  Description of Artificial Sequence: Synthetic oligonucleotide
accgcagccuguggcaaag

SEQ ID NO: 1369244 - RNA, 19 nt, Artificial Sequence
  Description of Artificial Sequence: Synthetic oligonucleotide
gaaacgaagucugucccuu

SEQ ID NO: 1369245 - RNA, 19 nt, Artificial Sequence
  Description of Artificial Sequence: Synthetic oligonucleotide
gcggucugcagauacugca

SEQ ID NO: 1369246 - RNA, 19 nt, Artificial Sequence
  Description of Artificial Sequence: Synthetic oligonucleotide
agccaaugucucgcauugg

SEQ ID NO: 1369247 - RNA, 19 nt, Artificial Sequence
  Description of Artificial Sequence: Synthetic oligonucleotide
agccgucgcuuaaucagag

SEQ ID NO: 1369248 - RNA, 19 nt, Artificial Sequence
  Description of Artificial Sequence: Synthetic oligonucleotide
gagccgucgcuuaaucaga

SEQ ID NO: 1369249 - RNA, 19 nt, Artificial Sequence
  Description of Artificial Sequence: Synthetic oligonucleotide
agaguaguccuugcccaaa

SEQ ID NO: 1369250 - RNA, 19 nt, Artificial Sequence
  Description of Artificial Sequence: Synthetic oligonucleotide
cacgagccgucgcuuaauc

SEQ ID NO: 1369251 - RNA, 19 nt, Artificial Sequence
  Description of Artificial Sequence: Synthetic oligonucleotide
cucgguucaguccaccccu

SEQ ID NO: 1369252 - RNA, 19 nt, Artificial Sequence
  Description of Artificial Sequence: Synthetic oligonucleotide
cugcacacucucccggguc

SEQ ID NO: 1369253 - RNA, 19 nt, Artificial Sequence
  Description of Artificial Sequence: Synthetic oligonucleotide
ggugggagaaccaggaagu

SEQ ID NO: 1369254 - RNA, 19 nt, Artificial Sequence
  Description of Artificial Sequence: Synthetic oligonucleotide
cgcuuaaucagagccaaug

SEQ ID NO: 1369255 - RNA, 19 nt, Artificial Sequence
  Description of Artificial Sequence: Synthetic oligonucleotide
ucgcuuaaucagagccaau

SEQ ID NO: 1369256 - RNA, 19 nt, Artificial Sequence
  Description of Artificial Sequence: Synthetic oligonucleotide
agccggaucuggucuguaa

SEQ ID NO: 1369257 - RNA, 19 nt, Artificial Sequence
  Description of Artificial Sequence: Synthetic oligonucleotide
gaacucacgcagguguugu

SEQ ID NO: 1369258 - RNA, 19 nt, Artificial Sequence
  Description of Artificial Sequence: Synthetic oligonucleotide
gacucaguauaggcauaca

SEQ ID NO: 1369259 - RNA, 19 nt, Artificial Sequence
  Description of Artificial Sequence: Synthetic oligonucleotide
ccugguccuuaggaaaugg

SEQ ID NO: 1369260 - RNA, 19 nt, Artificial Sequence
  Description of Artificial Sequence: Synthetic oligonucleotide
gccgaguucucgaacacca

SEQ ID NO: 1369261 - RNA, 19 nt, Artificial Sequence
  Description of Artificial Sequence: Synthetic oligonucleotide
agaccacugagcaguccug

SEQ ID NO: 1369262 - RNA, 19 nt, Artificial Sequence
  Description of Artificial Sequence: Synthetic oligonucleotide
augccccgacucugggcgg

SEQ ID NO: 1369263 - RNA, 19 nt, Artificial Sequence
  Description of Artificial Sequence: Synthetic oligonucleotide
ccggaucuggucuguaaug

SEQ ID NO: 1369264 - RNA, 19 nt, Artificial Sequence
  Description of Artificial Sequence: Synthetic oligonucleotide
uggcggaagaugggauuga

SEQ ID NO: 1369265 - RNA, 19 nt, Artificial Sequence
  Description of Artificial Sequence: Synthetic oligonucleotide
uaggugugcucgguucagu

SEQ ID NO: 1369266 - RNA, 19 nt, Artificial Sequence
  Description of Artificial Sequence: Synthetic oligonucleotide
cauccgcaucacccaauuc

SEQ ID NO: 1369267 - RNA, 19 nt, Artificial Sequence
  Description of Artificial Sequence: Synthetic oligonucleotide
cugguuauacaggacgccu

SEQ ID NO: 1369268 - RNA, 19 nt, Artificial Sequence
  Description of Artificial Sequence: Synthetic oligonucleotide
caccggaugggcccugguc

SEQ ID NO: 1369269 - RNA, 19 nt, Artificial Sequence
  Description of Artificial Sequence: Synthetic oligonucleotide
accccuugcaggggugauc

SEQ ID NO: 1369270 - RNA, 19 nt, Artificial Sequence
  Description of Artificial Sequence: Synthetic oligonucleotide
guaguaacgccgggacuuc

SEQ ID NO: 1369271 - RNA, 19 nt, Artificial Sequence
  Description of Artificial Sequence: Synthetic oligonucleotide
cgauucggagguucuggcg

SEQ ID NO: 1369272 - RNA, 19 nt, Artificial Sequence
  Description of Artificial Sequence: Synthetic oligonucleotide
acgccgggacuuccucuuc

SEQ ID NO: 1369273 - RNA, 19 nt, Artificial Sequence
  Description of Artificial Sequence: Synthetic oligonucleotide
aaagugcgaugagcgcaau

SEQ ID NO: 1369274 - RNA, 19 nt, Artificial Sequence
  Description of Artificial Sequence: Synthetic oligonucleotide
aucaccggaugggcccugg

SEQ ID NO: 1369275 - RNA, 19 nt, Artificial Sequence
  Description of Artificial Sequence: Synthetic oligonucleotide
ucaccggaugggcccuggu

SEQ ID NO: 1369276 - RNA, 19 nt, Artificial Sequence
  Description of Artificial Sequence: Synthetic oligonucleotide
gcgugugggguaguaacgc

SEQ ID NO: 1369277 - RNA, 19 nt, Artificial Sequence
  Description of Artificial Sequence: Synthetic oligonucleotide
ccauacaagcggucaagca

SEQ ID NO: 1369278 - RNA, 19 nt, Artificial Sequence
  Description of Artificial Sequence: Synthetic oligonucleotide
cacuugcgacaggaacugg

SEQ ID NO: 1369279 - RNA, 19 nt, Artificial Sequence
  Description of Artificial Sequence: Synthetic oligonucleotide
ggacgccuuccgugaaacg

SEQ ID NO: 1369280 - RNA, 19 nt, Artificial Sequence
  Description of Artificial Sequence: Synthetic oligonucleotide
acaggacgccuuccgugaa

SEQ ID NO: 1369281 - RNA, 19 nt, Artificial Sequence
  Description of Artificial Sequence: Synthetic oligonucleotide
cccauacaagcggucaagc

SEQ ID NO: 1369282 - RNA, 19 nt, Artificial Sequence
  Description of Artificial Sequence: Synthetic oligonucleotide
cggaugagagauugauggc

SEQ ID NO: 1369283 - RNA, 19 nt, Artificial Sequence
  Description of Artificial Sequence: Synthetic oligonucleotide
cuccacgacaaugaagccu

SEQ ID NO: 1369284 - RNA, 19 nt, Artificial Sequence
  Description of Artificial Sequence: Synthetic oligonucleotide
ggcggaagaugggauugag

SEQ ID NO: 1369285 - RNA, 19 nt, Artificial Sequence
  Description of Artificial Sequence: Synthetic oligonucleotide
acgccuuccgugaaacgaa

SEQ ID NO: 1369286 - RNA, 19 nt, Artificial Sequence
  Description of Artificial Sequence: Synthetic oligonucleotide
gguccaugccccgacucug

SEQ ID NO: 1369287 - RNA, 19 nt, Artificial Sequence
  Description of Artificial Sequence: Synthetic oligonucleotide
gucacgagccgucgcuuaa

SEQ ID NO: 1369288 - RNA, 19 nt, Artificial Sequence
  Description of Artificial Sequence: Synthetic oligonucleotide
ucacgagccgucgcuuaau

SEQ ID NO: 1369289 - RNA, 19 nt, Artificial Sequence
  Description of Artificial Sequence: Synthetic oligonucleotide
cuugcgacaggaacugguu

SEQ ID NO: 1369290 - RNA, 19 nt, Artificial Sequence
  Description of Artificial Sequence: Synthetic oligonucleotide
ucgguucaguccaccccuu

SEQ ID NO: 1369291 - RNA, 19 nt, Artificial Sequence
  Description of Artificial Sequence: Synthetic oligonucleotide
gggcggucugcagauacug

SEQ ID NO: 1369292 - RNA, 19 nt, Artificial Sequence
  Description of Artificial Sequence: Synthetic oligonucleotide
cgaugagcgcaaucuguag

SEQ ID NO: 1369293 - RNA, 19 nt, Artificial Sequence
  Description of Artificial Sequence: Synthetic oligonucleotide
agggcgauucggagguucu

SEQ ID NO: 1369294 - RNA, 19 nt, Artificial Sequence
  Description of Artificial Sequence: Synthetic oligonucleotide
gccaaauucggagaccacu

SEQ ID NO: 1369295 - RNA, 19 nt, Artificial Sequence
  Description of Artificial Sequence: Synthetic oligonucleotide
gucgcugugcccggccggc

SEQ ID NO: 1369296 - RNA, 19 nt, Artificial Sequence
  Description of Artificial Sequence: Synthetic oligonucleotide
uugcaggggugaucuccau

SEQ ID NO: 1369297 - RNA, 19 nt, Artificial Sequence
  Description of Artificial Sequence: Synthetic oligonucleotide
cugcagcaugaaguaccag

SEQ ID NO: 1369298 - RNA, 19 nt, Artificial Sequence
  Description of Artificial Sequence: Synthetic oligonucleotide
acagccggaucuggucugu

SEQ ID NO: 1369299 - RNA, 19 nt, Artificial Sequence
  Description of Artificial Sequence: Synthetic oligonucleotide
caccucccaacgcuccuca

SEQ ID NO: 1369300 - RNA, 19 nt, Artificial Sequence
  Description of Artificial Sequence: Synthetic oligonucleotide
ucgcugugcccggccggcg

SEQ ID NO: 1369301 - RNA, 19 nt, Artificial Sequence
  Description of Artificial Sequence: Synthetic oligonucleotide
cccagaagggcgauucgga

SEQ ID NO: 1369302 - RNA, 19 nt, Artificial Sequence
  Description of Artificial Sequence: Synthetic oligonucleotide
ggccgacguguccagcagc

SEQ ID NO: 1369303 - RNA, 19 nt, Artificial Sequence
  Description of Artificial Sequence: Synthetic oligonucleotide
ggccgaguucucgaacacc

SEQ ID NO: 1369304 - RNA, 19 nt, Artificial Sequence
  Description of Artificial Sequence: Synthetic oligonucleotide
gccgucgcuuaaucagagc

SEQ ID NO: 1369305 - RNA, 19 nt, Artificial Sequence
  Description of Artificial Sequence: Synthetic oligonucleotide
ccgugaaacgaagucuguc

SEQ ID NO: 1369306 - RNA, 19 nt, Artificial Sequence
  Description of Artificial Sequence: Synthetic oligonucleotide
ccaugccccgacucugggc

SEQ ID NO: 1369307 - RNA, 19 nt, Artificial Sequence
  Description of Artificial Sequence: Synthetic oligonucleotide
gugauacaagguggcucuc

SEQ ID NO: 1369308 - RNA, 19 nt, Artificial Sequence
  Description of Artificial Sequence: Synthetic oligonucleotide
agcauccgcaucacccaau

SEQ ID NO: 1369309 - RNA, 19 nt, Artificial Sequence
  Description of Artificial Sequence: Synthetic oligonucleotide
ggggaaccgguagagcauc

SEQ ID NO: 1369310 - RNA, 19 nt, Artificial Sequence
  Description of Artificial Sequence: Synthetic oligonucleotide
gugcucgguucaguccacc

SEQ ID NO: 1369311 - RNA, 19 nt, Artificial Sequence
  Description of Artificial Sequence: Synthetic oligonucleotide
guauaggcauacagucggu

SEQ ID NO: 1369312 - RNA, 19 nt, Artificial Sequence
  Description of Artificial Sequence: Synthetic oligonucleotide
ccuaggaacuccuguagau

SEQ ID NO: 1369313 - RNA, 19 nt, Artificial Sequence
  Description of Artificial Sequence: Synthetic oligonucleotide
caccggaugagagauugau

SEQ ID NO: 1369314 - RNA, 19 nt, Artificial Sequence
  Description of Artificial Sequence: Synthetic oligonucleotide
cgacucaguauaggcauac

SEQ ID NO: 1369315 - RNA, 19 nt, Artificial Sequence
  Description of Artificial Sequence: Synthetic oligonucleotide
cccgaacucacgcaggugu

SEQ ID NO: 1369316 - RNA, 19 nt, Artificial Sequence
  Description of Artificial Sequence: Synthetic oligonucleotide
acaccggaugagagauuga

SEQ ID NO: 1369317 - RNA, 19 nt, Artificial Sequence
  Description of Artificial Sequence: Synthetic oligonucleotide
ggggacgucccgggcaugc

SEQ ID NO: 1369318 - RNA, 19 nt, Artificial Sequence
  Description of Artificial Sequence: Synthetic oligonucleotide
cgucgcuuaaucagagcca

SEQ ID NO: 1369319 - RNA, 19 nt, Artificial Sequence
  Description of Artificial Sequence: Synthetic oligonucleotide
gcgcuugacgucgcugugc

SEQ ID NO: 1369320 - RNA, 19 nt, Artificial Sequence
  Description of Artificial Sequence: Synthetic oligonucleotide
gucaagcaccccggggcuc

SEQ ID NO: 1369321 - RNA, 19 nt, Artificial Sequence
  Description of Artificial Sequence: Synthetic oligonucleotide
ccaaugucucgcauuggcu

SEQ ID NO: 1369322 - RNA, 19 nt, Artificial Sequence
  Description of Artificial Sequence: Synthetic oligonucleotide
ggucaagcaccccggggcu

SEQ ID NO: 1369323 - RNA, 19 nt, Artificial Sequence
  Description of Artificial Sequence: Synthetic oligonucleotide
agccuggcugaugcacacu

SEQ ID NO: 1369324 - RNA, 19 nt, Artificial Sequence
  Description of Artificial Sequence: Synthetic oligonucleotide
cagguucagcacuuuucau

SEQ ID NO: 1369325 - RNA, 19 nt, Artificial Sequence
  Description of Artificial Sequence: Synthetic oligonucleotide
gccgacguguccagcagca

SEQ ID NO: 1369326 - RNA, 19 nt, Artificial Sequence
  Description of Artificial Sequence: Synthetic oligonucleotide
ggugcccauacaagcgguc

SEQ ID NO: 1369327 - RNA, 19 nt, Artificial Sequence
  Description of Artificial Sequence: Synthetic oligonucleotide
gaaucucuaccagguccau

SEQ ID NO: 1369328 - RNA, 19 nt, Artificial Sequence
  Description of Artificial Sequence: Synthetic oligonucleotide
accccgggucacgagccgu

SEQ ID NO: 1369329 - RNA, 19 nt, Artificial Sequence
  Description of Artificial Sequence: Synthetic oligonucleotide
ggucacgagccgucgcuua

SEQ ID NO: 1369330 - RNA, 19 nt, Artificial Sequence
  Description of Artificial Sequence: Synthetic oligonucleotide
cgccuuccgugaaacgaag

SEQ ID NO: 1369331 - RNA, 19 nt, Artificial Sequence
  Description of Artificial Sequence: Synthetic oligonucleotide
ggguaguaacgccgggacu

SEQ ID NO: 1369332 - RNA, 19 nt, Artificial Sequence
  Description of Artificial Sequence: Synthetic oligonucleotide
gccggaucuggucuguaau

SEQ ID NO: 1369333 - RNA, 19 nt, Artificial Sequence
  Description of Artificial Sequence: Synthetic oligonucleotide
gggcgauucggagguucug

SEQ ID NO: 1369334 - RNA, 19 nt, Artificial Sequence
  Description of Artificial Sequence: Synthetic oligonucleotide
ccauguuggggaaccggua

SEQ ID NO: 1369335 - RNA, 19 nt, Artificial Sequence
  Description of Artificial Sequence: Synthetic oligonucleotide
caggcgugugggguaguaa

SEQ ID NO: 1369336 - RNA, 19 nt, Artificial Sequence
  Description of Artificial Sequence: Synthetic oligonucleotide
gcacgcccagcucccgcgc

SEQ ID NO: 1369337 - RNA, 19 nt, Artificial Sequence
  Description of Artificial Sequence: Synthetic oligonucleotide
agacaccggaugagagauu

SEQ ID NO: 1369338 - RNA, 19 nt, Artificial Sequence
  Description of Artificial Sequence: Synthetic oligonucleotide
ccgacucugggcggucugc

SEQ ID NO: 1369339 - RNA, 19 nt, Artificial Sequence
  Description of Artificial Sequence: Synthetic oligonucleotide
cagcucccacagccggauc

SEQ ID NO: 1369340 - RNA, 19 nt, Artificial Sequence
  Description of Artificial Sequence: Synthetic oligonucleotide
ggagguucuggcggaagau

SEQ ID NO: 1369341 - RNA, 19 nt, Artificial Sequence
  Description of Artificial Sequence: Synthetic oligonucleotide
cgccgggacuuccucuucc

SEQ ID NO: 1369342 - RNA, 19 nt, Artificial Sequence
  Description of Artificial Sequence: Synthetic oligonucleotide
ccgggucacgagccgucgc

SEQ ID NO: 1369343 - RNA, 19 nt, Artificial Sequence
  Description of Artificial Sequence: Synthetic oligonucleotide
cagagccaaugucucgcau

SEQ ID NO: 1369344 - RNA, 19 nt, Artificial Sequence
  Description of Artificial Sequence: Synthetic oligonucleotide
cgucgcugugcccggccgg

SEQ ID NO: 1369345 - RNA, 19 nt, Artificial Sequence
  Description of Artificial Sequence: Synthetic oligonucleotide
gcugugcccggccggcguc

SEQ ID NO: 1369346 - RNA, 19 nt, Artificial Sequence
  Description of Artificial Sequence: Synthetic oligonucleotide
gcgacaggaacugguuaua

SEQ ID NO: 1369347 - RNA, 19 nt, Artificial Sequence
  Description of Artificial Sequence: Synthetic oligonucleotide
aggggacgucccgggcaug

SEQ ID NO: 1369348 - RNA, 19 nt, Artificial Sequence
  Description of Artificial Sequence: Synthetic oligonucleotide
cccgggucacgagccgucg

SEQ ID NO: 1369349 - RNA, 19 nt, Artificial Sequence
  Description of Artificial Sequence: Synthetic oligonucleotide
gcccgaacucacgcaggug

SEQ ID NO: 1369350 - RNA, 19 nt, Artificial Sequence
  Description of Artificial Sequence: Synthetic oligonucleotide
cccgacucugggcggucug

SEQ ID NO: 1369351 - RNA, 19 nt, Artificial Sequence
  Description of Artificial Sequence: Synthetic oligonucleotide
cggcgucaccaccaucagc

SEQ ID NO: 1369352 - RNA, 19 nt, Artificial Sequence
  Description of Artificial Sequence: Synthetic oligonucleotide
ccggccccagagacaccgg

SEQ ID NO: 1369353 - RNA, 19 nt, Artificial Sequence
  Description of Artificial Sequence: Synthetic oligonucleotide
cgguucaguccaccccuug

SEQ ID NO: 1369354 - RNA, 19 nt, Artificial Sequence
  Description of Artificial Sequence: Synthetic oligonucleotide
caacgcuccucagcauacu

SEQ ID NO: 1369355 - RNA, 19 nt, Artificial Sequence
  Description of Artificial Sequence: Synthetic oligonucleotide
ccgacguguccagcagcag

SEQ ID NO: 1369356 - RNA, 19 nt, Artificial Sequence
  Description of Artificial Sequence: Synthetic oligonucleotide
ccccgggucacgagccguc

SEQ ID NO: 1369357 - RNA, 19 nt, Artificial Sequence
  Description of Artificial Sequence: Synthetic oligonucleotide
cugugcccggccggcguca

SEQ ID NO: 1369358 - RNA, 19 nt, Artificial Sequence
  Description of Artificial Sequence: Synthetic oligonucleotide
ccccuugcaggggugaucu

SEQ ID NO: 1369359 - RNA, 19 nt, Artificial Sequence
  Description of Artificial Sequence: Synthetic oligonucleotide
ccgacucaguauaggcaua

SEQ ID NO: 1369360 - RNA, 19 nt, Artificial Sequence
  Description of Artificial Sequence: Synthetic oligonucleotide
gggugcccauacaagcggu

SEQ ID NO: 1369361 - RNA, 19 nt, Artificial Sequence
  Description of Artificial Sequence: Synthetic oligonucleotide
gcgcaaucuguagcuccga

SEQ ID NO: 1369362 - RNA, 19 nt, Artificial Sequence
  Description of Artificial Sequence: Synthetic oligonucleotide
ccgcaucacccaauucuua

SEQ ID NO: 1369363 - RNA, 19 nt, Artificial Sequence
  Description of Artificial Sequence: Synthetic oligonucleotide
gcccugguccuuaggaaau

SEQ ID NO: 1369364 - RNA, 19 nt, Artificial Sequence
  Description of Artificial Sequence: Synthetic oligonucleotide
ggacgucccgggcaugcuu

SEQ ID NO: 1369365 - RNA, 19 nt, Artificial Sequence
  Description of Artificial Sequence: Synthetic oligonucleotide
gccuuccgugaaacgaagu

SEQ ID NO: 1369366 - RNA, 19 nt, Artificial Sequence
  Description of Artificial Sequence: Synthetic oligonucleotide
cccuugcaggggugaucuc

SEQ ID NO: 1369367 - RNA, 19 nt, Artificial Sequence
  Description of Artificial Sequence: Synthetic oligonucleotide
gaagggcgauucggagguu

SEQ ID NO: 1369368 - RNA, 19 nt, Artificial Sequence
  Description of Artificial Sequence: Synthetic oligonucleotide
ccggcucaggagcugugcu

SEQ ID NO: 1369369 - RNA, 19 nt, Artificial Sequence
  Description of Artificial Sequence: Synthetic oligonucleotide
ccaccccuugcagggguga

SEQ ID NO: 1369370 - RNA, 19 nt, Artificial Sequence
  Description of Artificial Sequence: Synthetic oligonucleotide
ccgggcaugcuugucuggu

SEQ ID NO: 1369371 - RNA, 19 nt, Artificial Sequence
  Description of Artificial Sequence: Synthetic oligonucleotide
gggucacgagccgucgcuu

SEQ ID NO: 1369372 - RNA, 19 nt, Artificial Sequence
  Description of Artificial Sequence: Synthetic oligonucleotide
ccaggcgugugggguagua

SEQ ID NO: 1369373 - RNA, 19 nt, Artificial Sequence
  Description of Artificial Sequence: Synthetic oligonucleotide
cgcgugggccagcagcagu

SEQ ID NO: 1369374 - RNA, 19 nt, Artificial Sequence
  Description of Artificial Sequence: Synthetic oligonucleotide
ccccacccagaagggcgau

SEQ ID NO: 1369375 - RNA, 19 nt, Artificial Sequence
  Description of Artificial Sequence: Synthetic oligonucleotide
aauuuguucacucagacac

SEQ ID NO: 1369376 - RNA, 19 nt, Artificial Sequence
  Description of Artificial Sequence: Synthetic oligonucleotide
aauacuacgugagaaaugc

SEQ ID NO: 1369377 - RNA, 19 nt, Artificial Sequence
  Description of Artificial Sequence: Synthetic oligonucleotide
uuauagaagaucaagguug

SEQ ID NO: 1369378 - RNA, 19 nt, Artificial Sequence
  Description of Artificial Sequence: Synthetic oligonucleotide
aaaacuagcuccguauucc

SEQ ID NO: 1369379 - RNA, 19 nt, Artificial Sequence
  Description of Artificial Sequence: Synthetic oligonucleotide
aauuagagagcugucagac

SEQ ID NO: 1369380 - RNA, 19 nt, Artificial Sequence
  Description of Artificial Sequence: Synthetic oligonucleotide
aaugauuuagguauuccac

SEQ ID NO: 1369381 - RNA, 19 nt, Artificial Sequence
  Description of Artificial Sequence: Synthetic oligonucleotide
cuaaacacuccuaacauag

SEQ ID NO: 1369382 - RNA, 19 nt, Artificial Sequence
  Description of Artificial Sequence: Synthetic oligonucleotide
ucaagguugagccugcggg

SEQ ID NO: 1369383 - RNA, 19 nt, Artificial Sequence
  Description of Artificial Sequence: Synthetic oligonucleotide
gcauaaauugcuuauaggg

SEQ ID NO: 1369384 - RNA, 19 nt, Artificial Sequence
  Description of Artificial Sequence: Synthetic oligonucleotide
uguuuuguuacguugaauc

SEQ ID NO: 1369385 - RNA, 19 nt, Artificial Sequence
  Description of Artificial Sequence: Synthetic oligonucleotide
uacuacgugagaaaugcgg

SEQ ID NO: 1369386 - RNA, 19 nt, Artificial Sequence
  Description of Artificial Sequence: Synthetic oligonucleotide
aaagcugauucuuugagaa

SEQ ID NO: 1369387 - RNA, 19 nt, Artificial Sequence
  Description of Artificial Sequence: Synthetic oligonucleotide
auuuauagaagaucaaggu

SEQ ID NO: 1369388 - RNA, 19 nt, Artificial Sequence
  Description of Artificial Sequence: Synthetic oligonucleotide
gacucugguacuuagacug

SEQ ID NO: 1369389 - RNA, 19 nt, Artificial Sequence
  Description of Artificial Sequence: Synthetic oligonucleotide
uuuauguaugaacuuaacu

SEQ ID NO: 1369390 - RNA, 19 nt, Artificial Sequence
  Description of Artificial Sequence: Synthetic oligonucleotide
ugcauauauacuuuagacc

SEQ ID NO: 1369391 - RNA, 19 nt, Artificial Sequence
  Description of Artificial Sequence: Synthetic oligonucleotide
uuaaaugguauaaaaggaa

SEQ ID NO: 1369392 - RNA, 19 nt, Artificial Sequence
  Description of Artificial Sequence: Synthetic oligonucleotide
aacuagaccgagcagccac

SEQ ID NO: 1369393 - RNA, 19 nt, Artificial Sequence
  Description of Artificial Sequence: Synthetic oligonucleotide
aaacgguucucucaaauca

SEQ ID NO: 1369394 - RNA, 19 nt, Artificial Sequence
  Description of Artificial Sequence: Synthetic oligonucleotide
gacuaauaaggucacaagc

SEQ ID NO: 1369395 - RNA, 19 nt, Artificial Sequence
  Description of Artificial Sequence: Synthetic oligonucleotide
ucaaaucacagauaaucag

SEQ ID NO: 1369396 - RNA, 19 nt, Artificial Sequence
  Description of Artificial Sequence: Synthetic oligonucleotide
aaucaggcugcauaaauga

SEQ ID NO: 1369397 - RNA, 19 nt, Artificial Sequence
  Description of Artificial Sequence: Synthetic oligonucleotide
ucuacuucuugcuugacga

SEQ ID NO: 1369398 - RNA, 19 nt, Artificial Sequence
  Description of Artificial Sequence: Synthetic oligonucleotide
guuacguugaaucagaucu

SEQ ID NO: 1369399 - RNA, 19 nt, Artificial Sequence
  Description of Artificial Sequence: Synthetic oligonucleotide
ucuucacucaucauugaag

SEQ ID NO: 1369400 - RNA, 19 nt, Artificial Sequence
  Description of Artificial Sequence: Synthetic oligonucleotide
caguuugggaagaagaagg

SEQ ID NO: 1369401 - RNA, 19 nt, Artificial Sequence
  Description of Artificial Sequence: Synthetic oligonucleotide
uuuggcuuguaacaguuug

SEQ ID NO: 1369402 - RNA, 19 nt, Artificial Sequence
  Description of Artificial Sequence: Synthetic oligonucleotide
aauaaagcugauucuuuga

SEQ ID NO: 1369403 - RNA, 19 nt, Artificial Sequence
  Description of Artificial Sequence: Synthetic oligonucleotide
uauuccacguuuauguaug

SEQ ID NO: 1369404 - RNA, 19 nt, Artificial Sequence
  Description of Artificial Sequence: Synthetic oligonucleotide
uccggaaggaagaauaggc

SEQ ID NO: 1369405 - RNA, 19 nt, Artificial Sequence
  Description of Artificial Sequence: Synthetic oligonucleotide
aagaauaggcaucagcaau

SEQ ID NO: 1369406 - RNA, 19 nt, Artificial Sequence
  Description of Artificial Sequence: Synthetic oligonucleotide
uuuauagaagaucaagguu

SEQ ID NO: 1369407 - RNA, 19 nt, Artificial Sequence
  Description of Artificial Sequence: Synthetic oligonucleotide
ugcauaaauugcuuauagg

SEQ ID NO: 1369408 - RNA, 19 nt, Artificial Sequence
  Description of Artificial Sequence: Synthetic oligonucleotide
cuucacucaucauugaagc

SEQ ID NO: 1369409 - RNA, 19 nt, Artificial Sequence
  Description of Artificial Sequence: Synthetic oligonucleotide
gauucagcuagaaucaaag

SEQ ID NO: 1369410 - RNA, 19 nt, Artificial Sequence
  Description of Artificial Sequence: Synthetic oligonucleotide
acaauuagagagcugucag

SEQ ID NO: 1369411 - RNA, 19 nt, Artificial Sequence
  Description of Artificial Sequence: Synthetic oligonucleotide
aaaugguauaaaaggaaag

SEQ ID NO: 1369412 - RNA, 19 nt, Artificial Sequence
  Description of Artificial Sequence: Synthetic oligonucleotide
uucucuagacucaacggag

SEQ ID NO: 1369413 - RNA, 19 nt, Artificial Sequence
  Description of Artificial Sequence: Synthetic oligonucleotide
uaacauaguucucagugga

SEQ ID NO: 1369414 - RNA, 19 nt, Artificial Sequence
  Description of Artificial Sequence: Synthetic oligonucleotide
cuuaaaugguauaaaagga

SEQ ID NO: 1369415 - RNA, 19 nt, Artificial Sequence
  Description of Artificial Sequence: Synthetic oligonucleotide
ugagaaaggcaccuagucc

SEQ ID NO: 1369416 - RNA, 19 nt, Artificial Sequence
  Description of Artificial Sequence: Synthetic oligonucleotide
agcacagcaagaaugauuc

SEQ ID NO: 1369417 - RNA, 19 nt, Artificial Sequence
  Description of Artificial Sequence: Synthetic oligonucleotide
cuuucuaggaauguugugc

SEQ ID NO: 1369418 - RNA, 19 nt, Artificial Sequence
  Description of Artificial Sequence: Synthetic oligonucleotide
uuagagagcugucagacua

SEQ ID NO: 1369419 - RNA, 19 nt, Artificial Sequence
  Description of Artificial Sequence: Synthetic oligonucleotide
cuaacauaguucucagugg

SEQ ID NO: 1369420 - RNA, 19 nt, Artificial Sequence
  Description of Artificial Sequence: Synthetic oligonucleotide
uuucuaggaauguugugcc

SEQ ID NO: 1369421 - RNA, 19 nt, Artificial Sequence
  Description of Artificial Sequence: Synthetic oligonucleotide
aacuguucagaauucgaga

SEQ ID NO: 1369422 - RNA, 19 nt, Artificial Sequence
  Description of Artificial Sequence: Synthetic oligonucleotide
uauagaagaucaagguuga

SEQ ID NO: 1369423 - RNA, 19 nt, Artificial Sequence
  Description of Artificial Sequence: Synthetic oligonucleotide
gacucaacggaguuccugg

SEQ ID NO: 1369424 - RNA, 19 nt, Artificial Sequence
  Description of Artificial Sequence: Synthetic oligonucleotide
guaagagcucucuagauca

SEQ ID NO: 1369425 - RNA, 19 nt, Artificial Sequence
  Description of Artificial Sequence: Synthetic oligonucleotide
uaaauugcuuauagggucu

SEQ ID NO: 1369426 - RNA, 19 nt, Artificial Sequence
  Description of Artificial Sequence: Synthetic oligonucleotide
auggggaaaccacagcuac

SEQ ID NO: 1369427 - RNA, 19 nt, Artificial Sequence
  Description of Artificial Sequence: Synthetic oligonucleotide
auugcauauauacuuuaga

SEQ ID NO: 1369428 - RNA, 19 nt, Artificial Sequence
  Description of Artificial Sequence: Synthetic oligonucleotide
auuucuaaacccauugcuc

SEQ ID NO: 1369429 - RNA, 19 nt, Artificial Sequence
  Description of Artificial Sequence: Synthetic oligonucleotide
aacacuccuaacauaguuc

SEQ ID NO: 1369430 - RNA, 19 nt, Artificial Sequence
  Description of Artificial Sequence: Synthetic oligonucleotide
aguacagucaggacuaggg

SEQ ID NO: 1369431 - RNA, 19 nt, Artificial Sequence
  Description of Artificial Sequence: Synthetic oligonucleotide
uguaagagcucucuagauc

SEQ ID NO: 1369432 - RNA, 19 nt, Artificial Sequence
  Description of Artificial Sequence: Synthetic oligonucleotide
acuaauaaggucacaagca

SEQ ID NO: 1369433 - RNA, 19 nt, Artificial Sequence
  Description of Artificial Sequence: Synthetic oligonucleotide
aggaaaguaauggggaaac

SEQ ID NO: 1369434 - RNA, 19 nt, Artificial Sequence
  Description of Artificial Sequence: Synthetic oligonucleotide
agcugauucuuugagaaag

SEQ ID NO: 1369435 - RNA, 19 nt, Artificial Sequence
  Description of Artificial Sequence: Synthetic oligonucleotide
acagcaagaaugauucagc

SEQ ID NO: 1369436 - RNA, 19 nt, Artificial Sequence
  Description of Artificial Sequence: Synthetic oligonucleotide
acuacgugagaaaugcggc

SEQ ID NO: 1369437 - RNA, 19 nt, Artificial Sequence
  Description of Artificial Sequence: Synthetic oligonucleotide
uccacguuuauguaugaac

SEQ ID NO: 1369438 - RNA, 19 nt, Artificial Sequence
  Description of Artificial Sequence: Synthetic oligonucleotide
augcuaaacacuccuaaca

SEQ ID NO: 1369439 - RNA, 19 nt, Artificial Sequence
  Description of Artificial Sequence: Synthetic oligonucleotide
acuagcuccguauuccguc

SEQ ID NO: 1369440 - RNA, 19 nt, Artificial Sequence
  Description of Artificial Sequence: Synthetic oligonucleotide
ugcacggacacuccggaag

SEQ ID NO: 1369441 - RNA, 19 nt, Artificial Sequence
  Description of Artificial Sequence: Synthetic oligonucleotide
uguucagaauucgagacgu

SEQ ID NO: 1369442 - RNA, 19 nt, Artificial Sequence
  Description of Artificial Sequence: Synthetic oligonucleotide
gguacuuagacugaaguug

SEQ ID NO: 1369443 - RNA, 19 nt, Artificial Sequence
  Description of Artificial Sequence: Synthetic oligonucleotide
agcugucagacuaauaagg

SEQ ID NO: 1369444 - RNA, 19 nt, Artificial Sequence
  Description of Artificial Sequence: Synthetic oligonucleotide
aaaccacagcuacaauuag

SEQ ID NO: 1369445 - RNA, 19 nt, Artificial Sequence
  Description of Artificial Sequence: Synthetic oligonucleotide
acacuccuaacauaguucu

SEQ ID NO: 1369446 - RNA, 19 nt, Artificial Sequence
  Description of Artificial Sequence: Synthetic oligonucleotide
auaaaugauuuagguauuc

SEQ ID NO: 1369447 - RNA, 19 nt, Artificial Sequence
  Description of Artificial Sequence: Synthetic oligonucleotide
aaucacagauaaucaggcu

SEQ ID NO: 1369448 - RNA, 19 nt, Artificial Sequence
  Description of Artificial Sequence: Synthetic oligonucleotide
uaauaaggucacaagcaaa

SEQ ID NO: 1369449 - RNA, 19 nt, Artificial Sequence
  Description of Artificial Sequence: Synthetic oligonucleotide
uccaacaguacagucagga

SEQ ID NO: 1369450 - RNA, 19 nt, Artificial Sequence
  Description of Artificial Sequence: Synthetic oligonucleotide
uuugagaaaggcaccuagu

SEQ ID NO: 1369451 - RNA, 19 nt, Artificial Sequence
  Description of Artificial Sequence: Synthetic oligonucleotide
aucauugaagcaucuggug

SEQ ID NO: 1369452 - RNA, 19 nt, Artificial Sequence
  Description of Artificial Sequence: Synthetic oligonucleotide
ccuaacauaguucucagug

SEQ ID NO: 1369453 - RNA, 19 nt, Artificial Sequence
  Description of Artificial Sequence: Synthetic oligonucleotide
aaacaacuagaccgagcag

SEQ ID NO: 1369454 - RNA, 19 nt, Artificial Sequence
  Description of Artificial Sequence: Synthetic oligonucleotide
ugagaaaugcggcuccaga

SEQ ID NO: 1369455 - RNA, 19 nt, Artificial Sequence
  Description of Artificial Sequence: Synthetic oligonucleotide
aacgguucucucaaaucac

SEQ ID NO: 1369456 - RNA, 19 nt, Artificial Sequence
  Description of Artificial Sequence: Synthetic oligonucleotide
cacuguaagagcucucuag

SEQ ID NO: 1369457 - RNA, 19 nt, Artificial Sequence
  Description of Artificial Sequence: Synthetic oligonucleotide
aaaacuguucagaauucga

SEQ ID NO: 1369458 - RNA, 19 nt, Artificial Sequence
  Description of Artificial Sequence: Synthetic oligonucleotide
cugguuaaaguucugaaaa

SEQ ID NO: 1369459 - RNA, 19 nt, Artificial Sequence
  Description of Artificial Sequence: Synthetic oligonucleotide
uucuaaacccauugcucag

SEQ ID NO: 1369460 - RNA, 19 nt, Artificial Sequence
  Description of Artificial Sequence: Synthetic oligonucleotide
uuagaccaugcuaaacacu

SEQ ID NO: 1369461 - RNA, 19 nt, Artificial Sequence
  Description of Artificial Sequence: Synthetic oligonucleotide
augaacuuaacuuccuuua

SEQ ID NO: 1369462 - RNA, 19 nt, Artificial Sequence
  Description of Artificial Sequence: Synthetic oligonucleotide
auucuuugagaaaggcacc

SEQ ID NO: 1369463 - RNA, 19 nt, Artificial Sequence
  Description of Artificial Sequence: Synthetic oligonucleotide
acgugagaaaugcggcucc

SEQ ID NO: 1369464 - RNA, 19 nt, Artificial Sequence
  Description of Artificial Sequence: Synthetic oligonucleotide
uucuguugacagaagguuc

SEQ ID NO: 1369465 - RNA, 19 nt, Artificial Sequence
  Description of Artificial Sequence: Synthetic oligonucleotide
ucuagaucaucuucgguuu

SEQ ID NO: 1369466 - RNA, 19 nt, Artificial Sequence
  Description of Artificial Sequence: Synthetic oligonucleotide
ugguuaaaguucugaaaac

SEQ ID NO: 1369467 - RNA, 19 nt, Artificial Sequence
  Description of Artificial Sequence: Synthetic oligonucleotide
caucuucagagaaauggac

SEQ ID NO: 1369468 - RNA, 19 nt, Artificial Sequence
  Description of Artificial Sequence: Synthetic oligonucleotide
cucaaaucacagauaauca

SEQ ID NO: 1369469 - RNA, 19 nt, Artificial Sequence
  Description of Artificial Sequence: Synthetic oligonucleotide
gucaauccggauugcacgg

SEQ ID NO: 1369470 - RNA, 19 nt, Artificial Sequence
  Description of Artificial Sequence: Synthetic oligonucleotide
agagaaacgguucucucaa

SEQ ID NO: 1369471 - RNA, 19 nt, Artificial Sequence
  Description of Artificial Sequence: Synthetic oligonucleotide
cacuugagcacuucuuuag

SEQ ID NO: 1369472 - RNA, 19 nt, Artificial Sequence
  Description of Artificial Sequence: Synthetic oligonucleotide
ggucacaauauuuauagaa

SEQ ID NO: 1369473 - RNA, 19 nt, Artificial Sequence
  Description of Artificial Sequence: Synthetic oligonucleotide
cauaguucucaguggaaac

SEQ ID NO: 1369474 - RNA, 19 nt, Artificial Sequence
  Description of Artificial Sequence: Synthetic oligonucleotide
ucacucaucauugaagcau

SEQ ID NO: 1369475 - RNA, 19 nt, Artificial Sequence
  Description of Artificial Sequence: Synthetic oligonucleotide
auacuuuagaccaugcuaa

SEQ ID NO: 1369476 - RNA, 19 nt, Artificial Sequence
  Description of Artificial Sequence: Synthetic oligonucleotide
ucagaauucgagacgugau

SEQ ID NO: 1369477 - RNA, 19 nt, Artificial Sequence
  Description of Artificial Sequence: Synthetic oligonucleotide
aauaggcaucagcaauuug

SEQ ID NO: 1369478 - RNA, 19 nt, Artificial Sequence
  Description of Artificial Sequence: Synthetic oligonucleotide
cacagcaagaaugauucag

SEQ ID NO: 1369479 - RNA, 19 nt, Artificial Sequence
  Description of Artificial Sequence: Synthetic oligonucleotide
gaaacgguucucucaaauc

SEQ ID NO: 1369480 - RNA, 19 nt, Artificial Sequence
  Description of Artificial Sequence: Synthetic oligonucleotide
ugcguuuucauggucacaa

SEQ ID NO: 1369481 - RNA, 19 nt, Artificial Sequence
  Description of Artificial Sequence: Synthetic oligonucleotide
ugcacgggcaauacuacgu

SEQ ID NO: 1369482 - RNA, 19 nt, Artificial Sequence
  Description of Artificial Sequence: Synthetic oligonucleotide
acuccuaacauaguucuca

SEQ ID NO: 1369483 - RNA, 19 nt, Artificial Sequence
  Description of Artificial Sequence: Synthetic oligonucleotide
ggugaacuugacuuugagg

SEQ ID NO: 1369484 - RNA, 19 nt, Artificial Sequence
  Description of Artificial Sequence: Synthetic oligonucleotide
acaguuugggaagaagaag

SEQ ID NO: 1369485 - RNA, 19 nt, Artificial Sequence
  Description of Artificial Sequence: Synthetic oligonucleotide
aaaggcaccuaguccuucu

SEQ ID NO: 1369486 - RNA, 19 nt, Artificial Sequence
  Description of Artificial Sequence: Synthetic oligonucleotide
caugcuaaacacuccuaac

SEQ ID NO: 1369487 - RNA, 19 nt, Artificial Sequence
  Description of Artificial Sequence: Synthetic oligonucleotide
aauccaauggcaagggaaa

SEQ ID NO: 1369488 - RNA, 19 nt, Artificial Sequence
  Description of Artificial Sequence: Synthetic oligonucleotide
ggauccaugugguuguagg

SEQ ID NO: 1369489 - RNA, 19 nt, Artificial Sequence
  Description of Artificial Sequence: Synthetic oligonucleotide
gcuuauagggucuucacuc

SEQ ID NO: 1369490 - RNA, 19 nt, Artificial Sequence
  Description of Artificial Sequence: Synthetic oligonucleotide
gcuuguaacaguuugggaa

SEQ ID NO: 1369491 - RNA, 19 nt, Artificial Sequence
  Description of Artificial Sequence: Synthetic oligonucleotide
caauacuacgugagaaaug

SEQ ID NO: 1369492 - RNA, 19 nt, Artificial Sequence
  Description of Artificial Sequence: Synthetic oligonucleotide
aaggucacaagcaaaccaa

SEQ ID NO: 1369493 - RNA, 19 nt, Artificial Sequence
  Description of Artificial Sequence: Synthetic oligonucleotide
uuucuguugacagaagguu

SEQ ID NO: 1369494 - RNA, 19 nt, Artificial Sequence
  Description of Artificial Sequence: Synthetic oligonucleotide
ugauucagcuagaaucaaa

SEQ ID NO: 1369495 - RNA, 19 nt, Artificial Sequence
  Description of Artificial Sequence: Synthetic oligonucleotide
gaagaauaggcaucagcaa

SEQ ID NO: 1369496 - RNA, 19 nt, Artificial Sequence
  Description of Artificial Sequence: Synthetic oligonucleotide
gauugcacggacacuccgg

SEQ ID NO: 1369497 - RNA, 19 nt, Artificial Sequence
  Description of Artificial Sequence: Synthetic oligonucleotide
ucuuaguggggucugcaua

SEQ ID NO: 1369498 - RNA, 19 nt, Artificial Sequence
  Description of Artificial Sequence: Synthetic oligonucleotide
gcaggaguauaaaagaacc

SEQ ID NO: 1369499 - RNA, 19 nt, Artificial Sequence
  Description of Artificial Sequence: Synthetic oligonucleotide
ucaaagcgguguaccacag

SEQ ID NO: 1369500 - RNA, 19 nt, Artificial Sequence
  Description of Artificial Sequence: Synthetic oligonucleotide
uacguugaaucagaucuug

SEQ ID NO: 1369501 - RNA, 19 nt, Artificial Sequence
  Description of Artificial Sequence: Synthetic oligonucleotide
uagaaucaaagcagauccu

SEQ ID NO: 1369502 - RNA, 19 nt, Artificial Sequence
  Description of Artificial Sequence: Synthetic oligonucleotide
auuuuccggcugcacgggc

SEQ ID NO: 1369503 - RNA, 19 nt, Artificial Sequence
  Description of Artificial Sequence: Synthetic oligonucleotide
cauaaauugcuuauagggu

SEQ ID NO: 1369504 - RNA, 19 nt, Artificial Sequence
  Description of Artificial Sequence: Synthetic oligonucleotide
cagugguuugcacugcagg

SEQ ID NO: 1369505 - RNA, 19 nt, Artificial Sequence
  Description of Artificial Sequence: Synthetic oligonucleotide
ugagcacuucuuuagcauc

SEQ ID NO: 1369506 - RNA, 19 nt, Artificial Sequence
  Description of Artificial Sequence: Synthetic oligonucleotide
agaaugauucagcuagaau

SEQ ID NO: 1369507 - RNA, 19 nt, Artificial Sequence
  Description of Artificial Sequence: Synthetic oligonucleotide
ucuaggaauguugugccuc

SEQ ID NO: 1369508 - RNA, 19 nt, Artificial Sequence
  Description of Artificial Sequence: Synthetic oligonucleotide
ugguuugcacugcaggagu

SEQ ID NO: 1369509 - RNA, 19 nt, Artificial Sequence
  Description of Artificial Sequence: Synthetic oligonucleotide
uccguauuccgucucuggu

SEQ ID NO: 1369510 - RNA, 19 nt, Artificial Sequence
  Description of Artificial Sequence: Synthetic oligonucleotide
uguuacguugaaucagauc

SEQ ID NO: 1369511 - RNA, 19 nt, Artificial Sequence
  Description of Artificial Sequence: Synthetic oligonucleotide
cuaauaaggucacaagcaa

SEQ ID NO: 1369512 - RNA, 19 nt, Artificial Sequence
  Description of Artificial Sequence: Synthetic oligonucleotide
ucucuagacucaacggagu

SEQ ID NO: 1369513 - RNA, 19 nt, Artificial Sequence
  Description of Artificial Sequence: Synthetic oligonucleotide
uccuucaggccuagacugg

SEQ ID NO: 1369514 - RNA, 19 nt, Artificial Sequence
  Description of Artificial Sequence: Synthetic oligonucleotide
uugacagaagguucauuuc

SEQ ID NO: 1369515 - RNA, 19 nt, Artificial Sequence
  Description of Artificial Sequence: Synthetic oligonucleotide
aaggaaaguaauggggaaa

SEQ ID NO: 1369516 - RNA, 19 nt, Artificial Sequence
  Description of Artificial Sequence: Synthetic oligonucleotide
ggcauuuuccggcugcacg

SEQ ID NO: 1369517 - RNA, 19 nt, Artificial Sequence
  Description of Artificial Sequence: Synthetic oligonucleotide
uuguuagaguuggugaacu

SEQ ID NO: 1369518 - RNA, 19 nt, Artificial Sequence
  Description of Artificial Sequence: Synthetic oligonucleotide
gcauuuuccggcugcacgg

SEQ ID NO: 1369519 - RNA, 19 nt, Artificial Sequence
  Description of Artificial Sequence: Synthetic oligonucleotide
uccgucucugguuaaaguu

SEQ ID NO: 1369520 - RNA, 19 nt, Artificial Sequence
  Description of Artificial Sequence: Synthetic oligonucleotide
guacagucaggacuagggc

SEQ ID NO: 1369521 - RNA, 19 nt, Artificial Sequence
  Description of Artificial Sequence: Synthetic oligonucleotide
aaggcugcguuuucauggu

SEQ ID NO: 1369522 - RNA, 19 nt, Artificial Sequence
  Description of Artificial Sequence: Synthetic oligonucleotide
guaauggggaaaccacagc

SEQ ID NO: 1369523 - RNA, 19 nt, Artificial Sequence
  Description of Artificial Sequence: Synthetic oligonucleotide
cauugcucaguucuugauc

SEQ ID NO: 1369524 - RNA, 19 nt, Artificial Sequence
  Description of Artificial Sequence: Synthetic oligonucleotide
aagaaugauucagcuagaa

SEQ ID NO: 1369525 - RNA, 19 nt, Artificial Sequence
  Description of Artificial Sequence: Synthetic oligonucleotide
guaacaguuugggaagaag

SEQ ID NO: 1369526 - RNA, 19 nt, Artificial Sequence
  Description of Artificial Sequence: Synthetic oligonucleotide
auuagagagcugucagacu

SEQ ID NO: 1369527 - RNA, 19 nt, Artificial Sequence
  Description of Artificial Sequence: Synthetic oligonucleotide
ugguacuuagacugaaguu

SEQ ID NO: 1369528 - RNA, 19 nt, Artificial Sequence
  Description of Artificial Sequence: Synthetic oligonucleotide
caguggaaacagagaaacg

SEQ ID NO: 1369529 - RNA, 19 nt, Artificial Sequence
  Description of Artificial Sequence: Synthetic oligonucleotide
cuugagcacuucuuuagca

SEQ ID NO: 1369530 - RNA, 19 nt, Artificial Sequence
  Description of Artificial Sequence: Synthetic oligonucleotide
cauucagcuugucuggauc

SEQ ID NO: 1369531 - RNA, 19 nt, Artificial Sequence
  Description of Artificial Sequence: Synthetic oligonucleotide
ugacucugguacuuagacu

SEQ ID NO: 1369532 - RNA, 19 nt, Artificial Sequence
  Description of Artificial Sequence: Synthetic oligonucleotide
agaauucgagacgugauuu

SEQ ID NO: 1369533 - RNA, 19 nt, Artificial Sequence
  Description of Artificial Sequence: Synthetic oligonucleotide
cacucaucauugaagcauc

SEQ ID NO: 1369534 - RNA, 19 nt, Artificial Sequence
  Description of Artificial Sequence: Synthetic oligonucleotide
ccuuucagggcauuuuccg

SEQ ID NO: 1369535 - RNA, 19 nt, Artificial Sequence
  Description of Artificial Sequence: Synthetic oligonucleotide
cagauaaucaggcugcaua

SEQ ID NO: 1369536 - RNA, 19 nt, Artificial Sequence
  Description of Artificial Sequence: Synthetic oligonucleotide
uucucucaaaucacagaua

SEQ ID NO: 1369537 - RNA, 19 nt, Artificial Sequence
  Description of Artificial Sequence: Synthetic oligonucleotide
gaacuugacuuugaggaaa

SEQ ID NO: 1369538 - RNA, 19 nt, Artificial Sequence
  Description of Artificial Sequence: Synthetic oligonucleotide
agaaccaaaguaauccaau

SEQ ID NO: 1369539 - RNA, 19 nt, Artificial Sequence
  Description of Artificial Sequence: Synthetic oligonucleotide
gcucucuagaucaucuucg

SEQ ID NO: 1369540 - RNA, 19 nt, Artificial Sequence
  Description of Artificial Sequence: Synthetic oligonucleotide
agaccaugcuaaacacucc

SEQ ID NO: 1369541 - RNA, 19 nt, Artificial Sequence
  Description of Artificial Sequence: Synthetic oligonucleotide
uuacguugaaucagaucuu

SEQ ID NO: 1369542 - RNA, 19 nt, Artificial Sequence
  Description of Artificial Sequence: Synthetic oligonucleotide
guggugucacuguaagagc

SEQ ID NO: 1369543 - RNA, 19 nt, Artificial Sequence
  Description of Artificial Sequence: Synthetic oligonucleotide
uugcacugcaggaguauaa

SEQ ID NO: 1369544 - RNA, 19 nt, Artificial Sequence
  Description of Artificial Sequence: Synthetic oligonucleotide
acuagaccgagcagccacc

SEQ ID NO: 1369545 - RNA, 19 nt, Artificial Sequence
  Description of Artificial Sequence: Synthetic oligonucleotide
ggaucugaccuugacagug

SEQ ID NO: 1369546 - RNA, 19 nt, Artificial Sequence
  Description of Artificial Sequence: Synthetic oligonucleotide
cagagaaacgguucucuca

SEQ ID NO: 1369547 - RNA, 19 nt, Artificial Sequence
  Description of Artificial Sequence: Synthetic oligonucleotide
uacuuuagaccaugcuaaa

SEQ ID NO: 1369548 - RNA, 19 nt, Artificial Sequence
  Description of Artificial Sequence: Synthetic oligonucleotide
ucuagacucaacggaguuc

SEQ ID NO: 1369549 - RNA, 19 nt, Artificial Sequence
  Description of Artificial Sequence: Synthetic oligonucleotide
cuacaauuagagagcuguc

SEQ ID NO: 1369550 - RNA, 19 nt, Artificial Sequence
  Description of Artificial Sequence: Synthetic oligonucleotide
cauacuuaaaugguauaaa

SEQ ID NO: 1369551 - RNA, 19 nt, Artificial Sequence
  Description of Artificial Sequence: Synthetic oligonucleotide
ucugguguucugacaguuc

SEQ ID NO: 1369552 - RNA, 19 nt, Artificial Sequence
  Description of Artificial Sequence: Synthetic oligonucleotide
uacgugagaaaugcggcuc

SEQ ID NO: 1369553 - RNA, 19 nt, Artificial Sequence
  Description of Artificial Sequence: Synthetic oligonucleotide
cuacuucuugcuugacgag

SEQ ID NO: 1369554 - RNA, 19 nt, Artificial Sequence
  Description of Artificial Sequence: Synthetic oligonucleotide
aguuggugaacuugacuuu

SEQ ID NO: 1369555 - RNA, 19 nt, Artificial Sequence
  Description of Artificial Sequence: Synthetic oligonucleotide
gugguuugcacugcaggag

SEQ ID NO: 1369556 - RNA, 19 nt, Artificial Sequence
  Description of Artificial Sequence: Synthetic oligonucleotide
cugcacgggcaauacuacg

SEQ ID NO: 1369557 - RNA, 19 nt, Artificial Sequence
  Description of Artificial Sequence: Synthetic oligonucleotide
caauuagagagcugucaga

SEQ ID NO: 1369558 - RNA, 19 nt, Artificial Sequence
  Description of Artificial Sequence: Synthetic oligonucleotide
uuccgucucugguuaaagu

SEQ ID NO: 1369559 - RNA, 19 nt, Artificial Sequence
  Description of Artificial Sequence: Synthetic oligonucleotide
acguuuauguaugaacuua

SEQ ID NO: 1369560 - RNA, 19 nt, Artificial Sequence
  Description of Artificial Sequence: Synthetic oligonucleotide
aauggggaaaccacagcua

SEQ ID NO: 1369561 - RNA, 19 nt, Artificial Sequence
  Description of Artificial Sequence: Synthetic oligonucleotide
agggaauugcauauauacu

SEQ ID NO: 1369562 - RNA, 19 nt, Artificial Sequence
  Description of Artificial Sequence: Synthetic oligonucleotide
uucuaggaauguugugccu

SEQ ID NO: 1369563 - RNA, 19 nt, Artificial Sequence
  Description of Artificial Sequence: Synthetic oligonucleotide
cagacuaauaaggucacaa

SEQ ID NO: 1369564 - RNA, 19 nt, Artificial Sequence
  Description of Artificial Sequence: Synthetic oligonucleotide
agaauaggcaucagcaauu

SEQ ID NO: 1369565 - RNA, 19 nt, Artificial Sequence
  Description of Artificial Sequence: Synthetic oligonucleotide
gggaauugcauauauacuu

SEQ ID NO: 1369566 - RNA, 19 nt, Artificial Sequence
  Description of Artificial Sequence: Synthetic oligonucleotide
uccuaacauaguucucagu

SEQ ID NO: 1369567 - RNA, 19 nt, Artificial Sequence
  Description of Artificial Sequence: Synthetic oligonucleotide
uuguuacguugaaucagau

SEQ ID NO: 1369568 - RNA, 19 nt, Artificial Sequence
  Description of Artificial Sequence: Synthetic oligonucleotide
acgggcaauacuacgugag

SEQ ID NO: 1369569 - RNA, 19 nt, Artificial Sequence
  Description of Artificial Sequence: Synthetic oligonucleotide
ucgucuugacucugguacu

SEQ ID NO: 1369570 - RNA, 19 nt, Artificial Sequence
  Description of Artificial Sequence: Synthetic oligonucleotide
aguuugggaagaagaaggu

SEQ ID NO: 1369571 - RNA, 19 nt, Artificial Sequence
  Description of Artificial Sequence: Synthetic oligonucleotide
ugguuguaggagcuggcuu

SEQ ID NO: 1369572 - RNA, 19 nt, Artificial Sequence
  Description of Artificial Sequence: Synthetic oligonucleotide
agcaaaaggauggcaggcu

SEQ ID NO: 1369573 - RNA, 19 nt, Artificial Sequence
  Description of Artificial Sequence: Synthetic oligonucleotide
gacuagggcuacaucuuug

SEQ ID NO: 1369574 - RNA, 19 nt, Artificial Sequence
  Description of Artificial Sequence: Synthetic oligonucleotide
gcuacaauuagagagcugu

SEQ ID NO: 1369575 - RNA, 19 nt, Artificial Sequence
  Description of Artificial Sequence: Synthetic oligonucleotide
cucuagaucaucuucgguu

SEQ ID NO: 1369576 - RNA, 19 nt, Artificial Sequence
  Description of Artificial Sequence: Synthetic oligonucleotide
aacuugacuuugaggaaau

SEQ ID NO: 1369577 - RNA, 19 nt, Artificial Sequence
  Description of Artificial Sequence: Synthetic oligonucleotide
gaccaugcuaaacacuccu

SEQ ID NO: 1369578 - RNA, 19 nt, Artificial Sequence
  Description of Artificial Sequence: Synthetic oligonucleotide
agggaaacaacuagaccga

SEQ ID NO: 1369579 - RNA, 19 nt, Artificial Sequence
  Description of Artificial Sequence: Synthetic oligonucleotide
auuccgucucugguuaaag

SEQ ID NO: 1369580 - RNA, 19 nt, Artificial Sequence
  Description of Artificial Sequence: Synthetic oligonucleotide
uucaggccuagacuggcuu

SEQ ID NO: 1369581 - RNA, 19 nt, Artificial Sequence
  Description of Artificial Sequence: Synthetic oligonucleotide
cgucaauccggauugcacg

SEQ ID NO: 1369582 - RNA, 19 nt, Artificial Sequence
  Description of Artificial Sequence: Synthetic oligonucleotide
agagacucaaagcggugua

SEQ ID NO: 1369583 - RNA, 19 nt, Artificial Sequence
  Description of Artificial Sequence: Synthetic oligonucleotide
uguaacaguuugggaagaa

SEQ ID NO: 1369584 - RNA, 19 nt, Artificial Sequence
  Description of Artificial Sequence: Synthetic oligonucleotide
acguugaaucagaucuugg

SEQ ID NO: 1369585 - RNA, 19 nt, Artificial Sequence
  Description of Artificial Sequence: Synthetic oligonucleotide
auacuacgugagaaaugcg

SEQ ID NO: 1369586 - RNA, 19 nt, Artificial Sequence
  Description of Artificial Sequence: Synthetic oligonucleotide
ucgagacgugauuuccacu

SEQ ID NO: 1369587 - RNA, 19 nt, Artificial Sequence
  Description of Artificial Sequence: Synthetic oligonucleotide
gcuagaaucaaagcagauc

SEQ ID NO: 1369588 - RNA, 19 nt, Artificial Sequence
  Description of Artificial Sequence: Synthetic oligonucleotide
agacucaacggaguuccug

SEQ ID NO: 1369589 - RNA, 19 nt, Artificial Sequence
  Description of Artificial Sequence: Synthetic oligonucleotide
cagcuagaaucaaagcaga

SEQ ID NO: 1369590 - RNA, 19 nt, Artificial Sequence
  Description of Artificial Sequence: Synthetic oligonucleotide
ugccccgucaauccggauu

SEQ ID NO: 1369591 - RNA, 19 nt, Artificial Sequence
  Description of Artificial Sequence: Synthetic oligonucleotide
cacuccggaaggaagaaua

SEQ ID NO: 1369592 - RNA, 19 nt, Artificial Sequence
  Description of Artificial Sequence: Synthetic oligonucleotide
gagacucaaagcgguguac

SEQ ID NO: 1369593 - RNA, 19 nt, Artificial Sequence
  Description of Artificial Sequence: Synthetic oligonucleotide
cauuuuccggcugcacggg

SEQ ID NO: 1369594 - RNA, 19 nt, Artificial Sequence
  Description of Artificial Sequence: Synthetic oligonucleotide
cuagaccgagcagccaccg

SEQ ID NO: 1369595 - RNA, 19 nt, Artificial Sequence
  Description of Artificial Sequence: Synthetic oligonucleotide
gagacgugauuuccacuuc

SEQ ID NO: 1369596 - RNA, 19 nt, Artificial Sequence
  Description of Artificial Sequence: Synthetic oligonucleotide
cuagaucaucuucgguuuc

SEQ ID NO: 1369597 - RNA, 19 nt, Artificial Sequence
  Description of Artificial Sequence: Synthetic oligonucleotide
aauccggauugcacggaca

SEQ ID NO: 1369598 - RNA, 19 nt, Artificial Sequence
  Description of Artificial Sequence: Synthetic oligonucleotide
acucaacggaguuccugga

SEQ ID NO: 1369599 - RNA, 19 nt, Artificial Sequence
  Description of Artificial Sequence: Synthetic oligonucleotide
guaauccaauggcaaggga

SEQ ID NO: 1369600 - RNA, 19 nt, Artificial Sequence
  Description of Artificial Sequence: Synthetic oligonucleotide
uaguggggucugcauaaau

SEQ ID NO: 1369601 - RNA, 19 nt, Artificial Sequence
  Description of Artificial Sequence: Synthetic oligonucleotide
cugguacuuagacugaagu

SEQ ID NO: 1369602 - RNA, 19 nt, Artificial Sequence
  Description of Artificial Sequence: Synthetic oligonucleotide
ggaguauaaaagaaccaaa

SEQ ID NO: 1369603 - RNA, 19 nt, Artificial Sequence
  Description of Artificial Sequence: Synthetic oligonucleotide
uccauucagcuugucugga

SEQ ID NO: 1369604 - RNA, 19 nt, Artificial Sequence
  Description of Artificial Sequence: Synthetic oligonucleotide
uggauccaugugguuguag

SEQ ID NO: 1369605 - RNA, 19 nt, Artificial Sequence
  Description of Artificial Sequence: Synthetic oligonucleotide
guuguaggagcuggcuuug

SEQ ID NO: 1369606 - RNA, 19 nt, Artificial Sequence
  Description of Artificial Sequence: Synthetic oligonucleotide
ggaaacaacuagaccgagc

SEQ ID NO: 1369607 - RNA, 19 nt, Artificial Sequence
  Description of Artificial Sequence: Synthetic oligonucleotide
gaguccauucagcuugucu

SEQ ID NO: 1369608 - RNA, 19 nt, Artificial Sequence
  Description of Artificial Sequence: Synthetic oligonucleotide
ggcaauacuacgugagaaa

SEQ ID NO: 1369609 - RNA, 19 nt, Artificial Sequence
  Description of Artificial Sequence: Synthetic oligonucleotide
ucaauccggauugcacgga

SEQ ID NO: 1369610 - RNA, 19 nt, Artificial Sequence
  Description of Artificial Sequence: Synthetic oligonucleotide
uauuccgucucugguuaaa

SEQ ID NO: 1369611 - RNA, 19 nt, Artificial Sequence
  Description of Artificial Sequence: Synthetic oligonucleotide
auucgagacgugauuucca

SEQ ID NO: 1369612 - RNA, 19 nt, Artificial Sequence
  Description of Artificial Sequence: Synthetic oligonucleotide
caguacagucaggacuagg

SEQ ID NO: 1369613 - RNA, 19 nt, Artificial Sequence
  Description of Artificial Sequence: Synthetic oligonucleotide
ggacagagcuauucaggug

SEQ ID NO: 1369614 - RNA, 19 nt, Artificial Sequence
  Description of Artificial Sequence: Synthetic oligonucleotide
guacuuagacugaaguugu

SEQ ID NO: 1369615 - RNA, 19 nt, Artificial Sequence
  Description of Artificial Sequence: Synthetic oligonucleotide
uacuuagacugaaguuguu

SEQ ID NO: 1369616 - RNA, 19 nt, Artificial Sequence
  Description of Artificial Sequence: Synthetic oligonucleotide
ugacgaggucacugucuug

SEQ ID NO: 1369617 - RNA, 19 nt, Artificial Sequence
  Description of Artificial Sequence: Synthetic oligonucleotide
ucaggccuagacuggcuuu

SEQ ID NO: 1369618 - RNA, 19 nt, Artificial Sequence
  Description of Artificial Sequence: Synthetic oligonucleotide
agcuccguauuccgucucu

SEQ ID NO: 1369619 - RNA, 19 nt, Artificial Sequence
  Description of Artificial Sequence: Synthetic oligonucleotide
cacauacuuaaaugguaua

SEQ ID NO: 1369620 - RNA, 19 nt, Artificial Sequence
  Description of Artificial Sequence: Synthetic oligonucleotide
acgguucucucaaaucaca

SEQ ID NO: 1369621 - RNA, 19 nt, Artificial Sequence
  Description of Artificial Sequence: Synthetic oligonucleotide
gccccgucaauccggauug

SEQ ID NO: 1369622 - RNA, 19 nt, Artificial Sequence
  Description of Artificial Sequence: Synthetic oligonucleotide
ggcaagggaaacaacuaga

SEQ ID NO: 1369623 - RNA, 19 nt, Artificial Sequence
  Description of Artificial Sequence: Synthetic oligonucleotide
auggcaagggaaacaacua

SEQ ID NO: 1369624 - RNA, 19 nt, Artificial Sequence
  Description of Artificial Sequence: Synthetic oligonucleotide
cuaguccuucucacugguc

SEQ ID NO: 1369625 - RNA, 19 nt, Artificial Sequence
  Description of Artificial Sequence: Synthetic oligonucleotide
ccgucucugguuaaaguuc

SEQ ID NO: 1369626 - RNA, 19 nt, Artificial Sequence
  Description of Artificial Sequence: Synthetic oligonucleotide
uagacucaacggaguuccu

SEQ ID NO: 1369627 - RNA, 19 nt, Artificial Sequence
  Description of Artificial Sequence: Synthetic oligonucleotide
ccaacaguacagucaggac

SEQ ID NO: 1369628 - RNA, 19 nt, Artificial Sequence
  Description of Artificial Sequence: Synthetic oligonucleotide
aggagcuggcuuuguuaga

SEQ ID NO: 1369629 - RNA, 19 nt, Artificial Sequence
  Description of Artificial Sequence: Synthetic oligonucleotide
augauucagcuagaaucaa

SEQ ID NO: 1369630 - RNA, 19 nt, Artificial Sequence
  Description of Artificial Sequence: Synthetic oligonucleotide
agccaccgcuuucuguuga

SEQ ID NO: 1369631 - RNA, 19 nt, Artificial Sequence
  Description of Artificial Sequence: Synthetic oligonucleotide
gcuaaacacuccuaacaua

SEQ ID NO: 1369632 - RNA, 19 nt, Artificial Sequence
  Description of Artificial Sequence: Synthetic oligonucleotide
cuacgugagaaaugcggcu

SEQ ID NO: 1369633 - RNA, 19 nt, Artificial Sequence
  Description of Artificial Sequence: Synthetic oligonucleotide
ccacguuuauguaugaacu

SEQ ID NO: 1369634 - RNA, 19 nt, Artificial Sequence
  Description of Artificial Sequence: Synthetic oligonucleotide
cuaggaauguugugccucu

SEQ ID NO: 1369635 - RNA, 19 nt, Artificial Sequence
  Description of Artificial Sequence: Synthetic oligonucleotide
agagagcugucagacuaau

SEQ ID NO: 1369636 - RNA, 19 nt, Artificial Sequence
  Description of Artificial Sequence: Synthetic oligonucleotide
gcacgggcaauacuacgug

SEQ ID NO: 1369637 - RNA, 19 nt, Artificial Sequence
  Description of Artificial Sequence: Synthetic oligonucleotide
cacgggcaauacuacguga

SEQ ID NO: 1369638 - RNA, 19 nt, Artificial Sequence
  Description of Artificial Sequence: Synthetic oligonucleotide
gcugcguuuucauggucac

SEQ ID NO: 1369639 - RNA, 19 nt, Artificial Sequence
  Description of Artificial Sequence: Synthetic oligonucleotide
uuaguggggucugcauaaa

SEQ ID NO: 1369640 - RNA, 19 nt, Artificial Sequence
  Description of Artificial Sequence: Synthetic oligonucleotide
ccccucauaagcagcugcc

SEQ ID NO: 1369641 - RNA, 19 nt, Artificial Sequence
  Description of Artificial Sequence: Synthetic oligonucleotide
acaguacagucaggacuag

SEQ ID NO: 1369642 - RNA, 19 nt, Artificial Sequence
  Description of Artificial Sequence: Synthetic oligonucleotide
ccgucaauccggauugcac

SEQ ID NO: 1369643 - RNA, 19 nt, Artificial Sequence
  Description of Artificial Sequence: Synthetic oligonucleotide
cuagacuggcuuucagugu

SEQ ID NO: 1369644 - RNA, 19 nt, Artificial Sequence
  Description of Artificial Sequence: Synthetic oligonucleotide
cuucuuaguggggucugca

SEQ ID NO: 1369645 - RNA, 19 nt, Artificial Sequence
  Description of Artificial Sequence: Synthetic oligonucleotide
cuuugaggcuguuuggcuu

SEQ ID NO: 1369646 - RNA, 19 nt, Artificial Sequence
  Description of Artificial Sequence: Synthetic oligonucleotide
guaugaacuuaacuuccuu

SEQ ID NO: 1369647 - RNA, 19 nt, Artificial Sequence
  Description of Artificial Sequence: Synthetic oligonucleotide
cucagggaauugcauauau

SEQ ID NO: 1369648 - RNA, 19 nt, Artificial Sequence
  Description of Artificial Sequence: Synthetic oligonucleotide
ggcuuguaacaguuuggga

SEQ ID NO: 1369649 - RNA, 19 nt, Artificial Sequence
  Description of Artificial Sequence: Synthetic oligonucleotide
uugcacggacacuccggaa

SEQ ID NO: 1369650 - RNA, 19 nt, Artificial Sequence
  Description of Artificial Sequence: Synthetic oligonucleotide
caauuuccuucaggccuag

SEQ ID NO: 1369651 - RNA, 19 nt, Artificial Sequence
  Description of Artificial Sequence: Synthetic oligonucleotide
ugcggcuccagaguccauu

SEQ ID NO: 1369652 - RNA, 19 nt, Artificial Sequence
  Description of Artificial Sequence: Synthetic oligonucleotide
gggcaauacuacgugagaa

SEQ ID NO: 1369653 - RNA, 19 nt, Artificial Sequence
  Description of Artificial Sequence: Synthetic oligonucleotide
cuugaucuacuucuugcuu

SEQ ID NO: 1369654 - RNA, 19 nt, Artificial Sequence
  Description of Artificial Sequence: Synthetic oligonucleotide
cuagggcuacaucuuugaa

SEQ ID NO: 1369655 - RNA, 19 nt, Artificial Sequence
  Description of Artificial Sequence: Synthetic oligonucleotide
ccggaaggaagaauaggca

SEQ ID NO: 1369656 - RNA, 19 nt, Artificial Sequence
  Description of Artificial Sequence: Synthetic oligonucleotide
caucuuugaaggcugcguu

SEQ ID NO: 1369657 - RNA, 19 nt, Artificial Sequence
  Description of Artificial Sequence: Synthetic oligonucleotide
ccaugcuaaacacuccuaa

SEQ ID NO: 1369658 - RNA, 19 nt, Artificial Sequence
  Description of Artificial Sequence: Synthetic oligonucleotide
ggacuggcuggguacugac

SEQ ID NO: 1369659 - RNA, 19 nt, Artificial Sequence
  Description of Artificial Sequence: Synthetic oligonucleotide
cuagcuccguauuccgucu

SEQ ID NO: 1369660 - RNA, 19 nt, Artificial Sequence
  Description of Artificial Sequence: Synthetic oligonucleotide
cagccaccgcuuucuguug

SEQ ID NO: 1369661 - RNA, 19 nt, Artificial Sequence
  Description of Artificial Sequence: Synthetic oligonucleotide
cacguuuauguaugaacuu

SEQ ID NO: 1369662 - RNA, 19 nt, Artificial Sequence
  Description of Artificial Sequence: Synthetic oligonucleotide
ggggccgagggacagagcu

SEQ ID NO: 1369663 - RNA, 19 nt, Artificial Sequence
  Description of Artificial Sequence: Synthetic oligonucleotide
gcaauacuacgugagaaau

SEQ ID NO: 1369664 - RNA, 19 nt, Artificial Sequence
  Description of Artificial Sequence: Synthetic oligonucleotide
acggacacuccggaaggaa

SEQ ID NO: 1369665 - RNA, 19 nt, Artificial Sequence
  Description of Artificial Sequence: Synthetic oligonucleotide
ggcugcacgggcaauacua

SEQ ID NO: 1369666 - RNA, 19 nt, Artificial Sequence
  Description of Artificial Sequence: Synthetic oligonucleotide
cagaauucgagacgugauu

SEQ ID NO: 1369667 - RNA, 19 nt, Artificial Sequence
  Description of Artificial Sequence: Synthetic oligonucleotide
accaugcuaaacacuccua

SEQ ID NO: 1369668 - RNA, 19 nt, Artificial Sequence
  Description of Artificial Sequence: Synthetic oligonucleotide
cagucaggacuagggcuac

SEQ ID NO: 1369669 - RNA, 19 nt, Artificial Sequence
  Description of Artificial Sequence: Synthetic oligonucleotide
cacagauaaucaggcugca

SEQ ID NO: 1369670 - RNA, 19 nt, Artificial Sequence
  Description of Artificial Sequence: Synthetic oligonucleotide
guauuccgucucugguuaa

SEQ ID NO: 1369671 - RNA, 19 nt, Artificial Sequence
  Description of Artificial Sequence: Synthetic oligonucleotide
cuaaacccauugcucaguu

SEQ ID NO: 1369672 - RNA, 19 nt, Artificial Sequence
  Description of Artificial Sequence: Synthetic oligonucleotide
ggcagagacucaaagcggu

SEQ ID NO: 1369673 - RNA, 19 nt, Artificial Sequence
  Description of Artificial Sequence: Synthetic oligonucleotide
gcugcacgggcaauacuac

SEQ ID NO: 1369674 - RNA, 19 nt, Artificial Sequence
  Description of Artificial Sequence: Synthetic oligonucleotide
cccucauaagcagcugccc

SEQ ID NO: 1369675 - RNA, 19 nt, Artificial Sequence
  Description of Artificial Sequence: Synthetic oligonucleotide
cagcuacaauuagagagcu

SEQ ID NO: 1369676 - RNA, 19 nt, Artificial Sequence
  Description of Artificial Sequence: Synthetic oligonucleotide
ggcuucuuaguggggucug

SEQ ID NO: 1369677 - RNA, 19 nt, Artificial Sequence
  Description of Artificial Sequence: Synthetic oligonucleotide
aggccuagacuggcuuuca

SEQ ID NO: 1369678 - RNA, 19 nt, Artificial Sequence
  Description of Artificial Sequence: Synthetic oligonucleotide
gcuauucaggugucuuucu

SEQ ID NO: 1369679 - RNA, 19 nt, Artificial Sequence
  Description of Artificial Sequence: Synthetic oligonucleotide
gcuucuuaguggggucugc

SEQ ID NO: 1369680 - RNA, 19 nt, Artificial Sequence
  Description of Artificial Sequence: Synthetic oligonucleotide
gccuagacuggcuuucagu

SEQ ID NO: 1369681 - RNA, 19 nt, Artificial Sequence
  Description of Artificial Sequence: Synthetic oligonucleotide
agucaggacuagggcuaca

SEQ ID NO: 1369682 - RNA, 19 nt, Artificial Sequence
  Description of Artificial Sequence: Synthetic oligonucleotide
caucugguguucugacagu

SEQ ID NO: 1369683 - RNA, 19 nt, Artificial Sequence
  Description of Artificial Sequence: Synthetic oligonucleotide
gucaggacuagggcuacau

SEQ ID NO: 1369684 - RNA, 19 nt, Artificial Sequence
  Description of Artificial Sequence: Synthetic oligonucleotide
caacuagaccgagcagcca

SEQ ID NO: 1369685 - RNA, 19 nt, Artificial Sequence
  Description of Artificial Sequence: Synthetic oligonucleotide
cucaacggaguuccuggau

SEQ ID NO: 1369686 - RNA, 19 nt, Artificial Sequence
  Description of Artificial Sequence: Synthetic oligonucleotide
cguauuccgucucugguua

SEQ ID NO: 1369687 - RNA, 19 nt, Artificial Sequence
  Description of Artificial Sequence: Synthetic oligonucleotide
gucuugacucugguacuua

SEQ ID NO: 1369688 - RNA, 19 nt, Artificial Sequence
  Description of Artificial Sequence: Synthetic oligonucleotide
agcuucuauuucacucauu

SEQ ID NO: 1369689 - RNA, 19 nt, Artificial Sequence
  Description of Artificial Sequence: Synthetic oligonucleotide
cggauugcacggacacucc

SEQ ID NO: 1369690 - RNA, 19 nt, Artificial Sequence
  Description of Artificial Sequence: Synthetic oligonucleotide
gcuccguauuccgucucug

SEQ ID NO: 1369691 - RNA, 19 nt, Artificial Sequence
  Description of Artificial Sequence: Synthetic oligonucleotide
gccaccgcuuucuguugac

SEQ ID NO: 1369692 - RNA, 19 nt, Artificial Sequence
  Description of Artificial Sequence: Synthetic oligonucleotide
cugcguuuucauggucaca

SEQ ID NO: 1369693 - RNA, 19 nt, Artificial Sequence
  Description of Artificial Sequence: Synthetic oligonucleotide
cagaguccauucagcuugu

SEQ ID NO: 1369694 - RNA, 19 nt, Artificial Sequence
  Description of Artificial Sequence: Synthetic oligonucleotide
gagccugcgggcagagacu

SEQ ID NO: 1369695 - RNA, 19 nt, Artificial Sequence
  Description of Artificial Sequence: Synthetic oligonucleotide
guguucugacaguucucuu

SEQ ID NO: 1369696 - RNA, 19 nt, Artificial Sequence
  Description of Artificial Sequence: Synthetic oligonucleotide
cacggacacuccggaagga

SEQ ID NO: 1369697 - RNA, 19 nt, Artificial Sequence
  Description of Artificial Sequence: Synthetic oligonucleotide
cgagacgugauuuccacuu

SEQ ID NO: 1369698 - RNA, 19 nt, Artificial Sequence
  Description of Artificial Sequence: Synthetic oligonucleotide
cuugcuugacgaggucacu

SEQ ID NO: 1369699 - RNA, 19 nt, Artificial Sequence
  Description of Artificial Sequence: Synthetic oligonucleotide
ggacuagggcuacaucuuu

SEQ ID NO: 1369700 - RNA, 19 nt, Artificial Sequence
  Description of Artificial Sequence: Synthetic oligonucleotide
ccuaguccuucucacuggu

SEQ ID NO: 1369701 - RNA, 19 nt, Artificial Sequence
  Description of Artificial Sequence: Synthetic oligonucleotide
uuccggcugcacgggcaau

SEQ ID NO: 1369702 - RNA, 19 nt, Artificial Sequence
  Description of Artificial Sequence: Synthetic oligonucleotide
cuguugacagaagguucau

SEQ ID NO: 1369703 - RNA, 19 nt, Artificial Sequence
  Description of Artificial Sequence: Synthetic oligonucleotide
ggguacugacagcuucuau

SEQ ID NO: 1369704 - RNA, 19 nt, Artificial Sequence
  Description of Artificial Sequence: Synthetic oligonucleotide
cgggcaauacuacgugaga

SEQ ID NO: 1369705 - RNA, 19 nt, Artificial Sequence
  Description of Artificial Sequence: Synthetic oligonucleotide
gcagcuuucccugccccgu

SEQ ID NO: 1369706 - RNA, 19 nt, Artificial Sequence
  Description of Artificial Sequence: Synthetic oligonucleotide
ccggcugcacgggcaauac

SEQ ID NO: 1369707 - RNA, 19 nt, Artificial Sequence
  Description of Artificial Sequence: Synthetic oligonucleotide
cccgucaauccggauugca

SEQ ID NO: 1369708 - RNA, 19 nt, Artificial Sequence
  Description of Artificial Sequence: Synthetic oligonucleotide
ccguauuccgucucugguu

SEQ ID NO: 1369709 - RNA, 19 nt, Artificial Sequence
  Description of Artificial Sequence: Synthetic oligonucleotide
ccaccgcuuucuguugaca

SEQ ID NO: 1369710 - RNA, 19 nt, Artificial Sequence
  Description of Artificial Sequence: Synthetic oligonucleotide
ccucagggaauugcauaua

SEQ ID NO: 1369711 - RNA, 19 nt, Artificial Sequence
  Description of Artificial Sequence: Synthetic oligonucleotide
ccccgucaauccggauugc

SEQ ID NO: 1369712 - RNA, 19 nt, Artificial Sequence
  Description of Artificial Sequence: Synthetic oligonucleotide
gccugcgggcagagacuca

SEQ ID NO: 1369713 - RNA, 19 nt, Artificial Sequence
  Description of Artificial Sequence: Synthetic oligonucleotide
cgucuugacucugguacuu

SEQ ID NO: 1369714 - RNA, 19 nt, Artificial Sequence
  Description of Artificial Sequence: Synthetic oligonucleotide
cggcugcacgggcaauacu

SEQ ID NO: 1369715 - RNA, 19 nt, Artificial Sequence
  Description of Artificial Sequence: Synthetic oligonucleotide
gccgagggacagagcuauu

SEQ ID NO: 1369716 - RNA, 19 nt, Artificial Sequence
  Description of Artificial Sequence: Synthetic oligonucleotide
ugagcuaucgcccagugug

SEQ ID NO: 1369717 - RNA, 19 nt, Artificial Sequence
  Description of Artificial Sequence: Synthetic oligonucleotide
aacucaucaauccuuucgg

SEQ ID NO: 1369718 - RNA, 19 nt, Artificial Sequence
  Description of Artificial Sequence: Synthetic oligonucleotide
aauccuuucggcuauggca

SEQ ID NO: 1369719 - RNA, 19 nt, Artificial Sequence
  Description of Artificial Sequence: Synthetic oligonucleotide
ucguccauaguaaaguggg

SEQ ID NO: 1369720 - RNA, 19 nt, Artificial Sequence
  Description of Artificial Sequence: Synthetic oligonucleotide
uggguuuucaacaaagcug

SEQ ID NO: 1369721 - RNA, 19 nt, Artificial Sequence
  Description of Artificial Sequence: Synthetic oligonucleotide
uggacuagcuucauguugg

SEQ ID NO: 1369722 - RNA, 19 nt, Artificial Sequence
  Description of Artificial Sequence: Synthetic oligonucleotide
uucaaaauccagcuccggg

SEQ ID NO: 1369723 - RNA, 19 nt, Artificial Sequence
  Description of Artificial Sequence: Synthetic oligonucleotide
ucauaaauaugccuguggu

SEQ ID NO: 1369724 - RNA, 19 nt, Artificial Sequence
  Description of Artificial Sequence: Synthetic oligonucleotide
uagaucucuagcucaagcg

SEQ ID NO: 1369725 - RNA, 19 nt, Artificial Sequence
  Description of Artificial Sequence: Synthetic oligonucleotide
agccauucgcuucaggucc

SEQ ID NO: 1369726 - RNA, 19 nt, Artificial Sequence
  Description of Artificial Sequence: Synthetic oligonucleotide
uaaucuugguacccaaggg

SEQ ID NO: 1369727 - RNA, 19 nt, Artificial Sequence
  Description of Artificial Sequence: Synthetic oligonucleotide
caggauuugagcuaucgcc

SEQ ID NO: 1369728 - RNA, 19 nt, Artificial Sequence
  Description of Artificial Sequence: Synthetic oligonucleotide
aacuggagcacuucauuuc

SEQ ID NO: 1369729 - RNA, 19 nt, Artificial Sequence
  Description of Artificial Sequence: Synthetic oligonucleotide
gauaaccucuuuaaagugg

SEQ ID NO: 1369730 - RNA, 19 nt, Artificial Sequence
  Description of Artificial Sequence: Synthetic oligonucleotide
aggacgaaggcccaacagc

SEQ ID NO: 1369731 - RNA, 19 nt, Artificial Sequence
  Description of Artificial Sequence: Synthetic oligonucleotide
ugaucaauccuucaacagu

SEQ ID NO: 1369732 - RNA, 19 nt, Artificial Sequence
  Description of Artificial Sequence: Synthetic oligonucleotide
uguuccaagccagagauug

SEQ ID NO: 1369733 - RNA, 19 nt, Artificial Sequence
  Description of Artificial Sequence: Synthetic oligonucleotide
uggaggguaaucuugguac

SEQ ID NO: 1369734 - RNA, 19 nt, Artificial Sequence
  Description of Artificial Sequence: Synthetic oligonucleotide
ucaaaauccagcuccggga

SEQ ID NO: 1369735 - RNA, 19 nt, Artificial Sequence
  Description of Artificial Sequence: Synthetic oligonucleotide
agagcucacaauuauuucu

SEQ ID NO: 1369736 - RNA, 19 nt, Artificial Sequence
  Description of Artificial Sequence: Synthetic oligonucleotide
acaugucucagacuugagg

SEQ ID NO: 1369737 - RNA, 19 nt, Artificial Sequence
  Description of Artificial Sequence: Synthetic oligonucleotide
uuaaaguggggaauuugga

SEQ ID NO: 1369738 - RNA, 19 nt, Artificial Sequence
  Description of Artificial Sequence: Synthetic oligonucleotide
gaucaauccuucaacagug

SEQ ID NO: 1369739 - RNA, 19 nt, Artificial Sequence
  Description of Artificial Sequence: Synthetic oligonucleotide
ugauaaccucuuuaaagug

SEQ ID NO: 1369740 - RNA, 19 nt, Artificial Sequence
  Description of Artificial Sequence: Synthetic oligonucleotide
uaacggucaaaguguagcg

SEQ ID NO: 1369741 - RNA, 19 nt, Artificial Sequence
  Description of Artificial Sequence: Synthetic oligonucleotide
agcgauauccuccucacca

SEQ ID NO: 1369742 - RNA, 19 nt, Artificial Sequence
  Description of Artificial Sequence: Synthetic oligonucleotide
aaagguacgcugguaccgc

SEQ ID NO: 1369743 - RNA, 19 nt, Artificial Sequence
  Description of Artificial Sequence: Synthetic oligonucleotide
aacggucaaaguguagcgc

SEQ ID NO: 1369744 - RNA, 19 nt, Artificial Sequence
  Description of Artificial Sequence: Synthetic oligonucleotide
aauccagccgcggaggacg

SEQ ID NO: 1369745 - RNA, 19 nt, Artificial Sequence
  Description of Artificial Sequence: Synthetic oligonucleotide
aggauuugagcuaucgccc

SEQ ID NO: 1369746 - RNA, 19 nt, Artificial Sequence
  Description of Artificial Sequence: Synthetic oligonucleotide
cuaacggucaaaguguagc

SEQ ID NO: 1369747 - RNA, 19 nt, Artificial Sequence
  Description of Artificial Sequence: Synthetic oligonucleotide
ucaagcgauauccuccuca

SEQ ID NO: 1369748 - RNA, 19 nt, Artificial Sequence
  Description of Artificial Sequence: Synthetic oligonucleotide
uuggacuagcuucauguug

SEQ ID NO: 1369749 - RNA, 19 nt, Artificial Sequence
  Description of Artificial Sequence: Synthetic oligonucleotide
uuggugagcagaaggcgcg

SEQ ID NO: 1369750 - RNA, 19 nt, Artificial Sequence
  Description of Artificial Sequence: Synthetic oligonucleotide
aaguguagcgcacucccug

SEQ ID NO: 1369751 - RNA, 19 nt, Artificial Sequence
  Description of Artificial Sequence: Synthetic oligonucleotide
caaaguguagcgcacuccc

SEQ ID NO: 1369752 - RNA, 19 nt, Artificial Sequence
  Description of Artificial Sequence: Synthetic oligonucleotide
caauucucgcaguuggugg

SEQ ID NO: 1369753 - RNA, 19 nt, Artificial Sequence
  Description of Artificial Sequence: Synthetic oligonucleotide
auaaccucuuuaaaguggg

SEQ ID NO: 1369754 - RNA, 19 nt, Artificial Sequence
  Description of Artificial Sequence: Synthetic oligonucleotide
uaaggggccggaacaaggg

SEQ ID NO: 1369755 - RNA, 19 nt, Artificial Sequence
  Description of Artificial Sequence: Synthetic oligonucleotide
ucggcuauggcauguuccg

SEQ ID NO: 1369756 - RNA, 19 nt, Artificial Sequence
  Description of Artificial Sequence: Synthetic oligonucleotide
uguggguuuucaacaaagc

SEQ ID NO: 1369757 - RNA, 19 nt, Artificial Sequence
  Description of Artificial Sequence: Synthetic oligonucleotide
caugucucagacuugagga

SEQ ID NO: 1369758 - RNA, 19 nt, Artificial Sequence
  Description of Artificial Sequence: Synthetic oligonucleotide
ugcuggaucguccauagua

SEQ ID NO: 1369759 - RNA, 19 nt, Artificial Sequence
  Description of Artificial Sequence: Synthetic oligonucleotide
caccucauuaguccgaugc

SEQ ID NO: 1369760 - RNA, 19 nt, Artificial Sequence
  Description of Artificial Sequence: Synthetic oligonucleotide
uccaacagucauaaauaug

SEQ ID NO: 1369761 - RNA, 19 nt, Artificial Sequence
  Description of Artificial Sequence: Synthetic oligonucleotide
ucuaccuucaucuccggau

SEQ ID NO: 1369762 - RNA, 19 nt, Artificial Sequence
  Description of Artificial Sequence: Synthetic oligonucleotide
aauuuggacuagcuucaug

SEQ ID NO: 1369763 - RNA, 19 nt, Artificial Sequence
  Description of Artificial Sequence: Synthetic oligonucleotide
uccaacuucuggcuaaacu

SEQ ID NO: 1369764 - RNA, 19 nt, Artificial Sequence
  Description of Artificial Sequence: Synthetic oligonucleotide
agcucaagcgauauccucc

SEQ ID NO: 1369765 - RNA, 19 nt, Artificial Sequence
  Description of Artificial Sequence: Synthetic oligonucleotide
uucggcuauggcauguucc

SEQ ID NO: 1369766 - RNA, 19 nt, Artificial Sequence
  Description of Artificial Sequence: Synthetic oligonucleotide
uggaucguccauaguaaag

SEQ ID NO: 1369767 - RNA, 19 nt, Artificial Sequence
  Description of Artificial Sequence: Synthetic oligonucleotide
accucauuaguccgaugcc

SEQ ID NO: 1369768 - RNA, 19 nt, Artificial Sequence
  Description of Artificial Sequence: Synthetic oligonucleotide
guacccaagggcucuaccg

SEQ ID NO: 1369769 - RNA, 19 nt, Artificial Sequence
  Description of Artificial Sequence: Synthetic oligonucleotide
uccauaguaaagugggccu

SEQ ID NO: 1369770 - RNA, 19 nt, Artificial Sequence
  Description of Artificial Sequence: Synthetic oligonucleotide
ucuaaagaaggggaucuug

SEQ ID NO: 1369771 - RNA, 19 nt, Artificial Sequence
  Description of Artificial Sequence: Synthetic oligonucleotide
ucucuaaagaaggggaucu

SEQ ID NO: 1369772 - RNA, 19 nt, Artificial Sequence
  Description of Artificial Sequence: Synthetic oligonucleotide
cugaucaauccuucaacag

SEQ ID NO: 1369773 - RNA, 19 nt, Artificial Sequence
  Description of Artificial Sequence: Synthetic oligonucleotide
ucaaagguacgcugguacc

SEQ ID NO: 1369774 - RNA, 19 nt, Artificial Sequence
  Description of Artificial Sequence: Synthetic oligonucleotide
uccgguaacaguucaugca

SEQ ID NO: 1369775 - RNA, 19 nt, Artificial Sequence
  Description of Artificial Sequence: Synthetic oligonucleotide
aagcgauauccuccucacc

SEQ ID NO: 1369776 - RNA, 19 nt, Artificial Sequence
  Description of Artificial Sequence: Synthetic oligonucleotide
gagauugcacggcugauca

SEQ ID NO: 1369777 - RNA, 19 nt, Artificial Sequence
  Description of Artificial Sequence: Synthetic oligonucleotide
acgaaggcccaacagcacg

SEQ ID NO: 1369778 - RNA, 19 nt, Artificial Sequence
  Description of Artificial Sequence: Synthetic oligonucleotide
cuaaggggccggaacaagg

SEQ ID NO: 1369779 - RNA, 19 nt, Artificial Sequence
  Description of Artificial Sequence: Synthetic oligonucleotide
ucccgagggaucaucaaug

SEQ ID NO: 1369780 - RNA, 19 nt, Artificial Sequence
  Description of Artificial Sequence: Synthetic oligonucleotide
aguuucuccgacuggucag

SEQ ID NO: 1369781 - RNA, 19 nt, Artificial Sequence
  Description of Artificial Sequence: Synthetic oligonucleotide
aaccucuuuaaagugggga

SEQ ID NO: 1369782 - RNA, 19 nt, Artificial Sequence
  Description of Artificial Sequence: Synthetic oligonucleotide
gaucguccauaguaaagug

SEQ ID NO: 1369783 - RNA, 19 nt, Artificial Sequence
  Description of Artificial Sequence: Synthetic oligonucleotide
uccgggauucuuguggugg

SEQ ID NO: 1369784 - RNA, 19 nt, Artificial Sequence
  Description of Artificial Sequence: Synthetic oligonucleotide
aaggcccaacagcacgccc

SEQ ID NO: 1369785 - RNA, 19 nt, Artificial Sequence
  Description of Artificial Sequence: Synthetic oligonucleotide
ugcucaucguuuuccaaca

SEQ ID NO: 1369786 - RNA, 19 nt, Artificial Sequence
  Description of Artificial Sequence: Synthetic oligonucleotide
ugguccuggauccugccug

SEQ ID NO: 1369787 - RNA, 19 nt, Artificial Sequence
  Description of Artificial Sequence: Synthetic oligonucleotide
aguguagcgcacucccugg

SEQ ID NO: 1369788 - RNA, 19 nt, Artificial Sequence
  Description of Artificial Sequence: Synthetic oligonucleotide
ugggauuuccacacuacau

SEQ ID NO: 1369789 - RNA, 19 nt, Artificial Sequence
  Description of Artificial Sequence: Synthetic oligonucleotide
guagugugugaucaccaag

SEQ ID NO: 1369790 - RNA, 19 nt, Artificial Sequence
  Description of Artificial Sequence: Synthetic oligonucleotide
uggcuggcaauccagccgc

SEQ ID NO: 1369791 - RNA, 19 nt, Artificial Sequence
  Description of Artificial Sequence: Synthetic oligonucleotide
cucauuuuggucaaaggua

SEQ ID NO: 1369792 - RNA, 19 nt, Artificial Sequence
  Description of Artificial Sequence: Synthetic oligonucleotide
uacccaagggcucuaccgc

SEQ ID NO: 1369793 - RNA, 19 nt, Artificial Sequence
  Description of Artificial Sequence: Synthetic oligonucleotide
acggucaaaguguagcgca

SEQ ID NO: 1369794 - RNA, 19 nt, Artificial Sequence
  Description of Artificial Sequence: Synthetic oligonucleotide
caaagguacgcugguaccg

SEQ ID NO: 1369795 - RNA, 19 nt, Artificial Sequence
  Description of Artificial Sequence: Synthetic oligonucleotide
augaccagagugaaugggg

SEQ ID NO: 1369796 - RNA, 19 nt, Artificial Sequence
  Description of Artificial Sequence: Synthetic oligonucleotide
uuccgguaacaguucaugc

SEQ ID NO: 1369797 - RNA, 19 nt, Artificial Sequence
  Description of Artificial Sequence: Synthetic oligonucleotide
guccauaguaaagugggcc

SEQ ID NO: 1369798 - RNA, 19 nt, Artificial Sequence
  Description of Artificial Sequence: Synthetic oligonucleotide
ucuccggaucaucuucagg

SEQ ID NO: 1369799 - RNA, 19 nt, Artificial Sequence
  Description of Artificial Sequence: Synthetic oligonucleotide
uccguguugcuccaaccgc

SEQ ID NO: 1369800 - RNA, 19 nt, Artificial Sequence
  Description of Artificial Sequence: Synthetic oligonucleotide
uuugagcuaucgcccagug

SEQ ID NO: 1369801 - RNA, 19 nt, Artificial Sequence
  Description of Artificial Sequence: Synthetic oligonucleotide
ugaacuggagcacuucauu

SEQ ID NO: 1369802 - RNA, 19 nt, Artificial Sequence
  Description of Artificial Sequence: Synthetic oligonucleotide
uaaccucuuuaaagugggg

SEQ ID NO: 1369803 - RNA, 19 nt, Artificial Sequence
  Description of Artificial Sequence: Synthetic oligonucleotide
gauuugagcuaucgcccag

SEQ ID NO: 1369804 - RNA, 19 nt, Artificial Sequence
  Description of Artificial Sequence: Synthetic oligonucleotide
aggcugggauuucaaaauc

SEQ ID NO: 1369805 - RNA, 19 nt, Artificial Sequence
  Description of Artificial Sequence: Synthetic oligonucleotide
ugagcugugcacugcuacc

SEQ ID NO: 1369806 - RNA, 19 nt, Artificial Sequence
  Description of Artificial Sequence: Synthetic oligonucleotide
uagcccucugucuucaugu

SEQ ID NO: 1369807 - RNA, 19 nt, Artificial Sequence
  Description of Artificial Sequence: Synthetic oligonucleotide
uucugcagguaacuguuuc

SEQ ID NO: 1369808 - RNA, 19 nt, Artificial Sequence
  Description of Artificial Sequence: Synthetic oligonucleotide
aacaagggcccuguggcug

SEQ ID NO: 1369809 - RNA, 19 nt, Artificial Sequence
  Description of Artificial Sequence: Synthetic oligonucleotide
aguccgaugcccacaauuc

SEQ ID NO: 1369810 - RNA, 19 nt, Artificial Sequence
  Description of Artificial Sequence: Synthetic oligonucleotide
gaggacgaaggcccaacag

SEQ ID NO: 1369811 - RNA, 19 nt, Artificial Sequence
  Description of Artificial Sequence: Synthetic oligonucleotide
aucguccauaguaaagugg

SEQ ID NO: 1369812 - RNA, 19 nt, Artificial Sequence
  Description of Artificial Sequence: Synthetic oligonucleotide
acaauucucgcaguuggug

SEQ ID NO: 1369813 - RNA, 19 nt, Artificial Sequence
  Description of Artificial Sequence: Synthetic oligonucleotide
ugcacggcugaucaauccu

SEQ ID NO: 1369814 - RNA, 19 nt, Artificial Sequence
  Description of Artificial Sequence: Synthetic oligonucleotide
gguaacaguucaugcacag

SEQ ID NO: 1369815 - RNA, 19 nt, Artificial Sequence
  Description of Artificial Sequence: Synthetic oligonucleotide
uuuuggucaaagguacgcu

SEQ ID NO: 1369816 - RNA, 19 nt, Artificial Sequence
  Description of Artificial Sequence: Synthetic oligonucleotide
cuccguguugcuccaaccg

SEQ ID NO: 1369817 - RNA, 19 nt, Artificial Sequence
  Description of Artificial Sequence: Synthetic oligonucleotide
aacucuagcucugggauuu

SEQ ID NO: 1369818 - RNA, 19 nt, Artificial Sequence
  Description of Artificial Sequence: Synthetic oligonucleotide
aaauaugccuguggugcug

SEQ ID NO: 1369819 - RNA, 19 nt, Artificial Sequence
  Description of Artificial Sequence: Synthetic oligonucleotide
uguuccguugcccgucuug

SEQ ID NO: 1369820 - RNA, 19 nt, Artificial Sequence
  Description of Artificial Sequence: Synthetic oligonucleotide
caagcgauauccuccucac

SEQ ID NO: 1369821 - RNA, 19 nt, Artificial Sequence
  Description of Artificial Sequence: Synthetic oligonucleotide
uguagugugugaucaccaa

SEQ ID NO: 1369822 - RNA, 19 nt, Artificial Sequence
  Description of Artificial Sequence: Synthetic oligonucleotide
uaccaguucucugaugucu

SEQ ID NO: 1369823 - RNA, 19 nt, Artificial Sequence
  Description of Artificial Sequence: Synthetic oligonucleotide
uccgaugcccacaauucuc

SEQ ID NO: 1369824 - RNA, 19 nt, Artificial Sequence
  Description of Artificial Sequence: Synthetic oligonucleotide
agcugugcacugcuaccgc

SEQ ID NO: 1369825 - RNA, 19 nt, Artificial Sequence
  Description of Artificial Sequence: Synthetic oligonucleotide
uggggaauuuggacuagcu

SEQ ID NO: 1369826 - RNA, 19 nt, Artificial Sequence
  Description of Artificial Sequence: Synthetic oligonucleotide
ucuaccgcuccuccggacu

SEQ ID NO: 1369827 - RNA, 19 nt, Artificial Sequence
  Description of Artificial Sequence: Synthetic oligonucleotide
ugccucauagcccucuguc

SEQ ID NO: 1369828 - RNA, 19 nt, Artificial Sequence
  Description of Artificial Sequence: Synthetic oligonucleotide
uaucgcccagugugaaugg

SEQ ID NO: 1369829 - RNA, 19 nt, Artificial Sequence
  Description of Artificial Sequence: Synthetic oligonucleotide
auuaguccgaugcccacaa

SEQ ID NO: 1369830 - RNA, 19 nt, Artificial Sequence
  Description of Artificial Sequence: Synthetic oligonucleotide
uugaacuggagcacuucau

SEQ ID NO: 1369831 - RNA, 19 nt, Artificial Sequence
  Description of Artificial Sequence: Synthetic oligonucleotide
ucuugguuaccaguucucu

SEQ ID NO: 1369832 - RNA, 19 nt, Artificial Sequence
  Description of Artificial Sequence: Synthetic oligonucleotide
guaacaguucaugcacagg

SEQ ID NO: 1369833 - RNA, 19 nt, Artificial Sequence
  Description of Artificial Sequence: Synthetic oligonucleotide
aacagccccgcuggcagac

SEQ ID NO: 1369834 - RNA, 19 nt, Artificial Sequence
  Description of Artificial Sequence: Synthetic oligonucleotide
uacaugucucagacuugag

SEQ ID NO: 1369835 - RNA, 19 nt, Artificial Sequence
  Description of Artificial Sequence: Synthetic oligonucleotide
cuugaggaggucucugguc

SEQ ID NO: 1369836 - RNA, 19 nt, Artificial Sequence
  Description of Artificial Sequence: Synthetic oligonucleotide
ugugauguggaggguaauc

SEQ ID NO: 1369837 - RNA, 19 nt, Artificial Sequence
  Description of Artificial Sequence: Synthetic oligonucleotide
gccccuaacggucaaagug

SEQ ID NO: 1369838 - RNA, 19 nt, Artificial Sequence
  Description of Artificial Sequence: Synthetic oligonucleotide
uugcacggcugaucaaucc

SEQ ID NO: 1369839 - RNA, 19 nt, Artificial Sequence
  Description of Artificial Sequence: Synthetic oligonucleotide
aacaguucaugcacaggga

SEQ ID NO: 1369840 - RNA, 19 nt, Artificial Sequence
  Description of Artificial Sequence: Synthetic oligonucleotide
gaggguaaucuugguaccc

SEQ ID NO: 1369841 - RNA, 19 nt, Artificial Sequence
  Description of Artificial Sequence: Synthetic oligonucleotide
uccuccggacuucaccuca

SEQ ID NO: 1369842 - RNA, 19 nt, Artificial Sequence
  Description of Artificial Sequence: Synthetic oligonucleotide
ucauuaguccgaugcccac

SEQ ID NO: 1369843 - RNA, 19 nt, Artificial Sequence
  Description of Artificial Sequence: Synthetic oligonucleotide
cucauuaguccgaugccca

SEQ ID NO: 1369844 - RNA, 19 nt, Artificial Sequence
  Description of Artificial Sequence: Synthetic oligonucleotide
acgcugguaccgcucuacc

SEQ ID NO: 1369845 - RNA, 19 nt, Artificial Sequence
  Description of Artificial Sequence: Synthetic oligonucleotide
uuuggacuagcuucauguu

SEQ ID NO: 1369846 - RNA, 19 nt, Artificial Sequence
  Description of Artificial Sequence: Synthetic oligonucleotide
uaccacuucucuguucaug

SEQ ID NO: 1369847 - RNA, 19 nt, Artificial Sequence
  Description of Artificial Sequence: Synthetic oligonucleotide
gugagcugugcacugcuac

SEQ ID NO: 1369848 - RNA, 19 nt, Artificial Sequence
  Description of Artificial Sequence: Synthetic oligonucleotide
cacagggacucgaucucgg

SEQ ID NO: 1369849 - RNA, 19 nt, Artificial Sequence
  Description of Artificial Sequence: Synthetic oligonucleotide
ccaagccagagauugcacg

SEQ ID NO: 1369850 - RNA, 19 nt, Artificial Sequence
  Description of Artificial Sequence: Synthetic oligonucleotide
aggcgcgucgugccguucc

SEQ ID NO: 1369851 - RNA, 19 nt, Artificial Sequence
  Description of Artificial Sequence: Synthetic oligonucleotide
uccacacuacaugucucag

SEQ ID NO: 1369852 - RNA, 19 nt, Artificial Sequence
  Description of Artificial Sequence: Synthetic oligonucleotide
aucaauccuucaacagugg

SEQ ID NO: 1369853 - RNA, 19 nt, Artificial Sequence
  Description of Artificial Sequence: Synthetic oligonucleotide
guuucuccgacuggucagg

SEQ ID NO: 1369854 - RNA, 19 nt, Artificial Sequence
  Description of Artificial Sequence: Synthetic oligonucleotide
guggguuuucaacaaagcu

SEQ ID NO: 1369855 - RNA, 19 nt, Artificial Sequence
  Description of Artificial Sequence: Synthetic oligonucleotide
uagcucaagcgauauccuc

SEQ ID NO: 1369856 - RNA, 19 nt, Artificial Sequence
  Description of Artificial Sequence: Synthetic oligonucleotide
aagguacgcugguaccgcu

SEQ ID NO: 1369857 - RNA, 19 nt, Artificial Sequence
  Description of Artificial Sequence: Synthetic oligonucleotide
ucuuggccccuaacgguca

SEQ ID NO: 1369858 - RNA, 19 nt, Artificial Sequence
  Description of Artificial Sequence: Synthetic oligonucleotide
gcugaucaauccuucaaca

SEQ ID NO: 1369859 - RNA, 19 nt, Artificial Sequence
  Description of Artificial Sequence: Synthetic oligonucleotide
auugagcccgagcuccuca

SEQ ID NO: 1369860 - RNA, 19 nt, Artificial Sequence
  Description of Artificial Sequence: Synthetic oligonucleotide
gggaucaucaaugaccaga

SEQ ID NO: 1369861 - RNA, 19 nt, Artificial Sequence
  Description of Artificial Sequence: Synthetic oligonucleotide
cucugaugucuuucagaag

SEQ ID NO: 1369862 - RNA, 19 nt, Artificial Sequence
  Description of Artificial Sequence: Synthetic oligonucleotide
uugagcuaucgcccagugu

SEQ ID NO: 1369863 - RNA, 19 nt, Artificial Sequence
  Description of Artificial Sequence: Synthetic oligonucleotide
auugcacggcugaucaauc

SEQ ID NO: 1369864 - RNA, 19 nt, Artificial Sequence
  Description of Artificial Sequence: Synthetic oligonucleotide
accgcucuaccuucaucuc

SEQ ID NO: 1369865 - RNA, 19 nt, Artificial Sequence
  Description of Artificial Sequence: Synthetic oligonucleotide
cuauggcauguuccguugc

SEQ ID NO: 1369866 - RNA, 19 nt, Artificial Sequence
  Description of Artificial Sequence: Synthetic oligonucleotide
ggcucuaccgcuccuccgg

SEQ ID NO: 1369867 - RNA, 19 nt, Artificial Sequence
  Description of Artificial Sequence: Synthetic oligonucleotide
cucgaugaucugauccaac

SEQ ID NO: 1369868 - RNA, 19 nt, Artificial Sequence
  Description of Artificial Sequence: Synthetic oligonucleotide
cuacaugucucagacuuga

SEQ ID NO: 1369869 - RNA, 19 nt, Artificial Sequence
  Description of Artificial Sequence: Synthetic oligonucleotide
uuucggcuauggcauguuc

SEQ ID NO: 1369870 - RNA, 19 nt, Artificial Sequence
  Description of Artificial Sequence: Synthetic oligonucleotide
ggcugaucaauccuucaac

SEQ ID NO: 1369871 - RNA, 19 nt, Artificial Sequence
  Description of Artificial Sequence: Synthetic oligonucleotide
uccggacuucaccucauua

SEQ ID NO: 1369872 - RNA, 19 nt, Artificial Sequence
  Description of Artificial Sequence: Synthetic oligonucleotide
uguagcgcacucccugguc

SEQ ID NO: 1369873 - RNA, 19 nt, Artificial Sequence
  Description of Artificial Sequence: Synthetic oligonucleotide
auccuuucggcuauggcau

SEQ ID NO: 1369874 - RNA, 19 nt, Artificial Sequence
  Description of Artificial Sequence: Synthetic oligonucleotide
guuuccugcuggaucgucc

SEQ ID NO: 1369875 - RNA, 19 nt, Artificial Sequence
  Description of Artificial Sequence: Synthetic oligonucleotide
aaaguguagcgcacucccu

SEQ ID NO: 1369876 - RNA, 19 nt, Artificial Sequence
  Description of Artificial Sequence: Synthetic oligonucleotide
cauaguaaagugggccuuc

SEQ ID NO: 1369877 - RNA, 19 nt, Artificial Sequence
  Description of Artificial Sequence: Synthetic oligonucleotide
uggccccuaacggucaaag

SEQ ID NO: 1369878 - RNA, 19 nt, Artificial Sequence
  Description of Artificial Sequence: Synthetic oligonucleotide
ugguuaccaguucucugau

SEQ ID NO: 1369879 - RNA, 19 nt, Artificial Sequence
  Description of Artificial Sequence: Synthetic oligonucleotide
gcccucgaugaucugaucc

SEQ ID NO: 1369880 - RNA, 19 nt, Artificial Sequence
  Description of Artificial Sequence: Synthetic oligonucleotide
uuaccaguucucugauguc

SEQ ID NO: 1369881 - RNA, 19 nt, Artificial Sequence
  Description of Artificial Sequence: Synthetic oligonucleotide
ggaggguaaucuugguacc

SEQ ID NO: 1369882 - RNA, 19 nt, Artificial Sequence
  Description of Artificial Sequence: Synthetic oligonucleotide
gugugugaucaccaaggca

SEQ ID NO: 1369883 - RNA, 19 nt, Artificial Sequence
  Description of Artificial Sequence: Synthetic oligonucleotide
cucuguucauguccucuug

SEQ ID NO: 1369884 - RNA, 19 nt, Artificial Sequence
  Description of Artificial Sequence: Synthetic oligonucleotide
cugugcacugcuaccgcug

SEQ ID NO: 1369885 - RNA, 19 nt, Artificial Sequence
  Description of Artificial Sequence: Synthetic oligonucleotide
agccagagauugcacggcu

SEQ ID NO: 1369886 - RNA, 19 nt, Artificial Sequence
  Description of Artificial Sequence: Synthetic oligonucleotide
gcaacagccccgcuggcag

SEQ ID NO: 1369887 - RNA, 19 nt, Artificial Sequence
  Description of Artificial Sequence: Synthetic oligonucleotide
ccggacuucaccucauuag

SEQ ID NO: 1369888 - RNA, 19 nt, Artificial Sequence
  Description of Artificial Sequence: Synthetic oligonucleotide
agcuguuucccgagggauc

SEQ ID NO: 1369889 - RNA, 19 nt, Artificial Sequence
  Description of Artificial Sequence: Synthetic oligonucleotide
ucucuagcucaagcgauau

SEQ ID NO: 1369890 - RNA, 19 nt, Artificial Sequence
  Description of Artificial Sequence: Synthetic oligonucleotide
auaguaaagugggccuuca

SEQ ID NO: 1369891 - RNA, 19 nt, Artificial Sequence
  Description of Artificial Sequence: Synthetic oligonucleotide
gugaauggggaagccauuc

SEQ ID NO: 1369892 - RNA, 19 nt, Artificial Sequence
  Description of Artificial Sequence: Synthetic oligonucleotide
cagggacucgaucucggug

SEQ ID NO: 1369893 - RNA, 19 nt, Artificial Sequence
  Description of Artificial Sequence: Synthetic oligonucleotide
cacugcuaccgcugugggg

SEQ ID NO: 1369894 - RNA, 19 nt, Artificial Sequence
  Description of Artificial Sequence: Synthetic oligonucleotide
auuugagcuaucgcccagu

SEQ ID NO: 1369895 - RNA, 19 nt, Artificial Sequence
  Description of Artificial Sequence: Synthetic oligonucleotide
uuucccgagggaucaucaa

SEQ ID NO: 1369896 - RNA, 19 nt, Artificial Sequence
  Description of Artificial Sequence: Synthetic oligonucleotide
ccgaugcccacaauucucg

SEQ ID NO: 1369897 - RNA, 19 nt, Artificial Sequence
  Description of Artificial Sequence: Synthetic oligonucleotide
cugggauuuccacacuaca

SEQ ID NO: 1369898 - RNA, 19 nt, Artificial Sequence
  Description of Artificial Sequence: Synthetic oligonucleotide
uaguaaagugggccuucau

SEQ ID NO: 1369899 - RNA, 19 nt, Artificial Sequence
  Description of Artificial Sequence: Synthetic oligonucleotide
ggauuucaaaauccagcuc

SEQ ID NO: 1369900 - RNA, 19 nt, Artificial Sequence
  Description of Artificial Sequence: Synthetic oligonucleotide
gguaaucuugguacccaag

SEQ ID NO: 1369901 - RNA, 19 nt, Artificial Sequence
  Description of Artificial Sequence: Synthetic oligonucleotide
uacgcugguaccgcucuac

SEQ ID NO: 1369902 - RNA, 19 nt, Artificial Sequence
  Description of Artificial Sequence: Synthetic oligonucleotide
acacuacaugucucagacu

SEQ ID NO: 1369903 - RNA, 19 nt, Artificial Sequence
  Description of Artificial Sequence: Synthetic oligonucleotide
cugguaccgcucuaccuuc

SEQ ID NO: 1369904 - RNA, 19 nt, Artificial Sequence
  Description of Artificial Sequence: Synthetic oligonucleotide
gcuauggcauguuccguug

SEQ ID NO: 1369905 - RNA, 19 nt, Artificial Sequence
  Description of Artificial Sequence: Synthetic oligonucleotide
gaauggguucuugguuacc

SEQ ID NO: 1369906 - RNA, 19 nt, Artificial Sequence
  Description of Artificial Sequence: Synthetic oligonucleotide
caacagcacgccccugggg

SEQ ID NO: 1369907 - RNA, 19 nt, Artificial Sequence
  Description of Artificial Sequence: Synthetic oligonucleotide
acuacaugucucagacuug

SEQ ID NO: 1369908 - RNA, 19 nt, Artificial Sequence
  Description of Artificial Sequence: Synthetic oligonucleotide
uugcuccaaccgcagugcu

SEQ ID NO: 1369909 - RNA, 19 nt, Artificial Sequence
  Description of Artificial Sequence: Synthetic oligonucleotide
cagaaggcgcgucgugccg

SEQ ID NO: 1369910 - RNA, 19 nt, Artificial Sequence
  Description of Artificial Sequence: Synthetic oligonucleotide
caucuccggaucaucuuca

SEQ ID NO: 1369911 - RNA, 19 nt, Artificial Sequence
  Description of Artificial Sequence: Synthetic oligonucleotide
acggcugaucaauccuuca

SEQ ID NO: 1369912 - RNA, 19 nt, Artificial Sequence
  Description of Artificial Sequence: Synthetic oligonucleotide
cacggcugaucaauccuuc

SEQ ID NO: 1369913 - RNA, 19 nt, Artificial Sequence
  Description of Artificial Sequence: Synthetic oligonucleotide
gauugcacggcugaucaau

SEQ ID NO: 1369914 - RNA, 19 nt, Artificial Sequence
  Description of Artificial Sequence: Synthetic oligonucleotide
ucgcaguugguggccauga

SEQ ID NO: 1369915 - RNA, 19 nt, Artificial Sequence
  Description of Artificial Sequence: Synthetic oligonucleotide
ggauuugagcuaucgccca

SEQ ID NO: 1369916 - RNA, 19 nt, Artificial Sequence
  Description of Artificial Sequence: Synthetic oligonucleotide
ccucauuaguccgaugccc

SEQ ID NO: 1369917 - RNA, 19 nt, Artificial Sequence
  Description of Artificial Sequence: Synthetic oligonucleotide
gccgagucugucuuuacca

SEQ ID NO: 1369918 - RNA, 19 nt, Artificial Sequence
  Description of Artificial Sequence: Synthetic oligonucleotide
cagagugaauggggaagcc

SEQ ID NO: 1369919 - RNA, 19 nt, Artificial Sequence
  Description of Artificial Sequence: Synthetic oligonucleotide
caggggcauacacauucug

SEQ ID NO: 1369920 - RNA, 19 nt, Artificial Sequence
  Description of Artificial Sequence: Synthetic oligonucleotide
cuucaccucauuaguccga

SEQ ID NO: 1369921 - RNA, 19 nt, Artificial Sequence
  Description of Artificial Sequence: Synthetic oligonucleotide
gagugaauggggaagccau

SEQ ID NO: 1369922 - RNA, 19 nt, Artificial Sequence
  Description of Artificial Sequence: Synthetic oligonucleotide
acagggacucgaucucggu

SEQ ID NO: 1369923 - RNA, 19 nt, Artificial Sequence
  Description of Artificial Sequence: Synthetic oligonucleotide
uguuucccgagggaucauc

SEQ ID NO: 1369924 - RNA, 19 nt, Artificial Sequence
  Description of Artificial Sequence: Synthetic oligonucleotide
uccuuucggcuauggcaug

SEQ ID NO: 1369925 - RNA, 19 nt, Artificial Sequence
  Description of Artificial Sequence: Synthetic oligonucleotide
gagcagaaggcgcgucgug

SEQ ID NO: 1369926 - RNA, 19 nt, Artificial Sequence
  Description of Artificial Sequence: Synthetic oligonucleotide
ggacgaaggcccaacagca

SEQ ID NO: 1369927 - RNA, 19 nt, Artificial Sequence
  Description of Artificial Sequence: Synthetic oligonucleotide
aucgcccagugugaauggg

SEQ ID NO: 1369928 - RNA, 19 nt, Artificial Sequence
  Description of Artificial Sequence: Synthetic oligonucleotide
cuugcccucgaugaucuga

SEQ ID NO: 1369929 - RNA, 19 nt, Artificial Sequence
  Description of Artificial Sequence: Synthetic oligonucleotide
aguggggaauuuggacuag

SEQ ID NO: 1369930 - RNA, 19 nt, Artificial Sequence
  Description of Artificial Sequence: Synthetic oligonucleotide
cagccgcggaggacgaagg

SEQ ID NO: 1369931 - RNA, 19 nt, Artificial Sequence
  Description of Artificial Sequence: Synthetic oligonucleotide
guuucccgagggaucauca

SEQ ID NO: 1369932 - RNA, 19 nt, Artificial Sequence
  Description of Artificial Sequence: Synthetic oligonucleotide
gugauguggaggguaaucu

SEQ ID NO: 1369933 - RNA, 19 nt, Artificial Sequence
  Description of Artificial Sequence: Synthetic oligonucleotide
ccaaggacagccauuccca

SEQ ID NO: 1369934 - RNA, 19 nt, Artificial Sequence
  Description of Artificial Sequence: Synthetic oligonucleotide
ccauucccaguucaaacuc

SEQ ID NO: 1369935 - RNA, 19 nt, Artificial Sequence
  Description of Artificial Sequence: Synthetic oligonucleotide
gguacccaagggcucuacc

SEQ ID NO: 1369936 - RNA, 19 nt, Artificial Sequence
  Description of Artificial Sequence: Synthetic oligonucleotide
ggaucguccauaguaaagu

SEQ ID NO: 1369937 - RNA, 19 nt, Artificial Sequence
  Description of Artificial Sequence: Synthetic oligonucleotide
auugcacucugggcaguug

SEQ ID NO: 1369938 - RNA, 19 nt, Artificial Sequence
  Description of Artificial Sequence: Synthetic oligonucleotide
cuggaucguccauaguaaa

SEQ ID NO: 1369939 - RNA, 19 nt, Artificial Sequence
  Description of Artificial Sequence: Synthetic oligonucleotide
ccgcggaggacgaaggccc

SEQ ID NO: 1369940 - RNA, 19 nt, Artificial Sequence
  Description of Artificial Sequence: Synthetic oligonucleotide
gguuaccaguucucugaug

SEQ ID NO: 1369941 - RNA, 19 nt, Artificial Sequence
  Description of Artificial Sequence: Synthetic oligonucleotide
ggccgagucugucuuuacc

SEQ ID NO: 1369942 - RNA, 19 nt, Artificial Sequence
  Description of Artificial Sequence: Synthetic oligonucleotide
guggggaauuuggacuagc

SEQ ID NO: 1369943 - RNA, 19 nt, Artificial Sequence
  Description of Artificial Sequence: Synthetic oligonucleotide
cauuaguccgaugcccaca

SEQ ID NO: 1369944 - RNA, 19 nt, Artificial Sequence
  Description of Artificial Sequence: Synthetic oligonucleotide
ggcgcuaaggggccggaac

SEQ ID NO: 1369945 - RNA, 19 nt, Artificial Sequence
  Description of Artificial Sequence: Synthetic oligonucleotide
uucucgcaguugguggcca

SEQ ID NO: 1369946 - RNA, 19 nt, Artificial Sequence
  Description of Artificial Sequence: Synthetic oligonucleotide
gggacucgaucucgguggg

SEQ ID NO: 1369947 - RNA, 19 nt, Artificial Sequence
  Description of Artificial Sequence: Synthetic oligonucleotide
agguacgcugguaccgcuc

SEQ ID NO: 1369948 - RNA, 19 nt, Artificial Sequence
  Description of Artificial Sequence: Synthetic oligonucleotide
uccaaccgcagugcucgca

SEQ ID NO: 1369949 - RNA, 19 nt, Artificial Sequence
  Description of Artificial Sequence: Synthetic oligonucleotide
agauugcacggcugaucaa

SEQ ID NO: 1369950 - RNA, 19 nt, Artificial Sequence
  Description of Artificial Sequence: Synthetic oligonucleotide
cucuagcucaagcgauauc

SEQ ID NO: 1369951 - RNA, 19 nt, Artificial Sequence
  Description of Artificial Sequence: Synthetic oligonucleotide
guaccgcucuaccuucauc

SEQ ID NO: 1369952 - RNA, 19 nt, Artificial Sequence
  Description of Artificial Sequence: Synthetic oligonucleotide
uugugguggccgagucugu

SEQ ID NO: 1369953 - RNA, 19 nt, Artificial Sequence
  Description of Artificial Sequence: Synthetic oligonucleotide
ccgucuugugggcuggucc

SEQ ID NO: 1369954 - RNA, 19 nt, Artificial Sequence
  Description of Artificial Sequence: Synthetic oligonucleotide
cucaucguuuuccaacagu

SEQ ID NO: 1369955 - RNA, 19 nt, Artificial Sequence
  Description of Artificial Sequence: Synthetic oligonucleotide
ccggaucaucuucaggggc

SEQ ID NO: 1369956 - RNA, 19 nt, Artificial Sequence
  Description of Artificial Sequence: Synthetic oligonucleotide
cauucccaguucaaacucu

SEQ ID NO: 1369957 - RNA, 19 nt, Artificial Sequence
  Description of Artificial Sequence: Synthetic oligonucleotide
cugguccuguuccaagcca

SEQ ID NO: 1369958 - RNA, 19 nt, Artificial Sequence
  Description of Artificial Sequence: Synthetic oligonucleotide
agaaggcgcgucgugccgu

SEQ ID NO: 1369959 - RNA, 19 nt, Artificial Sequence
  Description of Artificial Sequence: Synthetic oligonucleotide
gguccgguuguagugugug

SEQ ID NO: 1369960 - RNA, 19 nt, Artificial Sequence
  Description of Artificial Sequence: Synthetic oligonucleotide
ccuaacggucaaaguguag

SEQ ID NO: 1369961 - RNA, 19 nt, Artificial Sequence
  Description of Artificial Sequence: Synthetic oligonucleotide
aucaaugaccagagugaau

SEQ ID NO: 1369962 - RNA, 19 nt, Artificial Sequence
  Description of Artificial Sequence: Synthetic oligonucleotide
uccgacuggucaggauuug

SEQ ID NO: 1369963 - RNA, 19 nt, Artificial Sequence
  Description of Artificial Sequence: Synthetic oligonucleotide
uuaguccgaugcccacaau

SEQ ID NO: 1369964 - RNA, 19 nt, Artificial Sequence
  Description of Artificial Sequence: Synthetic oligonucleotide
gcucaucguuuuccaacag

SEQ ID NO: 1369965 - RNA, 19 nt, Artificial Sequence
  Description of Artificial Sequence: Synthetic oligonucleotide
gcgauauccuccucaccac

SEQ ID NO: 1369966 - RNA, 19 nt, Artificial Sequence
  Description of Artificial Sequence: Synthetic oligonucleotide
gagcuaucgcccaguguga

SEQ ID NO: 1369967 - RNA, 19 nt, Artificial Sequence
  Description of Artificial Sequence: Synthetic oligonucleotide
gagucugucuuuaccacuu

SEQ ID NO: 1369968 - RNA, 19 nt, Artificial Sequence
  Description of Artificial Sequence: Synthetic oligonucleotide
cucuaccgcuccuccggac

SEQ ID NO: 1369969 - RNA, 19 nt, Artificial Sequence
  Description of Artificial Sequence: Synthetic oligonucleotide
cuggggcauugcacucugg

SEQ ID NO: 1369970 - RNA, 19 nt, Artificial Sequence
  Description of Artificial Sequence: Synthetic oligonucleotide
ccgagucugucuuuaccac

SEQ ID NO: 1369971 - RNA, 19 nt, Artificial Sequence
  Description of Artificial Sequence: Synthetic oligonucleotide
ccgcucuaccuucaucucc

SEQ ID NO: 1369972 - RNA, 19 nt, Artificial Sequence
  Description of Artificial Sequence: Synthetic oligonucleotide
aucaauccuuucggcuaug

SEQ ID NO: 1369973 - RNA, 19 nt, Artificial Sequence
  Description of Artificial Sequence: Synthetic oligonucleotide
aucucuagcucaagcgaua

SEQ ID NO: 1369974 - RNA, 19 nt, Artificial Sequence
  Description of Artificial Sequence: Synthetic oligonucleotide
caauccagccgcggaggac

SEQ ID NO: 1369975 - RNA, 19 nt, Artificial Sequence
  Description of Artificial Sequence: Synthetic oligonucleotide
cuuggaugcucaucguuuu

SEQ ID NO: 1369976 - RNA, 19 nt, Artificial Sequence
  Description of Artificial Sequence: Synthetic oligonucleotide
uggugagcagaaggcgcgu

SEQ ID NO: 1369977 - RNA, 19 nt, Artificial Sequence
  Description of Artificial Sequence: Synthetic oligonucleotide
uggccgagucugucuuuac

SEQ ID NO: 1369978 - RNA, 19 nt, Artificial Sequence
  Description of Artificial Sequence: Synthetic oligonucleotide
gcucacaauuauuucucua

SEQ ID NO: 1369979 - RNA, 19 nt, Artificial Sequence
  Description of Artificial Sequence: Synthetic oligonucleotide
gcuggaucguccauaguaa

SEQ ID NO: 1369980 - RNA, 19 nt, Artificial Sequence
  Description of Artificial Sequence: Synthetic oligonucleotide
ggagcauguggguuuucaa

SEQ ID NO: 1369981 - RNA, 19 nt, Artificial Sequence
  Description of Artificial Sequence: Synthetic oligonucleotide
agcccgagcuccucauuuu

SEQ ID NO: 1369982 - RNA, 19 nt, Artificial Sequence
  Description of Artificial Sequence: Synthetic oligonucleotide
ucgaucucggugggcugcu

SEQ ID NO: 1369983 - RNA, 19 nt, Artificial Sequence
  Description of Artificial Sequence: Synthetic oligonucleotide
agcuaucgcccagugugaa

SEQ ID NO: 1369984 - RNA, 19 nt, Artificial Sequence
  Description of Artificial Sequence: Synthetic oligonucleotide
cucgcaguugguggccaug

SEQ ID NO: 1369985 - RNA, 19 nt, Artificial Sequence
  Description of Artificial Sequence: Synthetic oligonucleotide
aaggcgcgucgugccguuc

SEQ ID NO: 1369986 - RNA, 19 nt, Artificial Sequence
  Description of Artificial Sequence: Synthetic oligonucleotide
ucucgcaguugguggccau

SEQ ID NO: 1369987 - RNA, 19 nt, Artificial Sequence
  Description of Artificial Sequence: Synthetic oligonucleotide
cccgcuggcagacaucauc

SEQ ID NO: 1369988 - RNA, 19 nt, Artificial Sequence
  Description of Artificial Sequence: Synthetic oligonucleotide
cucggcgcuaaggggccgg

SEQ ID NO: 1369989 - RNA, 19 nt, Artificial Sequence
  Description of Artificial Sequence: Synthetic oligonucleotide
cucaagcgauauccuccuc

SEQ ID NO: 1369990 - RNA, 19 nt, Artificial Sequence
  Description of Artificial Sequence: Synthetic oligonucleotide
accuucaucuccggaucau

SEQ ID NO: 1369991 - RNA, 19 nt, Artificial Sequence
  Description of Artificial Sequence: Synthetic oligonucleotide
cuccuccggacuucaccuc

SEQ ID NO: 1369992 - RNA, 19 nt, Artificial Sequence
  Description of Artificial Sequence: Synthetic oligonucleotide
ccaagggcucuaccgcucc

SEQ ID NO: 1369993 - RNA, 19 nt, Artificial Sequence
  Description of Artificial Sequence: Synthetic oligonucleotide
ccgggauucuugugguggc

SEQ ID NO: 1369994 - RNA, 19 nt, Artificial Sequence
  Description of Artificial Sequence: Synthetic oligonucleotide
gcgcuaaggggccggaaca

SEQ ID NO: 1369995 - RNA, 19 nt, Artificial Sequence
  Description of Artificial Sequence: Synthetic oligonucleotide
gcccgagcuccucauuuug

SEQ ID NO: 1369996 - RNA, 19 nt, Artificial Sequence
  Description of Artificial Sequence: Synthetic oligonucleotide
cacaauucucgcaguuggu

SEQ ID NO: 1369997 - RNA, 19 nt, Artificial Sequence
  Description of Artificial Sequence: Synthetic oligonucleotide
uaccgcuguggggccaggc

SEQ ID NO: 1369998 - RNA, 19 nt, Artificial Sequence
  Description of Artificial Sequence: Synthetic oligonucleotide
ugcccucgaugaucugauc

SEQ ID NO: 1369999 - RNA, 19 nt, Artificial Sequence
  Description of Artificial Sequence: Synthetic oligonucleotide
ccuccucaccacaggcagg

SEQ ID NO: 1370000 - RNA, 19 nt, Artificial Sequence
  Description of Artificial Sequence: Synthetic oligonucleotide
cauugagcccgagcuccuc

SEQ ID NO: 1370001 - RNA, 19 nt, Artificial Sequence
  Description of Artificial Sequence: Synthetic oligonucleotide
gcuccuccggacuucaccu

SEQ ID NO: 1370002 - RNA, 19 nt, Artificial Sequence
  Description of Artificial Sequence: Synthetic oligonucleotide
ccgagggaucaucaaugac

SEQ ID NO: 1370003 - RNA, 19 nt, Artificial Sequence
  Description of Artificial Sequence: Synthetic oligonucleotide
gggagcauguggguuuuca

SEQ ID NO: 1370004 - RNA, 19 nt, Artificial Sequence
  Description of Artificial Sequence: Synthetic oligonucleotide
gguacgcugguaccgcucu

SEQ ID NO: 1370005 - RNA, 19 nt, Artificial Sequence
  Description of Artificial Sequence: Synthetic oligonucleotide
gcugguaccgcucuaccuu

SEQ ID NO: 1370006 - RNA, 19 nt, Artificial Sequence
  Description of Artificial Sequence: Synthetic oligonucleotide
cguguugcuccaaccgcag

SEQ ID NO: 1370007 - RNA, 19 nt, Artificial Sequence
  Description of Artificial Sequence: Synthetic oligonucleotide
ggcgcgucgugccguuccg

SEQ ID NO: 1370008 - RNA, 19 nt, Artificial Sequence
  Description of Artificial Sequence: Synthetic oligonucleotide
gcucaagcgauauccuccu

SEQ ID NO: 1370009 - RNA, 19 nt, Artificial Sequence
  Description of Artificial Sequence: Synthetic oligonucleotide
gucgugccguuccgguaac

SEQ ID NO: 1370010 - RNA, 19 nt, Artificial Sequence
  Description of Artificial Sequence: Synthetic oligonucleotide
uggggagcauguggguuuu

SEQ ID NO: 1370011 - RNA, 19 nt, Artificial Sequence
  Description of Artificial Sequence: Synthetic oligonucleotide
gugccguuccgguaacagu

SEQ ID NO: 1370012 - RNA, 19 nt, Artificial Sequence
  Description of Artificial Sequence: Synthetic oligonucleotide
gugguggccgagucugucu

SEQ ID NO: 1370013 - RNA, 19 nt, Artificial Sequence
  Description of Artificial Sequence: Synthetic oligonucleotide
ccccuaacggucaaagugu

SEQ ID NO: 1370014 - RNA, 19 nt, Artificial Sequence
  Description of Artificial Sequence: Synthetic oligonucleotide
ccguguugcuccaaccgca

SEQ ID NO: 1370015 - RNA, 19 nt, Artificial Sequence
  Description of Artificial Sequence: Synthetic oligonucleotide
ugcuaccgcuguggggcca

SEQ ID NO: 1370016 - RNA, 19 nt, Artificial Sequence
  Description of Artificial Sequence: Synthetic oligonucleotide
ggaucuccguguugcucca

SEQ ID NO: 1370017 - RNA, 19 nt, Artificial Sequence
  Description of Artificial Sequence: Synthetic oligonucleotide
uugguacccaagggcucua

SEQ ID NO: 1370018 - RNA, 19 nt, Artificial Sequence
  Description of Artificial Sequence: Synthetic oligonucleotide
uuggccccuaacggucaaa

SEQ ID NO: 1370019 - RNA, 19 nt, Artificial Sequence
  Description of Artificial Sequence: Synthetic oligonucleotide
ggcuauggcauguuccguu

SEQ ID NO: 1370020 - RNA, 19 nt, Artificial Sequence
  Description of Artificial Sequence: Synthetic oligonucleotide
gcccagugugaauggguuc

SEQ ID NO: 1370021 - RNA, 19 nt, Artificial Sequence
  Description of Artificial Sequence: Synthetic oligonucleotide
ccagccgcggaggacgaag

SEQ ID NO: 1370022 - RNA, 19 nt, Artificial Sequence
  Description of Artificial Sequence: Synthetic oligonucleotide
gugaucaccaaggcaucau

SEQ ID NO: 1370023 - RNA, 19 nt, Artificial Sequence
  Description of Artificial Sequence: Synthetic oligonucleotide
cccgagggaucaucaauga

SEQ ID NO: 1370024 - RNA, 19 nt, Artificial Sequence
  Description of Artificial Sequence: Synthetic oligonucleotide
ucgugccguuccgguaaca

SEQ ID NO: 1370025 - RNA, 19 nt, Artificial Sequence
  Description of Artificial Sequence: Synthetic oligonucleotide
uaccgcuccuccggacuuc

SEQ ID NO: 1370026 - RNA, 19 nt, Artificial Sequence
  Description of Artificial Sequence: Synthetic oligonucleotide
guggccgagucugucuuua

SEQ ID NO: 1370027 - RNA, 19 nt, Artificial Sequence
  Description of Artificial Sequence: Synthetic oligonucleotide
cuccgacuggucaggauuu

SEQ ID NO: 1370028 - RNA, 19 nt, Artificial Sequence
  Description of Artificial Sequence: Synthetic oligonucleotide
cgugccguuccgguaacag

SEQ ID NO: 1370029 - RNA, 19 nt, Artificial Sequence
  Description of Artificial Sequence: Synthetic oligonucleotide
ggggccgggcugcaacagc

SEQ ID NO: 1370030 - RNA, 19 nt, Artificial Sequence
  Description of Artificial Sequence: Synthetic oligonucleotide
ucggcgcuaaggggccgga

SEQ ID NO: 1370031 - RNA, 19 nt, Artificial Sequence
  Description of Artificial Sequence: Synthetic oligonucleotide
gcuaccgcuguggggccag

SEQ ID NO: 1370032 - RNA, 19 nt, Artificial Sequence
  Description of Artificial Sequence: Synthetic oligonucleotide
cccaagggcucuaccgcuc

SEQ ID NO: 1370033 - RNA, 19 nt, Artificial Sequence
  Description of Artificial Sequence: Synthetic oligonucleotide
gcuuggaugcucaucguuu

SEQ ID NO: 1370034 - RNA, 19 nt, Artificial Sequence
  Description of Artificial Sequence: Synthetic oligonucleotide
cauguuccguugcccgucu

SEQ ID NO: 1370035 - RNA, 19 nt, Artificial Sequence
  Description of Artificial Sequence: Synthetic oligonucleotide
cuuggccccuaacggucaa

SEQ ID NO: 1370036 - RNA, 19 nt, Artificial Sequence
  Description of Artificial Sequence: Synthetic oligonucleotide
auguuccguugcccgucuu

SEQ ID NO: 1370037 - RNA, 19 nt, Artificial Sequence
  Description of Artificial Sequence: Synthetic oligonucleotide
gguccuguuccaagccaga

SEQ ID NO: 1370038 - RNA, 19 nt, Artificial Sequence
  Description of Artificial Sequence: Synthetic oligonucleotide
ggcuuggaugcucaucguu

SEQ ID NO: 1370039 - RNA, 19 nt, Artificial Sequence
  Description of Artificial Sequence: Synthetic oligonucleotide
gcucuaccgcuccuccgga

SEQ ID NO: 1370040 - RNA, 19 nt, Artificial Sequence
  Description of Artificial Sequence: Synthetic oligonucleotide
cgguaacaguucaugcaca

SEQ ID NO: 1370041 - RNA, 19 nt, Artificial Sequence
  Description of Artificial Sequence: Synthetic oligonucleotide
ggcuggcaauccagccgcg

SEQ ID NO: 1370042 - RNA, 19 nt, Artificial Sequence
  Description of Artificial Sequence: Synthetic oligonucleotide
auccagccgcggaggacga

SEQ ID NO: 1370043 - RNA, 19 nt, Artificial Sequence
  Description of Artificial Sequence: Synthetic oligonucleotide
ggacucgaucucggugggc

SEQ ID NO: 1370044 - RNA, 19 nt, Artificial Sequence
  Description of Artificial Sequence: Synthetic oligonucleotide
cccuaacggucaaagugua

SEQ ID NO: 1370045 - RNA, 19 nt, Artificial Sequence
  Description of Artificial Sequence: Synthetic oligonucleotide
gccguuccgguaacaguuc

SEQ ID NO: 1370046 - RNA, 19 nt, Artificial Sequence
  Description of Artificial Sequence: Synthetic oligonucleotide
gaaggcgcgucgugccguu

SEQ ID NO: 1370047 - RNA, 19 nt, Artificial Sequence
  Description of Artificial Sequence: Synthetic oligonucleotide
ccguuccgguaacaguuca

SEQ ID NO: 1370048 - RNA, 19 nt, Artificial Sequence
  Description of Artificial Sequence: Synthetic oligonucleotide
ggccggaacaagggcccug

SEQ ID NO: 1370049 - RNA, 19 nt, Artificial Sequence
  Description of Artificial Sequence: Synthetic oligonucleotide
cucuaaagaaggggaucuu

SEQ ID NO: 1370050 - RNA, 19 nt, Artificial Sequence
  Description of Artificial Sequence: Synthetic oligonucleotide
uccagccgcggaggacgaa

SEQ ID NO: 1370051 - RNA, 19 nt, Artificial Sequence
  Description of Artificial Sequence: Synthetic oligonucleotide
cgucgugccguuccgguaa

SEQ ID NO: 1370052 - RNA, 19 nt, Artificial Sequence
  Description of Artificial Sequence: Synthetic oligonucleotide
cuaccgcuccuccggacuu

SEQ ID NO: 1370053 - RNA, 19 nt, Artificial Sequence
  Description of Artificial Sequence: Synthetic oligonucleotide
cgggcugcaacagccccgc

SEQ ID NO: 1370054 - RNA, 19 nt, Artificial Sequence
  Description of Artificial Sequence: Synthetic oligonucleotide
ggccccuaacggucaaagu

SEQ ID NO: 1370055 - RNA, 19 nt, Artificial Sequence
  Description of Artificial Sequence: Synthetic oligonucleotide
gguaccgcucuaccuucau

SEQ ID NO: 1370056 - RNA, 19 nt, Artificial Sequence
  Description of Artificial Sequence: Synthetic oligonucleotide
cggcugaucaauccuucaa

SEQ ID NO: 1370057 - RNA, 19 nt, Artificial Sequence
  Description of Artificial Sequence: Synthetic oligonucleotide
cuguuccaagccagagauu

SEQ ID NO: 1370058 - RNA, 19 nt, Artificial Sequence
  Description of Artificial Sequence: Synthetic oligonucleotide
gcuaucgcccagugugaau

SEQ ID NO: 1370059 - RNA, 19 nt, Artificial Sequence
  Description of Artificial Sequence: Synthetic oligonucleotide
caagggcucuaccgcuccu

SEQ ID NO: 1370060 - RNA, 19 nt, Artificial Sequence
  Description of Artificial Sequence: Synthetic oligonucleotide
caguggucagagcucccuu

SEQ ID NO: 1370061 - RNA, 19 nt, Artificial Sequence
  Description of Artificial Sequence: Synthetic oligonucleotide
gcgcgucgugccguuccgg

SEQ ID NO: 1370062 - RNA, 19 nt, Artificial Sequence
  Description of Artificial Sequence: Synthetic oligonucleotide
cuuucggcuauggcauguu

SEQ ID NO: 1370063 - RNA, 19 nt, Artificial Sequence
  Description of Artificial Sequence: Synthetic oligonucleotide
ccgacuggucaggauuuga

SEQ ID NO: 1370064 - RNA, 19 nt, Artificial Sequence
  Description of Artificial Sequence: Synthetic oligonucleotide
cauagcccucugucuucau

SEQ ID NO: 1370065 - RNA, 19 nt, Artificial Sequence
  Description of Artificial Sequence: Synthetic oligonucleotide
gcccuuccagaguggugaa

SEQ ID NO: 1370066 - RNA, 19 nt, Artificial Sequence
  Description of Artificial Sequence: Synthetic oligonucleotide
gggcuuggaugcucaucgu

SEQ ID NO: 1370067 - RNA, 19 nt, Artificial Sequence
  Description of Artificial Sequence: Synthetic oligonucleotide
gcucugggauuuccacacu

SEQ ID NO: 1370068 - RNA, 19 nt, Artificial Sequence
  Description of Artificial Sequence: Synthetic oligonucleotide
cugugauguggaggguaau

SEQ ID NO: 1370069 - RNA, 19 nt, Artificial Sequence
  Description of Artificial Sequence: Synthetic oligonucleotide
gcgucgugccguuccggua

SEQ ID NO: 1370070 - RNA, 19 nt, Artificial Sequence
  Description of Artificial Sequence: Synthetic oligonucleotide
cugcuggaucguccauagu

SEQ ID NO: 1370071 - RNA, 19 nt, Artificial Sequence
  Description of Artificial Sequence: Synthetic oligonucleotide
ccauaguaaagugggccuu

SEQ ID NO: 1370072 - RNA, 19 nt, Artificial Sequence
  Description of Artificial Sequence: Synthetic oligonucleotide
ccuuucggcuauggcaugu

SEQ ID NO: 1370073 - RNA, 19 nt, Artificial Sequence
  Description of Artificial Sequence: Synthetic oligonucleotide
cuccggacuucaccucauu

SEQ ID NO: 1370074 - RNA, 19 nt, Artificial Sequence
  Description of Artificial Sequence: Synthetic oligonucleotide
ggggagcauguggguuuuc

SEQ ID NO: 1370075 - RNA, 19 nt, Artificial Sequence
  Description of Artificial Sequence: Synthetic oligonucleotide
ggguccgguuguagugugu

SEQ ID NO: 1370076 - RNA, 19 nt, Artificial Sequence
  Description of Artificial Sequence: Synthetic oligonucleotide
cguuccgguaacaguucau

SEQ ID NO: 1370077 - RNA, 19 nt, Artificial Sequence
  Description of Artificial Sequence: Synthetic oligonucleotide
cgcccagugugaauggguu

SEQ ID NO: 1370078 - RNA, 19 nt, Artificial Sequence
  Description of Artificial Sequence: Synthetic oligonucleotide
ccuccggacuucaccucau

SEQ ID NO: 1370079 - RNA, 19 nt, Artificial Sequence
  Description of Artificial Sequence: Synthetic oligonucleotide
cgcgucgugccguuccggu

SEQ ID NO: 1370080 - RNA, 19 nt, Artificial Sequence
  Description of Artificial Sequence: Synthetic oligonucleotide
cgaucucggugggcugcug

SEQ ID NO: 1370081 - RNA, 19 nt, Artificial Sequence
  Description of Artificial Sequence: Synthetic oligonucleotide
cggcuauggcauguuccgu

SEQ ID NO: 1370082 - RNA, 19 nt, Artificial Sequence
  Description of Artificial Sequence: Synthetic oligonucleotide
cgcaguugguggccaugau

SEQ ID NO: 1370083 - RNA, 19 nt, Artificial Sequence
  Description of Artificial Sequence: Synthetic oligonucleotide
ccccgcuggcagacaucau

SEQ ID NO: 1370084 - RNA, 19 nt, Artificial Sequence
  Description of Artificial Sequence: Synthetic oligonucleotide
cggcgcuaaggggccggaa

SEQ ID NO: 1370085 - RNA, 19 nt, Artificial Sequence
  Description of Artificial Sequence: Synthetic oligonucleotide
uuaagcaaggagaagagcg

SEQ ID NO: 1370086 - RNA, 19 nt, Artificial Sequence
  Description of Artificial Sequence: Synthetic oligonucleotide
uuagugauauucuugacag

SEQ ID NO: 1370087 - RNA, 19 nt, Artificial Sequence
  Description of Artificial Sequence: Synthetic oligonucleotide
aaagauucuaacgacacag

SEQ ID NO: 1370088 - RNA, 19 nt, Artificial Sequence
  Description of Artificial Sequence: Synthetic oligonucleotide
uggaccuucacuuagguag

SEQ ID NO: 1370089 - RNA, 19 nt, Artificial Sequence
  Description of Artificial Sequence: Synthetic oligonucleotide
auucuaacgacacagaaga

SEQ ID NO: 1370090 - RNA, 19 nt, Artificial Sequence
  Description of Artificial Sequence: Synthetic oligonucleotide
aaauagaagccagagaaag

SEQ ID NO: 1370091 - RNA, 19 nt, Artificial Sequence
  Description of Artificial Sequence: Synthetic oligonucleotide
aguuuaaagauucuaacga

SEQ ID NO: 1370092 - RNA, 19 nt, Artificial Sequence
  Description of Artificial Sequence: Synthetic oligonucleotide
uauguuagauaucugguca

SEQ ID NO: 1370093 - RNA, 19 nt, Artificial Sequence
  Description of Artificial Sequence: Synthetic oligonucleotide
uuaaccaguucauauuugg

SEQ ID NO: 1370094 - RNA, 19 nt, Artificial Sequence
  Description of Artificial Sequence: Synthetic oligonucleotide
uuuaaagauucuaacgaca

SEQ ID NO: 1370095 - RNA, 19 nt, Artificial Sequence
  Description of Artificial Sequence: Synthetic oligonucleotide
aggacuauccaugacagcc

SEQ ID NO: 1370096 - RNA, 19 nt, Artificial Sequence
  Description of Artificial Sequence: Synthetic oligonucleotide
aauagcugugaacacuuuc

SEQ ID NO: 1370097 - RNA, 19 nt, Artificial Sequence
  Description of Artificial Sequence: Synthetic oligonucleotide
ucaaauaaagcuuccaguc

SEQ ID NO: 1370098 - RNA, 19 nt, Artificial Sequence
  Description of Artificial Sequence: Synthetic oligonucleotide
uggacuguuaaacauaagu

SEQ ID NO: 1370099 - RNA, 19 nt, Artificial Sequence
  Description of Artificial Sequence: Synthetic oligonucleotide
uuaaagauucuaacgacac

SEQ ID NO: 1370100 - RNA, 19 nt, Artificial Sequence
  Description of Artificial Sequence: Synthetic oligonucleotide
aacauaaguuucugagccc

SEQ ID NO: 1370101 - RNA, 19 nt, Artificial Sequence
  Description of Artificial Sequence: Synthetic oligonucleotide
ugaagcuuugucauguucc

SEQ ID NO: 1370102 - RNA, 19 nt, Artificial Sequence
  Description of Artificial Sequence: Synthetic oligonucleotide
aagguauugucguccaugg

SEQ ID NO: 1370103 - RNA, 19 nt, Artificial Sequence
  Description of Artificial Sequence: Synthetic oligonucleotide
ugaggagguguucaaagcg

SEQ ID NO: 1370104 - RNA, 19 nt, Artificial Sequence
  Description of Artificial Sequence: Synthetic oligonucleotide
uucucguuaagcaaggaga

SEQ ID NO: 1370105 - RNA, 19 nt, Artificial Sequence
  Description of Artificial Sequence: Synthetic oligonucleotide
ugagucucaaauaauuuga

SEQ ID NO: 1370106 - RNA, 19 nt, Artificial Sequence
  Description of Artificial Sequence: Synthetic oligonucleotide
uuagauaucuggucaauga

SEQ ID NO: 1370107 - RNA, 19 nt, Artificial Sequence
  Description of Artificial Sequence: Synthetic oligonucleotide
uccaaucugggacagagug

SEQ ID NO: 1370108 - RNA, 19 nt, Artificial Sequence
  Description of Artificial Sequence: Synthetic oligonucleotide
aaagaucucugcaacaguc

SEQ ID NO: 1370109 - RNA, 19 nt, Artificial Sequence
  Description of Artificial Sequence: Synthetic oligonucleotide
uguuuuaauaguucagugu

SEQ ID NO: 1370110 - RNA, 19 nt, Artificial Sequence
  Description of Artificial Sequence: Synthetic oligonucleotide
uucaaauaaagcuuccagu

SEQ ID NO: 1370111 - RNA, 19 nt, Artificial Sequence
  Description of Artificial Sequence: Synthetic oligonucleotide
uaauaguucaguguuauuc

SEQ ID NO: 1370112 - RNA, 19 nt, Artificial Sequence
  Description of Artificial Sequence: Synthetic oligonucleotide
gauaaccuauucuugugag

SEQ ID NO: 1370113 - RNA, 19 nt, Artificial Sequence
  Description of Artificial Sequence: Synthetic oligonucleotide
aacaaucuguuuuaauagu

SEQ ID NO: 1370114 - RNA, 19 nt, Artificial Sequence
  Description of Artificial Sequence: Synthetic oligonucleotide
uccaccaaugcaauaaaca

SEQ ID NO: 1370115 - RNA, 19 nt, Artificial Sequence
  Description of Artificial Sequence: Synthetic oligonucleotide
acuuucucgagaaagacag

SEQ ID NO: 1370116 - RNA, 19 nt, Artificial Sequence
  Description of Artificial Sequence: Synthetic oligonucleotide
uuugauagccgcuuuggca

SEQ ID NO: 1370117 - RNA, 19 nt, Artificial Sequence
  Description of Artificial Sequence: Synthetic oligonucleotide
aacgacacagaagaaaucu

SEQ ID NO: 1370118 - RNA, 19 nt, Artificial Sequence
  Description of Artificial Sequence: Synthetic oligonucleotide
gauaaggaggcaaaccagg

SEQ ID NO: 1370119 - RNA, 19 nt, Artificial Sequence
  Description of Artificial Sequence: Synthetic oligonucleotide
ugguacaguaguuuaaaga

SEQ ID NO: 1370120 - RNA, 19 nt, Artificial Sequence
  Description of Artificial Sequence: Synthetic oligonucleotide
cuuagguagguucugaguc

SEQ ID NO: 1370121 - RNA, 19 nt, Artificial Sequence
  Description of Artificial Sequence: Synthetic oligonucleotide
auuugauagccgcuuuggc

SEQ ID NO: 1370122 - RNA, 19 nt, Artificial Sequence
  Description of Artificial Sequence: Synthetic oligonucleotide
ugugaggagguguucaaag

SEQ ID NO: 1370123 - RNA, 19 nt, Artificial Sequence
  Description of Artificial Sequence: Synthetic oligonucleotide
gauuuguugaggacuaucc

SEQ ID NO: 1370124 - RNA, 19 nt, Artificial Sequence
  Description of Artificial Sequence: Synthetic oligonucleotide
uaaccuauucuugugagga

SEQ ID NO: 1370125 - RNA, 19 nt, Artificial Sequence
  Description of Artificial Sequence: Synthetic oligonucleotide
aauagaagccagagaaagg

SEQ ID NO: 1370126 - RNA, 19 nt, Artificial Sequence
  Description of Artificial Sequence: Synthetic oligonucleotide
ugauaaccuauucuuguga

SEQ ID NO: 1370127 - RNA, 19 nt, Artificial Sequence
  Description of Artificial Sequence: Synthetic oligonucleotide
gauucuaacgacacagaag

SEQ ID NO: 1370128 - RNA, 19 nt, Artificial Sequence
  Description of Artificial Sequence: Synthetic oligonucleotide
aguauggaccuucacuuag

SEQ ID NO: 1370129 - RNA, 19 nt, Artificial Sequence
  Description of Artificial Sequence: Synthetic oligonucleotide
ugcuccaacaauuauguua

SEQ ID NO: 1370130 - RNA, 19 nt, Artificial Sequence
  Description of Artificial Sequence: Synthetic oligonucleotide
uaugcuagugaugucacca

SEQ ID NO: 1370131 - RNA, 19 nt, Artificial Sequence
  Description of Artificial Sequence: Synthetic oligonucleotide
auauacccuguaucgaacg

SEQ ID NO: 1370132 - RNA, 19 nt, Artificial Sequence
  Description of Artificial Sequence: Synthetic oligonucleotide
aagaaaucucuaugauuag

SEQ ID NO: 1370133 - RNA, 19 nt, Artificial Sequence
  Description of Artificial Sequence: Synthetic oligonucleotide
uaauuugaguucccaaaga

SEQ ID NO: 1370134 - RNA, 19 nt, Artificial Sequence
  Description of Artificial Sequence: Synthetic oligonucleotide
gauuugauagccgcuuugg

SEQ ID NO: 1370135 - RNA, 19 nt, Artificial Sequence
  Description of Artificial Sequence: Synthetic oligonucleotide
agagaaagggucugaaucu

SEQ ID NO: 1370136 - RNA, 19 nt, Artificial Sequence
  Description of Artificial Sequence: Synthetic oligonucleotide
uuauguuagauaucugguc

SEQ ID NO: 1370137 - RNA, 19 nt, Artificial Sequence
  Description of Artificial Sequence: Synthetic oligonucleotide
ucguuaagcaaggagaaga

SEQ ID NO: 1370138 - RNA, 19 nt, Artificial Sequence
  Description of Artificial Sequence: Synthetic oligonucleotide
ucaccauuucuauacaggu

SEQ ID NO: 1370139 - RNA, 19 nt, Artificial Sequence
  Description of Artificial Sequence: Synthetic oligonucleotide
ucuguaaaaccuguuuucc

SEQ ID NO: 1370140 - RNA, 19 nt, Artificial Sequence
  Description of Artificial Sequence: Synthetic oligonucleotide
ugauauucuugacagggau

SEQ ID NO: 1370141 - RNA, 19 nt, Artificial Sequence
  Description of Artificial Sequence: Synthetic oligonucleotide
uugauagccgcuuuggcaa

SEQ ID NO: 1370142 - RNA, 19 nt, Artificial Sequence
  Description of Artificial Sequence: Synthetic oligonucleotide
ugaggguuuugacagaguc

SEQ ID NO: 1370143 - RNA, 19 nt, Artificial Sequence
  Description of Artificial Sequence: Synthetic oligonucleotide
auaaccuauucuugugagg

SEQ ID NO: 1370144 - RNA, 19 nt, Artificial Sequence
  Description of Artificial Sequence: Synthetic oligonucleotide
cacaaauccuggcaaauag

SEQ ID NO: 1370145 - RNA, 19 nt, Artificial Sequence
  Description of Artificial Sequence: Synthetic oligonucleotide
guuagugauauucuugaca

SEQ ID NO: 1370146 - RNA, 19 nt, Artificial Sequence
  Description of Artificial Sequence: Synthetic oligonucleotide
ucaaauaauuugaguuccc

SEQ ID NO: 1370147 - RNA, 19 nt, Artificial Sequence
  Description of Artificial Sequence: Synthetic oligonucleotide
uuugcuugauaaccuauuc

SEQ ID NO: 1370148 - RNA, 19 nt, Artificial Sequence
  Description of Artificial Sequence: Synthetic oligonucleotide
aacaauuauguuagauauc

SEQ ID NO: 1370149 - RNA, 19 nt, Artificial Sequence
  Description of Artificial Sequence: Synthetic oligonucleotide
uugauaaccuauucuugug

SEQ ID NO: 1370150 - RNA, 19 nt, Artificial Sequence
  Description of Artificial Sequence: Synthetic oligonucleotide
gguauugucguccauggug

SEQ ID NO: 1370151 - RNA, 19 nt, Artificial Sequence
  Description of Artificial Sequence: Synthetic oligonucleotide
aguucccaaagaucucugc

SEQ ID NO: 1370152 - RNA, 19 nt, Artificial Sequence
  Description of Artificial Sequence: Synthetic oligonucleotide
guauugucguccauggugg

SEQ ID NO: 1370153 - RNA, 19 nt, Artificial Sequence
  Description of Artificial Sequence: Synthetic oligonucleotide
uauaugcuagugaugucac

SEQ ID NO: 1370154 - RNA, 19 nt, Artificial Sequence
  Description of Artificial Sequence: Synthetic oligonucleotide
auucuacaaaaccuggacu

SEQ ID NO: 1370155 - RNA, 19 nt, Artificial Sequence
  Description of Artificial Sequence: Synthetic oligonucleotide
gaucccaggauuccaacug

SEQ ID NO: 1370156 - RNA, 19 nt, Artificial Sequence
  Description of Artificial Sequence: Synthetic oligonucleotide
ucaacacuggaucccagga

SEQ ID NO: 1370157 - RNA, 19 nt, Artificial Sequence
  Description of Artificial Sequence: Synthetic oligonucleotide
ugagauaaggaggcaaacc

SEQ ID NO: 1370158 - RNA, 19 nt, Artificial Sequence
  Description of Artificial Sequence: Synthetic oligonucleotide
uugguuacugaugccacgg

SEQ ID NO: 1370159 - RNA, 19 nt, Artificial Sequence
  Description of Artificial Sequence: Synthetic oligonucleotide
ucuaacgacacagaagaaa

SEQ ID NO: 1370160 - RNA, 19 nt, Artificial Sequence
  Description of Artificial Sequence: Synthetic oligonucleotide
uuguucucguuaagcaagg

SEQ ID NO: 1370161 - RNA, 19 nt, Artificial Sequence
  Description of Artificial Sequence: Synthetic oligonucleotide
uaaagauucuaacgacaca

SEQ ID NO: 1370162 - RNA, 19 nt, Artificial Sequence
  Description of Artificial Sequence: Synthetic oligonucleotide
gacaggguagcgcucacag

SEQ ID NO: 1370163 - RNA, 19 nt, Artificial Sequence
  Description of Artificial Sequence: Synthetic oligonucleotide
ucucguuaagcaaggagaa

SEQ ID NO: 1370164 - RNA, 19 nt, Artificial Sequence
  Description of Artificial Sequence: Synthetic oligonucleotide
ucuaugauuagcucauaua

SEQ ID NO: 1370165 - RNA, 19 nt, Artificial Sequence
  Description of Artificial Sequence: Synthetic oligonucleotide
uguuaaacauaaguuucug

SEQ ID NO: 1370166 - RNA, 19 nt, Artificial Sequence
  Description of Artificial Sequence: Synthetic oligonucleotide
ucucgagaaagacagggua

SEQ ID NO: 1370167 - RNA, 19 nt, Artificial Sequence
  Description of Artificial Sequence: Synthetic oligonucleotide
cacagaagaaaucucuaug

SEQ ID NO: 1370168 - RNA, 19 nt, Artificial Sequence
  Description of Artificial Sequence: Synthetic oligonucleotide
auuauguuagauaucuggu

SEQ ID NO: 1370169 - RNA, 19 nt, Artificial Sequence
  Description of Artificial Sequence: Synthetic oligonucleotide
acagucuuggaauuggcaa

SEQ ID NO: 1370170 - RNA, 19 nt, Artificial Sequence
  Description of Artificial Sequence: Synthetic oligonucleotide
uucaaaucauccagcaaau

SEQ ID NO: 1370171 - RNA, 19 nt, Artificial Sequence
  Description of Artificial Sequence: Synthetic oligonucleotide
auaugcuagugaugucacc

SEQ ID NO: 1370172 - RNA, 19 nt, Artificial Sequence
  Description of Artificial Sequence: Synthetic oligonucleotide
uugcucaggugauaaauac

SEQ ID NO: 1370173 - RNA, 19 nt, Artificial Sequence
  Description of Artificial Sequence: Synthetic oligonucleotide
cucgagaaagacaggguag

SEQ ID NO: 1370174 - RNA, 19 nt, Artificial Sequence
  Description of Artificial Sequence: Synthetic oligonucleotide
caggcuucacauaguaugg

SEQ ID NO: 1370175 - RNA, 19 nt, Artificial Sequence
  Description of Artificial Sequence: Synthetic oligonucleotide
agcauucuuugcuugauaa

SEQ ID NO: 1370176 - RNA, 19 nt, Artificial Sequence
  Description of Artificial Sequence: Synthetic oligonucleotide
uauucuugugaggaggugu

SEQ ID NO: 1370177 - RNA, 19 nt, Artificial Sequence
  Description of Artificial Sequence: Synthetic oligonucleotide
aguaguuuaaagauucuaa

SEQ ID NO: 1370178 - RNA, 19 nt, Artificial Sequence
  Description of Artificial Sequence: Synthetic oligonucleotide
uugcucgcgaagcucgugg

SEQ ID NO: 1370179 - RNA, 19 nt, Artificial Sequence
  Description of Artificial Sequence: Synthetic oligonucleotide
auuuguugaggacuaucca

SEQ ID NO: 1370180 - RNA, 19 nt, Artificial Sequence
  Description of Artificial Sequence: Synthetic oligonucleotide
agguguucaaagcggguuc

SEQ ID NO: 1370181 - RNA, 19 nt, Artificial Sequence
  Description of Artificial Sequence: Synthetic oligonucleotide
agauucuaacgacacagaa

SEQ ID NO: 1370182 - RNA, 19 nt, Artificial Sequence
  Description of Artificial Sequence: Synthetic oligonucleotide
aaccuauucuugugaggag

SEQ ID NO: 1370183 - RNA, 19 nt, Artificial Sequence
  Description of Artificial Sequence: Synthetic oligonucleotide
ggcaacaggcuucacauag

SEQ ID NO: 1370184 - RNA, 19 nt, Artificial Sequence
  Description of Artificial Sequence: Synthetic oligonucleotide
aagucaucagucuguugcu

SEQ ID NO: 1370185 - RNA, 19 nt, Artificial Sequence
  Description of Artificial Sequence: Synthetic oligonucleotide
uuagguagguucugagucu

SEQ ID NO: 1370186 - RNA, 19 nt, Artificial Sequence
  Description of Artificial Sequence: Synthetic oligonucleotide
accuauucuugugaggagg

SEQ ID NO: 1370187 - RNA, 19 nt, Artificial Sequence
  Description of Artificial Sequence: Synthetic oligonucleotide
gaggagguguucaaagcgg

SEQ ID NO: 1370188 - RNA, 19 nt, Artificial Sequence
  Description of Artificial Sequence: Synthetic oligonucleotide
accgguccaucacaaauuc

SEQ ID NO: 1370189 - RNA, 19 nt, Artificial Sequence
  Description of Artificial Sequence: Synthetic oligonucleotide
uauacccuguaucgaacga

SEQ ID NO: 1370190 - RNA, 19 nt, Artificial Sequence
  Description of Artificial Sequence: Synthetic oligonucleotide
uagaagcauucuuugcuug

SEQ ID NO: 1370191 - RNA, 19 nt, Artificial Sequence
  Description of Artificial Sequence: Synthetic oligonucleotide
uacccuguaucgaacgaug

SEQ ID NO: 1370192 - RNA, 19 nt, Artificial Sequence
  Description of Artificial Sequence: Synthetic oligonucleotide
uguugaggacuauccauga

SEQ ID NO: 1370193 - RNA, 19 nt, Artificial Sequence
  Description of Artificial Sequence: Synthetic oligonucleotide
ugcucaggugauaaauaca

SEQ ID NO: 1370194 - RNA, 19 nt, Artificial Sequence
  Description of Artificial Sequence: Synthetic oligonucleotide
gucucaaauaauuugaguu

SEQ ID NO: 1370195 - RNA, 19 nt, Artificial Sequence
  Description of Artificial Sequence: Synthetic oligonucleotide
agcgcucacagauuuguug

SEQ ID NO: 1370196 - RNA, 19 nt, Artificial Sequence
  Description of Artificial Sequence: Synthetic oligonucleotide
gacuauccaugacagccag

SEQ ID NO: 1370197 - RNA, 19 nt, Artificial Sequence
  Description of Artificial Sequence: Synthetic oligonucleotide
cagucuuggaauuggcaag

SEQ ID NO: 1370198 - RNA, 19 nt, Artificial Sequence
  Description of Artificial Sequence: Synthetic oligonucleotide
agauuuguugaggacuauc

SEQ ID NO: 1370199 - RNA, 19 nt, Artificial Sequence
  Description of Artificial Sequence: Synthetic oligonucleotide
gcuacaccaaucauggugg

SEQ ID NO: 1370200 - RNA, 19 nt, Artificial Sequence
  Description of Artificial Sequence: Synthetic oligonucleotide
uauggaccuucacuuaggu

SEQ ID NO: 1370201 - RNA, 19 nt, Artificial Sequence
  Description of Artificial Sequence: Synthetic oligonucleotide
aguggcaacaggcuucaca

SEQ ID NO: 1370202 - RNA, 19 nt, Artificial Sequence
  Description of Artificial Sequence: Synthetic oligonucleotide
ucuuugcuugauaaccuau

SEQ ID NO: 1370203 - RNA, 19 nt, Artificial Sequence
  Description of Artificial Sequence: Synthetic oligonucleotide
acuuagguagguucugagu

SEQ ID NO: 1370204 - RNA, 19 nt, Artificial Sequence
  Description of Artificial Sequence: Synthetic oligonucleotide
agcugugaacacuuucaag

SEQ ID NO: 1370205 - RNA, 19 nt, Artificial Sequence
  Description of Artificial Sequence: Synthetic oligonucleotide
cauauacccuguaucgaac

SEQ ID NO: 1370206 - RNA, 19 nt, Artificial Sequence
  Description of Artificial Sequence: Synthetic oligonucleotide
uguugcucaggugauaaau

SEQ ID NO: 1370207 - RNA, 19 nt, Artificial Sequence
  Description of Artificial Sequence: Synthetic oligonucleotide
guccaugguggguauaugc

SEQ ID NO: 1370208 - RNA, 19 nt, Artificial Sequence
  Description of Artificial Sequence: Synthetic oligonucleotide
ucuugugaggagguguuca

SEQ ID NO: 1370209 - RNA, 19 nt, Artificial Sequence
  Description of Artificial Sequence: Synthetic oligonucleotide
gucaaugacuccuuccuga

SEQ ID NO: 1370210 - RNA, 19 nt, Artificial Sequence
  Description of Artificial Sequence: Synthetic oligonucleotide
ucuugagauaaggaggcaa

SEQ ID NO: 1370211 - RNA, 19 nt, Artificial Sequence
  Description of Artificial Sequence: Synthetic oligonucleotide
acauaaguuucugagccca

SEQ ID NO: 1370212 - RNA, 19 nt, Artificial Sequence
  Description of Artificial Sequence: Synthetic oligonucleotide
uucugccauccucaggaag

SEQ ID NO: 1370213 - RNA, 19 nt, Artificial Sequence
  Description of Artificial Sequence: Synthetic oligonucleotide
agaagcauucuuugcuuga

SEQ ID NO: 1370214 - RNA, 19 nt, Artificial Sequence
  Description of Artificial Sequence: Synthetic oligonucleotide
uggguauaugcuagugaug

SEQ ID NO: 1370215 - RNA, 19 nt, Artificial Sequence
  Description of Artificial Sequence: Synthetic oligonucleotide
agauaucuggucaaugacu

SEQ ID NO: 1370216 - RNA, 19 nt, Artificial Sequence
  Description of Artificial Sequence: Synthetic oligonucleotide
ucgcgaagcucguggagcg

SEQ ID NO: 1370217 - RNA, 19 nt, Artificial Sequence
  Description of Artificial Sequence: Synthetic oligonucleotide
uucucgagaaagacagggu

SEQ ID NO: 1370218 - RNA, 19 nt, Artificial Sequence
  Description of Artificial Sequence: Synthetic oligonucleotide
gagucaguccccucugcag

SEQ ID NO: 1370219 - RNA, 19 nt, Artificial Sequence
  Description of Artificial Sequence: Synthetic oligonucleotide
uucccgauuguucucguua

SEQ ID NO: 1370220 - RNA, 19 nt, Artificial Sequence
  Description of Artificial Sequence: Synthetic oligonucleotide
uuagcucuguagaagcauu

SEQ ID NO: 1370221 - RNA, 19 nt, Artificial Sequence
  Description of Artificial Sequence: Synthetic oligonucleotide
gguucugagucucaaauaa

SEQ ID NO: 1370222 - RNA, 19 nt, Artificial Sequence
  Description of Artificial Sequence: Synthetic oligonucleotide
aaucucaguaacagcuuca

SEQ ID NO: 1370223 - RNA, 19 nt, Artificial Sequence
  Description of Artificial Sequence: Synthetic oligonucleotide
uuuagcucuguagaagcau

SEQ ID NO: 1370224 - RNA, 19 nt, Artificial Sequence
  Description of Artificial Sequence: Synthetic oligonucleotide
gugaggagguguucaaagc

SEQ ID NO: 1370225 - RNA, 19 nt, Artificial Sequence
  Description of Artificial Sequence: Synthetic oligonucleotide
agcuuggagcaaccucucc

SEQ ID NO: 1370226 - RNA, 19 nt, Artificial Sequence
  Description of Artificial Sequence: Synthetic oligonucleotide
accaaucaugguggggucc

SEQ ID NO: 1370227 - RNA, 19 nt, Artificial Sequence
  Description of Artificial Sequence: Synthetic oligonucleotide
uucaaagcggguuccuguc

SEQ ID NO: 1370228 - RNA, 19 nt, Artificial Sequence
  Description of Artificial Sequence: Synthetic oligonucleotide
ucacagauuuguugaggac

SEQ ID NO: 1370229 - RNA, 19 nt, Artificial Sequence
  Description of Artificial Sequence: Synthetic oligonucleotide
caccauuucuauacaggug

SEQ ID NO: 1370230 - RNA, 19 nt, Artificial Sequence
  Description of Artificial Sequence: Synthetic oligonucleotide
guuaagcaaggagaagagc

SEQ ID NO: 1370231 - RNA, 19 nt, Artificial Sequence
  Description of Artificial Sequence: Synthetic oligonucleotide
cuaacgacacagaagaaau

SEQ ID NO: 1370232 - RNA, 19 nt, Artificial Sequence
  Description of Artificial Sequence: Synthetic oligonucleotide
gagguuccuggccacauga

SEQ ID NO: 1370233 - RNA, 19 nt, Artificial Sequence
  Description of Artificial Sequence: Synthetic oligonucleotide
augaaccggucccacagcu

SEQ ID NO: 1370234 - RNA, 19 nt, Artificial Sequence
  Description of Artificial Sequence: Synthetic oligonucleotide
cugcaggucaacccugagg

SEQ ID NO: 1370235 - RNA, 19 nt, Artificial Sequence
  Description of Artificial Sequence: Synthetic oligonucleotide
cuugagauaaggaggcaaa

SEQ ID NO: 1370236 - RNA, 19 nt, Artificial Sequence
  Description of Artificial Sequence: Synthetic oligonucleotide
aagauucuaacgacacaga

SEQ ID NO: 1370237 - RNA, 19 nt, Artificial Sequence
  Description of Artificial Sequence: Synthetic oligonucleotide
cuuucucgagaaagacagg

SEQ ID NO: 1370238 - RNA, 19 nt, Artificial Sequence
  Description of Artificial Sequence: Synthetic oligonucleotide
auguuagauaucuggucaa

SEQ ID NO: 1370239 - RNA, 19 nt, Artificial Sequence
  Description of Artificial Sequence: Synthetic oligonucleotide
uugagauaaggaggcaaac

SEQ ID NO: 1370240 - RNA, 19 nt, Artificial Sequence
  Description of Artificial Sequence: Synthetic oligonucleotide
cucguggagcggcacagcg

SEQ ID NO: 1370241 - RNA, 19 nt, Artificial Sequence
  Description of Artificial Sequence: Synthetic oligonucleotide
uucuauacagguggcucug

SEQ ID NO: 1370242 - RNA, 19 nt, Artificial Sequence
  Description of Artificial Sequence: Synthetic oligonucleotide
uagcugugaacacuuucaa

SEQ ID NO: 1370243 - RNA, 19 nt, Artificial Sequence
  Description of Artificial Sequence: Synthetic oligonucleotide
agucuguucccgauuguuc

SEQ ID NO: 1370244 - RNA, 19 nt, Artificial Sequence
  Description of Artificial Sequence: Synthetic oligonucleotide
ugguuugcaauagcuguga

SEQ ID NO: 1370245 - RNA, 19 nt, Artificial Sequence
  Description of Artificial Sequence: Synthetic oligonucleotide
cauaaguuucugagcccag

SEQ ID NO: 1370246 - RNA, 19 nt, Artificial Sequence
  Description of Artificial Sequence: Synthetic oligonucleotide
ucugggugagucagucccc

SEQ ID NO: 1370247 - RNA, 19 nt, Artificial Sequence
  Description of Artificial Sequence: Synthetic oligonucleotide
uguucaaagcggguuccug

SEQ ID NO: 1370248 - RNA, 19 nt, Artificial Sequence
  Description of Artificial Sequence: Synthetic oligonucleotide
guauggaccuucacuuagg

SEQ ID NO: 1370249 - RNA, 19 nt, Artificial Sequence
  Description of Artificial Sequence: Synthetic oligonucleotide
ugagcaagguauugucguc

SEQ ID NO: 1370250 - RNA, 19 nt, Artificial Sequence
  Description of Artificial Sequence: Synthetic oligonucleotide
agugcuuuaaccaguucau

SEQ ID NO: 1370251 - RNA, 19 nt, Artificial Sequence
  Description of Artificial Sequence: Synthetic oligonucleotide
aggucaacccugagguucc

SEQ ID NO: 1370252 - RNA, 19 nt, Artificial Sequence
  Description of Artificial Sequence: Synthetic oligonucleotide
gauuccaacuguguccaca

SEQ ID NO: 1370253 - RNA, 19 nt, Artificial Sequence
  Description of Artificial Sequence: Synthetic oligonucleotide
ucccaggauuccaacugug

SEQ ID NO: 1370254 - RNA, 19 nt, Artificial Sequence
  Description of Artificial Sequence: Synthetic oligonucleotide
gcaacagauaaauucucuc

SEQ ID NO: 1370255 - RNA, 19 nt, Artificial Sequence
  Description of Artificial Sequence: Synthetic oligonucleotide
uuagcucauauacccugua

SEQ ID NO: 1370256 - RNA, 19 nt, Artificial Sequence
  Description of Artificial Sequence: Synthetic oligonucleotide
ucgaacgaugucauuuguu

SEQ ID NO: 1370257 - RNA, 19 nt, Artificial Sequence
  Description of Artificial Sequence: Synthetic oligonucleotide
uagcucauauacccuguau

SEQ ID NO: 1370258 - RNA, 19 nt, Artificial Sequence
  Description of Artificial Sequence: Synthetic oligonucleotide
ucaauccgcuccuuccacu

SEQ ID NO: 1370259 - RNA, 19 nt, Artificial Sequence
  Description of Artificial Sequence: Synthetic oligonucleotide
caauccgcuccuuccacug

SEQ ID NO: 1370260 - RNA, 19 nt, Artificial Sequence
  Description of Artificial Sequence: Synthetic oligonucleotide
acgacacagaagaaaucuc

SEQ ID NO: 1370261 - RNA, 19 nt, Artificial Sequence
  Description of Artificial Sequence: Synthetic oligonucleotide
cuugugguacaguaguuua

SEQ ID NO: 1370262 - RNA, 19 nt, Artificial Sequence
  Description of Artificial Sequence: Synthetic oligonucleotide
caggucaacccugagguuc

SEQ ID NO: 1370263 - RNA, 19 nt, Artificial Sequence
  Description of Artificial Sequence: Synthetic oligonucleotide
agucuuggaauuggcaagu

SEQ ID NO: 1370264 - RNA, 19 nt, Artificial Sequence
  Description of Artificial Sequence: Synthetic oligonucleotide
aagcauucuuugcuugaua

SEQ ID NO: 1370265 - RNA, 19 nt, Artificial Sequence
  Description of Artificial Sequence: Synthetic oligonucleotide
agugcaguucagggaaggg

SEQ ID NO: 1370266 - RNA, 19 nt, Artificial Sequence
  Description of Artificial Sequence: Synthetic oligonucleotide
aucgaacgaugucauuugu

SEQ ID NO: 1370267 - RNA, 19 nt, Artificial Sequence
  Description of Artificial Sequence: Synthetic oligonucleotide
ucagucuguugcucaggug

SEQ ID NO: 1370268 - RNA, 19 nt, Artificial Sequence
  Description of Artificial Sequence: Synthetic oligonucleotide
guccaucacaaauucuaca

SEQ ID NO: 1370269 - RNA, 19 nt, Artificial Sequence
  Description of Artificial Sequence: Synthetic oligonucleotide
cuacaccaaucaugguggg

SEQ ID NO: 1370270 - RNA, 19 nt, Artificial Sequence
  Description of Artificial Sequence: Synthetic oligonucleotide
gaggcaaaccaggauucug

SEQ ID NO: 1370271 - RNA, 19 nt, Artificial Sequence
  Description of Artificial Sequence: Synthetic oligonucleotide
ugagguuccuggccacaug

SEQ ID NO: 1370272 - RNA, 19 nt, Artificial Sequence
  Description of Artificial Sequence: Synthetic oligonucleotide
uguuagauaucuggucaau

SEQ ID NO: 1370273 - RNA, 19 nt, Artificial Sequence
  Description of Artificial Sequence: Synthetic oligonucleotide
acaaauccuggcaaauaga

SEQ ID NO: 1370274 - RNA, 19 nt, Artificial Sequence
  Description of Artificial Sequence: Synthetic oligonucleotide
cucgcgaagcucguggagc

SEQ ID NO: 1370275 - RNA, 19 nt, Artificial Sequence
  Description of Artificial Sequence: Synthetic oligonucleotide
guggguauaugcuagugau

SEQ ID NO: 1370276 - RNA, 19 nt, Artificial Sequence
  Description of Artificial Sequence: Synthetic oligonucleotide
ucccgauuguucucguuaa

SEQ ID NO: 1370277 - RNA, 19 nt, Artificial Sequence
  Description of Artificial Sequence: Synthetic oligonucleotide
ugacuccuuccugagcaag

SEQ ID NO: 1370278 - RNA, 19 nt, Artificial Sequence
  Description of Artificial Sequence: Synthetic oligonucleotide
ccugagcaagguauugucg

SEQ ID NO: 1370279 - RNA, 19 nt, Artificial Sequence
  Description of Artificial Sequence: Synthetic oligonucleotide
uucuaacgacacagaagaa

SEQ ID NO: 1370280 - RNA, 19 nt, Artificial Sequence
  Description of Artificial Sequence: Synthetic oligonucleotide
ggauuugauagccgcuuug

SEQ ID NO: 1370281 - RNA, 19 nt, Artificial Sequence
  Description of Artificial Sequence: Synthetic oligonucleotide
uuccugagcaagguauugu

SEQ ID NO: 1370282 - RNA, 19 nt, Artificial Sequence
  Description of Artificial Sequence: Synthetic oligonucleotide
guugaggacuauccaugac

SEQ ID NO: 1370283 - RNA, 19 nt, Artificial Sequence
  Description of Artificial Sequence: Synthetic oligonucleotide
ugguuacugaugccacgga

SEQ ID NO: 1370284 - RNA, 19 nt, Artificial Sequence
  Description of Artificial Sequence: Synthetic oligonucleotide
ccuucacuuagguagguuc

SEQ ID NO: 1370285 - RNA, 19 nt, Artificial Sequence
  Description of Artificial Sequence: Synthetic oligonucleotide
auuagcucauauacccugu

SEQ ID NO: 1370286 - RNA, 19 nt, Artificial Sequence
  Description of Artificial Sequence: Synthetic oligonucleotide
gcuuggguuagugauauuc

SEQ ID NO: 1370287 - RNA, 19 nt, Artificial Sequence
  Description of Artificial Sequence: Synthetic oligonucleotide
uaguauggaccuucacuua

SEQ ID NO: 1370288 - RNA, 19 nt, Artificial Sequence
  Description of Artificial Sequence: Synthetic oligonucleotide
ucacaaauccuggcaaaua

SEQ ID NO: 1370289 - RNA, 19 nt, Artificial Sequence
  Description of Artificial Sequence: Synthetic oligonucleotide
gaggguuuugacagaguca

SEQ ID NO: 1370290 - RNA, 19 nt, Artificial Sequence
  Description of Artificial Sequence: Synthetic oligonucleotide
acagcgugcaccacggacu

SEQ ID NO: 1370291 - RNA, 19 nt, Artificial Sequence
  Description of Artificial Sequence: Synthetic oligonucleotide
acuugugguacaguaguuu

SEQ ID NO: 1370292 - RNA, 19 nt, Artificial Sequence
  Description of Artificial Sequence: Synthetic oligonucleotide
agguucugagucucaaaua

SEQ ID NO: 1370293 - RNA, 19 nt, Artificial Sequence
  Description of Artificial Sequence: Synthetic oligonucleotide
acgaugucauuuguuuuca

SEQ ID NO: 1370294 - RNA, 19 nt, Artificial Sequence
  Description of Artificial Sequence: Synthetic oligonucleotide
ggagcugagucaccagucc

SEQ ID NO: 1370295 - RNA, 19 nt, Artificial Sequence
  Description of Artificial Sequence: Synthetic oligonucleotide
cugagcaagguauugucgu

SEQ ID NO: 1370296 - RNA, 19 nt, Artificial Sequence
  Description of Artificial Sequence: Synthetic oligonucleotide
cuuggguuagugauauucu

SEQ ID NO: 1370297 - RNA, 19 nt, Artificial Sequence
  Description of Artificial Sequence: Synthetic oligonucleotide
caucugggugagucagucc

SEQ ID NO: 1370298 - RNA, 19 nt, Artificial Sequence
  Description of Artificial Sequence: Synthetic oligonucleotide
uuccacugcuguaguggca

SEQ ID NO: 1370299 - RNA, 19 nt, Artificial Sequence
  Description of Artificial Sequence: Synthetic oligonucleotide
cucguuaagcaaggagaag

SEQ ID NO: 1370300 - RNA, 19 nt, Artificial Sequence
  Description of Artificial Sequence: Synthetic oligonucleotide
uagguagguucugagucuc

SEQ ID NO: 1370301 - RNA, 19 nt, Artificial Sequence
  Description of Artificial Sequence: Synthetic oligonucleotide
ugauagccgcuuuggcaac

SEQ ID NO: 1370302 - RNA, 19 nt, Artificial Sequence
  Description of Artificial Sequence: Synthetic oligonucleotide
gaauuggcaagugcuuuaa

SEQ ID NO: 1370303 - RNA, 19 nt, Artificial Sequence
  Description of Artificial Sequence: Synthetic oligonucleotide
cuggcaaauagaagccaga

SEQ ID NO: 1370304 - RNA, 19 nt, Artificial Sequence
  Description of Artificial Sequence: Synthetic oligonucleotide
guaucgaacgaugucauuu

SEQ ID NO: 1370305 - RNA, 19 nt, Artificial Sequence
  Description of Artificial Sequence: Synthetic oligonucleotide
ggguauaugcuagugaugu

SEQ ID NO: 1370306 - RNA, 19 nt, Artificial Sequence
  Description of Artificial Sequence: Synthetic oligonucleotide
uguaucgaacgaugucauu

SEQ ID NO: 1370307 - RNA, 19 nt, Artificial Sequence
  Description of Artificial Sequence: Synthetic oligonucleotide
cguuaagcaaggagaagag

SEQ ID NO: 1370308 - RNA, 19 nt, Artificial Sequence
  Description of Artificial Sequence: Synthetic oligonucleotide
ucguggagcggcacagcgu

SEQ ID NO: 1370309 - RNA, 19 nt, Artificial Sequence
  Description of Artificial Sequence: Synthetic oligonucleotide
uguucucguuaagcaagga

SEQ ID NO: 1370310 - RNA, 19 nt, Artificial Sequence
  Description of Artificial Sequence: Synthetic oligonucleotide
ugcucgcgaagcucgugga

SEQ ID NO: 1370311 - RNA, 19 nt, Artificial Sequence
  Description of Artificial Sequence: Synthetic oligonucleotide
auacccuguaucgaacgau

SEQ ID NO: 1370312 - RNA, 19 nt, Artificial Sequence
  Description of Artificial Sequence: Synthetic oligonucleotide
gcuuggagcaaccucucca

SEQ ID NO: 1370313 - RNA, 19 nt, Artificial Sequence
  Description of Artificial Sequence: Synthetic oligonucleotide
cuauucuugugaggaggug

SEQ ID NO: 1370314 - RNA, 19 nt, Artificial Sequence
  Description of Artificial Sequence: Synthetic oligonucleotide
ucguccaugguggguauau

SEQ ID NO: 1370315 - RNA, 19 nt, Artificial Sequence
  Description of Artificial Sequence: Synthetic oligonucleotide
aaccggucccacagcuugg

SEQ ID NO: 1370316 - RNA, 19 nt, Artificial Sequence
  Description of Artificial Sequence: Synthetic oligonucleotide
ggaccuucacuuagguagg

SEQ ID NO: 1370317 - RNA, 19 nt, Artificial Sequence
  Description of Artificial Sequence: Synthetic oligonucleotide
aguccagcuuggguuagug

SEQ ID NO: 1370318 - RNA, 19 nt, Artificial Sequence
  Description of Artificial Sequence: Synthetic oligonucleotide
ccuguaucgaacgauguca

SEQ ID NO: 1370319 - RNA, 19 nt, Artificial Sequence
  Description of Artificial Sequence: Synthetic oligonucleotide
agguauugucguccauggu

SEQ ID NO: 1370320 - RNA, 19 nt, Artificial Sequence
  Description of Artificial Sequence: Synthetic oligonucleotide
ccgauuguucucguuaagc

SEQ ID NO: 1370321 - RNA, 19 nt, Artificial Sequence
  Description of Artificial Sequence: Synthetic oligonucleotide
caggguagcgcucacagau

SEQ ID NO: 1370322 - RNA, 19 nt, Artificial Sequence
  Description of Artificial Sequence: Synthetic oligonucleotide
gugauauucuugacaggga

SEQ ID NO: 1370323 - RNA, 19 nt, Artificial Sequence
  Description of Artificial Sequence: Synthetic oligonucleotide
guagaagcauucuuugcuu

SEQ ID NO: 1370324 - RNA, 19 nt, Artificial Sequence
  Description of Artificial Sequence: Synthetic oligonucleotide
auagccgcuuuggcaacag

SEQ ID NO: 1370325 - RNA, 19 nt, Artificial Sequence
  Description of Artificial Sequence: Synthetic oligonucleotide
gaaagacaggguagcgcuc

SEQ ID NO: 1370326 - RNA, 19 nt, Artificial Sequence
  Description of Artificial Sequence: Synthetic oligonucleotide
uccccucugcaggucaacc

SEQ ID NO: 1370327 - RNA, 19 nt, Artificial Sequence
  Description of Artificial Sequence: Synthetic oligonucleotide
guugcucaggugauaaaua

SEQ ID NO: 1370328 - RNA, 19 nt, Artificial Sequence
  Description of Artificial Sequence: Synthetic oligonucleotide
agccgcuuuggcaacagau

SEQ ID NO: 1370329 - RNA, 19 nt, Artificial Sequence
  Description of Artificial Sequence: Synthetic oligonucleotide
ggcacagcgugcaccacgg

SEQ ID NO: 1370330 - RNA, 19 nt, Artificial Sequence
  Description of Artificial Sequence: Synthetic oligonucleotide
ugaaccggucccacagcuu

SEQ ID NO: 1370331 - RNA, 19 nt, Artificial Sequence
  Description of Artificial Sequence: Synthetic oligonucleotide
cagcuccgccgcuugcucg

SEQ ID NO: 1370332 - RNA, 19 nt, Artificial Sequence
  Description of Artificial Sequence: Synthetic oligonucleotide
guaguggcaacaggcuuca

SEQ ID NO: 1370333 - RNA, 19 nt, Artificial Sequence
  Description of Artificial Sequence: Synthetic oligonucleotide
gguccaucacaaauucuac

SEQ ID NO: 1370334 - RNA, 19 nt, Artificial Sequence
  Description of Artificial Sequence: Synthetic oligonucleotide
cagcgugcaccacggacug

SEQ ID NO: 1370335 - RNA, 19 nt, Artificial Sequence
  Description of Artificial Sequence: Synthetic oligonucleotide
cacggaagagcuccaggga

SEQ ID NO: 1370336 - RNA, 19 nt, Artificial Sequence
  Description of Artificial Sequence: Synthetic oligonucleotide
caccaaucauggugggguc

SEQ ID NO: 1370337 - RNA, 19 nt, Artificial Sequence
  Description of Artificial Sequence: Synthetic oligonucleotide
cacagaccgguccaucaca

SEQ ID NO: 1370338 - RNA, 19 nt, Artificial Sequence
  Description of Artificial Sequence: Synthetic oligonucleotide
gguauaugcuagugauguc

SEQ ID NO: 1370339 - RNA, 19 nt, Artificial Sequence
  Description of Artificial Sequence: Synthetic oligonucleotide
guagcgcucacagauuugu

SEQ ID NO: 1370340 - RNA, 19 nt, Artificial Sequence
  Description of Artificial Sequence: Synthetic oligonucleotide
uucacauaguauggaccuu

SEQ ID NO: 1370341 - RNA, 19 nt, Artificial Sequence
  Description of Artificial Sequence: Synthetic oligonucleotide
uucuugugaggagguguuc

SEQ ID NO: 1370342 - RNA, 19 nt, Artificial Sequence
  Description of Artificial Sequence: Synthetic oligonucleotide
cgauuguucucguuaagca

SEQ ID NO: 1370343 - RNA, 19 nt, Artificial Sequence
  Description of Artificial Sequence: Synthetic oligonucleotide
ggaagucaucagucuguug

SEQ ID NO: 1370344 - RNA, 19 nt, Artificial Sequence
  Description of Artificial Sequence: Synthetic oligonucleotide
ggacuguuaaacauaaguu

SEQ ID NO: 1370345 - RNA, 19 nt, Artificial Sequence
  Description of Artificial Sequence: Synthetic oligonucleotide
gauagccgcuuuggcaaca

SEQ ID NO: 1370346 - RNA, 19 nt, Artificial Sequence
  Description of Artificial Sequence: Synthetic oligonucleotide
gucuuggaauuggcaagug

SEQ ID NO: 1370347 - RNA, 19 nt, Artificial Sequence
  Description of Artificial Sequence: Synthetic oligonucleotide
cacaugaaccggucccaca

SEQ ID NO: 1370348 - RNA, 19 nt, Artificial Sequence
  Description of Artificial Sequence: Synthetic oligonucleotide
ugucguccaugguggguau

SEQ ID NO: 1370349 - RNA, 19 nt, Artificial Sequence
  Description of Artificial Sequence: Synthetic oligonucleotide
caaagaucucugcaacagu

SEQ ID NO: 1370350 - RNA, 19 nt, Artificial Sequence
  Description of Artificial Sequence: Synthetic oligonucleotide
uagccgcuuuggcaacaga

SEQ ID NO: 1370351 - RNA, 19 nt, Artificial Sequence
  Description of Artificial Sequence: Synthetic oligonucleotide
acccuguaucgaacgaugu

SEQ ID NO: 1370352 - RNA, 19 nt, Artificial Sequence
  Description of Artificial Sequence: Synthetic oligonucleotide
acagaccgguccaucacaa

SEQ ID NO: 1370353 - RNA, 19 nt, Artificial Sequence
  Description of Artificial Sequence: Synthetic oligonucleotide
uccugacugucugccauuu

SEQ ID NO: 1370354 - RNA, 19 nt, Artificial Sequence
  Description of Artificial Sequence: Synthetic oligonucleotide
caguaacagcuucagaauu

SEQ ID NO: 1370355 - RNA, 19 nt, Artificial Sequence
  Description of Artificial Sequence: Synthetic oligonucleotide
gagguguucaaagcggguu

SEQ ID NO: 1370356 - RNA, 19 nt, Artificial Sequence
  Description of Artificial Sequence: Synthetic oligonucleotide
uccgccgcuugcucgcgaa

SEQ ID NO: 1370357 - RNA, 19 nt, Artificial Sequence
  Description of Artificial Sequence: Synthetic oligonucleotide
cuugcucgcgaagcucgug

SEQ ID NO: 1370358 - RNA, 19 nt, Artificial Sequence
  Description of Artificial Sequence: Synthetic oligonucleotide
ggacuauccaugacagcca

SEQ ID NO: 1370359 - RNA, 19 nt, Artificial Sequence
  Description of Artificial Sequence: Synthetic oligonucleotide
gcaguucagggaaggguug

SEQ ID NO: 1370360 - RNA, 19 nt, Artificial Sequence
  Description of Artificial Sequence: Synthetic oligonucleotide
agacaggguagcgcucaca

SEQ ID NO: 1370361 - RNA, 19 nt, Artificial Sequence
  Description of Artificial Sequence: Synthetic oligonucleotide
gcucgcgaagcucguggag

SEQ ID NO: 1370362 - RNA, 19 nt, Artificial Sequence
  Description of Artificial Sequence: Synthetic oligonucleotide
cccuguaucgaacgauguc

SEQ ID NO: 1370363 - RNA, 19 nt, Artificial Sequence
  Description of Artificial Sequence: Synthetic oligonucleotide
agucaccaguccacuugug

SEQ ID NO: 1370364 - RNA, 19 nt, Artificial Sequence
  Description of Artificial Sequence: Synthetic oligonucleotide
cgguccaucacaaauucua

SEQ ID NO: 1370365 - RNA, 19 nt, Artificial Sequence
  Description of Artificial Sequence: Synthetic oligonucleotide
gguuugcaauagcugugaa

SEQ ID NO: 1370366 - RNA, 19 nt, Artificial Sequence
  Description of Artificial Sequence: Synthetic oligonucleotide
gguagcgcucacagauuug

SEQ ID NO: 1370367 - RNA, 19 nt, Artificial Sequence
  Description of Artificial Sequence: Synthetic oligonucleotide
gcgaagcucguggagcggc

SEQ ID NO: 1370368 - RNA, 19 nt, Artificial Sequence
  Description of Artificial Sequence: Synthetic oligonucleotide
accuucacuuagguagguu

SEQ ID NO: 1370369 - RNA, 19 nt, Artificial Sequence
  Description of Artificial Sequence: Synthetic oligonucleotide
accggucccacagcuugga

SEQ ID NO: 1370370 - RNA, 19 nt, Artificial Sequence
  Description of Artificial Sequence: Synthetic oligonucleotide
ccacagaccgguccaucac

SEQ ID NO: 1370371 - RNA, 19 nt, Artificial Sequence
  Description of Artificial Sequence: Synthetic oligonucleotide
caccacggacugcagcgca

SEQ ID NO: 1370372 - RNA, 19 nt, Artificial Sequence
  Description of Artificial Sequence: Synthetic oligonucleotide
gggaaggguugguuacuga

SEQ ID NO: 1370373 - RNA, 19 nt, Artificial Sequence
  Description of Artificial Sequence: Synthetic oligonucleotide
ggagcaaccucuccaggau

SEQ ID NO: 1370374 - RNA, 19 nt, Artificial Sequence
  Description of Artificial Sequence: Synthetic oligonucleotide
caacacuggaucccaggau

SEQ ID NO: 1370375 - RNA, 19 nt, Artificial Sequence
  Description of Artificial Sequence: Synthetic oligonucleotide
ccuauucuugugaggaggu

SEQ ID NO: 1370376 - RNA, 19 nt, Artificial Sequence
  Description of Artificial Sequence: Synthetic oligonucleotide
agguagguucugagucuca

SEQ ID NO: 1370377 - RNA, 19 nt, Artificial Sequence
  Description of Artificial Sequence: Synthetic oligonucleotide
ggcaagugcuuuaaccagu

SEQ ID NO: 1370378 - RNA, 19 nt, Artificial Sequence
  Description of Artificial Sequence: Synthetic oligonucleotide
caaagcggguuccugucuu

SEQ ID NO: 1370379 - RNA, 19 nt, Artificial Sequence
  Description of Artificial Sequence: Synthetic oligonucleotide
cagcuuggguuagugauau

SEQ ID NO: 1370380 - RNA, 19 nt, Artificial Sequence
  Description of Artificial Sequence: Synthetic oligonucleotide
cggcacagcgugcaccacg

SEQ ID NO: 1370381 - RNA, 19 nt, Artificial Sequence
  Description of Artificial Sequence: Synthetic oligonucleotide
cgaacgaugucauuuguuu

SEQ ID NO: 1370382 - RNA, 19 nt, Artificial Sequence
  Description of Artificial Sequence: Synthetic oligonucleotide
aggguagcgcucacagauu

SEQ ID NO: 1370383 - RNA, 19 nt, Artificial Sequence
  Description of Artificial Sequence: Synthetic oligonucleotide
cagaccgguccaucacaaa

SEQ ID NO: 1370384 - RNA, 19 nt, Artificial Sequence
  Description of Artificial Sequence: Synthetic oligonucleotide
agcuuggguuagugauauu

SEQ ID NO: 1370385 - RNA, 19 nt, Artificial Sequence
  Description of Artificial Sequence: Synthetic oligonucleotide
cacuugugguacaguaguu

SEQ ID NO: 1370386 - RNA, 19 nt, Artificial Sequence
  Description of Artificial Sequence: Synthetic oligonucleotide
caauagcugugaacacuuu

SEQ ID NO: 1370387 - RNA, 19 nt, Artificial Sequence
  Description of Artificial Sequence: Synthetic oligonucleotide
guguucaaagcggguuccu

SEQ ID NO: 1370388 - RNA, 19 nt, Artificial Sequence
  Description of Artificial Sequence: Synthetic oligonucleotide
gagcgggcccgaggcgcag

SEQ ID NO: 1370389 - RNA, 19 nt, Artificial Sequence
  Description of Artificial Sequence: Synthetic oligonucleotide
augccacggaagagcucca

SEQ ID NO: 1370390 - RNA, 19 nt, Artificial Sequence
  Description of Artificial Sequence: Synthetic oligonucleotide
gggauuugauagccgcuuu

SEQ ID NO: 1370391 - RNA, 19 nt, Artificial Sequence
  Description of Artificial Sequence: Synthetic oligonucleotide
ccaguccagcuuggguuag

SEQ ID NO: 1370392 - RNA, 19 nt, Artificial Sequence
  Description of Artificial Sequence: Synthetic oligonucleotide
cagggaaggguugguuacu

SEQ ID NO: 1370393 - RNA, 19 nt, Artificial Sequence
  Description of Artificial Sequence: Synthetic oligonucleotide
gcucguggagcggcacagc

SEQ ID NO: 1370394 - RNA, 19 nt, Artificial Sequence
  Description of Artificial Sequence: Synthetic oligonucleotide
gccgcuugcucgcgaagcu

SEQ ID NO: 1370395 - RNA, 19 nt, Artificial Sequence
  Description of Artificial Sequence: Synthetic oligonucleotide
gcaagguauugucguccau

SEQ ID NO: 1370396 - RNA, 19 nt, Artificial Sequence
  Description of Artificial Sequence: Synthetic oligonucleotide
gucguccaugguggguaua

SEQ ID NO: 1370397 - RNA, 19 nt, Artificial Sequence
  Description of Artificial Sequence: Synthetic oligonucleotide
ccgcuugcucgcgaagcuc

SEQ ID NO: 1370398 - RNA, 19 nt, Artificial Sequence
  Description of Artificial Sequence: Synthetic oligonucleotide
cuccgccgcuugcucgcga

SEQ ID NO: 1370399 - RNA, 19 nt, Artificial Sequence
  Description of Artificial Sequence: Synthetic oligonucleotide
cguccaugguggguauaug

SEQ ID NO: 1370400 - RNA, 19 nt, Artificial Sequence
  Description of Artificial Sequence: Synthetic oligonucleotide
ccgccgcuugcucgcgaag

SEQ ID NO: 1370401 - RNA, 19 nt, Artificial Sequence
  Description of Artificial Sequence: Synthetic oligonucleotide
cgcgaagcucguggagcgg

SEQ ID NO: 1370402 - RNA, 19 nt, Artificial Sequence
  Description of Artificial Sequence: Synthetic oligonucleotide
ccgguccaucacaaauucu

SEQ ID NO: 1370403 - RNA, 19 nt, Artificial Sequence
  Description of Artificial Sequence: Synthetic oligonucleotide
gcuugcucgcgaagcucgu

SEQ ID NO: 1370404 - RNA, 19 nt, Artificial Sequence
  Description of Artificial Sequence: Synthetic oligonucleotide
gcggcacagcgugcaccac

SEQ ID NO: 1370405 - RNA, 19 nt, Artificial Sequence
  Description of Artificial Sequence: Synthetic oligonucleotide
ggucaacccugagguuccu

SEQ ID NO: 1370406 - RNA, 19 nt, Artificial Sequence
  Description of Artificial Sequence: Synthetic oligonucleotide
ccucacccgucagcucucu

SEQ ID NO: 1370407 - RNA, 19 nt, Artificial Sequence
  Description of Artificial Sequence: Synthetic oligonucleotide
aaucaaaagacuucaaaac

SEQ ID NO: 1370408 - RNA, 19 nt, Artificial Sequence
  Description of Artificial Sequence: Synthetic oligonucleotide
aaaugcuucauccaggcca

SEQ ID NO: 1370409 - RNA, 19 nt, Artificial Sequence
  Description of Artificial Sequence: Synthetic oligonucleotide
uguuaugaaacacauuuug

SEQ ID NO: 1370410 - RNA, 19 nt, Artificial Sequence
  Description of Artificial Sequence: Synthetic oligonucleotide
caaaccauguccauuaugg

SEQ ID NO: 1370411 - RNA, 19 nt, Artificial Sequence
  Description of Artificial Sequence: Synthetic oligonucleotide
cuugccaaaacucaaaggc

SEQ ID NO: 1370412 - RNA, 19 nt, Artificial Sequence
  Description of Artificial Sequence: Synthetic oligonucleotide
uuggucagaaaauagcugg

SEQ ID NO: 1370413 - RNA, 19 nt, Artificial Sequence
  Description of Artificial Sequence: Synthetic oligonucleotide
aggaccucaaaccaugucc

SEQ ID NO: 1370414 - RNA, 19 nt, Artificial Sequence
  Description of Artificial Sequence: Synthetic oligonucleotide
ugaaugaaaaguaucccgc

SEQ ID NO: 1370415 - RNA, 19 nt, Artificial Sequence
  Description of Artificial Sequence: Synthetic oligonucleotide
acaagggagccuuagacac

SEQ ID NO: 1370416 - RNA, 19 nt, Artificial Sequence
  Description of Artificial Sequence: Synthetic oligonucleotide
uucaaaacaugucuucccg

SEQ ID NO: 1370417 - RNA, 19 nt, Artificial Sequence
  Description of Artificial Sequence: Synthetic oligonucleotide
uuaugaaacacauuuuggu

SEQ ID NO: 1370418 - RNA, 19 nt, Artificial Sequence
  Description of Artificial Sequence: Synthetic oligonucleotide
uuccuuaccuguaaaauga

SEQ ID NO: 1370419 - RNA, 19 nt, Artificial Sequence
  Description of Artificial Sequence: Synthetic oligonucleotide
uucucaaugagcuggcuag

SEQ ID NO: 1370420 - RNA, 19 nt, Artificial Sequence
  Description of Artificial Sequence: Synthetic oligonucleotide
aaggcauggcauuccaggc

SEQ ID NO: 1370421 - RNA, 19 nt, Artificial Sequence
  Description of Artificial Sequence: Synthetic oligonucleotide
aaaggcaccagaugguuug

SEQ ID NO: 1370422 - RNA, 19 nt, Artificial Sequence
  Description of Artificial Sequence: Synthetic oligonucleotide
aaguuggcgguacaaacag

SEQ ID NO: 1370423 - RNA, 19 nt, Artificial Sequence
  Description of Artificial Sequence: Synthetic oligonucleotide
agacaccucuuccaaaucc

SEQ ID NO: 1370424 - RNA, 19 nt, Artificial Sequence
  Description of Artificial Sequence: Synthetic oligonucleotide
gaggcugucagucaggaug

SEQ ID NO: 1370425 - RNA, 19 nt, Artificial Sequence
  Description of Artificial Sequence: Synthetic oligonucleotide
agauccuguaaauggacac

SEQ ID NO: 1370426 - RNA, 19 nt, Artificial Sequence
  Description of Artificial Sequence: Synthetic oligonucleotide
augaaaaguaucccgccac

SEQ ID NO: 1370427 - RNA, 19 nt, Artificial Sequence
  Description of Artificial Sequence: Synthetic oligonucleotide
uuuccuuaccuguaaaaug

SEQ ID NO: 1370428 - RNA, 19 nt, Artificial Sequence
  Description of Artificial Sequence: Synthetic oligonucleotide
aaugaaaaguaucccgcca

SEQ ID NO: 1370429 - RNA, 19 nt, Artificial Sequence
  Description of Artificial Sequence: Synthetic oligonucleotide
agaauuugaggaucccagc

SEQ ID NO: 1370430 - RNA, 19 nt, Artificial Sequence
  Description of Artificial Sequence: Synthetic oligonucleotide
agaugguuuguuaugaaac

SEQ ID NO: 1370431 - RNA, 19 nt, Artificial Sequence
  Description of Artificial Sequence: Synthetic oligonucleotide
uaugcgaacaccuugucau

SEQ ID NO: 1370432 - RNA, 19 nt, Artificial Sequence
  Description of Artificial Sequence: Synthetic oligonucleotide
aaugacggggugcugucac

SEQ ID NO: 1370433 - RNA, 19 nt, Artificial Sequence
  Description of Artificial Sequence: Synthetic oligonucleotide
uaacccauggaaucaaaag

SEQ ID NO: 1370434 - RNA, 19 nt, Artificial Sequence
  Description of Artificial Sequence: Synthetic oligonucleotide
aacuuugaaggccugggcu

SEQ ID NO: 1370435 - RNA, 19 nt, Artificial Sequence
  Description of Artificial Sequence: Synthetic oligonucleotide
uaauggauguccugugugg

SEQ ID NO: 1370436 - RNA, 19 nt, Artificial Sequence
  Description of Artificial Sequence: Synthetic oligonucleotide
aaaccauguccauuauggg

SEQ ID NO: 1370437 - RNA, 19 nt, Artificial Sequence
  Description of Artificial Sequence: Synthetic oligonucleotide
aggacuugaggguucgucc

SEQ ID NO: 1370438 - RNA, 19 nt, Artificial Sequence
  Description of Artificial Sequence: Synthetic oligonucleotide
uguagguggcuuuuggucc

SEQ ID NO: 1370439 - RNA, 19 nt, Artificial Sequence
  Description of Artificial Sequence: Synthetic oligonucleotide
guuaugaaacacauuuugg

SEQ ID NO: 1370440 - RNA, 19 nt, Artificial Sequence
  Description of Artificial Sequence: Synthetic oligonucleotide
agcuaugugucuuugguca

SEQ ID NO: 1370441 - RNA, 19 nt, Artificial Sequence
  Description of Artificial Sequence: Synthetic oligonucleotide
acuaaggacagcucaccac

SEQ ID NO: 1370442 - RNA, 19 nt, Artificial Sequence
  Description of Artificial Sequence: Synthetic oligonucleotide
gaaugaaaaguaucccgcc

SEQ ID NO: 1370443 - RNA, 19 nt, Artificial Sequence
  Description of Artificial Sequence: Synthetic oligonucleotide
aggucaucucgaucgaugc

SEQ ID NO: 1370444 - RNA, 19 nt, Artificial Sequence
  Description of Artificial Sequence: Synthetic oligonucleotide
uacacuuagguccuagcac

SEQ ID NO: 1370445 - RNA, 19 nt, Artificial Sequence
  Description of Artificial Sequence: Synthetic oligonucleotide
gagauaaaagugcagagcu

SEQ ID NO: 1370446 - RNA, 19 nt, Artificial Sequence
  Description of Artificial Sequence: Synthetic oligonucleotide
uuaguggugaccguggaca

SEQ ID NO: 1370447 - RNA, 19 nt, Artificial Sequence
  Description of Artificial Sequence: Synthetic oligonucleotide
ugguuuguuaugaaacaca

SEQ ID NO: 1370448 - RNA, 19 nt, Artificial Sequence
  Description of Artificial Sequence: Synthetic oligonucleotide
auaauggauguccugugug

SEQ ID NO: 1370449 - RNA, 19 nt, Artificial Sequence
  Description of Artificial Sequence: Synthetic oligonucleotide
ggacaacaaagcuagagag

SEQ ID NO: 1370450 - RNA, 19 nt, Artificial Sequence
  Description of Artificial Sequence: Synthetic oligonucleotide
agaucuggguucuauucuc

SEQ ID NO: 1370451 - RNA, 19 nt, Artificial Sequence
  Description of Artificial Sequence: Synthetic oligonucleotide
uggucagaaaauagcuggg

SEQ ID NO: 1370452 - RNA, 19 nt, Artificial Sequence
  Description of Artificial Sequence: Synthetic oligonucleotide
gaugguuuguuaugaaaca

SEQ ID NO: 1370453 - RNA, 19 nt, Artificial Sequence
  Description of Artificial Sequence: Synthetic oligonucleotide
uuugguccaucacauguca

SEQ ID NO: 1370454 - RNA, 19 nt, Artificial Sequence
  Description of Artificial Sequence: Synthetic oligonucleotide
uguggaaaggcaccagaug

SEQ ID NO: 1370455 - RNA, 19 nt, Artificial Sequence
  Description of Artificial Sequence: Synthetic oligonucleotide
gacagcgagaugcuucugg

SEQ ID NO: 1370456 - RNA, 19 nt, Artificial Sequence
  Description of Artificial Sequence: Synthetic oligonucleotide
uaaauggacacguucucaa

SEQ ID NO: 1370457 - RNA, 19 nt, Artificial Sequence
  Description of Artificial Sequence: Synthetic oligonucleotide
agagcuaugugucuuuggu

SEQ ID NO: 1370458 - RNA, 19 nt, Artificial Sequence
  Description of Artificial Sequence: Synthetic oligonucleotide
accacuaaacugccuggcc

SEQ ID NO: 1370459 - RNA, 19 nt, Artificial Sequence
  Description of Artificial Sequence: Synthetic oligonucleotide
uaaaagugcagagcuaugu

SEQ ID NO: 1370460 - RNA, 19 nt, Artificial Sequence
  Description of Artificial Sequence: Synthetic oligonucleotide
aggacaacaaagcuagaga

SEQ ID NO: 1370461 - RNA, 19 nt, Artificial Sequence
  Description of Artificial Sequence: Synthetic oligonucleotide
acacuuagguccuagcacu

SEQ ID NO: 1370462 - RNA, 19 nt, Artificial Sequence
  Description of Artificial Sequence: Synthetic oligonucleotide
uuccgcuuggugcagagga

SEQ ID NO: 1370463 - RNA, 19 nt, Artificial Sequence
  Description of Artificial Sequence: Synthetic oligonucleotide
uuagguccuagcacuauac

SEQ ID NO: 1370464 - RNA, 19 nt, Artificial Sequence
  Description of Artificial Sequence: Synthetic oligonucleotide
ugguccaucacaugucaag

SEQ ID NO: 1370465 - RNA, 19 nt, Artificial Sequence
  Description of Artificial Sequence: Synthetic oligonucleotide
cacguucucaaugagcugg

SEQ ID NO: 1370466 - RNA, 19 nt, Artificial Sequence
  Description of Artificial Sequence: Synthetic oligonucleotide
auuaguggugaccguggac

SEQ ID NO: 1370467 - RNA, 19 nt, Artificial Sequence
  Description of Artificial Sequence: Synthetic oligonucleotide
uguaaauggacacguucuc

SEQ ID NO: 1370468 - RNA, 19 nt, Artificial Sequence
  Description of Artificial Sequence: Synthetic oligonucleotide
accauguccauuaugggag

SEQ ID NO: 1370469 - RNA, 19 nt, Artificial Sequence
  Description of Artificial Sequence: Synthetic oligonucleotide
aaggaccucaaaccauguc

SEQ ID NO: 1370470 - RNA, 19 nt, Artificial Sequence
  Description of Artificial Sequence: Synthetic oligonucleotide
cauguguugccucaguuuc

SEQ ID NO: 1370471 - RNA, 19 nt, Artificial Sequence
  Description of Artificial Sequence: Synthetic oligonucleotide
gauccuguaaauggacacg

SEQ ID NO: 1370472 - RNA, 19 nt, Artificial Sequence
  Description of Artificial Sequence: Synthetic oligonucleotide
ugaaaaguaucccgccaca

SEQ ID NO: 1370473 - RNA, 19 nt, Artificial Sequence
  Description of Artificial Sequence: Synthetic oligonucleotide
ucaaaccauguccauuaug

SEQ ID NO: 1370474 - RNA, 19 nt, Artificial Sequence
  Description of Artificial Sequence: Synthetic oligonucleotide
ugugccagccuugaaaaug

SEQ ID NO: 1370475 - RNA, 19 nt, Artificial Sequence
  Description of Artificial Sequence: Synthetic oligonucleotide
agaaaggagacgugggcug

SEQ ID NO: 1370476 - RNA, 19 nt, Artificial Sequence
  Description of Artificial Sequence: Synthetic oligonucleotide
uggcgguacaaacagcagc

SEQ ID NO: 1370477 - RNA, 19 nt, Artificial Sequence
  Description of Artificial Sequence: Synthetic oligonucleotide
ugggcgauaagcacugcgc

SEQ ID NO: 1370478 - RNA, 19 nt, Artificial Sequence
  Description of Artificial Sequence: Synthetic oligonucleotide
guugugcgggcuuugggcg

SEQ ID NO: 1370479 - RNA, 19 nt, Artificial Sequence
  Description of Artificial Sequence: Synthetic oligonucleotide
uucccaguggcaaccaagc

SEQ ID NO: 1370480 - RNA, 19 nt, Artificial Sequence
  Description of Artificial Sequence: Synthetic oligonucleotide
aagcacugcgcauaaugga

SEQ ID NO: 1370481 - RNA, 19 nt, Artificial Sequence
  Description of Artificial Sequence: Synthetic oligonucleotide
uggcuagugaggcugucag

SEQ ID NO: 1370482 - RNA, 19 nt, Artificial Sequence
  Description of Artificial Sequence: Synthetic oligonucleotide
gagagaaaggagacguggg

SEQ ID NO: 1370483 - RNA, 19 nt, Artificial Sequence
  Description of Artificial Sequence: Synthetic oligonucleotide
auggaaucaaaagacuuca

SEQ ID NO: 1370484 - RNA, 19 nt, Artificial Sequence
  Description of Artificial Sequence: Synthetic oligonucleotide
aauuauggagaggcagaag

SEQ ID NO: 1370485 - RNA, 19 nt, Artificial Sequence
  Description of Artificial Sequence: Synthetic oligonucleotide
ucgaucgaugccacugccg

SEQ ID NO: 1370486 - RNA, 19 nt, Artificial Sequence
  Description of Artificial Sequence: Synthetic oligonucleotide
agcuagagagaaaggagac

SEQ ID NO: 1370487 - RNA, 19 nt, Artificial Sequence
  Description of Artificial Sequence: Synthetic oligonucleotide
gugaccguggacaagggag

SEQ ID NO: 1370488 - RNA, 19 nt, Artificial Sequence
  Description of Artificial Sequence: Synthetic oligonucleotide
uuagcuaccaggccccaaa

SEQ ID NO: 1370489 - RNA, 19 nt, Artificial Sequence
  Description of Artificial Sequence: Synthetic oligonucleotide
gaaaaguaucccgccacag

SEQ ID NO: 1370490 - RNA, 19 nt, Artificial Sequence
  Description of Artificial Sequence: Synthetic oligonucleotide
agcacuauacagaucaccu

SEQ ID NO: 1370491 - RNA, 19 nt, Artificial Sequence
  Description of Artificial Sequence: Synthetic oligonucleotide
ucuucccggaagcagugug

SEQ ID NO: 1370492 - RNA, 19 nt, Artificial Sequence
  Description of Artificial Sequence: Synthetic oligonucleotide
ugaccguggacaagggagc

SEQ ID NO: 1370493 - RNA, 19 nt, Artificial Sequence
  Description of Artificial Sequence: Synthetic oligonucleotide
gacaagggagccuuagaca

SEQ ID NO: 1370494 - RNA, 19 nt, Artificial Sequence
  Description of Artificial Sequence: Synthetic oligonucleotide
uggacgcuugccaaaacuc

SEQ ID NO: 1370495 - RNA, 19 nt, Artificial Sequence
  Description of Artificial Sequence: Synthetic oligonucleotide
ccuagcacuauacagauca

SEQ ID NO: 1370496 - RNA, 19 nt, Artificial Sequence
  Description of Artificial Sequence: Synthetic oligonucleotide
ucguccgugacugugccag

SEQ ID NO: 1370497 - RNA, 19 nt, Artificial Sequence
  Description of Artificial Sequence: Synthetic oligonucleotide
uauuaguggugaccgugga

SEQ ID NO: 1370498 - RNA, 19 nt, Artificial Sequence
  Description of Artificial Sequence: Synthetic oligonucleotide
uggugcccaagacuugagg

SEQ ID NO: 1370499 - RNA, 19 nt, Artificial Sequence
  Description of Artificial Sequence: Synthetic oligonucleotide
aguaggagauccuguaaau

SEQ ID NO: 1370500 - RNA, 19 nt, Artificial Sequence
  Description of Artificial Sequence: Synthetic oligonucleotide
uuguuaugaaacacauuuu

SEQ ID NO: 1370501 - RNA, 19 nt, Artificial Sequence
  Description of Artificial Sequence: Synthetic oligonucleotide
gaauuugaggaucccagcu

SEQ ID NO: 1370502 - RNA, 19 nt, Artificial Sequence
  Description of Artificial Sequence: Synthetic oligonucleotide
ucucgaucgaugccacugc

SEQ ID NO: 1370503 - RNA, 19 nt, Artificial Sequence
  Description of Artificial Sequence: Synthetic oligonucleotide
gaggguucguccgugacug

SEQ ID NO: 1370504 - RNA, 19 nt, Artificial Sequence
  Description of Artificial Sequence: Synthetic oligonucleotide
uucaaugacggggugcugu

SEQ ID NO: 1370505 - RNA, 19 nt, Artificial Sequence
  Description of Artificial Sequence: Synthetic oligonucleotide
caccuugucaugcaucuug

SEQ ID NO: 1370506 - RNA, 19 nt, Artificial Sequence
  Description of Artificial Sequence: Synthetic oligonucleotide
ugucagucaggaugauucc

SEQ ID NO: 1370507 - RNA, 19 nt, Artificial Sequence
  Description of Artificial Sequence: Synthetic oligonucleotide
uagcacuauacagaucacc

SEQ ID NO: 1370508 - RNA, 19 nt, Artificial Sequence
  Description of Artificial Sequence: Synthetic oligonucleotide
ucggugggcgauaagcacu

SEQ ID NO: 1370509 - RNA, 19 nt, Artificial Sequence
  Description of Artificial Sequence: Synthetic oligonucleotide
ugcacaaauggcugcucug

SEQ ID NO: 1370510 - RNA, 19 nt, Artificial Sequence
  Description of Artificial Sequence: Synthetic oligonucleotide
uagagagaaaggagacgug

SEQ ID NO: 1370511 - RNA, 19 nt, Artificial Sequence
  Description of Artificial Sequence: Synthetic oligonucleotide
cugcgcauaauggaugucc

SEQ ID NO: 1370512 - RNA, 19 nt, Artificial Sequence
  Description of Artificial Sequence: Synthetic oligonucleotide
ugcgcauaauggauguccu

SEQ ID NO: 1370513 - RNA, 19 nt, Artificial Sequence
  Description of Artificial Sequence: Synthetic oligonucleotide
ugaagaggucaucucgauc

SEQ ID NO: 1370514 - RNA, 19 nt, Artificial Sequence
  Description of Artificial Sequence: Synthetic oligonucleotide
ggugcccaagacuugaggc

SEQ ID NO: 1370515 - RNA, 19 nt, Artificial Sequence
  Description of Artificial Sequence: Synthetic oligonucleotide
ugagggugacagcuugugc

SEQ ID NO: 1370516 - RNA, 19 nt, Artificial Sequence
  Description of Artificial Sequence: Synthetic oligonucleotide
uuuaacccauggaaucaaa

SEQ ID NO: 1370517 - RNA, 19 nt, Artificial Sequence
  Description of Artificial Sequence: Synthetic oligonucleotide
ggagauaaaagugcagagc

SEQ ID NO: 1370518 - RNA, 19 nt, Artificial Sequence
  Description of Artificial Sequence: Synthetic oligonucleotide
ucguugugcgggcuuuggg

SEQ ID NO: 1370519 - RNA, 19 nt, Artificial Sequence
  Description of Artificial Sequence: Synthetic oligonucleotide
cacuaaacugccuggccac

SEQ ID NO: 1370520 - RNA, 19 nt, Artificial Sequence
  Description of Artificial Sequence: Synthetic oligonucleotide
ugaggguucguccgugacu

SEQ ID NO: 1370521 - RNA, 19 nt, Artificial Sequence
  Description of Artificial Sequence: Synthetic oligonucleotide
ugggcgauguaugcgaaca

SEQ ID NO: 1370522 - RNA, 19 nt, Artificial Sequence
  Description of Artificial Sequence: Synthetic oligonucleotide
cucggagggccuuagcuac

SEQ ID NO: 1370523 - RNA, 19 nt, Artificial Sequence
  Description of Artificial Sequence: Synthetic oligonucleotide
uuggcgguacaaacagcag

SEQ ID NO: 1370524 - RNA, 19 nt, Artificial Sequence
  Description of Artificial Sequence: Synthetic oligonucleotide
guugccucaguuuccuuac

SEQ ID NO: 1370525 - RNA, 19 nt, Artificial Sequence
  Description of Artificial Sequence: Synthetic oligonucleotide
acggggugcugucacgucg

SEQ ID NO: 1370526 - RNA, 19 nt, Artificial Sequence
  Description of Artificial Sequence: Synthetic oligonucleotide
guuggcgguacaaacagca

SEQ ID NO: 1370527 - RNA, 19 nt, Artificial Sequence
  Description of Artificial Sequence: Synthetic oligonucleotide
aucucgaucgaugccacug

SEQ ID NO: 1370528 - RNA, 19 nt, Artificial Sequence
  Description of Artificial Sequence: Synthetic oligonucleotide
uagguccuagcacuauaca

SEQ ID NO: 1370529 - RNA, 19 nt, Artificial Sequence
  Description of Artificial Sequence: Synthetic oligonucleotide
ugucuucccggaagcagug

SEQ ID NO: 1370530 - RNA, 19 nt, Artificial Sequence
  Description of Artificial Sequence: Synthetic oligonucleotide
caaccaagcuuuucaauga

SEQ ID NO: 1370531 - RNA, 19 nt, Artificial Sequence
  Description of Artificial Sequence: Synthetic oligonucleotide
gacaacaaagcuagagaga

SEQ ID NO: 1370532 - RNA, 19 nt, Artificial Sequence
  Description of Artificial Sequence: Synthetic oligonucleotide
cuuugggcgauguaugcga

SEQ ID NO: 1370533 - RNA, 19 nt, Artificial Sequence
  Description of Artificial Sequence: Synthetic oligonucleotide
gaggucaucucgaucgaug

SEQ ID NO: 1370534 - RNA, 19 nt, Artificial Sequence
  Description of Artificial Sequence: Synthetic oligonucleotide
gugcccaagacuugaggcc

SEQ ID NO: 1370535 - RNA, 19 nt, Artificial Sequence
  Description of Artificial Sequence: Synthetic oligonucleotide
uucuggaggauuccauuua

SEQ ID NO: 1370536 - RNA, 19 nt, Artificial Sequence
  Description of Artificial Sequence: Synthetic oligonucleotide
gcuugccaaaacucaaagg

SEQ ID NO: 1370537 - RNA, 19 nt, Artificial Sequence
  Description of Artificial Sequence: Synthetic oligonucleotide
guaggagauccuguaaaug

SEQ ID NO: 1370538 - RNA, 19 nt, Artificial Sequence
  Description of Artificial Sequence: Synthetic oligonucleotide
ggaaucaaaagacuucaaa

SEQ ID NO: 1370539 - RNA, 19 nt, Artificial Sequence
  Description of Artificial Sequence: Synthetic oligonucleotide
ggacuugaggguucguccg

SEQ ID NO: 1370540 - RNA, 19 nt, Artificial Sequence
  Description of Artificial Sequence: Synthetic oligonucleotide
cagucggugggcgauaagc

SEQ ID NO: 1370541 - RNA, 19 nt, Artificial Sequence
  Description of Artificial Sequence: Synthetic oligonucleotide
guccaucacaugucaaggc

SEQ ID NO: 1370542 - RNA, 19 nt, Artificial Sequence
  Description of Artificial Sequence: Synthetic oligonucleotide
ucuggguucuauucucauc

SEQ ID NO: 1370543 - RNA, 19 nt, Artificial Sequence
  Description of Artificial Sequence: Synthetic oligonucleotide
uggaaucaaaagacuucaa

SEQ ID NO: 1370544 - RNA, 19 nt, Artificial Sequence
  Description of Artificial Sequence: Synthetic oligonucleotide
uguaugcgaacaccuuguc

SEQ ID NO: 1370545 - RNA, 19 nt, Artificial Sequence
  Description of Artificial Sequence: Synthetic oligonucleotide
gguccaucacaugucaagg

SEQ ID NO: 1370546 - RNA, 19 nt, Artificial Sequence
  Description of Artificial Sequence: Synthetic oligonucleotide
aggccaguuguguccugcc

SEQ ID NO: 1370547 - RNA, 19 nt, Artificial Sequence
  Description of Artificial Sequence: Synthetic oligonucleotide
cagagcuaugugucuuugg

SEQ ID NO: 1370548 - RNA, 19 nt, Artificial Sequence
  Description of Artificial Sequence: Synthetic oligonucleotide
gucaucucgaucgaugcca

SEQ ID NO: 1370549 - RNA, 19 nt, Artificial Sequence
  Description of Artificial Sequence: Synthetic oligonucleotide
ugugagaaguuggcgguac

SEQ ID NO: 1370550 - RNA, 19 nt, Artificial Sequence
  Description of Artificial Sequence: Synthetic oligonucleotide
gagcuaugugucuuugguc

SEQ ID NO: 1370551 - RNA, 19 nt, Artificial Sequence
  Description of Artificial Sequence: Synthetic oligonucleotide
cuagagagaaaggagacgu

SEQ ID NO: 1370552 - RNA, 19 nt, Artificial Sequence
  Description of Artificial Sequence: Synthetic oligonucleotide
cuguaaauggacacguucu

SEQ ID NO: 1370553 - RNA, 19 nt, Artificial Sequence
  Description of Artificial Sequence: Synthetic oligonucleotide
gagacgugggcugugagaa

SEQ ID NO: 1370554 - RNA, 19 nt, Artificial Sequence
  Description of Artificial Sequence: Synthetic oligonucleotide
ugucaaggccaguuguguc

SEQ ID NO: 1370555 - RNA, 19 nt, Artificial Sequence
  Description of Artificial Sequence: Synthetic oligonucleotide
gaauuauggagaggcagaa

SEQ ID NO: 1370556 - RNA, 19 nt, Artificial Sequence
  Description of Artificial Sequence: Synthetic oligonucleotide
ggucagaaaauagcugggg

SEQ ID NO: 1370557 - RNA, 19 nt, Artificial Sequence
  Description of Artificial Sequence: Synthetic oligonucleotide
uccuuaccuguaaaaugaa

SEQ ID NO: 1370558 - RNA, 19 nt, Artificial Sequence
  Description of Artificial Sequence: Synthetic oligonucleotide
cccuccagugcacaaaugg

SEQ ID NO: 1370559 - RNA, 19 nt, Artificial Sequence
  Description of Artificial Sequence: Synthetic oligonucleotide
guaaauggacacguucuca

SEQ ID NO: 1370560 - RNA, 19 nt, Artificial Sequence
  Description of Artificial Sequence: Synthetic oligonucleotide
cacaugucaaggccaguug

SEQ ID NO: 1370561 - RNA, 19 nt, Artificial Sequence
  Description of Artificial Sequence: Synthetic oligonucleotide
ugagaaguuggcgguacaa

SEQ ID NO: 1370562 - RNA, 19 nt, Artificial Sequence
  Description of Artificial Sequence: Synthetic oligonucleotide
guaugcgaacaccuuguca

SEQ ID NO: 1370563 - RNA, 19 nt, Artificial Sequence
  Description of Artificial Sequence: Synthetic oligonucleotide
caccagaugguuuguuaug

SEQ ID NO: 1370564 - RNA, 19 nt, Artificial Sequence
  Description of Artificial Sequence: Synthetic oligonucleotide
ucucggagggccuuagcua

SEQ ID NO: 1370565 - RNA, 19 nt, Artificial Sequence
  Description of Artificial Sequence: Synthetic oligonucleotide
caggaugauuccccggggc

SEQ ID NO: 1370566 - RNA, 19 nt, Artificial Sequence
  Description of Artificial Sequence: Synthetic oligonucleotide
ucaaugacggggugcuguc

SEQ ID NO: 1370567 - RNA, 19 nt, Artificial Sequence
  Description of Artificial Sequence: Synthetic oligonucleotide
uugaggguucguccgugac

SEQ ID NO: 1370568 - RNA, 19 nt, Artificial Sequence
  Description of Artificial Sequence: Synthetic oligonucleotide
uuugggcgauguaugcgaa

SEQ ID NO: 1370569 - RNA, 19 nt, Artificial Sequence
  Description of Artificial Sequence: Synthetic oligonucleotide
auguaugcgaacaccuugu

SEQ ID NO: 1370570 - RNA, 19 nt, Artificial Sequence
  Description of Artificial Sequence: Synthetic oligonucleotide
cuggaggauuccauuuaac

SEQ ID NO: 1370571 - RNA, 19 nt, Artificial Sequence
  Description of Artificial Sequence: Synthetic oligonucleotide
caggcucucguugugcggg

SEQ ID NO: 1370572 - RNA, 19 nt, Artificial Sequence
  Description of Artificial Sequence: Synthetic oligonucleotide
ccuguaaauggacacguuc

SEQ ID NO: 1370573 - RNA, 19 nt, Artificial Sequence
  Description of Artificial Sequence: Synthetic oligonucleotide
ucccgccacagccuagugc

SEQ ID NO: 1370574 - RNA, 19 nt, Artificial Sequence
  Description of Artificial Sequence: Synthetic oligonucleotide
uuccuuggacgcuugccaa

SEQ ID NO: 1370575 - RNA, 19 nt, Artificial Sequence
  Description of Artificial Sequence: Synthetic oligonucleotide
uggugaccguggacaaggg

SEQ ID NO: 1370576 - RNA, 19 nt, Artificial Sequence
  Description of Artificial Sequence: Synthetic oligonucleotide
ggguucuauucucaucucc

SEQ ID NO: 1370577 - RNA, 19 nt, Artificial Sequence
  Description of Artificial Sequence: Synthetic oligonucleotide
ugguacacuuagguccuag

SEQ ID NO: 1370578 - RNA, 19 nt, Artificial Sequence
  Description of Artificial Sequence: Synthetic oligonucleotide
auaaaagugcagagcuaug

SEQ ID NO: 1370579 - RNA, 19 nt, Artificial Sequence
  Description of Artificial Sequence: Synthetic oligonucleotide
acguucucaaugagcuggc

SEQ ID NO: 1370580 - RNA, 19 nt, Artificial Sequence
  Description of Artificial Sequence: Synthetic oligonucleotide
uggcaaccaagcuuuucaa

SEQ ID NO: 1370581 - RNA, 19 nt, Artificial Sequence
  Description of Artificial Sequence: Synthetic oligonucleotide
augacggggugcugucacg

SEQ ID NO: 1370582 - RNA, 19 nt, Artificial Sequence
  Description of Artificial Sequence: Synthetic oligonucleotide
cuagcacuauacagaucac

SEQ ID NO: 1370583 - RNA, 19 nt, Artificial Sequence
  Description of Artificial Sequence: Synthetic oligonucleotide
uccauccccgacauguguu

SEQ ID NO: 1370584 - RNA, 19 nt, Artificial Sequence
  Description of Artificial Sequence: Synthetic oligonucleotide
aggaaggcauggcauucca

SEQ ID NO: 1370585 - RNA, 19 nt, Artificial Sequence
  Description of Artificial Sequence: Synthetic oligonucleotide
ucaguccuaggcccucaga

SEQ ID NO: 1370586 - RNA, 19 nt, Artificial Sequence
  Description of Artificial Sequence: Synthetic oligonucleotide
augcgaacaccuugucaug

SEQ ID NO: 1370587 - RNA, 19 nt, Artificial Sequence
  Description of Artificial Sequence: Synthetic oligonucleotide
gucacgucgggucccugag

SEQ ID NO: 1370588 - RNA, 19 nt, Artificial Sequence
  Description of Artificial Sequence: Synthetic oligonucleotide
gaggaaggcauggcauucc

SEQ ID NO: 1370589 - RNA, 19 nt, Artificial Sequence
  Description of Artificial Sequence: Synthetic oligonucleotide
caucguccagcucccagac

SEQ ID NO: 1370590 - RNA, 19 nt, Artificial Sequence
  Description of Artificial Sequence: Synthetic oligonucleotide
aaguaucccgccacagccu

SEQ ID NO: 1370591 - RNA, 19 nt, Artificial Sequence
  Description of Artificial Sequence: Synthetic oligonucleotide
caguaggagauccuguaaa

SEQ ID NO: 1370592 - RNA, 19 nt, Artificial Sequence
  Description of Artificial Sequence: Synthetic oligonucleotide
ggaauuauggagaggcaga

SEQ ID NO: 1370593 - RNA, 19 nt, Artificial Sequence
  Description of Artificial Sequence: Synthetic oligonucleotide
gguucuauucucaucucca

SEQ ID NO: 1370594 - RNA, 19 nt, Artificial Sequence
  Description of Artificial Sequence: Synthetic oligonucleotide
gguacacuuagguccuagc

SEQ ID NO: 1370595 - RNA, 19 nt, Artificial Sequence
  Description of Artificial Sequence: Synthetic oligonucleotide
gcuagugaggcugucaguc

SEQ ID NO: 1370596 - RNA, 19 nt, Artificial Sequence
  Description of Artificial Sequence: Synthetic oligonucleotide
agcacugcgcauaauggau

SEQ ID NO: 1370597 - RNA, 19 nt, Artificial Sequence
  Description of Artificial Sequence: Synthetic oligonucleotide
gucggugggcgauaagcac

SEQ ID NO: 1370598 - RNA, 19 nt, Artificial Sequence
  Description of Artificial Sequence: Synthetic oligonucleotide
gaugauuccccggggcgac

SEQ ID NO: 1370599 - RNA, 19 nt, Artificial Sequence
  Description of Artificial Sequence: Synthetic oligonucleotide
uuuccgcuuggugcagagg

SEQ ID NO: 1370600 - RNA, 19 nt, Artificial Sequence
  Description of Artificial Sequence: Synthetic oligonucleotide
ucccaguggcaaccaagcu

SEQ ID NO: 1370601 - RNA, 19 nt, Artificial Sequence
  Description of Artificial Sequence: Synthetic oligonucleotide
guggcccuccuguggaggg

SEQ ID NO: 1370602 - RNA, 19 nt, Artificial Sequence
  Description of Artificial Sequence: Synthetic oligonucleotide
augucuucccggaagcagu

SEQ ID NO: 1370603 - RNA, 19 nt, Artificial Sequence
  Description of Artificial Sequence: Synthetic oligonucleotide
ggcuuugguaucauuccag

SEQ ID NO: 1370604 - RNA, 19 nt, Artificial Sequence
  Description of Artificial Sequence: Synthetic oligonucleotide
ugguauuaguggugaccgu

SEQ ID NO: 1370605 - RNA, 19 nt, Artificial Sequence
  Description of Artificial Sequence: Synthetic oligonucleotide
caccacuaaacugccuggc

SEQ ID NO: 1370606 - RNA, 19 nt, Artificial Sequence
  Description of Artificial Sequence: Synthetic oligonucleotide
caguccuaggcccucagaa

SEQ ID NO: 1370607 - RNA, 19 nt, Artificial Sequence
  Description of Artificial Sequence: Synthetic oligonucleotide
aucuggguucuauucucau

SEQ ID NO: 1370608 - RNA, 19 nt, Artificial Sequence
  Description of Artificial Sequence: Synthetic oligonucleotide
cuuagacaccucuuccaaa

SEQ ID NO: 1370609 - RNA, 19 nt, Artificial Sequence
  Description of Artificial Sequence: Synthetic oligonucleotide
ucucaaugagcuggcuagu

SEQ ID NO: 1370610 - RNA, 19 nt, Artificial Sequence
  Description of Artificial Sequence: Synthetic oligonucleotide
guggacaagggagccuuag

SEQ ID NO: 1370611 - RNA, 19 nt, Artificial Sequence
  Description of Artificial Sequence: Synthetic oligonucleotide
uccuuggacgcuugccaaa

SEQ ID NO: 1370612 - RNA, 19 nt, Artificial Sequence
  Description of Artificial Sequence: Synthetic oligonucleotide
uugggcgauguaugcgaac

SEQ ID NO: 1370613 - RNA, 19 nt, Artificial Sequence
  Description of Artificial Sequence: Synthetic oligonucleotide
uggguucuauucucaucuc

SEQ ID NO: 1370614 - RNA, 19 nt, Artificial Sequence
  Description of Artificial Sequence: Synthetic oligonucleotide
ggcgauguaugcgaacacc

SEQ ID NO: 1370615 - RNA, 19 nt, Artificial Sequence
  Description of Artificial Sequence: Synthetic oligonucleotide
uggcaguuagcagggcaug

SEQ ID NO: 1370616 - RNA, 19 nt, Artificial Sequence
  Description of Artificial Sequence: Synthetic oligonucleotide
ugacggggugcugucacgu

SEQ ID NO: 1370617 - RNA, 19 nt, Artificial Sequence
  Description of Artificial Sequence: Synthetic oligonucleotide
ggcuuugggcgauguaugc

SEQ ID NO: 1370618 - RNA, 19 nt, Artificial Sequence
  Description of Artificial Sequence: Synthetic oligonucleotide
ucggagggccuuagcuacc

SEQ ID NO: 1370619 - RNA, 19 nt, Artificial Sequence
  Description of Artificial Sequence: Synthetic oligonucleotide
uaucccgccacagccuagu

SEQ ID NO: 1370620 - RNA, 19 nt, Artificial Sequence
  Description of Artificial Sequence: Synthetic oligonucleotide
gcacaaauggcugcucugc

SEQ ID NO: 1370621 - RNA, 19 nt, Artificial Sequence
  Description of Artificial Sequence: Synthetic oligonucleotide
uccuguaaauggacacguu

SEQ ID NO: 1370622 - RNA, 19 nt, Artificial Sequence
  Description of Artificial Sequence: Synthetic oligonucleotide
gcuuugggcgauguaugcg

SEQ ID NO: 1370623 - RNA, 19 nt, Artificial Sequence
  Description of Artificial Sequence: Synthetic oligonucleotide
caugcaucuugucugcugu

SEQ ID NO: 1370624 - RNA, 19 nt, Artificial Sequence
  Description of Artificial Sequence: Synthetic oligonucleotide
ucagggacuguggcccucc

SEQ ID NO: 1370625 - RNA, 19 nt, Artificial Sequence
  Description of Artificial Sequence: Synthetic oligonucleotide
gaccacacugcuggugccc

SEQ ID NO: 1370626 - RNA, 19 nt, Artificial Sequence
  Description of Artificial Sequence: Synthetic oligonucleotide
gugcugucacgucgggucc

SEQ ID NO: 1370627 - RNA, 19 nt, Artificial Sequence
  Description of Artificial Sequence: Synthetic oligonucleotide
cauaauggauguccugugu

SEQ ID NO: 1370628 - RNA, 19 nt, Artificial Sequence
  Description of Artificial Sequence: Synthetic oligonucleotide
ucacgucgggucccugaga

SEQ ID NO: 1370629 - RNA, 19 nt, Artificial Sequence
  Description of Artificial Sequence: Synthetic oligonucleotide
cguugugcgggcuuugggc

SEQ ID NO: 1370630 - RNA, 19 nt, Artificial Sequence
  Description of Artificial Sequence: Synthetic oligonucleotide
cuuggacgcuugccaaaac

SEQ ID NO: 1370631 - RNA, 19 nt, Artificial Sequence
  Description of Artificial Sequence: Synthetic oligonucleotide
ggcaacuuugaaggccugg

SEQ ID NO: 1370632 - RNA, 19 nt, Artificial Sequence
  Description of Artificial Sequence: Synthetic oligonucleotide
cuuagguccuagcacuaua

SEQ ID NO: 1370633 - RNA, 19 nt, Artificial Sequence
  Description of Artificial Sequence: Synthetic oligonucleotide
cucguugugcgggcuuugg

SEQ ID NO: 1370634 - RNA, 19 nt, Artificial Sequence
  Description of Artificial Sequence: Synthetic oligonucleotide
uuucaaugacggggugcug

SEQ ID NO: 1370635 - RNA, 19 nt, Artificial Sequence
  Description of Artificial Sequence: Synthetic oligonucleotide
aaggcaccagaugguuugu

SEQ ID NO: 1370636 - RNA, 19 nt, Artificial Sequence
  Description of Artificial Sequence: Synthetic oligonucleotide
acuaaacugccuggccacu

SEQ ID NO: 1370637 - RNA, 19 nt, Artificial Sequence
  Description of Artificial Sequence: Synthetic oligonucleotide
gucaguccuaggcccucag

SEQ ID NO: 1370638 - RNA, 19 nt, Artificial Sequence
  Description of Artificial Sequence: Synthetic oligonucleotide
cgucgggucccugagaugg

SEQ ID NO: 1370639 - RNA, 19 nt, Artificial Sequence
  Description of Artificial Sequence: Synthetic oligonucleotide
ugauuccccggggcgacac

SEQ ID NO: 1370640 - RNA, 19 nt, Artificial Sequence
  Description of Artificial Sequence: Synthetic oligonucleotide
aggauuccauuuaacccau

SEQ ID NO: 1370641 - RNA, 19 nt, Artificial Sequence
  Description of Artificial Sequence: Synthetic oligonucleotide
gacauguguugccucaguu

SEQ ID NO: 1370642 - RNA, 19 nt, Artificial Sequence
  Description of Artificial Sequence: Synthetic oligonucleotide
cauccccgacauguguugc

SEQ ID NO: 1370643 - RNA, 19 nt, Artificial Sequence
  Description of Artificial Sequence: Synthetic oligonucleotide
cagcgcuguguggaaaggc

SEQ ID NO: 1370644 - RNA, 19 nt, Artificial Sequence
  Description of Artificial Sequence: Synthetic oligonucleotide
gauuccccggggcgacacc

SEQ ID NO: 1370645 - RNA, 19 nt, Artificial Sequence
  Description of Artificial Sequence: Synthetic oligonucleotide
uggcugcucugcuguaggu

SEQ ID NO: 1370646 - RNA, 19 nt, Artificial Sequence
  Description of Artificial Sequence: Synthetic oligonucleotide
acuuagguccuagcacuau

SEQ ID NO: 1370647 - RNA, 19 nt, Artificial Sequence
  Description of Artificial Sequence: Synthetic oligonucleotide
ggagacgugggcugugaga

SEQ ID NO: 1370648 - RNA, 19 nt, Artificial Sequence
  Description of Artificial Sequence: Synthetic oligonucleotide
gggcgauaagcacugcgca

SEQ ID NO: 1370649 - RNA, 19 nt, Artificial Sequence
  Description of Artificial Sequence: Synthetic oligonucleotide
agccuugaaaaugcuucau

SEQ ID NO: 1370650 - RNA, 19 nt, Artificial Sequence
  Description of Artificial Sequence: Synthetic oligonucleotide
uguccccuccagugcacaa

SEQ ID NO: 1370651 - RNA, 19 nt, Artificial Sequence
  Description of Artificial Sequence: Synthetic oligonucleotide
cuaggcccucagaagcuga

SEQ ID NO: 1370652 - RNA, 19 nt, Artificial Sequence
  Description of Artificial Sequence: Synthetic oligonucleotide
ccacuaaacugccuggcca

SEQ ID NO: 1370653 - RNA, 19 nt, Artificial Sequence
  Description of Artificial Sequence: Synthetic oligonucleotide
ugacugugccagccuugaa

SEQ ID NO: 1370654 - RNA, 19 nt, Artificial Sequence
  Description of Artificial Sequence: Synthetic oligonucleotide
cuucuggaggauuccauuu

SEQ ID NO: 1370655 - RNA, 19 nt, Artificial Sequence
  Description of Artificial Sequence: Synthetic oligonucleotide
ucgggucccugagauggcu

SEQ ID NO: 1370656 - RNA, 19 nt, Artificial Sequence
  Description of Artificial Sequence: Synthetic oligonucleotide
ggacgcuugccaaaacuca

SEQ ID NO: 1370657 - RNA, 19 nt, Artificial Sequence
  Description of Artificial Sequence: Synthetic oligonucleotide
ugaggccgcagugucucau

SEQ ID NO: 1370658 - RNA, 19 nt, Artificial Sequence
  Description of Artificial Sequence: Synthetic oligonucleotide
cgcuugccaaaacucaaag

SEQ ID NO: 1370659 - RNA, 19 nt, Artificial Sequence
  Description of Artificial Sequence: Synthetic oligonucleotide
uugaggccgcagugucuca

SEQ ID NO: 1370660 - RNA, 19 nt, Artificial Sequence
  Description of Artificial Sequence: Synthetic oligonucleotide
ggaaggcauggcauuccag

SEQ ID NO: 1370661 - RNA, 19 nt, Artificial Sequence
  Description of Artificial Sequence: Synthetic oligonucleotide
gcugugagaaguuggcggu

SEQ ID NO: 1370662 - RNA, 19 nt, Artificial Sequence
  Description of Artificial Sequence: Synthetic oligonucleotide
cacugcgcauaauggaugu

SEQ ID NO: 1370663 - RNA, 19 nt, Artificial Sequence
  Description of Artificial Sequence: Synthetic oligonucleotide
gggcuuugggcgauguaug

SEQ ID NO: 1370664 - RNA, 19 nt, Artificial Sequence
  Description of Artificial Sequence: Synthetic oligonucleotide
gacggggugcugucacguc

SEQ ID NO: 1370665 - RNA, 19 nt, Artificial Sequence
  Description of Artificial Sequence: Synthetic oligonucleotide
agaggucaucucgaucgau

SEQ ID NO: 1370666 - RNA, 19 nt, Artificial Sequence
  Description of Artificial Sequence: Synthetic oligonucleotide
gcacugcgcauaauggaug

SEQ ID NO: 1370667 - RNA, 19 nt, Artificial Sequence
  Description of Artificial Sequence: Synthetic oligonucleotide
gccaaaacucaaaggcaac

SEQ ID NO: 1370668 - RNA, 19 nt, Artificial Sequence
  Description of Artificial Sequence: Synthetic oligonucleotide
gcgcauaauggauguccug

SEQ ID NO: 1370669 - RNA, 19 nt, Artificial Sequence
  Description of Artificial Sequence: Synthetic oligonucleotide
ccacuuuccgcuuggugca

SEQ ID NO: 1370670 - RNA, 19 nt, Artificial Sequence
  Description of Artificial Sequence: Synthetic oligonucleotide
gccacugccgucaggcuug

SEQ ID NO: 1370671 - RNA, 19 nt, Artificial Sequence
  Description of Artificial Sequence: Synthetic oligonucleotide
acgcuugccaaaacucaaa

SEQ ID NO: 1370672 - RNA, 19 nt, Artificial Sequence
  Description of Artificial Sequence: Synthetic oligonucleotide
ccauccccgacauguguug

SEQ ID NO: 1370673 - RNA, 19 nt, Artificial Sequence
  Description of Artificial Sequence: Synthetic oligonucleotide
ugugcgggcuuugggcgau

SEQ ID NO: 1370674 - RNA, 19 nt, Artificial Sequence
  Description of Artificial Sequence: Synthetic oligonucleotide
agccuagugcuaggcuuug

SEQ ID NO: 1370675 - RNA, 19 nt, Artificial Sequence
  Description of Artificial Sequence: Synthetic oligonucleotide
ggguucguccgugacugug

SEQ ID NO: 1370676 - RNA, 19 nt, Artificial Sequence
  Description of Artificial Sequence: Synthetic oligonucleotide
aucccgccacagccuagug

SEQ ID NO: 1370677 - RNA, 19 nt, Artificial Sequence
  Description of Artificial Sequence: Synthetic oligonucleotide
gugcuaggcuuugguauca

SEQ ID NO: 1370678 - RNA, 19 nt, Artificial Sequence
  Description of Artificial Sequence: Synthetic oligonucleotide
acuuuccgcuuggugcaga

SEQ ID NO: 1370679 - RNA, 19 nt, Artificial Sequence
  Description of Artificial Sequence: Synthetic oligonucleotide
cacuuagguccuagcacua

SEQ ID NO: 1370680 - RNA, 19 nt, Artificial Sequence
  Description of Artificial Sequence: Synthetic oligonucleotide
cacaaauggcugcucugcu

SEQ ID NO: 1370681 - RNA, 19 nt, Artificial Sequence
  Description of Artificial Sequence: Synthetic oligonucleotide
gcagagcuaugugucuuug

SEQ ID NO: 1370682 - RNA, 19 nt, Artificial Sequence
  Description of Artificial Sequence: Synthetic oligonucleotide
accguggacaagggagccu

SEQ ID NO: 1370683 - RNA, 19 nt, Artificial Sequence
  Description of Artificial Sequence: Synthetic oligonucleotide
guaucccgccacagccuag

SEQ ID NO: 1370684 - RNA, 19 nt, Artificial Sequence
  Description of Artificial Sequence: Synthetic oligonucleotide
gaaaggcaccagaugguuu

SEQ ID NO: 1370685 - RNA, 19 nt, Artificial Sequence
  Description of Artificial Sequence: Synthetic oligonucleotide
gcuggugcccaagacuuga

SEQ ID NO: 1370686 - RNA, 19 nt, Artificial Sequence
  Description of Artificial Sequence: Synthetic oligonucleotide
ugcuaggcuuugguaucau

SEQ ID NO: 1370687 - RNA, 19 nt, Artificial Sequence
  Description of Artificial Sequence: Synthetic oligonucleotide
cacuuuccgcuuggugcag

SEQ ID NO: 1370688 - RNA, 19 nt, Artificial Sequence
  Description of Artificial Sequence: Synthetic oligonucleotide
gggcgauguaugcgaacac

SEQ ID NO: 1370689 - RNA, 19 nt, Artificial Sequence
  Description of Artificial Sequence: Synthetic oligonucleotide
guguggaaaggcaccagau

SEQ ID NO: 1370690 - RNA, 19 nt, Artificial Sequence
  Description of Artificial Sequence: Synthetic oligonucleotide
gcgauaagcacugcgcaua

SEQ ID NO: 1370691 - RNA, 19 nt, Artificial Sequence
  Description of Artificial Sequence: Synthetic oligonucleotide
cacgucgggucccugagau

SEQ ID NO: 1370692 - RNA, 19 nt, Artificial Sequence
  Description of Artificial Sequence: Synthetic oligonucleotide
gggcauggaggcccacgcc

SEQ ID NO: 1370693 - RNA, 19 nt, Artificial Sequence
  Description of Artificial Sequence: Synthetic oligonucleotide
gggagccuuagacaccucu

SEQ ID NO: 1370694 - RNA, 19 nt, Artificial Sequence
  Description of Artificial Sequence: Synthetic oligonucleotide
cccgccacagccuagugcu

SEQ ID NO: 1370695 - RNA, 19 nt, Artificial Sequence
  Description of Artificial Sequence: Synthetic oligonucleotide
caaugacggggugcuguca

SEQ ID NO: 1370696 - RNA, 19 nt, Artificial Sequence
  Description of Artificial Sequence: Synthetic oligonucleotide
ggccaguuguguccugcca

SEQ ID NO: 1370697 - RNA, 19 nt, Artificial Sequence
  Description of Artificial Sequence: Synthetic oligonucleotide
cggggugcugucacgucgg

SEQ ID NO: 1370698 - RNA, 19 nt, Artificial Sequence
  Description of Artificial Sequence: Synthetic oligonucleotide
cccauggaaucaaaagacu

SEQ ID NO: 1370699 - RNA, 19 nt, Artificial Sequence
  Description of Artificial Sequence: Synthetic oligonucleotide
gccgucaggcuugucccag

SEQ ID NO: 1370700 - RNA, 19 nt, Artificial Sequence
  Description of Artificial Sequence: Synthetic oligonucleotide
cacagccuagugcuaggcu

SEQ ID NO: 1370701 - RNA, 19 nt, Artificial Sequence
  Description of Artificial Sequence: Synthetic oligonucleotide
cccgacauguguugccuca

SEQ ID NO: 1370702 - RNA, 19 nt, Artificial Sequence
  Description of Artificial Sequence: Synthetic oligonucleotide
ggcgauaagcacugcgcau

SEQ ID NO: 1370703 - RNA, 19 nt, Artificial Sequence
  Description of Artificial Sequence: Synthetic oligonucleotide
uuccccggggcgacaccuu

SEQ ID NO: 1370704 - RNA, 19 nt, Artificial Sequence
  Description of Artificial Sequence: Synthetic oligonucleotide
augauuccccggggcgaca

SEQ ID NO: 1370705 - RNA, 19 nt, Artificial Sequence
  Description of Artificial Sequence: Synthetic oligonucleotide
gccuagugcuaggcuuugg

SEQ ID NO: 1370706 - RNA, 19 nt, Artificial Sequence
  Description of Artificial Sequence: Synthetic oligonucleotide
ccuaggcccucagaagcug

SEQ ID NO: 1370707 - RNA, 19 nt, Artificial Sequence
  Description of Artificial Sequence: Synthetic oligonucleotide
cuuagcuaccaggccccaa

SEQ ID NO: 1370708 - RNA, 19 nt, Artificial Sequence
  Description of Artificial Sequence: Synthetic oligonucleotide
cccggggcgacaccuugag

SEQ ID NO: 1370709 - RNA, 19 nt, Artificial Sequence
  Description of Artificial Sequence: Synthetic oligonucleotide
cugugcaguaggagauccu

SEQ ID NO: 1370710 - RNA, 19 nt, Artificial Sequence
  Description of Artificial Sequence: Synthetic oligonucleotide
ggaaaggcaccagaugguu

SEQ ID NO: 1370711 - RNA, 19 nt, Artificial Sequence
  Description of Artificial Sequence: Synthetic oligonucleotide
ccgacauguguugccucag

SEQ ID NO: 1370712 - RNA, 19 nt, Artificial Sequence
  Description of Artificial Sequence: Synthetic oligonucleotide
cugugagaaguuggcggua

SEQ ID NO: 1370713 - RNA, 19 nt, Artificial Sequence
  Description of Artificial Sequence: Synthetic oligonucleotide
ggccgcagugucucaucca

SEQ ID NO: 1370714 - RNA, 19 nt, Artificial Sequence
  Description of Artificial Sequence: Synthetic oligonucleotide
ccuuaccuguaaaaugaau

SEQ ID NO: 1370715 - RNA, 19 nt, Artificial Sequence
  Description of Artificial Sequence: Synthetic oligonucleotide
ccaagacuugaggccgcag

SEQ ID NO: 1370716 - RNA, 19 nt, Artificial Sequence
  Description of Artificial Sequence: Synthetic oligonucleotide
ccacgccagcgcugugugg

SEQ ID NO: 1370717 - RNA, 19 nt, Artificial Sequence
  Description of Artificial Sequence: Synthetic oligonucleotide
cauguccauuaugggagau

SEQ ID NO: 1370718 - RNA, 19 nt, Artificial Sequence
  Description of Artificial Sequence: Synthetic oligonucleotide
caucucgaucgaugccacu

SEQ ID NO: 1370719 - RNA, 19 nt, Artificial Sequence
  Description of Artificial Sequence: Synthetic oligonucleotide
ggcuagugaggcugucagu

SEQ ID NO: 1370720 - RNA, 19 nt, Artificial Sequence
  Description of Artificial Sequence: Synthetic oligonucleotide
cgaucgaugccacugccgu

SEQ ID NO: 1370721 - RNA, 19 nt, Artificial Sequence
  Description of Artificial Sequence: Synthetic oligonucleotide
ccucucggagggccuuagc

SEQ ID NO: 1370722 - RNA, 19 nt, Artificial Sequence
  Description of Artificial Sequence: Synthetic oligonucleotide
gcccaagacuugaggccgc

SEQ ID NO: 1370723 - RNA, 19 nt, Artificial Sequence
  Description of Artificial Sequence: Synthetic oligonucleotide
ccuuggacgcuugccaaaa

SEQ ID NO: 1370724 - RNA, 19 nt, Artificial Sequence
  Description of Artificial Sequence: Synthetic oligonucleotide
ggacagcgagaugcuucug

SEQ ID NO: 1370725 - RNA, 19 nt, Artificial Sequence
  Description of Artificial Sequence: Synthetic oligonucleotide
ggaucccagcuucccugaa

SEQ ID NO: 1370726 - RNA, 19 nt, Artificial Sequence
  Description of Artificial Sequence: Synthetic oligonucleotide
cgauaagcacugcgcauaa

SEQ ID NO: 1370727 - RNA, 19 nt, Artificial Sequence
  Description of Artificial Sequence: Synthetic oligonucleotide
cugucacgucgggucccug

SEQ ID NO: 1370728 - RNA, 19 nt, Artificial Sequence
  Description of Artificial Sequence: Synthetic oligonucleotide
ccagucggugggcgauaag

SEQ ID NO: 1370729 - RNA, 19 nt, Artificial Sequence
  Description of Artificial Sequence: Synthetic oligonucleotide
gccucucggagggccuuag

SEQ ID NO: 1370730 - RNA, 19 nt, Artificial Sequence
  Description of Artificial Sequence: Synthetic oligonucleotide
gucccagucggugggcgau

SEQ ID NO: 1370731 - RNA, 19 nt, Artificial Sequence
  Description of Artificial Sequence: Synthetic oligonucleotide
gucuucccggaagcagugu

SEQ ID NO: 1370732 - RNA, 19 nt, Artificial Sequence
  Description of Artificial Sequence: Synthetic oligonucleotide
cguccgugacugugccagc

SEQ ID NO: 1370733 - RNA, 19 nt, Artificial Sequence
  Description of Artificial Sequence: Synthetic oligonucleotide
gggcaggaggcaagcucuc

SEQ ID NO: 1370734 - RNA, 19 nt, Artificial Sequence
  Description of Artificial Sequence: Synthetic oligonucleotide
cugguacacuuagguccua

SEQ ID NO: 1370735 - RNA, 19 nt, Artificial Sequence
  Description of Artificial Sequence: Synthetic oligonucleotide
ccggaagcaguguggcagu

SEQ ID NO: 1370736 - RNA, 19 nt, Artificial Sequence
  Description of Artificial Sequence: Synthetic oligonucleotide
ggagggcaggaggcaagcu

SEQ ID NO: 1370737 - RNA, 19 nt, Artificial Sequence
  Description of Artificial Sequence: Synthetic oligonucleotide
cgauguaugcgaacaccuu

SEQ ID NO: 1370738 - RNA, 19 nt, Artificial Sequence
  Description of Artificial Sequence: Synthetic oligonucleotide
cccaagacuugaggccgca

SEQ ID NO: 1370739 - RNA, 19 nt, Artificial Sequence
  Description of Artificial Sequence: Synthetic oligonucleotide
gggugcugucacgucgggu

SEQ ID NO: 1370740 - RNA, 19 nt, Artificial Sequence
  Description of Artificial Sequence: Synthetic oligonucleotide
ccuuagcuaccaggcccca

SEQ ID NO: 1370741 - RNA, 19 nt, Artificial Sequence
  Description of Artificial Sequence: Synthetic oligonucleotide
gcugucacgucgggucccu

SEQ ID NO: 1370742 - RNA, 19 nt, Artificial Sequence
  Description of Artificial Sequence: Synthetic oligonucleotide
ccccggggcgacaccuuga

SEQ ID NO: 1370743 - RNA, 19 nt, Artificial Sequence
  Description of Artificial Sequence: Synthetic oligonucleotide
gcgggcuuugggcgaugua

SEQ ID NO: 1370744 - RNA, 19 nt, Artificial Sequence
  Description of Artificial Sequence: Synthetic oligonucleotide
cacugccgucaggcuuguc

SEQ ID NO: 1370745 - RNA, 19 nt, Artificial Sequence
  Description of Artificial Sequence: Synthetic oligonucleotide
ccguggacaagggagccuu

SEQ ID NO: 1370746 - RNA, 19 nt, Artificial Sequence
  Description of Artificial Sequence: Synthetic oligonucleotide
ggcucucguugugcgggcu

SEQ ID NO: 1370747 - RNA, 19 nt, Artificial Sequence
  Description of Artificial Sequence: Synthetic oligonucleotide
cgacauguguugccucagu

SEQ ID NO: 1370748 - RNA, 19 nt, Artificial Sequence
  Description of Artificial Sequence: Synthetic oligonucleotide
cugccucucggagggccuu

SEQ ID NO: 1370749 - RNA, 19 nt, Artificial Sequence
  Description of Artificial Sequence: Synthetic oligonucleotide
ccgucaggcuugucccagu

SEQ ID NO: 1370750 - RNA, 19 nt, Artificial Sequence
  Description of Artificial Sequence: Synthetic oligonucleotide
ccgccacagccuagugcua

SEQ ID NO: 1370751 - RNA, 19 nt, Artificial Sequence
  Description of Artificial Sequence: Synthetic oligonucleotide
cgccagcgcuguguggaaa

SEQ ID NO: 1370752 - RNA, 19 nt, Artificial Sequence
  Description of Artificial Sequence: Synthetic oligonucleotide
aaugauagcgccuaggucc

SEQ ID NO: 1370753 - RNA, 19 nt, Artificial Sequence
  Description of Artificial Sequence: Synthetic oligonucleotide
aauuucaaucuguacaacc

SEQ ID NO: 1370754 - RNA, 19 nt, Artificial Sequence
  Description of Artificial Sequence: Synthetic oligonucleotide
uuaucaacauuuuauaugc

SEQ ID NO: 1370755 - RNA, 19 nt, Artificial Sequence
  Description of Artificial Sequence: Synthetic oligonucleotide
acuacauacacaaauauac

SEQ ID NO: 1370756 - RNA, 19 nt, Artificial Sequence
  Description of Artificial Sequence: Synthetic oligonucleotide
uuuacuucgagauauucag

SEQ ID NO: 1370757 - RNA, 19 nt, Artificial Sequence
  Description of Artificial Sequence: Synthetic oligonucleotide
ucuauuaguucuuugaucu

SEQ ID NO: 1370758 - RNA, 19 nt, Artificial Sequence
  Description of Artificial Sequence: Synthetic oligonucleotide
aacuccuagauccaucgcc

SEQ ID NO: 1370759 - RNA, 19 nt, Artificial Sequence
  Description of Artificial Sequence: Synthetic oligonucleotide
uuaauacuggggaaaagcg

SEQ ID NO: 1370760 - RNA, 19 nt, Artificial Sequence
  Description of Artificial Sequence: Synthetic oligonucleotide
acuacugcguuuuauaaac

SEQ ID NO: 1370761 - RNA, 19 nt, Artificial Sequence
  Description of Artificial Sequence: Synthetic oligonucleotide
aauucacucaacuaguaca

SEQ ID NO: 1370762 - RNA, 19 nt, Artificial Sequence
  Description of Artificial Sequence: Synthetic oligonucleotide
aguucguuacacuacauac

SEQ ID NO: 1370763 - RNA, 19 nt, Artificial Sequence
  Description of Artificial Sequence: Synthetic oligonucleotide
ucagauuacaccaagugac

SEQ ID NO: 1370764 - RNA, 19 nt, Artificial Sequence
  Description of Artificial Sequence: Synthetic oligonucleotide
ugggauuucaugcaaaugc

SEQ ID NO: 1370765 - RNA, 19 nt, Artificial Sequence
  Description of Artificial Sequence: Synthetic oligonucleotide
uguuuugucacuaacaguu

SEQ ID NO: 1370766 - RNA, 19 nt, Artificial Sequence
  Description of Artificial Sequence: Synthetic oligonucleotide
aaccgagaagaccaaaucg

SEQ ID NO: 1370767 - RNA, 19 nt, Artificial Sequence
  Description of Artificial Sequence: Synthetic oligonucleotide
cuagauuucagauuacacc

SEQ ID NO: 1370768 - RNA, 19 nt, Artificial Sequence
  Description of Artificial Sequence: Synthetic oligonucleotide
gacgacaagaaagaaaucg

SEQ ID NO: 1370769 - RNA, 19 nt, Artificial Sequence
  Description of Artificial Sequence: Synthetic oligonucleotide
acaaccuucauaaugauag

SEQ ID NO: 1370770 - RNA, 19 nt, Artificial Sequence
  Description of Artificial Sequence: Synthetic oligonucleotide
aagugaagggaagagagcg

SEQ ID NO: 1370771 - RNA, 19 nt, Artificial Sequence
  Description of Artificial Sequence: Synthetic oligonucleotide
gacaguaaguacuacugcg

SEQ ID NO: 1370772 - RNA, 19 nt, Artificial Sequence
  Description of Artificial Sequence: Synthetic oligonucleotide
augcgguugauccugagcc

SEQ ID NO: 1370773 - RNA, 19 nt, Artificial Sequence
  Description of Artificial Sequence: Synthetic oligonucleotide
aaaacaaccuucauaauga

SEQ ID NO: 1370774 - RNA, 19 nt, Artificial Sequence
  Description of Artificial Sequence: Synthetic oligonucleotide
uuucagauuacaccaagug

SEQ ID NO: 1370775 - RNA, 19 nt, Artificial Sequence
  Description of Artificial Sequence: Synthetic oligonucleotide
auugaaaggugacaaggac

SEQ ID NO: 1370776 - RNA, 19 nt, Artificial Sequence
  Description of Artificial Sequence: Synthetic oligonucleotide
ucaauuaaaccauuccuca

SEQ ID NO: 1370777 - RNA, 19 nt, Artificial Sequence
  Description of Artificial Sequence: Synthetic oligonucleotide
acuguuuugucacuaacag

SEQ ID NO: 1370778 - RNA, 19 nt, Artificial Sequence
  Description of Artificial Sequence: Synthetic oligonucleotide
aauacuggggaaaagcgag

SEQ ID NO: 1370779 - RNA, 19 nt, Artificial Sequence
  Description of Artificial Sequence: Synthetic oligonucleotide
uguacaaccuaaacaguag

SEQ ID NO: 1370780 - RNA, 19 nt, Artificial Sequence
  Description of Artificial Sequence: Synthetic oligonucleotide
uaugcagaaaccccuacug

SEQ ID NO: 1370781 - RNA, 19 nt, Artificial Sequence
  Description of Artificial Sequence: Synthetic oligonucleotide
caaaacaaccuucauaaug

SEQ ID NO: 1370782 - RNA, 19 nt, Artificial Sequence
  Description of Artificial Sequence: Synthetic oligonucleotide
ucgauuuuguugucgauag

SEQ ID NO: 1370783 - RNA, 19 nt, Artificial Sequence
  Description of Artificial Sequence: Synthetic oligonucleotide
uaaccuuuaauucacucaa

SEQ ID NO: 1370784 - RNA, 19 nt, Artificial Sequence
  Description of Artificial Sequence: Synthetic oligonucleotide
uucguuacacuacauacac

SEQ ID NO: 1370785 - RNA, 19 nt, Artificial Sequence
  Description of Artificial Sequence: Synthetic oligonucleotide
aaaugagugcuuaauacug

SEQ ID NO: 1370786 - RNA, 19 nt, Artificial Sequence
  Description of Artificial Sequence: Synthetic oligonucleotide
agcguuuucaguucccagc

SEQ ID NO: 1370787 - RNA, 19 nt, Artificial Sequence
  Description of Artificial Sequence: Synthetic oligonucleotide
uaaacuuuggugacaguug

SEQ ID NO: 1370788 - RNA, 19 nt, Artificial Sequence
  Description of Artificial Sequence: Synthetic oligonucleotide
uucagauuacaccaaguga

SEQ ID NO: 1370789 - RNA, 19 nt, Artificial Sequence
  Description of Artificial Sequence: Synthetic oligonucleotide
ugauuaaccuuuaauucac

SEQ ID NO: 1370790 - RNA, 19 nt, Artificial Sequence
  Description of Artificial Sequence: Synthetic oligonucleotide
uguccuuaguaacugacca

SEQ ID NO: 1370791 - RNA, 19 nt, Artificial Sequence
  Description of Artificial Sequence: Synthetic oligonucleotide
uuuuauaaacuuuggugac

SEQ ID NO: 1370792 - RNA, 19 nt, Artificial Sequence
  Description of Artificial Sequence: Synthetic oligonucleotide
cuuaauacuggggaaaagc

SEQ ID NO: 1370793 - RNA, 19 nt, Artificial Sequence
  Description of Artificial Sequence: Synthetic oligonucleotide
aaccuucauaaugauagcg

SEQ ID NO: 1370794 - RNA, 19 nt, Artificial Sequence
  Description of Artificial Sequence: Synthetic oligonucleotide
uguaacaucuaaauuucaa

SEQ ID NO: 1370795 - RNA, 19 nt, Artificial Sequence
  Description of Artificial Sequence: Synthetic oligonucleotide
uuuauaugcuuuauugaaa

SEQ ID NO: 1370796 - RNA, 19 nt, Artificial Sequence
  Description of Artificial Sequence: Synthetic oligonucleotide
aaugucucaguugguaaac

SEQ ID NO: 1370797 - RNA, 19 nt, Artificial Sequence
  Description of Artificial Sequence: Synthetic oligonucleotide
ucuauagaggacaacccac

SEQ ID NO: 1370798 - RNA, 19 nt, Artificial Sequence
  Description of Artificial Sequence: Synthetic oligonucleotide
agagcuauugucaagucuc

SEQ ID NO: 1370799 - RNA, 19 nt, Artificial Sequence
  Description of Artificial Sequence: Synthetic oligonucleotide
caggcuaugcgguugaucc

SEQ ID NO: 1370800 - RNA, 19 nt, Artificial Sequence
  Description of Artificial Sequence: Synthetic oligonucleotide
ucgauguuucagaaaagag

SEQ ID NO: 1370801 - RNA, 19 nt, Artificial Sequence
  Description of Artificial Sequence: Synthetic oligonucleotide
uuuguugucgauagcuacc

SEQ ID NO: 1370802 - RNA, 19 nt, Artificial Sequence
  Description of Artificial Sequence: Synthetic oligonucleotide
uauaugcuuuauugaaagg

SEQ ID NO: 1370803 - RNA, 19 nt, Artificial Sequence
  Description of Artificial Sequence: Synthetic oligonucleotide
uuugucacuaacaguuuug

SEQ ID NO: 1370804 - RNA, 19 nt, Artificial Sequence
  Description of Artificial Sequence: Synthetic oligonucleotide
auugucaagucucacagaa

SEQ ID NO: 1370805 - RNA, 19 nt, Artificial Sequence
  Description of Artificial Sequence: Synthetic oligonucleotide
aaaaugucucaguugguaa

SEQ ID NO: 1370806 - RNA, 19 nt, Artificial Sequence
  Description of Artificial Sequence: Synthetic oligonucleotide
auaaugauagcgccuaggu

SEQ ID NO: 1370807 - RNA, 19 nt, Artificial Sequence
  Description of Artificial Sequence: Synthetic oligonucleotide
auaugcuuuauugaaaggu

SEQ ID NO: 1370808 - RNA, 19 nt, Artificial Sequence
  Description of Artificial Sequence: Synthetic oligonucleotide
aauagggcuuuacuucgag

SEQ ID NO: 1370809 - RNA, 19 nt, Artificial Sequence
  Description of Artificial Sequence: Synthetic oligonucleotide
caccauugggauuucaugc

SEQ ID NO: 1370810 - RNA, 19 nt, Artificial Sequence
  Description of Artificial Sequence: Synthetic oligonucleotide
cucucuauagaggacaacc

SEQ ID NO: 1370811 - RNA, 19 nt, Artificial Sequence
  Description of Artificial Sequence: Synthetic oligonucleotide
aggugauaugcagaaaccc

SEQ ID NO: 1370812 - RNA, 19 nt, Artificial Sequence
  Description of Artificial Sequence: Synthetic oligonucleotide
auuacaccaagugacuaac

SEQ ID NO: 1370813 - RNA, 19 nt, Artificial Sequence
  Description of Artificial Sequence: Synthetic oligonucleotide
aaacuccuagauccaucgc

SEQ ID NO: 1370814 - RNA, 19 nt, Artificial Sequence
  Description of Artificial Sequence: Synthetic oligonucleotide
accuucauaaugauagcgc

SEQ ID NO: 1370815 - RNA, 19 nt, Artificial Sequence
  Description of Artificial Sequence: Synthetic oligonucleotide
uaauucacucaacuaguac

SEQ ID NO: 1370816 - RNA, 19 nt, Artificial Sequence
  Description of Artificial Sequence: Synthetic oligonucleotide
ugagugcuuaauacugggg

SEQ ID NO: 1370817 - RNA, 19 nt, Artificial Sequence
  Description of Artificial Sequence: Synthetic oligonucleotide
augagugcuuaauacuggg

SEQ ID NO: 1370818 - RNA, 19 nt, Artificial Sequence
  Description of Artificial Sequence: Synthetic oligonucleotide
aaaugucucaguugguaaa

SEQ ID NO: 1370819 - RNA, 19 nt, Artificial Sequence
  Description of Artificial Sequence: Synthetic oligonucleotide
aaaagagggacaguaagua

SEQ ID NO: 1370820 - RNA, 19 nt, Artificial Sequence
  Description of Artificial Sequence: Synthetic oligonucleotide
aagcaaaacaaccuucaua

SEQ ID NO: 1370821 - RNA, 19 nt, Artificial Sequence
  Description of Artificial Sequence: Synthetic oligonucleotide
aaaagcgagaauggcaugu

SEQ ID NO: 1370822 - RNA, 19 nt, Artificial Sequence
  Description of Artificial Sequence: Synthetic oligonucleotide
acagaacuaccauacaggu

SEQ ID NO: 1370823 - RNA, 19 nt, Artificial Sequence
  Description of Artificial Sequence: Synthetic oligonucleotide
uacaaguucguuacacuac

SEQ ID NO: 1370824 - RNA, 19 nt, Artificial Sequence
  Description of Artificial Sequence: Synthetic oligonucleotide
aucgccacuggucuacacc

SEQ ID NO: 1370825 - RNA, 19 nt, Artificial Sequence
  Description of Artificial Sequence: Synthetic oligonucleotide
uucgagauauucagcagcu

SEQ ID NO: 1370826 - RNA, 19 nt, Artificial Sequence
  Description of Artificial Sequence: Synthetic oligonucleotide
aacagauuguucuccugcu

SEQ ID NO: 1370827 - RNA, 19 nt, Artificial Sequence
  Description of Artificial Sequence: Synthetic oligonucleotide
accuuuaauucacucaacu

SEQ ID NO: 1370828 - RNA, 19 nt, Artificial Sequence
  Description of Artificial Sequence: Synthetic oligonucleotide
acggcaaugaaauggguga

SEQ ID NO: 1370829 - RNA, 19 nt, Artificial Sequence
  Description of Artificial Sequence: Synthetic oligonucleotide
uauuaguucuuugaucugu

SEQ ID NO: 1370830 - RNA, 19 nt, Artificial Sequence
  Description of Artificial Sequence: Synthetic oligonucleotide
acaguugucgguuuguaaa

SEQ ID NO: 1370831 - RNA, 19 nt, Artificial Sequence
  Description of Artificial Sequence: Synthetic oligonucleotide
gugaauagggcuuuacuuc

SEQ ID NO: 1370832 - RNA, 19 nt, Artificial Sequence
  Description of Artificial Sequence: Synthetic oligonucleotide
agaucccaccauccgagcc

SEQ ID NO: 1370833 - RNA, 19 nt, Artificial Sequence
  Description of Artificial Sequence: Synthetic oligonucleotide
cugcguuuuauaaacuuug

SEQ ID NO: 1370834 - RNA, 19 nt, Artificial Sequence
  Description of Artificial Sequence: Synthetic oligonucleotide
gagugcuuaauacugggga

SEQ ID NO: 1370835 - RNA, 19 nt, Artificial Sequence
  Description of Artificial Sequence: Synthetic oligonucleotide
ucuuaacauuucuucaggu

SEQ ID NO: 1370836 - RNA, 19 nt, Artificial Sequence
  Description of Artificial Sequence: Synthetic oligonucleotide
accgagaagaccaaaucgg

SEQ ID NO: 1370837 - RNA, 19 nt, Artificial Sequence
  Description of Artificial Sequence: Synthetic oligonucleotide
gucacuaacaguuuugugu

SEQ ID NO: 1370838 - RNA, 19 nt, Artificial Sequence
  Description of Artificial Sequence: Synthetic oligonucleotide
uccucagcaucaauuaaac

SEQ ID NO: 1370839 - RNA, 19 nt, Artificial Sequence
  Description of Artificial Sequence: Synthetic oligonucleotide
gauccugagcccugggacg

SEQ ID NO: 1370840 - RNA, 19 nt, Artificial Sequence
  Description of Artificial Sequence: Synthetic oligonucleotide
uuuucagacggccaaugua

SEQ ID NO: 1370841 - RNA, 19 nt, Artificial Sequence
  Description of Artificial Sequence: Synthetic oligonucleotide
acaaguucguuacacuaca

SEQ ID NO: 1370842 - RNA, 19 nt, Artificial Sequence
  Description of Artificial Sequence: Synthetic oligonucleotide
aguugguaaacuccuagau

SEQ ID NO: 1370843 - RNA, 19 nt, Artificial Sequence
  Description of Artificial Sequence: Synthetic oligonucleotide
aauauucaaccagcucaac

SEQ ID NO: 1370844 - RNA, 19 nt, Artificial Sequence
  Description of Artificial Sequence: Synthetic oligonucleotide
uguacaaguucguuacacu

SEQ ID NO: 1370845 - RNA, 19 nt, Artificial Sequence
  Description of Artificial Sequence: Synthetic oligonucleotide
cguuuuauaaacuuuggug

SEQ ID NO: 1370846 - RNA, 19 nt, Artificial Sequence
  Description of Artificial Sequence: Synthetic oligonucleotide
uaacaguuuugugucuucg

SEQ ID NO: 1370847 - RNA, 19 nt, Artificial Sequence
  Description of Artificial Sequence: Synthetic oligonucleotide
ucgauagcuaccacacuug

SEQ ID NO: 1370848 - RNA, 19 nt, Artificial Sequence
  Description of Artificial Sequence: Synthetic oligonucleotide
aaauauucaaccagcucaa

SEQ ID NO: 1370849 - RNA, 19 nt, Artificial Sequence
  Description of Artificial Sequence: Synthetic oligonucleotide
uuacgguccucuauuguac

SEQ ID NO: 1370850 - RNA, 19 nt, Artificial Sequence
  Description of Artificial Sequence: Synthetic oligonucleotide
acagaugcacagaacuacc

SEQ ID NO: 1370851 - RNA, 19 nt, Artificial Sequence
  Description of Artificial Sequence: Synthetic oligonucleotide
uuugugucuucgauguuuc

SEQ ID NO: 1370852 - RNA, 19 nt, Artificial Sequence
  Description of Artificial Sequence: Synthetic oligonucleotide
uggucuacaccauugggau

SEQ ID NO: 1370853 - RNA, 19 nt, Artificial Sequence
  Description of Artificial Sequence: Synthetic oligonucleotide
acaccauugggauuucaug

SEQ ID NO: 1370854 - RNA, 19 nt, Artificial Sequence
  Description of Artificial Sequence: Synthetic oligonucleotide
cauaaugauagcgccuagg

SEQ ID NO: 1370855 - RNA, 19 nt, Artificial Sequence
  Description of Artificial Sequence: Synthetic oligonucleotide
acuaccauacaggugauau

SEQ ID NO: 1370856 - RNA, 19 nt, Artificial Sequence
  Description of Artificial Sequence: Synthetic oligonucleotide
aguacuacugcguuuuaua

SEQ ID NO: 1370857 - RNA, 19 nt, Artificial Sequence
  Description of Artificial Sequence: Synthetic oligonucleotide
uuagguaggucucucuaua

SEQ ID NO: 1370858 - RNA, 19 nt, Artificial Sequence
  Description of Artificial Sequence: Synthetic oligonucleotide
gccuguucaguucagacag

SEQ ID NO: 1370859 - RNA, 19 nt, Artificial Sequence
  Description of Artificial Sequence: Synthetic oligonucleotide
ucacucaacuaguacauuu

SEQ ID NO: 1370860 - RNA, 19 nt, Artificial Sequence
  Description of Artificial Sequence: Synthetic oligonucleotide
uaaugauagcgccuagguc

SEQ ID NO: 1370861 - RNA, 19 nt, Artificial Sequence
  Description of Artificial Sequence: Synthetic oligonucleotide
augcucauucugauuaacc

SEQ ID NO: 1370862 - RNA, 19 nt, Artificial Sequence
  Description of Artificial Sequence: Synthetic oligonucleotide
uucaaccagcucaaccgag

SEQ ID NO: 1370863 - RNA, 19 nt, Artificial Sequence
  Description of Artificial Sequence: Synthetic oligonucleotide
cuuuggugacaguugucgg

SEQ ID NO: 1370864 - RNA, 19 nt, Artificial Sequence
  Description of Artificial Sequence: Synthetic oligonucleotide
auacaggugauaugcagaa

SEQ ID NO: 1370865 - RNA, 19 nt, Artificial Sequence
  Description of Artificial Sequence: Synthetic oligonucleotide
ugagucucacgucucuuga

SEQ ID NO: 1370866 - RNA, 19 nt, Artificial Sequence
  Description of Artificial Sequence: Synthetic oligonucleotide
guugguaaacuccuagauc

SEQ ID NO: 1370867 - RNA, 19 nt, Artificial Sequence
  Description of Artificial Sequence: Synthetic oligonucleotide
gaaaugggugacuguggag

SEQ ID NO: 1370868 - RNA, 19 nt, Artificial Sequence
  Description of Artificial Sequence: Synthetic oligonucleotide
guacauuuucuucaagcca

SEQ ID NO: 1370869 - RNA, 19 nt, Artificial Sequence
  Description of Artificial Sequence: Synthetic oligonucleotide
uuuagguaggucucucuau

SEQ ID NO: 1370870 - RNA, 19 nt, Artificial Sequence
  Description of Artificial Sequence: Synthetic oligonucleotide
uccuugaagugaagggaag

SEQ ID NO: 1370871 - RNA, 19 nt, Artificial Sequence
  Description of Artificial Sequence: Synthetic oligonucleotide
agauccauagcuugcucga

SEQ ID NO: 1370872 - RNA, 19 nt, Artificial Sequence
  Description of Artificial Sequence: Synthetic oligonucleotide
ucacgucucuugaggacgg

SEQ ID NO: 1370873 - RNA, 19 nt, Artificial Sequence
  Description of Artificial Sequence: Synthetic oligonucleotide
gauuacaccaagugacuaa

SEQ ID NO: 1370874 - RNA, 19 nt, Artificial Sequence
  Description of Artificial Sequence: Synthetic oligonucleotide
guugucgauagcuaccaca

SEQ ID NO: 1370875 - RNA, 19 nt, Artificial Sequence
  Description of Artificial Sequence: Synthetic oligonucleotide
uacaaccuaaacaguaguu

SEQ ID NO: 1370876 - RNA, 19 nt, Artificial Sequence
  Description of Artificial Sequence: Synthetic oligonucleotide
cucuaaguuccuugaagug

SEQ ID NO: 1370877 - RNA, 19 nt, Artificial Sequence
  Description of Artificial Sequence: Synthetic oligonucleotide
aaccuuuaauucacucaac

SEQ ID NO: 1370878 - RNA, 19 nt, Artificial Sequence
  Description of Artificial Sequence: Synthetic oligonucleotide
agaccaaaucggugaauag

SEQ ID NO: 1370879 - RNA, 19 nt, Artificial Sequence
  Description of Artificial Sequence: Synthetic oligonucleotide
ucauaaugauagcgccuag

SEQ ID NO: 1370880 - RNA, 19 nt, Artificial Sequence
  Description of Artificial Sequence: Synthetic oligonucleotide
aguaguuacgguccucuau

SEQ ID NO: 1370881 - RNA, 19 nt, Artificial Sequence
  Description of Artificial Sequence: Synthetic oligonucleotide
gacggcaaugaaaugggug

SEQ ID NO: 1370882 - RNA, 19 nt, Artificial Sequence
  Description of Artificial Sequence: Synthetic oligonucleotide
uacuacugcguuuuauaaa

SEQ ID NO: 1370883 - RNA, 19 nt, Artificial Sequence
  Description of Artificial Sequence: Synthetic oligonucleotide
cucgcuagcacaucucuuc

SEQ ID NO: 1370884 - RNA, 19 nt, Artificial Sequence
  Description of Artificial Sequence: Synthetic oligonucleotide
ugucacuaacaguuuugug

SEQ ID NO: 1370885 - RNA, 19 nt, Artificial Sequence
  Description of Artificial Sequence: Synthetic oligonucleotide
ccuucauaaugauagcgcc

SEQ ID NO: 1370886 - RNA, 19 nt, Artificial Sequence
  Description of Artificial Sequence: Synthetic oligonucleotide
cucacgucucuugaggacg

SEQ ID NO: 1370887 - RNA, 19 nt, Artificial Sequence
  Description of Artificial Sequence: Synthetic oligonucleotide
aaaucggugaauagggcuu

SEQ ID NO: 1370888 - RNA, 19 nt, Artificial Sequence
  Description of Artificial Sequence: Synthetic oligonucleotide
aaagcgagaauggcaugug

SEQ ID NO: 1370889 - RNA, 19 nt, Artificial Sequence
  Description of Artificial Sequence: Synthetic oligonucleotide
acccacaccuuuucagacg

SEQ ID NO: 1370890 - RNA, 19 nt, Artificial Sequence
  Description of Artificial Sequence: Synthetic oligonucleotide
gaaaagcgagaauggcaug

SEQ ID NO: 1370891 - RNA, 19 nt, Artificial Sequence
  Description of Artificial Sequence: Synthetic oligonucleotide
augauagcgccuagguccc

SEQ ID NO: 1370892 - RNA, 19 nt, Artificial Sequence
  Description of Artificial Sequence: Synthetic oligonucleotide
uucaagccaaaagcaaaug

SEQ ID NO: 1370893 - RNA, 19 nt, Artificial Sequence
  Description of Artificial Sequence: Synthetic oligonucleotide
caucaauuaaaccauuccu

SEQ ID NO: 1370894 - RNA, 19 nt, Artificial Sequence
  Description of Artificial Sequence: Synthetic oligonucleotide
uacugcguuuuauaaacuu

SEQ ID NO: 1370895 - RNA, 19 nt, Artificial Sequence
  Description of Artificial Sequence: Synthetic oligonucleotide
ggugauaugcagaaacccc

SEQ ID NO: 1370896 - RNA, 19 nt, Artificial Sequence
  Description of Artificial Sequence: Synthetic oligonucleotide
cuagcacaucucuucggcc

SEQ ID NO: 1370897 - RNA, 19 nt, Artificial Sequence
  Description of Artificial Sequence: Synthetic oligonucleotide
acaaccuaaacaguaguua

SEQ ID NO: 1370898 - RNA, 19 nt, Artificial Sequence
  Description of Artificial Sequence: Synthetic oligonucleotide
cuggucuacaccauuggga

SEQ ID NO: 1370899 - RNA, 19 nt, Artificial Sequence
  Description of Artificial Sequence: Synthetic oligonucleotide
ucagacggccaauguaaca

SEQ ID NO: 1370900 - RNA, 19 nt, Artificial Sequence
  Description of Artificial Sequence: Synthetic oligonucleotide
cuauagaggacaacccaca

SEQ ID NO: 1370901 - RNA, 19 nt, Artificial Sequence
  Description of Artificial Sequence: Synthetic oligonucleotide
cuauuaguucuuugaucug

SEQ ID NO: 1370902 - RNA, 19 nt, Artificial Sequence
  Description of Artificial Sequence: Synthetic oligonucleotide
guaacaucuaaauuucaau

SEQ ID NO: 1370903 - RNA, 19 nt, Artificial Sequence
  Description of Artificial Sequence: Synthetic oligonucleotide
gagauauucagcagcuaga

SEQ ID NO: 1370904 - RNA, 19 nt, Artificial Sequence
  Description of Artificial Sequence: Synthetic oligonucleotide
cuucgauguuucagaaaag

SEQ ID NO: 1370905 - RNA, 19 nt, Artificial Sequence
  Description of Artificial Sequence: Synthetic oligonucleotide
uaguuacgguccucuauug

SEQ ID NO: 1370906 - RNA, 19 nt, Artificial Sequence
  Description of Artificial Sequence: Synthetic oligonucleotide
gucaagucucacagaagcg

SEQ ID NO: 1370907 - RNA, 19 nt, Artificial Sequence
  Description of Artificial Sequence: Synthetic oligonucleotide
uccauagcuugcucgauuu

SEQ ID NO: 1370908 - RNA, 19 nt, Artificial Sequence
  Description of Artificial Sequence: Synthetic oligonucleotide
aguaaguacuacugcguuu

SEQ ID NO: 1370909 - RNA, 19 nt, Artificial Sequence
  Description of Artificial Sequence: Synthetic oligonucleotide
acgacaagaaagaaaucga

SEQ ID NO: 1370910 - RNA, 19 nt, Artificial Sequence
  Description of Artificial Sequence: Synthetic oligonucleotide
agacggccaauguaacauc

SEQ ID NO: 1370911 - RNA, 19 nt, Artificial Sequence
  Description of Artificial Sequence: Synthetic oligonucleotide
ucuauuguacaaguucguu

SEQ ID NO: 1370912 - RNA, 19 nt, Artificial Sequence
  Description of Artificial Sequence: Synthetic oligonucleotide
gcagcuagauuucagauua

SEQ ID NO: 1370913 - RNA, 19 nt, Artificial Sequence
  Description of Artificial Sequence: Synthetic oligonucleotide
agcuaccacacuugcacca

SEQ ID NO: 1370914 - RNA, 19 nt, Artificial Sequence
  Description of Artificial Sequence: Synthetic oligonucleotide
uucagacggccaauguaac

SEQ ID NO: 1370915 - RNA, 19 nt, Artificial Sequence
  Description of Artificial Sequence: Synthetic oligonucleotide
uuacaccaagugacuaacu

SEQ ID NO: 1370916 - RNA, 19 nt, Artificial Sequence
  Description of Artificial Sequence: Synthetic oligonucleotide
aguuacgguccucuauugu

SEQ ID NO: 1370917 - RNA, 19 nt, Artificial Sequence
  Description of Artificial Sequence: Synthetic oligonucleotide
uugcucgauuuuguugucg

SEQ ID NO: 1370918 - RNA, 19 nt, Artificial Sequence
  Description of Artificial Sequence: Synthetic oligonucleotide
guuccuugaagugaaggga

SEQ ID NO: 1370919 - RNA, 19 nt, Artificial Sequence
  Description of Artificial Sequence: Synthetic oligonucleotide
accaagugacuaacugugc

SEQ ID NO: 1370920 - RNA, 19 nt, Artificial Sequence
  Description of Artificial Sequence: Synthetic oligonucleotide
ugcacagaacuaccauaca

SEQ ID NO: 1370921 - RNA, 19 nt, Artificial Sequence
  Description of Artificial Sequence: Synthetic oligonucleotide
cuaguacauuuucuucaag

SEQ ID NO: 1370922 - RNA, 19 nt, Artificial Sequence
  Description of Artificial Sequence: Synthetic oligonucleotide
aggagaucccaccauccga

SEQ ID NO: 1370923 - RNA, 19 nt, Artificial Sequence
  Description of Artificial Sequence: Synthetic oligonucleotide
guuacgguccucuauugua

SEQ ID NO: 1370924 - RNA, 19 nt, Artificial Sequence
  Description of Artificial Sequence: Synthetic oligonucleotide
cagaacuaccauacaggug

SEQ ID NO: 1370925 - RNA, 19 nt, Artificial Sequence
  Description of Artificial Sequence: Synthetic oligonucleotide
gagagcgcagaauccagga

SEQ ID NO: 1370926 - RNA, 19 nt, Artificial Sequence
  Description of Artificial Sequence: Synthetic oligonucleotide
ucguuacacuacauacaca

SEQ ID NO: 1370927 - RNA, 19 nt, Artificial Sequence
  Description of Artificial Sequence: Synthetic oligonucleotide
uccuagauccaucgccacu

SEQ ID NO: 1370928 - RNA, 19 nt, Artificial Sequence
  Description of Artificial Sequence: Synthetic oligonucleotide
caggagaucccaccauccg

SEQ ID NO: 1370929 - RNA, 19 nt, Artificial Sequence
  Description of Artificial Sequence: Synthetic oligonucleotide
caagugacuaacugugcca

SEQ ID NO: 1370930 - RNA, 19 nt, Artificial Sequence
  Description of Artificial Sequence: Synthetic oligonucleotide
cuaccauacaggugauaug

SEQ ID NO: 1370931 - RNA, 19 nt, Artificial Sequence
  Description of Artificial Sequence: Synthetic oligonucleotide
gggacaguaaguacuacug

SEQ ID NO: 1370932 - RNA, 19 nt, Artificial Sequence
  Description of Artificial Sequence: Synthetic oligonucleotide
gauccaucgccacuggucu

SEQ ID NO: 1370933 - RNA, 19 nt, Artificial Sequence
  Description of Artificial Sequence: Synthetic oligonucleotide
ugcuuaauacuggggaaaa

SEQ ID NO: 1370934 - RNA, 19 nt, Artificial Sequence
  Description of Artificial Sequence: Synthetic oligonucleotide
ugugugagucucacgucuc

SEQ ID NO: 1370935 - RNA, 19 nt, Artificial Sequence
  Description of Artificial Sequence: Synthetic oligonucleotide
ugggaaauccauguccuua

SEQ ID NO: 1370936 - RNA, 19 nt, Artificial Sequence
  Description of Artificial Sequence: Synthetic oligonucleotide
uaacugugccaaauucuua

SEQ ID NO: 1370937 - RNA, 19 nt, Artificial Sequence
  Description of Artificial Sequence: Synthetic oligonucleotide
agcuauugucaagucucac

SEQ ID NO: 1370938 - RNA, 19 nt, Artificial Sequence
  Description of Artificial Sequence: Synthetic oligonucleotide
gcuagcacaucucuucggc

SEQ ID NO: 1370939 - RNA, 19 nt, Artificial Sequence
  Description of Artificial Sequence: Synthetic oligonucleotide
agcgagaauggcaugugug

SEQ ID NO: 1370940 - RNA, 19 nt, Artificial Sequence
  Description of Artificial Sequence: Synthetic oligonucleotide
aaguacuacugcguuuuau

SEQ ID NO: 1370941 - RNA, 19 nt, Artificial Sequence
  Description of Artificial Sequence: Synthetic oligonucleotide
auagggcuuuacuucgaga

SEQ ID NO: 1370942 - RNA, 19 nt, Artificial Sequence
  Description of Artificial Sequence: Synthetic oligonucleotide
guucguuacacuacauaca

SEQ ID NO: 1370943 - RNA, 19 nt, Artificial Sequence
  Description of Artificial Sequence: Synthetic oligonucleotide
cagggcaaauccaugcuca

SEQ ID NO: 1370944 - RNA, 19 nt, Artificial Sequence
  Description of Artificial Sequence: Synthetic oligonucleotide
uugcaccagagcuauuguc

SEQ ID NO: 1370945 - RNA, 19 nt, Artificial Sequence
  Description of Artificial Sequence: Synthetic oligonucleotide
caaaucggugaauagggcu

SEQ ID NO: 1370946 - RNA, 19 nt, Artificial Sequence
  Description of Artificial Sequence: Synthetic oligonucleotide
agagagcgcagaauccagg

SEQ ID NO: 1370947 - RNA, 19 nt, Artificial Sequence
  Description of Artificial Sequence: Synthetic oligonucleotide
cgagauauucagcagcuag

SEQ ID NO: 1370948 - RNA, 19 nt, Artificial Sequence
  Description of Artificial Sequence: Synthetic oligonucleotide
ccauacaggugauaugcag

SEQ ID NO: 1370949 - RNA, 19 nt, Artificial Sequence
  Description of Artificial Sequence: Synthetic oligonucleotide
cuagauccaucgccacugg

SEQ ID NO: 1370950 - RNA, 19 nt, Artificial Sequence
  Description of Artificial Sequence: Synthetic oligonucleotide
ggauuucaugcaaaugcag

SEQ ID NO: 1370951 - RNA, 19 nt, Artificial Sequence
  Description of Artificial Sequence: Synthetic oligonucleotide
ugucgauagcuaccacacu

SEQ ID NO: 1370952 - RNA, 19 nt, Artificial Sequence
  Description of Artificial Sequence: Synthetic oligonucleotide
ucauucugauuaaccuuua

SEQ ID NO: 1370953 - RNA, 19 nt, Artificial Sequence
  Description of Artificial Sequence: Synthetic oligonucleotide
agcacaucucuucggccug

SEQ ID NO: 1370954 - RNA, 19 nt, Artificial Sequence
  Description of Artificial Sequence: Synthetic oligonucleotide
caucuaaauuucaaucugu

SEQ ID NO: 1370955 - RNA, 19 nt, Artificial Sequence
  Description of Artificial Sequence: Synthetic oligonucleotide
caugugugagucucacguc

SEQ ID NO: 1370956 - RNA, 19 nt, Artificial Sequence
  Description of Artificial Sequence: Synthetic oligonucleotide
acuccuagauccaucgcca

SEQ ID NO: 1370957 - RNA, 19 nt, Artificial Sequence
  Description of Artificial Sequence: Synthetic oligonucleotide
aucuaaauuucaaucugua

SEQ ID NO: 1370958 - RNA, 19 nt, Artificial Sequence
  Description of Artificial Sequence: Synthetic oligonucleotide
gauagcuaccacacuugca

SEQ ID NO: 1370959 - RNA, 19 nt, Artificial Sequence
  Description of Artificial Sequence: Synthetic oligonucleotide
gauagcgccuaggucccag

SEQ ID NO: 1370960 - RNA, 19 nt, Artificial Sequence
  Description of Artificial Sequence: Synthetic oligonucleotide
acuaacaguuuugugucuu

SEQ ID NO: 1370961 - RNA, 19 nt, Artificial Sequence
  Description of Artificial Sequence: Synthetic oligonucleotide
gcuagauuucagauuacac

SEQ ID NO: 1370962 - RNA, 19 nt, Artificial Sequence
  Description of Artificial Sequence: Synthetic oligonucleotide
gaagcguuuucaguuccca

SEQ ID NO: 1370963 - RNA, 19 nt, Artificial Sequence
  Description of Artificial Sequence: Synthetic oligonucleotide
uguugucgauagcuaccac

SEQ ID NO: 1370964 - RNA, 19 nt, Artificial Sequence
  Description of Artificial Sequence: Synthetic oligonucleotide
guaaacuccuagauccauc

SEQ ID NO: 1370965 - RNA, 19 nt, Artificial Sequence
  Description of Artificial Sequence: Synthetic oligonucleotide
ucucucgcuagcacaucuc

SEQ ID NO: 1370966 - RNA, 19 nt, Artificial Sequence
  Description of Artificial Sequence: Synthetic oligonucleotide
caguugguaaacuccuaga

SEQ ID NO: 1370967 - RNA, 19 nt, Artificial Sequence
  Description of Artificial Sequence: Synthetic oligonucleotide
ugcaggcaagccccagagc

SEQ ID NO: 1370968 - RNA, 19 nt, Artificial Sequence
  Description of Artificial Sequence: Synthetic oligonucleotide
uccaucgccacuggucuac

SEQ ID NO: 1370969 - RNA, 19 nt, Artificial Sequence
  Description of Artificial Sequence: Synthetic oligonucleotide
acugcguuuuauaaacuuu

SEQ ID NO: 1370970 - RNA, 19 nt, Artificial Sequence
  Description of Artificial Sequence: Synthetic oligonucleotide
gucucacgucucuugagga

SEQ ID NO: 1370971 - RNA, 19 nt, Artificial Sequence
  Description of Artificial Sequence: Synthetic oligonucleotide
guggucucucgcuagcaca

SEQ ID NO: 1370972 - RNA, 19 nt, Artificial Sequence
  Description of Artificial Sequence: Synthetic oligonucleotide
aggacaacagaugcacaga

SEQ ID NO: 1370973 - RNA, 19 nt, Artificial Sequence
  Description of Artificial Sequence: Synthetic oligonucleotide
uccggacuggccagugucu

SEQ ID NO: 1370974 - RNA, 19 nt, Artificial Sequence
  Description of Artificial Sequence: Synthetic oligonucleotide
ugugguccccuguggcugc

SEQ ID NO: 1370975 - RNA, 19 nt, Artificial Sequence
  Description of Artificial Sequence: Synthetic oligonucleotide
aaucggugaauagggcuuu

SEQ ID NO: 1370976 - RNA, 19 nt, Artificial Sequence
  Description of Artificial Sequence: Synthetic oligonucleotide
gucgauagcuaccacacuu

SEQ ID NO: 1370977 - RNA, 19 nt, Artificial Sequence
  Description of Artificial Sequence: Synthetic oligonucleotide
agauuacaccaagugacua

SEQ ID NO: 1370978 - RNA, 19 nt, Artificial Sequence
  Description of Artificial Sequence: Synthetic oligonucleotide
agacgacaagaaagaaauc

SEQ ID NO: 1370979 - RNA, 19 nt, Artificial Sequence
  Description of Artificial Sequence: Synthetic oligonucleotide
accagauccauagcuugcu

SEQ ID NO: 1370980 - RNA, 19 nt, Artificial Sequence
  Description of Artificial Sequence: Synthetic oligonucleotide
aagccccagagcucuugga

SEQ ID NO: 1370981 - RNA, 19 nt, Artificial Sequence
  Description of Artificial Sequence: Synthetic oligonucleotide
gcuugcucgauuuuguugu

SEQ ID NO: 1370982 - RNA, 19 nt, Artificial Sequence
  Description of Artificial Sequence: Synthetic oligonucleotide
cuucauaaugauagcgccu

SEQ ID NO: 1370983 - RNA, 19 nt, Artificial Sequence
  Description of Artificial Sequence: Synthetic oligonucleotide
cuguggagguggucucucg

SEQ ID NO: 1370984 - RNA, 19 nt, Artificial Sequence
  Description of Artificial Sequence: Synthetic oligonucleotide
guaguuacgguccucuauu

SEQ ID NO: 1370985 - RNA, 19 nt, Artificial Sequence
  Description of Artificial Sequence: Synthetic oligonucleotide
cagcucaaccgagaagacc

SEQ ID NO: 1370986 - RNA, 19 nt, Artificial Sequence
  Description of Artificial Sequence: Synthetic oligonucleotide
caauaagcaaaacaaccuu

SEQ ID NO: 1370987 - RNA, 19 nt, Artificial Sequence
  Description of Artificial Sequence: Synthetic oligonucleotide
ucucgcuagcacaucucuu

SEQ ID NO: 1370988 - RNA, 19 nt, Artificial Sequence
  Description of Artificial Sequence: Synthetic oligonucleotide
aggucucucuauagaggac

SEQ ID NO: 1370989 - RNA, 19 nt, Artificial Sequence
  Description of Artificial Sequence: Synthetic oligonucleotide
cuccggacuggccaguguc

SEQ ID NO: 1370990 - RNA, 19 nt, Artificial Sequence
  Description of Artificial Sequence: Synthetic oligonucleotide
gagccccaccuuccgagcc

SEQ ID NO: 1370991 - RNA, 19 nt, Artificial Sequence
  Description of Artificial Sequence: Synthetic oligonucleotide
ggucucucuauagaggaca

SEQ ID NO: 1370992 - RNA, 19 nt, Artificial Sequence
  Description of Artificial Sequence: Synthetic oligonucleotide
agcuaccugucacuguuuu

SEQ ID NO: 1370993 - RNA, 19 nt, Artificial Sequence
  Description of Artificial Sequence: Synthetic oligonucleotide
uucggccuguucaguucag

SEQ ID NO: 1370994 - RNA, 19 nt, Artificial Sequence
  Description of Artificial Sequence: Synthetic oligonucleotide
gacgcuggcugugcagggg

SEQ ID NO: 1370995 - RNA, 19 nt, Artificial Sequence
  Description of Artificial Sequence: Synthetic oligonucleotide
ccuagauccaucgccacug

SEQ ID NO: 1370996 - RNA, 19 nt, Artificial Sequence
  Description of Artificial Sequence: Synthetic oligonucleotide
uaaguacuacugcguuuua

SEQ ID NO: 1370997 - RNA, 19 nt, Artificial Sequence
  Description of Artificial Sequence: Synthetic oligonucleotide
gcgagaauggcauguguga

SEQ ID NO: 1370998 - RNA, 19 nt, Artificial Sequence
  Description of Artificial Sequence: Synthetic oligonucleotide
uagcgccuaggucccagcu

SEQ ID NO: 1370999 - RNA, 19 nt, Artificial Sequence
  Description of Artificial Sequence: Synthetic oligonucleotide
aguugucgguuuguaaaau

SEQ ID NO: 1371000 - RNA, 19 nt, Artificial Sequence
  Description of Artificial Sequence: Synthetic oligonucleotide
cuugcucgauuuuguuguc

SEQ ID NO: 1371001 - RNA, 19 nt, Artificial Sequence
  Description of Artificial Sequence: Synthetic oligonucleotide
cuaugcgguugauccugag

SEQ ID NO: 1371002 - RNA, 19 nt, Artificial Sequence
  Description of Artificial Sequence: Synthetic oligonucleotide
agugacuaacugugccaaa

SEQ ID NO: 1371003 - RNA, 19 nt, Artificial Sequence
  Description of Artificial Sequence: Synthetic oligonucleotide
cuccuagauccaucgccac

SEQ ID NO: 1371004 - RNA, 19 nt, Artificial Sequence
  Description of Artificial Sequence: Synthetic oligonucleotide
ucucucuauagaggacaac

SEQ ID NO: 1371005 - RNA, 19 nt, Artificial Sequence
  Description of Artificial Sequence: Synthetic oligonucleotide
ucggugaauagggcuuuac

SEQ ID NO: 1371006 - RNA, 19 nt, Artificial Sequence
  Description of Artificial Sequence: Synthetic oligonucleotide
gcguuuucaguucccagca

SEQ ID NO: 1371007 - RNA, 19 nt, Artificial Sequence
  Description of Artificial Sequence: Synthetic oligonucleotide
augucucaguugguaaacu

SEQ ID NO: 1371008 - RNA, 19 nt, Artificial Sequence
  Description of Artificial Sequence: Synthetic oligonucleotide
gaauagggcuuuacuucga

SEQ ID NO: 1371009 - RNA, 19 nt, Artificial Sequence
  Description of Artificial Sequence: Synthetic oligonucleotide
ggggaaaagcgagaauggc

SEQ ID NO: 1371010 - RNA, 19 nt, Artificial Sequence
  Description of Artificial Sequence: Synthetic oligonucleotide
cucgauuuuguugucgaua

SEQ ID NO: 1371011 - RNA, 19 nt, Artificial Sequence
  Description of Artificial Sequence: Synthetic oligonucleotide
gagcuauugucaagucuca

SEQ ID NO: 1371012 - RNA, 19 nt, Artificial Sequence
  Description of Artificial Sequence: Synthetic oligonucleotide
gugcuuaauacuggggaaa

SEQ ID NO: 1371013 - RNA, 19 nt, Artificial Sequence
  Description of Artificial Sequence: Synthetic oligonucleotide
ggcuaugcgguugauccug

SEQ ID NO: 1371014 - RNA, 19 nt, Artificial Sequence
  Description of Artificial Sequence: Synthetic oligonucleotide
ggccucucuaaguuccuug

SEQ ID NO: 1371015 - RNA, 19 nt, Artificial Sequence
  Description of Artificial Sequence: Synthetic oligonucleotide
cagauuacaccaagugacu

SEQ ID NO: 1371016 - RNA, 19 nt, Artificial Sequence
  Description of Artificial Sequence: Synthetic oligonucleotide
agggcaaauccaugcucau

SEQ ID NO: 1371017 - RNA, 19 nt, Artificial Sequence
  Description of Artificial Sequence: Synthetic oligonucleotide
agcgcagaauccaggagau

SEQ ID NO: 1371018 - RNA, 19 nt, Artificial Sequence
  Description of Artificial Sequence: Synthetic oligonucleotide
ugacaguugucgguuugua

SEQ ID NO: 1371019 - RNA, 19 nt, Artificial Sequence
  Description of Artificial Sequence: Synthetic oligonucleotide
agucucacagaagcguuuu

SEQ ID NO: 1371020 - RNA, 19 nt, Artificial Sequence
  Description of Artificial Sequence: Synthetic oligonucleotide
gcuuaauacuggggaaaag

SEQ ID NO: 1371021 - RNA, 19 nt, Artificial Sequence
  Description of Artificial Sequence: Synthetic oligonucleotide
ggccuguucaguucagaca

SEQ ID NO: 1371022 - RNA, 19 nt, Artificial Sequence
  Description of Artificial Sequence: Synthetic oligonucleotide
caccuuuucagacggccaa

SEQ ID NO: 1371023 - RNA, 19 nt, Artificial Sequence
  Description of Artificial Sequence: Synthetic oligonucleotide
gauauucagcagcuagauu

SEQ ID NO: 1371024 - RNA, 19 nt, Artificial Sequence
  Description of Artificial Sequence: Synthetic oligonucleotide
acaccuuuucagacggcca

SEQ ID NO: 1371025 - RNA, 19 nt, Artificial Sequence
  Description of Artificial Sequence: Synthetic oligonucleotide
cuguuuugucacuaacagu

SEQ ID NO: 1371026 - RNA, 19 nt, Artificial Sequence
  Description of Artificial Sequence: Synthetic oligonucleotide
ugugagucucacgucucuu

SEQ ID NO: 1371027 - RNA, 19 nt, Artificial Sequence
  Description of Artificial Sequence: Synthetic oligonucleotide
gcgccuaggucccagcuac

SEQ ID NO: 1371028 - RNA, 19 nt, Artificial Sequence
  Description of Artificial Sequence: Synthetic oligonucleotide
gaaaccccuacugggaaau

SEQ ID NO: 1371029 - RNA, 19 nt, Artificial Sequence
  Description of Artificial Sequence: Synthetic oligonucleotide
uucacucaacuaguacauu

SEQ ID NO: 1371030 - RNA, 19 nt, Artificial Sequence
  Description of Artificial Sequence: Synthetic oligonucleotide
cucuauuguacaaguucgu

SEQ ID NO: 1371031 - RNA, 19 nt, Artificial Sequence
  Description of Artificial Sequence: Synthetic oligonucleotide
accauacaggugauaugca

SEQ ID NO: 1371032 - RNA, 19 nt, Artificial Sequence
  Description of Artificial Sequence: Synthetic oligonucleotide
accccuacugggaaaucca

SEQ ID NO: 1371033 - RNA, 19 nt, Artificial Sequence
  Description of Artificial Sequence: Synthetic oligonucleotide
ccuuuaauucacucaacua

SEQ ID NO: 1371034 - RNA, 19 nt, Artificial Sequence
  Description of Artificial Sequence: Synthetic oligonucleotide
gcuuuacuucgagauauuc

SEQ ID NO: 1371035 - RNA, 19 nt, Artificial Sequence
  Description of Artificial Sequence: Synthetic oligonucleotide
gacggccaauguaacaucu

SEQ ID NO: 1371036 - RNA, 19 nt, Artificial Sequence
  Description of Artificial Sequence: Synthetic oligonucleotide
gguggucucucgcuagcac

SEQ ID NO: 1371037 - RNA, 19 nt, Artificial Sequence
  Description of Artificial Sequence: Synthetic oligonucleotide
cagagcuauugucaagucu

SEQ ID NO: 1371038 - RNA, 19 nt, Artificial Sequence
  Description of Artificial Sequence: Synthetic oligonucleotide
aacuaccauacaggugaua

SEQ ID NO: 1371039 - RNA, 19 nt, Artificial Sequence
  Description of Artificial Sequence: Synthetic oligonucleotide
gucucucgcuagcacaucu

SEQ ID NO: 1371040 - RNA, 19 nt, Artificial Sequence
  Description of Artificial Sequence: Synthetic oligonucleotide
gcuaccacacuugcaccag

SEQ ID NO: 1371041 - RNA, 19 nt, Artificial Sequence
  Description of Artificial Sequence: Synthetic oligonucleotide
caucgccacuggucuacac

SEQ ID NO: 1371042 - RNA, 19 nt, Artificial Sequence
  Description of Artificial Sequence: Synthetic oligonucleotide
ucgagauauucagcagcua

SEQ ID NO: 1371043 - RNA, 19 nt, Artificial Sequence
  Description of Artificial Sequence: Synthetic oligonucleotide
gugacuaacugugccaaau

SEQ ID NO: 1371044 - RNA, 19 nt, Artificial Sequence
  Description of Artificial Sequence: Synthetic oligonucleotide
ucggccuguucaguucaga

SEQ ID NO: 1371045 - RNA, 19 nt, Artificial Sequence
  Description of Artificial Sequence: Synthetic oligonucleotide
cgauagcuaccacacuugc

SEQ ID NO: 1371046 - RNA, 19 nt, Artificial Sequence
  Description of Artificial Sequence: Synthetic oligonucleotide
agcgccuaggucccagcua

SEQ ID NO: 1371047 - RNA, 19 nt, Artificial Sequence
  Description of Artificial Sequence: Synthetic oligonucleotide
gggccugaaacugggcaag

SEQ ID NO: 1371048 - RNA, 19 nt, Artificial Sequence
  Description of Artificial Sequence: Synthetic oligonucleotide
gggugggcggcugggaagg

SEQ ID NO: 1371049 - RNA, 19 nt, Artificial Sequence
  Description of Artificial Sequence: Synthetic oligonucleotide
cagacggccaauguaacau

SEQ ID NO: 1371050 - RNA, 19 nt, Artificial Sequence
  Description of Artificial Sequence: Synthetic oligonucleotide
uggugacaguugucgguuu

SEQ ID NO: 1371051 - RNA, 19 nt, Artificial Sequence
  Description of Artificial Sequence: Synthetic oligonucleotide
cucucgcuagcacaucucu

SEQ ID NO: 1371052 - RNA, 19 nt, Artificial Sequence
  Description of Artificial Sequence: Synthetic oligonucleotide
gcugcgugguggccggagg

SEQ ID NO: 1371053 - RNA, 19 nt, Artificial Sequence
  Description of Artificial Sequence: Synthetic oligonucleotide
ccggaggggagccagucug

SEQ ID NO: 1371054 - RNA, 19 nt, Artificial Sequence
  Description of Artificial Sequence: Synthetic oligonucleotide
gucucucuauagaggacaa

SEQ ID NO: 1371055 - RNA, 19 nt, Artificial Sequence
  Description of Artificial Sequence: Synthetic oligonucleotide
cuacugcguuuuauaaacu

SEQ ID NO: 1371056 - RNA, 19 nt, Artificial Sequence
  Description of Artificial Sequence: Synthetic oligonucleotide
ccgagccccaccuuccgag

SEQ ID NO: 1371057 - RNA, 19 nt, Artificial Sequence
  Description of Artificial Sequence: Synthetic oligonucleotide
ugcuccggacuggccagug

SEQ ID NO: 1371058 - RNA, 19 nt, Artificial Sequence
  Description of Artificial Sequence: Synthetic oligonucleotide
agacaucugccaagcugca

SEQ ID NO: 1371059 - RNA, 19 nt, Artificial Sequence
  Description of Artificial Sequence: Synthetic oligonucleotide
guccuuaguaacugaccau

SEQ ID NO: 1371060 - RNA, 19 nt, Artificial Sequence
  Description of Artificial Sequence: Synthetic oligonucleotide
cgacaagaaagaaaucgaa

SEQ ID NO: 1371061 - RNA, 19 nt, Artificial Sequence
  Description of Artificial Sequence: Synthetic oligonucleotide
caguaaguacuacugcguu

SEQ ID NO: 1371062 - RNA, 19 nt, Artificial Sequence
  Description of Artificial Sequence: Synthetic oligonucleotide
gggcuuuacuucgagauau

SEQ ID NO: 1371063 - RNA, 19 nt, Artificial Sequence
  Description of Artificial Sequence: Synthetic oligonucleotide
ccagagcuauugucaaguc

SEQ ID NO: 1371064 - RNA, 19 nt, Artificial Sequence
  Description of Artificial Sequence: Synthetic oligonucleotide
ggccaauguaacaucuaaa

SEQ ID NO: 1371065 - RNA, 19 nt, Artificial Sequence
  Description of Artificial Sequence: Synthetic oligonucleotide
gaagaccaaaucggugaau

SEQ ID NO: 1371066 - RNA, 19 nt, Artificial Sequence
  Description of Artificial Sequence: Synthetic oligonucleotide
ccuugaagugaagggaaga

SEQ ID NO: 1371067 - RNA, 19 nt, Artificial Sequence
  Description of Artificial Sequence: Synthetic oligonucleotide
auccaucgccacuggucua

SEQ ID NO: 1371068 - RNA, 19 nt, Artificial Sequence
  Description of Artificial Sequence: Synthetic oligonucleotide
ugauagcgccuagguccca

SEQ ID NO: 1371069 - RNA, 19 nt, Artificial Sequence
  Description of Artificial Sequence: Synthetic oligonucleotide
cucaaccgagaagaccaaa

SEQ ID NO: 1371070 - RNA, 19 nt, Artificial Sequence
  Description of Artificial Sequence: Synthetic oligonucleotide
caaguucguuacacuacau

SEQ ID NO: 1371071 - RNA, 19 nt, Artificial Sequence
  Description of Artificial Sequence: Synthetic oligonucleotide
cgauuuuguugucgauagc

SEQ ID NO: 1371072 - RNA, 19 nt, Artificial Sequence
  Description of Artificial Sequence: Synthetic oligonucleotide
cggccuguucaguucagac

SEQ ID NO: 1371073 - RNA, 19 nt, Artificial Sequence
  Description of Artificial Sequence: Synthetic oligonucleotide
gauccauagcuugcucgau

SEQ ID NO: 1371074 - RNA, 19 nt, Artificial Sequence
  Description of Artificial Sequence: Synthetic oligonucleotide
uccgagccucaugcaggca

SEQ ID NO: 1371075 - RNA, 19 nt, Artificial Sequence
  Description of Artificial Sequence: Synthetic oligonucleotide
caguaguuacgguccucua

SEQ ID NO: 1371076 - RNA, 19 nt, Artificial Sequence
  Description of Artificial Sequence: Synthetic oligonucleotide
cgagccucaugcaggcaag

SEQ ID NO: 1371077 - RNA, 19 nt, Artificial Sequence
  Description of Artificial Sequence: Synthetic oligonucleotide
cauagcaggcuaugcgguu

SEQ ID NO: 1371078 - RNA, 19 nt, Artificial Sequence
  Description of Artificial Sequence: Synthetic oligonucleotide
acggccaauguaacaucua

SEQ ID NO: 1371079 - RNA, 19 nt, Artificial Sequence
  Description of Artificial Sequence: Synthetic oligonucleotide
caccauccgagccccaccu

SEQ ID NO: 1371080 - RNA, 19 nt, Artificial Sequence
  Description of Artificial Sequence: Synthetic oligonucleotide
ccauguccuuaguaacuga

SEQ ID NO: 1371081 - RNA, 19 nt, Artificial Sequence
  Description of Artificial Sequence: Synthetic oligonucleotide
ggccugaaacugggcaagc

SEQ ID NO: 1371082 - RNA, 19 nt, Artificial Sequence
  Description of Artificial Sequence: Synthetic oligonucleotide
gugguccccuguggcugcg

SEQ ID NO: 1371083 - RNA, 19 nt, Artificial Sequence
  Description of Artificial Sequence: Synthetic oligonucleotide
ccgagaagaccaaaucggu

SEQ ID NO: 1371084 - RNA, 19 nt, Artificial Sequence
  Description of Artificial Sequence: Synthetic oligonucleotide
aucggugaauagggcuuua

SEQ ID NO: 1371085 - RNA, 19 nt, Artificial Sequence
  Description of Artificial Sequence: Synthetic oligonucleotide
ccgagccucaugcaggcaa

SEQ ID NO: 1371086 - RNA, 19 nt, Artificial Sequence
  Description of Artificial Sequence: Synthetic oligonucleotide
cucagacaucugccaagcu

SEQ ID NO: 1371087 - RNA, 19 nt, Artificial Sequence
  Description of Artificial Sequence: Synthetic oligonucleotide
cagcaucaauuaaaccauu

SEQ ID NO: 1371088 - RNA, 19 nt, Artificial Sequence
  Description of Artificial Sequence: Synthetic oligonucleotide
cggccaauguaacaucuaa

SEQ ID NO: 1371089 - RNA, 19 nt, Artificial Sequence
  Description of Artificial Sequence: Synthetic oligonucleotide
gcuaugcgguugauccuga

SEQ ID NO: 1371090 - RNA, 19 nt, Artificial Sequence
  Description of Artificial Sequence: Synthetic oligonucleotide
ggugggcggcugggaaggg

SEQ ID NO: 1371091 - RNA, 19 nt, Artificial Sequence
  Description of Artificial Sequence: Synthetic oligonucleotide
ggucucucgcuagcacauc

SEQ ID NO: 1371092 - RNA, 19 nt, Artificial Sequence
  Description of Artificial Sequence: Synthetic oligonucleotide
cgguugauccugagcccug

SEQ ID NO: 1371093 - RNA, 19 nt, Artificial Sequence
  Description of Artificial Sequence: Synthetic oligonucleotide
gggcggcugggaaggguug

SEQ ID NO: 1371094 - RNA, 19 nt, Artificial Sequence
  Description of Artificial Sequence: Synthetic oligonucleotide
ggccggaggggagccaguc

SEQ ID NO: 1371095 - RNA, 19 nt, Artificial Sequence
  Description of Artificial Sequence: Synthetic oligonucleotide
ggguugugugguccccugu

SEQ ID NO: 1371096 - RNA, 19 nt, Artificial Sequence
  Description of Artificial Sequence: Synthetic oligonucleotide
gccuaggucccagcuaccu

SEQ ID NO: 1371097 - RNA, 19 nt, Artificial Sequence
  Description of Artificial Sequence: Synthetic oligonucleotide
ggacggcaaugaaaugggu

SEQ ID NO: 1371098 - RNA, 19 nt, Artificial Sequence
  Description of Artificial Sequence: Synthetic oligonucleotide
cguuuucaguucccagcaa

SEQ ID NO: 1371099 - RNA, 19 nt, Artificial Sequence
  Description of Artificial Sequence: Synthetic oligonucleotide
gcgcagaauccaggagauc

SEQ ID NO: 1371100 - RNA, 19 nt, Artificial Sequence
  Description of Artificial Sequence: Synthetic oligonucleotide
gccggaggggagccagucu

SEQ ID NO: 1371101 - RNA, 19 nt, Artificial Sequence
  Description of Artificial Sequence: Synthetic oligonucleotide
ggcuuuacuucgagauauu

SEQ ID NO: 1371102 - RNA, 19 nt, Artificial Sequence
  Description of Artificial Sequence: Synthetic oligonucleotide
gcuccggacuggccagugu

SEQ ID NO: 1371103 - RNA, 19 nt, Artificial Sequence
  Description of Artificial Sequence: Synthetic oligonucleotide
cccagcuaccugucacugu

SEQ ID NO: 1371104 - RNA, 19 nt, Artificial Sequence
  Description of Artificial Sequence: Synthetic oligonucleotide
cacaucucuucggccuguu

SEQ ID NO: 1371105 - RNA, 19 nt, Artificial Sequence
  Description of Artificial Sequence: Synthetic oligonucleotide
ccaucgccacuggucuaca

SEQ ID NO: 1371106 - RNA, 19 nt, Artificial Sequence
  Description of Artificial Sequence: Synthetic oligonucleotide
cacuugcaccagagcuauu

SEQ ID NO: 1371107 - RNA, 19 nt, Artificial Sequence
  Description of Artificial Sequence: Synthetic oligonucleotide
ccggacuggccagugucuu

SEQ ID NO: 1371108 - RNA, 19 nt, Artificial Sequence
  Description of Artificial Sequence: Synthetic oligonucleotide
ggcaagccccagagcucuu

SEQ ID NO: 1371109 - RNA, 19 nt, Artificial Sequence
  Description of Artificial Sequence: Synthetic oligonucleotide
uguugauucggcaaauccg

SEQ ID NO: 1371110 - RNA, 19 nt, Artificial Sequence
  Description of Artificial Sequence: Synthetic oligonucleotide
auuguaggggucuaugccc

SEQ ID NO: 1371111 - RNA, 19 nt, Artificial Sequence
  Description of Artificial Sequence: Synthetic oligonucleotide
gaugccuggaagcagaucc

SEQ ID NO: 1371112 - RNA, 19 nt, Artificial Sequence
  Description of Artificial Sequence: Synthetic oligonucleotide
aauuugucggugcacauca

SEQ ID NO: 1371113 - RNA, 19 nt, Artificial Sequence
  Description of Artificial Sequence: Synthetic oligonucleotide
aaggcaugccguuaccucc

SEQ ID NO: 1371114 - RNA, 19 nt, Artificial Sequence
  Description of Artificial Sequence: Synthetic oligonucleotide
aaaagcugccucucgguac

SEQ ID NO: 1371115 - RNA, 19 nt, Artificial Sequence
  Description of Artificial Sequence: Synthetic oligonucleotide
aagacguugacagucacag

SEQ ID NO: 1371116 - RNA, 19 nt, Artificial Sequence
  Description of Artificial Sequence: Synthetic oligonucleotide
aaggacgucgggcaguccc

SEQ ID NO: 1371117 - RNA, 19 nt, Artificial Sequence
  Description of Artificial Sequence: Synthetic oligonucleotide
agguuguuaaagcugugcc

SEQ ID NO: 1371118 - RNA, 19 nt, Artificial Sequence
  Description of Artificial Sequence: Synthetic oligonucleotide
uucaauuccauguggguca

SEQ ID NO: 1371119 - RNA, 19 nt, Artificial Sequence
  Description of Artificial Sequence: Synthetic oligonucleotide
uuguugauucggcaaaucc

SEQ ID NO: 1371120 - RNA, 19 nt, Artificial Sequence
  Description of Artificial Sequence: Synthetic oligonucleotide
aaauccgcagcucggaugu

SEQ ID NO: 1371121 - RNA, 19 nt, Artificial Sequence
  Description of Artificial Sequence: Synthetic oligonucleotide
aauuccaugugggucagag

SEQ ID NO: 1371122 - RNA, 19 nt, Artificial Sequence
  Description of Artificial Sequence: Synthetic oligonucleotide
caugucgaccuccugaugg

SEQ ID NO: 1371123 - RNA, 19 nt, Artificial Sequence
  Description of Artificial Sequence: Synthetic oligonucleotide
agaaucuguccugagaagg

SEQ ID NO: 1371124 - RNA, 19 nt, Artificial Sequence
  Description of Artificial Sequence: Synthetic oligonucleotide
uuaaagcugugccuggggc

SEQ ID NO: 1371125 - RNA, 19 nt, Artificial Sequence
  Description of Artificial Sequence: Synthetic oligonucleotide
ucggcaaauccgcagcucg

SEQ ID NO: 1371126 - RNA, 19 nt, Artificial Sequence
  Description of Artificial Sequence: Synthetic oligonucleotide
aagagauaugguaccaggg

SEQ ID NO: 1371127 - RNA, 19 nt, Artificial Sequence
  Description of Artificial Sequence: Synthetic oligonucleotide
ucaucuguaaaaugggcuc

SEQ ID NO: 1371128 - RNA, 19 nt, Artificial Sequence
  Description of Artificial Sequence: Synthetic oligonucleotide
aaggcuacguggcuucagg

SEQ ID NO: 1371129 - RNA, 19 nt, Artificial Sequence
  Description of Artificial Sequence: Synthetic oligonucleotide
agagagaacggguuccagg

SEQ ID NO: 1371130 - RNA, 19 nt, Artificial Sequence
  Description of Artificial Sequence: Synthetic oligonucleotide
cuuccgaacacacuggaug

SEQ ID NO: 1371131 - RNA, 19 nt, Artificial Sequence
  Description of Artificial Sequence: Synthetic oligonucleotide
aaugggcucaaggagaccu

SEQ ID NO: 1371132 - RNA, 19 nt, Artificial Sequence
  Description of Artificial Sequence: Synthetic oligonucleotide
ucuaugcccagcuggaucu

SEQ ID NO: 1371133 - RNA, 19 nt, Artificial Sequence
  Description of Artificial Sequence: Synthetic oligonucleotide
aaguacaguuccucaccac

SEQ ID NO: 1371134 - RNA, 19 nt, Artificial Sequence
  Description of Artificial Sequence: Synthetic oligonucleotide
uccccuauguacaaucucu

SEQ ID NO: 1371135 - RNA, 19 nt, Artificial Sequence
  Description of Artificial Sequence: Synthetic oligonucleotide
caauucaggaugaggaaac

SEQ ID NO: 1371136 - RNA, 19 nt, Artificial Sequence
  Description of Artificial Sequence: Synthetic oligonucleotide
gauucggcaaauccgcagc

SEQ ID NO: 1371137 - RNA, 19 nt, Artificial Sequence
  Description of Artificial Sequence: Synthetic oligonucleotide
aacaccacggauauguccu

SEQ ID NO: 1371138 - RNA, 19 nt, Artificial Sequence
  Description of Artificial Sequence: Synthetic oligonucleotide
uguggguguacccggggcg

SEQ ID NO: 1371139 - RNA, 19 nt, Artificial Sequence
  Description of Artificial Sequence: Synthetic oligonucleotide
agggccgggaucuacuccc

SEQ ID NO: 1371140 - RNA, 19 nt, Artificial Sequence
  Description of Artificial Sequence: Synthetic oligonucleotide
aaucuguccugagaagggg

SEQ ID NO: 1371141 - RNA, 19 nt, Artificial Sequence
  Description of Artificial Sequence: Synthetic oligonucleotide
ugguucuucagagagccag

SEQ ID NO: 1371142 - RNA, 19 nt, Artificial Sequence
  Description of Artificial Sequence: Synthetic oligonucleotide
uuccgaacacacuggaugc

SEQ ID NO: 1371143 - RNA, 19 nt, Artificial Sequence
  Description of Artificial Sequence: Synthetic oligonucleotide
guugauucggcaaauccgc

SEQ ID NO: 1371144 - RNA, 19 nt, Artificial Sequence
  Description of Artificial Sequence: Synthetic oligonucleotide
uacgaguccagugucagug

SEQ ID NO: 1371145 - RNA, 19 nt, Artificial Sequence
  Description of Artificial Sequence: Synthetic oligonucleotide
aaagcugccucucgguacu

SEQ ID NO: 1371146 - RNA, 19 nt, Artificial Sequence
  Description of Artificial Sequence: Synthetic oligonucleotide
aucccgugcagucuuuccc

SEQ ID NO: 1371147 - RNA, 19 nt, Artificial Sequence
  Description of Artificial Sequence: Synthetic oligonucleotide
gaacaccacggauaugucc

SEQ ID NO: 1371148 - RNA, 19 nt, Artificial Sequence
  Description of Artificial Sequence: Synthetic oligonucleotide
ugauucggcaaauccgcag

SEQ ID NO: 1371149 - RNA, 19 nt, Artificial Sequence
  Description of Artificial Sequence: Synthetic oligonucleotide
agagcgcaggggcagaagg

SEQ ID NO: 1371150 - RNA, 19 nt, Artificial Sequence
  Description of Artificial Sequence: Synthetic oligonucleotide
uuucaauuccauguggguc

SEQ ID NO: 1371151 - RNA, 19 nt, Artificial Sequence
  Description of Artificial Sequence: Synthetic oligonucleotide
accucaaaggcuacguggc

SEQ ID NO: 1371152 - RNA, 19 nt, Artificial Sequence
  Description of Artificial Sequence: Synthetic oligonucleotide
ggugucuugaacacaauag

SEQ ID NO: 1371153 - RNA, 19 nt, Artificial Sequence
  Description of Artificial Sequence: Synthetic oligonucleotide
agcucggauguguuggugg

SEQ ID NO: 1371154 - RNA, 19 nt, Artificial Sequence
  Description of Artificial Sequence: Synthetic oligonucleotide
aguggcucgcugcacacuc

SEQ ID NO: 1371155 - RNA, 19 nt, Artificial Sequence
  Description of Artificial Sequence: Synthetic oligonucleotide
cuucagagagccagcauug

SEQ ID NO: 1371156 - RNA, 19 nt, Artificial Sequence
  Description of Artificial Sequence: Synthetic oligonucleotide
caauacacuccucacccag

SEQ ID NO: 1371157 - RNA, 19 nt, Artificial Sequence
  Description of Artificial Sequence: Synthetic oligonucleotide
ucugcgaucuccagguccu

SEQ ID NO: 1371158 - RNA, 19 nt, Artificial Sequence
  Description of Artificial Sequence: Synthetic oligonucleotide
gaagacugaucaagguugg

SEQ ID NO: 1371159 - RNA, 19 nt, Artificial Sequence
  Description of Artificial Sequence: Synthetic oligonucleotide
agugccaacauccccggga

SEQ ID NO: 1371160 - RNA, 19 nt, Artificial Sequence
  Description of Artificial Sequence: Synthetic oligonucleotide
gguaccagggaagaagucg

SEQ ID NO: 1371161 - RNA, 19 nt, Artificial Sequence
  Description of Artificial Sequence: Synthetic oligonucleotide
guaccagggaagaagucgg

SEQ ID NO: 1371162 - RNA, 19 nt, Artificial Sequence
  Description of Artificial Sequence: Synthetic oligonucleotide
guugcaauacacuccucac

SEQ ID NO: 1371163 - RNA, 19 nt, Artificial Sequence
  Description of Artificial Sequence: Synthetic oligonucleotide
uuuugcaccuugucgcaca

SEQ ID NO: 1371164 - RNA, 19 nt, Artificial Sequence
  Description of Artificial Sequence: Synthetic oligonucleotide
cuuaucguagacaggcuca

SEQ ID NO: 1371165 - RNA, 19 nt, Artificial Sequence
  Description of Artificial Sequence: Synthetic oligonucleotide
ugcugaacaccacggauau

SEQ ID NO: 1371166 - RNA, 19 nt, Artificial Sequence
  Description of Artificial Sequence: Synthetic oligonucleotide
ugccguuaccuccaccucc

SEQ ID NO: 1371167 - RNA, 19 nt, Artificial Sequence
  Description of Artificial Sequence: Synthetic oligonucleotide
agauaugguaccagggaag

SEQ ID NO: 1371168 - RNA, 19 nt, Artificial Sequence
  Description of Artificial Sequence: Synthetic oligonucleotide
ucucucagaaucuguccug

SEQ ID NO: 1371169 - RNA, 19 nt, Artificial Sequence
  Description of Artificial Sequence: Synthetic oligonucleotide
uccuuguugauucggcaaa

SEQ ID NO: 1371170 - RNA, 19 nt, Artificial Sequence
  Description of Artificial Sequence: Synthetic oligonucleotide
ucgcuggcaccucaaaggc

SEQ ID NO: 1371171 - RNA, 19 nt, Artificial Sequence
  Description of Artificial Sequence: Synthetic oligonucleotide
uacaaucucucagaaucug

SEQ ID NO: 1371172 - RNA, 19 nt, Artificial Sequence
  Description of Artificial Sequence: Synthetic oligonucleotide
ucauaggcaaagccgucgu

SEQ ID NO: 1371173 - RNA, 19 nt, Artificial Sequence
  Description of Artificial Sequence: Synthetic oligonucleotide
ugggguguugcaauacacu

SEQ ID NO: 1371174 - RNA, 19 nt, Artificial Sequence
  Description of Artificial Sequence: Synthetic oligonucleotide
uuaucguagacaggcucag

SEQ ID NO: 1371175 - RNA, 19 nt, Artificial Sequence
  Description of Artificial Sequence: Synthetic oligonucleotide
gauaggaugccuggaagca

SEQ ID NO: 1371176 - RNA, 19 nt, Artificial Sequence
  Description of Artificial Sequence: Synthetic oligonucleotide
uucaugucgaccuccugau

SEQ ID NO: 1371177 - RNA, 19 nt, Artificial Sequence
  Description of Artificial Sequence: Synthetic oligonucleotide
ucuccuuguugauucggca

SEQ ID NO: 1371178 - RNA, 19 nt, Artificial Sequence
  Description of Artificial Sequence: Synthetic oligonucleotide
ugcauacgaguccaguguc

SEQ ID NO: 1371179 - RNA, 19 nt, Artificial Sequence
  Description of Artificial Sequence: Synthetic oligonucleotide
gucauaggcaaagccgucg

SEQ ID NO: 1371180 - RNA, 19 nt, Artificial Sequence
  Description of Artificial Sequence: Synthetic oligonucleotide
gcugucgugaucccgaggc

SEQ ID NO: 1371181 - RNA, 19 nt, Artificial Sequence
  Description of Artificial Sequence: Synthetic oligonucleotide
guacgugaagggcaguggc

SEQ ID NO: 1371182 - RNA, 19 nt, Artificial Sequence
  Description of Artificial Sequence: Synthetic oligonucleotide
agagaacggguuccaggcg

SEQ ID NO: 1371183 - RNA, 19 nt, Artificial Sequence
  Description of Artificial Sequence: Synthetic oligonucleotide
ugucgugaucccgaggcag

SEQ ID NO: 1371184 - RNA, 19 nt, Artificial Sequence
  Description of Artificial Sequence: Synthetic oligonucleotide
cugacaugaggccgcagcc

SEQ ID NO: 1371185 - RNA, 19 nt, Artificial Sequence
  Description of Artificial Sequence: Synthetic oligonucleotide
aguaccuucgcuggcaccu

SEQ ID NO: 1371186 - RNA, 19 nt, Artificial Sequence
  Description of Artificial Sequence: Synthetic oligonucleotide
gugucugccggcuguagag

SEQ ID NO: 1371187 - RNA, 19 nt, Artificial Sequence
  Description of Artificial Sequence: Synthetic oligonucleotide
aacggguuccaggcggcgc

SEQ ID NO: 1371188 - RNA, 19 nt, Artificial Sequence
  Description of Artificial Sequence: Synthetic oligonucleotide
caaauccgcagcucggaug

SEQ ID NO: 1371189 - RNA, 19 nt, Artificial Sequence
  Description of Artificial Sequence: Synthetic oligonucleotide
ggggucuaugcccagcugg

SEQ ID NO: 1371190 - RNA, 19 nt, Artificial Sequence
  Description of Artificial Sequence: Synthetic oligonucleotide
agcaauuugucggugcaca

SEQ ID NO: 1371191 - RNA, 19 nt, Artificial Sequence
  Description of Artificial Sequence: Synthetic oligonucleotide
uugauucggcaaauccgca

SEQ ID NO: 1371192 - RNA, 19 nt, Artificial Sequence
  Description of Artificial Sequence: Synthetic oligonucleotide
gacugaucaagguuggccu

SEQ ID NO: 1371193 - RNA, 19 nt, Artificial Sequence
  Description of Artificial Sequence: Synthetic oligonucleotide
cuugucgcacagcaaguac

SEQ ID NO: 1371194 - RNA, 19 nt, Artificial Sequence
  Description of Artificial Sequence: Synthetic oligonucleotide
uggagcucuccccagcuuc

SEQ ID NO: 1371195 - RNA, 19 nt, Artificial Sequence
  Description of Artificial Sequence: Synthetic oligonucleotide
cucuccuuguugauucggc

SEQ ID NO: 1371196 - RNA, 19 nt, Artificial Sequence
  Description of Artificial Sequence: Synthetic oligonucleotide
gcuuucaauuccauguggg

SEQ ID NO: 1371197 - RNA, 19 nt, Artificial Sequence
  Description of Artificial Sequence: Synthetic oligonucleotide
uggggcugacaugaggccg

SEQ ID NO: 1371198 - RNA, 19 nt, Artificial Sequence
  Description of Artificial Sequence: Synthetic oligonucleotide
ugaucccgaggcagguacg

SEQ ID NO: 1371199 - RNA, 19 nt, Artificial Sequence
  Description of Artificial Sequence: Synthetic oligonucleotide
aagucggcucugccuuccc

SEQ ID NO: 1371200 - RNA, 19 nt, Artificial Sequence
  Description of Artificial Sequence: Synthetic oligonucleotide
cauacgaguccagugucag

SEQ ID NO: 1371201 - RNA, 19 nt, Artificial Sequence
  Description of Artificial Sequence: Synthetic oligonucleotide
gaagccgugcugaacacca

SEQ ID NO: 1371202 - RNA, 19 nt, Artificial Sequence
  Description of Artificial Sequence: Synthetic oligonucleotide
agucacaggcucugcgauc

SEQ ID NO: 1371203 - RNA, 19 nt, Artificial Sequence
  Description of Artificial Sequence: Synthetic oligonucleotide
cagguuguuaaagcugugc

SEQ ID NO: 1371204 - RNA, 19 nt, Artificial Sequence
  Description of Artificial Sequence: Synthetic oligonucleotide
augggguguugcaauacac

SEQ ID NO: 1371205 - RNA, 19 nt, Artificial Sequence
  Description of Artificial Sequence: Synthetic oligonucleotide
ucagagagccagcauugua

SEQ ID NO: 1371206 - RNA, 19 nt, Artificial Sequence
  Description of Artificial Sequence: Synthetic oligonucleotide
gcaaguacaguuccucacc

SEQ ID NO: 1371207 - RNA, 19 nt, Artificial Sequence
  Description of Artificial Sequence: Synthetic oligonucleotide
uugguggacuucuuaucgu

SEQ ID NO: 1371208 - RNA, 19 nt, Artificial Sequence
  Description of Artificial Sequence: Synthetic oligonucleotide
agagcuacucagcucccca

SEQ ID NO: 1371209 - RNA, 19 nt, Artificial Sequence
  Description of Artificial Sequence: Synthetic oligonucleotide
ucucagaaucuguccugag

SEQ ID NO: 1371210 - RNA, 19 nt, Artificial Sequence
  Description of Artificial Sequence: Synthetic oligonucleotide
gacggcgggaggaacaggc

SEQ ID NO: 1371211 - RNA, 19 nt, Artificial Sequence
  Description of Artificial Sequence: Synthetic oligonucleotide
aggaagccgugcugaacac

SEQ ID NO: 1371212 - RNA, 19 nt, Artificial Sequence
  Description of Artificial Sequence: Synthetic oligonucleotide
ggcagugccaacauccccg

SEQ ID NO: 1371213 - RNA, 19 nt, Artificial Sequence
  Description of Artificial Sequence: Synthetic oligonucleotide
ucccgaggcagguacguga

SEQ ID NO: 1371214 - RNA, 19 nt, Artificial Sequence
  Description of Artificial Sequence: Synthetic oligonucleotide
gcuacguggcuucaggccc

SEQ ID NO: 1371215 - RNA, 19 nt, Artificial Sequence
  Description of Artificial Sequence: Synthetic oligonucleotide
acgaguccagugucagugg

SEQ ID NO: 1371216 - RNA, 19 nt, Artificial Sequence
  Description of Artificial Sequence: Synthetic oligonucleotide
cauagcugucgugaucccg

SEQ ID NO: 1371217 - RNA, 19 nt, Artificial Sequence
  Description of Artificial Sequence: Synthetic oligonucleotide
aaaggcuacguggcuucag

SEQ ID NO: 1371218 - RNA, 19 nt, Artificial Sequence
  Description of Artificial Sequence: Synthetic oligonucleotide
caaggcaugccguuaccuc

SEQ ID NO: 1371219 - RNA, 19 nt, Artificial Sequence
  Description of Artificial Sequence: Synthetic oligonucleotide
cucaucuguaaaaugggcu

SEQ ID NO: 1371220 - RNA, 19 nt, Artificial Sequence
  Description of Artificial Sequence: Synthetic oligonucleotide
agacguugacagucacagg

SEQ ID NO: 1371221 - RNA, 19 nt, Artificial Sequence
  Description of Artificial Sequence: Synthetic oligonucleotide
ucggauguguugguggacu

SEQ ID NO: 1371222 - RNA, 19 nt, Artificial Sequence
  Description of Artificial Sequence: Synthetic oligonucleotide
auucggcaaauccgcagcu

SEQ ID NO: 1371223 - RNA, 19 nt, Artificial Sequence
  Description of Artificial Sequence: Synthetic oligonucleotide
auagcugucgugaucccga

SEQ ID NO: 1371224 - RNA, 19 nt, Artificial Sequence
  Description of Artificial Sequence: Synthetic oligonucleotide
gauccugaccacguucaug

SEQ ID NO: 1371225 - RNA, 19 nt, Artificial Sequence
  Description of Artificial Sequence: Synthetic oligonucleotide
ucgaccuccugaugguucu

SEQ ID NO: 1371226 - RNA, 19 nt, Artificial Sequence
  Description of Artificial Sequence: Synthetic oligonucleotide
ccggcuguagagcugacgg

SEQ ID NO: 1371227 - RNA, 19 nt, Artificial Sequence
  Description of Artificial Sequence: Synthetic oligonucleotide
gcugacaugaggccgcagc

SEQ ID NO: 1371228 - RNA, 19 nt, Artificial Sequence
  Description of Artificial Sequence: Synthetic oligonucleotide
uccguucaauggcagcuuc

SEQ ID NO: 1371229 - RNA, 19 nt, Artificial Sequence
  Description of Artificial Sequence: Synthetic oligonucleotide
ucaugucgaccuccugaug

SEQ ID NO: 1371230 - RNA, 19 nt, Artificial Sequence
  Description of Artificial Sequence: Synthetic oligonucleotide
gcugcauacgaguccagug

SEQ ID NO: 1371231 - RNA, 19 nt, Artificial Sequence
  Description of Artificial Sequence: Synthetic oligonucleotide
ugaacaccacggauauguc

SEQ ID NO: 1371232 - RNA, 19 nt, Artificial Sequence
  Description of Artificial Sequence: Synthetic oligonucleotide
gucggcucugccuucccag

SEQ ID NO: 1371233 - RNA, 19 nt, Artificial Sequence
  Description of Artificial Sequence: Synthetic oligonucleotide
ucauaggguggugucuuga

SEQ ID NO: 1371234 - RNA, 19 nt, Artificial Sequence
  Description of Artificial Sequence: Synthetic oligonucleotide
gaagucggugucugccggc

SEQ ID NO: 1371235 - RNA, 19 nt, Artificial Sequence
  Description of Artificial Sequence: Synthetic oligonucleotide
agaacggguuccaggcggc

SEQ ID NO: 1371236 - RNA, 19 nt, Artificial Sequence
  Description of Artificial Sequence: Synthetic oligonucleotide
ucccuccuccccuauguac

SEQ ID NO: 1371237 - RNA, 19 nt, Artificial Sequence
  Description of Artificial Sequence: Synthetic oligonucleotide
ggaucuacucccuccuccc

SEQ ID NO: 1371238 - RNA, 19 nt, Artificial Sequence
  Description of Artificial Sequence: Synthetic oligonucleotide
gccaacauccccgggaccg

SEQ ID NO: 1371239 - RNA, 19 nt, Artificial Sequence
  Description of Artificial Sequence: Synthetic oligonucleotide
auacacuccucacccagua

SEQ ID NO: 1371240 - RNA, 19 nt, Artificial Sequence
  Description of Artificial Sequence: Synthetic oligonucleotide
augccguuaccuccaccuc

SEQ ID NO: 1371241 - RNA, 19 nt, Artificial Sequence
  Description of Artificial Sequence: Synthetic oligonucleotide
uguaggggucuaugcccag

SEQ ID NO: 1371242 - RNA, 19 nt, Artificial Sequence
  Description of Artificial Sequence: Synthetic oligonucleotide
caucccgugcagucuuucc

SEQ ID NO: 1371243 - RNA, 19 nt, Artificial Sequence
  Description of Artificial Sequence: Synthetic oligonucleotide
uggcucgcugcacacucca

SEQ ID NO: 1371244 - RNA, 19 nt, Artificial Sequence
  Description of Artificial Sequence: Synthetic oligonucleotide
augucgaccuccugauggu

SEQ ID NO: 1371245 - RNA, 19 nt, Artificial Sequence
  Description of Artificial Sequence: Synthetic oligonucleotide
cuugagagaagucggcucu

SEQ ID NO: 1371246 - RNA, 19 nt, Artificial Sequence
  Description of Artificial Sequence: Synthetic oligonucleotide
caauuugucggugcacauc

SEQ ID NO: 1371247 - RNA, 19 nt, Artificial Sequence
  Description of Artificial Sequence: Synthetic oligonucleotide
uguagagcugacggcggga

SEQ ID NO: 1371248 - RNA, 19 nt, Artificial Sequence
  Description of Artificial Sequence: Synthetic oligonucleotide
ggcgcaacuguccuugcug

SEQ ID NO: 1371249 - RNA, 19 nt, Artificial Sequence
  Description of Artificial Sequence: Synthetic oligonucleotide
acaaggcaugccguuaccu

SEQ ID NO: 1371250 - RNA, 19 nt, Artificial Sequence
  Description of Artificial Sequence: Synthetic oligonucleotide
gaagacguugacagucaca

SEQ ID NO: 1371251 - RNA, 19 nt, Artificial Sequence
  Description of Artificial Sequence: Synthetic oligonucleotide
uugagagaagucggcucug

SEQ ID NO: 1371252 - RNA, 19 nt, Artificial Sequence
  Description of Artificial Sequence: Synthetic oligonucleotide
ugcagacgccaucccgugc

SEQ ID NO: 1371253 - RNA, 19 nt, Artificial Sequence
  Description of Artificial Sequence: Synthetic oligonucleotide
gguacgugaagggcagugg

SEQ ID NO: 1371254 - RNA, 19 nt, Artificial Sequence
  Description of Artificial Sequence: Synthetic oligonucleotide
cuguguggguguacccggg

SEQ ID NO: 1371255 - RNA, 19 nt, Artificial Sequence
  Description of Artificial Sequence: Synthetic oligonucleotide
agcacuggcgaguggcggu

SEQ ID NO: 1371256 - RNA, 19 nt, Artificial Sequence
  Description of Artificial Sequence: Synthetic oligonucleotide
cuuucaauuccaugugggu

SEQ ID NO: 1371257 - RNA, 19 nt, Artificial Sequence
  Description of Artificial Sequence: Synthetic oligonucleotide
cuuguugauucggcaaauc

SEQ ID NO: 1371258 - RNA, 19 nt, Artificial Sequence
  Description of Artificial Sequence: Synthetic oligonucleotide
agcugucgugaucccgagg

SEQ ID NO: 1371259 - RNA, 19 nt, Artificial Sequence
  Description of Artificial Sequence: Synthetic oligonucleotide
aagucggugucugccggcu

SEQ ID NO: 1371260 - RNA, 19 nt, Artificial Sequence
  Description of Artificial Sequence: Synthetic oligonucleotide
cuccccaaggacgucgggc

SEQ ID NO: 1371261 - RNA, 19 nt, Artificial Sequence
  Description of Artificial Sequence: Synthetic oligonucleotide
gcgcaacuguccuugcugg

SEQ ID NO: 1371262 - RNA, 19 nt, Artificial Sequence
  Description of Artificial Sequence: Synthetic oligonucleotide
uagcugucgugaucccgag

SEQ ID NO: 1371263 - RNA, 19 nt, Artificial Sequence
  Description of Artificial Sequence: Synthetic oligonucleotide
guguggguguacccggggc

SEQ ID NO: 1371264 - RNA, 19 nt, Artificial Sequence
  Description of Artificial Sequence: Synthetic oligonucleotide
ucuacucccuccuccccua

SEQ ID NO: 1371265 - RNA, 19 nt, Artificial Sequence
  Description of Artificial Sequence: Synthetic oligonucleotide
caauagcaauuugucggug

SEQ ID NO: 1371266 - RNA, 19 nt, Artificial Sequence
  Description of Artificial Sequence: Synthetic oligonucleotide
uucagagagccagcauugu

SEQ ID NO: 1371267 - RNA, 19 nt, Artificial Sequence
  Description of Artificial Sequence: Synthetic oligonucleotide
cuccuuguugauucggcaa

SEQ ID NO: 1371268 - RNA, 19 nt, Artificial Sequence
  Description of Artificial Sequence: Synthetic oligonucleotide
cuccccuauguacaaucuc

SEQ ID NO: 1371269 - RNA, 19 nt, Artificial Sequence
  Description of Artificial Sequence: Synthetic oligonucleotide
uagcaauuugucggugcac

SEQ ID NO: 1371270 - RNA, 19 nt, Artificial Sequence
  Description of Artificial Sequence: Synthetic oligonucleotide
uccgccguuugcuuucaau

SEQ ID NO: 1371271 - RNA, 19 nt, Artificial Sequence
  Description of Artificial Sequence: Synthetic oligonucleotide
caacauggugaagagcgca

SEQ ID NO: 1371272 - RNA, 19 nt, Artificial Sequence
  Description of Artificial Sequence: Synthetic oligonucleotide
auacgaguccagugucagu

SEQ ID NO: 1371273 - RNA, 19 nt, Artificial Sequence
  Description of Artificial Sequence: Synthetic oligonucleotide
guggguguacccggggcgg

SEQ ID NO: 1371274 - RNA, 19 nt, Artificial Sequence
  Description of Artificial Sequence: Synthetic oligonucleotide
aggcaaagccgucguccag

SEQ ID NO: 1371275 - RNA, 19 nt, Artificial Sequence
  Description of Artificial Sequence: Synthetic oligonucleotide
uggcaccucaaaggcuacg

SEQ ID NO: 1371276 - RNA, 19 nt, Artificial Sequence
  Description of Artificial Sequence: Synthetic oligonucleotide
gaagagggccgggaucuac

SEQ ID NO: 1371277 - RNA, 19 nt, Artificial Sequence
  Description of Artificial Sequence: Synthetic oligonucleotide
aagguuggccucagggaau

SEQ ID NO: 1371278 - RNA, 19 nt, Artificial Sequence
  Description of Artificial Sequence: Synthetic oligonucleotide
cccacuacagcacuggcga

SEQ ID NO: 1371279 - RNA, 19 nt, Artificial Sequence
  Description of Artificial Sequence: Synthetic oligonucleotide
cauaggcaaagccgucguc

SEQ ID NO: 1371280 - RNA, 19 nt, Artificial Sequence
  Description of Artificial Sequence: Synthetic oligonucleotide
uaucguagacaggcucaga

SEQ ID NO: 1371281 - RNA, 19 nt, Artificial Sequence
  Description of Artificial Sequence: Synthetic oligonucleotide
gaacggguuccaggcggcg

SEQ ID NO: 1371282 - RNA, 19 nt, Artificial Sequence
  Description of Artificial Sequence: Synthetic oligonucleotide
cauaggguggugucuugaa

SEQ ID NO: 1371283 - RNA, 19 nt, Artificial Sequence
  Description of Artificial Sequence: Synthetic oligonucleotide
gcacacuccauccgugagc

SEQ ID NO: 1371284 - RNA, 19 nt, Artificial Sequence
  Description of Artificial Sequence: Synthetic oligonucleotide
uacccggggcggccaaucc

SEQ ID NO: 1371285 - RNA, 19 nt, Artificial Sequence
  Description of Artificial Sequence: Synthetic oligonucleotide
cugcauacgaguccagugu

SEQ ID NO: 1371286 - RNA, 19 nt, Artificial Sequence
  Description of Artificial Sequence: Synthetic oligonucleotide
caguaccuucgcuggcacc

SEQ ID NO: 1371287 - RNA, 19 nt, Artificial Sequence
  Description of Artificial Sequence: Synthetic oligonucleotide
cugcagacgccaucccgug

SEQ ID NO: 1371288 - RNA, 19 nt, Artificial Sequence
  Description of Artificial Sequence: Synthetic oligonucleotide
caaaagcugccucucggua

SEQ ID NO: 1371289 - RNA, 19 nt, Artificial Sequence
  Description of Artificial Sequence: Synthetic oligonucleotide
ccgauaggaugccuggaag

SEQ ID NO: 1371290 - RNA, 19 nt, Artificial Sequence
  Description of Artificial Sequence: Synthetic oligonucleotide
cugacggcgggaggaacag

SEQ ID NO: 1371291 - RNA, 19 nt, Artificial Sequence
  Description of Artificial Sequence: Synthetic oligonucleotide
ggaaacuggaagacugauc

SEQ ID NO: 1371292 - RNA, 19 nt, Artificial Sequence
  Description of Artificial Sequence: Synthetic oligonucleotide
uccauccgugagccucugc

SEQ ID NO: 1371293 - RNA, 19 nt, Artificial Sequence
  Description of Artificial Sequence: Synthetic oligonucleotide
uccgcagcucggauguguu

SEQ ID NO: 1371294 - RNA, 19 nt, Artificial Sequence
  Description of Artificial Sequence: Synthetic oligonucleotide
caugaggccgcagccgcac

SEQ ID NO: 1371295 - RNA, 19 nt, Artificial Sequence
  Description of Artificial Sequence: Synthetic oligonucleotide
ccaacauggugaagagcgc

SEQ ID NO: 1371296 - RNA, 19 nt, Artificial Sequence
  Description of Artificial Sequence: Synthetic oligonucleotide
agucggcucugccuuccca

SEQ ID NO: 1371297 - RNA, 19 nt, Artificial Sequence
  Description of Artificial Sequence: Synthetic oligonucleotide
cuuccguucaauggcagcu

SEQ ID NO: 1371298 - RNA, 19 nt, Artificial Sequence
  Description of Artificial Sequence: Synthetic oligonucleotide
gccgggaucuacucccucc

SEQ ID NO: 1371299 - RNA, 19 nt, Artificial Sequence
  Description of Artificial Sequence: Synthetic oligonucleotide
aggcucagagagaacgggu

SEQ ID NO: 1371300 - RNA, 19 nt, Artificial Sequence
  Description of Artificial Sequence: Synthetic oligonucleotide
gcuguagagcugacggcgg

SEQ ID NO: 1371301 - RNA, 19 nt, Artificial Sequence
  Description of Artificial Sequence: Synthetic oligonucleotide
ccguucaauggcagcuucg

SEQ ID NO: 1371302 - RNA, 19 nt, Artificial Sequence
  Description of Artificial Sequence: Synthetic oligonucleotide
acgucgggcaguccccgcu

SEQ ID NO: 1371303 - RNA, 19 nt, Artificial Sequence
  Description of Artificial Sequence: Synthetic oligonucleotide
cagagcuacucagcucccc

SEQ ID NO: 1371304 - RNA, 19 nt, Artificial Sequence
  Description of Artificial Sequence: Synthetic oligonucleotide
auuugucggugcacaucag

SEQ ID NO: 1371305 - RNA, 19 nt, Artificial Sequence
  Description of Artificial Sequence: Synthetic oligonucleotide
ucgugaucccgaggcaggu

SEQ ID NO: 1371306 - RNA, 19 nt, Artificial Sequence
  Description of Artificial Sequence: Synthetic oligonucleotide
accacggauauguccucuu

SEQ ID NO: 1371307 - RNA, 19 nt, Artificial Sequence
  Description of Artificial Sequence: Synthetic oligonucleotide
agcagauccugaccacguu

SEQ ID NO: 1371308 - RNA, 19 nt, Artificial Sequence
  Description of Artificial Sequence: Synthetic oligonucleotide
uccaggcggcgcaacuguc

SEQ ID NO: 1371309 - RNA, 19 nt, Artificial Sequence
  Description of Artificial Sequence: Synthetic oligonucleotide
ugugcacggcccgcucucc

SEQ ID NO: 1371310 - RNA, 19 nt, Artificial Sequence
  Description of Artificial Sequence: Synthetic oligonucleotide
agucggugucugccggcug

SEQ ID NO: 1371311 - RNA, 19 nt, Artificial Sequence
  Description of Artificial Sequence: Synthetic oligonucleotide
ggucccgauaggaugccug

SEQ ID NO: 1371312 - RNA, 19 nt, Artificial Sequence
  Description of Artificial Sequence: Synthetic oligonucleotide
gcggccaauccuuccacac

SEQ ID NO: 1371313 - RNA, 19 nt, Artificial Sequence
  Description of Artificial Sequence: Synthetic oligonucleotide
uuuccgccguuugcuuuca

SEQ ID NO: 1371314 - RNA, 19 nt, Artificial Sequence
  Description of Artificial Sequence: Synthetic oligonucleotide
gcaccucaaaggcuacgug

SEQ ID NO: 1371315 - RNA, 19 nt, Artificial Sequence
  Description of Artificial Sequence: Synthetic oligonucleotide
gacgucgggcaguccccgc

SEQ ID NO: 1371316 - RNA, 19 nt, Artificial Sequence
  Description of Artificial Sequence: Synthetic oligonucleotide
cgugcagucuuuccccacg

SEQ ID NO: 1371317 - RNA, 19 nt, Artificial Sequence
  Description of Artificial Sequence: Synthetic oligonucleotide
cugugcacggcccgcucuc

SEQ ID NO: 1371318 - RNA, 19 nt, Artificial Sequence
  Description of Artificial Sequence: Synthetic oligonucleotide
ccaugugggucagagcuac

SEQ ID NO: 1371319 - RNA, 19 nt, Artificial Sequence
  Description of Artificial Sequence: Synthetic oligonucleotide
gucguccaggaggucuggg

SEQ ID NO: 1371320 - RNA, 19 nt, Artificial Sequence
  Description of Artificial Sequence: Synthetic oligonucleotide
cgcacagcaaguacaguuc

SEQ ID NO: 1371321 - RNA, 19 nt, Artificial Sequence
  Description of Artificial Sequence: Synthetic oligonucleotide
ggcggcgcaacuguccuug

SEQ ID NO: 1371322 - RNA, 19 nt, Artificial Sequence
  Description of Artificial Sequence: Synthetic oligonucleotide
acccggggcggccaauccu

SEQ ID NO: 1371323 - RNA, 19 nt, Artificial Sequence
  Description of Artificial Sequence: Synthetic oligonucleotide
ccgaacacacuggaugccc

SEQ ID NO: 1371324 - RNA, 19 nt, Artificial Sequence
  Description of Artificial Sequence: Synthetic oligonucleotide
ccauccgugagccucugca

SEQ ID NO: 1371325 - RNA, 19 nt, Artificial Sequence
  Description of Artificial Sequence: Synthetic oligonucleotide
ugaccacguucaugucgac

SEQ ID NO: 1371326 - RNA, 19 nt, Artificial Sequence
  Description of Artificial Sequence: Synthetic oligonucleotide
aauccgcagcucggaugug

SEQ ID NO: 1371327 - RNA, 19 nt, Artificial Sequence
  Description of Artificial Sequence: Synthetic oligonucleotide
ccccuauguacaaucucuc

SEQ ID NO: 1371328 - RNA, 19 nt, Artificial Sequence
  Description of Artificial Sequence: Synthetic oligonucleotide
ggaagccgugcugaacacc

SEQ ID NO: 1371329 - RNA, 19 nt, Artificial Sequence
  Description of Artificial Sequence: Synthetic oligonucleotide
gcaauacacuccucaccca

SEQ ID NO: 1371330 - RNA, 19 nt, Artificial Sequence
  Description of Artificial Sequence: Synthetic oligonucleotide
ggggcugacaugaggccgc

SEQ ID NO: 1371331 - RNA, 19 nt, Artificial Sequence
  Description of Artificial Sequence: Synthetic oligonucleotide
gccguuaccuccaccuccc

SEQ ID NO: 1371332 - RNA, 19 nt, Artificial Sequence
  Description of Artificial Sequence: Synthetic oligonucleotide
ccaauucaggaugaggaaa

SEQ ID NO: 1371333 - RNA, 19 nt, Artificial Sequence
  Description of Artificial Sequence: Synthetic oligonucleotide
uggguguacccggggcggc

SEQ ID NO: 1371334 - RNA, 19 nt, Artificial Sequence
  Description of Artificial Sequence: Synthetic oligonucleotide
cuggucccgauaggaugcc

SEQ ID NO: 1371335 - RNA, 19 nt, Artificial Sequence
  Description of Artificial Sequence: Synthetic oligonucleotide
ugucgaccuccugaugguu

SEQ ID NO: 1371336 - RNA, 19 nt, Artificial Sequence
  Description of Artificial Sequence: Synthetic oligonucleotide
ugcacggcccgcucuccuu

SEQ ID NO: 1371337 - RNA, 19 nt, Artificial Sequence
  Description of Artificial Sequence: Synthetic oligonucleotide
ggcgggaggaacaggccug

SEQ ID NO: 1371338 - RNA, 19 nt, Artificial Sequence
  Description of Artificial Sequence: Synthetic oligonucleotide
ccccaaaagcugccucucg

SEQ ID NO: 1371339 - RNA, 19 nt, Artificial Sequence
  Description of Artificial Sequence: Synthetic oligonucleotide
cgccguuugcuuucaauuc

SEQ ID NO: 1371340 - RNA, 19 nt, Artificial Sequence
  Description of Artificial Sequence: Synthetic oligonucleotide
cgaguccagugucaguggc

SEQ ID NO: 1371341 - RNA, 19 nt, Artificial Sequence
  Description of Artificial Sequence: Synthetic oligonucleotide
cugucgugaucccgaggca

SEQ ID NO: 1371342 - RNA, 19 nt, Artificial Sequence
  Description of Artificial Sequence: Synthetic oligonucleotide
uacguggcuucaggcccug

SEQ ID NO: 1371343 - RNA, 19 nt, Artificial Sequence
  Description of Artificial Sequence: Synthetic oligonucleotide
cagcucggauguguuggug

SEQ ID NO: 1371344 - RNA, 19 nt, Artificial Sequence
  Description of Artificial Sequence: Synthetic oligonucleotide
uggucccgauaggaugccu

SEQ ID NO: 1371345 - RNA, 19 nt, Artificial Sequence
  Description of Artificial Sequence: Synthetic oligonucleotide
gggucuaugcccagcugga

SEQ ID NO: 1371346 - RNA, 19 nt, Artificial Sequence
  Description of Artificial Sequence: Synthetic oligonucleotide
acgccaucccgugcagucu

SEQ ID NO: 1371347 - RNA, 19 nt, Artificial Sequence
  Description of Artificial Sequence: Synthetic oligonucleotide
guggcucgcugcacacucc

SEQ ID NO: 1371348 - RNA, 19 nt, Artificial Sequence
  Description of Artificial Sequence: Synthetic oligonucleotide
ggacgucgggcaguccccg

SEQ ID NO: 1371349 - RNA, 19 nt, Artificial Sequence
  Description of Artificial Sequence: Synthetic oligonucleotide
gcauacgaguccaguguca

SEQ ID NO: 1371350 - RNA, 19 nt, Artificial Sequence
  Description of Artificial Sequence: Synthetic oligonucleotide
gaggucugggccgcccgga

SEQ ID NO: 1371351 - RNA, 19 nt, Artificial Sequence
  Description of Artificial Sequence: Synthetic oligonucleotide
cuggcgaguggcggugcug

SEQ ID NO: 1371352 - RNA, 19 nt, Artificial Sequence
  Description of Artificial Sequence: Synthetic oligonucleotide
guccuugcuggucccgaua

SEQ ID NO: 1371353 - RNA, 19 nt, Artificial Sequence
  Description of Artificial Sequence: Synthetic oligonucleotide
agacgccaucccgugcagu

SEQ ID NO: 1371354 - RNA, 19 nt, Artificial Sequence
  Description of Artificial Sequence: Synthetic oligonucleotide
gcacggcccgcucuccuug

SEQ ID NO: 1371355 - RNA, 19 nt, Artificial Sequence
  Description of Artificial Sequence: Synthetic oligonucleotide
cuacguggcuucaggcccu

SEQ ID NO: 1371356 - RNA, 19 nt, Artificial Sequence
  Description of Artificial Sequence: Synthetic oligonucleotide
cacuggcgaguggcggugc

SEQ ID NO: 1371357 - RNA, 19 nt, Artificial Sequence
  Description of Artificial Sequence: Synthetic oligonucleotide
uuccgccguuugcuuucaa

SEQ ID NO: 1371358 - RNA, 19 nt, Artificial Sequence
  Description of Artificial Sequence: Synthetic oligonucleotide
caaggacgucgggcagucc

SEQ ID NO: 1371359 - RNA, 19 nt, Artificial Sequence
  Description of Artificial Sequence: Synthetic oligonucleotide
guaccuucgcuggcaccuc

SEQ ID NO: 1371360 - RNA, 19 nt, Artificial Sequence
  Description of Artificial Sequence: Synthetic oligonucleotide
cucacccaguaccuucgcu

SEQ ID NO: 1371361 - RNA, 19 nt, Artificial Sequence
  Description of Artificial Sequence: Synthetic oligonucleotide
gcuccccaaggacgucggg

SEQ ID NO: 1371362 - RNA, 19 nt, Artificial Sequence
  Description of Artificial Sequence: Synthetic oligonucleotide
uguacccggggcggccaau

SEQ ID NO: 1371363 - RNA, 19 nt, Artificial Sequence
  Description of Artificial Sequence: Synthetic oligonucleotide
ggcggccaauccuuccaca

SEQ ID NO: 1371364 - RNA, 19 nt, Artificial Sequence
  Description of Artificial Sequence: Synthetic oligonucleotide
ggcaccucaaaggcuacgu

SEQ ID NO: 1371365 - RNA, 19 nt, Artificial Sequence
  Description of Artificial Sequence: Synthetic oligonucleotide
cuuuccccacgaggcugug

SEQ ID NO: 1371366 - RNA, 19 nt, Artificial Sequence
  Description of Artificial Sequence: Synthetic oligonucleotide
ggggcccgccugcaggagc

SEQ ID NO: 1371367 - RNA, 19 nt, Artificial Sequence
  Description of Artificial Sequence: Synthetic oligonucleotide
cccgauaggaugccuggaa

SEQ ID NO: 1371368 - RNA, 19 nt, Artificial Sequence
  Description of Artificial Sequence: Synthetic oligonucleotide
gcaauuugucggugcacau

SEQ ID NO: 1371369 - RNA, 19 nt, Artificial Sequence
  Description of Artificial Sequence: Synthetic oligonucleotide
ccgcccggaggcuccaggc

SEQ ID NO: 1371370 - RNA, 19 nt, Artificial Sequence
  Description of Artificial Sequence: Synthetic oligonucleotide
acguggcuucaggcccugg

SEQ ID NO: 1371371 - RNA, 19 nt, Artificial Sequence
  Description of Artificial Sequence: Synthetic oligonucleotide
gcacuggcgaguggcggug

SEQ ID NO: 1371372 - RNA, 19 nt, Artificial Sequence
  Description of Artificial Sequence: Synthetic oligonucleotide
gcugaacaccacggauaug

SEQ ID NO: 1371373 - RNA, 19 nt, Artificial Sequence
  Description of Artificial Sequence: Synthetic oligonucleotide
accuucgcuggcaccucaa

SEQ ID NO: 1371374 - RNA, 19 nt, Artificial Sequence
  Description of Artificial Sequence: Synthetic oligonucleotide
ggcaugccguuaccuccac

SEQ ID NO: 1371375 - RNA, 19 nt, Artificial Sequence
  Description of Artificial Sequence: Synthetic oligonucleotide
cguuaccuccaccucccuc

SEQ ID NO: 1371376 - RNA, 19 nt, Artificial Sequence
  Description of Artificial Sequence: Synthetic oligonucleotide
cuccauccgugagccucug

SEQ ID NO: 1371377 - RNA, 19 nt, Artificial Sequence
  Description of Artificial Sequence: Synthetic oligonucleotide
gcaaauccgcagcucggau

SEQ ID NO: 1371378 - RNA, 19 nt, Artificial Sequence
  Description of Artificial Sequence: Synthetic oligonucleotide
ccgugcagucuuuccccac

SEQ ID NO: 1371379 - RNA, 19 nt, Artificial Sequence
  Description of Artificial Sequence: Synthetic oligonucleotide
cccaguaccuucgcuggca

SEQ ID NO: 1371380 - RNA, 19 nt, Artificial Sequence
  Description of Artificial Sequence: Synthetic oligonucleotide
aggcggcgcaacuguccuu

SEQ ID NO: 1371381 - RNA, 19 nt, Artificial Sequence
  Description of Artificial Sequence: Synthetic oligonucleotide
ggcucagagagaacggguu

SEQ ID NO: 1371382 - RNA, 19 nt, Artificial Sequence
  Description of Artificial Sequence: Synthetic oligonucleotide
agccgucguccaggagguc

SEQ ID NO: 1371383 - RNA, 19 nt, Artificial Sequence
  Description of Artificial Sequence: Synthetic oligonucleotide
ccgcagcucggauguguug

SEQ ID NO: 1371384 - RNA, 19 nt, Artificial Sequence
  Description of Artificial Sequence: Synthetic oligonucleotide
gguguacccggggcggcca

SEQ ID NO: 1371385 - RNA, 19 nt, Artificial Sequence
  Description of Artificial Sequence: Synthetic oligonucleotide
ggcugcauacgaguccagu

SEQ ID NO: 1371386 - RNA, 19 nt, Artificial Sequence
  Description of Artificial Sequence: Synthetic oligonucleotide
gccgucguccaggaggucu

SEQ ID NO: 1371387 - RNA, 19 nt, Artificial Sequence
  Description of Artificial Sequence: Synthetic oligonucleotide
ccgugcugaacaccacgga

SEQ ID NO: 1371388 - RNA, 19 nt, Artificial Sequence
  Description of Artificial Sequence: Synthetic oligonucleotide
guguacccggggcggccaa

SEQ ID NO: 1371389 - RNA, 19 nt, Artificial Sequence
  Description of Artificial Sequence: Synthetic oligonucleotide
caccacggauauguccucu

SEQ ID NO: 1371390 - RNA, 19 nt, Artificial Sequence
  Description of Artificial Sequence: Synthetic oligonucleotide
ccgccguuugcuuucaauu

SEQ ID NO: 1371391 - RNA, 19 nt, Artificial Sequence
  Description of Artificial Sequence: Synthetic oligonucleotide
ggccgggaucuacucccuc

SEQ ID NO: 1371392 - RNA, 19 nt, Artificial Sequence
  Description of Artificial Sequence: Synthetic oligonucleotide
gcggcgcaacuguccuugc

SEQ ID NO: 1371393 - RNA, 19 nt, Artificial Sequence
  Description of Artificial Sequence: Synthetic oligonucleotide
ccuccccuauguacaaucu

SEQ ID NO: 1371394 - RNA, 19 nt, Artificial Sequence
  Description of Artificial Sequence: Synthetic oligonucleotide
cccgugcagucuuucccca

SEQ ID NO: 1371395 - RNA, 19 nt, Artificial Sequence
  Description of Artificial Sequence: Synthetic oligonucleotide
gcagcucggauguguuggu

SEQ ID NO: 1371396 - RNA, 19 nt, Artificial Sequence
  Description of Artificial Sequence: Synthetic oligonucleotide
gugcacggcccgcucuccu

SEQ ID NO: 1371397 - RNA, 19 nt, Artificial Sequence
  Description of Artificial Sequence: Synthetic oligonucleotide
cgugcugaacaccacggau

SEQ ID NO: 1371398 - RNA, 19 nt, Artificial Sequence
  Description of Artificial Sequence: Synthetic oligonucleotide
gcgggaggaacaggccuga

SEQ ID NO: 1371399 - RNA, 19 nt, Artificial Sequence
  Description of Artificial Sequence: Synthetic oligonucleotide
cccagcuggaucuuccguu

SEQ ID NO: 1371400 - RNA, 19 nt, Artificial Sequence
  Description of Artificial Sequence: Synthetic oligonucleotide
ccaucccgugcagucuuuc

SEQ ID NO: 1371401 - RNA, 19 nt, Artificial Sequence
  Description of Artificial Sequence: Synthetic oligonucleotide
cgcccggaggcuccaggcc

SEQ ID NO: 1371402 - RNA, 19 nt, Artificial Sequence
  Description of Artificial Sequence: Synthetic oligonucleotide
ggccaggaagagauauggu

SEQ ID NO: 1371403 - RNA, 19 nt, Artificial Sequence
  Description of Artificial Sequence: Synthetic oligonucleotide
cggccaauccuuccacaca

SEQ ID NO: 1371404 - RNA, 19 nt, Artificial Sequence
  Description of Artificial Sequence: Synthetic oligonucleotide
ccuucgcuggcaccucaaa

SEQ ID NO: 1371405 - RNA, 19 nt, Artificial Sequence
  Description of Artificial Sequence: Synthetic oligonucleotide
cgggaucuacucccuccuc

SEQ ID NO: 1371406 - RNA, 19 nt, Artificial Sequence
  Description of Artificial Sequence: Synthetic oligonucleotide
gccgcacccugcagacgcc

SEQ ID NO: 1371407 - RNA, 19 nt, Artificial Sequence
  Description of Artificial Sequence: Synthetic oligonucleotide
ggucuaugcccagcuggau

SEQ ID NO: 1371408 - RNA, 19 nt, Artificial Sequence
  Description of Artificial Sequence: Synthetic oligonucleotide
cacggcccgcucuccuugu

SEQ ID NO: 1371409 - RNA, 19 nt, Artificial Sequence
  Description of Artificial Sequence: Synthetic oligonucleotide
ccggggcggccaauccuuc

SEQ ID NO: 1371410 - RNA, 19 nt, Artificial Sequence
  Description of Artificial Sequence: Synthetic oligonucleotide
ccacggauauguccucuuu

SEQ ID NO: 1371411 - RNA, 19 nt, Artificial Sequence
  Description of Artificial Sequence: Synthetic oligonucleotide
cuaugcccagcuggaucuu

SEQ ID NO: 1371412 - RNA, 19 nt, Artificial Sequence
  Description of Artificial Sequence: Synthetic oligonucleotide
cuccuccccuauguacaau

SEQ ID NO: 1371413 - RNA, 19 nt, Artificial Sequence
  Description of Artificial Sequence: Synthetic oligonucleotide
cccaaggacgucgggcagu

SEQ ID NO: 1371414 - RNA, 19 nt, Artificial Sequence
  Description of Artificial Sequence: Synthetic oligonucleotide
cgggaggaacaggccugag

SEQ ID NO: 1371415 - RNA, 19 nt, Artificial Sequence
  Description of Artificial Sequence: Synthetic oligonucleotide
ccggcaggaagugguccaa

SEQ ID NO: 1371416 - RNA, 19 nt, Artificial Sequence
  Description of Artificial Sequence: Synthetic oligonucleotide
cccggggcggccaauccuu

SEQ ID NO: 1371417 - RNA, 19 nt, Artificial Sequence
  Description of Artificial Sequence: Synthetic oligonucleotide
cgcuggcaccucaaaggcu

SEQ ID NO: 1371418 - RNA, 19 nt, Artificial Sequence
  Description of Artificial Sequence: Synthetic oligonucleotide
cgcaacuguccuugcuggu

SEQ ID NO: 1371419 - RNA, 19 nt, Artificial Sequence
  Description of Artificial Sequence: Synthetic oligonucleotide
gggccgggaucuacucccu

SEQ ID NO: 1371420 - RNA, 19 nt, Artificial Sequence
  Description of Artificial Sequence: Synthetic oligonucleotide
cggauguguugguggacuu

SEQ ID NO: 1371421 - RNA, 19 nt, Artificial Sequence
  Description of Artificial Sequence: Synthetic oligonucleotide
cgugaucccgaggcaggua

SEQ ID NO: 1371422 - RNA, 19 nt, Artificial Sequence
  Description of Artificial Sequence: Synthetic oligonucleotide
cccgcucuccuuguugauu

SEQ ID NO: 1371423 - RNA, 19 nt, Artificial Sequence
  Description of Artificial Sequence: Synthetic oligonucleotide
ccguuaccuccaccucccu

SEQ ID NO: 1371424 - RNA, 19 nt, Artificial Sequence
  Description of Artificial Sequence: Synthetic oligonucleotide
cggcgcaacuguccuugcu

SEQ ID NO: 1371425 - RNA, 19 nt, Artificial Sequence
  Description of Artificial Sequence: Synthetic oligonucleotide
cgccaucccgugcagucuu

SEQ ID NO: 1371426 - RNA, 19 nt, Artificial Sequence
  Description of Artificial Sequence: Synthetic oligonucleotide
gccaucccgugcagucuuu

SEQ ID NO: 1371427 - RNA, 19 nt, Artificial Sequence
  Description of Artificial Sequence: Synthetic oligonucleotide
cgucgggcaguccccgcuu

SEQ ID NO: 1371428 - RNA, 19 nt, Artificial Sequence
  Description of Artificial Sequence: Synthetic oligonucleotide
aaucuuuugaacuacaagu

SEQ ID NO: 1371429 - RNA, 19 nt, Artificial Sequence
  Description of Artificial Sequence: Synthetic oligonucleotide
aaugcuuauguauucaauc

SEQ ID NO: 1371430 - RNA, 19 nt, Artificial Sequence
  Description of Artificial Sequence: Synthetic oligonucleotide
uucaaucuaauauagauca

SEQ ID NO: 1371431 - RNA, 19 nt, Artificial Sequence
  Description of Artificial Sequence: Synthetic oligonucleotide
aacuacaagugcuacauac

SEQ ID NO: 1371432 - RNA, 19 nt, Artificial Sequence
  Description of Artificial Sequence: Synthetic oligonucleotide
ucaauaagaaauauguuca

SEQ ID NO: 1371433 - RNA, 19 nt, Artificial Sequence
  Description of Artificial Sequence: Synthetic oligonucleotide
uucucaauaagaaauaugu

SEQ ID NO: 1371434 - RNA, 19 nt, Artificial Sequence
  Description of Artificial Sequence: Synthetic oligonucleotide
ucuaauauagaucacuggu

SEQ ID NO: 1371435 - RNA, 19 nt, Artificial Sequence
  Description of Artificial Sequence: Synthetic oligonucleotide
aaaagauuugacgaagucg

SEQ ID NO: 1371436 - RNA, 19 nt, Artificial Sequence
  Description of Artificial Sequence: Synthetic oligonucleotide
ucgaauuuggcaaaaguag

SEQ ID NO: 1371437 - RNA, 19 nt, Artificial Sequence
  Description of Artificial Sequence: Synthetic oligonucleotide
uuauaagacauauagguaa

SEQ ID NO: 1371438 - RNA, 19 nt, Artificial Sequence
  Description of Artificial Sequence: Synthetic oligonucleotide
agugcaaucacuuugcacu

SEQ ID NO: 1371439 - RNA, 19 nt, Artificial Sequence
  Description of Artificial Sequence: Synthetic oligonucleotide
aaaaugguuauuugcaaca

SEQ ID NO: 1371440 - RNA, 19 nt, Artificial Sequence
  Description of Artificial Sequence: Synthetic oligonucleotide
uauucaaucuaauauagau

SEQ ID NO: 1371441 - RNA, 19 nt, Artificial Sequence
  Description of Artificial Sequence: Synthetic oligonucleotide
uauugauuuuauuauaaga

SEQ ID NO: 1371442 - RNA, 19 nt, Artificial Sequence
  Description of Artificial Sequence: Synthetic oligonucleotide
agaaauauuuuaugauagc

SEQ ID NO: 1371443 - RNA, 19 nt, Artificial Sequence
  Description of Artificial Sequence: Synthetic oligonucleotide
cuuucuaugauuuugggga

SEQ ID NO: 1371444 - RNA, 19 nt, Artificial Sequence
  Description of Artificial Sequence: Synthetic oligonucleotide
auuuguaagacacaagggu

SEQ ID NO: 1371445 - RNA, 19 nt, Artificial Sequence
  Description of Artificial Sequence: Synthetic oligonucleotide
aaagauuugacgaagucga

SEQ ID NO: 1371446 - RNA, 19 nt, Artificial Sequence
  Description of Artificial Sequence: Synthetic oligonucleotide
uaugauagcuccaugauuu

SEQ ID NO: 1371447 - RNA, 19 nt, Artificial Sequence
  Description of Artificial Sequence: Synthetic oligonucleotide
aaagauuccuugcccgugc

SEQ ID NO: 1371448 - RNA, 19 nt, Artificial Sequence
  Description of Artificial Sequence: Synthetic oligonucleotide
uuuuaugauagcuccauga

SEQ ID NO: 1371449 - RNA, 19 nt, Artificial Sequence
  Description of Artificial Sequence: Synthetic oligonucleotide
auaaauaugcuuuaucaaa

SEQ ID NO: 1371450 - RNA, 19 nt, Artificial Sequence
  Description of Artificial Sequence: Synthetic oligonucleotide
uacgauguccaucaagggg

SEQ ID NO: 1371451 - RNA, 19 nt, Artificial Sequence
  Description of Artificial Sequence: Synthetic oligonucleotide
uaagaaauauuuuaugaua

SEQ ID NO: 1371452 - RNA, 19 nt, Artificial Sequence
  Description of Artificial Sequence: Synthetic oligonucleotide
uguuccuaugaauaaauac

SEQ ID NO: 1371453 - RNA, 19 nt, Artificial Sequence
  Description of Artificial Sequence: Synthetic oligonucleotide
uugacaaagauuccuugcc

SEQ ID NO: 1371454 - RNA, 19 nt, Artificial Sequence
  Description of Artificial Sequence: Synthetic oligonucleotide
caugcaaugguccuggagc

SEQ ID NO: 1371455 - RNA, 19 nt, Artificial Sequence
  Description of Artificial Sequence: Synthetic oligonucleotide
uaugcuuuaucaaauguua

SEQ ID NO: 1371456 - RNA, 19 nt, Artificial Sequence
  Description of Artificial Sequence: Synthetic oligonucleotide
uuauuugcaacauaauaau

SEQ ID NO: 1371457 - RNA, 19 nt, Artificial Sequence
  Description of Artificial Sequence: Synthetic oligonucleotide
ugauuauauuuaaagugca

SEQ ID NO: 1371458 - RNA, 19 nt, Artificial Sequence
  Description of Artificial Sequence: Synthetic oligonucleotide
cacuaagucacuuuuguug

SEQ ID NO: 1371459 - RNA, 19 nt, Artificial Sequence
  Description of Artificial Sequence: Synthetic oligonucleotide
auaaucguugcacucucac

SEQ ID NO: 1371460 - RNA, 19 nt, Artificial Sequence
  Description of Artificial Sequence: Synthetic oligonucleotide
aaucuaauauagaucacug

SEQ ID NO: 1371461 - RNA, 19 nt, Artificial Sequence
  Description of Artificial Sequence: Synthetic oligonucleotide
aaauaugcccuuaaaugag

SEQ ID NO: 1371462 - RNA, 19 nt, Artificial Sequence
  Description of Artificial Sequence: Synthetic oligonucleotide
aaaugaugggaaugucuuc

SEQ ID NO: 1371463 - RNA, 19 nt, Artificial Sequence
  Description of Artificial Sequence: Synthetic oligonucleotide
uaaaaugguuauuugcaac

SEQ ID NO: 1371464 - RNA, 19 nt, Artificial Sequence
  Description of Artificial Sequence: Synthetic oligonucleotide
acucucaccaucaacgacc

SEQ ID NO: 1371465 - RNA, 19 nt, Artificial Sequence
  Description of Artificial Sequence: Synthetic oligonucleotide
aucuaauauagaucacugg

SEQ ID NO: 1371466 - RNA, 19 nt, Artificial Sequence
  Description of Artificial Sequence: Synthetic oligonucleotide
caaauaugcccuuaaauga

SEQ ID NO: 1371467 - RNA, 19 nt, Artificial Sequence
  Description of Artificial Sequence: Synthetic oligonucleotide
cauguagcaaaucaagaug

SEQ ID NO: 1371468 - RNA, 19 nt, Artificial Sequence
  Description of Artificial Sequence: Synthetic oligonucleotide
cuuaguuuccagcaaaguc

SEQ ID NO: 1371469 - RNA, 19 nt, Artificial Sequence
  Description of Artificial Sequence: Synthetic oligonucleotide
uagacgaugagguaggcau

SEQ ID NO: 1371470 - RNA, 19 nt, Artificial Sequence
  Description of Artificial Sequence: Synthetic oligonucleotide
uuaaaaugguuauuugcaa

SEQ ID NO: 1371471 - RNA, 19 nt, Artificial Sequence
  Description of Artificial Sequence: Synthetic oligonucleotide
aggguaaacaaucuuuuga

SEQ ID NO: 1371472 - RNA, 19 nt, Artificial Sequence
  Description of Artificial Sequence: Synthetic oligonucleotide
ucacgaugcccucaaacag

SEQ ID NO: 1371473 - RNA, 19 nt, Artificial Sequence
  Description of Artificial Sequence: Synthetic oligonucleotide
auuugcaacaggggaagcc

SEQ ID NO: 1371474 - RNA, 19 nt, Artificial Sequence
  Description of Artificial Sequence: Synthetic oligonucleotide
uggggaaaaccuuugauua

SEQ ID NO: 1371475 - RNA, 19 nt, Artificial Sequence
  Description of Artificial Sequence: Synthetic oligonucleotide
aaaugagucucaggugccc

SEQ ID NO: 1371476 - RNA, 19 nt, Artificial Sequence
  Description of Artificial Sequence: Synthetic oligonucleotide
augcuuauguauucaaucu

SEQ ID NO: 1371477 - RNA, 19 nt, Artificial Sequence
  Description of Artificial Sequence: Synthetic oligonucleotide
aagauguuccuaugaauaa

SEQ ID NO: 1371478 - RNA, 19 nt, Artificial Sequence
  Description of Artificial Sequence: Synthetic oligonucleotide
ucucauagucacaacugug

SEQ ID NO: 1371479 - RNA, 19 nt, Artificial Sequence
  Description of Artificial Sequence: Synthetic oligonucleotide
acaaacucaugugaacccc

SEQ ID NO: 1371480 - RNA, 19 nt, Artificial Sequence
  Description of Artificial Sequence: Synthetic oligonucleotide
cuuaaaugagucucaggug

SEQ ID NO: 1371481 - RNA, 19 nt, Artificial Sequence
  Description of Artificial Sequence: Synthetic oligonucleotide
ugaaccccaaauaugcccu

SEQ ID NO: 1371482 - RNA, 19 nt, Artificial Sequence
  Description of Artificial Sequence: Synthetic oligonucleotide
cuucacauugugcugcacg

SEQ ID NO: 1371483 - RNA, 19 nt, Artificial Sequence
  Description of Artificial Sequence: Synthetic oligonucleotide
auaagcaccacucgguagu

SEQ ID NO: 1371484 - RNA, 19 nt, Artificial Sequence
  Description of Artificial Sequence: Synthetic oligonucleotide
aauacugacucuugacaaa

SEQ ID NO: 1371485 - RNA, 19 nt, Artificial Sequence
  Description of Artificial Sequence: Synthetic oligonucleotide
ucuacaaaucucugugggc

SEQ ID NO: 1371486 - RNA, 19 nt, Artificial Sequence
  Description of Artificial Sequence: Synthetic oligonucleotide
aagaucaaccaaaggauca

SEQ ID NO: 1371487 - RNA, 19 nt, Artificial Sequence
  Description of Artificial Sequence: Synthetic oligonucleotide
caacacuucucauagucac

SEQ ID NO: 1371488 - RNA, 19 nt, Artificial Sequence
  Description of Artificial Sequence: Synthetic oligonucleotide
acgaagucgaauuuggcaa

SEQ ID NO: 1371489 - RNA, 19 nt, Artificial Sequence
  Description of Artificial Sequence: Synthetic oligonucleotide
uaaaugagucucaggugcc

SEQ ID NO: 1371490 - RNA, 19 nt, Artificial Sequence
  Description of Artificial Sequence: Synthetic oligonucleotide
uugcccaugaggcuaaccu

SEQ ID NO: 1371491 - RNA, 19 nt, Artificial Sequence
  Description of Artificial Sequence: Synthetic oligonucleotide
uuugacgaagucgaauuug

SEQ ID NO: 1371492 - RNA, 19 nt, Artificial Sequence
  Description of Artificial Sequence: Synthetic oligonucleotide
gacgaagucgaauuuggca

SEQ ID NO: 1371493 - RNA, 19 nt, Artificial Sequence
  Description of Artificial Sequence: Synthetic oligonucleotide
aggcuaaccuguugguucc

SEQ ID NO: 1371494 - RNA, 19 nt, Artificial Sequence
  Description of Artificial Sequence: Synthetic oligonucleotide
cugacacagacacuucucg

SEQ ID NO: 1371495 - RNA, 19 nt, Artificial Sequence
  Description of Artificial Sequence: Synthetic oligonucleotide
cucaaaauaagcauuugua

SEQ ID NO: 1371496 - RNA, 19 nt, Artificial Sequence
  Description of Artificial Sequence: Synthetic oligonucleotide
uauuugcaacauaauaaua

SEQ ID NO: 1371497 - RNA, 19 nt, Artificial Sequence
  Description of Artificial Sequence: Synthetic oligonucleotide
uauuuuaugauagcuccau

SEQ ID NO: 1371498 - RNA, 19 nt, Artificial Sequence
  Description of Artificial Sequence: Synthetic oligonucleotide
agucgaauuuggcaaaagu

SEQ ID NO: 1371499 - RNA, 19 nt, Artificial Sequence
  Description of Artificial Sequence: Synthetic oligonucleotide
uguccaugcugucauguac

SEQ ID NO: 1371500 - RNA, 19 nt, Artificial Sequence
  Description of Artificial Sequence: Synthetic oligonucleotide
gugaaccccaaauaugccc

SEQ ID NO: 1371501 - RNA, 19 nt, Artificial Sequence
  Description of Artificial Sequence: Synthetic oligonucleotide
agaacuguuagugagcuua

SEQ ID NO: 1371502 - RNA, 19 nt, Artificial Sequence
  Description of Artificial Sequence: Synthetic oligonucleotide
gaggcuaaccuguugguuc

SEQ ID NO: 1371503 - RNA, 19 nt, Artificial Sequence
  Description of Artificial Sequence: Synthetic oligonucleotide
auguagcaaaucaagaugu

SEQ ID NO: 1371504 - RNA, 19 nt, Artificial Sequence
  Description of Artificial Sequence: Synthetic oligonucleotide
agcuccuaagucuacaaau

SEQ ID NO: 1371505 - RNA, 19 nt, Artificial Sequence
  Description of Artificial Sequence: Synthetic oligonucleotide
uccuaagucuacaaaucuc

SEQ ID NO: 1371506 - RNA, 19 nt, Artificial Sequence
  Description of Artificial Sequence: Synthetic oligonucleotide
gacgucucaaugaauuugc

SEQ ID NO: 1371507 - RNA, 19 nt, Artificial Sequence
  Description of Artificial Sequence: Synthetic oligonucleotide
uuuaaagugcaaucacuuu

SEQ ID NO: 1371508 - RNA, 19 nt, Artificial Sequence
  Description of Artificial Sequence: Synthetic oligonucleotide
aaaggaucaggccuuucua

SEQ ID NO: 1371509 - RNA, 19 nt, Artificial Sequence
  Description of Artificial Sequence: Synthetic oligonucleotide
uaaucguugcacucucacc

SEQ ID NO: 1371510 - RNA, 19 nt, Artificial Sequence
  Description of Artificial Sequence: Synthetic oligonucleotide
ccuaugaauaaauacugac

SEQ ID NO: 1371511 - RNA, 19 nt, Artificial Sequence
  Description of Artificial Sequence: Synthetic oligonucleotide
uuggggaaaaccuuugauu

SEQ ID NO: 1371512 - RNA, 19 nt, Artificial Sequence
  Description of Artificial Sequence: Synthetic oligonucleotide
aaugguuauuugcaacaua

SEQ ID NO: 1371513 - RNA, 19 nt, Artificial Sequence
  Description of Artificial Sequence: Synthetic oligonucleotide
uugcacucaagguuaucag

SEQ ID NO: 1371514 - RNA, 19 nt, Artificial Sequence
  Description of Artificial Sequence: Synthetic oligonucleotide
cacuugguugcccaugagg

SEQ ID NO: 1371515 - RNA, 19 nt, Artificial Sequence
  Description of Artificial Sequence: Synthetic oligonucleotide
ugcuuauguauucaaucua

SEQ ID NO: 1371516 - RNA, 19 nt, Artificial Sequence
  Description of Artificial Sequence: Synthetic oligonucleotide
augguuauuugcaacauaa

SEQ ID NO: 1371517 - RNA, 19 nt, Artificial Sequence
  Description of Artificial Sequence: Synthetic oligonucleotide
acaccugcgaagauguugg

SEQ ID NO: 1371518 - RNA, 19 nt, Artificial Sequence
  Description of Artificial Sequence: Synthetic oligonucleotide
gucccaagggccuucuacg

SEQ ID NO: 1371519 - RNA, 19 nt, Artificial Sequence
  Description of Artificial Sequence: Synthetic oligonucleotide
acuguuagugagcuuaguu

SEQ ID NO: 1371520 - RNA, 19 nt, Artificial Sequence
  Description of Artificial Sequence: Synthetic oligonucleotide
cuaagucuacaaaucucug

SEQ ID NO: 1371521 - RNA, 19 nt, Artificial Sequence
  Description of Artificial Sequence: Synthetic oligonucleotide
ucugugggcuuuaaagaaa

SEQ ID NO: 1371522 - RNA, 19 nt, Artificial Sequence
  Description of Artificial Sequence: Synthetic oligonucleotide
ugcacucaagguuaucagu

SEQ ID NO: 1371523 - RNA, 19 nt, Artificial Sequence
  Description of Artificial Sequence: Synthetic oligonucleotide
aauaugcccuuaaaugagu

SEQ ID NO: 1371524 - RNA, 19 nt, Artificial Sequence
  Description of Artificial Sequence: Synthetic oligonucleotide
cucaaugaauuugcagucg

SEQ ID NO: 1371525 - RNA, 19 nt, Artificial Sequence
  Description of Artificial Sequence: Synthetic oligonucleotide
acacaaaagauuugacgaa

SEQ ID NO: 1371526 - RNA, 19 nt, Artificial Sequence
  Description of Artificial Sequence: Synthetic oligonucleotide
acucaagguuaucaguugu

SEQ ID NO: 1371527 - RNA, 19 nt, Artificial Sequence
  Description of Artificial Sequence: Synthetic oligonucleotide
uugcccgugcacuugguug

SEQ ID NO: 1371528 - RNA, 19 nt, Artificial Sequence
  Description of Artificial Sequence: Synthetic oligonucleotide
aaaugguuauuugcaacau

SEQ ID NO: 1371529 - RNA, 19 nt, Artificial Sequence
  Description of Artificial Sequence: Synthetic oligonucleotide
gaggauaaucguugcacuc

SEQ ID NO: 1371530 - RNA, 19 nt, Artificial Sequence
  Description of Artificial Sequence: Synthetic oligonucleotide
gugagcuuaguuuccagca

SEQ ID NO: 1371531 - RNA, 19 nt, Artificial Sequence
  Description of Artificial Sequence: Synthetic oligonucleotide
ugcacuugguugcccauga

SEQ ID NO: 1371532 - RNA, 19 nt, Artificial Sequence
  Description of Artificial Sequence: Synthetic oligonucleotide
acaaagauuccuugcccgu

SEQ ID NO: 1371533 - RNA, 19 nt, Artificial Sequence
  Description of Artificial Sequence: Synthetic oligonucleotide
gguuauuugcaacauaaua

SEQ ID NO: 1371534 - RNA, 19 nt, Artificial Sequence
  Description of Artificial Sequence: Synthetic oligonucleotide
gauuugacgaagucgaauu

SEQ ID NO: 1371535 - RNA, 19 nt, Artificial Sequence
  Description of Artificial Sequence: Synthetic oligonucleotide
ugagcuuaguuuccagcaa

SEQ ID NO: 1371536 - RNA, 19 nt, Artificial Sequence
  Description of Artificial Sequence: Synthetic oligonucleotide
ugucugucgggcccugcgg

SEQ ID NO: 1371537 - RNA, 19 nt, Artificial Sequence
  Description of Artificial Sequence: Synthetic oligonucleotide
gacgaugagguaggcaucc

SEQ ID NO: 1371538 - RNA, 19 nt, Artificial Sequence
  Description of Artificial Sequence: Synthetic oligonucleotide
acaacugugaugagaauau

SEQ ID NO: 1371539 - RNA, 19 nt, Artificial Sequence
  Description of Artificial Sequence: Synthetic oligonucleotide
ugugggcuuuaaagaaaag

SEQ ID NO: 1371540 - RNA, 19 nt, Artificial Sequence
  Description of Artificial Sequence: Synthetic oligonucleotide
aaggggacaucugggugac

SEQ ID NO: 1371541 - RNA, 19 nt, Artificial Sequence
  Description of Artificial Sequence: Synthetic oligonucleotide
agacgucucaaugaauuug

SEQ ID NO: 1371542 - RNA, 19 nt, Artificial Sequence
  Description of Artificial Sequence: Synthetic oligonucleotide
acacagacacuucucggca

SEQ ID NO: 1371543 - RNA, 19 nt, Artificial Sequence
  Description of Artificial Sequence: Synthetic oligonucleotide
ucucaaagcucgcucgguc

SEQ ID NO: 1371544 - RNA, 19 nt, Artificial Sequence
  Description of Artificial Sequence: Synthetic oligonucleotide
uuagugagcuuaguuucca

SEQ ID NO: 1371545 - RNA, 19 nt, Artificial Sequence
  Description of Artificial Sequence: Synthetic oligonucleotide
agaauauucugcugcccaa

SEQ ID NO: 1371546 - RNA, 19 nt, Artificial Sequence
  Description of Artificial Sequence: Synthetic oligonucleotide
acuugccuaccccuugcuc

SEQ ID NO: 1371547 - RNA, 19 nt, Artificial Sequence
  Description of Artificial Sequence: Synthetic oligonucleotide
uugcuccccuauaagcacc

SEQ ID NO: 1371548 - RNA, 19 nt, Artificial Sequence
  Description of Artificial Sequence: Synthetic oligonucleotide
ugcccaugaggcuaaccug

SEQ ID NO: 1371549 - RNA, 19 nt, Artificial Sequence
  Description of Artificial Sequence: Synthetic oligonucleotide
ugcccauguagcaaaucaa

SEQ ID NO: 1371550 - RNA, 19 nt, Artificial Sequence
  Description of Artificial Sequence: Synthetic oligonucleotide
uggauccuuagcucagaug

SEQ ID NO: 1371551 - RNA, 19 nt, Artificial Sequence
  Description of Artificial Sequence: Synthetic oligonucleotide
ugagguaggcauccccaac

SEQ ID NO: 1371552 - RNA, 19 nt, Artificial Sequence
  Description of Artificial Sequence: Synthetic oligonucleotide
cucgcucggucugugaugg

SEQ ID NO: 1371553 - RNA, 19 nt, Artificial Sequence
  Description of Artificial Sequence: Synthetic oligonucleotide
acuuuuguugccaaccaaa

SEQ ID NO: 1371554 - RNA, 19 nt, Artificial Sequence
  Description of Artificial Sequence: Synthetic oligonucleotide
agauuccuugcccgugcac

SEQ ID NO: 1371555 - RNA, 19 nt, Artificial Sequence
  Description of Artificial Sequence: Synthetic oligonucleotide
aagauuccuugcccgugca

SEQ ID NO: 1371556 - RNA, 19 nt, Artificial Sequence
  Description of Artificial Sequence: Synthetic oligonucleotide
ugcagucgaacaccacagc

SEQ ID NO: 1371557 - RNA, 19 nt, Artificial Sequence
  Description of Artificial Sequence: Synthetic oligonucleotide
acaaaagauuugacgaagu

SEQ ID NO: 1371558 - RNA, 19 nt, Artificial Sequence
  Description of Artificial Sequence: Synthetic oligonucleotide
cucggcaccucacuaaguc

SEQ ID NO: 1371559 - RNA, 19 nt, Artificial Sequence
  Description of Artificial Sequence: Synthetic oligonucleotide
gucgaauuuggcaaaagua

SEQ ID NO: 1371560 - RNA, 19 nt, Artificial Sequence
  Description of Artificial Sequence: Synthetic oligonucleotide
auuugacgaagucgaauuu

SEQ ID NO: 1371561 - RNA, 19 nt, Artificial Sequence
  Description of Artificial Sequence: Synthetic oligonucleotide
ggauuuugacuugagcuug

SEQ ID NO: 1371562 - RNA, 19 nt, Artificial Sequence
  Description of Artificial Sequence: Synthetic oligonucleotide
aguagacgaugagguaggc

SEQ ID NO: 1371563 - RNA, 19 nt, Artificial Sequence
  Description of Artificial Sequence: Synthetic oligonucleotide
aggccuuucuaugauuuug

SEQ ID NO: 1371564 - RNA, 19 nt, Artificial Sequence
  Description of Artificial Sequence: Synthetic oligonucleotide
acuacaagugcuacauaca

SEQ ID NO: 1371565 - RNA, 19 nt, Artificial Sequence
  Description of Artificial Sequence: Synthetic oligonucleotide
auauuuuaugauagcucca

SEQ ID NO: 1371566 - RNA, 19 nt, Artificial Sequence
  Description of Artificial Sequence: Synthetic oligonucleotide
caaccaaaggaucaggccu

SEQ ID NO: 1371567 - RNA, 19 nt, Artificial Sequence
  Description of Artificial Sequence: Synthetic oligonucleotide
cauacaucagcuccuaagu

SEQ ID NO: 1371568 - RNA, 19 nt, Artificial Sequence
  Description of Artificial Sequence: Synthetic oligonucleotide
agauuugacgaagucgaau

SEQ ID NO: 1371569 - RNA, 19 nt, Artificial Sequence
  Description of Artificial Sequence: Synthetic oligonucleotide
auagaucacuggucccaag

SEQ ID NO: 1371570 - RNA, 19 nt, Artificial Sequence
  Description of Artificial Sequence: Synthetic oligonucleotide
ccuuaaaugagucucaggu

SEQ ID NO: 1371571 - RNA, 19 nt, Artificial Sequence
  Description of Artificial Sequence: Synthetic oligonucleotide
gcuuuaucaaauguuaaaa

SEQ ID NO: 1371572 - RNA, 19 nt, Artificial Sequence
  Description of Artificial Sequence: Synthetic oligonucleotide
aacucaugugaaccccaaa

SEQ ID NO: 1371573 - RNA, 19 nt, Artificial Sequence
  Description of Artificial Sequence: Synthetic oligonucleotide
agauguuccuaugaauaaa

SEQ ID NO: 1371574 - RNA, 19 nt, Artificial Sequence
  Description of Artificial Sequence: Synthetic oligonucleotide
cucugugggcuuuaaagaa

SEQ ID NO: 1371575 - RNA, 19 nt, Artificial Sequence
  Description of Artificial Sequence: Synthetic oligonucleotide
uugcaacaggggaagccac

SEQ ID NO: 1371576 - RNA, 19 nt, Artificial Sequence
  Description of Artificial Sequence: Synthetic oligonucleotide
ucggcaccucacuaaguca

SEQ ID NO: 1371577 - RNA, 19 nt, Artificial Sequence
  Description of Artificial Sequence: Synthetic oligonucleotide
gaugcucucccuccucuuc

SEQ ID NO: 1371578 - RNA, 19 nt, Artificial Sequence
  Description of Artificial Sequence: Synthetic oligonucleotide
cacuuugcacucaagguua

SEQ ID NO: 1371579 - RNA, 19 nt, Artificial Sequence
  Description of Artificial Sequence: Synthetic oligonucleotide
caaucuaauauagaucacu

SEQ ID NO: 1371580 - RNA, 19 nt, Artificial Sequence
  Description of Artificial Sequence: Synthetic oligonucleotide
agcuuaguuuccagcaaag

SEQ ID NO: 1371581 - RNA, 19 nt, Artificial Sequence
  Description of Artificial Sequence: Synthetic oligonucleotide
uugguugcccaugaggcua

SEQ ID NO: 1371582 - RNA, 19 nt, Artificial Sequence
  Description of Artificial Sequence: Synthetic oligonucleotide
gacucuugacaaagauucc

SEQ ID NO: 1371583 - RNA, 19 nt, Artificial Sequence
  Description of Artificial Sequence: Synthetic oligonucleotide
ugcggagcuggauccuuag

SEQ ID NO: 1371584 - RNA, 19 nt, Artificial Sequence
  Description of Artificial Sequence: Synthetic oligonucleotide
ugcuccccuauaagcacca

SEQ ID NO: 1371585 - RNA, 19 nt, Artificial Sequence
  Description of Artificial Sequence: Synthetic oligonucleotide
ucccaagggccuucuacga

SEQ ID NO: 1371586 - RNA, 19 nt, Artificial Sequence
  Description of Artificial Sequence: Synthetic oligonucleotide
caaagauuccuugcccgug

SEQ ID NO: 1371587 - RNA, 19 nt, Artificial Sequence
  Description of Artificial Sequence: Synthetic oligonucleotide
aaccaaaggaucaggccuu

SEQ ID NO: 1371588 - RNA, 19 nt, Artificial Sequence
  Description of Artificial Sequence: Synthetic oligonucleotide
ucacauugugcugcacggc

SEQ ID NO: 1371589 - RNA, 19 nt, Artificial Sequence
  Description of Artificial Sequence: Synthetic oligonucleotide
ggagccauucauucucccc

SEQ ID NO: 1371590 - RNA, 19 nt, Artificial Sequence
  Description of Artificial Sequence: Synthetic oligonucleotide
guaagacacaaggguaaac

SEQ ID NO: 1371591 - RNA, 19 nt, Artificial Sequence
  Description of Artificial Sequence: Synthetic oligonucleotide
aacuguuagugagcuuagu

SEQ ID NO: 1371592 - RNA, 19 nt, Artificial Sequence
  Description of Artificial Sequence: Synthetic oligonucleotide
ucuugccccagaagcgccu

SEQ ID NO: 1371593 - RNA, 19 nt, Artificial Sequence
  Description of Artificial Sequence: Synthetic oligonucleotide
gaauauucugcugcccaaa

SEQ ID NO: 1371594 - RNA, 19 nt, Artificial Sequence
  Description of Artificial Sequence: Synthetic oligonucleotide
aaagcucgcucggucugug

SEQ ID NO: 1371595 - RNA, 19 nt, Artificial Sequence
  Description of Artificial Sequence: Synthetic oligonucleotide
ugagucucaggugcccaug

SEQ ID NO: 1371596 - RNA, 19 nt, Artificial Sequence
  Description of Artificial Sequence: Synthetic oligonucleotide
aucaacgaccagggugcgc

SEQ ID NO: 1371597 - RNA, 19 nt, Artificial Sequence
  Description of Artificial Sequence: Synthetic oligonucleotide
aagaacuguuagugagcuu

SEQ ID NO: 1371598 - RNA, 19 nt, Artificial Sequence
  Description of Artificial Sequence: Synthetic oligonucleotide
gauuccuugcccgugcacu

SEQ ID NO: 1371599 - RNA, 19 nt, Artificial Sequence
  Description of Artificial Sequence: Synthetic oligonucleotide
ccuguugguucccauuugc

SEQ ID NO: 1371600 - RNA, 19 nt, Artificial Sequence
  Description of Artificial Sequence: Synthetic oligonucleotide
cuacaagugcuacauacau

SEQ ID NO: 1371601 - RNA, 19 nt, Artificial Sequence
  Description of Artificial Sequence: Synthetic oligonucleotide
gcagucgaacaccacagca

SEQ ID NO: 1371602 - RNA, 19 nt, Artificial Sequence
  Description of Artificial Sequence: Synthetic oligonucleotide
uucucaaagcucgcucggu

SEQ ID NO: 1371603 - RNA, 19 nt, Artificial Sequence
  Description of Artificial Sequence: Synthetic oligonucleotide
gcuuauguauucaaucuaa

SEQ ID NO: 1371604 - RNA, 19 nt, Artificial Sequence
  Description of Artificial Sequence: Synthetic oligonucleotide
cuauaagcaccacucggua

SEQ ID NO: 1371605 - RNA, 19 nt, Artificial Sequence
  Description of Artificial Sequence: Synthetic oligonucleotide
ggauaaucguugcacucuc

SEQ ID NO: 1371606 - RNA, 19 nt, Artificial Sequence
  Description of Artificial Sequence: Synthetic oligonucleotide
ggucccaagggccuucuac

SEQ ID NO: 1371607 - RNA, 19 nt, Artificial Sequence
  Description of Artificial Sequence: Synthetic oligonucleotide
gauaaucguugcacucuca

SEQ ID NO: 1371608 - RNA, 19 nt, Artificial Sequence
  Description of Artificial Sequence: Synthetic oligonucleotide
aagauuugacgaagucgaa

SEQ ID NO: 1371609 - RNA, 19 nt, Artificial Sequence
  Description of Artificial Sequence: Synthetic oligonucleotide
ucucggcaccucacuaagu

SEQ ID NO: 1371610 - RNA, 19 nt, Artificial Sequence
  Description of Artificial Sequence: Synthetic oligonucleotide
cccuugcuccccuauaagc

SEQ ID NO: 1371611 - RNA, 19 nt, Artificial Sequence
  Description of Artificial Sequence: Synthetic oligonucleotide
aagcaccacucgguaguag

SEQ ID NO: 1371612 - RNA, 19 nt, Artificial Sequence
  Description of Artificial Sequence: Synthetic oligonucleotide
ugucgggcccugcggagcu

SEQ ID NO: 1371613 - RNA, 19 nt, Artificial Sequence
  Description of Artificial Sequence: Synthetic oligonucleotide
ugaggcuaaccuguugguu

SEQ ID NO: 1371614 - RNA, 19 nt, Artificial Sequence
  Description of Artificial Sequence: Synthetic oligonucleotide
cuccuaagucuacaaaucu

SEQ ID NO: 1371615 - RNA, 19 nt, Artificial Sequence
  Description of Artificial Sequence: Synthetic oligonucleotide
aacgaccagggugcgcuca

SEQ ID NO: 1371616 - RNA, 19 nt, Artificial Sequence
  Description of Artificial Sequence: Synthetic oligonucleotide
ugccucacgaugcccucaa

SEQ ID NO: 1371617 - RNA, 19 nt, Artificial Sequence
  Description of Artificial Sequence: Synthetic oligonucleotide
caauaagaaauauguucau

SEQ ID NO: 1371618 - RNA, 19 nt, Artificial Sequence
  Description of Artificial Sequence: Synthetic oligonucleotide
cgucucaaugaauuugcag

SEQ ID NO: 1371619 - RNA, 19 nt, Artificial Sequence
  Description of Artificial Sequence: Synthetic oligonucleotide
cacugggugccuagagaac

SEQ ID NO: 1371620 - RNA, 19 nt, Artificial Sequence
  Description of Artificial Sequence: Synthetic oligonucleotide
cugucauguacaccugcga

SEQ ID NO: 1371621 - RNA, 19 nt, Artificial Sequence
  Description of Artificial Sequence: Synthetic oligonucleotide
ugguugcccaugaggcuaa

SEQ ID NO: 1371622 - RNA, 19 nt, Artificial Sequence
  Description of Artificial Sequence: Synthetic oligonucleotide
aggucauggcaggauuuug

SEQ ID NO: 1371623 - RNA, 19 nt, Artificial Sequence
  Description of Artificial Sequence: Synthetic oligonucleotide
cuucucggcaccucacuaa

SEQ ID NO: 1371624 - RNA, 19 nt, Artificial Sequence
  Description of Artificial Sequence: Synthetic oligonucleotide
aucaggccuuucuaugauu

SEQ ID NO: 1371625 - RNA, 19 nt, Artificial Sequence
  Description of Artificial Sequence: Synthetic oligonucleotide
ggggacaucugggugacac

SEQ ID NO: 1371626 - RNA, 19 nt, Artificial Sequence
  Description of Artificial Sequence: Synthetic oligonucleotide
caucagcuccuaagucuac

SEQ ID NO: 1371627 - RNA, 19 nt, Artificial Sequence
  Description of Artificial Sequence: Synthetic oligonucleotide
agacacuucucggcaccuc

SEQ ID NO: 1371628 - RNA, 19 nt, Artificial Sequence
  Description of Artificial Sequence: Synthetic oligonucleotide
ccucacgaugcccucaaac

SEQ ID NO: 1371629 - RNA, 19 nt, Artificial Sequence
  Description of Artificial Sequence: Synthetic oligonucleotide
guagacgaugagguaggca

SEQ ID NO: 1371630 - RNA, 19 nt, Artificial Sequence
  Description of Artificial Sequence: Synthetic oligonucleotide
ugcugucccggcgcaggcg

SEQ ID NO: 1371631 - RNA, 19 nt, Artificial Sequence
  Description of Artificial Sequence: Synthetic oligonucleotide
ucgggcccugcggagcugg

SEQ ID NO: 1371632 - RNA, 19 nt, Artificial Sequence
  Description of Artificial Sequence: Synthetic oligonucleotide
gaucaggccuuucuaugau

SEQ ID NO: 1371633 - RNA, 19 nt, Artificial Sequence
  Description of Artificial Sequence: Synthetic oligonucleotide
gaacuacaagugcuacaua

SEQ ID NO: 1371634 - RNA, 19 nt, Artificial Sequence
  Description of Artificial Sequence: Synthetic oligonucleotide
ccucacuaagucacuuuug

SEQ ID NO: 1371635 - RNA, 19 nt, Artificial Sequence
  Description of Artificial Sequence: Synthetic oligonucleotide
ggaggauaaucguugcacu

SEQ ID NO: 1371636 - RNA, 19 nt, Artificial Sequence
  Description of Artificial Sequence: Synthetic oligonucleotide
cucaaagcucgcucggucu

SEQ ID NO: 1371637 - RNA, 19 nt, Artificial Sequence
  Description of Artificial Sequence: Synthetic oligonucleotide
aaccccaaauaugcccuua

SEQ ID NO: 1371638 - RNA, 19 nt, Artificial Sequence
  Description of Artificial Sequence: Synthetic oligonucleotide
ccacuaacaaugcuuaugu

SEQ ID NO: 1371639 - RNA, 19 nt, Artificial Sequence
  Description of Artificial Sequence: Synthetic oligonucleotide
cacgaugcccucaaacagu

SEQ ID NO: 1371640 - RNA, 19 nt, Artificial Sequence
  Description of Artificial Sequence: Synthetic oligonucleotide
cacuuuuguugccaaccaa

SEQ ID NO: 1371641 - RNA, 19 nt, Artificial Sequence
  Description of Artificial Sequence: Synthetic oligonucleotide
caucaacgaccagggugcg

SEQ ID NO: 1371642 - RNA, 19 nt, Artificial Sequence
  Description of Artificial Sequence: Synthetic oligonucleotide
ugcaugcaaugguccugga

SEQ ID NO: 1371643 - RNA, 19 nt, Artificial Sequence
  Description of Artificial Sequence: Synthetic oligonucleotide
uaagcaccacucgguagua

SEQ ID NO: 1371644 - RNA, 19 nt, Artificial Sequence
  Description of Artificial Sequence: Synthetic oligonucleotide
ccccuauaagcaccacucg

SEQ ID NO: 1371645 - RNA, 19 nt, Artificial Sequence
  Description of Artificial Sequence: Synthetic oligonucleotide
ccaacacuucucauaguca

SEQ ID NO: 1371646 - RNA, 19 nt, Artificial Sequence
  Description of Artificial Sequence: Synthetic oligonucleotide
augcccucaaacaguuccu

SEQ ID NO: 1371647 - RNA, 19 nt, Artificial Sequence
  Description of Artificial Sequence: Synthetic oligonucleotide
ccuauaagcaccacucggu

SEQ ID NO: 1371648 - RNA, 19 nt, Artificial Sequence
  Description of Artificial Sequence: Synthetic oligonucleotide
ccaggguggacuugccuac

SEQ ID NO: 1371649 - RNA, 19 nt, Artificial Sequence
  Description of Artificial Sequence: Synthetic oligonucleotide
cuugguugcccaugaggcu

SEQ ID NO: 1371650 - RNA, 19 nt, Artificial Sequence
  Description of Artificial Sequence: Synthetic oligonucleotide
ccauguagcaaaucaagau

SEQ ID NO: 1371651 - RNA, 19 nt, Artificial Sequence
  Description of Artificial Sequence: Synthetic oligonucleotide
acaggggaagccaccacua

SEQ ID NO: 1371652 - RNA, 19 nt, Artificial Sequence
  Description of Artificial Sequence: Synthetic oligonucleotide
acgucucaaugaauuugca

SEQ ID NO: 1371653 - RNA, 19 nt, Artificial Sequence
  Description of Artificial Sequence: Synthetic oligonucleotide
ccucaaaauaagcauuugu

SEQ ID NO: 1371654 - RNA, 19 nt, Artificial Sequence
  Description of Artificial Sequence: Synthetic oligonucleotide
cggcaccucacuaagucac

SEQ ID NO: 1371655 - RNA, 19 nt, Artificial Sequence
  Description of Artificial Sequence: Synthetic oligonucleotide
ccaccacuaacaaugcuua

SEQ ID NO: 1371656 - RNA, 19 nt, Artificial Sequence
  Description of Artificial Sequence: Synthetic oligonucleotide
gaccagggugcgcucauau

SEQ ID NO: 1371657 - RNA, 19 nt, Artificial Sequence
  Description of Artificial Sequence: Synthetic oligonucleotide
gcuacauacaucagcuccu

SEQ ID NO: 1371658 - RNA, 19 nt, Artificial Sequence
  Description of Artificial Sequence: Synthetic oligonucleotide
gcccugcggagcuggaucc

SEQ ID NO: 1371659 - RNA, 19 nt, Artificial Sequence
  Description of Artificial Sequence: Synthetic oligonucleotide
acuuugcacucaagguuau

SEQ ID NO: 1371660 - RNA, 19 nt, Artificial Sequence
  Description of Artificial Sequence: Synthetic oligonucleotide
cacaaggguaaacaaucuu

SEQ ID NO: 1371661 - RNA, 19 nt, Artificial Sequence
  Description of Artificial Sequence: Synthetic oligonucleotide
cagcuccuaagucuacaaa

SEQ ID NO: 1371662 - RNA, 19 nt, Artificial Sequence
  Description of Artificial Sequence: Synthetic oligonucleotide
acgaccagggugcgcucau

SEQ ID NO: 1371663 - RNA, 19 nt, Artificial Sequence
  Description of Artificial Sequence: Synthetic oligonucleotide
gcucgcucggucugugaug

SEQ ID NO: 1371664 - RNA, 19 nt, Artificial Sequence
  Description of Artificial Sequence: Synthetic oligonucleotide
gacuugccuaccccuugcu

SEQ ID NO: 1371665 - RNA, 19 nt, Artificial Sequence
  Description of Artificial Sequence: Synthetic oligonucleotide
ggcccugcggagcuggauc

SEQ ID NO: 1371666 - RNA, 19 nt, Artificial Sequence
  Description of Artificial Sequence: Synthetic oligonucleotide
ccuagagaacagagagguc

SEQ ID NO: 1371667 - RNA, 19 nt, Artificial Sequence
  Description of Artificial Sequence: Synthetic oligonucleotide
gcaaaucaagauguuccua

SEQ ID NO: 1371668 - RNA, 19 nt, Artificial Sequence
  Description of Artificial Sequence: Synthetic oligonucleotide
gcacuugguugcccaugag

SEQ ID NO: 1371669 - RNA, 19 nt, Artificial Sequence
  Description of Artificial Sequence: Synthetic oligonucleotide
ccccuuauuuucccacaug

SEQ ID NO: 1371670 - RNA, 19 nt, Artificial Sequence
  Description of Artificial Sequence: Synthetic oligonucleotide
cguugcacucucaccauca

SEQ ID NO: 1371671 - RNA, 19 nt, Artificial Sequence
  Description of Artificial Sequence: Synthetic oligonucleotide
ggggaaaaccuuugauuau

SEQ ID NO: 1371672 - RNA, 19 nt, Artificial Sequence
  Description of Artificial Sequence: Synthetic oligonucleotide
caacgaccagggugcgcuc

SEQ ID NO: 1371673 - RNA, 19 nt, Artificial Sequence
  Description of Artificial Sequence: Synthetic oligonucleotide
gcacucaagguuaucaguu

SEQ ID NO: 1371674 - RNA, 19 nt, Artificial Sequence
  Description of Artificial Sequence: Synthetic oligonucleotide
cagacgucucaaugaauuu

SEQ ID NO: 1371675 - RNA, 19 nt, Artificial Sequence
  Description of Artificial Sequence: Synthetic oligonucleotide
gccuucuacgauguccauc

SEQ ID NO: 1371676 - RNA, 19 nt, Artificial Sequence
  Description of Artificial Sequence: Synthetic oligonucleotide
gaggucauggcaggauuuu

SEQ ID NO: 1371677 - RNA, 19 nt, Artificial Sequence
  Description of Artificial Sequence: Synthetic oligonucleotide
ccccuugcuccccuauaag

SEQ ID NO: 1371678 - RNA, 19 nt, Artificial Sequence
  Description of Artificial Sequence: Synthetic oligonucleotide
ccaaccugcaugcaauggu

SEQ ID NO: 1371679 - RNA, 19 nt, Artificial Sequence
  Description of Artificial Sequence: Synthetic oligonucleotide
gaaccccaaauaugcccuu

SEQ ID NO: 1371680 - RNA, 19 nt, Artificial Sequence
  Description of Artificial Sequence: Synthetic oligonucleotide
cugcacggcugcagacguc

SEQ ID NO: 1371681 - RNA, 19 nt, Artificial Sequence
  Description of Artificial Sequence: Synthetic oligonucleotide
uggucccaagggccuucua

SEQ ID NO: 1371682 - RNA, 19 nt, Artificial Sequence
  Description of Artificial Sequence: Synthetic oligonucleotide
caucugggugacacugggu

SEQ ID NO: 1371683 - RNA, 19 nt, Artificial Sequence
  Description of Artificial Sequence: Synthetic oligonucleotide
ucgcucggucugugaugga

SEQ ID NO: 1371684 - RNA, 19 nt, Artificial Sequence
  Description of Artificial Sequence: Synthetic oligonucleotide
cuggauccuuagcucagau

SEQ ID NO: 1371685 - RNA, 19 nt, Artificial Sequence
  Description of Artificial Sequence: Synthetic oligonucleotide
ggugcccauguagcaaauc

SEQ ID NO: 1371686 - RNA, 19 nt, Artificial Sequence
  Description of Artificial Sequence: Synthetic oligonucleotide
guccaggaggauaaucguu

SEQ ID NO: 1371687 - RNA, 19 nt, Artificial Sequence
  Description of Artificial Sequence: Synthetic oligonucleotide
gcuaaccuguugguuccca

SEQ ID NO: 1371688 - RNA, 19 nt, Artificial Sequence
  Description of Artificial Sequence: Synthetic oligonucleotide
cgaagucgaauuuggcaaa

SEQ ID NO: 1371689 - RNA, 19 nt, Artificial Sequence
  Description of Artificial Sequence: Synthetic oligonucleotide
cgcucggucugugauggag

SEQ ID NO: 1371690 - RNA, 19 nt, Artificial Sequence
  Description of Artificial Sequence: Synthetic oligonucleotide
cugcggagcuggauccuua

SEQ ID NO: 1371691 - RNA, 19 nt, Artificial Sequence
  Description of Artificial Sequence: Synthetic oligonucleotide
ggcuaaccuguugguuccc

SEQ ID NO: 1371692 - RNA, 19 nt, Artificial Sequence
  Description of Artificial Sequence: Synthetic oligonucleotide
cauguacaccugcgaagau

SEQ ID NO: 1371693 - RNA, 19 nt, Artificial Sequence
  Description of Artificial Sequence: Synthetic oligonucleotide
caccucacuaagucacuuu

SEQ ID NO: 1371694 - RNA, 19 nt, Artificial Sequence
  Description of Artificial Sequence: Synthetic oligonucleotide
gcuggauccuuagcucaga

SEQ ID NO: 1371695 - RNA, 19 nt, Artificial Sequence
  Description of Artificial Sequence: Synthetic oligonucleotide
ccgugcacuugguugccca

SEQ ID NO: 1371696 - RNA, 19 nt, Artificial Sequence
  Description of Artificial Sequence: Synthetic oligonucleotide
caaagcucgcucggucugu

SEQ ID NO: 1371697 - RNA, 19 nt, Artificial Sequence
  Description of Artificial Sequence: Synthetic oligonucleotide
cuugcccgugcacuugguu

SEQ ID NO: 1371698 - RNA, 19 nt, Artificial Sequence
  Description of Artificial Sequence: Synthetic oligonucleotide
gcgcucauaugugucuucu

SEQ ID NO: 1371699 - RNA, 19 nt, Artificial Sequence
  Description of Artificial Sequence: Synthetic oligonucleotide
caacugugaugagaauauu

SEQ ID NO: 1371700 - RNA, 19 nt, Artificial Sequence
  Description of Artificial Sequence: Synthetic oligonucleotide
cuaccccuugcuccccuau

SEQ ID NO: 1371701 - RNA, 19 nt, Artificial Sequence
  Description of Artificial Sequence: Synthetic oligonucleotide
gcccgugcacuugguugcc

SEQ ID NO: 1371702 - RNA, 19 nt, Artificial Sequence
  Description of Artificial Sequence: Synthetic oligonucleotide
ggcgcaggcggaccugccu

SEQ ID NO: 1371703 - RNA, 19 nt, Artificial Sequence
  Description of Artificial Sequence: Synthetic oligonucleotide
cccgugcacuugguugccc

SEQ ID NO: 1371704 - RNA, 19 nt, Artificial Sequence
  Description of Artificial Sequence: Synthetic oligonucleotide
gucgggcccugcggagcug

SEQ ID NO: 1371705 - RNA, 19 nt, Artificial Sequence
  Description of Artificial Sequence: Synthetic oligonucleotide
gcuccccuauaagcaccac

SEQ ID NO: 1371706 - RNA, 19 nt, Artificial Sequence
  Description of Artificial Sequence: Synthetic oligonucleotide
ggcggaccugccucacgau

SEQ ID NO: 1371707 - RNA, 19 nt, Artificial Sequence
  Description of Artificial Sequence: Synthetic oligonucleotide
ccccagaagcgccuggcuu

SEQ ID NO: 1371708 - RNA, 19 nt, Artificial Sequence
  Description of Artificial Sequence: Synthetic oligonucleotide
cccaugaggcuaaccuguu

SEQ ID NO: 1371709 - RNA, 19 nt, Artificial Sequence
  Description of Artificial Sequence: Synthetic oligonucleotide
cccugcggagcuggauccu

SEQ ID NO: 1371710 - RNA, 19 nt, Artificial Sequence
  Description of Artificial Sequence: Synthetic oligonucleotide
cgaccagggugcgcucaua

SEQ ID NO: 1371711 - RNA, 19 nt, Artificial Sequence
  Description of Artificial Sequence: Synthetic oligonucleotide
acagauuucacauagcccc

SEQ ID NO: 1371712 - RNA, 19 nt, Artificial Sequence
  Description of Artificial Sequence: Synthetic oligonucleotide
aaagcgccguauuugaucc

SEQ ID NO: 1371713 - RNA, 19 nt, Artificial Sequence
  Description of Artificial Sequence: Synthetic oligonucleotide
aaaagcgccguauuugauc

SEQ ID NO: 1371714 - RNA, 19 nt, Artificial Sequence
  Description of Artificial Sequence: Synthetic oligonucleotide
acugucauaaaguucuuuc

SEQ ID NO: 1371715 - RNA, 19 nt, Artificial Sequence
  Description of Artificial Sequence: Synthetic oligonucleotide
aaacguuuuagcauccggc

SEQ ID NO: 1371716 - RNA, 19 nt, Artificial Sequence
  Description of Artificial Sequence: Synthetic oligonucleotide
ucaaagaugucccugacuu

SEQ ID NO: 1371717 - RNA, 19 nt, Artificial Sequence
  Description of Artificial Sequence: Synthetic oligonucleotide
uuaaaaguaaaaguccugu

SEQ ID NO: 1371718 - RNA, 19 nt, Artificial Sequence
  Description of Artificial Sequence: Synthetic oligonucleotide
cauuguacugcacagcccg

SEQ ID NO: 1371719 - RNA, 19 nt, Artificial Sequence
  Description of Artificial Sequence: Synthetic oligonucleotide
augcuuaauggucaugucg

SEQ ID NO: 1371720 - RNA, 19 nt, Artificial Sequence
  Description of Artificial Sequence: Synthetic oligonucleotide
ugcuuaauggucaugucga

SEQ ID NO: 1371721 - RNA, 19 nt, Artificial Sequence
  Description of Artificial Sequence: Synthetic oligonucleotide
ucuagcugggcaaacuuag

SEQ ID NO: 1371722 - RNA, 19 nt, Artificial Sequence
  Description of Artificial Sequence: Synthetic oligonucleotide
acacguaggaccuuggcag

SEQ ID NO: 1371723 - RNA, 19 nt, Artificial Sequence
  Description of Artificial Sequence: Synthetic oligonucleotide
aaucucuggaucuucgacu

SEQ ID NO: 1371724 - RNA, 19 nt, Artificial Sequence
  Description of Artificial Sequence: Synthetic oligonucleotide
uaauacgaccuccacacca

SEQ ID NO: 1371725 - RNA, 19 nt, Artificial Sequence
  Description of Artificial Sequence: Synthetic oligonucleotide
agcgccuucgccuugacag

SEQ ID NO: 1371726 - RNA, 19 nt, Artificial Sequence
  Description of Artificial Sequence: Synthetic oligonucleotide
aacguuuuagcauccggcu

SEQ ID NO: 1371727 - RNA, 19 nt, Artificial Sequence
  Description of Artificial Sequence: Synthetic oligonucleotide
uucccaaaacaaaagcgcc

SEQ ID NO: 1371728 - RNA, 19 nt, Artificial Sequence
  Description of Artificial Sequence: Synthetic oligonucleotide
uggaauuaaucucuggauc

SEQ ID NO: 1371729 - RNA, 19 nt, Artificial Sequence
  Description of Artificial Sequence: Synthetic oligonucleotide
gguaauacgaccuccacac

SEQ ID NO: 1371730 - RNA, 19 nt, Artificial Sequence
  Description of Artificial Sequence: Synthetic oligonucleotide
gaaacguuuuagcauccgg

SEQ ID NO: 1371731 - RNA, 19 nt, Artificial Sequence
  Description of Artificial Sequence: Synthetic oligonucleotide
aggugggcgacacugagac

SEQ ID NO: 1371732 - RNA, 19 nt, Artificial Sequence
  Description of Artificial Sequence: Synthetic oligonucleotide
aaacgaagccugaagagag

SEQ ID NO: 1371733 - RNA, 19 nt, Artificial Sequence
  Description of Artificial Sequence: Synthetic oligonucleotide
acagaauagagcuguuggg

SEQ ID NO: 1371734 - RNA, 19 nt, Artificial Sequence
  Description of Artificial Sequence: Synthetic oligonucleotide
ucccaaaacaaaagcgccg

SEQ ID NO: 1371735 - RNA, 19 nt, Artificial Sequence
  Description of Artificial Sequence: Synthetic oligonucleotide
uuagcauccggcuguacag

SEQ ID NO: 1371736 - RNA, 19 nt, Artificial Sequence
  Description of Artificial Sequence: Synthetic oligonucleotide
aauuaaucucuggaucuuc

SEQ ID NO: 1371737 - RNA, 19 nt, Artificial Sequence
  Description of Artificial Sequence: Synthetic oligonucleotide
aguacugagcucuuggccu

SEQ ID NO: 1371738 - RNA, 19 nt, Artificial Sequence
  Description of Artificial Sequence: Synthetic oligonucleotide
ucuacgagcacaccaugug

SEQ ID NO: 1371739 - RNA, 19 nt, Artificial Sequence
  Description of Artificial Sequence: Synthetic oligonucleotide
ucuaccuggcuccuuuccg

SEQ ID NO: 1371740 - RNA, 19 nt, Artificial Sequence
  Description of Artificial Sequence: Synthetic oligonucleotide
aaggagugacagcucuacc

SEQ ID NO: 1371741 - RNA, 19 nt, Artificial Sequence
  Description of Artificial Sequence: Synthetic oligonucleotide
aauacgaccuccacaccac

SEQ ID NO: 1371742 - RNA, 19 nt, Artificial Sequence
  Description of Artificial Sequence: Synthetic oligonucleotide
acacgugugaguauugggc

SEQ ID NO: 1371743 - RNA, 19 nt, Artificial Sequence
  Description of Artificial Sequence: Synthetic oligonucleotide
uugggccaaacccacaacc

SEQ ID NO: 1371744 - RNA, 19 nt, Artificial Sequence
  Description of Artificial Sequence: Synthetic oligonucleotide
ccguauuugauccagacag

SEQ ID NO: 1371745 - RNA, 19 nt, Artificial Sequence
  Description of Artificial Sequence: Synthetic oligonucleotide
aaugcgugacagcuccuuc

SEQ ID NO: 1371746 - RNA, 19 nt, Artificial Sequence
  Description of Artificial Sequence: Synthetic oligonucleotide
ugggccaaacccacaaccg

SEQ ID NO: 1371747 - RNA, 19 nt, Artificial Sequence
  Description of Artificial Sequence: Synthetic oligonucleotide
caaguggaaagccauguac

SEQ ID NO: 1371748 - RNA, 19 nt, Artificial Sequence
  Description of Artificial Sequence: Synthetic oligonucleotide
guaacugucauaaaguucu

SEQ ID NO: 1371749 - RNA, 19 nt, Artificial Sequence
  Description of Artificial Sequence: Synthetic oligonucleotide
uaaucucuggaucuucgac

SEQ ID NO: 1371750 - RNA, 19 nt, Artificial Sequence
  Description of Artificial Sequence: Synthetic oligonucleotide
ugggcaaacuuagaaauca

SEQ ID NO: 1371751 - RNA, 19 nt, Artificial Sequence
  Description of Artificial Sequence: Synthetic oligonucleotide
gacacgugugaguauuggg

SEQ ID NO: 1371752 - RNA, 19 nt, Artificial Sequence
  Description of Artificial Sequence: Synthetic oligonucleotide
aagcucuacgagcacacca

SEQ ID NO: 1371753 - RNA, 19 nt, Artificial Sequence
  Description of Artificial Sequence: Synthetic oligonucleotide
aggcccaagcucuacgagc

SEQ ID NO: 1371754 - RNA, 19 nt, Artificial Sequence
  Description of Artificial Sequence: Synthetic oligonucleotide
aaacaaaagcgccguauuu

SEQ ID NO: 1371755 - RNA, 19 nt, Artificial Sequence
  Description of Artificial Sequence: Synthetic oligonucleotide
auggaauuaaucucuggau

SEQ ID NO: 1371756 - RNA, 19 nt, Artificial Sequence
  Description of Artificial Sequence: Synthetic oligonucleotide
gaaggagauggucuucaag

SEQ ID NO: 1371757 - RNA, 19 nt, Artificial Sequence
  Description of Artificial Sequence: Synthetic oligonucleotide
acaaaagcgccguauuuga

SEQ ID NO: 1371758 - RNA, 19 nt, Artificial Sequence
  Description of Artificial Sequence: Synthetic oligonucleotide
guauuugauccagacagcc

SEQ ID NO: 1371759 - RNA, 19 nt, Artificial Sequence
  Description of Artificial Sequence: Synthetic oligonucleotide
uauugggccaaacccacaa

SEQ ID NO: 1371760 - RNA, 19 nt, Artificial Sequence
  Description of Artificial Sequence: Synthetic oligonucleotide
uccucaaugcgugacagcu

SEQ ID NO: 1371761 - RNA, 19 nt, Artificial Sequence
  Description of Artificial Sequence: Synthetic oligonucleotide
uauuugauccagacagccu

SEQ ID NO: 1371762 - RNA, 19 nt, Artificial Sequence
  Description of Artificial Sequence: Synthetic oligonucleotide
uacgagcacaccaugugac

SEQ ID NO: 1371763 - RNA, 19 nt, Artificial Sequence
  Description of Artificial Sequence: Synthetic oligonucleotide
cacgugugaguauugggcc

SEQ ID NO: 1371764 - RNA, 19 nt, Artificial Sequence
  Description of Artificial Sequence: Synthetic oligonucleotide
agagagucaagccccacgu

SEQ ID NO: 1371765 - RNA, 19 nt, Artificial Sequence
  Description of Artificial Sequence: Synthetic oligonucleotide
gacagauuucacauagccc

SEQ ID NO: 1371766 - RNA, 19 nt, Artificial Sequence
  Description of Artificial Sequence: Synthetic oligonucleotide
cucgaagaccuucaucagg

SEQ ID NO: 1371767 - RNA, 19 nt, Artificial Sequence
  Description of Artificial Sequence: Synthetic oligonucleotide
uuuccggguucacacguag

SEQ ID NO: 1371768 - RNA, 19 nt, Artificial Sequence
  Description of Artificial Sequence: Synthetic oligonucleotide
uccggguucacacguagga

SEQ ID NO: 1371769 - RNA, 19 nt, Artificial Sequence
  Description of Artificial Sequence: Synthetic oligonucleotide
acggaccagacaucugugc

SEQ ID NO: 1371770 - RNA, 19 nt, Artificial Sequence
  Description of Artificial Sequence: Synthetic oligonucleotide
gugcguuugggguaggugc

SEQ ID NO: 1371771 - RNA, 19 nt, Artificial Sequence
  Description of Artificial Sequence: Synthetic oligonucleotide
agaugaaugacacguucaa

SEQ ID NO: 1371772 - RNA, 19 nt, Artificial Sequence
  Description of Artificial Sequence: Synthetic oligonucleotide
uacagcucgggccuucuca

SEQ ID NO: 1371773 - RNA, 19 nt, Artificial Sequence
  Description of Artificial Sequence: Synthetic oligonucleotide
ucucccucccgguaauacg

SEQ ID NO: 1371774 - RNA, 19 nt, Artificial Sequence
  Description of Artificial Sequence: Synthetic oligonucleotide
aacgaagccugaagagagc

SEQ ID NO: 1371775 - RNA, 19 nt, Artificial Sequence
  Description of Artificial Sequence: Synthetic oligonucleotide
cucagugccaugcuguuuc

SEQ ID NO: 1371776 - RNA, 19 nt, Artificial Sequence
  Description of Artificial Sequence: Synthetic oligonucleotide
ugcacagcccgcucgaaga

SEQ ID NO: 1371777 - RNA, 19 nt, Artificial Sequence
  Description of Artificial Sequence: Synthetic oligonucleotide
uuuagcccgcucugcaucc

SEQ ID NO: 1371778 - RNA, 19 nt, Artificial Sequence
  Description of Artificial Sequence: Synthetic oligonucleotide
cucggcuacagcucgggcc

SEQ ID NO: 1371779 - RNA, 19 nt, Artificial Sequence
  Description of Artificial Sequence: Synthetic oligonucleotide
gaauagagcuguugggaga

SEQ ID NO: 1371780 - RNA, 19 nt, Artificial Sequence
  Description of Artificial Sequence: Synthetic oligonucleotide
ucggugacuggucccagcc

SEQ ID NO: 1371781 - RNA, 19 nt, Artificial Sequence
  Description of Artificial Sequence: Synthetic oligonucleotide
ucggcuacagcucgggccu

SEQ ID NO: 1371782 - RNA, 19 nt, Artificial Sequence
  Description of Artificial Sequence: Synthetic oligonucleotide
acaaccgaaggcccaagcu

SEQ ID NO: 1371783 - RNA, 19 nt, Artificial Sequence
  Description of Artificial Sequence: Synthetic oligonucleotide
caguacugagcucuuggcc

SEQ ID NO: 1371784 - RNA, 19 nt, Artificial Sequence
  Description of Artificial Sequence: Synthetic oligonucleotide
agcuacuuaguccuccagu

SEQ ID NO: 1371785 - RNA, 19 nt, Artificial Sequence
  Description of Artificial Sequence: Synthetic oligonucleotide
auugggccaaacccacaac

SEQ ID NO: 1371786 - RNA, 19 nt, Artificial Sequence
  Description of Artificial Sequence: Synthetic oligonucleotide
ggucaugucgauguagacg

SEQ ID NO: 1371787 - RNA, 19 nt, Artificial Sequence
  Description of Artificial Sequence: Synthetic oligonucleotide
ucuccugccggaaacguuu

SEQ ID NO: 1371788 - RNA, 19 nt, Artificial Sequence
  Description of Artificial Sequence: Synthetic oligonucleotide
guggccugcaaguggaaag

SEQ ID NO: 1371789 - RNA, 19 nt, Artificial Sequence
  Description of Artificial Sequence: Synthetic oligonucleotide
aaccgaaggcccaagcucu

SEQ ID NO: 1371790 - RNA, 19 nt, Artificial Sequence
  Description of Artificial Sequence: Synthetic oligonucleotide
cagagagucaagccccacg

SEQ ID NO: 1371791 - RNA, 19 nt, Artificial Sequence
  Description of Artificial Sequence: Synthetic oligonucleotide
uggaacucuagcugggcaa

SEQ ID NO: 1371792 - RNA, 19 nt, Artificial Sequence
  Description of Artificial Sequence: Synthetic oligonucleotide
gauguagacggaccagaca

SEQ ID NO: 1371793 - RNA, 19 nt, Artificial Sequence
  Description of Artificial Sequence: Synthetic oligonucleotide
ugaacuucuccgacuuggu

SEQ ID NO: 1371794 - RNA, 19 nt, Artificial Sequence
  Description of Artificial Sequence: Synthetic oligonucleotide
aggcucauuguacugcaca

SEQ ID NO: 1371795 - RNA, 19 nt, Artificial Sequence
  Description of Artificial Sequence: Synthetic oligonucleotide
acguuuuagcauccggcug

SEQ ID NO: 1371796 - RNA, 19 nt, Artificial Sequence
  Description of Artificial Sequence: Synthetic oligonucleotide
acgaccuccacaccacuug

SEQ ID NO: 1371797 - RNA, 19 nt, Artificial Sequence
  Description of Artificial Sequence: Synthetic oligonucleotide
uccuuuccggguucacacg

SEQ ID NO: 1371798 - RNA, 19 nt, Artificial Sequence
  Description of Artificial Sequence: Synthetic oligonucleotide
caaccgaaggcccaagcuc

SEQ ID NO: 1371799 - RNA, 19 nt, Artificial Sequence
  Description of Artificial Sequence: Synthetic oligonucleotide
ggaauuaaucucuggaucu

SEQ ID NO: 1371800 - RNA, 19 nt, Artificial Sequence
  Description of Artificial Sequence: Synthetic oligonucleotide
ucgguggccugcaagugga

SEQ ID NO: 1371801 - RNA, 19 nt, Artificial Sequence
  Description of Artificial Sequence: Synthetic oligonucleotide
ugcguuugggguaggugcu

SEQ ID NO: 1371802 - RNA, 19 nt, Artificial Sequence
  Description of Artificial Sequence: Synthetic oligonucleotide
uagagcuacuuaguccucc

SEQ ID NO: 1371803 - RNA, 19 nt, Artificial Sequence
  Description of Artificial Sequence: Synthetic oligonucleotide
agccccacgucccaaacga

SEQ ID NO: 1371804 - RNA, 19 nt, Artificial Sequence
  Description of Artificial Sequence: Synthetic oligonucleotide
aucucuggaucuucgacuu

SEQ ID NO: 1371805 - RNA, 19 nt, Artificial Sequence
  Description of Artificial Sequence: Synthetic oligonucleotide
gaaugacacguucaaagau

SEQ ID NO: 1371806 - RNA, 19 nt, Artificial Sequence
  Description of Artificial Sequence: Synthetic oligonucleotide
uuccggguucacacguagg

SEQ ID NO: 1371807 - RNA, 19 nt, Artificial Sequence
  Description of Artificial Sequence: Synthetic oligonucleotide
uaccuggcuccuuuccggg

SEQ ID NO: 1371808 - RNA, 19 nt, Artificial Sequence
  Description of Artificial Sequence: Synthetic oligonucleotide
uucccagugucgcugggaa

SEQ ID NO: 1371809 - RNA, 19 nt, Artificial Sequence
  Description of Artificial Sequence: Synthetic oligonucleotide
gaaggcccaagcucuacga

SEQ ID NO: 1371810 - RNA, 19 nt, Artificial Sequence
  Description of Artificial Sequence: Synthetic oligonucleotide
caugugacaggacagauuu

SEQ ID NO: 1371811 - RNA, 19 nt, Artificial Sequence
  Description of Artificial Sequence: Synthetic oligonucleotide
auccucuuaggggccaggc

SEQ ID NO: 1371812 - RNA, 19 nt, Artificial Sequence
  Description of Artificial Sequence: Synthetic oligonucleotide
ccaaacgaagccugaagag

SEQ ID NO: 1371813 - RNA, 19 nt, Artificial Sequence
  Description of Artificial Sequence: Synthetic oligonucleotide
uguagacggaccagacauc

SEQ ID NO: 1371814 - RNA, 19 nt, Artificial Sequence
  Description of Artificial Sequence: Synthetic oligonucleotide
caaacgaagccugaagaga

SEQ ID NO: 1371815 - RNA, 19 nt, Artificial Sequence
  Description of Artificial Sequence: Synthetic oligonucleotide
augcgugacagcuccuucu

SEQ ID NO: 1371816 - RNA, 19 nt, Artificial Sequence
  Description of Artificial Sequence: Synthetic oligonucleotide
uucgccuugacagccugca

SEQ ID NO: 1371817 - RNA, 19 nt, Artificial Sequence
  Description of Artificial Sequence: Synthetic oligonucleotide
gagucaagccccacguccc

SEQ ID NO: 1371818 - RNA, 19 nt, Artificial Sequence
  Description of Artificial Sequence: Synthetic oligonucleotide
cugggcaaacuuagaaauc

SEQ ID NO: 1371819 - RNA, 19 nt, Artificial Sequence
  Description of Artificial Sequence: Synthetic oligonucleotide
caugucgauguagacggac

SEQ ID NO: 1371820 - RNA, 19 nt, Artificial Sequence
  Description of Artificial Sequence: Synthetic oligonucleotide
uccucuuaggggccaggcu

SEQ ID NO: 1371821 - RNA, 19 nt, Artificial Sequence
  Description of Artificial Sequence: Synthetic oligonucleotide
aaaaguccuguggagccua

SEQ ID NO: 1371822 - RNA, 19 nt, Artificial Sequence
  Description of Artificial Sequence: Synthetic oligonucleotide
cucuaccuggcuccuuucc

SEQ ID NO: 1371823 - RNA, 19 nt, Artificial Sequence
  Description of Artificial Sequence: Synthetic oligonucleotide
guaauacgaccuccacacc

SEQ ID NO: 1371824 - RNA, 19 nt, Artificial Sequence
  Description of Artificial Sequence: Synthetic oligonucleotide
acguucaaagaugucccug

SEQ ID NO: 1371825 - RNA, 19 nt, Artificial Sequence
  Description of Artificial Sequence: Synthetic oligonucleotide
gagcuacuuaguccuccag

SEQ ID NO: 1371826 - RNA, 19 nt, Artificial Sequence
  Description of Artificial Sequence: Synthetic oligonucleotide
acgugugaguauugggcca

SEQ ID NO: 1371827 - RNA, 19 nt, Artificial Sequence
  Description of Artificial Sequence: Synthetic oligonucleotide
caaagaugucccugacuuc

SEQ ID NO: 1371828 - RNA, 19 nt, Artificial Sequence
  Description of Artificial Sequence: Synthetic oligonucleotide
uggucaugucgauguagac

SEQ ID NO: 1371829 - RNA, 19 nt, Artificial Sequence
  Description of Artificial Sequence: Synthetic oligonucleotide
agcauccggcuguacagcu

SEQ ID NO: 1371830 - RNA, 19 nt, Artificial Sequence
  Description of Artificial Sequence: Synthetic oligonucleotide
aggcagaaaacagguccgg

SEQ ID NO: 1371831 - RNA, 19 nt, Artificial Sequence
  Description of Artificial Sequence: Synthetic oligonucleotide
agugaccagcuuucccuug

SEQ ID NO: 1371832 - RNA, 19 nt, Artificial Sequence
  Description of Artificial Sequence: Synthetic oligonucleotide
agcgccguauuugauccag

SEQ ID NO: 1371833 - RNA, 19 nt, Artificial Sequence
  Description of Artificial Sequence: Synthetic oligonucleotide
acgagcacaccaugugaca

SEQ ID NO: 1371834 - RNA, 19 nt, Artificial Sequence
  Description of Artificial Sequence: Synthetic oligonucleotide
cacaaccgaaggcccaagc

SEQ ID NO: 1371835 - RNA, 19 nt, Artificial Sequence
  Description of Artificial Sequence: Synthetic oligonucleotide
ccggaaacguuuuagcauc

SEQ ID NO: 1371836 - RNA, 19 nt, Artificial Sequence
  Description of Artificial Sequence: Synthetic oligonucleotide
aucugugcguuugggguag

SEQ ID NO: 1371837 - RNA, 19 nt, Artificial Sequence
  Description of Artificial Sequence: Synthetic oligonucleotide
uagacggaccagacaucug

SEQ ID NO: 1371838 - RNA, 19 nt, Artificial Sequence
  Description of Artificial Sequence: Synthetic oligonucleotide
cuacgagcacaccauguga

SEQ ID NO: 1371839 - RNA, 19 nt, Artificial Sequence
  Description of Artificial Sequence: Synthetic oligonucleotide
gucgcugggaaggagugac

SEQ ID NO: 1371840 - RNA, 19 nt, Artificial Sequence
  Description of Artificial Sequence: Synthetic oligonucleotide
cugucauaaaguucuuucu

SEQ ID NO: 1371841 - RNA, 19 nt, Artificial Sequence
  Description of Artificial Sequence: Synthetic oligonucleotide
cucccucccgguaauacga

SEQ ID NO: 1371842 - RNA, 19 nt, Artificial Sequence
  Description of Artificial Sequence: Synthetic oligonucleotide
agugucgcugggaaggagu

SEQ ID NO: 1371843 - RNA, 19 nt, Artificial Sequence
  Description of Artificial Sequence: Synthetic oligonucleotide
uugaccguccuggauggaa

SEQ ID NO: 1371844 - RNA, 19 nt, Artificial Sequence
  Description of Artificial Sequence: Synthetic oligonucleotide
ugugaguauugggccaaac

SEQ ID NO: 1371845 - RNA, 19 nt, Artificial Sequence
  Description of Artificial Sequence: Synthetic oligonucleotide
cuguggagccuagagcuac

SEQ ID NO: 1371846 - RNA, 19 nt, Artificial Sequence
  Description of Artificial Sequence: Synthetic oligonucleotide
ucccgguaauacgaccucc

SEQ ID NO: 1371847 - RNA, 19 nt, Artificial Sequence
  Description of Artificial Sequence: Synthetic oligonucleotide
uaggugcucaguguguuuu

SEQ ID NO: 1371848 - RNA, 19 nt, Artificial Sequence
  Description of Artificial Sequence: Synthetic oligonucleotide
ucaaucucgguggccugca

SEQ ID NO: 1371849 - RNA, 19 nt, Artificial Sequence
  Description of Artificial Sequence: Synthetic oligonucleotide
ggucaaagucaucugcaga

SEQ ID NO: 1371850 - RNA, 19 nt, Artificial Sequence
  Description of Artificial Sequence: Synthetic oligonucleotide
gucgauguagacggaccag

SEQ ID NO: 1371851 - RNA, 19 nt, Artificial Sequence
  Description of Artificial Sequence: Synthetic oligonucleotide
ccuugaccguccuggaugg

SEQ ID NO: 1371852 - RNA, 19 nt, Artificial Sequence
  Description of Artificial Sequence: Synthetic oligonucleotide
ucucggcuacagcucgggc

SEQ ID NO: 1371853 - RNA, 19 nt, Artificial Sequence
  Description of Artificial Sequence: Synthetic oligonucleotide
agagcuguugggagagcuc

SEQ ID NO: 1371854 - RNA, 19 nt, Artificial Sequence
  Description of Artificial Sequence: Synthetic oligonucleotide
aaggcucgcugcagcacuc

SEQ ID NO: 1371855 - RNA, 19 nt, Artificial Sequence
  Description of Artificial Sequence: Synthetic oligonucleotide
gaaaucacguccacaugcu

SEQ ID NO: 1371856 - RNA, 19 nt, Artificial Sequence
  Description of Artificial Sequence: Synthetic oligonucleotide
ggcucagaugaaugacacg

SEQ ID NO: 1371857 - RNA, 19 nt, Artificial Sequence
  Description of Artificial Sequence: Synthetic oligonucleotide
gcucagaugaaugacacgu

SEQ ID NO: 1371858 - RNA, 19 nt, Artificial Sequence
  Description of Artificial Sequence: Synthetic oligonucleotide
ucaugucgauguagacgga

SEQ ID NO: 1371859 - RNA, 19 nt, Artificial Sequence
  Description of Artificial Sequence: Synthetic oligonucleotide
agcucuaccuggcuccuuu

SEQ ID NO: 1371860 - RNA, 19 nt, Artificial Sequence
  Description of Artificial Sequence: Synthetic oligonucleotide
guacugagcucuuggccuc

SEQ ID NO: 1371861 - RNA, 19 nt, Artificial Sequence
  Description of Artificial Sequence: Synthetic oligonucleotide
ugacacguucaaagauguc

SEQ ID NO: 1371862 - RNA, 19 nt, Artificial Sequence
  Description of Artificial Sequence: Synthetic oligonucleotide
gacggaccagacaucugug

SEQ ID NO: 1371863 - RNA, 19 nt, Artificial Sequence
  Description of Artificial Sequence: Synthetic oligonucleotide
ggggagguaacugucauaa

SEQ ID NO: 1371864 - RNA, 19 nt, Artificial Sequence
  Description of Artificial Sequence: Synthetic oligonucleotide
ggaaacguuuuagcauccg

SEQ ID NO: 1371865 - RNA, 19 nt, Artificial Sequence
  Description of Artificial Sequence: Synthetic oligonucleotide
ucaaugcgugacagcuccu

SEQ ID NO: 1371866 - RNA, 19 nt, Artificial Sequence
  Description of Artificial Sequence: Synthetic oligonucleotide
cucuccucgggguggcaag

SEQ ID NO: 1371867 - RNA, 19 nt, Artificial Sequence
  Description of Artificial Sequence: Synthetic oligonucleotide
aggcccucucggcuacagc

SEQ ID NO: 1371868 - RNA, 19 nt, Artificial Sequence
  Description of Artificial Sequence: Synthetic oligonucleotide
auacgaccuccacaccacu

SEQ ID NO: 1371869 - RNA, 19 nt, Artificial Sequence
  Description of Artificial Sequence: Synthetic oligonucleotide
uggagccuagagcuacuua

SEQ ID NO: 1371870 - RNA, 19 nt, Artificial Sequence
  Description of Artificial Sequence: Synthetic oligonucleotide
uacgaccuccacaccacuu

SEQ ID NO: 1371871 - RNA, 19 nt, Artificial Sequence
  Description of Artificial Sequence: Synthetic oligonucleotide
ucccagugucgcugggaag

SEQ ID NO: 1371872 - RNA, 19 nt, Artificial Sequence
  Description of Artificial Sequence: Synthetic oligonucleotide
ccucuuaggggccaggcuc

SEQ ID NO: 1371873 - RNA, 19 nt, Artificial Sequence
  Description of Artificial Sequence: Synthetic oligonucleotide
uucccuuggggagguaacu

SEQ ID NO: 1371874 - RNA, 19 nt, Artificial Sequence
  Description of Artificial Sequence: Synthetic oligonucleotide
agccggucaaagucaucug

SEQ ID NO: 1371875 - RNA, 19 nt, Artificial Sequence
  Description of Artificial Sequence: Synthetic oligonucleotide
aggaaaaccuugagaggcu

SEQ ID NO: 1371876 - RNA, 19 nt, Artificial Sequence
  Description of Artificial Sequence: Synthetic oligonucleotide
gaagaacuucauccucuua

SEQ ID NO: 1371877 - RNA, 19 nt, Artificial Sequence
  Description of Artificial Sequence: Synthetic oligonucleotide
gccugaagagagcugcagc

SEQ ID NO: 1371878 - RNA, 19 nt, Artificial Sequence
  Description of Artificial Sequence: Synthetic oligonucleotide
gagcucucuccucggggug

SEQ ID NO: 1371879 - RNA, 19 nt, Artificial Sequence
  Description of Artificial Sequence: Synthetic oligonucleotide
agcucuacgagcacaccau

SEQ ID NO: 1371880 - RNA, 19 nt, Artificial Sequence
  Description of Artificial Sequence: Synthetic oligonucleotide
uucuccugccggaaacguu

SEQ ID NO: 1371881 - RNA, 19 nt, Artificial Sequence
  Description of Artificial Sequence: Synthetic oligonucleotide
ccaagcucuacgagcacac

SEQ ID NO: 1371882 - RNA, 19 nt, Artificial Sequence
  Description of Artificial Sequence: Synthetic oligonucleotide
acgucccaaacgaagccug

SEQ ID NO: 1371883 - RNA, 19 nt, Artificial Sequence
  Description of Artificial Sequence: Synthetic oligonucleotide
cucggugacuggucccagc

SEQ ID NO: 1371884 - RNA, 19 nt, Artificial Sequence
  Description of Artificial Sequence: Synthetic oligonucleotide
cucucggcuacagcucggg

SEQ ID NO: 1371885 - RNA, 19 nt, Artificial Sequence
  Description of Artificial Sequence: Synthetic oligonucleotide
aagcgccguauuugaucca

SEQ ID NO: 1371886 - RNA, 19 nt, Artificial Sequence
  Description of Artificial Sequence: Synthetic oligonucleotide
uggcuuuagcccgcucugc

SEQ ID NO: 1371887 - RNA, 19 nt, Artificial Sequence
  Description of Artificial Sequence: Synthetic oligonucleotide
cuagcugggcaaacuuaga

SEQ ID NO: 1371888 - RNA, 19 nt, Artificial Sequence
  Description of Artificial Sequence: Synthetic oligonucleotide
caaaacaaaagcgccguau

SEQ ID NO: 1371889 - RNA, 19 nt, Artificial Sequence
  Description of Artificial Sequence: Synthetic oligonucleotide
ucccucccgguaauacgac

SEQ ID NO: 1371890 - RNA, 19 nt, Artificial Sequence
  Description of Artificial Sequence: Synthetic oligonucleotide
guccuggauggaauuaauc

SEQ ID NO: 1371891 - RNA, 19 nt, Artificial Sequence
  Description of Artificial Sequence: Synthetic oligonucleotide
cucugcgggcuuugucugc

SEQ ID NO: 1371892 - RNA, 19 nt, Artificial Sequence
  Description of Artificial Sequence: Synthetic oligonucleotide
cguauuugauccagacagc

SEQ ID NO: 1371893 - RNA, 19 nt, Artificial Sequence
  Description of Artificial Sequence: Synthetic oligonucleotide
gaccuccacaccacuuggc

SEQ ID NO: 1371894 - RNA, 19 nt, Artificial Sequence
  Description of Artificial Sequence: Synthetic oligonucleotide
caagccccacgucccaaac

SEQ ID NO: 1371895 - RNA, 19 nt, Artificial Sequence
  Description of Artificial Sequence: Synthetic oligonucleotide
cccaaacgaagccugaaga

SEQ ID NO: 1371896 - RNA, 19 nt, Artificial Sequence
  Description of Artificial Sequence: Synthetic oligonucleotide
gaucuucgacuuuacuuuu

SEQ ID NO: 1371897 - RNA, 19 nt, Artificial Sequence
  Description of Artificial Sequence: Synthetic oligonucleotide
caagcucuacgagcacacc

SEQ ID NO: 1371898 - RNA, 19 nt, Artificial Sequence
  Description of Artificial Sequence: Synthetic oligonucleotide
gaauuaaucucuggaucuu

SEQ ID NO: 1371899 - RNA, 19 nt, Artificial Sequence
  Description of Artificial Sequence: Synthetic oligonucleotide
uuuuagcauccggcuguac

SEQ ID NO: 1371900 - RNA, 19 nt, Artificial Sequence
  Description of Artificial Sequence: Synthetic oligonucleotide
ugucgcugggaaggaguga

SEQ ID NO: 1371901 - RNA, 19 nt, Artificial Sequence
  Description of Artificial Sequence: Synthetic oligonucleotide
cucccgguaauacgaccuc

SEQ ID NO: 1371902 - RNA, 19 nt, Artificial Sequence
  Description of Artificial Sequence: Synthetic oligonucleotide
aaguccuguggagccuaga

SEQ ID NO: 1371903 - RNA, 19 nt, Artificial Sequence
  Description of Artificial Sequence: Synthetic oligonucleotide
ggcagaaaacagguccggc

SEQ ID NO: 1371904 - RNA, 19 nt, Artificial Sequence
  Description of Artificial Sequence: Synthetic oligonucleotide
caucugugcguuuggggua

SEQ ID NO: 1371905 - RNA, 19 nt, Artificial Sequence
  Description of Artificial Sequence: Synthetic oligonucleotide
cacagcccgcucgaagacc

SEQ ID NO: 1371906 - RNA, 19 nt, Artificial Sequence
  Description of Artificial Sequence: Synthetic oligonucleotide
ucucuccucgggguggcaa

SEQ ID NO: 1371907 - RNA, 19 nt, Artificial Sequence
  Description of Artificial Sequence: Synthetic oligonucleotide
gccguauuugauccagaca

SEQ ID NO: 1371908 - RNA, 19 nt, Artificial Sequence
  Description of Artificial Sequence: Synthetic oligonucleotide
cagugccacccacacguuc

SEQ ID NO: 1371909 - RNA, 19 nt, Artificial Sequence
  Description of Artificial Sequence: Synthetic oligonucleotide
ccccacgucccaaacgaag

SEQ ID NO: 1371910 - RNA, 19 nt, Artificial Sequence
  Description of Artificial Sequence: Synthetic oligonucleotide
cucuacgagcacaccaugu

SEQ ID NO: 1371911 - RNA, 19 nt, Artificial Sequence
  Description of Artificial Sequence: Synthetic oligonucleotide
ccacgucccaaacgaagcc

SEQ ID NO: 1371912 - RNA, 19 nt, Artificial Sequence
  Description of Artificial Sequence: Synthetic oligonucleotide
ugacuggucccagccugac

SEQ ID NO: 1371913 - RNA, 19 nt, Artificial Sequence
  Description of Artificial Sequence: Synthetic oligonucleotide
cagccggggcaccucugcg

SEQ ID NO: 1371914 - RNA, 19 nt, Artificial Sequence
  Description of Artificial Sequence: Synthetic oligonucleotide
gccggggcaccucugcggg

SEQ ID NO: 1371915 - RNA, 19 nt, Artificial Sequence
  Description of Artificial Sequence: Synthetic oligonucleotide
gcucuacgagcacaccaug

SEQ ID NO: 1371916 - RNA, 19 nt, Artificial Sequence
  Description of Artificial Sequence: Synthetic oligonucleotide
gguccggcuucccaguguc

SEQ ID NO: 1371917 - RNA, 19 nt, Artificial Sequence
  Description of Artificial Sequence: Synthetic oligonucleotide
cguucaaagaugucccuga

SEQ ID NO: 1371918 - RNA, 19 nt, Artificial Sequence
  Description of Artificial Sequence: Synthetic oligonucleotide
ucugugcguuugggguagg

SEQ ID NO: 1371919 - RNA, 19 nt, Artificial Sequence
  Description of Artificial Sequence: Synthetic oligonucleotide
cagauuucacauagccccu

SEQ ID NO: 1371920 - RNA, 19 nt, Artificial Sequence
  Description of Artificial Sequence: Synthetic oligonucleotide
cagacucgggcugccgccc

SEQ ID NO: 1371921 - RNA, 19 nt, Artificial Sequence
  Description of Artificial Sequence: Synthetic oligonucleotide
gagccuagagcuacuuagu

SEQ ID NO: 1371922 - RNA, 19 nt, Artificial Sequence
  Description of Artificial Sequence: Synthetic oligonucleotide
gcgacacugagacacgugu

SEQ ID NO: 1371923 - RNA, 19 nt, Artificial Sequence
  Description of Artificial Sequence: Synthetic oligonucleotide
ccacacguucagcuuuucc

SEQ ID NO: 1371924 - RNA, 19 nt, Artificial Sequence
  Description of Artificial Sequence: Synthetic oligonucleotide
uucgcccuuucuucuucuu

SEQ ID NO: 1371925 - RNA, 19 nt, Artificial Sequence
  Description of Artificial Sequence: Synthetic oligonucleotide
caccaugugacaggacaga

SEQ ID NO: 1371926 - RNA, 19 nt, Artificial Sequence
  Description of Artificial Sequence: Synthetic oligonucleotide
gccggaaacguuuuagcau

SEQ ID NO: 1371927 - RNA, 19 nt, Artificial Sequence
  Description of Artificial Sequence: Synthetic oligonucleotide
acucggugacuggucccag

SEQ ID NO: 1371928 - RNA, 19 nt, Artificial Sequence
  Description of Artificial Sequence: Synthetic oligonucleotide
cacugagacacgugugagu

SEQ ID NO: 1371929 - RNA, 19 nt, Artificial Sequence
  Description of Artificial Sequence: Synthetic oligonucleotide
cauguacugcagccacaga

SEQ ID NO: 1371930 - RNA, 19 nt, Artificial Sequence
  Description of Artificial Sequence: Synthetic oligonucleotide
cuccucgggguggcaaggc

SEQ ID NO: 1371931 - RNA, 19 nt, Artificial Sequence
  Description of Artificial Sequence: Synthetic oligonucleotide
cgccguauuugauccagac

SEQ ID NO: 1371932 - RNA, 19 nt, Artificial Sequence
  Description of Artificial Sequence: Synthetic oligonucleotide
cggaaacguuuuagcaucc

SEQ ID NO: 1371933 - RNA, 19 nt, Artificial Sequence
  Description of Artificial Sequence: Synthetic oligonucleotide
ggaacucuagcugggcaaa

SEQ ID NO: 1371934 - RNA, 19 nt, Artificial Sequence
  Description of Artificial Sequence: Synthetic oligonucleotide
gauggucuucaaggcccuc

SEQ ID NO: 1371935 - RNA, 19 nt, Artificial Sequence
  Description of Artificial Sequence: Synthetic oligonucleotide
cugggagccguacauguuu

SEQ ID NO: 1371936 - RNA, 19 nt, Artificial Sequence
  Description of Artificial Sequence: Synthetic oligonucleotide
gcgugacagcuccuucucc

SEQ ID NO: 1371937 - RNA, 19 nt, Artificial Sequence
  Description of Artificial Sequence: Synthetic oligonucleotide
cuuuccggguucacacgua

SEQ ID NO: 1371938 - RNA, 19 nt, Artificial Sequence
  Description of Artificial Sequence: Synthetic oligonucleotide
ggccugcaaguggaaagcc

SEQ ID NO: 1371939 - RNA, 19 nt, Artificial Sequence
  Description of Artificial Sequence: Synthetic oligonucleotide
ccgguaauacgaccuccac

SEQ ID NO: 1371940 - RNA, 19 nt, Artificial Sequence
  Description of Artificial Sequence: Synthetic oligonucleotide
cccgggguccaugagugcc

SEQ ID NO: 1371941 - RNA, 19 nt, Artificial Sequence
  Description of Artificial Sequence: Synthetic oligonucleotide
cacguucaaagaugucccu

SEQ ID NO: 1371942 - RNA, 19 nt, Artificial Sequence
  Description of Artificial Sequence: Synthetic oligonucleotide
accguccuggauggaauua

SEQ ID NO: 1371943 - RNA, 19 nt, Artificial Sequence
  Description of Artificial Sequence: Synthetic oligonucleotide
gcgcuugaagaagaacuuc

SEQ ID NO: 1371944 - RNA, 19 nt, Artificial Sequence
  Description of Artificial Sequence: Synthetic oligonucleotide
gucccaaacgaagccugaa

SEQ ID NO: 1371945 - RNA, 19 nt, Artificial Sequence
  Description of Artificial Sequence: Synthetic oligonucleotide
cccucccgguaauacgacc

SEQ ID NO: 1371946 - RNA, 19 nt, Artificial Sequence
  Description of Artificial Sequence: Synthetic oligonucleotide
guccggcuucccagugucg

SEQ ID NO: 1371947 - RNA, 19 nt, Artificial Sequence
  Description of Artificial Sequence: Synthetic oligonucleotide
caaaagcgccguauuugau

SEQ ID NO: 1371948 - RNA, 19 nt, Artificial Sequence
  Description of Artificial Sequence: Synthetic oligonucleotide
cgacacugagacacgugug

SEQ ID NO: 1371949 - RNA, 19 nt, Artificial Sequence
  Description of Artificial Sequence: Synthetic oligonucleotide
ccggcuguacagcucacca

SEQ ID NO: 1371950 - RNA, 19 nt, Artificial Sequence
  Description of Artificial Sequence: Synthetic oligonucleotide
cuuucucaggugggcgaca

SEQ ID NO: 1371951 - RNA, 19 nt, Artificial Sequence
  Description of Artificial Sequence: Synthetic oligonucleotide
cccgguaauacgaccucca

SEQ ID NO: 1371952 - RNA, 19 nt, Artificial Sequence
  Description of Artificial Sequence: Synthetic oligonucleotide
ggcgacacugagacacgug

SEQ ID NO: 1371953 - RNA, 19 nt, Artificial Sequence
  Description of Artificial Sequence: Synthetic oligonucleotide
gacuggucccagccugacu

SEQ ID NO: 1371954 - RNA, 19 nt, Artificial Sequence
  Description of Artificial Sequence: Synthetic oligonucleotide
cguuuuagcauccggcugu

SEQ ID NO: 1371955 - RNA, 19 nt, Artificial Sequence
  Description of Artificial Sequence: Synthetic oligonucleotide
cagugccaugcuguuucuc

SEQ ID NO: 1371956 - RNA, 19 nt, Artificial Sequence
  Description of Artificial Sequence: Synthetic oligonucleotide
ccuucgccuugacagccug

SEQ ID NO: 1371957 - RNA, 19 nt, Artificial Sequence
  Description of Artificial Sequence: Synthetic oligonucleotide
cgguaauacgaccuccaca

SEQ ID NO: 1371958 - RNA, 19 nt, Artificial Sequence
  Description of Artificial Sequence: Synthetic oligonucleotide
ccgacuugguguagauguc

SEQ ID NO: 1371959 - RNA, 19 nt, Artificial Sequence
  Description of Artificial Sequence: Synthetic oligonucleotide
cauccucucccucccggua

SEQ ID NO: 1371960 - RNA, 19 nt, Artificial Sequence
  Description of Artificial Sequence: Synthetic oligonucleotide
cacgucccaaacgaagccu

SEQ ID NO: 1371961 - RNA, 19 nt, Artificial Sequence
  Description of Artificial Sequence: Synthetic oligonucleotide
gaccguccuggauggaauu

SEQ ID NO: 1371962 - RNA, 19 nt, Artificial Sequence
  Description of Artificial Sequence: Synthetic oligonucleotide
gggagccguacauguuuuc

SEQ ID NO: 1371963 - RNA, 19 nt, Artificial Sequence
  Description of Artificial Sequence: Synthetic oligonucleotide
gcuccuuuccggguucaca

SEQ ID NO: 1371964 - RNA, 19 nt, Artificial Sequence
  Description of Artificial Sequence: Synthetic oligonucleotide
gccaugcuuaauggucaug

SEQ ID NO: 1371965 - RNA, 19 nt, Artificial Sequence
  Description of Artificial Sequence: Synthetic oligonucleotide
ccggguucacacguaggac

SEQ ID NO: 1371966 - RNA, 19 nt, Artificial Sequence
  Description of Artificial Sequence: Synthetic oligonucleotide
cuucuccugccggaaacgu

SEQ ID NO: 1371967 - RNA, 19 nt, Artificial Sequence
  Description of Artificial Sequence: Synthetic oligonucleotide
cgcccgggguccaugagug

SEQ ID NO: 1371968 - RNA, 19 nt, Artificial Sequence
  Description of Artificial Sequence: Synthetic oligonucleotide
ccucccgguaauacgaccu

SEQ ID NO: 1371969 - RNA, 19 nt, Artificial Sequence
  Description of Artificial Sequence: Synthetic oligonucleotide
cacccacacguucagcuuu

SEQ ID NO: 1371970 - RNA, 19 nt, Artificial Sequence
  Description of Artificial Sequence: Synthetic oligonucleotide
cccaaaacaaaagcgccgu

SEQ ID NO: 1371971 - RNA, 19 nt, Artificial Sequence
  Description of Artificial Sequence: Synthetic oligonucleotide
gcucuaccuggcuccuuuc

SEQ ID NO: 1371972 - RNA, 19 nt, Artificial Sequence
  Description of Artificial Sequence: Synthetic oligonucleotide
gguggccugcaaguggaaa

SEQ ID NO: 1371973 - RNA, 19 nt, Artificial Sequence
  Description of Artificial Sequence: Synthetic oligonucleotide
ccgcucgaagaccuucauc

SEQ ID NO: 1371974 - RNA, 19 nt, Artificial Sequence
  Description of Artificial Sequence: Synthetic oligonucleotide
ccuuuccggguucacacgu

SEQ ID NO: 1371975 - RNA, 19 nt, Artificial Sequence
  Description of Artificial Sequence: Synthetic oligonucleotide
caaucucgguggccugcaa

SEQ ID NO: 1371976 - RNA, 19 nt, Artificial Sequence
  Description of Artificial Sequence: Synthetic oligonucleotide
ggugggcgacacugagaca

SEQ ID NO: 1371977 - RNA, 19 nt, Artificial Sequence
  Description of Artificial Sequence: Synthetic oligonucleotide
cagcgccuucgccuugaca

SEQ ID NO: 1371978 - RNA, 19 nt, Artificial Sequence
  Description of Artificial Sequence: Synthetic oligonucleotide
caaugcgugacagcuccuu

SEQ ID NO: 1371979 - RNA, 19 nt, Artificial Sequence
  Description of Artificial Sequence: Synthetic oligonucleotide
gugugaguauugggccaaa

SEQ ID NO: 1371980 - RNA, 19 nt, Artificial Sequence
  Description of Artificial Sequence: Synthetic oligonucleotide
gcauccggcuguacagcuc

SEQ ID NO: 1371981 - RNA, 19 nt, Artificial Sequence
  Description of Artificial Sequence: Synthetic oligonucleotide
cuugaccguccuggaugga

SEQ ID NO: 1371982 - RNA, 19 nt, Artificial Sequence
  Description of Artificial Sequence: Synthetic oligonucleotide
cccuuggggagguaacugu

SEQ ID NO: 1371983 - RNA, 19 nt, Artificial Sequence
  Description of Artificial Sequence: Synthetic oligonucleotide
ccacaaccgaaggcccaag

SEQ ID NO: 1371984 - RNA, 19 nt, Artificial Sequence
  Description of Artificial Sequence: Synthetic oligonucleotide
ccaugugacaggacagauu

SEQ ID NO: 1371985 - RNA, 19 nt, Artificial Sequence
  Description of Artificial Sequence: Synthetic oligonucleotide
cgugugaguauugggccaa

SEQ ID NO: 1371986 - RNA, 19 nt, Artificial Sequence
  Description of Artificial Sequence: Synthetic oligonucleotide
guggagccuagagcuacuu

SEQ ID NO: 1371987 - RNA, 19 nt, Artificial Sequence
  Description of Artificial Sequence: Synthetic oligonucleotide
cuccugccggaaacguuuu

SEQ ID NO: 1371988 - RNA, 19 nt, Artificial Sequence
  Description of Artificial Sequence: Synthetic oligonucleotide
cguaggaccuuggcaguga

SEQ ID NO: 1371989 - RNA, 19 nt, Artificial Sequence
  Description of Artificial Sequence: Synthetic oligonucleotide
ccagugucgcugggaagga

SEQ ID NO: 1371990 - RNA, 19 nt, Artificial Sequence
  Description of Artificial Sequence: Synthetic oligonucleotide
cugugcguuugggguaggu

SEQ ID NO: 1371991 - RNA, 19 nt, Artificial Sequence
  Description of Artificial Sequence: Synthetic oligonucleotide
gcgccguauuugauccaga

SEQ ID NO: 1371992 - RNA, 19 nt, Artificial Sequence
  Description of Artificial Sequence: Synthetic oligonucleotide
gcugcccuuccuugaccgu

SEQ ID NO: 1371993 - RNA, 19 nt, Artificial Sequence
  Description of Artificial Sequence: Synthetic oligonucleotide
ccaugagugccuccucaau

SEQ ID NO: 1371994 - RNA, 19 nt, Artificial Sequence
  Description of Artificial Sequence: Synthetic oligonucleotide
gggcgacacugagacacgu

SEQ ID NO: 1371995 - RNA, 19 nt, Artificial Sequence
  Description of Artificial Sequence: Synthetic oligonucleotide
cccacacguucagcuuuuc

SEQ ID NO: 1371996 - RNA, 19 nt, Artificial Sequence
  Description of Artificial Sequence: Synthetic oligonucleotide
ccgggguccaugagugccu

SEQ ID NO: 1371997 - RNA, 19 nt, Artificial Sequence
  Description of Artificial Sequence: Synthetic oligonucleotide
ccugggagccguacauguu

SEQ ID NO: 1371998 - RNA, 19 nt, Artificial Sequence
  Description of Artificial Sequence: Synthetic oligonucleotide
gccccacgucccaaacgaa

SEQ ID NO: 1371999 - RNA, 19 nt, Artificial Sequence
  Description of Artificial Sequence: Synthetic oligonucleotide
ccggcuucccagugucgcu

SEQ ID NO: 1372000 - RNA, 19 nt, Artificial Sequence
  Description of Artificial Sequence: Synthetic oligonucleotide
gcaccucugcgggcuuugu

SEQ ID NO: 1372001 - RNA, 19 nt, Artificial Sequence
  Description of Artificial Sequence: Synthetic oligonucleotide
aaguauaucuccuauauuc

SEQ ID NO: 1372002 - RNA, 19 nt, Artificial Sequence
  Description of Artificial Sequence: Synthetic oligonucleotide
uauggaaucauucuaaaag

SEQ ID NO: 1372003 - RNA, 19 nt, Artificial Sequence
  Description of Artificial Sequence: Synthetic oligonucleotide
acauauuuaugguagaagc

SEQ ID NO: 1372004 - RNA, 19 nt, Artificial Sequence
  Description of Artificial Sequence: Synthetic oligonucleotide
aaagucaacagacauucac

SEQ ID NO: 1372005 - RNA, 19 nt, Artificial Sequence
  Description of Artificial Sequence: Synthetic oligonucleotide
ucaacagacauucacauca

SEQ ID NO: 1372006 - RNA, 19 nt, Artificial Sequence
  Description of Artificial Sequence: Synthetic oligonucleotide
cuugcauucugauagaugg

SEQ ID NO: 1372007 - RNA, 19 nt, Artificial Sequence
  Description of Artificial Sequence: Synthetic oligonucleotide
aaggguaaaauagaugucc

SEQ ID NO: 1372008 - RNA, 19 nt, Artificial Sequence
  Description of Artificial Sequence: Synthetic oligonucleotide
ucuauaaaugaucucaccc

SEQ ID NO: 1372009 - RNA, 19 nt, Artificial Sequence
  Description of Artificial Sequence: Synthetic oligonucleotide
aguauuuuggaacaugggg

SEQ ID NO: 1372010 - RNA, 19 nt, Artificial Sequence
  Description of Artificial Sequence: Synthetic oligonucleotide
uuuaaauaaccuuucagca

SEQ ID NO: 1372011 - RNA, 19 nt, Artificial Sequence
  Description of Artificial Sequence: Synthetic oligonucleotide
ugggauaaggguaaaauag

SEQ ID NO: 1372012 - RNA, 19 nt, Artificial Sequence
  Description of Artificial Sequence: Synthetic oligonucleotide
uaacucuaaagcuugauag

SEQ ID NO: 1372013 - RNA, 19 nt, Artificial Sequence
  Description of Artificial Sequence: Synthetic oligonucleotide
uaaguauuuuggaacaugg

SEQ ID NO: 1372014 - RNA, 19 nt, Artificial Sequence
  Description of Artificial Sequence: Synthetic oligonucleotide
aacaugaugaaaaguaggc

SEQ ID NO: 1372015 - RNA, 19 nt, Artificial Sequence
  Description of Artificial Sequence: Synthetic oligonucleotide
cauuguuuaacucuaaagc

SEQ ID NO: 1372016 - RNA, 19 nt, Artificial Sequence
  Description of Artificial Sequence: Synthetic oligonucleotide
ucucuaguaaguauuuugg

SEQ ID NO: 1372017 - RNA, 19 nt, Artificial Sequence
  Description of Artificial Sequence: Synthetic oligonucleotide
uuuaguugguaauauagug

SEQ ID NO: 1372018 - RNA, 19 nt, Artificial Sequence
  Description of Artificial Sequence: Synthetic oligonucleotide
uguuuaaauaaccuuucag

SEQ ID NO: 1372019 - RNA, 19 nt, Artificial Sequence
  Description of Artificial Sequence: Synthetic oligonucleotide
cuagaagugauucuaagag

SEQ ID NO: 1372020 - RNA, 19 nt, Artificial Sequence
  Description of Artificial Sequence: Synthetic oligonucleotide
agaccuugcauucugauag

SEQ ID NO: 1372021 - RNA, 19 nt, Artificial Sequence
  Description of Artificial Sequence: Synthetic oligonucleotide
aaaaguaggcaguagcucu

SEQ ID NO: 1372022 - RNA, 19 nt, Artificial Sequence
  Description of Artificial Sequence: Synthetic oligonucleotide
uuugauucgagcuggagga

SEQ ID NO: 1372023 - RNA, 19 nt, Artificial Sequence
  Description of Artificial Sequence: Synthetic oligonucleotide
ucuuaaacuuuuaaaguca

SEQ ID NO: 1372024 - RNA, 19 nt, Artificial Sequence
  Description of Artificial Sequence: Synthetic oligonucleotide
aucuccuauauucugcucc

SEQ ID NO: 1372025 - RNA, 19 nt, Artificial Sequence
  Description of Artificial Sequence: Synthetic oligonucleotide
uguggguuagcacagacca

SEQ ID NO: 1372026 - RNA, 19 nt, Artificial Sequence
  Description of Artificial Sequence: Synthetic oligonucleotide
aaguaaggggcucuuuacc

SEQ ID NO: 1372027 - RNA, 19 nt, Artificial Sequence
  Description of Artificial Sequence: Synthetic oligonucleotide
aaaagucuguuucacaggu

SEQ ID NO: 1372028 - RNA, 19 nt, Artificial Sequence
  Description of Artificial Sequence: Synthetic oligonucleotide
aacucuaaagcuugauagg

SEQ ID NO: 1372029 - RNA, 19 nt, Artificial Sequence
  Description of Artificial Sequence: Synthetic oligonucleotide
ucauauuuugccaggacug

SEQ ID NO: 1372030 - RNA, 19 nt, Artificial Sequence
  Description of Artificial Sequence: Synthetic oligonucleotide
uuuacaaguaucuuucacu

SEQ ID NO: 1372031 - RNA, 19 nt, Artificial Sequence
  Description of Artificial Sequence: Synthetic oligonucleotide
uguuuaacucuaaagcuug

SEQ ID NO: 1372032 - RNA, 19 nt, Artificial Sequence
  Description of Artificial Sequence: Synthetic oligonucleotide
cuaguaaguauuuuggaac

SEQ ID NO: 1372033 - RNA, 19 nt, Artificial Sequence
  Description of Artificial Sequence: Synthetic oligonucleotide
uuaaagucaacagacauuc

SEQ ID NO: 1372034 - RNA, 19 nt, Artificial Sequence
  Description of Artificial Sequence: Synthetic oligonucleotide
uuacaaguaucuuucacug

SEQ ID NO: 1372035 - RNA, 19 nt, Artificial Sequence
  Description of Artificial Sequence: Synthetic oligonucleotide
uugagcuucaugcugagga

SEQ ID NO: 1372036 - RNA, 19 nt, Artificial Sequence
  Description of Artificial Sequence: Synthetic oligonucleotide
uucuuaaacuuuuaaaguc

SEQ ID NO: 1372037 - RNA, 19 nt, Artificial Sequence
  Description of Artificial Sequence: Synthetic oligonucleotide
uguucaacaugguaagagg

SEQ ID NO: 1372038 - RNA, 19 nt, Artificial Sequence
  Description of Artificial Sequence: Synthetic oligonucleotide
ugaauugcuuuccacagca

SEQ ID NO: 1372039 - RNA, 19 nt, Artificial Sequence
  Description of Artificial Sequence: Synthetic oligonucleotide
agguuuaaaggguuucucc

SEQ ID NO: 1372040 - RNA, 19 nt, Artificial Sequence
  Description of Artificial Sequence: Synthetic oligonucleotide
uauaucuccuauauucugc

SEQ ID NO: 1372041 - RNA, 19 nt, Artificial Sequence
  Description of Artificial Sequence: Synthetic oligonucleotide
ucuaucagcaguuucugug

SEQ ID NO: 1372042 - RNA, 19 nt, Artificial Sequence
  Description of Artificial Sequence: Synthetic oligonucleotide
ucgcaaauggcuuauagac

SEQ ID NO: 1372043 - RNA, 19 nt, Artificial Sequence
  Description of Artificial Sequence: Synthetic oligonucleotide
guaaaguggaugaagaaag

SEQ ID NO: 1372044 - RNA, 19 nt, Artificial Sequence
  Description of Artificial Sequence: Synthetic oligonucleotide
uuaguugguaauauagugu

SEQ ID NO: 1372045 - RNA, 19 nt, Artificial Sequence
  Description of Artificial Sequence: Synthetic oligonucleotide
ugaacaucugcauaggccu

SEQ ID NO: 1372046 - RNA, 19 nt, Artificial Sequence
  Description of Artificial Sequence: Synthetic oligonucleotide
uguuuguuuacaaguaucu

SEQ ID NO: 1372047 - RNA, 19 nt, Artificial Sequence
  Description of Artificial Sequence: Synthetic oligonucleotide
ugguagaagcuuuacaaag

SEQ ID NO: 1372048 - RNA, 19 nt, Artificial Sequence
  Description of Artificial Sequence: Synthetic oligonucleotide
auauauacaaguacauugg

SEQ ID NO: 1372049 - RNA, 19 nt, Artificial Sequence
  Description of Artificial Sequence: Synthetic oligonucleotide
acucuaaagcuugauaggc

SEQ ID NO: 1372050 - RNA, 19 nt, Artificial Sequence
  Description of Artificial Sequence: Synthetic oligonucleotide
aauauagugugacagcauu

SEQ ID NO: 1372051 - RNA, 19 nt, Artificial Sequence
  Description of Artificial Sequence: Synthetic oligonucleotide
ucuaaagcuugauaggcug

SEQ ID NO: 1372052 - RNA, 19 nt, Artificial Sequence
  Description of Artificial Sequence: Synthetic oligonucleotide
uuuuaguugguaauauagu

SEQ ID NO: 1372053 - RNA, 19 nt, Artificial Sequence
  Description of Artificial Sequence: Synthetic oligonucleotide
ucuaguaaguauuuuggaa

SEQ ID NO: 1372054 - RNA, 19 nt, Artificial Sequence
  Description of Artificial Sequence: Synthetic oligonucleotide
aauggguauggaaucauuc

SEQ ID NO: 1372055 - RNA, 19 nt, Artificial Sequence
  Description of Artificial Sequence: Synthetic oligonucleotide
cuuugauucgagcuggagg

SEQ ID NO: 1372056 - RNA, 19 nt, Artificial Sequence
  Description of Artificial Sequence: Synthetic oligonucleotide
ugugcuuaacccuagugcu

SEQ ID NO: 1372057 - RNA, 19 nt, Artificial Sequence
  Description of Artificial Sequence: Synthetic oligonucleotide
auaaccuuucagcaucuac

SEQ ID NO: 1372058 - RNA, 19 nt, Artificial Sequence
  Description of Artificial Sequence: Synthetic oligonucleotide
aguacauugguaucucguc

SEQ ID NO: 1372059 - RNA, 19 nt, Artificial Sequence
  Description of Artificial Sequence: Synthetic oligonucleotide
uucaacaugguaagaggag

SEQ ID NO: 1372060 - RNA, 19 nt, Artificial Sequence
  Description of Artificial Sequence: Synthetic oligonucleotide
ucuagaagugauucuaaga

SEQ ID NO: 1372061 - RNA, 19 nt, Artificial Sequence
  Description of Artificial Sequence: Synthetic oligonucleotide
ugauaggcugcuuugauuc

SEQ ID NO: 1372062 - RNA, 19 nt, Artificial Sequence
  Description of Artificial Sequence: Synthetic oligonucleotide
uucaucaaaucucucauua

SEQ ID NO: 1372063 - RNA, 19 nt, Artificial Sequence
  Description of Artificial Sequence: Synthetic oligonucleotide
uaaaugaucucacccgccc

SEQ ID NO: 1372064 - RNA, 19 nt, Artificial Sequence
  Description of Artificial Sequence: Synthetic oligonucleotide
uaagagguuuucauggaug

SEQ ID NO: 1372065 - RNA, 19 nt, Artificial Sequence
  Description of Artificial Sequence: Synthetic oligonucleotide
acagucauuguuuaacucu

SEQ ID NO: 1372066 - RNA, 19 nt, Artificial Sequence
  Description of Artificial Sequence: Synthetic oligonucleotide
agaacauaggcaguggcac

SEQ ID NO: 1372067 - RNA, 19 nt, Artificial Sequence
  Description of Artificial Sequence: Synthetic oligonucleotide
augucuuacaaauacucca

SEQ ID NO: 1372068 - RNA, 19 nt, Artificial Sequence
  Description of Artificial Sequence: Synthetic oligonucleotide
aucugcauaggccugcaac

SEQ ID NO: 1372069 - RNA, 19 nt, Artificial Sequence
  Description of Artificial Sequence: Synthetic oligonucleotide
ucuuucacugcucgugugg

SEQ ID NO: 1372070 - RNA, 19 nt, Artificial Sequence
  Description of Artificial Sequence: Synthetic oligonucleotide
auggaaucauucuaaaagu

SEQ ID NO: 1372071 - RNA, 19 nt, Artificial Sequence
  Description of Artificial Sequence: Synthetic oligonucleotide
gaacauggggauuaaacuc

SEQ ID NO: 1372072 - RNA, 19 nt, Artificial Sequence
  Description of Artificial Sequence: Synthetic oligonucleotide
ugagaucauacucacggcu

SEQ ID NO: 1372073 - RNA, 19 nt, Artificial Sequence
  Description of Artificial Sequence: Synthetic oligonucleotide
uaguaaguauuuuggaaca

SEQ ID NO: 1372074 - RNA, 19 nt, Artificial Sequence
  Description of Artificial Sequence: Synthetic oligonucleotide
auucuaaaagugccuuccc

SEQ ID NO: 1372075 - RNA, 19 nt, Artificial Sequence
  Description of Artificial Sequence: Synthetic oligonucleotide
cuaaaagugccuucccacg

SEQ ID NO: 1372076 - RNA, 19 nt, Artificial Sequence
  Description of Artificial Sequence: Synthetic oligonucleotide
agcuggaggauuucuuucc

SEQ ID NO: 1372077 - RNA, 19 nt, Artificial Sequence
  Description of Artificial Sequence: Synthetic oligonucleotide
uuuaaaggguuucuccaga

SEQ ID NO: 1372078 - RNA, 19 nt, Artificial Sequence
  Description of Artificial Sequence: Synthetic oligonucleotide
ucuuacaaauacuccacac

SEQ ID NO: 1372079 - RNA, 19 nt, Artificial Sequence
  Description of Artificial Sequence: Synthetic oligonucleotide
ucaguggucgcaaauggcu

SEQ ID NO: 1372080 - RNA, 19 nt, Artificial Sequence
  Description of Artificial Sequence: Synthetic oligonucleotide
uuagcacagaccagagccg

SEQ ID NO: 1372081 - RNA, 19 nt, Artificial Sequence
  Description of Artificial Sequence: Synthetic oligonucleotide
cuaucauugcuguagagga

SEQ ID NO: 1372082 - RNA, 19 nt, Artificial Sequence
  Description of Artificial Sequence: Synthetic oligonucleotide
uuaugguagaagcuuuaca

SEQ ID NO: 1372083 - RNA, 19 nt, Artificial Sequence
  Description of Artificial Sequence: Synthetic oligonucleotide
ugccugaacaucugcauag

SEQ ID NO: 1372084 - RNA, 19 nt, Artificial Sequence
  Description of Artificial Sequence: Synthetic oligonucleotide
agugccuguuuaaauaacc

SEQ ID NO: 1372085 - RNA, 19 nt, Artificial Sequence
  Description of Artificial Sequence: Synthetic oligonucleotide
uucaucucuaguaaguauu

SEQ ID NO: 1372086 - RNA, 19 nt, Artificial Sequence
  Description of Artificial Sequence: Synthetic oligonucleotide
uuguuuaacucuaaagcuu

SEQ ID NO: 1372087 - RNA, 19 nt, Artificial Sequence
  Description of Artificial Sequence: Synthetic oligonucleotide
gccaguagaacauaggcag

SEQ ID NO: 1372088 - RNA, 19 nt, Artificial Sequence
  Description of Artificial Sequence: Synthetic oligonucleotide
uuguuuguuuacaaguauc

SEQ ID NO: 1372089 - RNA, 19 nt, Artificial Sequence
  Description of Artificial Sequence: Synthetic oligonucleotide
auauucugcuccucuaaag

SEQ ID NO: 1372090 - RNA, 19 nt, Artificial Sequence
  Description of Artificial Sequence: Synthetic oligonucleotide
cugugcuuaacccuagugc

SEQ ID NO: 1372091 - RNA, 19 nt, Artificial Sequence
  Description of Artificial Sequence: Synthetic oligonucleotide
uauuuuggaacauggggau

SEQ ID NO: 1372092 - RNA, 19 nt, Artificial Sequence
  Description of Artificial Sequence: Synthetic oligonucleotide
gaugucuuacaaauacucc

SEQ ID NO: 1372093 - RNA, 19 nt, Artificial Sequence
  Description of Artificial Sequence: Synthetic oligonucleotide
uagaacauaggcaguggca

SEQ ID NO: 1372094 - RNA, 19 nt, Artificial Sequence
  Description of Artificial Sequence: Synthetic oligonucleotide
uguuccggagguaaaauua

SEQ ID NO: 1372095 - RNA, 19 nt, Artificial Sequence
  Description of Artificial Sequence: Synthetic oligonucleotide
aaguauuuuggaacauggg

SEQ ID NO: 1372096 - RNA, 19 nt, Artificial Sequence
  Description of Artificial Sequence: Synthetic oligonucleotide
uuucuugcacacauugcca

SEQ ID NO: 1372097 - RNA, 19 nt, Artificial Sequence
  Description of Artificial Sequence: Synthetic oligonucleotide
acaaguucaugucauagua

SEQ ID NO: 1372098 - RNA, 19 nt, Artificial Sequence
  Description of Artificial Sequence: Synthetic oligonucleotide
cuaucagcaguuucugugc

SEQ ID NO: 1372099 - RNA, 19 nt, Artificial Sequence
  Description of Artificial Sequence: Synthetic oligonucleotide
uguagaggaacagagcccu

SEQ ID NO: 1372100 - RNA, 19 nt, Artificial Sequence
  Description of Artificial Sequence: Synthetic oligonucleotide
aguaaggggcucuuuacca

SEQ ID NO: 1372101 - RNA, 19 nt, Artificial Sequence
  Description of Artificial Sequence: Synthetic oligonucleotide
uacaaguacauugguaucu

SEQ ID NO: 1372102 - RNA, 19 nt, Artificial Sequence
  Description of Artificial Sequence: Synthetic oligonucleotide
auguucaacaugguaagag

SEQ ID NO: 1372103 - RNA, 19 nt, Artificial Sequence
  Description of Artificial Sequence: Synthetic oligonucleotide
ucauaguaaguaaggggcu

SEQ ID NO: 1372104 - RNA, 19 nt, Artificial Sequence
  Description of Artificial Sequence: Synthetic oligonucleotide
aaaacagccaugacuucag

SEQ ID NO: 1372105 - RNA, 19 nt, Artificial Sequence
  Description of Artificial Sequence: Synthetic oligonucleotide
gcuguagaggaacagagcc

SEQ ID NO: 1372106 - RNA, 19 nt, Artificial Sequence
  Description of Artificial Sequence: Synthetic oligonucleotide
gacauucacaucaccagag

SEQ ID NO: 1372107 - RNA, 19 nt, Artificial Sequence
  Description of Artificial Sequence: Synthetic oligonucleotide
uccggagguaaaauuaaac

SEQ ID NO: 1372108 - RNA, 19 nt, Artificial Sequence
  Description of Artificial Sequence: Synthetic oligonucleotide
cuucuauccguuuccagug

SEQ ID NO: 1372109 - RNA, 19 nt, Artificial Sequence
  Description of Artificial Sequence: Synthetic oligonucleotide
acacaaguccuugagauca

SEQ ID NO: 1372110 - RNA, 19 nt, Artificial Sequence
  Description of Artificial Sequence: Synthetic oligonucleotide
guugguaauauagugugac

SEQ ID NO: 1372111 - RNA, 19 nt, Artificial Sequence
  Description of Artificial Sequence: Synthetic oligonucleotide
augucauaguaaguaaggg

SEQ ID NO: 1372112 - RNA, 19 nt, Artificial Sequence
  Description of Artificial Sequence: Synthetic oligonucleotide
uauuuaugguagaagcuuu

SEQ ID NO: 1372113 - RNA, 19 nt, Artificial Sequence
  Description of Artificial Sequence: Synthetic oligonucleotide
uucucuaauggguauggaa

SEQ ID NO: 1372114 - RNA, 19 nt, Artificial Sequence
  Description of Artificial Sequence: Synthetic oligonucleotide
uuucugcugugcuuaaccc

SEQ ID NO: 1372115 - RNA, 19 nt, Artificial Sequence
  Description of Artificial Sequence: Synthetic oligonucleotide
agcaccuucuauccguuuc

SEQ ID NO: 1372116 - RNA, 19 nt, Artificial Sequence
  Description of Artificial Sequence: Synthetic oligonucleotide
uaaguaaggggcucuuuac

SEQ ID NO: 1372117 - RNA, 19 nt, Artificial Sequence
  Description of Artificial Sequence: Synthetic oligonucleotide
cagccaguagaacauaggc

SEQ ID NO: 1372118 - RNA, 19 nt, Artificial Sequence
  Description of Artificial Sequence: Synthetic oligonucleotide
auaaaugaucucacccgcc

SEQ ID NO: 1372119 - RNA, 19 nt, Artificial Sequence
  Description of Artificial Sequence: Synthetic oligonucleotide
guaauauagugugacagca

SEQ ID NO: 1372120 - RNA, 19 nt, Artificial Sequence
  Description of Artificial Sequence: Synthetic oligonucleotide
ugcauaacugugucugaag

SEQ ID NO: 1372121 - RNA, 19 nt, Artificial Sequence
  Description of Artificial Sequence: Synthetic oligonucleotide
aaaaggucuggugauccug

SEQ ID NO: 1372122 - RNA, 19 nt, Artificial Sequence
  Description of Artificial Sequence: Synthetic oligonucleotide
ucuacaaugguuguugcuu

SEQ ID NO: 1372123 - RNA, 19 nt, Artificial Sequence
  Description of Artificial Sequence: Synthetic oligonucleotide
guuuacaaguaucuuucac

SEQ ID NO: 1372124 - RNA, 19 nt, Artificial Sequence
  Description of Artificial Sequence: Synthetic oligonucleotide
uauauucugcuccucuaaa

SEQ ID NO: 1372125 - RNA, 19 nt, Artificial Sequence
  Description of Artificial Sequence: Synthetic oligonucleotide
uaaagagguuuaaaggguu

SEQ ID NO: 1372126 - RNA, 19 nt, Artificial Sequence
  Description of Artificial Sequence: Synthetic oligonucleotide
agucaacagacauucacau

SEQ ID NO: 1372127 - RNA, 19 nt, Artificial Sequence
  Description of Artificial Sequence: Synthetic oligonucleotide
aagucaacagacauucaca

SEQ ID NO: 1372128 - RNA, 19 nt, Artificial Sequence
  Description of Artificial Sequence: Synthetic oligonucleotide
ugaccgucuauaaaugauc

SEQ ID NO: 1372129 - RNA, 19 nt, Artificial Sequence
  Description of Artificial Sequence: Synthetic oligonucleotide
guuucacuuucucuguugc

SEQ ID NO: 1372130 - RNA, 19 nt, Artificial Sequence
  Description of Artificial Sequence: Synthetic oligonucleotide
aggcaauugcuucacuauc

SEQ ID NO: 1372131 - RNA, 19 nt, Artificial Sequence
  Description of Artificial Sequence: Synthetic oligonucleotide
uccuauauucugcuccucu

SEQ ID NO: 1372132 - RNA, 19 nt, Artificial Sequence
  Description of Artificial Sequence: Synthetic oligonucleotide
uuaaaggguuucuccagac

SEQ ID NO: 1372133 - RNA, 19 nt, Artificial Sequence
  Description of Artificial Sequence: Synthetic oligonucleotide
gauaggcugcuuugauucg

SEQ ID NO: 1372134 - RNA, 19 nt, Artificial Sequence
  Description of Artificial Sequence: Synthetic oligonucleotide
auauuuaugguagaagcuu

SEQ ID NO: 1372135 - RNA, 19 nt, Artificial Sequence
  Description of Artificial Sequence: Synthetic oligonucleotide
auggguauggaaucauucu

SEQ ID NO: 1372136 - RNA, 19 nt, Artificial Sequence
  Description of Artificial Sequence: Synthetic oligonucleotide
aaaguaggcaguagcucuc

SEQ ID NO: 1372137 - RNA, 19 nt, Artificial Sequence
  Description of Artificial Sequence: Synthetic oligonucleotide
gguaauauagugugacagc

SEQ ID NO: 1372138 - RNA, 19 nt, Artificial Sequence
  Description of Artificial Sequence: Synthetic oligonucleotide
ugagagcaccuucuauccg

SEQ ID NO: 1372139 - RNA, 19 nt, Artificial Sequence
  Description of Artificial Sequence: Synthetic oligonucleotide
cauacucacggcuuuagca

SEQ ID NO: 1372140 - RNA, 19 nt, Artificial Sequence
  Description of Artificial Sequence: Synthetic oligonucleotide
aaucauucuaaaagugccu

SEQ ID NO: 1372141 - RNA, 19 nt, Artificial Sequence
  Description of Artificial Sequence: Synthetic oligonucleotide
uaucuuucacugcucgugu

SEQ ID NO: 1372142 - RNA, 19 nt, Artificial Sequence
  Description of Artificial Sequence: Synthetic oligonucleotide
agacaaguucaugucauag

SEQ ID NO: 1372143 - RNA, 19 nt, Artificial Sequence
  Description of Artificial Sequence: Synthetic oligonucleotide
aaaugaucucacccgcccu

SEQ ID NO: 1372144 - RNA, 19 nt, Artificial Sequence
  Description of Artificial Sequence: Synthetic oligonucleotide
aacucuagaagugauucua

SEQ ID NO: 1372145 - RNA, 19 nt, Artificial Sequence
  Description of Artificial Sequence: Synthetic oligonucleotide
aucucacccgcccugagug

SEQ ID NO: 1372146 - RNA, 19 nt, Artificial Sequence
  Description of Artificial Sequence: Synthetic oligonucleotide
guagaacauaggcaguggc

SEQ ID NO: 1372147 - RNA, 19 nt, Artificial Sequence
  Description of Artificial Sequence: Synthetic oligonucleotide
aaacagaaacaugaugaaa

SEQ ID NO: 1372148 - RNA, 19 nt, Artificial Sequence
  Description of Artificial Sequence: Synthetic oligonucleotide
ugugaccgucuauaaauga

SEQ ID NO: 1372149 - RNA, 19 nt, Artificial Sequence
  Description of Artificial Sequence: Synthetic oligonucleotide
uaaggguaaaauagauguc

SEQ ID NO: 1372150 - RNA, 19 nt, Artificial Sequence
  Description of Artificial Sequence: Synthetic oligonucleotide
ucugcugugcuuaacccua

SEQ ID NO: 1372151 - RNA, 19 nt, Artificial Sequence
  Description of Artificial Sequence: Synthetic oligonucleotide
ggauguucaacaugguaag

SEQ ID NO: 1372152 - RNA, 19 nt, Artificial Sequence
  Description of Artificial Sequence: Synthetic oligonucleotide
cucuagaagugauucuaag

SEQ ID NO: 1372153 - RNA, 19 nt, Artificial Sequence
  Description of Artificial Sequence: Synthetic oligonucleotide
gaugaaaaguaggcaguag

SEQ ID NO: 1372154 - RNA, 19 nt, Artificial Sequence
  Description of Artificial Sequence: Synthetic oligonucleotide
aaguacauugguaucucgu

SEQ ID NO: 1372155 - RNA, 19 nt, Artificial Sequence
  Description of Artificial Sequence: Synthetic oligonucleotide
uuucaucucuaguaaguau

SEQ ID NO: 1372156 - RNA, 19 nt, Artificial Sequence
  Description of Artificial Sequence: Synthetic oligonucleotide
gucuauaaaugaucucacc

SEQ ID NO: 1372157 - RNA, 19 nt, Artificial Sequence
  Description of Artificial Sequence: Synthetic oligonucleotide
auacucacggcuuuagcaa

SEQ ID NO: 1372158 - RNA, 19 nt, Artificial Sequence
  Description of Artificial Sequence: Synthetic oligonucleotide
auugguaucucgucucagu

SEQ ID NO: 1372159 - RNA, 19 nt, Artificial Sequence
  Description of Artificial Sequence: Synthetic oligonucleotide
uggguauggaaucauucua

SEQ ID NO: 1372160 - RNA, 19 nt, Artificial Sequence
  Description of Artificial Sequence: Synthetic oligonucleotide
uuuuggaacauggggauua

SEQ ID NO: 1372161 - RNA, 19 nt, Artificial Sequence
  Description of Artificial Sequence: Synthetic oligonucleotide
aguguuucacuuucucugu

SEQ ID NO: 1372162 - RNA, 19 nt, Artificial Sequence
  Description of Artificial Sequence: Synthetic oligonucleotide
uaggcaguagcucucuauc

SEQ ID NO: 1372163 - RNA, 19 nt, Artificial Sequence
  Description of Artificial Sequence: Synthetic oligonucleotide
uguuuacaaguaucuuuca

SEQ ID NO: 1372164 - RNA, 19 nt, Artificial Sequence
  Description of Artificial Sequence: Synthetic oligonucleotide
ugcuuaacccuagugcugc

SEQ ID NO: 1372165 - RNA, 19 nt, Artificial Sequence
  Description of Artificial Sequence: Synthetic oligonucleotide
uugagaucauacucacggc

SEQ ID NO: 1372166 - RNA, 19 nt, Artificial Sequence
  Description of Artificial Sequence: Synthetic oligonucleotide
uuuaugguagaagcuuuac

SEQ ID NO: 1372167 - RNA, 19 nt, Artificial Sequence
  Description of Artificial Sequence: Synthetic oligonucleotide
gaaaaguaggcaguagcuc

SEQ ID NO: 1372168 - RNA, 19 nt, Artificial Sequence
  Description of Artificial Sequence: Synthetic oligonucleotide
uugacauauuuaugguaga

SEQ ID NO: 1372169 - RNA, 19 nt, Artificial Sequence
  Description of Artificial Sequence: Synthetic oligonucleotide
gcuaucauugcuguagagg

SEQ ID NO: 1372170 - RNA, 19 nt, Artificial Sequence
  Description of Artificial Sequence: Synthetic oligonucleotide
aguagaacauaggcagugg

SEQ ID NO: 1372171 - RNA, 19 nt, Artificial Sequence
  Description of Artificial Sequence: Synthetic oligonucleotide
aguauaucuccuauauucu

SEQ ID NO: 1372172 - RNA, 19 nt, Artificial Sequence
  Description of Artificial Sequence: Synthetic oligonucleotide
ucauacucacggcuuuagc

SEQ ID NO: 1372173 - RNA, 19 nt, Artificial Sequence
  Description of Artificial Sequence: Synthetic oligonucleotide
ucuccuauauucugcuccu

SEQ ID NO: 1372174 - RNA, 19 nt, Artificial Sequence
  Description of Artificial Sequence: Synthetic oligonucleotide
agcauaggcaauugcuuca

SEQ ID NO: 1372175 - RNA, 19 nt, Artificial Sequence
  Description of Artificial Sequence: Synthetic oligonucleotide
caaguacauugguaucucg

SEQ ID NO: 1372176 - RNA, 19 nt, Artificial Sequence
  Description of Artificial Sequence: Synthetic oligonucleotide
ugauccugggcagacaagu

SEQ ID NO: 1372177 - RNA, 19 nt, Artificial Sequence
  Description of Artificial Sequence: Synthetic oligonucleotide
acaaguacauugguaucuc

SEQ ID NO: 1372178 - RNA, 19 nt, Artificial Sequence
  Description of Artificial Sequence: Synthetic oligonucleotide
uaggcaauugcuucacuau

SEQ ID NO: 1372179 - RNA, 19 nt, Artificial Sequence
  Description of Artificial Sequence: Synthetic oligonucleotide
ucuuuaccagucacccaag

SEQ ID NO: 1372180 - RNA, 19 nt, Artificial Sequence
  Description of Artificial Sequence: Synthetic oligonucleotide
ucaucucuaguaaguauuu

SEQ ID NO: 1372181 - RNA, 19 nt, Artificial Sequence
  Description of Artificial Sequence: Synthetic oligonucleotide
aucucgucucaguugagcu

SEQ ID NO: 1372182 - RNA, 19 nt, Artificial Sequence
  Description of Artificial Sequence: Synthetic oligonucleotide
auaggcaauugcuucacua

SEQ ID NO: 1372183 - RNA, 19 nt, Artificial Sequence
  Description of Artificial Sequence: Synthetic oligonucleotide
guaaggggcucuuuaccag

SEQ ID NO: 1372184 - RNA, 19 nt, Artificial Sequence
  Description of Artificial Sequence: Synthetic oligonucleotide
agagcccugcuguaaagug

SEQ ID NO: 1372185 - RNA, 19 nt, Artificial Sequence
  Description of Artificial Sequence: Synthetic oligonucleotide
ucuauccguuuccagugcu

SEQ ID NO: 1372186 - RNA, 19 nt, Artificial Sequence
  Description of Artificial Sequence: Synthetic oligonucleotide
uuucccgugaugucuuaca

SEQ ID NO: 1372187 - RNA, 19 nt, Artificial Sequence
  Description of Artificial Sequence: Synthetic oligonucleotide
gaacccggcucugaaaugc

SEQ ID NO: 1372188 - RNA, 19 nt, Artificial Sequence
  Description of Artificial Sequence: Synthetic oligonucleotide
augguagaagcuuuacaaa

SEQ ID NO: 1372189 - RNA, 19 nt, Artificial Sequence
  Description of Artificial Sequence: Synthetic oligonucleotide
ucauucuaaaagugccuuc

SEQ ID NO: 1372190 - RNA, 19 nt, Artificial Sequence
  Description of Artificial Sequence: Synthetic oligonucleotide
acaugaugaaaaguaggca

SEQ ID NO: 1372191 - RNA, 19 nt, Artificial Sequence
  Description of Artificial Sequence: Synthetic oligonucleotide
aguagcucucuaucagcag

SEQ ID NO: 1372192 - RNA, 19 nt, Artificial Sequence
  Description of Artificial Sequence: Synthetic oligonucleotide
uucuauccguuuccagugc

SEQ ID NO: 1372193 - RNA, 19 nt, Artificial Sequence
  Description of Artificial Sequence: Synthetic oligonucleotide
ugugucugaaggacguaaa

SEQ ID NO: 1372194 - RNA, 19 nt, Artificial Sequence
  Description of Artificial Sequence: Synthetic oligonucleotide
accgucuauaaaugaucuc

SEQ ID NO: 1372195 - RNA, 19 nt, Artificial Sequence
  Description of Artificial Sequence: Synthetic oligonucleotide
cuacaaugguuguugcuuc

SEQ ID NO: 1372196 - RNA, 19 nt, Artificial Sequence
  Description of Artificial Sequence: Synthetic oligonucleotide
cucuuuaccagucacccaa

SEQ ID NO: 1372197 - RNA, 19 nt, Artificial Sequence
  Description of Artificial Sequence: Synthetic oligonucleotide
uuggaaggcuuauaucauc

SEQ ID NO: 1372198 - RNA, 19 nt, Artificial Sequence
  Description of Artificial Sequence: Synthetic oligonucleotide
ucaggaaacugguguguga

SEQ ID NO: 1372199 - RNA, 19 nt, Artificial Sequence
  Description of Artificial Sequence: Synthetic oligonucleotide
cuucccaauuuucuugcac

SEQ ID NO: 1372200 - RNA, 19 nt, Artificial Sequence
  Description of Artificial Sequence: Synthetic oligonucleotide
caucuacaaugguuguugc

SEQ ID NO: 1372201 - RNA, 19 nt, Artificial Sequence
  Description of Artificial Sequence: Synthetic oligonucleotide
cauaacugugucugaagga

SEQ ID NO: 1372202 - RNA, 19 nt, Artificial Sequence
  Description of Artificial Sequence: Synthetic oligonucleotide
cuaaagagguuuaaagggu

SEQ ID NO: 1372203 - RNA, 19 nt, Artificial Sequence
  Description of Artificial Sequence: Synthetic oligonucleotide
gaaggcuuauaucaucaua

SEQ ID NO: 1372204 - RNA, 19 nt, Artificial Sequence
  Description of Artificial Sequence: Synthetic oligonucleotide
uagaggaacagagcccugc

SEQ ID NO: 1372205 - RNA, 19 nt, Artificial Sequence
  Description of Artificial Sequence: Synthetic oligonucleotide
guucaacaugguaagagga

SEQ ID NO: 1372206 - RNA, 19 nt, Artificial Sequence
  Description of Artificial Sequence: Synthetic oligonucleotide
cauauuuaugguagaagcu

SEQ ID NO: 1372207 - RNA, 19 nt, Artificial Sequence
  Description of Artificial Sequence: Synthetic oligonucleotide
acuaucuccucgcuucaga

SEQ ID NO: 1372208 - RNA, 19 nt, Artificial Sequence
  Description of Artificial Sequence: Synthetic oligonucleotide
aguaucuuucacugcucgu

SEQ ID NO: 1372209 - RNA, 19 nt, Artificial Sequence
  Description of Artificial Sequence: Synthetic oligonucleotide
auagaugguggugucucag

SEQ ID NO: 1372210 - RNA, 19 nt, Artificial Sequence
  Description of Artificial Sequence: Synthetic oligonucleotide
agccaugacuucaggaaac

SEQ ID NO: 1372211 - RNA, 19 nt, Artificial Sequence
  Description of Artificial Sequence: Synthetic oligonucleotide
aucuacaaugguuguugcu

SEQ ID NO: 1372212 - RNA, 19 nt, Artificial Sequence
  Description of Artificial Sequence: Synthetic oligonucleotide
auauagugugacagcauug

SEQ ID NO: 1372213 - RNA, 19 nt, Artificial Sequence
  Description of Artificial Sequence: Synthetic oligonucleotide
ugccuguuuaaauaaccuu

SEQ ID NO: 1372214 - RNA, 19 nt, Artificial Sequence
  Description of Artificial Sequence: Synthetic oligonucleotide
ugacuucaggaaacuggug

SEQ ID NO: 1372215 - RNA, 19 nt, Artificial Sequence
  Description of Artificial Sequence: Synthetic oligonucleotide
ugaugaaaaguaggcagua

SEQ ID NO: 1372216 - RNA, 19 nt, Artificial Sequence
  Description of Artificial Sequence: Synthetic oligonucleotide
cugugaccgucuauaaaug

SEQ ID NO: 1372217 - RNA, 19 nt, Artificial Sequence
  Description of Artificial Sequence: Synthetic oligonucleotide
cucuaguaaguauuuugga

SEQ ID NO: 1372218 - RNA, 19 nt, Artificial Sequence
  Description of Artificial Sequence: Synthetic oligonucleotide
gucgcaaauggcuuauaga

SEQ ID NO: 1372219 - RNA, 19 nt, Artificial Sequence
  Description of Artificial Sequence: Synthetic oligonucleotide
uacaaugguuguugcuucu

SEQ ID NO: 1372220 - RNA, 19 nt, Artificial Sequence
  Description of Artificial Sequence: Synthetic oligonucleotide
cacagucauuguuuaacuc

SEQ ID NO: 1372221 - RNA, 19 nt, Artificial Sequence
  Description of Artificial Sequence: Synthetic oligonucleotide
agcaguaguucuuguuugu

SEQ ID NO: 1372222 - RNA, 19 nt, Artificial Sequence
  Description of Artificial Sequence: Synthetic oligonucleotide
guaaguaaggggcucuuua

SEQ ID NO: 1372223 - RNA, 19 nt, Artificial Sequence
  Description of Artificial Sequence: Synthetic oligonucleotide
caguagaacauaggcagug

SEQ ID NO: 1372224 - RNA, 19 nt, Artificial Sequence
  Description of Artificial Sequence: Synthetic oligonucleotide
cucguguggguuagcacag

SEQ ID NO: 1372225 - RNA, 19 nt, Artificial Sequence
  Description of Artificial Sequence: Synthetic oligonucleotide
guaguucuuguuuguuuac

SEQ ID NO: 1372226 - RNA, 19 nt, Artificial Sequence
  Description of Artificial Sequence: Synthetic oligonucleotide
auaguaaguaaggggcucu

SEQ ID NO: 1372227 - RNA, 19 nt, Artificial Sequence
  Description of Artificial Sequence: Synthetic oligonucleotide
cucgcuucagaauguguuc

SEQ ID NO: 1372228 - RNA, 19 nt, Artificial Sequence
  Description of Artificial Sequence: Synthetic oligonucleotide
ggucgcaaauggcuuauag

SEQ ID NO: 1372229 - RNA, 19 nt, Artificial Sequence
  Description of Artificial Sequence: Synthetic oligonucleotide
uucccgugaugucuuacaa

SEQ ID NO: 1372230 - RNA, 19 nt, Artificial Sequence
  Description of Artificial Sequence: Synthetic oligonucleotide
cauaguaaguaaggggcuc

SEQ ID NO: 1372231 - RNA, 19 nt, Artificial Sequence
  Description of Artificial Sequence: Synthetic oligonucleotide
uaauggguauggaaucauu

SEQ ID NO: 1372232 - RNA, 19 nt, Artificial Sequence
  Description of Artificial Sequence: Synthetic oligonucleotide
guauggaaucauucuaaaa

SEQ ID NO: 1372233 - RNA, 19 nt, Artificial Sequence
  Description of Artificial Sequence: Synthetic oligonucleotide
gcaucuacaaugguuguug

SEQ ID NO: 1372234 - RNA, 19 nt, Artificial Sequence
  Description of Artificial Sequence: Synthetic oligonucleotide
gacaaguucaugucauagu

SEQ ID NO: 1372235 - RNA, 19 nt, Artificial Sequence
  Description of Artificial Sequence: Synthetic oligonucleotide
agagguuuaaaggguuucu

SEQ ID NO: 1372236 - RNA, 19 nt, Artificial Sequence
  Description of Artificial Sequence: Synthetic oligonucleotide
aucauucuaaaagugccuu

SEQ ID NO: 1372237 - RNA, 19 nt, Artificial Sequence
  Description of Artificial Sequence: Synthetic oligonucleotide
ggcaguggcacagucauug

SEQ ID NO: 1372238 - RNA, 19 nt, Artificial Sequence
  Description of Artificial Sequence: Synthetic oligonucleotide
uucucuuauucuucccaau

SEQ ID NO: 1372239 - RNA, 19 nt, Artificial Sequence
  Description of Artificial Sequence: Synthetic oligonucleotide
aucauacucacggcuuuag

SEQ ID NO: 1372240 - RNA, 19 nt, Artificial Sequence
  Description of Artificial Sequence: Synthetic oligonucleotide
uuccggagguaaaauuaaa

SEQ ID NO: 1372241 - RNA, 19 nt, Artificial Sequence
  Description of Artificial Sequence: Synthetic oligonucleotide
aaagagguuuaaaggguuu

SEQ ID NO: 1372242 - RNA, 19 nt, Artificial Sequence
  Description of Artificial Sequence: Synthetic oligonucleotide
caaguaucuuucacugcuc

SEQ ID NO: 1372243 - RNA, 19 nt, Artificial Sequence
  Description of Artificial Sequence: Synthetic oligonucleotide
gagguuuaaaggguuucuc

SEQ ID NO: 1372244 - RNA, 19 nt, Artificial Sequence
  Description of Artificial Sequence: Synthetic oligonucleotide
gcaacucuagaagugauuc

SEQ ID NO: 1372245 - RNA, 19 nt, Artificial Sequence
  Description of Artificial Sequence: Synthetic oligonucleotide
uacucacggcuuuagcaaa

SEQ ID NO: 1372246 - RNA, 19 nt, Artificial Sequence
  Description of Artificial Sequence: Synthetic oligonucleotide
uccucuaaagagguuuaaa

SEQ ID NO: 1372247 - RNA, 19 nt, Artificial Sequence
  Description of Artificial Sequence: Synthetic oligonucleotide
ggaacauggggauuaaacu

SEQ ID NO: 1372248 - RNA, 19 nt, Artificial Sequence
  Description of Artificial Sequence: Synthetic oligonucleotide
uuccucccaucaguggucg

SEQ ID NO: 1372249 - RNA, 19 nt, Artificial Sequence
  Description of Artificial Sequence: Synthetic oligonucleotide
agaucauacucacggcuuu

SEQ ID NO: 1372250 - RNA, 19 nt, Artificial Sequence
  Description of Artificial Sequence: Synthetic oligonucleotide
agucacccaaguauaucuc

SEQ ID NO: 1372251 - RNA, 19 nt, Artificial Sequence
  Description of Artificial Sequence: Synthetic oligonucleotide
accuucuauccguuuccag

SEQ ID NO: 1372252 - RNA, 19 nt, Artificial Sequence
  Description of Artificial Sequence: Synthetic oligonucleotide
gucuuacaaauacuccaca

SEQ ID NO: 1372253 - RNA, 19 nt, Artificial Sequence
  Description of Artificial Sequence: Synthetic oligonucleotide
ggcucuuuaccagucaccc

SEQ ID NO: 1372254 - RNA, 19 nt, Artificial Sequence
  Description of Artificial Sequence: Synthetic oligonucleotide
cuguuuaaauaaccuuuca

SEQ ID NO: 1372255 - RNA, 19 nt, Artificial Sequence
  Description of Artificial Sequence: Synthetic oligonucleotide
cugagugccuguuuaaaua

SEQ ID NO: 1372256 - RNA, 19 nt, Artificial Sequence
  Description of Artificial Sequence: Synthetic oligonucleotide
caugguaagaggaggaaau

SEQ ID NO: 1372257 - RNA, 19 nt, Artificial Sequence
  Description of Artificial Sequence: Synthetic oligonucleotide
cuauccguuuccagugcug

SEQ ID NO: 1372258 - RNA, 19 nt, Artificial Sequence
  Description of Artificial Sequence: Synthetic oligonucleotide
acccaaguauaucuccuau

SEQ ID NO: 1372259 - RNA, 19 nt, Artificial Sequence
  Description of Artificial Sequence: Synthetic oligonucleotide
agccaguagaacauaggca

SEQ ID NO: 1372260 - RNA, 19 nt, Artificial Sequence
  Description of Artificial Sequence: Synthetic oligonucleotide
gagagcaccuucuauccgu

SEQ ID NO: 1372261 - RNA, 19 nt, Artificial Sequence
  Description of Artificial Sequence: Synthetic oligonucleotide
cugggauaaggguaaaaua

SEQ ID NO: 1372262 - RNA, 19 nt, Artificial Sequence
  Description of Artificial Sequence: Synthetic oligonucleotide
uuuugccaggacugccuga

SEQ ID NO: 1372263 - RNA, 19 nt, Artificial Sequence
  Description of Artificial Sequence: Synthetic oligonucleotide
cacacaaguccuugagauc

SEQ ID NO: 1372264 - RNA, 19 nt, Artificial Sequence
  Description of Artificial Sequence: Synthetic oligonucleotide
caaguucaugucauaguaa

SEQ ID NO: 1372265 - RNA, 19 nt, Artificial Sequence
  Description of Artificial Sequence: Synthetic oligonucleotide
gucaacagacauucacauc

SEQ ID NO: 1372266 - RNA, 19 nt, Artificial Sequence
  Description of Artificial Sequence: Synthetic oligonucleotide
agaacccggcucugaaaug

SEQ ID NO: 1372267 - RNA, 19 nt, Artificial Sequence
  Description of Artificial Sequence: Synthetic oligonucleotide
uaucuccucgcuucagaau

SEQ ID NO: 1372268 - RNA, 19 nt, Artificial Sequence
  Description of Artificial Sequence: Synthetic oligonucleotide
ugaucucacccgcccugag

SEQ ID NO: 1372269 - RNA, 19 nt, Artificial Sequence
  Description of Artificial Sequence: Synthetic oligonucleotide
gcauucugauagauggugg

SEQ ID NO: 1372270 - RNA, 19 nt, Artificial Sequence
  Description of Artificial Sequence: Synthetic oligonucleotide
aaguaggcaguagcucucu

SEQ ID NO: 1372271 - RNA, 19 nt, Artificial Sequence
  Description of Artificial Sequence: Synthetic oligonucleotide
gcuguaaaguggaugaaga

SEQ ID NO: 1372272 - RNA, 19 nt, Artificial Sequence
  Description of Artificial Sequence: Synthetic oligonucleotide
acaugguaagaggaggaaa

SEQ ID NO: 1372273 - RNA, 19 nt, Artificial Sequence
  Description of Artificial Sequence: Synthetic oligonucleotide
guacauugguaucucgucu

SEQ ID NO: 1372274 - RNA, 19 nt, Artificial Sequence
  Description of Artificial Sequence: Synthetic oligonucleotide
gagaacccggcucugaaau

SEQ ID NO: 1372275 - RNA, 19 nt, Artificial Sequence
  Description of Artificial Sequence: Synthetic oligonucleotide
uaucuccuauauucugcuc

SEQ ID NO: 1372276 - RNA, 19 nt, Artificial Sequence
  Description of Artificial Sequence: Synthetic oligonucleotide
uguguagcagauggcugcu

SEQ ID NO: 1372277 - RNA, 19 nt, Artificial Sequence
  Description of Artificial Sequence: Synthetic oligonucleotide
aguggucgcaaauggcuua

SEQ ID NO: 1372278 - RNA, 19 nt, Artificial Sequence
  Description of Artificial Sequence: Synthetic oligonucleotide
uccucgcuucagaaugugu

SEQ ID NO: 1372279 - RNA, 19 nt, Artificial Sequence
  Description of Artificial Sequence: Synthetic oligonucleotide
uuucacugcucgugugggu

SEQ ID NO: 1372280 - RNA, 19 nt, Artificial Sequence
  Description of Artificial Sequence: Synthetic oligonucleotide
cagucacccaaguauaucu

SEQ ID NO: 1372281 - RNA, 19 nt, Artificial Sequence
  Description of Artificial Sequence: Synthetic oligonucleotide
agauugagagcaccuucua

SEQ ID NO: 1372282 - RNA, 19 nt, Artificial Sequence
  Description of Artificial Sequence: Synthetic oligonucleotide
auaggccugcaacucuaga

SEQ ID NO: 1372283 - RNA, 19 nt, Artificial Sequence
  Description of Artificial Sequence: Synthetic oligonucleotide
gagauugagagcaccuucu

SEQ ID NO: 1372284 - RNA, 19 nt, Artificial Sequence
  Description of Artificial Sequence: Synthetic oligonucleotide
uucacugcucguguggguu

SEQ ID NO: 1372285 - RNA, 19 nt, Artificial Sequence
  Description of Artificial Sequence: Synthetic oligonucleotide
uucgagcuggaggauuucu

SEQ ID NO: 1372286 - RNA, 19 nt, Artificial Sequence
  Description of Artificial Sequence: Synthetic oligonucleotide
ugcucguguggguuagcac

SEQ ID NO: 1372287 - RNA, 19 nt, Artificial Sequence
  Description of Artificial Sequence: Synthetic oligonucleotide
gauugagagcaccuucuau

SEQ ID NO: 1372288 - RNA, 19 nt, Artificial Sequence
  Description of Artificial Sequence: Synthetic oligonucleotide
ggauuucuuucccuccaug

SEQ ID NO: 1372289 - RNA, 19 nt, Artificial Sequence
  Description of Artificial Sequence: Synthetic oligonucleotide
gaccgucuauaaaugaucu

SEQ ID NO: 1372290 - RNA, 19 nt, Artificial Sequence
  Description of Artificial Sequence: Synthetic oligonucleotide
gcugugcuuaacccuagug

SEQ ID NO: 1372291 - RNA, 19 nt, Artificial Sequence
  Description of Artificial Sequence: Synthetic oligonucleotide
cauugguaucucgucucag

SEQ ID NO: 1372292 - RNA, 19 nt, Artificial Sequence
  Description of Artificial Sequence: Synthetic oligonucleotide
gguauggaaucauucuaaa

SEQ ID NO: 1372293 - RNA, 19 nt, Artificial Sequence
  Description of Artificial Sequence: Synthetic oligonucleotide
ggcagacaaguucauguca

SEQ ID NO: 1372294 - RNA, 19 nt, Artificial Sequence
  Description of Artificial Sequence: Synthetic oligonucleotide
ccgucuauaaaugaucuca

SEQ ID NO: 1372295 - RNA, 19 nt, Artificial Sequence
  Description of Artificial Sequence: Synthetic oligonucleotide
gguuagcacagaccagagc

SEQ ID NO: 1372296 - RNA, 19 nt, Artificial Sequence
  Description of Artificial Sequence: Synthetic oligonucleotide
uuuggaacauggggauuaa

SEQ ID NO: 1372297 - RNA, 19 nt, Artificial Sequence
  Description of Artificial Sequence: Synthetic oligonucleotide
auuuaugguagaagcuuua

SEQ ID NO: 1372298 - RNA, 19 nt, Artificial Sequence
  Description of Artificial Sequence: Synthetic oligonucleotide
ugauucgagcuggaggauu

SEQ ID NO: 1372299 - RNA, 19 nt, Artificial Sequence
  Description of Artificial Sequence: Synthetic oligonucleotide
gugucugaaggacguaaaa

SEQ ID NO: 1372300 - RNA, 19 nt, Artificial Sequence
  Description of Artificial Sequence: Synthetic oligonucleotide
auaggcaguggcacaguca

SEQ ID NO: 1372301 - RNA, 19 nt, Artificial Sequence
  Description of Artificial Sequence: Synthetic oligonucleotide
gcuacucucuguuccuccc

SEQ ID NO: 1372302 - RNA, 19 nt, Artificial Sequence
  Description of Artificial Sequence: Synthetic oligonucleotide
ugcugugcuuaacccuagu

SEQ ID NO: 1372303 - RNA, 19 nt, Artificial Sequence
  Description of Artificial Sequence: Synthetic oligonucleotide
ugacagcauuguauucuua

SEQ ID NO: 1372304 - RNA, 19 nt, Artificial Sequence
  Description of Artificial Sequence: Synthetic oligonucleotide
cauggggauuaaacuccac

SEQ ID NO: 1372305 - RNA, 19 nt, Artificial Sequence
  Description of Artificial Sequence: Synthetic oligonucleotide
agcccugcuguaaagugga

SEQ ID NO: 1372306 - RNA, 19 nt, Artificial Sequence
  Description of Artificial Sequence: Synthetic oligonucleotide
ucucacccgcccugagugc

SEQ ID NO: 1372307 - RNA, 19 nt, Artificial Sequence
  Description of Artificial Sequence: Synthetic oligonucleotide
gugcuuaacccuagugcug

SEQ ID NO: 1372308 - RNA, 19 nt, Artificial Sequence
  Description of Artificial Sequence: Synthetic oligonucleotide
cucuaaagcuugauaggcu

SEQ ID NO: 1372309 - RNA, 19 nt, Artificial Sequence
  Description of Artificial Sequence: Synthetic oligonucleotide
guuccggagguaaaauuaa

SEQ ID NO: 1372310 - RNA, 19 nt, Artificial Sequence
  Description of Artificial Sequence: Synthetic oligonucleotide
acucuagaagugauucuaa

SEQ ID NO: 1372311 - RNA, 19 nt, Artificial Sequence
  Description of Artificial Sequence: Synthetic oligonucleotide
cucacccgcccugagugcc

SEQ ID NO: 1372312 - RNA, 19 nt, Artificial Sequence
  Description of Artificial Sequence: Synthetic oligonucleotide
cgucuauaaaugaucucac

SEQ ID NO: 1372313 - RNA, 19 nt, Artificial Sequence
  Description of Artificial Sequence: Synthetic oligonucleotide
cugcugugcuuaacccuag

SEQ ID NO: 1372314 - RNA, 19 nt, Artificial Sequence
  Description of Artificial Sequence: Synthetic oligonucleotide
cuuucccgugaugucuuac

SEQ ID NO: 1372315 - RNA, 19 nt, Artificial Sequence
  Description of Artificial Sequence: Synthetic oligonucleotide
ucacugcucguguggguua

SEQ ID NO: 1372316 - RNA, 19 nt, Artificial Sequence
  Description of Artificial Sequence: Synthetic oligonucleotide
agcaucuacaaugguuguu

SEQ ID NO: 1372317 - RNA, 19 nt, Artificial Sequence
  Description of Artificial Sequence: Synthetic oligonucleotide
aggggcucuuuaccaguca

SEQ ID NO: 1372318 - RNA, 19 nt, Artificial Sequence
  Description of Artificial Sequence: Synthetic oligonucleotide
agagccgcuuucccgugau

SEQ ID NO: 1372319 - RNA, 19 nt, Artificial Sequence
  Description of Artificial Sequence: Synthetic oligonucleotide
auuuuggaacauggggauu

SEQ ID NO: 1372320 - RNA, 19 nt, Artificial Sequence
  Description of Artificial Sequence: Synthetic oligonucleotide
cuaagagguuuucauggau

SEQ ID NO: 1372321 - RNA, 19 nt, Artificial Sequence
  Description of Artificial Sequence: Synthetic oligonucleotide
aguaaguaaggggcucuuu

SEQ ID NO: 1372322 - RNA, 19 nt, Artificial Sequence
  Description of Artificial Sequence: Synthetic oligonucleotide
ggcugcuuugauucgagcu

SEQ ID NO: 1372323 - RNA, 19 nt, Artificial Sequence
  Description of Artificial Sequence: Synthetic oligonucleotide
aggagauugagagcaccuu

SEQ ID NO: 1372324 - RNA, 19 nt, Artificial Sequence
  Description of Artificial Sequence: Synthetic oligonucleotide
guggguuagcacagaccag

SEQ ID NO: 1372325 - RNA, 19 nt, Artificial Sequence
  Description of Artificial Sequence: Synthetic oligonucleotide
uuccagugcugcagaugaa

SEQ ID NO: 1372326 - RNA, 19 nt, Artificial Sequence
  Description of Artificial Sequence: Synthetic oligonucleotide
uaguaaguaaggggcucuu

SEQ ID NO: 1372327 - RNA, 19 nt, Artificial Sequence
  Description of Artificial Sequence: Synthetic oligonucleotide
ccggagguaaaauuaaacu

SEQ ID NO: 1372328 - RNA, 19 nt, Artificial Sequence
  Description of Artificial Sequence: Synthetic oligonucleotide
augaucucacccgcccuga

SEQ ID NO: 1372329 - RNA, 19 nt, Artificial Sequence
  Description of Artificial Sequence: Synthetic oligonucleotide
acccuagugcugcugugua

SEQ ID NO: 1372330 - RNA, 19 nt, Artificial Sequence
  Description of Artificial Sequence: Synthetic oligonucleotide
uugauucgagcuggaggau

SEQ ID NO: 1372331 - RNA, 19 nt, Artificial Sequence
  Description of Artificial Sequence: Synthetic oligonucleotide
gcauuguauucuuaaacuu

SEQ ID NO: 1372332 - RNA, 19 nt, Artificial Sequence
  Description of Artificial Sequence: Synthetic oligonucleotide
aacccggcucugaaaugcu

SEQ ID NO: 1372333 - RNA, 19 nt, Artificial Sequence
  Description of Artificial Sequence: Synthetic oligonucleotide
ccaaguauaucuccuauau

SEQ ID NO: 1372334 - RNA, 19 nt, Artificial Sequence
  Description of Artificial Sequence: Synthetic oligonucleotide
accuugcauucugauagau

SEQ ID NO: 1372335 - RNA, 19 nt, Artificial Sequence
  Description of Artificial Sequence: Synthetic oligonucleotide
cucuguuccucccaucagu

SEQ ID NO: 1372336 - RNA, 19 nt, Artificial Sequence
  Description of Artificial Sequence: Synthetic oligonucleotide
guaggcaguagcucucuau

SEQ ID NO: 1372337 - RNA, 19 nt, Artificial Sequence
  Description of Artificial Sequence: Synthetic oligonucleotide
gaucauacucacggcuuua

SEQ ID NO: 1372338 - RNA, 19 nt, Artificial Sequence
  Description of Artificial Sequence: Synthetic oligonucleotide
cugugucugaaggacguaa

SEQ ID NO: 1372339 - RNA, 19 nt, Artificial Sequence
  Description of Artificial Sequence: Synthetic oligonucleotide
gaucucacccgcccugagu

SEQ ID NO: 1372340 - RNA, 19 nt, Artificial Sequence
  Description of Artificial Sequence: Synthetic oligonucleotide
caggagauugagagcaccu

SEQ ID NO: 1372341 - RNA, 19 nt, Artificial Sequence
  Description of Artificial Sequence: Synthetic oligonucleotide
caacucuagaagugauucu

SEQ ID NO: 1372342 - RNA, 19 nt, Artificial Sequence
  Description of Artificial Sequence: Synthetic oligonucleotide
ggugucucaguguuucacu

SEQ ID NO: 1372343 - RNA, 19 nt, Artificial Sequence
  Description of Artificial Sequence: Synthetic oligonucleotide
ucacccgcccugagugccu

SEQ ID NO: 1372344 - RNA, 19 nt, Artificial Sequence
  Description of Artificial Sequence: Synthetic oligonucleotide
guaucucgucucaguugag

SEQ ID NO: 1372345 - RNA, 19 nt, Artificial Sequence
  Description of Artificial Sequence: Synthetic oligonucleotide
guccuuucucuaaugggua

SEQ ID NO: 1372346 - RNA, 19 nt, Artificial Sequence
  Description of Artificial Sequence: Synthetic oligonucleotide
ggguuagcacagaccagag

SEQ ID NO: 1372347 - RNA, 19 nt, Artificial Sequence
  Description of Artificial Sequence: Synthetic oligonucleotide
cacccaaguauaucuccua

SEQ ID NO: 1372348 - RNA, 19 nt, Artificial Sequence
  Description of Artificial Sequence: Synthetic oligonucleotide
cgcuucagaauguguuccg

SEQ ID NO: 1372349 - RNA, 19 nt, Artificial Sequence
  Description of Artificial Sequence: Synthetic oligonucleotide
caguaguucuuguuuguuu

SEQ ID NO: 1372350 - RNA, 19 nt, Artificial Sequence
  Description of Artificial Sequence: Synthetic oligonucleotide
ccacacaaguccuugagau

SEQ ID NO: 1372351 - RNA, 19 nt, Artificial Sequence
  Description of Artificial Sequence: Synthetic oligonucleotide
gugacagcauuguauucuu

SEQ ID NO: 1372352 - RNA, 19 nt, Artificial Sequence
  Description of Artificial Sequence: Synthetic oligonucleotide
acucacggcuuuagcaaaa

SEQ ID NO: 1372353 - RNA, 19 nt, Artificial Sequence
  Description of Artificial Sequence: Synthetic oligonucleotide
ucccaucaguggucgcaaa

SEQ ID NO: 1372354 - RNA, 19 nt, Artificial Sequence
  Description of Artificial Sequence: Synthetic oligonucleotide
gggcucuuuaccagucacc

SEQ ID NO: 1372355 - RNA, 19 nt, Artificial Sequence
  Description of Artificial Sequence: Synthetic oligonucleotide
gcugggauaaggguaaaau

SEQ ID NO: 1372356 - RNA, 19 nt, Artificial Sequence
  Description of Artificial Sequence: Synthetic oligonucleotide
ucguguggguuagcacaga

SEQ ID NO: 1372357 - RNA, 19 nt, Artificial Sequence
  Description of Artificial Sequence: Synthetic oligonucleotide
caaguauaucuccuauauu

SEQ ID NO: 1372358 - RNA, 19 nt, Artificial Sequence
  Description of Artificial Sequence: Synthetic oligonucleotide
ccugcaacucuagaaguga

SEQ ID NO: 1372359 - RNA, 19 nt, Artificial Sequence
  Description of Artificial Sequence: Synthetic oligonucleotide
guguuccggagguaaaauu

SEQ ID NO: 1372360 - RNA, 19 nt, Artificial Sequence
  Description of Artificial Sequence: Synthetic oligonucleotide
guggugucucaguguuuca

SEQ ID NO: 1372361 - RNA, 19 nt, Artificial Sequence
  Description of Artificial Sequence: Synthetic oligonucleotide
gagccgcuuucccgugaug

SEQ ID NO: 1372362 - RNA, 19 nt, Artificial Sequence
  Description of Artificial Sequence: Synthetic oligonucleotide
ccuauauucugcuccucua

SEQ ID NO: 1372363 - RNA, 19 nt, Artificial Sequence
  Description of Artificial Sequence: Synthetic oligonucleotide
cuccuauauucugcuccuc

SEQ ID NO: 1372364 - RNA, 19 nt, Artificial Sequence
  Description of Artificial Sequence: Synthetic oligonucleotide
cuaauggguauggaaucau

SEQ ID NO: 1372365 - RNA, 19 nt, Artificial Sequence
  Description of Artificial Sequence: Synthetic oligonucleotide
gcucuuuaccagucaccca

SEQ ID NO: 1372366 - RNA, 19 nt, Artificial Sequence
  Description of Artificial Sequence: Synthetic oligonucleotide
uccaugccuucugcauaac

SEQ ID NO: 1372367 - RNA, 19 nt, Artificial Sequence
  Description of Artificial Sequence: Synthetic oligonucleotide
cccugcuguaaaguggaug

SEQ ID NO: 1372368 - RNA, 19 nt, Artificial Sequence
  Description of Artificial Sequence: Synthetic oligonucleotide
agcacagaccagagccgcu

SEQ ID NO: 1372369 - RNA, 19 nt, Artificial Sequence
  Description of Artificial Sequence: Synthetic oligonucleotide
cugcaacucuagaagugau

SEQ ID NO: 1372370 - RNA, 19 nt, Artificial Sequence
  Description of Artificial Sequence: Synthetic oligonucleotide
caccuucuauccguuucca

SEQ ID NO: 1372371 - RNA, 19 nt, Artificial Sequence
  Description of Artificial Sequence: Synthetic oligonucleotide
cggagguaaaauuaaacuu

SEQ ID NO: 1372372 - RNA, 19 nt, Artificial Sequence
  Description of Artificial Sequence: Synthetic oligonucleotide
ccagucacccaaguauauc

SEQ ID NO: 1372373 - RNA, 19 nt, Artificial Sequence
  Description of Artificial Sequence: Synthetic oligonucleotide
cagcaucuacaaugguugu

SEQ ID NO: 1372374 - RNA, 19 nt, Artificial Sequence
  Description of Artificial Sequence: Synthetic oligonucleotide
cccaaguauaucuccuaua

SEQ ID NO: 1372375 - RNA, 19 nt, Artificial Sequence
  Description of Artificial Sequence: Synthetic oligonucleotide
gccgcuuucccgugauguc

SEQ ID NO: 1372376 - RNA, 19 nt, Artificial Sequence
  Description of Artificial Sequence: Synthetic oligonucleotide
cacguacacugcaggagau

SEQ ID NO: 1372377 - RNA, 19 nt, Artificial Sequence
  Description of Artificial Sequence: Synthetic oligonucleotide
caguggucgcaaauggcuu

SEQ ID NO: 1372378 - RNA, 19 nt, Artificial Sequence
  Description of Artificial Sequence: Synthetic oligonucleotide
cugcuguaaaguggaugaa

SEQ ID NO: 1372379 - RNA, 19 nt, Artificial Sequence
  Description of Artificial Sequence: Synthetic oligonucleotide
uggucgcaaauggcuuaua

SEQ ID NO: 1372380 - RNA, 19 nt, Artificial Sequence
  Description of Artificial Sequence: Synthetic oligonucleotide
ccucgcuucagaauguguu

SEQ ID NO: 1372381 - RNA, 19 nt, Artificial Sequence
  Description of Artificial Sequence: Synthetic oligonucleotide
ggguaaacagaaacaugau

SEQ ID NO: 1372382 - RNA, 19 nt, Artificial Sequence
  Description of Artificial Sequence: Synthetic oligonucleotide
gcauaggccugcaacucua

SEQ ID NO: 1372383 - RNA, 19 nt, Artificial Sequence
  Description of Artificial Sequence: Synthetic oligonucleotide
cacaaguccuugagaucau

SEQ ID NO: 1372384 - RNA, 19 nt, Artificial Sequence
  Description of Artificial Sequence: Synthetic oligonucleotide
guggucgcaaauggcuuau

SEQ ID NO: 1372385 - RNA, 19 nt, Artificial Sequence
  Description of Artificial Sequence: Synthetic oligonucleotide
ccagagccgcuuucccgug

SEQ ID NO: 1372386 - RNA, 19 nt, Artificial Sequence
  Description of Artificial Sequence: Synthetic oligonucleotide
cacccgcccugagugccug

SEQ ID NO: 1372387 - RNA, 19 nt, Artificial Sequence
  Description of Artificial Sequence: Synthetic oligonucleotide
acccggcucugaaaugcua

SEQ ID NO: 1372388 - RNA, 19 nt, Artificial Sequence
  Description of Artificial Sequence: Synthetic oligonucleotide
gcccugagugccuguuuaa

SEQ ID NO: 1372389 - RNA, 19 nt, Artificial Sequence
  Description of Artificial Sequence: Synthetic oligonucleotide
acccgcccugagugccugu

SEQ ID NO: 1372390 - RNA, 19 nt, Artificial Sequence
  Description of Artificial Sequence: Synthetic oligonucleotide
ccgugaugucuuacaaaua

SEQ ID NO: 1372391 - RNA, 19 nt, Artificial Sequence
  Description of Artificial Sequence: Synthetic oligonucleotide
ccagaccuugcauucugau

SEQ ID NO: 1372392 - RNA, 19 nt, Artificial Sequence
  Description of Artificial Sequence: Synthetic oligonucleotide
gcuuucccgugaugucuua

SEQ ID NO: 1372393 - RNA, 19 nt, Artificial Sequence
  Description of Artificial Sequence: Synthetic oligonucleotide
ccggcucugaaaugcuacu

SEQ ID NO: 1372394 - RNA, 19 nt, Artificial Sequence
  Description of Artificial Sequence: Synthetic oligonucleotide
ccgcuuucccgugaugucu

SEQ ID NO: 1372395 - RNA, 19 nt, Artificial Sequence
  Description of Artificial Sequence: Synthetic oligonucleotide
gcacagaccagagccgcuu

SEQ ID NO: 1372396 - RNA, 19 nt, Artificial Sequence
  Description of Artificial Sequence: Synthetic oligonucleotide
cgcccugagugccuguuua

SEQ ID NO: 1372397 - RNA, 19 nt, Artificial Sequence
  Description of Artificial Sequence: Synthetic oligonucleotide
cgcuuucccgugaugucuu

SEQ ID NO: 1372398 - RNA, 19 nt, Artificial Sequence
  Description of Artificial Sequence: Synthetic oligonucleotide
ccgcccugagugccuguuu

SEQ ID NO: 1372399 - RNA, 19 nt, Artificial Sequence
  Description of Artificial Sequence: Synthetic oligonucleotide
cccgcccugagugccuguu

SEQ ID NO: 1372400 - RNA, 19 nt, Artificial Sequence
  Description of Artificial Sequence: Synthetic oligonucleotide
aauacuaacccuuccaccc

SEQ ID NO: 1372401 - RNA, 19 nt, Artificial Sequence
  Description of Artificial Sequence: Synthetic oligonucleotide
aaauuaaucaccuccaugu

SEQ ID NO: 1372402 - RNA, 19 nt, Artificial Sequence
  Description of Artificial Sequence: Synthetic oligonucleotide
aauccgaacuaccauaacc

SEQ ID NO: 1372403 - RNA, 19 nt, Artificial Sequence
  Description of Artificial Sequence: Synthetic oligonucleotide
auugaggaaucucagaacc

SEQ ID NO: 1372404 - RNA, 19 nt, Artificial Sequence
  Description of Artificial Sequence: Synthetic oligonucleotide
agaauugucauucugaagu

SEQ ID NO: 1372405 - RNA, 19 nt, Artificial Sequence
  Description of Artificial Sequence: Synthetic oligonucleotide
aaauacuaacccuuccacc

SEQ ID NO: 1372406 - RNA, 19 nt, Artificial Sequence
  Description of Artificial Sequence: Synthetic oligonucleotide
uuauuaaucucuuagcaca

SEQ ID NO: 1372407 - RNA, 19 nt, Artificial Sequence
  Description of Artificial Sequence: Synthetic oligonucleotide
aaauauacuagcuucuagu

SEQ ID NO: 1372408 - RNA, 19 nt, Artificial Sequence
  Description of Artificial Sequence: Synthetic oligonucleotide
aaucugaagagauuuauaa

SEQ ID NO: 1372409 - RNA, 19 nt, Artificial Sequence
  Description of Artificial Sequence: Synthetic oligonucleotide
ucaagcucagagaugaccg

SEQ ID NO: 1372410 - RNA, 19 nt, Artificial Sequence
  Description of Artificial Sequence: Synthetic oligonucleotide
caucuuaugggacugagcc

SEQ ID NO: 1372411 - RNA, 19 nt, Artificial Sequence
  Description of Artificial Sequence: Synthetic oligonucleotide
auagaaucuauagaaaauc

SEQ ID NO: 1372412 - RNA, 19 nt, Artificial Sequence
  Description of Artificial Sequence: Synthetic oligonucleotide
acggauacaguuaacaccc

SEQ ID NO: 1372413 - RNA, 19 nt, Artificial Sequence
  Description of Artificial Sequence: Synthetic oligonucleotide
auagggauagaaucuauag

SEQ ID NO: 1372414 - RNA, 19 nt, Artificial Sequence
  Description of Artificial Sequence: Synthetic oligonucleotide
aucuauagaaaauccgaac

SEQ ID NO: 1372415 - RNA, 19 nt, Artificial Sequence
  Description of Artificial Sequence: Synthetic oligonucleotide
ugcaguaaaacaugucugg

SEQ ID NO: 1372416 - RNA, 19 nt, Artificial Sequence
  Description of Artificial Sequence: Synthetic oligonucleotide
aaauaccgucgcuagcucc

SEQ ID NO: 1372417 - RNA, 19 nt, Artificial Sequence
  Description of Artificial Sequence: Synthetic oligonucleotide
uauacuagcuucuaguuua

SEQ ID NO: 1372418 - RNA, 19 nt, Artificial Sequence
  Description of Artificial Sequence: Synthetic oligonucleotide
uuuggguaggugcagagug

SEQ ID NO: 1372419 - RNA, 19 nt, Artificial Sequence
  Description of Artificial Sequence: Synthetic oligonucleotide
ucucuuagcacaccuaagc

SEQ ID NO: 1372420 - RNA, 19 nt, Artificial Sequence
  Description of Artificial Sequence: Synthetic oligonucleotide
aaggaugcaagcuccagug

SEQ ID NO: 1372421 - RNA, 19 nt, Artificial Sequence
  Description of Artificial Sequence: Synthetic oligonucleotide
acuaccauaaccaguauuc

SEQ ID NO: 1372422 - RNA, 19 nt, Artificial Sequence
  Description of Artificial Sequence: Synthetic oligonucleotide
uaguuuaccuuucauugag

SEQ ID NO: 1372423 - RNA, 19 nt, Artificial Sequence
  Description of Artificial Sequence: Synthetic oligonucleotide
ucauugaggaaucucagaa

SEQ ID NO: 1372424 - RNA, 19 nt, Artificial Sequence
  Description of Artificial Sequence: Synthetic oligonucleotide
agggauagaaucuauagaa

SEQ ID NO: 1372425 - RNA, 19 nt, Artificial Sequence
  Description of Artificial Sequence: Synthetic oligonucleotide
auacaguuaacacccuggc

SEQ ID NO: 1372426 - RNA, 19 nt, Artificial Sequence
  Description of Artificial Sequence: Synthetic oligonucleotide
aaccaagacccucuggcac

SEQ ID NO: 1372427 - RNA, 19 nt, Artificial Sequence
  Description of Artificial Sequence: Synthetic oligonucleotide
uaaauacuaacccuuccac

SEQ ID NO: 1372428 - RNA, 19 nt, Artificial Sequence
  Description of Artificial Sequence: Synthetic oligonucleotide
auaaauacuaacccuucca

SEQ ID NO: 1372429 - RNA, 19 nt, Artificial Sequence
  Description of Artificial Sequence: Synthetic oligonucleotide
acuuguuaggacuauaaau

SEQ ID NO: 1372430 - RNA, 19 nt, Artificial Sequence
  Description of Artificial Sequence: Synthetic oligonucleotide
ucaucuagguaguaguuca

SEQ ID NO: 1372431 - RNA, 19 nt, Artificial Sequence
  Description of Artificial Sequence: Synthetic oligonucleotide
gaucguagaaauaccgucg

SEQ ID NO: 1372432 - RNA, 19 nt, Artificial Sequence
  Description of Artificial Sequence: Synthetic oligonucleotide
gugcaaauuaaucaccucc

SEQ ID NO: 1372433 - RNA, 19 nt, Artificial Sequence
  Description of Artificial Sequence: Synthetic oligonucleotide
aacugagaguagcuuuacc

SEQ ID NO: 1372434 - RNA, 19 nt, Artificial Sequence
  Description of Artificial Sequence: Synthetic oligonucleotide
aacaauauccauagcagcu

SEQ ID NO: 1372435 - RNA, 19 nt, Artificial Sequence
  Description of Artificial Sequence: Synthetic oligonucleotide
guuauuaaucucuuagcac

SEQ ID NO: 1372436 - RNA, 19 nt, Artificial Sequence
  Description of Artificial Sequence: Synthetic oligonucleotide
aaucucuuagcacaccuaa

SEQ ID NO: 1372437 - RNA, 19 nt, Artificial Sequence
  Description of Artificial Sequence: Synthetic oligonucleotide
ucuuaugggacugagccgc

SEQ ID NO: 1372438 - RNA, 19 nt, Artificial Sequence
  Description of Artificial Sequence: Synthetic oligonucleotide
uauuggacuuguuaggacu

SEQ ID NO: 1372439 - RNA, 19 nt, Artificial Sequence
  Description of Artificial Sequence: Synthetic oligonucleotide
ugaggugaaaaucuuucac

SEQ ID NO: 1372440 - RNA, 19 nt, Artificial Sequence
  Description of Artificial Sequence: Synthetic oligonucleotide
uuaccuuucauugaggaau

SEQ ID NO: 1372441 - RNA, 19 nt, Artificial Sequence
  Description of Artificial Sequence: Synthetic oligonucleotide
agaaucuauagaaaauccg

SEQ ID NO: 1372442 - RNA, 19 nt, Artificial Sequence
  Description of Artificial Sequence: Synthetic oligonucleotide
auagaaaauccgaacuacc

SEQ ID NO: 1372443 - RNA, 19 nt, Artificial Sequence
  Description of Artificial Sequence: Synthetic oligonucleotide
aauugucauucugaagugg

SEQ ID NO: 1372444 - RNA, 19 nt, Artificial Sequence
  Description of Artificial Sequence: Synthetic oligonucleotide
gaaucuauagaaaauccga

SEQ ID NO: 1372445 - RNA, 19 nt, Artificial Sequence
  Description of Artificial Sequence: Synthetic oligonucleotide
cuuguuaggacuauaaaua

SEQ ID NO: 1372446 - RNA, 19 nt, Artificial Sequence
  Description of Artificial Sequence: Synthetic oligonucleotide
agaaaaggcauagggauag

SEQ ID NO: 1372447 - RNA, 19 nt, Artificial Sequence
  Description of Artificial Sequence: Synthetic oligonucleotide
cacggauacaguuaacacc

SEQ ID NO: 1372448 - RNA, 19 nt, Artificial Sequence
  Description of Artificial Sequence: Synthetic oligonucleotide
uuguuaggacuauaaauac

SEQ ID NO: 1372449 - RNA, 19 nt, Artificial Sequence
  Description of Artificial Sequence: Synthetic oligonucleotide
caguaaaacaugucugggg

SEQ ID NO: 1372450 - RNA, 19 nt, Artificial Sequence
  Description of Artificial Sequence: Synthetic oligonucleotide
uguuaggacuauaaauacu

SEQ ID NO: 1372451 - RNA, 19 nt, Artificial Sequence
  Description of Artificial Sequence: Synthetic oligonucleotide
uuuggaggauuauuuauaa

SEQ ID NO: 1372452 - RNA, 19 nt, Artificial Sequence
  Description of Artificial Sequence: Synthetic oligonucleotide
uagggauagaaucuauaga

SEQ ID NO: 1372453 - RNA, 19 nt, Artificial Sequence
  Description of Artificial Sequence: Synthetic oligonucleotide
cuuucauugaggaaucuca

SEQ ID NO: 1372454 - RNA, 19 nt, Artificial Sequence
  Description of Artificial Sequence: Synthetic oligonucleotide
ugucauucugaagugguag

SEQ ID NO: 1372455 - RNA, 19 nt, Artificial Sequence
  Description of Artificial Sequence: Synthetic oligonucleotide
aagacuccucgccugggac

SEQ ID NO: 1372456 - RNA, 19 nt, Artificial Sequence
  Description of Artificial Sequence: Synthetic oligonucleotide
aaauccgaacuaccauaac

SEQ ID NO: 1372457 - RNA, 19 nt, Artificial Sequence
  Description of Artificial Sequence: Synthetic oligonucleotide
uauuaaucucuuagcacac

SEQ ID NO: 1372458 - RNA, 19 nt, Artificial Sequence
  Description of Artificial Sequence: Synthetic oligonucleotide
cuuggcaggaaugagaauc

SEQ ID NO: 1372459 - RNA, 19 nt, Artificial Sequence
  Description of Artificial Sequence: Synthetic oligonucleotide
auacuaacccuuccacccc

SEQ ID NO: 1372460 - RNA, 19 nt, Artificial Sequence
  Description of Artificial Sequence: Synthetic oligonucleotide
uaggacuauaaauacuaac

SEQ ID NO: 1372461 - RNA, 19 nt, Artificial Sequence
  Description of Artificial Sequence: Synthetic oligonucleotide
uaaccaguauuccuauuug

SEQ ID NO: 1372462 - RNA, 19 nt, Artificial Sequence
  Description of Artificial Sequence: Synthetic oligonucleotide
ugagaauccggggaaaggc

SEQ ID NO: 1372463 - RNA, 19 nt, Artificial Sequence
  Description of Artificial Sequence: Synthetic oligonucleotide
augaccgcggaguacagag

SEQ ID NO: 1372464 - RNA, 19 nt, Artificial Sequence
  Description of Artificial Sequence: Synthetic oligonucleotide
uuuauaaucugaagagauu

SEQ ID NO: 1372465 - RNA, 19 nt, Artificial Sequence
  Description of Artificial Sequence: Synthetic oligonucleotide
auaaccaguauuccuauuu

SEQ ID NO: 1372466 - RNA, 19 nt, Artificial Sequence
  Description of Artificial Sequence: Synthetic oligonucleotide
gaauugucauucugaagug

SEQ ID NO: 1372467 - RNA, 19 nt, Artificial Sequence
  Description of Artificial Sequence: Synthetic oligonucleotide
aggaaugagaauccgggga

SEQ ID NO: 1372468 - RNA, 19 nt, Artificial Sequence
  Description of Artificial Sequence: Synthetic oligonucleotide
agaaauaccgucgcuagcu

SEQ ID NO: 1372469 - RNA, 19 nt, Artificial Sequence
  Description of Artificial Sequence: Synthetic oligonucleotide
aaugagaauccggggaaag

SEQ ID NO: 1372470 - RNA, 19 nt, Artificial Sequence
  Description of Artificial Sequence: Synthetic oligonucleotide
ugugugaggucugaggcag

SEQ ID NO: 1372471 - RNA, 19 nt, Artificial Sequence
  Description of Artificial Sequence: Synthetic oligonucleotide
aaccaguauuccuauuuga

SEQ ID NO: 1372472 - RNA, 19 nt, Artificial Sequence
  Description of Artificial Sequence: Synthetic oligonucleotide
uuuuggccagauuaccaag

SEQ ID NO: 1372473 - RNA, 19 nt, Artificial Sequence
  Description of Artificial Sequence: Synthetic oligonucleotide
aauccggggaaaggcauac

SEQ ID NO: 1372474 - RNA, 19 nt, Artificial Sequence
  Description of Artificial Sequence: Synthetic oligonucleotide
cuugguuaaacagaucuuc

SEQ ID NO: 1372475 - RNA, 19 nt, Artificial Sequence
  Description of Artificial Sequence: Synthetic oligonucleotide
gaccgcggaguacagaggg

SEQ ID NO: 1372476 - RNA, 19 nt, Artificial Sequence
  Description of Artificial Sequence: Synthetic oligonucleotide
uuuggccagauuaccaaga

SEQ ID NO: 1372477 - RNA, 19 nt, Artificial Sequence
  Description of Artificial Sequence: Synthetic oligonucleotide
aagcaaaccuagcauaauu

SEQ ID NO: 1372478 - RNA, 19 nt, Artificial Sequence
  Description of Artificial Sequence: Synthetic oligonucleotide
gaaaauccgaacuaccaua

SEQ ID NO: 1372479 - RNA, 19 nt, Artificial Sequence
  Description of Artificial Sequence: Synthetic oligonucleotide
aaucuauagaaaauccgaa

SEQ ID NO: 1372480 - RNA, 19 nt, Artificial Sequence
  Description of Artificial Sequence: Synthetic oligonucleotide
agagaagucuccuggaaaa

SEQ ID NO: 1372481 - RNA, 19 nt, Artificial Sequence
  Description of Artificial Sequence: Synthetic oligonucleotide
uauuccuauuugaaguuau

SEQ ID NO: 1372482 - RNA, 19 nt, Artificial Sequence
  Description of Artificial Sequence: Synthetic oligonucleotide
agaaaauccgaacuaccau

SEQ ID NO: 1372483 - RNA, 19 nt, Artificial Sequence
  Description of Artificial Sequence: Synthetic oligonucleotide
auuauuggacuuguuagga

SEQ ID NO: 1372484 - RNA, 19 nt, Artificial Sequence
  Description of Artificial Sequence: Synthetic oligonucleotide
gucagguaaauguugucug

SEQ ID NO: 1372485 - RNA, 19 nt, Artificial Sequence
  Description of Artificial Sequence: Synthetic oligonucleotide
uccucaucuagguaguagu

SEQ ID NO: 1372486 - RNA, 19 nt, Artificial Sequence
  Description of Artificial Sequence: Synthetic oligonucleotide
gucauucugaagugguagg

SEQ ID NO: 1372487 - RNA, 19 nt, Artificial Sequence
  Description of Artificial Sequence: Synthetic oligonucleotide
accuagcauaauuaucguc

SEQ ID NO: 1372488 - RNA, 19 nt, Artificial Sequence
  Description of Artificial Sequence: Synthetic oligonucleotide
aauuaaucaccuccaugua

SEQ ID NO: 1372489 - RNA, 19 nt, Artificial Sequence
  Description of Artificial Sequence: Synthetic oligonucleotide
ucacggauacaguuaacac

SEQ ID NO: 1372490 - RNA, 19 nt, Artificial Sequence
  Description of Artificial Sequence: Synthetic oligonucleotide
gauuuggguaggugcagag

SEQ ID NO: 1372491 - RNA, 19 nt, Artificial Sequence
  Description of Artificial Sequence: Synthetic oligonucleotide
cucuccuggugauaaaggc

SEQ ID NO: 1372492 - RNA, 19 nt, Artificial Sequence
  Description of Artificial Sequence: Synthetic oligonucleotide
ggaaccaagacccucuggc

SEQ ID NO: 1372493 - RNA, 19 nt, Artificial Sequence
  Description of Artificial Sequence: Synthetic oligonucleotide
aucuuaugggacugagccg

SEQ ID NO: 1372494 - RNA, 19 nt, Artificial Sequence
  Description of Artificial Sequence: Synthetic oligonucleotide
uucauugaggaaucucaga

SEQ ID NO: 1372495 - RNA, 19 nt, Artificial Sequence
  Description of Artificial Sequence: Synthetic oligonucleotide
caguuaacacccuggcugg

SEQ ID NO: 1372496 - RNA, 19 nt, Artificial Sequence
  Description of Artificial Sequence: Synthetic oligonucleotide
aguucaccuggacagcguc

SEQ ID NO: 1372497 - RNA, 19 nt, Artificial Sequence
  Description of Artificial Sequence: Synthetic oligonucleotide
uaccauaaccaguauuccu

SEQ ID NO: 1372498 - RNA, 19 nt, Artificial Sequence
  Description of Artificial Sequence: Synthetic oligonucleotide
aaaauccgaacuaccauaa

SEQ ID NO: 1372499 - RNA, 19 nt, Artificial Sequence
  Description of Artificial Sequence: Synthetic oligonucleotide
uuauuggacuuguuaggac

SEQ ID NO: 1372500 - RNA, 19 nt, Artificial Sequence
  Description of Artificial Sequence: Synthetic oligonucleotide
ugaggcauccucaugcgua

SEQ ID NO: 1372501 - RNA, 19 nt, Artificial Sequence
  Description of Artificial Sequence: Synthetic oligonucleotide
uccgaacuaccauaaccag

SEQ ID NO: 1372502 - RNA, 19 nt, Artificial Sequence
  Description of Artificial Sequence: Synthetic oligonucleotide
aaagccacuucccggcaca

SEQ ID NO: 1372503 - RNA, 19 nt, Artificial Sequence
  Description of Artificial Sequence: Synthetic oligonucleotide
aggagcuucaugcaguaaa

SEQ ID NO: 1372504 - RNA, 19 nt, Artificial Sequence
  Description of Artificial Sequence: Synthetic oligonucleotide
ucuuagcacaccuaagcuu

SEQ ID NO: 1372505 - RNA, 19 nt, Artificial Sequence
  Description of Artificial Sequence: Synthetic oligonucleotide
aaccuagcauaauuaucgu

SEQ ID NO: 1372506 - RNA, 19 nt, Artificial Sequence
  Description of Artificial Sequence: Synthetic oligonucleotide
ugaaaaucuuucaccuuau

SEQ ID NO: 1372507 - RNA, 19 nt, Artificial Sequence
  Description of Artificial Sequence: Synthetic oligonucleotide
gagacgaacugagaguagc

SEQ ID NO: 1372508 - RNA, 19 nt, Artificial Sequence
  Description of Artificial Sequence: Synthetic oligonucleotide
ggaucaucaccccuguccg

SEQ ID NO: 1372509 - RNA, 19 nt, Artificial Sequence
  Description of Artificial Sequence: Synthetic oligonucleotide
agggugcaaauuaaucacc

SEQ ID NO: 1372510 - RNA, 19 nt, Artificial Sequence
  Description of Artificial Sequence: Synthetic oligonucleotide
ggauagaaucuauagaaaa

SEQ ID NO: 1372511 - RNA, 19 nt, Artificial Sequence
  Description of Artificial Sequence: Synthetic oligonucleotide
cccggcacaacacagaugc

SEQ ID NO: 1372512 - RNA, 19 nt, Artificial Sequence
  Description of Artificial Sequence: Synthetic oligonucleotide
gaggauucacaacaauauc

SEQ ID NO: 1372513 - RNA, 19 nt, Artificial Sequence
  Description of Artificial Sequence: Synthetic oligonucleotide
auauacuagcuucuaguuu

SEQ ID NO: 1372514 - RNA, 19 nt, Artificial Sequence
  Description of Artificial Sequence: Synthetic oligonucleotide
cucguccacauucaaggcc

SEQ ID NO: 1372515 - RNA, 19 nt, Artificial Sequence
  Description of Artificial Sequence: Synthetic oligonucleotide
gggaucaucaccccugucc

SEQ ID NO: 1372516 - RNA, 19 nt, Artificial Sequence
  Description of Artificial Sequence: Synthetic oligonucleotide
caagccugcaggauucgcc

SEQ ID NO: 1372517 - RNA, 19 nt, Artificial Sequence
  Description of Artificial Sequence: Synthetic oligonucleotide
uuggcuugccgcacugccg

SEQ ID NO: 1372518 - RNA, 19 nt, Artificial Sequence
  Description of Artificial Sequence: Synthetic oligonucleotide
aauaccgucgcuagcucca

SEQ ID NO: 1372519 - RNA, 19 nt, Artificial Sequence
  Description of Artificial Sequence: Synthetic oligonucleotide
cagauuaccaagaacaaau

SEQ ID NO: 1372520 - RNA, 19 nt, Artificial Sequence
  Description of Artificial Sequence: Synthetic oligonucleotide
uccucacggauacaguuaa

SEQ ID NO: 1372521 - RNA, 19 nt, Artificial Sequence
  Description of Artificial Sequence: Synthetic oligonucleotide
caggaaugagaauccgggg

SEQ ID NO: 1372522 - RNA, 19 nt, Artificial Sequence
  Description of Artificial Sequence: Synthetic oligonucleotide
aaauguugucugggucugc

SEQ ID NO: 1372523 - RNA, 19 nt, Artificial Sequence
  Description of Artificial Sequence: Synthetic oligonucleotide
gcaggaaugagaauccggg

SEQ ID NO: 1372524 - RNA, 19 nt, Artificial Sequence
  Description of Artificial Sequence: Synthetic oligonucleotide
aaaagacuccucgccuggg

SEQ ID NO: 1372525 - RNA, 19 nt, Artificial Sequence
  Description of Artificial Sequence: Synthetic oligonucleotide
uaaucaccuccauguagcc

SEQ ID NO: 1372526 - RNA, 19 nt, Artificial Sequence
  Description of Artificial Sequence: Synthetic oligonucleotide
caauauccauagcagcuug

SEQ ID NO: 1372527 - RNA, 19 nt, Artificial Sequence
  Description of Artificial Sequence: Synthetic oligonucleotide
guaguucaccuggacagcg

SEQ ID NO: 1372528 - RNA, 19 nt, Artificial Sequence
  Description of Artificial Sequence: Synthetic oligonucleotide
uagcuuuaccagcuggccu

SEQ ID NO: 1372529 - RNA, 19 nt, Artificial Sequence
  Description of Artificial Sequence: Synthetic oligonucleotide
agggagaauugucauucug

SEQ ID NO: 1372530 - RNA, 19 nt, Artificial Sequence
  Description of Artificial Sequence: Synthetic oligonucleotide
uggcuugccgcacugccgc

SEQ ID NO: 1372531 - RNA, 19 nt, Artificial Sequence
  Description of Artificial Sequence: Synthetic oligonucleotide
gcuguuuccaccacaagcc

SEQ ID NO: 1372532 - RNA, 19 nt, Artificial Sequence
  Description of Artificial Sequence: Synthetic oligonucleotide
ggccagauuaccaagaaca

SEQ ID NO: 1372533 - RNA, 19 nt, Artificial Sequence
  Description of Artificial Sequence: Synthetic oligonucleotide
gaugaacugggcuggccac

SEQ ID NO: 1372534 - RNA, 19 nt, Artificial Sequence
  Description of Artificial Sequence: Synthetic oligonucleotide
caguauuccuauuugaagu

SEQ ID NO: 1372535 - RNA, 19 nt, Artificial Sequence
  Description of Artificial Sequence: Synthetic oligonucleotide
augcaguaaaacaugucug

SEQ ID NO: 1372536 - RNA, 19 nt, Artificial Sequence
  Description of Artificial Sequence: Synthetic oligonucleotide
uccggggaaaggcauacau

SEQ ID NO: 1372537 - RNA, 19 nt, Artificial Sequence
  Description of Artificial Sequence: Synthetic oligonucleotide
cauaauuaucgucuuuuaa

SEQ ID NO: 1372538 - RNA, 19 nt, Artificial Sequence
  Description of Artificial Sequence: Synthetic oligonucleotide
cuguccgugacuugccacc

SEQ ID NO: 1372539 - RNA, 19 nt, Artificial Sequence
  Description of Artificial Sequence: Synthetic oligonucleotide
augagaauccggggaaagg

SEQ ID NO: 1372540 - RNA, 19 nt, Artificial Sequence
  Description of Artificial Sequence: Synthetic oligonucleotide
gguagaaguggaaggaugc

SEQ ID NO: 1372541 - RNA, 19 nt, Artificial Sequence
  Description of Artificial Sequence: Synthetic oligonucleotide
aggaugcaagcuccagugg

SEQ ID NO: 1372542 - RNA, 19 nt, Artificial Sequence
  Description of Artificial Sequence: Synthetic oligonucleotide
cuuagcagauuuggguagg

SEQ ID NO: 1372543 - RNA, 19 nt, Artificial Sequence
  Description of Artificial Sequence: Synthetic oligonucleotide
cuaguuuaccuuucauuga

SEQ ID NO: 1372544 - RNA, 19 nt, Artificial Sequence
  Description of Artificial Sequence: Synthetic oligonucleotide
cuaccauaaccaguauucc

SEQ ID NO: 1372545 - RNA, 19 nt, Artificial Sequence
  Description of Artificial Sequence: Synthetic oligonucleotide
aaaggcauacauagcuccu

SEQ ID NO: 1372546 - RNA, 19 nt, Artificial Sequence
  Description of Artificial Sequence: Synthetic oligonucleotide
uaccuuucauugaggaauc

SEQ ID NO: 1372547 - RNA, 19 nt, Artificial Sequence
  Description of Artificial Sequence: Synthetic oligonucleotide
uauggagcacugucuucag

SEQ ID NO: 1372548 - RNA, 19 nt, Artificial Sequence
  Description of Artificial Sequence: Synthetic oligonucleotide
cagagugccaucaccugac

SEQ ID NO: 1372549 - RNA, 19 nt, Artificial Sequence
  Description of Artificial Sequence: Synthetic oligonucleotide
ccaguauuccuauuugaag

SEQ ID NO: 1372550 - RNA, 19 nt, Artificial Sequence
  Description of Artificial Sequence: Synthetic oligonucleotide
aagcuguuuccaccacaag

SEQ ID NO: 1372551 - RNA, 19 nt, Artificial Sequence
  Description of Artificial Sequence: Synthetic oligonucleotide
uaaucucuuagcacaccua

SEQ ID NO: 1372552 - RNA, 19 nt, Artificial Sequence
  Description of Artificial Sequence: Synthetic oligonucleotide
gaaccaagacccucuggca

SEQ ID NO: 1372553 - RNA, 19 nt, Artificial Sequence
  Description of Artificial Sequence: Synthetic oligonucleotide
aacaugucuggggccaucu

SEQ ID NO: 1372554 - RNA, 19 nt, Artificial Sequence
  Description of Artificial Sequence: Synthetic oligonucleotide
guagcuuuaccagcuggcc

SEQ ID NO: 1372555 - RNA, 19 nt, Artificial Sequence
  Description of Artificial Sequence: Synthetic oligonucleotide
augaacugggcuggccacc

SEQ ID NO: 1372556 - RNA, 19 nt, Artificial Sequence
  Description of Artificial Sequence: Synthetic oligonucleotide
ugcaagggguugcagugaa

SEQ ID NO: 1372557 - RNA, 19 nt, Artificial Sequence
  Description of Artificial Sequence: Synthetic oligonucleotide
gaaauaccgucgcuagcuc

SEQ ID NO: 1372558 - RNA, 19 nt, Artificial Sequence
  Description of Artificial Sequence: Synthetic oligonucleotide
aaacaugucuggggccauc

SEQ ID NO: 1372559 - RNA, 19 nt, Artificial Sequence
  Description of Artificial Sequence: Synthetic oligonucleotide
uucccggcacaacacagau

SEQ ID NO: 1372560 - RNA, 19 nt, Artificial Sequence
  Description of Artificial Sequence: Synthetic oligonucleotide
ucguagaaauaccgucgcu

SEQ ID NO: 1372561 - RNA, 19 nt, Artificial Sequence
  Description of Artificial Sequence: Synthetic oligonucleotide
agguagaaguggaaggaug

SEQ ID NO: 1372562 - RNA, 19 nt, Artificial Sequence
  Description of Artificial Sequence: Synthetic oligonucleotide
cacagagagaagucuccug

SEQ ID NO: 1372563 - RNA, 19 nt, Artificial Sequence
  Description of Artificial Sequence: Synthetic oligonucleotide
cucacggauacaguuaaca

SEQ ID NO: 1372564 - RNA, 19 nt, Artificial Sequence
  Description of Artificial Sequence: Synthetic oligonucleotide
gguugcagugaaucccugg

SEQ ID NO: 1372565 - RNA, 19 nt, Artificial Sequence
  Description of Artificial Sequence: Synthetic oligonucleotide
uccuggugauaaaggcugc

SEQ ID NO: 1372566 - RNA, 19 nt, Artificial Sequence
  Description of Artificial Sequence: Synthetic oligonucleotide
gugguaggugccuucucgc

SEQ ID NO: 1372567 - RNA, 19 nt, Artificial Sequence
  Description of Artificial Sequence: Synthetic oligonucleotide
aucccugggacuugguuaa

SEQ ID NO: 1372568 - RNA, 19 nt, Artificial Sequence
  Description of Artificial Sequence: Synthetic oligonucleotide
uggaaggaugcaagcucca

SEQ ID NO: 1372569 - RNA, 19 nt, Artificial Sequence
  Description of Artificial Sequence: Synthetic oligonucleotide
cuuagcacaccuaagcuuu

SEQ ID NO: 1372570 - RNA, 19 nt, Artificial Sequence
  Description of Artificial Sequence: Synthetic oligonucleotide
uaugggacugagccgccuc

SEQ ID NO: 1372571 - RNA, 19 nt, Artificial Sequence
  Description of Artificial Sequence: Synthetic oligonucleotide
ggccgagugaugcugaaac

SEQ ID NO: 1372572 - RNA, 19 nt, Artificial Sequence
  Description of Artificial Sequence: Synthetic oligonucleotide
accaguauuccuauuugaa

SEQ ID NO: 1372573 - RNA, 19 nt, Artificial Sequence
  Description of Artificial Sequence: Synthetic oligonucleotide
aggcauagggauagaaucu

SEQ ID NO: 1372574 - RNA, 19 nt, Artificial Sequence
  Description of Artificial Sequence: Synthetic oligonucleotide
ccuagcauaauuaucgucu

SEQ ID NO: 1372575 - RNA, 19 nt, Artificial Sequence
  Description of Artificial Sequence: Synthetic oligonucleotide
caucuagguaguaguucac

SEQ ID NO: 1372576 - RNA, 19 nt, Artificial Sequence
  Description of Artificial Sequence: Synthetic oligonucleotide
agcaaaccuagcauaauua

SEQ ID NO: 1372577 - RNA, 19 nt, Artificial Sequence
  Description of Artificial Sequence: Synthetic oligonucleotide
gacuccucgccugggacag

SEQ ID NO: 1372578 - RNA, 19 nt, Artificial Sequence
  Description of Artificial Sequence: Synthetic oligonucleotide
aggaggauucacaacaaua

SEQ ID NO: 1372579 - RNA, 19 nt, Artificial Sequence
  Description of Artificial Sequence: Synthetic oligonucleotide
caugcguauuucuccagga

SEQ ID NO: 1372580 - RNA, 19 nt, Artificial Sequence
  Description of Artificial Sequence: Synthetic oligonucleotide
gaugcaagcuccagugguc

SEQ ID NO: 1372581 - RNA, 19 nt, Artificial Sequence
  Description of Artificial Sequence: Synthetic oligonucleotide
gagugaugcugaaacagaa

SEQ ID NO: 1372582 - RNA, 19 nt, Artificial Sequence
  Description of Artificial Sequence: Synthetic oligonucleotide
acaauauccauagcagcuu

SEQ ID NO: 1372583 - RNA, 19 nt, Artificial Sequence
  Description of Artificial Sequence: Synthetic oligonucleotide
acagaggguacugugggau

SEQ ID NO: 1372584 - RNA, 19 nt, Artificial Sequence
  Description of Artificial Sequence: Synthetic oligonucleotide
uucuccacgggagggagaa

SEQ ID NO: 1372585 - RNA, 19 nt, Artificial Sequence
  Description of Artificial Sequence: Synthetic oligonucleotide
ucucagaaccaaggcacac

SEQ ID NO: 1372586 - RNA, 19 nt, Artificial Sequence
  Description of Artificial Sequence: Synthetic oligonucleotide
cacaccuaagcuuuuauuu

SEQ ID NO: 1372587 - RNA, 19 nt, Artificial Sequence
  Description of Artificial Sequence: Synthetic oligonucleotide
ugguaggugccuucucgcu

SEQ ID NO: 1372588 - RNA, 19 nt, Artificial Sequence
  Description of Artificial Sequence: Synthetic oligonucleotide
cucaugcguauuucuccag

SEQ ID NO: 1372589 - RNA, 19 nt, Artificial Sequence
  Description of Artificial Sequence: Synthetic oligonucleotide
uuucccugcuaaacugcuc

SEQ ID NO: 1372590 - RNA, 19 nt, Artificial Sequence
  Description of Artificial Sequence: Synthetic oligonucleotide
uucaccuggacagcgucaa

SEQ ID NO: 1372591 - RNA, 19 nt, Artificial Sequence
  Description of Artificial Sequence: Synthetic oligonucleotide
ggaaugagaauccggggaa

SEQ ID NO: 1372592 - RNA, 19 nt, Artificial Sequence
  Description of Artificial Sequence: Synthetic oligonucleotide
ugcaggauucgccgggcuc

SEQ ID NO: 1372593 - RNA, 19 nt, Artificial Sequence
  Description of Artificial Sequence: Synthetic oligonucleotide
aggaucguagaaauaccgu

SEQ ID NO: 1372594 - RNA, 19 nt, Artificial Sequence
  Description of Artificial Sequence: Synthetic oligonucleotide
uagcauaauuaucgucuuu

SEQ ID NO: 1372595 - RNA, 19 nt, Artificial Sequence
  Description of Artificial Sequence: Synthetic oligonucleotide
cuuaugggacugagccgcc

SEQ ID NO: 1372596 - RNA, 19 nt, Artificial Sequence
  Description of Artificial Sequence: Synthetic oligonucleotide
ggaggauuauuuauaaucu

SEQ ID NO: 1372597 - RNA, 19 nt, Artificial Sequence
  Description of Artificial Sequence: Synthetic oligonucleotide
gagaauccggggaaaggca

SEQ ID NO: 1372598 - RNA, 19 nt, Artificial Sequence
  Description of Artificial Sequence: Synthetic oligonucleotide
aaggcauacauagcuccuu

SEQ ID NO: 1372599 - RNA, 19 nt, Artificial Sequence
  Description of Artificial Sequence: Synthetic oligonucleotide
augcguauuucuccaggaa

SEQ ID NO: 1372600 - RNA, 19 nt, Artificial Sequence
  Description of Artificial Sequence: Synthetic oligonucleotide
agacuccucgccugggaca

SEQ ID NO: 1372601 - RNA, 19 nt, Artificial Sequence
  Description of Artificial Sequence: Synthetic oligonucleotide
uuagcagauuuggguaggu

SEQ ID NO: 1372602 - RNA, 19 nt, Artificial Sequence
  Description of Artificial Sequence: Synthetic oligonucleotide
gauucgccgggcucgcuuc

SEQ ID NO: 1372603 - RNA, 19 nt, Artificial Sequence
  Description of Artificial Sequence: Synthetic oligonucleotide
gcacuguaagaucccaagc

SEQ ID NO: 1372604 - RNA, 19 nt, Artificial Sequence
  Description of Artificial Sequence: Synthetic oligonucleotide
uggucagguaaauguuguc

SEQ ID NO: 1372605 - RNA, 19 nt, Artificial Sequence
  Description of Artificial Sequence: Synthetic oligonucleotide
uguccgugacuugccaccc

SEQ ID NO: 1372606 - RNA, 19 nt, Artificial Sequence
  Description of Artificial Sequence: Synthetic oligonucleotide
gguaggugccuucucgcug

SEQ ID NO: 1372607 - RNA, 19 nt, Artificial Sequence
  Description of Artificial Sequence: Synthetic oligonucleotide
auuuggguaggugcagagu

SEQ ID NO: 1372608 - RNA, 19 nt, Artificial Sequence
  Description of Artificial Sequence: Synthetic oligonucleotide
ugaacugggcuggccaccu

SEQ ID NO: 1372609 - RNA, 19 nt, Artificial Sequence
  Description of Artificial Sequence: Synthetic oligonucleotide
cuguaagaucccaagcugu

SEQ ID NO: 1372610 - RNA, 19 nt, Artificial Sequence
  Description of Artificial Sequence: Synthetic oligonucleotide
agauuuggguaggugcaga

SEQ ID NO: 1372611 - RNA, 19 nt, Artificial Sequence
  Description of Artificial Sequence: Synthetic oligonucleotide
gcaggauucgccgggcucg

SEQ ID NO: 1372612 - RNA, 19 nt, Artificial Sequence
  Description of Artificial Sequence: Synthetic oligonucleotide
cagauuuggguaggugcag

SEQ ID NO: 1372613 - RNA, 19 nt, Artificial Sequence
  Description of Artificial Sequence: Synthetic oligonucleotide
agauuaccaagaacaaauu

SEQ ID NO: 1372614 - RNA, 19 nt, Artificial Sequence
  Description of Artificial Sequence: Synthetic oligonucleotide
ucgcuagcuccagugguca

SEQ ID NO: 1372615 - RNA, 19 nt, Artificial Sequence
  Description of Artificial Sequence: Synthetic oligonucleotide
aaaacaugucuggggccau

SEQ ID NO: 1372616 - RNA, 19 nt, Artificial Sequence
  Description of Artificial Sequence: Synthetic oligonucleotide
cagagacgaacugagagua

SEQ ID NO: 1372617 - RNA, 19 nt, Artificial Sequence
  Description of Artificial Sequence: Synthetic oligonucleotide
agugaugcugaaacagaaa

SEQ ID NO: 1372618 - RNA, 19 nt, Artificial Sequence
  Description of Artificial Sequence: Synthetic oligonucleotide
cagaaaaggcauagggaua

SEQ ID NO: 1372619 - RNA, 19 nt, Artificial Sequence
  Description of Artificial Sequence: Synthetic oligonucleotide
auuggacuuguuaggacua

SEQ ID NO: 1372620 - RNA, 19 nt, Artificial Sequence
  Description of Artificial Sequence: Synthetic oligonucleotide
ucccggcacaacacagaug

SEQ ID NO: 1372621 - RNA, 19 nt, Artificial Sequence
  Description of Artificial Sequence: Synthetic oligonucleotide
caaagccacuucccggcac

SEQ ID NO: 1372622 - RNA, 19 nt, Artificial Sequence
  Description of Artificial Sequence: Synthetic oligonucleotide
guagaaguggaaggaugca

SEQ ID NO: 1372623 - RNA, 19 nt, Artificial Sequence
  Description of Artificial Sequence: Synthetic oligonucleotide
agaauccggggaaaggcau

SEQ ID NO: 1372624 - RNA, 19 nt, Artificial Sequence
  Description of Artificial Sequence: Synthetic oligonucleotide
uuagcacaccuaagcuuuu

SEQ ID NO: 1372625 - RNA, 19 nt, Artificial Sequence
  Description of Artificial Sequence: Synthetic oligonucleotide
cucuuagcacaccuaagcu

SEQ ID NO: 1372626 - RNA, 19 nt, Artificial Sequence
  Description of Artificial Sequence: Synthetic oligonucleotide
gucugaggcagaguccaug

SEQ ID NO: 1372627 - RNA, 19 nt, Artificial Sequence
  Description of Artificial Sequence: Synthetic oligonucleotide
ggaggauucacaacaauau

SEQ ID NO: 1372628 - RNA, 19 nt, Artificial Sequence
  Description of Artificial Sequence: Synthetic oligonucleotide
ggaaaggcauacauagcuc

SEQ ID NO: 1372629 - RNA, 19 nt, Artificial Sequence
  Description of Artificial Sequence: Synthetic oligonucleotide
uaacacccuggcuggcacu

SEQ ID NO: 1372630 - RNA, 19 nt, Artificial Sequence
  Description of Artificial Sequence: Synthetic oligonucleotide
uguagcccuuggagguaga

SEQ ID NO: 1372631 - RNA, 19 nt, Artificial Sequence
  Description of Artificial Sequence: Synthetic oligonucleotide
cuucccggcacaacacaga

SEQ ID NO: 1372632 - RNA, 19 nt, Artificial Sequence
  Description of Artificial Sequence: Synthetic oligonucleotide
cucagaaccaaggcacaca

SEQ ID NO: 1372633 - RNA, 19 nt, Artificial Sequence
  Description of Artificial Sequence: Synthetic oligonucleotide
ggaaggaugcaagcuccag

SEQ ID NO: 1372634 - RNA, 19 nt, Artificial Sequence
  Description of Artificial Sequence: Synthetic oligonucleotide
aucucagaaccaaggcaca

SEQ ID NO: 1372635 - RNA, 19 nt, Artificial Sequence
  Description of Artificial Sequence: Synthetic oligonucleotide
uggacuuguuaggacuaua

SEQ ID NO: 1372636 - RNA, 19 nt, Artificial Sequence
  Description of Artificial Sequence: Synthetic oligonucleotide
uuggacuuguuaggacuau

SEQ ID NO: 1372637 - RNA, 19 nt, Artificial Sequence
  Description of Artificial Sequence: Synthetic oligonucleotide
ggaugcaagcuccaguggu

SEQ ID NO: 1372638 - RNA, 19 nt, Artificial Sequence
  Description of Artificial Sequence: Synthetic oligonucleotide
ggucagguaaauguugucu

SEQ ID NO: 1372639 - RNA, 19 nt, Artificial Sequence
  Description of Artificial Sequence: Synthetic oligonucleotide
cagacacuggcgggcagag

SEQ ID NO: 1372640 - RNA, 19 nt, Artificial Sequence
  Description of Artificial Sequence: Synthetic oligonucleotide
accuaagcuuuuauuuaaa

SEQ ID NO: 1372641 - RNA, 19 nt, Artificial Sequence
  Description of Artificial Sequence: Synthetic oligonucleotide
ggacuuguuaggacuauaa

SEQ ID NO: 1372642 - RNA, 19 nt, Artificial Sequence
  Description of Artificial Sequence: Synthetic oligonucleotide
ccuaagcuuuuauuuaaaa

SEQ ID NO: 1372643 - RNA, 19 nt, Artificial Sequence
  Description of Artificial Sequence: Synthetic oligonucleotide
gcaaaccuagcauaauuau

SEQ ID NO: 1372644 - RNA, 19 nt, Artificial Sequence
  Description of Artificial Sequence: Synthetic oligonucleotide
ccugcuaaacugcucaaaa

SEQ ID NO: 1372645 - RNA, 19 nt, Artificial Sequence
  Description of Artificial Sequence: Synthetic oligonucleotide
aucaccccuguccgugacu

SEQ ID NO: 1372646 - RNA, 19 nt, Artificial Sequence
  Description of Artificial Sequence: Synthetic oligonucleotide
gggauagaaucuauagaaa

SEQ ID NO: 1372647 - RNA, 19 nt, Artificial Sequence
  Description of Artificial Sequence: Synthetic oligonucleotide
cauccucacggauacaguu

SEQ ID NO: 1372648 - RNA, 19 nt, Artificial Sequence
  Description of Artificial Sequence: Synthetic oligonucleotide
ccucgccugggacaggagg

SEQ ID NO: 1372649 - RNA, 19 nt, Artificial Sequence
  Description of Artificial Sequence: Synthetic oligonucleotide
gaugaccgcggaguacaga

SEQ ID NO: 1372650 - RNA, 19 nt, Artificial Sequence
  Description of Artificial Sequence: Synthetic oligonucleotide
cuagcauaauuaucgucuu

SEQ ID NO: 1372651 - RNA, 19 nt, Artificial Sequence
  Description of Artificial Sequence: Synthetic oligonucleotide
uccucgccugggacaggag

SEQ ID NO: 1372652 - RNA, 19 nt, Artificial Sequence
  Description of Artificial Sequence: Synthetic oligonucleotide
gucgcuagcuccagugguc

SEQ ID NO: 1372653 - RNA, 19 nt, Artificial Sequence
  Description of Artificial Sequence: Synthetic oligonucleotide
caucaccccuguccgugac

SEQ ID NO: 1372654 - RNA, 19 nt, Artificial Sequence
  Description of Artificial Sequence: Synthetic oligonucleotide
agccacuucccggcacaac

SEQ ID NO: 1372655 - RNA, 19 nt, Artificial Sequence
  Description of Artificial Sequence: Synthetic oligonucleotide
auaccgucgcuagcuccag

SEQ ID NO: 1372656 - RNA, 19 nt, Artificial Sequence
  Description of Artificial Sequence: Synthetic oligonucleotide
cagccuuggcaggaaugag

SEQ ID NO: 1372657 - RNA, 19 nt, Artificial Sequence
  Description of Artificial Sequence: Synthetic oligonucleotide
cacuucccggcacaacaca

SEQ ID NO: 1372658 - RNA, 19 nt, Artificial Sequence
  Description of Artificial Sequence: Synthetic oligonucleotide
accuuucauugaggaaucu

SEQ ID NO: 1372659 - RNA, 19 nt, Artificial Sequence
  Description of Artificial Sequence: Synthetic oligonucleotide
cuuucaccuuauggagcac

SEQ ID NO: 1372660 - RNA, 19 nt, Artificial Sequence
  Description of Artificial Sequence: Synthetic oligonucleotide
agaugaccgcggaguacag

SEQ ID NO: 1372661 - RNA, 19 nt, Artificial Sequence
  Description of Artificial Sequence: Synthetic oligonucleotide
ccucaugcguauuucucca

SEQ ID NO: 1372662 - RNA, 19 nt, Artificial Sequence
  Description of Artificial Sequence: Synthetic oligonucleotide
auucgccgggcucgcuucu

SEQ ID NO: 1372663 - RNA, 19 nt, Artificial Sequence
  Description of Artificial Sequence: Synthetic oligonucleotide
gaauccggggaaaggcaua

SEQ ID NO: 1372664 - RNA, 19 nt, Artificial Sequence
  Description of Artificial Sequence: Synthetic oligonucleotide
gaucaucaccccuguccgu

SEQ ID NO: 1372665 - RNA, 19 nt, Artificial Sequence
  Description of Artificial Sequence: Synthetic oligonucleotide
gcguauuucuccaggaacu

SEQ ID NO: 1372666 - RNA, 19 nt, Artificial Sequence
  Description of Artificial Sequence: Synthetic oligonucleotide
gggacuugguuaaacagau

SEQ ID NO: 1372667 - RNA, 19 nt, Artificial Sequence
  Description of Artificial Sequence: Synthetic oligonucleotide
ggcauagggauagaaucua

SEQ ID NO: 1372668 - RNA, 19 nt, Artificial Sequence
  Description of Artificial Sequence: Synthetic oligonucleotide
cacugccgcccggagcucg

SEQ ID NO: 1372669 - RNA, 19 nt, Artificial Sequence
  Description of Artificial Sequence: Synthetic oligonucleotide
agccuggccgagugaugcu

SEQ ID NO: 1372670 - RNA, 19 nt, Artificial Sequence
  Description of Artificial Sequence: Synthetic oligonucleotide
aagccacuucccggcacaa

SEQ ID NO: 1372671 - RNA, 19 nt, Artificial Sequence
  Description of Artificial Sequence: Synthetic oligonucleotide
ccacuucccggcacaacac

SEQ ID NO: 1372672 - RNA, 19 nt, Artificial Sequence
  Description of Artificial Sequence: Synthetic oligonucleotide
cuguuuccaccacaagccu

SEQ ID NO: 1372673 - RNA, 19 nt, Artificial Sequence
  Description of Artificial Sequence: Synthetic oligonucleotide
ccuguccgugacuugccac

SEQ ID NO: 1372674 - RNA, 19 nt, Artificial Sequence
  Description of Artificial Sequence: Synthetic oligonucleotide
cacuggcgggcagagacga

SEQ ID NO: 1372675 - RNA, 19 nt, Artificial Sequence
  Description of Artificial Sequence: Synthetic oligonucleotide
caggauucgccgggcucgc

SEQ ID NO: 1372676 - RNA, 19 nt, Artificial Sequence
  Description of Artificial Sequence: Synthetic oligonucleotide
gccgagugaugcugaaaca

SEQ ID NO: 1372677 - RNA, 19 nt, Artificial Sequence
  Description of Artificial Sequence: Synthetic oligonucleotide
uggccgagugaugcugaaa

SEQ ID NO: 1372678 - RNA, 19 nt, Artificial Sequence
  Description of Artificial Sequence: Synthetic oligonucleotide
gccagauuaccaagaacaa

SEQ ID NO: 1372679 - RNA, 19 nt, Artificial Sequence
  Description of Artificial Sequence: Synthetic oligonucleotide
cuagcuccaguggucaggu

SEQ ID NO: 1372680 - RNA, 19 nt, Artificial Sequence
  Description of Artificial Sequence: Synthetic oligonucleotide
ggugaaaaucuuucaccuu

SEQ ID NO: 1372681 - RNA, 19 nt, Artificial Sequence
  Description of Artificial Sequence: Synthetic oligonucleotide
ucgccgggcucgcuucuua

SEQ ID NO: 1372682 - RNA, 19 nt, Artificial Sequence
  Description of Artificial Sequence: Synthetic oligonucleotide
ccagauuaccaagaacaaa

SEQ ID NO: 1372683 - RNA, 19 nt, Artificial Sequence
  Description of Artificial Sequence: Synthetic oligonucleotide
guaagaucccaagcuguuu

SEQ ID NO: 1372684 - RNA, 19 nt, Artificial Sequence
  Description of Artificial Sequence: Synthetic oligonucleotide
cguagaaauaccgucgcua

SEQ ID NO: 1372685 - RNA, 19 nt, Artificial Sequence
  Description of Artificial Sequence: Synthetic oligonucleotide
gccugggacaggaggauuc

SEQ ID NO: 1372686 - RNA, 19 nt, Artificial Sequence
  Description of Artificial Sequence: Synthetic oligonucleotide
guagcccuuggagguagaa

SEQ ID NO: 1372687 - RNA, 19 nt, Artificial Sequence
  Description of Artificial Sequence: Synthetic oligonucleotide
cuccucgccugggacagga

SEQ ID NO: 1372688 - RNA, 19 nt, Artificial Sequence
  Description of Artificial Sequence: Synthetic oligonucleotide
ucgcugcccaaagccacuu

SEQ ID NO: 1372689 - RNA, 19 nt, Artificial Sequence
  Description of Artificial Sequence: Synthetic oligonucleotide
cauaaccaguauuccuauu

SEQ ID NO: 1372690 - RNA, 19 nt, Artificial Sequence
  Description of Artificial Sequence: Synthetic oligonucleotide
ccgaacuaccauaaccagu

SEQ ID NO: 1372691 - RNA, 19 nt, Artificial Sequence
  Description of Artificial Sequence: Synthetic oligonucleotide
accgcggaguacagagggu

SEQ ID NO: 1372692 - RNA, 19 nt, Artificial Sequence
  Description of Artificial Sequence: Synthetic oligonucleotide
ggacuugguuaaacagauc

SEQ ID NO: 1372693 - RNA, 19 nt, Artificial Sequence
  Description of Artificial Sequence: Synthetic oligonucleotide
acuccucgccugggacagg

SEQ ID NO: 1372694 - RNA, 19 nt, Artificial Sequence
  Description of Artificial Sequence: Synthetic oligonucleotide
gggcucgcuucuuacuucu

SEQ ID NO: 1372695 - RNA, 19 nt, Artificial Sequence
  Description of Artificial Sequence: Synthetic oligonucleotide
ccggagaccaggagcuuca

SEQ ID NO: 1372696 - RNA, 19 nt, Artificial Sequence
  Description of Artificial Sequence: Synthetic oligonucleotide
cuggccgagugaugcugaa

SEQ ID NO: 1372697 - RNA, 19 nt, Artificial Sequence
  Description of Artificial Sequence: Synthetic oligonucleotide
cuccacgggagggagaauu

SEQ ID NO: 1372698 - RNA, 19 nt, Artificial Sequence
  Description of Artificial Sequence: Synthetic oligonucleotide
cgcggaguacagaggguac

SEQ ID NO: 1372699 - RNA, 19 nt, Artificial Sequence
  Description of Artificial Sequence: Synthetic oligonucleotide
cggcacaacacagaugcca

SEQ ID NO: 1372700 - RNA, 19 nt, Artificial Sequence
  Description of Artificial Sequence: Synthetic oligonucleotide
ccggcacaacacagaugcc

SEQ ID NO: 1372701 - RNA, 19 nt, Artificial Sequence
  Description of Artificial Sequence: Synthetic oligonucleotide
ucuccacgggagggagaau

SEQ ID NO: 1372702 - RNA, 19 nt, Artificial Sequence
  Description of Artificial Sequence: Synthetic oligonucleotide
uucgccgggcucgcuucuu

SEQ ID NO: 1372703 - RNA, 19 nt, Artificial Sequence
  Description of Artificial Sequence: Synthetic oligonucleotide
gccgcacugccgcccggag

SEQ ID NO: 1372704 - RNA, 19 nt, Artificial Sequence
  Description of Artificial Sequence: Synthetic oligonucleotide
gcauagggauagaaucuau

SEQ ID NO: 1372705 - RNA, 19 nt, Artificial Sequence
  Description of Artificial Sequence: Synthetic oligonucleotide
aggcauccucaugcguauu

SEQ ID NO: 1372706 - RNA, 19 nt, Artificial Sequence
  Description of Artificial Sequence: Synthetic oligonucleotide
cgggcucgcuucuuacuuc

SEQ ID NO: 1372707 - RNA, 19 nt, Artificial Sequence
  Description of Artificial Sequence: Synthetic oligonucleotide
cugaagugguaggugccuu

SEQ ID NO: 1372708 - RNA, 19 nt, Artificial Sequence
  Description of Artificial Sequence: Synthetic oligonucleotide
cugcaggauucgccgggcu

SEQ ID NO: 1372709 - RNA, 19 nt, Artificial Sequence
  Description of Artificial Sequence: Synthetic oligonucleotide
gcggaguacagaggguacu

SEQ ID NO: 1372710 - RNA, 19 nt, Artificial Sequence
  Description of Artificial Sequence: Synthetic oligonucleotide
cccuguccgugacuugcca

SEQ ID NO: 1372711 - RNA, 19 nt, Artificial Sequence
  Description of Artificial Sequence: Synthetic oligonucleotide
ccgcggaguacagagggua

SEQ ID NO: 1372712 - RNA, 19 nt, Artificial Sequence
  Description of Artificial Sequence: Synthetic oligonucleotide
cgccgggcucgcuucuuac

SEQ ID NO: 1372713 - RNA, 19 nt, Artificial Sequence
  Description of Artificial Sequence: Synthetic oligonucleotide
cgucgcuagcuccaguggu

SEQ ID NO: 1372714 - RNA, 19 nt, Artificial Sequence
  Description of Artificial Sequence: Synthetic oligonucleotide
cggagaccaggagcuucag

SEQ ID NO: 1372715 - RNA, 19 nt, Artificial Sequence
  Description of Artificial Sequence: Synthetic oligonucleotide
ccgggcucgcuucuuacuu

SEQ ID NO: 1372716 - RNA, 19 nt, Artificial Sequence
  Description of Artificial Sequence: Synthetic oligonucleotide
cgccugggacaggaggauu

SEQ ID NO: 1372717 - RNA, 19 nt, Artificial Sequence
  Description of Artificial Sequence: Synthetic oligonucleotide
aauucuuaguaguagaugg

SEQ ID NO: 1372718 - RNA, 19 nt, Artificial Sequence
  Description of Artificial Sequence: Synthetic oligonucleotide
aaagacuucccguagagcc

SEQ ID NO: 1372719 - RNA, 19 nt, Artificial Sequence
  Description of Artificial Sequence: Synthetic oligonucleotide
uuugagauaauguuaauag

SEQ ID NO: 1372720 - RNA, 19 nt, Artificial Sequence
  Description of Artificial Sequence: Synthetic oligonucleotide
uccuguaaaauucuuaugg

SEQ ID NO: 1372721 - RNA, 19 nt, Artificial Sequence
  Description of Artificial Sequence: Synthetic oligonucleotide
aaugacuaauuauagauga

SEQ ID NO: 1372722 - RNA, 19 nt, Artificial Sequence
  Description of Artificial Sequence: Synthetic oligonucleotide
acuuauaaagccuuucagc

SEQ ID NO: 1372723 - RNA, 19 nt, Artificial Sequence
  Description of Artificial Sequence: Synthetic oligonucleotide
ugagauaauguuaauagca

SEQ ID NO: 1372724 - RNA, 19 nt, Artificial Sequence
  Description of Artificial Sequence: Synthetic oligonucleotide
augauaauaacacaggcug

SEQ ID NO: 1372725 - RNA, 19 nt, Artificial Sequence
  Description of Artificial Sequence: Synthetic oligonucleotide
agaugauaauaacacaggc

SEQ ID NO: 1372726 - RNA, 19 nt, Artificial Sequence
  Description of Artificial Sequence: Synthetic oligonucleotide
ucaaaaugacuaauuauag

SEQ ID NO: 1372727 - RNA, 19 nt, Artificial Sequence
  Description of Artificial Sequence: Synthetic oligonucleotide
ucuguuaaagacuuggagc

SEQ ID NO: 1372728 - RNA, 19 nt, Artificial Sequence
  Description of Artificial Sequence: Synthetic oligonucleotide
aauuucaccucgucugucc

SEQ ID NO: 1372729 - RNA, 19 nt, Artificial Sequence
  Description of Artificial Sequence: Synthetic oligonucleotide
uccauuuaggucuuaaaag

SEQ ID NO: 1372730 - RNA, 19 nt, Artificial Sequence
  Description of Artificial Sequence: Synthetic oligonucleotide
uaauuauagaugauaauaa

SEQ ID NO: 1372731 - RNA, 19 nt, Artificial Sequence
  Description of Artificial Sequence: Synthetic oligonucleotide
ugcaaaacaugcaugagga

SEQ ID NO: 1372732 - RNA, 19 nt, Artificial Sequence
  Description of Artificial Sequence: Synthetic oligonucleotide
ugagaauucagucacccca

SEQ ID NO: 1372733 - RNA, 19 nt, Artificial Sequence
  Description of Artificial Sequence: Synthetic oligonucleotide
uuucuaauucuaaaucucc

SEQ ID NO: 1372734 - RNA, 19 nt, Artificial Sequence
  Description of Artificial Sequence: Synthetic oligonucleotide
cucacuauagccagcaggg

SEQ ID NO: 1372735 - RNA, 19 nt, Artificial Sequence
  Description of Artificial Sequence: Synthetic oligonucleotide
uguuuuaaucaucuccucc

SEQ ID NO: 1372736 - RNA, 19 nt, Artificial Sequence
  Description of Artificial Sequence: Synthetic oligonucleotide
cugaacgucauacagcacg

SEQ ID NO: 1372737 - RNA, 19 nt, Artificial Sequence
  Description of Artificial Sequence: Synthetic oligonucleotide
aaauaagcauuugagauaa

SEQ ID NO: 1372738 - RNA, 19 nt, Artificial Sequence
  Description of Artificial Sequence: Synthetic oligonucleotide
cuaucagcuaacacgauag

SEQ ID NO: 1372739 - RNA, 19 nt, Artificial Sequence
  Description of Artificial Sequence: Synthetic oligonucleotide
gaugcuuaggaauuucacc

SEQ ID NO: 1372740 - RNA, 19 nt, Artificial Sequence
  Description of Artificial Sequence: Synthetic oligonucleotide
cuuaguaguagaugguagg

SEQ ID NO: 1372741 - RNA, 19 nt, Artificial Sequence
  Description of Artificial Sequence: Synthetic oligonucleotide
uauaaagccuuucagcaaa

SEQ ID NO: 1372742 - RNA, 19 nt, Artificial Sequence
  Description of Artificial Sequence: Synthetic oligonucleotide
ucuuaguaguagaugguag

SEQ ID NO: 1372743 - RNA, 19 nt, Artificial Sequence
  Description of Artificial Sequence: Synthetic oligonucleotide
uaauguuaauagcagugca

SEQ ID NO: 1372744 - RNA, 19 nt, Artificial Sequence
  Description of Artificial Sequence: Synthetic oligonucleotide
aauguuaauagcagugcag

SEQ ID NO: 1372745 - RNA, 19 nt, Artificial Sequence
  Description of Artificial Sequence: Synthetic oligonucleotide
guaccaaguccuuucaugg

SEQ ID NO: 1372746 - RNA, 19 nt, Artificial Sequence
  Description of Artificial Sequence: Synthetic oligonucleotide
uuuaaggcaucaaaaugac

SEQ ID NO: 1372747 - RNA, 19 nt, Artificial Sequence
  Description of Artificial Sequence: Synthetic oligonucleotide
uuaguaguagaugguaggg

SEQ ID NO: 1372748 - RNA, 19 nt, Artificial Sequence
  Description of Artificial Sequence: Synthetic oligonucleotide
ucggauuuaauacucugcu

SEQ ID NO: 1372749 - RNA, 19 nt, Artificial Sequence
  Description of Artificial Sequence: Synthetic oligonucleotide
aucuguuaaagacuuggag

SEQ ID NO: 1372750 - RNA, 19 nt, Artificial Sequence
  Description of Artificial Sequence: Synthetic oligonucleotide
ugaacgucauacagcacgg

SEQ ID NO: 1372751 - RNA, 19 nt, Artificial Sequence
  Description of Artificial Sequence: Synthetic oligonucleotide
uugagauaauguuaauagc

SEQ ID NO: 1372752 - RNA, 19 nt, Artificial Sequence
  Description of Artificial Sequence: Synthetic oligonucleotide
aacacgauagacaaagcca

SEQ ID NO: 1372753 - RNA, 19 nt, Artificial Sequence
  Description of Artificial Sequence: Synthetic oligonucleotide
gagauaauguuaauagcag

SEQ ID NO: 1372754 - RNA, 19 nt, Artificial Sequence
  Description of Artificial Sequence: Synthetic oligonucleotide
uuguaugcaguccugauuu

SEQ ID NO: 1372755 - RNA, 19 nt, Artificial Sequence
  Description of Artificial Sequence: Synthetic oligonucleotide
acuggaggcguuuuaauug

SEQ ID NO: 1372756 - RNA, 19 nt, Artificial Sequence
  Description of Artificial Sequence: Synthetic oligonucleotide
augaguaggaccuuccugu

SEQ ID NO: 1372757 - RNA, 19 nt, Artificial Sequence
  Description of Artificial Sequence: Synthetic oligonucleotide
agcuguguaaaauaggaaa

SEQ ID NO: 1372758 - RNA, 19 nt, Artificial Sequence
  Description of Artificial Sequence: Synthetic oligonucleotide
uucggauuuaauacucugc

SEQ ID NO: 1372759 - RNA, 19 nt, Artificial Sequence
  Description of Artificial Sequence: Synthetic oligonucleotide
gaagugucgcccuugauga

SEQ ID NO: 1372760 - RNA, 19 nt, Artificial Sequence
  Description of Artificial Sequence: Synthetic oligonucleotide
aagucugguugauucgacg

SEQ ID NO: 1372761 - RNA, 19 nt, Artificial Sequence
  Description of Artificial Sequence: Synthetic oligonucleotide
uucaucgguaccaaguccu

SEQ ID NO: 1372762 - RNA, 19 nt, Artificial Sequence
  Description of Artificial Sequence: Synthetic oligonucleotide
uguccuguaaaauucuuau

SEQ ID NO: 1372763 - RNA, 19 nt, Artificial Sequence
  Description of Artificial Sequence: Synthetic oligonucleotide
uuaauacucugcucaaugu

SEQ ID NO: 1372764 - RNA, 19 nt, Artificial Sequence
  Description of Artificial Sequence: Synthetic oligonucleotide
uggcaugaagagaugacug

SEQ ID NO: 1372765 - RNA, 19 nt, Artificial Sequence
  Description of Artificial Sequence: Synthetic oligonucleotide
aggaaauaaucuguuaaag

SEQ ID NO: 1372766 - RNA, 19 nt, Artificial Sequence
  Description of Artificial Sequence: Synthetic oligonucleotide
agauaauguuaauagcagu

SEQ ID NO: 1372767 - RNA, 19 nt, Artificial Sequence
  Description of Artificial Sequence: Synthetic oligonucleotide
uuucggauuuaauacucug

SEQ ID NO: 1372768 - RNA, 19 nt, Artificial Sequence
  Description of Artificial Sequence: Synthetic oligonucleotide
cuucacgagugcaucaucc

SEQ ID NO: 1372769 - RNA, 19 nt, Artificial Sequence
  Description of Artificial Sequence: Synthetic oligonucleotide
guugauucgacggaucucc

SEQ ID NO: 1372770 - RNA, 19 nt, Artificial Sequence
  Description of Artificial Sequence: Synthetic oligonucleotide
gcuaacacgauagacaaag

SEQ ID NO: 1372771 - RNA, 19 nt, Artificial Sequence
  Description of Artificial Sequence: Synthetic oligonucleotide
aguacaaagacuucccgua

SEQ ID NO: 1372772 - RNA, 19 nt, Artificial Sequence
  Description of Artificial Sequence: Synthetic oligonucleotide
gugccuaggcccuucaugg

SEQ ID NO: 1372773 - RNA, 19 nt, Artificial Sequence
  Description of Artificial Sequence: Synthetic oligonucleotide
cuauaggucagguugagaa

SEQ ID NO: 1372774 - RNA, 19 nt, Artificial Sequence
  Description of Artificial Sequence: Synthetic oligonucleotide
gguuuaaggcaucaaaaug

SEQ ID NO: 1372775 - RNA, 19 nt, Artificial Sequence
  Description of Artificial Sequence: Synthetic oligonucleotide
ucgacggaucuccucaggg

SEQ ID NO: 1372776 - RNA, 19 nt, Artificial Sequence
  Description of Artificial Sequence: Synthetic oligonucleotide
acucgcuggaacaugaagg

SEQ ID NO: 1372777 - RNA, 19 nt, Artificial Sequence
  Description of Artificial Sequence: Synthetic oligonucleotide
agcagggcgucuucaaagc

SEQ ID NO: 1372778 - RNA, 19 nt, Artificial Sequence
  Description of Artificial Sequence: Synthetic oligonucleotide
ucaugcaccucacuauagc

SEQ ID NO: 1372779 - RNA, 19 nt, Artificial Sequence
  Description of Artificial Sequence: Synthetic oligonucleotide
agaugguuccgauuccggg

SEQ ID NO: 1372780 - RNA, 19 nt, Artificial Sequence
  Description of Artificial Sequence: Synthetic oligonucleotide
gauucgacggaucuccuca

SEQ ID NO: 1372781 - RNA, 19 nt, Artificial Sequence
  Description of Artificial Sequence: Synthetic oligonucleotide
ucuucaucgguaccaaguc

SEQ ID NO: 1372782 - RNA, 19 nt, Artificial Sequence
  Description of Artificial Sequence: Synthetic oligonucleotide
caggcuggaucaaaggagg

SEQ ID NO: 1372783 - RNA, 19 nt, Artificial Sequence
  Description of Artificial Sequence: Synthetic oligonucleotide
aguccuuucauggccuucc

SEQ ID NO: 1372784 - RNA, 19 nt, Artificial Sequence
  Description of Artificial Sequence: Synthetic oligonucleotide
ucacgagugcaucauccag

SEQ ID NO: 1372785 - RNA, 19 nt, Artificial Sequence
  Description of Artificial Sequence: Synthetic oligonucleotide
ucaaucaggucccugccaa

SEQ ID NO: 1372786 - RNA, 19 nt, Artificial Sequence
  Description of Artificial Sequence: Synthetic oligonucleotide
acuaauuauagaugauaau

SEQ ID NO: 1372787 - RNA, 19 nt, Artificial Sequence
  Description of Artificial Sequence: Synthetic oligonucleotide
caaggcuccuuccauauug

SEQ ID NO: 1372788 - RNA, 19 nt, Artificial Sequence
  Description of Artificial Sequence: Synthetic oligonucleotide
ugacuaauuauagaugaua

SEQ ID NO: 1372789 - RNA, 19 nt, Artificial Sequence
  Description of Artificial Sequence: Synthetic oligonucleotide
cuggaggcguuuuaauugg

SEQ ID NO: 1372790 - RNA, 19 nt, Artificial Sequence
  Description of Artificial Sequence: Synthetic oligonucleotide
cacgagugcaucauccagg

SEQ ID NO: 1372791 - RNA, 19 nt, Artificial Sequence
  Description of Artificial Sequence: Synthetic oligonucleotide
agacguuucggauuuaaua

SEQ ID NO: 1372792 - RNA, 19 nt, Artificial Sequence
  Description of Artificial Sequence: Synthetic oligonucleotide
agguuuaaggcaucaaaau

SEQ ID NO: 1372793 - RNA, 19 nt, Artificial Sequence
  Description of Artificial Sequence: Synthetic oligonucleotide
aguccugauuuccugacgu

SEQ ID NO: 1372794 - RNA, 19 nt, Artificial Sequence
  Description of Artificial Sequence: Synthetic oligonucleotide
uaugcaguccugauuuccu

SEQ ID NO: 1372795 - RNA, 19 nt, Artificial Sequence
  Description of Artificial Sequence: Synthetic oligonucleotide
ugacuucaagucaucaauc

SEQ ID NO: 1372796 - RNA, 19 nt, Artificial Sequence
  Description of Artificial Sequence: Synthetic oligonucleotide
uacucgcuggaacaugaag

SEQ ID NO: 1372797 - RNA, 19 nt, Artificial Sequence
  Description of Artificial Sequence: Synthetic oligonucleotide
cucauaagaacuucaaucu

SEQ ID NO: 1372798 - RNA, 19 nt, Artificial Sequence
  Description of Artificial Sequence: Synthetic oligonucleotide
acuuggagcacauuuuaau

SEQ ID NO: 1372799 - RNA, 19 nt, Artificial Sequence
  Description of Artificial Sequence: Synthetic oligonucleotide
gagagauccuuuuguauuc

SEQ ID NO: 1372800 - RNA, 19 nt, Artificial Sequence
  Description of Artificial Sequence: Synthetic oligonucleotide
auguuaauagcagugcaga

SEQ ID NO: 1372801 - RNA, 19 nt, Artificial Sequence
  Description of Artificial Sequence: Synthetic oligonucleotide
aacuggaggcguuuuaauu

SEQ ID NO: 1372802 - RNA, 19 nt, Artificial Sequence
  Description of Artificial Sequence: Synthetic oligonucleotide
gaugugucugagcagaugu

SEQ ID NO: 1372803 - RNA, 19 nt, Artificial Sequence
  Description of Artificial Sequence: Synthetic oligonucleotide
ucuggcaugaagagaugac

SEQ ID NO: 1372804 - RNA, 19 nt, Artificial Sequence
  Description of Artificial Sequence: Synthetic oligonucleotide
aacacaggcuggaucaaag

SEQ ID NO: 1372805 - RNA, 19 nt, Artificial Sequence
  Description of Artificial Sequence: Synthetic oligonucleotide
agaagcuccucuugcgcgg

SEQ ID NO: 1372806 - RNA, 19 nt, Artificial Sequence
  Description of Artificial Sequence: Synthetic oligonucleotide
ugguugauucgacggaucu

SEQ ID NO: 1372807 - RNA, 19 nt, Artificial Sequence
  Description of Artificial Sequence: Synthetic oligonucleotide
gaaguuugcccggaugucc

SEQ ID NO: 1372808 - RNA, 19 nt, Artificial Sequence
  Description of Artificial Sequence: Synthetic oligonucleotide
agggugucgucaucagugc

SEQ ID NO: 1372809 - RNA, 19 nt, Artificial Sequence
  Description of Artificial Sequence: Synthetic oligonucleotide
aggcguuuuaauuggaaau

SEQ ID NO: 1372810 - RNA, 19 nt, Artificial Sequence
  Description of Artificial Sequence: Synthetic oligonucleotide
aaggcuccuuccauauugc

SEQ ID NO: 1372811 - RNA, 19 nt, Artificial Sequence
  Description of Artificial Sequence: Synthetic oligonucleotide
gaugguuccgauuccggga

SEQ ID NO: 1372812 - RNA, 19 nt, Artificial Sequence
  Description of Artificial Sequence: Synthetic oligonucleotide
aacgucauacagcacggua

SEQ ID NO: 1372813 - RNA, 19 nt, Artificial Sequence
  Description of Artificial Sequence: Synthetic oligonucleotide
uuaagaagucucuguccug

SEQ ID NO: 1372814 - RNA, 19 nt, Artificial Sequence
  Description of Artificial Sequence: Synthetic oligonucleotide
uguuaauagcagugcagaa

SEQ ID NO: 1372815 - RNA, 19 nt, Artificial Sequence
  Description of Artificial Sequence: Synthetic oligonucleotide
uuaggaauuucaccucguc

SEQ ID NO: 1372816 - RNA, 19 nt, Artificial Sequence
  Description of Artificial Sequence: Synthetic oligonucleotide
cagaagcuccucuugcgcg

SEQ ID NO: 1372817 - RNA, 19 nt, Artificial Sequence
  Description of Artificial Sequence: Synthetic oligonucleotide
auucccuucaucccugcca

SEQ ID NO: 1372818 - RNA, 19 nt, Artificial Sequence
  Description of Artificial Sequence: Synthetic oligonucleotide
uucccguagagccucuuga

SEQ ID NO: 1372819 - RNA, 19 nt, Artificial Sequence
  Description of Artificial Sequence: Synthetic oligonucleotide
uagugcauucaguuucugc

SEQ ID NO: 1372820 - RNA, 19 nt, Artificial Sequence
  Description of Artificial Sequence: Synthetic oligonucleotide
guuaagaagucucuguccu

SEQ ID NO: 1372821 - RNA, 19 nt, Artificial Sequence
  Description of Artificial Sequence: Synthetic oligonucleotide
accaguacucgcuggaaca

SEQ ID NO: 1372822 - RNA, 19 nt, Artificial Sequence
  Description of Artificial Sequence: Synthetic oligonucleotide
ccuuuuguauucaucaaac

SEQ ID NO: 1372823 - RNA, 19 nt, Artificial Sequence
  Description of Artificial Sequence: Synthetic oligonucleotide
aaucaccugcucaaaguug

SEQ ID NO: 1372824 - RNA, 19 nt, Artificial Sequence
  Description of Artificial Sequence: Synthetic oligonucleotide
ucgcccuugaugaaagagu

SEQ ID NO: 1372825 - RNA, 19 nt, Artificial Sequence
  Description of Artificial Sequence: Synthetic oligonucleotide
guugccauggcuauagguc

SEQ ID NO: 1372826 - RNA, 19 nt, Artificial Sequence
  Description of Artificial Sequence: Synthetic oligonucleotide
guacaaagacuucccguag

SEQ ID NO: 1372827 - RNA, 19 nt, Artificial Sequence
  Description of Artificial Sequence: Synthetic oligonucleotide
gcuuaggaauuucaccucg

SEQ ID NO: 1372828 - RNA, 19 nt, Artificial Sequence
  Description of Artificial Sequence: Synthetic oligonucleotide
acuaucagcuaacacgaua

SEQ ID NO: 1372829 - RNA, 19 nt, Artificial Sequence
  Description of Artificial Sequence: Synthetic oligonucleotide
gguaccaaguccuuucaug

SEQ ID NO: 1372830 - RNA, 19 nt, Artificial Sequence
  Description of Artificial Sequence: Synthetic oligonucleotide
cuucaucgguaccaagucc

SEQ ID NO: 1372831 - RNA, 19 nt, Artificial Sequence
  Description of Artificial Sequence: Synthetic oligonucleotide
aacccaguguuaagaaguc

SEQ ID NO: 1372832 - RNA, 19 nt, Artificial Sequence
  Description of Artificial Sequence: Synthetic oligonucleotide
auuccgggaacagaggaug

SEQ ID NO: 1372833 - RNA, 19 nt, Artificial Sequence
  Description of Artificial Sequence: Synthetic oligonucleotide
ggaaauucuuaguaguaga

SEQ ID NO: 1372834 - RNA, 19 nt, Artificial Sequence
  Description of Artificial Sequence: Synthetic oligonucleotide
agcaaaauaugcaggcuug

SEQ ID NO: 1372835 - RNA, 19 nt, Artificial Sequence
  Description of Artificial Sequence: Synthetic oligonucleotide
uucaaucuacagcugugua

SEQ ID NO: 1372836 - RNA, 19 nt, Artificial Sequence
  Description of Artificial Sequence: Synthetic oligonucleotide
cuaacacgauagacaaagc

SEQ ID NO: 1372837 - RNA, 19 nt, Artificial Sequence
  Description of Artificial Sequence: Synthetic oligonucleotide
acaugaaggaugugucuga

SEQ ID NO: 1372838 - RNA, 19 nt, Artificial Sequence
  Description of Artificial Sequence: Synthetic oligonucleotide
acgucauacagcacgguag

SEQ ID NO: 1372839 - RNA, 19 nt, Artificial Sequence
  Description of Artificial Sequence: Synthetic oligonucleotide
cuaucaggcagccuucauc

SEQ ID NO: 1372840 - RNA, 19 nt, Artificial Sequence
  Description of Artificial Sequence: Synthetic oligonucleotide
uucacgagugcaucaucca

SEQ ID NO: 1372841 - RNA, 19 nt, Artificial Sequence
  Description of Artificial Sequence: Synthetic oligonucleotide
agcacgguaggugucauca

SEQ ID NO: 1372842 - RNA, 19 nt, Artificial Sequence
  Description of Artificial Sequence: Synthetic oligonucleotide
uaagucugguugauucgac

SEQ ID NO: 1372843 - RNA, 19 nt, Artificial Sequence
  Description of Artificial Sequence: Synthetic oligonucleotide
gaauucagucaccccagca

SEQ ID NO: 1372844 - RNA, 19 nt, Artificial Sequence
  Description of Artificial Sequence: Synthetic oligonucleotide
cuccauuuaggucuuaaaa

SEQ ID NO: 1372845 - RNA, 19 nt, Artificial Sequence
  Description of Artificial Sequence: Synthetic oligonucleotide
uuugcccggauguccagca

SEQ ID NO: 1372846 - RNA, 19 nt, Artificial Sequence
  Description of Artificial Sequence: Synthetic oligonucleotide
aacuggauggaaauucuua

SEQ ID NO: 1372847 - RNA, 19 nt, Artificial Sequence
  Description of Artificial Sequence: Synthetic oligonucleotide
uucaaagcuaccagacguu

SEQ ID NO: 1372848 - RNA, 19 nt, Artificial Sequence
  Description of Artificial Sequence: Synthetic oligonucleotide
ugggcguccugcuucacga

SEQ ID NO: 1372849 - RNA, 19 nt, Artificial Sequence
  Description of Artificial Sequence: Synthetic oligonucleotide
gaguaggaccuuccuguag

SEQ ID NO: 1372850 - RNA, 19 nt, Artificial Sequence
  Description of Artificial Sequence: Synthetic oligonucleotide
acgagugcaucauccaggu

SEQ ID NO: 1372851 - RNA, 19 nt, Artificial Sequence
  Description of Artificial Sequence: Synthetic oligonucleotide
gaggcguuuuaauuggaaa

SEQ ID NO: 1372852 - RNA, 19 nt, Artificial Sequence
  Description of Artificial Sequence: Synthetic oligonucleotide
cagcagggcgucuucaaag

SEQ ID NO: 1372853 - RNA, 19 nt, Artificial Sequence
  Description of Artificial Sequence: Synthetic oligonucleotide
auaggucagguugagaauu

SEQ ID NO: 1372854 - RNA, 19 nt, Artificial Sequence
  Description of Artificial Sequence: Synthetic oligonucleotide
agggcgucuucaaagcuac

SEQ ID NO: 1372855 - RNA, 19 nt, Artificial Sequence
  Description of Artificial Sequence: Synthetic oligonucleotide
auugaauccugaagcagcu

SEQ ID NO: 1372856 - RNA, 19 nt, Artificial Sequence
  Description of Artificial Sequence: Synthetic oligonucleotide
acuauagccagcagggcgu

SEQ ID NO: 1372857 - RNA, 19 nt, Artificial Sequence
  Description of Artificial Sequence: Synthetic oligonucleotide
uaccagacguuucggauuu

SEQ ID NO: 1372858 - RNA, 19 nt, Artificial Sequence
  Description of Artificial Sequence: Synthetic oligonucleotide
ugauuuccugacguugggc

SEQ ID NO: 1372859 - RNA, 19 nt, Artificial Sequence
  Description of Artificial Sequence: Synthetic oligonucleotide
auauugcugcugguaaguc

SEQ ID NO: 1372860 - RNA, 19 nt, Artificial Sequence
  Description of Artificial Sequence: Synthetic oligonucleotide
cagaugguuccgauuccgg

SEQ ID NO: 1372861 - RNA, 19 nt, Artificial Sequence
  Description of Artificial Sequence: Synthetic oligonucleotide
gaguacaaagacuucccgu

SEQ ID NO: 1372862 - RNA, 19 nt, Artificial Sequence
  Description of Artificial Sequence: Synthetic oligonucleotide
aaucucugcucgggacacc

SEQ ID NO: 1372863 - RNA, 19 nt, Artificial Sequence
  Description of Artificial Sequence: Synthetic oligonucleotide
aagcuaccagacguuucgg

SEQ ID NO: 1372864 - RNA, 19 nt, Artificial Sequence
  Description of Artificial Sequence: Synthetic oligonucleotide
guagggucuggcaugaaga

SEQ ID NO: 1372865 - RNA, 19 nt, Artificial Sequence
  Description of Artificial Sequence: Synthetic oligonucleotide
acuucaaucuacagcugug

SEQ ID NO: 1372866 - RNA, 19 nt, Artificial Sequence
  Description of Artificial Sequence: Synthetic oligonucleotide
cucgcuggaacaugaagga

SEQ ID NO: 1372867 - RNA, 19 nt, Artificial Sequence
  Description of Artificial Sequence: Synthetic oligonucleotide
cuucauagcccugcgcagc

SEQ ID NO: 1372868 - RNA, 19 nt, Artificial Sequence
  Description of Artificial Sequence: Synthetic oligonucleotide
uuccgggaacagaggaugc

SEQ ID NO: 1372869 - RNA, 19 nt, Artificial Sequence
  Description of Artificial Sequence: Synthetic oligonucleotide
guugcgguaggccaggacu

SEQ ID NO: 1372870 - RNA, 19 nt, Artificial Sequence
  Description of Artificial Sequence: Synthetic oligonucleotide
agaagucucuguccugggu

SEQ ID NO: 1372871 - RNA, 19 nt, Artificial Sequence
  Description of Artificial Sequence: Synthetic oligonucleotide
gguagggucuggcaugaag

SEQ ID NO: 1372872 - RNA, 19 nt, Artificial Sequence
  Description of Artificial Sequence: Synthetic oligonucleotide
aagacuucccguagagccu

SEQ ID NO: 1372873 - RNA, 19 nt, Artificial Sequence
  Description of Artificial Sequence: Synthetic oligonucleotide
auucgacggaucuccucag

SEQ ID NO: 1372874 - RNA, 19 nt, Artificial Sequence
  Description of Artificial Sequence: Synthetic oligonucleotide
aguacucgcuggaacauga

SEQ ID NO: 1372875 - RNA, 19 nt, Artificial Sequence
  Description of Artificial Sequence: Synthetic oligonucleotide
uugcgguaggccaggacuc

SEQ ID NO: 1372876 - RNA, 19 nt, Artificial Sequence
  Description of Artificial Sequence: Synthetic oligonucleotide
cauccagguaauucccuuc

SEQ ID NO: 1372877 - RNA, 19 nt, Artificial Sequence
  Description of Artificial Sequence: Synthetic oligonucleotide
gacguugggcaguguugcg

SEQ ID NO: 1372878 - RNA, 19 nt, Artificial Sequence
  Description of Artificial Sequence: Synthetic oligonucleotide
guaauucccuucaucccug

SEQ ID NO: 1372879 - RNA, 19 nt, Artificial Sequence
  Description of Artificial Sequence: Synthetic oligonucleotide
gucgcccuugaugaaagag

SEQ ID NO: 1372880 - RNA, 19 nt, Artificial Sequence
  Description of Artificial Sequence: Synthetic oligonucleotide
guaagucugguugauucga

SEQ ID NO: 1372881 - RNA, 19 nt, Artificial Sequence
  Description of Artificial Sequence: Synthetic oligonucleotide
acguugggcaguguugcgg

SEQ ID NO: 1372882 - RNA, 19 nt, Artificial Sequence
  Description of Artificial Sequence: Synthetic oligonucleotide
guagaugguagggucuggc

SEQ ID NO: 1372883 - RNA, 19 nt, Artificial Sequence
  Description of Artificial Sequence: Synthetic oligonucleotide
gaacaugaaggaugugucu

SEQ ID NO: 1372884 - RNA, 19 nt, Artificial Sequence
  Description of Artificial Sequence: Synthetic oligonucleotide
augguuccgauuccgggaa

SEQ ID NO: 1372885 - RNA, 19 nt, Artificial Sequence
  Description of Artificial Sequence: Synthetic oligonucleotide
guaggccaggacuccaaug

SEQ ID NO: 1372886 - RNA, 19 nt, Artificial Sequence
  Description of Artificial Sequence: Synthetic oligonucleotide
agggguacgagaagccagg

SEQ ID NO: 1372887 - RNA, 19 nt, Artificial Sequence
  Description of Artificial Sequence: Synthetic oligonucleotide
caguguugcgguaggccag

SEQ ID NO: 1372888 - RNA, 19 nt, Artificial Sequence
  Description of Artificial Sequence: Synthetic oligonucleotide
aguguugcgguaggccagg

SEQ ID NO: 1372889 - RNA, 19 nt, Artificial Sequence
  Description of Artificial Sequence: Synthetic oligonucleotide
ugauucgacggaucuccuc

SEQ ID NO: 1372890 - RNA, 19 nt, Artificial Sequence
  Description of Artificial Sequence: Synthetic oligonucleotide
ucgggacaccaucacucug

SEQ ID NO: 1372891 - RNA, 19 nt, Artificial Sequence
  Description of Artificial Sequence: Synthetic oligonucleotide
agcuaccagacguuucgga

SEQ ID NO: 1372892 - RNA, 19 nt, Artificial Sequence
  Description of Artificial Sequence: Synthetic oligonucleotide
uugcucuuguaugcagucc

SEQ ID NO: 1372893 - RNA, 19 nt, Artificial Sequence
  Description of Artificial Sequence: Synthetic oligonucleotide
ugcucgggacaccaucacu

SEQ ID NO: 1372894 - RNA, 19 nt, Artificial Sequence
  Description of Artificial Sequence: Synthetic oligonucleotide
ucccugccaauguugcucu

SEQ ID NO: 1372895 - RNA, 19 nt, Artificial Sequence
  Description of Artificial Sequence: Synthetic oligonucleotide
uugauucgacggaucuccu

SEQ ID NO: 1372896 - RNA, 19 nt, Artificial Sequence
  Description of Artificial Sequence: Synthetic oligonucleotide
aguagaugguagggucugg

SEQ ID NO: 1372897 - RNA, 19 nt, Artificial Sequence
  Description of Artificial Sequence: Synthetic oligonucleotide
ucacuauagccagcagggc

SEQ ID NO: 1372898 - RNA, 19 nt, Artificial Sequence
  Description of Artificial Sequence: Synthetic oligonucleotide
cugacuucaagucaucaau

SEQ ID NO: 1372899 - RNA, 19 nt, Artificial Sequence
  Description of Artificial Sequence: Synthetic oligonucleotide
gacggaucuccucaggggu

SEQ ID NO: 1372900 - RNA, 19 nt, Artificial Sequence
  Description of Artificial Sequence: Synthetic oligonucleotide
caguguuaagaagucucug

SEQ ID NO: 1372901 - RNA, 19 nt, Artificial Sequence
  Description of Artificial Sequence: Synthetic oligonucleotide
gcgucuucaaagcuaccag

SEQ ID NO: 1372902 - RNA, 19 nt, Artificial Sequence
  Description of Artificial Sequence: Synthetic oligonucleotide
gcaugaagagaugacuggc

SEQ ID NO: 1372903 - RNA, 19 nt, Artificial Sequence
  Description of Artificial Sequence: Synthetic oligonucleotide
uggaggcguuuuaauugga

SEQ ID NO: 1372904 - RNA, 19 nt, Artificial Sequence
  Description of Artificial Sequence: Synthetic oligonucleotide
ugaguaggaccuuccugua

SEQ ID NO: 1372905 - RNA, 19 nt, Artificial Sequence
  Description of Artificial Sequence: Synthetic oligonucleotide
auggaaauucuuaguagua

SEQ ID NO: 1372906 - RNA, 19 nt, Artificial Sequence
  Description of Artificial Sequence: Synthetic oligonucleotide
auaaucuguuaaagacuug

SEQ ID NO: 1372907 - RNA, 19 nt, Artificial Sequence
  Description of Artificial Sequence: Synthetic oligonucleotide
aguuugcccggauguccag

SEQ ID NO: 1372908 - RNA, 19 nt, Artificial Sequence
  Description of Artificial Sequence: Synthetic oligonucleotide
uuagugcauucaguuucug

SEQ ID NO: 1372909 - RNA, 19 nt, Artificial Sequence
  Description of Artificial Sequence: Synthetic oligonucleotide
ucaccugcucaaaguugcu

SEQ ID NO: 1372910 - RNA, 19 nt, Artificial Sequence
  Description of Artificial Sequence: Synthetic oligonucleotide
cugggcguccugcuucacg

SEQ ID NO: 1372911 - RNA, 19 nt, Artificial Sequence
  Description of Artificial Sequence: Synthetic oligonucleotide
acacaugcagcagaugguu

SEQ ID NO: 1372912 - RNA, 19 nt, Artificial Sequence
  Description of Artificial Sequence: Synthetic oligonucleotide
ucagugccuaggcccuuca

SEQ ID NO: 1372913 - RNA, 19 nt, Artificial Sequence
  Description of Artificial Sequence: Synthetic oligonucleotide
agggacaccaguacucgcu

SEQ ID NO: 1372914 - RNA, 19 nt, Artificial Sequence
  Description of Artificial Sequence: Synthetic oligonucleotide
gagcagauguccucuucaa

SEQ ID NO: 1372915 - RNA, 19 nt, Artificial Sequence
  Description of Artificial Sequence: Synthetic oligonucleotide
gccuuucagcaaaauaugc

SEQ ID NO: 1372916 - RNA, 19 nt, Artificial Sequence
  Description of Artificial Sequence: Synthetic oligonucleotide
aggacuccaaugauggcau

SEQ ID NO: 1372917 - RNA, 19 nt, Artificial Sequence
  Description of Artificial Sequence: Synthetic oligonucleotide
agugucgcccuugaugaaa

SEQ ID NO: 1372918 - RNA, 19 nt, Artificial Sequence
  Description of Artificial Sequence: Synthetic oligonucleotide
uaaagccuuucagcaaaau

SEQ ID NO: 1372919 - RNA, 19 nt, Artificial Sequence
  Description of Artificial Sequence: Synthetic oligonucleotide
augacuaauuauagaugau

SEQ ID NO: 1372920 - RNA, 19 nt, Artificial Sequence
  Description of Artificial Sequence: Synthetic oligonucleotide
ccugcgcagcuccugaacg

SEQ ID NO: 1372921 - RNA, 19 nt, Artificial Sequence
  Description of Artificial Sequence: Synthetic oligonucleotide
guuccgauuccgggaacag

SEQ ID NO: 1372922 - RNA, 19 nt, Artificial Sequence
  Description of Artificial Sequence: Synthetic oligonucleotide
gcaguguugcgguaggcca

SEQ ID NO: 1372923 - RNA, 19 nt, Artificial Sequence
  Description of Artificial Sequence: Synthetic oligonucleotide
ggucagguugagaauucag

SEQ ID NO: 1372924 - RNA, 19 nt, Artificial Sequence
  Description of Artificial Sequence: Synthetic oligonucleotide
cgucauacagcacgguagg

SEQ ID NO: 1372925 - RNA, 19 nt, Artificial Sequence
  Description of Artificial Sequence: Synthetic oligonucleotide
cuguccuguaaaauucuua

SEQ ID NO: 1372926 - RNA, 19 nt, Artificial Sequence
  Description of Artificial Sequence: Synthetic oligonucleotide
agugcaucauccagguaau

SEQ ID NO: 1372927 - RNA, 19 nt, Artificial Sequence
  Description of Artificial Sequence: Synthetic oligonucleotide
cuguguaaaauaggaaacu

SEQ ID NO: 1372928 - RNA, 19 nt, Artificial Sequence
  Description of Artificial Sequence: Synthetic oligonucleotide
guaggaccuuccuguaguc

SEQ ID NO: 1372929 - RNA, 19 nt, Artificial Sequence
  Description of Artificial Sequence: Synthetic oligonucleotide
gucagguugagaauucagu

SEQ ID NO: 1372930 - RNA, 19 nt, Artificial Sequence
  Description of Artificial Sequence: Synthetic oligonucleotide
aagugucgcccuugaugaa

SEQ ID NO: 1372931 - RNA, 19 nt, Artificial Sequence
  Description of Artificial Sequence: Synthetic oligonucleotide
uccgggaacagaggaugcu

SEQ ID NO: 1372932 - RNA, 19 nt, Artificial Sequence
  Description of Artificial Sequence: Synthetic oligonucleotide
cguuucggauuuaauacuc

SEQ ID NO: 1372933 - RNA, 19 nt, Artificial Sequence
  Description of Artificial Sequence: Synthetic oligonucleotide
ugccuaggcccuucaugga

SEQ ID NO: 1372934 - RNA, 19 nt, Artificial Sequence
  Description of Artificial Sequence: Synthetic oligonucleotide
gacuuggagcacauuuuaa

SEQ ID NO: 1372935 - RNA, 19 nt, Artificial Sequence
  Description of Artificial Sequence: Synthetic oligonucleotide
agcuuugaaagaacagguu

SEQ ID NO: 1372936 - RNA, 19 nt, Artificial Sequence
  Description of Artificial Sequence: Synthetic oligonucleotide
ugcgguaggccaggacucc

SEQ ID NO: 1372937 - RNA, 19 nt, Artificial Sequence
  Description of Artificial Sequence: Synthetic oligonucleotide
ucaaggcuccuuccauauu

SEQ ID NO: 1372938 - RNA, 19 nt, Artificial Sequence
  Description of Artificial Sequence: Synthetic oligonucleotide
gacuccaaugauggcaucu

SEQ ID NO: 1372939 - RNA, 19 nt, Artificial Sequence
  Description of Artificial Sequence: Synthetic oligonucleotide
augguagggucuggcauga

SEQ ID NO: 1372940 - RNA, 19 nt, Artificial Sequence
  Description of Artificial Sequence: Synthetic oligonucleotide
cuucaaggcuccuuccaua

SEQ ID NO: 1372941 - RNA, 19 nt, Artificial Sequence
  Description of Artificial Sequence: Synthetic oligonucleotide
cagcuguguaaaauaggaa

SEQ ID NO: 1372942 - RNA, 19 nt, Artificial Sequence
  Description of Artificial Sequence: Synthetic oligonucleotide
ggcaguguugcgguaggcc

SEQ ID NO: 1372943 - RNA, 19 nt, Artificial Sequence
  Description of Artificial Sequence: Synthetic oligonucleotide
ggaucucuaucaggcagcc

SEQ ID NO: 1372944 - RNA, 19 nt, Artificial Sequence
  Description of Artificial Sequence: Synthetic oligonucleotide
ccuucauagcccugcgcag

SEQ ID NO: 1372945 - RNA, 19 nt, Artificial Sequence
  Description of Artificial Sequence: Synthetic oligonucleotide
cauauugcugcugguaagu

SEQ ID NO: 1372946 - RNA, 19 nt, Artificial Sequence
  Description of Artificial Sequence: Synthetic oligonucleotide
ggcguuuuaauuggaaaua

SEQ ID NO: 1372947 - RNA, 19 nt, Artificial Sequence
  Description of Artificial Sequence: Synthetic oligonucleotide
gggacaccaguacucgcug

SEQ ID NO: 1372948 - RNA, 19 nt, Artificial Sequence
  Description of Artificial Sequence: Synthetic oligonucleotide
aggucagguugagaauuca

SEQ ID NO: 1372949 - RNA, 19 nt, Artificial Sequence
  Description of Artificial Sequence: Synthetic oligonucleotide
auaaagccuuucagcaaaa

SEQ ID NO: 1372950 - RNA, 19 nt, Artificial Sequence
  Description of Artificial Sequence: Synthetic oligonucleotide
gcucgggacaccaucacuc

SEQ ID NO: 1372951 - RNA, 19 nt, Artificial Sequence
  Description of Artificial Sequence: Synthetic oligonucleotide
cagcaaaauaugcaggcuu

SEQ ID NO: 1372952 - RNA, 19 nt, Artificial Sequence
  Description of Artificial Sequence: Synthetic oligonucleotide
gaucuccucagggguacga

SEQ ID NO: 1372953 - RNA, 19 nt, Artificial Sequence
  Description of Artificial Sequence: Synthetic oligonucleotide
acccaguguuaagaagucu

SEQ ID NO: 1372954 - RNA, 19 nt, Artificial Sequence
  Description of Artificial Sequence: Synthetic oligonucleotide
gccaauguugcucuuguau

SEQ ID NO: 1372955 - RNA, 19 nt, Artificial Sequence
  Description of Artificial Sequence: Synthetic oligonucleotide
caccucacuauagccagca

SEQ ID NO: 1372956 - RNA, 19 nt, Artificial Sequence
  Description of Artificial Sequence: Synthetic oligonucleotide
ugguuccgauuccgggaac

SEQ ID NO: 1372957 - RNA, 19 nt, Artificial Sequence
  Description of Artificial Sequence: Synthetic oligonucleotide
cucugaugagggugucguc

SEQ ID NO: 1372958 - RNA, 19 nt, Artificial Sequence
  Description of Artificial Sequence: Synthetic oligonucleotide
gggugucgucaucagugcc

SEQ ID NO: 1372959 - RNA, 19 nt, Artificial Sequence
  Description of Artificial Sequence: Synthetic oligonucleotide
caguacucgcuggaacaug

SEQ ID NO: 1372960 - RNA, 19 nt, Artificial Sequence
  Description of Artificial Sequence: Synthetic oligonucleotide
cacgauagacaaagccaaa

SEQ ID NO: 1372961 - RNA, 19 nt, Artificial Sequence
  Description of Artificial Sequence: Synthetic oligonucleotide
aggugucaucauucccaca

SEQ ID NO: 1372962 - RNA, 19 nt, Artificial Sequence
  Description of Artificial Sequence: Synthetic oligonucleotide
cagggcgucuucaaagcua

SEQ ID NO: 1372963 - RNA, 19 nt, Artificial Sequence
  Description of Artificial Sequence: Synthetic oligonucleotide
gcguuuuaauuggaaauaa

SEQ ID NO: 1372964 - RNA, 19 nt, Artificial Sequence
  Description of Artificial Sequence: Synthetic oligonucleotide
aggaggcucauaagaacuu

SEQ ID NO: 1372965 - RNA, 19 nt, Artificial Sequence
  Description of Artificial Sequence: Synthetic oligonucleotide
ggaggcucauaagaacuuc

SEQ ID NO: 1372966 - RNA, 19 nt, Artificial Sequence
  Description of Artificial Sequence: Synthetic oligonucleotide
cuaccagacguuucggauu

SEQ ID NO: 1372967 - RNA, 19 nt, Artificial Sequence
  Description of Artificial Sequence: Synthetic oligonucleotide
ccuuugguugccauggcua

SEQ ID NO: 1372968 - RNA, 19 nt, Artificial Sequence
  Description of Artificial Sequence: Synthetic oligonucleotide
gauuccgggaacagaggau

SEQ ID NO: 1372969 - RNA, 19 nt, Artificial Sequence
  Description of Artificial Sequence: Synthetic oligonucleotide
gguugauucgacggaucuc

SEQ ID NO: 1372970 - RNA, 19 nt, Artificial Sequence
  Description of Artificial Sequence: Synthetic oligonucleotide
acaccaguacucgcuggaa

SEQ ID NO: 1372971 - RNA, 19 nt, Artificial Sequence
  Description of Artificial Sequence: Synthetic oligonucleotide
gcuaccagacguuucggau

SEQ ID NO: 1372972 - RNA, 19 nt, Artificial Sequence
  Description of Artificial Sequence: Synthetic oligonucleotide
gguuccgauuccgggaaca

SEQ ID NO: 1372973 - RNA, 19 nt, Artificial Sequence
  Description of Artificial Sequence: Synthetic oligonucleotide
aggaggcaacuggaggcgu

SEQ ID NO: 1372974 - RNA, 19 nt, Artificial Sequence
  Description of Artificial Sequence: Synthetic oligonucleotide
gcaacuggaggcguuuuaa

SEQ ID NO: 1372975 - RNA, 19 nt, Artificial Sequence
  Description of Artificial Sequence: Synthetic oligonucleotide
cucuugaaguuugcccgga

SEQ ID NO: 1372976 - RNA, 19 nt, Artificial Sequence
  Description of Artificial Sequence: Synthetic oligonucleotide
gcuucacgagugcaucauc

SEQ ID NO: 1372977 - RNA, 19 nt, Artificial Sequence
  Description of Artificial Sequence: Synthetic oligonucleotide
ccguagagccucuugaagu

SEQ ID NO: 1372978 - RNA, 19 nt, Artificial Sequence
  Description of Artificial Sequence: Synthetic oligonucleotide
agcuaacacgauagacaaa

SEQ ID NO: 1372979 - RNA, 19 nt, Artificial Sequence
  Description of Artificial Sequence: Synthetic oligonucleotide
ggugucgucaucagugccu

SEQ ID NO: 1372980 - RNA, 19 nt, Artificial Sequence
  Description of Artificial Sequence: Synthetic oligonucleotide
cucgggacaccaucacucu

SEQ ID NO: 1372981 - RNA, 19 nt, Artificial Sequence
  Description of Artificial Sequence: Synthetic oligonucleotide
ccugccaauguugcucuug

SEQ ID NO: 1372982 - RNA, 19 nt, Artificial Sequence
  Description of Artificial Sequence: Synthetic oligonucleotide
ggaggcguuuuaauuggaa

SEQ ID NO: 1372983 - RNA, 19 nt, Artificial Sequence
  Description of Artificial Sequence: Synthetic oligonucleotide
gugucgucaucagugccua

SEQ ID NO: 1372984 - RNA, 19 nt, Artificial Sequence
  Description of Artificial Sequence: Synthetic oligonucleotide
aggaugugucugagcagau

SEQ ID NO: 1372985 - RNA, 19 nt, Artificial Sequence
  Description of Artificial Sequence: Synthetic oligonucleotide
gccacccgcugccagggac

SEQ ID NO: 1372986 - RNA, 19 nt, Artificial Sequence
  Description of Artificial Sequence: Synthetic oligonucleotide
ggaucuccucagggguacg

SEQ ID NO: 1372987 - RNA, 19 nt, Artificial Sequence
  Description of Artificial Sequence: Synthetic oligonucleotide
gcuauaggucagguugaga

SEQ ID NO: 1372988 - RNA, 19 nt, Artificial Sequence
  Description of Artificial Sequence: Synthetic oligonucleotide
gaacgucauacagcacggu

SEQ ID NO: 1372989 - RNA, 19 nt, Artificial Sequence
  Description of Artificial Sequence: Synthetic oligonucleotide
cagacguuucggauuuaau

SEQ ID NO: 1372990 - RNA, 19 nt, Artificial Sequence
  Description of Artificial Sequence: Synthetic oligonucleotide
acggaucuccucaggggua

SEQ ID NO: 1372991 - RNA, 19 nt, Artificial Sequence
  Description of Artificial Sequence: Synthetic oligonucleotide
gggcguccugcuucacgag

SEQ ID NO: 1372992 - RNA, 19 nt, Artificial Sequence
  Description of Artificial Sequence: Synthetic oligonucleotide
ugccacccgcugccaggga

SEQ ID NO: 1372993 - RNA, 19 nt, Artificial Sequence
  Description of Artificial Sequence: Synthetic oligonucleotide
gcaaaauaugcaggcuugu

SEQ ID NO: 1372994 - RNA, 19 nt, Artificial Sequence
  Description of Artificial Sequence: Synthetic oligonucleotide
cacccgcugccagggacac

SEQ ID NO: 1372995 - RNA, 19 nt, Artificial Sequence
  Description of Artificial Sequence: Synthetic oligonucleotide
ggcaacuggaggcguuuua

SEQ ID NO: 1372996 - RNA, 19 nt, Artificial Sequence
  Description of Artificial Sequence: Synthetic oligonucleotide
aggcaacuggaggcguuuu

SEQ ID NO: 1372997 - RNA, 19 nt, Artificial Sequence
  Description of Artificial Sequence: Synthetic oligonucleotide
guccugauuuccugacguu

SEQ ID NO: 1372998 - RNA, 19 nt, Artificial Sequence
  Description of Artificial Sequence: Synthetic oligonucleotide
guagagccucuugaaguuu

SEQ ID NO: 1372999 - RNA, 19 nt, Artificial Sequence
  Description of Artificial Sequence: Synthetic oligonucleotide
ugguagggucuggcaugaa

SEQ ID NO: 1373000 - RNA, 19 nt, Artificial Sequence
  Description of Artificial Sequence: Synthetic oligonucleotide
gggguacgagaagccagga

SEQ ID NO: 1373001 - RNA, 19 nt, Artificial Sequence
  Description of Artificial Sequence: Synthetic oligonucleotide
ccagacguuucggauuuaa

SEQ ID NO: 1373002 - RNA, 19 nt, Artificial Sequence
  Description of Artificial Sequence: Synthetic oligonucleotide
ccaaaaggauuuagugcau

SEQ ID NO: 1373003 - RNA, 19 nt, Artificial Sequence
  Description of Artificial Sequence: Synthetic oligonucleotide
ccacccgcugccagggaca

SEQ ID NO: 1373004 - RNA, 19 nt, Artificial Sequence
  Description of Artificial Sequence: Synthetic oligonucleotide
ggucccugccaauguugcu

SEQ ID NO: 1373005 - RNA, 19 nt, Artificial Sequence
  Description of Artificial Sequence: Synthetic oligonucleotide
guguugcgguaggccagga

SEQ ID NO: 1373006 - RNA, 19 nt, Artificial Sequence
  Description of Artificial Sequence: Synthetic oligonucleotide
ccugacguugggcaguguu

SEQ ID NO: 1373007 - RNA, 19 nt, Artificial Sequence
  Description of Artificial Sequence: Synthetic oligonucleotide
gggcgucuucaaagcuacc

SEQ ID NO: 1373008 - RNA, 19 nt, Artificial Sequence
  Description of Artificial Sequence: Synthetic oligonucleotide
accagacguuucggauuua

SEQ ID NO: 1373009 - RNA, 19 nt, Artificial Sequence
  Description of Artificial Sequence: Synthetic oligonucleotide
gcgguaggccaggacucca

SEQ ID NO: 1373010 - RNA, 19 nt, Artificial Sequence
  Description of Artificial Sequence: Synthetic oligonucleotide
ccaaagaaaggaggcucau

SEQ ID NO: 1373011 - RNA, 19 nt, Artificial Sequence
  Description of Artificial Sequence: Synthetic oligonucleotide
ccaguacucgcuggaacau

SEQ ID NO: 1373012 - RNA, 19 nt, Artificial Sequence
  Description of Artificial Sequence: Synthetic oligonucleotide
ccugggcguccugcuucac

SEQ ID NO: 1373013 - RNA, 19 nt, Artificial Sequence
  Description of Artificial Sequence: Synthetic oligonucleotide
cgagugcaucauccaggua

SEQ ID NO: 1373014 - RNA, 19 nt, Artificial Sequence
  Description of Artificial Sequence: Synthetic oligonucleotide
cgguaccaaguccuuucau

SEQ ID NO: 1373015 - RNA, 19 nt, Artificial Sequence
  Description of Artificial Sequence: Synthetic oligonucleotide
ucugcuucuauucagaggg

SEQ ID NO: 1373016 - RNA, 19 nt, Artificial Sequence
  Description of Artificial Sequence: Synthetic oligonucleotide
accauuacaguucacaucc

SEQ ID NO: 1373017 - RNA, 19 nt, Artificial Sequence
  Description of Artificial Sequence: Synthetic oligonucleotide
uaauuuaucauauauacau

SEQ ID NO: 1373018 - RNA, 19 nt, Artificial Sequence
  Description of Artificial Sequence: Synthetic oligonucleotide
aaguccaacauuucuguac

SEQ ID NO: 1373019 - RNA, 19 nt, Artificial Sequence
  Description of Artificial Sequence: Synthetic oligonucleotide
uacagaguauagcaaaugg

SEQ ID NO: 1373020 - RNA, 19 nt, Artificial Sequence
  Description of Artificial Sequence: Synthetic oligonucleotide
uuugguuuguggaaugugg

SEQ ID NO: 1373021 - RNA, 19 nt, Artificial Sequence
  Description of Artificial Sequence: Synthetic oligonucleotide
ucuuacuuccauaaagucc

SEQ ID NO: 1373022 - RNA, 19 nt, Artificial Sequence
  Description of Artificial Sequence: Synthetic oligonucleotide
ugacauguacacaagacca

SEQ ID NO: 1373023 - RNA, 19 nt, Artificial Sequence
  Description of Artificial Sequence: Synthetic oligonucleotide
aaaugaugaaucuucagua

SEQ ID NO: 1373024 - RNA, 19 nt, Artificial Sequence
  Description of Artificial Sequence: Synthetic oligonucleotide
aaaccugauaucaagauga

SEQ ID NO: 1373025 - RNA, 19 nt, Artificial Sequence
  Description of Artificial Sequence: Synthetic oligonucleotide
uucuuucauaaauaugugg

SEQ ID NO: 1373026 - RNA, 19 nt, Artificial Sequence
  Description of Artificial Sequence: Synthetic oligonucleotide
cagaguauagcaaauggcc

SEQ ID NO: 1373027 - RNA, 19 nt, Artificial Sequence
  Description of Artificial Sequence: Synthetic oligonucleotide
ugaagaguagaacacugag

SEQ ID NO: 1373028 - RNA, 19 nt, Artificial Sequence
  Description of Artificial Sequence: Synthetic oligonucleotide
acuauuggagcuuuggcag

SEQ ID NO: 1373029 - RNA, 19 nt, Artificial Sequence
  Description of Artificial Sequence: Synthetic oligonucleotide
ucuagcucggcauagguca

SEQ ID NO: 1373030 - RNA, 19 nt, Artificial Sequence
  Description of Artificial Sequence: Synthetic oligonucleotide
auguaaauuacauagccaa

SEQ ID NO: 1373031 - RNA, 19 nt, Artificial Sequence
  Description of Artificial Sequence: Synthetic oligonucleotide
aauaaugucuugcucugga

SEQ ID NO: 1373032 - RNA, 19 nt, Artificial Sequence
  Description of Artificial Sequence: Synthetic oligonucleotide
uuucauaaauaugugggag

SEQ ID NO: 1373033 - RNA, 19 nt, Artificial Sequence
  Description of Artificial Sequence: Synthetic oligonucleotide
uguauaguacuccccgacg

SEQ ID NO: 1373034 - RNA, 19 nt, Artificial Sequence
  Description of Artificial Sequence: Synthetic oligonucleotide
aggagaguggcauuuuccc

SEQ ID NO: 1373035 - RNA, 19 nt, Artificial Sequence
  Description of Artificial Sequence: Synthetic oligonucleotide
agggaaaucacucucauuu

SEQ ID NO: 1373036 - RNA, 19 nt, Artificial Sequence
  Description of Artificial Sequence: Synthetic oligonucleotide
acggcauacauauagagau

SEQ ID NO: 1373037 - RNA, 19 nt, Artificial Sequence
  Description of Artificial Sequence: Synthetic oligonucleotide
aguagaacacugaggaucc

SEQ ID NO: 1373038 - RNA, 19 nt, Artificial Sequence
  Description of Artificial Sequence: Synthetic oligonucleotide
ugaugaaucuucaguagcu

SEQ ID NO: 1373039 - RNA, 19 nt, Artificial Sequence
  Description of Artificial Sequence: Synthetic oligonucleotide
aaugucuugcucuggauuu

SEQ ID NO: 1373040 - RNA, 19 nt, Artificial Sequence
  Description of Artificial Sequence: Synthetic oligonucleotide
uuucuuucauaaauaugug

SEQ ID NO: 1373041 - RNA, 19 nt, Artificial Sequence
  Description of Artificial Sequence: Synthetic oligonucleotide
cauauagagaucuucaaaa

SEQ ID NO: 1373042 - RNA, 19 nt, Artificial Sequence
  Description of Artificial Sequence: Synthetic oligonucleotide
auaaauaugugggagcuca

SEQ ID NO: 1373043 - RNA, 19 nt, Artificial Sequence
  Description of Artificial Sequence: Synthetic oligonucleotide
acagaguauagcaaauggc

SEQ ID NO: 1373044 - RNA, 19 nt, Artificial Sequence
  Description of Artificial Sequence: Synthetic oligonucleotide
ucagaggggacagugagag

SEQ ID NO: 1373045 - RNA, 19 nt, Artificial Sequence
  Description of Artificial Sequence: Synthetic oligonucleotide
aauaggaccuuucuuucau

SEQ ID NO: 1373046 - RNA, 19 nt, Artificial Sequence
  Description of Artificial Sequence: Synthetic oligonucleotide
ugcagagugaaucuuacuu

SEQ ID NO: 1373047 - RNA, 19 nt, Artificial Sequence
  Description of Artificial Sequence: Synthetic oligonucleotide
accauuaaggccuccuggg

SEQ ID NO: 1373048 - RNA, 19 nt, Artificial Sequence
  Description of Artificial Sequence: Synthetic oligonucleotide
cugacauguacacaagacc

SEQ ID NO: 1373049 - RNA, 19 nt, Artificial Sequence
  Description of Artificial Sequence: Synthetic oligonucleotide
uguacacaagaccauuaca

SEQ ID NO: 1373050 - RNA, 19 nt, Artificial Sequence
  Description of Artificial Sequence: Synthetic oligonucleotide
uuugagggaaaucacucuc

SEQ ID NO: 1373051 - RNA, 19 nt, Artificial Sequence
  Description of Artificial Sequence: Synthetic oligonucleotide
cagagugaaucuuacuucc

SEQ ID NO: 1373052 - RNA, 19 nt, Artificial Sequence
  Description of Artificial Sequence: Synthetic oligonucleotide
uugagagcaccacauaccu

SEQ ID NO: 1373053 - RNA, 19 nt, Artificial Sequence
  Description of Artificial Sequence: Synthetic oligonucleotide
aguauagcaaauggccacc

SEQ ID NO: 1373054 - RNA, 19 nt, Artificial Sequence
  Description of Artificial Sequence: Synthetic oligonucleotide
ucauaaauaugugggagcu

SEQ ID NO: 1373055 - RNA, 19 nt, Artificial Sequence
  Description of Artificial Sequence: Synthetic oligonucleotide
ugaaucacccgaagcuugg

SEQ ID NO: 1373056 - RNA, 19 nt, Artificial Sequence
  Description of Artificial Sequence: Synthetic oligonucleotide
auagccaaacaauguuuac

SEQ ID NO: 1373057 - RNA, 19 nt, Artificial Sequence
  Description of Artificial Sequence: Synthetic oligonucleotide
gacuauuggagcuuuggca

SEQ ID NO: 1373058 - RNA, 19 nt, Artificial Sequence
  Description of Artificial Sequence: Synthetic oligonucleotide
gaggugucacuacagcugg

SEQ ID NO: 1373059 - RNA, 19 nt, Artificial Sequence
  Description of Artificial Sequence: Synthetic oligonucleotide
aaauaggaccuuucuuuca

SEQ ID NO: 1373060 - RNA, 19 nt, Artificial Sequence
  Description of Artificial Sequence: Synthetic oligonucleotide
aaucacccgaagcuugguc

SEQ ID NO: 1373061 - RNA, 19 nt, Artificial Sequence
  Description of Artificial Sequence: Synthetic oligonucleotide
auaguacugaaucacccga

SEQ ID NO: 1373062 - RNA, 19 nt, Artificial Sequence
  Description of Artificial Sequence: Synthetic oligonucleotide
gaguauagcaaauggccac

SEQ ID NO: 1373063 - RNA, 19 nt, Artificial Sequence
  Description of Artificial Sequence: Synthetic oligonucleotide
uuguacuuugcagacauac

SEQ ID NO: 1373064 - RNA, 19 nt, Artificial Sequence
  Description of Artificial Sequence: Synthetic oligonucleotide
gaguagaacacugaggauc

SEQ ID NO: 1373065 - RNA, 19 nt, Artificial Sequence
  Description of Artificial Sequence: Synthetic oligonucleotide
ucaccaaauaaugucuugc

SEQ ID NO: 1373066 - RNA, 19 nt, Artificial Sequence
  Description of Artificial Sequence: Synthetic oligonucleotide
caggacggcauacauauag

SEQ ID NO: 1373067 - RNA, 19 nt, Artificial Sequence
  Description of Artificial Sequence: Synthetic oligonucleotide
auggacuuaugucccaagg

SEQ ID NO: 1373068 - RNA, 19 nt, Artificial Sequence
  Description of Artificial Sequence: Synthetic oligonucleotide
cauugagagcaccacauac

SEQ ID NO: 1373069 - RNA, 19 nt, Artificial Sequence
  Description of Artificial Sequence: Synthetic oligonucleotide
guagcuuugagggaaauca

SEQ ID NO: 1373070 - RNA, 19 nt, Artificial Sequence
  Description of Artificial Sequence: Synthetic oligonucleotide
auagcuuuccugcauggcu

SEQ ID NO: 1373071 - RNA, 19 nt, Artificial Sequence
  Description of Artificial Sequence: Synthetic oligonucleotide
cugggcauagcuuuccugc

SEQ ID NO: 1373072 - RNA, 19 nt, Artificial Sequence
  Description of Artificial Sequence: Synthetic oligonucleotide
aggugggacaucuaccuuc

SEQ ID NO: 1373073 - RNA, 19 nt, Artificial Sequence
  Description of Artificial Sequence: Synthetic oligonucleotide
uuugcagagugaaucuuac

SEQ ID NO: 1373074 - RNA, 19 nt, Artificial Sequence
  Description of Artificial Sequence: Synthetic oligonucleotide
ugacuauuggagcuuuggc

SEQ ID NO: 1373075 - RNA, 19 nt, Artificial Sequence
  Description of Artificial Sequence: Synthetic oligonucleotide
uucugcuucuauucagagg

SEQ ID NO: 1373076 - RNA, 19 nt, Artificial Sequence
  Description of Artificial Sequence: Synthetic oligonucleotide
auagcaaauggccaccaga

SEQ ID NO: 1373077 - RNA, 19 nt, Artificial Sequence
  Description of Artificial Sequence: Synthetic oligonucleotide
aaacacuugccaauuguug

SEQ ID NO: 1373078 - RNA, 19 nt, Artificial Sequence
  Description of Artificial Sequence: Synthetic oligonucleotide
guauaguacuccccgacgc

SEQ ID NO: 1373079 - RNA, 19 nt, Artificial Sequence
  Description of Artificial Sequence: Synthetic oligonucleotide
acauauagagaucuucaaa

SEQ ID NO: 1373080 - RNA, 19 nt, Artificial Sequence
  Description of Artificial Sequence: Synthetic oligonucleotide
uggacaaaacacuugccaa

SEQ ID NO: 1373081 - RNA, 19 nt, Artificial Sequence
  Description of Artificial Sequence: Synthetic oligonucleotide
agugaucuuuggcaaggcg

SEQ ID NO: 1373082 - RNA, 19 nt, Artificial Sequence
  Description of Artificial Sequence: Synthetic oligonucleotide
aguccaacauuucuguaca

SEQ ID NO: 1373083 - RNA, 19 nt, Artificial Sequence
  Description of Artificial Sequence: Synthetic oligonucleotide
aaacacagacugccaggcg

SEQ ID NO: 1373084 - RNA, 19 nt, Artificial Sequence
  Description of Artificial Sequence: Synthetic oligonucleotide
acuuaugucccaagguccc

SEQ ID NO: 1373085 - RNA, 19 nt, Artificial Sequence
  Description of Artificial Sequence: Synthetic oligonucleotide
gacuuaugucccaaggucc

SEQ ID NO: 1373086 - RNA, 19 nt, Artificial Sequence
  Description of Artificial Sequence: Synthetic oligonucleotide
gaaacacagacugccaggc

SEQ ID NO: 1373087 - RNA, 19 nt, Artificial Sequence
  Description of Artificial Sequence: Synthetic oligonucleotide
acuugccaauuguugaguc

SEQ ID NO: 1373088 - RNA, 19 nt, Artificial Sequence
  Description of Artificial Sequence: Synthetic oligonucleotide
ugucacuacagcugguucu

SEQ ID NO: 1373089 - RNA, 19 nt, Artificial Sequence
  Description of Artificial Sequence: Synthetic oligonucleotide
gacacaacagcacggccgc

SEQ ID NO: 1373090 - RNA, 19 nt, Artificial Sequence
  Description of Artificial Sequence: Synthetic oligonucleotide
cauuaaggccuccugggag

SEQ ID NO: 1373091 - RNA, 19 nt, Artificial Sequence
  Description of Artificial Sequence: Synthetic oligonucleotide
uucaguagcuuugagggaa

SEQ ID NO: 1373092 - RNA, 19 nt, Artificial Sequence
  Description of Artificial Sequence: Synthetic oligonucleotide
auacauauagagaucuuca

SEQ ID NO: 1373093 - RNA, 19 nt, Artificial Sequence
  Description of Artificial Sequence: Synthetic oligonucleotide
uucuauucagaggggacag

SEQ ID NO: 1373094 - RNA, 19 nt, Artificial Sequence
  Description of Artificial Sequence: Synthetic oligonucleotide
auaugugggagcucaggug

SEQ ID NO: 1373095 - RNA, 19 nt, Artificial Sequence
  Description of Artificial Sequence: Synthetic oligonucleotide
gaauguggugacuauugga

SEQ ID NO: 1373096 - RNA, 19 nt, Artificial Sequence
  Description of Artificial Sequence: Synthetic oligonucleotide
uauagcaaauggccaccag

SEQ ID NO: 1373097 - RNA, 19 nt, Artificial Sequence
  Description of Artificial Sequence: Synthetic oligonucleotide
uuguuuaggucuucagaga

SEQ ID NO: 1373098 - RNA, 19 nt, Artificial Sequence
  Description of Artificial Sequence: Synthetic oligonucleotide
gaucugugcguacacggug

SEQ ID NO: 1373099 - RNA, 19 nt, Artificial Sequence
  Description of Artificial Sequence: Synthetic oligonucleotide
cauacugccccugaucugc

SEQ ID NO: 1373100 - RNA, 19 nt, Artificial Sequence
  Description of Artificial Sequence: Synthetic oligonucleotide
agggcauuucaccaaauaa

SEQ ID NO: 1373101 - RNA, 19 nt, Artificial Sequence
  Description of Artificial Sequence: Synthetic oligonucleotide
uauaguacuccccgacgcu

SEQ ID NO: 1373102 - RNA, 19 nt, Artificial Sequence
  Description of Artificial Sequence: Synthetic oligonucleotide
ucggcauaggucaaguuuu

SEQ ID NO: 1373103 - RNA, 19 nt, Artificial Sequence
  Description of Artificial Sequence: Synthetic oligonucleotide
accagaguacaccuacauc

SEQ ID NO: 1373104 - RNA, 19 nt, Artificial Sequence
  Description of Artificial Sequence: Synthetic oligonucleotide
uagccaaacaauguuuaca

SEQ ID NO: 1373105 - RNA, 19 nt, Artificial Sequence
  Description of Artificial Sequence: Synthetic oligonucleotide
ccaucaggggcaaagaacc

SEQ ID NO: 1373106 - RNA, 19 nt, Artificial Sequence
  Description of Artificial Sequence: Synthetic oligonucleotide
aaggcgacuuuccucugug

SEQ ID NO: 1373107 - RNA, 19 nt, Artificial Sequence
  Description of Artificial Sequence: Synthetic oligonucleotide
ugaaucuuacuuccauaaa

SEQ ID NO: 1373108 - RNA, 19 nt, Artificial Sequence
  Description of Artificial Sequence: Synthetic oligonucleotide
gacaccuuuggcagcacgg

SEQ ID NO: 1373109 - RNA, 19 nt, Artificial Sequence
  Description of Artificial Sequence: Synthetic oligonucleotide
cacgcagcacaccaggacg

SEQ ID NO: 1373110 - RNA, 19 nt, Artificial Sequence
  Description of Artificial Sequence: Synthetic oligonucleotide
gugaaucuuacuuccauaa

SEQ ID NO: 1373111 - RNA, 19 nt, Artificial Sequence
  Description of Artificial Sequence: Synthetic oligonucleotide
agaggagaggugucacuac

SEQ ID NO: 1373112 - RNA, 19 nt, Artificial Sequence
  Description of Artificial Sequence: Synthetic oligonucleotide
uuccucagugaucuuuggc

SEQ ID NO: 1373113 - RNA, 19 nt, Artificial Sequence
  Description of Artificial Sequence: Synthetic oligonucleotide
cuauuggagcuuuggcagg

SEQ ID NO: 1373114 - RNA, 19 nt, Artificial Sequence
  Description of Artificial Sequence: Synthetic oligonucleotide
agaccauuacaguucacau

SEQ ID NO: 1373115 - RNA, 19 nt, Artificial Sequence
  Description of Artificial Sequence: Synthetic oligonucleotide
uuuccugcauggcuuguac

SEQ ID NO: 1373116 - RNA, 19 nt, Artificial Sequence
  Description of Artificial Sequence: Synthetic oligonucleotide
ucaccauuaaggccuccug

SEQ ID NO: 1373117 - RNA, 19 nt, Artificial Sequence
  Description of Artificial Sequence: Synthetic oligonucleotide
acaaaacacuugccaauug

SEQ ID NO: 1373118 - RNA, 19 nt, Artificial Sequence
  Description of Artificial Sequence: Synthetic oligonucleotide
ucgaagaggaucugugcgu

SEQ ID NO: 1373119 - RNA, 19 nt, Artificial Sequence
  Description of Artificial Sequence: Synthetic oligonucleotide
caaaugaugaaucuucagu

SEQ ID NO: 1373120 - RNA, 19 nt, Artificial Sequence
  Description of Artificial Sequence: Synthetic oligonucleotide
aaaacacuugccaauuguu

SEQ ID NO: 1373121 - RNA, 19 nt, Artificial Sequence
  Description of Artificial Sequence: Synthetic oligonucleotide
aauacggcugaaguuccca

SEQ ID NO: 1373122 - RNA, 19 nt, Artificial Sequence
  Description of Artificial Sequence: Synthetic oligonucleotide
gugacuauuggagcuuugg

SEQ ID NO: 1373123 - RNA, 19 nt, Artificial Sequence
  Description of Artificial Sequence: Synthetic oligonucleotide
cagacagccuguauaguac

SEQ ID NO: 1373124 - RNA, 19 nt, Artificial Sequence
  Description of Artificial Sequence: Synthetic oligonucleotide
gaccauuacaguucacauc

SEQ ID NO: 1373125 - RNA, 19 nt, Artificial Sequence
  Description of Artificial Sequence: Synthetic oligonucleotide
ucccauaguacugaaucac

SEQ ID NO: 1373126 - RNA, 19 nt, Artificial Sequence
  Description of Artificial Sequence: Synthetic oligonucleotide
agaggugucacuacagcug

SEQ ID NO: 1373127 - RNA, 19 nt, Artificial Sequence
  Description of Artificial Sequence: Synthetic oligonucleotide
cuguauaguacuccccgac

SEQ ID NO: 1373128 - RNA, 19 nt, Artificial Sequence
  Description of Artificial Sequence: Synthetic oligonucleotide
auagauaauuuaucauaua

SEQ ID NO: 1373129 - RNA, 19 nt, Artificial Sequence
  Description of Artificial Sequence: Synthetic oligonucleotide
agaguauagcaaauggcca

SEQ ID NO: 1373130 - RNA, 19 nt, Artificial Sequence
  Description of Artificial Sequence: Synthetic oligonucleotide
ugacugaguuugugggacg

SEQ ID NO: 1373131 - RNA, 19 nt, Artificial Sequence
  Description of Artificial Sequence: Synthetic oligonucleotide
gccuguauaguacuccccg

SEQ ID NO: 1373132 - RNA, 19 nt, Artificial Sequence
  Description of Artificial Sequence: Synthetic oligonucleotide
gacugaguuugugggacgg

SEQ ID NO: 1373133 - RNA, 19 nt, Artificial Sequence
  Description of Artificial Sequence: Synthetic oligonucleotide
auaguacuccccgacgcuc

SEQ ID NO: 1373134 - RNA, 19 nt, Artificial Sequence
  Description of Artificial Sequence: Synthetic oligonucleotide
aguagcuuugagggaaauc

SEQ ID NO: 1373135 - RNA, 19 nt, Artificial Sequence
  Description of Artificial Sequence: Synthetic oligonucleotide
ggaauguggugacuauugg

SEQ ID NO: 1373136 - RNA, 19 nt, Artificial Sequence
  Description of Artificial Sequence: Synthetic oligonucleotide
uaguacuccccgacgcucc

SEQ ID NO: 1373137 - RNA, 19 nt, Artificial Sequence
  Description of Artificial Sequence: Synthetic oligonucleotide
ggucaaguuuuccucagug

SEQ ID NO: 1373138 - RNA, 19 nt, Artificial Sequence
  Description of Artificial Sequence: Synthetic oligonucleotide
agccgcaucuucccgccgc

SEQ ID NO: 1373139 - RNA, 19 nt, Artificial Sequence
  Description of Artificial Sequence: Synthetic oligonucleotide
agugaaucuuacuuccaua

SEQ ID NO: 1373140 - RNA, 19 nt, Artificial Sequence
  Description of Artificial Sequence: Synthetic oligonucleotide
uaguacugaaucacccgaa

SEQ ID NO: 1373141 - RNA, 19 nt, Artificial Sequence
  Description of Artificial Sequence: Synthetic oligonucleotide
ggacacaacagcacggccg

SEQ ID NO: 1373142 - RNA, 19 nt, Artificial Sequence
  Description of Artificial Sequence: Synthetic oligonucleotide
cugacugaguuugugggac

SEQ ID NO: 1373143 - RNA, 19 nt, Artificial Sequence
  Description of Artificial Sequence: Synthetic oligonucleotide
ugcuucuauucagagggga

SEQ ID NO: 1373144 - RNA, 19 nt, Artificial Sequence
  Description of Artificial Sequence: Synthetic oligonucleotide
cuugcccuucuguggaugc

SEQ ID NO: 1373145 - RNA, 19 nt, Artificial Sequence
  Description of Artificial Sequence: Synthetic oligonucleotide
ugugggacggggcucccca

SEQ ID NO: 1373146 - RNA, 19 nt, Artificial Sequence
  Description of Artificial Sequence: Synthetic oligonucleotide
caccacauaccuccggggc

SEQ ID NO: 1373147 - RNA, 19 nt, Artificial Sequence
  Description of Artificial Sequence: Synthetic oligonucleotide
cauuggaccaggcugucca

SEQ ID NO: 1373148 - RNA, 19 nt, Artificial Sequence
  Description of Artificial Sequence: Synthetic oligonucleotide
cauagccaaacaauguuua

SEQ ID NO: 1373149 - RNA, 19 nt, Artificial Sequence
  Description of Artificial Sequence: Synthetic oligonucleotide
agacagccuguauaguacu

SEQ ID NO: 1373150 - RNA, 19 nt, Artificial Sequence
  Description of Artificial Sequence: Synthetic oligonucleotide
uagcuuuccugcauggcuu

SEQ ID NO: 1373151 - RNA, 19 nt, Artificial Sequence
  Description of Artificial Sequence: Synthetic oligonucleotide
caggggcaaagaaccagcg

SEQ ID NO: 1373152 - RNA, 19 nt, Artificial Sequence
  Description of Artificial Sequence: Synthetic oligonucleotide
gacggcauacauauagaga

SEQ ID NO: 1373153 - RNA, 19 nt, Artificial Sequence
  Description of Artificial Sequence: Synthetic oligonucleotide
agcggggccaagcugguca

SEQ ID NO: 1373154 - RNA, 19 nt, Artificial Sequence
  Description of Artificial Sequence: Synthetic oligonucleotide
aggauccccacgcagcaca

SEQ ID NO: 1373155 - RNA, 19 nt, Artificial Sequence
  Description of Artificial Sequence: Synthetic oligonucleotide
cacacuggugacagucucc

SEQ ID NO: 1373156 - RNA, 19 nt, Artificial Sequence
  Description of Artificial Sequence: Synthetic oligonucleotide
uucaccauuaaggccuccu

SEQ ID NO: 1373157 - RNA, 19 nt, Artificial Sequence
  Description of Artificial Sequence: Synthetic oligonucleotide
acaccuuuggcagcacggg

SEQ ID NO: 1373158 - RNA, 19 nt, Artificial Sequence
  Description of Artificial Sequence: Synthetic oligonucleotide
cauggacuuaugucccaag

SEQ ID NO: 1373159 - RNA, 19 nt, Artificial Sequence
  Description of Artificial Sequence: Synthetic oligonucleotide
ucagcucuagcucggcaua

SEQ ID NO: 1373160 - RNA, 19 nt, Artificial Sequence
  Description of Artificial Sequence: Synthetic oligonucleotide
gcagagugaaucuuacuuc

SEQ ID NO: 1373161 - RNA, 19 nt, Artificial Sequence
  Description of Artificial Sequence: Synthetic oligonucleotide
guuggcaauacggcugaag

SEQ ID NO: 1373162 - RNA, 19 nt, Artificial Sequence
  Description of Artificial Sequence: Synthetic oligonucleotide
uuguggaauguggugacua

SEQ ID NO: 1373163 - RNA, 19 nt, Artificial Sequence
  Description of Artificial Sequence: Synthetic oligonucleotide
ggagcuuuggcagggacug

SEQ ID NO: 1373164 - RNA, 19 nt, Artificial Sequence
  Description of Artificial Sequence: Synthetic oligonucleotide
agcuuugagggaaaucacu

SEQ ID NO: 1373165 - RNA, 19 nt, Artificial Sequence
  Description of Artificial Sequence: Synthetic oligonucleotide
gaugacuuuugcagaguga

SEQ ID NO: 1373166 - RNA, 19 nt, Artificial Sequence
  Description of Artificial Sequence: Synthetic oligonucleotide
cuucuauucagaggggaca

SEQ ID NO: 1373167 - RNA, 19 nt, Artificial Sequence
  Description of Artificial Sequence: Synthetic oligonucleotide
gcguacacggugcugcugg

SEQ ID NO: 1373168 - RNA, 19 nt, Artificial Sequence
  Description of Artificial Sequence: Synthetic oligonucleotide
ggagaguggcauuuucccc

SEQ ID NO: 1373169 - RNA, 19 nt, Artificial Sequence
  Description of Artificial Sequence: Synthetic oligonucleotide
ggagaggugucacuacagc

SEQ ID NO: 1373170 - RNA, 19 nt, Artificial Sequence
  Description of Artificial Sequence: Synthetic oligonucleotide
agaguacaccuacaucaaa

SEQ ID NO: 1373171 - RNA, 19 nt, Artificial Sequence
  Description of Artificial Sequence: Synthetic oligonucleotide
ccugauaucaagaugacuu

SEQ ID NO: 1373172 - RNA, 19 nt, Artificial Sequence
  Description of Artificial Sequence: Synthetic oligonucleotide
uugcagagugaaucuuacu

SEQ ID NO: 1373173 - RNA, 19 nt, Artificial Sequence
  Description of Artificial Sequence: Synthetic oligonucleotide
gaagaggaucugugcguac

SEQ ID NO: 1373174 - RNA, 19 nt, Artificial Sequence
  Description of Artificial Sequence: Synthetic oligonucleotide
ugcccuucuguggaugcag

SEQ ID NO: 1373175 - RNA, 19 nt, Artificial Sequence
  Description of Artificial Sequence: Synthetic oligonucleotide
acauagccaaacaauguuu

SEQ ID NO: 1373176 - RNA, 19 nt, Artificial Sequence
  Description of Artificial Sequence: Synthetic oligonucleotide
aagcuguccuuccgucucu

SEQ ID NO: 1373177 - RNA, 19 nt, Artificial Sequence
  Description of Artificial Sequence: Synthetic oligonucleotide
cugcuucuauucagagggg

SEQ ID NO: 1373178 - RNA, 19 nt, Artificial Sequence
  Description of Artificial Sequence: Synthetic oligonucleotide
cccauaguacugaaucacc

SEQ ID NO: 1373179 - RNA, 19 nt, Artificial Sequence
  Description of Artificial Sequence: Synthetic oligonucleotide
cauguacacaagaccauua

SEQ ID NO: 1373180 - RNA, 19 nt, Artificial Sequence
  Description of Artificial Sequence: Synthetic oligonucleotide
ggccggacacaacagcacg

SEQ ID NO: 1373181 - RNA, 19 nt, Artificial Sequence
  Description of Artificial Sequence: Synthetic oligonucleotide
augucuugcucuggauuuc

SEQ ID NO: 1373182 - RNA, 19 nt, Artificial Sequence
  Description of Artificial Sequence: Synthetic oligonucleotide
aacuuccccauggacuuau

SEQ ID NO: 1373183 - RNA, 19 nt, Artificial Sequence
  Description of Artificial Sequence: Synthetic oligonucleotide
acugaguuugugggacggg

SEQ ID NO: 1373184 - RNA, 19 nt, Artificial Sequence
  Description of Artificial Sequence: Synthetic oligonucleotide
uggcaaggcgacuuuccuc

SEQ ID NO: 1373185 - RNA, 19 nt, Artificial Sequence
  Description of Artificial Sequence: Synthetic oligonucleotide
agccaucaggggcaaagaa

SEQ ID NO: 1373186 - RNA, 19 nt, Artificial Sequence
  Description of Artificial Sequence: Synthetic oligonucleotide
aggaccuuucuuucauaaa

SEQ ID NO: 1373187 - RNA, 19 nt, Artificial Sequence
  Description of Artificial Sequence: Synthetic oligonucleotide
cauaaauaugugggagcuc

SEQ ID NO: 1373188 - RNA, 19 nt, Artificial Sequence
  Description of Artificial Sequence: Synthetic oligonucleotide
cugggagccaucaggggca

SEQ ID NO: 1373189 - RNA, 19 nt, Artificial Sequence
  Description of Artificial Sequence: Synthetic oligonucleotide
ggaccuuucuuucauaaau

SEQ ID NO: 1373190 - RNA, 19 nt, Artificial Sequence
  Description of Artificial Sequence: Synthetic oligonucleotide
gagggcauuucaccaaaua

SEQ ID NO: 1373191 - RNA, 19 nt, Artificial Sequence
  Description of Artificial Sequence: Synthetic oligonucleotide
gcuuugagggaaaucacuc

SEQ ID NO: 1373192 - RNA, 19 nt, Artificial Sequence
  Description of Artificial Sequence: Synthetic oligonucleotide
gcugaaguucccauaguac

SEQ ID NO: 1373193 - RNA, 19 nt, Artificial Sequence
  Description of Artificial Sequence: Synthetic oligonucleotide
gugaagaguagaacacuga

SEQ ID NO: 1373194 - RNA, 19 nt, Artificial Sequence
  Description of Artificial Sequence: Synthetic oligonucleotide
auacggcugaaguucccau

SEQ ID NO: 1373195 - RNA, 19 nt, Artificial Sequence
  Description of Artificial Sequence: Synthetic oligonucleotide
accugauaucaagaugacu

SEQ ID NO: 1373196 - RNA, 19 nt, Artificial Sequence
  Description of Artificial Sequence: Synthetic oligonucleotide
uacggcugaaguucccaua

SEQ ID NO: 1373197 - RNA, 19 nt, Artificial Sequence
  Description of Artificial Sequence: Synthetic oligonucleotide
uacuuccauaaaguccaac

SEQ ID NO: 1373198 - RNA, 19 nt, Artificial Sequence
  Description of Artificial Sequence: Synthetic oligonucleotide
gucacuacagcugguucuc

SEQ ID NO: 1373199 - RNA, 19 nt, Artificial Sequence
  Description of Artificial Sequence: Synthetic oligonucleotide
gaugcagcggggccaagcu

SEQ ID NO: 1373200 - RNA, 19 nt, Artificial Sequence
  Description of Artificial Sequence: Synthetic oligonucleotide
agcucuagcucggcauagg

SEQ ID NO: 1373201 - RNA, 19 nt, Artificial Sequence
  Description of Artificial Sequence: Synthetic oligonucleotide
ggcauacauauagagaucu

SEQ ID NO: 1373202 - RNA, 19 nt, Artificial Sequence
  Description of Artificial Sequence: Synthetic oligonucleotide
agagugaaucuuacuucca

SEQ ID NO: 1373203 - RNA, 19 nt, Artificial Sequence
  Description of Artificial Sequence: Synthetic oligonucleotide
cagaguacaccuacaucaa

SEQ ID NO: 1373204 - RNA, 19 nt, Artificial Sequence
  Description of Artificial Sequence: Synthetic oligonucleotide
caccaaauaaugucuugcu

SEQ ID NO: 1373205 - RNA, 19 nt, Artificial Sequence
  Description of Artificial Sequence: Synthetic oligonucleotide
gggaaaucacucucauuuc

SEQ ID NO: 1373206 - RNA, 19 nt, Artificial Sequence
  Description of Artificial Sequence: Synthetic oligonucleotide
gcgaugaccagggugaaga

SEQ ID NO: 1373207 - RNA, 19 nt, Artificial Sequence
  Description of Artificial Sequence: Synthetic oligonucleotide
ugcagacauacugccccug

SEQ ID NO: 1373208 - RNA, 19 nt, Artificial Sequence
  Description of Artificial Sequence: Synthetic oligonucleotide
agagcaccacauaccuccg

SEQ ID NO: 1373209 - RNA, 19 nt, Artificial Sequence
  Description of Artificial Sequence: Synthetic oligonucleotide
gcaccacauaccuccgggg

SEQ ID NO: 1373210 - RNA, 19 nt, Artificial Sequence
  Description of Artificial Sequence: Synthetic oligonucleotide
guauagcaaauggccacca

SEQ ID NO: 1373211 - RNA, 19 nt, Artificial Sequence
  Description of Artificial Sequence: Synthetic oligonucleotide
ccaaguagucaaccacagg

SEQ ID NO: 1373212 - RNA, 19 nt, Artificial Sequence
  Description of Artificial Sequence: Synthetic oligonucleotide
ggcgcugugacccgggaga

SEQ ID NO: 1373213 - RNA, 19 nt, Artificial Sequence
  Description of Artificial Sequence: Synthetic oligonucleotide
ucacuacagcugguucucc

SEQ ID NO: 1373214 - RNA, 19 nt, Artificial Sequence
  Description of Artificial Sequence: Synthetic oligonucleotide
aguacuccccgacgcuccu

SEQ ID NO: 1373215 - RNA, 19 nt, Artificial Sequence
  Description of Artificial Sequence: Synthetic oligonucleotide
gacagccuguauaguacuc

SEQ ID NO: 1373216 - RNA, 19 nt, Artificial Sequence
  Description of Artificial Sequence: Synthetic oligonucleotide
ugcccaugucacuuucuuu

SEQ ID NO: 1373217 - RNA, 19 nt, Artificial Sequence
  Description of Artificial Sequence: Synthetic oligonucleotide
auaccuccggggccggaca

SEQ ID NO: 1373218 - RNA, 19 nt, Artificial Sequence
  Description of Artificial Sequence: Synthetic oligonucleotide
cuugccaauuguugagucu

SEQ ID NO: 1373219 - RNA, 19 nt, Artificial Sequence
  Description of Artificial Sequence: Synthetic oligonucleotide
accagggugaagaguagaa

SEQ ID NO: 1373220 - RNA, 19 nt, Artificial Sequence
  Description of Artificial Sequence: Synthetic oligonucleotide
aggacggcauacauauaga

SEQ ID NO: 1373221 - RNA, 19 nt, Artificial Sequence
  Description of Artificial Sequence: Synthetic oligonucleotide
gcaauacggcugaaguucc

SEQ ID NO: 1373222 - RNA, 19 nt, Artificial Sequence
  Description of Artificial Sequence: Synthetic oligonucleotide
agaguggcauuuuccccuu

SEQ ID NO: 1373223 - RNA, 19 nt, Artificial Sequence
  Description of Artificial Sequence: Synthetic oligonucleotide
gcauaggucaaguuuuccu

SEQ ID NO: 1373224 - RNA, 19 nt, Artificial Sequence
  Description of Artificial Sequence: Synthetic oligonucleotide
cagugacauugagagcacc

SEQ ID NO: 1373225 - RNA, 19 nt, Artificial Sequence
  Description of Artificial Sequence: Synthetic oligonucleotide
guuuaggucuucagagaaa

SEQ ID NO: 1373226 - RNA, 19 nt, Artificial Sequence
  Description of Artificial Sequence: Synthetic oligonucleotide
gaaccagcgcacagccagc

SEQ ID NO: 1373227 - RNA, 19 nt, Artificial Sequence
  Description of Artificial Sequence: Synthetic oligonucleotide
aagaaccagcgcacagcca

SEQ ID NO: 1373228 - RNA, 19 nt, Artificial Sequence
  Description of Artificial Sequence: Synthetic oligonucleotide
ccccauggacuuauguccc

SEQ ID NO: 1373229 - RNA, 19 nt, Artificial Sequence
  Description of Artificial Sequence: Synthetic oligonucleotide
gaccagggugaagaguaga

SEQ ID NO: 1373230 - RNA, 19 nt, Artificial Sequence
  Description of Artificial Sequence: Synthetic oligonucleotide
gacggggcuccccaccaca

SEQ ID NO: 1373231 - RNA, 19 nt, Artificial Sequence
  Description of Artificial Sequence: Synthetic oligonucleotide
caucaggggcaaagaacca

SEQ ID NO: 1373232 - RNA, 19 nt, Artificial Sequence
  Description of Artificial Sequence: Synthetic oligonucleotide
cucggcauaggucaaguuu

SEQ ID NO: 1373233 - RNA, 19 nt, Artificial Sequence
  Description of Artificial Sequence: Synthetic oligonucleotide
acacaacagcacggccgcc

SEQ ID NO: 1373234 - RNA, 19 nt, Artificial Sequence
  Description of Artificial Sequence: Synthetic oligonucleotide
ggagcugacugaguuugug

SEQ ID NO: 1373235 - RNA, 19 nt, Artificial Sequence
  Description of Artificial Sequence: Synthetic oligonucleotide
gaugaaucuucaguagcuu

SEQ ID NO: 1373236 - RNA, 19 nt, Artificial Sequence
  Description of Artificial Sequence: Synthetic oligonucleotide
cauaccuccggggccggac

SEQ ID NO: 1373237 - RNA, 19 nt, Artificial Sequence
  Description of Artificial Sequence: Synthetic oligonucleotide
gggugguuugaucagcucu

SEQ ID NO: 1373238 - RNA, 19 nt, Artificial Sequence
  Description of Artificial Sequence: Synthetic oligonucleotide
uaccuccggggccggacac

SEQ ID NO: 1373239 - RNA, 19 nt, Artificial Sequence
  Description of Artificial Sequence: Synthetic oligonucleotide
ggacaaaacacuugccaau

SEQ ID NO: 1373240 - RNA, 19 nt, Artificial Sequence
  Description of Artificial Sequence: Synthetic oligonucleotide
gccaauuguugagucuucc

SEQ ID NO: 1373241 - RNA, 19 nt, Artificial Sequence
  Description of Artificial Sequence: Synthetic oligonucleotide
cgaagcuuggucaucuuca

SEQ ID NO: 1373242 - RNA, 19 nt, Artificial Sequence
  Description of Artificial Sequence: Synthetic oligonucleotide
gcugacugaguuuguggga

SEQ ID NO: 1373243 - RNA, 19 nt, Artificial Sequence
  Description of Artificial Sequence: Synthetic oligonucleotide
cucggcgcugugacccggg

SEQ ID NO: 1373244 - RNA, 19 nt, Artificial Sequence
  Description of Artificial Sequence: Synthetic oligonucleotide
cuggccggagugucaggac

SEQ ID NO: 1373245 - RNA, 19 nt, Artificial Sequence
  Description of Artificial Sequence: Synthetic oligonucleotide
cagcucuagcucggcauag

SEQ ID NO: 1373246 - RNA, 19 nt, Artificial Sequence
  Description of Artificial Sequence: Synthetic oligonucleotide
uggugacuauuggagcuuu

SEQ ID NO: 1373247 - RNA, 19 nt, Artificial Sequence
  Description of Artificial Sequence: Synthetic oligonucleotide
guagaacacugaggauccc

SEQ ID NO: 1373248 - RNA, 19 nt, Artificial Sequence
  Description of Artificial Sequence: Synthetic oligonucleotide
gggcauuucaccaaauaau

SEQ ID NO: 1373249 - RNA, 19 nt, Artificial Sequence
  Description of Artificial Sequence: Synthetic oligonucleotide
gccggacacaacagcacgg

SEQ ID NO: 1373250 - RNA, 19 nt, Artificial Sequence
  Description of Artificial Sequence: Synthetic oligonucleotide
ccuuccaaguagucaacca

SEQ ID NO: 1373251 - RNA, 19 nt, Artificial Sequence
  Description of Artificial Sequence: Synthetic oligonucleotide
guagucaaccacagguccu

SEQ ID NO: 1373252 - RNA, 19 nt, Artificial Sequence
  Description of Artificial Sequence: Synthetic oligonucleotide
gcugguuggcaauacggcu

SEQ ID NO: 1373253 - RNA, 19 nt, Artificial Sequence
  Description of Artificial Sequence: Synthetic oligonucleotide
acggugcugcuggggacac

SEQ ID NO: 1373254 - RNA, 19 nt, Artificial Sequence
  Description of Artificial Sequence: Synthetic oligonucleotide
aaacuuccccauggacuua

SEQ ID NO: 1373255 - RNA, 19 nt, Artificial Sequence
  Description of Artificial Sequence: Synthetic oligonucleotide
uugagucuuccugggcaua

SEQ ID NO: 1373256 - RNA, 19 nt, Artificial Sequence
  Description of Artificial Sequence: Synthetic oligonucleotide
uuugugggacggggcuccc

SEQ ID NO: 1373257 - RNA, 19 nt, Artificial Sequence
  Description of Artificial Sequence: Synthetic oligonucleotide
guacauuguuuaggucuuc

SEQ ID NO: 1373258 - RNA, 19 nt, Artificial Sequence
  Description of Artificial Sequence: Synthetic oligonucleotide
ccccugaucugcuggccgg

SEQ ID NO: 1373259 - RNA, 19 nt, Artificial Sequence
  Description of Artificial Sequence: Synthetic oligonucleotide
ggaugcagcggggccaagc

SEQ ID NO: 1373260 - RNA, 19 nt, Artificial Sequence
  Description of Artificial Sequence: Synthetic oligonucleotide
cacaccaggacggcauaca

SEQ ID NO: 1373261 - RNA, 19 nt, Artificial Sequence
  Description of Artificial Sequence: Synthetic oligonucleotide
ggcgacuuuccucuguggu

SEQ ID NO: 1373262 - RNA, 19 nt, Artificial Sequence
  Description of Artificial Sequence: Synthetic oligonucleotide
uugugggacggggcucccc

SEQ ID NO: 1373263 - RNA, 19 nt, Artificial Sequence
  Description of Artificial Sequence: Synthetic oligonucleotide
cuagcucggcauaggucaa

SEQ ID NO: 1373264 - RNA, 19 nt, Artificial Sequence
  Description of Artificial Sequence: Synthetic oligonucleotide
gaggauccccacgcagcac

SEQ ID NO: 1373265 - RNA, 19 nt, Artificial Sequence
  Description of Artificial Sequence: Synthetic oligonucleotide
caccaggacggcauacaua

SEQ ID NO: 1373266 - RNA, 19 nt, Artificial Sequence
  Description of Artificial Sequence: Synthetic oligonucleotide
ccggacacaacagcacggc

SEQ ID NO: 1373267 - RNA, 19 nt, Artificial Sequence
  Description of Artificial Sequence: Synthetic oligonucleotide
ccuguauaguacuccccga

SEQ ID NO: 1373268 - RNA, 19 nt, Artificial Sequence
  Description of Artificial Sequence: Synthetic oligonucleotide
gacagacagccuguauagu

SEQ ID NO: 1373269 - RNA, 19 nt, Artificial Sequence
  Description of Artificial Sequence: Synthetic oligonucleotide
cugugcguacacggugcug

SEQ ID NO: 1373270 - RNA, 19 nt, Artificial Sequence
  Description of Artificial Sequence: Synthetic oligonucleotide
gaaucacccgaagcuuggu

SEQ ID NO: 1373271 - RNA, 19 nt, Artificial Sequence
  Description of Artificial Sequence: Synthetic oligonucleotide
auacugccccugaucugcu

SEQ ID NO: 1373272 - RNA, 19 nt, Artificial Sequence
  Description of Artificial Sequence: Synthetic oligonucleotide
cccugacauguacacaaga

SEQ ID NO: 1373273 - RNA, 19 nt, Artificial Sequence
  Description of Artificial Sequence: Synthetic oligonucleotide
ggggugguuugaucagcuc

SEQ ID NO: 1373274 - RNA, 19 nt, Artificial Sequence
  Description of Artificial Sequence: Synthetic oligonucleotide
gcaaggcgacuuuccucug

SEQ ID NO: 1373275 - RNA, 19 nt, Artificial Sequence
  Description of Artificial Sequence: Synthetic oligonucleotide
ccaauuguugagucuuccu

SEQ ID NO: 1373276 - RNA, 19 nt, Artificial Sequence
  Description of Artificial Sequence: Synthetic oligonucleotide
cggcauacauauagagauc

SEQ ID NO: 1373277 - RNA, 19 nt, Artificial Sequence
  Description of Artificial Sequence: Synthetic oligonucleotide
ggugggacaucuaccuucu

SEQ ID NO: 1373278 - RNA, 19 nt, Artificial Sequence
  Description of Artificial Sequence: Synthetic oligonucleotide
gugggacggggcuccccac

SEQ ID NO: 1373279 - RNA, 19 nt, Artificial Sequence
  Description of Artificial Sequence: Synthetic oligonucleotide
cuuaugucccaaggucccu

SEQ ID NO: 1373280 - RNA, 19 nt, Artificial Sequence
  Description of Artificial Sequence: Synthetic oligonucleotide
gccgcaucuucccgccgcc

SEQ ID NO: 1373281 - RNA, 19 nt, Artificial Sequence
  Description of Artificial Sequence: Synthetic oligonucleotide
cagcaagcuguccuuccgu

SEQ ID NO: 1373282 - RNA, 19 nt, Artificial Sequence
  Description of Artificial Sequence: Synthetic oligonucleotide
guggaugcagcggggccaa

SEQ ID NO: 1373283 - RNA, 19 nt, Artificial Sequence
  Description of Artificial Sequence: Synthetic oligonucleotide
gggccggacacaacagcac

SEQ ID NO: 1373284 - RNA, 19 nt, Artificial Sequence
  Description of Artificial Sequence: Synthetic oligonucleotide
uggaugcagcggggccaag

SEQ ID NO: 1373285 - RNA, 19 nt, Artificial Sequence
  Description of Artificial Sequence: Synthetic oligonucleotide
ggaucugugcguacacggu

SEQ ID NO: 1373286 - RNA, 19 nt, Artificial Sequence
  Description of Artificial Sequence: Synthetic oligonucleotide
cagcuuugguuuguggaau

SEQ ID NO: 1373287 - RNA, 19 nt, Artificial Sequence
  Description of Artificial Sequence: Synthetic oligonucleotide
ccauuacaguucacaucca

SEQ ID NO: 1373288 - RNA, 19 nt, Artificial Sequence
  Description of Artificial Sequence: Synthetic oligonucleotide
gcgacuuuccucugugguu

SEQ ID NO: 1373289 - RNA, 19 nt, Artificial Sequence
  Description of Artificial Sequence: Synthetic oligonucleotide
caggagccgcagccgcauc

SEQ ID NO: 1373290 - RNA, 19 nt, Artificial Sequence
  Description of Artificial Sequence: Synthetic oligonucleotide
ggcuccccaccacacugaa

SEQ ID NO: 1373291 - RNA, 19 nt, Artificial Sequence
  Description of Artificial Sequence: Synthetic oligonucleotide
guacuccccgacgcuccuc

SEQ ID NO: 1373292 - RNA, 19 nt, Artificial Sequence
  Description of Artificial Sequence: Synthetic oligonucleotide
cggggccggacacaacagc

SEQ ID NO: 1373293 - RNA, 19 nt, Artificial Sequence
  Description of Artificial Sequence: Synthetic oligonucleotide
gggcauagcuuuccugcau

SEQ ID NO: 1373294 - RNA, 19 nt, Artificial Sequence
  Description of Artificial Sequence: Synthetic oligonucleotide
ggacggggcuccccaccac

SEQ ID NO: 1373295 - RNA, 19 nt, Artificial Sequence
  Description of Artificial Sequence: Synthetic oligonucleotide
gcucggcgcugugacccgg

SEQ ID NO: 1373296 - RNA, 19 nt, Artificial Sequence
  Description of Artificial Sequence: Synthetic oligonucleotide
caggugggacaucuaccuu

SEQ ID NO: 1373297 - RNA, 19 nt, Artificial Sequence
  Description of Artificial Sequence: Synthetic oligonucleotide
ccgcaucuucccgccgccg

SEQ ID NO: 1373298 - RNA, 19 nt, Artificial Sequence
  Description of Artificial Sequence: Synthetic oligonucleotide
caguagcuuugagggaaau

SEQ ID NO: 1373299 - RNA, 19 nt, Artificial Sequence
  Description of Artificial Sequence: Synthetic oligonucleotide
gccggagugucaggacaga

SEQ ID NO: 1373300 - RNA, 19 nt, Artificial Sequence
  Description of Artificial Sequence: Synthetic oligonucleotide
cggcgcugugacccgggag

SEQ ID NO: 1373301 - RNA, 19 nt, Artificial Sequence
  Description of Artificial Sequence: Synthetic oligonucleotide
gcucggcauaggucaaguu

SEQ ID NO: 1373302 - RNA, 19 nt, Artificial Sequence
  Description of Artificial Sequence: Synthetic oligonucleotide
ccccgacgcuccucacgca

SEQ ID NO: 1373303 - RNA, 19 nt, Artificial Sequence
  Description of Artificial Sequence: Synthetic oligonucleotide
ccccgagugggagcugacu

SEQ ID NO: 1373304 - RNA, 19 nt, Artificial Sequence
  Description of Artificial Sequence: Synthetic oligonucleotide
ccgccgcucggcgcuguga

SEQ ID NO: 1373305 - RNA, 19 nt, Artificial Sequence
  Description of Artificial Sequence: Synthetic oligonucleotide
aauaaguagacuguaacug

SEQ ID NO: 1373306 - RNA, 19 nt, Artificial Sequence
  Description of Artificial Sequence: Synthetic oligonucleotide
uguaaggcaaccuucaaca

SEQ ID NO: 1373307 - RNA, 19 nt, Artificial Sequence
  Description of Artificial Sequence: Synthetic oligonucleotide
aaauaaguagacuguaacu

SEQ ID NO: 1373308 - RNA, 19 nt, Artificial Sequence
  Description of Artificial Sequence: Synthetic oligonucleotide
ucauccauggguaaguuug

SEQ ID NO: 1373309 - RNA, 19 nt, Artificial Sequence
  Description of Artificial Sequence: Synthetic oligonucleotide
uaaauaaguagacuguaac

SEQ ID NO: 1373310 - RNA, 19 nt, Artificial Sequence
  Description of Artificial Sequence: Synthetic oligonucleotide
caugucacggaucaggugg

SEQ ID NO: 1373311 - RNA, 19 nt, Artificial Sequence
  Description of Artificial Sequence: Synthetic oligonucleotide
uucacgcugaaacauuugg

SEQ ID NO: 1373312 - RNA, 19 nt, Artificial Sequence
  Description of Artificial Sequence: Synthetic oligonucleotide
uuaggacugucauugagag

SEQ ID NO: 1373313 - RNA, 19 nt, Artificial Sequence
  Description of Artificial Sequence: Synthetic oligonucleotide
cauaacaggacuccaaagc

SEQ ID NO: 1373314 - RNA, 19 nt, Artificial Sequence
  Description of Artificial Sequence: Synthetic oligonucleotide
uucaacacgaccccuguag

SEQ ID NO: 1373315 - RNA, 19 nt, Artificial Sequence
  Description of Artificial Sequence: Synthetic oligonucleotide
ugaaacauuugguggaucc

SEQ ID NO: 1373316 - RNA, 19 nt, Artificial Sequence
  Description of Artificial Sequence: Synthetic oligonucleotide
aagcgagugcuccucaccc

SEQ ID NO: 1373317 - RNA, 19 nt, Artificial Sequence
  Description of Artificial Sequence: Synthetic oligonucleotide
caaguuaucagcuauggga

SEQ ID NO: 1373318 - RNA, 19 nt, Artificial Sequence
  Description of Artificial Sequence: Synthetic oligonucleotide
uuuaaagauguaaacggau

SEQ ID NO: 1373319 - RNA, 19 nt, Artificial Sequence
  Description of Artificial Sequence: Synthetic oligonucleotide
ugugucauaggcacuuagg

SEQ ID NO: 1373320 - RNA, 19 nt, Artificial Sequence
  Description of Artificial Sequence: Synthetic oligonucleotide
ugucaauuuugucccaagg

SEQ ID NO: 1373321 - RNA, 19 nt, Artificial Sequence
  Description of Artificial Sequence: Synthetic oligonucleotide
aaaugcgcaauaaauaagu

SEQ ID NO: 1373322 - RNA, 19 nt, Artificial Sequence
  Description of Artificial Sequence: Synthetic oligonucleotide
caccacauagauaagcagg

SEQ ID NO: 1373323 - RNA, 19 nt, Artificial Sequence
  Description of Artificial Sequence: Synthetic oligonucleotide
ucgauuuccccauaggucu

SEQ ID NO: 1373324 - RNA, 19 nt, Artificial Sequence
  Description of Artificial Sequence: Synthetic oligonucleotide
ugguuucugacuaaggccu

SEQ ID NO: 1373325 - RNA, 19 nt, Artificial Sequence
  Description of Artificial Sequence: Synthetic oligonucleotide
uaaguuuguacuuccgggc

SEQ ID NO: 1373326 - RNA, 19 nt, Artificial Sequence
  Description of Artificial Sequence: Synthetic oligonucleotide
aaaagguuaucugagccca

SEQ ID NO: 1373327 - RNA, 19 nt, Artificial Sequence
  Description of Artificial Sequence: Synthetic oligonucleotide
gaauaucucugauugcuug

SEQ ID NO: 1373328 - RNA, 19 nt, Artificial Sequence
  Description of Artificial Sequence: Synthetic oligonucleotide
aaggguuuguuacagcccu

SEQ ID NO: 1373329 - RNA, 19 nt, Artificial Sequence
  Description of Artificial Sequence: Synthetic oligonucleotide
cauuauggaaacccugugg

SEQ ID NO: 1373330 - RNA, 19 nt, Artificial Sequence
  Description of Artificial Sequence: Synthetic oligonucleotide
aauaucucugauugcuugu

SEQ ID NO: 1373331 - RNA, 19 nt, Artificial Sequence
  Description of Artificial Sequence: Synthetic oligonucleotide
aaaaugcgcaauaaauaag

SEQ ID NO: 1373332 - RNA, 19 nt, Artificial Sequence
  Description of Artificial Sequence: Synthetic oligonucleotide
augcgcaauaaauaaguag

SEQ ID NO: 1373333 - RNA, 19 nt, Artificial Sequence
  Description of Artificial Sequence: Synthetic oligonucleotide
agauggugcaacuuccagg

SEQ ID NO: 1373334 - RNA, 19 nt, Artificial Sequence
  Description of Artificial Sequence: Synthetic oligonucleotide
agagaauaucucugauugc

SEQ ID NO: 1373335 - RNA, 19 nt, Artificial Sequence
  Description of Artificial Sequence: Synthetic oligonucleotide
aaacacuugucccggacca

SEQ ID NO: 1373336 - RNA, 19 nt, Artificial Sequence
  Description of Artificial Sequence: Synthetic oligonucleotide
uguaaacggauuuauuaaa

SEQ ID NO: 1373337 - RNA, 19 nt, Artificial Sequence
  Description of Artificial Sequence: Synthetic oligonucleotide
auaaguagacuguaacugu

SEQ ID NO: 1373338 - RNA, 19 nt, Artificial Sequence
  Description of Artificial Sequence: Synthetic oligonucleotide
ucaguuaguauugggaaca

SEQ ID NO: 1373339 - RNA, 19 nt, Artificial Sequence
  Description of Artificial Sequence: Synthetic oligonucleotide
aguuuguacuuccgggccc

SEQ ID NO: 1373340 - RNA, 19 nt, Artificial Sequence
  Description of Artificial Sequence: Synthetic oligonucleotide
aacacgaccccuguaggcg

SEQ ID NO: 1373341 - RNA, 19 nt, Artificial Sequence
  Description of Artificial Sequence: Synthetic oligonucleotide
cugguuucugacuaaggcc

SEQ ID NO: 1373342 - RNA, 19 nt, Artificial Sequence
  Description of Artificial Sequence: Synthetic oligonucleotide
uucgugucagggaacaggc

SEQ ID NO: 1373343 - RNA, 19 nt, Artificial Sequence
  Description of Artificial Sequence: Synthetic oligonucleotide
acgcugaaacauuuggugg

SEQ ID NO: 1373344 - RNA, 19 nt, Artificial Sequence
  Description of Artificial Sequence: Synthetic oligonucleotide
ucucuagaguuccaguggc

SEQ ID NO: 1373345 - RNA, 19 nt, Artificial Sequence
  Description of Artificial Sequence: Synthetic oligonucleotide
ucaacacgaccccuguagg

SEQ ID NO: 1373346 - RNA, 19 nt, Artificial Sequence
  Description of Artificial Sequence: Synthetic oligonucleotide
acccuguggacccacaagg

SEQ ID NO: 1373347 - RNA, 19 nt, Artificial Sequence
  Description of Artificial Sequence: Synthetic oligonucleotide
aacauuugguggauccagc

SEQ ID NO: 1373348 - RNA, 19 nt, Artificial Sequence
  Description of Artificial Sequence: Synthetic oligonucleotide
ucacggaucagguggaucu

SEQ ID NO: 1373349 - RNA, 19 nt, Artificial Sequence
  Description of Artificial Sequence: Synthetic oligonucleotide
ucguacgucuuccuucugg

SEQ ID NO: 1373350 - RNA, 19 nt, Artificial Sequence
  Description of Artificial Sequence: Synthetic oligonucleotide
aaggcaaccuucaacacga

SEQ ID NO: 1373351 - RNA, 19 nt, Artificial Sequence
  Description of Artificial Sequence: Synthetic oligonucleotide
aggagucucagccgcacgc

SEQ ID NO: 1373352 - RNA, 19 nt, Artificial Sequence
  Description of Artificial Sequence: Synthetic oligonucleotide
aggguaggagaacaguagg

SEQ ID NO: 1373353 - RNA, 19 nt, Artificial Sequence
  Description of Artificial Sequence: Synthetic oligonucleotide
agagugaagcgagugcucc

SEQ ID NO: 1373354 - RNA, 19 nt, Artificial Sequence
  Description of Artificial Sequence: Synthetic oligonucleotide
ggaacaggggaguaggugg

SEQ ID NO: 1373355 - RNA, 19 nt, Artificial Sequence
  Description of Artificial Sequence: Synthetic oligonucleotide
ucuuugcucgcucugggga

SEQ ID NO: 1373356 - RNA, 19 nt, Artificial Sequence
  Description of Artificial Sequence: Synthetic oligonucleotide
uccgaguagaagcugggca

SEQ ID NO: 1373357 - RNA, 19 nt, Artificial Sequence
  Description of Artificial Sequence: Synthetic oligonucleotide
caggacauuauggaaaccc

SEQ ID NO: 1373358 - RNA, 19 nt, Artificial Sequence
  Description of Artificial Sequence: Synthetic oligonucleotide
cacgcugaaacauuuggug

SEQ ID NO: 1373359 - RNA, 19 nt, Artificial Sequence
  Description of Artificial Sequence: Synthetic oligonucleotide
cacuuugacgcuuccaaag

SEQ ID NO: 1373360 - RNA, 19 nt, Artificial Sequence
  Description of Artificial Sequence: Synthetic oligonucleotide
acuuaggacugucauugag

SEQ ID NO: 1373361 - RNA, 19 nt, Artificial Sequence
  Description of Artificial Sequence: Synthetic oligonucleotide
aaguuaucagcuaugggau

SEQ ID NO: 1373362 - RNA, 19 nt, Artificial Sequence
  Description of Artificial Sequence: Synthetic oligonucleotide
agcagcaacccgugcaccc

SEQ ID NO: 1373363 - RNA, 19 nt, Artificial Sequence
  Description of Artificial Sequence: Synthetic oligonucleotide
uccucacccaagauggugc

SEQ ID NO: 1373364 - RNA, 19 nt, Artificial Sequence
  Description of Artificial Sequence: Synthetic oligonucleotide
ccuauguucacgcugaaac

SEQ ID NO: 1373365 - RNA, 19 nt, Artificial Sequence
  Description of Artificial Sequence: Synthetic oligonucleotide
aguauugggaacaggggag

SEQ ID NO: 1373366 - RNA, 19 nt, Artificial Sequence
  Description of Artificial Sequence: Synthetic oligonucleotide
cagaacucaagccccaggc

SEQ ID NO: 1373367 - RNA, 19 nt, Artificial Sequence
  Description of Artificial Sequence: Synthetic oligonucleotide
aaguagacuguaacuguuc

SEQ ID NO: 1373368 - RNA, 19 nt, Artificial Sequence
  Description of Artificial Sequence: Synthetic oligonucleotide
gacacucaguggcugacag

SEQ ID NO: 1373369 - RNA, 19 nt, Artificial Sequence
  Description of Artificial Sequence: Synthetic oligonucleotide
cugaauucgggcucgggac

SEQ ID NO: 1373370 - RNA, 19 nt, Artificial Sequence
  Description of Artificial Sequence: Synthetic oligonucleotide
aaagauguaaacggauuua

SEQ ID NO: 1373371 - RNA, 19 nt, Artificial Sequence
  Description of Artificial Sequence: Synthetic oligonucleotide
uauguucacgcugaaacau

SEQ ID NO: 1373372 - RNA, 19 nt, Artificial Sequence
  Description of Artificial Sequence: Synthetic oligonucleotide
uggguaaguuuguacuucc

SEQ ID NO: 1373373 - RNA, 19 nt, Artificial Sequence
  Description of Artificial Sequence: Synthetic oligonucleotide
aguucaguuaguauuggga

SEQ ID NO: 1373374 - RNA, 19 nt, Artificial Sequence
  Description of Artificial Sequence: Synthetic oligonucleotide
ucuagaguuccaguggcca

SEQ ID NO: 1373375 - RNA, 19 nt, Artificial Sequence
  Description of Artificial Sequence: Synthetic oligonucleotide
aacccuguggacccacaag

SEQ ID NO: 1373376 - RNA, 19 nt, Artificial Sequence
  Description of Artificial Sequence: Synthetic oligonucleotide
uccagaguagccacgucac

SEQ ID NO: 1373377 - RNA, 19 nt, Artificial Sequence
  Description of Artificial Sequence: Synthetic oligonucleotide
agguuaucugagcccagac

SEQ ID NO: 1373378 - RNA, 19 nt, Artificial Sequence
  Description of Artificial Sequence: Synthetic oligonucleotide
cugauugcuugucagccag

SEQ ID NO: 1373379 - RNA, 19 nt, Artificial Sequence
  Description of Artificial Sequence: Synthetic oligonucleotide
acauagauaagcaggggca

SEQ ID NO: 1373380 - RNA, 19 nt, Artificial Sequence
  Description of Artificial Sequence: Synthetic oligonucleotide
uucugacuaaggccugagg

SEQ ID NO: 1373381 - RNA, 19 nt, Artificial Sequence
  Description of Artificial Sequence: Synthetic oligonucleotide
accuguuuggguggggucc

SEQ ID NO: 1373382 - RNA, 19 nt, Artificial Sequence
  Description of Artificial Sequence: Synthetic oligonucleotide
guaggcucucuucacagug

SEQ ID NO: 1373383 - RNA, 19 nt, Artificial Sequence
  Description of Artificial Sequence: Synthetic oligonucleotide
ggcaguaggucauccaugg

SEQ ID NO: 1373384 - RNA, 19 nt, Artificial Sequence
  Description of Artificial Sequence: Synthetic oligonucleotide
gcaaccuucaacacgaccc

SEQ ID NO: 1373385 - RNA, 19 nt, Artificial Sequence
  Description of Artificial Sequence: Synthetic oligonucleotide
cucugauugcuugucagcc

SEQ ID NO: 1373386 - RNA, 19 nt, Artificial Sequence
  Description of Artificial Sequence: Synthetic oligonucleotide
ucacgcugaaacauuuggu

SEQ ID NO: 1373387 - RNA, 19 nt, Artificial Sequence
  Description of Artificial Sequence: Synthetic oligonucleotide
cuuaggacugucauugaga

SEQ ID NO: 1373388 - RNA, 19 nt, Artificial Sequence
  Description of Artificial Sequence: Synthetic oligonucleotide
ugaauucgggcucgggaca

SEQ ID NO: 1373389 - RNA, 19 nt, Artificial Sequence
  Description of Artificial Sequence: Synthetic oligonucleotide
agcuaugggaucacacugc

SEQ ID NO: 1373390 - RNA, 19 nt, Artificial Sequence
  Description of Artificial Sequence: Synthetic oligonucleotide
caaggguuuguuacagccc

SEQ ID NO: 1373391 - RNA, 19 nt, Artificial Sequence
  Description of Artificial Sequence: Synthetic oligonucleotide
cuucgugucagggaacagg

SEQ ID NO: 1373392 - RNA, 19 nt, Artificial Sequence
  Description of Artificial Sequence: Synthetic oligonucleotide
gacgcuuccaaagacuuuc

SEQ ID NO: 1373393 - RNA, 19 nt, Artificial Sequence
  Description of Artificial Sequence: Synthetic oligonucleotide
uucuugguccagaguagcc

SEQ ID NO: 1373394 - RNA, 19 nt, Artificial Sequence
  Description of Artificial Sequence: Synthetic oligonucleotide
ugagagagaggccuccauc

SEQ ID NO: 1373395 - RNA, 19 nt, Artificial Sequence
  Description of Artificial Sequence: Synthetic oligonucleotide
gcugguuucugacuaaggc

SEQ ID NO: 1373396 - RNA, 19 nt, Artificial Sequence
  Description of Artificial Sequence: Synthetic oligonucleotide
gagaauaucucugauugcu

SEQ ID NO: 1373397 - RNA, 19 nt, Artificial Sequence
  Description of Artificial Sequence: Synthetic oligonucleotide
guagagugugaagagcucc

SEQ ID NO: 1373398 - RNA, 19 nt, Artificial Sequence
  Description of Artificial Sequence: Synthetic oligonucleotide
aaccuaccaggacauuaug

SEQ ID NO: 1373399 - RNA, 19 nt, Artificial Sequence
  Description of Artificial Sequence: Synthetic oligonucleotide
cuuugacgcuuccaaagac

SEQ ID NO: 1373400 - RNA, 19 nt, Artificial Sequence
  Description of Artificial Sequence: Synthetic oligonucleotide
uguucacgcugaaacauuu

SEQ ID NO: 1373401 - RNA, 19 nt, Artificial Sequence
  Description of Artificial Sequence: Synthetic oligonucleotide
ucugauugcuugucagcca

SEQ ID NO: 1373402 - RNA, 19 nt, Artificial Sequence
  Description of Artificial Sequence: Synthetic oligonucleotide
cuugguccagaguagccac

SEQ ID NO: 1373403 - RNA, 19 nt, Artificial Sequence
  Description of Artificial Sequence: Synthetic oligonucleotide
gaagcgagugcuccucacc

SEQ ID NO: 1373404 - RNA, 19 nt, Artificial Sequence
  Description of Artificial Sequence: Synthetic oligonucleotide
gcugaucugugucauaggc

SEQ ID NO: 1373405 - RNA, 19 nt, Artificial Sequence
  Description of Artificial Sequence: Synthetic oligonucleotide
agucguacgucuuccuucu

SEQ ID NO: 1373406 - RNA, 19 nt, Artificial Sequence
  Description of Artificial Sequence: Synthetic oligonucleotide
ccaaggguuuguuacagcc

SEQ ID NO: 1373407 - RNA, 19 nt, Artificial Sequence
  Description of Artificial Sequence: Synthetic oligonucleotide
aacccgugcacccgcaggu

SEQ ID NO: 1373408 - RNA, 19 nt, Artificial Sequence
  Description of Artificial Sequence: Synthetic oligonucleotide
gacugucauugagagagag

SEQ ID NO: 1373409 - RNA, 19 nt, Artificial Sequence
  Description of Artificial Sequence: Synthetic oligonucleotide
guaggagaacaguaggcuc

SEQ ID NO: 1373410 - RNA, 19 nt, Artificial Sequence
  Description of Artificial Sequence: Synthetic oligonucleotide
uggcaaguuaucagcuaug

SEQ ID NO: 1373411 - RNA, 19 nt, Artificial Sequence
  Description of Artificial Sequence: Synthetic oligonucleotide
caguaggcucucuucacag

SEQ ID NO: 1373412 - RNA, 19 nt, Artificial Sequence
  Description of Artificial Sequence: Synthetic oligonucleotide
auaaauaaguagacuguaa

SEQ ID NO: 1373413 - RNA, 19 nt, Artificial Sequence
  Description of Artificial Sequence: Synthetic oligonucleotide
uugguccagaguagccacg

SEQ ID NO: 1373414 - RNA, 19 nt, Artificial Sequence
  Description of Artificial Sequence: Synthetic oligonucleotide
cuagaguuccaguggccag

SEQ ID NO: 1373415 - RNA, 19 nt, Artificial Sequence
  Description of Artificial Sequence: Synthetic oligonucleotide
guaggcgacccaaagcucc

SEQ ID NO: 1373416 - RNA, 19 nt, Artificial Sequence
  Description of Artificial Sequence: Synthetic oligonucleotide
agugaagcgagugcuccuc

SEQ ID NO: 1373417 - RNA, 19 nt, Artificial Sequence
  Description of Artificial Sequence: Synthetic oligonucleotide
ucacccaagauggugcaac

SEQ ID NO: 1373418 - RNA, 19 nt, Artificial Sequence
  Description of Artificial Sequence: Synthetic oligonucleotide
caacacgaccccuguaggc

SEQ ID NO: 1373419 - RNA, 19 nt, Artificial Sequence
  Description of Artificial Sequence: Synthetic oligonucleotide
gaccagagaauaucucuga

SEQ ID NO: 1373420 - RNA, 19 nt, Artificial Sequence
  Description of Artificial Sequence: Synthetic oligonucleotide
ggcaaguuaucagcuaugg

SEQ ID NO: 1373421 - RNA, 19 nt, Artificial Sequence
  Description of Artificial Sequence: Synthetic oligonucleotide
cuauguucacgcugaaaca

SEQ ID NO: 1373422 - RNA, 19 nt, Artificial Sequence
  Description of Artificial Sequence: Synthetic oligonucleotide
uucuggaugugcucauaac

SEQ ID NO: 1373423 - RNA, 19 nt, Artificial Sequence
  Description of Artificial Sequence: Synthetic oligonucleotide
caaagacuuuccuggggac

SEQ ID NO: 1373424 - RNA, 19 nt, Artificial Sequence
  Description of Artificial Sequence: Synthetic oligonucleotide
gaguucucuagaguuccag

SEQ ID NO: 1373425 - RNA, 19 nt, Artificial Sequence
  Description of Artificial Sequence: Synthetic oligonucleotide
uaggucauccauggguaag

SEQ ID NO: 1373426 - RNA, 19 nt, Artificial Sequence
  Description of Artificial Sequence: Synthetic oligonucleotide
gguuaucugagcccagacc

SEQ ID NO: 1373427 - RNA, 19 nt, Artificial Sequence
  Description of Artificial Sequence: Synthetic oligonucleotide
caggaaacacuugucccgg

SEQ ID NO: 1373428 - RNA, 19 nt, Artificial Sequence
  Description of Artificial Sequence: Synthetic oligonucleotide
aagguuaucugagcccaga

SEQ ID NO: 1373429 - RNA, 19 nt, Artificial Sequence
  Description of Artificial Sequence: Synthetic oligonucleotide
agcugaucugugucauagg

SEQ ID NO: 1373430 - RNA, 19 nt, Artificial Sequence
  Description of Artificial Sequence: Synthetic oligonucleotide
uaggcacuuaggacuguca

SEQ ID NO: 1373431 - RNA, 19 nt, Artificial Sequence
  Description of Artificial Sequence: Synthetic oligonucleotide
uccaggcaaaagguuaucu

SEQ ID NO: 1373432 - RNA, 19 nt, Artificial Sequence
  Description of Artificial Sequence: Synthetic oligonucleotide
aaacccuguggacccacaa

SEQ ID NO: 1373433 - RNA, 19 nt, Artificial Sequence
  Description of Artificial Sequence: Synthetic oligonucleotide
cucuuugcucgcucugggg

SEQ ID NO: 1373434 - RNA, 19 nt, Artificial Sequence
  Description of Artificial Sequence: Synthetic oligonucleotide
cagucguacgucuuccuuc

SEQ ID NO: 1373435 - RNA, 19 nt, Artificial Sequence
  Description of Artificial Sequence: Synthetic oligonucleotide
aaugcgcaauaaauaagua

SEQ ID NO: 1373436 - RNA, 19 nt, Artificial Sequence
  Description of Artificial Sequence: Synthetic oligonucleotide
cuuugcucgcucuggggac

SEQ ID NO: 1373437 - RNA, 19 nt, Artificial Sequence
  Description of Artificial Sequence: Synthetic oligonucleotide
auaggcacuuaggacuguc

SEQ ID NO: 1373438 - RNA, 19 nt, Artificial Sequence
  Description of Artificial Sequence: Synthetic oligonucleotide
gaaacauuugguggaucca

SEQ ID NO: 1373439 - RNA, 19 nt, Artificial Sequence
  Description of Artificial Sequence: Synthetic oligonucleotide
cucuagaguuccaguggcc

SEQ ID NO: 1373440 - RNA, 19 nt, Artificial Sequence
  Description of Artificial Sequence: Synthetic oligonucleotide
gcaaguuaucagcuauggg

SEQ ID NO: 1373441 - RNA, 19 nt, Artificial Sequence
  Description of Artificial Sequence: Synthetic oligonucleotide
gucucagccgcacgcagcc

SEQ ID NO: 1373442 - RNA, 19 nt, Artificial Sequence
  Description of Artificial Sequence: Synthetic oligonucleotide
cugugucauaggcacuuag

SEQ ID NO: 1373443 - RNA, 19 nt, Artificial Sequence
  Description of Artificial Sequence: Synthetic oligonucleotide
gaacaggggaguagguggc

SEQ ID NO: 1373444 - RNA, 19 nt, Artificial Sequence
  Description of Artificial Sequence: Synthetic oligonucleotide
cuugucccggaccagagaa

SEQ ID NO: 1373445 - RNA, 19 nt, Artificial Sequence
  Description of Artificial Sequence: Synthetic oligonucleotide
aggcccuauguucacgcug

SEQ ID NO: 1373446 - RNA, 19 nt, Artificial Sequence
  Description of Artificial Sequence: Synthetic oligonucleotide
agcaaaacaccaucuccuu

SEQ ID NO: 1373447 - RNA, 19 nt, Artificial Sequence
  Description of Artificial Sequence: Synthetic oligonucleotide
accagagaauaucucugau

SEQ ID NO: 1373448 - RNA, 19 nt, Artificial Sequence
  Description of Artificial Sequence: Synthetic oligonucleotide
aaagguuaucugagcccag

SEQ ID NO: 1373449 - RNA, 19 nt, Artificial Sequence
  Description of Artificial Sequence: Synthetic oligonucleotide
cugaucugugucauaggca

SEQ ID NO: 1373450 - RNA, 19 nt, Artificial Sequence
  Description of Artificial Sequence: Synthetic oligonucleotide
ucccgaggguccacugugg

SEQ ID NO: 1373451 - RNA, 19 nt, Artificial Sequence
  Description of Artificial Sequence: Synthetic oligonucleotide
gacaccguggucucgauuu

SEQ ID NO: 1373452 - RNA, 19 nt, Artificial Sequence
  Description of Artificial Sequence: Synthetic oligonucleotide
accguggucucgauuuccc

SEQ ID NO: 1373453 - RNA, 19 nt, Artificial Sequence
  Description of Artificial Sequence: Synthetic oligonucleotide
agucucagccgcacgcagc

SEQ ID NO: 1373454 - RNA, 19 nt, Artificial Sequence
  Description of Artificial Sequence: Synthetic oligonucleotide
aguagccacgucaccagag

SEQ ID NO: 1373455 - RNA, 19 nt, Artificial Sequence
  Description of Artificial Sequence: Synthetic oligonucleotide
aggcacuuaggacugucau

SEQ ID NO: 1373456 - RNA, 19 nt, Artificial Sequence
  Description of Artificial Sequence: Synthetic oligonucleotide
cuguaggcgacccaaagcu

SEQ ID NO: 1373457 - RNA, 19 nt, Artificial Sequence
  Description of Artificial Sequence: Synthetic oligonucleotide
aguaggcucucuucacagu

SEQ ID NO: 1373458 - RNA, 19 nt, Artificial Sequence
  Description of Artificial Sequence: Synthetic oligonucleotide
gugugaagagcuccgagua

SEQ ID NO: 1373459 - RNA, 19 nt, Artificial Sequence
  Description of Artificial Sequence: Synthetic oligonucleotide
aggacauuauggaaacccu

SEQ ID NO: 1373460 - RNA, 19 nt, Artificial Sequence
  Description of Artificial Sequence: Synthetic oligonucleotide
ugcuugucagccagagguc

SEQ ID NO: 1373461 - RNA, 19 nt, Artificial Sequence
  Description of Artificial Sequence: Synthetic oligonucleotide
agccacgucaccagaguuc

SEQ ID NO: 1373462 - RNA, 19 nt, Artificial Sequence
  Description of Artificial Sequence: Synthetic oligonucleotide
ugaagcgagugcuccucac

SEQ ID NO: 1373463 - RNA, 19 nt, Artificial Sequence
  Description of Artificial Sequence: Synthetic oligonucleotide
acccgagacaccguggucu

SEQ ID NO: 1373464 - RNA, 19 nt, Artificial Sequence
  Description of Artificial Sequence: Synthetic oligonucleotide
uugagagagaggccuccau

SEQ ID NO: 1373465 - RNA, 19 nt, Artificial Sequence
  Description of Artificial Sequence: Synthetic oligonucleotide
ugauugcuugucagccaga

SEQ ID NO: 1373466 - RNA, 19 nt, Artificial Sequence
  Description of Artificial Sequence: Synthetic oligonucleotide
ggcucgggacaccacauag

SEQ ID NO: 1373467 - RNA, 19 nt, Artificial Sequence
  Description of Artificial Sequence: Synthetic oligonucleotide
ugcucauaacaggacucca

SEQ ID NO: 1373468 - RNA, 19 nt, Artificial Sequence
  Description of Artificial Sequence: Synthetic oligonucleotide
uggcccuggcgcuguaagg

SEQ ID NO: 1373469 - RNA, 19 nt, Artificial Sequence
  Description of Artificial Sequence: Synthetic oligonucleotide
aguggcaaguuaucagcua

SEQ ID NO: 1373470 - RNA, 19 nt, Artificial Sequence
  Description of Artificial Sequence: Synthetic oligonucleotide
ggugggguccaucauguca

SEQ ID NO: 1373471 - RNA, 19 nt, Artificial Sequence
  Description of Artificial Sequence: Synthetic oligonucleotide
cagugagcaagaagucaug

SEQ ID NO: 1373472 - RNA, 19 nt, Artificial Sequence
  Description of Artificial Sequence: Synthetic oligonucleotide
cgggacaccacauagauaa

SEQ ID NO: 1373473 - RNA, 19 nt, Artificial Sequence
  Description of Artificial Sequence: Synthetic oligonucleotide
ggaccagagaauaucucug

SEQ ID NO: 1373474 - RNA, 19 nt, Artificial Sequence
  Description of Artificial Sequence: Synthetic oligonucleotide
aggaccagaggcccaaguu

SEQ ID NO: 1373475 - RNA, 19 nt, Artificial Sequence
  Description of Artificial Sequence: Synthetic oligonucleotide
caacccgugcacccgcagg

SEQ ID NO: 1373476 - RNA, 19 nt, Artificial Sequence
  Description of Artificial Sequence: Synthetic oligonucleotide
uaggacugucauugagaga

SEQ ID NO: 1373477 - RNA, 19 nt, Artificial Sequence
  Description of Artificial Sequence: Synthetic oligonucleotide
acaccguggucucgauuuc

SEQ ID NO: 1373478 - RNA, 19 nt, Artificial Sequence
  Description of Artificial Sequence: Synthetic oligonucleotide
cacuugucccggaccagag

SEQ ID NO: 1373479 - RNA, 19 nt, Artificial Sequence
  Description of Artificial Sequence: Synthetic oligonucleotide
gacgaggggcagcagcaac

SEQ ID NO: 1373480 - RNA, 19 nt, Artificial Sequence
  Description of Artificial Sequence: Synthetic oligonucleotide
caggcggugcagucguacg

SEQ ID NO: 1373481 - RNA, 19 nt, Artificial Sequence
  Description of Artificial Sequence: Synthetic oligonucleotide
ggaccagaggcccaaguuc

SEQ ID NO: 1373482 - RNA, 19 nt, Artificial Sequence
  Description of Artificial Sequence: Synthetic oligonucleotide
uaggcgacccaaagcuccu

SEQ ID NO: 1373483 - RNA, 19 nt, Artificial Sequence
  Description of Artificial Sequence: Synthetic oligonucleotide
gaauucgggcucgggacac

SEQ ID NO: 1373484 - RNA, 19 nt, Artificial Sequence
  Description of Artificial Sequence: Synthetic oligonucleotide
uuugcucgcucuggggaca

SEQ ID NO: 1373485 - RNA, 19 nt, Artificial Sequence
  Description of Artificial Sequence: Synthetic oligonucleotide
acgcuuccaaagacuuucc

SEQ ID NO: 1373486 - RNA, 19 nt, Artificial Sequence
  Description of Artificial Sequence: Synthetic oligonucleotide
ugggaacaggggaguaggu

SEQ ID NO: 1373487 - RNA, 19 nt, Artificial Sequence
  Description of Artificial Sequence: Synthetic oligonucleotide
ucccggaccagagaauauc

SEQ ID NO: 1373488 - RNA, 19 nt, Artificial Sequence
  Description of Artificial Sequence: Synthetic oligonucleotide
uccccucacaugucaauuu

SEQ ID NO: 1373489 - RNA, 19 nt, Artificial Sequence
  Description of Artificial Sequence: Synthetic oligonucleotide
gcugaauucgggcucggga

SEQ ID NO: 1373490 - RNA, 19 nt, Artificial Sequence
  Description of Artificial Sequence: Synthetic oligonucleotide
agcuucgugucagggaaca

SEQ ID NO: 1373491 - RNA, 19 nt, Artificial Sequence
  Description of Artificial Sequence: Synthetic oligonucleotide
caauuuugucccaaggguu

SEQ ID NO: 1373492 - RNA, 19 nt, Artificial Sequence
  Description of Artificial Sequence: Synthetic oligonucleotide
cagagugaagcgagugcuc

SEQ ID NO: 1373493 - RNA, 19 nt, Artificial Sequence
  Description of Artificial Sequence: Synthetic oligonucleotide
acacgaccccuguaggcga

SEQ ID NO: 1373494 - RNA, 19 nt, Artificial Sequence
  Description of Artificial Sequence: Synthetic oligonucleotide
gcagcuucgugucagggaa

SEQ ID NO: 1373495 - RNA, 19 nt, Artificial Sequence
  Description of Artificial Sequence: Synthetic oligonucleotide
aacaggggaguagguggca

SEQ ID NO: 1373496 - RNA, 19 nt, Artificial Sequence
  Description of Artificial Sequence: Synthetic oligonucleotide
agaauaucucugauugcuu

SEQ ID NO: 1373497 - RNA, 19 nt, Artificial Sequence
  Description of Artificial Sequence: Synthetic oligonucleotide
uucucccgaggguccacug

SEQ ID NO: 1373498 - RNA, 19 nt, Artificial Sequence
  Description of Artificial Sequence: Synthetic oligonucleotide
guucacgcugaaacauuug

SEQ ID NO: 1373499 - RNA, 19 nt, Artificial Sequence
  Description of Artificial Sequence: Synthetic oligonucleotide
aggcggugcagucguacgu

SEQ ID NO: 1373500 - RNA, 19 nt, Artificial Sequence
  Description of Artificial Sequence: Synthetic oligonucleotide
guggcaaguuaucagcuau

SEQ ID NO: 1373501 - RNA, 19 nt, Artificial Sequence
  Description of Artificial Sequence: Synthetic oligonucleotide
guagacuguaacuguuccu

SEQ ID NO: 1373502 - RNA, 19 nt, Artificial Sequence
  Description of Artificial Sequence: Synthetic oligonucleotide
cccagaugcugaauucggg

SEQ ID NO: 1373503 - RNA, 19 nt, Artificial Sequence
  Description of Artificial Sequence: Synthetic oligonucleotide
cacgcagcccagagagugc

SEQ ID NO: 1373504 - RNA, 19 nt, Artificial Sequence
  Description of Artificial Sequence: Synthetic oligonucleotide
ccgcacgcagcccagagag

SEQ ID NO: 1373505 - RNA, 19 nt, Artificial Sequence
  Description of Artificial Sequence: Synthetic oligonucleotide
agcgagugcuccucaccca

SEQ ID NO: 1373506 - RNA, 19 nt, Artificial Sequence
  Description of Artificial Sequence: Synthetic oligonucleotide
ucgggacaccacauagaua

SEQ ID NO: 1373507 - RNA, 19 nt, Artificial Sequence
  Description of Artificial Sequence: Synthetic oligonucleotide
aggggcaguaggucaucca

SEQ ID NO: 1373508 - RNA, 19 nt, Artificial Sequence
  Description of Artificial Sequence: Synthetic oligonucleotide
ggugcagucguacgucuuc

SEQ ID NO: 1373509 - RNA, 19 nt, Artificial Sequence
  Description of Artificial Sequence: Synthetic oligonucleotide
cuccgaguagaagcugggc

SEQ ID NO: 1373510 - RNA, 19 nt, Artificial Sequence
  Description of Artificial Sequence: Synthetic oligonucleotide
gcgcaauaaauaaguagac

SEQ ID NO: 1373511 - RNA, 19 nt, Artificial Sequence
  Description of Artificial Sequence: Synthetic oligonucleotide
gguaggagaacaguaggcu

SEQ ID NO: 1373512 - RNA, 19 nt, Artificial Sequence
  Description of Artificial Sequence: Synthetic oligonucleotide
gaaccuaccaggacauuau

SEQ ID NO: 1373513 - RNA, 19 nt, Artificial Sequence
  Description of Artificial Sequence: Synthetic oligonucleotide
gcacgcagcccagagagug

SEQ ID NO: 1373514 - RNA, 19 nt, Artificial Sequence
  Description of Artificial Sequence: Synthetic oligonucleotide
cagguggaucucagcuccc

SEQ ID NO: 1373515 - RNA, 19 nt, Artificial Sequence
  Description of Artificial Sequence: Synthetic oligonucleotide
caccuguuugggugggguc

SEQ ID NO: 1373516 - RNA, 19 nt, Artificial Sequence
  Description of Artificial Sequence: Synthetic oligonucleotide
gggcaugucccucaaggaa

SEQ ID NO: 1373517 - RNA, 19 nt, Artificial Sequence
  Description of Artificial Sequence: Synthetic oligonucleotide
ggcccuggcgcuguaaggc

SEQ ID NO: 1373518 - RNA, 19 nt, Artificial Sequence
  Description of Artificial Sequence: Synthetic oligonucleotide
ggaaccuaccaggacauua

SEQ ID NO: 1373519 - RNA, 19 nt, Artificial Sequence
  Description of Artificial Sequence: Synthetic oligonucleotide
guacuuccgggcccagcac

SEQ ID NO: 1373520 - RNA, 19 nt, Artificial Sequence
  Description of Artificial Sequence: Synthetic oligonucleotide
auucgggcucgggacacca

SEQ ID NO: 1373521 - RNA, 19 nt, Artificial Sequence
  Description of Artificial Sequence: Synthetic oligonucleotide
guagccacgucaccagagu

SEQ ID NO: 1373522 - RNA, 19 nt, Artificial Sequence
  Description of Artificial Sequence: Synthetic oligonucleotide
acgcagcccagagagugcu

SEQ ID NO: 1373523 - RNA, 19 nt, Artificial Sequence
  Description of Artificial Sequence: Synthetic oligonucleotide
auguucacgcugaaacauu

SEQ ID NO: 1373524 - RNA, 19 nt, Artificial Sequence
  Description of Artificial Sequence: Synthetic oligonucleotide
uguuugggugggguccauc

SEQ ID NO: 1373525 - RNA, 19 nt, Artificial Sequence
  Description of Artificial Sequence: Synthetic oligonucleotide
accccuguaggcgacccaa

SEQ ID NO: 1373526 - RNA, 19 nt, Artificial Sequence
  Description of Artificial Sequence: Synthetic oligonucleotide
uucgggcucgggacaccac

SEQ ID NO: 1373527 - RNA, 19 nt, Artificial Sequence
  Description of Artificial Sequence: Synthetic oligonucleotide
gagugaagcgagugcuccu

SEQ ID NO: 1373528 - RNA, 19 nt, Artificial Sequence
  Description of Artificial Sequence: Synthetic oligonucleotide
cuggcgcuguaaggcaacc

SEQ ID NO: 1373529 - RNA, 19 nt, Artificial Sequence
  Description of Artificial Sequence: Synthetic oligonucleotide
cacgucaccagaguucucu

SEQ ID NO: 1373530 - RNA, 19 nt, Artificial Sequence
  Description of Artificial Sequence: Synthetic oligonucleotide
cacuuaggacugucauuga

SEQ ID NO: 1373531 - RNA, 19 nt, Artificial Sequence
  Description of Artificial Sequence: Synthetic oligonucleotide
guauugggaacaggggagu

SEQ ID NO: 1373532 - RNA, 19 nt, Artificial Sequence
  Description of Artificial Sequence: Synthetic oligonucleotide
gucacggaucagguggauc

SEQ ID NO: 1373533 - RNA, 19 nt, Artificial Sequence
  Description of Artificial Sequence: Synthetic oligonucleotide
uggcgcuguaaggcaaccu

SEQ ID NO: 1373534 - RNA, 19 nt, Artificial Sequence
  Description of Artificial Sequence: Synthetic oligonucleotide
acgucaccagaguucucua

SEQ ID NO: 1373535 - RNA, 19 nt, Artificial Sequence
  Description of Artificial Sequence: Synthetic oligonucleotide
gcuccgaguagaagcuggg

SEQ ID NO: 1373536 - RNA, 19 nt, Artificial Sequence
  Description of Artificial Sequence: Synthetic oligonucleotide
ggcccuauguucacgcuga

SEQ ID NO: 1373537 - RNA, 19 nt, Artificial Sequence
  Description of Artificial Sequence: Synthetic oligonucleotide
agacaccguggucucgauu

SEQ ID NO: 1373538 - RNA, 19 nt, Artificial Sequence
  Description of Artificial Sequence: Synthetic oligonucleotide
ccgaguagaagcugggcaa

SEQ ID NO: 1373539 - RNA, 19 nt, Artificial Sequence
  Description of Artificial Sequence: Synthetic oligonucleotide
gggguccaucaugucacgg

SEQ ID NO: 1373540 - RNA, 19 nt, Artificial Sequence
  Description of Artificial Sequence: Synthetic oligonucleotide
cauccauggguaaguuugu

SEQ ID NO: 1373541 - RNA, 19 nt, Artificial Sequence
  Description of Artificial Sequence: Synthetic oligonucleotide
aggguuuguuacagcccug

SEQ ID NO: 1373542 - RNA, 19 nt, Artificial Sequence
  Description of Artificial Sequence: Synthetic oligonucleotide
cccaaggguuuguuacagc

SEQ ID NO: 1373543 - RNA, 19 nt, Artificial Sequence
  Description of Artificial Sequence: Synthetic oligonucleotide
ccucacaugucaauuuugu

SEQ ID NO: 1373544 - RNA, 19 nt, Artificial Sequence
  Description of Artificial Sequence: Synthetic oligonucleotide
gucguacgucuuccuucug

SEQ ID NO: 1373545 - RNA, 19 nt, Artificial Sequence
  Description of Artificial Sequence: Synthetic oligonucleotide
gcucauaacaggacuccaa

SEQ ID NO: 1373546 - RNA, 19 nt, Artificial Sequence
  Description of Artificial Sequence: Synthetic oligonucleotide
ugucacggaucagguggau

SEQ ID NO: 1373547 - RNA, 19 nt, Artificial Sequence
  Description of Artificial Sequence: Synthetic oligonucleotide
cacggaucagguggaucuc

SEQ ID NO: 1373548 - RNA, 19 nt, Artificial Sequence
  Description of Artificial Sequence: Synthetic oligonucleotide
caaggaccagaggcccaag

SEQ ID NO: 1373549 - RNA, 19 nt, Artificial Sequence
  Description of Artificial Sequence: Synthetic oligonucleotide
cacccgagacaccgugguc

SEQ ID NO: 1373550 - RNA, 19 nt, Artificial Sequence
  Description of Artificial Sequence: Synthetic oligonucleotide
gaccccuguaggcgaccca

SEQ ID NO: 1373551 - RNA, 19 nt, Artificial Sequence
  Description of Artificial Sequence: Synthetic oligonucleotide
caccagaguucucuagagu

SEQ ID NO: 1373552 - RNA, 19 nt, Artificial Sequence
  Description of Artificial Sequence: Synthetic oligonucleotide
cguacgucuuccuucugga

SEQ ID NO: 1373553 - RNA, 19 nt, Artificial Sequence
  Description of Artificial Sequence: Synthetic oligonucleotide
ccguggucucgauuucccc

SEQ ID NO: 1373554 - RNA, 19 nt, Artificial Sequence
  Description of Artificial Sequence: Synthetic oligonucleotide
cccgcagguuccuugucuc

SEQ ID NO: 1373555 - RNA, 19 nt, Artificial Sequence
  Description of Artificial Sequence: Synthetic oligonucleotide
ggggcaguaggucauccau

SEQ ID NO: 1373556 - RNA, 19 nt, Artificial Sequence
  Description of Artificial Sequence: Synthetic oligonucleotide
aggcccaaguucaguuagu

SEQ ID NO: 1373557 - RNA, 19 nt, Artificial Sequence
  Description of Artificial Sequence: Synthetic oligonucleotide
gcaacccgugcacccgcag

SEQ ID NO: 1373558 - RNA, 19 nt, Artificial Sequence
  Description of Artificial Sequence: Synthetic oligonucleotide
gggacaccacauagauaag

SEQ ID NO: 1373559 - RNA, 19 nt, Artificial Sequence
  Description of Artificial Sequence: Synthetic oligonucleotide
ggagucucagccgcacgca

SEQ ID NO: 1373560 - RNA, 19 nt, Artificial Sequence
  Description of Artificial Sequence: Synthetic oligonucleotide
gcgagugcuccucacccaa

SEQ ID NO: 1373561 - RNA, 19 nt, Artificial Sequence
  Description of Artificial Sequence: Synthetic oligonucleotide
cacccaagauggugcaacu

SEQ ID NO: 1373562 - RNA, 19 nt, Artificial Sequence
  Description of Artificial Sequence: Synthetic oligonucleotide
cgcuguaaggcaaccuuca

SEQ ID NO: 1373563 - RNA, 19 nt, Artificial Sequence
  Description of Artificial Sequence: Synthetic oligonucleotide
gcgcuguaaggcaaccuuc

SEQ ID NO: 1373564 - RNA, 19 nt, Artificial Sequence
  Description of Artificial Sequence: Synthetic oligonucleotide
guacgucuuccuucuggau

SEQ ID NO: 1373565 - RNA, 19 nt, Artificial Sequence
  Description of Artificial Sequence: Synthetic oligonucleotide
ggcggugcagucguacguc

SEQ ID NO: 1373566 - RNA, 19 nt, Artificial Sequence
  Description of Artificial Sequence: Synthetic oligonucleotide
uggaaccuaccaggacauu

SEQ ID NO: 1373567 - RNA, 19 nt, Artificial Sequence
  Description of Artificial Sequence: Synthetic oligonucleotide
gcuucgugucagggaacag

SEQ ID NO: 1373568 - RNA, 19 nt, Artificial Sequence
  Description of Artificial Sequence: Synthetic oligonucleotide
uggcaaugcccuggcugua

SEQ ID NO: 1373569 - RNA, 19 nt, Artificial Sequence
  Description of Artificial Sequence: Synthetic oligonucleotide
ccagagaauaucucugauu

SEQ ID NO: 1373570 - RNA, 19 nt, Artificial Sequence
  Description of Artificial Sequence: Synthetic oligonucleotide
cggaccagagaauaucucu

SEQ ID NO: 1373571 - RNA, 19 nt, Artificial Sequence
  Description of Artificial Sequence: Synthetic oligonucleotide
ggcccaaguucaguuagua

SEQ ID NO: 1373572 - RNA, 19 nt, Artificial Sequence
  Description of Artificial Sequence: Synthetic oligonucleotide
agcaacccgugcacccgca

SEQ ID NO: 1373573 - RNA, 19 nt, Artificial Sequence
  Description of Artificial Sequence: Synthetic oligonucleotide
cacccgcagguuccuuguc

SEQ ID NO: 1373574 - RNA, 19 nt, Artificial Sequence
  Description of Artificial Sequence: Synthetic oligonucleotide
cccuguggacccacaagga

SEQ ID NO: 1373575 - RNA, 19 nt, Artificial Sequence
  Description of Artificial Sequence: Synthetic oligonucleotide
gccccaggcccuauguuca

SEQ ID NO: 1373576 - RNA, 19 nt, Artificial Sequence
  Description of Artificial Sequence: Synthetic oligonucleotide
cccgagacaccguggucuc

SEQ ID NO: 1373577 - RNA, 19 nt, Artificial Sequence
  Description of Artificial Sequence: Synthetic oligonucleotide
ccucacccaagauggugca

SEQ ID NO: 1373578 - RNA, 19 nt, Artificial Sequence
  Description of Artificial Sequence: Synthetic oligonucleotide
gcacccgagacaccguggu

SEQ ID NO: 1373579 - RNA, 19 nt, Artificial Sequence
  Description of Artificial Sequence: Synthetic oligonucleotide
gcccuggcgcuguaaggca

SEQ ID NO: 1373580 - RNA, 19 nt, Artificial Sequence
  Description of Artificial Sequence: Synthetic oligonucleotide
cccaggcccuauguucacg

SEQ ID NO: 1373581 - RNA, 19 nt, Artificial Sequence
  Description of Artificial Sequence: Synthetic oligonucleotide
cgcaauaaauaaguagacu

SEQ ID NO: 1373582 - RNA, 19 nt, Artificial Sequence
  Description of Artificial Sequence: Synthetic oligonucleotide
cgagugcuccucacccaag

SEQ ID NO: 1373583 - RNA, 19 nt, Artificial Sequence
  Description of Artificial Sequence: Synthetic oligonucleotide
gaggguccacuguggugau

SEQ ID NO: 1373584 - RNA, 19 nt, Artificial Sequence
  Description of Artificial Sequence: Synthetic oligonucleotide
gcagucguacgucuuccuu

SEQ ID NO: 1373585 - RNA, 19 nt, Artificial Sequence
  Description of Artificial Sequence: Synthetic oligonucleotide
caggcccuauguucacgcu

SEQ ID NO: 1373586 - RNA, 19 nt, Artificial Sequence
  Description of Artificial Sequence: Synthetic oligonucleotide
ggaacuccagcagcuucgu

SEQ ID NO: 1373587 - RNA, 19 nt, Artificial Sequence
  Description of Artificial Sequence: Synthetic oligonucleotide
acccgugcacccgcagguu

SEQ ID NO: 1373588 - RNA, 19 nt, Artificial Sequence
  Description of Artificial Sequence: Synthetic oligonucleotide
ccuguuuggguggggucca

SEQ ID NO: 1373589 - RNA, 19 nt, Artificial Sequence
  Description of Artificial Sequence: Synthetic oligonucleotide
gccugccuugacccaggca

SEQ ID NO: 1373590 - RNA, 19 nt, Artificial Sequence
  Description of Artificial Sequence: Synthetic oligonucleotide
ccgagacaccguggucucg

SEQ ID NO: 1373591 - RNA, 19 nt, Artificial Sequence
  Description of Artificial Sequence: Synthetic oligonucleotide
gcggugcagucguacgucu

SEQ ID NO: 1373592 - RNA, 19 nt, Artificial Sequence
  Description of Artificial Sequence: Synthetic oligonucleotide
cgagacaccguggucucga

SEQ ID NO: 1373593 - RNA, 19 nt, Artificial Sequence
  Description of Artificial Sequence: Synthetic oligonucleotide
gggcucgggacaccacaua

SEQ ID NO: 1373594 - RNA, 19 nt, Artificial Sequence
  Description of Artificial Sequence: Synthetic oligonucleotide
gucccggaccagagaauau

SEQ ID NO: 1373595 - RNA, 19 nt, Artificial Sequence
  Description of Artificial Sequence: Synthetic oligonucleotide
gcccuauguucacgcugaa

SEQ ID NO: 1373596 - RNA, 19 nt, Artificial Sequence
  Description of Artificial Sequence: Synthetic oligonucleotide
ccacacuuucugagaggcu

SEQ ID NO: 1373597 - RNA, 19 nt, Artificial Sequence
  Description of Artificial Sequence: Synthetic oligonucleotide
ccccuguaggcgacccaaa

SEQ ID NO: 1373598 - RNA, 19 nt, Artificial Sequence
  Description of Artificial Sequence: Synthetic oligonucleotide
cgauuuccccauaggucuu

SEQ ID NO: 1373599 - RNA, 19 nt, Artificial Sequence
  Description of Artificial Sequence: Synthetic oligonucleotide
cgggcucgggacaccacau

SEQ ID NO: 1373600 - RNA, 19 nt, Artificial Sequence
  Description of Artificial Sequence: Synthetic oligonucleotide
cggugcagucguacgucuu

SEQ ID NO: 1373601 - RNA, 19 nt, Artificial Sequence
  Description of Artificial Sequence: Synthetic oligonucleotide
aaucacaguaaauguaccc

SEQ ID NO: 1373602 - RNA, 19 nt, Artificial Sequence
  Description of Artificial Sequence: Synthetic oligonucleotide
aaaucaaacauaaacagcu

SEQ ID NO: 1373603 - RNA, 19 nt, Artificial Sequence
  Description of Artificial Sequence: Synthetic oligonucleotide
aaauaagacguucaggccu

SEQ ID NO: 1373604 - RNA, 19 nt, Artificial Sequence
  Description of Artificial Sequence: Synthetic oligonucleotide
aagaacaacgaccggcagc

SEQ ID NO: 1373605 - RNA, 19 nt, Artificial Sequence
  Description of Artificial Sequence: Synthetic oligonucleotide
ucuucuaaacauuucaacu

SEQ ID NO: 1373606 - RNA, 19 nt, Artificial Sequence
  Description of Artificial Sequence: Synthetic oligonucleotide
uuuauaagcagcuucccga

SEQ ID NO: 1373607 - RNA, 19 nt, Artificial Sequence
  Description of Artificial Sequence: Synthetic oligonucleotide
uuaucaucuaguaauuucu

SEQ ID NO: 1373608 - RNA, 19 nt, Artificial Sequence
  Description of Artificial Sequence: Synthetic oligonucleotide
aggaucuugacauugaggu

SEQ ID NO: 1373609 - RNA, 19 nt, Artificial Sequence
  Description of Artificial Sequence: Synthetic oligonucleotide
uguuaaauaagacguucag

SEQ ID NO: 1373610 - RNA, 19 nt, Artificial Sequence
  Description of Artificial Sequence: Synthetic oligonucleotide
aacauaaacagcucagcca

SEQ ID NO: 1373611 - RNA, 19 nt, Artificial Sequence
  Description of Artificial Sequence: Synthetic oligonucleotide
cuuucagagaguuugucag

SEQ ID NO: 1373612 - RNA, 19 nt, Artificial Sequence
  Description of Artificial Sequence: Synthetic oligonucleotide
uucagcauaagaacaacga

SEQ ID NO: 1373613 - RNA, 19 nt, Artificial Sequence
  Description of Artificial Sequence: Synthetic oligonucleotide
uauaaggugaugcccagca

SEQ ID NO: 1373614 - RNA, 19 nt, Artificial Sequence
  Description of Artificial Sequence: Synthetic oligonucleotide
ucaauauuauaccucucug

SEQ ID NO: 1373615 - RNA, 19 nt, Artificial Sequence
  Description of Artificial Sequence: Synthetic oligonucleotide
uucuaaacauuucaacuga

SEQ ID NO: 1373616 - RNA, 19 nt, Artificial Sequence
  Description of Artificial Sequence: Synthetic oligonucleotide
uacuaaguuugccagacga

SEQ ID NO: 1373617 - RNA, 19 nt, Artificial Sequence
  Description of Artificial Sequence: Synthetic oligonucleotide
agcauaagaacaacgaccg

SEQ ID NO: 1373618 - RNA, 19 nt, Artificial Sequence
  Description of Artificial Sequence: Synthetic oligonucleotide
aaccuacuaaguuugccag

SEQ ID NO: 1373619 - RNA, 19 nt, Artificial Sequence
  Description of Artificial Sequence: Synthetic oligonucleotide
gaugaggacagucuguggc

SEQ ID NO: 1373620 - RNA, 19 nt, Artificial Sequence
  Description of Artificial Sequence: Synthetic oligonucleotide
ucuaguaauuucuggagac

SEQ ID NO: 1373621 - RNA, 19 nt, Artificial Sequence
  Description of Artificial Sequence: Synthetic oligonucleotide
aaccuucggauucaugaac

SEQ ID NO: 1373622 - RNA, 19 nt, Artificial Sequence
  Description of Artificial Sequence: Synthetic oligonucleotide
caauauuauaccucucugc

SEQ ID NO: 1373623 - RNA, 19 nt, Artificial Sequence
  Description of Artificial Sequence: Synthetic oligonucleotide
gaagguucagcauaagaac

SEQ ID NO: 1373624 - RNA, 19 nt, Artificial Sequence
  Description of Artificial Sequence: Synthetic oligonucleotide
ucaacugaccagcauuagg

SEQ ID NO: 1373625 - RNA, 19 nt, Artificial Sequence
  Description of Artificial Sequence: Synthetic oligonucleotide
ucaaugacuguguaacucc

SEQ ID NO: 1373626 - RNA, 19 nt, Artificial Sequence
  Description of Artificial Sequence: Synthetic oligonucleotide
acaugcucgcuccacaagc

SEQ ID NO: 1373627 - RNA, 19 nt, Artificial Sequence
  Description of Artificial Sequence: Synthetic oligonucleotide
uguagaccaucaaugacug

SEQ ID NO: 1373628 - RNA, 19 nt, Artificial Sequence
  Description of Artificial Sequence: Synthetic oligonucleotide
ucgguagucauuugaaaag

SEQ ID NO: 1373629 - RNA, 19 nt, Artificial Sequence
  Description of Artificial Sequence: Synthetic oligonucleotide
gaauggauggaacuucugc

SEQ ID NO: 1373630 - RNA, 19 nt, Artificial Sequence
  Description of Artificial Sequence: Synthetic oligonucleotide
guaaauguaccccagcaac

SEQ ID NO: 1373631 - RNA, 19 nt, Artificial Sequence
  Description of Artificial Sequence: Synthetic oligonucleotide
gauguggcuuguuugcucg

SEQ ID NO: 1373632 - RNA, 19 nt, Artificial Sequence
  Description of Artificial Sequence: Synthetic oligonucleotide
gaaccaagucaucugaggc

SEQ ID NO: 1373633 - RNA, 19 nt, Artificial Sequence
  Description of Artificial Sequence: Synthetic oligonucleotide
aaugggaagguucagcaua

SEQ ID NO: 1373634 - RNA, 19 nt, Artificial Sequence
  Description of Artificial Sequence: Synthetic oligonucleotide
gaauaaccuacuaaguuug

SEQ ID NO: 1373635 - RNA, 19 nt, Artificial Sequence
  Description of Artificial Sequence: Synthetic oligonucleotide
guuaaauaagacguucagg

SEQ ID NO: 1373636 - RNA, 19 nt, Artificial Sequence
  Description of Artificial Sequence: Synthetic oligonucleotide
uguaacucccaucucgggc

SEQ ID NO: 1373637 - RNA, 19 nt, Artificial Sequence
  Description of Artificial Sequence: Synthetic oligonucleotide
uuguuaaauaagacguuca

SEQ ID NO: 1373638 - RNA, 19 nt, Artificial Sequence
  Description of Artificial Sequence: Synthetic oligonucleotide
agaauaaccuacuaaguuu

SEQ ID NO: 1373639 - RNA, 19 nt, Artificial Sequence
  Description of Artificial Sequence: Synthetic oligonucleotide
uagaccaucaaugacugug

SEQ ID NO: 1373640 - RNA, 19 nt, Artificial Sequence
  Description of Artificial Sequence: Synthetic oligonucleotide
uaaccuacuaaguuugcca

SEQ ID NO: 1373641 - RNA, 19 nt, Artificial Sequence
  Description of Artificial Sequence: Synthetic oligonucleotide
gacaucaucacaccacacc

SEQ ID NO: 1373642 - RNA, 19 nt, Artificial Sequence
  Description of Artificial Sequence: Synthetic oligonucleotide
ugcucugcauauaagguga

SEQ ID NO: 1373643 - RNA, 19 nt, Artificial Sequence
  Description of Artificial Sequence: Synthetic oligonucleotide
uccgauuuucacaaagucu

SEQ ID NO: 1373644 - RNA, 19 nt, Artificial Sequence
  Description of Artificial Sequence: Synthetic oligonucleotide
agagauucuccaucauccc

SEQ ID NO: 1373645 - RNA, 19 nt, Artificial Sequence
  Description of Artificial Sequence: Synthetic oligonucleotide
aagagaugauucuguaucu

SEQ ID NO: 1373646 - RNA, 19 nt, Artificial Sequence
  Description of Artificial Sequence: Synthetic oligonucleotide
aguagggugggucccaagg

SEQ ID NO: 1373647 - RNA, 19 nt, Artificial Sequence
  Description of Artificial Sequence: Synthetic oligonucleotide
uguauucaacuuuuccacc

SEQ ID NO: 1373648 - RNA, 19 nt, Artificial Sequence
  Description of Artificial Sequence: Synthetic oligonucleotide
ccaggaguuaauaaggugg

SEQ ID NO: 1373649 - RNA, 19 nt, Artificial Sequence
  Description of Artificial Sequence: Synthetic oligonucleotide
uauaaacugggcucaauau

SEQ ID NO: 1373650 - RNA, 19 nt, Artificial Sequence
  Description of Artificial Sequence: Synthetic oligonucleotide
aauuucuggagacucugau

SEQ ID NO: 1373651 - RNA, 19 nt, Artificial Sequence
  Description of Artificial Sequence: Synthetic oligonucleotide
aaaguggcgccgaacgugc

SEQ ID NO: 1373652 - RNA, 19 nt, Artificial Sequence
  Description of Artificial Sequence: Synthetic oligonucleotide
uagggauaaaggaaaauuu

SEQ ID NO: 1373653 - RNA, 19 nt, Artificial Sequence
  Description of Artificial Sequence: Synthetic oligonucleotide
aauaaccuacuaaguuugc

SEQ ID NO: 1373654 - RNA, 19 nt, Artificial Sequence
  Description of Artificial Sequence: Synthetic oligonucleotide
aaguuugccagacgaucuc

SEQ ID NO: 1373655 - RNA, 19 nt, Artificial Sequence
  Description of Artificial Sequence: Synthetic oligonucleotide
caucccaggaguuaauaag

SEQ ID NO: 1373656 - RNA, 19 nt, Artificial Sequence
  Description of Artificial Sequence: Synthetic oligonucleotide
uccaccauggugccgauac

SEQ ID NO: 1373657 - RNA, 19 nt, Artificial Sequence
  Description of Artificial Sequence: Synthetic oligonucleotide
cauuaguucagaauuuuga

SEQ ID NO: 1373658 - RNA, 19 nt, Artificial Sequence
  Description of Artificial Sequence: Synthetic oligonucleotide
ugcauauaaggugaugccc

SEQ ID NO: 1373659 - RNA, 19 nt, Artificial Sequence
  Description of Artificial Sequence: Synthetic oligonucleotide
cguagaauaaccuacuaag

SEQ ID NO: 1373660 - RNA, 19 nt, Artificial Sequence
  Description of Artificial Sequence: Synthetic oligonucleotide
ucacaguaaauguacccca

SEQ ID NO: 1373661 - RNA, 19 nt, Artificial Sequence
  Description of Artificial Sequence: Synthetic oligonucleotide
ucugaacgcgggcucaggg

SEQ ID NO: 1373662 - RNA, 19 nt, Artificial Sequence
  Description of Artificial Sequence: Synthetic oligonucleotide
ucuaaacauuucaacugac

SEQ ID NO: 1373663 - RNA, 19 nt, Artificial Sequence
  Description of Artificial Sequence: Synthetic oligonucleotide
ugcuuagcaauucuucuaa

SEQ ID NO: 1373664 - RNA, 19 nt, Artificial Sequence
  Description of Artificial Sequence: Synthetic oligonucleotide
agaggcgagacaccauagc

SEQ ID NO: 1373665 - RNA, 19 nt, Artificial Sequence
  Description of Artificial Sequence: Synthetic oligonucleotide
aacaacgaccggcagcuga

SEQ ID NO: 1373666 - RNA, 19 nt, Artificial Sequence
  Description of Artificial Sequence: Synthetic oligonucleotide
aagccauuccgacuuccuc

SEQ ID NO: 1373667 - RNA, 19 nt, Artificial Sequence
  Description of Artificial Sequence: Synthetic oligonucleotide
aagguucagcauaagaaca

SEQ ID NO: 1373668 - RNA, 19 nt, Artificial Sequence
  Description of Artificial Sequence: Synthetic oligonucleotide
ucccaugagaaaagcacug

SEQ ID NO: 1373669 - RNA, 19 nt, Artificial Sequence
  Description of Artificial Sequence: Synthetic oligonucleotide
auauaaacugggcucaaua

SEQ ID NO: 1373670 - RNA, 19 nt, Artificial Sequence
  Description of Artificial Sequence: Synthetic oligonucleotide
ccgauuuucacaaagucug

SEQ ID NO: 1373671 - RNA, 19 nt, Artificial Sequence
  Description of Artificial Sequence: Synthetic oligonucleotide
gaauccauaagcuucuuau

SEQ ID NO: 1373672 - RNA, 19 nt, Artificial Sequence
  Description of Artificial Sequence: Synthetic oligonucleotide
ugaggcuuccgcauguaga

SEQ ID NO: 1373673 - RNA, 19 nt, Artificial Sequence
  Description of Artificial Sequence: Synthetic oligonucleotide
aucacaccacuguaguagg

SEQ ID NO: 1373674 - RNA, 19 nt, Artificial Sequence
  Description of Artificial Sequence: Synthetic oligonucleotide
agaacaacgaccggcagcu

SEQ ID NO: 1373675 - RNA, 19 nt, Artificial Sequence
  Description of Artificial Sequence: Synthetic oligonucleotide
uuuauucugccuccucgga

SEQ ID NO: 1373676 - RNA, 19 nt, Artificial Sequence
  Description of Artificial Sequence: Synthetic oligonucleotide
aacgaccggcagcugauag

SEQ ID NO: 1373677 - RNA, 19 nt, Artificial Sequence
  Description of Artificial Sequence: Synthetic oligonucleotide
auguagaccaucaaugacu

SEQ ID NO: 1373678 - RNA, 19 nt, Artificial Sequence
  Description of Artificial Sequence: Synthetic oligonucleotide
ugggcucaauauuauaccu

SEQ ID NO: 1373679 - RNA, 19 nt, Artificial Sequence
  Description of Artificial Sequence: Synthetic oligonucleotide
caucacaccacaccucucc

SEQ ID NO: 1373680 - RNA, 19 nt, Artificial Sequence
  Description of Artificial Sequence: Synthetic oligonucleotide
auaaacugggcucaauauu

SEQ ID NO: 1373681 - RNA, 19 nt, Artificial Sequence
  Description of Artificial Sequence: Synthetic oligonucleotide
uguccgauuuucacaaagu

SEQ ID NO: 1373682 - RNA, 19 nt, Artificial Sequence
  Description of Artificial Sequence: Synthetic oligonucleotide
aacaugcucgcuccacaag

SEQ ID NO: 1373683 - RNA, 19 nt, Artificial Sequence
  Description of Artificial Sequence: Synthetic oligonucleotide
gagagcucgucaaagauga

SEQ ID NO: 1373684 - RNA, 19 nt, Artificial Sequence
  Description of Artificial Sequence: Synthetic oligonucleotide
cugcauauaaggugaugcc

SEQ ID NO: 1373685 - RNA, 19 nt, Artificial Sequence
  Description of Artificial Sequence: Synthetic oligonucleotide
aagacguucaggccuucca

SEQ ID NO: 1373686 - RNA, 19 nt, Artificial Sequence
  Description of Artificial Sequence: Synthetic oligonucleotide
uuauaagcagcuucccgaa

SEQ ID NO: 1373687 - RNA, 19 nt, Artificial Sequence
  Description of Artificial Sequence: Synthetic oligonucleotide
aguaaauguaccccagcaa

SEQ ID NO: 1373688 - RNA, 19 nt, Artificial Sequence
  Description of Artificial Sequence: Synthetic oligonucleotide
ugcacgaaucacaccacug

SEQ ID NO: 1373689 - RNA, 19 nt, Artificial Sequence
  Description of Artificial Sequence: Synthetic oligonucleotide
gaggcuuccgcauguagac

SEQ ID NO: 1373690 - RNA, 19 nt, Artificial Sequence
  Description of Artificial Sequence: Synthetic oligonucleotide
ggcaaaguggcgccgaacg

SEQ ID NO: 1373691 - RNA, 19 nt, Artificial Sequence
  Description of Artificial Sequence: Synthetic oligonucleotide
aaacguagaauaaccuacu

SEQ ID NO: 1373692 - RNA, 19 nt, Artificial Sequence
  Description of Artificial Sequence: Synthetic oligonucleotide
uuuugaggauuuaguuuca

SEQ ID NO: 1373693 - RNA, 19 nt, Artificial Sequence
  Description of Artificial Sequence: Synthetic oligonucleotide
gagucugagcuaucguucc

SEQ ID NO: 1373694 - RNA, 19 nt, Artificial Sequence
  Description of Artificial Sequence: Synthetic oligonucleotide
uaagaacaacgaccggcag

SEQ ID NO: 1373695 - RNA, 19 nt, Artificial Sequence
  Description of Artificial Sequence: Synthetic oligonucleotide
cagcaguuuguuaaauaag

SEQ ID NO: 1373696 - RNA, 19 nt, Artificial Sequence
  Description of Artificial Sequence: Synthetic oligonucleotide
ugggaaaacguagaauaac

SEQ ID NO: 1373697 - RNA, 19 nt, Artificial Sequence
  Description of Artificial Sequence: Synthetic oligonucleotide
agucugagcuaucguuccc

SEQ ID NO: 1373698 - RNA, 19 nt, Artificial Sequence
  Description of Artificial Sequence: Synthetic oligonucleotide
cuaaguuugccagacgauc

SEQ ID NO: 1373699 - RNA, 19 nt, Artificial Sequence
  Description of Artificial Sequence: Synthetic oligonucleotide
guaacucccaucucgggca

SEQ ID NO: 1373700 - RNA, 19 nt, Artificial Sequence
  Description of Artificial Sequence: Synthetic oligonucleotide
guguccgauuuucacaaag

SEQ ID NO: 1373701 - RNA, 19 nt, Artificial Sequence
  Description of Artificial Sequence: Synthetic oligonucleotide
ugccaagucggccacucug

SEQ ID NO: 1373702 - RNA, 19 nt, Artificial Sequence
  Description of Artificial Sequence: Synthetic oligonucleotide
cauauaaggugaugcccag

SEQ ID NO: 1373703 - RNA, 19 nt, Artificial Sequence
  Description of Artificial Sequence: Synthetic oligonucleotide
guaauuucuggagacucug

SEQ ID NO: 1373704 - RNA, 19 nt, Artificial Sequence
  Description of Artificial Sequence: Synthetic oligonucleotide
gauucaugaacaacagcca

SEQ ID NO: 1373705 - RNA, 19 nt, Artificial Sequence
  Description of Artificial Sequence: Synthetic oligonucleotide
acguagaauaaccuacuaa

SEQ ID NO: 1373706 - RNA, 19 nt, Artificial Sequence
  Description of Artificial Sequence: Synthetic oligonucleotide
uacucgguagucauuugaa

SEQ ID NO: 1373707 - RNA, 19 nt, Artificial Sequence
  Description of Artificial Sequence: Synthetic oligonucleotide
agccauuccgacuuccuca

SEQ ID NO: 1373708 - RNA, 19 nt, Artificial Sequence
  Description of Artificial Sequence: Synthetic oligonucleotide
uaccccagcaaccuucgga

SEQ ID NO: 1373709 - RNA, 19 nt, Artificial Sequence
  Description of Artificial Sequence: Synthetic oligonucleotide
ucagaauggauggaacuuc

SEQ ID NO: 1373710 - RNA, 19 nt, Artificial Sequence
  Description of Artificial Sequence: Synthetic oligonucleotide
gggaaaacguagaauaacc

SEQ ID NO: 1373711 - RNA, 19 nt, Artificial Sequence
  Description of Artificial Sequence: Synthetic oligonucleotide
auauaaggugaugcccagc

SEQ ID NO: 1373712 - RNA, 19 nt, Artificial Sequence
  Description of Artificial Sequence: Synthetic oligonucleotide
uucuuaucaucuaguaauu

SEQ ID NO: 1373713 - RNA, 19 nt, Artificial Sequence
  Description of Artificial Sequence: Synthetic oligonucleotide
gcuaucguucccuggaggg

SEQ ID NO: 1373714 - RNA, 19 nt, Artificial Sequence
  Description of Artificial Sequence: Synthetic oligonucleotide
gcaaccuucggauucauga

SEQ ID NO: 1373715 - RNA, 19 nt, Artificial Sequence
  Description of Artificial Sequence: Synthetic oligonucleotide
cacaguaaauguaccccag

SEQ ID NO: 1373716 - RNA, 19 nt, Artificial Sequence
  Description of Artificial Sequence: Synthetic oligonucleotide
aacguagaauaaccuacua

SEQ ID NO: 1373717 - RNA, 19 nt, Artificial Sequence
  Description of Artificial Sequence: Synthetic oligonucleotide
uaucguucccuggagggcc

SEQ ID NO: 1373718 - RNA, 19 nt, Artificial Sequence
  Description of Artificial Sequence: Synthetic oligonucleotide
acgaccggcagcugauagc

SEQ ID NO: 1373719 - RNA, 19 nt, Artificial Sequence
  Description of Artificial Sequence: Synthetic oligonucleotide
agcuaucguucccuggagg

SEQ ID NO: 1373720 - RNA, 19 nt, Artificial Sequence
  Description of Artificial Sequence: Synthetic oligonucleotide
gaaugcauggcauguccca

SEQ ID NO: 1373721 - RNA, 19 nt, Artificial Sequence
  Description of Artificial Sequence: Synthetic oligonucleotide
uuccgcauguagaccauca

SEQ ID NO: 1373722 - RNA, 19 nt, Artificial Sequence
  Description of Artificial Sequence: Synthetic oligonucleotide
aaagcacugcucaaaucca

SEQ ID NO: 1373723 - RNA, 19 nt, Artificial Sequence
  Description of Artificial Sequence: Synthetic oligonucleotide
uuauucugccuccucggau

SEQ ID NO: 1373724 - RNA, 19 nt, Artificial Sequence
  Description of Artificial Sequence: Synthetic oligonucleotide
cauggcaugucccauuuca

SEQ ID NO: 1373725 - RNA, 19 nt, Artificial Sequence
  Description of Artificial Sequence: Synthetic oligonucleotide
cugguaccgaguucguccg

SEQ ID NO: 1373726 - RNA, 19 nt, Artificial Sequence
  Description of Artificial Sequence: Synthetic oligonucleotide
cugauaaugccuggcaaac

SEQ ID NO: 1373727 - RNA, 19 nt, Artificial Sequence
  Description of Artificial Sequence: Synthetic oligonucleotide
acucugcacaggcaauccg

SEQ ID NO: 1373728 - RNA, 19 nt, Artificial Sequence
  Description of Artificial Sequence: Synthetic oligonucleotide
gguuccagugacaugcugg

SEQ ID NO: 1373729 - RNA, 19 nt, Artificial Sequence
  Description of Artificial Sequence: Synthetic oligonucleotide
gcugguaccgaguucgucc

SEQ ID NO: 1373730 - RNA, 19 nt, Artificial Sequence
  Description of Artificial Sequence: Synthetic oligonucleotide
auugggcaauauaaacugg

SEQ ID NO: 1373731 - RNA, 19 nt, Artificial Sequence
  Description of Artificial Sequence: Synthetic oligonucleotide
aacgugcucugguaagaga

SEQ ID NO: 1373732 - RNA, 19 nt, Artificial Sequence
  Description of Artificial Sequence: Synthetic oligonucleotide
caugcucgcuccacaagcc

SEQ ID NO: 1373733 - RNA, 19 nt, Artificial Sequence
  Description of Artificial Sequence: Synthetic oligonucleotide
uucguccgagcaucgaaug

SEQ ID NO: 1373734 - RNA, 19 nt, Artificial Sequence
  Description of Artificial Sequence: Synthetic oligonucleotide
uaccgaguucguccgagca

SEQ ID NO: 1373735 - RNA, 19 nt, Artificial Sequence
  Description of Artificial Sequence: Synthetic oligonucleotide
ucagucgggcaccugguuc

SEQ ID NO: 1373736 - RNA, 19 nt, Artificial Sequence
  Description of Artificial Sequence: Synthetic oligonucleotide
uccggacaucaucacacca

SEQ ID NO: 1373737 - RNA, 19 nt, Artificial Sequence
  Description of Artificial Sequence: Synthetic oligonucleotide
ggaacuccaaaagaccccg

SEQ ID NO: 1373738 - RNA, 19 nt, Artificial Sequence
  Description of Artificial Sequence: Synthetic oligonucleotide
uaccucucugcacgaauca

SEQ ID NO: 1373739 - RNA, 19 nt, Artificial Sequence
  Description of Artificial Sequence: Synthetic oligonucleotide
aauaagacguucaggccuu

SEQ ID NO: 1373740 - RNA, 19 nt, Artificial Sequence
  Description of Artificial Sequence: Synthetic oligonucleotide
uggagacucugauacaauu

SEQ ID NO: 1373741 - RNA, 19 nt, Artificial Sequence
  Description of Artificial Sequence: Synthetic oligonucleotide
uauaagcagcuucccgaac

SEQ ID NO: 1373742 - RNA, 19 nt, Artificial Sequence
  Description of Artificial Sequence: Synthetic oligonucleotide
cugaacgcgggcucagggg

SEQ ID NO: 1373743 - RNA, 19 nt, Artificial Sequence
  Description of Artificial Sequence: Synthetic oligonucleotide
ucagccacucgccugguuu

SEQ ID NO: 1373744 - RNA, 19 nt, Artificial Sequence
  Description of Artificial Sequence: Synthetic oligonucleotide
augacuguguaacucccau

SEQ ID NO: 1373745 - RNA, 19 nt, Artificial Sequence
  Description of Artificial Sequence: Synthetic oligonucleotide
ggugaugcccagcaguuug

SEQ ID NO: 1373746 - RNA, 19 nt, Artificial Sequence
  Description of Artificial Sequence: Synthetic oligonucleotide
ucguccgagcaucgaaugc

SEQ ID NO: 1373747 - RNA, 19 nt, Artificial Sequence
  Description of Artificial Sequence: Synthetic oligonucleotide
uguaucuuguugggaaagu

SEQ ID NO: 1373748 - RNA, 19 nt, Artificial Sequence
  Description of Artificial Sequence: Synthetic oligonucleotide
cucaauauuauaccucucu

SEQ ID NO: 1373749 - RNA, 19 nt, Artificial Sequence
  Description of Artificial Sequence: Synthetic oligonucleotide
acgaaucacaccacuguag

SEQ ID NO: 1373750 - RNA, 19 nt, Artificial Sequence
  Description of Artificial Sequence: Synthetic oligonucleotide
ugacaugcugguaccgagu

SEQ ID NO: 1373751 - RNA, 19 nt, Artificial Sequence
  Description of Artificial Sequence: Synthetic oligonucleotide
ucugagcuaucguucccug

SEQ ID NO: 1373752 - RNA, 19 nt, Artificial Sequence
  Description of Artificial Sequence: Synthetic oligonucleotide
ugccgauacuucugcaggc

SEQ ID NO: 1373753 - RNA, 19 nt, Artificial Sequence
  Description of Artificial Sequence: Synthetic oligonucleotide
ccgagcaucgaaugcaugg

SEQ ID NO: 1373754 - RNA, 19 nt, Artificial Sequence
  Description of Artificial Sequence: Synthetic oligonucleotide
cagucgggcaccugguucc

SEQ ID NO: 1373755 - RNA, 19 nt, Artificial Sequence
  Description of Artificial Sequence: Synthetic oligonucleotide
uccgagagcucgucaaaga

SEQ ID NO: 1373756 - RNA, 19 nt, Artificial Sequence
  Description of Artificial Sequence: Synthetic oligonucleotide
guagggugggucccaaggc

SEQ ID NO: 1373757 - RNA, 19 nt, Artificial Sequence
  Description of Artificial Sequence: Synthetic oligonucleotide
uucaggccuuccauacaag

SEQ ID NO: 1373758 - RNA, 19 nt, Artificial Sequence
  Description of Artificial Sequence: Synthetic oligonucleotide
ucugcacgaaucacaccac

SEQ ID NO: 1373759 - RNA, 19 nt, Artificial Sequence
  Description of Artificial Sequence: Synthetic oligonucleotide
aaagaccccggugcucuuc

SEQ ID NO: 1373760 - RNA, 19 nt, Artificial Sequence
  Description of Artificial Sequence: Synthetic oligonucleotide
aguucguccgagcaucgaa

SEQ ID NO: 1373761 - RNA, 19 nt, Artificial Sequence
  Description of Artificial Sequence: Synthetic oligonucleotide
ccugauguggcuuguuugc

SEQ ID NO: 1373762 - RNA, 19 nt, Artificial Sequence
  Description of Artificial Sequence: Synthetic oligonucleotide
ggugccgauacuucugcag

SEQ ID NO: 1373763 - RNA, 19 nt, Artificial Sequence
  Description of Artificial Sequence: Synthetic oligonucleotide
cugagcuaucguucccugg

SEQ ID NO: 1373764 - RNA, 19 nt, Artificial Sequence
  Description of Artificial Sequence: Synthetic oligonucleotide
uucaacugaccagcauuag

SEQ ID NO: 1373765 - RNA, 19 nt, Artificial Sequence
  Description of Artificial Sequence: Synthetic oligonucleotide
guguaacucccaucucggg

SEQ ID NO: 1373766 - RNA, 19 nt, Artificial Sequence
  Description of Artificial Sequence: Synthetic oligonucleotide
agcuuccggacaucaucac

SEQ ID NO: 1373767 - RNA, 19 nt, Artificial Sequence
  Description of Artificial Sequence: Synthetic oligonucleotide
aggaguuaauaaggugggg

SEQ ID NO: 1373768 - RNA, 19 nt, Artificial Sequence
  Description of Artificial Sequence: Synthetic oligonucleotide
guucaggccuuccauacaa

SEQ ID NO: 1373769 - RNA, 19 nt, Artificial Sequence
  Description of Artificial Sequence: Synthetic oligonucleotide
ucuuaucaucuaguaauuu

SEQ ID NO: 1373770 - RNA, 19 nt, Artificial Sequence
  Description of Artificial Sequence: Synthetic oligonucleotide
auagcuuuuggcaguggcu

SEQ ID NO: 1373771 - RNA, 19 nt, Artificial Sequence
  Description of Artificial Sequence: Synthetic oligonucleotide
gagcuaucguucccuggag

SEQ ID NO: 1373772 - RNA, 19 nt, Artificial Sequence
  Description of Artificial Sequence: Synthetic oligonucleotide
uuccggacaucaucacacc

SEQ ID NO: 1373773 - RNA, 19 nt, Artificial Sequence
  Description of Artificial Sequence: Synthetic oligonucleotide
cuucggauucaugaacaac

SEQ ID NO: 1373774 - RNA, 19 nt, Artificial Sequence
  Description of Artificial Sequence: Synthetic oligonucleotide
aucgaaugcauggcauguc

SEQ ID NO: 1373775 - RNA, 19 nt, Artificial Sequence
  Description of Artificial Sequence: Synthetic oligonucleotide
agccucucugaacgcgggc

SEQ ID NO: 1373776 - RNA, 19 nt, Artificial Sequence
  Description of Artificial Sequence: Synthetic oligonucleotide
accuacuaaguuugccaga

SEQ ID NO: 1373777 - RNA, 19 nt, Artificial Sequence
  Description of Artificial Sequence: Synthetic oligonucleotide
gagcaucgaaugcauggca

SEQ ID NO: 1373778 - RNA, 19 nt, Artificial Sequence
  Description of Artificial Sequence: Synthetic oligonucleotide
ugguuccagugacaugcug

SEQ ID NO: 1373779 - RNA, 19 nt, Artificial Sequence
  Description of Artificial Sequence: Synthetic oligonucleotide
agacguucaggccuuccau

SEQ ID NO: 1373780 - RNA, 19 nt, Artificial Sequence
  Description of Artificial Sequence: Synthetic oligonucleotide
uggcaaacuggcugacuac

SEQ ID NO: 1373781 - RNA, 19 nt, Artificial Sequence
  Description of Artificial Sequence: Synthetic oligonucleotide
acauugagguccacugcuc

SEQ ID NO: 1373782 - RNA, 19 nt, Artificial Sequence
  Description of Artificial Sequence: Synthetic oligonucleotide
gaacaugcucgcuccacaa

SEQ ID NO: 1373783 - RNA, 19 nt, Artificial Sequence
  Description of Artificial Sequence: Synthetic oligonucleotide
cuacucgguagucauuuga

SEQ ID NO: 1373784 - RNA, 19 nt, Artificial Sequence
  Description of Artificial Sequence: Synthetic oligonucleotide
uguaguaggguggguccca

SEQ ID NO: 1373785 - RNA, 19 nt, Artificial Sequence
  Description of Artificial Sequence: Synthetic oligonucleotide
gagaguuugucagauaguu

SEQ ID NO: 1373786 - RNA, 19 nt, Artificial Sequence
  Description of Artificial Sequence: Synthetic oligonucleotide
accuucggauucaugaaca

SEQ ID NO: 1373787 - RNA, 19 nt, Artificial Sequence
  Description of Artificial Sequence: Synthetic oligonucleotide
gcaauauaaacugggcuca

SEQ ID NO: 1373788 - RNA, 19 nt, Artificial Sequence
  Description of Artificial Sequence: Synthetic oligonucleotide
cugcaugacagucucugga

SEQ ID NO: 1373789 - RNA, 19 nt, Artificial Sequence
  Description of Artificial Sequence: Synthetic oligonucleotide
cuaucguucccuggagggc

SEQ ID NO: 1373790 - RNA, 19 nt, Artificial Sequence
  Description of Artificial Sequence: Synthetic oligonucleotide
auacaauuccacauuugua

SEQ ID NO: 1373791 - RNA, 19 nt, Artificial Sequence
  Description of Artificial Sequence: Synthetic oligonucleotide
accauggugccgauacuuc

SEQ ID NO: 1373792 - RNA, 19 nt, Artificial Sequence
  Description of Artificial Sequence: Synthetic oligonucleotide
gguccacugcucuucugcg

SEQ ID NO: 1373793 - RNA, 19 nt, Artificial Sequence
  Description of Artificial Sequence: Synthetic oligonucleotide
gucugauaaugccuggcaa

SEQ ID NO: 1373794 - RNA, 19 nt, Artificial Sequence
  Description of Artificial Sequence: Synthetic oligonucleotide
ugcucgcuccacaagccau

SEQ ID NO: 1373795 - RNA, 19 nt, Artificial Sequence
  Description of Artificial Sequence: Synthetic oligonucleotide
aaacugggcucaauauuau

SEQ ID NO: 1373796 - RNA, 19 nt, Artificial Sequence
  Description of Artificial Sequence: Synthetic oligonucleotide
augacagucucuggagucu

SEQ ID NO: 1373797 - RNA, 19 nt, Artificial Sequence
  Description of Artificial Sequence: Synthetic oligonucleotide
acgugcucugguaagagau

SEQ ID NO: 1373798 - RNA, 19 nt, Artificial Sequence
  Description of Artificial Sequence: Synthetic oligonucleotide
gcauauaaggugaugccca

SEQ ID NO: 1373799 - RNA, 19 nt, Artificial Sequence
  Description of Artificial Sequence: Synthetic oligonucleotide
uccgcauguagaccaucaa

SEQ ID NO: 1373800 - RNA, 19 nt, Artificial Sequence
  Description of Artificial Sequence: Synthetic oligonucleotide
uggaauccuucagcggugc

SEQ ID NO: 1373801 - RNA, 19 nt, Artificial Sequence
  Description of Artificial Sequence: Synthetic oligonucleotide
ggcucaauauuauaccucu

SEQ ID NO: 1373802 - RNA, 19 nt, Artificial Sequence
  Description of Artificial Sequence: Synthetic oligonucleotide
gaacuccaaaagaccccgg

SEQ ID NO: 1373803 - RNA, 19 nt, Artificial Sequence
  Description of Artificial Sequence: Synthetic oligonucleotide
ucggauggugaaguggcaa

SEQ ID NO: 1373804 - RNA, 19 nt, Artificial Sequence
  Description of Artificial Sequence: Synthetic oligonucleotide
ccaucucgggcaaaguggc

SEQ ID NO: 1373805 - RNA, 19 nt, Artificial Sequence
  Description of Artificial Sequence: Synthetic oligonucleotide
cccagucugauaaugccug

SEQ ID NO: 1373806 - RNA, 19 nt, Artificial Sequence
  Description of Artificial Sequence: Synthetic oligonucleotide
caucucgggcaaaguggcg

SEQ ID NO: 1373807 - RNA, 19 nt, Artificial Sequence
  Description of Artificial Sequence: Synthetic oligonucleotide
caauccgagagcucgucaa

SEQ ID NO: 1373808 - RNA, 19 nt, Artificial Sequence
  Description of Artificial Sequence: Synthetic oligonucleotide
aggcuuccgcauguagacc

SEQ ID NO: 1373809 - RNA, 19 nt, Artificial Sequence
  Description of Artificial Sequence: Synthetic oligonucleotide
uggcaauccugauguggcu

SEQ ID NO: 1373810 - RNA, 19 nt, Artificial Sequence
  Description of Artificial Sequence: Synthetic oligonucleotide
acuaaguuugccagacgau

SEQ ID NO: 1373811 - RNA, 19 nt, Artificial Sequence
  Description of Artificial Sequence: Synthetic oligonucleotide
gcaucgaaugcauggcaug

SEQ ID NO: 1373812 - RNA, 19 nt, Artificial Sequence
  Description of Artificial Sequence: Synthetic oligonucleotide
auccugauguggcuuguuu

SEQ ID NO: 1373813 - RNA, 19 nt, Artificial Sequence
  Description of Artificial Sequence: Synthetic oligonucleotide
cucgccugguuucugcauc

SEQ ID NO: 1373814 - RNA, 19 nt, Artificial Sequence
  Description of Artificial Sequence: Synthetic oligonucleotide
agagaguuugucagauagu

SEQ ID NO: 1373815 - RNA, 19 nt, Artificial Sequence
  Description of Artificial Sequence: Synthetic oligonucleotide
agggcccugugggaaaacg

SEQ ID NO: 1373816 - RNA, 19 nt, Artificial Sequence
  Description of Artificial Sequence: Synthetic oligonucleotide
caagucggccacucugcac

SEQ ID NO: 1373817 - RNA, 19 nt, Artificial Sequence
  Description of Artificial Sequence: Synthetic oligonucleotide
cuguaguaggguggguccc

SEQ ID NO: 1373818 - RNA, 19 nt, Artificial Sequence
  Description of Artificial Sequence: Synthetic oligonucleotide
gcauaagaacaacgaccgg

SEQ ID NO: 1373819 - RNA, 19 nt, Artificial Sequence
  Description of Artificial Sequence: Synthetic oligonucleotide
ggagacucugauacaauuc

SEQ ID NO: 1373820 - RNA, 19 nt, Artificial Sequence
  Description of Artificial Sequence: Synthetic oligonucleotide
gguaagagaugauucugua

SEQ ID NO: 1373821 - RNA, 19 nt, Artificial Sequence
  Description of Artificial Sequence: Synthetic oligonucleotide
agaauggauggaacuucug

SEQ ID NO: 1373822 - RNA, 19 nt, Artificial Sequence
  Description of Artificial Sequence: Synthetic oligonucleotide
gacguucaggccuuccaua

SEQ ID NO: 1373823 - RNA, 19 nt, Artificial Sequence
  Description of Artificial Sequence: Synthetic oligonucleotide
ucaucacaccacaccucuc

SEQ ID NO: 1373824 - RNA, 19 nt, Artificial Sequence
  Description of Artificial Sequence: Synthetic oligonucleotide
caccacaccucuccuuuug

SEQ ID NO: 1373825 - RNA, 19 nt, Artificial Sequence
  Description of Artificial Sequence: Synthetic oligonucleotide
ucagaauuuugaggauuua

SEQ ID NO: 1373826 - RNA, 19 nt, Artificial Sequence
  Description of Artificial Sequence: Synthetic oligonucleotide
ucucugaacgcgggcucag

SEQ ID NO: 1373827 - RNA, 19 nt, Artificial Sequence
  Description of Artificial Sequence: Synthetic oligonucleotide
ugcucugguaagagaugau

SEQ ID NO: 1373828 - RNA, 19 nt, Artificial Sequence
  Description of Artificial Sequence: Synthetic oligonucleotide
uaguagggugggucccaag

SEQ ID NO: 1373829 - RNA, 19 nt, Artificial Sequence
  Description of Artificial Sequence: Synthetic oligonucleotide
caaccuucggauucaugaa

SEQ ID NO: 1373830 - RNA, 19 nt, Artificial Sequence
  Description of Artificial Sequence: Synthetic oligonucleotide
uuccucucaucaucucaaa

SEQ ID NO: 1373831 - RNA, 19 nt, Artificial Sequence
  Description of Artificial Sequence: Synthetic oligonucleotide
agcaucgaaugcauggcau

SEQ ID NO: 1373832 - RNA, 19 nt, Artificial Sequence
  Description of Artificial Sequence: Synthetic oligonucleotide
accgaguucguccgagcau

SEQ ID NO: 1373833 - RNA, 19 nt, Artificial Sequence
  Description of Artificial Sequence: Synthetic oligonucleotide
ucgggcaccugguuccagu

SEQ ID NO: 1373834 - RNA, 19 nt, Artificial Sequence
  Description of Artificial Sequence: Synthetic oligonucleotide
augucccauuucauggaag

SEQ ID NO: 1373835 - RNA, 19 nt, Artificial Sequence
  Description of Artificial Sequence: Synthetic oligonucleotide
caaggcauuaguucagaau

SEQ ID NO: 1373836 - RNA, 19 nt, Artificial Sequence
  Description of Artificial Sequence: Synthetic oligonucleotide
cugcuuagcaauucuucua

SEQ ID NO: 1373837 - RNA, 19 nt, Artificial Sequence
  Description of Artificial Sequence: Synthetic oligonucleotide
ggguguccgauuuucacaa

SEQ ID NO: 1373838 - RNA, 19 nt, Artificial Sequence
  Description of Artificial Sequence: Synthetic oligonucleotide
auggaauccuucagcggug

SEQ ID NO: 1373839 - RNA, 19 nt, Artificial Sequence
  Description of Artificial Sequence: Synthetic oligonucleotide
uaacucccaucucgggcaa

SEQ ID NO: 1373840 - RNA, 19 nt, Artificial Sequence
  Description of Artificial Sequence: Synthetic oligonucleotide
guaccgaguucguccgagc

SEQ ID NO: 1373841 - RNA, 19 nt, Artificial Sequence
  Description of Artificial Sequence: Synthetic oligonucleotide
cguggaacaugcucgcucc

SEQ ID NO: 1373842 - RNA, 19 nt, Artificial Sequence
  Description of Artificial Sequence: Synthetic oligonucleotide
ccggacaucaucacaccac

SEQ ID NO: 1373843 - RNA, 19 nt, Artificial Sequence
  Description of Artificial Sequence: Synthetic oligonucleotide
ggaucuugacauugagguc

SEQ ID NO: 1373844 - RNA, 19 nt, Artificial Sequence
  Description of Artificial Sequence: Synthetic oligonucleotide
aucguucccuggagggccc

SEQ ID NO: 1373845 - RNA, 19 nt, Artificial Sequence
  Description of Artificial Sequence: Synthetic oligonucleotide
ugacuacucgguagucauu

SEQ ID NO: 1373846 - RNA, 19 nt, Artificial Sequence
  Description of Artificial Sequence: Synthetic oligonucleotide
gguaccgaguucguccgag

SEQ ID NO: 1373847 - RNA, 19 nt, Artificial Sequence
  Description of Artificial Sequence: Synthetic oligonucleotide
uggugccgauacuucugca

SEQ ID NO: 1373848 - RNA, 19 nt, Artificial Sequence
  Description of Artificial Sequence: Synthetic oligonucleotide
aaaagaccccggugcucuu

SEQ ID NO: 1373849 - RNA, 19 nt, Artificial Sequence
  Description of Artificial Sequence: Synthetic oligonucleotide
cccaggaguuaauaaggug

SEQ ID NO: 1373850 - RNA, 19 nt, Artificial Sequence
  Description of Artificial Sequence: Synthetic oligonucleotide
agaguuugucagauaguuu

SEQ ID NO: 1373851 - RNA, 19 nt, Artificial Sequence
  Description of Artificial Sequence: Synthetic oligonucleotide
gacuacucgguagucauuu

SEQ ID NO: 1373852 - RNA, 19 nt, Artificial Sequence
  Description of Artificial Sequence: Synthetic oligonucleotide
cacgaaucacaccacugua

SEQ ID NO: 1373853 - RNA, 19 nt, Artificial Sequence
  Description of Artificial Sequence: Synthetic oligonucleotide
caugucccauuucauggaa

SEQ ID NO: 1373854 - RNA, 19 nt, Artificial Sequence
  Description of Artificial Sequence: Synthetic oligonucleotide
cugacuacucgguagucau

SEQ ID NO: 1373855 - RNA, 19 nt, Artificial Sequence
  Description of Artificial Sequence: Synthetic oligonucleotide
cagaauggauggaacuucu

SEQ ID NO: 1373856 - RNA, 19 nt, Artificial Sequence
  Description of Artificial Sequence: Synthetic oligonucleotide
accugguuccagugacaug

SEQ ID NO: 1373857 - RNA, 19 nt, Artificial Sequence
  Description of Artificial Sequence: Synthetic oligonucleotide
aacgcgggcucaggggugu

SEQ ID NO: 1373858 - RNA, 19 nt, Artificial Sequence
  Description of Artificial Sequence: Synthetic oligonucleotide
ugggaagguucagcauaag

SEQ ID NO: 1373859 - RNA, 19 nt, Artificial Sequence
  Description of Artificial Sequence: Synthetic oligonucleotide
ggaaaacguagaauaaccu

SEQ ID NO: 1373860 - RNA, 19 nt, Artificial Sequence
  Description of Artificial Sequence: Synthetic oligonucleotide
auaagacguucaggccuuc

SEQ ID NO: 1373861 - RNA, 19 nt, Artificial Sequence
  Description of Artificial Sequence: Synthetic oligonucleotide
ccucaaggccuccuucugg

SEQ ID NO: 1373862 - RNA, 19 nt, Artificial Sequence
  Description of Artificial Sequence: Synthetic oligonucleotide
caucuagauggauuccacu

SEQ ID NO: 1373863 - RNA, 19 nt, Artificial Sequence
  Description of Artificial Sequence: Synthetic oligonucleotide
caaaagaccccggugcucu

SEQ ID NO: 1373864 - RNA, 19 nt, Artificial Sequence
  Description of Artificial Sequence: Synthetic oligonucleotide
cuucccgaaccaagucauc

SEQ ID NO: 1373865 - RNA, 19 nt, Artificial Sequence
  Description of Artificial Sequence: Synthetic oligonucleotide
cugauacaauuccacauuu

SEQ ID NO: 1373866 - RNA, 19 nt, Artificial Sequence
  Description of Artificial Sequence: Synthetic oligonucleotide
acaggcaauccgagagcuc

SEQ ID NO: 1373867 - RNA, 19 nt, Artificial Sequence
  Description of Artificial Sequence: Synthetic oligonucleotide
cccagcaaccuucggauuc

SEQ ID NO: 1373868 - RNA, 19 nt, Artificial Sequence
  Description of Artificial Sequence: Synthetic oligonucleotide
acaacgaccggcagcugau

SEQ ID NO: 1373869 - RNA, 19 nt, Artificial Sequence
  Description of Artificial Sequence: Synthetic oligonucleotide
gccagacgaucucugcugc

SEQ ID NO: 1373870 - RNA, 19 nt, Artificial Sequence
  Description of Artificial Sequence: Synthetic oligonucleotide
ggccuuccauacaagcucc

SEQ ID NO: 1373871 - RNA, 19 nt, Artificial Sequence
  Description of Artificial Sequence: Synthetic oligonucleotide
aggcauuaguucagaauuu

SEQ ID NO: 1373872 - RNA, 19 nt, Artificial Sequence
  Description of Artificial Sequence: Synthetic oligonucleotide
caggccuuccauacaagcu

SEQ ID NO: 1373873 - RNA, 19 nt, Artificial Sequence
  Description of Artificial Sequence: Synthetic oligonucleotide
ugguaccgaguucguccga

SEQ ID NO: 1373874 - RNA, 19 nt, Artificial Sequence
  Description of Artificial Sequence: Synthetic oligonucleotide
cuugacauugagguccacu

SEQ ID NO: 1373875 - RNA, 19 nt, Artificial Sequence
  Description of Artificial Sequence: Synthetic oligonucleotide
cauugagguccacugcucu

SEQ ID NO: 1373876 - RNA, 19 nt, Artificial Sequence
  Description of Artificial Sequence: Synthetic oligonucleotide
ccgaaccaagucaucugag

SEQ ID NO: 1373877 - RNA, 19 nt, Artificial Sequence
  Description of Artificial Sequence: Synthetic oligonucleotide
ucgggcaaaguggcgccga

SEQ ID NO: 1373878 - RNA, 19 nt, Artificial Sequence
  Description of Artificial Sequence: Synthetic oligonucleotide
cccaugagaaaagcacugc

SEQ ID NO: 1373879 - RNA, 19 nt, Artificial Sequence
  Description of Artificial Sequence: Synthetic oligonucleotide
gcagccucucugaacgcgg

SEQ ID NO: 1373880 - RNA, 19 nt, Artificial Sequence
  Description of Artificial Sequence: Synthetic oligonucleotide
caucaaugacuguguaacu

SEQ ID NO: 1373881 - RNA, 19 nt, Artificial Sequence
  Description of Artificial Sequence: Synthetic oligonucleotide
gggcucaauauuauaccuc

SEQ ID NO: 1373882 - RNA, 19 nt, Artificial Sequence
  Description of Artificial Sequence: Synthetic oligonucleotide
cucugaacgcgggcucagg

SEQ ID NO: 1373883 - RNA, 19 nt, Artificial Sequence
  Description of Artificial Sequence: Synthetic oligonucleotide
gcguggaacaugcucgcuc

SEQ ID NO: 1373884 - RNA, 19 nt, Artificial Sequence
  Description of Artificial Sequence: Synthetic oligonucleotide
gcacgaaucacaccacugu

SEQ ID NO: 1373885 - RNA, 19 nt, Artificial Sequence
  Description of Artificial Sequence: Synthetic oligonucleotide
agucagucgggcaccuggu

SEQ ID NO: 1373886 - RNA, 19 nt, Artificial Sequence
  Description of Artificial Sequence: Synthetic oligonucleotide
ugcugguaccgaguucguc

SEQ ID NO: 1373887 - RNA, 19 nt, Artificial Sequence
  Description of Artificial Sequence: Synthetic oligonucleotide
caucgaaugcauggcaugu

SEQ ID NO: 1373888 - RNA, 19 nt, Artificial Sequence
  Description of Artificial Sequence: Synthetic oligonucleotide
gccgauacuucugcaggcc

SEQ ID NO: 1373889 - RNA, 19 nt, Artificial Sequence
  Description of Artificial Sequence: Synthetic oligonucleotide
ggccacucugcacaggcaa

SEQ ID NO: 1373890 - RNA, 19 nt, Artificial Sequence
  Description of Artificial Sequence: Synthetic oligonucleotide
cucgcuccacaagccauuc

SEQ ID NO: 1373891 - RNA, 19 nt, Artificial Sequence
  Description of Artificial Sequence: Synthetic oligonucleotide
ggcgagacaccauagcuuu

SEQ ID NO: 1373892 - RNA, 19 nt, Artificial Sequence
  Description of Artificial Sequence: Synthetic oligonucleotide
gggcguggaacaugcucgc

SEQ ID NO: 1373893 - RNA, 19 nt, Artificial Sequence
  Description of Artificial Sequence: Synthetic oligonucleotide
ggauuccacuuauuucaaa

SEQ ID NO: 1373894 - RNA, 19 nt, Artificial Sequence
  Description of Artificial Sequence: Synthetic oligonucleotide
guaucuuguugggaaaguu

SEQ ID NO: 1373895 - RNA, 19 nt, Artificial Sequence
  Description of Artificial Sequence: Synthetic oligonucleotide
agggugggucccaaggcau

SEQ ID NO: 1373896 - RNA, 19 nt, Artificial Sequence
  Description of Artificial Sequence: Synthetic oligonucleotide
cauaaacagcucagccacu

SEQ ID NO: 1373897 - RNA, 19 nt, Artificial Sequence
  Description of Artificial Sequence: Synthetic oligonucleotide
ccacucgccugguuucugc

SEQ ID NO: 1373898 - RNA, 19 nt, Artificial Sequence
  Description of Artificial Sequence: Synthetic oligonucleotide
cccgaaccaagucaucuga

SEQ ID NO: 1373899 - RNA, 19 nt, Artificial Sequence
  Description of Artificial Sequence: Synthetic oligonucleotide
ccgaguucguccgagcauc

SEQ ID NO: 1373900 - RNA, 19 nt, Artificial Sequence
  Description of Artificial Sequence: Synthetic oligonucleotide
gaguucguccgagcaucga

SEQ ID NO: 1373901 - RNA, 19 nt, Artificial Sequence
  Description of Artificial Sequence: Synthetic oligonucleotide
gaacaacgaccggcagcug

SEQ ID NO: 1373902 - RNA, 19 nt, Artificial Sequence
  Description of Artificial Sequence: Synthetic oligonucleotide
cucuggagucugagcuauc

SEQ ID NO: 1373903 - RNA, 19 nt, Artificial Sequence
  Description of Artificial Sequence: Synthetic oligonucleotide
cuucagcggugcugagcuc

SEQ ID NO: 1373904 - RNA, 19 nt, Artificial Sequence
  Description of Artificial Sequence: Synthetic oligonucleotide
ggcaaacuggcugacuacu

SEQ ID NO: 1373905 - RNA, 19 nt, Artificial Sequence
  Description of Artificial Sequence: Synthetic oligonucleotide
gccgaacgugcucugguaa

SEQ ID NO: 1373906 - RNA, 19 nt, Artificial Sequence
  Description of Artificial Sequence: Synthetic oligonucleotide
guucguccgagcaucgaau

SEQ ID NO: 1373907 - RNA, 19 nt, Artificial Sequence
  Description of Artificial Sequence: Synthetic oligonucleotide
agaccccggugcucuucca

SEQ ID NO: 1373908 - RNA, 19 nt, Artificial Sequence
  Description of Artificial Sequence: Synthetic oligonucleotide
agccacucgccugguuucu

SEQ ID NO: 1373909 - RNA, 19 nt, Artificial Sequence
  Description of Artificial Sequence: Synthetic oligonucleotide
gcucaauauuauaccucuc

SEQ ID NO: 1373910 - RNA, 19 nt, Artificial Sequence
  Description of Artificial Sequence: Synthetic oligonucleotide
cgaguucguccgagcaucg

SEQ ID NO: 1373911 - RNA, 19 nt, Artificial Sequence
  Description of Artificial Sequence: Synthetic oligonucleotide
uggcgccgaacgugcucug

SEQ ID NO: 1373912 - RNA, 19 nt, Artificial Sequence
  Description of Artificial Sequence: Synthetic oligonucleotide
aacucccaucucgggcaaa

SEQ ID NO: 1373913 - RNA, 19 nt, Artificial Sequence
  Description of Artificial Sequence: Synthetic oligonucleotide
aggcaauccgagagcucgu

SEQ ID NO: 1373914 - RNA, 19 nt, Artificial Sequence
  Description of Artificial Sequence: Synthetic oligonucleotide
guagaccaucaaugacugu

SEQ ID NO: 1373915 - RNA, 19 nt, Artificial Sequence
  Description of Artificial Sequence: Synthetic oligonucleotide
guggcgccgaacgugcucu

SEQ ID NO: 1373916 - RNA, 19 nt, Artificial Sequence
  Description of Artificial Sequence: Synthetic oligonucleotide
ggcaauccgagagcucguc

SEQ ID NO: 1373917 - RNA, 19 nt, Artificial Sequence
  Description of Artificial Sequence: Synthetic oligonucleotide
ccuucggauucaugaacaa

SEQ ID NO: 1373918 - RNA, 19 nt, Artificial Sequence
  Description of Artificial Sequence: Synthetic oligonucleotide
gcaaaguggcgccgaacgu

SEQ ID NO: 1373919 - RNA, 19 nt, Artificial Sequence
  Description of Artificial Sequence: Synthetic oligonucleotide
ggcccugugggaaaacgua

SEQ ID NO: 1373920 - RNA, 19 nt, Artificial Sequence
  Description of Artificial Sequence: Synthetic oligonucleotide
ggaagagauucuccaucau

SEQ ID NO: 1373921 - RNA, 19 nt, Artificial Sequence
  Description of Artificial Sequence: Synthetic oligonucleotide
ccaaggcauuaguucagaa

SEQ ID NO: 1373922 - RNA, 19 nt, Artificial Sequence
  Description of Artificial Sequence: Synthetic oligonucleotide
cugcugcuuagcaauucuu

SEQ ID NO: 1373923 - RNA, 19 nt, Artificial Sequence
  Description of Artificial Sequence: Synthetic oligonucleotide
caccauggugccgauacuu

SEQ ID NO: 1373924 - RNA, 19 nt, Artificial Sequence
  Description of Artificial Sequence: Synthetic oligonucleotide
augcugguaccgaguucgu

SEQ ID NO: 1373925 - RNA, 19 nt, Artificial Sequence
  Description of Artificial Sequence: Synthetic oligonucleotide
gguguccgauuuucacaaa

SEQ ID NO: 1373926 - RNA, 19 nt, Artificial Sequence
  Description of Artificial Sequence: Synthetic oligonucleotide
cguccgagcaucgaaugca

SEQ ID NO: 1373927 - RNA, 19 nt, Artificial Sequence
  Description of Artificial Sequence: Synthetic oligonucleotide
gcuucccgaaccaagucau

SEQ ID NO: 1373928 - RNA, 19 nt, Artificial Sequence
  Description of Artificial Sequence: Synthetic oligonucleotide
cugguuccagugacaugcu

SEQ ID NO: 1373929 - RNA, 19 nt, Artificial Sequence
  Description of Artificial Sequence: Synthetic oligonucleotide
gcggugcugagcucaggaa

SEQ ID NO: 1373930 - RNA, 19 nt, Artificial Sequence
  Description of Artificial Sequence: Synthetic oligonucleotide
ccauuccgacuuccucaag

SEQ ID NO: 1373931 - RNA, 19 nt, Artificial Sequence
  Description of Artificial Sequence: Synthetic oligonucleotide
gcccagucugauaaugccu

SEQ ID NO: 1373932 - RNA, 19 nt, Artificial Sequence
  Description of Artificial Sequence: Synthetic oligonucleotide
guccgagcaucgaaugcau

SEQ ID NO: 1373933 - RNA, 19 nt, Artificial Sequence
  Description of Artificial Sequence: Synthetic oligonucleotide
cacagaggcgagacaccau

SEQ ID NO: 1373934 - RNA, 19 nt, Artificial Sequence
  Description of Artificial Sequence: Synthetic oligonucleotide
ggcaauccugauguggcuu

SEQ ID NO: 1373935 - RNA, 19 nt, Artificial Sequence
  Description of Artificial Sequence: Synthetic oligonucleotide
gucagucgggcaccugguu

SEQ ID NO: 1373936 - RNA, 19 nt, Artificial Sequence
  Description of Artificial Sequence: Synthetic oligonucleotide
gccucucugaacgcgggcu

SEQ ID NO: 1373937 - RNA, 19 nt, Artificial Sequence
  Description of Artificial Sequence: Synthetic oligonucleotide
ccgcauguagaccaucaau

SEQ ID NO: 1373938 - RNA, 19 nt, Artificial Sequence
  Description of Artificial Sequence: Synthetic oligonucleotide
gccacucgccugguuucug

SEQ ID NO: 1373939 - RNA, 19 nt, Artificial Sequence
  Description of Artificial Sequence: Synthetic oligonucleotide
ccgauacuucugcaggccu

SEQ ID NO: 1373940 - RNA, 19 nt, Artificial Sequence
  Description of Artificial Sequence: Synthetic oligonucleotide
caacgaccggcagcugaua

SEQ ID NO: 1373941 - RNA, 19 nt, Artificial Sequence
  Description of Artificial Sequence: Synthetic oligonucleotide
gggucccaaggcauuaguu

SEQ ID NO: 1373942 - RNA, 19 nt, Artificial Sequence
  Description of Artificial Sequence: Synthetic oligonucleotide
cgaccggcagcugauagcu

SEQ ID NO: 1373943 - RNA, 19 nt, Artificial Sequence
  Description of Artificial Sequence: Synthetic oligonucleotide
ccagacgaucucugcugcu

SEQ ID NO: 1373944 - RNA, 19 nt, Artificial Sequence
  Description of Artificial Sequence: Synthetic oligonucleotide
ggcucagggguguccgauu

SEQ ID NO: 1373945 - RNA, 19 nt, Artificial Sequence
  Description of Artificial Sequence: Synthetic oligonucleotide
ggcguggaacaugcucgcu

SEQ ID NO: 1373946 - RNA, 19 nt, Artificial Sequence
  Description of Artificial Sequence: Synthetic oligonucleotide
gggcucagggguguccgau

SEQ ID NO: 1373947 - RNA, 19 nt, Artificial Sequence
  Description of Artificial Sequence: Synthetic oligonucleotide
gcucgcuccacaagccauu

SEQ ID NO: 1373948 - RNA, 19 nt, Artificial Sequence
  Description of Artificial Sequence: Synthetic oligonucleotide
gaccggcagcugauagcuu

SEQ ID NO: 1373949 - RNA, 19 nt, Artificial Sequence
  Description of Artificial Sequence: Synthetic oligonucleotide
cgccgaacgugcucuggua

SEQ ID NO: 1373950 - RNA, 19 nt, Artificial Sequence
  Description of Artificial Sequence: Synthetic oligonucleotide
caaaagaacaccuacaucc

SEQ ID NO: 1373951 - RNA, 19 nt, Artificial Sequence
  Description of Artificial Sequence: Synthetic oligonucleotide
auuugugagauuuuauugc

SEQ ID NO: 1373952 - RNA, 19 nt, Artificial Sequence
  Description of Artificial Sequence: Synthetic oligonucleotide
uaguauagaagcuaaagag

SEQ ID NO: 1373953 - RNA, 19 nt, Artificial Sequence
  Description of Artificial Sequence: Synthetic oligonucleotide
uaaguuauaggugucagcg

SEQ ID NO: 1373954 - RNA, 19 nt, Artificial Sequence
  Description of Artificial Sequence: Synthetic oligonucleotide
aaugauacacucuaaggga

SEQ ID NO: 1373955 - RNA, 19 nt, Artificial Sequence
  Description of Artificial Sequence: Synthetic oligonucleotide
aguuauaggugucagcggc

SEQ ID NO: 1373956 - RNA, 19 nt, Artificial Sequence
  Description of Artificial Sequence: Synthetic oligonucleotide
aacugaccuaguuauauag

SEQ ID NO: 1373957 - RNA, 19 nt, Artificial Sequence
  Description of Artificial Sequence: Synthetic oligonucleotide
uuggguuugaacacgaggc

SEQ ID NO: 1373958 - RNA, 19 nt, Artificial Sequence
  Description of Artificial Sequence: Synthetic oligonucleotide
aagcuaaagagcuucauau

SEQ ID NO: 1373959 - RNA, 19 nt, Artificial Sequence
  Description of Artificial Sequence: Synthetic oligonucleotide
uccaaggugucuaagguag

SEQ ID NO: 1373960 - RNA, 19 nt, Artificial Sequence
  Description of Artificial Sequence: Synthetic oligonucleotide
aaugggacgucugcgagcc

SEQ ID NO: 1373961 - RNA, 19 nt, Artificial Sequence
  Description of Artificial Sequence: Synthetic oligonucleotide
aaguguuaaagccuggcca

SEQ ID NO: 1373962 - RNA, 19 nt, Artificial Sequence
  Description of Artificial Sequence: Synthetic oligonucleotide
aaauacugacaaucucagc

SEQ ID NO: 1373963 - RNA, 19 nt, Artificial Sequence
  Description of Artificial Sequence: Synthetic oligonucleotide
uauauaggaaugccucugg

SEQ ID NO: 1373964 - RNA, 19 nt, Artificial Sequence
  Description of Artificial Sequence: Synthetic oligonucleotide
aguuauauaggaaugccuc

SEQ ID NO: 1373965 - RNA, 19 nt, Artificial Sequence
  Description of Artificial Sequence: Synthetic oligonucleotide
aaagaacaccuacauccac

SEQ ID NO: 1373966 - RNA, 19 nt, Artificial Sequence
  Description of Artificial Sequence: Synthetic oligonucleotide
aagauucuggggcaguuag

SEQ ID NO: 1373967 - RNA, 19 nt, Artificial Sequence
  Description of Artificial Sequence: Synthetic oligonucleotide
ucuagauccugcaaaagaa

SEQ ID NO: 1373968 - RNA, 19 nt, Artificial Sequence
  Description of Artificial Sequence: Synthetic oligonucleotide
ucacgauagaagauucugg

SEQ ID NO: 1373969 - RNA, 19 nt, Artificial Sequence
  Description of Artificial Sequence: Synthetic oligonucleotide
aaggguaaaggaguaguac

SEQ ID NO: 1373970 - RNA, 19 nt, Artificial Sequence
  Description of Artificial Sequence: Synthetic oligonucleotide
cacgauagaagauucuggg

SEQ ID NO: 1373971 - RNA, 19 nt, Artificial Sequence
  Description of Artificial Sequence: Synthetic oligonucleotide
ggcaucuuaguauagaagc

SEQ ID NO: 1373972 - RNA, 19 nt, Artificial Sequence
  Description of Artificial Sequence: Synthetic oligonucleotide
uguccuucggcccacaacu

SEQ ID NO: 1373973 - RNA, 19 nt, Artificial Sequence
  Description of Artificial Sequence: Synthetic oligonucleotide
auauaggaaugccucuggc

SEQ ID NO: 1373974 - RNA, 19 nt, Artificial Sequence
  Description of Artificial Sequence: Synthetic oligonucleotide
uuugugagauuuuauugcu

SEQ ID NO: 1373975 - RNA, 19 nt, Artificial Sequence
  Description of Artificial Sequence: Synthetic oligonucleotide
uaagggagcagccaacuga

SEQ ID NO: 1373976 - RNA, 19 nt, Artificial Sequence
  Description of Artificial Sequence: Synthetic oligonucleotide
aaguuauaggugucagcgg

SEQ ID NO: 1373977 - RNA, 19 nt, Artificial Sequence
  Description of Artificial Sequence: Synthetic oligonucleotide
auuuuauugcugcuaggag

SEQ ID NO: 1373978 - RNA, 19 nt, Artificial Sequence
  Description of Artificial Sequence: Synthetic oligonucleotide
uuuaaccucagagugagaa

SEQ ID NO: 1373979 - RNA, 19 nt, Artificial Sequence
  Description of Artificial Sequence: Synthetic oligonucleotide
ugcacaggggauaaguagc

SEQ ID NO: 1373980 - RNA, 19 nt, Artificial Sequence
  Description of Artificial Sequence: Synthetic oligonucleotide
ugcaaaagaacaccuacau

SEQ ID NO: 1373981 - RNA, 19 nt, Artificial Sequence
  Description of Artificial Sequence: Synthetic oligonucleotide
ucauauaguggcucagucc

SEQ ID NO: 1373982 - RNA, 19 nt, Artificial Sequence
  Description of Artificial Sequence: Synthetic oligonucleotide
cuuacggccagcaugagca

SEQ ID NO: 1373983 - RNA, 19 nt, Artificial Sequence
  Description of Artificial Sequence: Synthetic oligonucleotide
agcaacagggguucuauag

SEQ ID NO: 1373984 - RNA, 19 nt, Artificial Sequence
  Description of Artificial Sequence: Synthetic oligonucleotide
auaggggucuuggugaugc

SEQ ID NO: 1373985 - RNA, 19 nt, Artificial Sequence
  Description of Artificial Sequence: Synthetic oligonucleotide
uauugcugcuaggagaagg

SEQ ID NO: 1373986 - RNA, 19 nt, Artificial Sequence
  Description of Artificial Sequence: Synthetic oligonucleotide
uguggucaaggaauuaucu

SEQ ID NO: 1373987 - RNA, 19 nt, Artificial Sequence
  Description of Artificial Sequence: Synthetic oligonucleotide
ugacaacugaccuaguuau

SEQ ID NO: 1373988 - RNA, 19 nt, Artificial Sequence
  Description of Artificial Sequence: Synthetic oligonucleotide
uaguuauauaggaaugccu

SEQ ID NO: 1373989 - RNA, 19 nt, Artificial Sequence
  Description of Artificial Sequence: Synthetic oligonucleotide
uguagcuuggagaagggua

SEQ ID NO: 1373990 - RNA, 19 nt, Artificial Sequence
  Description of Artificial Sequence: Synthetic oligonucleotide
uuaguaagauguucuucag

SEQ ID NO: 1373991 - RNA, 19 nt, Artificial Sequence
  Description of Artificial Sequence: Synthetic oligonucleotide
uauaggaaugccucuggca

SEQ ID NO: 1373992 - RNA, 19 nt, Artificial Sequence
  Description of Artificial Sequence: Synthetic oligonucleotide
agagggcaaguguuaaagc

SEQ ID NO: 1373993 - RNA, 19 nt, Artificial Sequence
  Description of Artificial Sequence: Synthetic oligonucleotide
gagucuggcaucacgauag

SEQ ID NO: 1373994 - RNA, 19 nt, Artificial Sequence
  Description of Artificial Sequence: Synthetic oligonucleotide
auaggaaugccucuggcaa

SEQ ID NO: 1373995 - RNA, 19 nt, Artificial Sequence
  Description of Artificial Sequence: Synthetic oligonucleotide
ucuagcuucacagucuuac

SEQ ID NO: 1373996 - RNA, 19 nt, Artificial Sequence
  Description of Artificial Sequence: Synthetic oligonucleotide
acuccaaggguagauaccg

SEQ ID NO: 1373997 - RNA, 19 nt, Artificial Sequence
  Description of Artificial Sequence: Synthetic oligonucleotide
acgauagaagauucugggg

SEQ ID NO: 1373998 - RNA, 19 nt, Artificial Sequence
  Description of Artificial Sequence: Synthetic oligonucleotide
cuaguuauauaggaaugcc

SEQ ID NO: 1373999 - RNA, 19 nt, Artificial Sequence
  Description of Artificial Sequence: Synthetic oligonucleotide
uccacaagcacgugcagug

SEQ ID NO: 1374000 - RNA, 19 nt, Artificial Sequence
  Description of Artificial Sequence: Synthetic oligonucleotide
ugugagaaaggcugggugu

SEQ ID NO: 1374001 - RNA, 19 nt, Artificial Sequence
  Description of Artificial Sequence: Synthetic oligonucleotide
ucuauaguugucaccugga

SEQ ID NO: 1374002 - RNA, 19 nt, Artificial Sequence
  Description of Artificial Sequence: Synthetic oligonucleotide
cuuauaggggucuugguga

SEQ ID NO: 1374003 - RNA, 19 nt, Artificial Sequence
  Description of Artificial Sequence: Synthetic oligonucleotide
cuugucuaggcacuucucc

SEQ ID NO: 1374004 - RNA, 19 nt, Artificial Sequence
  Description of Artificial Sequence: Synthetic oligonucleotide
guagauaccgcuccacaag

SEQ ID NO: 1374005 - RNA, 19 nt, Artificial Sequence
  Description of Artificial Sequence: Synthetic oligonucleotide
aagccuggccacuacuggg

SEQ ID NO: 1374006 - RNA, 19 nt, Artificial Sequence
  Description of Artificial Sequence: Synthetic oligonucleotide
uagauaccgcuccacaagc

SEQ ID NO: 1374007 - RNA, 19 nt, Artificial Sequence
  Description of Artificial Sequence: Synthetic oligonucleotide
aggugucuaagguagggag

SEQ ID NO: 1374008 - RNA, 19 nt, Artificial Sequence
  Description of Artificial Sequence: Synthetic oligonucleotide
aguuaguaagauguucuuc

SEQ ID NO: 1374009 - RNA, 19 nt, Artificial Sequence
  Description of Artificial Sequence: Synthetic oligonucleotide
gucauugcaaaggugcugg

SEQ ID NO: 1374010 - RNA, 19 nt, Artificial Sequence
  Description of Artificial Sequence: Synthetic oligonucleotide
uaaagccuggccacuacug

SEQ ID NO: 1374011 - RNA, 19 nt, Artificial Sequence
  Description of Artificial Sequence: Synthetic oligonucleotide
uuaaccucagagugagaag

SEQ ID NO: 1374012 - RNA, 19 nt, Artificial Sequence
  Description of Artificial Sequence: Synthetic oligonucleotide
ucagugacuagucccugcc

SEQ ID NO: 1374013 - RNA, 19 nt, Artificial Sequence
  Description of Artificial Sequence: Synthetic oligonucleotide
ugaacacgaggcaaucuga

SEQ ID NO: 1374014 - RNA, 19 nt, Artificial Sequence
  Description of Artificial Sequence: Synthetic oligonucleotide
ugggugucuuccaacacug

SEQ ID NO: 1374015 - RNA, 19 nt, Artificial Sequence
  Description of Artificial Sequence: Synthetic oligonucleotide
agguccaaggugucuaagg

SEQ ID NO: 1374016 - RNA, 19 nt, Artificial Sequence
  Description of Artificial Sequence: Synthetic oligonucleotide
aguaaguuauaggugucag

SEQ ID NO: 1374017 - RNA, 19 nt, Artificial Sequence
  Description of Artificial Sequence: Synthetic oligonucleotide
ucuaagguagggagagggc

SEQ ID NO: 1374018 - RNA, 19 nt, Artificial Sequence
  Description of Artificial Sequence: Synthetic oligonucleotide
gauaaguagcugccgguac

SEQ ID NO: 1374019 - RNA, 19 nt, Artificial Sequence
  Description of Artificial Sequence: Synthetic oligonucleotide
agauccugcaaaagaacac

SEQ ID NO: 1374020 - RNA, 19 nt, Artificial Sequence
  Description of Artificial Sequence: Synthetic oligonucleotide
caaggguagauaccgcucc

SEQ ID NO: 1374021 - RNA, 19 nt, Artificial Sequence
  Description of Artificial Sequence: Synthetic oligonucleotide
cuugaucagugacuagucc

SEQ ID NO: 1374022 - RNA, 19 nt, Artificial Sequence
  Description of Artificial Sequence: Synthetic oligonucleotide
aucacgauagaagauucug

SEQ ID NO: 1374023 - RNA, 19 nt, Artificial Sequence
  Description of Artificial Sequence: Synthetic oligonucleotide
gaaaccuugaugauggugu

SEQ ID NO: 1374024 - RNA, 19 nt, Artificial Sequence
  Description of Artificial Sequence: Synthetic oligonucleotide
agaguagcaacagggguuc

SEQ ID NO: 1374025 - RNA, 19 nt, Artificial Sequence
  Description of Artificial Sequence: Synthetic oligonucleotide
cuggaguaaguuauaggug

SEQ ID NO: 1374026 - RNA, 19 nt, Artificial Sequence
  Description of Artificial Sequence: Synthetic oligonucleotide
uugucuaggcacuucucca

SEQ ID NO: 1374027 - RNA, 19 nt, Artificial Sequence
  Description of Artificial Sequence: Synthetic oligonucleotide
aacacgaggcaaucugaca

SEQ ID NO: 1374028 - RNA, 19 nt, Artificial Sequence
  Description of Artificial Sequence: Synthetic oligonucleotide
ugaccuaguuauauaggaa

SEQ ID NO: 1374029 - RNA, 19 nt, Artificial Sequence
  Description of Artificial Sequence: Synthetic oligonucleotide
guaaguuauaggugucagc

SEQ ID NO: 1374030 - RNA, 19 nt, Artificial Sequence
  Description of Artificial Sequence: Synthetic oligonucleotide
aagaacaccuacauccaca

SEQ ID NO: 1374031 - RNA, 19 nt, Artificial Sequence
  Description of Artificial Sequence: Synthetic oligonucleotide
uggauggaagccuggccgg

SEQ ID NO: 1374032 - RNA, 19 nt, Artificial Sequence
  Description of Artificial Sequence: Synthetic oligonucleotide
gaggcuguagcuuggagaa

SEQ ID NO: 1374033 - RNA, 19 nt, Artificial Sequence
  Description of Artificial Sequence: Synthetic oligonucleotide
uaguaccaaggcuaguucu

SEQ ID NO: 1374034 - RNA, 19 nt, Artificial Sequence
  Description of Artificial Sequence: Synthetic oligonucleotide
gauaccgcuccacaagcac

SEQ ID NO: 1374035 - RNA, 19 nt, Artificial Sequence
  Description of Artificial Sequence: Synthetic oligonucleotide
cugaccuaguuauauagga

SEQ ID NO: 1374036 - RNA, 19 nt, Artificial Sequence
  Description of Artificial Sequence: Synthetic oligonucleotide
auaaguagcugccgguacu

SEQ ID NO: 1374037 - RNA, 19 nt, Artificial Sequence
  Description of Artificial Sequence: Synthetic oligonucleotide
agugacuagucccugccgu

SEQ ID NO: 1374038 - RNA, 19 nt, Artificial Sequence
  Description of Artificial Sequence: Synthetic oligonucleotide
agaaggguaaaggaguagu

SEQ ID NO: 1374039 - RNA, 19 nt, Artificial Sequence
  Description of Artificial Sequence: Synthetic oligonucleotide
augauacacucuaagggag

SEQ ID NO: 1374040 - RNA, 19 nt, Artificial Sequence
  Description of Artificial Sequence: Synthetic oligonucleotide
ugacugacaaggugggaca

SEQ ID NO: 1374041 - RNA, 19 nt, Artificial Sequence
  Description of Artificial Sequence: Synthetic oligonucleotide
uacuccaaggguagauacc

SEQ ID NO: 1374042 - RNA, 19 nt, Artificial Sequence
  Description of Artificial Sequence: Synthetic oligonucleotide
cagucuuacggccagcaug

SEQ ID NO: 1374043 - RNA, 19 nt, Artificial Sequence
  Description of Artificial Sequence: Synthetic oligonucleotide
acaccuacauccacaggcc

SEQ ID NO: 1374044 - RNA, 19 nt, Artificial Sequence
  Description of Artificial Sequence: Synthetic oligonucleotide
auaggugucagcggcuaac

SEQ ID NO: 1374045 - RNA, 19 nt, Artificial Sequence
  Description of Artificial Sequence: Synthetic oligonucleotide
caugagcagaaaaugccuc

SEQ ID NO: 1374046 - RNA, 19 nt, Artificial Sequence
  Description of Artificial Sequence: Synthetic oligonucleotide
ucuuaguauagaagcuaaa

SEQ ID NO: 1374047 - RNA, 19 nt, Artificial Sequence
  Description of Artificial Sequence: Synthetic oligonucleotide
ugcuaggagaaggaaaccu

SEQ ID NO: 1374048 - RNA, 19 nt, Artificial Sequence
  Description of Artificial Sequence: Synthetic oligonucleotide
gugucuaagguagggagag

SEQ ID NO: 1374049 - RNA, 19 nt, Artificial Sequence
  Description of Artificial Sequence: Synthetic oligonucleotide
ugaaggcugugagaaaggc

SEQ ID NO: 1374050 - RNA, 19 nt, Artificial Sequence
  Description of Artificial Sequence: Synthetic oligonucleotide
guacuccaaggguagauac

SEQ ID NO: 1374051 - RNA, 19 nt, Artificial Sequence
  Description of Artificial Sequence: Synthetic oligonucleotide
ggaccuacaguuugggucc

SEQ ID NO: 1374052 - RNA, 19 nt, Artificial Sequence
  Description of Artificial Sequence: Synthetic oligonucleotide
uauaguggcucaguccagc

SEQ ID NO: 1374053 - RNA, 19 nt, Artificial Sequence
  Description of Artificial Sequence: Synthetic oligonucleotide
cugugacugacaagguggg

SEQ ID NO: 1374054 - RNA, 19 nt, Artificial Sequence
  Description of Artificial Sequence: Synthetic oligonucleotide
cauccguuggcagaguagc

SEQ ID NO: 1374055 - RNA, 19 nt, Artificial Sequence
  Description of Artificial Sequence: Synthetic oligonucleotide
ugcgagccagaccaggucu

SEQ ID NO: 1374056 - RNA, 19 nt, Artificial Sequence
  Description of Artificial Sequence: Synthetic oligonucleotide
acugaccuaguuauauagg

SEQ ID NO: 1374057 - RNA, 19 nt, Artificial Sequence
  Description of Artificial Sequence: Synthetic oligonucleotide
gaagcuaaagagcuucaua

SEQ ID NO: 1374058 - RNA, 19 nt, Artificial Sequence
  Description of Artificial Sequence: Synthetic oligonucleotide
agagugagaagggcugggc

SEQ ID NO: 1374059 - RNA, 19 nt, Artificial Sequence
  Description of Artificial Sequence: Synthetic oligonucleotide
uauagaagcuaaagagcuu

SEQ ID NO: 1374060 - RNA, 19 nt, Artificial Sequence
  Description of Artificial Sequence: Synthetic oligonucleotide
acaacugaccuaguuauau

SEQ ID NO: 1374061 - RNA, 19 nt, Artificial Sequence
  Description of Artificial Sequence: Synthetic oligonucleotide
ggaaauacuugucuaggca

SEQ ID NO: 1374062 - RNA, 19 nt, Artificial Sequence
  Description of Artificial Sequence: Synthetic oligonucleotide
ugacuagucccugccgucg

SEQ ID NO: 1374063 - RNA, 19 nt, Artificial Sequence
  Description of Artificial Sequence: Synthetic oligonucleotide
ucaccuggaagagcugugg

SEQ ID NO: 1374064 - RNA, 19 nt, Artificial Sequence
  Description of Artificial Sequence: Synthetic oligonucleotide
agugagacuugaucaguga

SEQ ID NO: 1374065 - RNA, 19 nt, Artificial Sequence
  Description of Artificial Sequence: Synthetic oligonucleotide
caaggugucuaagguaggg

SEQ ID NO: 1374066 - RNA, 19 nt, Artificial Sequence
  Description of Artificial Sequence: Synthetic oligonucleotide
gugagacuugaucagugac

SEQ ID NO: 1374067 - RNA, 19 nt, Artificial Sequence
  Description of Artificial Sequence: Synthetic oligonucleotide
gaugaagcaucagcauucc

SEQ ID NO: 1374068 - RNA, 19 nt, Artificial Sequence
  Description of Artificial Sequence: Synthetic oligonucleotide
ucagcggcuaacucuggac

SEQ ID NO: 1374069 - RNA, 19 nt, Artificial Sequence
  Description of Artificial Sequence: Synthetic oligonucleotide
cagagaaugauacacucua

SEQ ID NO: 1374070 - RNA, 19 nt, Artificial Sequence
  Description of Artificial Sequence: Synthetic oligonucleotide
agucuuacggccagcauga

SEQ ID NO: 1374071 - RNA, 19 nt, Artificial Sequence
  Description of Artificial Sequence: Synthetic oligonucleotide
ggggauaaguagcugccgg

SEQ ID NO: 1374072 - RNA, 19 nt, Artificial Sequence
  Description of Artificial Sequence: Synthetic oligonucleotide
gggaccuacaguuuggguc

SEQ ID NO: 1374073 - RNA, 19 nt, Artificial Sequence
  Description of Artificial Sequence: Synthetic oligonucleotide
acucuaagggagcagccaa

SEQ ID NO: 1374074 - RNA, 19 nt, Artificial Sequence
  Description of Artificial Sequence: Synthetic oligonucleotide
accuaguuauauaggaaug

SEQ ID NO: 1374075 - RNA, 19 nt, Artificial Sequence
  Description of Artificial Sequence: Synthetic oligonucleotide
agcacgugcagugagacuu

SEQ ID NO: 1374076 - RNA, 19 nt, Artificial Sequence
  Description of Artificial Sequence: Synthetic oligonucleotide
uaccgcuccacaagcacgu

SEQ ID NO: 1374077 - RNA, 19 nt, Artificial Sequence
  Description of Artificial Sequence: Synthetic oligonucleotide
ucugcgagccagaccaggu

SEQ ID NO: 1374078 - RNA, 19 nt, Artificial Sequence
  Description of Artificial Sequence: Synthetic oligonucleotide
aggaguauccucaucccug

SEQ ID NO: 1374079 - RNA, 19 nt, Artificial Sequence
  Description of Artificial Sequence: Synthetic oligonucleotide
aggguugagggguauucca

SEQ ID NO: 1374080 - RNA, 19 nt, Artificial Sequence
  Description of Artificial Sequence: Synthetic oligonucleotide
uugagggguauuccaguuc

SEQ ID NO: 1374081 - RNA, 19 nt, Artificial Sequence
  Description of Artificial Sequence: Synthetic oligonucleotide
gaacaccuacauccacagg

SEQ ID NO: 1374082 - RNA, 19 nt, Artificial Sequence
  Description of Artificial Sequence: Synthetic oligonucleotide
aguaccaaggcuaguucug

SEQ ID NO: 1374083 - RNA, 19 nt, Artificial Sequence
  Description of Artificial Sequence: Synthetic oligonucleotide
guuggcagaguagcaacag

SEQ ID NO: 1374084 - RNA, 19 nt, Artificial Sequence
  Description of Artificial Sequence: Synthetic oligonucleotide
cuguggucaaggaauuauc

SEQ ID NO: 1374085 - RNA, 19 nt, Artificial Sequence
  Description of Artificial Sequence: Synthetic oligonucleotide
aauacuugucuaggcacuu

SEQ ID NO: 1374086 - RNA, 19 nt, Artificial Sequence
  Description of Artificial Sequence: Synthetic oligonucleotide
auaccgcuccacaagcacg

SEQ ID NO: 1374087 - RNA, 19 nt, Artificial Sequence
  Description of Artificial Sequence: Synthetic oligonucleotide
cacaagcacgugcagugag

SEQ ID NO: 1374088 - RNA, 19 nt, Artificial Sequence
  Description of Artificial Sequence: Synthetic oligonucleotide
ccuaguuauauaggaaugc

SEQ ID NO: 1374089 - RNA, 19 nt, Artificial Sequence
  Description of Artificial Sequence: Synthetic oligonucleotide
ugggacgucugcgagccag

SEQ ID NO: 1374090 - RNA, 19 nt, Artificial Sequence
  Description of Artificial Sequence: Synthetic oligonucleotide
gcuuggagaaggguaaagg

SEQ ID NO: 1374091 - RNA, 19 nt, Artificial Sequence
  Description of Artificial Sequence: Synthetic oligonucleotide
uuauaggggucuuggugau

SEQ ID NO: 1374092 - RNA, 19 nt, Artificial Sequence
  Description of Artificial Sequence: Synthetic oligonucleotide
guaguaccaaggcuaguuc

SEQ ID NO: 1374093 - RNA, 19 nt, Artificial Sequence
  Description of Artificial Sequence: Synthetic oligonucleotide
gaacacgaggcaaucugac

SEQ ID NO: 1374094 - RNA, 19 nt, Artificial Sequence
  Description of Artificial Sequence: Synthetic oligonucleotide
aauugccacugaaugcaca

SEQ ID NO: 1374095 - RNA, 19 nt, Artificial Sequence
  Description of Artificial Sequence: Synthetic oligonucleotide
agcuaaagagcuucauaua

SEQ ID NO: 1374096 - RNA, 19 nt, Artificial Sequence
  Description of Artificial Sequence: Synthetic oligonucleotide
uccuucggcccacaacucu

SEQ ID NO: 1374097 - RNA, 19 nt, Artificial Sequence
  Description of Artificial Sequence: Synthetic oligonucleotide
cucuuauuucuggaggcug

SEQ ID NO: 1374098 - RNA, 19 nt, Artificial Sequence
  Description of Artificial Sequence: Synthetic oligonucleotide
aaugcacaggggauaagua

SEQ ID NO: 1374099 - RNA, 19 nt, Artificial Sequence
  Description of Artificial Sequence: Synthetic oligonucleotide
gaguaaguuauagguguca

SEQ ID NO: 1374100 - RNA, 19 nt, Artificial Sequence
  Description of Artificial Sequence: Synthetic oligonucleotide
uaggaaugccucuggcaac

SEQ ID NO: 1374101 - RNA, 19 nt, Artificial Sequence
  Description of Artificial Sequence: Synthetic oligonucleotide
aucuuaguauagaagcuaa

SEQ ID NO: 1374102 - RNA, 19 nt, Artificial Sequence
  Description of Artificial Sequence: Synthetic oligonucleotide
aggcaucuuaguauagaag

SEQ ID NO: 1374103 - RNA, 19 nt, Artificial Sequence
  Description of Artificial Sequence: Synthetic oligonucleotide
guccucuagcuucacaguc

SEQ ID NO: 1374104 - RNA, 19 nt, Artificial Sequence
  Description of Artificial Sequence: Synthetic oligonucleotide
uccugcaaaagaacaccua

SEQ ID NO: 1374105 - RNA, 19 nt, Artificial Sequence
  Description of Artificial Sequence: Synthetic oligonucleotide
auugcugcuaggagaagga

SEQ ID NO: 1374106 - RNA, 19 nt, Artificial Sequence
  Description of Artificial Sequence: Synthetic oligonucleotide
ugccgguacuccaagggua

SEQ ID NO: 1374107 - RNA, 19 nt, Artificial Sequence
  Description of Artificial Sequence: Synthetic oligonucleotide
aggcuaguucugcucaugu

SEQ ID NO: 1374108 - RNA, 19 nt, Artificial Sequence
  Description of Artificial Sequence: Synthetic oligonucleotide
accuacauccacaggccgg

SEQ ID NO: 1374109 - RNA, 19 nt, Artificial Sequence
  Description of Artificial Sequence: Synthetic oligonucleotide
agggcaaguguuaaagccu

SEQ ID NO: 1374110 - RNA, 19 nt, Artificial Sequence
  Description of Artificial Sequence: Synthetic oligonucleotide
aaggcuaguucugcucaug

SEQ ID NO: 1374111 - RNA, 19 nt, Artificial Sequence
  Description of Artificial Sequence: Synthetic oligonucleotide
ccuuuaaccucagagugag

SEQ ID NO: 1374112 - RNA, 19 nt, Artificial Sequence
  Description of Artificial Sequence: Synthetic oligonucleotide
ggaugaagcaucagcauuc

SEQ ID NO: 1374113 - RNA, 19 nt, Artificial Sequence
  Description of Artificial Sequence: Synthetic oligonucleotide
uaggguugagggguauucc

SEQ ID NO: 1374114 - RNA, 19 nt, Artificial Sequence
  Description of Artificial Sequence: Synthetic oligonucleotide
gugucagcggcuaacucug

SEQ ID NO: 1374115 - RNA, 19 nt, Artificial Sequence
  Description of Artificial Sequence: Synthetic oligonucleotide
uaaguagcugccgguacuc

SEQ ID NO: 1374116 - RNA, 19 nt, Artificial Sequence
  Description of Artificial Sequence: Synthetic oligonucleotide
ugucuaagguagggagagg

SEQ ID NO: 1374117 - RNA, 19 nt, Artificial Sequence
  Description of Artificial Sequence: Synthetic oligonucleotide
caagcacgugcagugagac

SEQ ID NO: 1374118 - RNA, 19 nt, Artificial Sequence
  Description of Artificial Sequence: Synthetic oligonucleotide
cucuaagggagcagccaac

SEQ ID NO: 1374119 - RNA, 19 nt, Artificial Sequence
  Description of Artificial Sequence: Synthetic oligonucleotide
cauuggguuugaacacgag

SEQ ID NO: 1374120 - RNA, 19 nt, Artificial Sequence
  Description of Artificial Sequence: Synthetic oligonucleotide
gaaugcacaggggauaagu

SEQ ID NO: 1374121 - RNA, 19 nt, Artificial Sequence
  Description of Artificial Sequence: Synthetic oligonucleotide
cacgaggcaaucugacaac

SEQ ID NO: 1374122 - RNA, 19 nt, Artificial Sequence
  Description of Artificial Sequence: Synthetic oligonucleotide
guucuauaguugucaccug

SEQ ID NO: 1374123 - RNA, 19 nt, Artificial Sequence
  Description of Artificial Sequence: Synthetic oligonucleotide
cuaggguugagggguauuc

SEQ ID NO: 1374124 - RNA, 19 nt, Artificial Sequence
  Description of Artificial Sequence: Synthetic oligonucleotide
cuaagggagcagccaacug

SEQ ID NO: 1374125 - RNA, 19 nt, Artificial Sequence
  Description of Artificial Sequence: Synthetic oligonucleotide
aggggauaaguagcugccg

SEQ ID NO: 1374126 - RNA, 19 nt, Artificial Sequence
  Description of Artificial Sequence: Synthetic oligonucleotide
ugucagcggcuaacucugg

SEQ ID NO: 1374127 - RNA, 19 nt, Artificial Sequence
  Description of Artificial Sequence: Synthetic oligonucleotide
uauaggugucagcggcuaa

SEQ ID NO: 1374128 - RNA, 19 nt, Artificial Sequence
  Description of Artificial Sequence: Synthetic oligonucleotide
uuauaggugucagcggcua

SEQ ID NO: 1374129 - RNA, 19 nt, Artificial Sequence
  Description of Artificial Sequence: Synthetic oligonucleotide
ggcagggaagacugaauug

SEQ ID NO: 1374130 - RNA, 19 nt, Artificial Sequence
  Description of Artificial Sequence: Synthetic oligonucleotide
caggccggcgaaugggacg

SEQ ID NO: 1374131 - RNA, 19 nt, Artificial Sequence
  Description of Artificial Sequence: Synthetic oligonucleotide
uggcaucacgauagaagau

SEQ ID NO: 1374132 - RNA, 19 nt, Artificial Sequence
  Description of Artificial Sequence: Synthetic oligonucleotide
gccuggaguaaguuauagg

SEQ ID NO: 1374133 - RNA, 19 nt, Artificial Sequence
  Description of Artificial Sequence: Synthetic oligonucleotide
uccguuggcagaguagcaa

SEQ ID NO: 1374134 - RNA, 19 nt, Artificial Sequence
  Description of Artificial Sequence: Synthetic oligonucleotide
gacuagucccugccgucgc

SEQ ID NO: 1374135 - RNA, 19 nt, Artificial Sequence
  Description of Artificial Sequence: Synthetic oligonucleotide
cagugacuagucccugccg

SEQ ID NO: 1374136 - RNA, 19 nt, Artificial Sequence
  Description of Artificial Sequence: Synthetic oligonucleotide
caggcaucuuaguauagaa

SEQ ID NO: 1374137 - RNA, 19 nt, Artificial Sequence
  Description of Artificial Sequence: Synthetic oligonucleotide
cuuuguguccuucggccca

SEQ ID NO: 1374138 - RNA, 19 nt, Artificial Sequence
  Description of Artificial Sequence: Synthetic oligonucleotide
ggaaaccuugaugauggug

SEQ ID NO: 1374139 - RNA, 19 nt, Artificial Sequence
  Description of Artificial Sequence: Synthetic oligonucleotide
caucuuaguauagaagcua

SEQ ID NO: 1374140 - RNA, 19 nt, Artificial Sequence
  Description of Artificial Sequence: Synthetic oligonucleotide
gaucagugacuagucccug

SEQ ID NO: 1374141 - RNA, 19 nt, Artificial Sequence
  Description of Artificial Sequence: Synthetic oligonucleotide
ugcauccguuggcagagua

SEQ ID NO: 1374142 - RNA, 19 nt, Artificial Sequence
  Description of Artificial Sequence: Synthetic oligonucleotide
uagcugccgguacuccaag

SEQ ID NO: 1374143 - RNA, 19 nt, Artificial Sequence
  Description of Artificial Sequence: Synthetic oligonucleotide
auccugcaaaagaacaccu

SEQ ID NO: 1374144 - RNA, 19 nt, Artificial Sequence
  Description of Artificial Sequence: Synthetic oligonucleotide
cuauaguugucaccuggaa

SEQ ID NO: 1374145 - RNA, 19 nt, Artificial Sequence
  Description of Artificial Sequence: Synthetic oligonucleotide
uaggugucagcggcuaacu

SEQ ID NO: 1374146 - RNA, 19 nt, Artificial Sequence
  Description of Artificial Sequence: Synthetic oligonucleotide
gguagauaccgcuccacaa

SEQ ID NO: 1374147 - RNA, 19 nt, Artificial Sequence
  Description of Artificial Sequence: Synthetic oligonucleotide
gaaggguaaaggaguagua

SEQ ID NO: 1374148 - RNA, 19 nt, Artificial Sequence
  Description of Artificial Sequence: Synthetic oligonucleotide
ugggaccuacaguuugggu

SEQ ID NO: 1374149 - RNA, 19 nt, Artificial Sequence
  Description of Artificial Sequence: Synthetic oligonucleotide
uguuggcuacucugccucu

SEQ ID NO: 1374150 - RNA, 19 nt, Artificial Sequence
  Description of Artificial Sequence: Synthetic oligonucleotide
cugggaccuacaguuuggg

SEQ ID NO: 1374151 - RNA, 19 nt, Artificial Sequence
  Description of Artificial Sequence: Synthetic oligonucleotide
gcugggcagagaaugauac

SEQ ID NO: 1374152 - RNA, 19 nt, Artificial Sequence
  Description of Artificial Sequence: Synthetic oligonucleotide
ugcaaaggugcuggaaaua

SEQ ID NO: 1374153 - RNA, 19 nt, Artificial Sequence
  Description of Artificial Sequence: Synthetic oligonucleotide
acgaggcaaucugacaacu

SEQ ID NO: 1374154 - RNA, 19 nt, Artificial Sequence
  Description of Artificial Sequence: Synthetic oligonucleotide
agggaagacugaauugcca

SEQ ID NO: 1374155 - RNA, 19 nt, Artificial Sequence
  Description of Artificial Sequence: Synthetic oligonucleotide
agucccugccgucgcaaca

SEQ ID NO: 1374156 - RNA, 19 nt, Artificial Sequence
  Description of Artificial Sequence: Synthetic oligonucleotide
agcggcuaacucuggacuu

SEQ ID NO: 1374157 - RNA, 19 nt, Artificial Sequence
  Description of Artificial Sequence: Synthetic oligonucleotide
gcaaguguuaaagccuggc

SEQ ID NO: 1374158 - RNA, 19 nt, Artificial Sequence
  Description of Artificial Sequence: Synthetic oligonucleotide
ggcgaaugggacgucugcg

SEQ ID NO: 1374159 - RNA, 19 nt, Artificial Sequence
  Description of Artificial Sequence: Synthetic oligonucleotide
gcuuuguguccuucggccc

SEQ ID NO: 1374160 - RNA, 19 nt, Artificial Sequence
  Description of Artificial Sequence: Synthetic oligonucleotide
gucugcgagccagaccagg

SEQ ID NO: 1374161 - RNA, 19 nt, Artificial Sequence
  Description of Artificial Sequence: Synthetic oligonucleotide
ccugcucaaauacugacaa

SEQ ID NO: 1374162 - RNA, 19 nt, Artificial Sequence
  Description of Artificial Sequence: Synthetic oligonucleotide
guguccuucggcccacaac

SEQ ID NO: 1374163 - RNA, 19 nt, Artificial Sequence
  Description of Artificial Sequence: Synthetic oligonucleotide
gugacuagucccugccguc

SEQ ID NO: 1374164 - RNA, 19 nt, Artificial Sequence
  Description of Artificial Sequence: Synthetic oligonucleotide
gucaaggaugaagcaucag

SEQ ID NO: 1374165 - RNA, 19 nt, Artificial Sequence
  Description of Artificial Sequence: Synthetic oligonucleotide
gucccugccgucgcaacag

SEQ ID NO: 1374166 - RNA, 19 nt, Artificial Sequence
  Description of Artificial Sequence: Synthetic oligonucleotide
uguguccuucggcccacaa

SEQ ID NO: 1374167 - RNA, 19 nt, Artificial Sequence
  Description of Artificial Sequence: Synthetic oligonucleotide
cagggguucuauaguuguc

SEQ ID NO: 1374168 - RNA, 19 nt, Artificial Sequence
  Description of Artificial Sequence: Synthetic oligonucleotide
acagucuuacggccagcau

SEQ ID NO: 1374169 - RNA, 19 nt, Artificial Sequence
  Description of Artificial Sequence: Synthetic oligonucleotide
uucggcccacaacucuuuc

SEQ ID NO: 1374170 - RNA, 19 nt, Artificial Sequence
  Description of Artificial Sequence: Synthetic oligonucleotide
acuagucccugccgucgca

SEQ ID NO: 1374171 - RNA, 19 nt, Artificial Sequence
  Description of Artificial Sequence: Synthetic oligonucleotide
acaagcacgugcagugaga

SEQ ID NO: 1374172 - RNA, 19 nt, Artificial Sequence
  Description of Artificial Sequence: Synthetic oligonucleotide
uuccaacacugcauccguu

SEQ ID NO: 1374173 - RNA, 19 nt, Artificial Sequence
  Description of Artificial Sequence: Synthetic oligonucleotide
gccacuacugggcagggaa

SEQ ID NO: 1374174 - RNA, 19 nt, Artificial Sequence
  Description of Artificial Sequence: Synthetic oligonucleotide
gcugauucacuuccugcuc

SEQ ID NO: 1374175 - RNA, 19 nt, Artificial Sequence
  Description of Artificial Sequence: Synthetic oligonucleotide
ucaucccuggaagauccuu

SEQ ID NO: 1374176 - RNA, 19 nt, Artificial Sequence
  Description of Artificial Sequence: Synthetic oligonucleotide
uggcuucaccacugagucu

SEQ ID NO: 1374177 - RNA, 19 nt, Artificial Sequence
  Description of Artificial Sequence: Synthetic oligonucleotide
gcuucauauaguggcucag

SEQ ID NO: 1374178 - RNA, 19 nt, Artificial Sequence
  Description of Artificial Sequence: Synthetic oligonucleotide
uccggggugucuguucuuc

SEQ ID NO: 1374179 - RNA, 19 nt, Artificial Sequence
  Description of Artificial Sequence: Synthetic oligonucleotide
cagaguagcaacagggguu

SEQ ID NO: 1374180 - RNA, 19 nt, Artificial Sequence
  Description of Artificial Sequence: Synthetic oligonucleotide
cuccacaggcaucuuagua

SEQ ID NO: 1374181 - RNA, 19 nt, Artificial Sequence
  Description of Artificial Sequence: Synthetic oligonucleotide
auccacaggccggcgaaug

SEQ ID NO: 1374182 - RNA, 19 nt, Artificial Sequence
  Description of Artificial Sequence: Synthetic oligonucleotide
agauaccgcuccacaagca

SEQ ID NO: 1374183 - RNA, 19 nt, Artificial Sequence
  Description of Artificial Sequence: Synthetic oligonucleotide
ccugccgucgcaacagcag

SEQ ID NO: 1374184 - RNA, 19 nt, Artificial Sequence
  Description of Artificial Sequence: Synthetic oligonucleotide
ugccgucgcaacagcaguu

SEQ ID NO: 1374185 - RNA, 19 nt, Artificial Sequence
  Description of Artificial Sequence: Synthetic oligonucleotide
gacugaauugccacugaau

SEQ ID NO: 1374186 - RNA, 19 nt, Artificial Sequence
  Description of Artificial Sequence: Synthetic oligonucleotide
aguagcaacagggguucua

SEQ ID NO: 1374187 - RNA, 19 nt, Artificial Sequence
  Description of Artificial Sequence: Synthetic oligonucleotide
gcaucacgauagaagauuc

SEQ ID NO: 1374188 - RNA, 19 nt, Artificial Sequence
  Description of Artificial Sequence: Synthetic oligonucleotide
caacugaccuaguuauaua

SEQ ID NO: 1374189 - RNA, 19 nt, Artificial Sequence
  Description of Artificial Sequence: Synthetic oligonucleotide
gucagcggcuaacucugga

SEQ ID NO: 1374190 - RNA, 19 nt, Artificial Sequence
  Description of Artificial Sequence: Synthetic oligonucleotide
ccuacaguuuggguccugg

SEQ ID NO: 1374191 - RNA, 19 nt, Artificial Sequence
  Description of Artificial Sequence: Synthetic oligonucleotide
ccaaggguagauaccgcuc

SEQ ID NO: 1374192 - RNA, 19 nt, Artificial Sequence
  Description of Artificial Sequence: Synthetic oligonucleotide
uagucccugccgucgcaac

SEQ ID NO: 1374193 - RNA, 19 nt, Artificial Sequence
  Description of Artificial Sequence: Synthetic oligonucleotide
ggugucuaagguagggaga

SEQ ID NO: 1374194 - RNA, 19 nt, Artificial Sequence
  Description of Artificial Sequence: Synthetic oligonucleotide
ggguagauaccgcuccaca

SEQ ID NO: 1374195 - RNA, 19 nt, Artificial Sequence
  Description of Artificial Sequence: Synthetic oligonucleotide
gucaaggaauuaucuucua

SEQ ID NO: 1374196 - RNA, 19 nt, Artificial Sequence
  Description of Artificial Sequence: Synthetic oligonucleotide
uagcaacagggguucuaua

SEQ ID NO: 1374197 - RNA, 19 nt, Artificial Sequence
  Description of Artificial Sequence: Synthetic oligonucleotide
aggggcucugaaucugcaa

SEQ ID NO: 1374198 - RNA, 19 nt, Artificial Sequence
  Description of Artificial Sequence: Synthetic oligonucleotide
ucccugccgucgcaacagc

SEQ ID NO: 1374199 - RNA, 19 nt, Artificial Sequence
  Description of Artificial Sequence: Synthetic oligonucleotide
cugcgagccagaccagguc

SEQ ID NO: 1374200 - RNA, 19 nt, Artificial Sequence
  Description of Artificial Sequence: Synthetic oligonucleotide
aggccggcgaaugggacgu

SEQ ID NO: 1374201 - RNA, 19 nt, Artificial Sequence
  Description of Artificial Sequence: Synthetic oligonucleotide
cugggugucuuccaacacu

SEQ ID NO: 1374202 - RNA, 19 nt, Artificial Sequence
  Description of Artificial Sequence: Synthetic oligonucleotide
cacagucuuacggccagca

SEQ ID NO: 1374203 - RNA, 19 nt, Artificial Sequence
  Description of Artificial Sequence: Synthetic oligonucleotide
ggaguaaguuauagguguc

SEQ ID NO: 1374204 - RNA, 19 nt, Artificial Sequence
  Description of Artificial Sequence: Synthetic oligonucleotide
gaugaugguguagguccaa

SEQ ID NO: 1374205 - RNA, 19 nt, Artificial Sequence
  Description of Artificial Sequence: Synthetic oligonucleotide
ccguuggcagaguagcaac

SEQ ID NO: 1374206 - RNA, 19 nt, Artificial Sequence
  Description of Artificial Sequence: Synthetic oligonucleotide
gcaguuccauguccucuag

SEQ ID NO: 1374207 - RNA, 19 nt, Artificial Sequence
  Description of Artificial Sequence: Synthetic oligonucleotide
ccaaggcuaguucugcuca

SEQ ID NO: 1374208 - RNA, 19 nt, Artificial Sequence
  Description of Artificial Sequence: Synthetic oligonucleotide
gcgaaugggacgucugcga

SEQ ID NO: 1374209 - RNA, 19 nt, Artificial Sequence
  Description of Artificial Sequence: Synthetic oligonucleotide
guagcugccgguacuccaa

SEQ ID NO: 1374210 - RNA, 19 nt, Artificial Sequence
  Description of Artificial Sequence: Synthetic oligonucleotide
cacaggccggcgaauggga

SEQ ID NO: 1374211 - RNA, 19 nt, Artificial Sequence
  Description of Artificial Sequence: Synthetic oligonucleotide
caucacgauagaagauucu

SEQ ID NO: 1374212 - RNA, 19 nt, Artificial Sequence
  Description of Artificial Sequence: Synthetic oligonucleotide
guacuuguacuggcuucac

SEQ ID NO: 1374213 - RNA, 19 nt, Artificial Sequence
  Description of Artificial Sequence: Synthetic oligonucleotide
cuuuaaccucagagugaga

SEQ ID NO: 1374214 - RNA, 19 nt, Artificial Sequence
  Description of Artificial Sequence: Synthetic oligonucleotide
gccgguacuccaaggguag

SEQ ID NO: 1374215 - RNA, 19 nt, Artificial Sequence
  Description of Artificial Sequence: Synthetic oligonucleotide
gacaacugaccuaguuaua

SEQ ID NO: 1374216 - RNA, 19 nt, Artificial Sequence
  Description of Artificial Sequence: Synthetic oligonucleotide
cuucauauaguggcucagu

SEQ ID NO: 1374217 - RNA, 19 nt, Artificial Sequence
  Description of Artificial Sequence: Synthetic oligonucleotide
gguugagggguauuccagu

SEQ ID NO: 1374218 - RNA, 19 nt, Artificial Sequence
  Description of Artificial Sequence: Synthetic oligonucleotide
ggcuacucugccucuugga

SEQ ID NO: 1374219 - RNA, 19 nt, Artificial Sequence
  Description of Artificial Sequence: Synthetic oligonucleotide
ggauaaguagcugccggua

SEQ ID NO: 1374220 - RNA, 19 nt, Artificial Sequence
  Description of Artificial Sequence: Synthetic oligonucleotide
gcaucuuaguauagaagcu

SEQ ID NO: 1374221 - RNA, 19 nt, Artificial Sequence
  Description of Artificial Sequence: Synthetic oligonucleotide
cagccuuauaggggucuug

SEQ ID NO: 1374222 - RNA, 19 nt, Artificial Sequence
  Description of Artificial Sequence: Synthetic oligonucleotide
cagcggcuaacucuggacu

SEQ ID NO: 1374223 - RNA, 19 nt, Artificial Sequence
  Description of Artificial Sequence: Synthetic oligonucleotide
gcaugagcagaaaaugccu

SEQ ID NO: 1374224 - RNA, 19 nt, Artificial Sequence
  Description of Artificial Sequence: Synthetic oligonucleotide
aguuuggguccuggaugga

SEQ ID NO: 1374225 - RNA, 19 nt, Artificial Sequence
  Description of Artificial Sequence: Synthetic oligonucleotide
acaacucuuucagcaccuu

SEQ ID NO: 1374226 - RNA, 19 nt, Artificial Sequence
  Description of Artificial Sequence: Synthetic oligonucleotide
gcggcuaacucuggacuug

SEQ ID NO: 1374227 - RNA, 19 nt, Artificial Sequence
  Description of Artificial Sequence: Synthetic oligonucleotide
ggccagcaugagcagaaaa

SEQ ID NO: 1374228 - RNA, 19 nt, Artificial Sequence
  Description of Artificial Sequence: Synthetic oligonucleotide
gucuuacggccagcaugag

SEQ ID NO: 1374229 - RNA, 19 nt, Artificial Sequence
  Description of Artificial Sequence: Synthetic oligonucleotide
ccgucgcaacagcaguucc

SEQ ID NO: 1374230 - RNA, 19 nt, Artificial Sequence
  Description of Artificial Sequence: Synthetic oligonucleotide
gcagagaaugauacacucu

SEQ ID NO: 1374231 - RNA, 19 nt, Artificial Sequence
  Description of Artificial Sequence: Synthetic oligonucleotide
cugccgguacuccaagggu

SEQ ID NO: 1374232 - RNA, 19 nt, Artificial Sequence
  Description of Artificial Sequence: Synthetic oligonucleotide
gccagcaugagcagaaaau

SEQ ID NO: 1374233 - RNA, 19 nt, Artificial Sequence
  Description of Artificial Sequence: Synthetic oligonucleotide
accuacaguuuggguccug

SEQ ID NO: 1374234 - RNA, 19 nt, Artificial Sequence
  Description of Artificial Sequence: Synthetic oligonucleotide
cugccgucgcaacagcagu

SEQ ID NO: 1374235 - RNA, 19 nt, Artificial Sequence
  Description of Artificial Sequence: Synthetic oligonucleotide
uuguguccuucggcccaca

SEQ ID NO: 1374236 - RNA, 19 nt, Artificial Sequence
  Description of Artificial Sequence: Synthetic oligonucleotide
gccagaccaggucucccca

SEQ ID NO: 1374237 - RNA, 19 nt, Artificial Sequence
  Description of Artificial Sequence: Synthetic oligonucleotide
guccuucggcccacaacuc

SEQ ID NO: 1374238 - RNA, 19 nt, Artificial Sequence
  Description of Artificial Sequence: Synthetic oligonucleotide
cagucccagugcuuugugu

SEQ ID NO: 1374239 - RNA, 19 nt, Artificial Sequence
  Description of Artificial Sequence: Synthetic oligonucleotide
cuagucccugccgucgcaa

SEQ ID NO: 1374240 - RNA, 19 nt, Artificial Sequence
  Description of Artificial Sequence: Synthetic oligonucleotide
agcuaggguugagggguau

SEQ ID NO: 1374241 - RNA, 19 nt, Artificial Sequence
  Description of Artificial Sequence: Synthetic oligonucleotide
ccggggugucuguucuucc

SEQ ID NO: 1374242 - RNA, 19 nt, Artificial Sequence
  Description of Artificial Sequence: Synthetic oligonucleotide
ccagaccaggucuccccac

SEQ ID NO: 1374243 - RNA, 19 nt, Artificial Sequence
  Description of Artificial Sequence: Synthetic oligonucleotide
gggugucuuccaacacugc

SEQ ID NO: 1374244 - RNA, 19 nt, Artificial Sequence
  Description of Artificial Sequence: Synthetic oligonucleotide
accgcuccacaagcacgug

SEQ ID NO: 1374245 - RNA, 19 nt, Artificial Sequence
  Description of Artificial Sequence: Synthetic oligonucleotide
gaguaguaccaaggcuagu

SEQ ID NO: 1374246 - RNA, 19 nt, Artificial Sequence
  Description of Artificial Sequence: Synthetic oligonucleotide
cacgugcagugagacuuga

SEQ ID NO: 1374247 - RNA, 19 nt, Artificial Sequence
  Description of Artificial Sequence: Synthetic oligonucleotide
ccggcgaaugggacgucug

SEQ ID NO: 1374248 - RNA, 19 nt, Artificial Sequence
  Description of Artificial Sequence: Synthetic oligonucleotide
gccgucgcaacagcaguuc

SEQ ID NO: 1374249 - RNA, 19 nt, Artificial Sequence
  Description of Artificial Sequence: Synthetic oligonucleotide
ggguccggggugucuguuc

SEQ ID NO: 1374250 - RNA, 19 nt, Artificial Sequence
  Description of Artificial Sequence: Synthetic oligonucleotide
ggacgucugcgagccagac

SEQ ID NO: 1374251 - RNA, 19 nt, Artificial Sequence
  Description of Artificial Sequence: Synthetic oligonucleotide
gggcagagaaugauacacu

SEQ ID NO: 1374252 - RNA, 19 nt, Artificial Sequence
  Description of Artificial Sequence: Synthetic oligonucleotide
gugggacaaagcugagguu

SEQ ID NO: 1374253 - RNA, 19 nt, Artificial Sequence
  Description of Artificial Sequence: Synthetic oligonucleotide
augggacgucugcgagcca

SEQ ID NO: 1374254 - RNA, 19 nt, Artificial Sequence
  Description of Artificial Sequence: Synthetic oligonucleotide
cgucgcaacagcaguucca

SEQ ID NO: 1374255 - RNA, 19 nt, Artificial Sequence
  Description of Artificial Sequence: Synthetic oligonucleotide
gcacaggggauaaguagcu

SEQ ID NO: 1374256 - RNA, 19 nt, Artificial Sequence
  Description of Artificial Sequence: Synthetic oligonucleotide
ggcugggcagagaaugaua

SEQ ID NO: 1374257 - RNA, 19 nt, Artificial Sequence
  Description of Artificial Sequence: Synthetic oligonucleotide
cuucggcccacaacucuuu

SEQ ID NO: 1374258 - RNA, 19 nt, Artificial Sequence
  Description of Artificial Sequence: Synthetic oligonucleotide
gaccuacaguuuggguccu

SEQ ID NO: 1374259 - RNA, 19 nt, Artificial Sequence
  Description of Artificial Sequence: Synthetic oligonucleotide
gcgagccagaccaggucuc

SEQ ID NO: 1374260 - RNA, 19 nt, Artificial Sequence
  Description of Artificial Sequence: Synthetic oligonucleotide
cgagccagaccaggucucc

SEQ ID NO: 1374261 - RNA, 19 nt, Artificial Sequence
  Description of Artificial Sequence: Synthetic oligonucleotide
cccugccgucgcaacagca

SEQ ID NO: 1374262 - RNA, 19 nt, Artificial Sequence
  Description of Artificial Sequence: Synthetic oligonucleotide
gggacgucugcgagccaga

SEQ ID NO: 1374263 - RNA, 19 nt, Artificial Sequence
  Description of Artificial Sequence: Synthetic oligonucleotide
ccaggugcccauuggguuu

SEQ ID NO: 1374264 - RNA, 19 nt, Artificial Sequence
  Description of Artificial Sequence: Synthetic oligonucleotide
ccuucggcccacaacucuu

SEQ ID NO: 1374265 - RNA, 19 nt, Artificial Sequence
  Description of Artificial Sequence: Synthetic oligonucleotide
caggguccggggugucugu

SEQ ID NO: 1374266 - RNA, 19 nt, Artificial Sequence
  Description of Artificial Sequence: Synthetic oligonucleotide
gcuggcagaccuggagcua

SEQ ID NO: 1374267 - RNA, 19 nt, Artificial Sequence
  Description of Artificial Sequence: Synthetic oligonucleotide
ggccacuacugggcaggga

SEQ ID NO: 1374268 - RNA, 19 nt, Artificial Sequence
  Description of Artificial Sequence: Synthetic oligonucleotide
cauccacaggccggcgaau

SEQ ID NO: 1374269 - RNA, 19 nt, Artificial Sequence
  Description of Artificial Sequence: Synthetic oligonucleotide
cagcccagucccagugcuu

SEQ ID NO: 1374270 - RNA, 19 nt, Artificial Sequence
  Description of Artificial Sequence: Synthetic oligonucleotide
gccggcgaaugggacgucu

SEQ ID NO: 1374271 - RNA, 19 nt, Artificial Sequence
  Description of Artificial Sequence: Synthetic oligonucleotide
gcuaggguugagggguauu

SEQ ID NO: 1374272 - RNA, 19 nt, Artificial Sequence
  Description of Artificial Sequence: Synthetic oligonucleotide
cugcauccguuggcagagu

SEQ ID NO: 1374273 - RNA, 19 nt, Artificial Sequence
  Description of Artificial Sequence: Synthetic oligonucleotide
ccaucucaagagccuucuu

SEQ ID NO: 1374274 - RNA, 19 nt, Artificial Sequence
  Description of Artificial Sequence: Synthetic oligonucleotide
ggccggcgaaugggacguc

SEQ ID NO: 1374275 - RNA, 19 nt, Artificial Sequence
  Description of Artificial Sequence: Synthetic oligonucleotide
cccgggcugcuuucccauu

SEQ ID NO: 1374276 - RNA, 19 nt, Artificial Sequence
  Description of Artificial Sequence: Synthetic oligonucleotide
aaagguaacaacaccaucc

SEQ ID NO: 1374277 - RNA, 19 nt, Artificial Sequence
  Description of Artificial Sequence: Synthetic oligonucleotide
aaauucaccugcuuggcac

SEQ ID NO: 1374278 - RNA, 19 nt, Artificial Sequence
  Description of Artificial Sequence: Synthetic oligonucleotide
ugaugaaggacucuguacg

SEQ ID NO: 1374279 - RNA, 19 nt, Artificial Sequence
  Description of Artificial Sequence: Synthetic oligonucleotide
ucaaacuugcggaaaaugg

SEQ ID NO: 1374280 - RNA, 19 nt, Artificial Sequence
  Description of Artificial Sequence: Synthetic oligonucleotide
auaagggccaacaagaagc

SEQ ID NO: 1374281 - RNA, 19 nt, Artificial Sequence
  Description of Artificial Sequence: Synthetic oligonucleotide
aagucguggaaugacaucc

SEQ ID NO: 1374282 - RNA, 19 nt, Artificial Sequence
  Description of Artificial Sequence: Synthetic oligonucleotide
uuguguuugcuaaugaucc

SEQ ID NO: 1374283 - RNA, 19 nt, Artificial Sequence
  Description of Artificial Sequence: Synthetic oligonucleotide
agaagaauuggccaggaag

SEQ ID NO: 1374284 - RNA, 19 nt, Artificial Sequence
  Description of Artificial Sequence: Synthetic oligonucleotide
uuaaacagaucaaagguaa

SEQ ID NO: 1374285 - RNA, 19 nt, Artificial Sequence
  Description of Artificial Sequence: Synthetic oligonucleotide
uccauauccaugauauugg

SEQ ID NO: 1374286 - RNA, 19 nt, Artificial Sequence
  Description of Artificial Sequence: Synthetic oligonucleotide
agagucguguuccaguucc

SEQ ID NO: 1374287 - RNA, 19 nt, Artificial Sequence
  Description of Artificial Sequence: Synthetic oligonucleotide
uugcuaaugauccuguuca

SEQ ID NO: 1374288 - RNA, 19 nt, Artificial Sequence
  Description of Artificial Sequence: Synthetic oligonucleotide
uggaaauucaccugcuugg

SEQ ID NO: 1374289 - RNA, 19 nt, Artificial Sequence
  Description of Artificial Sequence: Synthetic oligonucleotide
ugucgaaauccacagacag

SEQ ID NO: 1374290 - RNA, 19 nt, Artificial Sequence
  Description of Artificial Sequence: Synthetic oligonucleotide
ugcauaagggccaacaaga

SEQ ID NO: 1374291 - RNA, 19 nt, Artificial Sequence
  Description of Artificial Sequence: Synthetic oligonucleotide
gcuguaaccacuuaaacag

SEQ ID NO: 1374292 - RNA, 19 nt, Artificial Sequence
  Description of Artificial Sequence: Synthetic oligonucleotide
aucucguaggcacucaugc

SEQ ID NO: 1374293 - RNA, 19 nt, Artificial Sequence
  Description of Artificial Sequence: Synthetic oligonucleotide
aaaaccggaacauggucuc

SEQ ID NO: 1374294 - RNA, 19 nt, Artificial Sequence
  Description of Artificial Sequence: Synthetic oligonucleotide
aaacauagucagcuguaac

SEQ ID NO: 1374295 - RNA, 19 nt, Artificial Sequence
  Description of Artificial Sequence: Synthetic oligonucleotide
accaucacgauccaugagg

SEQ ID NO: 1374296 - RNA, 19 nt, Artificial Sequence
  Description of Artificial Sequence: Synthetic oligonucleotide
aaugauccuguucaagaug

SEQ ID NO: 1374297 - RNA, 19 nt, Artificial Sequence
  Description of Artificial Sequence: Synthetic oligonucleotide
ucaucuagcuccugggucg

SEQ ID NO: 1374298 - RNA, 19 nt, Artificial Sequence
  Description of Artificial Sequence: Synthetic oligonucleotide
uacgauauacuccccuugg

SEQ ID NO: 1374299 - RNA, 19 nt, Artificial Sequence
  Description of Artificial Sequence: Synthetic oligonucleotide
uucagaucguaccacucgg

SEQ ID NO: 1374300 - RNA, 19 nt, Artificial Sequence
  Description of Artificial Sequence: Synthetic oligonucleotide
ucugauucgguuccacagg

SEQ ID NO: 1374301 - RNA, 19 nt, Artificial Sequence
  Description of Artificial Sequence: Synthetic oligonucleotide
gaagucacgcuucaagugc

SEQ ID NO: 1374302 - RNA, 19 nt, Artificial Sequence
  Description of Artificial Sequence: Synthetic oligonucleotide
gaugguccugcucuuaagg

SEQ ID NO: 1374303 - RNA, 19 nt, Artificial Sequence
  Description of Artificial Sequence: Synthetic oligonucleotide
guugucgaaauccacagac

SEQ ID NO: 1374304 - RNA, 19 nt, Artificial Sequence
  Description of Artificial Sequence: Synthetic oligonucleotide
aaacgcagcacaaagucag

SEQ ID NO: 1374305 - RNA, 19 nt, Artificial Sequence
  Description of Artificial Sequence: Synthetic oligonucleotide
gguuuugaaagugucaucg

SEQ ID NO: 1374306 - RNA, 19 nt, Artificial Sequence
  Description of Artificial Sequence: Synthetic oligonucleotide
aaacuugcggaaaaugguc

SEQ ID NO: 1374307 - RNA, 19 nt, Artificial Sequence
  Description of Artificial Sequence: Synthetic oligonucleotide
uagggguccacucuguucc

SEQ ID NO: 1374308 - RNA, 19 nt, Artificial Sequence
  Description of Artificial Sequence: Synthetic oligonucleotide
auuaggcucaccugcuggc

SEQ ID NO: 1374309 - RNA, 19 nt, Artificial Sequence
  Description of Artificial Sequence: Synthetic oligonucleotide
cuugguggaagaagaaagg

SEQ ID NO: 1374310 - RNA, 19 nt, Artificial Sequence
  Description of Artificial Sequence: Synthetic oligonucleotide
ucagguaauuucugauucg

SEQ ID NO: 1374311 - RNA, 19 nt, Artificial Sequence
  Description of Artificial Sequence: Synthetic oligonucleotide
acugcuauagucaucuuag

SEQ ID NO: 1374312 - RNA, 19 nt, Artificial Sequence
  Description of Artificial Sequence: Synthetic oligonucleotide
gacgccaccaguaaagucc

SEQ ID NO: 1374313 - RNA, 19 nt, Artificial Sequence
  Description of Artificial Sequence: Synthetic oligonucleotide
agcuguaaccacuuaaaca

SEQ ID NO: 1374314 - RNA, 19 nt, Artificial Sequence
  Description of Artificial Sequence: Synthetic oligonucleotide
cccauuaccaucacgaucc

SEQ ID NO: 1374315 - RNA, 19 nt, Artificial Sequence
  Description of Artificial Sequence: Synthetic oligonucleotide
agaaaggaagaacacggca

SEQ ID NO: 1374316 - RNA, 19 nt, Artificial Sequence
  Description of Artificial Sequence: Synthetic oligonucleotide
guaauuucugauucgguuc

SEQ ID NO: 1374317 - RNA, 19 nt, Artificial Sequence
  Description of Artificial Sequence: Synthetic oligonucleotide
uuguuaagcuugaagccug

SEQ ID NO: 1374318 - RNA, 19 nt, Artificial Sequence
  Description of Artificial Sequence: Synthetic oligonucleotide
gagauaucaauggagcagc

SEQ ID NO: 1374319 - RNA, 19 nt, Artificial Sequence
  Description of Artificial Sequence: Synthetic oligonucleotide
auuaccaucacgauccaug

SEQ ID NO: 1374320 - RNA, 19 nt, Artificial Sequence
  Description of Artificial Sequence: Synthetic oligonucleotide
ucauagagagucguguucc

SEQ ID NO: 1374321 - RNA, 19 nt, Artificial Sequence
  Description of Artificial Sequence: Synthetic oligonucleotide
cacgaggcaacacacaaag

SEQ ID NO: 1374322 - RNA, 19 nt, Artificial Sequence
  Description of Artificial Sequence: Synthetic oligonucleotide
ggcacuacgauauacuccc

SEQ ID NO: 1374323 - RNA, 19 nt, Artificial Sequence
  Description of Artificial Sequence: Synthetic oligonucleotide
gguaguugccuccauaucc

SEQ ID NO: 1374324 - RNA, 19 nt, Artificial Sequence
  Description of Artificial Sequence: Synthetic oligonucleotide
ugaaggacucuguacgugc

SEQ ID NO: 1374325 - RNA, 19 nt, Artificial Sequence
  Description of Artificial Sequence: Synthetic oligonucleotide
uguaaccacuuaaacagau

SEQ ID NO: 1374326 - RNA, 19 nt, Artificial Sequence
  Description of Artificial Sequence: Synthetic oligonucleotide
ucuuaguuccugcagccac

SEQ ID NO: 1374327 - RNA, 19 nt, Artificial Sequence
  Description of Artificial Sequence: Synthetic oligonucleotide
cuaaugauccuguucaaga

SEQ ID NO: 1374328 - RNA, 19 nt, Artificial Sequence
  Description of Artificial Sequence: Synthetic oligonucleotide
guucagaucguaccacucg

SEQ ID NO: 1374329 - RNA, 19 nt, Artificial Sequence
  Description of Artificial Sequence: Synthetic oligonucleotide
aaauggucagguaauuucu

SEQ ID NO: 1374330 - RNA, 19 nt, Artificial Sequence
  Description of Artificial Sequence: Synthetic oligonucleotide
ucauacaccgcggaaacca

SEQ ID NO: 1374331 - RNA, 19 nt, Artificial Sequence
  Description of Artificial Sequence: Synthetic oligonucleotide
auucggauuaggcucaccu

SEQ ID NO: 1374332 - RNA, 19 nt, Artificial Sequence
  Description of Artificial Sequence: Synthetic oligonucleotide
cuccauauccaugauauug

SEQ ID NO: 1374333 - RNA, 19 nt, Artificial Sequence
  Description of Artificial Sequence: Synthetic oligonucleotide
cacagaguaugcauggccc

SEQ ID NO: 1374334 - RNA, 19 nt, Artificial Sequence
  Description of Artificial Sequence: Synthetic oligonucleotide
agaagucacgcuucaagug

SEQ ID NO: 1374335 - RNA, 19 nt, Artificial Sequence
  Description of Artificial Sequence: Synthetic oligonucleotide
gguucuuaaggguaguugc

SEQ ID NO: 1374336 - RNA, 19 nt, Artificial Sequence
  Description of Artificial Sequence: Synthetic oligonucleotide
ucagaauaaucugguagag

SEQ ID NO: 1374337 - RNA, 19 nt, Artificial Sequence
  Description of Artificial Sequence: Synthetic oligonucleotide
aggagcuaucacuccaggc

SEQ ID NO: 1374338 - RNA, 19 nt, Artificial Sequence
  Description of Artificial Sequence: Synthetic oligonucleotide
uagcgggugaugaugagcu

SEQ ID NO: 1374339 - RNA, 19 nt, Artificial Sequence
  Description of Artificial Sequence: Synthetic oligonucleotide
ucacgcuucaagugcacag

SEQ ID NO: 1374340 - RNA, 19 nt, Artificial Sequence
  Description of Artificial Sequence: Synthetic oligonucleotide
cuuaaggguaguugccucc

SEQ ID NO: 1374341 - RNA, 19 nt, Artificial Sequence
  Description of Artificial Sequence: Synthetic oligonucleotide
uuccucauucggauuaggc

SEQ ID NO: 1374342 - RNA, 19 nt, Artificial Sequence
  Description of Artificial Sequence: Synthetic oligonucleotide
cuuaagggcaucaggugug

SEQ ID NO: 1374343 - RNA, 19 nt, Artificial Sequence
  Description of Artificial Sequence: Synthetic oligonucleotide
augguccugcucuuaaggg

SEQ ID NO: 1374344 - RNA, 19 nt, Artificial Sequence
  Description of Artificial Sequence: Synthetic oligonucleotide
agggcacuacgauauacuc

SEQ ID NO: 1374345 - RNA, 19 nt, Artificial Sequence
  Description of Artificial Sequence: Synthetic oligonucleotide
uuccauuccacuguacccc

SEQ ID NO: 1374346 - RNA, 19 nt, Artificial Sequence
  Description of Artificial Sequence: Synthetic oligonucleotide
cacaaagucagccucccug

SEQ ID NO: 1374347 - RNA, 19 nt, Artificial Sequence
  Description of Artificial Sequence: Synthetic oligonucleotide
ugcccgagaagaauuggcc

SEQ ID NO: 1374348 - RNA, 19 nt, Artificial Sequence
  Description of Artificial Sequence: Synthetic oligonucleotide
cauaagggccaacaagaag

SEQ ID NO: 1374349 - RNA, 19 nt, Artificial Sequence
  Description of Artificial Sequence: Synthetic oligonucleotide
uacaccgcggaaaccaaug

SEQ ID NO: 1374350 - RNA, 19 nt, Artificial Sequence
  Description of Artificial Sequence: Synthetic oligonucleotide
aagccauugguccgcaggu

SEQ ID NO: 1374351 - RNA, 19 nt, Artificial Sequence
  Description of Artificial Sequence: Synthetic oligonucleotide
guuugguaaacucucguaa

SEQ ID NO: 1374352 - RNA, 19 nt, Artificial Sequence
  Description of Artificial Sequence: Synthetic oligonucleotide
uaagaagucguggaaugac

SEQ ID NO: 1374353 - RNA, 19 nt, Artificial Sequence
  Description of Artificial Sequence: Synthetic oligonucleotide
ggcaaugggaguugaaucc

SEQ ID NO: 1374354 - RNA, 19 nt, Artificial Sequence
  Description of Artificial Sequence: Synthetic oligonucleotide
  modified_base (8)..(8): a, c, u, g, unknown or other
agcugugnuuccccggcgc

SEQ ID NO: 1374355 - RNA, 19 nt, Artificial Sequence
  Description of Artificial Sequence: Synthetic oligonucleotide
agcgccuucagaauaaucu

SEQ ID NO: 1374356 - RNA, 19 nt, Artificial Sequence
  Description of Artificial Sequence: Synthetic oligonucleotide
cagguaauuucugauucgg

SEQ ID NO: 1374357 - RNA, 19 nt, Artificial Sequence
  Description of Artificial Sequence: Synthetic oligonucleotide
gguaaacucucguaagaag

SEQ ID NO: 1374358 - RNA, 19 nt, Artificial Sequence
  Description of Artificial Sequence: Synthetic oligonucleotide
ccaacaagaagcugcagcc

SEQ ID NO: 1374359 - RNA, 19 nt, Artificial Sequence
  Description of Artificial Sequence: Synthetic oligonucleotide
ugaauccccacuucaugca

SEQ ID NO: 1374360 - RNA, 19 nt, Artificial Sequence
  Description of Artificial Sequence: Synthetic oligonucleotide
aacaagguuuugaaagugu

SEQ ID NO: 1374361 - RNA, 19 nt, Artificial Sequence
  Description of Artificial Sequence: Synthetic oligonucleotide
ugaguagcgggugaugaug

SEQ ID NO: 1374362 - RNA, 19 nt, Artificial Sequence
  Description of Artificial Sequence: Synthetic oligonucleotide
ucugaguagcgggugauga

SEQ ID NO: 1374363 - RNA, 19 nt, Artificial Sequence
  Description of Artificial Sequence: Synthetic oligonucleotide
ugaccugcaacuccuugac

SEQ ID NO: 1374364 - RNA, 19 nt, Artificial Sequence
  Description of Artificial Sequence: Synthetic oligonucleotide
gauccuguucaagaugacc

SEQ ID NO: 1374365 - RNA, 19 nt, Artificial Sequence
  Description of Artificial Sequence: Synthetic oligonucleotide
acuugcggaaaauggucag

SEQ ID NO: 1374366 - RNA, 19 nt, Artificial Sequence
  Description of Artificial Sequence: Synthetic oligonucleotide
uaagggccaacaagaagcu

SEQ ID NO: 1374367 - RNA, 19 nt, Artificial Sequence
  Description of Artificial Sequence: Synthetic oligonucleotide
ugggaguugaauccccacu

SEQ ID NO: 1374368 - RNA, 19 nt, Artificial Sequence
  Description of Artificial Sequence: Synthetic oligonucleotide
ggaagaacacggcaauggg

SEQ ID NO: 1374369 - RNA, 19 nt, Artificial Sequence
  Description of Artificial Sequence: Synthetic oligonucleotide
gcuguucccggucauaggg

SEQ ID NO: 1374370 - RNA, 19 nt, Artificial Sequence
  Description of Artificial Sequence: Synthetic oligonucleotide
ucccauuaccaucacgauc

SEQ ID NO: 1374371 - RNA, 19 nt, Artificial Sequence
  Description of Artificial Sequence: Synthetic oligonucleotide
uuuguucagaucguaccac

SEQ ID NO: 1374372 - RNA, 19 nt, Artificial Sequence
  Description of Artificial Sequence: Synthetic oligonucleotide
uucggauuaggcucaccug

SEQ ID NO: 1374373 - RNA, 19 nt, Artificial Sequence
  Description of Artificial Sequence: Synthetic oligonucleotide
auccccacuucaugcaaac

SEQ ID NO: 1374374 - RNA, 19 nt, Artificial Sequence
  Description of Artificial Sequence: Synthetic oligonucleotide
gcuuuguucagaucguacc

SEQ ID NO: 1374375 - RNA, 19 nt, Artificial Sequence
  Description of Artificial Sequence: Synthetic oligonucleotide
aaaccggaacauggucucc

SEQ ID NO: 1374376 - RNA, 19 nt, Artificial Sequence
  Description of Artificial Sequence: Synthetic oligonucleotide
uguuaagcuugaagccugc

SEQ ID NO: 1374377 - RNA, 19 nt, Artificial Sequence
  Description of Artificial Sequence: Synthetic oligonucleotide
caggugcccucauagagag

SEQ ID NO: 1374378 - RNA, 19 nt, Artificial Sequence
  Description of Artificial Sequence: Synthetic oligonucleotide
aacuugcggaaaaugguca

SEQ ID NO: 1374379 - RNA, 19 nt, Artificial Sequence
  Description of Artificial Sequence: Synthetic oligonucleotide
cagaauaaucugguagagg

SEQ ID NO: 1374380 - RNA, 19 nt, Artificial Sequence
  Description of Artificial Sequence: Synthetic oligonucleotide
gaauuggccaggaagaagu

SEQ ID NO: 1374381 - RNA, 19 nt, Artificial Sequence
  Description of Artificial Sequence: Synthetic oligonucleotide
uguucagaucguaccacuc

SEQ ID NO: 1374382 - RNA, 19 nt, Artificial Sequence
  Description of Artificial Sequence: Synthetic oligonucleotide
uucuuaaggguaguugccu

SEQ ID NO: 1374383 - RNA, 19 nt, Artificial Sequence
  Description of Artificial Sequence: Synthetic oligonucleotide
cuuuguucagaucguacca

SEQ ID NO: 1374384 - RNA, 19 nt, Artificial Sequence
  Description of Artificial Sequence: Synthetic oligonucleotide
ucuuaaggguaguugccuc

SEQ ID NO: 1374385 - RNA, 19 nt, Artificial Sequence
  Description of Artificial Sequence: Synthetic oligonucleotide
ucguggaaugacauccaga

SEQ ID NO: 1374386 - RNA, 19 nt, Artificial Sequence
  Description of Artificial Sequence: Synthetic oligonucleotide
ucgugcaauuucuuguuaa

SEQ ID NO: 1374387 - RNA, 19 nt, Artificial Sequence
  Description of Artificial Sequence: Synthetic oligonucleotide
accgcggaaaccaaugguc

SEQ ID NO: 1374388 - RNA, 19 nt, Artificial Sequence
  Description of Artificial Sequence: Synthetic oligonucleotide
uguguuugcuaaugauccu

SEQ ID NO: 1374389 - RNA, 19 nt, Artificial Sequence
  Description of Artificial Sequence: Synthetic oligonucleotide
acgcagcacaaagucagcc

SEQ ID NO: 1374390 - RNA, 19 nt, Artificial Sequence
  Description of Artificial Sequence: Synthetic oligonucleotide
ugcggcacgacuccaggcu

SEQ ID NO: 1374391 - RNA, 19 nt, Artificial Sequence
  Description of Artificial Sequence: Synthetic oligonucleotide
cauuccacuguaccccagg

SEQ ID NO: 1374392 - RNA, 19 nt, Artificial Sequence
  Description of Artificial Sequence: Synthetic oligonucleotide
agauaucaauggagcagcc

SEQ ID NO: 1374393 - RNA, 19 nt, Artificial Sequence
  Description of Artificial Sequence: Synthetic oligonucleotide
aggguaguugccuccauau

SEQ ID NO: 1374394 - RNA, 19 nt, Artificial Sequence
  Description of Artificial Sequence: Synthetic oligonucleotide
aacgcagcacaaagucagc

SEQ ID NO: 1374395 - RNA, 19 nt, Artificial Sequence
  Description of Artificial Sequence: Synthetic oligonucleotide
agucgcacgaggcaacaca

SEQ ID NO: 1374396 - RNA, 19 nt, Artificial Sequence
  Description of Artificial Sequence: Synthetic oligonucleotide
acaccgcggaaaccaaugg

SEQ ID NO: 1374397 - RNA, 19 nt, Artificial Sequence
  Description of Artificial Sequence: Synthetic oligonucleotide
aaucugguagaggucucug

SEQ ID NO: 1374398 - RNA, 19 nt, Artificial Sequence
  Description of Artificial Sequence: Synthetic oligonucleotide
ugguaaacucucguaagaa

SEQ ID NO: 1374399 - RNA, 19 nt, Artificial Sequence
  Description of Artificial Sequence: Synthetic oligonucleotide
cuacgauauacuccccuug

SEQ ID NO: 1374400 - RNA, 19 nt, Artificial Sequence
  Description of Artificial Sequence: Synthetic oligonucleotide
agcacuuccucaucaggga

SEQ ID NO: 1374401 - RNA, 19 nt, Artificial Sequence
  Description of Artificial Sequence: Synthetic oligonucleotide
uguucccggucauaggggu

SEQ ID NO: 1374402 - RNA, 19 nt, Artificial Sequence
  Description of Artificial Sequence: Synthetic oligonucleotide
caaugggaguugaaucccc

SEQ ID NO: 1374403 - RNA, 19 nt, Artificial Sequence
  Description of Artificial Sequence: Synthetic oligonucleotide
cccaucauccauuuugacc

SEQ ID NO: 1374404 - RNA, 19 nt, Artificial Sequence
  Description of Artificial Sequence: Synthetic oligonucleotide
gagcuaucacuccaggcuc

SEQ ID NO: 1374405 - RNA, 19 nt, Artificial Sequence
  Description of Artificial Sequence: Synthetic oligonucleotide
guaaacucucguaagaagu

SEQ ID NO: 1374406 - RNA, 19 nt, Artificial Sequence
  Description of Artificial Sequence: Synthetic oligonucleotide
gcaacacacaaaguugucg

SEQ ID NO: 1374407 - RNA, 19 nt, Artificial Sequence
  Description of Artificial Sequence: Synthetic oligonucleotide
aggagccucguuccagcgc

SEQ ID NO: 1374408 - RNA, 19 nt, Artificial Sequence
  Description of Artificial Sequence: Synthetic oligonucleotide
guucuuaaggguaguugcc

SEQ ID NO: 1374409 - RNA, 19 nt, Artificial Sequence
  Description of Artificial Sequence: Synthetic oligonucleotide
uugcggaaaauggucaggu

SEQ ID NO: 1374410 - RNA, 19 nt, Artificial Sequence
  Description of Artificial Sequence: Synthetic oligonucleotide
acagaguaugcauggcccu

SEQ ID NO: 1374411 - RNA, 19 nt, Artificial Sequence
  Description of Artificial Sequence: Synthetic oligonucleotide
guguuugcuaaugauccug

SEQ ID NO: 1374412 - RNA, 19 nt, Artificial Sequence
  Description of Artificial Sequence: Synthetic oligonucleotide
agguucuuaaggguaguug

SEQ ID NO: 1374413 - RNA, 19 nt, Artificial Sequence
  Description of Artificial Sequence: Synthetic oligonucleotide
ucguguuccaguuccggau

SEQ ID NO: 1374414 - RNA, 19 nt, Artificial Sequence
  Description of Artificial Sequence: Synthetic oligonucleotide
uguacgugcccgagaagaa

SEQ ID NO: 1374415 - RNA, 19 nt, Artificial Sequence
  Description of Artificial Sequence: Synthetic oligonucleotide
acuacgauauacuccccuu

SEQ ID NO: 1374416 - RNA, 19 nt, Artificial Sequence
  Description of Artificial Sequence: Synthetic oligonucleotide
aacucucguaagaagucgu

SEQ ID NO: 1374417 - RNA, 19 nt, Artificial Sequence
  Description of Artificial Sequence: Synthetic oligonucleotide
cauggucuccagucgcacg

SEQ ID NO: 1374418 - RNA, 19 nt, Artificial Sequence
  Description of Artificial Sequence: Synthetic oligonucleotide
caugcugcggcacgacucc

SEQ ID NO: 1374419 - RNA, 19 nt, Artificial Sequence
  Description of Artificial Sequence: Synthetic oligonucleotide
  modified_base (5)..(5): a, c, u, g, unknown or other
ugugnuuccccggcgccag

SEQ ID NO: 1374420 - RNA, 19 nt, Artificial Sequence
  Description of Artificial Sequence: Synthetic oligonucleotide
gaagucguggaaugacauc

SEQ ID NO: 1374421 - RNA, 19 nt, Artificial Sequence
  Description of Artificial Sequence: Synthetic oligonucleotide
cuugcggaaaauggucagg

SEQ ID NO: 1374422 - RNA, 19 nt, Artificial Sequence
  Description of Artificial Sequence: Synthetic oligonucleotide
cgugggaccucauacaccg

SEQ ID NO: 1374423 - RNA, 19 nt, Artificial Sequence
  Description of Artificial Sequence: Synthetic oligonucleotide
uggucuccaugucucggcc

SEQ ID NO: 1374424 - RNA, 19 nt, Artificial Sequence
  Description of Artificial Sequence: Synthetic oligonucleotide
gacugcuauagucaucuua

SEQ ID NO: 1374425 - RNA, 19 nt, Artificial Sequence
  Description of Artificial Sequence: Synthetic oligonucleotide
  modified_base (11)..(11): a, c, u, g, unknown or other
accagcugugnuuccccgg

SEQ ID NO: 1374426 - RNA, 19 nt, Artificial Sequence
  Description of Artificial Sequence: Synthetic oligonucleotide
agaguaugcauggcccuuc

SEQ ID NO: 1374427 - RNA, 19 nt, Artificial Sequence
  Description of Artificial Sequence: Synthetic oligonucleotide
uacgugcccgagaagaauu

SEQ ID NO: 1374428 - RNA, 19 nt, Artificial Sequence
  Description of Artificial Sequence: Synthetic oligonucleotide
cuguucccggucauagggg

SEQ ID NO: 1374429 - RNA, 19 nt, Artificial Sequence
  Description of Artificial Sequence: Synthetic oligonucleotide
cagaucguaccacucggug

SEQ ID NO: 1374430 - RNA, 19 nt, Artificial Sequence
  Description of Artificial Sequence: Synthetic oligonucleotide
ucaagaugaccugcaacuc

SEQ ID NO: 1374431 - RNA, 19 nt, Artificial Sequence
  Description of Artificial Sequence: Synthetic oligonucleotide
aaugggaguugaaucccca

SEQ ID NO: 1374432 - RNA, 19 nt, Artificial Sequence
  Description of Artificial Sequence: Synthetic oligonucleotide
gucuuuguguuugcuaaug

SEQ ID NO: 1374433 - RNA, 19 nt, Artificial Sequence
  Description of Artificial Sequence: Synthetic oligonucleotide
cagcacaaagucagccucc

SEQ ID NO: 1374434 - RNA, 19 nt, Artificial Sequence
  Description of Artificial Sequence: Synthetic oligonucleotide
caaacuugcggaaaauggu

SEQ ID NO: 1374435 - RNA, 19 nt, Artificial Sequence
  Description of Artificial Sequence: Synthetic oligonucleotide
ucuguacgugcccgagaag

SEQ ID NO: 1374436 - RNA, 19 nt, Artificial Sequence
  Description of Artificial Sequence: Synthetic oligonucleotide
cagcuguaaccacuuaaac

SEQ ID NO: 1374437 - RNA, 19 nt, Artificial Sequence
  Description of Artificial Sequence: Synthetic oligonucleotide
ucucguaggcacucaugcu

SEQ ID NO: 1374438 - RNA, 19 nt, Artificial Sequence
  Description of Artificial Sequence: Synthetic oligonucleotide
aggucaaacuugcggaaaa

SEQ ID NO: 1374439 - RNA, 19 nt, Artificial Sequence
  Description of Artificial Sequence: Synthetic oligonucleotide
ggugacgccaccaguaaag

SEQ ID NO: 1374440 - RNA, 19 nt, Artificial Sequence
  Description of Artificial Sequence: Synthetic oligonucleotide
aguugucgaaauccacaga

SEQ ID NO: 1374441 - RNA, 19 nt, Artificial Sequence
  Description of Artificial Sequence: Synthetic oligonucleotide
auagagagucguguuccag

SEQ ID NO: 1374442 - RNA, 19 nt, Artificial Sequence
  Description of Artificial Sequence: Synthetic oligonucleotide
cacgcuucaagugcacagg

SEQ ID NO: 1374443 - RNA, 19 nt, Artificial Sequence
  Description of Artificial Sequence: Synthetic oligonucleotide
aaggguaguugccuccaua

SEQ ID NO: 1374444 - RNA, 19 nt, Artificial Sequence
  Description of Artificial Sequence: Synthetic oligonucleotide
ugccagcuuacugaacaag

SEQ ID NO: 1374445 - RNA, 19 nt, Artificial Sequence
  Description of Artificial Sequence: Synthetic oligonucleotide
acgauauacuccccuuggu

SEQ ID NO: 1374446 - RNA, 19 nt, Artificial Sequence
  Description of Artificial Sequence: Synthetic oligonucleotide
aagucacgcuucaagugca

SEQ ID NO: 1374447 - RNA, 19 nt, Artificial Sequence
  Description of Artificial Sequence: Synthetic oligonucleotide
gaccugcaacuccuugacg

SEQ ID NO: 1374448 - RNA, 19 nt, Artificial Sequence
  Description of Artificial Sequence: Synthetic oligonucleotide
agggguuccucauucggau

SEQ ID NO: 1374449 - RNA, 19 nt, Artificial Sequence
  Description of Artificial Sequence: Synthetic oligonucleotide
agucguguuccaguuccgg

SEQ ID NO: 1374450 - RNA, 19 nt, Artificial Sequence
  Description of Artificial Sequence: Synthetic oligonucleotide
ggagccucguuccagcgcc

SEQ ID NO: 1374451 - RNA, 19 nt, Artificial Sequence
  Description of Artificial Sequence: Synthetic oligonucleotide
uaaucugguagaggucucu

SEQ ID NO: 1374452 - RNA, 19 nt, Artificial Sequence
  Description of Artificial Sequence: Synthetic oligonucleotide
ugucucggccgaagcgacg

SEQ ID NO: 1374453 - RNA, 19 nt, Artificial Sequence
  Description of Artificial Sequence: Synthetic oligonucleotide
uuaggcucaccugcuggcc

SEQ ID NO: 1374454 - RNA, 19 nt, Artificial Sequence
  Description of Artificial Sequence: Synthetic oligonucleotide
augaaggacucuguacgug

SEQ ID NO: 1374455 - RNA, 19 nt, Artificial Sequence
  Description of Artificial Sequence: Synthetic oligonucleotide
auaaucugguagaggucuc

SEQ ID NO: 1374456 - RNA, 19 nt, Artificial Sequence
  Description of Artificial Sequence: Synthetic oligonucleotide
gucgcagcacccuucucug

SEQ ID NO: 1374457 - RNA, 19 nt, Artificial Sequence
  Description of Artificial Sequence: Synthetic oligonucleotide
cuguacgugcccgagaaga

SEQ ID NO: 1374458 - RNA, 19 nt, Artificial Sequence
  Description of Artificial Sequence: Synthetic oligonucleotide
guaguugccuccauaucca

SEQ ID NO: 1374459 - RNA, 19 nt, Artificial Sequence
  Description of Artificial Sequence: Synthetic oligonucleotide
uccucaucucguaggcacu

SEQ ID NO: 1374460 - RNA, 19 nt, Artificial Sequence
  Description of Artificial Sequence: Synthetic oligonucleotide
guagcgggugaugaugagc

SEQ ID NO: 1374461 - RNA, 19 nt, Artificial Sequence
  Description of Artificial Sequence: Synthetic oligonucleotide
agaagucguggaaugacau

SEQ ID NO: 1374462 - RNA, 19 nt, Artificial Sequence
  Description of Artificial Sequence: Synthetic oligonucleotide
ugauccuguucaagaugac

SEQ ID NO: 1374463 - RNA, 19 nt, Artificial Sequence
  Description of Artificial Sequence: Synthetic oligonucleotide
cugauucgguuccacagga

SEQ ID NO: 1374464 - RNA, 19 nt, Artificial Sequence
  Description of Artificial Sequence: Synthetic oligonucleotide
ugcuaaugauccuguucaa

SEQ ID NO: 1374465 - RNA, 19 nt, Artificial Sequence
  Description of Artificial Sequence: Synthetic oligonucleotide
augagcucgugcaauuucu

SEQ ID NO: 1374466 - RNA, 19 nt, Artificial Sequence
  Description of Artificial Sequence: Synthetic oligonucleotide
cuuguuaagcuugaagccu

SEQ ID NO: 1374467 - RNA, 19 nt, Artificial Sequence
  Description of Artificial Sequence: Synthetic oligonucleotide
acggcuugguggaagaaga

SEQ ID NO: 1374468 - RNA, 19 nt, Artificial Sequence
  Description of Artificial Sequence: Synthetic oligonucleotide
gcggaaaauggucagguaa

SEQ ID NO: 1374469 - RNA, 19 nt, Artificial Sequence
  Description of Artificial Sequence: Synthetic oligonucleotide
guaagaagucguggaauga

SEQ ID NO: 1374470 - RNA, 19 nt, Artificial Sequence
  Description of Artificial Sequence: Synthetic oligonucleotide
  modified_base (10)..(10): a, c, u, g, unknown or other
ccagcugugnuuccccggc

SEQ ID NO: 1374471 - RNA, 19 nt, Artificial Sequence
  Description of Artificial Sequence: Synthetic oligonucleotide
ucggugacgccaccaguaa

SEQ ID NO: 1374472 - RNA, 19 nt, Artificial Sequence
  Description of Artificial Sequence: Synthetic oligonucleotide
ccaguuugguaaacucucg

SEQ ID NO: 1374473 - RNA, 19 nt, Artificial Sequence
  Description of Artificial Sequence: Synthetic oligonucleotide
ugacgccaccaguaaaguc

SEQ ID NO: 1374474 - RNA, 19 nt, Artificial Sequence
  Description of Artificial Sequence: Synthetic oligonucleotide
ucguaccacucggugacgc

SEQ ID NO: 1374475 - RNA, 19 nt, Artificial Sequence
  Description of Artificial Sequence: Synthetic oligonucleotide
accucauacaccgcggaaa

SEQ ID NO: 1374476 - RNA, 19 nt, Artificial Sequence
  Description of Artificial Sequence: Synthetic oligonucleotide
ugagcucgugcaauuucuu

SEQ ID NO: 1374477 - RNA, 19 nt, Artificial Sequence
  Description of Artificial Sequence: Synthetic oligonucleotide
aggcggaugcgguugcuga

SEQ ID NO: 1374478 - RNA, 19 nt, Artificial Sequence
  Description of Artificial Sequence: Synthetic oligonucleotide
cguaagaagucguggaaug

SEQ ID NO: 1374479 - RNA, 19 nt, Artificial Sequence
  Description of Artificial Sequence: Synthetic oligonucleotide
ugggucgcagcacccuucu

SEQ ID NO: 1374480 - RNA, 19 nt, Artificial Sequence
  Description of Artificial Sequence: Synthetic oligonucleotide
aguugaauccccacuucau

SEQ ID NO: 1374481 - RNA, 19 nt, Artificial Sequence
  Description of Artificial Sequence: Synthetic oligonucleotide
cacggcuugguggaagaag

SEQ ID NO: 1374482 - RNA, 19 nt, Artificial Sequence
  Description of Artificial Sequence: Synthetic oligonucleotide
cucuguacgugcccgagaa

SEQ ID NO: 1374483 - RNA, 19 nt, Artificial Sequence
  Description of Artificial Sequence: Synthetic oligonucleotide
ugauucgguuccacaggau

SEQ ID NO: 1374484 - RNA, 19 nt, Artificial Sequence
  Description of Artificial Sequence: Synthetic oligonucleotide
acggcaaugggaguugaau

SEQ ID NO: 1374485 - RNA, 19 nt, Artificial Sequence
  Description of Artificial Sequence: Synthetic oligonucleotide
uagcuccugggucgcagca

SEQ ID NO: 1374486 - RNA, 19 nt, Artificial Sequence
  Description of Artificial Sequence: Synthetic oligonucleotide
uuccccggcgccaggugcc

SEQ ID NO: 1374487 - RNA, 19 nt, Artificial Sequence
  Description of Artificial Sequence: Synthetic oligonucleotide
gcgggugaugaugagcucg

SEQ ID NO: 1374488 - RNA, 19 nt, Artificial Sequence
  Description of Artificial Sequence: Synthetic oligonucleotide
augucucggccgaagcgac

SEQ ID NO: 1374489 - RNA, 19 nt, Artificial Sequence
  Description of Artificial Sequence: Synthetic oligonucleotide
ucgcacgaggcaacacaca

SEQ ID NO: 1374490 - RNA, 19 nt, Artificial Sequence
  Description of Artificial Sequence: Synthetic oligonucleotide
  modified_base (2)..(2): a, c, u, g, unknown or other
gnuuccccggcgccaggug

SEQ ID NO: 1374491 - RNA, 19 nt, Artificial Sequence
  Description of Artificial Sequence: Synthetic oligonucleotide
guuccucauucggauuagg

SEQ ID NO: 1374492 - RNA, 19 nt, Artificial Sequence
  Description of Artificial Sequence: Synthetic oligonucleotide
gcgccuucagaauaaucug

SEQ ID NO: 1374493 - RNA, 19 nt, Artificial Sequence
  Description of Artificial Sequence: Synthetic oligonucleotide
ugcccucauagagagucgu

SEQ ID NO: 1374494 - RNA, 19 nt, Artificial Sequence
  Description of Artificial Sequence: Synthetic oligonucleotide
gagguucaccaugcugcgg

SEQ ID NO: 1374495 - RNA, 19 nt, Artificial Sequence
  Description of Artificial Sequence: Synthetic oligonucleotide
gugcccgagaagaauuggc

SEQ ID NO: 1374496 - RNA, 19 nt, Artificial Sequence
  Description of Artificial Sequence: Synthetic oligonucleotide
  modified_base (7)..(7): a, c, u, g, unknown or other
gcugugnuuccccggcgcc

SEQ ID NO: 1374497 - RNA, 19 nt, Artificial Sequence
  Description of Artificial Sequence: Synthetic oligonucleotide
ucccgacugcuauagucau

SEQ ID NO: 1374498 - RNA, 19 nt, Artificial Sequence
  Description of Artificial Sequence: Synthetic oligonucleotide
gccgaagcgacgcucccgg

SEQ ID NO: 1374499 - RNA, 19 nt, Artificial Sequence
  Description of Artificial Sequence: Synthetic oligonucleotide
gucguguuccaguuccgga

SEQ ID NO: 1374500 - RNA, 19 nt, Artificial Sequence
  Description of Artificial Sequence: Synthetic oligonucleotide
agcgggugaugaugagcuc

SEQ ID NO: 1374501 - RNA, 19 nt, Artificial Sequence
  Description of Artificial Sequence: Synthetic oligonucleotide
gaguaugcauggcccuuca

SEQ ID NO: 1374502 - RNA, 19 nt, Artificial Sequence
  Description of Artificial Sequence: Synthetic oligonucleotide
ugcggaaaauggucaggua

SEQ ID NO: 1374503 - RNA, 19 nt, Artificial Sequence
  Description of Artificial Sequence: Synthetic oligonucleotide
gucgcacgaggcaacacac

SEQ ID NO: 1374504 - RNA, 19 nt, Artificial Sequence
  Description of Artificial Sequence: Synthetic oligonucleotide
gucucggccgaagcgacgc

SEQ ID NO: 1374505 - RNA, 19 nt, Artificial Sequence
  Description of Artificial Sequence: Synthetic oligonucleotide
agguaauuucugauucggu

SEQ ID NO: 1374506 - RNA, 19 nt, Artificial Sequence
  Description of Artificial Sequence: Synthetic oligonucleotide
cucauacaccgcggaaacc

SEQ ID NO: 1374507 - RNA, 19 nt, Artificial Sequence
  Description of Artificial Sequence: Synthetic oligonucleotide
gagucguguuccaguuccg

SEQ ID NO: 1374508 - RNA, 19 nt, Artificial Sequence
  Description of Artificial Sequence: Synthetic oligonucleotide
uaaggguaguugccuccau

SEQ ID NO: 1374509 - RNA, 19 nt, Artificial Sequence
  Description of Artificial Sequence: Synthetic oligonucleotide
aguugccuccauauccaug

SEQ ID NO: 1374510 - RNA, 19 nt, Artificial Sequence
  Description of Artificial Sequence: Synthetic oligonucleotide
acucaugcugccagacuug

SEQ ID NO: 1374511 - RNA, 19 nt, Artificial Sequence
  Description of Artificial Sequence: Synthetic oligonucleotide
aucuuaguuccugcagcca

SEQ ID NO: 1374512 - RNA, 19 nt, Artificial Sequence
  Description of Artificial Sequence: Synthetic oligonucleotide
agucacgcuucaagugcac

SEQ ID NO: 1374513 - RNA, 19 nt, Artificial Sequence
  Description of Artificial Sequence: Synthetic oligonucleotide
gggcacuacgauauacucc

SEQ ID NO: 1374514 - RNA, 19 nt, Artificial Sequence
  Description of Artificial Sequence: Synthetic oligonucleotide
ggaugguccugcucuuaag

SEQ ID NO: 1374515 - RNA, 19 nt, Artificial Sequence
  Description of Artificial Sequence: Synthetic oligonucleotide
ccucauacaccgcggaaac

SEQ ID NO: 1374516 - RNA, 19 nt, Artificial Sequence
  Description of Artificial Sequence: Synthetic oligonucleotide
cgugcaauuucuuguuaag

SEQ ID NO: 1374517 - RNA, 19 nt, Artificial Sequence
  Description of Artificial Sequence: Synthetic oligonucleotide
  modified_base (9)..(9): a, c, u, g, unknown or other
cagcugugnuuccccggcg

SEQ ID NO: 1374518 - RNA, 19 nt, Artificial Sequence
  Description of Artificial Sequence: Synthetic oligonucleotide
  modified_base (3)..(3): a, c, u, g, unknown or other
ugnuuccccggcgccaggu

SEQ ID NO: 1374519 - RNA, 19 nt, Artificial Sequence
  Description of Artificial Sequence: Synthetic oligonucleotide
ccuguucaagaugaccugc

SEQ ID NO: 1374520 - RNA, 19 nt, Artificial Sequence
  Description of Artificial Sequence: Synthetic oligonucleotide
accugucacagaguaugca

SEQ ID NO: 1374521 - RNA, 19 nt, Artificial Sequence
  Description of Artificial Sequence: Synthetic oligonucleotide
cugcggcacgacuccaggc

SEQ ID NO: 1374522 - RNA, 19 nt, Artificial Sequence
  Description of Artificial Sequence: Synthetic oligonucleotide
cucgaagguugaugaagga

SEQ ID NO: 1374523 - RNA, 19 nt, Artificial Sequence
  Description of Artificial Sequence: Synthetic oligonucleotide
ggaguugaauccccacuuc

SEQ ID NO: 1374524 - RNA, 19 nt, Artificial Sequence
  Description of Artificial Sequence: Synthetic oligonucleotide
cucggugacgccaccagua

SEQ ID NO: 1374525 - RNA, 19 nt, Artificial Sequence
  Description of Artificial Sequence: Synthetic oligonucleotide
acaacaccauccaggucug

SEQ ID NO: 1374526 - RNA, 19 nt, Artificial Sequence
  Description of Artificial Sequence: Synthetic oligonucleotide
uaguugccuccauauccau

SEQ ID NO: 1374527 - RNA, 19 nt, Artificial Sequence
  Description of Artificial Sequence: Synthetic oligonucleotide
cagggguuccucauucgga

SEQ ID NO: 1374528 - RNA, 19 nt, Artificial Sequence
  Description of Artificial Sequence: Synthetic oligonucleotide
gaccucauacaccgcggaa

SEQ ID NO: 1374529 - RNA, 19 nt, Artificial Sequence
  Description of Artificial Sequence: Synthetic oligonucleotide
ggucuccagucgcacgagg

SEQ ID NO: 1374530 - RNA, 19 nt, Artificial Sequence
  Description of Artificial Sequence: Synthetic oligonucleotide
acaagaagcugcagcccga

SEQ ID NO: 1374531 - RNA, 19 nt, Artificial Sequence
  Description of Artificial Sequence: Synthetic oligonucleotide
caucuagcuccugggucgc

SEQ ID NO: 1374532 - RNA, 19 nt, Artificial Sequence
  Description of Artificial Sequence: Synthetic oligonucleotide
gagggcacuacgauauacu

SEQ ID NO: 1374533 - RNA, 19 nt, Artificial Sequence
  Description of Artificial Sequence: Synthetic oligonucleotide
gcugcggcacgacuccagg

SEQ ID NO: 1374534 - RNA, 19 nt, Artificial Sequence
  Description of Artificial Sequence: Synthetic oligonucleotide
cugcucuuaagggcaucag

SEQ ID NO: 1374535 - RNA, 19 nt, Artificial Sequence
  Description of Artificial Sequence: Synthetic oligonucleotide
aucguaccacucggugacg

SEQ ID NO: 1374536 - RNA, 19 nt, Artificial Sequence
  Description of Artificial Sequence: Synthetic oligonucleotide
guuaagcuugaagccugca

SEQ ID NO: 1374537 - RNA, 19 nt, Artificial Sequence
  Description of Artificial Sequence: Synthetic oligonucleotide
ggagggcacuacgauauac

SEQ ID NO: 1374538 - RNA, 19 nt, Artificial Sequence
  Description of Artificial Sequence: Synthetic oligonucleotide
gcugaagccauugguccgc

SEQ ID NO: 1374539 - RNA, 19 nt, Artificial Sequence
  Description of Artificial Sequence: Synthetic oligonucleotide
cauacaccgcggaaaccaa

SEQ ID NO: 1374540 - RNA, 19 nt, Artificial Sequence
  Description of Artificial Sequence: Synthetic oligonucleotide
cugggucgcagcacccuuc

SEQ ID NO: 1374541 - RNA, 19 nt, Artificial Sequence
  Description of Artificial Sequence: Synthetic oligonucleotide
  modified_base (4)..(4): a, c, u, g, unknown or other
gugnuuccccggcgccagg

SEQ ID NO: 1374542 - RNA, 19 nt, Artificial Sequence
  Description of Artificial Sequence: Synthetic oligonucleotide
cagcgccuucagaauaauc

SEQ ID NO: 1374543 - RNA, 19 nt, Artificial Sequence
  Description of Artificial Sequence: Synthetic oligonucleotide
ugaagccugcagccucaau

SEQ ID NO: 1374544 - RNA, 19 nt, Artificial Sequence
  Description of Artificial Sequence: Synthetic oligonucleotide
auuuugacccucagcuguu

SEQ ID NO: 1374545 - RNA, 19 nt, Artificial Sequence
  Description of Artificial Sequence: Synthetic oligonucleotide
uccccacuucaugcaaaca

SEQ ID NO: 1374546 - RNA, 19 nt, Artificial Sequence
  Description of Artificial Sequence: Synthetic oligonucleotide
ccaugcugcggcacgacuc

SEQ ID NO: 1374547 - RNA, 19 nt, Artificial Sequence
  Description of Artificial Sequence: Synthetic oligonucleotide
guuccggaugguccugcuc

SEQ ID NO: 1374548 - RNA, 19 nt, Artificial Sequence
  Description of Artificial Sequence: Synthetic oligonucleotide
cauucggauuaggcucacc

SEQ ID NO: 1374549 - RNA, 19 nt, Artificial Sequence
  Description of Artificial Sequence: Synthetic oligonucleotide
cacuacgauauacuccccu

SEQ ID NO: 1374550 - RNA, 19 nt, Artificial Sequence
  Description of Artificial Sequence: Synthetic oligonucleotide
acgccaccaguaaaguccu

SEQ ID NO: 1374551 - RNA, 19 nt, Artificial Sequence
  Description of Artificial Sequence: Synthetic oligonucleotide
gaacacggcaaugggaguu

SEQ ID NO: 1374552 - RNA, 19 nt, Artificial Sequence
  Description of Artificial Sequence: Synthetic oligonucleotide
uguaccccagggguuccuc

SEQ ID NO: 1374553 - RNA, 19 nt, Artificial Sequence
  Description of Artificial Sequence: Synthetic oligonucleotide
ucauucggauuaggcucac

SEQ ID NO: 1374554 - RNA, 19 nt, Artificial Sequence
  Description of Artificial Sequence: Synthetic oligonucleotide
guaccccagggguuccuca

SEQ ID NO: 1374555 - RNA, 19 nt, Artificial Sequence
  Description of Artificial Sequence: Synthetic oligonucleotide
ugcugacuucucgaagguu

SEQ ID NO: 1374556 - RNA, 19 nt, Artificial Sequence
  Description of Artificial Sequence: Synthetic oligonucleotide
cggcaaugggaguugaauc

SEQ ID NO: 1374557 - RNA, 19 nt, Artificial Sequence
  Description of Artificial Sequence: Synthetic oligonucleotide
gcgguugcugacuucucga

SEQ ID NO: 1374558 - RNA, 19 nt, Artificial Sequence
  Description of Artificial Sequence: Synthetic oligonucleotide
gcaaacauagucagcugua

SEQ ID NO: 1374559 - RNA, 19 nt, Artificial Sequence
  Description of Artificial Sequence: Synthetic oligonucleotide
ggguaguugccuccauauc

SEQ ID NO: 1374560 - RNA, 19 nt, Artificial Sequence
  Description of Artificial Sequence: Synthetic oligonucleotide
gucacgcuucaagugcaca

SEQ ID NO: 1374561 - RNA, 19 nt, Artificial Sequence
  Description of Artificial Sequence: Synthetic oligonucleotide
auacaccgcggaaaccaau

SEQ ID NO: 1374562 - RNA, 19 nt, Artificial Sequence
  Description of Artificial Sequence: Synthetic oligonucleotide
guagaggucucugggugcu

SEQ ID NO: 1374563 - RNA, 19 nt, Artificial Sequence
  Description of Artificial Sequence: Synthetic oligonucleotide
aggucugugucuagagcuu

SEQ ID NO: 1374564 - RNA, 19 nt, Artificial Sequence
  Description of Artificial Sequence: Synthetic oligonucleotide
acgaggcaacacacaaagu

SEQ ID NO: 1374565 - RNA, 19 nt, Artificial Sequence
  Description of Artificial Sequence: Synthetic oligonucleotide
ccgugggaccucauacacc

SEQ ID NO: 1374566 - RNA, 19 nt, Artificial Sequence
  Description of Artificial Sequence: Synthetic oligonucleotide
caggucaaacuugcggaaa

SEQ ID NO: 1374567 - RNA, 19 nt, Artificial Sequence
  Description of Artificial Sequence: Synthetic oligonucleotide
agcgacgcucccggcgccg

SEQ ID NO: 1374568 - RNA, 19 nt, Artificial Sequence
  Description of Artificial Sequence: Synthetic oligonucleotide
cugcagcccgacucccgac

SEQ ID NO: 1374569 - RNA, 19 nt, Artificial Sequence
  Description of Artificial Sequence: Synthetic oligonucleotide
cccagggguuccucauucg

SEQ ID NO: 1374570 - RNA, 19 nt, Artificial Sequence
  Description of Artificial Sequence: Synthetic oligonucleotide
ggcggaugcgguugcugac

SEQ ID NO: 1374571 - RNA, 19 nt, Artificial Sequence
  Description of Artificial Sequence: Synthetic oligonucleotide
ggcaacacacaaaguuguc

SEQ ID NO: 1374572 - RNA, 19 nt, Artificial Sequence
  Description of Artificial Sequence: Synthetic oligonucleotide
cagccucccuguugggcuc

SEQ ID NO: 1374573 - RNA, 19 nt, Artificial Sequence
  Description of Artificial Sequence: Synthetic oligonucleotide
  modified_base (6)..(6): a, c, u, g, unknown or other
cugugnuuccccggcgcca

SEQ ID NO: 1374574 - RNA, 19 nt, Artificial Sequence
  Description of Artificial Sequence: Synthetic oligonucleotide
gcaucaggugugagguugc

SEQ ID NO: 1374575 - RNA, 19 nt, Artificial Sequence
  Description of Artificial Sequence: Synthetic oligonucleotide
gcggcacgacuccaggcug

SEQ ID NO: 1374576 - RNA, 19 nt, Artificial Sequence
  Description of Artificial Sequence: Synthetic oligonucleotide
cugcuauagucaucuuagu

SEQ ID NO: 1374577 - RNA, 19 nt, Artificial Sequence
  Description of Artificial Sequence: Synthetic oligonucleotide
gcauaagggccaacaagaa

SEQ ID NO: 1374578 - RNA, 19 nt, Artificial Sequence
  Description of Artificial Sequence: Synthetic oligonucleotide
guccgcaggucuuuguguu

SEQ ID NO: 1374579 - RNA, 19 nt, Artificial Sequence
  Description of Artificial Sequence: Synthetic oligonucleotide
ggccgaagcgacgcucccg

SEQ ID NO: 1374580 - RNA, 19 nt, Artificial Sequence
  Description of Artificial Sequence: Synthetic oligonucleotide
cgaggcaacacacaaaguu

SEQ ID NO: 1374581 - RNA, 19 nt, Artificial Sequence
  Description of Artificial Sequence: Synthetic oligonucleotide
gccuucagaauaaucuggu

SEQ ID NO: 1374582 - RNA, 19 nt, Artificial Sequence
  Description of Artificial Sequence: Synthetic oligonucleotide
gggccaacaagaagcugca

SEQ ID NO: 1374583 - RNA, 19 nt, Artificial Sequence
  Description of Artificial Sequence: Synthetic oligonucleotide
ccaucacgauccaugaggu

SEQ ID NO: 1374584 - RNA, 19 nt, Artificial Sequence
  Description of Artificial Sequence: Synthetic oligonucleotide
caccgcggaaaccaauggu

SEQ ID NO: 1374585 - RNA, 19 nt, Artificial Sequence
  Description of Artificial Sequence: Synthetic oligonucleotide
cagucgcacgaggcaacac

SEQ ID NO: 1374586 - RNA, 19 nt, Artificial Sequence
  Description of Artificial Sequence: Synthetic oligonucleotide
aaggcacggcuugguggaa

SEQ ID NO: 1374587 - RNA, 19 nt, Artificial Sequence
  Description of Artificial Sequence: Synthetic oligonucleotide
caucauccauuuugacccu

SEQ ID NO: 1374588 - RNA, 19 nt, Artificial Sequence
  Description of Artificial Sequence: Synthetic oligonucleotide
cugaguagcgggugaugau

SEQ ID NO: 1374589 - RNA, 19 nt, Artificial Sequence
  Description of Artificial Sequence: Synthetic oligonucleotide
cguaccacucggugacgcc

SEQ ID NO: 1374590 - RNA, 19 nt, Artificial Sequence
  Description of Artificial Sequence: Synthetic oligonucleotide
caucaggugugagguugca

SEQ ID NO: 1374591 - RNA, 19 nt, Artificial Sequence
  Description of Artificial Sequence: Synthetic oligonucleotide
caccaugcugcggcacgac

SEQ ID NO: 1374592 - RNA, 19 nt, Artificial Sequence
  Description of Artificial Sequence: Synthetic oligonucleotide
gugacgccaccaguaaagu

SEQ ID NO: 1374593 - RNA, 19 nt, Artificial Sequence
  Description of Artificial Sequence: Synthetic oligonucleotide
cacgauccaugagguucac

SEQ ID NO: 1374594 - RNA, 19 nt, Artificial Sequence
  Description of Artificial Sequence: Synthetic oligonucleotide
ccccagggguuccucauuc

SEQ ID NO: 1374595 - RNA, 19 nt, Artificial Sequence
  Description of Artificial Sequence: Synthetic oligonucleotide
cucaugcugccagacuugu

SEQ ID NO: 1374596 - RNA, 19 nt, Artificial Sequence
  Description of Artificial Sequence: Synthetic oligonucleotide
guacgugcccgagaagaau

SEQ ID NO: 1374597 - RNA, 19 nt, Artificial Sequence
  Description of Artificial Sequence: Synthetic oligonucleotide
ccaugauauuggagauauc

SEQ ID NO: 1374598 - RNA, 19 nt, Artificial Sequence
  Description of Artificial Sequence: Synthetic oligonucleotide
cggucauagggguccacuc

SEQ ID NO: 1374599 - RNA, 19 nt, Artificial Sequence
  Description of Artificial Sequence: Synthetic oligonucleotide
gcuuacugaacaagguuuu

SEQ ID NO: 1374600 - RNA, 19 nt, Artificial Sequence
  Description of Artificial Sequence: Synthetic oligonucleotide
ggaugcgguugcugacuuc

SEQ ID NO: 1374601 - RNA, 19 nt, Artificial Sequence
  Description of Artificial Sequence: Synthetic oligonucleotide
cguaggcacucaugcugcc

SEQ ID NO: 1374602 - RNA, 19 nt, Artificial Sequence
  Description of Artificial Sequence: Synthetic oligonucleotide
gcucgugcaauuucuuguu

SEQ ID NO: 1374603 - RNA, 19 nt, Artificial Sequence
  Description of Artificial Sequence: Synthetic oligonucleotide
cgcacgaggcaacacacaa

SEQ ID NO: 1374604 - RNA, 19 nt, Artificial Sequence
  Description of Artificial Sequence: Synthetic oligonucleotide
augcugcggcacgacucca

SEQ ID NO: 1374605 - RNA, 19 nt, Artificial Sequence
  Description of Artificial Sequence: Synthetic oligonucleotide
cauagggguccacucuguu

SEQ ID NO: 1374606 - RNA, 19 nt, Artificial Sequence
  Description of Artificial Sequence: Synthetic oligonucleotide
cggaaaauggucagguaau

SEQ ID NO: 1374607 - RNA, 19 nt, Artificial Sequence
  Description of Artificial Sequence: Synthetic oligonucleotide
gcacuacgauauacucccc

SEQ ID NO: 1374608 - RNA, 19 nt, Artificial Sequence
  Description of Artificial Sequence: Synthetic oligonucleotide
ccucguuccagcgccuuca

SEQ ID NO: 1374609 - RNA, 19 nt, Artificial Sequence
  Description of Artificial Sequence: Synthetic oligonucleotide
ccgcggaaaccaauggucu

SEQ ID NO: 1374610 - RNA, 19 nt, Artificial Sequence
  Description of Artificial Sequence: Synthetic oligonucleotide
gcacgaggcaacacacaaa

SEQ ID NO: 1374611 - RNA, 19 nt, Artificial Sequence
  Description of Artificial Sequence: Synthetic oligonucleotide
caucacgauccaugagguu

SEQ ID NO: 1374612 - RNA, 19 nt, Artificial Sequence
  Description of Artificial Sequence: Synthetic oligonucleotide
cauuaccaucacgauccau

SEQ ID NO: 1374613 - RNA, 19 nt, Artificial Sequence
  Description of Artificial Sequence: Synthetic oligonucleotide
agccucguuccagcgccuu

SEQ ID NO: 1374614 - RNA, 19 nt, Artificial Sequence
  Description of Artificial Sequence: Synthetic oligonucleotide
ccucauagagagucguguu

SEQ ID NO: 1374615 - RNA, 19 nt, Artificial Sequence
  Description of Artificial Sequence: Synthetic oligonucleotide
ccgaagcgacgcucccggc

SEQ ID NO: 1374616 - RNA, 19 nt, Artificial Sequence
  Description of Artificial Sequence: Synthetic oligonucleotide
cauugguccgcaggucuuu

SEQ ID NO: 1374617 - RNA, 19 nt, Artificial Sequence
  Description of Artificial Sequence: Synthetic oligonucleotide
gcggaugcgguugcugacu

SEQ ID NO: 1374618 - RNA, 19 nt, Artificial Sequence
  Description of Artificial Sequence: Synthetic oligonucleotide
ggcacgacuccaggcugaa

SEQ ID NO: 1374619 - RNA, 19 nt, Artificial Sequence
  Description of Artificial Sequence: Synthetic oligonucleotide
gggucgcagcacccuucuc

SEQ ID NO: 1374620 - RNA, 19 nt, Artificial Sequence
  Description of Artificial Sequence: Synthetic oligonucleotide
gagccucguuccagcgccu

SEQ ID NO: 1374621 - RNA, 19 nt, Artificial Sequence
  Description of Artificial Sequence: Synthetic oligonucleotide
cccgacucccgacugcuau

SEQ ID NO: 1374622 - RNA, 19 nt, Artificial Sequence
  Description of Artificial Sequence: Synthetic oligonucleotide
ccgacucccgacugcuaua

SEQ ID NO: 1374623 - RNA, 19 nt, Artificial Sequence
  Description of Artificial Sequence: Synthetic oligonucleotide
gcaacuccuugacgcugau

SEQ ID NO: 1374624 - RNA, 19 nt, Artificial Sequence
  Description of Artificial Sequence: Synthetic oligonucleotide
cauggcccuucaccagguu

SEQ ID NO: 1374625 - RNA, 19 nt, Artificial Sequence
  Description of Artificial Sequence: Synthetic oligonucleotide
ccauugguccgcaggucuu

SEQ ID NO: 1374626 - RNA, 19 nt, Artificial Sequence
  Description of Artificial Sequence: Synthetic oligonucleotide
cuaucacuccaggcuccuu

SEQ ID NO: 1374627 - RNA, 19 nt, Artificial Sequence
  Description of Artificial Sequence: Synthetic oligonucleotide
cagccucaauggccauccu

SEQ ID NO: 1374628 - RNA, 19 nt, Artificial Sequence
  Description of Artificial Sequence: Synthetic oligonucleotide
cggugacgccaccaguaaa

SEQ ID NO: 1374629 - RNA, 19 nt, Artificial Sequence
  Description of Artificial Sequence: Synthetic oligonucleotide
cccagcaaggagccucguu

SEQ ID NO: 1374630 - RNA, 19 nt, Artificial Sequence
  Description of Artificial Sequence: Synthetic oligonucleotide
ccuugacgcugaucuccau

SEQ ID NO: 1374631 - RNA, 19 nt, Artificial Sequence
  Description of Artificial Sequence: Synthetic oligonucleotide
gccucccuguugggcucga

SEQ ID NO: 1374632 - RNA, 19 nt, Artificial Sequence
  Description of Artificial Sequence: Synthetic oligonucleotide
cggaugcgguugcugacuu

SEQ ID NO: 1374633 - RNA, 19 nt, Artificial Sequence
  Description of Artificial Sequence: Synthetic oligonucleotide
cccuugguggcaggcggau

SEQ ID NO: 1374634 - RNA, 19 nt, Artificial Sequence
  Description of Artificial Sequence: Synthetic oligonucleotide
ccucccuguugggcucgaa

SEQ ID NO: 1374635 - RNA, 19 nt, Artificial Sequence
  Description of Artificial Sequence: Synthetic oligonucleotide
cgacugcuauagucaucuu

SEQ ID NO: 1374636 - RNA, 19 nt, Artificial Sequence
  Description of Artificial Sequence: Synthetic oligonucleotide
  modified_base (1)..(1): a, c, u, g, unknown or other
nuuccccggcgccaggugc

SEQ ID NO: 1374637 - RNA, 19 nt, Artificial Sequence
  Description of Artificial Sequence: Synthetic oligonucleotide
ucuauuuacaccauaccac

SEQ ID NO: 1374638 - RNA, 19 nt, Artificial Sequence
  Description of Artificial Sequence: Synthetic oligonucleotide
aguaacaccaggucacucc

SEQ ID NO: 1374639 - RNA, 19 nt, Artificial Sequence
  Description of Artificial Sequence: Synthetic oligonucleotide
ugugcgauaccccugacca

SEQ ID NO: 1374640 - RNA, 19 nt, Artificial Sequence
  Description of Artificial Sequence: Synthetic oligonucleotide
caaagcgcagaucaaaucg

SEQ ID NO: 1374641 - RNA, 19 nt, Artificial Sequence
  Description of Artificial Sequence: Synthetic oligonucleotide
aaaucggcggcugaggucg

SEQ ID NO: 1374642 - RNA, 19 nt, Artificial Sequence
  Description of Artificial Sequence: Synthetic oligonucleotide
uguaaucagcuucugcagg

SEQ ID NO: 1374643 - RNA, 19 nt, Artificial Sequence
  Description of Artificial Sequence: Synthetic oligonucleotide
uccuuaauguaacagcucu

SEQ ID NO: 1374644 - RNA, 19 nt, Artificial Sequence
  Description of Artificial Sequence: Synthetic oligonucleotide
ugcaccgucuuauugaacc

SEQ ID NO: 1374645 - RNA, 19 nt, Artificial Sequence
  Description of Artificial Sequence: Synthetic oligonucleotide
aaauacugguauuuugaga

SEQ ID NO: 1374646 - RNA, 19 nt, Artificial Sequence
  Description of Artificial Sequence: Synthetic oligonucleotide
guauuuugagaucugugcc

SEQ ID NO: 1374647 - RNA, 19 nt, Artificial Sequence
  Description of Artificial Sequence: Synthetic oligonucleotide
uuuacugugcgauaccccu

SEQ ID NO: 1374648 - RNA, 19 nt, Artificial Sequence
  Description of Artificial Sequence: Synthetic oligonucleotide
uagaguaacaccaggucac

SEQ ID NO: 1374649 - RNA, 19 nt, Artificial Sequence
  Description of Artificial Sequence: Synthetic oligonucleotide
gguauuuugagaucugugc

SEQ ID NO: 1374650 - RNA, 19 nt, Artificial Sequence
  Description of Artificial Sequence: Synthetic oligonucleotide
cauaccaccaacccuagug

SEQ ID NO: 1374651 - RNA, 19 nt, Artificial Sequence
  Description of Artificial Sequence: Synthetic oligonucleotide
aaaggguaguccuugcccu

SEQ ID NO: 1374652 - RNA, 19 nt, Artificial Sequence
  Description of Artificial Sequence: Synthetic oligonucleotide
uauuuugagaucugugccu

SEQ ID NO: 1374653 - RNA, 19 nt, Artificial Sequence
  Description of Artificial Sequence: Synthetic oligonucleotide
cuuacgaagcuccuguagc

SEQ ID NO: 1374654 - RNA, 19 nt, Artificial Sequence
  Description of Artificial Sequence: Synthetic oligonucleotide
ucugccuuaguccaugcgu

SEQ ID NO: 1374655 - RNA, 19 nt, Artificial Sequence
  Description of Artificial Sequence: Synthetic oligonucleotide
cccacuacaucaaugaugg

SEQ ID NO: 1374656 - RNA, 19 nt, Artificial Sequence
  Description of Artificial Sequence: Synthetic oligonucleotide
ucuuauugaaccuggcaaa

SEQ ID NO: 1374657 - RNA, 19 nt, Artificial Sequence
  Description of Artificial Sequence: Synthetic oligonucleotide
aaagcgcagaucaaaucgg

SEQ ID NO: 1374658 - RNA, 19 nt, Artificial Sequence
  Description of Artificial Sequence: Synthetic oligonucleotide
aaugugguaguaccucucu

SEQ ID NO: 1374659 - RNA, 19 nt, Artificial Sequence
  Description of Artificial Sequence: Synthetic oligonucleotide
auaccgaucaugaauaacu

SEQ ID NO: 1374660 - RNA, 19 nt, Artificial Sequence
  Description of Artificial Sequence: Synthetic oligonucleotide
ucaucgugaagguagaguu

SEQ ID NO: 1374661 - RNA, 19 nt, Artificial Sequence
  Description of Artificial Sequence: Synthetic oligonucleotide
ugaccaguaucacugggca

SEQ ID NO: 1374662 - RNA, 19 nt, Artificial Sequence
  Description of Artificial Sequence: Synthetic oligonucleotide
aaauccucuacagaacgcu

SEQ ID NO: 1374663 - RNA, 19 nt, Artificial Sequence
  Description of Artificial Sequence: Synthetic oligonucleotide
acuacaucaaugauggugu

SEQ ID NO: 1374664 - RNA, 19 nt, Artificial Sequence
  Description of Artificial Sequence: Synthetic oligonucleotide
uacagaacgcuucuugaac

SEQ ID NO: 1374665 - RNA, 19 nt, Artificial Sequence
  Description of Artificial Sequence: Synthetic oligonucleotide
acaaaugugguaguaccuc

SEQ ID NO: 1374666 - RNA, 19 nt, Artificial Sequence
  Description of Artificial Sequence: Synthetic oligonucleotide
accgaucaugaauaacuac

SEQ ID NO: 1374667 - RNA, 19 nt, Artificial Sequence
  Description of Artificial Sequence: Synthetic oligonucleotide
guaacagcucuauuuacac

SEQ ID NO: 1374668 - RNA, 19 nt, Artificial Sequence
  Description of Artificial Sequence: Synthetic oligonucleotide
ugguaaauggcauccauuu

SEQ ID NO: 1374669 - RNA, 19 nt, Artificial Sequence
  Description of Artificial Sequence: Synthetic oligonucleotide
cucuauuuacaccauacca

SEQ ID NO: 1374670 - RNA, 19 nt, Artificial Sequence
  Description of Artificial Sequence: Synthetic oligonucleotide
agcucuauuuacaccauac

SEQ ID NO: 1374671 - RNA, 19 nt, Artificial Sequence
  Description of Artificial Sequence: Synthetic oligonucleotide
uuuacaccauaccaccaac

SEQ ID NO: 1374672 - RNA, 19 nt, Artificial Sequence
  Description of Artificial Sequence: Synthetic oligonucleotide
uugaaccuggcaaaagggu

SEQ ID NO: 1374673 - RNA, 19 nt, Artificial Sequence
  Description of Artificial Sequence: Synthetic oligonucleotide
uauuuacaccauaccacca

SEQ ID NO: 1374674 - RNA, 19 nt, Artificial Sequence
  Description of Artificial Sequence: Synthetic oligonucleotide
ugaauacacgggcaccugc

SEQ ID NO: 1374675 - RNA, 19 nt, Artificial Sequence
  Description of Artificial Sequence: Synthetic oligonucleotide
uccgaagugugacaccugc

SEQ ID NO: 1374676 - RNA, 19 nt, Artificial Sequence
  Description of Artificial Sequence: Synthetic oligonucleotide
guagaguaacaccagguca

SEQ ID NO: 1374677 - RNA, 19 nt, Artificial Sequence
  Description of Artificial Sequence: Synthetic oligonucleotide
ucccaauuuagccuuuacu

SEQ ID NO: 1374678 - RNA, 19 nt, Artificial Sequence
  Description of Artificial Sequence: Synthetic oligonucleotide
accgaguucuagaaugucc

SEQ ID NO: 1374679 - RNA, 19 nt, Artificial Sequence
  Description of Artificial Sequence: Synthetic oligonucleotide
gucuuauugaaccuggcaa

SEQ ID NO: 1374680 - RNA, 19 nt, Artificial Sequence
  Description of Artificial Sequence: Synthetic oligonucleotide
cuuaguccaugcgucaucg

SEQ ID NO: 1374681 - RNA, 19 nt, Artificial Sequence
  Description of Artificial Sequence: Synthetic oligonucleotide
gucuccgaggauuucuugg

SEQ ID NO: 1374682 - RNA, 19 nt, Artificial Sequence
  Description of Artificial Sequence: Synthetic oligonucleotide
uacugguauuuugagaucu

SEQ ID NO: 1374683 - RNA, 19 nt, Artificial Sequence
  Description of Artificial Sequence: Synthetic oligonucleotide
aaggccgaaccuucuuggg

SEQ ID NO: 1374684 - RNA, 19 nt, Artificial Sequence
  Description of Artificial Sequence: Synthetic oligonucleotide
agcgccauccuuucgagcu

SEQ ID NO: 1374685 - RNA, 19 nt, Artificial Sequence
  Description of Artificial Sequence: Synthetic oligonucleotide
aagcgcagaucaaaucggc

SEQ ID NO: 1374686 - RNA, 19 nt, Artificial Sequence
  Description of Artificial Sequence: Synthetic oligonucleotide
cuguagcucguauucacag

SEQ ID NO: 1374687 - RNA, 19 nt, Artificial Sequence
  Description of Artificial Sequence: Synthetic oligonucleotide
auuuacaccauaccaccaa

SEQ ID NO: 1374688 - RNA, 19 nt, Artificial Sequence
  Description of Artificial Sequence: Synthetic oligonucleotide
ugcuugagcucguagagua

SEQ ID NO: 1374689 - RNA, 19 nt, Artificial Sequence
  Description of Artificial Sequence: Synthetic oligonucleotide
cuuuacugugcgauacccc

SEQ ID NO: 1374690 - RNA, 19 nt, Artificial Sequence
  Description of Artificial Sequence: Synthetic oligonucleotide
acaccugccgacuuaaaau

SEQ ID NO: 1374691 - RNA, 19 nt, Artificial Sequence
  Description of Artificial Sequence: Synthetic oligonucleotide
aaggguaguccuugcccuc

SEQ ID NO: 1374692 - RNA, 19 nt, Artificial Sequence
  Description of Artificial Sequence: Synthetic oligonucleotide
caaggccgaaccuucuugg

SEQ ID NO: 1374693 - RNA, 19 nt, Artificial Sequence
  Description of Artificial Sequence: Synthetic oligonucleotide
caaauccucuacagaacgc

SEQ ID NO: 1374694 - RNA, 19 nt, Artificial Sequence
  Description of Artificial Sequence: Synthetic oligonucleotide
auuuugagaucugugccug

SEQ ID NO: 1374695 - RNA, 19 nt, Artificial Sequence
  Description of Artificial Sequence: Synthetic oligonucleotide
agcucguagaguaacacca

SEQ ID NO: 1374696 - RNA, 19 nt, Artificial Sequence
  Description of Artificial Sequence: Synthetic oligonucleotide
uuugagaucugugccuggc

SEQ ID NO: 1374697 - RNA, 19 nt, Artificial Sequence
  Description of Artificial Sequence: Synthetic oligonucleotide
gucguuuccgcgaauuggg

SEQ ID NO: 1374698 - RNA, 19 nt, Artificial Sequence
  Description of Artificial Sequence: Synthetic oligonucleotide
ggaacagccggcuucucgg

SEQ ID NO: 1374699 - RNA, 19 nt, Artificial Sequence
  Description of Artificial Sequence: Synthetic oligonucleotide
gcauccauuuccaaggccg

SEQ ID NO: 1374700 - RNA, 19 nt, Artificial Sequence
  Description of Artificial Sequence: Synthetic oligonucleotide
cugccgacuuaaaaucugg

SEQ ID NO: 1374701 - RNA, 19 nt, Artificial Sequence
  Description of Artificial Sequence: Synthetic oligonucleotide
gagcucguagaguaacacc

SEQ ID NO: 1374702 - RNA, 19 nt, Artificial Sequence
  Description of Artificial Sequence: Synthetic oligonucleotide
aaugucccguacauccgcg

SEQ ID NO: 1374703 - RNA, 19 nt, Artificial Sequence
  Description of Artificial Sequence: Synthetic oligonucleotide
caugcccagcaucaaauac

SEQ ID NO: 1374704 - RNA, 19 nt, Artificial Sequence
  Description of Artificial Sequence: Synthetic oligonucleotide
gauaccccugaccaguauc

SEQ ID NO: 1374705 - RNA, 19 nt, Artificial Sequence
  Description of Artificial Sequence: Synthetic oligonucleotide
gaucaaaucggcggcugag

SEQ ID NO: 1374706 - RNA, 19 nt, Artificial Sequence
  Description of Artificial Sequence: Synthetic oligonucleotide
aacuugaugccugcagucu

SEQ ID NO: 1374707 - RNA, 19 nt, Artificial Sequence
  Description of Artificial Sequence: Synthetic oligonucleotide
uugguaaauggcauccauu

SEQ ID NO: 1374708 - RNA, 19 nt, Artificial Sequence
  Description of Artificial Sequence: Synthetic oligonucleotide
gaugcaugccuucaggccu

SEQ ID NO: 1374709 - RNA, 19 nt, Artificial Sequence
  Description of Artificial Sequence: Synthetic oligonucleotide
uucuuaggggcuuugcguu

SEQ ID NO: 1374710 - RNA, 19 nt, Artificial Sequence
  Description of Artificial Sequence: Synthetic oligonucleotide
uuccuuaauguaacagcuc

SEQ ID NO: 1374711 - RNA, 19 nt, Artificial Sequence
  Description of Artificial Sequence: Synthetic oligonucleotide
uguagcucguauucacagu

SEQ ID NO: 1374712 - RNA, 19 nt, Artificial Sequence
  Description of Artificial Sequence: Synthetic oligonucleotide
ugucccguacauccgcgcc

SEQ ID NO: 1374713 - RNA, 19 nt, Artificial Sequence
  Description of Artificial Sequence: Synthetic oligonucleotide
uugagcucguagaguaaca

SEQ ID NO: 1374714 - RNA, 19 nt, Artificial Sequence
  Description of Artificial Sequence: Synthetic oligonucleotide
auagcgccauccuuucgag

SEQ ID NO: 1374715 - RNA, 19 nt, Artificial Sequence
  Description of Artificial Sequence: Synthetic oligonucleotide
gcgcagaucaaaucggcgg

SEQ ID NO: 1374716 - RNA, 19 nt, Artificial Sequence
  Description of Artificial Sequence: Synthetic oligonucleotide
acaccauaccaccaacccu

SEQ ID NO: 1374717 - RNA, 19 nt, Artificial Sequence
  Description of Artificial Sequence: Synthetic oligonucleotide
caccugccgacuuaaaauc

SEQ ID NO: 1374718 - RNA, 19 nt, Artificial Sequence
  Description of Artificial Sequence: Synthetic oligonucleotide
ugcgauaccccugaccagu

SEQ ID NO: 1374719 - RNA, 19 nt, Artificial Sequence
  Description of Artificial Sequence: Synthetic oligonucleotide
uaccgaucaugaauaacua

SEQ ID NO: 1374720 - RNA, 19 nt, Artificial Sequence
  Description of Artificial Sequence: Synthetic oligonucleotide
gccaccgaguucuagaaug

SEQ ID NO: 1374721 - RNA, 19 nt, Artificial Sequence
  Description of Artificial Sequence: Synthetic oligonucleotide
uuugcguucugugcgccgc

SEQ ID NO: 1374722 - RNA, 19 nt, Artificial Sequence
  Description of Artificial Sequence: Synthetic oligonucleotide
cucguauucacaguuggca

SEQ ID NO: 1374723 - RNA, 19 nt, Artificial Sequence
  Description of Artificial Sequence: Synthetic oligonucleotide
augucccguacauccgcgc

SEQ ID NO: 1374724 - RNA, 19 nt, Artificial Sequence
  Description of Artificial Sequence: Synthetic oligonucleotide
acccacuacaucaaugaug

SEQ ID NO: 1374725 - RNA, 19 nt, Artificial Sequence
  Description of Artificial Sequence: Synthetic oligonucleotide
uacauccgcgcccguagcc

SEQ ID NO: 1374726 - RNA, 19 nt, Artificial Sequence
  Description of Artificial Sequence: Synthetic oligonucleotide
uagcucguauucacaguug

SEQ ID NO: 1374727 - RNA, 19 nt, Artificial Sequence
  Description of Artificial Sequence: Synthetic oligonucleotide
ucauccgcuggcuccgaag

SEQ ID NO: 1374728 - RNA, 19 nt, Artificial Sequence
  Description of Artificial Sequence: Synthetic oligonucleotide
gaggggugcacccacuaca

SEQ ID NO: 1374729 - RNA, 19 nt, Artificial Sequence
  Description of Artificial Sequence: Synthetic oligonucleotide
ugguaguaccucucuuuca

SEQ ID NO: 1374730 - RNA, 19 nt, Artificial Sequence
  Description of Artificial Sequence: Synthetic oligonucleotide
ccgaguucuagaauguccc

SEQ ID NO: 1374731 - RNA, 19 nt, Artificial Sequence
  Description of Artificial Sequence: Synthetic oligonucleotide
caucgugaagguagaguug

SEQ ID NO: 1374732 - RNA, 19 nt, Artificial Sequence
  Description of Artificial Sequence: Synthetic oligonucleotide
ugccgacuuaaaaucugga

SEQ ID NO: 1374733 - RNA, 19 nt, Artificial Sequence
  Description of Artificial Sequence: Synthetic oligonucleotide
gggcuuugcguucugugcg

SEQ ID NO: 1374734 - RNA, 19 nt, Artificial Sequence
  Description of Artificial Sequence: Synthetic oligonucleotide
ugggccaccgaguucuaga

SEQ ID NO: 1374735 - RNA, 19 nt, Artificial Sequence
  Description of Artificial Sequence: Synthetic oligonucleotide
cauagcgccauccuuucga

SEQ ID NO: 1374736 - RNA, 19 nt, Artificial Sequence
  Description of Artificial Sequence: Synthetic oligonucleotide
guccggguugaugauaucc

SEQ ID NO: 1374737 - RNA, 19 nt, Artificial Sequence
  Description of Artificial Sequence: Synthetic oligonucleotide
aacgcuucuugaacuguug

SEQ ID NO: 1374738 - RNA, 19 nt, Artificial Sequence
  Description of Artificial Sequence: Synthetic oligonucleotide
uccauuuccaaggccgaac

SEQ ID NO: 1374739 - RNA, 19 nt, Artificial Sequence
  Description of Artificial Sequence: Synthetic oligonucleotide
aggguaguccuugcccucc

SEQ ID NO: 1374740 - RNA, 19 nt, Artificial Sequence
  Description of Artificial Sequence: Synthetic oligonucleotide
gugguaguaccucucuuuc

SEQ ID NO: 1374741 - RNA, 19 nt, Artificial Sequence
  Description of Artificial Sequence: Synthetic oligonucleotide
gucauaccgaucaugaaua

SEQ ID NO: 1374742 - RNA, 19 nt, Artificial Sequence
  Description of Artificial Sequence: Synthetic oligonucleotide
gacaccugccgacuuaaaa

SEQ ID NO: 1374743 - RNA, 19 nt, Artificial Sequence
  Description of Artificial Sequence: Synthetic oligonucleotide
ugcugcucgucgccagugg

SEQ ID NO: 1374744 - RNA, 19 nt, Artificial Sequence
  Description of Artificial Sequence: Synthetic oligonucleotide
cauaccgaucaugaauaac

SEQ ID NO: 1374745 - RNA, 19 nt, Artificial Sequence
  Description of Artificial Sequence: Synthetic oligonucleotide
uguuccgcaguggugucug

SEQ ID NO: 1374746 - RNA, 19 nt, Artificial Sequence
  Description of Artificial Sequence: Synthetic oligonucleotide
guggucauaccgaucauga

SEQ ID NO: 1374747 - RNA, 19 nt, Artificial Sequence
  Description of Artificial Sequence: Synthetic oligonucleotide
cuccgcaacucguugaaca

SEQ ID NO: 1374748 - RNA, 19 nt, Artificial Sequence
  Description of Artificial Sequence: Synthetic oligonucleotide
agacucccgucguuuccgc

SEQ ID NO: 1374749 - RNA, 19 nt, Artificial Sequence
  Description of Artificial Sequence: Synthetic oligonucleotide
gcucuauuuacaccauacc

SEQ ID NO: 1374750 - RNA, 19 nt, Artificial Sequence
  Description of Artificial Sequence: Synthetic oligonucleotide
ucauaccgaucaugaauaa

SEQ ID NO: 1374751 - RNA, 19 nt, Artificial Sequence
  Description of Artificial Sequence: Synthetic oligonucleotide
agaucaaaucggcggcuga

SEQ ID NO: 1374752 - RNA, 19 nt, Artificial Sequence
  Description of Artificial Sequence: Synthetic oligonucleotide
uccgcaguggugucugcug

SEQ ID NO: 1374753 - RNA, 19 nt, Artificial Sequence
  Description of Artificial Sequence: Synthetic oligonucleotide
gguaguaccucucuuucaa

SEQ ID NO: 1374754 - RNA, 19 nt, Artificial Sequence
  Description of Artificial Sequence: Synthetic oligonucleotide
guagagccgcuccaacugc

SEQ ID NO: 1374755 - RNA, 19 nt, Artificial Sequence
  Description of Artificial Sequence: Synthetic oligonucleotide
ucgaagagguggucagucu

SEQ ID NO: 1374756 - RNA, 19 nt, Artificial Sequence
  Description of Artificial Sequence: Synthetic oligonucleotide
cucugaauacacgggcacc

SEQ ID NO: 1374757 - RNA, 19 nt, Artificial Sequence
  Description of Artificial Sequence: Synthetic oligonucleotide
guuuccgcgaauugggugu

SEQ ID NO: 1374758 - RNA, 19 nt, Artificial Sequence
  Description of Artificial Sequence: Synthetic oligonucleotide
gggugcacccacuacauca

SEQ ID NO: 1374759 - RNA, 19 nt, Artificial Sequence
  Description of Artificial Sequence: Synthetic oligonucleotide
uuggcacaaaugugguagu

SEQ ID NO: 1374760 - RNA, 19 nt, Artificial Sequence
  Description of Artificial Sequence: Synthetic oligonucleotide
guuguagagccgcuccaac

SEQ ID NO: 1374761 - RNA, 19 nt, Artificial Sequence
  Description of Artificial Sequence: Synthetic oligonucleotide
gucacuccgcaacucguug

SEQ ID NO: 1374762 - RNA, 19 nt, Artificial Sequence
  Description of Artificial Sequence: Synthetic oligonucleotide
uccgcaacucguugaacau

SEQ ID NO: 1374763 - RNA, 19 nt, Artificial Sequence
  Description of Artificial Sequence: Synthetic oligonucleotide
guaucacugggcaguagug

SEQ ID NO: 1374764 - RNA, 19 nt, Artificial Sequence
  Description of Artificial Sequence: Synthetic oligonucleotide
cugugcgauaccccugacc

SEQ ID NO: 1374765 - RNA, 19 nt, Artificial Sequence
  Description of Artificial Sequence: Synthetic oligonucleotide
agcgcagaucaaaucggcg

SEQ ID NO: 1374766 - RNA, 19 nt, Artificial Sequence
  Description of Artificial Sequence: Synthetic oligonucleotide
aguccaugcgucaucguga

SEQ ID NO: 1374767 - RNA, 19 nt, Artificial Sequence
  Description of Artificial Sequence: Synthetic oligonucleotide
ugaggggugcacccacuac

SEQ ID NO: 1374768 - RNA, 19 nt, Artificial Sequence
  Description of Artificial Sequence: Synthetic oligonucleotide
ucccguacauccgcgcccg

SEQ ID NO: 1374769 - RNA, 19 nt, Artificial Sequence
  Description of Artificial Sequence: Synthetic oligonucleotide
caccccgaggucaaggguc

SEQ ID NO: 1374770 - RNA, 19 nt, Artificial Sequence
  Description of Artificial Sequence: Synthetic oligonucleotide
ucccgaugcaugccuucag

SEQ ID NO: 1374771 - RNA, 19 nt, Artificial Sequence
  Description of Artificial Sequence: Synthetic oligonucleotide
acucccgucguuuccgcga

SEQ ID NO: 1374772 - RNA, 19 nt, Artificial Sequence
  Description of Artificial Sequence: Synthetic oligonucleotide
ucuuaggggcuuugcguuc

SEQ ID NO: 1374773 - RNA, 19 nt, Artificial Sequence
  Description of Artificial Sequence: Synthetic oligonucleotide
gguacuccugcucugaaua

SEQ ID NO: 1374774 - RNA, 19 nt, Artificial Sequence
  Description of Artificial Sequence: Synthetic oligonucleotide
ucguuuccgcgaauugggu

SEQ ID NO: 1374775 - RNA, 19 nt, Artificial Sequence
  Description of Artificial Sequence: Synthetic oligonucleotide
gaacagccggcuucucggc

SEQ ID NO: 1374776 - RNA, 19 nt, Artificial Sequence
  Description of Artificial Sequence: Synthetic oligonucleotide
aggccgaaccuucuuggga

SEQ ID NO: 1374777 - RNA, 19 nt, Artificial Sequence
  Description of Artificial Sequence: Synthetic oligonucleotide
gauauccuucuugcugaug

SEQ ID NO: 1374778 - RNA, 19 nt, Artificial Sequence
  Description of Artificial Sequence: Synthetic oligonucleotide
cagacucccgucguuuccg

SEQ ID NO: 1374779 - RNA, 19 nt, Artificial Sequence
  Description of Artificial Sequence: Synthetic oligonucleotide
cgcgaauugggugugaggg

SEQ ID NO: 1374780 - RNA, 19 nt, Artificial Sequence
  Description of Artificial Sequence: Synthetic oligonucleotide
aucaaugaugguguccuua

SEQ ID NO: 1374781 - RNA, 19 nt, Artificial Sequence
  Description of Artificial Sequence: Synthetic oligonucleotide
agaccucccgaugcaugcc

SEQ ID NO: 1374782 - RNA, 19 nt, Artificial Sequence
  Description of Artificial Sequence: Synthetic oligonucleotide
gacucccgucguuuccgcg

SEQ ID NO: 1374783 - RNA, 19 nt, Artificial Sequence
  Description of Artificial Sequence: Synthetic oligonucleotide
aacccuaguggccccucau

SEQ ID NO: 1374784 - RNA, 19 nt, Artificial Sequence
  Description of Artificial Sequence: Synthetic oligonucleotide
uccgcgaauugggugugag

SEQ ID NO: 1374785 - RNA, 19 nt, Artificial Sequence
  Description of Artificial Sequence: Synthetic oligonucleotide
guacuccugcucugaauac

SEQ ID NO: 1374786 - RNA, 19 nt, Artificial Sequence
  Description of Artificial Sequence: Synthetic oligonucleotide
uggggcuguucccacugcu

SEQ ID NO: 1374787 - RNA, 19 nt, Artificial Sequence
  Description of Artificial Sequence: Synthetic oligonucleotide
ccauuuccaaggccgaacc

SEQ ID NO: 1374788 - RNA, 19 nt, Artificial Sequence
  Description of Artificial Sequence: Synthetic oligonucleotide
ccucacguuggcaagcuug

SEQ ID NO: 1374789 - RNA, 19 nt, Artificial Sequence
  Description of Artificial Sequence: Synthetic oligonucleotide
agaacgcuucuugaacugu

SEQ ID NO: 1374790 - RNA, 19 nt, Artificial Sequence
  Description of Artificial Sequence: Synthetic oligonucleotide
auagaccucccgaugcaug

SEQ ID NO: 1374791 - RNA, 19 nt, Artificial Sequence
  Description of Artificial Sequence: Synthetic oligonucleotide
ccgacuuaaaaucuggaaa

SEQ ID NO: 1374792 - RNA, 19 nt, Artificial Sequence
  Description of Artificial Sequence: Synthetic oligonucleotide
cuugaacuguuggugguca

SEQ ID NO: 1374793 - RNA, 19 nt, Artificial Sequence
  Description of Artificial Sequence: Synthetic oligonucleotide
cuagaaugucccguacauc

SEQ ID NO: 1374794 - RNA, 19 nt, Artificial Sequence
  Description of Artificial Sequence: Synthetic oligonucleotide
ggucauaccgaucaugaau

SEQ ID NO: 1374795 - RNA, 19 nt, Artificial Sequence
  Description of Artificial Sequence: Synthetic oligonucleotide
guagcucguauucacaguu

SEQ ID NO: 1374796 - RNA, 19 nt, Artificial Sequence
  Description of Artificial Sequence: Synthetic oligonucleotide
agugugacaccugccgacu

SEQ ID NO: 1374797 - RNA, 19 nt, Artificial Sequence
  Description of Artificial Sequence: Synthetic oligonucleotide
uggcuccgaagugugacac

SEQ ID NO: 1374798 - RNA, 19 nt, Artificial Sequence
  Description of Artificial Sequence: Synthetic oligonucleotide
acccuaguggccccucaug

SEQ ID NO: 1374799 - RNA, 19 nt, Artificial Sequence
  Description of Artificial Sequence: Synthetic oligonucleotide
gucccguacauccgcgccc

SEQ ID NO: 1374800 - RNA, 19 nt, Artificial Sequence
  Description of Artificial Sequence: Synthetic oligonucleotide
agaguaacaccaggucacu

SEQ ID NO: 1374801 - RNA, 19 nt, Artificial Sequence
  Description of Artificial Sequence: Synthetic oligonucleotide
gagcaccccgaggucaagg

SEQ ID NO: 1374802 - RNA, 19 nt, Artificial Sequence
  Description of Artificial Sequence: Synthetic oligonucleotide
ccuggcaaaaggguagucc

SEQ ID NO: 1374803 - RNA, 19 nt, Artificial Sequence
  Description of Artificial Sequence: Synthetic oligonucleotide
uuaguccaugcgucaucgu

SEQ ID NO: 1374804 - RNA, 19 nt, Artificial Sequence
  Description of Artificial Sequence: Synthetic oligonucleotide
ucuuguccggguugaugau

SEQ ID NO: 1374805 - RNA, 19 nt, Artificial Sequence
  Description of Artificial Sequence: Synthetic oligonucleotide
uuuccgcgaauugggugug

SEQ ID NO: 1374806 - RNA, 19 nt, Artificial Sequence
  Description of Artificial Sequence: Synthetic oligonucleotide
ugcgccgcuguuccgcagu

SEQ ID NO: 1374807 - RNA, 19 nt, Artificial Sequence
  Description of Artificial Sequence: Synthetic oligonucleotide
cauccauuuccaaggccga

SEQ ID NO: 1374808 - RNA, 19 nt, Artificial Sequence
  Description of Artificial Sequence: Synthetic oligonucleotide
guugguaaauggcauccau

SEQ ID NO: 1374809 - RNA, 19 nt, Artificial Sequence
  Description of Artificial Sequence: Synthetic oligonucleotide
ugcucgucgccaguggaaa

SEQ ID NO: 1374810 - RNA, 19 nt, Artificial Sequence
  Description of Artificial Sequence: Synthetic oligonucleotide
cagaucaaaucggcggcug

SEQ ID NO: 1374811 - RNA, 19 nt, Artificial Sequence
  Description of Artificial Sequence: Synthetic oligonucleotide
guggggucaaggccaaguc

SEQ ID NO: 1374812 - RNA, 19 nt, Artificial Sequence
  Description of Artificial Sequence: Synthetic oligonucleotide
uuaggggcuuugcguucug

SEQ ID NO: 1374813 - RNA, 19 nt, Artificial Sequence
  Description of Artificial Sequence: Synthetic oligonucleotide
uccaugcgucaucgugaag

SEQ ID NO: 1374814 - RNA, 19 nt, Artificial Sequence
  Description of Artificial Sequence: Synthetic oligonucleotide
ggccucuugaaggucagug

SEQ ID NO: 1374815 - RNA, 19 nt, Artificial Sequence
  Description of Artificial Sequence: Synthetic oligonucleotide
acuccgcaacucguugaac

SEQ ID NO: 1374816 - RNA, 19 nt, Artificial Sequence
  Description of Artificial Sequence: Synthetic oligonucleotide
caccgucuuauugaaccug

SEQ ID NO: 1374817 - RNA, 19 nt, Artificial Sequence
  Description of Artificial Sequence: Synthetic oligonucleotide
uagcgccauccuuucgagc

SEQ ID NO: 1374818 - RNA, 19 nt, Artificial Sequence
  Description of Artificial Sequence: Synthetic oligonucleotide
ugugcgccgcuguuccgca

SEQ ID NO: 1374819 - RNA, 19 nt, Artificial Sequence
  Description of Artificial Sequence: Synthetic oligonucleotide
augugguaguaccucucuu

SEQ ID NO: 1374820 - RNA, 19 nt, Artificial Sequence
  Description of Artificial Sequence: Synthetic oligonucleotide
guacauccgcgcccguagc

SEQ ID NO: 1374821 - RNA, 19 nt, Artificial Sequence
  Description of Artificial Sequence: Synthetic oligonucleotide
agccaucacgccugagaga

SEQ ID NO: 1374822 - RNA, 19 nt, Artificial Sequence
  Description of Artificial Sequence: Synthetic oligonucleotide
gugcgauaccccugaccag

SEQ ID NO: 1374823 - RNA, 19 nt, Artificial Sequence
  Description of Artificial Sequence: Synthetic oligonucleotide
ccugaccaguaucacuggg

SEQ ID NO: 1374824 - RNA, 19 nt, Artificial Sequence
  Description of Artificial Sequence: Synthetic oligonucleotide
ccugccgacuuaaaaucug

SEQ ID NO: 1374825 - RNA, 19 nt, Artificial Sequence
  Description of Artificial Sequence: Synthetic oligonucleotide
accugccgacuuaaaaucu

SEQ ID NO: 1374826 - RNA, 19 nt, Artificial Sequence
  Description of Artificial Sequence: Synthetic oligonucleotide
cgaugcaugccuucaggcc

SEQ ID NO: 1374827 - RNA, 19 nt, Artificial Sequence
  Description of Artificial Sequence: Synthetic oligonucleotide
cugugcgccgcuguuccgc

SEQ ID NO: 1374828 - RNA, 19 nt, Artificial Sequence
  Description of Artificial Sequence: Synthetic oligonucleotide
ucgagcuggguugguaaau

SEQ ID NO: 1374829 - RNA, 19 nt, Artificial Sequence
  Description of Artificial Sequence: Synthetic oligonucleotide
gguccgguuguagagccgc

SEQ ID NO: 1374830 - RNA, 19 nt, Artificial Sequence
  Description of Artificial Sequence: Synthetic oligonucleotide
uuccgcaguggugucugcu

SEQ ID NO: 1374831 - RNA, 19 nt, Artificial Sequence
  Description of Artificial Sequence: Synthetic oligonucleotide
ggcuuugcguucugugcgc

SEQ ID NO: 1374832 - RNA, 19 nt, Artificial Sequence
  Description of Artificial Sequence: Synthetic oligonucleotide
acauccgcgcccguagcca

SEQ ID NO: 1374833 - RNA, 19 nt, Artificial Sequence
  Description of Artificial Sequence: Synthetic oligonucleotide
uugcguucugugcgccgcu

SEQ ID NO: 1374834 - RNA, 19 nt, Artificial Sequence
  Description of Artificial Sequence: Synthetic oligonucleotide
cgcagaucaaaucggcggc

SEQ ID NO: 1374835 - RNA, 19 nt, Artificial Sequence
  Description of Artificial Sequence: Synthetic oligonucleotide
gucaucgugaagguagagu

SEQ ID NO: 1374836 - RNA, 19 nt, Artificial Sequence
  Description of Artificial Sequence: Synthetic oligonucleotide
cccgaugcaugccuucagg

SEQ ID NO: 1374837 - RNA, 19 nt, Artificial Sequence
  Description of Artificial Sequence: Synthetic oligonucleotide
guccaugcgucaucgugaa

SEQ ID NO: 1374838 - RNA, 19 nt, Artificial Sequence
  Description of Artificial Sequence: Synthetic oligonucleotide
uggcacaaaugugguagua

SEQ ID NO: 1374839 - RNA, 19 nt, Artificial Sequence
  Description of Artificial Sequence: Synthetic oligonucleotide
uucauccgcuggcuccgaa

SEQ ID NO: 1374840 - RNA, 19 nt, Artificial Sequence
  Description of Artificial Sequence: Synthetic oligonucleotide
accauaccaccaacccuag

SEQ ID NO: 1374841 - RNA, 19 nt, Artificial Sequence
  Description of Artificial Sequence: Synthetic oligonucleotide
ccaaggccgaaccuucuug

SEQ ID NO: 1374842 - RNA, 19 nt, Artificial Sequence
  Description of Artificial Sequence: Synthetic oligonucleotide
cuccgaagugugacaccug

SEQ ID NO: 1374843 - RNA, 19 nt, Artificial Sequence
  Description of Artificial Sequence: Synthetic oligonucleotide
ccgguuguagagccgcucc

SEQ ID NO: 1374844 - RNA, 19 nt, Artificial Sequence
  Description of Artificial Sequence: Synthetic oligonucleotide
cgaguucuagaaugucccg

SEQ ID NO: 1374845 - RNA, 19 nt, Artificial Sequence
  Description of Artificial Sequence: Synthetic oligonucleotide
uccgguuguagagccgcuc

SEQ ID NO: 1374846 - RNA, 19 nt, Artificial Sequence
  Description of Artificial Sequence: Synthetic oligonucleotide
guugguggucauaccgauc

SEQ ID NO: 1374847 - RNA, 19 nt, Artificial Sequence
  Description of Artificial Sequence: Synthetic oligonucleotide
gcucguagaguaacaccag

SEQ ID NO: 1374848 - RNA, 19 nt, Artificial Sequence
  Description of Artificial Sequence: Synthetic oligonucleotide
gccuuuacugugcgauacc

SEQ ID NO: 1374849 - RNA, 19 nt, Artificial Sequence
  Description of Artificial Sequence: Synthetic oligonucleotide
uccgcgcccguagccauca

SEQ ID NO: 1374850 - RNA, 19 nt, Artificial Sequence
  Description of Artificial Sequence: Synthetic oligonucleotide
cguacauccgcgcccguag

SEQ ID NO: 1374851 - RNA, 19 nt, Artificial Sequence
  Description of Artificial Sequence: Synthetic oligonucleotide
cgucguuuccgcgaauugg

SEQ ID NO: 1374852 - RNA, 19 nt, Artificial Sequence
  Description of Artificial Sequence: Synthetic oligonucleotide
caugcgucaucgugaaggu

SEQ ID NO: 1374853 - RNA, 19 nt, Artificial Sequence
  Description of Artificial Sequence: Synthetic oligonucleotide
aggucacuccgcaacucgu

SEQ ID NO: 1374854 - RNA, 19 nt, Artificial Sequence
  Description of Artificial Sequence: Synthetic oligonucleotide
cuggcuccgaagugugaca

SEQ ID NO: 1374855 - RNA, 19 nt, Artificial Sequence
  Description of Artificial Sequence: Synthetic oligonucleotide
cuggguugguaaauggcau

SEQ ID NO: 1374856 - RNA, 19 nt, Artificial Sequence
  Description of Artificial Sequence: Synthetic oligonucleotide
ugcguucugugcgccgcug

SEQ ID NO: 1374857 - RNA, 19 nt, Artificial Sequence
  Description of Artificial Sequence: Synthetic oligonucleotide
gcgcccguagccaucacgc

SEQ ID NO: 1374858 - RNA, 19 nt, Artificial Sequence
  Description of Artificial Sequence: Synthetic oligonucleotide
gcucguauucacaguuggc

SEQ ID NO: 1374859 - RNA, 19 nt, Artificial Sequence
  Description of Artificial Sequence: Synthetic oligonucleotide
ccgaagugugacaccugcc

SEQ ID NO: 1374860 - RNA, 19 nt, Artificial Sequence
  Description of Artificial Sequence: Synthetic oligonucleotide
caccgaguucuagaauguc

SEQ ID NO: 1374861 - RNA, 19 nt, Artificial Sequence
  Description of Artificial Sequence: Synthetic oligonucleotide
gcauagaccucccgaugca

SEQ ID NO: 1374862 - RNA, 19 nt, Artificial Sequence
  Description of Artificial Sequence: Synthetic oligonucleotide
aggggugcacccacuacau

SEQ ID NO: 1374863 - RNA, 19 nt, Artificial Sequence
  Description of Artificial Sequence: Synthetic oligonucleotide
uuccuccgucucucaugcc

SEQ ID NO: 1374864 - RNA, 19 nt, Artificial Sequence
  Description of Artificial Sequence: Synthetic oligonucleotide
cugaggucgaagagguggu

SEQ ID NO: 1374865 - RNA, 19 nt, Artificial Sequence
  Description of Artificial Sequence: Synthetic oligonucleotide
auccauuuccaaggccgaa

SEQ ID NO: 1374866 - RNA, 19 nt, Artificial Sequence
  Description of Artificial Sequence: Synthetic oligonucleotide
cguuuccgcgaauugggug

SEQ ID NO: 1374867 - RNA, 19 nt, Artificial Sequence
  Description of Artificial Sequence: Synthetic oligonucleotide
cacuccgcaacucguugaa

SEQ ID NO: 1374868 - RNA, 19 nt, Artificial Sequence
  Description of Artificial Sequence: Synthetic oligonucleotide
gaccucccgaugcaugccu

SEQ ID NO: 1374869 - RNA, 19 nt, Artificial Sequence
  Description of Artificial Sequence: Synthetic oligonucleotide
caguaucacugggcaguag

SEQ ID NO: 1374870 - RNA, 19 nt, Artificial Sequence
  Description of Artificial Sequence: Synthetic oligonucleotide
gaucccaauuuagccuuua

SEQ ID NO: 1374871 - RNA, 19 nt, Artificial Sequence
  Description of Artificial Sequence: Synthetic oligonucleotide
ucgugccggugccgcagca

SEQ ID NO: 1374872 - RNA, 19 nt, Artificial Sequence
  Description of Artificial Sequence: Synthetic oligonucleotide
cucgugccggugccgcagc

SEQ ID NO: 1374873 - RNA, 19 nt, Artificial Sequence
  Description of Artificial Sequence: Synthetic oligonucleotide
cggguugaugauauccuuc

SEQ ID NO: 1374874 - RNA, 19 nt, Artificial Sequence
  Description of Artificial Sequence: Synthetic oligonucleotide
ggcuccgaagugugacacc

SEQ ID NO: 1374875 - RNA, 19 nt, Artificial Sequence
  Description of Artificial Sequence: Synthetic oligonucleotide
ccuuaguccaugcgucauc

SEQ ID NO: 1374876 - RNA, 19 nt, Artificial Sequence
  Description of Artificial Sequence: Synthetic oligonucleotide
gccaucacgccugagagau

SEQ ID NO: 1374877 - RNA, 19 nt, Artificial Sequence
  Description of Artificial Sequence: Synthetic oligonucleotide
ccgcgaauugggugugagg

SEQ ID NO: 1374878 - RNA, 19 nt, Artificial Sequence
  Description of Artificial Sequence: Synthetic oligonucleotide
gguugguaaauggcaucca

SEQ ID NO: 1374879 - RNA, 19 nt, Artificial Sequence
  Description of Artificial Sequence: Synthetic oligonucleotide
cugcucgucgccaguggaa

SEQ ID NO: 1374880 - RNA, 19 nt, Artificial Sequence
  Description of Artificial Sequence: Synthetic oligonucleotide
ccgaaccuucuugggaucc

SEQ ID NO: 1374881 - RNA, 19 nt, Artificial Sequence
  Description of Artificial Sequence: Synthetic oligonucleotide
ccgcaguggugucugcugc

SEQ ID NO: 1374882 - RNA, 19 nt, Artificial Sequence
  Description of Artificial Sequence: Synthetic oligonucleotide
gaagcuccuguagcaggua

SEQ ID NO: 1374883 - RNA, 19 nt, Artificial Sequence
  Description of Artificial Sequence: Synthetic oligonucleotide
gguuguagagccgcuccaa

SEQ ID NO: 1374884 - RNA, 19 nt, Artificial Sequence
  Description of Artificial Sequence: Synthetic oligonucleotide
gcugcucgucgccagugga

SEQ ID NO: 1374885 - RNA, 19 nt, Artificial Sequence
  Description of Artificial Sequence: Synthetic oligonucleotide
uuccgcgaauuggguguga

SEQ ID NO: 1374886 - RNA, 19 nt, Artificial Sequence
  Description of Artificial Sequence: Synthetic oligonucleotide
cuuaggggcuuugcguucu

SEQ ID NO: 1374887 - RNA, 19 nt, Artificial Sequence
  Description of Artificial Sequence: Synthetic oligonucleotide
gcuccgaagugugacaccu

SEQ ID NO: 1374888 - RNA, 19 nt, Artificial Sequence
  Description of Artificial Sequence: Synthetic oligonucleotide
ggugcacccacuacaucaa

SEQ ID NO: 1374889 - RNA, 19 nt, Artificial Sequence
  Description of Artificial Sequence: Synthetic oligonucleotide
caacccuaguggccccuca

SEQ ID NO: 1374890 - RNA, 19 nt, Artificial Sequence
  Description of Artificial Sequence: Synthetic oligonucleotide
ccgucguuuccgcgaauug

SEQ ID NO: 1374891 - RNA, 19 nt, Artificial Sequence
  Description of Artificial Sequence: Synthetic oligonucleotide
cucccgucguuuccgcgaa

SEQ ID NO: 1374892 - RNA, 19 nt, Artificial Sequence
  Description of Artificial Sequence: Synthetic oligonucleotide
aaucggcggcugaggucga

SEQ ID NO: 1374893 - RNA, 19 nt, Artificial Sequence
  Description of Artificial Sequence: Synthetic oligonucleotide
gccgaaccuucuugggauc

SEQ ID NO: 1374894 - RNA, 19 nt, Artificial Sequence
  Description of Artificial Sequence: Synthetic oligonucleotide
gcuguuccgcagugguguc

SEQ ID NO: 1374895 - RNA, 19 nt, Artificial Sequence
  Description of Artificial Sequence: Synthetic oligonucleotide
augcgucaucgugaaggua

SEQ ID NO: 1374896 - RNA, 19 nt, Artificial Sequence
  Description of Artificial Sequence: Synthetic oligonucleotide
ccgcaacucguugaacaug

SEQ ID NO: 1374897 - RNA, 19 nt, Artificial Sequence
  Description of Artificial Sequence: Synthetic oligonucleotide
gcaacucguugaacaugug

SEQ ID NO: 1374898 - RNA, 19 nt, Artificial Sequence
  Description of Artificial Sequence: Synthetic oligonucleotide
gcaccgucuuauugaaccu

SEQ ID NO: 1374899 - RNA, 19 nt, Artificial Sequence
  Description of Artificial Sequence: Synthetic oligonucleotide
gcccguagccaucacgccu

SEQ ID NO: 1374900 - RNA, 19 nt, Artificial Sequence
  Description of Artificial Sequence: Synthetic oligonucleotide
cauagaccucccgaugcau

SEQ ID NO: 1374901 - RNA, 19 nt, Artificial Sequence
  Description of Artificial Sequence: Synthetic oligonucleotide
ggaggcagacucccgucgu

SEQ ID NO: 1374902 - RNA, 19 nt, Artificial Sequence
  Description of Artificial Sequence: Synthetic oligonucleotide
ucccgucguuuccgcgaau

SEQ ID NO: 1374903 - RNA, 19 nt, Artificial Sequence
  Description of Artificial Sequence: Synthetic oligonucleotide
aggccucuugaaggucagu

SEQ ID NO: 1374904 - RNA, 19 nt, Artificial Sequence
  Description of Artificial Sequence: Synthetic oligonucleotide
ggggugcacccacuacauc

SEQ ID NO: 1374905 - RNA, 19 nt, Artificial Sequence
  Description of Artificial Sequence: Synthetic oligonucleotide
ccgcuguuccgcaguggug

SEQ ID NO: 1374906 - RNA, 19 nt, Artificial Sequence
  Description of Artificial Sequence: Synthetic oligonucleotide
gcagaucaaaucggcggcu

SEQ ID NO: 1374907 - RNA, 19 nt, Artificial Sequence
  Description of Artificial Sequence: Synthetic oligonucleotide
gcucgucgccaguggaaaa

SEQ ID NO: 1374908 - RNA, 19 nt, Artificial Sequence
  Description of Artificial Sequence: Synthetic oligonucleotide
accucccgaugcaugccuu

SEQ ID NO: 1374909 - RNA, 19 nt, Artificial Sequence
  Description of Artificial Sequence: Synthetic oligonucleotide
ggggugcauccuucuuguc

SEQ ID NO: 1374910 - RNA, 19 nt, Artificial Sequence
  Description of Artificial Sequence: Synthetic oligonucleotide
ccaccgaguucuagaaugu

SEQ ID NO: 1374911 - RNA, 19 nt, Artificial Sequence
  Description of Artificial Sequence: Synthetic oligonucleotide
ccaucacgccugagagaug

SEQ ID NO: 1374912 - RNA, 19 nt, Artificial Sequence
  Description of Artificial Sequence: Synthetic oligonucleotide
ccgaggucaagggucagua

SEQ ID NO: 1374913 - RNA, 19 nt, Artificial Sequence
  Description of Artificial Sequence: Synthetic oligonucleotide
cgucaucgugaagguagag

SEQ ID NO: 1374914 - RNA, 19 nt, Artificial Sequence
  Description of Artificial Sequence: Synthetic oligonucleotide
gcgccgcuguuccgcagug

SEQ ID NO: 1374915 - RNA, 19 nt, Artificial Sequence
  Description of Artificial Sequence: Synthetic oligonucleotide
cuucauccgcuggcuccga

SEQ ID NO: 1374916 - RNA, 19 nt, Artificial Sequence
  Description of Artificial Sequence: Synthetic oligonucleotide
cugcccgagccagggccuc

SEQ ID NO: 1374917 - RNA, 19 nt, Artificial Sequence
  Description of Artificial Sequence: Synthetic oligonucleotide
cgcccguagccaucacgcc

SEQ ID NO: 1374918 - RNA, 19 nt, Artificial Sequence
  Description of Artificial Sequence: Synthetic oligonucleotide
cauccgcgcccguagccau

SEQ ID NO: 1374919 - RNA, 19 nt, Artificial Sequence
  Description of Artificial Sequence: Synthetic oligonucleotide
caacugcuccuuccuccgu

SEQ ID NO: 1374920 - RNA, 19 nt, Artificial Sequence
  Description of Artificial Sequence: Synthetic oligonucleotide
gggagcaccccgaggucaa

SEQ ID NO: 1374921 - RNA, 19 nt, Artificial Sequence
  Description of Artificial Sequence: Synthetic oligonucleotide
cuguuccgcaguggugucu

SEQ ID NO: 1374922 - RNA, 19 nt, Artificial Sequence
  Description of Artificial Sequence: Synthetic oligonucleotide
gcaccccgaggucaagggu

SEQ ID NO: 1374923 - RNA, 19 nt, Artificial Sequence
  Description of Artificial Sequence: Synthetic oligonucleotide
cgguuguagagccgcucca

SEQ ID NO: 1374924 - RNA, 19 nt, Artificial Sequence
  Description of Artificial Sequence: Synthetic oligonucleotide
cgcuguuccgcaguggugu

SEQ ID NO: 1374925 - RNA, 19 nt, Artificial Sequence
  Description of Artificial Sequence: Synthetic oligonucleotide
ggucacuccgcaacucguu

SEQ ID NO: 1374926 - RNA, 19 nt, Artificial Sequence
  Description of Artificial Sequence: Synthetic oligonucleotide
ggccaccgaguucuagaau

SEQ ID NO: 1374927 - RNA, 19 nt, Artificial Sequence
  Description of Artificial Sequence: Synthetic oligonucleotide
caggccugcuugagcucgu

SEQ ID NO: 1374928 - RNA, 19 nt, Artificial Sequence
  Description of Artificial Sequence: Synthetic oligonucleotide
gcguucugugcgccgcugu

SEQ ID NO: 1374929 - RNA, 19 nt, Artificial Sequence
  Description of Artificial Sequence: Synthetic oligonucleotide
gccuuaguccaugcgucau

SEQ ID NO: 1374930 - RNA, 19 nt, Artificial Sequence
  Description of Artificial Sequence: Synthetic oligonucleotide
ccggguugaugauauccuu

SEQ ID NO: 1374931 - RNA, 19 nt, Artificial Sequence
  Description of Artificial Sequence: Synthetic oligonucleotide
gcccucacguuggcaagcu

SEQ ID NO: 1374932 - RNA, 19 nt, Artificial Sequence
  Description of Artificial Sequence: Synthetic oligonucleotide
ccauaccaccaacccuagu

SEQ ID NO: 1374933 - RNA, 19 nt, Artificial Sequence
  Description of Artificial Sequence: Synthetic oligonucleotide
ccguacauccgcgcccgua

SEQ ID NO: 1374934 - RNA, 19 nt, Artificial Sequence
  Description of Artificial Sequence: Synthetic oligonucleotide
cccgucguuuccgcgaauu

SEQ ID NO: 1374935 - RNA, 19 nt, Artificial Sequence
  Description of Artificial Sequence: Synthetic oligonucleotide
cccgaggucaagggucagu

SEQ ID NO: 1374936 - RNA, 19 nt, Artificial Sequence
  Description of Artificial Sequence: Synthetic oligonucleotide
ccucuacagaacgcuucuu

SEQ ID NO: 1374937 - RNA, 19 nt, Artificial Sequence
  Description of Artificial Sequence: Synthetic oligonucleotide
ccgcgcccguagccaucac

SEQ ID NO: 1374938 - RNA, 19 nt, Artificial Sequence
  Description of Artificial Sequence: Synthetic oligonucleotide
cccucacguuggcaagcuu

SEQ ID NO: 1374939 - RNA, 19 nt, Artificial Sequence
  Description of Artificial Sequence: Synthetic oligonucleotide
cccguacauccgcgcccgu

SEQ ID NO: 1374940 - RNA, 19 nt, Artificial Sequence
  Description of Artificial Sequence: Synthetic oligonucleotide
aaauuucucacaaugaucg

SEQ ID NO: 1374941 - RNA, 19 nt, Artificial Sequence
  Description of Artificial Sequence: Synthetic oligonucleotide
uucuacaugauaaagagcu

SEQ ID NO: 1374942 - RNA, 19 nt, Artificial Sequence
  Description of Artificial Sequence: Synthetic oligonucleotide
uugaaauagcccaugagcg

SEQ ID NO: 1374943 - RNA, 19 nt, Artificial Sequence
  Description of Artificial Sequence: Synthetic oligonucleotide
uuaucauuaauucuuggag

SEQ ID NO: 1374944 - RNA, 19 nt, Artificial Sequence
  Description of Artificial Sequence: Synthetic oligonucleotide
auuauaugcugucaggggc

SEQ ID NO: 1374945 - RNA, 19 nt, Artificial Sequence
  Description of Artificial Sequence: Synthetic oligonucleotide
aaaauuauaugcugucagg

SEQ ID NO: 1374946 - RNA, 19 nt, Artificial Sequence
  Description of Artificial Sequence: Synthetic oligonucleotide
uaaaauuauaugcugucag

SEQ ID NO: 1374947 - RNA, 19 nt, Artificial Sequence
  Description of Artificial Sequence: Synthetic oligonucleotide
aauuauaugcugucagggg

SEQ ID NO: 1374948 - RNA, 19 nt, Artificial Sequence
  Description of Artificial Sequence: Synthetic oligonucleotide
aaauuauaugcugucaggg

SEQ ID NO: 1374949 - RNA, 19 nt, Artificial Sequence
  Description of Artificial Sequence: Synthetic oligonucleotide
uaucauuaauucuuggagg

SEQ ID NO: 1374950 - RNA, 19 nt, Artificial Sequence
  Description of Artificial Sequence: Synthetic oligonucleotide
uucacaaugguaaagcaca

SEQ ID NO: 1374951 - RNA, 19 nt, Artificial Sequence
  Description of Artificial Sequence: Synthetic oligonucleotide
aauauuccaguaccuuugc

SEQ ID NO: 1374952 - RNA, 19 nt, Artificial Sequence
  Description of Artificial Sequence: Synthetic oligonucleotide
uuuaucauuaauucuugga

SEQ ID NO: 1374953 - RNA, 19 nt, Artificial Sequence
  Description of Artificial Sequence: Synthetic oligonucleotide
aagaaaucggcugagaccu

SEQ ID NO: 1374954 - RNA, 19 nt, Artificial Sequence
  Description of Artificial Sequence: Synthetic oligonucleotide
agaagaaaucggcugagac

SEQ ID NO: 1374955 - RNA, 19 nt, Artificial Sequence
  Description of Artificial Sequence: Synthetic oligonucleotide
uucagauccucguacaagg

SEQ ID NO: 1374956 - RNA, 19 nt, Artificial Sequence
  Description of Artificial Sequence: Synthetic oligonucleotide
auagccguaacuucguuuc

SEQ ID NO: 1374957 - RNA, 19 nt, Artificial Sequence
  Description of Artificial Sequence: Synthetic oligonucleotide
ugguauagccguaacuucg

SEQ ID NO: 1374958 - RNA, 19 nt, Artificial Sequence
  Description of Artificial Sequence: Synthetic oligonucleotide
auaucugagacgucgggcg

SEQ ID NO: 1374959 - RNA, 19 nt, Artificial Sequence
  Description of Artificial Sequence: Synthetic oligonucleotide
uaguuuaucauuaauucuu

SEQ ID NO: 1374960 - RNA, 19 nt, Artificial Sequence
  Description of Artificial Sequence: Synthetic oligonucleotide
uacgaugugaccacuucgg

SEQ ID NO: 1374961 - RNA, 19 nt, Artificial Sequence
  Description of Artificial Sequence: Synthetic oligonucleotide
gaagaaaucggcugagacc

SEQ ID NO: 1374962 - RNA, 19 nt, Artificial Sequence
  Description of Artificial Sequence: Synthetic oligonucleotide
agaaagauauccugaaaca

SEQ ID NO: 1374963 - RNA, 19 nt, Artificial Sequence
  Description of Artificial Sequence: Synthetic oligonucleotide
aaugguauagccguaacuu

SEQ ID NO: 1374964 - RNA, 19 nt, Artificial Sequence
  Description of Artificial Sequence: Synthetic oligonucleotide
acugcuuacuggcacuugc

SEQ ID NO: 1374965 - RNA, 19 nt, Artificial Sequence
  Description of Artificial Sequence: Synthetic oligonucleotide
ugacucauuucuuuccacg

SEQ ID NO: 1374966 - RNA, 19 nt, Artificial Sequence
  Description of Artificial Sequence: Synthetic oligonucleotide
aaacacaucacaccacgga

SEQ ID NO: 1374967 - RNA, 19 nt, Artificial Sequence
  Description of Artificial Sequence: Synthetic oligonucleotide
uccuuaaaauuauaugcug

SEQ ID NO: 1374968 - RNA, 19 nt, Artificial Sequence
  Description of Artificial Sequence: Synthetic oligonucleotide
uugcggaucugcuuggucg

SEQ ID NO: 1374969 - RNA, 19 nt, Artificial Sequence
  Description of Artificial Sequence: Synthetic oligonucleotide
gacaccuuuaauugccagg

SEQ ID NO: 1374970 - RNA, 19 nt, Artificial Sequence
  Description of Artificial Sequence: Synthetic oligonucleotide
ugcuccuuaaaauuauaug

SEQ ID NO: 1374971 - RNA, 19 nt, Artificial Sequence
  Description of Artificial Sequence: Synthetic oligonucleotide
ugauguucacuuuggguag

SEQ ID NO: 1374972 - RNA, 19 nt, Artificial Sequence
  Description of Artificial Sequence: Synthetic oligonucleotide
ucauuuaaauauuccagua

SEQ ID NO: 1374973 - RNA, 19 nt, Artificial Sequence
  Description of Artificial Sequence: Synthetic oligonucleotide
uagguuacauucuuugcug

SEQ ID NO: 1374974 - RNA, 19 nt, Artificial Sequence
  Description of Artificial Sequence: Synthetic oligonucleotide
auauccugaaacagggugc

SEQ ID NO: 1374975 - RNA, 19 nt, Artificial Sequence
  Description of Artificial Sequence: Synthetic oligonucleotide
acaaugaucgaagaaccuc

SEQ ID NO: 1374976 - RNA, 19 nt, Artificial Sequence
  Description of Artificial Sequence: Synthetic oligonucleotide
uugugagugagccaagggu

SEQ ID NO: 1374977 - RNA, 19 nt, Artificial Sequence
  Description of Artificial Sequence: Synthetic oligonucleotide
gaaauagcccaugagcgag

SEQ ID NO: 1374978 - RNA, 19 nt, Artificial Sequence
  Description of Artificial Sequence: Synthetic oligonucleotide
uagcccaugagcgagagca

SEQ ID NO: 1374979 - RNA, 19 nt, Artificial Sequence
  Description of Artificial Sequence: Synthetic oligonucleotide
ugagccaaggguaacacuu

SEQ ID NO: 1374980 - RNA, 19 nt, Artificial Sequence
  Description of Artificial Sequence: Synthetic oligonucleotide
auaagguacgaugugacca

SEQ ID NO: 1374981 - RNA, 19 nt, Artificial Sequence
  Description of Artificial Sequence: Synthetic oligonucleotide
aaggcaacgguuucuugug

SEQ ID NO: 1374982 - RNA, 19 nt, Artificial Sequence
  Description of Artificial Sequence: Synthetic oligonucleotide
cuuugcguuuucacaaugg

SEQ ID NO: 1374983 - RNA, 19 nt, Artificial Sequence
  Description of Artificial Sequence: Synthetic oligonucleotide
uuggucgucggguagcggg

SEQ ID NO: 1374984 - RNA, 19 nt, Artificial Sequence
  Description of Artificial Sequence: Synthetic oligonucleotide
aauaucagguucgaggcau

SEQ ID NO: 1374985 - RNA, 19 nt, Artificial Sequence
  Description of Artificial Sequence: Synthetic oligonucleotide
uuucuugugagugagccaa

SEQ ID NO: 1374986 - RNA, 19 nt, Artificial Sequence
  Description of Artificial Sequence: Synthetic oligonucleotide
auaaagagcugacucauuu

SEQ ID NO: 1374987 - RNA, 19 nt, Artificial Sequence
  Description of Artificial Sequence: Synthetic oligonucleotide
uaaugguauagccguaacu

SEQ ID NO: 1374988 - RNA, 19 nt, Artificial Sequence
  Description of Artificial Sequence: Synthetic oligonucleotide
augguauagccguaacuuc

SEQ ID NO: 1374989 - RNA, 19 nt, Artificial Sequence
  Description of Artificial Sequence: Synthetic oligonucleotide
uacaugauaaagagcugac

SEQ ID NO: 1374990 - RNA, 19 nt, Artificial Sequence
  Description of Artificial Sequence: Synthetic oligonucleotide
agaucaggcuuccucacag

SEQ ID NO: 1374991 - RNA, 19 nt, Artificial Sequence
  Description of Artificial Sequence: Synthetic oligonucleotide
ugaaauagcccaugagcga

SEQ ID NO: 1374992 - RNA, 19 nt, Artificial Sequence
  Description of Artificial Sequence: Synthetic oligonucleotide
uccauaucugagacgucgg

SEQ ID NO: 1374993 - RNA, 19 nt, Artificial Sequence
  Description of Artificial Sequence: Synthetic oligonucleotide
aaauaucagguucgaggca

SEQ ID NO: 1374994 - RNA, 19 nt, Artificial Sequence
  Description of Artificial Sequence: Synthetic oligonucleotide
ucauuaguuuaucauuaau

SEQ ID NO: 1374995 - RNA, 19 nt, Artificial Sequence
  Description of Artificial Sequence: Synthetic oligonucleotide
agggcgaccagcugcaccg

SEQ ID NO: 1374996 - RNA, 19 nt, Artificial Sequence
  Description of Artificial Sequence: Synthetic oligonucleotide
gugauguucacuuugggua

SEQ ID NO: 1374997 - RNA, 19 nt, Artificial Sequence
  Description of Artificial Sequence: Synthetic oligonucleotide
ucuucgugccgaaguaggg

SEQ ID NO: 1374998 - RNA, 19 nt, Artificial Sequence
  Description of Artificial Sequence: Synthetic oligonucleotide
acucauuucuuuccacguc

SEQ ID NO: 1374999 - RNA, 19 nt, Artificial Sequence
  Description of Artificial Sequence: Synthetic oligonucleotide
ucuacaugauaaagagcug

SEQ ID NO: 1375000 - RNA, 19 nt, Artificial Sequence
  Description of Artificial Sequence: Synthetic oligonucleotide
gaaguaggggcugagcacc

SEQ ID NO: 1375001 - RNA, 19 nt, Artificial Sequence
  Description of Artificial Sequence: Synthetic oligonucleotide
agagcagucguacccgggg

SEQ ID NO: 1375002 - RNA, 19 nt, Artificial Sequence
  Description of Artificial Sequence: Synthetic oligonucleotide
guacgaugugaccacuucg

SEQ ID NO: 1375003 - RNA, 19 nt, Artificial Sequence
  Description of Artificial Sequence: Synthetic oligonucleotide
uccaauacuguuucagauc

SEQ ID NO: 1375004 - RNA, 19 nt, Artificial Sequence
  Description of Artificial Sequence: Synthetic oligonucleotide
ucaucggaugugauguuca

SEQ ID NO: 1375005 - RNA, 19 nt, Artificial Sequence
  Description of Artificial Sequence: Synthetic oligonucleotide
ucggcuguuaaugguauag

SEQ ID NO: 1375006 - RNA, 19 nt, Artificial Sequence
  Description of Artificial Sequence: Synthetic oligonucleotide
uuaaugguauagccguaac

SEQ ID NO: 1375007 - RNA, 19 nt, Artificial Sequence
  Description of Artificial Sequence: Synthetic oligonucleotide
uaucugagacgucgggcgg

SEQ ID NO: 1375008 - RNA, 19 nt, Artificial Sequence
  Description of Artificial Sequence: Synthetic oligonucleotide
cauaagguacgaugugacc

SEQ ID NO: 1375009 - RNA, 19 nt, Artificial Sequence
  Description of Artificial Sequence: Synthetic oligonucleotide
uaagguacgaugugaccac

SEQ ID NO: 1375010 - RNA, 19 nt, Artificial Sequence
  Description of Artificial Sequence: Synthetic oligonucleotide
uucgugccgaaguaggggc

SEQ ID NO: 1375011 - RNA, 19 nt, Artificial Sequence
  Description of Artificial Sequence: Synthetic oligonucleotide
gucaucguaccacagcggc

SEQ ID NO: 1375012 - RNA, 19 nt, Artificial Sequence
  Description of Artificial Sequence: Synthetic oligonucleotide
aacgguuucuugugaguga

SEQ ID NO: 1375013 - RNA, 19 nt, Artificial Sequence
  Description of Artificial Sequence: Synthetic oligonucleotide
ugauaaagagcugacucau

SEQ ID NO: 1375014 - RNA, 19 nt, Artificial Sequence
  Description of Artificial Sequence: Synthetic oligonucleotide
caaugaucgaagaaccuca

SEQ ID NO: 1375015 - RNA, 19 nt, Artificial Sequence
  Description of Artificial Sequence: Synthetic oligonucleotide
cauuaauucuuggaggguc

SEQ ID NO: 1375016 - RNA, 19 nt, Artificial Sequence
  Description of Artificial Sequence: Synthetic oligonucleotide
ucuugugagugagccaagg

SEQ ID NO: 1375017 - RNA, 19 nt, Artificial Sequence
  Description of Artificial Sequence: Synthetic oligonucleotide
caaacacaucacaccacgg

SEQ ID NO: 1375018 - RNA, 19 nt, Artificial Sequence
  Description of Artificial Sequence: Synthetic oligonucleotide
ucuugaggggucuuugcgu

SEQ ID NO: 1375019 - RNA, 19 nt, Artificial Sequence
  Description of Artificial Sequence: Synthetic oligonucleotide
uugcuccuuaaaauuauau

SEQ ID NO: 1375020 - RNA, 19 nt, Artificial Sequence
  Description of Artificial Sequence: Synthetic oligonucleotide
ucuucguagcgagucuucg

SEQ ID NO: 1375021 - RNA, 19 nt, Artificial Sequence
  Description of Artificial Sequence: Synthetic oligonucleotide
gcuguuaaugguauagccg

SEQ ID NO: 1375022 - RNA, 19 nt, Artificial Sequence
  Description of Artificial Sequence: Synthetic oligonucleotide
aaagccaccugaacuaagu

SEQ ID NO: 1375023 - RNA, 19 nt, Artificial Sequence
  Description of Artificial Sequence: Synthetic oligonucleotide
cacuucggaacuuucgaug

SEQ ID NO: 1375024 - RNA, 19 nt, Artificial Sequence
  Description of Artificial Sequence: Synthetic oligonucleotide
aguuuaucauuaauucuug

SEQ ID NO: 1375025 - RNA, 19 nt, Artificial Sequence
  Description of Artificial Sequence: Synthetic oligonucleotide
aauagcccaugagcgagag

SEQ ID NO: 1375026 - RNA, 19 nt, Artificial Sequence
  Description of Artificial Sequence: Synthetic oligonucleotide
agugagccaaggguaacac

SEQ ID NO: 1375027 - RNA, 19 nt, Artificial Sequence
  Description of Artificial Sequence: Synthetic oligonucleotide
uuccaguaccuuugcauca

SEQ ID NO: 1375028 - RNA, 19 nt, Artificial Sequence
  Description of Artificial Sequence: Synthetic oligonucleotide
accacuucggaacuuucga

SEQ ID NO: 1375029 - RNA, 19 nt, Artificial Sequence
  Description of Artificial Sequence: Synthetic oligonucleotide
ggcuguuaaugguauagcc

SEQ ID NO: 1375030 - RNA, 19 nt, Artificial Sequence
  Description of Artificial Sequence: Synthetic oligonucleotide
agaaccucauuaguuuauc

SEQ ID NO: 1375031 - RNA, 19 nt, Artificial Sequence
  Description of Artificial Sequence: Synthetic oligonucleotide
guagguuacauucuuugcu

SEQ ID NO: 1375032 - RNA, 19 nt, Artificial Sequence
  Description of Artificial Sequence: Synthetic oligonucleotide
acuuucgaugggcuugcuc

SEQ ID NO: 1375033 - RNA, 19 nt, Artificial Sequence
  Description of Artificial Sequence: Synthetic oligonucleotide
ucaucguaccacagcggcc

SEQ ID NO: 1375034 - RNA, 19 nt, Artificial Sequence
  Description of Artificial Sequence: Synthetic oligonucleotide
ugcauuucagguccaguuu

SEQ ID NO: 1375035 - RNA, 19 nt, Artificial Sequence
  Description of Artificial Sequence: Synthetic oligonucleotide
uaauguagaucaggcuucc

SEQ ID NO: 1375036 - RNA, 19 nt, Artificial Sequence
  Description of Artificial Sequence: Synthetic oligonucleotide
gaagccaccgggucgccgc

SEQ ID NO: 1375037 - RNA, 19 nt, Artificial Sequence
  Description of Artificial Sequence: Synthetic oligonucleotide
uauagccguaacuucguuu

SEQ ID NO: 1375038 - RNA, 19 nt, Artificial Sequence
  Description of Artificial Sequence: Synthetic oligonucleotide
agagcugacucauuucuuu

SEQ ID NO: 1375039 - RNA, 19 nt, Artificial Sequence
  Description of Artificial Sequence: Synthetic oligonucleotide
gaagaaccucauuaguuua

SEQ ID NO: 1375040 - RNA, 19 nt, Artificial Sequence
  Description of Artificial Sequence: Synthetic oligonucleotide
gaccacuucggaacuuucg

SEQ ID NO: 1375041 - RNA, 19 nt, Artificial Sequence
  Description of Artificial Sequence: Synthetic oligonucleotide
ugagcaccgaagccaccgg

SEQ ID NO: 1375042 - RNA, 19 nt, Artificial Sequence
  Description of Artificial Sequence: Synthetic oligonucleotide
aacuaagucugcauuuaaa

SEQ ID NO: 1375043 - RNA, 19 nt, Artificial Sequence
  Description of Artificial Sequence: Synthetic oligonucleotide
gguagguuacauucuuugc

SEQ ID NO: 1375044 - RNA, 19 nt, Artificial Sequence
  Description of Artificial Sequence: Synthetic oligonucleotide
gauguucacuuuggguagg

SEQ ID NO: 1375045 - RNA, 19 nt, Artificial Sequence
  Description of Artificial Sequence: Synthetic oligonucleotide
aacuggaggaugacuggag

SEQ ID NO: 1375046 - RNA, 19 nt, Artificial Sequence
  Description of Artificial Sequence: Synthetic oligonucleotide
accgggucgaccagcagcc

SEQ ID NO: 1375047 - RNA, 19 nt, Artificial Sequence
  Description of Artificial Sequence: Synthetic oligonucleotide
ggguagguuacauucuuug

SEQ ID NO: 1375048 - RNA, 19 nt, Artificial Sequence
  Description of Artificial Sequence: Synthetic oligonucleotide
ucuuugcugguuugacagc

SEQ ID NO: 1375049 - RNA, 19 nt, Artificial Sequence
  Description of Artificial Sequence: Synthetic oligonucleotide
uggaacuccuaauguagau

SEQ ID NO: 1375050 - RNA, 19 nt, Artificial Sequence
  Description of Artificial Sequence: Synthetic oligonucleotide
cuucgugccgaaguagggg

SEQ ID NO: 1375051 - RNA, 19 nt, Artificial Sequence
  Description of Artificial Sequence: Synthetic oligonucleotide
guucgaggcauaagguacg

SEQ ID NO: 1375052 - RNA, 19 nt, Artificial Sequence
  Description of Artificial Sequence: Synthetic oligonucleotide
gucuucgugccgaaguagg

SEQ ID NO: 1375053 - RNA, 19 nt, Artificial Sequence
  Description of Artificial Sequence: Synthetic oligonucleotide
uggaucggcuguuaauggu

SEQ ID NO: 1375054 - RNA, 19 nt, Artificial Sequence
  Description of Artificial Sequence: Synthetic oligonucleotide
cuccuuaaaauuauaugcu

SEQ ID NO: 1375055 - RNA, 19 nt, Artificial Sequence
  Description of Artificial Sequence: Synthetic oligonucleotide
ugucgcauguccugccgcc

SEQ ID NO: 1375056 - RNA, 19 nt, Artificial Sequence
  Description of Artificial Sequence: Synthetic oligonucleotide
ugcaaaguagcugcaacuu

SEQ ID NO: 1375057 - RNA, 19 nt, Artificial Sequence
  Description of Artificial Sequence: Synthetic oligonucleotide
gguaaagcacaaauaucag

SEQ ID NO: 1375058 - RNA, 19 nt, Artificial Sequence
  Description of Artificial Sequence: Synthetic oligonucleotide
ucggaacuuucgaugggcu

SEQ ID NO: 1375059 - RNA, 19 nt, Artificial Sequence
  Description of Artificial Sequence: Synthetic oligonucleotide
aguaccuuugcaucaucua

SEQ ID NO: 1375060 - RNA, 19 nt, Artificial Sequence
  Description of Artificial Sequence: Synthetic oligonucleotide
ucguagcgagucuucgugc

SEQ ID NO: 1375061 - RNA, 19 nt, Artificial Sequence
  Description of Artificial Sequence: Synthetic oligonucleotide
uggacaccuuuaauugcca

SEQ ID NO: 1375062 - RNA, 19 nt, Artificial Sequence
  Description of Artificial Sequence: Synthetic oligonucleotide
acgguuucuugugagugag

SEQ ID NO: 1375063 - RNA, 19 nt, Artificial Sequence
  Description of Artificial Sequence: Synthetic oligonucleotide
caacgguuucuugugagug

SEQ ID NO: 1375064 - RNA, 19 nt, Artificial Sequence
  Description of Artificial Sequence: Synthetic oligonucleotide
uguuaaugguauagccgua

SEQ ID NO: 1375065 - RNA, 19 nt, Artificial Sequence
  Description of Artificial Sequence: Synthetic oligonucleotide
ggaacuuucgaugggcuug

SEQ ID NO: 1375066 - RNA, 19 nt, Artificial Sequence
  Description of Artificial Sequence: Synthetic oligonucleotide
cuucggaacuuucgauggg

SEQ ID NO: 1375067 - RNA, 19 nt, Artificial Sequence
  Description of Artificial Sequence: Synthetic oligonucleotide
gaacgacgagagcagcgcc

SEQ ID NO: 1375068 - RNA, 19 nt, Artificial Sequence
  Description of Artificial Sequence: Synthetic oligonucleotide
ggugccgugacggaugagg

SEQ ID NO: 1375069 - RNA, 19 nt, Artificial Sequence
  Description of Artificial Sequence: Synthetic oligonucleotide
ccaauacuguuucagauca

SEQ ID NO: 1375070 - RNA, 19 nt, Artificial Sequence
  Description of Artificial Sequence: Synthetic oligonucleotide
agagcagcgcgcgaacgac

SEQ ID NO: 1375071 - RNA, 19 nt, Artificial Sequence
  Description of Artificial Sequence: Synthetic oligonucleotide
gaacuuucgaugggcuugc

SEQ ID NO: 1375072 - RNA, 19 nt, Artificial Sequence
  Description of Artificial Sequence: Synthetic oligonucleotide
guagcgagucuucgugccg

SEQ ID NO: 1375073 - RNA, 19 nt, Artificial Sequence
  Description of Artificial Sequence: Synthetic oligonucleotide
aagaaccucauuaguuuau

SEQ ID NO: 1375074 - RNA, 19 nt, Artificial Sequence
  Description of Artificial Sequence: Synthetic oligonucleotide
uuaauucuuggagggucac

SEQ ID NO: 1375075 - RNA, 19 nt, Artificial Sequence
  Description of Artificial Sequence: Synthetic oligonucleotide
aggcauaagguacgaugug

SEQ ID NO: 1375076 - RNA, 19 nt, Artificial Sequence
  Description of Artificial Sequence: Synthetic oligonucleotide
uucuugugagugagccaag

SEQ ID NO: 1375077 - RNA, 19 nt, Artificial Sequence
  Description of Artificial Sequence: Synthetic oligonucleotide
caaugguaaagcacaaaua

SEQ ID NO: 1375078 - RNA, 19 nt, Artificial Sequence
  Description of Artificial Sequence: Synthetic oligonucleotide
caugagcgagagcagcggc

SEQ ID NO: 1375079 - RNA, 19 nt, Artificial Sequence
  Description of Artificial Sequence: Synthetic oligonucleotide
aauugccaggucaaaugaa

SEQ ID NO: 1375080 - RNA, 19 nt, Artificial Sequence
  Description of Artificial Sequence: Synthetic oligonucleotide
guagaaagauauccugaaa

SEQ ID NO: 1375081 - RNA, 19 nt, Artificial Sequence
  Description of Artificial Sequence: Synthetic oligonucleotide
uccauccagucaucguacc

SEQ ID NO: 1375082 - RNA, 19 nt, Artificial Sequence
  Description of Artificial Sequence: Synthetic oligonucleotide
aaugaucgaagaaccucau

SEQ ID NO: 1375083 - RNA, 19 nt, Artificial Sequence
  Description of Artificial Sequence: Synthetic oligonucleotide
auccagucaucguaccaca

SEQ ID NO: 1375084 - RNA, 19 nt, Artificial Sequence
  Description of Artificial Sequence: Synthetic oligonucleotide
gaauucuucuugagggguc

SEQ ID NO: 1375085 - RNA, 19 nt, Artificial Sequence
  Description of Artificial Sequence: Synthetic oligonucleotide
ugcggaucugcuuggucgu

SEQ ID NO: 1375086 - RNA, 19 nt, Artificial Sequence
  Description of Artificial Sequence: Synthetic oligonucleotide
agauccucguacaaggcaa

SEQ ID NO: 1375087 - RNA, 19 nt, Artificial Sequence
  Description of Artificial Sequence: Synthetic oligonucleotide
acuucguuuccaauacugu

SEQ ID NO: 1375088 - RNA, 19 nt, Artificial Sequence
  Description of Artificial Sequence: Synthetic oligonucleotide
agucuucgugccgaaguag

SEQ ID NO: 1375089 - RNA, 19 nt, Artificial Sequence
  Description of Artificial Sequence: Synthetic oligonucleotide
uagccguaacuucguuucc

SEQ ID NO: 1375090 - RNA, 19 nt, Artificial Sequence
  Description of Artificial Sequence: Synthetic oligonucleotide
gaucugcuuggucgucggg

SEQ ID NO: 1375091 - RNA, 19 nt, Artificial Sequence
  Description of Artificial Sequence: Synthetic oligonucleotide
guuaaugguauagccguaa

SEQ ID NO: 1375092 - RNA, 19 nt, Artificial Sequence
  Description of Artificial Sequence: Synthetic oligonucleotide
gccgugacggaugagggcg

SEQ ID NO: 1375093 - RNA, 19 nt, Artificial Sequence
  Description of Artificial Sequence: Synthetic oligonucleotide
acggagaauggacaccuuu

SEQ ID NO: 1375094 - RNA, 19 nt, Artificial Sequence
  Description of Artificial Sequence: Synthetic oligonucleotide
ucugcauuucagguccagu

SEQ ID NO: 1375095 - RNA, 19 nt, Artificial Sequence
  Description of Artificial Sequence: Synthetic oligonucleotide
ccagggguugacaucuucg

SEQ ID NO: 1375096 - RNA, 19 nt, Artificial Sequence
  Description of Artificial Sequence: Synthetic oligonucleotide
agucaucguaccacagcgg

SEQ ID NO: 1375097 - RNA, 19 nt, Artificial Sequence
  Description of Artificial Sequence: Synthetic oligonucleotide
agagagcagcgcgcgaacg

SEQ ID NO: 1375098 - RNA, 19 nt, Artificial Sequence
  Description of Artificial Sequence: Synthetic oligonucleotide
acgaugugaccacuucgga

SEQ ID NO: 1375099 - RNA, 19 nt, Artificial Sequence
  Description of Artificial Sequence: Synthetic oligonucleotide
caccgaagccaccgggucg

SEQ ID NO: 1375100 - RNA, 19 nt, Artificial Sequence
  Description of Artificial Sequence: Synthetic oligonucleotide
ucgcauguccugccgcccc

SEQ ID NO: 1375101 - RNA, 19 nt, Artificial Sequence
  Description of Artificial Sequence: Synthetic oligonucleotide
aaauagcccaugagcgaga

SEQ ID NO: 1375102 - RNA, 19 nt, Artificial Sequence
  Description of Artificial Sequence: Synthetic oligonucleotide
caucggaugugauguucac

SEQ ID NO: 1375103 - RNA, 19 nt, Artificial Sequence
  Description of Artificial Sequence: Synthetic oligonucleotide
caucguaccacagcggcca

SEQ ID NO: 1375104 - RNA, 19 nt, Artificial Sequence
  Description of Artificial Sequence: Synthetic oligonucleotide
cgaggcauaagguacgaug

SEQ ID NO: 1375105 - RNA, 19 nt, Artificial Sequence
  Description of Artificial Sequence: Synthetic oligonucleotide
caaggcaacgguuucuugu

SEQ ID NO: 1375106 - RNA, 19 nt, Artificial Sequence
  Description of Artificial Sequence: Synthetic oligonucleotide
aagccaccgggucgccgcg

SEQ ID NO: 1375107 - RNA, 19 nt, Artificial Sequence
  Description of Artificial Sequence: Synthetic oligonucleotide
auccucguacaaggcaacg

SEQ ID NO: 1375108 - RNA, 19 nt, Artificial Sequence
  Description of Artificial Sequence: Synthetic oligonucleotide
gagagcagcgcgcgaacga

SEQ ID NO: 1375109 - RNA, 19 nt, Artificial Sequence
  Description of Artificial Sequence: Synthetic oligonucleotide
uucugcauuucagguccag

SEQ ID NO: 1375110 - RNA, 19 nt, Artificial Sequence
  Description of Artificial Sequence: Synthetic oligonucleotide
ugccgugacggaugagggc

SEQ ID NO: 1375111 - RNA, 19 nt, Artificial Sequence
  Description of Artificial Sequence: Synthetic oligonucleotide
gagagcagucguacccggg

SEQ ID NO: 1375112 - RNA, 19 nt, Artificial Sequence
  Description of Artificial Sequence: Synthetic oligonucleotide
aacugcuuacuggcacuug

SEQ ID NO: 1375113 - RNA, 19 nt, Artificial Sequence
  Description of Artificial Sequence: Synthetic oligonucleotide
aggagggucucugcaugac

SEQ ID NO: 1375114 - RNA, 19 nt, Artificial Sequence
  Description of Artificial Sequence: Synthetic oligonucleotide
uggguagguuacauucuuu

SEQ ID NO: 1375115 - RNA, 19 nt, Artificial Sequence
  Description of Artificial Sequence: Synthetic oligonucleotide
cuuggagggucacacucca

SEQ ID NO: 1375116 - RNA, 19 nt, Artificial Sequence
  Description of Artificial Sequence: Synthetic oligonucleotide
ggaucugcuuggucgucgg

SEQ ID NO: 1375117 - RNA, 19 nt, Artificial Sequence
  Description of Artificial Sequence: Synthetic oligonucleotide
cucaucggaugugauguuc

SEQ ID NO: 1375118 - RNA, 19 nt, Artificial Sequence
  Description of Artificial Sequence: Synthetic oligonucleotide
aagguacgaugugaccacu

SEQ ID NO: 1375119 - RNA, 19 nt, Artificial Sequence
  Description of Artificial Sequence: Synthetic oligonucleotide
aucuucguagcgagucuuc

SEQ ID NO: 1375120 - RNA, 19 nt, Artificial Sequence
  Description of Artificial Sequence: Synthetic oligonucleotide
gguacgaugugaccacuuc

SEQ ID NO: 1375121 - RNA, 19 nt, Artificial Sequence
  Description of Artificial Sequence: Synthetic oligonucleotide
uucgaggcauaagguacga

SEQ ID NO: 1375122 - RNA, 19 nt, Artificial Sequence
  Description of Artificial Sequence: Synthetic oligonucleotide
gagagagcagcgcgcgaac

SEQ ID NO: 1375123 - RNA, 19 nt, Artificial Sequence
  Description of Artificial Sequence: Synthetic oligonucleotide
gcaugaccaaacuggagga

SEQ ID NO: 1375124 - RNA, 19 nt, Artificial Sequence
  Description of Artificial Sequence: Synthetic oligonucleotide
uggucgucggguagcgggu

SEQ ID NO: 1375125 - RNA, 19 nt, Artificial Sequence
  Description of Artificial Sequence: Synthetic oligonucleotide
agcgagagcagcggcagga

SEQ ID NO: 1375126 - RNA, 19 nt, Artificial Sequence
  Description of Artificial Sequence: Synthetic oligonucleotide
ggagagcagucguacccgg

SEQ ID NO: 1375127 - RNA, 19 nt, Artificial Sequence
  Description of Artificial Sequence: Synthetic oligonucleotide
ucacuuuggguagguuaca

SEQ ID NO: 1375128 - RNA, 19 nt, Artificial Sequence
  Description of Artificial Sequence: Synthetic oligonucleotide
cugucgcauguccugccgc

SEQ ID NO: 1375129 - RNA, 19 nt, Artificial Sequence
  Description of Artificial Sequence: Synthetic oligonucleotide
gauccucguacaaggcaac

SEQ ID NO: 1375130 - RNA, 19 nt, Artificial Sequence
  Description of Artificial Sequence: Synthetic oligonucleotide
gcauaagguacgaugugac

SEQ ID NO: 1375131 - RNA, 19 nt, Artificial Sequence
  Description of Artificial Sequence: Synthetic oligonucleotide
cuggaggaugacuggagaa

SEQ ID NO: 1375132 - RNA, 19 nt, Artificial Sequence
  Description of Artificial Sequence: Synthetic oligonucleotide
ucgugccgaaguaggggcu

SEQ ID NO: 1375133 - RNA, 19 nt, Artificial Sequence
  Description of Artificial Sequence: Synthetic oligonucleotide
gagugagccaaggguaaca

SEQ ID NO: 1375134 - RNA, 19 nt, Artificial Sequence
  Description of Artificial Sequence: Synthetic oligonucleotide
ucugagacgucgggcggug

SEQ ID NO: 1375135 - RNA, 19 nt, Artificial Sequence
  Description of Artificial Sequence: Synthetic oligonucleotide
uccaguaccuuugcaucau

SEQ ID NO: 1375136 - RNA, 19 nt, Artificial Sequence
  Description of Artificial Sequence: Synthetic oligonucleotide
ggcauaagguacgauguga

SEQ ID NO: 1375137 - RNA, 19 nt, Artificial Sequence
  Description of Artificial Sequence: Synthetic oligonucleotide
augaucgaagaaccucauu

SEQ ID NO: 1375138 - RNA, 19 nt, Artificial Sequence
  Description of Artificial Sequence: Synthetic oligonucleotide
ccauaucugagacgucggg

SEQ ID NO: 1375139 - RNA, 19 nt, Artificial Sequence
  Description of Artificial Sequence: Synthetic oligonucleotide
ucggguagcgggugccgug

SEQ ID NO: 1375140 - RNA, 19 nt, Artificial Sequence
  Description of Artificial Sequence: Synthetic oligonucleotide
ccuuaaaauuauaugcugu

SEQ ID NO: 1375141 - RNA, 19 nt, Artificial Sequence
  Description of Artificial Sequence: Synthetic oligonucleotide
ggaacuccuaauguagauc

SEQ ID NO: 1375142 - RNA, 19 nt, Artificial Sequence
  Description of Artificial Sequence: Synthetic oligonucleotide
gagcagcgcgcgaacgacg

SEQ ID NO: 1375143 - RNA, 19 nt, Artificial Sequence
  Description of Artificial Sequence: Synthetic oligonucleotide
ccucauuaguuuaucauua

SEQ ID NO: 1375144 - RNA, 19 nt, Artificial Sequence
  Description of Artificial Sequence: Synthetic oligonucleotide
agccguaacuucguuucca

SEQ ID NO: 1375145 - RNA, 19 nt, Artificial Sequence
  Description of Artificial Sequence: Synthetic oligonucleotide
gacggaugagggcgaccag

SEQ ID NO: 1375146 - RNA, 19 nt, Artificial Sequence
  Description of Artificial Sequence: Synthetic oligonucleotide
guccauccagucaucguac

SEQ ID NO: 1375147 - RNA, 19 nt, Artificial Sequence
  Description of Artificial Sequence: Synthetic oligonucleotide
gcggccguaguucucccgg

SEQ ID NO: 1375148 - RNA, 19 nt, Artificial Sequence
  Description of Artificial Sequence: Synthetic oligonucleotide
gagcgagagcagcggcagg

SEQ ID NO: 1375149 - RNA, 19 nt, Artificial Sequence
  Description of Artificial Sequence: Synthetic oligonucleotide
agccaaggguaacacuuuu

SEQ ID NO: 1375150 - RNA, 19 nt, Artificial Sequence
  Description of Artificial Sequence: Synthetic oligonucleotide
ccggagagcagucguaccc

SEQ ID NO: 1375151 - RNA, 19 nt, Artificial Sequence
  Description of Artificial Sequence: Synthetic oligonucleotide
agauauccugaaacagggu

SEQ ID NO: 1375152 - RNA, 19 nt, Artificial Sequence
  Description of Artificial Sequence: Synthetic oligonucleotide
ggagggucucugcaugacc

SEQ ID NO: 1375153 - RNA, 19 nt, Artificial Sequence
  Description of Artificial Sequence: Synthetic oligonucleotide
ucgaugggcuugcuccuua

SEQ ID NO: 1375154 - RNA, 19 nt, Artificial Sequence
  Description of Artificial Sequence: Synthetic oligonucleotide
caggcggccguaguucucc

SEQ ID NO: 1375155 - RNA, 19 nt, Artificial Sequence
  Description of Artificial Sequence: Synthetic oligonucleotide
gcugucgcauguccugccg

SEQ ID NO: 1375156 - RNA, 19 nt, Artificial Sequence
  Description of Artificial Sequence: Synthetic oligonucleotide
ggggucuuugcguuuucac

SEQ ID NO: 1375157 - RNA, 19 nt, Artificial Sequence
  Description of Artificial Sequence: Synthetic oligonucleotide
ggcaguguugccacagccc

SEQ ID NO: 1375158 - RNA, 19 nt, Artificial Sequence
  Description of Artificial Sequence: Synthetic oligonucleotide
agcugcaacuuuguuuaaa

SEQ ID NO: 1375159 - RNA, 19 nt, Artificial Sequence
  Description of Artificial Sequence: Synthetic oligonucleotide
aggcggccguaguucuccc

SEQ ID NO: 1375160 - RNA, 19 nt, Artificial Sequence
  Description of Artificial Sequence: Synthetic oligonucleotide
cuuugcugguuugacagcu

SEQ ID NO: 1375161 - RNA, 19 nt, Artificial Sequence
  Description of Artificial Sequence: Synthetic oligonucleotide
augagcgagagcagcggca

SEQ ID NO: 1375162 - RNA, 19 nt, Artificial Sequence
  Description of Artificial Sequence: Synthetic oligonucleotide
uucuucuugaggggucuuu

SEQ ID NO: 1375163 - RNA, 19 nt, Artificial Sequence
  Description of Artificial Sequence: Synthetic oligonucleotide
gcuuacuggcacuugcaaa

SEQ ID NO: 1375164 - RNA, 19 nt, Artificial Sequence
  Description of Artificial Sequence: Synthetic oligonucleotide
gcgaacgacgagagcagcg

SEQ ID NO: 1375165 - RNA, 19 nt, Artificial Sequence
  Description of Artificial Sequence: Synthetic oligonucleotide
cguagcgagucuucgugcc

SEQ ID NO: 1375166 - RNA, 19 nt, Artificial Sequence
  Description of Artificial Sequence: Synthetic oligonucleotide
caccuuuaauugccagguc

SEQ ID NO: 1375167 - RNA, 19 nt, Artificial Sequence
  Description of Artificial Sequence: Synthetic oligonucleotide
cccgggagagagcagcgcg

SEQ ID NO: 1375168 - RNA, 19 nt, Artificial Sequence
  Description of Artificial Sequence: Synthetic oligonucleotide
aucugagacgucgggcggu

SEQ ID NO: 1375169 - RNA, 19 nt, Artificial Sequence
  Description of Artificial Sequence: Synthetic oligonucleotide
cagcggugcuuggagcugg

SEQ ID NO: 1375170 - RNA, 19 nt, Artificial Sequence
  Description of Artificial Sequence: Synthetic oligonucleotide
ucgucggguagcgggugcc

SEQ ID NO: 1375171 - RNA, 19 nt, Artificial Sequence
  Description of Artificial Sequence: Synthetic oligonucleotide
agcggccacuccaccagcg

SEQ ID NO: 1375172 - RNA, 19 nt, Artificial Sequence
  Description of Artificial Sequence: Synthetic oligonucleotide
agacgucgggcgguggcag

SEQ ID NO: 1375173 - RNA, 19 nt, Artificial Sequence
  Description of Artificial Sequence: Synthetic oligonucleotide
caguaccuuugcaucaucu

SEQ ID NO: 1375174 - RNA, 19 nt, Artificial Sequence
  Description of Artificial Sequence: Synthetic oligonucleotide
ucucccggcugaagagauc

SEQ ID NO: 1375175 - RNA, 19 nt, Artificial Sequence
  Description of Artificial Sequence: Synthetic oligonucleotide
uugaggggucuuugcguuu

SEQ ID NO: 1375176 - RNA, 19 nt, Artificial Sequence
  Description of Artificial Sequence: Synthetic oligonucleotide
gucgucggguagcgggugc

SEQ ID NO: 1375177 - RNA, 19 nt, Artificial Sequence
  Description of Artificial Sequence: Synthetic oligonucleotide
acgucgggcgguggcaguc

SEQ ID NO: 1375178 - RNA, 19 nt, Artificial Sequence
  Description of Artificial Sequence: Synthetic oligonucleotide
cagguucgaggcauaaggu

SEQ ID NO: 1375179 - RNA, 19 nt, Artificial Sequence
  Description of Artificial Sequence: Synthetic oligonucleotide
ggccacuccaccagcgcgg

SEQ ID NO: 1375180 - RNA, 19 nt, Artificial Sequence
  Description of Artificial Sequence: Synthetic oligonucleotide
ggaauucuucuugaggggu

SEQ ID NO: 1375181 - RNA, 19 nt, Artificial Sequence
  Description of Artificial Sequence: Synthetic oligonucleotide
cuuggucgucggguagcgg

SEQ ID NO: 1375182 - RNA, 19 nt, Artificial Sequence
  Description of Artificial Sequence: Synthetic oligonucleotide
gucgaccagcagccagggg

SEQ ID NO: 1375183 - RNA, 19 nt, Artificial Sequence
  Description of Artificial Sequence: Synthetic oligonucleotide
agucccggguggcaguguu

SEQ ID NO: 1375184 - RNA, 19 nt, Artificial Sequence
  Description of Artificial Sequence: Synthetic oligonucleotide
cccggcugaagagaucugg

SEQ ID NO: 1375185 - RNA, 19 nt, Artificial Sequence
  Description of Artificial Sequence: Synthetic oligonucleotide
gagacgucgggcgguggca

SEQ ID NO: 1375186 - RNA, 19 nt, Artificial Sequence
  Description of Artificial Sequence: Synthetic oligonucleotide
cagggguugacaucuucgu

SEQ ID NO: 1375187 - RNA, 19 nt, Artificial Sequence
  Description of Artificial Sequence: Synthetic oligonucleotide
aucggcuguuaaugguaua

SEQ ID NO: 1375188 - RNA, 19 nt, Artificial Sequence
  Description of Artificial Sequence: Synthetic oligonucleotide
ccaccugaacuaagucugc

SEQ ID NO: 1375189 - RNA, 19 nt, Artificial Sequence
  Description of Artificial Sequence: Synthetic oligonucleotide
cacaaugguaaagcacaaa

SEQ ID NO: 1375190 - RNA, 19 nt, Artificial Sequence
  Description of Artificial Sequence: Synthetic oligonucleotide
aacuuucgaugggcuugcu

SEQ ID NO: 1375191 - RNA, 19 nt, Artificial Sequence
  Description of Artificial Sequence: Synthetic oligonucleotide
gcuuggucgucggguagcg

SEQ ID NO: 1375192 - RNA, 19 nt, Artificial Sequence
  Description of Artificial Sequence: Synthetic oligonucleotide
gaucggcuguuaaugguau

SEQ ID NO: 1375193 - RNA, 19 nt, Artificial Sequence
  Description of Artificial Sequence: Synthetic oligonucleotide
acggcuuuguccaggugua

SEQ ID NO: 1375194 - RNA, 19 nt, Artificial Sequence
  Description of Artificial Sequence: Synthetic oligonucleotide
cuucguagcgagucuucgu

SEQ ID NO: 1375195 - RNA, 19 nt, Artificial Sequence
  Description of Artificial Sequence: Synthetic oligonucleotide
gaaaucggcugagaccuuu

SEQ ID NO: 1375196 - RNA, 19 nt, Artificial Sequence
  Description of Artificial Sequence: Synthetic oligonucleotide
ccaggucaaaugaacaggu

SEQ ID NO: 1375197 - RNA, 19 nt, Artificial Sequence
  Description of Artificial Sequence: Synthetic oligonucleotide
gucgcauguccugccgccc

SEQ ID NO: 1375198 - RNA, 19 nt, Artificial Sequence
  Description of Artificial Sequence: Synthetic oligonucleotide
guaccacagcggccacucc

SEQ ID NO: 1375199 - RNA, 19 nt, Artificial Sequence
  Description of Artificial Sequence: Synthetic oligonucleotide
gauaaagagcugacucauu

SEQ ID NO: 1375200 - RNA, 19 nt, Artificial Sequence
  Description of Artificial Sequence: Synthetic oligonucleotide
gccaggaccgcggcgggcg

SEQ ID NO: 1375201 - RNA, 19 nt, Artificial Sequence
  Description of Artificial Sequence: Synthetic oligonucleotide
cucccggcugaagagaucu

SEQ ID NO: 1375202 - RNA, 19 nt, Artificial Sequence
  Description of Artificial Sequence: Synthetic oligonucleotide
ggaucggcuguuaauggua

SEQ ID NO: 1375203 - RNA, 19 nt, Artificial Sequence
  Description of Artificial Sequence: Synthetic oligonucleotide
ggcuugcuccuuaaaauua

SEQ ID NO: 1375204 - RNA, 19 nt, Artificial Sequence
  Description of Artificial Sequence: Synthetic oligonucleotide
uagcgggugccgugacgga

SEQ ID NO: 1375205 - RNA, 19 nt, Artificial Sequence
  Description of Artificial Sequence: Synthetic oligonucleotide
gucgggcgguggcaguccc

SEQ ID NO: 1375206 - RNA, 19 nt, Artificial Sequence
  Description of Artificial Sequence: Synthetic oligonucleotide
gaggggucuuugcguuuuc

SEQ ID NO: 1375207 - RNA, 19 nt, Artificial Sequence
  Description of Artificial Sequence: Synthetic oligonucleotide
gucuuugcguuuucacaau

SEQ ID NO: 1375208 - RNA, 19 nt, Artificial Sequence
  Description of Artificial Sequence: Synthetic oligonucleotide
ucguaccacagcggccacu

SEQ ID NO: 1375209 - RNA, 19 nt, Artificial Sequence
  Description of Artificial Sequence: Synthetic oligonucleotide
agcgagucuucgugccgaa

SEQ ID NO: 1375210 - RNA, 19 nt, Artificial Sequence
  Description of Artificial Sequence: Synthetic oligonucleotide
gcauuucagguccaguuuu

SEQ ID NO: 1375211 - RNA, 19 nt, Artificial Sequence
  Description of Artificial Sequence: Synthetic oligonucleotide
gcgaccgaggccgggaggc

SEQ ID NO: 1375212 - RNA, 19 nt, Artificial Sequence
  Description of Artificial Sequence: Synthetic oligonucleotide
gcgaccagcugcaccgggg

SEQ ID NO: 1375213 - RNA, 19 nt, Artificial Sequence
  Description of Artificial Sequence: Synthetic oligonucleotide
cagccaggaccgcggcggg

SEQ ID NO: 1375214 - RNA, 19 nt, Artificial Sequence
  Description of Artificial Sequence: Synthetic oligonucleotide
gcguuuucacaaugguaaa

SEQ ID NO: 1375215 - RNA, 19 nt, Artificial Sequence
  Description of Artificial Sequence: Synthetic oligonucleotide
ggcggccguaguucucccg

SEQ ID NO: 1375216 - RNA, 19 nt, Artificial Sequence
  Description of Artificial Sequence: Synthetic oligonucleotide
gccggagagcagucguacc

SEQ ID NO: 1375217 - RNA, 19 nt, Artificial Sequence
  Description of Artificial Sequence: Synthetic oligonucleotide
cagcgcgcgaacgacgaga

SEQ ID NO: 1375218 - RNA, 19 nt, Artificial Sequence
  Description of Artificial Sequence: Synthetic oligonucleotide
gcgguggcagucccgggug

SEQ ID NO: 1375219 - RNA, 19 nt, Artificial Sequence
  Description of Artificial Sequence: Synthetic oligonucleotide
gcaccgaagccaccggguc

SEQ ID NO: 1375220 - RNA, 19 nt, Artificial Sequence
  Description of Artificial Sequence: Synthetic oligonucleotide
gccguaacuucguuuccaa

SEQ ID NO: 1375221 - RNA, 19 nt, Artificial Sequence
  Description of Artificial Sequence: Synthetic oligonucleotide
gguauagccguaacuucgu

SEQ ID NO: 1375222 - RNA, 19 nt, Artificial Sequence
  Description of Artificial Sequence: Synthetic oligonucleotide
agcgggugccgugacggau

SEQ ID NO: 1375223 - RNA, 19 nt, Artificial Sequence
  Description of Artificial Sequence: Synthetic oligonucleotide
cgcgcgaacgacgagagca

SEQ ID NO: 1375224 - RNA, 19 nt, Artificial Sequence
  Description of Artificial Sequence: Synthetic oligonucleotide
agguacgaugugaccacuu

SEQ ID NO: 1375225 - RNA, 19 nt, Artificial Sequence
  Description of Artificial Sequence: Synthetic oligonucleotide
aggccgggaggcgggugcg

SEQ ID NO: 1375226 - RNA, 19 nt, Artificial Sequence
  Description of Artificial Sequence: Synthetic oligonucleotide
gucgccgcgccccgggaga

SEQ ID NO: 1375227 - RNA, 19 nt, Artificial Sequence
  Description of Artificial Sequence: Synthetic oligonucleotide
gcaacgguuucuugugagu

SEQ ID NO: 1375228 - RNA, 19 nt, Artificial Sequence
  Description of Artificial Sequence: Synthetic oligonucleotide
ggccggagagcagucguac

SEQ ID NO: 1375229 - RNA, 19 nt, Artificial Sequence
  Description of Artificial Sequence: Synthetic oligonucleotide
gcgcgaacgacgagagcag

SEQ ID NO: 1375230 - RNA, 19 nt, Artificial Sequence
  Description of Artificial Sequence: Synthetic oligonucleotide
gccgaaguaggggcugagc

SEQ ID NO: 1375231 - RNA, 19 nt, Artificial Sequence
  Description of Artificial Sequence: Synthetic oligonucleotide
guauagccguaacuucguu

SEQ ID NO: 1375232 - RNA, 19 nt, Artificial Sequence
  Description of Artificial Sequence: Synthetic oligonucleotide
ugagggcgaccagcugcac

SEQ ID NO: 1375233 - RNA, 19 nt, Artificial Sequence
  Description of Artificial Sequence: Synthetic oligonucleotide
cggccacuccaccagcgcg

SEQ ID NO: 1375234 - RNA, 19 nt, Artificial Sequence
  Description of Artificial Sequence: Synthetic oligonucleotide
caauacuguuucagaucau

SEQ ID NO: 1375235 - RNA, 19 nt, Artificial Sequence
  Description of Artificial Sequence: Synthetic oligonucleotide
cguccauccagucaucgua

SEQ ID NO: 1375236 - RNA, 19 nt, Artificial Sequence
  Description of Artificial Sequence: Synthetic oligonucleotide
cugccucagcuugcggauc

SEQ ID NO: 1375237 - RNA, 19 nt, Artificial Sequence
  Description of Artificial Sequence: Synthetic oligonucleotide
cggcuguuaaugguauagc

SEQ ID NO: 1375238 - RNA, 19 nt, Artificial Sequence
  Description of Artificial Sequence: Synthetic oligonucleotide
agguccccgccagcagcuc

SEQ ID NO: 1375239 - RNA, 19 nt, Artificial Sequence
  Description of Artificial Sequence: Synthetic oligonucleotide
cggaucugcuuggucgucg

SEQ ID NO: 1375240 - RNA, 19 nt, Artificial Sequence
  Description of Artificial Sequence: Synthetic oligonucleotide
cacuuuggguagguuacau

SEQ ID NO: 1375241 - RNA, 19 nt, Artificial Sequence
  Description of Artificial Sequence: Synthetic oligonucleotide
ggucgucggguagcgggug

SEQ ID NO: 1375242 - RNA, 19 nt, Artificial Sequence
  Description of Artificial Sequence: Synthetic oligonucleotide
agaaaucggcugagaccuu

SEQ ID NO: 1375243 - RNA, 19 nt, Artificial Sequence
  Description of Artificial Sequence: Synthetic oligonucleotide
gcagcgcgcgaacgacgag

SEQ ID NO: 1375244 - RNA, 19 nt, Artificial Sequence
  Description of Artificial Sequence: Synthetic oligonucleotide
ccggguccgcagcagcccc

SEQ ID NO: 1375245 - RNA, 19 nt, Artificial Sequence
  Description of Artificial Sequence: Synthetic oligonucleotide
agagggcggccaggcgcag

SEQ ID NO: 1375246 - RNA, 19 nt, Artificial Sequence
  Description of Artificial Sequence: Synthetic oligonucleotide
gccgcgccccgggagagag

SEQ ID NO: 1375247 - RNA, 19 nt, Artificial Sequence
  Description of Artificial Sequence: Synthetic oligonucleotide
gcagucccggguggcagug

SEQ ID NO: 1375248 - RNA, 19 nt, Artificial Sequence
  Description of Artificial Sequence: Synthetic oligonucleotide
gcgagucuucgugccgaag

SEQ ID NO: 1375249 - RNA, 19 nt, Artificial Sequence
  Description of Artificial Sequence: Synthetic oligonucleotide
gcgcgaccgaggccgggag

SEQ ID NO: 1375250 - RNA, 19 nt, Artificial Sequence
  Description of Artificial Sequence: Synthetic oligonucleotide
ccacggagaauggacaccu

SEQ ID NO: 1375251 - RNA, 19 nt, Artificial Sequence
  Description of Artificial Sequence: Synthetic oligonucleotide
agcggugcuuggagcuggu

SEQ ID NO: 1375252 - RNA, 19 nt, Artificial Sequence
  Description of Artificial Sequence: Synthetic oligonucleotide
caccggggugcaggucccc

SEQ ID NO: 1375253 - RNA, 19 nt, Artificial Sequence
  Description of Artificial Sequence: Synthetic oligonucleotide
ggccguaguucucccggcu

SEQ ID NO: 1375254 - RNA, 19 nt, Artificial Sequence
  Description of Artificial Sequence: Synthetic oligonucleotide
cguuuccaauacuguuuca

SEQ ID NO: 1375255 - RNA, 19 nt, Artificial Sequence
  Description of Artificial Sequence: Synthetic oligonucleotide
gcgguccccggguccccgg

SEQ ID NO: 1375256 - RNA, 19 nt, Artificial Sequence
  Description of Artificial Sequence: Synthetic oligonucleotide
ccacuucggaacuuucgau

SEQ ID NO: 1375257 - RNA, 19 nt, Artificial Sequence
  Description of Artificial Sequence: Synthetic oligonucleotide
cgcgaacgacgagagcagc

SEQ ID NO: 1375258 - RNA, 19 nt, Artificial Sequence
  Description of Artificial Sequence: Synthetic oligonucleotide
gcaccggggugcagguccc

SEQ ID NO: 1375259 - RNA, 19 nt, Artificial Sequence
  Description of Artificial Sequence: Synthetic oligonucleotide
cggccguaguucucccggc

SEQ ID NO: 1375260 - RNA, 19 nt, Artificial Sequence
  Description of Artificial Sequence: Synthetic oligonucleotide
gcgcgcgaacgacgagagc

SEQ ID NO: 1375261 - RNA, 19 nt, Artificial Sequence
  Description of Artificial Sequence: Synthetic oligonucleotide
cgcgaccgaggccgggagg

SEQ ID NO: 1375262 - RNA, 19 nt, Artificial Sequence
  Description of Artificial Sequence: Synthetic oligonucleotide
ccgugacggaugagggcga

SEQ ID NO: 1375263 - RNA, 19 nt, Artificial Sequence
  Description of Artificial Sequence: Synthetic oligonucleotide
gcggugcuuggagcuggug

SEQ ID NO: 1375264 - RNA, 19 nt, Artificial Sequence
  Description of Artificial Sequence: Synthetic oligonucleotide
cacggagaauggacaccuu

SEQ ID NO: 1375265 - RNA, 19 nt, Artificial Sequence
  Description of Artificial Sequence: Synthetic oligonucleotide
ccccgcgguccccgggucc

SEQ ID NO: 1375266 - RNA, 19 nt, Artificial Sequence
  Description of Artificial Sequence: Synthetic oligonucleotide
cgugacggaugagggcgac

SEQ ID NO: 1375267 - RNA, 19 nt, Artificial Sequence
  Description of Artificial Sequence: Synthetic oligonucleotide
ccaccgggucgccgcgccc

SEQ ID NO: 1375268 - RNA, 19 nt, Artificial Sequence
  Description of Artificial Sequence: Synthetic oligonucleotide
ccguccauccagucaucgu

SEQ ID NO: 1375269 - RNA, 19 nt, Artificial Sequence
  Description of Artificial Sequence: Synthetic oligonucleotide
gggugccgugacggaugag

SEQ ID NO: 1375270 - RNA, 19 nt, Artificial Sequence
  Description of Artificial Sequence: Synthetic oligonucleotide
cgcgccccgggagagagca

SEQ ID NO: 1375271 - RNA, 19 nt, Artificial Sequence
  Description of Artificial Sequence: Synthetic oligonucleotide
ccguaacuucguuuccaau

SEQ ID NO: 1375272 - RNA, 19 nt, Artificial Sequence
  Description of Artificial Sequence: Synthetic oligonucleotide
cgucgggcgguggcagucc

SEQ ID NO: 1375273 - RNA, 19 nt, Artificial Sequence
  Description of Artificial Sequence: Synthetic oligonucleotide
gggcgcgaccgaggccggg

SEQ ID NO: 1375274 - RNA, 19 nt, Artificial Sequence
  Description of Artificial Sequence: Synthetic oligonucleotide
cgaccgaggccgggaggcg

SEQ ID NO: 1375275 - RNA, 19 nt, Artificial Sequence
  Description of Artificial Sequence: Synthetic oligonucleotide
gggccggagagcagucgua

SEQ ID NO: 1375276 - RNA, 19 nt, Artificial Sequence
  Description of Artificial Sequence: Synthetic oligonucleotide
cggguagcgggugccguga

SEQ ID NO: 1375277 - RNA, 19 nt, Artificial Sequence
  Description of Artificial Sequence: Synthetic oligonucleotide
cgggcgcgaccgaggccgg

SEQ ID NO: 1375278 - RNA, 19 nt, Artificial Sequence
  Description of Artificial Sequence: Synthetic oligonucleotide
cagucccggguggcagugu

SEQ ID NO: 1375279 - RNA, 19 nt, Artificial Sequence
  Description of Artificial Sequence: Synthetic oligonucleotide
gcgccccgggagagagcag

SEQ ID NO: 1375280 - RNA, 19 nt, Artificial Sequence
  Description of Artificial Sequence: Synthetic oligonucleotide
ccgggucgccgcgccccgg

SEQ ID NO: 1375281 - RNA, 19 nt, Artificial Sequence
  Description of Artificial Sequence: Synthetic oligonucleotide
cggcgccaccgggucgacc

SEQ ID NO: 1375282 - RNA, 19 nt, Artificial Sequence
  Description of Artificial Sequence: Synthetic oligonucleotide
cggguccgcagcagccccu

SEQ ID NO: 1375283 - RNA, 19 nt, Artificial Sequence
  Description of Artificial Sequence: Synthetic oligonucleotide
aaaauauguaugcaagucc

SEQ ID NO: 1375284 - RNA, 19 nt, Artificial Sequence
  Description of Artificial Sequence: Synthetic oligonucleotide
uaaaggcuaaaucagaugg

SEQ ID NO: 1375285 - RNA, 19 nt, Artificial Sequence
  Description of Artificial Sequence: Synthetic oligonucleotide
guuaauuacauuaucaugg

SEQ ID NO: 1375286 - RNA, 19 nt, Artificial Sequence
  Description of Artificial Sequence: Synthetic oligonucleotide
gaagagaacgacuauagcg

SEQ ID NO: 1375287 - RNA, 19 nt, Artificial Sequence
  Description of Artificial Sequence: Synthetic oligonucleotide
uuauuuuagauucuaacug

SEQ ID NO: 1375288 - RNA, 19 nt, Artificial Sequence
  Description of Artificial Sequence: Synthetic oligonucleotide
aauacagaauauucaaagg

SEQ ID NO: 1375289 - RNA, 19 nt, Artificial Sequence
  Description of Artificial Sequence: Synthetic oligonucleotide
aucauaagaaaauaaauug

SEQ ID NO: 1375290 - RNA, 19 nt, Artificial Sequence
  Description of Artificial Sequence: Synthetic oligonucleotide
cuuauaauguucuaggagc

SEQ ID NO: 1375291 - RNA, 19 nt, Artificial Sequence
  Description of Artificial Sequence: Synthetic oligonucleotide
auuacauuaucauggaugg

SEQ ID NO: 1375292 - RNA, 19 nt, Artificial Sequence
  Description of Artificial Sequence: Synthetic oligonucleotide
aauaaauugaucuggaauu

SEQ ID NO: 1375293 - RNA, 19 nt, Artificial Sequence
  Description of Artificial Sequence: Synthetic oligonucleotide
uggauuaucacacucaucu

SEQ ID NO: 1375294 - RNA, 19 nt, Artificial Sequence
  Description of Artificial Sequence: Synthetic oligonucleotide
uuacauguagcaaagagca

SEQ ID NO: 1375295 - RNA, 19 nt, Artificial Sequence
  Description of Artificial Sequence: Synthetic oligonucleotide
aauucaaagaggcacaaga

SEQ ID NO: 1375296 - RNA, 19 nt, Artificial Sequence
  Description of Artificial Sequence: Synthetic oligonucleotide
gagaauggaagacacaugg

SEQ ID NO: 1375297 - RNA, 19 nt, Artificial Sequence
  Description of Artificial Sequence: Synthetic oligonucleotide
auuggaagggcaucgaugc

SEQ ID NO: 1375298 - RNA, 19 nt, Artificial Sequence
  Description of Artificial Sequence: Synthetic oligonucleotide
ucaaagaacauacaggcac

SEQ ID NO: 1375299 - RNA, 19 nt, Artificial Sequence
  Description of Artificial Sequence: Synthetic oligonucleotide
aauuacauuaucauggaug

SEQ ID NO: 1375300 - RNA, 19 nt, Artificial Sequence
  Description of Artificial Sequence: Synthetic oligonucleotide
ucauaagaaaauaaauuga

SEQ ID NO: 1375301 - RNA, 19 nt, Artificial Sequence
  Description of Artificial Sequence: Synthetic oligonucleotide
uuugugaccaaguucauca

SEQ ID NO: 1375302 - RNA, 19 nt, Artificial Sequence
  Description of Artificial Sequence: Synthetic oligonucleotide
uguaucauaagaaaauaaa

SEQ ID NO: 1375303 - RNA, 19 nt, Artificial Sequence
  Description of Artificial Sequence: Synthetic oligonucleotide
uauaacaaguguaucauaa

SEQ ID NO: 1375304 - RNA, 19 nt, Artificial Sequence
  Description of Artificial Sequence: Synthetic oligonucleotide
ugugacacaaggcugaaca

SEQ ID NO: 1375305 - RNA, 19 nt, Artificial Sequence
  Description of Artificial Sequence: Synthetic oligonucleotide
ucuaacugccuuuaguagg

SEQ ID NO: 1375306 - RNA, 19 nt, Artificial Sequence
  Description of Artificial Sequence: Synthetic oligonucleotide
aauaacuauucugccauac

SEQ ID NO: 1375307 - RNA, 19 nt, Artificial Sequence
  Description of Artificial Sequence: Synthetic oligonucleotide
uacaagaauacugauagug

SEQ ID NO: 1375308 - RNA, 19 nt, Artificial Sequence
  Description of Artificial Sequence: Synthetic oligonucleotide
agugguucaaagaacauac

SEQ ID NO: 1375309 - RNA, 19 nt, Artificial Sequence
  Description of Artificial Sequence: Synthetic oligonucleotide
aaguuaauuacauuaucau

SEQ ID NO: 1375310 - RNA, 19 nt, Artificial Sequence
  Description of Artificial Sequence: Synthetic oligonucleotide
aaaguugugauuccacugu

SEQ ID NO: 1375311 - RNA, 19 nt, Artificial Sequence
  Description of Artificial Sequence: Synthetic oligonucleotide
aacaauaacuauucugcca

SEQ ID NO: 1375312 - RNA, 19 nt, Artificial Sequence
  Description of Artificial Sequence: Synthetic oligonucleotide
uuaauaaaaugccaccuaa

SEQ ID NO: 1375313 - RNA, 19 nt, Artificial Sequence
  Description of Artificial Sequence: Synthetic oligonucleotide
aguuaauuacauuaucaug

SEQ ID NO: 1375314 - RNA, 19 nt, Artificial Sequence
  Description of Artificial Sequence: Synthetic oligonucleotide
ugauuuauaaugguauucc

SEQ ID NO: 1375315 - RNA, 19 nt, Artificial Sequence
  Description of Artificial Sequence: Synthetic oligonucleotide
uuauaauguucuaggagcc

SEQ ID NO: 1375316 - RNA, 19 nt, Artificial Sequence
  Description of Artificial Sequence: Synthetic oligonucleotide
uuaccgaagaauuuuaaaa

SEQ ID NO: 1375317 - RNA, 19 nt, Artificial Sequence
  Description of Artificial Sequence: Synthetic oligonucleotide
augccguuuaauaaaaugc

SEQ ID NO: 1375318 - RNA, 19 nt, Artificial Sequence
  Description of Artificial Sequence: Synthetic oligonucleotide
aacaaauguaccucuagaa

SEQ ID NO: 1375319 - RNA, 19 nt, Artificial Sequence
  Description of Artificial Sequence: Synthetic oligonucleotide
ucuacaagaagcacuggug

SEQ ID NO: 1375320 - RNA, 19 nt, Artificial Sequence
  Description of Artificial Sequence: Synthetic oligonucleotide
uccauaacaccccaguagc

SEQ ID NO: 1375321 - RNA, 19 nt, Artificial Sequence
  Description of Artificial Sequence: Synthetic oligonucleotide
uaugccguuuaauaaaaug

SEQ ID NO: 1375322 - RNA, 19 nt, Artificial Sequence
  Description of Artificial Sequence: Synthetic oligonucleotide
uuaauggaguggauaaaag

SEQ ID NO: 1375323 - RNA, 19 nt, Artificial Sequence
  Description of Artificial Sequence: Synthetic oligonucleotide
ucagauggaggugagaaag

SEQ ID NO: 1375324 - RNA, 19 nt, Artificial Sequence
  Description of Artificial Sequence: Synthetic oligonucleotide
ugccguuuaauaaaaugcc

SEQ ID NO: 1375325 - RNA, 19 nt, Artificial Sequence
  Description of Artificial Sequence: Synthetic oligonucleotide
uaacggagaauaaauaauc

SEQ ID NO: 1375326 - RNA, 19 nt, Artificial Sequence
  Description of Artificial Sequence: Synthetic oligonucleotide
acuuacaggaacaguaugc

SEQ ID NO: 1375327 - RNA, 19 nt, Artificial Sequence
  Description of Artificial Sequence: Synthetic oligonucleotide
uauucugccauacaagaau

SEQ ID NO: 1375328 - RNA, 19 nt, Artificial Sequence
  Description of Artificial Sequence: Synthetic oligonucleotide
ggaaaguccggauuaaugg

SEQ ID NO: 1375329 - RNA, 19 nt, Artificial Sequence
  Description of Artificial Sequence: Synthetic oligonucleotide
uagcgucuaaaacuaacgg

SEQ ID NO: 1375330 - RNA, 19 nt, Artificial Sequence
  Description of Artificial Sequence: Synthetic oligonucleotide
gauaagucugugcucaccc

SEQ ID NO: 1375331 - RNA, 19 nt, Artificial Sequence
  Description of Artificial Sequence: Synthetic oligonucleotide
guacuuauccauaacaccc

SEQ ID NO: 1375332 - RNA, 19 nt, Artificial Sequence
  Description of Artificial Sequence: Synthetic oligonucleotide
cauaucacuaucuucuaug

SEQ ID NO: 1375333 - RNA, 19 nt, Artificial Sequence
  Description of Artificial Sequence: Synthetic oligonucleotide
ucuucuaugcuguuauuug

SEQ ID NO: 1375334 - RNA, 19 nt, Artificial Sequence
  Description of Artificial Sequence: Synthetic oligonucleotide
uaaaguugugauuccacug

SEQ ID NO: 1375335 - RNA, 19 nt, Artificial Sequence
  Description of Artificial Sequence: Synthetic oligonucleotide
auacugauaguguagauua

SEQ ID NO: 1375336 - RNA, 19 nt, Artificial Sequence
  Description of Artificial Sequence: Synthetic oligonucleotide
acaauaacuauucugccau

SEQ ID NO: 1375337 - RNA, 19 nt, Artificial Sequence
  Description of Artificial Sequence: Synthetic oligonucleotide
gaagacacauggaucaugg

SEQ ID NO: 1375338 - RNA, 19 nt, Artificial Sequence
  Description of Artificial Sequence: Synthetic oligonucleotide
uuaauuacauuaucaugga

SEQ ID NO: 1375339 - RNA, 19 nt, Artificial Sequence
  Description of Artificial Sequence: Synthetic oligonucleotide
acaggguaugucuucuucc

SEQ ID NO: 1375340 - RNA, 19 nt, Artificial Sequence
  Description of Artificial Sequence: Synthetic oligonucleotide
uaacuauucugccauacaa

SEQ ID NO: 1375341 - RNA, 19 nt, Artificial Sequence
  Description of Artificial Sequence: Synthetic oligonucleotide
uuuaauaaaaugccaccua

SEQ ID NO: 1375342 - RNA, 19 nt, Artificial Sequence
  Description of Artificial Sequence: Synthetic oligonucleotide
acugauaguguagauuagc

SEQ ID NO: 1375343 - RNA, 19 nt, Artificial Sequence
  Description of Artificial Sequence: Synthetic oligonucleotide
acuaacggagaauaaauaa

SEQ ID NO: 1375344 - RNA, 19 nt, Artificial Sequence
  Description of Artificial Sequence: Synthetic oligonucleotide
aaaacuaacggagaauaaa

SEQ ID NO: 1375345 - RNA, 19 nt, Artificial Sequence
  Description of Artificial Sequence: Synthetic oligonucleotide
ucuucguuuuagcugacug

SEQ ID NO: 1375346 - RNA, 19 nt, Artificial Sequence
  Description of Artificial Sequence: Synthetic oligonucleotide
uuucuaguagcgauuaaaa

SEQ ID NO: 1375347 - RNA, 19 nt, Artificial Sequence
  Description of Artificial Sequence: Synthetic oligonucleotide
ugcguacuuauccauaaca

SEQ ID NO: 1375348 - RNA, 19 nt, Artificial Sequence
  Description of Artificial Sequence: Synthetic oligonucleotide
aagagaacgacuauagcgu

SEQ ID NO: 1375349 - RNA, 19 nt, Artificial Sequence
  Description of Artificial Sequence: Synthetic oligonucleotide
aagcuaaaguugugauucc

SEQ ID NO: 1375350 - RNA, 19 nt, Artificial Sequence
  Description of Artificial Sequence: Synthetic oligonucleotide
uggacuuacaggaacagua

SEQ ID NO: 1375351 - RNA, 19 nt, Artificial Sequence
  Description of Artificial Sequence: Synthetic oligonucleotide
aaggcuaaaucagauggag

SEQ ID NO: 1375352 - RNA, 19 nt, Artificial Sequence
  Description of Artificial Sequence: Synthetic oligonucleotide
uagaacauaacauucuauu

SEQ ID NO: 1375353 - RNA, 19 nt, Artificial Sequence
  Description of Artificial Sequence: Synthetic oligonucleotide
accgaagaauuuuaaaaug

SEQ ID NO: 1375354 - RNA, 19 nt, Artificial Sequence
  Description of Artificial Sequence: Synthetic oligonucleotide
uuauccauaacaccccagu

SEQ ID NO: 1375355 - RNA, 19 nt, Artificial Sequence
  Description of Artificial Sequence: Synthetic oligonucleotide
uuucauaggagaaggaauu

SEQ ID NO: 1375356 - RNA, 19 nt, Artificial Sequence
  Description of Artificial Sequence: Synthetic oligonucleotide
auccauaacaccccaguag

SEQ ID NO: 1375357 - RNA, 19 nt, Artificial Sequence
  Description of Artificial Sequence: Synthetic oligonucleotide
uguaugcaaguccacauuc

SEQ ID NO: 1375358 - RNA, 19 nt, Artificial Sequence
  Description of Artificial Sequence: Synthetic oligonucleotide
uauauaacaaguguaucau

SEQ ID NO: 1375359 - RNA, 19 nt, Artificial Sequence
  Description of Artificial Sequence: Synthetic oligonucleotide
gaacaauaacuauucugcc

SEQ ID NO: 1375360 - RNA, 19 nt, Artificial Sequence
  Description of Artificial Sequence: Synthetic oligonucleotide
gugcacauaaucaaucugg

SEQ ID NO: 1375361 - RNA, 19 nt, Artificial Sequence
  Description of Artificial Sequence: Synthetic oligonucleotide
auaacaaguguaucauaag

SEQ ID NO: 1375362 - RNA, 19 nt, Artificial Sequence
  Description of Artificial Sequence: Synthetic oligonucleotide
acugguaugugagaaacag

SEQ ID NO: 1375363 - RNA, 19 nt, Artificial Sequence
  Description of Artificial Sequence: Synthetic oligonucleotide
uaugugagaaacaggguau

SEQ ID NO: 1375364 - RNA, 19 nt, Artificial Sequence
  Description of Artificial Sequence: Synthetic oligonucleotide
acaguguuauaauuucauc

SEQ ID NO: 1375365 - RNA, 19 nt, Artificial Sequence
  Description of Artificial Sequence: Synthetic oligonucleotide
agaacaaauguaccucuag

SEQ ID NO: 1375366 - RNA, 19 nt, Artificial Sequence
  Description of Artificial Sequence: Synthetic oligonucleotide
uucuaacugccuuuaguag

SEQ ID NO: 1375367 - RNA, 19 nt, Artificial Sequence
  Description of Artificial Sequence: Synthetic oligonucleotide
aaucagauggaggugagaa

SEQ ID NO: 1375368 - RNA, 19 nt, Artificial Sequence
  Description of Artificial Sequence: Synthetic oligonucleotide
uuacaggaacaguaugccg

SEQ ID NO: 1375369 - RNA, 19 nt, Artificial Sequence
  Description of Artificial Sequence: Synthetic oligonucleotide
uucggcugcguacuuaucc

SEQ ID NO: 1375370 - RNA, 19 nt, Artificial Sequence
  Description of Artificial Sequence: Synthetic oligonucleotide
cauucaucugauuuuggac

SEQ ID NO: 1375371 - RNA, 19 nt, Artificial Sequence
  Description of Artificial Sequence: Synthetic oligonucleotide
gauuguuacugaucugaag

SEQ ID NO: 1375372 - RNA, 19 nt, Artificial Sequence
  Description of Artificial Sequence: Synthetic oligonucleotide
uacuuauccauaacacccc

SEQ ID NO: 1375373 - RNA, 19 nt, Artificial Sequence
  Description of Artificial Sequence: Synthetic oligonucleotide
uuacugaucugaaggaggu

SEQ ID NO: 1375374 - RNA, 19 nt, Artificial Sequence
  Description of Artificial Sequence: Synthetic oligonucleotide
acaaguguaucauaagaaa

SEQ ID NO: 1375375 - RNA, 19 nt, Artificial Sequence
  Description of Artificial Sequence: Synthetic oligonucleotide
agaaacaggguaugucuuc

SEQ ID NO: 1375376 - RNA, 19 nt, Artificial Sequence
  Description of Artificial Sequence: Synthetic oligonucleotide
aauccugaguaaccuaacu

SEQ ID NO: 1375377 - RNA, 19 nt, Artificial Sequence
  Description of Artificial Sequence: Synthetic oligonucleotide
uaacauuucuaguagcgau

SEQ ID NO: 1375378 - RNA, 19 nt, Artificial Sequence
  Description of Artificial Sequence: Synthetic oligonucleotide
acuuaucuagcaugaguuc

SEQ ID NO: 1375379 - RNA, 19 nt, Artificial Sequence
  Description of Artificial Sequence: Synthetic oligonucleotide
ucuagaacauaacauucua

SEQ ID NO: 1375380 - RNA, 19 nt, Artificial Sequence
  Description of Artificial Sequence: Synthetic oligonucleotide
auucuaacugccuuuagua

SEQ ID NO: 1375381 - RNA, 19 nt, Artificial Sequence
  Description of Artificial Sequence: Synthetic oligonucleotide
guuacugaucugaaggagg

SEQ ID NO: 1375382 - RNA, 19 nt, Artificial Sequence
  Description of Artificial Sequence: Synthetic oligonucleotide
aacuauucugccauacaag

SEQ ID NO: 1375383 - RNA, 19 nt, Artificial Sequence
  Description of Artificial Sequence: Synthetic oligonucleotide
uuuaccgaagaauuuuaaa

SEQ ID NO: 1375384 - RNA, 19 nt, Artificial Sequence
  Description of Artificial Sequence: Synthetic oligonucleotide
gguucaaagaacauacagg

SEQ ID NO: 1375385 - RNA, 19 nt, Artificial Sequence
  Description of Artificial Sequence: Synthetic oligonucleotide
aaguguaucauaagaaaau

SEQ ID NO: 1375386 - RNA, 19 nt, Artificial Sequence
  Description of Artificial Sequence: Synthetic oligonucleotide
uuaaaauuuagagcaaguu

SEQ ID NO: 1375387 - RNA, 19 nt, Artificial Sequence
  Description of Artificial Sequence: Synthetic oligonucleotide
ucguaaguuguacaauuac

SEQ ID NO: 1375388 - RNA, 19 nt, Artificial Sequence
  Description of Artificial Sequence: Synthetic oligonucleotide
uuauaaugguauuccuuca

SEQ ID NO: 1375389 - RNA, 19 nt, Artificial Sequence
  Description of Artificial Sequence: Synthetic oligonucleotide
acaucaauccugaguaacc

SEQ ID NO: 1375390 - RNA, 19 nt, Artificial Sequence
  Description of Artificial Sequence: Synthetic oligonucleotide
aaaguccggauuaauggag

SEQ ID NO: 1375391 - RNA, 19 nt, Artificial Sequence
  Description of Artificial Sequence: Synthetic oligonucleotide
aucauggauggauuaucac

SEQ ID NO: 1375392 - RNA, 19 nt, Artificial Sequence
  Description of Artificial Sequence: Synthetic oligonucleotide
acaauuacaaauaacuguu

SEQ ID NO: 1375393 - RNA, 19 nt, Artificial Sequence
  Description of Artificial Sequence: Synthetic oligonucleotide
cugccauacaagaauacug

SEQ ID NO: 1375394 - RNA, 19 nt, Artificial Sequence
  Description of Artificial Sequence: Synthetic oligonucleotide
auagcgucuaaaacuaacg

SEQ ID NO: 1375395 - RNA, 19 nt, Artificial Sequence
  Description of Artificial Sequence: Synthetic oligonucleotide
uugccuaacauuucuagua

SEQ ID NO: 1375396 - RNA, 19 nt, Artificial Sequence
  Description of Artificial Sequence: Synthetic oligonucleotide
ugaagagaacgacuauagc

SEQ ID NO: 1375397 - RNA, 19 nt, Artificial Sequence
  Description of Artificial Sequence: Synthetic oligonucleotide
aguaaccuaacuuuugauu

SEQ ID NO: 1375398 - RNA, 19 nt, Artificial Sequence
  Description of Artificial Sequence: Synthetic oligonucleotide
uuaucuagcaugaguucac

SEQ ID NO: 1375399 - RNA, 19 nt, Artificial Sequence
  Description of Artificial Sequence: Synthetic oligonucleotide
ugugcucacccauucaucu

SEQ ID NO: 1375400 - RNA, 19 nt, Artificial Sequence
  Description of Artificial Sequence: Synthetic oligonucleotide
ucacccauucaucugauuu

SEQ ID NO: 1375401 - RNA, 19 nt, Artificial Sequence
  Description of Artificial Sequence: Synthetic oligonucleotide
aauugaucuggaauuaaaa

SEQ ID NO: 1375402 - RNA, 19 nt, Artificial Sequence
  Description of Artificial Sequence: Synthetic oligonucleotide
ucugaauccauaucacuau

SEQ ID NO: 1375403 - RNA, 19 nt, Artificial Sequence
  Description of Artificial Sequence: Synthetic oligonucleotide
uauguaugcaaguccacau

SEQ ID NO: 1375404 - RNA, 19 nt, Artificial Sequence
  Description of Artificial Sequence: Synthetic oligonucleotide
uaccucuagaacauaacau

SEQ ID NO: 1375405 - RNA, 19 nt, Artificial Sequence
  Description of Artificial Sequence: Synthetic oligonucleotide
caccuaaaggcuaaaucag

SEQ ID NO: 1375406 - RNA, 19 nt, Artificial Sequence
  Description of Artificial Sequence: Synthetic oligonucleotide
agaacauaacauucuauuu

SEQ ID NO: 1375407 - RNA, 19 nt, Artificial Sequence
  Description of Artificial Sequence: Synthetic oligonucleotide
uaaaucagauggaggugag

SEQ ID NO: 1375408 - RNA, 19 nt, Artificial Sequence
  Description of Artificial Sequence: Synthetic oligonucleotide
ucuaugcuguuauuuguga

SEQ ID NO: 1375409 - RNA, 19 nt, Artificial Sequence
  Description of Artificial Sequence: Synthetic oligonucleotide
agcgucuaaaacuaacgga

SEQ ID NO: 1375410 - RNA, 19 nt, Artificial Sequence
  Description of Artificial Sequence: Synthetic oligonucleotide
guacaauuacaaauaacug

SEQ ID NO: 1375411 - RNA, 19 nt, Artificial Sequence
  Description of Artificial Sequence: Synthetic oligonucleotide
gaacauacaggcacuuggg

SEQ ID NO: 1375412 - RNA, 19 nt, Artificial Sequence
  Description of Artificial Sequence: Synthetic oligonucleotide
aacggagaauaaauaaucu

SEQ ID NO: 1375413 - RNA, 19 nt, Artificial Sequence
  Description of Artificial Sequence: Synthetic oligonucleotide
gaacaaauguaccucuaga

SEQ ID NO: 1375414 - RNA, 19 nt, Artificial Sequence
  Description of Artificial Sequence: Synthetic oligonucleotide
acauguagcaaagagcaga

SEQ ID NO: 1375415 - RNA, 19 nt, Artificial Sequence
  Description of Artificial Sequence: Synthetic oligonucleotide
gaaaguccggauuaaugga

SEQ ID NO: 1375416 - RNA, 19 nt, Artificial Sequence
  Description of Artificial Sequence: Synthetic oligonucleotide
uccuuauaauguucuagga

SEQ ID NO: 1375417 - RNA, 19 nt, Artificial Sequence
  Description of Artificial Sequence: Synthetic oligonucleotide
ugauaguguagauuagcaa

SEQ ID NO: 1375418 - RNA, 19 nt, Artificial Sequence
  Description of Artificial Sequence: Synthetic oligonucleotide
agaauauucaaagguaaaa

SEQ ID NO: 1375419 - RNA, 19 nt, Artificial Sequence
  Description of Artificial Sequence: Synthetic oligonucleotide
uguacacaguguuauaauu

SEQ ID NO: 1375420 - RNA, 19 nt, Artificial Sequence
  Description of Artificial Sequence: Synthetic oligonucleotide
acgacuauagcgucuaaaa

SEQ ID NO: 1375421 - RNA, 19 nt, Artificial Sequence
  Description of Artificial Sequence: Synthetic oligonucleotide
uggaguggauaaaaguggu

SEQ ID NO: 1375422 - RNA, 19 nt, Artificial Sequence
  Description of Artificial Sequence: Synthetic oligonucleotide
agcaugaguucacugauau

SEQ ID NO: 1375423 - RNA, 19 nt, Artificial Sequence
  Description of Artificial Sequence: Synthetic oligonucleotide
acuggaggauuucaucauc

SEQ ID NO: 1375424 - RNA, 19 nt, Artificial Sequence
  Description of Artificial Sequence: Synthetic oligonucleotide
auuaauggaguggauaaaa

SEQ ID NO: 1375425 - RNA, 19 nt, Artificial Sequence
  Description of Artificial Sequence: Synthetic oligonucleotide
aaauguaccucuagaacau

SEQ ID NO: 1375426 - RNA, 19 nt, Artificial Sequence
  Description of Artificial Sequence: Synthetic oligonucleotide
ucuggcgugaagagaacga

SEQ ID NO: 1375427 - RNA, 19 nt, Artificial Sequence
  Description of Artificial Sequence: Synthetic oligonucleotide
guaugugagaaacagggua

SEQ ID NO: 1375428 - RNA, 19 nt, Artificial Sequence
  Description of Artificial Sequence: Synthetic oligonucleotide
accucuagaacauaacauu

SEQ ID NO: 1375429 - RNA, 19 nt, Artificial Sequence
  Description of Artificial Sequence: Synthetic oligonucleotide
uggauggauuaucacacuc

SEQ ID NO: 1375430 - RNA, 19 nt, Artificial Sequence
  Description of Artificial Sequence: Synthetic oligonucleotide
uucguuuuagcugacuguc

SEQ ID NO: 1375431 - RNA, 19 nt, Artificial Sequence
  Description of Artificial Sequence: Synthetic oligonucleotide
ucuaggagcccaguaaugu

SEQ ID NO: 1375432 - RNA, 19 nt, Artificial Sequence
  Description of Artificial Sequence: Synthetic oligonucleotide
auaacaccccaguagcaug

SEQ ID NO: 1375433 - RNA, 19 nt, Artificial Sequence
  Description of Artificial Sequence: Synthetic oligonucleotide
auaacuauucugccauaca

SEQ ID NO: 1375434 - RNA, 19 nt, Artificial Sequence
  Description of Artificial Sequence: Synthetic oligonucleotide
uaaucaaucuggguguggu

SEQ ID NO: 1375435 - RNA, 19 nt, Artificial Sequence
  Description of Artificial Sequence: Synthetic oligonucleotide
agauaagucugugcucacc

SEQ ID NO: 1375436 - RNA, 19 nt, Artificial Sequence
  Description of Artificial Sequence: Synthetic oligonucleotide
ucuuuaccgaagaauuuua

SEQ ID NO: 1375437 - RNA, 19 nt, Artificial Sequence
  Description of Artificial Sequence: Synthetic oligonucleotide
uggcacaucaauccugagu

SEQ ID NO: 1375438 - RNA, 19 nt, Artificial Sequence
  Description of Artificial Sequence: Synthetic oligonucleotide
uuuggacuuacaggaacag

SEQ ID NO: 1375439 - RNA, 19 nt, Artificial Sequence
  Description of Artificial Sequence: Synthetic oligonucleotide
uccggauuaauggagugga

SEQ ID NO: 1375440 - RNA, 19 nt, Artificial Sequence
  Description of Artificial Sequence: Synthetic oligonucleotide
aaauugaucuggaauuaaa

SEQ ID NO: 1375441 - RNA, 19 nt, Artificial Sequence
  Description of Artificial Sequence: Synthetic oligonucleotide
gaacauaacauucuauuuu

SEQ ID NO: 1375442 - RNA, 19 nt, Artificial Sequence
  Description of Artificial Sequence: Synthetic oligonucleotide
caaguguaucauaagaaaa

SEQ ID NO: 1375443 - RNA, 19 nt, Artificial Sequence
  Description of Artificial Sequence: Synthetic oligonucleotide
accccaguagcauggauug

SEQ ID NO: 1375444 - RNA, 19 nt, Artificial Sequence
  Description of Artificial Sequence: Synthetic oligonucleotide
uaucacuaucuucuaugcu

SEQ ID NO: 1375445 - RNA, 19 nt, Artificial Sequence
  Description of Artificial Sequence: Synthetic oligonucleotide
guaccucuagaacauaaca

SEQ ID NO: 1375446 - RNA, 19 nt, Artificial Sequence
  Description of Artificial Sequence: Synthetic oligonucleotide
aaagggcacuuaucuagca

SEQ ID NO: 1375447 - RNA, 19 nt, Artificial Sequence
  Description of Artificial Sequence: Synthetic oligonucleotide
ucuaaaacuaacggagaau

SEQ ID NO: 1375448 - RNA, 19 nt, Artificial Sequence
  Description of Artificial Sequence: Synthetic oligonucleotide
uaauuacauuaucauggau

SEQ ID NO: 1375449 - RNA, 19 nt, Artificial Sequence
  Description of Artificial Sequence: Synthetic oligonucleotide
uacugauaguguagauuag

SEQ ID NO: 1375450 - RNA, 19 nt, Artificial Sequence
  Description of Artificial Sequence: Synthetic oligonucleotide
caugaguucacugauaugu

SEQ ID NO: 1375451 - RNA, 19 nt, Artificial Sequence
  Description of Artificial Sequence: Synthetic oligonucleotide
ucugccauacaagaauacu

SEQ ID NO: 1375452 - RNA, 19 nt, Artificial Sequence
  Description of Artificial Sequence: Synthetic oligonucleotide
auuucuaguagcgauuaaa

SEQ ID NO: 1375453 - RNA, 19 nt, Artificial Sequence
  Description of Artificial Sequence: Synthetic oligonucleotide
ugcagaacaaauguaccuc

SEQ ID NO: 1375454 - RNA, 19 nt, Artificial Sequence
  Description of Artificial Sequence: Synthetic oligonucleotide
gaauggaagacacauggau

SEQ ID NO: 1375455 - RNA, 19 nt, Artificial Sequence
  Description of Artificial Sequence: Synthetic oligonucleotide
gcgucuaaaacuaacggag

SEQ ID NO: 1375456 - RNA, 19 nt, Artificial Sequence
  Description of Artificial Sequence: Synthetic oligonucleotide
ucauuguugcucuggcaca

SEQ ID NO: 1375457 - RNA, 19 nt, Artificial Sequence
  Description of Artificial Sequence: Synthetic oligonucleotide
ccuuauaauguucuaggag

SEQ ID NO: 1375458 - RNA, 19 nt, Artificial Sequence
  Description of Artificial Sequence: Synthetic oligonucleotide
uuaucauggauggauuauc

SEQ ID NO: 1375459 - RNA, 19 nt, Artificial Sequence
  Description of Artificial Sequence: Synthetic oligonucleotide
caauuacaaauaacuguuc

SEQ ID NO: 1375460 - RNA, 19 nt, Artificial Sequence
  Description of Artificial Sequence: Synthetic oligonucleotide
aagcacuggugguaguugu

SEQ ID NO: 1375461 - RNA, 19 nt, Artificial Sequence
  Description of Artificial Sequence: Synthetic oligonucleotide
cuaaaucagauggagguga

SEQ ID NO: 1375462 - RNA, 19 nt, Artificial Sequence
  Description of Artificial Sequence: Synthetic oligonucleotide
aaaccauuuuguugccuaa

SEQ ID NO: 1375463 - RNA, 19 nt, Artificial Sequence
  Description of Artificial Sequence: Synthetic oligonucleotide
uucuggcgugaagagaacg

SEQ ID NO: 1375464 - RNA, 19 nt, Artificial Sequence
  Description of Artificial Sequence: Synthetic oligonucleotide
ucguuuuagcugacugucc

SEQ ID NO: 1375465 - RNA, 19 nt, Artificial Sequence
  Description of Artificial Sequence: Synthetic oligonucleotide
guaaccuaacuuuugauuu

SEQ ID NO: 1375466 - RNA, 19 nt, Artificial Sequence
  Description of Artificial Sequence: Synthetic oligonucleotide
acggagaauaaauaaucuu

SEQ ID NO: 1375467 - RNA, 19 nt, Artificial Sequence
  Description of Artificial Sequence: Synthetic oligonucleotide
auuugugaccaaguucauc

SEQ ID NO: 1375468 - RNA, 19 nt, Artificial Sequence
  Description of Artificial Sequence: Synthetic oligonucleotide
cuuaucuagcaugaguuca

SEQ ID NO: 1375469 - RNA, 19 nt, Artificial Sequence
  Description of Artificial Sequence: Synthetic oligonucleotide
gauucuaacugccuuuagu

SEQ ID NO: 1375470 - RNA, 19 nt, Artificial Sequence
  Description of Artificial Sequence: Synthetic oligonucleotide
acuauagcgucuaaaacua

SEQ ID NO: 1375471 - RNA, 19 nt, Artificial Sequence
  Description of Artificial Sequence: Synthetic oligonucleotide
gaaagggcacuuaucuagc

SEQ ID NO: 1375472 - RNA, 19 nt, Artificial Sequence
  Description of Artificial Sequence: Synthetic oligonucleotide
cuuauccauaacaccccag

SEQ ID NO: 1375473 - RNA, 19 nt, Artificial Sequence
  Description of Artificial Sequence: Synthetic oligonucleotide
ggauuaauggaguggauaa

SEQ ID NO: 1375474 - RNA, 19 nt, Artificial Sequence
  Description of Artificial Sequence: Synthetic oligonucleotide
uggaagggcaucgaugcca

SEQ ID NO: 1375475 - RNA, 19 nt, Artificial Sequence
  Description of Artificial Sequence: Synthetic oligonucleotide
uaaauugaucuggaauuaa

SEQ ID NO: 1375476 - RNA, 19 nt, Artificial Sequence
  Description of Artificial Sequence: Synthetic oligonucleotide
aauaacuguucugcaaaua

SEQ ID NO: 1375477 - RNA, 19 nt, Artificial Sequence
  Description of Artificial Sequence: Synthetic oligonucleotide
acuuauccauaacacccca

SEQ ID NO: 1375478 - RNA, 19 nt, Artificial Sequence
  Description of Artificial Sequence: Synthetic oligonucleotide
uaaccuaacuuuugauuua

SEQ ID NO: 1375479 - RNA, 19 nt, Artificial Sequence
  Description of Artificial Sequence: Synthetic oligonucleotide
aagggcacuuaucuagcau

SEQ ID NO: 1375480 - RNA, 19 nt, Artificial Sequence
  Description of Artificial Sequence: Synthetic oligonucleotide
acuuggguccuuauaaugu

SEQ ID NO: 1375481 - RNA, 19 nt, Artificial Sequence
  Description of Artificial Sequence: Synthetic oligonucleotide
uuuuagcugacugucccuc

SEQ ID NO: 1375482 - RNA, 19 nt, Artificial Sequence
  Description of Artificial Sequence: Synthetic oligonucleotide
aucuggaauuaaaauuuag

SEQ ID NO: 1375483 - RNA, 19 nt, Artificial Sequence
  Description of Artificial Sequence: Synthetic oligonucleotide
ucccucaauuuacucucag

SEQ ID NO: 1375484 - RNA, 19 nt, Artificial Sequence
  Description of Artificial Sequence: Synthetic oligonucleotide
uuaucacacucaucuuuac

SEQ ID NO: 1375485 - RNA, 19 nt, Artificial Sequence
  Description of Artificial Sequence: Synthetic oligonucleotide
auaaauugaucuggaauua

SEQ ID NO: 1375486 - RNA, 19 nt, Artificial Sequence
  Description of Artificial Sequence: Synthetic oligonucleotide
auuaucauggauggauuau

SEQ ID NO: 1375487 - RNA, 19 nt, Artificial Sequence
  Description of Artificial Sequence: Synthetic oligonucleotide
gucuaaaacuaacggagaa

SEQ ID NO: 1375488 - RNA, 19 nt, Artificial Sequence
  Description of Artificial Sequence: Synthetic oligonucleotide
guguuauaauuucauccuc

SEQ ID NO: 1375489 - RNA, 19 nt, Artificial Sequence
  Description of Artificial Sequence: Synthetic oligonucleotide
aaccuaacuuuugauuuau

SEQ ID NO: 1375490 - RNA, 19 nt, Artificial Sequence
  Description of Artificial Sequence: Synthetic oligonucleotide
aguugugacacaaggcuga

SEQ ID NO: 1375491 - RNA, 19 nt, Artificial Sequence
  Description of Artificial Sequence: Synthetic oligonucleotide
cguuuaauaaaaugccacc

SEQ ID NO: 1375492 - RNA, 19 nt, Artificial Sequence
  Description of Artificial Sequence: Synthetic oligonucleotide
auccugaguaaccuaacuu

SEQ ID NO: 1375493 - RNA, 19 nt, Artificial Sequence
  Description of Artificial Sequence: Synthetic oligonucleotide
ucaaucuggguguggugcu

SEQ ID NO: 1375494 - RNA, 19 nt, Artificial Sequence
  Description of Artificial Sequence: Synthetic oligonucleotide
aucuagcaugaguucacug

SEQ ID NO: 1375495 - RNA, 19 nt, Artificial Sequence
  Description of Artificial Sequence: Synthetic oligonucleotide
ugucaggagaauggaagac

SEQ ID NO: 1375496 - RNA, 19 nt, Artificial Sequence
  Description of Artificial Sequence: Synthetic oligonucleotide
auauaacaaguguaucaua

SEQ ID NO: 1375497 - RNA, 19 nt, Artificial Sequence
  Description of Artificial Sequence: Synthetic oligonucleotide
uuuagcugacugucccuca

SEQ ID NO: 1375498 - RNA, 19 nt, Artificial Sequence
  Description of Artificial Sequence: Synthetic oligonucleotide
aacuaacggagaauaaaua

SEQ ID NO: 1375499 - RNA, 19 nt, Artificial Sequence
  Description of Artificial Sequence: Synthetic oligonucleotide
cuagcagagcuucggcugc

SEQ ID NO: 1375500 - RNA, 19 nt, Artificial Sequence
  Description of Artificial Sequence: Synthetic oligonucleotide
aguccggauuaauggagug

SEQ ID NO: 1375501 - RNA, 19 nt, Artificial Sequence
  Description of Artificial Sequence: Synthetic oligonucleotide
aacugccuuuaguaggaaa

SEQ ID NO: 1375502 - RNA, 19 nt, Artificial Sequence
  Description of Artificial Sequence: Synthetic oligonucleotide
uuuccuucuagcagagcuu

SEQ ID NO: 1375503 - RNA, 19 nt, Artificial Sequence
  Description of Artificial Sequence: Synthetic oligonucleotide
cuuccugugcugagucucg

SEQ ID NO: 1375504 - RNA, 19 nt, Artificial Sequence
  Description of Artificial Sequence: Synthetic oligonucleotide
uccuucuagcagagcuucg

SEQ ID NO: 1375505 - RNA, 19 nt, Artificial Sequence
  Description of Artificial Sequence: Synthetic oligonucleotide
gguccuuauaauguucuag

SEQ ID NO: 1375506 - RNA, 19 nt, Artificial Sequence
  Description of Artificial Sequence: Synthetic oligonucleotide
aacgacuauagcgucuaaa

SEQ ID NO: 1375507 - RNA, 19 nt, Artificial Sequence
  Description of Artificial Sequence: Synthetic oligonucleotide
ucggcugcguacuuaucca

SEQ ID NO: 1375508 - RNA, 19 nt, Artificial Sequence
  Description of Artificial Sequence: Synthetic oligonucleotide
ucgaugccaucguaaguug

SEQ ID NO: 1375509 - RNA, 19 nt, Artificial Sequence
  Description of Artificial Sequence: Synthetic oligonucleotide
ugugagaaacaggguaugu

SEQ ID NO: 1375510 - RNA, 19 nt, Artificial Sequence
  Description of Artificial Sequence: Synthetic oligonucleotide
augccaucguaaguuguac

SEQ ID NO: 1375511 - RNA, 19 nt, Artificial Sequence
  Description of Artificial Sequence: Synthetic oligonucleotide
auacaagaauacugauagu

SEQ ID NO: 1375512 - RNA, 19 nt, Artificial Sequence
  Description of Artificial Sequence: Synthetic oligonucleotide
auaagucugugcucaccca

SEQ ID NO: 1375513 - RNA, 19 nt, Artificial Sequence
  Description of Artificial Sequence: Synthetic oligonucleotide
cuaacggagaauaaauaau

SEQ ID NO: 1375514 - RNA, 19 nt, Artificial Sequence
  Description of Artificial Sequence: Synthetic oligonucleotide
guucaauucuggcgugaag

SEQ ID NO: 1375515 - RNA, 19 nt, Artificial Sequence
  Description of Artificial Sequence: Synthetic oligonucleotide
ugccaucguaaguuguaca

SEQ ID NO: 1375516 - RNA, 19 nt, Artificial Sequence
  Description of Artificial Sequence: Synthetic oligonucleotide
aggcuaaaucagauggagg

SEQ ID NO: 1375517 - RNA, 19 nt, Artificial Sequence
  Description of Artificial Sequence: Synthetic oligonucleotide
gguaguugugacacaaggc

SEQ ID NO: 1375518 - RNA, 19 nt, Artificial Sequence
  Description of Artificial Sequence: Synthetic oligonucleotide
cuaggagcccaguaauguc

SEQ ID NO: 1375519 - RNA, 19 nt, Artificial Sequence
  Description of Artificial Sequence: Synthetic oligonucleotide
cauguagcaaagagcagaa

SEQ ID NO: 1375520 - RNA, 19 nt, Artificial Sequence
  Description of Artificial Sequence: Synthetic oligonucleotide
aaaucagauggaggugaga

SEQ ID NO: 1375521 - RNA, 19 nt, Artificial Sequence
  Description of Artificial Sequence: Synthetic oligonucleotide
aaguccggauuaauggagu

SEQ ID NO: 1375522 - RNA, 19 nt, Artificial Sequence
  Description of Artificial Sequence: Synthetic oligonucleotide
ccucuagaacauaacauuc

SEQ ID NO: 1375523 - RNA, 19 nt, Artificial Sequence
  Description of Artificial Sequence: Synthetic oligonucleotide
aaagugguucaaagaacau

SEQ ID NO: 1375524 - RNA, 19 nt, Artificial Sequence
  Description of Artificial Sequence: Synthetic oligonucleotide
guccggauuaauggagugg

SEQ ID NO: 1375525 - RNA, 19 nt, Artificial Sequence
  Description of Artificial Sequence: Synthetic oligonucleotide
caguagcauggauuguuac

SEQ ID NO: 1375526 - RNA, 19 nt, Artificial Sequence
  Description of Artificial Sequence: Synthetic oligonucleotide
auguaugcaaguccacauu

SEQ ID NO: 1375527 - RNA, 19 nt, Artificial Sequence
  Description of Artificial Sequence: Synthetic oligonucleotide
ccgaagaauuuuaaaauga

SEQ ID NO: 1375528 - RNA, 19 nt, Artificial Sequence
  Description of Artificial Sequence: Synthetic oligonucleotide
cucaauuuacucucagaua

SEQ ID NO: 1375529 - RNA, 19 nt, Artificial Sequence
  Description of Artificial Sequence: Synthetic oligonucleotide
guuauguggccaccucuac

SEQ ID NO: 1375530 - RNA, 19 nt, Artificial Sequence
  Description of Artificial Sequence: Synthetic oligonucleotide
caucugauuuuggacuuac

SEQ ID NO: 1375531 - RNA, 19 nt, Artificial Sequence
  Description of Artificial Sequence: Synthetic oligonucleotide
cacuguucaauucuggcgu

SEQ ID NO: 1375532 - RNA, 19 nt, Artificial Sequence
  Description of Artificial Sequence: Synthetic oligonucleotide
cauuaucauggauggauua

SEQ ID NO: 1375533 - RNA, 19 nt, Artificial Sequence
  Description of Artificial Sequence: Synthetic oligonucleotide
cauaaucaaucugggugug

SEQ ID NO: 1375534 - RNA, 19 nt, Artificial Sequence
  Description of Artificial Sequence: Synthetic oligonucleotide
aggaacaguaugccguuua

SEQ ID NO: 1375535 - RNA, 19 nt, Artificial Sequence
  Description of Artificial Sequence: Synthetic oligonucleotide
cuuuaccgaagaauuuuaa

SEQ ID NO: 1375536 - RNA, 19 nt, Artificial Sequence
  Description of Artificial Sequence: Synthetic oligonucleotide
uuggacuuacaggaacagu

SEQ ID NO: 1375537 - RNA, 19 nt, Artificial Sequence
  Description of Artificial Sequence: Synthetic oligonucleotide
uccauaucacuaucuucua

SEQ ID NO: 1375538 - RNA, 19 nt, Artificial Sequence
  Description of Artificial Sequence: Synthetic oligonucleotide
cuugggaggugccuccaac

SEQ ID NO: 1375539 - RNA, 19 nt, Artificial Sequence
  Description of Artificial Sequence: Synthetic oligonucleotide
gugacacaaggcugaacac

SEQ ID NO: 1375540 - RNA, 19 nt, Artificial Sequence
  Description of Artificial Sequence: Synthetic oligonucleotide
ugccuuacugcagaacaaa

SEQ ID NO: 1375541 - RNA, 19 nt, Artificial Sequence
  Description of Artificial Sequence: Synthetic oligonucleotide
uuacauuaucauggaugga

SEQ ID NO: 1375542 - RNA, 19 nt, Artificial Sequence
  Description of Artificial Sequence: Synthetic oligonucleotide
gucaggagaauggaagaca

SEQ ID NO: 1375543 - RNA, 19 nt, Artificial Sequence
  Description of Artificial Sequence: Synthetic oligonucleotide
agcuaaaguugugauucca

SEQ ID NO: 1375544 - RNA, 19 nt, Artificial Sequence
  Description of Artificial Sequence: Synthetic oligonucleotide
accuaaaggcuaaaucaga

SEQ ID NO: 1375545 - RNA, 19 nt, Artificial Sequence
  Description of Artificial Sequence: Synthetic oligonucleotide
gagaaagggcacuuaucua

SEQ ID NO: 1375546 - RNA, 19 nt, Artificial Sequence
  Description of Artificial Sequence: Synthetic oligonucleotide
aaaugccaccuaaaggcua

SEQ ID NO: 1375547 - RNA, 19 nt, Artificial Sequence
  Description of Artificial Sequence: Synthetic oligonucleotide
aucaugggcaucaaagcua

SEQ ID NO: 1375548 - RNA, 19 nt, Artificial Sequence
  Description of Artificial Sequence: Synthetic oligonucleotide
acaagaagcacugguggua

SEQ ID NO: 1375549 - RNA, 19 nt, Artificial Sequence
  Description of Artificial Sequence: Synthetic oligonucleotide
agaacgacuauagcgucua

SEQ ID NO: 1375550 - RNA, 19 nt, Artificial Sequence
  Description of Artificial Sequence: Synthetic oligonucleotide
cuucuaugcuguuauuugu

SEQ ID NO: 1375551 - RNA, 19 nt, Artificial Sequence
  Description of Artificial Sequence: Synthetic oligonucleotide
guugccuaacauuucuagu

SEQ ID NO: 1375552 - RNA, 19 nt, Artificial Sequence
  Description of Artificial Sequence: Synthetic oligonucleotide
guagcaaagagcagaagau

SEQ ID NO: 1375553 - RNA, 19 nt, Artificial Sequence
  Description of Artificial Sequence: Synthetic oligonucleotide
gauuuuggacuuacaggaa

SEQ ID NO: 1375554 - RNA, 19 nt, Artificial Sequence
  Description of Artificial Sequence: Synthetic oligonucleotide
caaagaacauacaggcacu

SEQ ID NO: 1375555 - RNA, 19 nt, Artificial Sequence
  Description of Artificial Sequence: Synthetic oligonucleotide
cguuuuagcugacuguccc

SEQ ID NO: 1375556 - RNA, 19 nt, Artificial Sequence
  Description of Artificial Sequence: Synthetic oligonucleotide
accuuucuccaucauuguu

SEQ ID NO: 1375557 - RNA, 19 nt, Artificial Sequence
  Description of Artificial Sequence: Synthetic oligonucleotide
uugugaccaaguucaucau

SEQ ID NO: 1375558 - RNA, 19 nt, Artificial Sequence
  Description of Artificial Sequence: Synthetic oligonucleotide
cugugcucacccauucauc

SEQ ID NO: 1375559 - RNA, 19 nt, Artificial Sequence
  Description of Artificial Sequence: Synthetic oligonucleotide
uagagccaguuauguggcc

SEQ ID NO: 1375560 - RNA, 19 nt, Artificial Sequence
  Description of Artificial Sequence: Synthetic oligonucleotide
gaugccaucguaaguugua

SEQ ID NO: 1375561 - RNA, 19 nt, Artificial Sequence
  Description of Artificial Sequence: Synthetic oligonucleotide
gaaacaggguaugucuucu

SEQ ID NO: 1375562 - RNA, 19 nt, Artificial Sequence
  Description of Artificial Sequence: Synthetic oligonucleotide
aauguaccucuagaacaua

SEQ ID NO: 1375563 - RNA, 19 nt, Artificial Sequence
  Description of Artificial Sequence: Synthetic oligonucleotide
agggcaucgaugccaucgu

SEQ ID NO: 1375564 - RNA, 19 nt, Artificial Sequence
  Description of Artificial Sequence: Synthetic oligonucleotide
gccuaacauuucuaguagc

SEQ ID NO: 1375565 - RNA, 19 nt, Artificial Sequence
  Description of Artificial Sequence: Synthetic oligonucleotide
agccaguuauguggccacc

SEQ ID NO: 1375566 - RNA, 19 nt, Artificial Sequence
  Description of Artificial Sequence: Synthetic oligonucleotide
gcguacuuauccauaacac

SEQ ID NO: 1375567 - RNA, 19 nt, Artificial Sequence
  Description of Artificial Sequence: Synthetic oligonucleotide
aguuauguggccaccucua

SEQ ID NO: 1375568 - RNA, 19 nt, Artificial Sequence
  Description of Artificial Sequence: Synthetic oligonucleotide
gcuaaaucagauggaggug

SEQ ID NO: 1375569 - RNA, 19 nt, Artificial Sequence
  Description of Artificial Sequence: Synthetic oligonucleotide
gcuaaaguugugauuccac

SEQ ID NO: 1375570 - RNA, 19 nt, Artificial Sequence
  Description of Artificial Sequence: Synthetic oligonucleotide
ggauggauuaucacacuca

SEQ ID NO: 1375571 - RNA, 19 nt, Artificial Sequence
  Description of Artificial Sequence: Synthetic oligonucleotide
gaguaaccuaacuuuugau

SEQ ID NO: 1375572 - RNA, 19 nt, Artificial Sequence
  Description of Artificial Sequence: Synthetic oligonucleotide
cuucguuuuagcugacugu

SEQ ID NO: 1375573 - RNA, 19 nt, Artificial Sequence
  Description of Artificial Sequence: Synthetic oligonucleotide
auucuggcgugaagagaac

SEQ ID NO: 1375574 - RNA, 19 nt, Artificial Sequence
  Description of Artificial Sequence: Synthetic oligonucleotide
cguaaguuguacaauuaca

SEQ ID NO: 1375575 - RNA, 19 nt, Artificial Sequence
  Description of Artificial Sequence: Synthetic oligonucleotide
gccaucguaaguuguacaa

SEQ ID NO: 1375576 - RNA, 19 nt, Artificial Sequence
  Description of Artificial Sequence: Synthetic oligonucleotide
ccugccuuacugcagaaca

SEQ ID NO: 1375577 - RNA, 19 nt, Artificial Sequence
  Description of Artificial Sequence: Synthetic oligonucleotide
aggguaugucuucuuccau

SEQ ID NO: 1375578 - RNA, 19 nt, Artificial Sequence
  Description of Artificial Sequence: Synthetic oligonucleotide
aucguaaguuguacaauua

SEQ ID NO: 1375579 - RNA, 19 nt, Artificial Sequence
  Description of Artificial Sequence: Synthetic oligonucleotide
gaauuggaagggcaucgau

SEQ ID NO: 1375580 - RNA, 19 nt, Artificial Sequence
  Description of Artificial Sequence: Synthetic oligonucleotide
uaucuucuaugcuguuauu

SEQ ID NO: 1375581 - RNA, 19 nt, Artificial Sequence
  Description of Artificial Sequence: Synthetic oligonucleotide
uucuucguuuuagcugacu

SEQ ID NO: 1375582 - RNA, 19 nt, Artificial Sequence
  Description of Artificial Sequence: Synthetic oligonucleotide
cugcguacuuauccauaac

SEQ ID NO: 1375583 - RNA, 19 nt, Artificial Sequence
  Description of Artificial Sequence: Synthetic oligonucleotide
cucaucuuuaccgaagaau

SEQ ID NO: 1375584 - RNA, 19 nt, Artificial Sequence
  Description of Artificial Sequence: Synthetic oligonucleotide
gugguaguugugacacaag

SEQ ID NO: 1375585 - RNA, 19 nt, Artificial Sequence
  Description of Artificial Sequence: Synthetic oligonucleotide
ggugguaguugugacacaa

SEQ ID NO: 1375586 - RNA, 19 nt, Artificial Sequence
  Description of Artificial Sequence: Synthetic oligonucleotide
cuauagcgucuaaaacuaa

SEQ ID NO: 1375587 - RNA, 19 nt, Artificial Sequence
  Description of Artificial Sequence: Synthetic oligonucleotide
cgacuauagcgucuaaaac

SEQ ID NO: 1375588 - RNA, 19 nt, Artificial Sequence
  Description of Artificial Sequence: Synthetic oligonucleotide
caaguucaucauagagcca

SEQ ID NO: 1375589 - RNA, 19 nt, Artificial Sequence
  Description of Artificial Sequence: Synthetic oligonucleotide
ccucaauuuacucucagau

SEQ ID NO: 1375590 - RNA, 19 nt, Artificial Sequence
  Description of Artificial Sequence: Synthetic oligonucleotide
caggagaauggaagacaca

SEQ ID NO: 1375591 - RNA, 19 nt, Artificial Sequence
  Description of Artificial Sequence: Synthetic oligonucleotide
cccaguaaugucaggagaa

SEQ ID NO: 1375592 - RNA, 19 nt, Artificial Sequence
  Description of Artificial Sequence: Synthetic oligonucleotide
ccauacaagaauacugaua

SEQ ID NO: 1375593 - RNA, 19 nt, Artificial Sequence
  Description of Artificial Sequence: Synthetic oligonucleotide
cccauucaucugauuuugg

SEQ ID NO: 1375594 - RNA, 19 nt, Artificial Sequence
  Description of Artificial Sequence: Synthetic oligonucleotide
augcaaguccacauucuua

SEQ ID NO: 1375595 - RNA, 19 nt, Artificial Sequence
  Description of Artificial Sequence: Synthetic oligonucleotide
caucaauccugaguaaccu

SEQ ID NO: 1375596 - RNA, 19 nt, Artificial Sequence
  Description of Artificial Sequence: Synthetic oligonucleotide
augaguucacugauaugua

SEQ ID NO: 1375597 - RNA, 19 nt, Artificial Sequence
  Description of Artificial Sequence: Synthetic oligonucleotide
gcacuuaucuagcaugagu

SEQ ID NO: 1375598 - RNA, 19 nt, Artificial Sequence
  Description of Artificial Sequence: Synthetic oligonucleotide
ggaacaguaugccguuuaa

SEQ ID NO: 1375599 - RNA, 19 nt, Artificial Sequence
  Description of Artificial Sequence: Synthetic oligonucleotide
cugccuuacugcagaacaa

SEQ ID NO: 1375600 - RNA, 19 nt, Artificial Sequence
  Description of Artificial Sequence: Synthetic oligonucleotide
ggugagaaagggcacuuau

SEQ ID NO: 1375601 - RNA, 19 nt, Artificial Sequence
  Description of Artificial Sequence: Synthetic oligonucleotide
gagaacgacuauagcgucu

SEQ ID NO: 1375602 - RNA, 19 nt, Artificial Sequence
  Description of Artificial Sequence: Synthetic oligonucleotide
ggcgugaagagaacgacua

SEQ ID NO: 1375603 - RNA, 19 nt, Artificial Sequence
  Description of Artificial Sequence: Synthetic oligonucleotide
gcccaguaaugucaggaga

SEQ ID NO: 1375604 - RNA, 19 nt, Artificial Sequence
  Description of Artificial Sequence: Synthetic oligonucleotide
ugccaccuaaaggcuaaau

SEQ ID NO: 1375605 - RNA, 19 nt, Artificial Sequence
  Description of Artificial Sequence: Synthetic oligonucleotide
cauaacaccccaguagcau

SEQ ID NO: 1375606 - RNA, 19 nt, Artificial Sequence
  Description of Artificial Sequence: Synthetic oligonucleotide
aucugauuuuggacuuaca

SEQ ID NO: 1375607 - RNA, 19 nt, Artificial Sequence
  Description of Artificial Sequence: Synthetic oligonucleotide
caauaacuauucugccaua

SEQ ID NO: 1375608 - RNA, 19 nt, Artificial Sequence
  Description of Artificial Sequence: Synthetic oligonucleotide
cacaaggcugaacacuggu

SEQ ID NO: 1375609 - RNA, 19 nt, Artificial Sequence
  Description of Artificial Sequence: Synthetic oligonucleotide
ggcacuuaucuagcaugag

SEQ ID NO: 1375610 - RNA, 19 nt, Artificial Sequence
  Description of Artificial Sequence: Synthetic oligonucleotide
cauuucccaccugggcuug

SEQ ID NO: 1375611 - RNA, 19 nt, Artificial Sequence
  Description of Artificial Sequence: Synthetic oligonucleotide
acaccccaguagcauggau

SEQ ID NO: 1375612 - RNA, 19 nt, Artificial Sequence
  Description of Artificial Sequence: Synthetic oligonucleotide
gugauuccacuguucaauu

SEQ ID NO: 1375613 - RNA, 19 nt, Artificial Sequence
  Description of Artificial Sequence: Synthetic oligonucleotide
cuucggcugcguacuuauc

SEQ ID NO: 1375614 - RNA, 19 nt, Artificial Sequence
  Description of Artificial Sequence: Synthetic oligonucleotide
ggcaucgaugccaucguaa

SEQ ID NO: 1375615 - RNA, 19 nt, Artificial Sequence
  Description of Artificial Sequence: Synthetic oligonucleotide
ggaauuggaagggcaucga

SEQ ID NO: 1375616 - RNA, 19 nt, Artificial Sequence
  Description of Artificial Sequence: Synthetic oligonucleotide
gaacgacuauagcgucuaa

SEQ ID NO: 1375617 - RNA, 19 nt, Artificial Sequence
  Description of Artificial Sequence: Synthetic oligonucleotide
ggcugaacacugguaugug

SEQ ID NO: 1375618 - RNA, 19 nt, Artificial Sequence
  Description of Artificial Sequence: Synthetic oligonucleotide
guugugacacaaggcugaa

SEQ ID NO: 1375619 - RNA, 19 nt, Artificial Sequence
  Description of Artificial Sequence: Synthetic oligonucleotide
cacauggaucaugggcauc

SEQ ID NO: 1375620 - RNA, 19 nt, Artificial Sequence
  Description of Artificial Sequence: Synthetic oligonucleotide
caucgaugccaucguaagu

SEQ ID NO: 1375621 - RNA, 19 nt, Artificial Sequence
  Description of Artificial Sequence: Synthetic oligonucleotide
caccccaguagcauggauu

SEQ ID NO: 1375622 - RNA, 19 nt, Artificial Sequence
  Description of Artificial Sequence: Synthetic oligonucleotide
ccauaacaccccaguagca

SEQ ID NO: 1375623 - RNA, 19 nt, Artificial Sequence
  Description of Artificial Sequence: Synthetic oligonucleotide
gguaugugagaaacagggu

SEQ ID NO: 1375624 - RNA, 19 nt, Artificial Sequence
  Description of Artificial Sequence: Synthetic oligonucleotide
cccucaauuuacucucaga

SEQ ID NO: 1375625 - RNA, 19 nt, Artificial Sequence
  Description of Artificial Sequence: Synthetic oligonucleotide
aggugagaaagggcacuua

SEQ ID NO: 1375626 - RNA, 19 nt, Artificial Sequence
  Description of Artificial Sequence: Synthetic oligonucleotide
gccauacaagaauacugau

SEQ ID NO: 1375627 - RNA, 19 nt, Artificial Sequence
  Description of Artificial Sequence: Synthetic oligonucleotide
gucccucaauuuacucuca

SEQ ID NO: 1375628 - RNA, 19 nt, Artificial Sequence
  Description of Artificial Sequence: Synthetic oligonucleotide
ggacuuacaggaacaguau

SEQ ID NO: 1375629 - RNA, 19 nt, Artificial Sequence
  Description of Artificial Sequence: Synthetic oligonucleotide
ccucuacaagaagcacugg

SEQ ID NO: 1375630 - RNA, 19 nt, Artificial Sequence
  Description of Artificial Sequence: Synthetic oligonucleotide
gcacaucaauccugaguaa

SEQ ID NO: 1375631 - RNA, 19 nt, Artificial Sequence
  Description of Artificial Sequence: Synthetic oligonucleotide
agcuucggcugcguacuua

SEQ ID NO: 1375632 - RNA, 19 nt, Artificial Sequence
  Description of Artificial Sequence: Synthetic oligonucleotide
ccugaguaaccuaacuuuu

SEQ ID NO: 1375633 - RNA, 19 nt, Artificial Sequence
  Description of Artificial Sequence: Synthetic oligonucleotide
ggauuaucacacucaucuu

SEQ ID NO: 1375634 - RNA, 19 nt, Artificial Sequence
  Description of Artificial Sequence: Synthetic oligonucleotide
ccaguagcauggauuguua

SEQ ID NO: 1375635 - RNA, 19 nt, Artificial Sequence
  Description of Artificial Sequence: Synthetic oligonucleotide
ugccuccaacuggaggauu

SEQ ID NO: 1375636 - RNA, 19 nt, Artificial Sequence
  Description of Artificial Sequence: Synthetic oligonucleotide
cgugaagagaacgacuaua

SEQ ID NO: 1375637 - RNA, 19 nt, Artificial Sequence
  Description of Artificial Sequence: Synthetic oligonucleotide
gcugacugucccucaauuu

SEQ ID NO: 1375638 - RNA, 19 nt, Artificial Sequence
  Description of Artificial Sequence: Synthetic oligonucleotide
cggauuaauggaguggaua

SEQ ID NO: 1375639 - RNA, 19 nt, Artificial Sequence
  Description of Artificial Sequence: Synthetic oligonucleotide
ggcugcguacuuauccaua

SEQ ID NO: 1375640 - RNA, 19 nt, Artificial Sequence
  Description of Artificial Sequence: Synthetic oligonucleotide
ccauaucacuaucuucuau

SEQ ID NO: 1375641 - RNA, 19 nt, Artificial Sequence
  Description of Artificial Sequence: Synthetic oligonucleotide
ggaagggcaucgaugccau

SEQ ID NO: 1375642 - RNA, 19 nt, Artificial Sequence
  Description of Artificial Sequence: Synthetic oligonucleotide
gccaguuauguggccaccu

SEQ ID NO: 1375643 - RNA, 19 nt, Artificial Sequence
  Description of Artificial Sequence: Synthetic oligonucleotide
gcgugaagagaacgacuau

SEQ ID NO: 1375644 - RNA, 19 nt, Artificial Sequence
  Description of Artificial Sequence: Synthetic oligonucleotide
caggcacuuggguccuuau

SEQ ID NO: 1375645 - RNA, 19 nt, Artificial Sequence
  Description of Artificial Sequence: Synthetic oligonucleotide
cccaguagcauggauuguu

SEQ ID NO: 1375646 - RNA, 19 nt, Artificial Sequence
  Description of Artificial Sequence: Synthetic oligonucleotide
ccaguaaugucaggagaau

SEQ ID NO: 1375647 - RNA, 19 nt, Artificial Sequence
  Description of Artificial Sequence: Synthetic oligonucleotide
gagcuucggcugcguacuu

SEQ ID NO: 1375648 - RNA, 19 nt, Artificial Sequence
  Description of Artificial Sequence: Synthetic oligonucleotide
caaucuggguguggugcuu

SEQ ID NO: 1375649 - RNA, 19 nt, Artificial Sequence
  Description of Artificial Sequence: Synthetic oligonucleotide
cgaugccaucguaaguugu

SEQ ID NO: 1375650 - RNA, 19 nt, Artificial Sequence
  Description of Artificial Sequence: Synthetic oligonucleotide
ccggauuaauggaguggau

SEQ ID NO: 1375651 - RNA, 19 nt, Artificial Sequence
  Description of Artificial Sequence: Synthetic oligonucleotide
gcucacccauucaucugau

SEQ ID NO: 1375652 - RNA, 19 nt, Artificial Sequence
  Description of Artificial Sequence: Synthetic oligonucleotide
cggcugcguacuuauccau

SEQ ID NO: 1375653 - RNA, 19 nt, Artificial Sequence
  Description of Artificial Sequence: Synthetic oligonucleotide
aaucuaauaauuuaguauc

SEQ ID NO: 1375654 - RNA, 19 nt, Artificial Sequence
  Description of Artificial Sequence: Synthetic oligonucleotide
aaauguuauaguuagaggu

SEQ ID NO: 1375655 - RNA, 19 nt, Artificial Sequence
  Description of Artificial Sequence: Synthetic oligonucleotide
uugaaagucacuuggaugg

SEQ ID NO: 1375656 - RNA, 19 nt, Artificial Sequence
  Description of Artificial Sequence: Synthetic oligonucleotide
aucuuguuaauguacaggc

SEQ ID NO: 1375657 - RNA, 19 nt, Artificial Sequence
  Description of Artificial Sequence: Synthetic oligonucleotide
auuuauaagcagcacaugg

SEQ ID NO: 1375658 - RNA, 19 nt, Artificial Sequence
  Description of Artificial Sequence: Synthetic oligonucleotide
uauaguuagagguagauaa

SEQ ID NO: 1375659 - RNA, 19 nt, Artificial Sequence
  Description of Artificial Sequence: Synthetic oligonucleotide
aaacagaucuuuccuauac

SEQ ID NO: 1375660 - RNA, 19 nt, Artificial Sequence
  Description of Artificial Sequence: Synthetic oligonucleotide
aauuagaucaauuccuucu

SEQ ID NO: 1375661 - RNA, 19 nt, Artificial Sequence
  Description of Artificial Sequence: Synthetic oligonucleotide
ucuaauuagaucaauuccu

SEQ ID NO: 1375662 - RNA, 19 nt, Artificial Sequence
  Description of Artificial Sequence: Synthetic oligonucleotide
caguguaucaccaugaaag

SEQ ID NO: 1375663 - RNA, 19 nt, Artificial Sequence
  Description of Artificial Sequence: Synthetic oligonucleotide
aaaguagaaugucagaagu

SEQ ID NO: 1375664 - RNA, 19 nt, Artificial Sequence
  Description of Artificial Sequence: Synthetic oligonucleotide
gaugggaucaugcuggugg

SEQ ID NO: 1375665 - RNA, 19 nt, Artificial Sequence
  Description of Artificial Sequence: Synthetic oligonucleotide
aaauuuaugugguauuucu

SEQ ID NO: 1375666 - RNA, 19 nt, Artificial Sequence
  Description of Artificial Sequence: Synthetic oligonucleotide
aacuaacauaaacagaucu

SEQ ID NO: 1375667 - RNA, 19 nt, Artificial Sequence
  Description of Artificial Sequence: Synthetic oligonucleotide
uucuaauuagaucaauucc

SEQ ID NO: 1375668 - RNA, 19 nt, Artificial Sequence
  Description of Artificial Sequence: Synthetic oligonucleotide
auaagcagcacauggauag

SEQ ID NO: 1375669 - RNA, 19 nt, Artificial Sequence
  Description of Artificial Sequence: Synthetic oligonucleotide
aaauucuucgcuuuugccu

SEQ ID NO: 1375670 - RNA, 19 nt, Artificial Sequence
  Description of Artificial Sequence: Synthetic oligonucleotide
agagguagauaacaguccc

SEQ ID NO: 1375671 - RNA, 19 nt, Artificial Sequence
  Description of Artificial Sequence: Synthetic oligonucleotide
ucaucuaaauuaaaguugu

SEQ ID NO: 1375672 - RNA, 19 nt, Artificial Sequence
  Description of Artificial Sequence: Synthetic oligonucleotide
uuauuuauaagcagcacau

SEQ ID NO: 1375673 - RNA, 19 nt, Artificial Sequence
  Description of Artificial Sequence: Synthetic oligonucleotide
uuauauguggcagugaaug

SEQ ID NO: 1375674 - RNA, 19 nt, Artificial Sequence
  Description of Artificial Sequence: Synthetic oligonucleotide
ugauaucauaaauucuucg

SEQ ID NO: 1375675 - RNA, 19 nt, Artificial Sequence
  Description of Artificial Sequence: Synthetic oligonucleotide
uaaauuaaaguuguaguca

SEQ ID NO: 1375676 - RNA, 19 nt, Artificial Sequence
  Description of Artificial Sequence: Synthetic oligonucleotide
aauuuaguaucugaacauc

SEQ ID NO: 1375677 - RNA, 19 nt, Artificial Sequence
  Description of Artificial Sequence: Synthetic oligonucleotide
uauacucuaggaaaguaga

SEQ ID NO: 1375678 - RNA, 19 nt, Artificial Sequence
  Description of Artificial Sequence: Synthetic oligonucleotide
aaauuaaaguuguagucau

SEQ ID NO: 1375679 - RNA, 19 nt, Artificial Sequence
  Description of Artificial Sequence: Synthetic oligonucleotide
cuaaaaugguguuacauuc

SEQ ID NO: 1375680 - RNA, 19 nt, Artificial Sequence
  Description of Artificial Sequence: Synthetic oligonucleotide
aguuguagucaucagcugg

SEQ ID NO: 1375681 - RNA, 19 nt, Artificial Sequence
  Description of Artificial Sequence: Synthetic oligonucleotide
aguguaucaccaugaaagc

SEQ ID NO: 1375682 - RNA, 19 nt, Artificial Sequence
  Description of Artificial Sequence: Synthetic oligonucleotide
uaauguacaggcauuggca

SEQ ID NO: 1375683 - RNA, 19 nt, Artificial Sequence
  Description of Artificial Sequence: Synthetic oligonucleotide
ugugaggucaucagguggg

SEQ ID NO: 1375684 - RNA, 19 nt, Artificial Sequence
  Description of Artificial Sequence: Synthetic oligonucleotide
caaauaagugaucuuuugg

SEQ ID NO: 1375685 - RNA, 19 nt, Artificial Sequence
  Description of Artificial Sequence: Synthetic oligonucleotide
ucaugaguuacauaggaaa

SEQ ID NO: 1375686 - RNA, 19 nt, Artificial Sequence
  Description of Artificial Sequence: Synthetic oligonucleotide
uuggugauaucauaaauuc

SEQ ID NO: 1375687 - RNA, 19 nt, Artificial Sequence
  Description of Artificial Sequence: Synthetic oligonucleotide
ugaacuaaaaugguguuac

SEQ ID NO: 1375688 - RNA, 19 nt, Artificial Sequence
  Description of Artificial Sequence: Synthetic oligonucleotide
acucuaggaaaguagaaug

SEQ ID NO: 1375689 - RNA, 19 nt, Artificial Sequence
  Description of Artificial Sequence: Synthetic oligonucleotide
gaggaaacacaucagaaga

SEQ ID NO: 1375690 - RNA, 19 nt, Artificial Sequence
  Description of Artificial Sequence: Synthetic oligonucleotide
aucaauuccuucuaagaca

SEQ ID NO: 1375691 - RNA, 19 nt, Artificial Sequence
  Description of Artificial Sequence: Synthetic oligonucleotide
gaucuuguuaauguacagg

SEQ ID NO: 1375692 - RNA, 19 nt, Artificial Sequence
  Description of Artificial Sequence: Synthetic oligonucleotide
ugggcaauguuucaugaug

SEQ ID NO: 1375693 - RNA, 19 nt, Artificial Sequence
  Description of Artificial Sequence: Synthetic oligonucleotide
gauagaauuaaagugcuaa

SEQ ID NO: 1375694 - RNA, 19 nt, Artificial Sequence
  Description of Artificial Sequence: Synthetic oligonucleotide
uuugagauccaggacgccg

SEQ ID NO: 1375695 - RNA, 19 nt, Artificial Sequence
  Description of Artificial Sequence: Synthetic oligonucleotide
aaaaugguguuacauucau

SEQ ID NO: 1375696 - RNA, 19 nt, Artificial Sequence
  Description of Artificial Sequence: Synthetic oligonucleotide
gaugcuuugcuguagccac

SEQ ID NO: 1375697 - RNA, 19 nt, Artificial Sequence
  Description of Artificial Sequence: Synthetic oligonucleotide
  modified_base (9)..(9): a, c, u, g, unknown or other
gaugauggngccccaggcg

SEQ ID NO: 1375698 - RNA, 19 nt, Artificial Sequence
  Description of Artificial Sequence: Synthetic oligonucleotide
uuccuauacucuaggaaag

SEQ ID NO: 1375699 - RNA, 19 nt, Artificial Sequence
  Description of Artificial Sequence: Synthetic oligonucleotide
uacagaaucagugaacuaa

SEQ ID NO: 1375700 - RNA, 19 nt, Artificial Sequence
  Description of Artificial Sequence: Synthetic oligonucleotide
ucacucaacagugaugucc

SEQ ID NO: 1375701 - RNA, 19 nt, Artificial Sequence
  Description of Artificial Sequence: Synthetic oligonucleotide
gaaucuaauaauuuaguau

SEQ ID NO: 1375702 - RNA, 19 nt, Artificial Sequence
  Description of Artificial Sequence: Synthetic oligonucleotide
uggaaucuaauaauuuagu

SEQ ID NO: 1375703 - RNA, 19 nt, Artificial Sequence
  Description of Artificial Sequence: Synthetic oligonucleotide
aauagguacuucgagcugu

SEQ ID NO: 1375704 - RNA, 19 nt, Artificial Sequence
  Description of Artificial Sequence: Synthetic oligonucleotide
uagagguagauaacagucc

SEQ ID NO: 1375705 - RNA, 19 nt, Artificial Sequence
  Description of Artificial Sequence: Synthetic oligonucleotide
uuuaaauuuaugugguauu

SEQ ID NO: 1375706 - RNA, 19 nt, Artificial Sequence
  Description of Artificial Sequence: Synthetic oligonucleotide
uuuaguaucugaacaucaa

SEQ ID NO: 1375707 - RNA, 19 nt, Artificial Sequence
  Description of Artificial Sequence: Synthetic oligonucleotide
aauguuaggaaagaacauu

SEQ ID NO: 1375708 - RNA, 19 nt, Artificial Sequence
  Description of Artificial Sequence: Synthetic oligonucleotide
  modified_base (8)..(8): a, c, u, g, unknown or other
augauggngccccaggcgg

SEQ ID NO: 1375709 - RNA, 19 nt, Artificial Sequence
  Description of Artificial Sequence: Synthetic oligonucleotide
auuuaugugguauuucuuu

SEQ ID NO: 1375710 - RNA, 19 nt, Artificial Sequence
  Description of Artificial Sequence: Synthetic oligonucleotide
aaaccuguuauuaauggaa

SEQ ID NO: 1375711 - RNA, 19 nt, Artificial Sequence
  Description of Artificial Sequence: Synthetic oligonucleotide
aaagccguaagagaggaaa

SEQ ID NO: 1375712 - RNA, 19 nt, Artificial Sequence
  Description of Artificial Sequence: Synthetic oligonucleotide
acuaauagauccugaagau

SEQ ID NO: 1375713 - RNA, 19 nt, Artificial Sequence
  Description of Artificial Sequence: Synthetic oligonucleotide
cacuaauagauccugaaga

SEQ ID NO: 1375714 - RNA, 19 nt, Artificial Sequence
  Description of Artificial Sequence: Synthetic oligonucleotide
auggaaucuaauaauuuag

SEQ ID NO: 1375715 - RNA, 19 nt, Artificial Sequence
  Description of Artificial Sequence: Synthetic oligonucleotide
uagaaugucagaagucaac

SEQ ID NO: 1375716 - RNA, 19 nt, Artificial Sequence
  Description of Artificial Sequence: Synthetic oligonucleotide
ucgucauuucaucuuuucc

SEQ ID NO: 1375717 - RNA, 19 nt, Artificial Sequence
  Description of Artificial Sequence: Synthetic oligonucleotide
gauaacagucccaaguuuc

SEQ ID NO: 1375718 - RNA, 19 nt, Artificial Sequence
  Description of Artificial Sequence: Synthetic oligonucleotide
auaacagucccaaguuucc

SEQ ID NO: 1375719 - RNA, 19 nt, Artificial Sequence
  Description of Artificial Sequence: Synthetic oligonucleotide
ucuaagacauuggugauau

SEQ ID NO: 1375720 - RNA, 19 nt, Artificial Sequence
  Description of Artificial Sequence: Synthetic oligonucleotide
uguuaauguacaggcauug

SEQ ID NO: 1375721 - RNA, 19 nt, Artificial Sequence
  Description of Artificial Sequence: Synthetic oligonucleotide
uuaaauacucagguuauua

SEQ ID NO: 1375722 - RNA, 19 nt, Artificial Sequence
  Description of Artificial Sequence: Synthetic oligonucleotide
uccuucuaagacauuggug

SEQ ID NO: 1375723 - RNA, 19 nt, Artificial Sequence
  Description of Artificial Sequence: Synthetic oligonucleotide
ugucagaagucaacaaacu

SEQ ID NO: 1375724 - RNA, 19 nt, Artificial Sequence
  Description of Artificial Sequence: Synthetic oligonucleotide
uaucauaaauucuucgcuu

SEQ ID NO: 1375725 - RNA, 19 nt, Artificial Sequence
  Description of Artificial Sequence: Synthetic oligonucleotide
uguucacucaacagugaug

SEQ ID NO: 1375726 - RNA, 19 nt, Artificial Sequence
  Description of Artificial Sequence: Synthetic oligonucleotide
caauguuucaugaugaccu

SEQ ID NO: 1375727 - RNA, 19 nt, Artificial Sequence
  Description of Artificial Sequence: Synthetic oligonucleotide
aauaacuuuguggcaauaa

SEQ ID NO: 1375728 - RNA, 19 nt, Artificial Sequence
  Description of Artificial Sequence: Synthetic oligonucleotide
ggagaaagccguaagagag

SEQ ID NO: 1375729 - RNA, 19 nt, Artificial Sequence
  Description of Artificial Sequence: Synthetic oligonucleotide
uagauaacagucccaaguu

SEQ ID NO: 1375730 - RNA, 19 nt, Artificial Sequence
  Description of Artificial Sequence: Synthetic oligonucleotide
uaguuagagguagauaaca

SEQ ID NO: 1375731 - RNA, 19 nt, Artificial Sequence
  Description of Artificial Sequence: Synthetic oligonucleotide
aauguuauaguuagaggua

SEQ ID NO: 1375732 - RNA, 19 nt, Artificial Sequence
  Description of Artificial Sequence: Synthetic oligonucleotide
auguuauaguuagagguag

SEQ ID NO: 1375733 - RNA, 19 nt, Artificial Sequence
  Description of Artificial Sequence: Synthetic oligonucleotide
uguuucaugaugaccugaa

SEQ ID NO: 1375734 - RNA, 19 nt, Artificial Sequence
  Description of Artificial Sequence: Synthetic oligonucleotide
acugauguuaaggacugag

SEQ ID NO: 1375735 - RNA, 19 nt, Artificial Sequence
  Description of Artificial Sequence: Synthetic oligonucleotide
aucuuuccuauacucuagg

SEQ ID NO: 1375736 - RNA, 19 nt, Artificial Sequence
  Description of Artificial Sequence: Synthetic oligonucleotide
auaacuuuguggcaauaaa

SEQ ID NO: 1375737 - RNA, 19 nt, Artificial Sequence
  Description of Artificial Sequence: Synthetic oligonucleotide
uuugggcaauguuucauga

SEQ ID NO: 1375738 - RNA, 19 nt, Artificial Sequence
  Description of Artificial Sequence: Synthetic oligonucleotide
agcaacgacacgaacuugg

SEQ ID NO: 1375739 - RNA, 19 nt, Artificial Sequence
  Description of Artificial Sequence: Synthetic oligonucleotide
guggcaauaaaagguaaag

SEQ ID NO: 1375740 - RNA, 19 nt, Artificial Sequence
  Description of Artificial Sequence: Synthetic oligonucleotide
uggacucuuuauuuauaag

SEQ ID NO: 1375741 - RNA, 19 nt, Artificial Sequence
  Description of Artificial Sequence: Synthetic oligonucleotide
guagauaacagucccaagu

SEQ ID NO: 1375742 - RNA, 19 nt, Artificial Sequence
  Description of Artificial Sequence: Synthetic oligonucleotide
uuuaugugguauuucuuuu

SEQ ID NO: 1375743 - RNA, 19 nt, Artificial Sequence
  Description of Artificial Sequence: Synthetic oligonucleotide
uaauuagaucaauuccuuc

SEQ ID NO: 1375744 - RNA, 19 nt, Artificial Sequence
  Description of Artificial Sequence: Synthetic oligonucleotide
ugaauggccaacaguguau

SEQ ID NO: 1375745 - RNA, 19 nt, Artificial Sequence
  Description of Artificial Sequence: Synthetic oligonucleotide
aaguuguagucaucagcug

SEQ ID NO: 1375746 - RNA, 19 nt, Artificial Sequence
  Description of Artificial Sequence: Synthetic oligonucleotide
gaagcuacugcaagaauuc

SEQ ID NO: 1375747 - RNA, 19 nt, Artificial Sequence
  Description of Artificial Sequence: Synthetic oligonucleotide
auaguuagagguagauaac

SEQ ID NO: 1375748 - RNA, 19 nt, Artificial Sequence
  Description of Artificial Sequence: Synthetic oligonucleotide
uccacuaauagauccugaa

SEQ ID NO: 1375749 - RNA, 19 nt, Artificial Sequence
  Description of Artificial Sequence: Synthetic oligonucleotide
agaucuuuccuauacucua

SEQ ID NO: 1375750 - RNA, 19 nt, Artificial Sequence
  Description of Artificial Sequence: Synthetic oligonucleotide
cuuuauauguggcagugaa

SEQ ID NO: 1375751 - RNA, 19 nt, Artificial Sequence
  Description of Artificial Sequence: Synthetic oligonucleotide
uauauguggcagugaaugu

SEQ ID NO: 1375752 - RNA, 19 nt, Artificial Sequence
  Description of Artificial Sequence: Synthetic oligonucleotide
auuuaguaucugaacauca

SEQ ID NO: 1375753 - RNA, 19 nt, Artificial Sequence
  Description of Artificial Sequence: Synthetic oligonucleotide
aggaaacacaucagaagac

SEQ ID NO: 1375754 - RNA, 19 nt, Artificial Sequence
  Description of Artificial Sequence: Synthetic oligonucleotide
aguuagagguagauaacag

SEQ ID NO: 1375755 - RNA, 19 nt, Artificial Sequence
  Description of Artificial Sequence: Synthetic oligonucleotide
uggccaacaguguaucacc

SEQ ID NO: 1375756 - RNA, 19 nt, Artificial Sequence
  Description of Artificial Sequence: Synthetic oligonucleotide
uauuuauaagcagcacaug

SEQ ID NO: 1375757 - RNA, 19 nt, Artificial Sequence
  Description of Artificial Sequence: Synthetic oligonucleotide
aacagucccaaguuuccau

SEQ ID NO: 1375758 - RNA, 19 nt, Artificial Sequence
  Description of Artificial Sequence: Synthetic oligonucleotide
ucuuuccuauacucuagga

SEQ ID NO: 1375759 - RNA, 19 nt, Artificial Sequence
  Description of Artificial Sequence: Synthetic oligonucleotide
acucagguuauuaagaauu

SEQ ID NO: 1375760 - RNA, 19 nt, Artificial Sequence
  Description of Artificial Sequence: Synthetic oligonucleotide
aucauaaauucuucgcuuu

SEQ ID NO: 1375761 - RNA, 19 nt, Artificial Sequence
  Description of Artificial Sequence: Synthetic oligonucleotide
uguucgucauuucaucuuu

SEQ ID NO: 1375762 - RNA, 19 nt, Artificial Sequence
  Description of Artificial Sequence: Synthetic oligonucleotide
ugccucacagccaaaguau

SEQ ID NO: 1375763 - RNA, 19 nt, Artificial Sequence
  Description of Artificial Sequence: Synthetic oligonucleotide
auaggaaaaccuguuauua

SEQ ID NO: 1375764 - RNA, 19 nt, Artificial Sequence
  Description of Artificial Sequence: Synthetic oligonucleotide
cauggaaucuaauaauuua

SEQ ID NO: 1375765 - RNA, 19 nt, Artificial Sequence
  Description of Artificial Sequence: Synthetic oligonucleotide
aagccguaagagaggaaac

SEQ ID NO: 1375766 - RNA, 19 nt, Artificial Sequence
  Description of Artificial Sequence: Synthetic oligonucleotide
uacugcaagaauucugcau

SEQ ID NO: 1375767 - RNA, 19 nt, Artificial Sequence
  Description of Artificial Sequence: Synthetic oligonucleotide
ucacuuuauauguggcagu

SEQ ID NO: 1375768 - RNA, 19 nt, Artificial Sequence
  Description of Artificial Sequence: Synthetic oligonucleotide
ugacccauuucuggaauag

SEQ ID NO: 1375769 - RNA, 19 nt, Artificial Sequence
  Description of Artificial Sequence: Synthetic oligonucleotide
gguacuucgagcuguguac

SEQ ID NO: 1375770 - RNA, 19 nt, Artificial Sequence
  Description of Artificial Sequence: Synthetic oligonucleotide
auaaaauguuaggaaagaa

SEQ ID NO: 1375771 - RNA, 19 nt, Artificial Sequence
  Description of Artificial Sequence: Synthetic oligonucleotide
gaauagguacuucgagcug

SEQ ID NO: 1375772 - RNA, 19 nt, Artificial Sequence
  Description of Artificial Sequence: Synthetic oligonucleotide
agucaacaaacugauagaa

SEQ ID NO: 1375773 - RNA, 19 nt, Artificial Sequence
  Description of Artificial Sequence: Synthetic oligonucleotide
uacucuaggaaaguagaau

SEQ ID NO: 1375774 - RNA, 19 nt, Artificial Sequence
  Description of Artificial Sequence: Synthetic oligonucleotide
ucagguuauuaagaauucu

SEQ ID NO: 1375775 - RNA, 19 nt, Artificial Sequence
  Description of Artificial Sequence: Synthetic oligonucleotide
cucagguuauuaagaauuc

SEQ ID NO: 1375776 - RNA, 19 nt, Artificial Sequence
  Description of Artificial Sequence: Synthetic oligonucleotide
accggcuuagaugaacugg

SEQ ID NO: 1375777 - RNA, 19 nt, Artificial Sequence
  Description of Artificial Sequence: Synthetic oligonucleotide
ugaugcuuugcuguagcca

SEQ ID NO: 1375778 - RNA, 19 nt, Artificial Sequence
  Description of Artificial Sequence: Synthetic oligonucleotide
ucauaaauucuucgcuuuu

SEQ ID NO: 1375779 - RNA, 19 nt, Artificial Sequence
  Description of Artificial Sequence: Synthetic oligonucleotide
ugaaagucacuuggauggg

SEQ ID NO: 1375780 - RNA, 19 nt, Artificial Sequence
  Description of Artificial Sequence: Synthetic oligonucleotide
uuugccucacagccaaagu

SEQ ID NO: 1375781 - RNA, 19 nt, Artificial Sequence
  Description of Artificial Sequence: Synthetic oligonucleotide
ugguagauuucuguggagu

SEQ ID NO: 1375782 - RNA, 19 nt, Artificial Sequence
  Description of Artificial Sequence: Synthetic oligonucleotide
cauuuacagaaucagugaa

SEQ ID NO: 1375783 - RNA, 19 nt, Artificial Sequence
  Description of Artificial Sequence: Synthetic oligonucleotide
aauggccaacaguguauca

SEQ ID NO: 1375784 - RNA, 19 nt, Artificial Sequence
  Description of Artificial Sequence: Synthetic oligonucleotide
ucuuuaaauuuauguggua

SEQ ID NO: 1375785 - RNA, 19 nt, Artificial Sequence
  Description of Artificial Sequence: Synthetic oligonucleotide
ucuccacuaauagauccug

SEQ ID NO: 1375786 - RNA, 19 nt, Artificial Sequence
  Description of Artificial Sequence: Synthetic oligonucleotide
agugaacuaaaaugguguu

SEQ ID NO: 1375787 - RNA, 19 nt, Artificial Sequence
  Description of Artificial Sequence: Synthetic oligonucleotide
acaucaguucaucaauaau

SEQ ID NO: 1375788 - RNA, 19 nt, Artificial Sequence
  Description of Artificial Sequence: Synthetic oligonucleotide
augaaagcaauugcagaug

SEQ ID NO: 1375789 - RNA, 19 nt, Artificial Sequence
  Description of Artificial Sequence: Synthetic oligonucleotide
acagucccaaguuuccaug

SEQ ID NO: 1375790 - RNA, 19 nt, Artificial Sequence
  Description of Artificial Sequence: Synthetic oligonucleotide
guagucaucagcuggggua

SEQ ID NO: 1375791 - RNA, 19 nt, Artificial Sequence
  Description of Artificial Sequence: Synthetic oligonucleotide
  modified_base (7)..(7): a, c, u, g, unknown or other
ugauggngccccaggcggc

SEQ ID NO: 1375792 - RNA, 19 nt, Artificial Sequence
  Description of Artificial Sequence: Synthetic oligonucleotide
aauuuaugugguauuucuu

SEQ ID NO: 1375793 - RNA, 19 nt, Artificial Sequence
  Description of Artificial Sequence: Synthetic oligonucleotide
cuuuccuauacucuaggaa

SEQ ID NO: 1375794 - RNA, 19 nt, Artificial Sequence
  Description of Artificial Sequence: Synthetic oligonucleotide
uuauaguuagagguagaua

SEQ ID NO: 1375795 - RNA, 19 nt, Artificial Sequence
  Description of Artificial Sequence: Synthetic oligonucleotide
guaggagaaagccguaaga

SEQ ID NO: 1375796 - RNA, 19 nt, Artificial Sequence
  Description of Artificial Sequence: Synthetic oligonucleotide
uuguggcaauaaaagguaa

SEQ ID NO: 1375797 - RNA, 19 nt, Artificial Sequence
  Description of Artificial Sequence: Synthetic oligonucleotide
agaaagccguaagagagga

SEQ ID NO: 1375798 - RNA, 19 nt, Artificial Sequence
  Description of Artificial Sequence: Synthetic oligonucleotide
uucgucauuucaucuuuuc

SEQ ID NO: 1375799 - RNA, 19 nt, Artificial Sequence
  Description of Artificial Sequence: Synthetic oligonucleotide
gcuacugcaagaauucugc

SEQ ID NO: 1375800 - RNA, 19 nt, Artificial Sequence
  Description of Artificial Sequence: Synthetic oligonucleotide
gaaugucagaagucaacaa

SEQ ID NO: 1375801 - RNA, 19 nt, Artificial Sequence
  Description of Artificial Sequence: Synthetic oligonucleotide
uggggcaugcuguucguca

SEQ ID NO: 1375802 - RNA, 19 nt, Artificial Sequence
  Description of Artificial Sequence: Synthetic oligonucleotide
agguuauuaagaauucuaa

SEQ ID NO: 1375803 - RNA, 19 nt, Artificial Sequence
  Description of Artificial Sequence: Synthetic oligonucleotide
gguuauuaagaauucuaaa

SEQ ID NO: 1375804 - RNA, 19 nt, Artificial Sequence
  Description of Artificial Sequence: Synthetic oligonucleotide
ucugacccauuucuggaau

SEQ ID NO: 1375805 - RNA, 19 nt, Artificial Sequence
  Description of Artificial Sequence: Synthetic oligonucleotide
guucacucaacagugaugu

SEQ ID NO: 1375806 - RNA, 19 nt, Artificial Sequence
  Description of Artificial Sequence: Synthetic oligonucleotide
gguaggagaaagccguaag

SEQ ID NO: 1375807 - RNA, 19 nt, Artificial Sequence
  Description of Artificial Sequence: Synthetic oligonucleotide
caugcuguucgucauuuca

SEQ ID NO: 1375808 - RNA, 19 nt, Artificial Sequence
  Description of Artificial Sequence: Synthetic oligonucleotide
caugaaagcaauugcagau

SEQ ID NO: 1375809 - RNA, 19 nt, Artificial Sequence
  Description of Artificial Sequence: Synthetic oligonucleotide
cagguuauuaagaauucua

SEQ ID NO: 1375810 - RNA, 19 nt, Artificial Sequence
  Description of Artificial Sequence: Synthetic oligonucleotide
cacuuuauauguggcagug

SEQ ID NO: 1375811 - RNA, 19 nt, Artificial Sequence
  Description of Artificial Sequence: Synthetic oligonucleotide
cugcugagcgccacgggcg

SEQ ID NO: 1375812 - RNA, 19 nt, Artificial Sequence
  Description of Artificial Sequence: Synthetic oligonucleotide
ugauagaauuaaagugcua

SEQ ID NO: 1375813 - RNA, 19 nt, Artificial Sequence
  Description of Artificial Sequence: Synthetic oligonucleotide
uaaacagaucuuuccuaua

SEQ ID NO: 1375814 - RNA, 19 nt, Artificial Sequence
  Description of Artificial Sequence: Synthetic oligonucleotide
cagugaacuaaaauggugu

SEQ ID NO: 1375815 - RNA, 19 nt, Artificial Sequence
  Description of Artificial Sequence: Synthetic oligonucleotide
acaguguaucaccaugaaa

SEQ ID NO: 1375816 - RNA, 19 nt, Artificial Sequence
  Description of Artificial Sequence: Synthetic oligonucleotide
cgcuuugagauccaggacg

SEQ ID NO: 1375817 - RNA, 19 nt, Artificial Sequence
  Description of Artificial Sequence: Synthetic oligonucleotide
ggaauagguacuucgagcu

SEQ ID NO: 1375818 - RNA, 19 nt, Artificial Sequence
  Description of Artificial Sequence: Synthetic oligonucleotide
agcccucucaaguuuugug

SEQ ID NO: 1375819 - RNA, 19 nt, Artificial Sequence
  Description of Artificial Sequence: Synthetic oligonucleotide
ucgagcuguguaccagaag

SEQ ID NO: 1375820 - RNA, 19 nt, Artificial Sequence
  Description of Artificial Sequence: Synthetic oligonucleotide
agguagauaacagucccaa

SEQ ID NO: 1375821 - RNA, 19 nt, Artificial Sequence
  Description of Artificial Sequence: Synthetic oligonucleotide
gacccauuucuggaauagg

SEQ ID NO: 1375822 - RNA, 19 nt, Artificial Sequence
  Description of Artificial Sequence: Synthetic oligonucleotide
gcagcacauggauaggucc

SEQ ID NO: 1375823 - RNA, 19 nt, Artificial Sequence
  Description of Artificial Sequence: Synthetic oligonucleotide
gugauaucauaaauucuuc

SEQ ID NO: 1375824 - RNA, 19 nt, Artificial Sequence
  Description of Artificial Sequence: Synthetic oligonucleotide
cugauagaauuaaagugcu

SEQ ID NO: 1375825 - RNA, 19 nt, Artificial Sequence
  Description of Artificial Sequence: Synthetic oligonucleotide
gguagauuucuguggaguc

SEQ ID NO: 1375826 - RNA, 19 nt, Artificial Sequence
  Description of Artificial Sequence: Synthetic oligonucleotide
gaacuaaaaugguguuaca

SEQ ID NO: 1375827 - RNA, 19 nt, Artificial Sequence
  Description of Artificial Sequence: Synthetic oligonucleotide
uuuuguccauucugaccca

SEQ ID NO: 1375828 - RNA, 19 nt, Artificial Sequence
  Description of Artificial Sequence: Synthetic oligonucleotide
agcuguguaccagaaggug

SEQ ID NO: 1375829 - RNA, 19 nt, Artificial Sequence
  Description of Artificial Sequence: Synthetic oligonucleotide
uuuaaauacucagguuauu

SEQ ID NO: 1375830 - RNA, 19 nt, Artificial Sequence
  Description of Artificial Sequence: Synthetic oligonucleotide
cugauguuaaggacugaga

SEQ ID NO: 1375831 - RNA, 19 nt, Artificial Sequence
  Description of Artificial Sequence: Synthetic oligonucleotide
ugcaagaauucugcauuga

SEQ ID NO: 1375832 - RNA, 19 nt, Artificial Sequence
  Description of Artificial Sequence: Synthetic oligonucleotide
uuacagaaucagugaacua

SEQ ID NO: 1375833 - RNA, 19 nt, Artificial Sequence
  Description of Artificial Sequence: Synthetic oligonucleotide
uccuauacucuaggaaagu

SEQ ID NO: 1375834 - RNA, 19 nt, Artificial Sequence
  Description of Artificial Sequence: Synthetic oligonucleotide
uucgagcuguguaccagaa

SEQ ID NO: 1375835 - RNA, 19 nt, Artificial Sequence
  Description of Artificial Sequence: Synthetic oligonucleotide
accaccggcuuagaugaac

SEQ ID NO: 1375836 - RNA, 19 nt, Artificial Sequence
  Description of Artificial Sequence: Synthetic oligonucleotide
agguacuucgagcugugua

SEQ ID NO: 1375837 - RNA, 19 nt, Artificial Sequence
  Description of Artificial Sequence: Synthetic oligonucleotide
cuggucgaguucucuuucc

SEQ ID NO: 1375838 - RNA, 19 nt, Artificial Sequence
  Description of Artificial Sequence: Synthetic oligonucleotide
gcaauguuucaugaugacc

SEQ ID NO: 1375839 - RNA, 19 nt, Artificial Sequence
  Description of Artificial Sequence: Synthetic oligonucleotide
  modified_base (6)..(6): a, c, u, g, unknown or other
gauggngccccaggcggcg

SEQ ID NO: 1375840 - RNA, 19 nt, Artificial Sequence
  Description of Artificial Sequence: Synthetic oligonucleotide
uacuucgagcuguguacca

SEQ ID NO: 1375841 - RNA, 19 nt, Artificial Sequence
  Description of Artificial Sequence: Synthetic oligonucleotide
guagauuucuguggaguca

SEQ ID NO: 1375842 - RNA, 19 nt, Artificial Sequence
  Description of Artificial Sequence: Synthetic oligonucleotide
uucuaagacauuggugaua

SEQ ID NO: 1375843 - RNA, 19 nt, Artificial Sequence
  Description of Artificial Sequence: Synthetic oligonucleotide
uaacagucccaaguuucca

SEQ ID NO: 1375844 - RNA, 19 nt, Artificial Sequence
  Description of Artificial Sequence: Synthetic oligonucleotide
ggaaacacaucagaagaca

SEQ ID NO: 1375845 - RNA, 19 nt, Artificial Sequence
  Description of Artificial Sequence: Synthetic oligonucleotide
uguuaaggacugagaggaa

SEQ ID NO: 1375846 - RNA, 19 nt, Artificial Sequence
  Description of Artificial Sequence: Synthetic oligonucleotide
uugggcaauguuucaugau

SEQ ID NO: 1375847 - RNA, 19 nt, Artificial Sequence
  Description of Artificial Sequence: Synthetic oligonucleotide
gguagauaacagucccaag

SEQ ID NO: 1375848 - RNA, 19 nt, Artificial Sequence
  Description of Artificial Sequence: Synthetic oligonucleotide
agcagucagagcccucuca

SEQ ID NO: 1375849 - RNA, 19 nt, Artificial Sequence
  Description of Artificial Sequence: Synthetic oligonucleotide
gaacauuuacagaaucagu

SEQ ID NO: 1375850 - RNA, 19 nt, Artificial Sequence
  Description of Artificial Sequence: Synthetic oligonucleotide
ggugauaucauaaauucuu

SEQ ID NO: 1375851 - RNA, 19 nt, Artificial Sequence
  Description of Artificial Sequence: Synthetic oligonucleotide
guacuucgagcuguguacc

SEQ ID NO: 1375852 - RNA, 19 nt, Artificial Sequence
  Description of Artificial Sequence: Synthetic oligonucleotide
ccacuaauagauccugaag

SEQ ID NO: 1375853 - RNA, 19 nt, Artificial Sequence
  Description of Artificial Sequence: Synthetic oligonucleotide
agccguaagagaggaaaca

SEQ ID NO: 1375854 - RNA, 19 nt, Artificial Sequence
  Description of Artificial Sequence: Synthetic oligonucleotide
guguaucaccaugaaagca

SEQ ID NO: 1375855 - RNA, 19 nt, Artificial Sequence
  Description of Artificial Sequence: Synthetic oligonucleotide
uagaugaacuggacucuuu

SEQ ID NO: 1375856 - RNA, 19 nt, Artificial Sequence
  Description of Artificial Sequence: Synthetic oligonucleotide
cuaauuagaucaauuccuu

SEQ ID NO: 1375857 - RNA, 19 nt, Artificial Sequence
  Description of Artificial Sequence: Synthetic oligonucleotide
caacgacacgaacuuggug

SEQ ID NO: 1375858 - RNA, 19 nt, Artificial Sequence
  Description of Artificial Sequence: Synthetic oligonucleotide
ugauguccuucacuuuaua

SEQ ID NO: 1375859 - RNA, 19 nt, Artificial Sequence
  Description of Artificial Sequence: Synthetic oligonucleotide
cagucagagcccucucaag

SEQ ID NO: 1375860 - RNA, 19 nt, Artificial Sequence
  Description of Artificial Sequence: Synthetic oligonucleotide
acuuuauauguggcaguga

SEQ ID NO: 1375861 - RNA, 19 nt, Artificial Sequence
  Description of Artificial Sequence: Synthetic oligonucleotide
gaugaacuggacucuuuau

SEQ ID NO: 1375862 - RNA, 19 nt, Artificial Sequence
  Description of Artificial Sequence: Synthetic oligonucleotide
cauuucuggaauagguacu

SEQ ID NO: 1375863 - RNA, 19 nt, Artificial Sequence
  Description of Artificial Sequence: Synthetic oligonucleotide
ugcuggucgaguucucuuu

SEQ ID NO: 1375864 - RNA, 19 nt, Artificial Sequence
  Description of Artificial Sequence: Synthetic oligonucleotide
ccaaaguaucugcagccgc

SEQ ID NO: 1375865 - RNA, 19 nt, Artificial Sequence
  Description of Artificial Sequence: Synthetic oligonucleotide
gcuuugagauccaggacgc

SEQ ID NO: 1375866 - RNA, 19 nt, Artificial Sequence
  Description of Artificial Sequence: Synthetic oligonucleotide
gaguuacauaggaaaaccu

SEQ ID NO: 1375867 - RNA, 19 nt, Artificial Sequence
  Description of Artificial Sequence: Synthetic oligonucleotide
auacucuaggaaaguagaa

SEQ ID NO: 1375868 - RNA, 19 nt, Artificial Sequence
  Description of Artificial Sequence: Synthetic oligonucleotide
aggaagcuacugcaagaau

SEQ ID NO: 1375869 - RNA, 19 nt, Artificial Sequence
  Description of Artificial Sequence: Synthetic oligonucleotide
  modified_base (11)..(11): a, c, u, g, unknown or other
gcgaugauggngccccagg

SEQ ID NO: 1375870 - RNA, 19 nt, Artificial Sequence
  Description of Artificial Sequence: Synthetic oligonucleotide
cuucgagcuguguaccaga

SEQ ID NO: 1375871 - RNA, 19 nt, Artificial Sequence
  Description of Artificial Sequence: Synthetic oligonucleotide
gccaaaguaucugcagccg

SEQ ID NO: 1375872 - RNA, 19 nt, Artificial Sequence
  Description of Artificial Sequence: Synthetic oligonucleotide
ccaugaaagcaauugcaga

SEQ ID NO: 1375873 - RNA, 19 nt, Artificial Sequence
  Description of Artificial Sequence: Synthetic oligonucleotide
auagguacuucgagcugug

SEQ ID NO: 1375874 - RNA, 19 nt, Artificial Sequence
  Description of Artificial Sequence: Synthetic oligonucleotide
acacaucagaagacaucag

SEQ ID NO: 1375875 - RNA, 19 nt, Artificial Sequence
  Description of Artificial Sequence: Synthetic oligonucleotide
aagugaucuuuugggcaau

SEQ ID NO: 1375876 - RNA, 19 nt, Artificial Sequence
  Description of Artificial Sequence: Synthetic oligonucleotide
aaggugccugaauggccaa

SEQ ID NO: 1375877 - RNA, 19 nt, Artificial Sequence
  Description of Artificial Sequence: Synthetic oligonucleotide
ucuucgcuuuugccucaca

SEQ ID NO: 1375878 - RNA, 19 nt, Artificial Sequence
  Description of Artificial Sequence: Synthetic oligonucleotide
uucacucaacagugauguc

SEQ ID NO: 1375879 - RNA, 19 nt, Artificial Sequence
  Description of Artificial Sequence: Synthetic oligonucleotide
cagaaucagugaacuaaaa

SEQ ID NO: 1375880 - RNA, 19 nt, Artificial Sequence
  Description of Artificial Sequence: Synthetic oligonucleotide
  modified_base (4)..(4): a, c, u, g, unknown or other
uggngccccaggcggcggc

SEQ ID NO: 1375881 - RNA, 19 nt, Artificial Sequence
  Description of Artificial Sequence: Synthetic oligonucleotide
cuuugagauccaggacgcc

SEQ ID NO: 1375882 - RNA, 19 nt, Artificial Sequence
  Description of Artificial Sequence: Synthetic oligonucleotide
  modified_base (17)..(17): a, c, u, g, unknown or other
gcggcugcgaugauggngc

SEQ ID NO: 1375883 - RNA, 19 nt, Artificial Sequence
  Description of Artificial Sequence: Synthetic oligonucleotide
uggcagugaaugucuguuu

SEQ ID NO: 1375884 - RNA, 19 nt, Artificial Sequence
  Description of Artificial Sequence: Synthetic oligonucleotide
gcccucucaaguuuuguga

SEQ ID NO: 1375885 - RNA, 19 nt, Artificial Sequence
  Description of Artificial Sequence: Synthetic oligonucleotide
cuccacuaauagauccuga

SEQ ID NO: 1375886 - RNA, 19 nt, Artificial Sequence
  Description of Artificial Sequence: Synthetic oligonucleotide
gccguaagagaggaaacac

SEQ ID NO: 1375887 - RNA, 19 nt, Artificial Sequence
  Description of Artificial Sequence: Synthetic oligonucleotide
caccggcuuagaugaacug

SEQ ID NO: 1375888 - RNA, 19 nt, Artificial Sequence
  Description of Artificial Sequence: Synthetic oligonucleotide
gggcaauguuucaugauga

SEQ ID NO: 1375889 - RNA, 19 nt, Artificial Sequence
  Description of Artificial Sequence: Synthetic oligonucleotide
ccucucaaguuuugugaag

SEQ ID NO: 1375890 - RNA, 19 nt, Artificial Sequence
  Description of Artificial Sequence: Synthetic oligonucleotide
caucuaaauuaaaguugua

SEQ ID NO: 1375891 - RNA, 19 nt, Artificial Sequence
  Description of Artificial Sequence: Synthetic oligonucleotide
  modified_base (18)..(18): a, c, u, g, unknown or other
ggcggcugcgaugauggng

SEQ ID NO: 1375892 - RNA, 19 nt, Artificial Sequence
  Description of Artificial Sequence: Synthetic oligonucleotide
ggaagcuacugcaagaauu

SEQ ID NO: 1375893 - RNA, 19 nt, Artificial Sequence
  Description of Artificial Sequence: Synthetic oligonucleotide
cuucuaagacauuggugau

SEQ ID NO: 1375894 - RNA, 19 nt, Artificial Sequence
  Description of Artificial Sequence: Synthetic oligonucleotide
ccggcuuagaugaacugga

SEQ ID NO: 1375895 - RNA, 19 nt, Artificial Sequence
  Description of Artificial Sequence: Synthetic oligonucleotide
cagcacauggauagguccu

SEQ ID NO: 1375896 - RNA, 19 nt, Artificial Sequence
  Description of Artificial Sequence: Synthetic oligonucleotide
gucaacaaacugauagaau

SEQ ID NO: 1375897 - RNA, 19 nt, Artificial Sequence
  Description of Artificial Sequence: Synthetic oligonucleotide
gcagucagagcccucucaa

SEQ ID NO: 1375898 - RNA, 19 nt, Artificial Sequence
  Description of Artificial Sequence: Synthetic oligonucleotide
cuguucacucaacagugau

SEQ ID NO: 1375899 - RNA, 19 nt, Artificial Sequence
  Description of Artificial Sequence: Synthetic oligonucleotide
gcuggucgaguucucuuuc

SEQ ID NO: 1375900 - RNA, 19 nt, Artificial Sequence
  Description of Artificial Sequence: Synthetic oligonucleotide
cuguuauuaauggaaucuu

SEQ ID NO: 1375901 - RNA, 19 nt, Artificial Sequence
  Description of Artificial Sequence: Synthetic oligonucleotide
agaagucaacaaacugaua

SEQ ID NO: 1375902 - RNA, 19 nt, Artificial Sequence
  Description of Artificial Sequence: Synthetic oligonucleotide
agauuucuguggagucacu

SEQ ID NO: 1375903 - RNA, 19 nt, Artificial Sequence
  Description of Artificial Sequence: Synthetic oligonucleotide
cuguucgucauuucaucuu

SEQ ID NO: 1375904 - RNA, 19 nt, Artificial Sequence
  Description of Artificial Sequence: Synthetic oligonucleotide
gucuccacuaauagauccu

SEQ ID NO: 1375905 - RNA, 19 nt, Artificial Sequence
  Description of Artificial Sequence: Synthetic oligonucleotide
  modified_base (5)..(5): a, c, u, g, unknown or other
auggngccccaggcggcgg

SEQ ID NO: 1375906 - RNA, 19 nt, Artificial Sequence
  Description of Artificial Sequence: Synthetic oligonucleotide
gaaagccguaagagaggaa

SEQ ID NO: 1375907 - RNA, 19 nt, Artificial Sequence
  Description of Artificial Sequence: Synthetic oligonucleotide
cagcaacgacacgaacuug

SEQ ID NO: 1375908 - RNA, 19 nt, Artificial Sequence
  Description of Artificial Sequence: Synthetic oligonucleotide
cucgugccggcugcugagc

SEQ ID NO: 1375909 - RNA, 19 nt, Artificial Sequence
  Description of Artificial Sequence: Synthetic oligonucleotide
caggcggcggcggcggcgg

SEQ ID NO: 1375910 - RNA, 19 nt, Artificial Sequence
  Description of Artificial Sequence: Synthetic oligonucleotide
cccucucaaguuuugugaa

SEQ ID NO: 1375911 - RNA, 19 nt, Artificial Sequence
  Description of Artificial Sequence: Synthetic oligonucleotide
ccuauacucuaggaaagua

SEQ ID NO: 1375912 - RNA, 19 nt, Artificial Sequence
  Description of Artificial Sequence: Synthetic oligonucleotide
ccauggaaucuaauaauuu

SEQ ID NO: 1375913 - RNA, 19 nt, Artificial Sequence
  Description of Artificial Sequence: Synthetic oligonucleotide
gcgugggcugagcagagcu

SEQ ID NO: 1375914 - RNA, 19 nt, Artificial Sequence
  Description of Artificial Sequence: Synthetic oligonucleotide
gcaugcuguucgucauuuc

SEQ ID NO: 1375915 - RNA, 19 nt, Artificial Sequence
  Description of Artificial Sequence: Synthetic oligonucleotide
gagcccucucaaguuuugu

SEQ ID NO: 1375916 - RNA, 19 nt, Artificial Sequence
  Description of Artificial Sequence: Synthetic oligonucleotide
cugcggcgugggcugagca

SEQ ID NO: 1375917 - RNA, 19 nt, Artificial Sequence
  Description of Artificial Sequence: Synthetic oligonucleotide
guggggcaugcuguucguc

SEQ ID NO: 1375918 - RNA, 19 nt, Artificial Sequence
  Description of Artificial Sequence: Synthetic oligonucleotide
ccucacagccaaaguaucu

SEQ ID NO: 1375919 - RNA, 19 nt, Artificial Sequence
  Description of Artificial Sequence: Synthetic oligonucleotide
cggcuuagaugaacuggac

SEQ ID NO: 1375920 - RNA, 19 nt, Artificial Sequence
  Description of Artificial Sequence: Synthetic oligonucleotide
gucacuuggaugggaucau

SEQ ID NO: 1375921 - RNA, 19 nt, Artificial Sequence
  Description of Artificial Sequence: Synthetic oligonucleotide
aggcggcggcggcggcggc

SEQ ID NO: 1375922 - RNA, 19 nt, Artificial Sequence
  Description of Artificial Sequence: Synthetic oligonucleotide
gcaacgacacgaacuuggu

SEQ ID NO: 1375923 - RNA, 19 nt, Artificial Sequence
  Description of Artificial Sequence: Synthetic oligonucleotide
cagugauguccuucacuuu

SEQ ID NO: 1375924 - RNA, 19 nt, Artificial Sequence
  Description of Artificial Sequence: Synthetic oligonucleotide
ccaccggcuuagaugaacu

SEQ ID NO: 1375925 - RNA, 19 nt, Artificial Sequence
  Description of Artificial Sequence: Synthetic oligonucleotide
ggggcaugcuguucgucau

SEQ ID NO: 1375926 - RNA, 19 nt, Artificial Sequence
  Description of Artificial Sequence: Synthetic oligonucleotide
ggcaugcuguucgucauuu

SEQ ID NO: 1375927 - RNA, 19 nt, Artificial Sequence
  Description of Artificial Sequence: Synthetic oligonucleotide
ggcgugggcugagcagagc

SEQ ID NO: 1375928 - RNA, 19 nt, Artificial Sequence
  Description of Artificial Sequence: Synthetic oligonucleotide
gcggcggcggcggcggcgg

SEQ ID NO: 1375929 - RNA, 19 nt, Artificial Sequence
  Description of Artificial Sequence: Synthetic oligonucleotide
ggcggcggcggcggcggcg

SEQ ID NO: 1375930 - RNA, 19 nt, Artificial Sequence
  Description of Artificial Sequence: Synthetic oligonucleotide
cugagcgccacgggcggcu

SEQ ID NO: 1375931 - RNA, 19 nt, Artificial Sequence
  Description of Artificial Sequence: Synthetic oligonucleotide
gcugagcgccacgggcggc

SEQ ID NO: 1375932 - RNA, 19 nt, Artificial Sequence
  Description of Artificial Sequence: Synthetic oligonucleotide
gcugguggggcaugcuguu

SEQ ID NO: 1375933 - RNA, 19 nt, Artificial Sequence
  Description of Artificial Sequence: Synthetic oligonucleotide
gggguaggagaaagccgua

SEQ ID NO: 1375934 - RNA, 19 nt, Artificial Sequence
  Description of Artificial Sequence: Synthetic oligonucleotide
cggcgugggcugagcagag

SEQ ID NO: 1375935 - RNA, 19 nt, Artificial Sequence
  Description of Artificial Sequence: Synthetic oligonucleotide
gcggcggcggcggcggcug

SEQ ID NO: 1375936 - RNA, 19 nt, Artificial Sequence
  Description of Artificial Sequence: Synthetic oligonucleotide
ggcggcggcggcggcggcu

SEQ ID NO: 1375937 - RNA, 19 nt, Artificial Sequence
  Description of Artificial Sequence: Synthetic oligonucleotide
cacgggcggcugcgaugau

SEQ ID NO: 1375938 - RNA, 19 nt, Artificial Sequence
  Description of Artificial Sequence: Synthetic oligonucleotide
cggcggcggcggcggcggc

SEQ ID NO: 1375939 - RNA, 19 nt, Artificial Sequence
  Description of Artificial Sequence: Synthetic oligonucleotide
uaggaaucaaaacacaagg

SEQ ID NO: 1375940 - RNA, 19 nt, Artificial Sequence
  Description of Artificial Sequence: Synthetic oligonucleotide
uuuagagagguucacgagg

SEQ ID NO: 1375941 - RNA, 19 nt, Artificial Sequence
  Description of Artificial Sequence: Synthetic oligonucleotide
uaaucguucaguuccagcg

SEQ ID NO: 1375942 - RNA, 19 nt, Artificial Sequence
  Description of Artificial Sequence: Synthetic oligonucleotide
uuaggaaacauacaugucu

SEQ ID NO: 1375943 - RNA, 19 nt, Artificial Sequence
  Description of Artificial Sequence: Synthetic oligonucleotide
cacgaaauggguuaaaccc

SEQ ID NO: 1375944 - RNA, 19 nt, Artificial Sequence
  Description of Artificial Sequence: Synthetic oligonucleotide
uuuaaugucaguuuccuua

SEQ ID NO: 1375945 - RNA, 19 nt, Artificial Sequence
  Description of Artificial Sequence: Synthetic oligonucleotide
gcaauuuucauacacgucg

SEQ ID NO: 1375946 - RNA, 19 nt, Artificial Sequence
  Description of Artificial Sequence: Synthetic oligonucleotide
ugaagaaguauuauugaca

SEQ ID NO: 1375947 - RNA, 19 nt, Artificial Sequence
  Description of Artificial Sequence: Synthetic oligonucleotide
augucauugcuucaguggc

SEQ ID NO: 1375948 - RNA, 19 nt, Artificial Sequence
  Description of Artificial Sequence: Synthetic oligonucleotide
cuuuguggggcccagaugg

SEQ ID NO: 1375949 - RNA, 19 nt, Artificial Sequence
  Description of Artificial Sequence: Synthetic oligonucleotide
agaaguauuauugacaagu

SEQ ID NO: 1375950 - RNA, 19 nt, Artificial Sequence
  Description of Artificial Sequence: Synthetic oligonucleotide
uuuucuuccggaaaggcgu

SEQ ID NO: 1375951 - RNA, 19 nt, Artificial Sequence
  Description of Artificial Sequence: Synthetic oligonucleotide
agacugaaaucccucacgc

SEQ ID NO: 1375952 - RNA, 19 nt, Artificial Sequence
  Description of Artificial Sequence: Synthetic oligonucleotide
gaaucaaaacacaaggccc

SEQ ID NO: 1375953 - RNA, 19 nt, Artificial Sequence
  Description of Artificial Sequence: Synthetic oligonucleotide
auacacgucgcuuuguggg

SEQ ID NO: 1375954 - RNA, 19 nt, Artificial Sequence
  Description of Artificial Sequence: Synthetic oligonucleotide
acugagacaggcuacucac

SEQ ID NO: 1375955 - RNA, 19 nt, Artificial Sequence
  Description of Artificial Sequence: Synthetic oligonucleotide
ugugcuaguccauaugucc

SEQ ID NO: 1375956 - RNA, 19 nt, Artificial Sequence
  Description of Artificial Sequence: Synthetic oligonucleotide
uguauucccuccuucacag

SEQ ID NO: 1375957 - RNA, 19 nt, Artificial Sequence
  Description of Artificial Sequence: Synthetic oligonucleotide
acuccaaucaaugaaacug

SEQ ID NO: 1375958 - RNA, 19 nt, Artificial Sequence
  Description of Artificial Sequence: Synthetic oligonucleotide
uguuuagagagguucacga

SEQ ID NO: 1375959 - RNA, 19 nt, Artificial Sequence
  Description of Artificial Sequence: Synthetic oligonucleotide
aguccauauguccagguuc

SEQ ID NO: 1375960 - RNA, 19 nt, Artificial Sequence
  Description of Artificial Sequence: Synthetic oligonucleotide
aaucguucaguuccagcgg

SEQ ID NO: 1375961 - RNA, 19 nt, Artificial Sequence
  Description of Artificial Sequence: Synthetic oligonucleotide
aaguauuauugacaagugu

SEQ ID NO: 1375962 - RNA, 19 nt, Artificial Sequence
  Description of Artificial Sequence: Synthetic oligonucleotide
uguuccuugagcucaacca

SEQ ID NO: 1375963 - RNA, 19 nt, Artificial Sequence
  Description of Artificial Sequence: Synthetic oligonucleotide
aauggguuaaacccugggu

SEQ ID NO: 1375964 - RNA, 19 nt, Artificial Sequence
  Description of Artificial Sequence: Synthetic oligonucleotide
gaggguuaaauucuucugc

SEQ ID NO: 1375965 - RNA, 19 nt, Artificial Sequence
  Description of Artificial Sequence: Synthetic oligonucleotide
uguggcgggacucacgggg

SEQ ID NO: 1375966 - RNA, 19 nt, Artificial Sequence
  Description of Artificial Sequence: Synthetic oligonucleotide
uuugcauugcgauuugcug

SEQ ID NO: 1375967 - RNA, 19 nt, Artificial Sequence
  Description of Artificial Sequence: Synthetic oligonucleotide
uuagagagguucacgagga

SEQ ID NO: 1375968 - RNA, 19 nt, Artificial Sequence
  Description of Artificial Sequence: Synthetic oligonucleotide
acugaaaucccucacgcgu

SEQ ID NO: 1375969 - RNA, 19 nt, Artificial Sequence
  Description of Artificial Sequence: Synthetic oligonucleotide
aaaaguccagacaugggag

SEQ ID NO: 1375970 - RNA, 19 nt, Artificial Sequence
  Description of Artificial Sequence: Synthetic oligonucleotide
acggagaguugacaaaacc

SEQ ID NO: 1375971 - RNA, 19 nt, Artificial Sequence
  Description of Artificial Sequence: Synthetic oligonucleotide
ucuguggcgggacucacgg

SEQ ID NO: 1375972 - RNA, 19 nt, Artificial Sequence
  Description of Artificial Sequence: Synthetic oligonucleotide
ugaaguuuuaaugucaguu

SEQ ID NO: 1375973 - RNA, 19 nt, Artificial Sequence
  Description of Artificial Sequence: Synthetic oligonucleotide
aaaucccucacgcguuccc

SEQ ID NO: 1375974 - RNA, 19 nt, Artificial Sequence
  Description of Artificial Sequence: Synthetic oligonucleotide
aguuuuaaugucaguuucc

SEQ ID NO: 1375975 - RNA, 19 nt, Artificial Sequence
  Description of Artificial Sequence: Synthetic oligonucleotide
aacaccaucuccggguggc

SEQ ID NO: 1375976 - RNA, 19 nt, Artificial Sequence
  Description of Artificial Sequence: Synthetic oligonucleotide
aaaacuugucugcacacuu

SEQ ID NO: 1375977 - RNA, 19 nt, Artificial Sequence
  Description of Artificial Sequence: Synthetic oligonucleotide
aggaaucaaaacacaaggc

SEQ ID NO: 1375978 - RNA, 19 nt, Artificial Sequence
  Description of Artificial Sequence: Synthetic oligonucleotide
agugcaagcgucuuccuug

SEQ ID NO: 1375979 - RNA, 19 nt, Artificial Sequence
  Description of Artificial Sequence: Synthetic oligonucleotide
aaaggcguuguaaucguuc

SEQ ID NO: 1375980 - RNA, 19 nt, Artificial Sequence
  Description of Artificial Sequence: Synthetic oligonucleotide
uggguuaaacccuggguag

SEQ ID NO: 1375981 - RNA, 19 nt, Artificial Sequence
  Description of Artificial Sequence: Synthetic oligonucleotide
uuagaagucuucugugggc

SEQ ID NO: 1375982 - RNA, 19 nt, Artificial Sequence
  Description of Artificial Sequence: Synthetic oligonucleotide
uucauguaggcacgaaaug

SEQ ID NO: 1375983 - RNA, 19 nt, Artificial Sequence
  Description of Artificial Sequence: Synthetic oligonucleotide
ugggagacaaacuucgggu

SEQ ID NO: 1375984 - RNA, 19 nt, Artificial Sequence
  Description of Artificial Sequence: Synthetic oligonucleotide
aguuuccugucacagucgg

SEQ ID NO: 1375985 - RNA, 19 nt, Artificial Sequence
  Description of Artificial Sequence: Synthetic oligonucleotide
uccuuaggaaacauacaug

SEQ ID NO: 1375986 - RNA, 19 nt, Artificial Sequence
  Description of Artificial Sequence: Synthetic oligonucleotide
ucagacuucugguaguaac

SEQ ID NO: 1375987 - RNA, 19 nt, Artificial Sequence
  Description of Artificial Sequence: Synthetic oligonucleotide
uccgaacaaaacuugucug

SEQ ID NO: 1375988 - RNA, 19 nt, Artificial Sequence
  Description of Artificial Sequence: Synthetic oligonucleotide
uugcauugcgauuugcugu

SEQ ID NO: 1375989 - RNA, 19 nt, Artificial Sequence
  Description of Artificial Sequence: Synthetic oligonucleotide
aaaguccagacaugggaga

SEQ ID NO: 1375990 - RNA, 19 nt, Artificial Sequence
  Description of Artificial Sequence: Synthetic oligonucleotide
aauuuucauacacgucgcu

SEQ ID NO: 1375991 - RNA, 19 nt, Artificial Sequence
  Description of Artificial Sequence: Synthetic oligonucleotide
ugcacuccaaucaaugaaa

SEQ ID NO: 1375992 - RNA, 19 nt, Artificial Sequence
  Description of Artificial Sequence: Synthetic oligonucleotide
uuauugacaaguguguuuu

SEQ ID NO: 1375993 - RNA, 19 nt, Artificial Sequence
  Description of Artificial Sequence: Synthetic oligonucleotide
aaggcguuguaaucguuca

SEQ ID NO: 1375994 - RNA, 19 nt, Artificial Sequence
  Description of Artificial Sequence: Synthetic oligonucleotide
uggauacagaccuuucucu

SEQ ID NO: 1375995 - RNA, 19 nt, Artificial Sequence
  Description of Artificial Sequence: Synthetic oligonucleotide
gaggaaacaccaucuccgg

SEQ ID NO: 1375996 - RNA, 19 nt, Artificial Sequence
  Description of Artificial Sequence: Synthetic oligonucleotide
ggagaguugacaaaaccgg

SEQ ID NO: 1375997 - RNA, 19 nt, Artificial Sequence
  Description of Artificial Sequence: Synthetic oligonucleotide
gaaguauuauugacaagug

SEQ ID NO: 1375998 - RNA, 19 nt, Artificial Sequence
  Description of Artificial Sequence: Synthetic oligonucleotide
uuauucacauugcuccaga

SEQ ID NO: 1375999 - RNA, 19 nt, Artificial Sequence
  Description of Artificial Sequence: Synthetic oligonucleotide
auuauugacaaguguguuu

SEQ ID NO: 1376000 - RNA, 19 nt, Artificial Sequence
  Description of Artificial Sequence: Synthetic oligonucleotide
gaagccauuggcguaauuc

SEQ ID NO: 1376001 - RNA, 19 nt, Artificial Sequence
  Description of Artificial Sequence: Synthetic oligonucleotide
aucguucaguuccagcggg

SEQ ID NO: 1376002 - RNA, 19 nt, Artificial Sequence
  Description of Artificial Sequence: Synthetic oligonucleotide
aguugaagcuacuggucag

SEQ ID NO: 1376003 - RNA, 19 nt, Artificial Sequence
  Description of Artificial Sequence: Synthetic oligonucleotide
uuccaugugggucgaaugu

SEQ ID NO: 1376004 - RNA, 19 nt, Artificial Sequence
  Description of Artificial Sequence: Synthetic oligonucleotide
guuuagagagguucacgag

SEQ ID NO: 1376005 - RNA, 19 nt, Artificial Sequence
  Description of Artificial Sequence: Synthetic oligonucleotide
gacugaaaucccucacgcg

SEQ ID NO: 1376006 - RNA, 19 nt, Artificial Sequence
  Description of Artificial Sequence: Synthetic oligonucleotide
uggaguccgaacaaaacuu

SEQ ID NO: 1376007 - RNA, 19 nt, Artificial Sequence
  Description of Artificial Sequence: Synthetic oligonucleotide
uaguuuccugucacagucg

SEQ ID NO: 1376008 - RNA, 19 nt, Artificial Sequence
  Description of Artificial Sequence: Synthetic oligonucleotide
uauucccuccuucacagua

SEQ ID NO: 1376009 - RNA, 19 nt, Artificial Sequence
  Description of Artificial Sequence: Synthetic oligonucleotide
cuucugguaguaacugucc

SEQ ID NO: 1376010 - RNA, 19 nt, Artificial Sequence
  Description of Artificial Sequence: Synthetic oligonucleotide
gauacagaccuuucucuuc

SEQ ID NO: 1376011 - RNA, 19 nt, Artificial Sequence
  Description of Artificial Sequence: Synthetic oligonucleotide
ucauguuuucuuccggaaa

SEQ ID NO: 1376012 - RNA, 19 nt, Artificial Sequence
  Description of Artificial Sequence: Synthetic oligonucleotide
uguccugugcacaccagcu

SEQ ID NO: 1376013 - RNA, 19 nt, Artificial Sequence
  Description of Artificial Sequence: Synthetic oligonucleotide
aaacuucgggugcugguga

SEQ ID NO: 1376014 - RNA, 19 nt, Artificial Sequence
  Description of Artificial Sequence: Synthetic oligonucleotide
aaaccggcauguucccagg

SEQ ID NO: 1376015 - RNA, 19 nt, Artificial Sequence
  Description of Artificial Sequence: Synthetic oligonucleotide
uugcgauuugcugugcuag

SEQ ID NO: 1376016 - RNA, 19 nt, Artificial Sequence
  Description of Artificial Sequence: Synthetic oligonucleotide
aggcuacucacaucugugg

SEQ ID NO: 1376017 - RNA, 19 nt, Artificial Sequence
  Description of Artificial Sequence: Synthetic oligonucleotide
gauuugcugugcuagucca

SEQ ID NO: 1376018 - RNA, 19 nt, Artificial Sequence
  Description of Artificial Sequence: Synthetic oligonucleotide
ugcuaguccauauguccag

SEQ ID NO: 1376019 - RNA, 19 nt, Artificial Sequence
  Description of Artificial Sequence: Synthetic oligonucleotide
aagcuuccggagaaaaguc

SEQ ID NO: 1376020 - RNA, 19 nt, Artificial Sequence
  Description of Artificial Sequence: Synthetic oligonucleotide
uccagguagagugagcgcu

SEQ ID NO: 1376021 - RNA, 19 nt, Artificial Sequence
  Description of Artificial Sequence: Synthetic oligonucleotide
cugccugaaaucuccacac

SEQ ID NO: 1376022 - RNA, 19 nt, Artificial Sequence
  Description of Artificial Sequence: Synthetic oligonucleotide
uaaacccuggguaguacuc

SEQ ID NO: 1376023 - RNA, 19 nt, Artificial Sequence
  Description of Artificial Sequence: Synthetic oligonucleotide
cuuaggaaacauacauguc

SEQ ID NO: 1376024 - RNA, 19 nt, Artificial Sequence
  Description of Artificial Sequence: Synthetic oligonucleotide
guagagugagcgcuguggc

SEQ ID NO: 1376025 - RNA, 19 nt, Artificial Sequence
  Description of Artificial Sequence: Synthetic oligonucleotide
aauguucuguggcgggacu

SEQ ID NO: 1376026 - RNA, 19 nt, Artificial Sequence
  Description of Artificial Sequence: Synthetic oligonucleotide
aggauggaagcuuccggag

SEQ ID NO: 1376027 - RNA, 19 nt, Artificial Sequence
  Description of Artificial Sequence: Synthetic oligonucleotide
cuacucacaucuguggggc

SEQ ID NO: 1376028 - RNA, 19 nt, Artificial Sequence
  Description of Artificial Sequence: Synthetic oligonucleotide
agcgcuguggccaaugaag

SEQ ID NO: 1376029 - RNA, 19 nt, Artificial Sequence
  Description of Artificial Sequence: Synthetic oligonucleotide
uccagacugaaaucccuca

SEQ ID NO: 1376030 - RNA, 19 nt, Artificial Sequence
  Description of Artificial Sequence: Synthetic oligonucleotide
cacgcguucccacaguagc

SEQ ID NO: 1376031 - RNA, 19 nt, Artificial Sequence
  Description of Artificial Sequence: Synthetic oligonucleotide
gaaacauacaugucuguau

SEQ ID NO: 1376032 - RNA, 19 nt, Artificial Sequence
  Description of Artificial Sequence: Synthetic oligonucleotide
augaccugguuuuccaugu

SEQ ID NO: 1376033 - RNA, 19 nt, Artificial Sequence
  Description of Artificial Sequence: Synthetic oligonucleotide
aacuggccuucacaggaug

SEQ ID NO: 1376034 - RNA, 19 nt, Artificial Sequence
  Description of Artificial Sequence: Synthetic oligonucleotide
agcuuccggagaaaagucc

SEQ ID NO: 1376035 - RNA, 19 nt, Artificial Sequence
  Description of Artificial Sequence: Synthetic oligonucleotide
uccggaaaggcguuguaau

SEQ ID NO: 1376036 - RNA, 19 nt, Artificial Sequence
  Description of Artificial Sequence: Synthetic oligonucleotide
acuaguuuccugucacagu

SEQ ID NO: 1376037 - RNA, 19 nt, Artificial Sequence
  Description of Artificial Sequence: Synthetic oligonucleotide
uacaugucuguauucccuc

SEQ ID NO: 1376038 - RNA, 19 nt, Artificial Sequence
  Description of Artificial Sequence: Synthetic oligonucleotide
uguaggcacgaaauggguu

SEQ ID NO: 1376039 - RNA, 19 nt, Artificial Sequence
  Description of Artificial Sequence: Synthetic oligonucleotide
aacuucgggugcuggugag

SEQ ID NO: 1376040 - RNA, 19 nt, Artificial Sequence
  Description of Artificial Sequence: Synthetic oligonucleotide
auucacaccacuggcauau

SEQ ID NO: 1376041 - RNA, 19 nt, Artificial Sequence
  Description of Artificial Sequence: Synthetic oligonucleotide
aaguuugcauugcgauuug

SEQ ID NO: 1376042 - RNA, 19 nt, Artificial Sequence
  Description of Artificial Sequence: Synthetic oligonucleotide
uauuauugacaaguguguu

SEQ ID NO: 1376043 - RNA, 19 nt, Artificial Sequence
  Description of Artificial Sequence: Synthetic oligonucleotide
aguccgaacaaaacuuguc

SEQ ID NO: 1376044 - RNA, 19 nt, Artificial Sequence
  Description of Artificial Sequence: Synthetic oligonucleotide
agcaauuuucauacacguc

SEQ ID NO: 1376045 - RNA, 19 nt, Artificial Sequence
  Description of Artificial Sequence: Synthetic oligonucleotide
gaaauggguuaaacccugg

SEQ ID NO: 1376046 - RNA, 19 nt, Artificial Sequence
  Description of Artificial Sequence: Synthetic oligonucleotide
gguagagugagcgcugugg

SEQ ID NO: 1376047 - RNA, 19 nt, Artificial Sequence
  Description of Artificial Sequence: Synthetic oligonucleotide
gucgaauguucuguggcgg

SEQ ID NO: 1376048 - RNA, 19 nt, Artificial Sequence
  Description of Artificial Sequence: Synthetic oligonucleotide
gaagcuuccggagaaaagu

SEQ ID NO: 1376049 - RNA, 19 nt, Artificial Sequence
  Description of Artificial Sequence: Synthetic oligonucleotide
agagugagcgcuguggcca

SEQ ID NO: 1376050 - RNA, 19 nt, Artificial Sequence
  Description of Artificial Sequence: Synthetic oligonucleotide
cacuaguuuccugucacag

SEQ ID NO: 1376051 - RNA, 19 nt, Artificial Sequence
  Description of Artificial Sequence: Synthetic oligonucleotide
caugggagacaaacuucgg

SEQ ID NO: 1376052 - RNA, 19 nt, Artificial Sequence
  Description of Artificial Sequence: Synthetic oligonucleotide
ucccacaguagcuggaguc

SEQ ID NO: 1376053 - RNA, 19 nt, Artificial Sequence
  Description of Artificial Sequence: Synthetic oligonucleotide
agaguugacaaaaccggca

SEQ ID NO: 1376054 - RNA, 19 nt, Artificial Sequence
  Description of Artificial Sequence: Synthetic oligonucleotide
agcgucuuccuugacagca

SEQ ID NO: 1376055 - RNA, 19 nt, Artificial Sequence
  Description of Artificial Sequence: Synthetic oligonucleotide
acaaacuucgggugcuggu

SEQ ID NO: 1376056 - RNA, 19 nt, Artificial Sequence
  Description of Artificial Sequence: Synthetic oligonucleotide
agcugccugaaaucuccac

SEQ ID NO: 1376057 - RNA, 19 nt, Artificial Sequence
  Description of Artificial Sequence: Synthetic oligonucleotide
cggagaguugacaaaaccg

SEQ ID NO: 1376058 - RNA, 19 nt, Artificial Sequence
  Description of Artificial Sequence: Synthetic oligonucleotide
agaaaaguccugugaggaa

SEQ ID NO: 1376059 - RNA, 19 nt, Artificial Sequence
  Description of Artificial Sequence: Synthetic oligonucleotide
caggcuacucacaucugug

SEQ ID NO: 1376060 - RNA, 19 nt, Artificial Sequence
  Description of Artificial Sequence: Synthetic oligonucleotide
ugaaaucccucacgcguuc

SEQ ID NO: 1376061 - RNA, 19 nt, Artificial Sequence
  Description of Artificial Sequence: Synthetic oligonucleotide
ccgaacaaaacuugucugc

SEQ ID NO: 1376062 - RNA, 19 nt, Artificial Sequence
  Description of Artificial Sequence: Synthetic oligonucleotide
acuggccuucacaggaugc

SEQ ID NO: 1376063 - RNA, 19 nt, Artificial Sequence
  Description of Artificial Sequence: Synthetic oligonucleotide
cuccagguggauacagacc

SEQ ID NO: 1376064 - RNA, 19 nt, Artificial Sequence
  Description of Artificial Sequence: Synthetic oligonucleotide
ucacgcguucccacaguag

SEQ ID NO: 1376065 - RNA, 19 nt, Artificial Sequence
  Description of Artificial Sequence: Synthetic oligonucleotide
acgaaauggguuaaacccu

SEQ ID NO: 1376066 - RNA, 19 nt, Artificial Sequence
  Description of Artificial Sequence: Synthetic oligonucleotide
auacaugucuguauucccu

SEQ ID NO: 1376067 - RNA, 19 nt, Artificial Sequence
  Description of Artificial Sequence: Synthetic oligonucleotide
guaggcacgaaauggguua

SEQ ID NO: 1376068 - RNA, 19 nt, Artificial Sequence
  Description of Artificial Sequence: Synthetic oligonucleotide
cuguggccaaugaagucag

SEQ ID NO: 1376069 - RNA, 19 nt, Artificial Sequence
  Description of Artificial Sequence: Synthetic oligonucleotide
ugccugaaaucuccacacc

SEQ ID NO: 1376070 - RNA, 19 nt, Artificial Sequence
  Description of Artificial Sequence: Synthetic oligonucleotide
gcacgaaauggguuaaacc

SEQ ID NO: 1376071 - RNA, 19 nt, Artificial Sequence
  Description of Artificial Sequence: Synthetic oligonucleotide
accugguuuuccauguggg

SEQ ID NO: 1376072 - RNA, 19 nt, Artificial Sequence
  Description of Artificial Sequence: Synthetic oligonucleotide
ggaaacuggccuucacagg

SEQ ID NO: 1376073 - RNA, 19 nt, Artificial Sequence
  Description of Artificial Sequence: Synthetic oligonucleotide
guaguaacuguccuccucu

SEQ ID NO: 1376074 - RNA, 19 nt, Artificial Sequence
  Description of Artificial Sequence: Synthetic oligonucleotide
auucccuccuucacaguac

SEQ ID NO: 1376075 - RNA, 19 nt, Artificial Sequence
  Description of Artificial Sequence: Synthetic oligonucleotide
uuuuccaugugggucgaau

SEQ ID NO: 1376076 - RNA, 19 nt, Artificial Sequence
  Description of Artificial Sequence: Synthetic oligonucleotide
caaacuucgggugcuggug

SEQ ID NO: 1376077 - RNA, 19 nt, Artificial Sequence
  Description of Artificial Sequence: Synthetic oligonucleotide
guauuauugacaagugugu

SEQ ID NO: 1376078 - RNA, 19 nt, Artificial Sequence
  Description of Artificial Sequence: Synthetic oligonucleotide
acgaggauggaagcuuccg

SEQ ID NO: 1376079 - RNA, 19 nt, Artificial Sequence
  Description of Artificial Sequence: Synthetic oligonucleotide
ccugaaaucuccacaccag

SEQ ID NO: 1376080 - RNA, 19 nt, Artificial Sequence
  Description of Artificial Sequence: Synthetic oligonucleotide
ugggcaguugaagcuacug

SEQ ID NO: 1376081 - RNA, 19 nt, Artificial Sequence
  Description of Artificial Sequence: Synthetic oligonucleotide
gucugaacuuuggaggggc

SEQ ID NO: 1376082 - RNA, 19 nt, Artificial Sequence
  Description of Artificial Sequence: Synthetic oligonucleotide
uaguccauauguccagguu

SEQ ID NO: 1376083 - RNA, 19 nt, Artificial Sequence
  Description of Artificial Sequence: Synthetic oligonucleotide
uuccagguagagugagcgc

SEQ ID NO: 1376084 - RNA, 19 nt, Artificial Sequence
  Description of Artificial Sequence: Synthetic oligonucleotide
uuuguggggcccagaugga

SEQ ID NO: 1376085 - RNA, 19 nt, Artificial Sequence
  Description of Artificial Sequence: Synthetic oligonucleotide
guagcuggagucccuggac

SEQ ID NO: 1376086 - RNA, 19 nt, Artificial Sequence
  Description of Artificial Sequence: Synthetic oligonucleotide
cuuccggagaaaaguccug

SEQ ID NO: 1376087 - RNA, 19 nt, Artificial Sequence
  Description of Artificial Sequence: Synthetic oligonucleotide
ucaguugaguuuuccucuu

SEQ ID NO: 1376088 - RNA, 19 nt, Artificial Sequence
  Description of Artificial Sequence: Synthetic oligonucleotide
gggagacaaacuucgggug

SEQ ID NO: 1376089 - RNA, 19 nt, Artificial Sequence
  Description of Artificial Sequence: Synthetic oligonucleotide
gcugcacauguguuuagag

SEQ ID NO: 1376090 - RNA, 19 nt, Artificial Sequence
  Description of Artificial Sequence: Synthetic oligonucleotide
auugcgauuugcugugcua

SEQ ID NO: 1376091 - RNA, 19 nt, Artificial Sequence
  Description of Artificial Sequence: Synthetic oligonucleotide
ugagcgcuguggccaauga

SEQ ID NO: 1376092 - RNA, 19 nt, Artificial Sequence
  Description of Artificial Sequence: Synthetic oligonucleotide
acacccggugcacuguucu

SEQ ID NO: 1376093 - RNA, 19 nt, Artificial Sequence
  Description of Artificial Sequence: Synthetic oligonucleotide
gguucacgaggauggaagc

SEQ ID NO: 1376094 - RNA, 19 nt, Artificial Sequence
  Description of Artificial Sequence: Synthetic oligonucleotide
ggaugcacuccaaucaaug

SEQ ID NO: 1376095 - RNA, 19 nt, Artificial Sequence
  Description of Artificial Sequence: Synthetic oligonucleotide
gaaaucuccacaccagcuu

SEQ ID NO: 1376096 - RNA, 19 nt, Artificial Sequence
  Description of Artificial Sequence: Synthetic oligonucleotide
aggcguuguaaucguucag

SEQ ID NO: 1376097 - RNA, 19 nt, Artificial Sequence
  Description of Artificial Sequence: Synthetic oligonucleotide
ucuuccggaaaggcguugu

SEQ ID NO: 1376098 - RNA, 19 nt, Artificial Sequence
  Description of Artificial Sequence: Synthetic oligonucleotide
guccauauguccagguuca

SEQ ID NO: 1376099 - RNA, 19 nt, Artificial Sequence
  Description of Artificial Sequence: Synthetic oligonucleotide
gcgggcaguacacacuggg

SEQ ID NO: 1376100 - RNA, 19 nt, Artificial Sequence
  Description of Artificial Sequence: Synthetic oligonucleotide
ggaaacaccaucuccgggu

SEQ ID NO: 1376101 - RNA, 19 nt, Artificial Sequence
  Description of Artificial Sequence: Synthetic oligonucleotide
ggcucuuagaagucuucug

SEQ ID NO: 1376102 - RNA, 19 nt, Artificial Sequence
  Description of Artificial Sequence: Synthetic oligonucleotide
gugggucgaauguucugug

SEQ ID NO: 1376103 - RNA, 19 nt, Artificial Sequence
  Description of Artificial Sequence: Synthetic oligonucleotide
gaaaucccucacgcguucc

SEQ ID NO: 1376104 - RNA, 19 nt, Artificial Sequence
  Description of Artificial Sequence: Synthetic oligonucleotide
aggacggagaguugacaaa

SEQ ID NO: 1376105 - RNA, 19 nt, Artificial Sequence
  Description of Artificial Sequence: Synthetic oligonucleotide
ucuccggguggcagaaggu

SEQ ID NO: 1376106 - RNA, 19 nt, Artificial Sequence
  Description of Artificial Sequence: Synthetic oligonucleotide
aaccggcauguucccaggu

SEQ ID NO: 1376107 - RNA, 19 nt, Artificial Sequence
  Description of Artificial Sequence: Synthetic oligonucleotide
uggcguaauucauguuuuc

SEQ ID NO: 1376108 - RNA, 19 nt, Artificial Sequence
  Description of Artificial Sequence: Synthetic oligonucleotide
ggguaguacuccuugcaca

SEQ ID NO: 1376109 - RNA, 19 nt, Artificial Sequence
  Description of Artificial Sequence: Synthetic oligonucleotide
guucauguaggcacgaaau

SEQ ID NO: 1376110 - RNA, 19 nt, Artificial Sequence
  Description of Artificial Sequence: Synthetic oligonucleotide
gccugaaaucuccacacca

SEQ ID NO: 1376111 - RNA, 19 nt, Artificial Sequence
  Description of Artificial Sequence: Synthetic oligonucleotide
ggaguccgaacaaaacuug

SEQ ID NO: 1376112 - RNA, 19 nt, Artificial Sequence
  Description of Artificial Sequence: Synthetic oligonucleotide
ucucagacuucugguagua

SEQ ID NO: 1376113 - RNA, 19 nt, Artificial Sequence
  Description of Artificial Sequence: Synthetic oligonucleotide
gucacagucggagcugcug

SEQ ID NO: 1376114 - RNA, 19 nt, Artificial Sequence
  Description of Artificial Sequence: Synthetic oligonucleotide
gugcuaguccauaugucca

SEQ ID NO: 1376115 - RNA, 19 nt, Artificial Sequence
  Description of Artificial Sequence: Synthetic oligonucleotide
auguaggcacgaaaugggu

SEQ ID NO: 1376116 - RNA, 19 nt, Artificial Sequence
  Description of Artificial Sequence: Synthetic oligonucleotide
ucagugcaagcgucuuccu

SEQ ID NO: 1376117 - RNA, 19 nt, Artificial Sequence
  Description of Artificial Sequence: Synthetic oligonucleotide
gcacauguguuuagagagg

SEQ ID NO: 1376118 - RNA, 19 nt, Artificial Sequence
  Description of Artificial Sequence: Synthetic oligonucleotide
uccuugcacaugaccuggu

SEQ ID NO: 1376119 - RNA, 19 nt, Artificial Sequence
  Description of Artificial Sequence: Synthetic oligonucleotide
agguggauacagaccuuuc

SEQ ID NO: 1376120 - RNA, 19 nt, Artificial Sequence
  Description of Artificial Sequence: Synthetic oligonucleotide
gcucuuagaagucuucugu

SEQ ID NO: 1376121 - RNA, 19 nt, Artificial Sequence
  Description of Artificial Sequence: Synthetic oligonucleotide
guuugcauugcgauuugcu

SEQ ID NO: 1376122 - RNA, 19 nt, Artificial Sequence
  Description of Artificial Sequence: Synthetic oligonucleotide
gcaagcgucuuccuugaca

SEQ ID NO: 1376123 - RNA, 19 nt, Artificial Sequence
  Description of Artificial Sequence: Synthetic oligonucleotide
cgaaauggguuaaacccug

SEQ ID NO: 1376124 - RNA, 19 nt, Artificial Sequence
  Description of Artificial Sequence: Synthetic oligonucleotide
ucccucacgcguucccaca

SEQ ID NO: 1376125 - RNA, 19 nt, Artificial Sequence
  Description of Artificial Sequence: Synthetic oligonucleotide
aguguuccagguagaguga

SEQ ID NO: 1376126 - RNA, 19 nt, Artificial Sequence
  Description of Artificial Sequence: Synthetic oligonucleotide
ggauggaagcuuccggaga

SEQ ID NO: 1376127 - RNA, 19 nt, Artificial Sequence
  Description of Artificial Sequence: Synthetic oligonucleotide
ccggcauguucccagguag

SEQ ID NO: 1376128 - RNA, 19 nt, Artificial Sequence
  Description of Artificial Sequence: Synthetic oligonucleotide
uaggcacgaaauggguuaa

SEQ ID NO: 1376129 - RNA, 19 nt, Artificial Sequence
  Description of Artificial Sequence: Synthetic oligonucleotide
ggcacgaaauggguuaaac

SEQ ID NO: 1376130 - RNA, 19 nt, Artificial Sequence
  Description of Artificial Sequence: Synthetic oligonucleotide
agguagagugagcgcugug

SEQ ID NO: 1376131 - RNA, 19 nt, Artificial Sequence
  Description of Artificial Sequence: Synthetic oligonucleotide
ugcacaugaccugguuuuc

SEQ ID NO: 1376132 - RNA, 19 nt, Artificial Sequence
  Description of Artificial Sequence: Synthetic oligonucleotide
caggaugcacuccaaucaa

SEQ ID NO: 1376133 - RNA, 19 nt, Artificial Sequence
  Description of Artificial Sequence: Synthetic oligonucleotide
cgauuugcugugcuagucc

SEQ ID NO: 1376134 - RNA, 19 nt, Artificial Sequence
  Description of Artificial Sequence: Synthetic oligonucleotide
cuccggguggcagaaggug

SEQ ID NO: 1376135 - RNA, 19 nt, Artificial Sequence
  Description of Artificial Sequence: Synthetic oligonucleotide
guccagacaugggagacaa

SEQ ID NO: 1376136 - RNA, 19 nt, Artificial Sequence
  Description of Artificial Sequence: Synthetic oligonucleotide
gguggauacagaccuuucu

SEQ ID NO: 1376137 - RNA, 19 nt, Artificial Sequence
  Description of Artificial Sequence: Synthetic oligonucleotide
agacaaacuucgggugcug

SEQ ID NO: 1376138 - RNA, 19 nt, Artificial Sequence
  Description of Artificial Sequence: Synthetic oligonucleotide
gagcucaaccacauuuucu

SEQ ID NO: 1376139 - RNA, 19 nt, Artificial Sequence
  Description of Artificial Sequence: Synthetic oligonucleotide
gacaucagugcaagcgucu

SEQ ID NO: 1376140 - RNA, 19 nt, Artificial Sequence
  Description of Artificial Sequence: Synthetic oligonucleotide
ugcaagcgucuuccuugac

SEQ ID NO: 1376141 - RNA, 19 nt, Artificial Sequence
  Description of Artificial Sequence: Synthetic oligonucleotide
gaguccgaacaaaacuugu

SEQ ID NO: 1376142 - RNA, 19 nt, Artificial Sequence
  Description of Artificial Sequence: Synthetic oligonucleotide
acgucgcuuuguggggccc

SEQ ID NO: 1376143 - RNA, 19 nt, Artificial Sequence
  Description of Artificial Sequence: Synthetic oligonucleotide
gagguucacgaggauggaa

SEQ ID NO: 1376144 - RNA, 19 nt, Artificial Sequence
  Description of Artificial Sequence: Synthetic oligonucleotide
cuguggcgggacucacggg

SEQ ID NO: 1376145 - RNA, 19 nt, Artificial Sequence
  Description of Artificial Sequence: Synthetic oligonucleotide
ggacggagaguugacaaaa

SEQ ID NO: 1376146 - RNA, 19 nt, Artificial Sequence
  Description of Artificial Sequence: Synthetic oligonucleotide
cccacaguagcuggagucc

SEQ ID NO: 1376147 - RNA, 19 nt, Artificial Sequence
  Description of Artificial Sequence: Synthetic oligonucleotide
gcacuccaaucaaugaaac

SEQ ID NO: 1376148 - RNA, 19 nt, Artificial Sequence
  Description of Artificial Sequence: Synthetic oligonucleotide
acacaucuccccagugcug

SEQ ID NO: 1376149 - RNA, 19 nt, Artificial Sequence
  Description of Artificial Sequence: Synthetic oligonucleotide
gagcgcuguggccaaugaa

SEQ ID NO: 1376150 - RNA, 19 nt, Artificial Sequence
  Description of Artificial Sequence: Synthetic oligonucleotide
cugggacacacccggugca

SEQ ID NO: 1376151 - RNA, 19 nt, Artificial Sequence
  Description of Artificial Sequence: Synthetic oligonucleotide
caugucuguauucccuccu

SEQ ID NO: 1376152 - RNA, 19 nt, Artificial Sequence
  Description of Artificial Sequence: Synthetic oligonucleotide
aggaugcacuccaaucaau

SEQ ID NO: 1376153 - RNA, 19 nt, Artificial Sequence
  Description of Artificial Sequence: Synthetic oligonucleotide
caaaacuugucugcacacu

SEQ ID NO: 1376154 - RNA, 19 nt, Artificial Sequence
  Description of Artificial Sequence: Synthetic oligonucleotide
ccggaaaggcguuguaauc

SEQ ID NO: 1376155 - RNA, 19 nt, Artificial Sequence
  Description of Artificial Sequence: Synthetic oligonucleotide
guggcucuuagaagucuuc

SEQ ID NO: 1376156 - RNA, 19 nt, Artificial Sequence
  Description of Artificial Sequence: Synthetic oligonucleotide
acucacggggcagcaauuu

SEQ ID NO: 1376157 - RNA, 19 nt, Artificial Sequence
  Description of Artificial Sequence: Synthetic oligonucleotide
acgcguucccacaguagcu

SEQ ID NO: 1376158 - RNA, 19 nt, Artificial Sequence
  Description of Artificial Sequence: Synthetic oligonucleotide
agggagcuugccaggguca

SEQ ID NO: 1376159 - RNA, 19 nt, Artificial Sequence
  Description of Artificial Sequence: Synthetic oligonucleotide
gugagcgcuguggccaaug

SEQ ID NO: 1376160 - RNA, 19 nt, Artificial Sequence
  Description of Artificial Sequence: Synthetic oligonucleotide
ccagguagagugagcgcug

SEQ ID NO: 1376161 - RNA, 19 nt, Artificial Sequence
  Description of Artificial Sequence: Synthetic oligonucleotide
ccauauguccagguucaug

SEQ ID NO: 1376162 - RNA, 19 nt, Artificial Sequence
  Description of Artificial Sequence: Synthetic oligonucleotide
cuuguuccuugagcucaac

SEQ ID NO: 1376163 - RNA, 19 nt, Artificial Sequence
  Description of Artificial Sequence: Synthetic oligonucleotide
ggcguuguaaucguucagu

SEQ ID NO: 1376164 - RNA, 19 nt, Artificial Sequence
  Description of Artificial Sequence: Synthetic oligonucleotide
gucgcuuuguggggcccag

SEQ ID NO: 1376165 - RNA, 19 nt, Artificial Sequence
  Description of Artificial Sequence: Synthetic oligonucleotide
cccuggguaguacuccuug

SEQ ID NO: 1376166 - RNA, 19 nt, Artificial Sequence
  Description of Artificial Sequence: Synthetic oligonucleotide
ggaaguuugcauugcgauu

SEQ ID NO: 1376167 - RNA, 19 nt, Artificial Sequence
  Description of Artificial Sequence: Synthetic oligonucleotide
gcguaauucauguuuucuu

SEQ ID NO: 1376168 - RNA, 19 nt, Artificial Sequence
  Description of Artificial Sequence: Synthetic oligonucleotide
guggcgggacucacggggc

SEQ ID NO: 1376169 - RNA, 19 nt, Artificial Sequence
  Description of Artificial Sequence: Synthetic oligonucleotide
gagugagcgcuguggccaa

SEQ ID NO: 1376170 - RNA, 19 nt, Artificial Sequence
  Description of Artificial Sequence: Synthetic oligonucleotide
cucacgcguucccacagua

SEQ ID NO: 1376171 - RNA, 19 nt, Artificial Sequence
  Description of Artificial Sequence: Synthetic oligonucleotide
cacacccggugcacuguuc

SEQ ID NO: 1376172 - RNA, 19 nt, Artificial Sequence
  Description of Artificial Sequence: Synthetic oligonucleotide
cauugcgauuugcugugcu

SEQ ID NO: 1376173 - RNA, 19 nt, Artificial Sequence
  Description of Artificial Sequence: Synthetic oligonucleotide
ggcguaauucauguuuucu

SEQ ID NO: 1376174 - RNA, 19 nt, Artificial Sequence
  Description of Artificial Sequence: Synthetic oligonucleotide
ccacaguagcuggaguccc

SEQ ID NO: 1376175 - RNA, 19 nt, Artificial Sequence
  Description of Artificial Sequence: Synthetic oligonucleotide
acggggcagcaauuuucau

SEQ ID NO: 1376176 - RNA, 19 nt, Artificial Sequence
  Description of Artificial Sequence: Synthetic oligonucleotide
agcgggcaguacacacugg

SEQ ID NO: 1376177 - RNA, 19 nt, Artificial Sequence
  Description of Artificial Sequence: Synthetic oligonucleotide
uucgggugcuggugaggua

SEQ ID NO: 1376178 - RNA, 19 nt, Artificial Sequence
  Description of Artificial Sequence: Synthetic oligonucleotide
agguucauguaggcacgaa

SEQ ID NO: 1376179 - RNA, 19 nt, Artificial Sequence
  Description of Artificial Sequence: Synthetic oligonucleotide
gcgauuugcugugcuaguc

SEQ ID NO: 1376180 - RNA, 19 nt, Artificial Sequence
  Description of Artificial Sequence: Synthetic oligonucleotide
uggcccgcacgcugccuga

SEQ ID NO: 1376181 - RNA, 19 nt, Artificial Sequence
  Description of Artificial Sequence: Synthetic oligonucleotide
acauguguuuagagagguu

SEQ ID NO: 1376182 - RNA, 19 nt, Artificial Sequence
  Description of Artificial Sequence: Synthetic oligonucleotide
cacccggugcacuguucuc

SEQ ID NO: 1376183 - RNA, 19 nt, Artificial Sequence
  Description of Artificial Sequence: Synthetic oligonucleotide
gggcugcacauguguuuag

SEQ ID NO: 1376184 - RNA, 19 nt, Artificial Sequence
  Description of Artificial Sequence: Synthetic oligonucleotide
gcuuccggagaaaaguccu

SEQ ID NO: 1376185 - RNA, 19 nt, Artificial Sequence
  Description of Artificial Sequence: Synthetic oligonucleotide
gugcuguccugugcacacc

SEQ ID NO: 1376186 - RNA, 19 nt, Artificial Sequence
  Description of Artificial Sequence: Synthetic oligonucleotide
ggcugcacauguguuuaga

SEQ ID NO: 1376187 - RNA, 19 nt, Artificial Sequence
  Description of Artificial Sequence: Synthetic oligonucleotide
gccauagaugcacuggcuu

SEQ ID NO: 1376188 - RNA, 19 nt, Artificial Sequence
  Description of Artificial Sequence: Synthetic oligonucleotide
ggacucacggggcagcaau

SEQ ID NO: 1376189 - RNA, 19 nt, Artificial Sequence
  Description of Artificial Sequence: Synthetic oligonucleotide
caggccccugggacacacc

SEQ ID NO: 1376190 - RNA, 19 nt, Artificial Sequence
  Description of Artificial Sequence: Synthetic oligonucleotide
acaccaucuccggguggca

SEQ ID NO: 1376191 - RNA, 19 nt, Artificial Sequence
  Description of Artificial Sequence: Synthetic oligonucleotide
gcccuuuauucacauugcu

SEQ ID NO: 1376192 - RNA, 19 nt, Artificial Sequence
  Description of Artificial Sequence: Synthetic oligonucleotide
cccucacgcguucccacag

SEQ ID NO: 1376193 - RNA, 19 nt, Artificial Sequence
  Description of Artificial Sequence: Synthetic oligonucleotide
ggggaagccauuggcguaa

SEQ ID NO: 1376194 - RNA, 19 nt, Artificial Sequence
  Description of Artificial Sequence: Synthetic oligonucleotide
ucgcuuuguggggcccaga

SEQ ID NO: 1376195 - RNA, 19 nt, Artificial Sequence
  Description of Artificial Sequence: Synthetic oligonucleotide
cuuccggaaaggcguugua

SEQ ID NO: 1376196 - RNA, 19 nt, Artificial Sequence
  Description of Artificial Sequence: Synthetic oligonucleotide
guauucccuccuucacagu

SEQ ID NO: 1376197 - RNA, 19 nt, Artificial Sequence
  Description of Artificial Sequence: Synthetic oligonucleotide
cagguucauguaggcacga

SEQ ID NO: 1376198 - RNA, 19 nt, Artificial Sequence
  Description of Artificial Sequence: Synthetic oligonucleotide
cccggugcacuguucucug

SEQ ID NO: 1376199 - RNA, 19 nt, Artificial Sequence
  Description of Artificial Sequence: Synthetic oligonucleotide
cgcuaggaaucaaaacaca

SEQ ID NO: 1376200 - RNA, 19 nt, Artificial Sequence
  Description of Artificial Sequence: Synthetic oligonucleotide
gaaaggcguuguaaucguu

SEQ ID NO: 1376201 - RNA, 19 nt, Artificial Sequence
  Description of Artificial Sequence: Synthetic oligonucleotide
cgcacgcugccugaggagc

SEQ ID NO: 1376202 - RNA, 19 nt, Artificial Sequence
  Description of Artificial Sequence: Synthetic oligonucleotide
ccacuaguuuccugucaca

SEQ ID NO: 1376203 - RNA, 19 nt, Artificial Sequence
  Description of Artificial Sequence: Synthetic oligonucleotide
ggaguguuccagguagagu

SEQ ID NO: 1376204 - RNA, 19 nt, Artificial Sequence
  Description of Artificial Sequence: Synthetic oligonucleotide
cagguggauacagaccuuu

SEQ ID NO: 1376205 - RNA, 19 nt, Artificial Sequence
  Description of Artificial Sequence: Synthetic oligonucleotide
ccggugcacuguucucugc

SEQ ID NO: 1376206 - RNA, 19 nt, Artificial Sequence
  Description of Artificial Sequence: Synthetic oligonucleotide
ccauagaugcacuggcuuu

SEQ ID NO: 1376207 - RNA, 19 nt, Artificial Sequence
  Description of Artificial Sequence: Synthetic oligonucleotide
ggguuaaacccuggguagu

SEQ ID NO: 1376208 - RNA, 19 nt, Artificial Sequence
  Description of Artificial Sequence: Synthetic oligonucleotide
cgcguucccacaguagcug

SEQ ID NO: 1376209 - RNA, 19 nt, Artificial Sequence
  Description of Artificial Sequence: Synthetic oligonucleotide
ggcccagauggaaccaaaa

SEQ ID NO: 1376210 - RNA, 19 nt, Artificial Sequence
  Description of Artificial Sequence: Synthetic oligonucleotide
cucacggggcagcaauuuu

SEQ ID NO: 1376211 - RNA, 19 nt, Artificial Sequence
  Description of Artificial Sequence: Synthetic oligonucleotide
cccgcacgcugccugagga

SEQ ID NO: 1376212 - RNA, 19 nt, Artificial Sequence
  Description of Artificial Sequence: Synthetic oligonucleotide
agugagcgcuguggccaau

SEQ ID NO: 1376213 - RNA, 19 nt, Artificial Sequence
  Description of Artificial Sequence: Synthetic oligonucleotide
cagguagagugagcgcugu

SEQ ID NO: 1376214 - RNA, 19 nt, Artificial Sequence
  Description of Artificial Sequence: Synthetic oligonucleotide
gcgggacucacggggcagc

SEQ ID NO: 1376215 - RNA, 19 nt, Artificial Sequence
  Description of Artificial Sequence: Synthetic oligonucleotide
acccuggguaguacuccuu

SEQ ID NO: 1376216 - RNA, 19 nt, Artificial Sequence
  Description of Artificial Sequence: Synthetic oligonucleotide
gggagcuugccagggucaa

SEQ ID NO: 1376217 - RNA, 19 nt, Artificial Sequence
  Description of Artificial Sequence: Synthetic oligonucleotide
cauccaccacuaguuuccu

SEQ ID NO: 1376218 - RNA, 19 nt, Artificial Sequence
  Description of Artificial Sequence: Synthetic oligonucleotide
ggggcccagauggaaccaa

SEQ ID NO: 1376219 - RNA, 19 nt, Artificial Sequence
  Description of Artificial Sequence: Synthetic oligonucleotide
ggagcuugccagggucaaa

SEQ ID NO: 1376220 - RNA, 19 nt, Artificial Sequence
  Description of Artificial Sequence: Synthetic oligonucleotide
gggacacacccggugcacu

SEQ ID NO: 1376221 - RNA, 19 nt, Artificial Sequence
  Description of Artificial Sequence: Synthetic oligonucleotide
gcuacuggucaggcacacu

SEQ ID NO: 1376222 - RNA, 19 nt, Artificial Sequence
  Description of Artificial Sequence: Synthetic oligonucleotide
ggaagccauuggcguaauu

SEQ ID NO: 1376223 - RNA, 19 nt, Artificial Sequence
  Description of Artificial Sequence: Synthetic oligonucleotide
ccucacgcguucccacagu

SEQ ID NO: 1376224 - RNA, 19 nt, Artificial Sequence
  Description of Artificial Sequence: Synthetic oligonucleotide
cgucgcuuuguggggccca

SEQ ID NO: 1376225 - RNA, 19 nt, Artificial Sequence
  Description of Artificial Sequence: Synthetic oligonucleotide
gggaagccauuggcguaau

SEQ ID NO: 1376226 - RNA, 19 nt, Artificial Sequence
  Description of Artificial Sequence: Synthetic oligonucleotide
ccguggcaauguuggcacu

SEQ ID NO: 1376227 - RNA, 19 nt, Artificial Sequence
  Description of Artificial Sequence: Synthetic oligonucleotide
ggcaggccccugggacaca

SEQ ID NO: 1376228 - RNA, 19 nt, Artificial Sequence
  Description of Artificial Sequence: Synthetic oligonucleotide
ccccugggacacacccggu

SEQ ID NO: 1376229 - RNA, 19 nt, Artificial Sequence
  Description of Artificial Sequence: Synthetic oligonucleotide
auuuuaagcaauuauugcc

SEQ ID NO: 1376230 - RNA, 19 nt, Artificial Sequence
  Description of Artificial Sequence: Synthetic oligonucleotide
aaauaugucuuguugacuc

SEQ ID NO: 1376231 - RNA, 19 nt, Artificial Sequence
  Description of Artificial Sequence: Synthetic oligonucleotide
agacaauugucacagaugc

SEQ ID NO: 1376232 - RNA, 19 nt, Artificial Sequence
  Description of Artificial Sequence: Synthetic oligonucleotide
agugaaaauguauuguggc

SEQ ID NO: 1376233 - RNA, 19 nt, Artificial Sequence
  Description of Artificial Sequence: Synthetic oligonucleotide
aaacccacaguucugaauc

SEQ ID NO: 1376234 - RNA, 19 nt, Artificial Sequence
  Description of Artificial Sequence: Synthetic oligonucleotide
uuuaaugauaguaacuucu

SEQ ID NO: 1376235 - RNA, 19 nt, Artificial Sequence
  Description of Artificial Sequence: Synthetic oligonucleotide
guuagauacauguaaagag

SEQ ID NO: 1376236 - RNA, 19 nt, Artificial Sequence
  Description of Artificial Sequence: Synthetic oligonucleotide
aauauaggacuuuguaaac

SEQ ID NO: 1376237 - RNA, 19 nt, Artificial Sequence
  Description of Artificial Sequence: Synthetic oligonucleotide
aauuauauuguucugggua

SEQ ID NO: 1376238 - RNA, 19 nt, Artificial Sequence
  Description of Artificial Sequence: Synthetic oligonucleotide
uguuauaaugcuaaaauuu

SEQ ID NO: 1376239 - RNA, 19 nt, Artificial Sequence
  Description of Artificial Sequence: Synthetic oligonucleotide
aaugauaguaacuucuuau

SEQ ID NO: 1376240 - RNA, 19 nt, Artificial Sequence
  Description of Artificial Sequence: Synthetic oligonucleotide
aguuacgaaaauaagggcc

SEQ ID NO: 1376241 - RNA, 19 nt, Artificial Sequence
  Description of Artificial Sequence: Synthetic oligonucleotide
uguaugaaagaauagcucu

SEQ ID NO: 1376242 - RNA, 19 nt, Artificial Sequence
  Description of Artificial Sequence: Synthetic oligonucleotide
aaagauugccacuuagauc

SEQ ID NO: 1376243 - RNA, 19 nt, Artificial Sequence
  Description of Artificial Sequence: Synthetic oligonucleotide
uuuuaagcaauuauugcca

SEQ ID NO: 1376244 - RNA, 19 nt, Artificial Sequence
  Description of Artificial Sequence: Synthetic oligonucleotide
aagacaaucaaguuaucca

SEQ ID NO: 1376245 - RNA, 19 nt, Artificial Sequence
  Description of Artificial Sequence: Synthetic oligonucleotide
uguacaauugucucuuugg

SEQ ID NO: 1376246 - RNA, 19 nt, Artificial Sequence
  Description of Artificial Sequence: Synthetic oligonucleotide
uuaaaguuugcuucaauca

SEQ ID NO: 1376247 - RNA, 19 nt, Artificial Sequence
  Description of Artificial Sequence: Synthetic oligonucleotide
gaaagaauagcucucggug

SEQ ID NO: 1376248 - RNA, 19 nt, Artificial Sequence
  Description of Artificial Sequence: Synthetic oligonucleotide
uauuguucuggguagacag

SEQ ID NO: 1376249 - RNA, 19 nt, Artificial Sequence
  Description of Artificial Sequence: Synthetic oligonucleotide
ucuguaugaaagaauagcu

SEQ ID NO: 1376250 - RNA, 19 nt, Artificial Sequence
  Description of Artificial Sequence: Synthetic oligonucleotide
uagauauuggccauugaag

SEQ ID NO: 1376251 - RNA, 19 nt, Artificial Sequence
  Description of Artificial Sequence: Synthetic oligonucleotide
aaggaaucgugaugaaacc

SEQ ID NO: 1376252 - RNA, 19 nt, Artificial Sequence
  Description of Artificial Sequence: Synthetic oligonucleotide
aaccacucuauuuucuuac

SEQ ID NO: 1376253 - RNA, 19 nt, Artificial Sequence
  Description of Artificial Sequence: Synthetic oligonucleotide
uuaugcagugguuagauac

SEQ ID NO: 1376254 - RNA, 19 nt, Artificial Sequence
  Description of Artificial Sequence: Synthetic oligonucleotide
uuagauacauguaaagagu

SEQ ID NO: 1376255 - RNA, 19 nt, Artificial Sequence
  Description of Artificial Sequence: Synthetic oligonucleotide
uauucuguaugaaagaaua

SEQ ID NO: 1376256 - RNA, 19 nt, Artificial Sequence
  Description of Artificial Sequence: Synthetic oligonucleotide
acgguuacugcucugaagg

SEQ ID NO: 1376257 - RNA, 19 nt, Artificial Sequence
  Description of Artificial Sequence: Synthetic oligonucleotide
ugagucaucacucuugggu

SEQ ID NO: 1376258 - RNA, 19 nt, Artificial Sequence
  Description of Artificial Sequence: Synthetic oligonucleotide
auaguaacuucuuauauau

SEQ ID NO: 1376259 - RNA, 19 nt, Artificial Sequence
  Description of Artificial Sequence: Synthetic oligonucleotide
gauggaguuguuuaugcag

SEQ ID NO: 1376260 - RNA, 19 nt, Artificial Sequence
  Description of Artificial Sequence: Synthetic oligonucleotide
uauaauuagcauguggccc

SEQ ID NO: 1376261 - RNA, 19 nt, Artificial Sequence
  Description of Artificial Sequence: Synthetic oligonucleotide
cuaaaauuugagaagauaa

SEQ ID NO: 1376262 - RNA, 19 nt, Artificial Sequence
  Description of Artificial Sequence: Synthetic oligonucleotide
acaaucugcaaauaugucu

SEQ ID NO: 1376263 - RNA, 19 nt, Artificial Sequence
  Description of Artificial Sequence: Synthetic oligonucleotide
agcauuauaaauaaauaug

SEQ ID NO: 1376264 - RNA, 19 nt, Artificial Sequence
  Description of Artificial Sequence: Synthetic oligonucleotide
auuagcauguggcccaagc

SEQ ID NO: 1376265 - RNA, 19 nt, Artificial Sequence
  Description of Artificial Sequence: Synthetic oligonucleotide
cuuguugacucaaauacug

SEQ ID NO: 1376266 - RNA, 19 nt, Artificial Sequence
  Description of Artificial Sequence: Synthetic oligonucleotide
uugccaauuauauuguucu

SEQ ID NO: 1376267 - RNA, 19 nt, Artificial Sequence
  Description of Artificial Sequence: Synthetic oligonucleotide
uucaaauaucaguuuauca

SEQ ID NO: 1376268 - RNA, 19 nt, Artificial Sequence
  Description of Artificial Sequence: Synthetic oligonucleotide
cugaacuauaauuagcaug

SEQ ID NO: 1376269 - RNA, 19 nt, Artificial Sequence
  Description of Artificial Sequence: Synthetic oligonucleotide
ucaaauacuggguuauuca

SEQ ID NO: 1376270 - RNA, 19 nt, Artificial Sequence
  Description of Artificial Sequence: Synthetic oligonucleotide
uugacaucggugaaagucc

SEQ ID NO: 1376271 - RNA, 19 nt, Artificial Sequence
  Description of Artificial Sequence: Synthetic oligonucleotide
gaaggaaucgugaugaaac

SEQ ID NO: 1376272 - RNA, 19 nt, Artificial Sequence
  Description of Artificial Sequence: Synthetic oligonucleotide
uuuaaugaccugucaauga

SEQ ID NO: 1376273 - RNA, 19 nt, Artificial Sequence
  Description of Artificial Sequence: Synthetic oligonucleotide
uucuguaugaaagaauagc

SEQ ID NO: 1376274 - RNA, 19 nt, Artificial Sequence
  Description of Artificial Sequence: Synthetic oligonucleotide
acuguugugaugaugacag

SEQ ID NO: 1376275 - RNA, 19 nt, Artificial Sequence
  Description of Artificial Sequence: Synthetic oligonucleotide
cuuaaaguuugcuucaauc

SEQ ID NO: 1376276 - RNA, 19 nt, Artificial Sequence
  Description of Artificial Sequence: Synthetic oligonucleotide
guuaucuaagaauuucaag

SEQ ID NO: 1376277 - RNA, 19 nt, Artificial Sequence
  Description of Artificial Sequence: Synthetic oligonucleotide
guuauaaugcuaaaauuug

SEQ ID NO: 1376278 - RNA, 19 nt, Artificial Sequence
  Description of Artificial Sequence: Synthetic oligonucleotide
ugauuagaaagcgucauca

SEQ ID NO: 1376279 - RNA, 19 nt, Artificial Sequence
  Description of Artificial Sequence: Synthetic oligonucleotide
ugaauagaagagcuguugu

SEQ ID NO: 1376280 - RNA, 19 nt, Artificial Sequence
  Description of Artificial Sequence: Synthetic oligonucleotide
acaauugucacagaugcug

SEQ ID NO: 1376281 - RNA, 19 nt, Artificial Sequence
  Description of Artificial Sequence: Synthetic oligonucleotide
aacgcucccaaagauugcc

SEQ ID NO: 1376282 - RNA, 19 nt, Artificial Sequence
  Description of Artificial Sequence: Synthetic oligonucleotide
agugguuagauacauguaa

SEQ ID NO: 1376283 - RNA, 19 nt, Artificial Sequence
  Description of Artificial Sequence: Synthetic oligonucleotide
auagauauuggccauugaa

SEQ ID NO: 1376284 - RNA, 19 nt, Artificial Sequence
  Description of Artificial Sequence: Synthetic oligonucleotide
uuaaugaccugucaaugaa

SEQ ID NO: 1376285 - RNA, 19 nt, Artificial Sequence
  Description of Artificial Sequence: Synthetic oligonucleotide
uuuuaaugaccugucaaug

SEQ ID NO: 1376286 - RNA, 19 nt, Artificial Sequence
  Description of Artificial Sequence: Synthetic oligonucleotide
auaauuagcauguggccca

SEQ ID NO: 1376287 - RNA, 19 nt, Artificial Sequence
  Description of Artificial Sequence: Synthetic oligonucleotide
ugauaguaacuucuuauau

SEQ ID NO: 1376288 - RNA, 19 nt, Artificial Sequence
  Description of Artificial Sequence: Synthetic oligonucleotide
gcaguuacgaaaauaaggg

SEQ ID NO: 1376289 - RNA, 19 nt, Artificial Sequence
  Description of Artificial Sequence: Synthetic oligonucleotide
aucggugaaaguccacucc

SEQ ID NO: 1376290 - RNA, 19 nt, Artificial Sequence
  Description of Artificial Sequence: Synthetic oligonucleotide
agcuauaagaccugggaca

SEQ ID NO: 1376291 - RNA, 19 nt, Artificial Sequence
  Description of Artificial Sequence: Synthetic oligonucleotide
ggagcugucaaccaaguag

SEQ ID NO: 1376292 - RNA, 19 nt, Artificial Sequence
  Description of Artificial Sequence: Synthetic oligonucleotide
gaaggaaugugcaaacugc

SEQ ID NO: 1376293 - RNA, 19 nt, Artificial Sequence
  Description of Artificial Sequence: Synthetic oligonucleotide
agcacugaacuauaauuag

SEQ ID NO: 1376294 - RNA, 19 nt, Artificial Sequence
  Description of Artificial Sequence: Synthetic oligonucleotide
uguuaucuaagaauuucaa

SEQ ID NO: 1376295 - RNA, 19 nt, Artificial Sequence
  Description of Artificial Sequence: Synthetic oligonucleotide
aauuauugccaauuauauu

SEQ ID NO: 1376296 - RNA, 19 nt, Artificial Sequence
  Description of Artificial Sequence: Synthetic oligonucleotide
ucagaaaccugccacccug

SEQ ID NO: 1376297 - RNA, 19 nt, Artificial Sequence
  Description of Artificial Sequence: Synthetic oligonucleotide
aggcgcacacucuagauuc

SEQ ID NO: 1376298 - RNA, 19 nt, Artificial Sequence
  Description of Artificial Sequence: Synthetic oligonucleotide
ugguuagauacauguaaag

SEQ ID NO: 1376299 - RNA, 19 nt, Artificial Sequence
  Description of Artificial Sequence: Synthetic oligonucleotide
cuugcuagcauuauaaaua

SEQ ID NO: 1376300 - RNA, 19 nt, Artificial Sequence
  Description of Artificial Sequence: Synthetic oligonucleotide
ugucucagaaaccugccac

SEQ ID NO: 1376301 - RNA, 19 nt, Artificial Sequence
  Description of Artificial Sequence: Synthetic oligonucleotide
uuguuuaugcagugguuag

SEQ ID NO: 1376302 - RNA, 19 nt, Artificial Sequence
  Description of Artificial Sequence: Synthetic oligonucleotide
ugaaagaauagcucucggu

SEQ ID NO: 1376303 - RNA, 19 nt, Artificial Sequence
  Description of Artificial Sequence: Synthetic oligonucleotide
uaugcugcgaaguuuuggu

SEQ ID NO: 1376304 - RNA, 19 nt, Artificial Sequence
  Description of Artificial Sequence: Synthetic oligonucleotide
uauaagaccugggacaaac

SEQ ID NO: 1376305 - RNA, 19 nt, Artificial Sequence
  Description of Artificial Sequence: Synthetic oligonucleotide
aauaugucuuguugacuca

SEQ ID NO: 1376306 - RNA, 19 nt, Artificial Sequence
  Description of Artificial Sequence: Synthetic oligonucleotide
aagcgucaucaucugaguc

SEQ ID NO: 1376307 - RNA, 19 nt, Artificial Sequence
  Description of Artificial Sequence: Synthetic oligonucleotide
aggaaucgugaugaaaccc

SEQ ID NO: 1376308 - RNA, 19 nt, Artificial Sequence
  Description of Artificial Sequence: Synthetic oligonucleotide
aagaccugggacaaaccac

SEQ ID NO: 1376309 - RNA, 19 nt, Artificial Sequence
  Description of Artificial Sequence: Synthetic oligonucleotide
gauaguaacuucuuauaua

SEQ ID NO: 1376310 - RNA, 19 nt, Artificial Sequence
  Description of Artificial Sequence: Synthetic oligonucleotide
ggcaguuacgaaaauaagg

SEQ ID NO: 1376311 - RNA, 19 nt, Artificial Sequence
  Description of Artificial Sequence: Synthetic oligonucleotide
uuguuauaaugcuaaaauu

SEQ ID NO: 1376312 - RNA, 19 nt, Artificial Sequence
  Description of Artificial Sequence: Synthetic oligonucleotide
aaacccauguccugccaag

SEQ ID NO: 1376313 - RNA, 19 nt, Artificial Sequence
  Description of Artificial Sequence: Synthetic oligonucleotide
guagggaugauuagaaagc

SEQ ID NO: 1376314 - RNA, 19 nt, Artificial Sequence
  Description of Artificial Sequence: Synthetic oligonucleotide
ugaccugucaaugaacaug

SEQ ID NO: 1376315 - RNA, 19 nt, Artificial Sequence
  Description of Artificial Sequence: Synthetic oligonucleotide
guugacaucggugaaaguc

SEQ ID NO: 1376316 - RNA, 19 nt, Artificial Sequence
  Description of Artificial Sequence: Synthetic oligonucleotide
agugagggcgacgauagac

SEQ ID NO: 1376317 - RNA, 19 nt, Artificial Sequence
  Description of Artificial Sequence: Synthetic oligonucleotide
aauaucaguuuaucagaaa

SEQ ID NO: 1376318 - RNA, 19 nt, Artificial Sequence
  Description of Artificial Sequence: Synthetic oligonucleotide
ugggguaaagaaggaaucg

SEQ ID NO: 1376319 - RNA, 19 nt, Artificial Sequence
  Description of Artificial Sequence: Synthetic oligonucleotide
gacuguuggggcuucuagg

SEQ ID NO: 1376320 - RNA, 19 nt, Artificial Sequence
  Description of Artificial Sequence: Synthetic oligonucleotide
augauuagaaagcgucauc

SEQ ID NO: 1376321 - RNA, 19 nt, Artificial Sequence
  Description of Artificial Sequence: Synthetic oligonucleotide
uuauagauauuggccauug

SEQ ID NO: 1376322 - RNA, 19 nt, Artificial Sequence
  Description of Artificial Sequence: Synthetic oligonucleotide
aagacaauugucacagaug

SEQ ID NO: 1376323 - RNA, 19 nt, Artificial Sequence
  Description of Artificial Sequence: Synthetic oligonucleotide
aacaaucugcaaauauguc

SEQ ID NO: 1376324 - RNA, 19 nt, Artificial Sequence
  Description of Artificial Sequence: Synthetic oligonucleotide
ggacuuuguaaacacacag

SEQ ID NO: 1376325 - RNA, 19 nt, Artificial Sequence
  Description of Artificial Sequence: Synthetic oligonucleotide
ucuuggauggaguuguuua

SEQ ID NO: 1376326 - RNA, 19 nt, Artificial Sequence
  Description of Artificial Sequence: Synthetic oligonucleotide
uuaugcugcgaaguuuugg

SEQ ID NO: 1376327 - RNA, 19 nt, Artificial Sequence
  Description of Artificial Sequence: Synthetic oligonucleotide
gaaaccugccacccugugg

SEQ ID NO: 1376328 - RNA, 19 nt, Artificial Sequence
  Description of Artificial Sequence: Synthetic oligonucleotide
aaaacccacaguucugaau

SEQ ID NO: 1376329 - RNA, 19 nt, Artificial Sequence
  Description of Artificial Sequence: Synthetic oligonucleotide
aaauaucaguuuaucagaa

SEQ ID NO: 1376330 - RNA, 19 nt, Artificial Sequence
  Description of Artificial Sequence: Synthetic oligonucleotide
aaagcgucaucaucugagu

SEQ ID NO: 1376331 - RNA, 19 nt, Artificial Sequence
  Description of Artificial Sequence: Synthetic oligonucleotide
ugcuauucuguaugaaaga

SEQ ID NO: 1376332 - RNA, 19 nt, Artificial Sequence
  Description of Artificial Sequence: Synthetic oligonucleotide
ccaauuauauuguucuggg

SEQ ID NO: 1376333 - RNA, 19 nt, Artificial Sequence
  Description of Artificial Sequence: Synthetic oligonucleotide
uguuguuauaaugcuaaaa

SEQ ID NO: 1376334 - RNA, 19 nt, Artificial Sequence
  Description of Artificial Sequence: Synthetic oligonucleotide
auguauuguggccauaaaa

SEQ ID NO: 1376335 - RNA, 19 nt, Artificial Sequence
  Description of Artificial Sequence: Synthetic oligonucleotide
uugugaugaugacaguugu

SEQ ID NO: 1376336 - RNA, 19 nt, Artificial Sequence
  Description of Artificial Sequence: Synthetic oligonucleotide
uuuaagcaauuauugccaa

SEQ ID NO: 1376337 - RNA, 19 nt, Artificial Sequence
  Description of Artificial Sequence: Synthetic oligonucleotide
caguuacgaaaauaagggc

SEQ ID NO: 1376338 - RNA, 19 nt, Artificial Sequence
  Description of Artificial Sequence: Synthetic oligonucleotide
ugcugcgaaguuuugguac

SEQ ID NO: 1376339 - RNA, 19 nt, Artificial Sequence
  Description of Artificial Sequence: Synthetic oligonucleotide
acuguuggggcuucuagga

SEQ ID NO: 1376340 - RNA, 19 nt, Artificial Sequence
  Description of Artificial Sequence: Synthetic oligonucleotide
uaaugauaguaacuucuua

SEQ ID NO: 1376341 - RNA, 19 nt, Artificial Sequence
  Description of Artificial Sequence: Synthetic oligonucleotide
uuucaaauaucaguuuauc

SEQ ID NO: 1376342 - RNA, 19 nt, Artificial Sequence
  Description of Artificial Sequence: Synthetic oligonucleotide
acgaaaauaagggccagug

SEQ ID NO: 1376343 - RNA, 19 nt, Artificial Sequence
  Description of Artificial Sequence: Synthetic oligonucleotide
gauauuggccauugaagaa

SEQ ID NO: 1376344 - RNA, 19 nt, Artificial Sequence
  Description of Artificial Sequence: Synthetic oligonucleotide
ugucaaccaaguagggaug

SEQ ID NO: 1376345 - RNA, 19 nt, Artificial Sequence
  Description of Artificial Sequence: Synthetic oligonucleotide
auagaagagcuguuguuau

SEQ ID NO: 1376346 - RNA, 19 nt, Artificial Sequence
  Description of Artificial Sequence: Synthetic oligonucleotide
uggccauugaagaaauaaa

SEQ ID NO: 1376347 - RNA, 19 nt, Artificial Sequence
  Description of Artificial Sequence: Synthetic oligonucleotide
guuacgaaaauaagggcca

SEQ ID NO: 1376348 - RNA, 19 nt, Artificial Sequence
  Description of Artificial Sequence: Synthetic oligonucleotide
auauaggacuuuguaaaca

SEQ ID NO: 1376349 - RNA, 19 nt, Artificial Sequence
  Description of Artificial Sequence: Synthetic oligonucleotide
aaggaaugugcaaacugca

SEQ ID NO: 1376350 - RNA, 19 nt, Artificial Sequence
  Description of Artificial Sequence: Synthetic oligonucleotide
ugguuguacaauugucucu

SEQ ID NO: 1376351 - RNA, 19 nt, Artificial Sequence
  Description of Artificial Sequence: Synthetic oligonucleotide
ugguagcuuauaauucaca

SEQ ID NO: 1376352 - RNA, 19 nt, Artificial Sequence
  Description of Artificial Sequence: Synthetic oligonucleotide
uguuuucaaauaucaguuu

SEQ ID NO: 1376353 - RNA, 19 nt, Artificial Sequence
  Description of Artificial Sequence: Synthetic oligonucleotide
agcacuauccugaauagaa

SEQ ID NO: 1376354 - RNA, 19 nt, Artificial Sequence
  Description of Artificial Sequence: Synthetic oligonucleotide
gccaauuauauuguucugg

SEQ ID NO: 1376355 - RNA, 19 nt, Artificial Sequence
  Description of Artificial Sequence: Synthetic oligonucleotide
gaugcuguaaaugcucaca

SEQ ID NO: 1376356 - RNA, 19 nt, Artificial Sequence
  Description of Artificial Sequence: Synthetic oligonucleotide
uuguaaacacacaggcuua

SEQ ID NO: 1376357 - RNA, 19 nt, Artificial Sequence
  Description of Artificial Sequence: Synthetic oligonucleotide
acuggaacgcucccaaaga

SEQ ID NO: 1376358 - RNA, 19 nt, Artificial Sequence
  Description of Artificial Sequence: Synthetic oligonucleotide
aauaaagcacugaacuaua

SEQ ID NO: 1376359 - RNA, 19 nt, Artificial Sequence
  Description of Artificial Sequence: Synthetic oligonucleotide
ugggccaucaagacaugga

SEQ ID NO: 1376360 - RNA, 19 nt, Artificial Sequence
  Description of Artificial Sequence: Synthetic oligonucleotide
accaaguagggaugauuag

SEQ ID NO: 1376361 - RNA, 19 nt, Artificial Sequence
  Description of Artificial Sequence: Synthetic oligonucleotide
ugccaaguuaugcugcgaa

SEQ ID NO: 1376362 - RNA, 19 nt, Artificial Sequence
  Description of Artificial Sequence: Synthetic oligonucleotide
gaccugucaaugaacauga

SEQ ID NO: 1376363 - RNA, 19 nt, Artificial Sequence
  Description of Artificial Sequence: Synthetic oligonucleotide
uggaguuguuuaugcagug

SEQ ID NO: 1376364 - RNA, 19 nt, Artificial Sequence
  Description of Artificial Sequence: Synthetic oligonucleotide
uauauuguucuggguagac

SEQ ID NO: 1376365 - RNA, 19 nt, Artificial Sequence
  Description of Artificial Sequence: Synthetic oligonucleotide
acaggcuuaaaguuugcuu

SEQ ID NO: 1376366 - RNA, 19 nt, Artificial Sequence
  Description of Artificial Sequence: Synthetic oligonucleotide
cacuggaacgcucccaaag

SEQ ID NO: 1376367 - RNA, 19 nt, Artificial Sequence
  Description of Artificial Sequence: Synthetic oligonucleotide
cagcuauaagaccugggac

SEQ ID NO: 1376368 - RNA, 19 nt, Artificial Sequence
  Description of Artificial Sequence: Synthetic oligonucleotide
acugaacuauaauuagcau

SEQ ID NO: 1376369 - RNA, 19 nt, Artificial Sequence
  Description of Artificial Sequence: Synthetic oligonucleotide
auaagaccugggacaaacc

SEQ ID NO: 1376370 - RNA, 19 nt, Artificial Sequence
  Description of Artificial Sequence: Synthetic oligonucleotide
auguuaucuaagaauuuca

SEQ ID NO: 1376371 - RNA, 19 nt, Artificial Sequence
  Description of Artificial Sequence: Synthetic oligonucleotide
aaguagggaugauuagaaa

SEQ ID NO: 1376372 - RNA, 19 nt, Artificial Sequence
  Description of Artificial Sequence: Synthetic oligonucleotide
caaguagggaugauuagaa

SEQ ID NO: 1376373 - RNA, 19 nt, Artificial Sequence
  Description of Artificial Sequence: Synthetic oligonucleotide
ucugcaaauaugucuuguu

SEQ ID NO: 1376374 - RNA, 19 nt, Artificial Sequence
  Description of Artificial Sequence: Synthetic oligonucleotide
gaucccggauccuuucuug

SEQ ID NO: 1376375 - RNA, 19 nt, Artificial Sequence
  Description of Artificial Sequence: Synthetic oligonucleotide
cauagucuuauguucaugu

SEQ ID NO: 1376376 - RNA, 19 nt, Artificial Sequence
  Description of Artificial Sequence: Synthetic oligonucleotide
uuacugcucugaaggacca

SEQ ID NO: 1376377 - RNA, 19 nt, Artificial Sequence
  Description of Artificial Sequence: Synthetic oligonucleotide
aggcuuaaaguuugcuuca

SEQ ID NO: 1376378 - RNA, 19 nt, Artificial Sequence
  Description of Artificial Sequence: Synthetic oligonucleotide
acagguggauuuuaaugau

SEQ ID NO: 1376379 - RNA, 19 nt, Artificial Sequence
  Description of Artificial Sequence: Synthetic oligonucleotide
ugccaauuauauuguucug

SEQ ID NO: 1376380 - RNA, 19 nt, Artificial Sequence
  Description of Artificial Sequence: Synthetic oligonucleotide
aaauacuggguuauucaua

SEQ ID NO: 1376381 - RNA, 19 nt, Artificial Sequence
  Description of Artificial Sequence: Synthetic oligonucleotide
uuacgaaaauaagggccag

SEQ ID NO: 1376382 - RNA, 19 nt, Artificial Sequence
  Description of Artificial Sequence: Synthetic oligonucleotide
caguugacaucggugaaag

SEQ ID NO: 1376383 - RNA, 19 nt, Artificial Sequence
  Description of Artificial Sequence: Synthetic oligonucleotide
acuaggacagacacuguug

SEQ ID NO: 1376384 - RNA, 19 nt, Artificial Sequence
  Description of Artificial Sequence: Synthetic oligonucleotide
aacccacaguucugaaucu

SEQ ID NO: 1376385 - RNA, 19 nt, Artificial Sequence
  Description of Artificial Sequence: Synthetic oligonucleotide
uguuuaugcagugguuaga

SEQ ID NO: 1376386 - RNA, 19 nt, Artificial Sequence
  Description of Artificial Sequence: Synthetic oligonucleotide
ugccgccucagcacuaucc

SEQ ID NO: 1376387 - RNA, 19 nt, Artificial Sequence
  Description of Artificial Sequence: Synthetic oligonucleotide
uguggcuguucuaagucuu

SEQ ID NO: 1376388 - RNA, 19 nt, Artificial Sequence
  Description of Artificial Sequence: Synthetic oligonucleotide
ugacucaaauacuggguua

SEQ ID NO: 1376389 - RNA, 19 nt, Artificial Sequence
  Description of Artificial Sequence: Synthetic oligonucleotide
ucauagucuuauguucaug

SEQ ID NO: 1376390 - RNA, 19 nt, Artificial Sequence
  Description of Artificial Sequence: Synthetic oligonucleotide
uguauccaguucagaugcc

SEQ ID NO: 1376391 - RNA, 19 nt, Artificial Sequence
  Description of Artificial Sequence: Synthetic oligonucleotide
uauguucaugucucagaaa

SEQ ID NO: 1376392 - RNA, 19 nt, Artificial Sequence
  Description of Artificial Sequence: Synthetic oligonucleotide
gaguuguuuaugcaguggu

SEQ ID NO: 1376393 - RNA, 19 nt, Artificial Sequence
  Description of Artificial Sequence: Synthetic oligonucleotide
aguuugcuucaaucaccac

SEQ ID NO: 1376394 - RNA, 19 nt, Artificial Sequence
  Description of Artificial Sequence: Synthetic oligonucleotide
aaaacggaugugacuaaaa

SEQ ID NO: 1376395 - RNA, 19 nt, Artificial Sequence
  Description of Artificial Sequence: Synthetic oligonucleotide
gguuagauacauguaaaga

SEQ ID NO: 1376396 - RNA, 19 nt, Artificial Sequence
  Description of Artificial Sequence: Synthetic oligonucleotide
uucauagucuuauguucau

SEQ ID NO: 1376397 - RNA, 19 nt, Artificial Sequence
  Description of Artificial Sequence: Synthetic oligonucleotide
uggcuguucuaagucuugg

SEQ ID NO: 1376398 - RNA, 19 nt, Artificial Sequence
  Description of Artificial Sequence: Synthetic oligonucleotide
gauugccacuuagaucccg

SEQ ID NO: 1376399 - RNA, 19 nt, Artificial Sequence
  Description of Artificial Sequence: Synthetic oligonucleotide
gugcaaacugcaugguagc

SEQ ID NO: 1376400 - RNA, 19 nt, Artificial Sequence
  Description of Artificial Sequence: Synthetic oligonucleotide
agggcgacgauagacaaaa

SEQ ID NO: 1376401 - RNA, 19 nt, Artificial Sequence
  Description of Artificial Sequence: Synthetic oligonucleotide
uuagaucccggauccuuuc

SEQ ID NO: 1376402 - RNA, 19 nt, Artificial Sequence
  Description of Artificial Sequence: Synthetic oligonucleotide
uggguuauucauagucuua

SEQ ID NO: 1376403 - RNA, 19 nt, Artificial Sequence
  Description of Artificial Sequence: Synthetic oligonucleotide
caguucugaaucuggucac

SEQ ID NO: 1376404 - RNA, 19 nt, Artificial Sequence
  Description of Artificial Sequence: Synthetic oligonucleotide
ugagggcgacgauagacaa

SEQ ID NO: 1376405 - RNA, 19 nt, Artificial Sequence
  Description of Artificial Sequence: Synthetic oligonucleotide
gggaugauuagaaagcguc

SEQ ID NO: 1376406 - RNA, 19 nt, Artificial Sequence
  Description of Artificial Sequence: Synthetic oligonucleotide
guuguuuaugcagugguua

SEQ ID NO: 1376407 - RNA, 19 nt, Artificial Sequence
  Description of Artificial Sequence: Synthetic oligonucleotide
uguaaacacacaggcuuaa

SEQ ID NO: 1376408 - RNA, 19 nt, Artificial Sequence
  Description of Artificial Sequence: Synthetic oligonucleotide
gguuuggucagucuuucca

SEQ ID NO: 1376409 - RNA, 19 nt, Artificial Sequence
  Description of Artificial Sequence: Synthetic oligonucleotide
acaucggugaaaguccacu

SEQ ID NO: 1376410 - RNA, 19 nt, Artificial Sequence
  Description of Artificial Sequence: Synthetic oligonucleotide
aguuugugggagcugucaa

SEQ ID NO: 1376411 - RNA, 19 nt, Artificial Sequence
  Description of Artificial Sequence: Synthetic oligonucleotide
aaguuaugcugcgaaguuu

SEQ ID NO: 1376412 - RNA, 19 nt, Artificial Sequence
  Description of Artificial Sequence: Synthetic oligonucleotide
aguuaugcugcgaaguuuu

SEQ ID NO: 1376413 - RNA, 19 nt, Artificial Sequence
  Description of Artificial Sequence: Synthetic oligonucleotide
auggaguuguuuaugcagu

SEQ ID NO: 1376414 - RNA, 19 nt, Artificial Sequence
  Description of Artificial Sequence: Synthetic oligonucleotide
gguaaagaaggaaucguga

SEQ ID NO: 1376415 - RNA, 19 nt, Artificial Sequence
  Description of Artificial Sequence: Synthetic oligonucleotide
guaaagaaggaaucgugau

SEQ ID NO: 1376416 - RNA, 19 nt, Artificial Sequence
  Description of Artificial Sequence: Synthetic oligonucleotide
cacgguuacugcucugaag

SEQ ID NO: 1376417 - RNA, 19 nt, Artificial Sequence
  Description of Artificial Sequence: Synthetic oligonucleotide
cugucaaccaaguagggau

SEQ ID NO: 1376418 - RNA, 19 nt, Artificial Sequence
  Description of Artificial Sequence: Synthetic oligonucleotide
uccacucccugguuguaca

SEQ ID NO: 1376419 - RNA, 19 nt, Artificial Sequence
  Description of Artificial Sequence: Synthetic oligonucleotide
aagaaggaaucgugaugaa

SEQ ID NO: 1376420 - RNA, 19 nt, Artificial Sequence
  Description of Artificial Sequence: Synthetic oligonucleotide
uggaacgcucccaaagauu

SEQ ID NO: 1376421 - RNA, 19 nt, Artificial Sequence
  Description of Artificial Sequence: Synthetic oligonucleotide
accacucuauuuucuuacu

SEQ ID NO: 1376422 - RNA, 19 nt, Artificial Sequence
  Description of Artificial Sequence: Synthetic oligonucleotide
caaagauugccacuuagau

SEQ ID NO: 1376423 - RNA, 19 nt, Artificial Sequence
  Description of Artificial Sequence: Synthetic oligonucleotide
ugggacaaaccacucuauu

SEQ ID NO: 1376424 - RNA, 19 nt, Artificial Sequence
  Description of Artificial Sequence: Synthetic oligonucleotide
ccacuuagaucccggaucc

SEQ ID NO: 1376425 - RNA, 19 nt, Artificial Sequence
  Description of Artificial Sequence: Synthetic oligonucleotide
gcagugguuagauacaugu

SEQ ID NO: 1376426 - RNA, 19 nt, Artificial Sequence
  Description of Artificial Sequence: Synthetic oligonucleotide
gaugauuagaaagcgucau

SEQ ID NO: 1376427 - RNA, 19 nt, Artificial Sequence
  Description of Artificial Sequence: Synthetic oligonucleotide
agaaggaaucgugaugaaa

SEQ ID NO: 1376428 - RNA, 19 nt, Artificial Sequence
  Description of Artificial Sequence: Synthetic oligonucleotide
agcuugcuauucuguauga

SEQ ID NO: 1376429 - RNA, 19 nt, Artificial Sequence
  Description of Artificial Sequence: Synthetic oligonucleotide
ugcuagcauuauaaauaaa

SEQ ID NO: 1376430 - RNA, 19 nt, Artificial Sequence
  Description of Artificial Sequence: Synthetic oligonucleotide
aucugcaaauaugucuugu

SEQ ID NO: 1376431 - RNA, 19 nt, Artificial Sequence
  Description of Artificial Sequence: Synthetic oligonucleotide
gucaccugggccaucaaga

SEQ ID NO: 1376432 - RNA, 19 nt, Artificial Sequence
  Description of Artificial Sequence: Synthetic oligonucleotide
uaggcgcacacucuagauu

SEQ ID NO: 1376433 - RNA, 19 nt, Artificial Sequence
  Description of Artificial Sequence: Synthetic oligonucleotide
ggccagugaaaauguauug

SEQ ID NO: 1376434 - RNA, 19 nt, Artificial Sequence
  Description of Artificial Sequence: Synthetic oligonucleotide
gcaauuauugccaauuaua

SEQ ID NO: 1376435 - RNA, 19 nt, Artificial Sequence
  Description of Artificial Sequence: Synthetic oligonucleotide
ugccacuuagaucccggau

SEQ ID NO: 1376436 - RNA, 19 nt, Artificial Sequence
  Description of Artificial Sequence: Synthetic oligonucleotide
ggguaaagaaggaaucgug

SEQ ID NO: 1376437 - RNA, 19 nt, Artificial Sequence
  Description of Artificial Sequence: Synthetic oligonucleotide
gcuguuguuauaaugcuaa

SEQ ID NO: 1376438 - RNA, 19 nt, Artificial Sequence
  Description of Artificial Sequence: Synthetic oligonucleotide
gcuagcauuauaaauaaau

SEQ ID NO: 1376439 - RNA, 19 nt, Artificial Sequence
  Description of Artificial Sequence: Synthetic oligonucleotide
ggaaucgugaugaaaccca

SEQ ID NO: 1376440 - RNA, 19 nt, Artificial Sequence
  Description of Artificial Sequence: Synthetic oligonucleotide
uacgaaaauaagggccagu

SEQ ID NO: 1376441 - RNA, 19 nt, Artificial Sequence
  Description of Artificial Sequence: Synthetic oligonucleotide
gaaggcaguuacgaaaaua

SEQ ID NO: 1376442 - RNA, 19 nt, Artificial Sequence
  Description of Artificial Sequence: Synthetic oligonucleotide
ugcaaacugcaugguagcu

SEQ ID NO: 1376443 - RNA, 19 nt, Artificial Sequence
  Description of Artificial Sequence: Synthetic oligonucleotide
gaagauaggaaaggacaua

SEQ ID NO: 1376444 - RNA, 19 nt, Artificial Sequence
  Description of Artificial Sequence: Synthetic oligonucleotide
gauuagaaagcgucaucau

SEQ ID NO: 1376445 - RNA, 19 nt, Artificial Sequence
  Description of Artificial Sequence: Synthetic oligonucleotide
ucacgguuacugcucugaa

SEQ ID NO: 1376446 - RNA, 19 nt, Artificial Sequence
  Description of Artificial Sequence: Synthetic oligonucleotide
gguagcuuauaauucacau

SEQ ID NO: 1376447 - RNA, 19 nt, Artificial Sequence
  Description of Artificial Sequence: Synthetic oligonucleotide
gccacuuagaucccggauc

SEQ ID NO: 1376448 - RNA, 19 nt, Artificial Sequence
  Description of Artificial Sequence: Synthetic oligonucleotide
gugguuagauacauguaaa

SEQ ID NO: 1376449 - RNA, 19 nt, Artificial Sequence
  Description of Artificial Sequence: Synthetic oligonucleotide
augugcaaacugcauggua

SEQ ID NO: 1376450 - RNA, 19 nt, Artificial Sequence
  Description of Artificial Sequence: Synthetic oligonucleotide
aauuagcauguggcccaag

SEQ ID NO: 1376451 - RNA, 19 nt, Artificial Sequence
  Description of Artificial Sequence: Synthetic oligonucleotide
gcugaagauaggaaaggac

SEQ ID NO: 1376452 - RNA, 19 nt, Artificial Sequence
  Description of Artificial Sequence: Synthetic oligonucleotide
gcaggcugaagauaggaaa

SEQ ID NO: 1376453 - RNA, 19 nt, Artificial Sequence
  Description of Artificial Sequence: Synthetic oligonucleotide
aaauuccagggagggccug

SEQ ID NO: 1376454 - RNA, 19 nt, Artificial Sequence
  Description of Artificial Sequence: Synthetic oligonucleotide
auaaagcacugaacuauaa

SEQ ID NO: 1376455 - RNA, 19 nt, Artificial Sequence
  Description of Artificial Sequence: Synthetic oligonucleotide
guugacucaaauacugggu

SEQ ID NO: 1376456 - RNA, 19 nt, Artificial Sequence
  Description of Artificial Sequence: Synthetic oligonucleotide
ugccuaggcgcacacucua

SEQ ID NO: 1376457 - RNA, 19 nt, Artificial Sequence
  Description of Artificial Sequence: Synthetic oligonucleotide
aacugcaugguagcuuaua

SEQ ID NO: 1376458 - RNA, 19 nt, Artificial Sequence
  Description of Artificial Sequence: Synthetic oligonucleotide
aacccauguccugccaagu

SEQ ID NO: 1376459 - RNA, 19 nt, Artificial Sequence
  Description of Artificial Sequence: Synthetic oligonucleotide
acuuagaucccggauccuu

SEQ ID NO: 1376460 - RNA, 19 nt, Artificial Sequence
  Description of Artificial Sequence: Synthetic oligonucleotide
guagcuuauaauucacauu

SEQ ID NO: 1376461 - RNA, 19 nt, Artificial Sequence
  Description of Artificial Sequence: Synthetic oligonucleotide
agauugccacuuagauccc

SEQ ID NO: 1376462 - RNA, 19 nt, Artificial Sequence
  Description of Artificial Sequence: Synthetic oligonucleotide
aaaauguauuguggccaua

SEQ ID NO: 1376463 - RNA, 19 nt, Artificial Sequence
  Description of Artificial Sequence: Synthetic oligonucleotide
ugggagcauucucuucuaa

SEQ ID NO: 1376464 - RNA, 19 nt, Artificial Sequence
  Description of Artificial Sequence: Synthetic oligonucleotide
gcuauucuguaugaaagaa

SEQ ID NO: 1376465 - RNA, 19 nt, Artificial Sequence
  Description of Artificial Sequence: Synthetic oligonucleotide
gccaaguuaugcugcgaag

SEQ ID NO: 1376466 - RNA, 19 nt, Artificial Sequence
  Description of Artificial Sequence: Synthetic oligonucleotide
gacuaggacagacacuguu

SEQ ID NO: 1376467 - RNA, 19 nt, Artificial Sequence
  Description of Artificial Sequence: Synthetic oligonucleotide
cccaaagauugccacuuag

SEQ ID NO: 1376468 - RNA, 19 nt, Artificial Sequence
  Description of Artificial Sequence: Synthetic oligonucleotide
acacacaggcuuaaaguuu

SEQ ID NO: 1376469 - RNA, 19 nt, Artificial Sequence
  Description of Artificial Sequence: Synthetic oligonucleotide
aguugacaucggugaaagu

SEQ ID NO: 1376470 - RNA, 19 nt, Artificial Sequence
  Description of Artificial Sequence: Synthetic oligonucleotide
auauggagaggaagacugu

SEQ ID NO: 1376471 - RNA, 19 nt, Artificial Sequence
  Description of Artificial Sequence: Synthetic oligonucleotide
ccagcuauaagaccuggga

SEQ ID NO: 1376472 - RNA, 19 nt, Artificial Sequence
  Description of Artificial Sequence: Synthetic oligonucleotide
gaacgcucccaaagauugc

SEQ ID NO: 1376473 - RNA, 19 nt, Artificial Sequence
  Description of Artificial Sequence: Synthetic oligonucleotide
auccugaauagaagagcug

SEQ ID NO: 1376474 - RNA, 19 nt, Artificial Sequence
  Description of Artificial Sequence: Synthetic oligonucleotide
gcuaaaauuugagaagaua

SEQ ID NO: 1376475 - RNA, 19 nt, Artificial Sequence
  Description of Artificial Sequence: Synthetic oligonucleotide
ggaugauuagaaagcguca

SEQ ID NO: 1376476 - RNA, 19 nt, Artificial Sequence
  Description of Artificial Sequence: Synthetic oligonucleotide
gucuuauguucaugucuca

SEQ ID NO: 1376477 - RNA, 19 nt, Artificial Sequence
  Description of Artificial Sequence: Synthetic oligonucleotide
cauguccugccaaguuaug

SEQ ID NO: 1376478 - RNA, 19 nt, Artificial Sequence
  Description of Artificial Sequence: Synthetic oligonucleotide
gugagggcgacgauagaca

SEQ ID NO: 1376479 - RNA, 19 nt, Artificial Sequence
  Description of Artificial Sequence: Synthetic oligonucleotide
ggauggaguuguuuaugca

SEQ ID NO: 1376480 - RNA, 19 nt, Artificial Sequence
  Description of Artificial Sequence: Synthetic oligonucleotide
gucacgguuacugcucuga

SEQ ID NO: 1376481 - RNA, 19 nt, Artificial Sequence
  Description of Artificial Sequence: Synthetic oligonucleotide
guuaugcugcgaaguuuug

SEQ ID NO: 1376482 - RNA, 19 nt, Artificial Sequence
  Description of Artificial Sequence: Synthetic oligonucleotide
caauuauauuguucugggu

SEQ ID NO: 1376483 - RNA, 19 nt, Artificial Sequence
  Description of Artificial Sequence: Synthetic oligonucleotide
gcacuauccugaauagaag

SEQ ID NO: 1376484 - RNA, 19 nt, Artificial Sequence
  Description of Artificial Sequence: Synthetic oligonucleotide
aguuguuuaugcagugguu

SEQ ID NO: 1376485 - RNA, 19 nt, Artificial Sequence
  Description of Artificial Sequence: Synthetic oligonucleotide
uaauuagcauguggcccaa

SEQ ID NO: 1376486 - RNA, 19 nt, Artificial Sequence
  Description of Artificial Sequence: Synthetic oligonucleotide
augcugcgaaguuuuggua

SEQ ID NO: 1376487 - RNA, 19 nt, Artificial Sequence
  Description of Artificial Sequence: Synthetic oligonucleotide
cuggaaccuggaagaugag

SEQ ID NO: 1376488 - RNA, 19 nt, Artificial Sequence
  Description of Artificial Sequence: Synthetic oligonucleotide
caggaauuggaugggguaa

SEQ ID NO: 1376489 - RNA, 19 nt, Artificial Sequence
  Description of Artificial Sequence: Synthetic oligonucleotide
ucaaccaaguagggaugau

SEQ ID NO: 1376490 - RNA, 19 nt, Artificial Sequence
  Description of Artificial Sequence: Synthetic oligonucleotide
aagacuguuggggcuucua

SEQ ID NO: 1376491 - RNA, 19 nt, Artificial Sequence
  Description of Artificial Sequence: Synthetic oligonucleotide
cuuggauggaguuguuuau

SEQ ID NO: 1376492 - RNA, 19 nt, Artificial Sequence
  Description of Artificial Sequence: Synthetic oligonucleotide
gcuugcuagcauuauaaau

SEQ ID NO: 1376493 - RNA, 19 nt, Artificial Sequence
  Description of Artificial Sequence: Synthetic oligonucleotide
caaaacggaugugacuaaa

SEQ ID NO: 1376494 - RNA, 19 nt, Artificial Sequence
  Description of Artificial Sequence: Synthetic oligonucleotide
cccagcuauaagaccuggg

SEQ ID NO: 1376495 - RNA, 19 nt, Artificial Sequence
  Description of Artificial Sequence: Synthetic oligonucleotide
ggccugaaaucaaagacua

SEQ ID NO: 1376496 - RNA, 19 nt, Artificial Sequence
  Description of Artificial Sequence: Synthetic oligonucleotide
cuguuguuauaaugcuaaa

SEQ ID NO: 1376497 - RNA, 19 nt, Artificial Sequence
  Description of Artificial Sequence: Synthetic oligonucleotide
cagguggauuuuaaugaua

SEQ ID NO: 1376498 - RNA, 19 nt, Artificial Sequence
  Description of Artificial Sequence: Synthetic oligonucleotide
gacaucggugaaaguccac

SEQ ID NO: 1376499 - RNA, 19 nt, Artificial Sequence
  Description of Artificial Sequence: Synthetic oligonucleotide
cccaaaacggaugugacua

SEQ ID NO: 1376500 - RNA, 19 nt, Artificial Sequence
  Description of Artificial Sequence: Synthetic oligonucleotide
gcaggaauuggauggggua

SEQ ID NO: 1376501 - RNA, 19 nt, Artificial Sequence
  Description of Artificial Sequence: Synthetic oligonucleotide
ggccaucaagacauggaac

SEQ ID NO: 1376502 - RNA, 19 nt, Artificial Sequence
  Description of Artificial Sequence: Synthetic oligonucleotide
cccaagcccaaaacggaug

SEQ ID NO: 1376503 - RNA, 19 nt, Artificial Sequence
  Description of Artificial Sequence: Synthetic oligonucleotide
cagugguuagauacaugua

SEQ ID NO: 1376504 - RNA, 19 nt, Artificial Sequence
  Description of Artificial Sequence: Synthetic oligonucleotide
caaguuaugcugcgaaguu

SEQ ID NO: 1376505 - RNA, 19 nt, Artificial Sequence
  Description of Artificial Sequence: Synthetic oligonucleotide
gaaucgugaugaaacccau

SEQ ID NO: 1376506 - RNA, 19 nt, Artificial Sequence
  Description of Artificial Sequence: Synthetic oligonucleotide
cacucuagauucugaggcu

SEQ ID NO: 1376507 - RNA, 19 nt, Artificial Sequence
  Description of Artificial Sequence: Synthetic oligonucleotide
cuuagaucccggauccuuu

SEQ ID NO: 1376508 - RNA, 19 nt, Artificial Sequence
  Description of Artificial Sequence: Synthetic oligonucleotide
augccgccucagcacuauc

SEQ ID NO: 1376509 - RNA, 19 nt, Artificial Sequence
  Description of Artificial Sequence: Synthetic oligonucleotide
cuguggcuguucuaagucu

SEQ ID NO: 1376510 - RNA, 19 nt, Artificial Sequence
  Description of Artificial Sequence: Synthetic oligonucleotide
ggguuauucauagucuuau

SEQ ID NO: 1376511 - RNA, 19 nt, Artificial Sequence
  Description of Artificial Sequence: Synthetic oligonucleotide
gaccugggacaaaccacuc

SEQ ID NO: 1376512 - RNA, 19 nt, Artificial Sequence
  Description of Artificial Sequence: Synthetic oligonucleotide
cuguuggggcuucuaggaa

SEQ ID NO: 1376513 - RNA, 19 nt, Artificial Sequence
  Description of Artificial Sequence: Synthetic oligonucleotide
cacacaguuugugggagcu

SEQ ID NO: 1376514 - RNA, 19 nt, Artificial Sequence
  Description of Artificial Sequence: Synthetic oligonucleotide
cuaggcgcacacucuagau

SEQ ID NO: 1376515 - RNA, 19 nt, Artificial Sequence
  Description of Artificial Sequence: Synthetic oligonucleotide
ggaaaacaaucugcaaaua

SEQ ID NO: 1376516 - RNA, 19 nt, Artificial Sequence
  Description of Artificial Sequence: Synthetic oligonucleotide
gccugaaaucaaagacuag

SEQ ID NO: 1376517 - RNA, 19 nt, Artificial Sequence
  Description of Artificial Sequence: Synthetic oligonucleotide
gggguaaagaaggaaucgu

SEQ ID NO: 1376518 - RNA, 19 nt, Artificial Sequence
  Description of Artificial Sequence: Synthetic oligonucleotide
cuggaacgcucccaaagau

SEQ ID NO: 1376519 - RNA, 19 nt, Artificial Sequence
  Description of Artificial Sequence: Synthetic oligonucleotide
agacuaggacagacacugu

SEQ ID NO: 1376520 - RNA, 19 nt, Artificial Sequence
  Description of Artificial Sequence: Synthetic oligonucleotide
acgcucccaaagauugcca

SEQ ID NO: 1376521 - RNA, 19 nt, Artificial Sequence
  Description of Artificial Sequence: Synthetic oligonucleotide
gagggcgacgauagacaaa

SEQ ID NO: 1376522 - RNA, 19 nt, Artificial Sequence
  Description of Artificial Sequence: Synthetic oligonucleotide
cagaugccgccucagcacu

SEQ ID NO: 1376523 - RNA, 19 nt, Artificial Sequence
  Description of Artificial Sequence: Synthetic oligonucleotide
ccaaguuaugcugcgaagu

SEQ ID NO: 1376524 - RNA, 19 nt, Artificial Sequence
  Description of Artificial Sequence: Synthetic oligonucleotide
gaaucuggucacgguuacu

SEQ ID NO: 1376525 - RNA, 19 nt, Artificial Sequence
  Description of Artificial Sequence: Synthetic oligonucleotide
gguagacagguggauuuua

SEQ ID NO: 1376526 - RNA, 19 nt, Artificial Sequence
  Description of Artificial Sequence: Synthetic oligonucleotide
cugggacaaaccacucuau

SEQ ID NO: 1376527 - RNA, 19 nt, Artificial Sequence
  Description of Artificial Sequence: Synthetic oligonucleotide
gcuuaaaguuugcuucaau

SEQ ID NO: 1376528 - RNA, 19 nt, Artificial Sequence
  Description of Artificial Sequence: Synthetic oligonucleotide
cuauaagaccugggacaaa

SEQ ID NO: 1376529 - RNA, 19 nt, Artificial Sequence
  Description of Artificial Sequence: Synthetic oligonucleotide
caaccaaguagggaugauu

SEQ ID NO: 1376530 - RNA, 19 nt, Artificial Sequence
  Description of Artificial Sequence: Synthetic oligonucleotide
ccuaggcgcacacucuaga

SEQ ID NO: 1376531 - RNA, 19 nt, Artificial Sequence
  Description of Artificial Sequence: Synthetic oligonucleotide
gcucccaaagauugccacu

SEQ ID NO: 1376532 - RNA, 19 nt, Artificial Sequence
  Description of Artificial Sequence: Synthetic oligonucleotide
ggcuuaaaguuugcuucaa

SEQ ID NO: 1376533 - RNA, 19 nt, Artificial Sequence
  Description of Artificial Sequence: Synthetic oligonucleotide
gcuugcuauucuguaugaa

SEQ ID NO: 1376534 - RNA, 19 nt, Artificial Sequence
  Description of Artificial Sequence: Synthetic oligonucleotide
gcccaaaacggaugugacu

SEQ ID NO: 1376535 - RNA, 19 nt, Artificial Sequence
  Description of Artificial Sequence: Synthetic oligonucleotide
gcgcacacucuagauucug

SEQ ID NO: 1376536 - RNA, 19 nt, Artificial Sequence
  Description of Artificial Sequence: Synthetic oligonucleotide
ccaagcccaaaacggaugu

SEQ ID NO: 1376537 - RNA, 19 nt, Artificial Sequence
  Description of Artificial Sequence: Synthetic oligonucleotide
cugccaaguuaugcugcga

SEQ ID NO: 1376538 - RNA, 19 nt, Artificial Sequence
  Description of Artificial Sequence: Synthetic oligonucleotide
gaugccgccucagcacuau

SEQ ID NO: 1376539 - RNA, 19 nt, Artificial Sequence
  Description of Artificial Sequence: Synthetic oligonucleotide
ccaaaacggaugugacuaa

SEQ ID NO: 1376540 - RNA, 19 nt, Artificial Sequence
  Description of Artificial Sequence: Synthetic oligonucleotide
ccgccucagcacuauccug

SEQ ID NO: 1376541 - RNA, 19 nt, Artificial Sequence
  Description of Artificial Sequence: Synthetic oligonucleotide
cccacuggaacgcucccaa

SEQ ID NO: 1376542 - RNA, 19 nt, Artificial Sequence
  Description of Artificial Sequence: Synthetic oligonucleotide
ccauguccugccaaguuau

SEQ ID NO: 1376543 - RNA, 19 nt, Artificial Sequence
  Description of Artificial Sequence: Synthetic oligonucleotide
cuguugugaugaugacagu

SEQ ID NO: 1376544 - RNA, 19 nt, Artificial Sequence
  Description of Artificial Sequence: Synthetic oligonucleotide
gggagcugucaaccaagua

SEQ ID NO: 1376545 - RNA, 19 nt, Artificial Sequence
  Description of Artificial Sequence: Synthetic oligonucleotide
gaagacuguuggggcuucu

SEQ ID NO: 1376546 - RNA, 19 nt, Artificial Sequence
  Description of Artificial Sequence: Synthetic oligonucleotide
ccugaauagaagagcuguu

SEQ ID NO: 1376547 - RNA, 19 nt, Artificial Sequence
  Description of Artificial Sequence: Synthetic oligonucleotide
ccggauccuuucuugccua

SEQ ID NO: 1376548 - RNA, 19 nt, Artificial Sequence
  Description of Artificial Sequence: Synthetic oligonucleotide
ccacuggaacgcucccaaa

SEQ ID NO: 1376549 - RNA, 19 nt, Artificial Sequence
  Description of Artificial Sequence: Synthetic oligonucleotide
ggcgcacacucuagauucu

SEQ ID NO: 1376550 - RNA, 19 nt, Artificial Sequence
  Description of Artificial Sequence: Synthetic oligonucleotide
ggaccagggucagcccauu

SEQ ID NO: 1376551 - RNA, 19 nt, Artificial Sequence
  Description of Artificial Sequence: Synthetic oligonucleotide
uuauuuauuaccaauagcu

SEQ ID NO: 1376552 - RNA, 19 nt, Artificial Sequence
  Description of Artificial Sequence: Synthetic oligonucleotide
aauagcuacuccuaaaugg

SEQ ID NO: 1376553 - RNA, 19 nt, Artificial Sequence
  Description of Artificial Sequence: Synthetic oligonucleotide
aauagugucucauucuccc

SEQ ID NO: 1376554 - RNA, 19 nt, Artificial Sequence
  Description of Artificial Sequence: Synthetic oligonucleotide
gauauguugaacuugcagg

SEQ ID NO: 1376555 - RNA, 19 nt, Artificial Sequence
  Description of Artificial Sequence: Synthetic oligonucleotide
agaauuuuaagauuucuac

SEQ ID NO: 1376556 - RNA, 19 nt, Artificial Sequence
  Description of Artificial Sequence: Synthetic oligonucleotide
aauucaaugauauuuuaca

SEQ ID NO: 1376557 - RNA, 19 nt, Artificial Sequence
  Description of Artificial Sequence: Synthetic oligonucleotide
auuuuguuggaguauaccc

SEQ ID NO: 1376558 - RNA, 19 nt, Artificial Sequence
  Description of Artificial Sequence: Synthetic oligonucleotide
guagguaucauucagaaug

SEQ ID NO: 1376559 - RNA, 19 nt, Artificial Sequence
  Description of Artificial Sequence: Synthetic oligonucleotide
uugggaaacaauuuggucg

SEQ ID NO: 1376560 - RNA, 19 nt, Artificial Sequence
  Description of Artificial Sequence: Synthetic oligonucleotide
ucugauaccacaaagccgc

SEQ ID NO: 1376561 - RNA, 19 nt, Artificial Sequence
  Description of Artificial Sequence: Synthetic oligonucleotide
uuuaguuugauaugcagag

SEQ ID NO: 1376562 - RNA, 19 nt, Artificial Sequence
  Description of Artificial Sequence: Synthetic oligonucleotide
aguaguuuacauuuguaac

SEQ ID NO: 1376563 - RNA, 19 nt, Artificial Sequence
  Description of Artificial Sequence: Synthetic oligonucleotide
uagaauaagugaaauauca

SEQ ID NO: 1376564 - RNA, 19 nt, Artificial Sequence
  Description of Artificial Sequence: Synthetic oligonucleotide
acaguugugauaaugaagc

SEQ ID NO: 1376565 - RNA, 19 nt, Artificial Sequence
  Description of Artificial Sequence: Synthetic oligonucleotide
uuuagaauaagugaaauau

SEQ ID NO: 1376566 - RNA, 19 nt, Artificial Sequence
  Description of Artificial Sequence: Synthetic oligonucleotide
aaugauauuuuacacucug

SEQ ID NO: 1376567 - RNA, 19 nt, Artificial Sequence
  Description of Artificial Sequence: Synthetic oligonucleotide
ugagauaggacacaguucu

SEQ ID NO: 1376568 - RNA, 19 nt, Artificial Sequence
  Description of Artificial Sequence: Synthetic oligonucleotide
guaaaguuagcauaagucc

SEQ ID NO: 1376569 - RNA, 19 nt, Artificial Sequence
  Description of Artificial Sequence: Synthetic oligonucleotide
augaucaaaacgcaaguac

SEQ ID NO: 1376570 - RNA, 19 nt, Artificial Sequence
  Description of Artificial Sequence: Synthetic oligonucleotide
aucuaaaguauucugagug

SEQ ID NO: 1376571 - RNA, 19 nt, Artificial Sequence
  Description of Artificial Sequence: Synthetic oligonucleotide
ucaaugauauuuuacacuc

SEQ ID NO: 1376572 - RNA, 19 nt, Artificial Sequence
  Description of Artificial Sequence: Synthetic oligonucleotide
aggaauuugaugcaaaugu

SEQ ID NO: 1376573 - RNA, 19 nt, Artificial Sequence
  Description of Artificial Sequence: Synthetic oligonucleotide
aauuuuguuggaguauacc

SEQ ID NO: 1376574 - RNA, 19 nt, Artificial Sequence
  Description of Artificial Sequence: Synthetic oligonucleotide
uuuauuaccaauagcuacu

SEQ ID NO: 1376575 - RNA, 19 nt, Artificial Sequence
  Description of Artificial Sequence: Synthetic oligonucleotide
aguaaaguuagcauaaguc

SEQ ID NO: 1376576 - RNA, 19 nt, Artificial Sequence
  Description of Artificial Sequence: Synthetic oligonucleotide
aaauaucauuucuaccuuc

SEQ ID NO: 1376577 - RNA, 19 nt, Artificial Sequence
  Description of Artificial Sequence: Synthetic oligonucleotide
uaaaguuagcauaaguccu

SEQ ID NO: 1376578 - RNA, 19 nt, Artificial Sequence
  Description of Artificial Sequence: Synthetic oligonucleotide
uuuaugugcaauugaaucu

SEQ ID NO: 1376579 - RNA, 19 nt, Artificial Sequence
  Description of Artificial Sequence: Synthetic oligonucleotide
auaagugaaauaucauuuc

SEQ ID NO: 1376580 - RNA, 19 nt, Artificial Sequence
  Description of Artificial Sequence: Synthetic oligonucleotide
gucucaacgagguagaacc

SEQ ID NO: 1376581 - RNA, 19 nt, Artificial Sequence
  Description of Artificial Sequence: Synthetic oligonucleotide
aaccuuauuaaacucggca

SEQ ID NO: 1376582 - RNA, 19 nt, Artificial Sequence
  Description of Artificial Sequence: Synthetic oligonucleotide
uaauguuaaacuuucuagu

SEQ ID NO: 1376583 - RNA, 19 nt, Artificial Sequence
  Description of Artificial Sequence: Synthetic oligonucleotide
uucaauuucugaauggccu

SEQ ID NO: 1376584 - RNA, 19 nt, Artificial Sequence
  Description of Artificial Sequence: Synthetic oligonucleotide
uuaucacugauguuuaagc

SEQ ID NO: 1376585 - RNA, 19 nt, Artificial Sequence
  Description of Artificial Sequence: Synthetic oligonucleotide
agaagcuacacuuaauucu

SEQ ID NO: 1376586 - RNA, 19 nt, Artificial Sequence
  Description of Artificial Sequence: Synthetic oligonucleotide
ugauauguugaacuugcag

SEQ ID NO: 1376587 - RNA, 19 nt, Artificial Sequence
  Description of Artificial Sequence: Synthetic oligonucleotide
aaugacuuaucuucugucu

SEQ ID NO: 1376588 - RNA, 19 nt, Artificial Sequence
  Description of Artificial Sequence: Synthetic oligonucleotide
uuagcauaaguccugggga

SEQ ID NO: 1376589 - RNA, 19 nt, Artificial Sequence
  Description of Artificial Sequence: Synthetic oligonucleotide
ugauauaguaaaguuagca

SEQ ID NO: 1376590 - RNA, 19 nt, Artificial Sequence
  Description of Artificial Sequence: Synthetic oligonucleotide
agugaaguaguuuacauuu

SEQ ID NO: 1376591 - RNA, 19 nt, Artificial Sequence
  Description of Artificial Sequence: Synthetic oligonucleotide
uuuucagugaaguaguuua

SEQ ID NO: 1376592 - RNA, 19 nt, Artificial Sequence
  Description of Artificial Sequence: Synthetic oligonucleotide
aucuuuguaggauaccgac

SEQ ID NO: 1376593 - RNA, 19 nt, Artificial Sequence
  Description of Artificial Sequence: Synthetic oligonucleotide
guuagcauaaguccugggg

SEQ ID NO: 1376594 - RNA, 19 nt, Artificial Sequence
  Description of Artificial Sequence: Synthetic oligonucleotide
aaaguauucugagugaggu

SEQ ID NO: 1376595 - RNA, 19 nt, Artificial Sequence
  Description of Artificial Sequence: Synthetic oligonucleotide
acugauauguugaacuugc

SEQ ID NO: 1376596 - RNA, 19 nt, Artificial Sequence
  Description of Artificial Sequence: Synthetic oligonucleotide
ucugauaugauuucagaau

SEQ ID NO: 1376597 - RNA, 19 nt, Artificial Sequence
  Description of Artificial Sequence: Synthetic oligonucleotide
uuugaugcaaaugugacau

SEQ ID NO: 1376598 - RNA, 19 nt, Artificial Sequence
  Description of Artificial Sequence: Synthetic oligonucleotide
uucaguugaacuaauguua

SEQ ID NO: 1376599 - RNA, 19 nt, Artificial Sequence
  Description of Artificial Sequence: Synthetic oligonucleotide
uuuuguuggaguauaccca

SEQ ID NO: 1376600 - RNA, 19 nt, Artificial Sequence
  Description of Artificial Sequence: Synthetic oligonucleotide
uucaaugauauuuuacacu

SEQ ID NO: 1376601 - RNA, 19 nt, Artificial Sequence
  Description of Artificial Sequence: Synthetic oligonucleotide
gauaccaugggaaucuggg

SEQ ID NO: 1376602 - RNA, 19 nt, Artificial Sequence
  Description of Artificial Sequence: Synthetic oligonucleotide
ugaucaaaacgcaaguacu

SEQ ID NO: 1376603 - RNA, 19 nt, Artificial Sequence
  Description of Artificial Sequence: Synthetic oligonucleotide
aaugugacauuaugucuuc

SEQ ID NO: 1376604 - RNA, 19 nt, Artificial Sequence
  Description of Artificial Sequence: Synthetic oligonucleotide
agaugcuuuaguuucagca

SEQ ID NO: 1376605 - RNA, 19 nt, Artificial Sequence
  Description of Artificial Sequence: Synthetic oligonucleotide
ugaacuaauguuaaacuuu

SEQ ID NO: 1376606 - RNA, 19 nt, Artificial Sequence
  Description of Artificial Sequence: Synthetic oligonucleotide
uauuaaacucggcauauuc

SEQ ID NO: 1376607 - RNA, 19 nt, Artificial Sequence
  Description of Artificial Sequence: Synthetic oligonucleotide
aaaccuggcacugauaugu

SEQ ID NO: 1376608 - RNA, 19 nt, Artificial Sequence
  Description of Artificial Sequence: Synthetic oligonucleotide
ugauauuuuacacucugau

SEQ ID NO: 1376609 - RNA, 19 nt, Artificial Sequence
  Description of Artificial Sequence: Synthetic oligonucleotide
aauugaaucuacccugaca

SEQ ID NO: 1376610 - RNA, 19 nt, Artificial Sequence
  Description of Artificial Sequence: Synthetic oligonucleotide
aacgcaaguacuccagauc

SEQ ID NO: 1376611 - RNA, 19 nt, Artificial Sequence
  Description of Artificial Sequence: Synthetic oligonucleotide
ugagcgaaagaguucuugg

SEQ ID NO: 1376612 - RNA, 19 nt, Artificial Sequence
  Description of Artificial Sequence: Synthetic oligonucleotide
ugauaaugaagcaauucaa

SEQ ID NO: 1376613 - RNA, 19 nt, Artificial Sequence
  Description of Artificial Sequence: Synthetic oligonucleotide
auauaguaaaguuagcaua

SEQ ID NO: 1376614 - RNA, 19 nt, Artificial Sequence
  Description of Artificial Sequence: Synthetic oligonucleotide
cuuuguaggauaccgacug

SEQ ID NO: 1376615 - RNA, 19 nt, Artificial Sequence
  Description of Artificial Sequence: Synthetic oligonucleotide
cacuuauuuguugagauag

SEQ ID NO: 1376616 - RNA, 19 nt, Artificial Sequence
  Description of Artificial Sequence: Synthetic oligonucleotide
aagcaauucaaugauauuu

SEQ ID NO: 1376617 - RNA, 19 nt, Artificial Sequence
  Description of Artificial Sequence: Synthetic oligonucleotide
aauguguguuuccagcucu

SEQ ID NO: 1376618 - RNA, 19 nt, Artificial Sequence
  Description of Artificial Sequence: Synthetic oligonucleotide
aauuuggucgcuguucauc

SEQ ID NO: 1376619 - RNA, 19 nt, Artificial Sequence
  Description of Artificial Sequence: Synthetic oligonucleotide
auauguugaacuugcaggu

SEQ ID NO: 1376620 - RNA, 19 nt, Artificial Sequence
  Description of Artificial Sequence: Synthetic oligonucleotide
uuagaauaagugaaauauc

SEQ ID NO: 1376621 - RNA, 19 nt, Artificial Sequence
  Description of Artificial Sequence: Synthetic oligonucleotide
uuggaguauacccaagugu

SEQ ID NO: 1376622 - RNA, 19 nt, Artificial Sequence
  Description of Artificial Sequence: Synthetic oligonucleotide
ucuaguauguuaucaucug

SEQ ID NO: 1376623 - RNA, 19 nt, Artificial Sequence
  Description of Artificial Sequence: Synthetic oligonucleotide
uuaagauuucuacuuugac

SEQ ID NO: 1376624 - RNA, 19 nt, Artificial Sequence
  Description of Artificial Sequence: Synthetic oligonucleotide
auguuuaagccugugaaag

SEQ ID NO: 1376625 - RNA, 19 nt, Artificial Sequence
  Description of Artificial Sequence: Synthetic oligonucleotide
gguagaaccagaaaagggg

SEQ ID NO: 1376626 - RNA, 19 nt, Artificial Sequence
  Description of Artificial Sequence: Synthetic oligonucleotide
acaucuuuguaggauaccg

SEQ ID NO: 1376627 - RNA, 19 nt, Artificial Sequence
  Description of Artificial Sequence: Synthetic oligonucleotide
uuaaacucggcauauucau

SEQ ID NO: 1376628 - RNA, 19 nt, Artificial Sequence
  Description of Artificial Sequence: Synthetic oligonucleotide
uuaggcuaugcaauguucu

SEQ ID NO: 1376629 - RNA, 19 nt, Artificial Sequence
  Description of Artificial Sequence: Synthetic oligonucleotide
gugauaaugaagcaauuca

SEQ ID NO: 1376630 - RNA, 19 nt, Artificial Sequence
  Description of Artificial Sequence: Synthetic oligonucleotide
ucuaaaguauucugaguga

SEQ ID NO: 1376631 - RNA, 19 nt, Artificial Sequence
  Description of Artificial Sequence: Synthetic oligonucleotide
uacacuuaauucuuucucu

SEQ ID NO: 1376632 - RNA, 19 nt, Artificial Sequence
  Description of Artificial Sequence: Synthetic oligonucleotide
uuuugcauuauacuccuuu

SEQ ID NO: 1376633 - RNA, 19 nt, Artificial Sequence
  Description of Artificial Sequence: Synthetic oligonucleotide
ucgcuguucaucauaaccu

SEQ ID NO: 1376634 - RNA, 19 nt, Artificial Sequence
  Description of Artificial Sequence: Synthetic oligonucleotide
aaagaugacacuggggaga

SEQ ID NO: 1376635 - RNA, 19 nt, Artificial Sequence
  Description of Artificial Sequence: Synthetic oligonucleotide
auacccaaguguuauuauc

SEQ ID NO: 1376636 - RNA, 19 nt, Artificial Sequence
  Description of Artificial Sequence: Synthetic oligonucleotide
caauucaaugauauuuuac

SEQ ID NO: 1376637 - RNA, 19 nt, Artificial Sequence
  Description of Artificial Sequence: Synthetic oligonucleotide
uuaaguuuauugaggugga

SEQ ID NO: 1376638 - RNA, 19 nt, Artificial Sequence
  Description of Artificial Sequence: Synthetic oligonucleotide
acgagguagaaccagaaaa

SEQ ID NO: 1376639 - RNA, 19 nt, Artificial Sequence
  Description of Artificial Sequence: Synthetic oligonucleotide
gauaccacaaagccgccug

SEQ ID NO: 1376640 - RNA, 19 nt, Artificial Sequence
  Description of Artificial Sequence: Synthetic oligonucleotide
acuaauagugucucauucu

SEQ ID NO: 1376641 - RNA, 19 nt, Artificial Sequence
  Description of Artificial Sequence: Synthetic oligonucleotide
uggaguauacccaaguguu

SEQ ID NO: 1376642 - RNA, 19 nt, Artificial Sequence
  Description of Artificial Sequence: Synthetic oligonucleotide
guuaucaucugauaccaca

SEQ ID NO: 1376643 - RNA, 19 nt, Artificial Sequence
  Description of Artificial Sequence: Synthetic oligonucleotide
aauaucauuucuaccuucu

SEQ ID NO: 1376644 - RNA, 19 nt, Artificial Sequence
  Description of Artificial Sequence: Synthetic oligonucleotide
uaguaaaguuagcauaagu

SEQ ID NO: 1376645 - RNA, 19 nt, Artificial Sequence
  Description of Artificial Sequence: Synthetic oligonucleotide
uaguauguuaucaucugau

SEQ ID NO: 1376646 - RNA, 19 nt, Artificial Sequence
  Description of Artificial Sequence: Synthetic oligonucleotide
uugaacuaauguuaaacuu

SEQ ID NO: 1376647 - RNA, 19 nt, Artificial Sequence
  Description of Artificial Sequence: Synthetic oligonucleotide
acuaauguuaaacuuucua

SEQ ID NO: 1376648 - RNA, 19 nt, Artificial Sequence
  Description of Artificial Sequence: Synthetic oligonucleotide
uuauuuucucuguagugaa

SEQ ID NO: 1376649 - RNA, 19 nt, Artificial Sequence
  Description of Artificial Sequence: Synthetic oligonucleotide
guuaggaagacagcaaacc

SEQ ID NO: 1376650 - RNA, 19 nt, Artificial Sequence
  Description of Artificial Sequence: Synthetic oligonucleotide
aaaugugacauuaugucuu

SEQ ID NO: 1376651 - RNA, 19 nt, Artificial Sequence
  Description of Artificial Sequence: Synthetic oligonucleotide
aaaguuagcauaaguccug

SEQ ID NO: 1376652 - RNA, 19 nt, Artificial Sequence
  Description of Artificial Sequence: Synthetic oligonucleotide
guuuaagccugugaaagag

SEQ ID NO: 1376653 - RNA, 19 nt, Artificial Sequence
  Description of Artificial Sequence: Synthetic oligonucleotide
uccuaaauggagcugcuau

SEQ ID NO: 1376654 - RNA, 19 nt, Artificial Sequence
  Description of Artificial Sequence: Synthetic oligonucleotide
cuaauagugucucauucuc

SEQ ID NO: 1376655 - RNA, 19 nt, Artificial Sequence
  Description of Artificial Sequence: Synthetic oligonucleotide
gucgcuguucaucauaacc

SEQ ID NO: 1376656 - RNA, 19 nt, Artificial Sequence
  Description of Artificial Sequence: Synthetic oligonucleotide
acuggaacaguaugacuuc

SEQ ID NO: 1376657 - RNA, 19 nt, Artificial Sequence
  Description of Artificial Sequence: Synthetic oligonucleotide
aaagaaugacuuaucuucu

SEQ ID NO: 1376658 - RNA, 19 nt, Artificial Sequence
  Description of Artificial Sequence: Synthetic oligonucleotide
cuaaaguauucugagugag

SEQ ID NO: 1376659 - RNA, 19 nt, Artificial Sequence
  Description of Artificial Sequence: Synthetic oligonucleotide
uguuggaguauacccaagu

SEQ ID NO: 1376660 - RNA, 19 nt, Artificial Sequence
  Description of Artificial Sequence: Synthetic oligonucleotide
uguuaggaagacagcaaac

SEQ ID NO: 1376661 - RNA, 19 nt, Artificial Sequence
  Description of Artificial Sequence: Synthetic oligonucleotide
ugcacuuauuuguugagau

SEQ ID NO: 1376662 - RNA, 19 nt, Artificial Sequence
  Description of Artificial Sequence: Synthetic oligonucleotide
auuuccuucaguugaacua

SEQ ID NO: 1376663 - RNA, 19 nt, Artificial Sequence
  Description of Artificial Sequence: Synthetic oligonucleotide
uacuguuguauuuaaguuu

SEQ ID NO: 1376664 - RNA, 19 nt, Artificial Sequence
  Description of Artificial Sequence: Synthetic oligonucleotide
aacaagaauuccauuauuu

SEQ ID NO: 1376665 - RNA, 19 nt, Artificial Sequence
  Description of Artificial Sequence: Synthetic oligonucleotide
auaccgacugucuuggcug

SEQ ID NO: 1376666 - RNA, 19 nt, Artificial Sequence
  Description of Artificial Sequence: Synthetic oligonucleotide
uuuaggcuaugcaauguuc

SEQ ID NO: 1376667 - RNA, 19 nt, Artificial Sequence
  Description of Artificial Sequence: Synthetic oligonucleotide
uaggacacaguucuguguc

SEQ ID NO: 1376668 - RNA, 19 nt, Artificial Sequence
  Description of Artificial Sequence: Synthetic oligonucleotide
uauugagguggacuggaac

SEQ ID NO: 1376669 - RNA, 19 nt, Artificial Sequence
  Description of Artificial Sequence: Synthetic oligonucleotide
ccaaguguuauuaucacug

SEQ ID NO: 1376670 - RNA, 19 nt, Artificial Sequence
  Description of Artificial Sequence: Synthetic oligonucleotide
uguaggauaccgacugucu

SEQ ID NO: 1376671 - RNA, 19 nt, Artificial Sequence
  Description of Artificial Sequence: Synthetic oligonucleotide
caaaacgcaaguacuccag

SEQ ID NO: 1376672 - RNA, 19 nt, Artificial Sequence
  Description of Artificial Sequence: Synthetic oligonucleotide
auuuggucgcuguucauca

SEQ ID NO: 1376673 - RNA, 19 nt, Artificial Sequence
  Description of Artificial Sequence: Synthetic oligonucleotide
uuacuauuuguuuuagcuu

SEQ ID NO: 1376674 - RNA, 19 nt, Artificial Sequence
  Description of Artificial Sequence: Synthetic oligonucleotide
accuuauuaaacucggcau

SEQ ID NO: 1376675 - RNA, 19 nt, Artificial Sequence
  Description of Artificial Sequence: Synthetic oligonucleotide
uacuccuaaauggagcugc

SEQ ID NO: 1376676 - RNA, 19 nt, Artificial Sequence
  Description of Artificial Sequence: Synthetic oligonucleotide
agugaaauuccgaugccuc

SEQ ID NO: 1376677 - RNA, 19 nt, Artificial Sequence
  Description of Artificial Sequence: Synthetic oligonucleotide
uguggauacuguaggcuug

SEQ ID NO: 1376678 - RNA, 19 nt, Artificial Sequence
  Description of Artificial Sequence: Synthetic oligonucleotide
caguuugcagugaaauucc

SEQ ID NO: 1376679 - RNA, 19 nt, Artificial Sequence
  Description of Artificial Sequence: Synthetic oligonucleotide
uugauauaguaaaguuagc

SEQ ID NO: 1376680 - RNA, 19 nt, Artificial Sequence
  Description of Artificial Sequence: Synthetic oligonucleotide
auaacuaauagugucucau

SEQ ID NO: 1376681 - RNA, 19 nt, Artificial Sequence
  Description of Artificial Sequence: Synthetic oligonucleotide
ucuuuguaggauaccgacu

SEQ ID NO: 1376682 - RNA, 19 nt, Artificial Sequence
  Description of Artificial Sequence: Synthetic oligonucleotide
agcuacuccuaaauggagc

SEQ ID NO: 1376683 - RNA, 19 nt, Artificial Sequence
  Description of Artificial Sequence: Synthetic oligonucleotide
caagugcuaguccaggagc

SEQ ID NO: 1376684 - RNA, 19 nt, Artificial Sequence
  Description of Artificial Sequence: Synthetic oligonucleotide
uguuuaagccugugaaaga

SEQ ID NO: 1376685 - RNA, 19 nt, Artificial Sequence
  Description of Artificial Sequence: Synthetic oligonucleotide
gaaugacuuaucuucuguc

SEQ ID NO: 1376686 - RNA, 19 nt, Artificial Sequence
  Description of Artificial Sequence: Synthetic oligonucleotide
ucaacgagguagaaccaga

SEQ ID NO: 1376687 - RNA, 19 nt, Artificial Sequence
  Description of Artificial Sequence: Synthetic oligonucleotide
auauuuucagugaaguagu

SEQ ID NO: 1376688 - RNA, 19 nt, Artificial Sequence
  Description of Artificial Sequence: Synthetic oligonucleotide
uuucagugaaguaguuuac

SEQ ID NO: 1376689 - RNA, 19 nt, Artificial Sequence
  Description of Artificial Sequence: Synthetic oligonucleotide
gaauccaccuucuuuacua

SEQ ID NO: 1376690 - RNA, 19 nt, Artificial Sequence
  Description of Artificial Sequence: Synthetic oligonucleotide
agguagaaccagaaaaggg

SEQ ID NO: 1376691 - RNA, 19 nt, Artificial Sequence
  Description of Artificial Sequence: Synthetic oligonucleotide
uuuacacucugauaugauu

SEQ ID NO: 1376692 - RNA, 19 nt, Artificial Sequence
  Description of Artificial Sequence: Synthetic oligonucleotide
uacuuugacuacauuggaa

SEQ ID NO: 1376693 - RNA, 19 nt, Artificial Sequence
  Description of Artificial Sequence: Synthetic oligonucleotide
acagaaauucagaaguuca

SEQ ID NO: 1376694 - RNA, 19 nt, Artificial Sequence
  Description of Artificial Sequence: Synthetic oligonucleotide
uuaccaauagcuacuccua

SEQ ID NO: 1376695 - RNA, 19 nt, Artificial Sequence
  Description of Artificial Sequence: Synthetic oligonucleotide
guuggaguauacccaagug

SEQ ID NO: 1376696 - RNA, 19 nt, Artificial Sequence
  Description of Artificial Sequence: Synthetic oligonucleotide
uauuaccaauagcuacucc

SEQ ID NO: 1376697 - RNA, 19 nt, Artificial Sequence
  Description of Artificial Sequence: Synthetic oligonucleotide
cuugggaaacaauuugguc

SEQ ID NO: 1376698 - RNA, 19 nt, Artificial Sequence
  Description of Artificial Sequence: Synthetic oligonucleotide
ugauaacuaauagugucuc

SEQ ID NO: 1376699 - RNA, 19 nt, Artificial Sequence
  Description of Artificial Sequence: Synthetic oligonucleotide
uuaugugcaauugaaucua

SEQ ID NO: 1376700 - RNA, 19 nt, Artificial Sequence
  Description of Artificial Sequence: Synthetic oligonucleotide
gaucaaaacgcaaguacuc

SEQ ID NO: 1376701 - RNA, 19 nt, Artificial Sequence
  Description of Artificial Sequence: Synthetic oligonucleotide
aucugauaccacaaagccg

SEQ ID NO: 1376702 - RNA, 19 nt, Artificial Sequence
  Description of Artificial Sequence: Synthetic oligonucleotide
guagaaccagaaaaggggc

SEQ ID NO: 1376703 - RNA, 19 nt, Artificial Sequence
  Description of Artificial Sequence: Synthetic oligonucleotide
uggcugacaugucuccugg

SEQ ID NO: 1376704 - RNA, 19 nt, Artificial Sequence
  Description of Artificial Sequence: Synthetic oligonucleotide
ucggcauauucauuuagaa

SEQ ID NO: 1376705 - RNA, 19 nt, Artificial Sequence
  Description of Artificial Sequence: Synthetic oligonucleotide
uccgaugccucuuuaggcu

SEQ ID NO: 1376706 - RNA, 19 nt, Artificial Sequence
  Description of Artificial Sequence: Synthetic oligonucleotide
auuaaacucggcauauuca

SEQ ID NO: 1376707 - RNA, 19 nt, Artificial Sequence
  Description of Artificial Sequence: Synthetic oligonucleotide
ugaugcaaaugugacauua

SEQ ID NO: 1376708 - RNA, 19 nt, Artificial Sequence
  Description of Artificial Sequence: Synthetic oligonucleotide
uagcuacuccuaaauggag

SEQ ID NO: 1376709 - RNA, 19 nt, Artificial Sequence
  Description of Artificial Sequence: Synthetic oligonucleotide
uaaccuuauuaaacucggc

SEQ ID NO: 1376710 - RNA, 19 nt, Artificial Sequence
  Description of Artificial Sequence: Synthetic oligonucleotide
uuuuacacucugauaugau

SEQ ID NO: 1376711 - RNA, 19 nt, Artificial Sequence
  Description of Artificial Sequence: Synthetic oligonucleotide
guguuauuaucacugaugu

SEQ ID NO: 1376712 - RNA, 19 nt, Artificial Sequence
  Description of Artificial Sequence: Synthetic oligonucleotide
aaagccgccugagcgaaag

SEQ ID NO: 1376713 - RNA, 19 nt, Artificial Sequence
  Description of Artificial Sequence: Synthetic oligonucleotide
ugaaauuuuguuggaguau

SEQ ID NO: 1376714 - RNA, 19 nt, Artificial Sequence
  Description of Artificial Sequence: Synthetic oligonucleotide
acuugcagguuuagcaagc

SEQ ID NO: 1376715 - RNA, 19 nt, Artificial Sequence
  Description of Artificial Sequence: Synthetic oligonucleotide
uugacuacauuggaagccu

SEQ ID NO: 1376716 - RNA, 19 nt, Artificial Sequence
  Description of Artificial Sequence: Synthetic oligonucleotide
ucuacccugacaucuuccu

SEQ ID NO: 1376717 - RNA, 19 nt, Artificial Sequence
  Description of Artificial Sequence: Synthetic oligonucleotide
cuuuaguuucagcagagaa

SEQ ID NO: 1376718 - RNA, 19 nt, Artificial Sequence
  Description of Artificial Sequence: Synthetic oligonucleotide
agcuaagaaggccacaguu

SEQ ID NO: 1376719 - RNA, 19 nt, Artificial Sequence
  Description of Artificial Sequence: Synthetic oligonucleotide
gauaacuaauagugucuca

SEQ ID NO: 1376720 - RNA, 19 nt, Artificial Sequence
  Description of Artificial Sequence: Synthetic oligonucleotide
caugcacuuauuuguugag

SEQ ID NO: 1376721 - RNA, 19 nt, Artificial Sequence
  Description of Artificial Sequence: Synthetic oligonucleotide
uguaggcuugucuguuagg

SEQ ID NO: 1376722 - RNA, 19 nt, Artificial Sequence
  Description of Artificial Sequence: Synthetic oligonucleotide
ucauaacuccuuuuaguuu

SEQ ID NO: 1376723 - RNA, 19 nt, Artificial Sequence
  Description of Artificial Sequence: Synthetic oligonucleotide
uucagugaaguaguuuaca

SEQ ID NO: 1376724 - RNA, 19 nt, Artificial Sequence
  Description of Artificial Sequence: Synthetic oligonucleotide
uaacaagaauuccauuauu

SEQ ID NO: 1376725 - RNA, 19 nt, Artificial Sequence
  Description of Artificial Sequence: Synthetic oligonucleotide
caagccucccucauaacuc

SEQ ID NO: 1376726 - RNA, 19 nt, Artificial Sequence
  Description of Artificial Sequence: Synthetic oligonucleotide
cauucuccccuugaaaagc

SEQ ID NO: 1376727 - RNA, 19 nt, Artificial Sequence
  Description of Artificial Sequence: Synthetic oligonucleotide
aggauaccgacugucuugg

SEQ ID NO: 1376728 - RNA, 19 nt, Artificial Sequence
  Description of Artificial Sequence: Synthetic oligonucleotide
cucuuuaggcuaugcaaug

SEQ ID NO: 1376729 - RNA, 19 nt, Artificial Sequence
  Description of Artificial Sequence: Synthetic oligonucleotide
guuuauugagguggacugg

SEQ ID NO: 1376730 - RNA, 19 nt, Artificial Sequence
  Description of Artificial Sequence: Synthetic oligonucleotide
acucggcauauucauuuag

SEQ ID NO: 1376731 - RNA, 19 nt, Artificial Sequence
  Description of Artificial Sequence: Synthetic oligonucleotide
acuguuguauuuaaguuua

SEQ ID NO: 1376732 - RNA, 19 nt, Artificial Sequence
  Description of Artificial Sequence: Synthetic oligonucleotide
cucauucuccccuugaaaa

SEQ ID NO: 1376733 - RNA, 19 nt, Artificial Sequence
  Description of Artificial Sequence: Synthetic oligonucleotide
uaugugcaauugaaucuac

SEQ ID NO: 1376734 - RNA, 19 nt, Artificial Sequence
  Description of Artificial Sequence: Synthetic oligonucleotide
aguuagcauaaguccuggg

SEQ ID NO: 1376735 - RNA, 19 nt, Artificial Sequence
  Description of Artificial Sequence: Synthetic oligonucleotide
aguauguuaucaucugaua

SEQ ID NO: 1376736 - RNA, 19 nt, Artificial Sequence
  Description of Artificial Sequence: Synthetic oligonucleotide
aacgagguagaaccagaaa

SEQ ID NO: 1376737 - RNA, 19 nt, Artificial Sequence
  Description of Artificial Sequence: Synthetic oligonucleotide
aguugugauaaugaagcaa

SEQ ID NO: 1376738 - RNA, 19 nt, Artificial Sequence
  Description of Artificial Sequence: Synthetic oligonucleotide
agaaauucagaaguucaau

SEQ ID NO: 1376739 - RNA, 19 nt, Artificial Sequence
  Description of Artificial Sequence: Synthetic oligonucleotide
guugagauaggacacaguu

SEQ ID NO: 1376740 - RNA, 19 nt, Artificial Sequence
  Description of Artificial Sequence: Synthetic oligonucleotide
aaugcucuuuguucuuaaa

SEQ ID NO: 1376741 - RNA, 19 nt, Artificial Sequence
  Description of Artificial Sequence: Synthetic oligonucleotide
auaguaaaguuagcauaag

SEQ ID NO: 1376742 - RNA, 19 nt, Artificial Sequence
  Description of Artificial Sequence: Synthetic oligonucleotide
cucugauaugauuucagaa

SEQ ID NO: 1376743 - RNA, 19 nt, Artificial Sequence
  Description of Artificial Sequence: Synthetic oligonucleotide
uuauuaccaauagcuacuc

SEQ ID NO: 1376744 - RNA, 19 nt, Artificial Sequence
  Description of Artificial Sequence: Synthetic oligonucleotide
uuuguaggauaccgacugu

SEQ ID NO: 1376745 - RNA, 19 nt, Artificial Sequence
  Description of Artificial Sequence: Synthetic oligonucleotide
uggacuggaacaguaugac

SEQ ID NO: 1376746 - RNA, 19 nt, Artificial Sequence
  Description of Artificial Sequence: Synthetic oligonucleotide
ugucucauucuccccuuga

SEQ ID NO: 1376747 - RNA, 19 nt, Artificial Sequence
  Description of Artificial Sequence: Synthetic oligonucleotide
agcgaaagaguucuuggua

SEQ ID NO: 1376748 - RNA, 19 nt, Artificial Sequence
  Description of Artificial Sequence: Synthetic oligonucleotide
ucuuuaggcuaugcaaugu

SEQ ID NO: 1376749 - RNA, 19 nt, Artificial Sequence
  Description of Artificial Sequence: Synthetic oligonucleotide
cuccuuuuaguuugauaug

SEQ ID NO: 1376750 - RNA, 19 nt, Artificial Sequence
  Description of Artificial Sequence: Synthetic oligonucleotide
gacauagcguggcaugcac

SEQ ID NO: 1376751 - RNA, 19 nt, Artificial Sequence
  Description of Artificial Sequence: Synthetic oligonucleotide
uguugagauaggacacagu

SEQ ID NO: 1376752 - RNA, 19 nt, Artificial Sequence
  Description of Artificial Sequence: Synthetic oligonucleotide
uccaggagcuaagaaggcc

SEQ ID NO: 1376753 - RNA, 19 nt, Artificial Sequence
  Description of Artificial Sequence: Synthetic oligonucleotide
ucuuacaagccucccucau

SEQ ID NO: 1376754 - RNA, 19 nt, Artificial Sequence
  Description of Artificial Sequence: Synthetic oligonucleotide
uagcauaaguccuggggau

SEQ ID NO: 1376755 - RNA, 19 nt, Artificial Sequence
  Description of Artificial Sequence: Synthetic oligonucleotide
ucucaacgagguagaacca

SEQ ID NO: 1376756 - RNA, 19 nt, Artificial Sequence
  Description of Artificial Sequence: Synthetic oligonucleotide
auacuguaggcuugucugu

SEQ ID NO: 1376757 - RNA, 19 nt, Artificial Sequence
  Description of Artificial Sequence: Synthetic oligonucleotide
cuggacauagcguggcaug

SEQ ID NO: 1376758 - RNA, 19 nt, Artificial Sequence
  Description of Artificial Sequence: Synthetic oligonucleotide
uggucgcuguucaucauaa

SEQ ID NO: 1376759 - RNA, 19 nt, Artificial Sequence
  Description of Artificial Sequence: Synthetic oligonucleotide
gaucuggacauagcguggc

SEQ ID NO: 1376760 - RNA, 19 nt, Artificial Sequence
  Description of Artificial Sequence: Synthetic oligonucleotide
uuaguuugauaugcagagu

SEQ ID NO: 1376761 - RNA, 19 nt, Artificial Sequence
  Description of Artificial Sequence: Synthetic oligonucleotide
aagugcuaguccaggagcu

SEQ ID NO: 1376762 - RNA, 19 nt, Artificial Sequence
  Description of Artificial Sequence: Synthetic oligonucleotide
uguuguauuuaaguuuauu

SEQ ID NO: 1376763 - RNA, 19 nt, Artificial Sequence
  Description of Artificial Sequence: Synthetic oligonucleotide
aucuacccugacaucuucc

SEQ ID NO: 1376764 - RNA, 19 nt, Artificial Sequence
  Description of Artificial Sequence: Synthetic oligonucleotide
guggcaugcacuuauuugu

SEQ ID NO: 1376765 - RNA, 19 nt, Artificial Sequence
  Description of Artificial Sequence: Synthetic oligonucleotide
gauaugcagaguggcacac

SEQ ID NO: 1376766 - RNA, 19 nt, Artificial Sequence
  Description of Artificial Sequence: Synthetic oligonucleotide
cuguaggcuugucuguuag

SEQ ID NO: 1376767 - RNA, 19 nt, Artificial Sequence
  Description of Artificial Sequence: Synthetic oligonucleotide
ugcaacaugccaagugcua

SEQ ID NO: 1376768 - RNA, 19 nt, Artificial Sequence
  Description of Artificial Sequence: Synthetic oligonucleotide
ggaaucugggaucuggaca

SEQ ID NO: 1376769 - RNA, 19 nt, Artificial Sequence
  Description of Artificial Sequence: Synthetic oligonucleotide
agcaauucaaugauauuuu

SEQ ID NO: 1376770 - RNA, 19 nt, Artificial Sequence
  Description of Artificial Sequence: Synthetic oligonucleotide
acuacauuggaagccugcu

SEQ ID NO: 1376771 - RNA, 19 nt, Artificial Sequence
  Description of Artificial Sequence: Synthetic oligonucleotide
uuguaggauaccgacuguc

SEQ ID NO: 1376772 - RNA, 19 nt, Artificial Sequence
  Description of Artificial Sequence: Synthetic oligonucleotide
gacauuaugucuucauuuu

SEQ ID NO: 1376773 - RNA, 19 nt, Artificial Sequence
  Description of Artificial Sequence: Synthetic oligonucleotide
accaauagcuacuccuaaa

SEQ ID NO: 1376774 - RNA, 19 nt, Artificial Sequence
  Description of Artificial Sequence: Synthetic oligonucleotide
ugacuacauuggaagccug

SEQ ID NO: 1376775 - RNA, 19 nt, Artificial Sequence
  Description of Artificial Sequence: Synthetic oligonucleotide
ucucuggacucuuuugaua

SEQ ID NO: 1376776 - RNA, 19 nt, Artificial Sequence
  Description of Artificial Sequence: Synthetic oligonucleotide
cucaacgagguagaaccag

SEQ ID NO: 1376777 - RNA, 19 nt, Artificial Sequence
  Description of Artificial Sequence: Synthetic oligonucleotide
gagaugcuuuaguuucagc

SEQ ID NO: 1376778 - RNA, 19 nt, Artificial Sequence
  Description of Artificial Sequence: Synthetic oligonucleotide
gauaccgacugucuuggcu

SEQ ID NO: 1376779 - RNA, 19 nt, Artificial Sequence
  Description of Artificial Sequence: Synthetic oligonucleotide
gguggacuggaacaguaug

SEQ ID NO: 1376780 - RNA, 19 nt, Artificial Sequence
  Description of Artificial Sequence: Synthetic oligonucleotide
ugucucaacgagguagaac

SEQ ID NO: 1376781 - RNA, 19 nt, Artificial Sequence
  Description of Artificial Sequence: Synthetic oligonucleotide
aacuaauguuaaacuuucu

SEQ ID NO: 1376782 - RNA, 19 nt, Artificial Sequence
  Description of Artificial Sequence: Synthetic oligonucleotide
aagaugacacuggggagau

SEQ ID NO: 1376783 - RNA, 19 nt, Artificial Sequence
  Description of Artificial Sequence: Synthetic oligonucleotide
ggcacugauauguugaacu

SEQ ID NO: 1376784 - RNA, 19 nt, Artificial Sequence
  Description of Artificial Sequence: Synthetic oligonucleotide
cacugauauguugaacuug

SEQ ID NO: 1376785 - RNA, 19 nt, Artificial Sequence
  Description of Artificial Sequence: Synthetic oligonucleotide
cagaaauucagaaguucaa

SEQ ID NO: 1376786 - RNA, 19 nt, Artificial Sequence
  Description of Artificial Sequence: Synthetic oligonucleotide
uagcguggcaugcacuuau

SEQ ID NO: 1376787 - RNA, 19 nt, Artificial Sequence
  Description of Artificial Sequence: Synthetic oligonucleotide
uuggucgcuguucaucaua

SEQ ID NO: 1376788 - RNA, 19 nt, Artificial Sequence
  Description of Artificial Sequence: Synthetic oligonucleotide
cgagguagaaccagaaaag

SEQ ID NO: 1376789 - RNA, 19 nt, Artificial Sequence
  Description of Artificial Sequence: Synthetic oligonucleotide
uuguaacaagaauuccauu

SEQ ID NO: 1376790 - RNA, 19 nt, Artificial Sequence
  Description of Artificial Sequence: Synthetic oligonucleotide
aacucggcauauucauuua

SEQ ID NO: 1376791 - RNA, 19 nt, Artificial Sequence
  Description of Artificial Sequence: Synthetic oligonucleotide
caaguguuauuaucacuga

SEQ ID NO: 1376792 - RNA, 19 nt, Artificial Sequence
  Description of Artificial Sequence: Synthetic oligonucleotide
cucggcauauucauuuaga

SEQ ID NO: 1376793 - RNA, 19 nt, Artificial Sequence
  Description of Artificial Sequence: Synthetic oligonucleotide
cugagcgaaagaguucuug

SEQ ID NO: 1376794 - RNA, 19 nt, Artificial Sequence
  Description of Artificial Sequence: Synthetic oligonucleotide
cuucaguugaacuaauguu

SEQ ID NO: 1376795 - RNA, 19 nt, Artificial Sequence
  Description of Artificial Sequence: Synthetic oligonucleotide
uaaguuuauugagguggac

SEQ ID NO: 1376796 - RNA, 19 nt, Artificial Sequence
  Description of Artificial Sequence: Synthetic oligonucleotide
gugcaauugaaucuacccu

SEQ ID NO: 1376797 - RNA, 19 nt, Artificial Sequence
  Description of Artificial Sequence: Synthetic oligonucleotide
cuacuuugacuacauugga

SEQ ID NO: 1376798 - RNA, 19 nt, Artificial Sequence
  Description of Artificial Sequence: Synthetic oligonucleotide
cugauguuuaagccuguga

SEQ ID NO: 1376799 - RNA, 19 nt, Artificial Sequence
  Description of Artificial Sequence: Synthetic oligonucleotide
agcuuaugaucaaaacgca

SEQ ID NO: 1376800 - RNA, 19 nt, Artificial Sequence
  Description of Artificial Sequence: Synthetic oligonucleotide
acacaguucugugucccag

SEQ ID NO: 1376801 - RNA, 19 nt, Artificial Sequence
  Description of Artificial Sequence: Synthetic oligonucleotide
ucuggacauagcguggcau

SEQ ID NO: 1376802 - RNA, 19 nt, Artificial Sequence
  Description of Artificial Sequence: Synthetic oligonucleotide
cagaguggcacacaagucu

SEQ ID NO: 1376803 - RNA, 19 nt, Artificial Sequence
  Description of Artificial Sequence: Synthetic oligonucleotide
guauacccaaguguuauua

SEQ ID NO: 1376804 - RNA, 19 nt, Artificial Sequence
  Description of Artificial Sequence: Synthetic oligonucleotide
aguauacccaaguguuauu

SEQ ID NO: 1376805 - RNA, 19 nt, Artificial Sequence
  Description of Artificial Sequence: Synthetic oligonucleotide
uucagcagagaaggaauuu

SEQ ID NO: 1376806 - RNA, 19 nt, Artificial Sequence
  Description of Artificial Sequence: Synthetic oligonucleotide
agccgccugagcgaaagag

SEQ ID NO: 1376807 - RNA, 19 nt, Artificial Sequence
  Description of Artificial Sequence: Synthetic oligonucleotide
gaagcuacacuuaauucuu

SEQ ID NO: 1376808 - RNA, 19 nt, Artificial Sequence
  Description of Artificial Sequence: Synthetic oligonucleotide
agaaggaauuugaugcaaa

SEQ ID NO: 1376809 - RNA, 19 nt, Artificial Sequence
  Description of Artificial Sequence: Synthetic oligonucleotide
uauguugaacuugcagguu

SEQ ID NO: 1376810 - RNA, 19 nt, Artificial Sequence
  Description of Artificial Sequence: Synthetic oligonucleotide
uggccuccuuucuuuagaa

SEQ ID NO: 1376811 - RNA, 19 nt, Artificial Sequence
  Description of Artificial Sequence: Synthetic oligonucleotide
cauuucuaccuucuuucaa

SEQ ID NO: 1376812 - RNA, 19 nt, Artificial Sequence
  Description of Artificial Sequence: Synthetic oligonucleotide
cucuggacucuuuugauau

SEQ ID NO: 1376813 - RNA, 19 nt, Artificial Sequence
  Description of Artificial Sequence: Synthetic oligonucleotide
guuugcagugaaauuccga

SEQ ID NO: 1376814 - RNA, 19 nt, Artificial Sequence
  Description of Artificial Sequence: Synthetic oligonucleotide
gagcgaaagaguucuuggu

SEQ ID NO: 1376815 - RNA, 19 nt, Artificial Sequence
  Description of Artificial Sequence: Synthetic oligonucleotide
uaccgacugucuuggcuga

SEQ ID NO: 1376816 - RNA, 19 nt, Artificial Sequence
  Description of Artificial Sequence: Synthetic oligonucleotide
ccagaaaaggggcucuuac

SEQ ID NO: 1376817 - RNA, 19 nt, Artificial Sequence
  Description of Artificial Sequence: Synthetic oligonucleotide
gaguauacccaaguguuau

SEQ ID NO: 1376818 - RNA, 19 nt, Artificial Sequence
  Description of Artificial Sequence: Synthetic oligonucleotide
uuggaagccugcugagaau

SEQ ID NO: 1376819 - RNA, 19 nt, Artificial Sequence
  Description of Artificial Sequence: Synthetic oligonucleotide
cugauaccacaaagccgcc

SEQ ID NO: 1376820 - RNA, 19 nt, Artificial Sequence
  Description of Artificial Sequence: Synthetic oligonucleotide
ggacucuuuugauauagua

SEQ ID NO: 1376821 - RNA, 19 nt, Artificial Sequence
  Description of Artificial Sequence: Synthetic oligonucleotide
gaagccugcugagaaucca

SEQ ID NO: 1376822 - RNA, 19 nt, Artificial Sequence
  Description of Artificial Sequence: Synthetic oligonucleotide
ggcaugcacuuauuuguug

SEQ ID NO: 1376823 - RNA, 19 nt, Artificial Sequence
  Description of Artificial Sequence: Synthetic oligonucleotide
gacacaguucuguguccca

SEQ ID NO: 1376824 - RNA, 19 nt, Artificial Sequence
  Description of Artificial Sequence: Synthetic oligonucleotide
gagauaggacacaguucug

SEQ ID NO: 1376825 - RNA, 19 nt, Artificial Sequence
  Description of Artificial Sequence: Synthetic oligonucleotide
ggaucuggacauagcgugg

SEQ ID NO: 1376826 - RNA, 19 nt, Artificial Sequence
  Description of Artificial Sequence: Synthetic oligonucleotide
auucuccccuugaaaagcu

SEQ ID NO: 1376827 - RNA, 19 nt, Artificial Sequence
  Description of Artificial Sequence: Synthetic oligonucleotide
guagugaagcagccacuuc

SEQ ID NO: 1376828 - RNA, 19 nt, Artificial Sequence
  Description of Artificial Sequence: Synthetic oligonucleotide
agcagagaaggaauuugau

SEQ ID NO: 1376829 - RNA, 19 nt, Artificial Sequence
  Description of Artificial Sequence: Synthetic oligonucleotide
ggagaugcuuuaguuucag

SEQ ID NO: 1376830 - RNA, 19 nt, Artificial Sequence
  Description of Artificial Sequence: Synthetic oligonucleotide
uccccuugaaaagcuugac

SEQ ID NO: 1376831 - RNA, 19 nt, Artificial Sequence
  Description of Artificial Sequence: Synthetic oligonucleotide
aucuggacauagcguggca

SEQ ID NO: 1376832 - RNA, 19 nt, Artificial Sequence
  Description of Artificial Sequence: Synthetic oligonucleotide
uuuggucgcuguucaucau

SEQ ID NO: 1376833 - RNA, 19 nt, Artificial Sequence
  Description of Artificial Sequence: Synthetic oligonucleotide
gugaaauuccgaugccucu

SEQ ID NO: 1376834 - RNA, 19 nt, Artificial Sequence
  Description of Artificial Sequence: Synthetic oligonucleotide
gcuacuccuaaauggagcu

SEQ ID NO: 1376835 - RNA, 19 nt, Artificial Sequence
  Description of Artificial Sequence: Synthetic oligonucleotide
cguggcaugcacuuauuug

SEQ ID NO: 1376836 - RNA, 19 nt, Artificial Sequence
  Description of Artificial Sequence: Synthetic oligonucleotide
caacgagguagaaccagaa

SEQ ID NO: 1376837 - RNA, 19 nt, Artificial Sequence
  Description of Artificial Sequence: Synthetic oligonucleotide
acaaagccgccugagcgaa

SEQ ID NO: 1376838 - RNA, 19 nt, Artificial Sequence
  Description of Artificial Sequence: Synthetic oligonucleotide
gggaaucugggaucuggac

SEQ ID NO: 1376839 - RNA, 19 nt, Artificial Sequence
  Description of Artificial Sequence: Synthetic oligonucleotide
cuaguccaggagcuaagaa

SEQ ID NO: 1376840 - RNA, 19 nt, Artificial Sequence
  Description of Artificial Sequence: Synthetic oligonucleotide
cccucauaacuccuuuuag

SEQ ID NO: 1376841 - RNA, 19 nt, Artificial Sequence
  Description of Artificial Sequence: Synthetic oligonucleotide
cuuacaagccucccucaua

SEQ ID NO: 1376842 - RNA, 19 nt, Artificial Sequence
  Description of Artificial Sequence: Synthetic oligonucleotide
cuacuccuaaauggagcug

SEQ ID NO: 1376843 - RNA, 19 nt, Artificial Sequence
  Description of Artificial Sequence: Synthetic oligonucleotide
uugaugcaaaugugacauu

SEQ ID NO: 1376844 - RNA, 19 nt, Artificial Sequence
  Description of Artificial Sequence: Synthetic oligonucleotide
caaugauauuuuacacucu

SEQ ID NO: 1376845 - RNA, 19 nt, Artificial Sequence
  Description of Artificial Sequence: Synthetic oligonucleotide
auaugcagaguggcacaca

SEQ ID NO: 1376846 - RNA, 19 nt, Artificial Sequence
  Description of Artificial Sequence: Synthetic oligonucleotide
cacaagucugugaucacau

SEQ ID NO: 1376847 - RNA, 19 nt, Artificial Sequence
  Description of Artificial Sequence: Synthetic oligonucleotide
ccuuauuaaacucggcaua

SEQ ID NO: 1376848 - RNA, 19 nt, Artificial Sequence
  Description of Artificial Sequence: Synthetic oligonucleotide
acauagcguggcaugcacu

SEQ ID NO: 1376849 - RNA, 19 nt, Artificial Sequence
  Description of Artificial Sequence: Synthetic oligonucleotide
cuugcagguuuagcaagca

SEQ ID NO: 1376850 - RNA, 19 nt, Artificial Sequence
  Description of Artificial Sequence: Synthetic oligonucleotide
aagccgccugagcgaaaga

SEQ ID NO: 1376851 - RNA, 19 nt, Artificial Sequence
  Description of Artificial Sequence: Synthetic oligonucleotide
aaccagaaaaggggcucuu

SEQ ID NO: 1376852 - RNA, 19 nt, Artificial Sequence
  Description of Artificial Sequence: Synthetic oligonucleotide
cauagcguggcaugcacuu

SEQ ID NO: 1376853 - RNA, 19 nt, Artificial Sequence
  Description of Artificial Sequence: Synthetic oligonucleotide
caguugaacuaauguuaaa

SEQ ID NO: 1376854 - RNA, 19 nt, Artificial Sequence
  Description of Artificial Sequence: Synthetic oligonucleotide
guaggauaccgacugucuu

SEQ ID NO: 1376855 - RNA, 19 nt, Artificial Sequence
  Description of Artificial Sequence: Synthetic oligonucleotide
gcuuaugaucaaaacgcaa

SEQ ID NO: 1376856 - RNA, 19 nt, Artificial Sequence
  Description of Artificial Sequence: Synthetic oligonucleotide
acuccuaaauggagcugcu

SEQ ID NO: 1376857 - RNA, 19 nt, Artificial Sequence
  Description of Artificial Sequence: Synthetic oligonucleotide
cuuuaggcuaugcaauguu

SEQ ID NO: 1376858 - RNA, 19 nt, Artificial Sequence
  Description of Artificial Sequence: Synthetic oligonucleotide
cuguggauacuguaggcuu

SEQ ID NO: 1376859 - RNA, 19 nt, Artificial Sequence
  Description of Artificial Sequence: Synthetic oligonucleotide
ggcugacaugucuccuggg

SEQ ID NO: 1376860 - RNA, 19 nt, Artificial Sequence
  Description of Artificial Sequence: Synthetic oligonucleotide
gagcugcuaucuuuuguau

SEQ ID NO: 1376861 - RNA, 19 nt, Artificial Sequence
  Description of Artificial Sequence: Synthetic oligonucleotide
caacaugccaagugcuagu

SEQ ID NO: 1376862 - RNA, 19 nt, Artificial Sequence
  Description of Artificial Sequence: Synthetic oligonucleotide
gcucugaaauuuuguugga

SEQ ID NO: 1376863 - RNA, 19 nt, Artificial Sequence
  Description of Artificial Sequence: Synthetic oligonucleotide
accgacugucuuggcugac

SEQ ID NO: 1376864 - RNA, 19 nt, Artificial Sequence
  Description of Artificial Sequence: Synthetic oligonucleotide
accagaaaaggggcucuua

SEQ ID NO: 1376865 - RNA, 19 nt, Artificial Sequence
  Description of Artificial Sequence: Synthetic oligonucleotide
ggggauaccaugggaaucu

SEQ ID NO: 1376866 - RNA, 19 nt, Artificial Sequence
  Description of Artificial Sequence: Synthetic oligonucleotide
agugcuaguccaggagcua

SEQ ID NO: 1376867 - RNA, 19 nt, Artificial Sequence
  Description of Artificial Sequence: Synthetic oligonucleotide
cacaguuugcagugaaauu

SEQ ID NO: 1376868 - RNA, 19 nt, Artificial Sequence
  Description of Artificial Sequence: Synthetic oligonucleotide
gcacuuauuuguugagaua

SEQ ID NO: 1376869 - RNA, 19 nt, Artificial Sequence
  Description of Artificial Sequence: Synthetic oligonucleotide
cuggggagaugcuuuaguu

SEQ ID NO: 1376870 - RNA, 19 nt, Artificial Sequence
  Description of Artificial Sequence: Synthetic oligonucleotide
cagugaaauuccgaugccu

SEQ ID NO: 1376871 - RNA, 19 nt, Artificial Sequence
  Description of Artificial Sequence: Synthetic oligonucleotide
gaaucuacccugacaucuu

SEQ ID NO: 1376872 - RNA, 19 nt, Artificial Sequence
  Description of Artificial Sequence: Synthetic oligonucleotide
caugggaaucugggaucug

SEQ ID NO: 1376873 - RNA, 19 nt, Artificial Sequence
  Description of Artificial Sequence: Synthetic oligonucleotide
auagcguggcaugcacuua

SEQ ID NO: 1376874 - RNA, 19 nt, Artificial Sequence
  Description of Artificial Sequence: Synthetic oligonucleotide
ccucuuuaggcuaugcaau

SEQ ID NO: 1376875 - RNA, 19 nt, Artificial Sequence
  Description of Artificial Sequence: Synthetic oligonucleotide
ggaguauacccaaguguua

SEQ ID NO: 1376876 - RNA, 19 nt, Artificial Sequence
  Description of Artificial Sequence: Synthetic oligonucleotide
ggucgcuguucaucauaac

SEQ ID NO: 1376877 - RNA, 19 nt, Artificial Sequence
  Description of Artificial Sequence: Synthetic oligonucleotide
gcuaguccaggagcuaaga

SEQ ID NO: 1376878 - RNA, 19 nt, Artificial Sequence
  Description of Artificial Sequence: Synthetic oligonucleotide
ggauaccgacugucuuggc

SEQ ID NO: 1376879 - RNA, 19 nt, Artificial Sequence
  Description of Artificial Sequence: Synthetic oligonucleotide
gggagaugcuuuaguuuca

SEQ ID NO: 1376880 - RNA, 19 nt, Artificial Sequence
  Description of Artificial Sequence: Synthetic oligonucleotide
agaugacacuggggagaug

SEQ ID NO: 1376881 - RNA, 19 nt, Artificial Sequence
  Description of Artificial Sequence: Synthetic oligonucleotide
gcuaagaaggccacaguuu

SEQ ID NO: 1376882 - RNA, 19 nt, Artificial Sequence
  Description of Artificial Sequence: Synthetic oligonucleotide
gcagguuuagcaagcauuu

SEQ ID NO: 1376883 - RNA, 19 nt, Artificial Sequence
  Description of Artificial Sequence: Synthetic oligonucleotide
ggacauagcguggcaugca

SEQ ID NO: 1376884 - RNA, 19 nt, Artificial Sequence
  Description of Artificial Sequence: Synthetic oligonucleotide
cuggaacaguaugacuucu

SEQ ID NO: 1376885 - RNA, 19 nt, Artificial Sequence
  Description of Artificial Sequence: Synthetic oligonucleotide
gggauaccaugggaaucug

SEQ ID NO: 1376886 - RNA, 19 nt, Artificial Sequence
  Description of Artificial Sequence: Synthetic oligonucleotide
gcacugauauguugaacuu

SEQ ID NO: 1376887 - RNA, 19 nt, Artificial Sequence
  Description of Artificial Sequence: Synthetic oligonucleotide
gaguggcacacaagucugu

SEQ ID NO: 1376888 - RNA, 19 nt, Artificial Sequence
  Description of Artificial Sequence: Synthetic oligonucleotide
cagcaaaccuggcacugau

SEQ ID NO: 1376889 - RNA, 19 nt, Artificial Sequence
  Description of Artificial Sequence: Synthetic oligonucleotide
guauucugagugaggucau

SEQ ID NO: 1376890 - RNA, 19 nt, Artificial Sequence
  Description of Artificial Sequence: Synthetic oligonucleotide
cuccuaaauggagcugcua

SEQ ID NO: 1376891 - RNA, 19 nt, Artificial Sequence
  Description of Artificial Sequence: Synthetic oligonucleotide
caauuuggucgcuguucau

SEQ ID NO: 1376892 - RNA, 19 nt, Artificial Sequence
  Description of Artificial Sequence: Synthetic oligonucleotide
cugucucaacgagguagaa

SEQ ID NO: 1376893 - RNA, 19 nt, Artificial Sequence
  Description of Artificial Sequence: Synthetic oligonucleotide
ccacaguuugcagugaaau

SEQ ID NO: 1376894 - RNA, 19 nt, Artificial Sequence
  Description of Artificial Sequence: Synthetic oligonucleotide
gagucacaguugugauaau

SEQ ID NO: 1376895 - RNA, 19 nt, Artificial Sequence
  Description of Artificial Sequence: Synthetic oligonucleotide
agcguggcaugcacuuauu

SEQ ID NO: 1376896 - RNA, 19 nt, Artificial Sequence
  Description of Artificial Sequence: Synthetic oligonucleotide
ccgaugccucuuuaggcua

SEQ ID NO: 1376897 - RNA, 19 nt, Artificial Sequence
  Description of Artificial Sequence: Synthetic oligonucleotide
cggcauauucauuuagaau

SEQ ID NO: 1376898 - RNA, 19 nt, Artificial Sequence
  Description of Artificial Sequence: Synthetic oligonucleotide
ccgccugagcgaaagaguu

SEQ ID NO: 1376899 - RNA, 19 nt, Artificial Sequence
  Description of Artificial Sequence: Synthetic oligonucleotide
gccgccugagcgaaagagu

SEQ ID NO: 1376900 - RNA, 19 nt, Artificial Sequence
  Description of Artificial Sequence: Synthetic oligonucleotide
ccgacugucuuggcugaca

SEQ ID NO: 1376901 - RNA, 19 nt, Artificial Sequence
  Description of Artificial Sequence: Synthetic oligonucleotide
gcguggcaugcacuuauuu

SEQ ID NO: 1376902 - RNA, 19 nt, Artificial Sequence
  Description of Artificial Sequence: Synthetic oligonucleotide
cgcaaguacuccagaucua

SEQ ID NO: 1376903 - RNA, 19 nt, Artificial Sequence
  Description of Artificial Sequence: Synthetic oligonucleotide
gccucccucauaacuccuu

SEQ ID NO: 1376904 - RNA, 19 nt, Artificial Sequence
  Description of Artificial Sequence: Synthetic oligonucleotide
uaaacuaccauucacaccc

SEQ ID NO: 1376905 - RNA, 19 nt, Artificial Sequence
  Description of Artificial Sequence: Synthetic oligonucleotide
aaauagaucaucuagauua

SEQ ID NO: 1376906 - RNA, 19 nt, Artificial Sequence
  Description of Artificial Sequence: Synthetic oligonucleotide
aacuaacguaguuugaacc

SEQ ID NO: 1376907 - RNA, 19 nt, Artificial Sequence
  Description of Artificial Sequence: Synthetic oligonucleotide
uuagauugcauauucaaag

SEQ ID NO: 1376908 - RNA, 19 nt, Artificial Sequence
  Description of Artificial Sequence: Synthetic oligonucleotide
aauucaucaaauucccuac

SEQ ID NO: 1376909 - RNA, 19 nt, Artificial Sequence
  Description of Artificial Sequence: Synthetic oligonucleotide
aaacuuauaaugcaguccu

SEQ ID NO: 1376910 - RNA, 19 nt, Artificial Sequence
  Description of Artificial Sequence: Synthetic oligonucleotide
aguuugaaccaacaaaccc

SEQ ID NO: 1376911 - RNA, 19 nt, Artificial Sequence
  Description of Artificial Sequence: Synthetic oligonucleotide
acucacuuagcuuauaaac

SEQ ID NO: 1376912 - RNA, 19 nt, Artificial Sequence
  Description of Artificial Sequence: Synthetic oligonucleotide
gaucaucuagauuagauug

SEQ ID NO: 1376913 - RNA, 19 nt, Artificial Sequence
  Description of Artificial Sequence: Synthetic oligonucleotide
caaaacacuaaaacgaagg

SEQ ID NO: 1376914 - RNA, 19 nt, Artificial Sequence
  Description of Artificial Sequence: Synthetic oligonucleotide
aaaacaaacaccucuuaga

SEQ ID NO: 1376915 - RNA, 19 nt, Artificial Sequence
  Description of Artificial Sequence: Synthetic oligonucleotide
ugauucaaaacacuaaaac

SEQ ID NO: 1376916 - RNA, 19 nt, Artificial Sequence
  Description of Artificial Sequence: Synthetic oligonucleotide
uuagcuuauaaacuuauaa

SEQ ID NO: 1376917 - RNA, 19 nt, Artificial Sequence
  Description of Artificial Sequence: Synthetic oligonucleotide
agcagagaaacuuacgugg

SEQ ID NO: 1376918 - RNA, 19 nt, Artificial Sequence
  Description of Artificial Sequence: Synthetic oligonucleotide
ucuaucacgacauucuaag

SEQ ID NO: 1376919 - RNA, 19 nt, Artificial Sequence
  Description of Artificial Sequence: Synthetic oligonucleotide
ucuaugauaaagauaaaua

SEQ ID NO: 1376920 - RNA, 19 nt, Artificial Sequence
  Description of Artificial Sequence: Synthetic oligonucleotide
aaacuaacguaguuugaac

SEQ ID NO: 1376921 - RNA, 19 nt, Artificial Sequence
  Description of Artificial Sequence: Synthetic oligonucleotide
ucuuaaagcuucuaagugc

SEQ ID NO: 1376922 - RNA, 19 nt, Artificial Sequence
  Description of Artificial Sequence: Synthetic oligonucleotide
acuaaacuaccauucacac

SEQ ID NO: 1376923 - RNA, 19 nt, Artificial Sequence
  Description of Artificial Sequence: Synthetic oligonucleotide
ucaaauuagacuaugucuu

SEQ ID NO: 1376924 - RNA, 19 nt, Artificial Sequence
  Description of Artificial Sequence: Synthetic oligonucleotide
cacaagaacaccauuagug

SEQ ID NO: 1376925 - RNA, 19 nt, Artificial Sequence
  Description of Artificial Sequence: Synthetic oligonucleotide
ugugaaucugguuuuauga

SEQ ID NO: 1376926 - RNA, 19 nt, Artificial Sequence
  Description of Artificial Sequence: Synthetic oligonucleotide
auaaacuuauaaugcaguc

SEQ ID NO: 1376927 - RNA, 19 nt, Artificial Sequence
  Description of Artificial Sequence: Synthetic oligonucleotide
uguuauaguacuacacuug

SEQ ID NO: 1376928 - RNA, 19 nt, Artificial Sequence
  Description of Artificial Sequence: Synthetic oligonucleotide
aauguuugcaacaaauugu

SEQ ID NO: 1376929 - RNA, 19 nt, Artificial Sequence
  Description of Artificial Sequence: Synthetic oligonucleotide
auaguacuacacuugagag

SEQ ID NO: 1376930 - RNA, 19 nt, Artificial Sequence
  Description of Artificial Sequence: Synthetic oligonucleotide
cuuaaugcaaugaccagag

SEQ ID NO: 1376931 - RNA, 19 nt, Artificial Sequence
  Description of Artificial Sequence: Synthetic oligonucleotide
auaaacuugccaaaugucg

SEQ ID NO: 1376932 - RNA, 19 nt, Artificial Sequence
  Description of Artificial Sequence: Synthetic oligonucleotide
uagauugcauauucaaagg

SEQ ID NO: 1376933 - RNA, 19 nt, Artificial Sequence
  Description of Artificial Sequence: Synthetic oligonucleotide
aguaccaugaggaaguggg

SEQ ID NO: 1376934 - RNA, 19 nt, Artificial Sequence
  Description of Artificial Sequence: Synthetic oligonucleotide
uaucacgacauucuaaggu

SEQ ID NO: 1376935 - RNA, 19 nt, Artificial Sequence
  Description of Artificial Sequence: Synthetic oligonucleotide
aacagaucaguuaccaugg

SEQ ID NO: 1376936 - RNA, 19 nt, Artificial Sequence
  Description of Artificial Sequence: Synthetic oligonucleotide
uggguggugauucaaaaca

SEQ ID NO: 1376937 - RNA, 19 nt, Artificial Sequence
  Description of Artificial Sequence: Synthetic oligonucleotide
agacugaacacauucccac

SEQ ID NO: 1376938 - RNA, 19 nt, Artificial Sequence
  Description of Artificial Sequence: Synthetic oligonucleotide
auuaccaugcuacucuauc

SEQ ID NO: 1376939 - RNA, 19 nt, Artificial Sequence
  Description of Artificial Sequence: Synthetic oligonucleotide
aguguguugaacccuacag

SEQ ID NO: 1376940 - RNA, 19 nt, Artificial Sequence
  Description of Artificial Sequence: Synthetic oligonucleotide
uagauuagauugcauauuc

SEQ ID NO: 1376941 - RNA, 19 nt, Artificial Sequence
  Description of Artificial Sequence: Synthetic oligonucleotide
ugucuuaaagcuucuaagu

SEQ ID NO: 1376942 - RNA, 19 nt, Artificial Sequence
  Description of Artificial Sequence: Synthetic oligonucleotide
ucaaaacucagaauucaga

SEQ ID NO: 1376943 - RNA, 19 nt, Artificial Sequence
  Description of Artificial Sequence: Synthetic oligonucleotide
caaacugauauuucucucc

SEQ ID NO: 1376944 - RNA, 19 nt, Artificial Sequence
  Description of Artificial Sequence: Synthetic oligonucleotide
ucuagauuagauugcauau

SEQ ID NO: 1376945 - RNA, 19 nt, Artificial Sequence
  Description of Artificial Sequence: Synthetic oligonucleotide
acuugagagaaacauuaag

SEQ ID NO: 1376946 - RNA, 19 nt, Artificial Sequence
  Description of Artificial Sequence: Synthetic oligonucleotide
gauugcauauucaaaggag

SEQ ID NO: 1376947 - RNA, 19 nt, Artificial Sequence
  Description of Artificial Sequence: Synthetic oligonucleotide
uugguuucgauuuccacca

SEQ ID NO: 1376948 - RNA, 19 nt, Artificial Sequence
  Description of Artificial Sequence: Synthetic oligonucleotide
uucuccuuaacuuugcaaa

SEQ ID NO: 1376949 - RNA, 19 nt, Artificial Sequence
  Description of Artificial Sequence: Synthetic oligonucleotide
agggcuaaaaggcaauggg

SEQ ID NO: 1376950 - RNA, 19 nt, Artificial Sequence
  Description of Artificial Sequence: Synthetic oligonucleotide
aacgaaggcaucaaauuag

SEQ ID NO: 1376951 - RNA, 19 nt, Artificial Sequence
  Description of Artificial Sequence: Synthetic oligonucleotide
uuccgauuaacuucaaugu

SEQ ID NO: 1376952 - RNA, 19 nt, Artificial Sequence
  Description of Artificial Sequence: Synthetic oligonucleotide
aaacugauauuucucucca

SEQ ID NO: 1376953 - RNA, 19 nt, Artificial Sequence
  Description of Artificial Sequence: Synthetic oligonucleotide
cuuauaaacuuauaaugca

SEQ ID NO: 1376954 - RNA, 19 nt, Artificial Sequence
  Description of Artificial Sequence: Synthetic oligonucleotide
cuucugugaacccauuucg

SEQ ID NO: 1376955 - RNA, 19 nt, Artificial Sequence
  Description of Artificial Sequence: Synthetic oligonucleotide
aaacacuaaaacgaaggca

SEQ ID NO: 1376956 - RNA, 19 nt, Artificial Sequence
  Description of Artificial Sequence: Synthetic oligonucleotide
aucacaagaacaccauuag

SEQ ID NO: 1376957 - RNA, 19 nt, Artificial Sequence
  Description of Artificial Sequence: Synthetic oligonucleotide
gauaaaauccagcuucaca

SEQ ID NO: 1376958 - RNA, 19 nt, Artificial Sequence
  Description of Artificial Sequence: Synthetic oligonucleotide
uacucuaucacgacauucu

SEQ ID NO: 1376959 - RNA, 19 nt, Artificial Sequence
  Description of Artificial Sequence: Synthetic oligonucleotide
uuagucuagagguccuugg

SEQ ID NO: 1376960 - RNA, 19 nt, Artificial Sequence
  Description of Artificial Sequence: Synthetic oligonucleotide
uuuucugaacacacgugcc

SEQ ID NO: 1376961 - RNA, 19 nt, Artificial Sequence
  Description of Artificial Sequence: Synthetic oligonucleotide
gauuagauugcauauucaa

SEQ ID NO: 1376962 - RNA, 19 nt, Artificial Sequence
  Description of Artificial Sequence: Synthetic oligonucleotide
ugaaauacucuaauucauc

SEQ ID NO: 1376963 - RNA, 19 nt, Artificial Sequence
  Description of Artificial Sequence: Synthetic oligonucleotide
caucuuaaugcaaugacca

SEQ ID NO: 1376964 - RNA, 19 nt, Artificial Sequence
  Description of Artificial Sequence: Synthetic oligonucleotide
uaagguauuuucuaugaua

SEQ ID NO: 1376965 - RNA, 19 nt, Artificial Sequence
  Description of Artificial Sequence: Synthetic oligonucleotide
uucacaguaggaguguggg

SEQ ID NO: 1376966 - RNA, 19 nt, Artificial Sequence
  Description of Artificial Sequence: Synthetic oligonucleotide
agaucaguuaccaugggag

SEQ ID NO: 1376967 - RNA, 19 nt, Artificial Sequence
  Description of Artificial Sequence: Synthetic oligonucleotide
ugauaaagauaaauagaaa

SEQ ID NO: 1376968 - RNA, 19 nt, Artificial Sequence
  Description of Artificial Sequence: Synthetic oligonucleotide
acuaacguaguuugaacca

SEQ ID NO: 1376969 - RNA, 19 nt, Artificial Sequence
  Description of Artificial Sequence: Synthetic oligonucleotide
uaugugcccacuaaacuac

SEQ ID NO: 1376970 - RNA, 19 nt, Artificial Sequence
  Description of Artificial Sequence: Synthetic oligonucleotide
gauauagccuuguucacca

SEQ ID NO: 1376971 - RNA, 19 nt, Artificial Sequence
  Description of Artificial Sequence: Synthetic oligonucleotide
acaaugguaauuaauguga

SEQ ID NO: 1376972 - RNA, 19 nt, Artificial Sequence
  Description of Artificial Sequence: Synthetic oligonucleotide
ggaucugugaccaauaggc

SEQ ID NO: 1376973 - RNA, 19 nt, Artificial Sequence
  Description of Artificial Sequence: Synthetic oligonucleotide
ugucuuuucugaacacacg

SEQ ID NO: 1376974 - RNA, 19 nt, Artificial Sequence
  Description of Artificial Sequence: Synthetic oligonucleotide
uacuuauacaggccugggg

SEQ ID NO: 1376975 - RNA, 19 nt, Artificial Sequence
  Description of Artificial Sequence: Synthetic oligonucleotide
ucguggaugcaucacaaga

SEQ ID NO: 1376976 - RNA, 19 nt, Artificial Sequence
  Description of Artificial Sequence: Synthetic oligonucleotide
uuauaguacuacacuugag

SEQ ID NO: 1376977 - RNA, 19 nt, Artificial Sequence
  Description of Artificial Sequence: Synthetic oligonucleotide
cugugaacccauuucgugg

SEQ ID NO: 1376978 - RNA, 19 nt, Artificial Sequence
  Description of Artificial Sequence: Synthetic oligonucleotide
ugugaguaccaugaggaag

SEQ ID NO: 1376979 - RNA, 19 nt, Artificial Sequence
  Description of Artificial Sequence: Synthetic oligonucleotide
gucuuaaagcuucuaagug

SEQ ID NO: 1376980 - RNA, 19 nt, Artificial Sequence
  Description of Artificial Sequence: Synthetic oligonucleotide
uaguuugaaccaacaaacc

SEQ ID NO: 1376981 - RNA, 19 nt, Artificial Sequence
  Description of Artificial Sequence: Synthetic oligonucleotide
aauagaucaucuagauuag

SEQ ID NO: 1376982 - RNA, 19 nt, Artificial Sequence
  Description of Artificial Sequence: Synthetic oligonucleotide
aacccuacagggcacugag

SEQ ID NO: 1376983 - RNA, 19 nt, Artificial Sequence
  Description of Artificial Sequence: Synthetic oligonucleotide
acaccauuaguggucaagc

SEQ ID NO: 1376984 - RNA, 19 nt, Artificial Sequence
  Description of Artificial Sequence: Synthetic oligonucleotide
gaaaagugugaguaccaug

SEQ ID NO: 1376985 - RNA, 19 nt, Artificial Sequence
  Description of Artificial Sequence: Synthetic oligonucleotide
uucuaugauaaagauaaau

SEQ ID NO: 1376986 - RNA, 19 nt, Artificial Sequence
  Description of Artificial Sequence: Synthetic oligonucleotide
uaaacuaacguaguuugaa

SEQ ID NO: 1376987 - RNA, 19 nt, Artificial Sequence
  Description of Artificial Sequence: Synthetic oligonucleotide
aucaucuagauuagauugc

SEQ ID NO: 1376988 - RNA, 19 nt, Artificial Sequence
  Description of Artificial Sequence: Synthetic oligonucleotide
gaaggcaucaaauuagacu

SEQ ID NO: 1376989 - RNA, 19 nt, Artificial Sequence
  Description of Artificial Sequence: Synthetic oligonucleotide
ucugugaacccauuucgug

SEQ ID NO: 1376990 - RNA, 19 nt, Artificial Sequence
  Description of Artificial Sequence: Synthetic oligonucleotide
uccgcaguacgccaaagca

SEQ ID NO: 1376991 - RNA, 19 nt, Artificial Sequence
  Description of Artificial Sequence: Synthetic oligonucleotide
ucuuagacaaugguaauua

SEQ ID NO: 1376992 - RNA, 19 nt, Artificial Sequence
  Description of Artificial Sequence: Synthetic oligonucleotide
auacccaacucacuuagcu

SEQ ID NO: 1376993 - RNA, 19 nt, Artificial Sequence
  Description of Artificial Sequence: Synthetic oligonucleotide
uggaauacccaacucacuu

SEQ ID NO: 1376994 - RNA, 19 nt, Artificial Sequence
  Description of Artificial Sequence: Synthetic oligonucleotide
auuaguggucaagccaucc

SEQ ID NO: 1376995 - RNA, 19 nt, Artificial Sequence
  Description of Artificial Sequence: Synthetic oligonucleotide
guguguugaacccuacagg

SEQ ID NO: 1376996 - RNA, 19 nt, Artificial Sequence
  Description of Artificial Sequence: Synthetic oligonucleotide
cuaaacuaccauucacacc

SEQ ID NO: 1376997 - RNA, 19 nt, Artificial Sequence
  Description of Artificial Sequence: Synthetic oligonucleotide
uuacguggacaacugguug

SEQ ID NO: 1376998 - RNA, 19 nt, Artificial Sequence
  Description of Artificial Sequence: Synthetic oligonucleotide
aucuagauuagauugcaua

SEQ ID NO: 1376999 - RNA, 19 nt, Artificial Sequence
  Description of Artificial Sequence: Synthetic oligonucleotide
ucacuuagcuuauaaacuu

SEQ ID NO: 1377000 - RNA, 19 nt, Artificial Sequence
  Description of Artificial Sequence: Synthetic oligonucleotide
uuaccaugcuacucuauca

SEQ ID NO: 1377001 - RNA, 19 nt, Artificial Sequence
  Description of Artificial Sequence: Synthetic oligonucleotide
aacugguuggaauacccaa

SEQ ID NO: 1377002 - RNA, 19 nt, Artificial Sequence
  Description of Artificial Sequence: Synthetic oligonucleotide
aauuguaaacuaacguagu

SEQ ID NO: 1377003 - RNA, 19 nt, Artificial Sequence
  Description of Artificial Sequence: Synthetic oligonucleotide
auuaauauacauguugcua

SEQ ID NO: 1377004 - RNA, 19 nt, Artificial Sequence
  Description of Artificial Sequence: Synthetic oligonucleotide
uacgccaaagcaagguugc

SEQ ID NO: 1377005 - RNA, 19 nt, Artificial Sequence
  Description of Artificial Sequence: Synthetic oligonucleotide
gagcagagaaacuuacgug

SEQ ID NO: 1377006 - RNA, 19 nt, Artificial Sequence
  Description of Artificial Sequence: Synthetic oligonucleotide
uaguacuacacuugagaga

SEQ ID NO: 1377007 - RNA, 19 nt, Artificial Sequence
  Description of Artificial Sequence: Synthetic oligonucleotide
aggcuaguguguugaaccc

SEQ ID NO: 1377008 - RNA, 19 nt, Artificial Sequence
  Description of Artificial Sequence: Synthetic oligonucleotide
uccuagagacagcuguuag

SEQ ID NO: 1377009 - RNA, 19 nt, Artificial Sequence
  Description of Artificial Sequence: Synthetic oligonucleotide
gguuuuaugaaauacucua

SEQ ID NO: 1377010 - RNA, 19 nt, Artificial Sequence
  Description of Artificial Sequence: Synthetic oligonucleotide
ugcuacucuaucacgacau

SEQ ID NO: 1377011 - RNA, 19 nt, Artificial Sequence
  Description of Artificial Sequence: Synthetic oligonucleotide
ugugcacaaaagagggcag

SEQ ID NO: 1377012 - RNA, 19 nt, Artificial Sequence
  Description of Artificial Sequence: Synthetic oligonucleotide
ugcgugaaaagugugagua

SEQ ID NO: 1377013 - RNA, 19 nt, Artificial Sequence
  Description of Artificial Sequence: Synthetic oligonucleotide
ucaucaaauucccuacuua

SEQ ID NO: 1377014 - RNA, 19 nt, Artificial Sequence
  Description of Artificial Sequence: Synthetic oligonucleotide
auuucguggaugcaucaca

SEQ ID NO: 1377015 - RNA, 19 nt, Artificial Sequence
  Description of Artificial Sequence: Synthetic oligonucleotide
uuaguggucaagccaucca

SEQ ID NO: 1377016 - RNA, 19 nt, Artificial Sequence
  Description of Artificial Sequence: Synthetic oligonucleotide
aaggccuuccgcaguacgc

SEQ ID NO: 1377017 - RNA, 19 nt, Artificial Sequence
  Description of Artificial Sequence: Synthetic oligonucleotide
agcugauugguuucgauuu

SEQ ID NO: 1377018 - RNA, 19 nt, Artificial Sequence
  Description of Artificial Sequence: Synthetic oligonucleotide
aucuuaaugcaaugaccag

SEQ ID NO: 1377019 - RNA, 19 nt, Artificial Sequence
  Description of Artificial Sequence: Synthetic oligonucleotide
aaacaccucuuagacaaug

SEQ ID NO: 1377020 - RNA, 19 nt, Artificial Sequence
  Description of Artificial Sequence: Synthetic oligonucleotide
gaugcaucacaagaacacc

SEQ ID NO: 1377021 - RNA, 19 nt, Artificial Sequence
  Description of Artificial Sequence: Synthetic oligonucleotide
caacacugaguaugggugg

SEQ ID NO: 1377022 - RNA, 19 nt, Artificial Sequence
  Description of Artificial Sequence: Synthetic oligonucleotide
cuaucacgacauucuaagg

SEQ ID NO: 1377023 - RNA, 19 nt, Artificial Sequence
  Description of Artificial Sequence: Synthetic oligonucleotide
augugaaucugguuuuaug

SEQ ID NO: 1377024 - RNA, 19 nt, Artificial Sequence
  Description of Artificial Sequence: Synthetic oligonucleotide
ugagcuaugugcccacuaa

SEQ ID NO: 1377025 - RNA, 19 nt, Artificial Sequence
  Description of Artificial Sequence: Synthetic oligonucleotide
ugggaucugugaccaauag

SEQ ID NO: 1377026 - RNA, 19 nt, Artificial Sequence
  Description of Artificial Sequence: Synthetic oligonucleotide
guuggaauacccaacucac

SEQ ID NO: 1377027 - RNA, 19 nt, Artificial Sequence
  Description of Artificial Sequence: Synthetic oligonucleotide
ugaguauggguggugauuc

SEQ ID NO: 1377028 - RNA, 19 nt, Artificial Sequence
  Description of Artificial Sequence: Synthetic oligonucleotide
cucaguuauacagaacaac

SEQ ID NO: 1377029 - RNA, 19 nt, Artificial Sequence
  Description of Artificial Sequence: Synthetic oligonucleotide
aauaggccguugucuuuuc

SEQ ID NO: 1377030 - RNA, 19 nt, Artificial Sequence
  Description of Artificial Sequence: Synthetic oligonucleotide
agcuaugugcccacuaaac

SEQ ID NO: 1377031 - RNA, 19 nt, Artificial Sequence
  Description of Artificial Sequence: Synthetic oligonucleotide
ucucgaagacugaacacau

SEQ ID NO: 1377032 - RNA, 19 nt, Artificial Sequence
  Description of Artificial Sequence: Synthetic oligonucleotide
cuucacaguaggagugugg

SEQ ID NO: 1377033 - RNA, 19 nt, Artificial Sequence
  Description of Artificial Sequence: Synthetic oligonucleotide
aucacgacauucuaaggua

SEQ ID NO: 1377034 - RNA, 19 nt, Artificial Sequence
  Description of Artificial Sequence: Synthetic oligonucleotide
ggucaagccauccaucugc

SEQ ID NO: 1377035 - RNA, 19 nt, Artificial Sequence
  Description of Artificial Sequence: Synthetic oligonucleotide
agagaaacuuacguggaca

SEQ ID NO: 1377036 - RNA, 19 nt, Artificial Sequence
  Description of Artificial Sequence: Synthetic oligonucleotide
uugcaaauccuugagcuau

SEQ ID NO: 1377037 - RNA, 19 nt, Artificial Sequence
  Description of Artificial Sequence: Synthetic oligonucleotide
uaacguaguuugaaccaac

SEQ ID NO: 1377038 - RNA, 19 nt, Artificial Sequence
  Description of Artificial Sequence: Synthetic oligonucleotide
gguugcaccacaaagguca

SEQ ID NO: 1377039 - RNA, 19 nt, Artificial Sequence
  Description of Artificial Sequence: Synthetic oligonucleotide
uagucuagagguccuugga

SEQ ID NO: 1377040 - RNA, 19 nt, Artificial Sequence
  Description of Artificial Sequence: Synthetic oligonucleotide
accucuuagacaaugguaa

SEQ ID NO: 1377041 - RNA, 19 nt, Artificial Sequence
  Description of Artificial Sequence: Synthetic oligonucleotide
aaauuagacuaugucuuuu

SEQ ID NO: 1377042 - RNA, 19 nt, Artificial Sequence
  Description of Artificial Sequence: Synthetic oligonucleotide
uguucaccagccaacugau

SEQ ID NO: 1377043 - RNA, 19 nt, Artificial Sequence
  Description of Artificial Sequence: Synthetic oligonucleotide
gagaaacuuacguggacaa

SEQ ID NO: 1377044 - RNA, 19 nt, Artificial Sequence
  Description of Artificial Sequence: Synthetic oligonucleotide
acccaacucacuuagcuua

SEQ ID NO: 1377045 - RNA, 19 nt, Artificial Sequence
  Description of Artificial Sequence: Synthetic oligonucleotide
uuaaugcaaugaccagagc

SEQ ID NO: 1377046 - RNA, 19 nt, Artificial Sequence
  Description of Artificial Sequence: Synthetic oligonucleotide
gaucaguuaccaugggaga

SEQ ID NO: 1377047 - RNA, 19 nt, Artificial Sequence
  Description of Artificial Sequence: Synthetic oligonucleotide
uaggccguugucuuuucug

SEQ ID NO: 1377048 - RNA, 19 nt, Artificial Sequence
  Description of Artificial Sequence: Synthetic oligonucleotide
acacuugagagaaacauua

SEQ ID NO: 1377049 - RNA, 19 nt, Artificial Sequence
  Description of Artificial Sequence: Synthetic oligonucleotide
auuagauugcauauucaaa

SEQ ID NO: 1377050 - RNA, 19 nt, Artificial Sequence
  Description of Artificial Sequence: Synthetic oligonucleotide
agaaacuuacguggacaac

SEQ ID NO: 1377051 - RNA, 19 nt, Artificial Sequence
  Description of Artificial Sequence: Synthetic oligonucleotide
uaaugcaguccuagagaca

SEQ ID NO: 1377052 - RNA, 19 nt, Artificial Sequence
  Description of Artificial Sequence: Synthetic oligonucleotide
uuccgcaguacgccaaagc

SEQ ID NO: 1377053 - RNA, 19 nt, Artificial Sequence
  Description of Artificial Sequence: Synthetic oligonucleotide
gaaacagugaacagaugaa

SEQ ID NO: 1377054 - RNA, 19 nt, Artificial Sequence
  Description of Artificial Sequence: Synthetic oligonucleotide
caugcuacucuaucacgac

SEQ ID NO: 1377055 - RNA, 19 nt, Artificial Sequence
  Description of Artificial Sequence: Synthetic oligonucleotide
gaucugguuucucgaagac

SEQ ID NO: 1377056 - RNA, 19 nt, Artificial Sequence
  Description of Artificial Sequence: Synthetic oligonucleotide
ucacgacauucuaagguau

SEQ ID NO: 1377057 - RNA, 19 nt, Artificial Sequence
  Description of Artificial Sequence: Synthetic oligonucleotide
uuuuccgauuaacuucaau

SEQ ID NO: 1377058 - RNA, 19 nt, Artificial Sequence
  Description of Artificial Sequence: Synthetic oligonucleotide
augaaauacucuaauucau

SEQ ID NO: 1377059 - RNA, 19 nt, Artificial Sequence
  Description of Artificial Sequence: Synthetic oligonucleotide
acauucuaagguauuuucu

SEQ ID NO: 1377060 - RNA, 19 nt, Artificial Sequence
  Description of Artificial Sequence: Synthetic oligonucleotide
aacguaguuugaaccaaca

SEQ ID NO: 1377061 - RNA, 19 nt, Artificial Sequence
  Description of Artificial Sequence: Synthetic oligonucleotide
guugagcugaucugguuuc

SEQ ID NO: 1377062 - RNA, 19 nt, Artificial Sequence
  Description of Artificial Sequence: Synthetic oligonucleotide
gaucugugaccaauaggcc

SEQ ID NO: 1377063 - RNA, 19 nt, Artificial Sequence
  Description of Artificial Sequence: Synthetic oligonucleotide
caccauuaguggucaagcc

SEQ ID NO: 1377064 - RNA, 19 nt, Artificial Sequence
  Description of Artificial Sequence: Synthetic oligonucleotide
acagaucaguuaccauggg

SEQ ID NO: 1377065 - RNA, 19 nt, Artificial Sequence
  Description of Artificial Sequence: Synthetic oligonucleotide
acuuacguggacaacuggu

SEQ ID NO: 1377066 - RNA, 19 nt, Artificial Sequence
  Description of Artificial Sequence: Synthetic oligonucleotide
ugugcccacuaaacuacca

SEQ ID NO: 1377067 - RNA, 19 nt, Artificial Sequence
  Description of Artificial Sequence: Synthetic oligonucleotide
guuauacagaacaacucaa

SEQ ID NO: 1377068 - RNA, 19 nt, Artificial Sequence
  Description of Artificial Sequence: Synthetic oligonucleotide
ucuuuccucucuguugagc

SEQ ID NO: 1377069 - RNA, 19 nt, Artificial Sequence
  Description of Artificial Sequence: Synthetic oligonucleotide
ugaaaagugugaguaccau

SEQ ID NO: 1377070 - RNA, 19 nt, Artificial Sequence
  Description of Artificial Sequence: Synthetic oligonucleotide
aguaggagugugggaaagg

SEQ ID NO: 1377071 - RNA, 19 nt, Artificial Sequence
  Description of Artificial Sequence: Synthetic oligonucleotide
aacacugaguauggguggu

SEQ ID NO: 1377072 - RNA, 19 nt, Artificial Sequence
  Description of Artificial Sequence: Synthetic oligonucleotide
aacugauauuucucuccau

SEQ ID NO: 1377073 - RNA, 19 nt, Artificial Sequence
  Description of Artificial Sequence: Synthetic oligonucleotide
caaauucccuacuuauaca

SEQ ID NO: 1377074 - RNA, 19 nt, Artificial Sequence
  Description of Artificial Sequence: Synthetic oligonucleotide
gugggaaaggccuuccgca

SEQ ID NO: 1377075 - RNA, 19 nt, Artificial Sequence
  Description of Artificial Sequence: Synthetic oligonucleotide
guacgccaaagcaagguug

SEQ ID NO: 1377076 - RNA, 19 nt, Artificial Sequence
  Description of Artificial Sequence: Synthetic oligonucleotide
uggucaagccauccaucug

SEQ ID NO: 1377077 - RNA, 19 nt, Artificial Sequence
  Description of Artificial Sequence: Synthetic oligonucleotide
gggaucugugaccaauagg

SEQ ID NO: 1377078 - RNA, 19 nt, Artificial Sequence
  Description of Artificial Sequence: Synthetic oligonucleotide
gugugugacaccaucauua

SEQ ID NO: 1377079 - RNA, 19 nt, Artificial Sequence
  Description of Artificial Sequence: Synthetic oligonucleotide
aaugucgcuggcacuaaaa

SEQ ID NO: 1377080 - RNA, 19 nt, Artificial Sequence
  Description of Artificial Sequence: Synthetic oligonucleotide
cagugaacagaugaaccac

SEQ ID NO: 1377081 - RNA, 19 nt, Artificial Sequence
  Description of Artificial Sequence: Synthetic oligonucleotide
aguacgccaaagcaagguu

SEQ ID NO: 1377082 - RNA, 19 nt, Artificial Sequence
  Description of Artificial Sequence: Synthetic oligonucleotide
acuaaaacgaaggcaucaa

SEQ ID NO: 1377083 - RNA, 19 nt, Artificial Sequence
  Description of Artificial Sequence: Synthetic oligonucleotide
cuacucuaucacgacauuc

SEQ ID NO: 1377084 - RNA, 19 nt, Artificial Sequence
  Description of Artificial Sequence: Synthetic oligonucleotide
augcuacucuaucacgaca

SEQ ID NO: 1377085 - RNA, 19 nt, Artificial Sequence
  Description of Artificial Sequence: Synthetic oligonucleotide
agugaacagaugaaccaca

SEQ ID NO: 1377086 - RNA, 19 nt, Artificial Sequence
  Description of Artificial Sequence: Synthetic oligonucleotide
accaacaaacccucaguua

SEQ ID NO: 1377087 - RNA, 19 nt, Artificial Sequence
  Description of Artificial Sequence: Synthetic oligonucleotide
cuacuuauacaggccuggg

SEQ ID NO: 1377088 - RNA, 19 nt, Artificial Sequence
  Description of Artificial Sequence: Synthetic oligonucleotide
guuagucuagagguccuug

SEQ ID NO: 1377089 - RNA, 19 nt, Artificial Sequence
  Description of Artificial Sequence: Synthetic oligonucleotide
aggccguugucuuuucuga

SEQ ID NO: 1377090 - RNA, 19 nt, Artificial Sequence
  Description of Artificial Sequence: Synthetic oligonucleotide
acguaguuugaaccaacaa

SEQ ID NO: 1377091 - RNA, 19 nt, Artificial Sequence
  Description of Artificial Sequence: Synthetic oligonucleotide
aaaugucgcuggcacuaaa

SEQ ID NO: 1377092 - RNA, 19 nt, Artificial Sequence
  Description of Artificial Sequence: Synthetic oligonucleotide
uugaaccaacaaacccuca

SEQ ID NO: 1377093 - RNA, 19 nt, Artificial Sequence
  Description of Artificial Sequence: Synthetic oligonucleotide
acuuagcuuauaaacuuau

SEQ ID NO: 1377094 - RNA, 19 nt, Artificial Sequence
  Description of Artificial Sequence: Synthetic oligonucleotide
ucuuagcauuagcuuuugu

SEQ ID NO: 1377095 - RNA, 19 nt, Artificial Sequence
  Description of Artificial Sequence: Synthetic oligonucleotide
cagagaaacuuacguggac

SEQ ID NO: 1377096 - RNA, 19 nt, Artificial Sequence
  Description of Artificial Sequence: Synthetic oligonucleotide
aacuaccauucacacccaa

SEQ ID NO: 1377097 - RNA, 19 nt, Artificial Sequence
  Description of Artificial Sequence: Synthetic oligonucleotide
gcuuuuguuauaguacuac

SEQ ID NO: 1377098 - RNA, 19 nt, Artificial Sequence
  Description of Artificial Sequence: Synthetic oligonucleotide
gugcacaaaagagggcagg

SEQ ID NO: 1377099 - RNA, 19 nt, Artificial Sequence
  Description of Artificial Sequence: Synthetic oligonucleotide
caaacgucuuuccucuuca

SEQ ID NO: 1377100 - RNA, 19 nt, Artificial Sequence
  Description of Artificial Sequence: Synthetic oligonucleotide
caucaaauucccuacuuau

SEQ ID NO: 1377101 - RNA, 19 nt, Artificial Sequence
  Description of Artificial Sequence: Synthetic oligonucleotide
cacuaaaacgaaggcauca

SEQ ID NO: 1377102 - RNA, 19 nt, Artificial Sequence
  Description of Artificial Sequence: Synthetic oligonucleotide
cagaacaacucaacacuga

SEQ ID NO: 1377103 - RNA, 19 nt, Artificial Sequence
  Description of Artificial Sequence: Synthetic oligonucleotide
auauagccuuguucaccag

SEQ ID NO: 1377104 - RNA, 19 nt, Artificial Sequence
  Description of Artificial Sequence: Synthetic oligonucleotide
gugauucaaaacacuaaaa

SEQ ID NO: 1377105 - RNA, 19 nt, Artificial Sequence
  Description of Artificial Sequence: Synthetic oligonucleotide
uacccaacucacuuagcuu

SEQ ID NO: 1377106 - RNA, 19 nt, Artificial Sequence
  Description of Artificial Sequence: Synthetic oligonucleotide
acucuaucacgacauucua

SEQ ID NO: 1377107 - RNA, 19 nt, Artificial Sequence
  Description of Artificial Sequence: Synthetic oligonucleotide
cuccuuaacuuugcaaauc

SEQ ID NO: 1377108 - RNA, 19 nt, Artificial Sequence
  Description of Artificial Sequence: Synthetic oligonucleotide
ucacacccaaaguguguga

SEQ ID NO: 1377109 - RNA, 19 nt, Artificial Sequence
  Description of Artificial Sequence: Synthetic oligonucleotide
cacaagggcuaaaaggcaa

SEQ ID NO: 1377110 - RNA, 19 nt, Artificial Sequence
  Description of Artificial Sequence: Synthetic oligonucleotide
acgauaaaauccagcuuca

SEQ ID NO: 1377111 - RNA, 19 nt, Artificial Sequence
  Description of Artificial Sequence: Synthetic oligonucleotide
gugaguaccaugaggaagu

SEQ ID NO: 1377112 - RNA, 19 nt, Artificial Sequence
  Description of Artificial Sequence: Synthetic oligonucleotide
guuucgauuuccaccaucu

SEQ ID NO: 1377113 - RNA, 19 nt, Artificial Sequence
  Description of Artificial Sequence: Synthetic oligonucleotide
cagaucaguuaccauggga

SEQ ID NO: 1377114 - RNA, 19 nt, Artificial Sequence
  Description of Artificial Sequence: Synthetic oligonucleotide
auagaucaucuagauuaga

SEQ ID NO: 1377115 - RNA, 19 nt, Artificial Sequence
  Description of Artificial Sequence: Synthetic oligonucleotide
augugcccacuaaacuacc

SEQ ID NO: 1377116 - RNA, 19 nt, Artificial Sequence
  Description of Artificial Sequence: Synthetic oligonucleotide
ggaaaggcuaguguguuga

SEQ ID NO: 1377117 - RNA, 19 nt, Artificial Sequence
  Description of Artificial Sequence: Synthetic oligonucleotide
uguagcugauugguuucga

SEQ ID NO: 1377118 - RNA, 19 nt, Artificial Sequence
  Description of Artificial Sequence: Synthetic oligonucleotide
cacacccaaagugugugac

SEQ ID NO: 1377119 - RNA, 19 nt, Artificial Sequence
  Description of Artificial Sequence: Synthetic oligonucleotide
gcugcgugaaaagugugag

SEQ ID NO: 1377120 - RNA, 19 nt, Artificial Sequence
  Description of Artificial Sequence: Synthetic oligonucleotide
auacugggaaaggcuagug

SEQ ID NO: 1377121 - RNA, 19 nt, Artificial Sequence
  Description of Artificial Sequence: Synthetic oligonucleotide
cauuucguggaugcaucac

SEQ ID NO: 1377122 - RNA, 19 nt, Artificial Sequence
  Description of Artificial Sequence: Synthetic oligonucleotide
cgcaguacgccaaagcaag

SEQ ID NO: 1377123 - RNA, 19 nt, Artificial Sequence
  Description of Artificial Sequence: Synthetic oligonucleotide
caccacaaaggucaauuaa

SEQ ID NO: 1377124 - RNA, 19 nt, Artificial Sequence
  Description of Artificial Sequence: Synthetic oligonucleotide
acugaguauggguggugau

SEQ ID NO: 1377125 - RNA, 19 nt, Artificial Sequence
  Description of Artificial Sequence: Synthetic oligonucleotide
acgaaggcaucaaauuaga

SEQ ID NO: 1377126 - RNA, 19 nt, Artificial Sequence
  Description of Artificial Sequence: Synthetic oligonucleotide
gagcuaugugcccacuaaa

SEQ ID NO: 1377127 - RNA, 19 nt, Artificial Sequence
  Description of Artificial Sequence: Synthetic oligonucleotide
cauuaguggucaagccauc

SEQ ID NO: 1377128 - RNA, 19 nt, Artificial Sequence
  Description of Artificial Sequence: Synthetic oligonucleotide
ccacuaaacuaccauucac

SEQ ID NO: 1377129 - RNA, 19 nt, Artificial Sequence
  Description of Artificial Sequence: Synthetic oligonucleotide
cuacacuugagagaaacau

SEQ ID NO: 1377130 - RNA, 19 nt, Artificial Sequence
  Description of Artificial Sequence: Synthetic oligonucleotide
caccucuuagacaauggua

SEQ ID NO: 1377131 - RNA, 19 nt, Artificial Sequence
  Description of Artificial Sequence: Synthetic oligonucleotide
caacugguuggaauaccca

SEQ ID NO: 1377132 - RNA, 19 nt, Artificial Sequence
  Description of Artificial Sequence: Synthetic oligonucleotide
caguaggagugugggaaag

SEQ ID NO: 1377133 - RNA, 19 nt, Artificial Sequence
  Description of Artificial Sequence: Synthetic oligonucleotide
acgacauucuaagguauuu

SEQ ID NO: 1377134 - RNA, 19 nt, Artificial Sequence
  Description of Artificial Sequence: Synthetic oligonucleotide
cuaacguaguuugaaccaa

SEQ ID NO: 1377135 - RNA, 19 nt, Artificial Sequence
  Description of Artificial Sequence: Synthetic oligonucleotide
cacuuagcuuauaaacuua

SEQ ID NO: 1377136 - RNA, 19 nt, Artificial Sequence
  Description of Artificial Sequence: Synthetic oligonucleotide
agguugcaccacaaagguc

SEQ ID NO: 1377137 - RNA, 19 nt, Artificial Sequence
  Description of Artificial Sequence: Synthetic oligonucleotide
ggacaaacgucuuuccucu

SEQ ID NO: 1377138 - RNA, 19 nt, Artificial Sequence
  Description of Artificial Sequence: Synthetic oligonucleotide
auaggccguugucuuuucu

SEQ ID NO: 1377139 - RNA, 19 nt, Artificial Sequence
  Description of Artificial Sequence: Synthetic oligonucleotide
uugaacccuacagggcacu

SEQ ID NO: 1377140 - RNA, 19 nt, Artificial Sequence
  Description of Artificial Sequence: Synthetic oligonucleotide
gaacaacucaacacugagu

SEQ ID NO: 1377141 - RNA, 19 nt, Artificial Sequence
  Description of Artificial Sequence: Synthetic oligonucleotide
gaguauggguggugauuca

SEQ ID NO: 1377142 - RNA, 19 nt, Artificial Sequence
  Description of Artificial Sequence: Synthetic oligonucleotide
aaacuaccauucacaccca

SEQ ID NO: 1377143 - RNA, 19 nt, Artificial Sequence
  Description of Artificial Sequence: Synthetic oligonucleotide
aacuuauaaugcaguccua

SEQ ID NO: 1377144 - RNA, 19 nt, Artificial Sequence
  Description of Artificial Sequence: Synthetic oligonucleotide
ccaugcuacucuaucacga

SEQ ID NO: 1377145 - RNA, 19 nt, Artificial Sequence
  Description of Artificial Sequence: Synthetic oligonucleotide
cacuugagagaaacauuaa

SEQ ID NO: 1377146 - RNA, 19 nt, Artificial Sequence
  Description of Artificial Sequence: Synthetic oligonucleotide
gugaccaauaggccguugu

SEQ ID NO: 1377147 - RNA, 19 nt, Artificial Sequence
  Description of Artificial Sequence: Synthetic oligonucleotide
gguuucucgaagacugaac

SEQ ID NO: 1377148 - RNA, 19 nt, Artificial Sequence
  Description of Artificial Sequence: Synthetic oligonucleotide
gccguugucuuuucugaac

SEQ ID NO: 1377149 - RNA, 19 nt, Artificial Sequence
  Description of Artificial Sequence: Synthetic oligonucleotide
agggcaggcugcgugaaaa

SEQ ID NO: 1377150 - RNA, 19 nt, Artificial Sequence
  Description of Artificial Sequence: Synthetic oligonucleotide
cucuuagcauuagcuuuug

SEQ ID NO: 1377151 - RNA, 19 nt, Artificial Sequence
  Description of Artificial Sequence: Synthetic oligonucleotide
uguuagucuagagguccuu

SEQ ID NO: 1377152 - RNA, 19 nt, Artificial Sequence
  Description of Artificial Sequence: Synthetic oligonucleotide
ggaauacccaacucacuua

SEQ ID NO: 1377153 - RNA, 19 nt, Artificial Sequence
  Description of Artificial Sequence: Synthetic oligonucleotide
gcuaugugcccacuaaacu

SEQ ID NO: 1377154 - RNA, 19 nt, Artificial Sequence
  Description of Artificial Sequence: Synthetic oligonucleotide
acguggacaacugguugga

SEQ ID NO: 1377155 - RNA, 19 nt, Artificial Sequence
  Description of Artificial Sequence: Synthetic oligonucleotide
cuuacguggacaacugguu

SEQ ID NO: 1377156 - RNA, 19 nt, Artificial Sequence
  Description of Artificial Sequence: Synthetic oligonucleotide
ugaggucgggcugcauuga

SEQ ID NO: 1377157 - RNA, 19 nt, Artificial Sequence
  Description of Artificial Sequence: Synthetic oligonucleotide
ccuuggaaaauaagucuga

SEQ ID NO: 1377158 - RNA, 19 nt, Artificial Sequence
  Description of Artificial Sequence: Synthetic oligonucleotide
gaacccuacagggcacuga

SEQ ID NO: 1377159 - RNA, 19 nt, Artificial Sequence
  Description of Artificial Sequence: Synthetic oligonucleotide
gcguccacgauaaaaucca

SEQ ID NO: 1377160 - RNA, 19 nt, Artificial Sequence
  Description of Artificial Sequence: Synthetic oligonucleotide
caaauuagacuaugucuuu

SEQ ID NO: 1377161 - RNA, 19 nt, Artificial Sequence
  Description of Artificial Sequence: Synthetic oligonucleotide
agggccggcguccacgaua

SEQ ID NO: 1377162 - RNA, 19 nt, Artificial Sequence
  Description of Artificial Sequence: Synthetic oligonucleotide
caggcugcgugaaaagugu

SEQ ID NO: 1377163 - RNA, 19 nt, Artificial Sequence
  Description of Artificial Sequence: Synthetic oligonucleotide
acacugaguauggguggug

SEQ ID NO: 1377164 - RNA, 19 nt, Artificial Sequence
  Description of Artificial Sequence: Synthetic oligonucleotide
cuaagguauuuucuaugau

SEQ ID NO: 1377165 - RNA, 19 nt, Artificial Sequence
  Description of Artificial Sequence: Synthetic oligonucleotide
agcuuuuguuauaguacua

SEQ ID NO: 1377166 - RNA, 19 nt, Artificial Sequence
  Description of Artificial Sequence: Synthetic oligonucleotide
cuuccgcaguacgccaaag

SEQ ID NO: 1377167 - RNA, 19 nt, Artificial Sequence
  Description of Artificial Sequence: Synthetic oligonucleotide
guaccaugaggaaguggga

SEQ ID NO: 1377168 - RNA, 19 nt, Artificial Sequence
  Description of Artificial Sequence: Synthetic oligonucleotide
cuagauuagauugcauauu

SEQ ID NO: 1377169 - RNA, 19 nt, Artificial Sequence
  Description of Artificial Sequence: Synthetic oligonucleotide
cccuacuuauacaggccug

SEQ ID NO: 1377170 - RNA, 19 nt, Artificial Sequence
  Description of Artificial Sequence: Synthetic oligonucleotide
ccguugucuuuucugaaca

SEQ ID NO: 1377171 - RNA, 19 nt, Artificial Sequence
  Description of Artificial Sequence: Synthetic oligonucleotide
guagcugauugguuucgau

SEQ ID NO: 1377172 - RNA, 19 nt, Artificial Sequence
  Description of Artificial Sequence: Synthetic oligonucleotide
gcaguacgccaaagcaagg

SEQ ID NO: 1377173 - RNA, 19 nt, Artificial Sequence
  Description of Artificial Sequence: Synthetic oligonucleotide
aggcaucaaauuagacuau

SEQ ID NO: 1377174 - RNA, 19 nt, Artificial Sequence
  Description of Artificial Sequence: Synthetic oligonucleotide
cguggaugcaucacaagaa

SEQ ID NO: 1377175 - RNA, 19 nt, Artificial Sequence
  Description of Artificial Sequence: Synthetic oligonucleotide
aggcugcgugaaaagugug

SEQ ID NO: 1377176 - RNA, 19 nt, Artificial Sequence
  Description of Artificial Sequence: Synthetic oligonucleotide
gugcccacuaaacuaccau

SEQ ID NO: 1377177 - RNA, 19 nt, Artificial Sequence
  Description of Artificial Sequence: Synthetic oligonucleotide
gggagggccggcguccacg

SEQ ID NO: 1377178 - RNA, 19 nt, Artificial Sequence
  Description of Artificial Sequence: Synthetic oligonucleotide
ccacaagggcuaaaaggca

SEQ ID NO: 1377179 - RNA, 19 nt, Artificial Sequence
  Description of Artificial Sequence: Synthetic oligonucleotide
cguugucuuuucugaacac

SEQ ID NO: 1377180 - RNA, 19 nt, Artificial Sequence
  Description of Artificial Sequence: Synthetic oligonucleotide
ggcugcgugaaaaguguga

SEQ ID NO: 1377181 - RNA, 19 nt, Artificial Sequence
  Description of Artificial Sequence: Synthetic oligonucleotide
gggcuaaaaggcaaugggu

SEQ ID NO: 1377182 - RNA, 19 nt, Artificial Sequence
  Description of Artificial Sequence: Synthetic oligonucleotide
gugcccacaagggcuaaaa

SEQ ID NO: 1377183 - RNA, 19 nt, Artificial Sequence
  Description of Artificial Sequence: Synthetic oligonucleotide
gucgggcugcauugauuuc

SEQ ID NO: 1377184 - RNA, 19 nt, Artificial Sequence
  Description of Artificial Sequence: Synthetic oligonucleotide
gcuaguguguugaacccua

SEQ ID NO: 1377185 - RNA, 19 nt, Artificial Sequence
  Description of Artificial Sequence: Synthetic oligonucleotide
caguacgccaaagcaaggu

SEQ ID NO: 1377186 - RNA, 19 nt, Artificial Sequence
  Description of Artificial Sequence: Synthetic oligonucleotide
ccaaaugucgcuggcacua

SEQ ID NO: 1377187 - RNA, 19 nt, Artificial Sequence
  Description of Artificial Sequence: Synthetic oligonucleotide
acgccaaagcaagguugca

SEQ ID NO: 1377188 - RNA, 19 nt, Artificial Sequence
  Description of Artificial Sequence: Synthetic oligonucleotide
cugcgugaaaagugugagu

SEQ ID NO: 1377189 - RNA, 19 nt, Artificial Sequence
  Description of Artificial Sequence: Synthetic oligonucleotide
acagagggacaaacgucuu

SEQ ID NO: 1377190 - RNA, 19 nt, Artificial Sequence
  Description of Artificial Sequence: Synthetic oligonucleotide
cauuaccaugcuacucuau

SEQ ID NO: 1377191 - RNA, 19 nt, Artificial Sequence
  Description of Artificial Sequence: Synthetic oligonucleotide
gcaccacaaaggucaauua

SEQ ID NO: 1377192 - RNA, 19 nt, Artificial Sequence
  Description of Artificial Sequence: Synthetic oligonucleotide
caccaucauuaccaugcua

SEQ ID NO: 1377193 - RNA, 19 nt, Artificial Sequence
  Description of Artificial Sequence: Synthetic oligonucleotide
cacgugcccacaagggcua

SEQ ID NO: 1377194 - RNA, 19 nt, Artificial Sequence
  Description of Artificial Sequence: Synthetic oligonucleotide
caaaugucgcuggcacuaa

SEQ ID NO: 1377195 - RNA, 19 nt, Artificial Sequence
  Description of Artificial Sequence: Synthetic oligonucleotide
cacgacauucuaagguauu

SEQ ID NO: 1377196 - RNA, 19 nt, Artificial Sequence
  Description of Artificial Sequence: Synthetic oligonucleotide
caauaggccguugucuuuu

SEQ ID NO: 1377197 - RNA, 19 nt, Artificial Sequence
  Description of Artificial Sequence: Synthetic oligonucleotide
cugaguauggguggugauu

SEQ ID NO: 1377198 - RNA, 19 nt, Artificial Sequence
  Description of Artificial Sequence: Synthetic oligonucleotide
ccgcaguacgccaaagcaa

SEQ ID NO: 1377199 - RNA, 19 nt, Artificial Sequence
  Description of Artificial Sequence: Synthetic oligonucleotide
gaggucgggcugcauugau

SEQ ID NO: 1377200 - RNA, 19 nt, Artificial Sequence
  Description of Artificial Sequence: Synthetic oligonucleotide
aggucgggcugcauugauu

SEQ ID NO: 1377201 - RNA, 19 nt, Artificial Sequence
  Description of Artificial Sequence: Synthetic oligonucleotide
ggagggccggcguccacga

SEQ ID NO: 1377202 - RNA, 19 nt, Artificial Sequence
  Description of Artificial Sequence: Synthetic oligonucleotide
cagagggacaaacgucuuu

SEQ ID NO: 1377203 - RNA, 19 nt, Artificial Sequence
  Description of Artificial Sequence: Synthetic oligonucleotide
ggcuaguguguugaacccu

SEQ ID NO: 1377204 - RNA, 19 nt, Artificial Sequence
  Description of Artificial Sequence: Synthetic oligonucleotide
cggcguccacgauaaaauc

SEQ ID NO: 1377205 - RNA, 19 nt, Artificial Sequence
  Description of Artificial Sequence: Synthetic oligonucleotide
cuugagcuaugugcccacu

SEQ ID NO: 1377206 - RNA, 19 nt, Artificial Sequence
  Description of Artificial Sequence: Synthetic oligonucleotide
gggccggcguccacgauaa

SEQ ID NO: 1377207 - RNA, 19 nt, Artificial Sequence
  Description of Artificial Sequence: Synthetic oligonucleotide
gcuacucuaucacgacauu

SEQ ID NO: 1377208 - RNA, 19 nt, Artificial Sequence
  Description of Artificial Sequence: Synthetic oligonucleotide
gugggagggccggcgucca

SEQ ID NO: 1377209 - RNA, 19 nt, Artificial Sequence
  Description of Artificial Sequence: Synthetic oligonucleotide
ccaauaggccguugucuuu

SEQ ID NO: 1377210 - RNA, 19 nt, Artificial Sequence
  Description of Artificial Sequence: Synthetic oligonucleotide
ccaacucacuuagcuuaua

SEQ ID NO: 1377211 - RNA, 19 nt, Artificial Sequence
  Description of Artificial Sequence: Synthetic oligonucleotide
cguggacaacugguuggaa

SEQ ID NO: 1377212 - RNA, 19 nt, Artificial Sequence
  Description of Artificial Sequence: Synthetic oligonucleotide
aggaauacaaaacggaucc

SEQ ID NO: 1377213 - RNA, 19 nt, Artificial Sequence
  Description of Artificial Sequence: Synthetic oligonucleotide
ugaggaaagacuugggugg

SEQ ID NO: 1377214 - RNA, 19 nt, Artificial Sequence
  Description of Artificial Sequence: Synthetic oligonucleotide
uggacuguuguaaaggcgg

SEQ ID NO: 1377215 - RNA, 19 nt, Artificial Sequence
  Description of Artificial Sequence: Synthetic oligonucleotide
aauaccucccaccaaaagu

SEQ ID NO: 1377216 - RNA, 19 nt, Artificial Sequence
  Description of Artificial Sequence: Synthetic oligonucleotide
agacauuuaggcaagaagg

SEQ ID NO: 1377217 - RNA, 19 nt, Artificial Sequence
  Description of Artificial Sequence: Synthetic oligonucleotide
gagcaaggaauacaaaacg

SEQ ID NO: 1377218 - RNA, 19 nt, Artificial Sequence
  Description of Artificial Sequence: Synthetic oligonucleotide
agauuguucagagucagac

SEQ ID NO: 1377219 - RNA, 19 nt, Artificial Sequence
  Description of Artificial Sequence: Synthetic oligonucleotide
ucuaauaccucccaccaaa

SEQ ID NO: 1377220 - RNA, 19 nt, Artificial Sequence
  Description of Artificial Sequence: Synthetic oligonucleotide
aaggaauacaaaacggauc

SEQ ID NO: 1377221 - RNA, 19 nt, Artificial Sequence
  Description of Artificial Sequence: Synthetic oligonucleotide
uacaaaacggauccagcag

SEQ ID NO: 1377222 - RNA, 19 nt, Artificial Sequence
  Description of Artificial Sequence: Synthetic oligonucleotide
aaggcaaguuaaauaacac

SEQ ID NO: 1377223 - RNA, 19 nt, Artificial Sequence
  Description of Artificial Sequence: Synthetic oligonucleotide
caucacuagaacauucagg

SEQ ID NO: 1377224 - RNA, 19 nt, Artificial Sequence
  Description of Artificial Sequence: Synthetic oligonucleotide
ugacagaagauuccugaag

SEQ ID NO: 1377225 - RNA, 19 nt, Artificial Sequence
  Description of Artificial Sequence: Synthetic oligonucleotide
ugcacacacacacacauaa

SEQ ID NO: 1377226 - RNA, 19 nt, Artificial Sequence
  Description of Artificial Sequence: Synthetic oligonucleotide
ucuucaauuccugggaucc

SEQ ID NO: 1377227 - RNA, 19 nt, Artificial Sequence
  Description of Artificial Sequence: Synthetic oligonucleotide
cacauaaugucauucucag

SEQ ID NO: 1377228 - RNA, 19 nt, Artificial Sequence
  Description of Artificial Sequence: Synthetic oligonucleotide
ugugugcacacacacacac

SEQ ID NO: 1377229 - RNA, 19 nt, Artificial Sequence
  Description of Artificial Sequence: Synthetic oligonucleotide
cucgccaacacccauacug

SEQ ID NO: 1377230 - RNA, 19 nt, Artificial Sequence
  Description of Artificial Sequence: Synthetic oligonucleotide
aauuccugggauccgaaaa

SEQ ID NO: 1377231 - RNA, 19 nt, Artificial Sequence
  Description of Artificial Sequence: Synthetic oligonucleotide
cauaaugucauucucagcu

SEQ ID NO: 1377232 - RNA, 19 nt, Artificial Sequence
  Description of Artificial Sequence: Synthetic oligonucleotide
auacaaaacggauccagca

SEQ ID NO: 1377233 - RNA, 19 nt, Artificial Sequence
  Description of Artificial Sequence: Synthetic oligonucleotide
ucgagcaaggaauacaaaa

SEQ ID NO: 1377234 - RNA, 19 nt, Artificial Sequence
  Description of Artificial Sequence: Synthetic oligonucleotide
aaagcuaaagagagccugg

SEQ ID NO: 1377235 - RNA, 19 nt, Artificial Sequence
  Description of Artificial Sequence: Synthetic oligonucleotide
ugugcacacacacacacau

SEQ ID NO: 1377236 - RNA, 19 nt, Artificial Sequence
  Description of Artificial Sequence: Synthetic oligonucleotide
acguagcagacauucuucc

SEQ ID NO: 1377237 - RNA, 19 nt, Artificial Sequence
  Description of Artificial Sequence: Synthetic oligonucleotide
gagacuucagugaacagug

SEQ ID NO: 1377238 - RNA, 19 nt, Artificial Sequence
  Description of Artificial Sequence: Synthetic oligonucleotide
ucaccccuaaucuuugggg

SEQ ID NO: 1377239 - RNA, 19 nt, Artificial Sequence
  Description of Artificial Sequence: Synthetic oligonucleotide
cuguagaugggacaguggc

SEQ ID NO: 1377240 - RNA, 19 nt, Artificial Sequence
  Description of Artificial Sequence: Synthetic oligonucleotide
ugugggucgagcaaggaau

SEQ ID NO: 1377241 - RNA, 19 nt, Artificial Sequence
  Description of Artificial Sequence: Synthetic oligonucleotide
aacggauccagcaggcacc

SEQ ID NO: 1377242 - RNA, 19 nt, Artificial Sequence
  Description of Artificial Sequence: Synthetic oligonucleotide
ugucccacauacaauuuca

SEQ ID NO: 1377243 - RNA, 19 nt, Artificial Sequence
  Description of Artificial Sequence: Synthetic oligonucleotide
acaguccuacugcugauac

SEQ ID NO: 1377244 - RNA, 19 nt, Artificial Sequence
  Description of Artificial Sequence: Synthetic oligonucleotide
guaccagccagccuggagg

SEQ ID NO: 1377245 - RNA, 19 nt, Artificial Sequence
  Description of Artificial Sequence: Synthetic oligonucleotide
agucuugagaacuccaccu

SEQ ID NO: 1377246 - RNA, 19 nt, Artificial Sequence
  Description of Artificial Sequence: Synthetic oligonucleotide
guagcagacauucuuccgc

SEQ ID NO: 1377247 - RNA, 19 nt, Artificial Sequence
  Description of Artificial Sequence: Synthetic oligonucleotide
uccucuaauaccucccacc

SEQ ID NO: 1377248 - RNA, 19 nt, Artificial Sequence
  Description of Artificial Sequence: Synthetic oligonucleotide
gagucagacacuccuguag

SEQ ID NO: 1377249 - RNA, 19 nt, Artificial Sequence
  Description of Artificial Sequence: Synthetic oligonucleotide
cacacacacacacauaaug

SEQ ID NO: 1377250 - RNA, 19 nt, Artificial Sequence
  Description of Artificial Sequence: Synthetic oligonucleotide
uuucaccagaccaaacugu

SEQ ID NO: 1377251 - RNA, 19 nt, Artificial Sequence
  Description of Artificial Sequence: Synthetic oligonucleotide
agcaaggaauacaaaacgg

SEQ ID NO: 1377252 - RNA, 19 nt, Artificial Sequence
  Description of Artificial Sequence: Synthetic oligonucleotide
uguagaugggacaguggcc

SEQ ID NO: 1377253 - RNA, 19 nt, Artificial Sequence
  Description of Artificial Sequence: Synthetic oligonucleotide
ugagacuucagugaacagu

SEQ ID NO: 1377254 - RNA, 19 nt, Artificial Sequence
  Description of Artificial Sequence: Synthetic oligonucleotide
uaauaccucccaccaaaag

SEQ ID NO: 1377255 - RNA, 19 nt, Artificial Sequence
  Description of Artificial Sequence: Synthetic oligonucleotide
gauccgaaaagccaccauc

SEQ ID NO: 1377256 - RNA, 19 nt, Artificial Sequence
  Description of Artificial Sequence: Synthetic oligonucleotide
acaccccugcaucacaucg

SEQ ID NO: 1377257 - RNA, 19 nt, Artificial Sequence
  Description of Artificial Sequence: Synthetic oligonucleotide
ucgccagaccccuaggagg

SEQ ID NO: 1377258 - RNA, 19 nt, Artificial Sequence
  Description of Artificial Sequence: Synthetic oligonucleotide
ucagugaacaguguugccu

SEQ ID NO: 1377259 - RNA, 19 nt, Artificial Sequence
  Description of Artificial Sequence: Synthetic oligonucleotide
aggcaaguuaaauaacacu

SEQ ID NO: 1377260 - RNA, 19 nt, Artificial Sequence
  Description of Artificial Sequence: Synthetic oligonucleotide
ugcgacgaaccgcugagcc

SEQ ID NO: 1377261 - RNA, 19 nt, Artificial Sequence
  Description of Artificial Sequence: Synthetic oligonucleotide
aguccuacugcugauaccu

SEQ ID NO: 1377262 - RNA, 19 nt, Artificial Sequence
  Description of Artificial Sequence: Synthetic oligonucleotide
aagcuaaagagagccuggg

SEQ ID NO: 1377263 - RNA, 19 nt, Artificial Sequence
  Description of Artificial Sequence: Synthetic oligonucleotide
aguccgagcaaccccuugg

SEQ ID NO: 1377264 - RNA, 19 nt, Artificial Sequence
  Description of Artificial Sequence: Synthetic oligonucleotide
agaccaaacuguuccaaca

SEQ ID NO: 1377265 - RNA, 19 nt, Artificial Sequence
  Description of Artificial Sequence: Synthetic oligonucleotide
acaucgguguguguugugc

SEQ ID NO: 1377266 - RNA, 19 nt, Artificial Sequence
  Description of Artificial Sequence: Synthetic oligonucleotide
ucaaagucccacacccacc

SEQ ID NO: 1377267 - RNA, 19 nt, Artificial Sequence
  Description of Artificial Sequence: Synthetic oligonucleotide
acccauacugacuggacug

SEQ ID NO: 1377268 - RNA, 19 nt, Artificial Sequence
  Description of Artificial Sequence: Synthetic oligonucleotide
aagccaccaucacuagaac

SEQ ID NO: 1377269 - RNA, 19 nt, Artificial Sequence
  Description of Artificial Sequence: Synthetic oligonucleotide
auacugacuggacuguugu

SEQ ID NO: 1377270 - RNA, 19 nt, Artificial Sequence
  Description of Artificial Sequence: Synthetic oligonucleotide
uacucugggagcccuacac

SEQ ID NO: 1377271 - RNA, 19 nt, Artificial Sequence
  Description of Artificial Sequence: Synthetic oligonucleotide
guaguucucaccccuaauc

SEQ ID NO: 1377272 - RNA, 19 nt, Artificial Sequence
  Description of Artificial Sequence: Synthetic oligonucleotide
gacagaagauuccugaagu

SEQ ID NO: 1377273 - RNA, 19 nt, Artificial Sequence
  Description of Artificial Sequence: Synthetic oligonucleotide
cuggacuguuguaaaggcg

SEQ ID NO: 1377274 - RNA, 19 nt, Artificial Sequence
  Description of Artificial Sequence: Synthetic oligonucleotide
cucguugaggaacaccgcc

SEQ ID NO: 1377275 - RNA, 19 nt, Artificial Sequence
  Description of Artificial Sequence: Synthetic oligonucleotide
ggagguaccaugcuccccg

SEQ ID NO: 1377276 - RNA, 19 nt, Artificial Sequence
  Description of Artificial Sequence: Synthetic oligonucleotide
cacacacacacauaauguc

SEQ ID NO: 1377277 - RNA, 19 nt, Artificial Sequence
  Description of Artificial Sequence: Synthetic oligonucleotide
ugauaccucucuaucugcu

SEQ ID NO: 1377278 - RNA, 19 nt, Artificial Sequence
  Description of Artificial Sequence: Synthetic oligonucleotide
auaccucucuaucugcuca

SEQ ID NO: 1377279 - RNA, 19 nt, Artificial Sequence
  Description of Artificial Sequence: Synthetic oligonucleotide
agcaccacguagcagacau

SEQ ID NO: 1377280 - RNA, 19 nt, Artificial Sequence
  Description of Artificial Sequence: Synthetic oligonucleotide
aaccgcugagccccucgcc

SEQ ID NO: 1377281 - RNA, 19 nt, Artificial Sequence
  Description of Artificial Sequence: Synthetic oligonucleotide
agucagacacuccuguagu

SEQ ID NO: 1377282 - RNA, 19 nt, Artificial Sequence
  Description of Artificial Sequence: Synthetic oligonucleotide
ugacuggacuguuguaaag

SEQ ID NO: 1377283 - RNA, 19 nt, Artificial Sequence
  Description of Artificial Sequence: Synthetic oligonucleotide
gaaaagccaccaucacuag

SEQ ID NO: 1377284 - RNA, 19 nt, Artificial Sequence
  Description of Artificial Sequence: Synthetic oligonucleotide
cuugagaacuccaccugug

SEQ ID NO: 1377285 - RNA, 19 nt, Artificial Sequence
  Description of Artificial Sequence: Synthetic oligonucleotide
agcagugucacugguucac

SEQ ID NO: 1377286 - RNA, 19 nt, Artificial Sequence
  Description of Artificial Sequence: Synthetic oligonucleotide
ucguugaggaacaccgcca

SEQ ID NO: 1377287 - RNA, 19 nt, Artificial Sequence
  Description of Artificial Sequence: Synthetic oligonucleotide
ugcaguccgagcaaccccu

SEQ ID NO: 1377288 - RNA, 19 nt, Artificial Sequence
  Description of Artificial Sequence: Synthetic oligonucleotide
agugaacaguguugccuac

SEQ ID NO: 1377289 - RNA, 19 nt, Artificial Sequence
  Description of Artificial Sequence: Synthetic oligonucleotide
uugucccacauacaauuuc

SEQ ID NO: 1377290 - RNA, 19 nt, Artificial Sequence
  Description of Artificial Sequence: Synthetic oligonucleotide
aucacaucgguguguguug

SEQ ID NO: 1377291 - RNA, 19 nt, Artificial Sequence
  Description of Artificial Sequence: Synthetic oligonucleotide
auuuaggcaagaaggcaag

SEQ ID NO: 1377292 - RNA, 19 nt, Artificial Sequence
  Description of Artificial Sequence: Synthetic oligonucleotide
agacccguggguaccagcc

SEQ ID NO: 1377293 - RNA, 19 nt, Artificial Sequence
  Description of Artificial Sequence: Synthetic oligonucleotide
acacauaaugucauucuca

SEQ ID NO: 1377294 - RNA, 19 nt, Artificial Sequence
  Description of Artificial Sequence: Synthetic oligonucleotide
uuuacucagcaaugacucu

SEQ ID NO: 1377295 - RNA, 19 nt, Artificial Sequence
  Description of Artificial Sequence: Synthetic oligonucleotide
ucgccaacacccauacuga

SEQ ID NO: 1377296 - RNA, 19 nt, Artificial Sequence
  Description of Artificial Sequence: Synthetic oligonucleotide
aaguaguucucaccccuaa

SEQ ID NO: 1377297 - RNA, 19 nt, Artificial Sequence
  Description of Artificial Sequence: Synthetic oligonucleotide
uucaccagaccaaacuguu

SEQ ID NO: 1377298 - RNA, 19 nt, Artificial Sequence
  Description of Artificial Sequence: Synthetic oligonucleotide
accgaagcugcgacgaacc

SEQ ID NO: 1377299 - RNA, 19 nt, Artificial Sequence
  Description of Artificial Sequence: Synthetic oligonucleotide
uccuauccccuccacaguc

SEQ ID NO: 1377300 - RNA, 19 nt, Artificial Sequence
  Description of Artificial Sequence: Synthetic oligonucleotide
cacacauaaugucauucuc

SEQ ID NO: 1377301 - RNA, 19 nt, Artificial Sequence
  Description of Artificial Sequence: Synthetic oligonucleotide
cucaccccuaaucuuuggg

SEQ ID NO: 1377302 - RNA, 19 nt, Artificial Sequence
  Description of Artificial Sequence: Synthetic oligonucleotide
uguugcaguccgagcaacc

SEQ ID NO: 1377303 - RNA, 19 nt, Artificial Sequence
  Description of Artificial Sequence: Synthetic oligonucleotide
agggagguaccaugcuccc

SEQ ID NO: 1377304 - RNA, 19 nt, Artificial Sequence
  Description of Artificial Sequence: Synthetic oligonucleotide
aguguugccuacucuggga

SEQ ID NO: 1377305 - RNA, 19 nt, Artificial Sequence
  Description of Artificial Sequence: Synthetic oligonucleotide
acacacacacacauaaugu

SEQ ID NO: 1377306 - RNA, 19 nt, Artificial Sequence
  Description of Artificial Sequence: Synthetic oligonucleotide
uccccagauuccauucucc

SEQ ID NO: 1377307 - RNA, 19 nt, Artificial Sequence
  Description of Artificial Sequence: Synthetic oligonucleotide
gacacuccuguaguagccg

SEQ ID NO: 1377308 - RNA, 19 nt, Artificial Sequence
  Description of Artificial Sequence: Synthetic oligonucleotide
uccauggauccgaagccac

SEQ ID NO: 1377309 - RNA, 19 nt, Artificial Sequence
  Description of Artificial Sequence: Synthetic oligonucleotide
ugucacugguucacagagc

SEQ ID NO: 1377310 - RNA, 19 nt, Artificial Sequence
  Description of Artificial Sequence: Synthetic oligonucleotide
cacguagcagacauucuuc

SEQ ID NO: 1377311 - RNA, 19 nt, Artificial Sequence
  Description of Artificial Sequence: Synthetic oligonucleotide
uucagugaacaguguugcc

SEQ ID NO: 1377312 - RNA, 19 nt, Artificial Sequence
  Description of Artificial Sequence: Synthetic oligonucleotide
guugccuacucugggagcc

SEQ ID NO: 1377313 - RNA, 19 nt, Artificial Sequence
  Description of Artificial Sequence: Synthetic oligonucleotide
ucuaagcggagugggcagg

SEQ ID NO: 1377314 - RNA, 19 nt, Artificial Sequence
  Description of Artificial Sequence: Synthetic oligonucleotide
cauucucccugcagggagg

SEQ ID NO: 1377315 - RNA, 19 nt, Artificial Sequence
  Description of Artificial Sequence: Synthetic oligonucleotide
acugacuggacuguuguaa

SEQ ID NO: 1377316 - RNA, 19 nt, Artificial Sequence
  Description of Artificial Sequence: Synthetic oligonucleotide
uccgaaaagccaccaucac

SEQ ID NO: 1377317 - RNA, 19 nt, Artificial Sequence
  Description of Artificial Sequence: Synthetic oligonucleotide
uugagacuucagugaacag

SEQ ID NO: 1377318 - RNA, 19 nt, Artificial Sequence
  Description of Artificial Sequence: Synthetic oligonucleotide
ugcucgccaacacccauac

SEQ ID NO: 1377319 - RNA, 19 nt, Artificial Sequence
  Description of Artificial Sequence: Synthetic oligonucleotide
cugugaugugugcacacac

SEQ ID NO: 1377320 - RNA, 19 nt, Artificial Sequence
  Description of Artificial Sequence: Synthetic oligonucleotide
ccaacacccauacugacug

SEQ ID NO: 1377321 - RNA, 19 nt, Artificial Sequence
  Description of Artificial Sequence: Synthetic oligonucleotide
cauggauccgaagccacag

SEQ ID NO: 1377322 - RNA, 19 nt, Artificial Sequence
  Description of Artificial Sequence: Synthetic oligonucleotide
ugggauccgaaaagccacc

SEQ ID NO: 1377323 - RNA, 19 nt, Artificial Sequence
  Description of Artificial Sequence: Synthetic oligonucleotide
aucgccuccacgauggucu

SEQ ID NO: 1377324 - RNA, 19 nt, Artificial Sequence
  Description of Artificial Sequence: Synthetic oligonucleotide
cagaccaaacuguuccaac

SEQ ID NO: 1377325 - RNA, 19 nt, Artificial Sequence
  Description of Artificial Sequence: Synthetic oligonucleotide
acaauuucaccagaccaaa

SEQ ID NO: 1377326 - RNA, 19 nt, Artificial Sequence
  Description of Artificial Sequence: Synthetic oligonucleotide
uguugccuacucugggagc

SEQ ID NO: 1377327 - RNA, 19 nt, Artificial Sequence
  Description of Artificial Sequence: Synthetic oligonucleotide
ugugcaucaugaggaaaga

SEQ ID NO: 1377328 - RNA, 19 nt, Artificial Sequence
  Description of Artificial Sequence: Synthetic oligonucleotide
cucuaagcggagugggcag

SEQ ID NO: 1377329 - RNA, 19 nt, Artificial Sequence
  Description of Artificial Sequence: Synthetic oligonucleotide
ugggcaagugaggaguccc

SEQ ID NO: 1377330 - RNA, 19 nt, Artificial Sequence
  Description of Artificial Sequence: Synthetic oligonucleotide
ucaauuccugggauccgaa

SEQ ID NO: 1377331 - RNA, 19 nt, Artificial Sequence
  Description of Artificial Sequence: Synthetic oligonucleotide
auccgaaaagccaccauca

SEQ ID NO: 1377332 - RNA, 19 nt, Artificial Sequence
  Description of Artificial Sequence: Synthetic oligonucleotide
auggcuuguuggcagaauu

SEQ ID NO: 1377333 - RNA, 19 nt, Artificial Sequence
  Description of Artificial Sequence: Synthetic oligonucleotide
caccaucacuagaacauuc

SEQ ID NO: 1377334 - RNA, 19 nt, Artificial Sequence
  Description of Artificial Sequence: Synthetic oligonucleotide
aaaacggauccagcaggca

SEQ ID NO: 1377335 - RNA, 19 nt, Artificial Sequence
  Description of Artificial Sequence: Synthetic oligonucleotide
acuagaacauucaggcaga

SEQ ID NO: 1377336 - RNA, 19 nt, Artificial Sequence
  Description of Artificial Sequence: Synthetic oligonucleotide
caccacguagcagacauuc

SEQ ID NO: 1377337 - RNA, 19 nt, Artificial Sequence
  Description of Artificial Sequence: Synthetic oligonucleotide
agaccgucaacaugguuuu

SEQ ID NO: 1377338 - RNA, 19 nt, Artificial Sequence
  Description of Artificial Sequence: Synthetic oligonucleotide
cuccuggaucaucagcacc

SEQ ID NO: 1377339 - RNA, 19 nt, Artificial Sequence
  Description of Artificial Sequence: Synthetic oligonucleotide
agcucuuuauugucccaca

SEQ ID NO: 1377340 - RNA, 19 nt, Artificial Sequence
  Description of Artificial Sequence: Synthetic oligonucleotide
ucaccagaccaaacuguuc

SEQ ID NO: 1377341 - RNA, 19 nt, Artificial Sequence
  Description of Artificial Sequence: Synthetic oligonucleotide
caaggaauacaaaacggau

SEQ ID NO: 1377342 - RNA, 19 nt, Artificial Sequence
  Description of Artificial Sequence: Synthetic oligonucleotide
gauggucuccccagauucc

SEQ ID NO: 1377343 - RNA, 19 nt, Artificial Sequence
  Description of Artificial Sequence: Synthetic oligonucleotide
cuuugaugccaccccuuug

SEQ ID NO: 1377344 - RNA, 19 nt, Artificial Sequence
  Description of Artificial Sequence: Synthetic oligonucleotide
ucaugggcucuaagcggag

SEQ ID NO: 1377345 - RNA, 19 nt, Artificial Sequence
  Description of Artificial Sequence: Synthetic oligonucleotide
gagaccgucaacaugguuu

SEQ ID NO: 1377346 - RNA, 19 nt, Artificial Sequence
  Description of Artificial Sequence: Synthetic oligonucleotide
aguaguucucaccccuaau

SEQ ID NO: 1377347 - RNA, 19 nt, Artificial Sequence
  Description of Artificial Sequence: Synthetic oligonucleotide
agugaggaguccccacugu

SEQ ID NO: 1377348 - RNA, 19 nt, Artificial Sequence
  Description of Artificial Sequence: Synthetic oligonucleotide
agguaccaugcuccccggc

SEQ ID NO: 1377349 - RNA, 19 nt, Artificial Sequence
  Description of Artificial Sequence: Synthetic oligonucleotide
gaagcugcgacgaaccgcu

SEQ ID NO: 1377350 - RNA, 19 nt, Artificial Sequence
  Description of Artificial Sequence: Synthetic oligonucleotide
gaacaccgccagcaccacg

SEQ ID NO: 1377351 - RNA, 19 nt, Artificial Sequence
  Description of Artificial Sequence: Synthetic oligonucleotide
caccccugcaucacaucgg

SEQ ID NO: 1377352 - RNA, 19 nt, Artificial Sequence
  Description of Artificial Sequence: Synthetic oligonucleotide
aaagacuuggguggcugua

SEQ ID NO: 1377353 - RNA, 19 nt, Artificial Sequence
  Description of Artificial Sequence: Synthetic oligonucleotide
auguccuauccccuccaca

SEQ ID NO: 1377354 - RNA, 19 nt, Artificial Sequence
  Description of Artificial Sequence: Synthetic oligonucleotide
gcuuguuggcagaauuugg

SEQ ID NO: 1377355 - RNA, 19 nt, Artificial Sequence
  Description of Artificial Sequence: Synthetic oligonucleotide
ugugcucgccaacacccau

SEQ ID NO: 1377356 - RNA, 19 nt, Artificial Sequence
  Description of Artificial Sequence: Synthetic oligonucleotide
cuucaauuccugggauccg

SEQ ID NO: 1377357 - RNA, 19 nt, Artificial Sequence
  Description of Artificial Sequence: Synthetic oligonucleotide
cuaagcggagugggcaggg

SEQ ID NO: 1377358 - RNA, 19 nt, Artificial Sequence
  Description of Artificial Sequence: Synthetic oligonucleotide
uccccggcacucuuucuug

SEQ ID NO: 1377359 - RNA, 19 nt, Artificial Sequence
  Description of Artificial Sequence: Synthetic oligonucleotide
gaaccgcugagccccucgc

SEQ ID NO: 1377360 - RNA, 19 nt, Artificial Sequence
  Description of Artificial Sequence: Synthetic oligonucleotide
caguccuacugcugauacc

SEQ ID NO: 1377361 - RNA, 19 nt, Artificial Sequence
  Description of Artificial Sequence: Synthetic oligonucleotide
uuccgcagccgcacgggca

SEQ ID NO: 1377362 - RNA, 19 nt, Artificial Sequence
  Description of Artificial Sequence: Synthetic oligonucleotide
gacucgccagaccccuagg

SEQ ID NO: 1377363 - RNA, 19 nt, Artificial Sequence
  Description of Artificial Sequence: Synthetic oligonucleotide
gccgagguguugcaguccg

SEQ ID NO: 1377364 - RNA, 19 nt, Artificial Sequence
  Description of Artificial Sequence: Synthetic oligonucleotide
acugugaugugugcacaca

SEQ ID NO: 1377365 - RNA, 19 nt, Artificial Sequence
  Description of Artificial Sequence: Synthetic oligonucleotide
caccuggacaggucugagc

SEQ ID NO: 1377366 - RNA, 19 nt, Artificial Sequence
  Description of Artificial Sequence: Synthetic oligonucleotide
guagccguaggguggccac

SEQ ID NO: 1377367 - RNA, 19 nt, Artificial Sequence
  Description of Artificial Sequence: Synthetic oligonucleotide
aaaguaguucucaccccua

SEQ ID NO: 1377368 - RNA, 19 nt, Artificial Sequence
  Description of Artificial Sequence: Synthetic oligonucleotide
cuuugcuccauggauccga

SEQ ID NO: 1377369 - RNA, 19 nt, Artificial Sequence
  Description of Artificial Sequence: Synthetic oligonucleotide
cuaauaccucccaccaaaa

SEQ ID NO: 1377370 - RNA, 19 nt, Artificial Sequence
  Description of Artificial Sequence: Synthetic oligonucleotide
gagacccguggguaccagc

SEQ ID NO: 1377371 - RNA, 19 nt, Artificial Sequence
  Description of Artificial Sequence: Synthetic oligonucleotide
caacaccuggacaggucug

SEQ ID NO: 1377372 - RNA, 19 nt, Artificial Sequence
  Description of Artificial Sequence: Synthetic oligonucleotide
aagagagccuggguggguu

SEQ ID NO: 1377373 - RNA, 19 nt, Artificial Sequence
  Description of Artificial Sequence: Synthetic oligonucleotide
agagucagacacuccugua

SEQ ID NO: 1377374 - RNA, 19 nt, Artificial Sequence
  Description of Artificial Sequence: Synthetic oligonucleotide
gcaggcaccccucuccucc

SEQ ID NO: 1377375 - RNA, 19 nt, Artificial Sequence
  Description of Artificial Sequence: Synthetic oligonucleotide
gguaccaugcuccccggca

SEQ ID NO: 1377376 - RNA, 19 nt, Artificial Sequence
  Description of Artificial Sequence: Synthetic oligonucleotide
gaccgaagcugcgacgaac

SEQ ID NO: 1377377 - RNA, 19 nt, Artificial Sequence
  Description of Artificial Sequence: Synthetic oligonucleotide
cagugaacaguguugccua

SEQ ID NO: 1377378 - RNA, 19 nt, Artificial Sequence
  Description of Artificial Sequence: Synthetic oligonucleotide
uccgagcaaccccuugguc

SEQ ID NO: 1377379 - RNA, 19 nt, Artificial Sequence
  Description of Artificial Sequence: Synthetic oligonucleotide
cugacuggacuguuguaaa

SEQ ID NO: 1377380 - RNA, 19 nt, Artificial Sequence
  Description of Artificial Sequence: Synthetic oligonucleotide
cuccacugccagauuguuc

SEQ ID NO: 1377381 - RNA, 19 nt, Artificial Sequence
  Description of Artificial Sequence: Synthetic oligonucleotide
accucucuaucugcucagg

SEQ ID NO: 1377382 - RNA, 19 nt, Artificial Sequence
  Description of Artificial Sequence: Synthetic oligonucleotide
caucgguguguguugugca

SEQ ID NO: 1377383 - RNA, 19 nt, Artificial Sequence
  Description of Artificial Sequence: Synthetic oligonucleotide
gaaagacuuggguggcugu

SEQ ID NO: 1377384 - RNA, 19 nt, Artificial Sequence
  Description of Artificial Sequence: Synthetic oligonucleotide
uugcuccauggauccgaag

SEQ ID NO: 1377385 - RNA, 19 nt, Artificial Sequence
  Description of Artificial Sequence: Synthetic oligonucleotide
ucgguguguguugugcauc

SEQ ID NO: 1377386 - RNA, 19 nt, Artificial Sequence
  Description of Artificial Sequence: Synthetic oligonucleotide
uggacaggucugagcugug

SEQ ID NO: 1377387 - RNA, 19 nt, Artificial Sequence
  Description of Artificial Sequence: Synthetic oligonucleotide
gugcaucaugaggaaagac

SEQ ID NO: 1377388 - RNA, 19 nt, Artificial Sequence
  Description of Artificial Sequence: Synthetic oligonucleotide
ucaagucuccagggagcug

SEQ ID NO: 1377389 - RNA, 19 nt, Artificial Sequence
  Description of Artificial Sequence: Synthetic oligonucleotide
ugggucgagcaaggaauac

SEQ ID NO: 1377390 - RNA, 19 nt, Artificial Sequence
  Description of Artificial Sequence: Synthetic oligonucleotide
cuuccgcagccgcacgggc

SEQ ID NO: 1377391 - RNA, 19 nt, Artificial Sequence
  Description of Artificial Sequence: Synthetic oligonucleotide
ggucgagcaaggaauacaa

SEQ ID NO: 1377392 - RNA, 19 nt, Artificial Sequence
  Description of Artificial Sequence: Synthetic oligonucleotide
ggacucgccagaccccuag

SEQ ID NO: 1377393 - RNA, 19 nt, Artificial Sequence
  Description of Artificial Sequence: Synthetic oligonucleotide
aggcagagaccgucaacau

SEQ ID NO: 1377394 - RNA, 19 nt, Artificial Sequence
  Description of Artificial Sequence: Synthetic oligonucleotide
gggcucuaagcggaguggg

SEQ ID NO: 1377395 - RNA, 19 nt, Artificial Sequence
  Description of Artificial Sequence: Synthetic oligonucleotide
ccucuaauaccucccacca

SEQ ID NO: 1377396 - RNA, 19 nt, Artificial Sequence
  Description of Artificial Sequence: Synthetic oligonucleotide
acaccuggacaggucugag

SEQ ID NO: 1377397 - RNA, 19 nt, Artificial Sequence
  Description of Artificial Sequence: Synthetic oligonucleotide
cacagcggcuugccagccg

SEQ ID NO: 1377398 - RNA, 19 nt, Artificial Sequence
  Description of Artificial Sequence: Synthetic oligonucleotide
ccuauccccuccacagucc

SEQ ID NO: 1377399 - RNA, 19 nt, Artificial Sequence
  Description of Artificial Sequence: Synthetic oligonucleotide
cugugggucgagcaaggaa

SEQ ID NO: 1377400 - RNA, 19 nt, Artificial Sequence
  Description of Artificial Sequence: Synthetic oligonucleotide
gcuggcagaccacacugca

SEQ ID NO: 1377401 - RNA, 19 nt, Artificial Sequence
  Description of Artificial Sequence: Synthetic oligonucleotide
uugccuacucugggagccc

SEQ ID NO: 1377402 - RNA, 19 nt, Artificial Sequence
  Description of Artificial Sequence: Synthetic oligonucleotide
gcucuaagcggagugggca

SEQ ID NO: 1377403 - RNA, 19 nt, Artificial Sequence
  Description of Artificial Sequence: Synthetic oligonucleotide
caauuccugggauccgaaa

SEQ ID NO: 1377404 - RNA, 19 nt, Artificial Sequence
  Description of Artificial Sequence: Synthetic oligonucleotide
ggccacuuugaugccaccc

SEQ ID NO: 1377405 - RNA, 19 nt, Artificial Sequence
  Description of Artificial Sequence: Synthetic oligonucleotide
agccgcacgggcacagcgg

SEQ ID NO: 1377406 - RNA, 19 nt, Artificial Sequence
  Description of Artificial Sequence: Synthetic oligonucleotide
cgacgaaccgcugagcccc

SEQ ID NO: 1377407 - RNA, 19 nt, Artificial Sequence
  Description of Artificial Sequence: Synthetic oligonucleotide
cucuaauaccucccaccaa

SEQ ID NO: 1377408 - RNA, 19 nt, Artificial Sequence
  Description of Artificial Sequence: Synthetic oligonucleotide
augugugcacacacacaca

SEQ ID NO: 1377409 - RNA, 19 nt, Artificial Sequence
  Description of Artificial Sequence: Synthetic oligonucleotide
ugccuacucugggagcccu

SEQ ID NO: 1377410 - RNA, 19 nt, Artificial Sequence
  Description of Artificial Sequence: Synthetic oligonucleotide
ggugcauggcuuguuggca

SEQ ID NO: 1377411 - RNA, 19 nt, Artificial Sequence
  Description of Artificial Sequence: Synthetic oligonucleotide
gcgacgaaccgcugagccc

SEQ ID NO: 1377412 - RNA, 19 nt, Artificial Sequence
  Description of Artificial Sequence: Synthetic oligonucleotide
uggccacuuugaugccacc

SEQ ID NO: 1377413 - RNA, 19 nt, Artificial Sequence
  Description of Artificial Sequence: Synthetic oligonucleotide
gacaggucugagcuguguu

SEQ ID NO: 1377414 - RNA, 19 nt, Artificial Sequence
  Description of Artificial Sequence: Synthetic oligonucleotide
ggauccagcaggcaccccu

SEQ ID NO: 1377415 - RNA, 19 nt, Artificial Sequence
  Description of Artificial Sequence: Synthetic oligonucleotide
ggaauacaaaacggaucca

SEQ ID NO: 1377416 - RNA, 19 nt, Artificial Sequence
  Description of Artificial Sequence: Synthetic oligonucleotide
gguugagacuucagugaac

SEQ ID NO: 1377417 - RNA, 19 nt, Artificial Sequence
  Description of Artificial Sequence: Synthetic oligonucleotide
caguccgagcaaccccuug

SEQ ID NO: 1377418 - RNA, 19 nt, Artificial Sequence
  Description of Artificial Sequence: Synthetic oligonucleotide
cccauguccuauccccucc

SEQ ID NO: 1377419 - RNA, 19 nt, Artificial Sequence
  Description of Artificial Sequence: Synthetic oligonucleotide
gggaccgaagcugcgacga

SEQ ID NO: 1377420 - RNA, 19 nt, Artificial Sequence
  Description of Artificial Sequence: Synthetic oligonucleotide
ccggcacucuuucuuggcc

SEQ ID NO: 1377421 - RNA, 19 nt, Artificial Sequence
  Description of Artificial Sequence: Synthetic oligonucleotide
gggucgagcaaggaauaca

SEQ ID NO: 1377422 - RNA, 19 nt, Artificial Sequence
  Description of Artificial Sequence: Synthetic oligonucleotide
gccuccacgauggucuccc

SEQ ID NO: 1377423 - RNA, 19 nt, Artificial Sequence
  Description of Artificial Sequence: Synthetic oligonucleotide
gccaccaucacuagaacau

SEQ ID NO: 1377424 - RNA, 19 nt, Artificial Sequence
  Description of Artificial Sequence: Synthetic oligonucleotide
agccggcuccgagucacag

SEQ ID NO: 1377425 - RNA, 19 nt, Artificial Sequence
  Description of Artificial Sequence: Synthetic oligonucleotide
gagcccuacaccccugcau

SEQ ID NO: 1377426 - RNA, 19 nt, Artificial Sequence
  Description of Artificial Sequence: Synthetic oligonucleotide
ccgcuggcagaccacacug

SEQ ID NO: 1377427 - RNA, 19 nt, Artificial Sequence
  Description of Artificial Sequence: Synthetic oligonucleotide
gugugcacacacacacaca

SEQ ID NO: 1377428 - RNA, 19 nt, Artificial Sequence
  Description of Artificial Sequence: Synthetic oligonucleotide
gccgcacgggcacagcggc

SEQ ID NO: 1377429 - RNA, 19 nt, Artificial Sequence
  Description of Artificial Sequence: Synthetic oligonucleotide
cagaacaucaugggcucua

SEQ ID NO: 1377430 - RNA, 19 nt, Artificial Sequence
  Description of Artificial Sequence: Synthetic oligonucleotide
ggauccgaagccacagcca

SEQ ID NO: 1377431 - RNA, 19 nt, Artificial Sequence
  Description of Artificial Sequence: Synthetic oligonucleotide
cugcgacgaaccgcugagc

SEQ ID NO: 1377432 - RNA, 19 nt, Artificial Sequence
  Description of Artificial Sequence: Synthetic oligonucleotide
cugugcucgccaacaccca

SEQ ID NO: 1377433 - RNA, 19 nt, Artificial Sequence
  Description of Artificial Sequence: Synthetic oligonucleotide
cacagcucugcaccagcaa

SEQ ID NO: 1377434 - RNA, 19 nt, Artificial Sequence
  Description of Artificial Sequence: Synthetic oligonucleotide
ccgaagcugcgacgaaccg

SEQ ID NO: 1377435 - RNA, 19 nt, Artificial Sequence
  Description of Artificial Sequence: Synthetic oligonucleotide
ggcucuaagcggagugggc

SEQ ID NO: 1377436 - RNA, 19 nt, Artificial Sequence
  Description of Artificial Sequence: Synthetic oligonucleotide
agcggcuugccagccggcu

SEQ ID NO: 1377437 - RNA, 19 nt, Artificial Sequence
  Description of Artificial Sequence: Synthetic oligonucleotide
cuauccccuccacaguccu

SEQ ID NO: 1377438 - RNA, 19 nt, Artificial Sequence
  Description of Artificial Sequence: Synthetic oligonucleotide
cgaagcugcgacgaaccgc

SEQ ID NO: 1377439 - RNA, 19 nt, Artificial Sequence
  Description of Artificial Sequence: Synthetic oligonucleotide
guaggguggccacuuugau

SEQ ID NO: 1377440 - RNA, 19 nt, Artificial Sequence
  Description of Artificial Sequence: Synthetic oligonucleotide
ccgagcaaccccuuggucu

SEQ ID NO: 1377441 - RNA, 19 nt, Artificial Sequence
  Description of Artificial Sequence: Synthetic oligonucleotide
uccccuccacaguccuacu

SEQ ID NO: 1377442 - RNA, 19 nt, Artificial Sequence
  Description of Artificial Sequence: Synthetic oligonucleotide
gucgagcaaggaauacaaa

SEQ ID NO: 1377443 - RNA, 19 nt, Artificial Sequence
  Description of Artificial Sequence: Synthetic oligonucleotide
gggcaagugaggagucccc

SEQ ID NO: 1377444 - RNA, 19 nt, Artificial Sequence
  Description of Artificial Sequence: Synthetic oligonucleotide
cccggcacucuuucuuggc

SEQ ID NO: 1377445 - RNA, 19 nt, Artificial Sequence
  Description of Artificial Sequence: Synthetic oligonucleotide
cacuccuguaguagccgua

SEQ ID NO: 1377446 - RNA, 19 nt, Artificial Sequence
  Description of Artificial Sequence: Synthetic oligonucleotide
gugggucgagcaaggaaua

SEQ ID NO: 1377447 - RNA, 19 nt, Artificial Sequence
  Description of Artificial Sequence: Synthetic oligonucleotide
gggagguaccaugcucccc

SEQ ID NO: 1377448 - RNA, 19 nt, Artificial Sequence
  Description of Artificial Sequence: Synthetic oligonucleotide
guccuauccccuccacagu

SEQ ID NO: 1377449 - RNA, 19 nt, Artificial Sequence
  Description of Artificial Sequence: Synthetic oligonucleotide
gggcucaucuucaauuccu

SEQ ID NO: 1377450 - RNA, 19 nt, Artificial Sequence
  Description of Artificial Sequence: Synthetic oligonucleotide
aagcugcgacgaaccgcug

SEQ ID NO: 1377451 - RNA, 19 nt, Artificial Sequence
  Description of Artificial Sequence: Synthetic oligonucleotide
cgaaccgcugagccccucg

SEQ ID NO: 1377452 - RNA, 19 nt, Artificial Sequence
  Description of Artificial Sequence: Synthetic oligonucleotide
guccuacugcugauaccuc

SEQ ID NO: 1377453 - RNA, 19 nt, Artificial Sequence
  Description of Artificial Sequence: Synthetic oligonucleotide
cacagccagugaugggcaa

SEQ ID NO: 1377454 - RNA, 19 nt, Artificial Sequence
  Description of Artificial Sequence: Synthetic oligonucleotide
cacaguccuacugcugaua

SEQ ID NO: 1377455 - RNA, 19 nt, Artificial Sequence
  Description of Artificial Sequence: Synthetic oligonucleotide
acgaaccgcugagccccuc

SEQ ID NO: 1377456 - RNA, 19 nt, Artificial Sequence
  Description of Artificial Sequence: Synthetic oligonucleotide
ccauggauccgaagccaca

SEQ ID NO: 1377457 - RNA, 19 nt, Artificial Sequence
  Description of Artificial Sequence: Synthetic oligonucleotide
ggguggguugagacuucag

SEQ ID NO: 1377458 - RNA, 19 nt, Artificial Sequence
  Description of Artificial Sequence: Synthetic oligonucleotide
ccuacaccccugcaucaca

SEQ ID NO: 1377459 - RNA, 19 nt, Artificial Sequence
  Description of Artificial Sequence: Synthetic oligonucleotide
cacgauggucuccccagau

SEQ ID NO: 1377460 - RNA, 19 nt, Artificial Sequence
  Description of Artificial Sequence: Synthetic oligonucleotide
ggguggccacuuugaugcc

SEQ ID NO: 1377461 - RNA, 19 nt, Artificial Sequence
  Description of Artificial Sequence: Synthetic oligonucleotide
gugcacacacacacacaua

SEQ ID NO: 1377462 - RNA, 19 nt, Artificial Sequence
  Description of Artificial Sequence: Synthetic oligonucleotide
ccggcuccgagucacagcu

SEQ ID NO: 1377463 - RNA, 19 nt, Artificial Sequence
  Description of Artificial Sequence: Synthetic oligonucleotide
cgccaacacccauacugac

SEQ ID NO: 1377464 - RNA, 19 nt, Artificial Sequence
  Description of Artificial Sequence: Synthetic oligonucleotide
ggagacccguggguaccag

SEQ ID NO: 1377465 - RNA, 19 nt, Artificial Sequence
  Description of Artificial Sequence: Synthetic oligonucleotide
gccaacacccauacugacu

SEQ ID NO: 1377466 - RNA, 19 nt, Artificial Sequence
  Description of Artificial Sequence: Synthetic oligonucleotide
gugcucgccaacacccaua

SEQ ID NO: 1377467 - RNA, 19 nt, Artificial Sequence
  Description of Artificial Sequence: Synthetic oligonucleotide
ggauccgaaaagccaccau

SEQ ID NO: 1377468 - RNA, 19 nt, Artificial Sequence
  Description of Artificial Sequence: Synthetic oligonucleotide
ggcggggaccgaagcugcg

SEQ ID NO: 1377469 - RNA, 19 nt, Artificial Sequence
  Description of Artificial Sequence: Synthetic oligonucleotide
ggaacaccgccagcaccac

SEQ ID NO: 1377470 - RNA, 19 nt, Artificial Sequence
  Description of Artificial Sequence: Synthetic oligonucleotide
cgguguguguugugcauca

SEQ ID NO: 1377471 - RNA, 19 nt, Artificial Sequence
  Description of Artificial Sequence: Synthetic oligonucleotide
cagagaccgucaacauggu

SEQ ID NO: 1377472 - RNA, 19 nt, Artificial Sequence
  Description of Artificial Sequence: Synthetic oligonucleotide
cuccccggcacucuuucuu

SEQ ID NO: 1377473 - RNA, 19 nt, Artificial Sequence
  Description of Artificial Sequence: Synthetic oligonucleotide
ccgaggcccucaagucucc

SEQ ID NO: 1377474 - RNA, 19 nt, Artificial Sequence
  Description of Artificial Sequence: Synthetic oligonucleotide
ggcuugccagccggcuccg

SEQ ID NO: 1377475 - RNA, 19 nt, Artificial Sequence
  Description of Artificial Sequence: Synthetic oligonucleotide
cccuacaccccugcaucac

SEQ ID NO: 1377476 - RNA, 19 nt, Artificial Sequence
  Description of Artificial Sequence: Synthetic oligonucleotide
ccacguagcagacauucuu

SEQ ID NO: 1377477 - RNA, 19 nt, Artificial Sequence
  Description of Artificial Sequence: Synthetic oligonucleotide
gcggcuugccagccggcuc

SEQ ID NO: 1377478 - RNA, 19 nt, Artificial Sequence
  Description of Artificial Sequence: Synthetic oligonucleotide
gccuuccgaggcccucaag

SEQ ID NO: 1377479 - RNA, 19 nt, Artificial Sequence
  Description of Artificial Sequence: Synthetic oligonucleotide
caugggcucuaagcggagu

SEQ ID NO: 1377480 - RNA, 19 nt, Artificial Sequence
  Description of Artificial Sequence: Synthetic oligonucleotide
ggaccgaagcugcgacgaa

SEQ ID NO: 1377481 - RNA, 19 nt, Artificial Sequence
  Description of Artificial Sequence: Synthetic oligonucleotide
gcauggcuuguuggcagaa

SEQ ID NO: 1377482 - RNA, 19 nt, Artificial Sequence
  Description of Artificial Sequence: Synthetic oligonucleotide
cacccacccggggcaggac

SEQ ID NO: 1377483 - RNA, 19 nt, Artificial Sequence
  Description of Artificial Sequence: Synthetic oligonucleotide
cagccggcuccgagucaca

SEQ ID NO: 1377484 - RNA, 19 nt, Artificial Sequence
  Description of Artificial Sequence: Synthetic oligonucleotide
gacgaaccgcugagccccu

SEQ ID NO: 1377485 - RNA, 19 nt, Artificial Sequence
  Description of Artificial Sequence: Synthetic oligonucleotide
aggacucgccagaccccua

SEQ ID NO: 1377486 - RNA, 19 nt, Artificial Sequence
  Description of Artificial Sequence: Synthetic oligonucleotide
gcacacacacacacauaau

SEQ ID NO: 1377487 - RNA, 19 nt, Artificial Sequence
  Description of Artificial Sequence: Synthetic oligonucleotide
gcagaacaucaugggcucu

SEQ ID NO: 1377488 - RNA, 19 nt, Artificial Sequence
  Description of Artificial Sequence: Synthetic oligonucleotide
ggccuuccgaggcccucaa

SEQ ID NO: 1377489 - RNA, 19 nt, Artificial Sequence
  Description of Artificial Sequence: Synthetic oligonucleotide
gccagccggcuccgaguca

SEQ ID NO: 1377490 - RNA, 19 nt, Artificial Sequence
  Description of Artificial Sequence: Synthetic oligonucleotide
gcuccccggcacucuuucu

SEQ ID NO: 1377491 - RNA, 19 nt, Artificial Sequence
  Description of Artificial Sequence: Synthetic oligonucleotide
ccaccaucacuagaacauu

SEQ ID NO: 1377492 - RNA, 19 nt, Artificial Sequence
  Description of Artificial Sequence: Synthetic oligonucleotide
ccauacugacuggacuguu

SEQ ID NO: 1377493 - RNA, 19 nt, Artificial Sequence
  Description of Artificial Sequence: Synthetic oligonucleotide
cgggcacagcggcuugcca

SEQ ID NO: 1377494 - RNA, 19 nt, Artificial Sequence
  Description of Artificial Sequence: Synthetic oligonucleotide
cguggguaccagccagccu

SEQ ID NO: 1377495 - RNA, 19 nt, Artificial Sequence
  Description of Artificial Sequence: Synthetic oligonucleotide
gcaguccgagcaaccccuu

SEQ ID NO: 1377496 - RNA, 19 nt, Artificial Sequence
  Description of Artificial Sequence: Synthetic oligonucleotide
ccgcacgggcacagcggcu

SEQ ID NO: 1377497 - RNA, 19 nt, Artificial Sequence
  Description of Artificial Sequence: Synthetic oligonucleotide
cgcacgggcacagcggcuu

SEQ ID NO: 1377498 - RNA, 19 nt, Artificial Sequence
  Description of Artificial Sequence: Synthetic oligonucleotide
aaagcuuucaccuuugggc

SEQ ID NO: 1377499 - RNA, 19 nt, Artificial Sequence
  Description of Artificial Sequence: Synthetic oligonucleotide
aaguugugaagguugaugc

SEQ ID NO: 1377500 - RNA, 19 nt, Artificial Sequence
  Description of Artificial Sequence: Synthetic oligonucleotide
agaaagguacuacuuaucc

SEQ ID NO: 1377501 - RNA, 19 nt, Artificial Sequence
  Description of Artificial Sequence: Synthetic oligonucleotide
aaagucuuguugcagagag

SEQ ID NO: 1377502 - RNA, 19 nt, Artificial Sequence
  Description of Artificial Sequence: Synthetic oligonucleotide
uuauccgucagacacaugc

SEQ ID NO: 1377503 - RNA, 19 nt, Artificial Sequence
  Description of Artificial Sequence: Synthetic oligonucleotide
agauauagcacucauagga

SEQ ID NO: 1377504 - RNA, 19 nt, Artificial Sequence
  Description of Artificial Sequence: Synthetic oligonucleotide
aaagguacuacuuauccgu

SEQ ID NO: 1377505 - RNA, 19 nt, Artificial Sequence
  Description of Artificial Sequence: Synthetic oligonucleotide
uuuggucaaacuuugcugg

SEQ ID NO: 1377506 - RNA, 19 nt, Artificial Sequence
  Description of Artificial Sequence: Synthetic oligonucleotide
ugguucguaagaaagagag

SEQ ID NO: 1377507 - RNA, 19 nt, Artificial Sequence
  Description of Artificial Sequence: Synthetic oligonucleotide
uuuuguuuuguuuuguuug

SEQ ID NO: 1377508 - RNA, 19 nt, Artificial Sequence
  Description of Artificial Sequence: Synthetic oligonucleotide
ugaugucacaaucagacga

SEQ ID NO: 1377509 - RNA, 19 nt, Artificial Sequence
  Description of Artificial Sequence: Synthetic oligonucleotide
auuucgaugucgcuguagc

SEQ ID NO: 1377510 - RNA, 19 nt, Artificial Sequence
  Description of Artificial Sequence: Synthetic oligonucleotide
uuguaggacacccuuauca

SEQ ID NO: 1377511 - RNA, 19 nt, Artificial Sequence
  Description of Artificial Sequence: Synthetic oligonucleotide
uguauggacgaacaugugc

SEQ ID NO: 1377512 - RNA, 19 nt, Artificial Sequence
  Description of Artificial Sequence: Synthetic oligonucleotide
aguaaagguggacaggccg

SEQ ID NO: 1377513 - RNA, 19 nt, Artificial Sequence
  Description of Artificial Sequence: Synthetic oligonucleotide
uguuguuccacugagucag

SEQ ID NO: 1377514 - RNA, 19 nt, Artificial Sequence
  Description of Artificial Sequence: Synthetic oligonucleotide
cuacuuauccgucagacac

SEQ ID NO: 1377515 - RNA, 19 nt, Artificial Sequence
  Description of Artificial Sequence: Synthetic oligonucleotide
uugucuuggaagaaggggc

SEQ ID NO: 1377516 - RNA, 19 nt, Artificial Sequence
  Description of Artificial Sequence: Synthetic oligonucleotide
gaaagguacuacuuauccg

SEQ ID NO: 1377517 - RNA, 19 nt, Artificial Sequence
  Description of Artificial Sequence: Synthetic oligonucleotide
ucguaagaaagagagaaag

SEQ ID NO: 1377518 - RNA, 19 nt, Artificial Sequence
  Description of Artificial Sequence: Synthetic oligonucleotide
uuugguucguaagaaagag

SEQ ID NO: 1377519 - RNA, 19 nt, Artificial Sequence
  Description of Artificial Sequence: Synthetic oligonucleotide
auuuggucaaacuuugcug

SEQ ID NO: 1377520 - RNA, 19 nt, Artificial Sequence
  Description of Artificial Sequence: Synthetic oligonucleotide
guuaccaugugcuugauaa

SEQ ID NO: 1377521 - RNA, 19 nt, Artificial Sequence
  Description of Artificial Sequence: Synthetic oligonucleotide
gaacaugugcuugacauag

SEQ ID NO: 1377522 - RNA, 19 nt, Artificial Sequence
  Description of Artificial Sequence: Synthetic oligonucleotide
uggauguguugacugaagg

SEQ ID NO: 1377523 - RNA, 19 nt, Artificial Sequence
  Description of Artificial Sequence: Synthetic oligonucleotide
cagcuuacaaaguucaggc

SEQ ID NO: 1377524 - RNA, 19 nt, Artificial Sequence
  Description of Artificial Sequence: Synthetic oligonucleotide
aagguugaugcugugaaug

SEQ ID NO: 1377525 - RNA, 19 nt, Artificial Sequence
  Description of Artificial Sequence: Synthetic oligonucleotide
uguaggacacccuuaucag

SEQ ID NO: 1377526 - RNA, 19 nt, Artificial Sequence
  Description of Artificial Sequence: Synthetic oligonucleotide
gagaguacacucauaaggc

SEQ ID NO: 1377527 - RNA, 19 nt, Artificial Sequence
  Description of Artificial Sequence: Synthetic oligonucleotide
ugaagguugaugcugugaa

SEQ ID NO: 1377528 - RNA, 19 nt, Artificial Sequence
  Description of Artificial Sequence: Synthetic oligonucleotide
acugucacaaacugggucu

SEQ ID NO: 1377529 - RNA, 19 nt, Artificial Sequence
  Description of Artificial Sequence: Synthetic oligonucleotide
aaaguucaggcagggaagg

SEQ ID NO: 1377530 - RNA, 19 nt, Artificial Sequence
  Description of Artificial Sequence: Synthetic oligonucleotide
gauaagguaauccuucaaa

SEQ ID NO: 1377531 - RNA, 19 nt, Artificial Sequence
  Description of Artificial Sequence: Synthetic oligonucleotide
uuucuagcugguuuggcug

SEQ ID NO: 1377532 - RNA, 19 nt, Artificial Sequence
  Description of Artificial Sequence: Synthetic oligonucleotide
ugcuugauaagguaauccu

SEQ ID NO: 1377533 - RNA, 19 nt, Artificial Sequence
  Description of Artificial Sequence: Synthetic oligonucleotide
acgaacaugugcuugacau

SEQ ID NO: 1377534 - RNA, 19 nt, Artificial Sequence
  Description of Artificial Sequence: Synthetic oligonucleotide
ugugcaguaaagguggaca

SEQ ID NO: 1377535 - RNA, 19 nt, Artificial Sequence
  Description of Artificial Sequence: Synthetic oligonucleotide
gagcgugagaguuugucag

SEQ ID NO: 1377536 - RNA, 19 nt, Artificial Sequence
  Description of Artificial Sequence: Synthetic oligonucleotide
cuugucuuggaagaagggg

SEQ ID NO: 1377537 - RNA, 19 nt, Artificial Sequence
  Description of Artificial Sequence: Synthetic oligonucleotide
gacugaaggcuguuguagg

SEQ ID NO: 1377538 - RNA, 19 nt, Artificial Sequence
  Description of Artificial Sequence: Synthetic oligonucleotide
gaguuugucagugaaugug

SEQ ID NO: 1377539 - RNA, 19 nt, Artificial Sequence
  Description of Artificial Sequence: Synthetic oligonucleotide
uucggugccaauagaggag

SEQ ID NO: 1377540 - RNA, 19 nt, Artificial Sequence
  Description of Artificial Sequence: Synthetic oligonucleotide
agggagcgccaacagaugc

SEQ ID NO: 1377541 - RNA, 19 nt, Artificial Sequence
  Description of Artificial Sequence: Synthetic oligonucleotide
ucgagcacggaauugcuga

SEQ ID NO: 1377542 - RNA, 19 nt, Artificial Sequence
  Description of Artificial Sequence: Synthetic oligonucleotide
guucguaagaaagagagaa

SEQ ID NO: 1377543 - RNA, 19 nt, Artificial Sequence
  Description of Artificial Sequence: Synthetic oligonucleotide
uucgaugucgcuguagccc

SEQ ID NO: 1377544 - RNA, 19 nt, Artificial Sequence
  Description of Artificial Sequence: Synthetic oligonucleotide
aagugguccccucagugca

SEQ ID NO: 1377545 - RNA, 19 nt, Artificial Sequence
  Description of Artificial Sequence: Synthetic oligonucleotide
uguuguaggacacccuuau

SEQ ID NO: 1377546 - RNA, 19 nt, Artificial Sequence
  Description of Artificial Sequence: Synthetic oligonucleotide
gcagaugcuacacugguag

SEQ ID NO: 1377547 - RNA, 19 nt, Artificial Sequence
  Description of Artificial Sequence: Synthetic oligonucleotide
uaagugguccccucagugc

SEQ ID NO: 1377548 - RNA, 19 nt, Artificial Sequence
  Description of Artificial Sequence: Synthetic oligonucleotide
ucaccuguauggacgaaca

SEQ ID NO: 1377549 - RNA, 19 nt, Artificial Sequence
  Description of Artificial Sequence: Synthetic oligonucleotide
cauaggauuucuccccgcg

SEQ ID NO: 1377550 - RNA, 19 nt, Artificial Sequence
  Description of Artificial Sequence: Synthetic oligonucleotide
auaggauuucuccccgcgg

SEQ ID NO: 1377551 - RNA, 19 nt, Artificial Sequence
  Description of Artificial Sequence: Synthetic oligonucleotide
uuuugcagauauagcacuc

SEQ ID NO: 1377552 - RNA, 19 nt, Artificial Sequence
  Description of Artificial Sequence: Synthetic oligonucleotide
cagugaauguguugagugg

SEQ ID NO: 1377553 - RNA, 19 nt, Artificial Sequence
  Description of Artificial Sequence: Synthetic oligonucleotide
uuggucaaacuuugcuggg

SEQ ID NO: 1377554 - RNA, 19 nt, Artificial Sequence
  Description of Artificial Sequence: Synthetic oligonucleotide
caacugaugucacaaucag

SEQ ID NO: 1377555 - RNA, 19 nt, Artificial Sequence
  Description of Artificial Sequence: Synthetic oligonucleotide
uacuacuuauccgucagac

SEQ ID NO: 1377556 - RNA, 19 nt, Artificial Sequence
  Description of Artificial Sequence: Synthetic oligonucleotide
caauagaggagcugacccc

SEQ ID NO: 1377557 - RNA, 19 nt, Artificial Sequence
  Description of Artificial Sequence: Synthetic oligonucleotide
ugaccccggaaucaaagcu

SEQ ID NO: 1377558 - RNA, 19 nt, Artificial Sequence
  Description of Artificial Sequence: Synthetic oligonucleotide
ugaaggcuguuguaggaca

SEQ ID NO: 1377559 - RNA, 19 nt, Artificial Sequence
  Description of Artificial Sequence: Synthetic oligonucleotide
ucggucauccccuugcaac

SEQ ID NO: 1377560 - RNA, 19 nt, Artificial Sequence
  Description of Artificial Sequence: Synthetic oligonucleotide
ugagcgugagaguuuguca

SEQ ID NO: 1377561 - RNA, 19 nt, Artificial Sequence
  Description of Artificial Sequence: Synthetic oligonucleotide
uaggauuucuccccgcggu

SEQ ID NO: 1377562 - RNA, 19 nt, Artificial Sequence
  Description of Artificial Sequence: Synthetic oligonucleotide
aauggcugcccaauggaug

SEQ ID NO: 1377563 - RNA, 19 nt, Artificial Sequence
  Description of Artificial Sequence: Synthetic oligonucleotide
caggcuuagagcuggguac

SEQ ID NO: 1377564 - RNA, 19 nt, Artificial Sequence
  Description of Artificial Sequence: Synthetic oligonucleotide
gugucuuccgugcacucgg

SEQ ID NO: 1377565 - RNA, 19 nt, Artificial Sequence
  Description of Artificial Sequence: Synthetic oligonucleotide
ugauaagguaauccuucaa

SEQ ID NO: 1377566 - RNA, 19 nt, Artificial Sequence
  Description of Artificial Sequence: Synthetic oligonucleotide
uuaccaugugcuugauaag

SEQ ID NO: 1377567 - RNA, 19 nt, Artificial Sequence
  Description of Artificial Sequence: Synthetic oligonucleotide
uugguucguaagaaagaga

SEQ ID NO: 1377568 - RNA, 19 nt, Artificial Sequence
  Description of Artificial Sequence: Synthetic oligonucleotide
agugaauguguugagugga

SEQ ID NO: 1377569 - RNA, 19 nt, Artificial Sequence
  Description of Artificial Sequence: Synthetic oligonucleotide
gguacuacuuauccgucag

SEQ ID NO: 1377570 - RNA, 19 nt, Artificial Sequence
  Description of Artificial Sequence: Synthetic oligonucleotide
ugugcuugacauaguucug

SEQ ID NO: 1377571 - RNA, 19 nt, Artificial Sequence
  Description of Artificial Sequence: Synthetic oligonucleotide
ugucgcuccagcagggucu

SEQ ID NO: 1377572 - RNA, 19 nt, Artificial Sequence
  Description of Artificial Sequence: Synthetic oligonucleotide
cacggaauugcugaaguug

SEQ ID NO: 1377573 - RNA, 19 nt, Artificial Sequence
  Description of Artificial Sequence: Synthetic oligonucleotide
cucguugagggucucgagc

SEQ ID NO: 1377574 - RNA, 19 nt, Artificial Sequence
  Description of Artificial Sequence: Synthetic oligonucleotide
uacuuauccgucagacaca

SEQ ID NO: 1377575 - RNA, 19 nt, Artificial Sequence
  Description of Artificial Sequence: Synthetic oligonucleotide
guugaugcugugaaugcgc

SEQ ID NO: 1377576 - RNA, 19 nt, Artificial Sequence
  Description of Artificial Sequence: Synthetic oligonucleotide
ccaauagaggagcugaccc

SEQ ID NO: 1377577 - RNA, 19 nt, Artificial Sequence
  Description of Artificial Sequence: Synthetic oligonucleotide
gugcaguaaagguggacag

SEQ ID NO: 1377578 - RNA, 19 nt, Artificial Sequence
  Description of Artificial Sequence: Synthetic oligonucleotide
gguacuugcgaauggcugc

SEQ ID NO: 1377579 - RNA, 19 nt, Artificial Sequence
  Description of Artificial Sequence: Synthetic oligonucleotide
agcacggaauugcugaagu

SEQ ID NO: 1377580 - RNA, 19 nt, Artificial Sequence
  Description of Artificial Sequence: Synthetic oligonucleotide
ugugaaugcgcucggucau

SEQ ID NO: 1377581 - RNA, 19 nt, Artificial Sequence
  Description of Artificial Sequence: Synthetic oligonucleotide
guggaugcgaaccgucacg

SEQ ID NO: 1377582 - RNA, 19 nt, Artificial Sequence
  Description of Artificial Sequence: Synthetic oligonucleotide
uuucgaugucgcuguagcc

SEQ ID NO: 1377583 - RNA, 19 nt, Artificial Sequence
  Description of Artificial Sequence: Synthetic oligonucleotide
aggacacccuuaucagagc

SEQ ID NO: 1377584 - RNA, 19 nt, Artificial Sequence
  Description of Artificial Sequence: Synthetic oligonucleotide
auauagcacucauaggauu

SEQ ID NO: 1377585 - RNA, 19 nt, Artificial Sequence
  Description of Artificial Sequence: Synthetic oligonucleotide
augucacaaucagacgacc

SEQ ID NO: 1377586 - RNA, 19 nt, Artificial Sequence
  Description of Artificial Sequence: Synthetic oligonucleotide
ugcuacacugguaggcucu

SEQ ID NO: 1377587 - RNA, 19 nt, Artificial Sequence
  Description of Artificial Sequence: Synthetic oligonucleotide
acuacuuauccgucagaca

SEQ ID NO: 1377588 - RNA, 19 nt, Artificial Sequence
  Description of Artificial Sequence: Synthetic oligonucleotide
accuguauggacgaacaug

SEQ ID NO: 1377589 - RNA, 19 nt, Artificial Sequence
  Description of Artificial Sequence: Synthetic oligonucleotide
uauccgucagacacaugca

SEQ ID NO: 1377590 - RNA, 19 nt, Artificial Sequence
  Description of Artificial Sequence: Synthetic oligonucleotide
cucgggauuucgaugucgc

SEQ ID NO: 1377591 - RNA, 19 nt, Artificial Sequence
  Description of Artificial Sequence: Synthetic oligonucleotide
acugaaggcuguuguagga

SEQ ID NO: 1377592 - RNA, 19 nt, Artificial Sequence
  Description of Artificial Sequence: Synthetic oligonucleotide
cuguuacugacagugauca

SEQ ID NO: 1377593 - RNA, 19 nt, Artificial Sequence
  Description of Artificial Sequence: Synthetic oligonucleotide
gacggagcagacguaagug

SEQ ID NO: 1377594 - RNA, 19 nt, Artificial Sequence
  Description of Artificial Sequence: Synthetic oligonucleotide
cuuccguggaugcgaaccg

SEQ ID NO: 1377595 - RNA, 19 nt, Artificial Sequence
  Description of Artificial Sequence: Synthetic oligonucleotide
cacaugcauccucaugugg

SEQ ID NO: 1377596 - RNA, 19 nt, Artificial Sequence
  Description of Artificial Sequence: Synthetic oligonucleotide
ugugcgcgcagcaugcuuc

SEQ ID NO: 1377597 - RNA, 19 nt, Artificial Sequence
  Description of Artificial Sequence: Synthetic oligonucleotide
agacgacccggugugagcg

SEQ ID NO: 1377598 - RNA, 19 nt, Artificial Sequence
  Description of Artificial Sequence: Synthetic oligonucleotide
uggacuccgacccggcuga

SEQ ID NO: 1377599 - RNA, 19 nt, Artificial Sequence
  Description of Artificial Sequence: Synthetic oligonucleotide
uccgucagacacaugcauc

SEQ ID NO: 1377600 - RNA, 19 nt, Artificial Sequence
  Description of Artificial Sequence: Synthetic oligonucleotide
agacacaugcauccucaug

SEQ ID NO: 1377601 - RNA, 19 nt, Artificial Sequence
  Description of Artificial Sequence: Synthetic oligonucleotide
gaaccgucacgucacagaa

SEQ ID NO: 1377602 - RNA, 19 nt, Artificial Sequence
  Description of Artificial Sequence: Synthetic oligonucleotide
cagagaguacacucauaag

SEQ ID NO: 1377603 - RNA, 19 nt, Artificial Sequence
  Description of Artificial Sequence: Synthetic oligonucleotide
uugcagauauagcacucau

SEQ ID NO: 1377604 - RNA, 19 nt, Artificial Sequence
  Description of Artificial Sequence: Synthetic oligonucleotide
ugcagauauagcacucaua

SEQ ID NO: 1377605 - RNA, 19 nt, Artificial Sequence
  Description of Artificial Sequence: Synthetic oligonucleotide
agaaagagagaaagguacu

SEQ ID NO: 1377606 - RNA, 19 nt, Artificial Sequence
  Description of Artificial Sequence: Synthetic oligonucleotide
cacugucacaaacuggguc

SEQ ID NO: 1377607 - RNA, 19 nt, Artificial Sequence
  Description of Artificial Sequence: Synthetic oligonucleotide
augcuacacugguaggcuc

SEQ ID NO: 1377608 - RNA, 19 nt, Artificial Sequence
  Description of Artificial Sequence: Synthetic oligonucleotide
acaaucagacgacccggug

SEQ ID NO: 1377609 - RNA, 19 nt, Artificial Sequence
  Description of Artificial Sequence: Synthetic oligonucleotide
uggucggugucuuccgugc

SEQ ID NO: 1377610 - RNA, 19 nt, Artificial Sequence
  Description of Artificial Sequence: Synthetic oligonucleotide
agacggagcagacguaagu

SEQ ID NO: 1377611 - RNA, 19 nt, Artificial Sequence
  Description of Artificial Sequence: Synthetic oligonucleotide
ucauaggauuucuccccgc

SEQ ID NO: 1377612 - RNA, 19 nt, Artificial Sequence
  Description of Artificial Sequence: Synthetic oligonucleotide
acacaugcauccucaugug

SEQ ID NO: 1377613 - RNA, 19 nt, Artificial Sequence
  Description of Artificial Sequence: Synthetic oligonucleotide
ucuuccgugcacucgggau

SEQ ID NO: 1377614 - RNA, 19 nt, Artificial Sequence
  Description of Artificial Sequence: Synthetic oligonucleotide
agguucggugccaauagag

SEQ ID NO: 1377615 - RNA, 19 nt, Artificial Sequence
  Description of Artificial Sequence: Synthetic oligonucleotide
uucgccuugcccacuggcu

SEQ ID NO: 1377616 - RNA, 19 nt, Artificial Sequence
  Description of Artificial Sequence: Synthetic oligonucleotide
gucaaacuuugcugggcag

SEQ ID NO: 1377617 - RNA, 19 nt, Artificial Sequence
  Description of Artificial Sequence: Synthetic oligonucleotide
ugcgaauggcugcccaaug

SEQ ID NO: 1377618 - RNA, 19 nt, Artificial Sequence
  Description of Artificial Sequence: Synthetic oligonucleotide
accuguuucuagcugguuu

SEQ ID NO: 1377619 - RNA, 19 nt, Artificial Sequence
  Description of Artificial Sequence: Synthetic oligonucleotide
agguacuacuuauccguca

SEQ ID NO: 1377620 - RNA, 19 nt, Artificial Sequence
  Description of Artificial Sequence: Synthetic oligonucleotide
ugaaugcgcucggucaucc

SEQ ID NO: 1377621 - RNA, 19 nt, Artificial Sequence
  Description of Artificial Sequence: Synthetic oligonucleotide
gucucgagcacggaauugc

SEQ ID NO: 1377622 - RNA, 19 nt, Artificial Sequence
  Description of Artificial Sequence: Synthetic oligonucleotide
cugaccccggaaucaaagc

SEQ ID NO: 1377623 - RNA, 19 nt, Artificial Sequence
  Description of Artificial Sequence: Synthetic oligonucleotide
ucagacgacccggugugag

SEQ ID NO: 1377624 - RNA, 19 nt, Artificial Sequence
  Description of Artificial Sequence: Synthetic oligonucleotide
ugucuuccgugcacucggg

SEQ ID NO: 1377625 - RNA, 19 nt, Artificial Sequence
  Description of Artificial Sequence: Synthetic oligonucleotide
agacguaagugguccccuc

SEQ ID NO: 1377626 - RNA, 19 nt, Artificial Sequence
  Description of Artificial Sequence: Synthetic oligonucleotide
cugugaaugcgcucgguca

SEQ ID NO: 1377627 - RNA, 19 nt, Artificial Sequence
  Description of Artificial Sequence: Synthetic oligonucleotide
agguaauccuucaaagaga

SEQ ID NO: 1377628 - RNA, 19 nt, Artificial Sequence
  Description of Artificial Sequence: Synthetic oligonucleotide
gcagagaguacacucauaa

SEQ ID NO: 1377629 - RNA, 19 nt, Artificial Sequence
  Description of Artificial Sequence: Synthetic oligonucleotide
uguuucuagcugguuuggc

SEQ ID NO: 1377630 - RNA, 19 nt, Artificial Sequence
  Description of Artificial Sequence: Synthetic oligonucleotide
agcgccaacagaugcugca

SEQ ID NO: 1377631 - RNA, 19 nt, Artificial Sequence
  Description of Artificial Sequence: Synthetic oligonucleotide
uggucaaacuuugcugggc

SEQ ID NO: 1377632 - RNA, 19 nt, Artificial Sequence
  Description of Artificial Sequence: Synthetic oligonucleotide
ucucgagcacggaauugcu

SEQ ID NO: 1377633 - RNA, 19 nt, Artificial Sequence
  Description of Artificial Sequence: Synthetic oligonucleotide
uguugacugaaggcuguug

SEQ ID NO: 1377634 - RNA, 19 nt, Artificial Sequence
  Description of Artificial Sequence: Synthetic oligonucleotide
guuugguucguaagaaaga

SEQ ID NO: 1377635 - RNA, 19 nt, Artificial Sequence
  Description of Artificial Sequence: Synthetic oligonucleotide
acacccuuaucagagcugu

SEQ ID NO: 1377636 - RNA, 19 nt, Artificial Sequence
  Description of Artificial Sequence: Synthetic oligonucleotide
guauggacgaacaugugcu

SEQ ID NO: 1377637 - RNA, 19 nt, Artificial Sequence
  Description of Artificial Sequence: Synthetic oligonucleotide
cagaugcuacacugguagg

SEQ ID NO: 1377638 - RNA, 19 nt, Artificial Sequence
  Description of Artificial Sequence: Synthetic oligonucleotide
acggaauugcugaaguugu

SEQ ID NO: 1377639 - RNA, 19 nt, Artificial Sequence
  Description of Artificial Sequence: Synthetic oligonucleotide
acucgggauuucgaugucg

SEQ ID NO: 1377640 - RNA, 19 nt, Artificial Sequence
  Description of Artificial Sequence: Synthetic oligonucleotide
uuggaagaaggggcugccg

SEQ ID NO: 1377641 - RNA, 19 nt, Artificial Sequence
  Description of Artificial Sequence: Synthetic oligonucleotide
caguaaagguggacaggcc

SEQ ID NO: 1377642 - RNA, 19 nt, Artificial Sequence
  Description of Artificial Sequence: Synthetic oligonucleotide
augcgaaccgucacgucac

SEQ ID NO: 1377643 - RNA, 19 nt, Artificial Sequence
  Description of Artificial Sequence: Synthetic oligonucleotide
ccgucagacacaugcaucc

SEQ ID NO: 1377644 - RNA, 19 nt, Artificial Sequence
  Description of Artificial Sequence: Synthetic oligonucleotide
gguucggugccaauagagg

SEQ ID NO: 1377645 - RNA, 19 nt, Artificial Sequence
  Description of Artificial Sequence: Synthetic oligonucleotide
gguugaugcugugaaugcg

SEQ ID NO: 1377646 - RNA, 19 nt, Artificial Sequence
  Description of Artificial Sequence: Synthetic oligonucleotide
ucuagcugguuuggcuggg

SEQ ID NO: 1377647 - RNA, 19 nt, Artificial Sequence
  Description of Artificial Sequence: Synthetic oligonucleotide
uccacugagucagguucgg

SEQ ID NO: 1377648 - RNA, 19 nt, Artificial Sequence
  Description of Artificial Sequence: Synthetic oligonucleotide
gaagggagcgccaacagau

SEQ ID NO: 1377649 - RNA, 19 nt, Artificial Sequence
  Description of Artificial Sequence: Synthetic oligonucleotide
acuuauccgucagacacau

SEQ ID NO: 1377650 - RNA, 19 nt, Artificial Sequence
  Description of Artificial Sequence: Synthetic oligonucleotide
gguaauccuucaaagagaa

SEQ ID NO: 1377651 - RNA, 19 nt, Artificial Sequence
  Description of Artificial Sequence: Synthetic oligonucleotide
auccgucagacacaugcau

SEQ ID NO: 1377652 - RNA, 19 nt, Artificial Sequence
  Description of Artificial Sequence: Synthetic oligonucleotide
guuucuagcugguuuggcu

SEQ ID NO: 1377653 - RNA, 19 nt, Artificial Sequence
  Description of Artificial Sequence: Synthetic oligonucleotide
aggauuucuccccgcggug

SEQ ID NO: 1377654 - RNA, 19 nt, Artificial Sequence
  Description of Artificial Sequence: Synthetic oligonucleotide
gcgaauggcugcccaaugg

SEQ ID NO: 1377655 - RNA, 19 nt, Artificial Sequence
  Description of Artificial Sequence: Synthetic oligonucleotide
gacguaagugguccccuca

SEQ ID NO: 1377656 - RNA, 19 nt, Artificial Sequence
  Description of Artificial Sequence: Synthetic oligonucleotide
cuggguacuugcgaauggc

SEQ ID NO: 1377657 - RNA, 19 nt, Artificial Sequence
  Description of Artificial Sequence: Synthetic oligonucleotide
ugcgggaggggucccguug

SEQ ID NO: 1377658 - RNA, 19 nt, Artificial Sequence
  Description of Artificial Sequence: Synthetic oligonucleotide
gaaggcuguuguaggacac

SEQ ID NO: 1377659 - RNA, 19 nt, Artificial Sequence
  Description of Artificial Sequence: Synthetic oligonucleotide
cagaaguggccacgguugc

SEQ ID NO: 1377660 - RNA, 19 nt, Artificial Sequence
  Description of Artificial Sequence: Synthetic oligonucleotide
cucaccuguauggacgaac

SEQ ID NO: 1377661 - RNA, 19 nt, Artificial Sequence
  Description of Artificial Sequence: Synthetic oligonucleotide
acuugcgaauggcugccca

SEQ ID NO: 1377662 - RNA, 19 nt, Artificial Sequence
  Description of Artificial Sequence: Synthetic oligonucleotide
gauauagcacucauaggau

SEQ ID NO: 1377663 - RNA, 19 nt, Artificial Sequence
  Description of Artificial Sequence: Synthetic oligonucleotide
ugcagaugcuacacuggua

SEQ ID NO: 1377664 - RNA, 19 nt, Artificial Sequence
  Description of Artificial Sequence: Synthetic oligonucleotide
uguuacugacagugaucac

SEQ ID NO: 1377665 - RNA, 19 nt, Artificial Sequence
  Description of Artificial Sequence: Synthetic oligonucleotide
gugccaauagaggagcuga

SEQ ID NO: 1377666 - RNA, 19 nt, Artificial Sequence
  Description of Artificial Sequence: Synthetic oligonucleotide
uguuaccaugugcuugaua

SEQ ID NO: 1377667 - RNA, 19 nt, Artificial Sequence
  Description of Artificial Sequence: Synthetic oligonucleotide
guacuugcgaauggcugcc

SEQ ID NO: 1377668 - RNA, 19 nt, Artificial Sequence
  Description of Artificial Sequence: Synthetic oligonucleotide
acuccgacccggcugagua

SEQ ID NO: 1377669 - RNA, 19 nt, Artificial Sequence
  Description of Artificial Sequence: Synthetic oligonucleotide
ugcucguugagggucucga

SEQ ID NO: 1377670 - RNA, 19 nt, Artificial Sequence
  Description of Artificial Sequence: Synthetic oligonucleotide
gccacgguugcgcugcucg

SEQ ID NO: 1377671 - RNA, 19 nt, Artificial Sequence
  Description of Artificial Sequence: Synthetic oligonucleotide
agaaguggccacgguugcg

SEQ ID NO: 1377672 - RNA, 19 nt, Artificial Sequence
  Description of Artificial Sequence: Synthetic oligonucleotide
gauuucuccccgcggugca

SEQ ID NO: 1377673 - RNA, 19 nt, Artificial Sequence
  Description of Artificial Sequence: Synthetic oligonucleotide
cuggacuccgacccggcug

SEQ ID NO: 1377674 - RNA, 19 nt, Artificial Sequence
  Description of Artificial Sequence: Synthetic oligonucleotide
uauggacgaacaugugcuu

SEQ ID NO: 1377675 - RNA, 19 nt, Artificial Sequence
  Description of Artificial Sequence: Synthetic oligonucleotide
cucgagcacggaauugcug

SEQ ID NO: 1377676 - RNA, 19 nt, Artificial Sequence
  Description of Artificial Sequence: Synthetic oligonucleotide
uccguggaugcgaaccguc

SEQ ID NO: 1377677 - RNA, 19 nt, Artificial Sequence
  Description of Artificial Sequence: Synthetic oligonucleotide
gacacccuuaucagagcug

SEQ ID NO: 1377678 - RNA, 19 nt, Artificial Sequence
  Description of Artificial Sequence: Synthetic oligonucleotide
gacgaacaugugcuugaca

SEQ ID NO: 1377679 - RNA, 19 nt, Artificial Sequence
  Description of Artificial Sequence: Synthetic oligonucleotide
gcuuccguggaugcgaacc

SEQ ID NO: 1377680 - RNA, 19 nt, Artificial Sequence
  Description of Artificial Sequence: Synthetic oligonucleotide
cccggugugagcgugagag

SEQ ID NO: 1377681 - RNA, 19 nt, Artificial Sequence
  Description of Artificial Sequence: Synthetic oligonucleotide
gagcacggaauugcugaag

SEQ ID NO: 1377682 - RNA, 19 nt, Artificial Sequence
  Description of Artificial Sequence: Synthetic oligonucleotide
cuguauggacgaacaugug

SEQ ID NO: 1377683 - RNA, 19 nt, Artificial Sequence
  Description of Artificial Sequence: Synthetic oligonucleotide
ggaauugcugaaguuguga

SEQ ID NO: 1377684 - RNA, 19 nt, Artificial Sequence
  Description of Artificial Sequence: Synthetic oligonucleotide
guugggcggguucugccug

SEQ ID NO: 1377685 - RNA, 19 nt, Artificial Sequence
  Description of Artificial Sequence: Synthetic oligonucleotide
cagacgacccggugugagc

SEQ ID NO: 1377686 - RNA, 19 nt, Artificial Sequence
  Description of Artificial Sequence: Synthetic oligonucleotide
cggaaucaaagcuuucacc

SEQ ID NO: 1377687 - RNA, 19 nt, Artificial Sequence
  Description of Artificial Sequence: Synthetic oligonucleotide
guaauccuucaaagagaag

SEQ ID NO: 1377688 - RNA, 19 nt, Artificial Sequence
  Description of Artificial Sequence: Synthetic oligonucleotide
guaggcucucacuccugug

SEQ ID NO: 1377689 - RNA, 19 nt, Artificial Sequence
  Description of Artificial Sequence: Synthetic oligonucleotide
aagggagcgccaacagaug

SEQ ID NO: 1377690 - RNA, 19 nt, Artificial Sequence
  Description of Artificial Sequence: Synthetic oligonucleotide
ugacccucccuuguggcuc

SEQ ID NO: 1377691 - RNA, 19 nt, Artificial Sequence
  Description of Artificial Sequence: Synthetic oligonucleotide
gugagcgugagaguuuguc

SEQ ID NO: 1377692 - RNA, 19 nt, Artificial Sequence
  Description of Artificial Sequence: Synthetic oligonucleotide
gaaugcgcucggucauccc

SEQ ID NO: 1377693 - RNA, 19 nt, Artificial Sequence
  Description of Artificial Sequence: Synthetic oligonucleotide
guuggcgcuggacuccgac

SEQ ID NO: 1377694 - RNA, 19 nt, Artificial Sequence
  Description of Artificial Sequence: Synthetic oligonucleotide
ucgggauuucgaugucgcu

SEQ ID NO: 1377695 - RNA, 19 nt, Artificial Sequence
  Description of Artificial Sequence: Synthetic oligonucleotide
ggugucuuccgugcacucg

SEQ ID NO: 1377696 - RNA, 19 nt, Artificial Sequence
  Description of Artificial Sequence: Synthetic oligonucleotide
ugaaguugugaagguugau

SEQ ID NO: 1377697 - RNA, 19 nt, Artificial Sequence
  Description of Artificial Sequence: Synthetic oligonucleotide
ugguaggcucucacuccug

SEQ ID NO: 1377698 - RNA, 19 nt, Artificial Sequence
  Description of Artificial Sequence: Synthetic oligonucleotide
guuguaggacacccuuauc

SEQ ID NO: 1377699 - RNA, 19 nt, Artificial Sequence
  Description of Artificial Sequence: Synthetic oligonucleotide
ccuguauggacgaacaugu

SEQ ID NO: 1377700 - RNA, 19 nt, Artificial Sequence
  Description of Artificial Sequence: Synthetic oligonucleotide
uccucauguggucguugaa

SEQ ID NO: 1377701 - RNA, 19 nt, Artificial Sequence
  Description of Artificial Sequence: Synthetic oligonucleotide
cuccauuuggucaaacuuu

SEQ ID NO: 1377702 - RNA, 19 nt, Artificial Sequence
  Description of Artificial Sequence: Synthetic oligonucleotide
ucggugucuuccgugcacu

SEQ ID NO: 1377703 - RNA, 19 nt, Artificial Sequence
  Description of Artificial Sequence: Synthetic oligonucleotide
gcuugucuuggaagaaggg

SEQ ID NO: 1377704 - RNA, 19 nt, Artificial Sequence
  Description of Artificial Sequence: Synthetic oligonucleotide
ggguacuugcgaauggcug

SEQ ID NO: 1377705 - RNA, 19 nt, Artificial Sequence
  Description of Artificial Sequence: Synthetic oligonucleotide
cauccccuugcaacugaug

SEQ ID NO: 1377706 - RNA, 19 nt, Artificial Sequence
  Description of Artificial Sequence: Synthetic oligonucleotide
cucguugcuucucucugga

SEQ ID NO: 1377707 - RNA, 19 nt, Artificial Sequence
  Description of Artificial Sequence: Synthetic oligonucleotide
caaucagacgacccggugu

SEQ ID NO: 1377708 - RNA, 19 nt, Artificial Sequence
  Description of Artificial Sequence: Synthetic oligonucleotide
gucggugucuuccgugcac

SEQ ID NO: 1377709 - RNA, 19 nt, Artificial Sequence
  Description of Artificial Sequence: Synthetic oligonucleotide
cccuuaucagagcuguuac

SEQ ID NO: 1377710 - RNA, 19 nt, Artificial Sequence
  Description of Artificial Sequence: Synthetic oligonucleotide
guacuacuuauccgucaga

SEQ ID NO: 1377711 - RNA, 19 nt, Artificial Sequence
  Description of Artificial Sequence: Synthetic oligonucleotide
gacccggcugaguaaucuc

SEQ ID NO: 1377712 - RNA, 19 nt, Artificial Sequence
  Description of Artificial Sequence: Synthetic oligonucleotide
cugccggcugccagcacgc

SEQ ID NO: 1377713 - RNA, 19 nt, Artificial Sequence
  Description of Artificial Sequence: Synthetic oligonucleotide
uugcgaauggcugcccaau

SEQ ID NO: 1377714 - RNA, 19 nt, Artificial Sequence
  Description of Artificial Sequence: Synthetic oligonucleotide
ugugagcgugagaguuugu

SEQ ID NO: 1377715 - RNA, 19 nt, Artificial Sequence
  Description of Artificial Sequence: Synthetic oligonucleotide
ugcgaaccgucacgucaca

SEQ ID NO: 1377716 - RNA, 19 nt, Artificial Sequence
  Description of Artificial Sequence: Synthetic oligonucleotide
augucgcuguagcccagca

SEQ ID NO: 1377717 - RNA, 19 nt, Artificial Sequence
  Description of Artificial Sequence: Synthetic oligonucleotide
uggagaggaggcaccuguu

SEQ ID NO: 1377718 - RNA, 19 nt, Artificial Sequence
  Description of Artificial Sequence: Synthetic oligonucleotide
gcugugaaugcgcucgguc

SEQ ID NO: 1377719 - RNA, 19 nt, Artificial Sequence
  Description of Artificial Sequence: Synthetic oligonucleotide
ggauuucuccccgcggugc

SEQ ID NO: 1377720 - RNA, 19 nt, Artificial Sequence
  Description of Artificial Sequence: Synthetic oligonucleotide
uccgacccggcugaguaau

SEQ ID NO: 1377721 - RNA, 19 nt, Artificial Sequence
  Description of Artificial Sequence: Synthetic oligonucleotide
cugugcaguaaagguggac

SEQ ID NO: 1377722 - RNA, 19 nt, Artificial Sequence
  Description of Artificial Sequence: Synthetic oligonucleotide
cuugcgaauggcugcccaa

SEQ ID NO: 1377723 - RNA, 19 nt, Artificial Sequence
  Description of Artificial Sequence: Synthetic oligonucleotide
ccucauguggucguugaac

SEQ ID NO: 1377724 - RNA, 19 nt, Artificial Sequence
  Description of Artificial Sequence: Synthetic oligonucleotide
ggugccaauagaggagcug

SEQ ID NO: 1377725 - RNA, 19 nt, Artificial Sequence
  Description of Artificial Sequence: Synthetic oligonucleotide
cauccucauguggucguug

SEQ ID NO: 1377726 - RNA, 19 nt, Artificial Sequence
  Description of Artificial Sequence: Synthetic oligonucleotide
uacuugcgaauggcugccc

SEQ ID NO: 1377727 - RNA, 19 nt, Artificial Sequence
  Description of Artificial Sequence: Synthetic oligonucleotide
uuccgugcacucgggauuu

SEQ ID NO: 1377728 - RNA, 19 nt, Artificial Sequence
  Description of Artificial Sequence: Synthetic oligonucleotide
gugcgcgcagcaugcuucc

SEQ ID NO: 1377729 - RNA, 19 nt, Artificial Sequence
  Description of Artificial Sequence: Synthetic oligonucleotide
ggaaggcccggcguuggcg

SEQ ID NO: 1377730 - RNA, 19 nt, Artificial Sequence
  Description of Artificial Sequence: Synthetic oligonucleotide
gacccggugugagcgugag

SEQ ID NO: 1377731 - RNA, 19 nt, Artificial Sequence
  Description of Artificial Sequence: Synthetic oligonucleotide
gaagaaggggcugccggcu

SEQ ID NO: 1377732 - RNA, 19 nt, Artificial Sequence
  Description of Artificial Sequence: Synthetic oligonucleotide
cuguuguaggacacccuua

SEQ ID NO: 1377733 - RNA, 19 nt, Artificial Sequence
  Description of Artificial Sequence: Synthetic oligonucleotide
ugcugugaaugcgcucggu

SEQ ID NO: 1377734 - RNA, 19 nt, Artificial Sequence
  Description of Artificial Sequence: Synthetic oligonucleotide
gguucguaagaaagagaga

SEQ ID NO: 1377735 - RNA, 19 nt, Artificial Sequence
  Description of Artificial Sequence: Synthetic oligonucleotide
gcggugugcgcgcagcaug

SEQ ID NO: 1377736 - RNA, 19 nt, Artificial Sequence
  Description of Artificial Sequence: Synthetic oligonucleotide
gugccugcgggaggggucc

SEQ ID NO: 1377737 - RNA, 19 nt, Artificial Sequence
  Description of Artificial Sequence: Synthetic oligonucleotide
augcgcucggucauccccu

SEQ ID NO: 1377738 - RNA, 19 nt, Artificial Sequence
  Description of Artificial Sequence: Synthetic oligonucleotide
acgacccggugugagcgug

SEQ ID NO: 1377739 - RNA, 19 nt, Artificial Sequence
  Description of Artificial Sequence: Synthetic oligonucleotide
gucuuccgugcacucggga

SEQ ID NO: 1377740 - RNA, 19 nt, Artificial Sequence
  Description of Artificial Sequence: Synthetic oligonucleotide
cugguaggcucucacuccu

SEQ ID NO: 1377741 - RNA, 19 nt, Artificial Sequence
  Description of Artificial Sequence: Synthetic oligonucleotide
ugcuuccguggaugcgaac

SEQ ID NO: 1377742 - RNA, 19 nt, Artificial Sequence
  Description of Artificial Sequence: Synthetic oligonucleotide
cacaaucagacgacccggu

SEQ ID NO: 1377743 - RNA, 19 nt, Artificial Sequence
  Description of Artificial Sequence: Synthetic oligonucleotide
cgggauuucgaugucgcug

SEQ ID NO: 1377744 - RNA, 19 nt, Artificial Sequence
  Description of Artificial Sequence: Synthetic oligonucleotide
cagguucggugccaauaga

SEQ ID NO: 1377745 - RNA, 19 nt, Artificial Sequence
  Description of Artificial Sequence: Synthetic oligonucleotide
ggucucgagcacggaauug

SEQ ID NO: 1377746 - RNA, 19 nt, Artificial Sequence
  Description of Artificial Sequence: Synthetic oligonucleotide
ccccuugcaacugauguca

SEQ ID NO: 1377747 - RNA, 19 nt, Artificial Sequence
  Description of Artificial Sequence: Synthetic oligonucleotide
gugaaugcgcucggucauc

SEQ ID NO: 1377748 - RNA, 19 nt, Artificial Sequence
  Description of Artificial Sequence: Synthetic oligonucleotide
accacgccuggugggccgg

SEQ ID NO: 1377749 - RNA, 19 nt, Artificial Sequence
  Description of Artificial Sequence: Synthetic oligonucleotide
gaccccggaaucaaagcuu

SEQ ID NO: 1377750 - RNA, 19 nt, Artificial Sequence
  Description of Artificial Sequence: Synthetic oligonucleotide
uuucaccuuugggcucacu

SEQ ID NO: 1377751 - RNA, 19 nt, Artificial Sequence
  Description of Artificial Sequence: Synthetic oligonucleotide
gugcacucgggauuucgau

SEQ ID NO: 1377752 - RNA, 19 nt, Artificial Sequence
  Description of Artificial Sequence: Synthetic oligonucleotide
gcagacggagcagacguaa

SEQ ID NO: 1377753 - RNA, 19 nt, Artificial Sequence
  Description of Artificial Sequence: Synthetic oligonucleotide
aucagacgacccgguguga

SEQ ID NO: 1377754 - RNA, 19 nt, Artificial Sequence
  Description of Artificial Sequence: Synthetic oligonucleotide
ggacgaacaugugcuugac

SEQ ID NO: 1377755 - RNA, 19 nt, Artificial Sequence
  Description of Artificial Sequence: Synthetic oligonucleotide
ggcguuggcgcuggacucc

SEQ ID NO: 1377756 - RNA, 19 nt, Artificial Sequence
  Description of Artificial Sequence: Synthetic oligonucleotide
cccggaaucaaagcuuuca

SEQ ID NO: 1377757 - RNA, 19 nt, Artificial Sequence
  Description of Artificial Sequence: Synthetic oligonucleotide
cuuugggcucacucucugu

SEQ ID NO: 1377758 - RNA, 19 nt, Artificial Sequence
  Description of Artificial Sequence: Synthetic oligonucleotide
guuugucagugaauguguu

SEQ ID NO: 1377759 - RNA, 19 nt, Artificial Sequence
  Description of Artificial Sequence: Synthetic oligonucleotide
cucggucauccccuugcaa

SEQ ID NO: 1377760 - RNA, 19 nt, Artificial Sequence
  Description of Artificial Sequence: Synthetic oligonucleotide
cgaaccgucacgucacaga

SEQ ID NO: 1377761 - RNA, 19 nt, Artificial Sequence
  Description of Artificial Sequence: Synthetic oligonucleotide
cgaauggcugcccaaugga

SEQ ID NO: 1377762 - RNA, 19 nt, Artificial Sequence
  Description of Artificial Sequence: Synthetic oligonucleotide
ugggccggcgcgggcaccu

SEQ ID NO: 1377763 - RNA, 19 nt, Artificial Sequence
  Description of Artificial Sequence: Synthetic oligonucleotide
ucggccuggucggugucuu

SEQ ID NO: 1377764 - RNA, 19 nt, Artificial Sequence
  Description of Artificial Sequence: Synthetic oligonucleotide
guuuggcugugaaagucuu

SEQ ID NO: 1377765 - RNA, 19 nt, Artificial Sequence
  Description of Artificial Sequence: Synthetic oligonucleotide
gcucagguugggcggguuc

SEQ ID NO: 1377766 - RNA, 19 nt, Artificial Sequence
  Description of Artificial Sequence: Synthetic oligonucleotide
agcggugugcgcgcagcau

SEQ ID NO: 1377767 - RNA, 19 nt, Artificial Sequence
  Description of Artificial Sequence: Synthetic oligonucleotide
gcgaaccgucacgucacag

SEQ ID NO: 1377768 - RNA, 19 nt, Artificial Sequence
  Description of Artificial Sequence: Synthetic oligonucleotide
cacgccuggugggccggcg

SEQ ID NO: 1377769 - RNA, 19 nt, Artificial Sequence
  Description of Artificial Sequence: Synthetic oligonucleotide
cuuucaccuuugggcucac

SEQ ID NO: 1377770 - RNA, 19 nt, Artificial Sequence
  Description of Artificial Sequence: Synthetic oligonucleotide
ccgugcacucgggauuucg

SEQ ID NO: 1377771 - RNA, 19 nt, Artificial Sequence
  Description of Artificial Sequence: Synthetic oligonucleotide
augcuuccguggaugcgaa

SEQ ID NO: 1377772 - RNA, 19 nt, Artificial Sequence
  Description of Artificial Sequence: Synthetic oligonucleotide
gcguuggcgcuggacuccg

SEQ ID NO: 1377773 - RNA, 19 nt, Artificial Sequence
  Description of Artificial Sequence: Synthetic oligonucleotide
cccuugcaacugaugucac

SEQ ID NO: 1377774 - RNA, 19 nt, Artificial Sequence
  Description of Artificial Sequence: Synthetic oligonucleotide
acccggugugagcgugaga

SEQ ID NO: 1377775 - RNA, 19 nt, Artificial Sequence
  Description of Artificial Sequence: Synthetic oligonucleotide
cgcgcagcaugcuuccgug

SEQ ID NO: 1377776 - RNA, 19 nt, Artificial Sequence
  Description of Artificial Sequence: Synthetic oligonucleotide
ggggucccguugcuggcac

SEQ ID NO: 1377777 - RNA, 19 nt, Artificial Sequence
  Description of Artificial Sequence: Synthetic oligonucleotide
cucucacuccugugugugu

SEQ ID NO: 1377778 - RNA, 19 nt, Artificial Sequence
  Description of Artificial Sequence: Synthetic oligonucleotide
ccguggaugcgaaccguca

SEQ ID NO: 1377779 - RNA, 19 nt, Artificial Sequence
  Description of Artificial Sequence: Synthetic oligonucleotide
gcuacacugguaggcucuc

SEQ ID NO: 1377780 - RNA, 19 nt, Artificial Sequence
  Description of Artificial Sequence: Synthetic oligonucleotide
gacgacccggugugagcgu

SEQ ID NO: 1377781 - RNA, 19 nt, Artificial Sequence
  Description of Artificial Sequence: Synthetic oligonucleotide
cuccgacccggcugaguaa

SEQ ID NO: 1377782 - RNA, 19 nt, Artificial Sequence
  Description of Artificial Sequence: Synthetic oligonucleotide
ggguucugccugacccucc

SEQ ID NO: 1377783 - RNA, 19 nt, Artificial Sequence
  Description of Artificial Sequence: Synthetic oligonucleotide
cugccugacccucccuugu

SEQ ID NO: 1377784 - RNA, 19 nt, Artificial Sequence
  Description of Artificial Sequence: Synthetic oligonucleotide
ggccggcgcgggcaccugg

SEQ ID NO: 1377785 - RNA, 19 nt, Artificial Sequence
  Description of Artificial Sequence: Synthetic oligonucleotide
cagagcuguuacugacagu

SEQ ID NO: 1377786 - RNA, 19 nt, Artificial Sequence
  Description of Artificial Sequence: Synthetic oligonucleotide
cagcggugugcgcgcagca

SEQ ID NO: 1377787 - RNA, 19 nt, Artificial Sequence
  Description of Artificial Sequence: Synthetic oligonucleotide
ccuuguggcuccugcccca

SEQ ID NO: 1377788 - RNA, 19 nt, Artificial Sequence
  Description of Artificial Sequence: Synthetic oligonucleotide
cgugcacucgggauuucga

SEQ ID NO: 1377789 - RNA, 19 nt, Artificial Sequence
  Description of Artificial Sequence: Synthetic oligonucleotide
caccuguauggacgaacau

SEQ ID NO: 1377790 - RNA, 19 nt, Artificial Sequence
  Description of Artificial Sequence: Synthetic oligonucleotide
uccgugcacucgggauuuc

SEQ ID NO: 1377791 - RNA, 19 nt, Artificial Sequence
  Description of Artificial Sequence: Synthetic oligonucleotide
ugccugcgggagggguccc

SEQ ID NO: 1377792 - RNA, 19 nt, Artificial Sequence
  Description of Artificial Sequence: Synthetic oligonucleotide
ggauuucgaugucgcugua

SEQ ID NO: 1377793 - RNA, 19 nt, Artificial Sequence
  Description of Artificial Sequence: Synthetic oligonucleotide
cgaacaugugcuugacaua

SEQ ID NO: 1377794 - RNA, 19 nt, Artificial Sequence
  Description of Artificial Sequence: Synthetic oligonucleotide
gccggcgcgggcaccuggg

SEQ ID NO: 1377795 - RNA, 19 nt, Artificial Sequence
  Description of Artificial Sequence: Synthetic oligonucleotide
cgugccugcgggagggguc

SEQ ID NO: 1377796 - RNA, 19 nt, Artificial Sequence
  Description of Artificial Sequence: Synthetic oligonucleotide
gugugcgcgcagcaugcuu

SEQ ID NO: 1377797 - RNA, 19 nt, Artificial Sequence
  Description of Artificial Sequence: Synthetic oligonucleotide
gggagcgccaacagaugcu

SEQ ID NO: 1377798 - RNA, 19 nt, Artificial Sequence
  Description of Artificial Sequence: Synthetic oligonucleotide
gacuccgacccggcugagu

SEQ ID NO: 1377799 - RNA, 19 nt, Artificial Sequence
  Description of Artificial Sequence: Synthetic oligonucleotide
gcacggaauugcugaaguu

SEQ ID NO: 1377800 - RNA, 19 nt, Artificial Sequence
  Description of Artificial Sequence: Synthetic oligonucleotide
cccaauggauguguugacu

SEQ ID NO: 1377801 - RNA, 19 nt, Artificial Sequence
  Description of Artificial Sequence: Synthetic oligonucleotide
gccugcgggaggggucccg

SEQ ID NO: 1377802 - RNA, 19 nt, Artificial Sequence
  Description of Artificial Sequence: Synthetic oligonucleotide
ggcuguuguaggacacccu

SEQ ID NO: 1377803 - RNA, 19 nt, Artificial Sequence
  Description of Artificial Sequence: Synthetic oligonucleotide
gcgcgcagcaugcuuccgu

SEQ ID NO: 1377804 - RNA, 19 nt, Artificial Sequence
  Description of Artificial Sequence: Synthetic oligonucleotide
guguugacugaaggcuguu

SEQ ID NO: 1377805 - RNA, 19 nt, Artificial Sequence
  Description of Artificial Sequence: Synthetic oligonucleotide
ccgacccggcugaguaauc

SEQ ID NO: 1377806 - RNA, 19 nt, Artificial Sequence
  Description of Artificial Sequence: Synthetic oligonucleotide
cggugucuuccgugcacuc

SEQ ID NO: 1377807 - RNA, 19 nt, Artificial Sequence
  Description of Artificial Sequence: Synthetic oligonucleotide
cggguucugccugacccuc

SEQ ID NO: 1377808 - RNA, 19 nt, Artificial Sequence
  Description of Artificial Sequence: Synthetic oligonucleotide
ggcagacggagcagacgua

SEQ ID NO: 1377809 - RNA, 19 nt, Artificial Sequence
  Description of Artificial Sequence: Synthetic oligonucleotide
cacgguugcgcugcucguu

SEQ ID NO: 1377810 - RNA, 19 nt, Artificial Sequence
  Description of Artificial Sequence: Synthetic oligonucleotide
guguuaccaugugcuugau

SEQ ID NO: 1377811 - RNA, 19 nt, Artificial Sequence
  Description of Artificial Sequence: Synthetic oligonucleotide
cccggcguuggcgcuggac

SEQ ID NO: 1377812 - RNA, 19 nt, Artificial Sequence
  Description of Artificial Sequence: Synthetic oligonucleotide
cacccuuaucagagcuguu

SEQ ID NO: 1377813 - RNA, 19 nt, Artificial Sequence
  Description of Artificial Sequence: Synthetic oligonucleotide
gcgccaacagaugcugcau

SEQ ID NO: 1377814 - RNA, 19 nt, Artificial Sequence
  Description of Artificial Sequence: Synthetic oligonucleotide
ggugugcgcgcagcaugcu

SEQ ID NO: 1377815 - RNA, 19 nt, Artificial Sequence
  Description of Artificial Sequence: Synthetic oligonucleotide
caccuguuucuagcugguu

SEQ ID NO: 1377816 - RNA, 19 nt, Artificial Sequence
  Description of Artificial Sequence: Synthetic oligonucleotide
ccggugugagcgugagagu

SEQ ID NO: 1377817 - RNA, 19 nt, Artificial Sequence
  Description of Artificial Sequence: Synthetic oligonucleotide
ggccacgguugcgcugcuc

SEQ ID NO: 1377818 - RNA, 19 nt, Artificial Sequence
  Description of Artificial Sequence: Synthetic oligonucleotide
ccacgguugcgcugcucgu

SEQ ID NO: 1377819 - RNA, 19 nt, Artificial Sequence
  Description of Artificial Sequence: Synthetic oligonucleotide
cgacccggcugaguaaucu

SEQ ID NO: 1377820 - RNA, 19 nt, Artificial Sequence
  Description of Artificial Sequence: Synthetic oligonucleotide
cugcgggaggggucccguu

SEQ ID NO: 1377821 - RNA, 19 nt, Artificial Sequence
  Description of Artificial Sequence: Synthetic oligonucleotide
cgccuugcccacuggcugu

SEQ ID NO: 1377822 - RNA, 19 nt, Artificial Sequence
  Description of Artificial Sequence: Synthetic oligonucleotide
cggugccaauagaggagcu

SEQ ID NO: 1377823 - RNA, 19 nt, Artificial Sequence
  Description of Artificial Sequence: Synthetic oligonucleotide
cgggaggggucccguugcu

SEQ ID NO: 1377824 - RNA, 19 nt, Artificial Sequence
  Description of Artificial Sequence: Synthetic oligonucleotide
gcccggcguuggcgcugga

SEQ ID NO: 1377825 - RNA, 19 nt, Artificial Sequence
  Description of Artificial Sequence: Synthetic oligonucleotide
uuuguuaucagacucaacu

SEQ ID NO: 1377826 - RNA, 19 nt, Artificial Sequence
  Description of Artificial Sequence: Synthetic oligonucleotide
uucagaacggcuuuaaugg

SEQ ID NO: 1377827 - RNA, 19 nt, Artificial Sequence
  Description of Artificial Sequence: Synthetic oligonucleotide
uaaauauucuaccugagac

SEQ ID NO: 1377828 - RNA, 19 nt, Artificial Sequence
  Description of Artificial Sequence: Synthetic oligonucleotide
aauucauuaauuuucugaa

SEQ ID NO: 1377829 - RNA, 19 nt, Artificial Sequence
  Description of Artificial Sequence: Synthetic oligonucleotide
aauauucuaccugagacag

SEQ ID NO: 1377830 - RNA, 19 nt, Artificial Sequence
  Description of Artificial Sequence: Synthetic oligonucleotide
uuuaauuucguacaagaau

SEQ ID NO: 1377831 - RNA, 19 nt, Artificial Sequence
  Description of Artificial Sequence: Synthetic oligonucleotide
uuaauuucguacaagaaua

SEQ ID NO: 1377832 - RNA, 19 nt, Artificial Sequence
  Description of Artificial Sequence: Synthetic oligonucleotide
uaauucauuaauuuucuga

SEQ ID NO: 1377833 - RNA, 19 nt, Artificial Sequence
  Description of Artificial Sequence: Synthetic oligonucleotide
uuuacaaacaguacaggga

SEQ ID NO: 1377834 - RNA, 19 nt, Artificial Sequence
  Description of Artificial Sequence: Synthetic oligonucleotide
aagaaagacauucacaguu

SEQ ID NO: 1377835 - RNA, 19 nt, Artificial Sequence
  Description of Artificial Sequence: Synthetic oligonucleotide
aauagcaucacugugcacu

SEQ ID NO: 1377836 - RNA, 19 nt, Artificial Sequence
  Description of Artificial Sequence: Synthetic oligonucleotide
uuuauagucaucaccccag

SEQ ID NO: 1377837 - RNA, 19 nt, Artificial Sequence
  Description of Artificial Sequence: Synthetic oligonucleotide
uuugauggauaucucauug

SEQ ID NO: 1377838 - RNA, 19 nt, Artificial Sequence
  Description of Artificial Sequence: Synthetic oligonucleotide
ugaauuuaccuuucgcugg

SEQ ID NO: 1377839 - RNA, 19 nt, Artificial Sequence
  Description of Artificial Sequence: Synthetic oligonucleotide
uucauuaauuuucugaauc

SEQ ID NO: 1377840 - RNA, 19 nt, Artificial Sequence
  Description of Artificial Sequence: Synthetic oligonucleotide
uuucgcuggaaccucaugg

SEQ ID NO: 1377841 - RNA, 19 nt, Artificial Sequence
  Description of Artificial Sequence: Synthetic oligonucleotide
aacuucugaguauuuucgc

SEQ ID NO: 1377842 - RNA, 19 nt, Artificial Sequence
  Description of Artificial Sequence: Synthetic oligonucleotide
aaauauucuaccugagaca

SEQ ID NO: 1377843 - RNA, 19 nt, Artificial Sequence
  Description of Artificial Sequence: Synthetic oligonucleotide
uuucagaacggcuuuaaug

SEQ ID NO: 1377844 - RNA, 19 nt, Artificial Sequence
  Description of Artificial Sequence: Synthetic oligonucleotide
ucugcagacagauacgugc

SEQ ID NO: 1377845 - RNA, 19 nt, Artificial Sequence
  Description of Artificial Sequence: Synthetic oligonucleotide
ucauuaauuuucugaaucc

SEQ ID NO: 1377846 - RNA, 19 nt, Artificial Sequence
  Description of Artificial Sequence: Synthetic oligonucleotide
ugaucuugcucacugcugg

SEQ ID NO: 1377847 - RNA, 19 nt, Artificial Sequence
  Description of Artificial Sequence: Synthetic oligonucleotide
uugaauuuaccuuucgcug

SEQ ID NO: 1377848 - RNA, 19 nt, Artificial Sequence
  Description of Artificial Sequence: Synthetic oligonucleotide
uaauucauuacacauuuua

SEQ ID NO: 1377849 - RNA, 19 nt, Artificial Sequence
  Description of Artificial Sequence: Synthetic oligonucleotide
ugauucaccacaugcauug

SEQ ID NO: 1377850 - RNA, 19 nt, Artificial Sequence
  Description of Artificial Sequence: Synthetic oligonucleotide
uuacaaacaguacagggaa

SEQ ID NO: 1377851 - RNA, 19 nt, Artificial Sequence
  Description of Artificial Sequence: Synthetic oligonucleotide
aaagugugugaagugacgg

SEQ ID NO: 1377852 - RNA, 19 nt, Artificial Sequence
  Description of Artificial Sequence: Synthetic oligonucleotide
uuuucugaauccaugccug

SEQ ID NO: 1377853 - RNA, 19 nt, Artificial Sequence
  Description of Artificial Sequence: Synthetic oligonucleotide
ucacugauucaccacaugc

SEQ ID NO: 1377854 - RNA, 19 nt, Artificial Sequence
  Description of Artificial Sequence: Synthetic oligonucleotide
agauacgugcuuuuccacc

SEQ ID NO: 1377855 - RNA, 19 nt, Artificial Sequence
  Description of Artificial Sequence: Synthetic oligonucleotide
acugaugcacuucacgugg

SEQ ID NO: 1377856 - RNA, 19 nt, Artificial Sequence
  Description of Artificial Sequence: Synthetic oligonucleotide
uguuauaauucauuacaca

SEQ ID NO: 1377857 - RNA, 19 nt, Artificial Sequence
  Description of Artificial Sequence: Synthetic oligonucleotide
uucacugaugcacuucacg

SEQ ID NO: 1377858 - RNA, 19 nt, Artificial Sequence
  Description of Artificial Sequence: Synthetic oligonucleotide
auggauaucucauugucug

SEQ ID NO: 1377859 - RNA, 19 nt, Artificial Sequence
  Description of Artificial Sequence: Synthetic oligonucleotide
uuuaccuuucgcuggaacc

SEQ ID NO: 1377860 - RNA, 19 nt, Artificial Sequence
  Description of Artificial Sequence: Synthetic oligonucleotide
ugacuaaauauucuaccug

SEQ ID NO: 1377861 - RNA, 19 nt, Artificial Sequence
  Description of Artificial Sequence: Synthetic oligonucleotide
ugguuaaaugacuaaauau

SEQ ID NO: 1377862 - RNA, 19 nt, Artificial Sequence
  Description of Artificial Sequence: Synthetic oligonucleotide
cagaauagcaucacugugc

SEQ ID NO: 1377863 - RNA, 19 nt, Artificial Sequence
  Description of Artificial Sequence: Synthetic oligonucleotide
uguuaucagacucaacuuc

SEQ ID NO: 1377864 - RNA, 19 nt, Artificial Sequence
  Description of Artificial Sequence: Synthetic oligonucleotide
gacuaaauauucuaccuga

SEQ ID NO: 1377865 - RNA, 19 nt, Artificial Sequence
  Description of Artificial Sequence: Synthetic oligonucleotide
aaccuuagggcugacauug

SEQ ID NO: 1377866 - RNA, 19 nt, Artificial Sequence
  Description of Artificial Sequence: Synthetic oligonucleotide
auuuucugaauccaugccu

SEQ ID NO: 1377867 - RNA, 19 nt, Artificial Sequence
  Description of Artificial Sequence: Synthetic oligonucleotide
augacuaaauauucuaccu

SEQ ID NO: 1377868 - RNA, 19 nt, Artificial Sequence
  Description of Artificial Sequence: Synthetic oligonucleotide
auuaguuucagaaagcaaa

SEQ ID NO: 1377869 - RNA, 19 nt, Artificial Sequence
  Description of Artificial Sequence: Synthetic oligonucleotide
acugauuugcugcaaaagu

SEQ ID NO: 1377870 - RNA, 19 nt, Artificial Sequence
  Description of Artificial Sequence: Synthetic oligonucleotide
cugcagaugacuuagccac

SEQ ID NO: 1377871 - RNA, 19 nt, Artificial Sequence
  Description of Artificial Sequence: Synthetic oligonucleotide
acuuguucuucuguggugc

SEQ ID NO: 1377872 - RNA, 19 nt, Artificial Sequence
  Description of Artificial Sequence: Synthetic oligonucleotide
augcaagaaagacauucac

SEQ ID NO: 1377873 - RNA, 19 nt, Artificial Sequence
  Description of Artificial Sequence: Synthetic oligonucleotide
cugauuuucacugaugcac

SEQ ID NO: 1377874 - RNA, 19 nt, Artificial Sequence
  Description of Artificial Sequence: Synthetic oligonucleotide
uccgccaacggucuuaacc

SEQ ID NO: 1377875 - RNA, 19 nt, Artificial Sequence
  Description of Artificial Sequence: Synthetic oligonucleotide
aacggucuuaaccggccgc

SEQ ID NO: 1377876 - RNA, 19 nt, Artificial Sequence
  Description of Artificial Sequence: Synthetic oligonucleotide
gugguacugagcuauaacc

SEQ ID NO: 1377877 - RNA, 19 nt, Artificial Sequence
  Description of Artificial Sequence: Synthetic oligonucleotide
uauucuaccugagacaggu

SEQ ID NO: 1377878 - RNA, 19 nt, Artificial Sequence
  Description of Artificial Sequence: Synthetic oligonucleotide
ucuuccuauucuucugucg

SEQ ID NO: 1377879 - RNA, 19 nt, Artificial Sequence
  Description of Artificial Sequence: Synthetic oligonucleotide
ugacuuagccacauggcug

SEQ ID NO: 1377880 - RNA, 19 nt, Artificial Sequence
  Description of Artificial Sequence: Synthetic oligonucleotide
uugcuaauuuucuuguuga

SEQ ID NO: 1377881 - RNA, 19 nt, Artificial Sequence
  Description of Artificial Sequence: Synthetic oligonucleotide
ucaaaagugugugaaguga

SEQ ID NO: 1377882 - RNA, 19 nt, Artificial Sequence
  Description of Artificial Sequence: Synthetic oligonucleotide
uagucaucaccccagaaau

SEQ ID NO: 1377883 - RNA, 19 nt, Artificial Sequence
  Description of Artificial Sequence: Synthetic oligonucleotide
aaaagugugugaagugacg

SEQ ID NO: 1377884 - RNA, 19 nt, Artificial Sequence
  Description of Artificial Sequence: Synthetic oligonucleotide
ugauggauaucucauuguc

SEQ ID NO: 1377885 - RNA, 19 nt, Artificial Sequence
  Description of Artificial Sequence: Synthetic oligonucleotide
cagauggaaccuuaguggg

SEQ ID NO: 1377886 - RNA, 19 nt, Artificial Sequence
  Description of Artificial Sequence: Synthetic oligonucleotide
ucaacuucugaguauuuuc

SEQ ID NO: 1377887 - RNA, 19 nt, Artificial Sequence
  Description of Artificial Sequence: Synthetic oligonucleotide
aaacaguacagggaagcag

SEQ ID NO: 1377888 - RNA, 19 nt, Artificial Sequence
  Description of Artificial Sequence: Synthetic oligonucleotide
guuauaauucauuacacau

SEQ ID NO: 1377889 - RNA, 19 nt, Artificial Sequence
  Description of Artificial Sequence: Synthetic oligonucleotide
caaugcaagaaagacauuc

SEQ ID NO: 1377890 - RNA, 19 nt, Artificial Sequence
  Description of Artificial Sequence: Synthetic oligonucleotide
ugguacugagcuauaaccu

SEQ ID NO: 1377891 - RNA, 19 nt, Artificial Sequence
  Description of Artificial Sequence: Synthetic oligonucleotide
agaacggcuuuaauggucc

SEQ ID NO: 1377892 - RNA, 19 nt, Artificial Sequence
  Description of Artificial Sequence: Synthetic oligonucleotide
uuucguacaagaauauauu

SEQ ID NO: 1377893 - RNA, 19 nt, Artificial Sequence
  Description of Artificial Sequence: Synthetic oligonucleotide
auucacaguuucugcagac

SEQ ID NO: 1377894 - RNA, 19 nt, Artificial Sequence
  Description of Artificial Sequence: Synthetic oligonucleotide
aauucggguuguuauaauu

SEQ ID NO: 1377895 - RNA, 19 nt, Artificial Sequence
  Description of Artificial Sequence: Synthetic oligonucleotide
aaaauucggguuguuauaa

SEQ ID NO: 1377896 - RNA, 19 nt, Artificial Sequence
  Description of Artificial Sequence: Synthetic oligonucleotide
augugucuuggcuucauag

SEQ ID NO: 1377897 - RNA, 19 nt, Artificial Sequence
  Description of Artificial Sequence: Synthetic oligonucleotide
gacagauacgugcuuuucc

SEQ ID NO: 1377898 - RNA, 19 nt, Artificial Sequence
  Description of Artificial Sequence: Synthetic oligonucleotide
auuuaccuuucgcuggaac

SEQ ID NO: 1377899 - RNA, 19 nt, Artificial Sequence
  Description of Artificial Sequence: Synthetic oligonucleotide
uccaguugaauuuaccuuu

SEQ ID NO: 1377900 - RNA, 19 nt, Artificial Sequence
  Description of Artificial Sequence: Synthetic oligonucleotide
ucguacaagaauauauuuu

SEQ ID NO: 1377901 - RNA, 19 nt, Artificial Sequence
  Description of Artificial Sequence: Synthetic oligonucleotide
ucugcagaugacuuagcca

SEQ ID NO: 1377902 - RNA, 19 nt, Artificial Sequence
  Description of Artificial Sequence: Synthetic oligonucleotide
accugagacagguuugaac

SEQ ID NO: 1377903 - RNA, 19 nt, Artificial Sequence
  Description of Artificial Sequence: Synthetic oligonucleotide
auuucguacaagaauauau

SEQ ID NO: 1377904 - RNA, 19 nt, Artificial Sequence
  Description of Artificial Sequence: Synthetic oligonucleotide
ugcaaaaguucuccaaccu

SEQ ID NO: 1377905 - RNA, 19 nt, Artificial Sequence
  Description of Artificial Sequence: Synthetic oligonucleotide
ugacggugcauucacuuca

SEQ ID NO: 1377906 - RNA, 19 nt, Artificial Sequence
  Description of Artificial Sequence: Synthetic oligonucleotide
gauaucucauugucuggag

SEQ ID NO: 1377907 - RNA, 19 nt, Artificial Sequence
  Description of Artificial Sequence: Synthetic oligonucleotide
uccagaauagcaucacugu

SEQ ID NO: 1377908 - RNA, 19 nt, Artificial Sequence
  Description of Artificial Sequence: Synthetic oligonucleotide
auagucaucaccccagaaa

SEQ ID NO: 1377909 - RNA, 19 nt, Artificial Sequence
  Description of Artificial Sequence: Synthetic oligonucleotide
augacuuagccacauggcu

SEQ ID NO: 1377910 - RNA, 19 nt, Artificial Sequence
  Description of Artificial Sequence: Synthetic oligonucleotide
ugcaucaccuuuauguguc

SEQ ID NO: 1377911 - RNA, 19 nt, Artificial Sequence
  Description of Artificial Sequence: Synthetic oligonucleotide
cuuuaugugucuuggcuuc

SEQ ID NO: 1377912 - RNA, 19 nt, Artificial Sequence
  Description of Artificial Sequence: Synthetic oligonucleotide
aaugcaagaaagacauuca

SEQ ID NO: 1377913 - RNA, 19 nt, Artificial Sequence
  Description of Artificial Sequence: Synthetic oligonucleotide
ucugacaugugauggucgc

SEQ ID NO: 1377914 - RNA, 19 nt, Artificial Sequence
  Description of Artificial Sequence: Synthetic oligonucleotide
uuaguggggaucucugcag

SEQ ID NO: 1377915 - RNA, 19 nt, Artificial Sequence
  Description of Artificial Sequence: Synthetic oligonucleotide
uucggguuguuauaauuca

SEQ ID NO: 1377916 - RNA, 19 nt, Artificial Sequence
  Description of Artificial Sequence: Synthetic oligonucleotide
caaaagugugugaagugac

SEQ ID NO: 1377917 - RNA, 19 nt, Artificial Sequence
  Description of Artificial Sequence: Synthetic oligonucleotide
cuuuuauagucaucacccc

SEQ ID NO: 1377918 - RNA, 19 nt, Artificial Sequence
  Description of Artificial Sequence: Synthetic oligonucleotide
aacggcuuuaauggucccc

SEQ ID NO: 1377919 - RNA, 19 nt, Artificial Sequence
  Description of Artificial Sequence: Synthetic oligonucleotide
uccuuaacuuaaaauuagu

SEQ ID NO: 1377920 - RNA, 19 nt, Artificial Sequence
  Description of Artificial Sequence: Synthetic oligonucleotide
ucaaaagcacugauuugcu

SEQ ID NO: 1377921 - RNA, 19 nt, Artificial Sequence
  Description of Artificial Sequence: Synthetic oligonucleotide
accuuuaugugucuuggcu

SEQ ID NO: 1377922 - RNA, 19 nt, Artificial Sequence
  Description of Artificial Sequence: Synthetic oligonucleotide
auucggguuguuauaauuc

SEQ ID NO: 1377923 - RNA, 19 nt, Artificial Sequence
  Description of Artificial Sequence: Synthetic oligonucleotide
guugaauuuaccuuucgcu

SEQ ID NO: 1377924 - RNA, 19 nt, Artificial Sequence
  Description of Artificial Sequence: Synthetic oligonucleotide
ugcuuuuccaccuguauuu

SEQ ID NO: 1377925 - RNA, 19 nt, Artificial Sequence
  Description of Artificial Sequence: Synthetic oligonucleotide
cugcaaaaguucuccaacc

SEQ ID NO: 1377926 - RNA, 19 nt, Artificial Sequence
  Description of Artificial Sequence: Synthetic oligonucleotide
uggauaucucauugucugg

SEQ ID NO: 1377927 - RNA, 19 nt, Artificial Sequence
  Description of Artificial Sequence: Synthetic oligonucleotide
uucguacaagaauauauuu

SEQ ID NO: 1377928 - RNA, 19 nt, Artificial Sequence
  Description of Artificial Sequence: Synthetic oligonucleotide
ucugauuuucacugaugca

SEQ ID NO: 1377929 - RNA, 19 nt, Artificial Sequence
  Description of Artificial Sequence: Synthetic oligonucleotide
uggggaucucugcagauga

SEQ ID NO: 1377930 - RNA, 19 nt, Artificial Sequence
  Description of Artificial Sequence: Synthetic oligonucleotide
uaucagacucaacuucuga

SEQ ID NO: 1377931 - RNA, 19 nt, Artificial Sequence
  Description of Artificial Sequence: Synthetic oligonucleotide
ugggaacauugucaaaagc

SEQ ID NO: 1377932 - RNA, 19 nt, Artificial Sequence
  Description of Artificial Sequence: Synthetic oligonucleotide
uuaucagacucaacuucug

SEQ ID NO: 1377933 - RNA, 19 nt, Artificial Sequence
  Description of Artificial Sequence: Synthetic oligonucleotide
uaauuucguacaagaauau

SEQ ID NO: 1377934 - RNA, 19 nt, Artificial Sequence
  Description of Artificial Sequence: Synthetic oligonucleotide
uucuaccugagacagguuu

SEQ ID NO: 1377935 - RNA, 19 nt, Artificial Sequence
  Description of Artificial Sequence: Synthetic oligonucleotide
uaauuuucuuguugaagau

SEQ ID NO: 1377936 - RNA, 19 nt, Artificial Sequence
  Description of Artificial Sequence: Synthetic oligonucleotide
ugucuuggcuucauagucu

SEQ ID NO: 1377937 - RNA, 19 nt, Artificial Sequence
  Description of Artificial Sequence: Synthetic oligonucleotide
uuuguuugggcagauggaa

SEQ ID NO: 1377938 - RNA, 19 nt, Artificial Sequence
  Description of Artificial Sequence: Synthetic oligonucleotide
gaugacuuagccacauggc

SEQ ID NO: 1377939 - RNA, 19 nt, Artificial Sequence
  Description of Artificial Sequence: Synthetic oligonucleotide
ucacguggcuuuuauaguc

SEQ ID NO: 1377940 - RNA, 19 nt, Artificial Sequence
  Description of Artificial Sequence: Synthetic oligonucleotide
gaagugacggugcauucac

SEQ ID NO: 1377941 - RNA, 19 nt, Artificial Sequence
  Description of Artificial Sequence: Synthetic oligonucleotide
aagugugugaagugacggu

SEQ ID NO: 1377942 - RNA, 19 nt, Artificial Sequence
  Description of Artificial Sequence: Synthetic oligonucleotide
uugauggauaucucauugu

SEQ ID NO: 1377943 - RNA, 19 nt, Artificial Sequence
  Description of Artificial Sequence: Synthetic oligonucleotide
uuaccuuucgcuggaaccu

SEQ ID NO: 1377944 - RNA, 19 nt, Artificial Sequence
  Description of Artificial Sequence: Synthetic oligonucleotide
ugugauggucgcuugucac

SEQ ID NO: 1377945 - RNA, 19 nt, Artificial Sequence
  Description of Artificial Sequence: Synthetic oligonucleotide
uggucugccccucaucagc

SEQ ID NO: 1377946 - RNA, 19 nt, Artificial Sequence
  Description of Artificial Sequence: Synthetic oligonucleotide
ggcagauggaaccuuagug

SEQ ID NO: 1377947 - RNA, 19 nt, Artificial Sequence
  Description of Artificial Sequence: Synthetic oligonucleotide
aauuaguuucagaaagcaa

SEQ ID NO: 1377948 - RNA, 19 nt, Artificial Sequence
  Description of Artificial Sequence: Synthetic oligonucleotide
aagccugcccaccccgggc

SEQ ID NO: 1377949 - RNA, 19 nt, Artificial Sequence
  Description of Artificial Sequence: Synthetic oligonucleotide
aagcuugacucuguccuuc

SEQ ID NO: 1377950 - RNA, 19 nt, Artificial Sequence
  Description of Artificial Sequence: Synthetic oligonucleotide
auucauuaauuuucugaau

SEQ ID NO: 1377951 - RNA, 19 nt, Artificial Sequence
  Description of Artificial Sequence: Synthetic oligonucleotide
cucugcagaugacuuagcc

SEQ ID NO: 1377952 - RNA, 19 nt, Artificial Sequence
  Description of Artificial Sequence: Synthetic oligonucleotide
cuugcucacugcuggacgc

SEQ ID NO: 1377953 - RNA, 19 nt, Artificial Sequence
  Description of Artificial Sequence: Synthetic oligonucleotide
agggaagcagucaaaagug

SEQ ID NO: 1377954 - RNA, 19 nt, Artificial Sequence
  Description of Artificial Sequence: Synthetic oligonucleotide
acagggaagcagucaaaag

SEQ ID NO: 1377955 - RNA, 19 nt, Artificial Sequence
  Description of Artificial Sequence: Synthetic oligonucleotide
agugugugaagugacggug

SEQ ID NO: 1377956 - RNA, 19 nt, Artificial Sequence
  Description of Artificial Sequence: Synthetic oligonucleotide
ugugugaagugacggugca

SEQ ID NO: 1377957 - RNA, 19 nt, Artificial Sequence
  Description of Artificial Sequence: Synthetic oligonucleotide
uuccaguugaauuuaccuu

SEQ ID NO: 1377958 - RNA, 19 nt, Artificial Sequence
  Description of Artificial Sequence: Synthetic oligonucleotide
uuguuaucagacucaacuu

SEQ ID NO: 1377959 - RNA, 19 nt, Artificial Sequence
  Description of Artificial Sequence: Synthetic oligonucleotide
ucgucuuuuggaccuucag

SEQ ID NO: 1377960 - RNA, 19 nt, Artificial Sequence
  Description of Artificial Sequence: Synthetic oligonucleotide
agguuugaacucuugcccu

SEQ ID NO: 1377961 - RNA, 19 nt, Artificial Sequence
  Description of Artificial Sequence: Synthetic oligonucleotide
ucacuucagaagcuugacu

SEQ ID NO: 1377962 - RNA, 19 nt, Artificial Sequence
  Description of Artificial Sequence: Synthetic oligonucleotide
gaauuuaccuuucgcugga

SEQ ID NO: 1377963 - RNA, 19 nt, Artificial Sequence
  Description of Artificial Sequence: Synthetic oligonucleotide
cuucuucgucuuuuggacc

SEQ ID NO: 1377964 - RNA, 19 nt, Artificial Sequence
  Description of Artificial Sequence: Synthetic oligonucleotide
cucugacaugugauggucg

SEQ ID NO: 1377965 - RNA, 19 nt, Artificial Sequence
  Description of Artificial Sequence: Synthetic oligonucleotide
gguuguuauaauucauuac

SEQ ID NO: 1377966 - RNA, 19 nt, Artificial Sequence
  Description of Artificial Sequence: Synthetic oligonucleotide
uuuugauggauaucucauu

SEQ ID NO: 1377967 - RNA, 19 nt, Artificial Sequence
  Description of Artificial Sequence: Synthetic oligonucleotide
acuaaauauucuaccugag

SEQ ID NO: 1377968 - RNA, 19 nt, Artificial Sequence
  Description of Artificial Sequence: Synthetic oligonucleotide
uuucugaauccaugccugc

SEQ ID NO: 1377969 - RNA, 19 nt, Artificial Sequence
  Description of Artificial Sequence: Synthetic oligonucleotide
uugcaucaccuuuaugugu

SEQ ID NO: 1377970 - RNA, 19 nt, Artificial Sequence
  Description of Artificial Sequence: Synthetic oligonucleotide
guuucugcagacagauacg

SEQ ID NO: 1377971 - RNA, 19 nt, Artificial Sequence
  Description of Artificial Sequence: Synthetic oligonucleotide
uucacugauucaccacaug

SEQ ID NO: 1377972 - RNA, 19 nt, Artificial Sequence
  Description of Artificial Sequence: Synthetic oligonucleotide
gucaaugcaagaaagacau

SEQ ID NO: 1377973 - RNA, 19 nt, Artificial Sequence
  Description of Artificial Sequence: Synthetic oligonucleotide
agucaaugcaagaaagaca

SEQ ID NO: 1377974 - RNA, 19 nt, Artificial Sequence
  Description of Artificial Sequence: Synthetic oligonucleotide
aaggugggguucuugcuaa

SEQ ID NO: 1377975 - RNA, 19 nt, Artificial Sequence
  Description of Artificial Sequence: Synthetic oligonucleotide
uauagucaucaccccagaa

SEQ ID NO: 1377976 - RNA, 19 nt, Artificial Sequence
  Description of Artificial Sequence: Synthetic oligonucleotide
aaauucggguuguuauaau

SEQ ID NO: 1377977 - RNA, 19 nt, Artificial Sequence
  Description of Artificial Sequence: Synthetic oligonucleotide
ugcauucacuucagaagcu

SEQ ID NO: 1377978 - RNA, 19 nt, Artificial Sequence
  Description of Artificial Sequence: Synthetic oligonucleotide
uucgcuggaaccucauggu

SEQ ID NO: 1377979 - RNA, 19 nt, Artificial Sequence
  Description of Artificial Sequence: Synthetic oligonucleotide
ugugaagugacggugcauu

SEQ ID NO: 1377980 - RNA, 19 nt, Artificial Sequence
  Description of Artificial Sequence: Synthetic oligonucleotide
aauuucguacaagaauaua

SEQ ID NO: 1377981 - RNA, 19 nt, Artificial Sequence
  Description of Artificial Sequence: Synthetic oligonucleotide
auggucgcuugucacugcg

SEQ ID NO: 1377982 - RNA, 19 nt, Artificial Sequence
  Description of Artificial Sequence: Synthetic oligonucleotide
gacgcuucagagaagaugu

SEQ ID NO: 1377983 - RNA, 19 nt, Artificial Sequence
  Description of Artificial Sequence: Synthetic oligonucleotide
caccccagaaaucuuuccc

SEQ ID NO: 1377984 - RNA, 19 nt, Artificial Sequence
  Description of Artificial Sequence: Synthetic oligonucleotide
agcaccuuaaagguggggu

SEQ ID NO: 1377985 - RNA, 19 nt, Artificial Sequence
  Description of Artificial Sequence: Synthetic oligonucleotide
gucacugcgugguacugag

SEQ ID NO: 1377986 - RNA, 19 nt, Artificial Sequence
  Description of Artificial Sequence: Synthetic oligonucleotide
ugauggucgcuugucacug

SEQ ID NO: 1377987 - RNA, 19 nt, Artificial Sequence
  Description of Artificial Sequence: Synthetic oligonucleotide
gggaacauugucaaaagca

SEQ ID NO: 1377988 - RNA, 19 nt, Artificial Sequence
  Description of Artificial Sequence: Synthetic oligonucleotide
ugaagugacggugcauuca

SEQ ID NO: 1377989 - RNA, 19 nt, Artificial Sequence
  Description of Artificial Sequence: Synthetic oligonucleotide
cagucaaaagugugugaag

SEQ ID NO: 1377990 - RNA, 19 nt, Artificial Sequence
  Description of Artificial Sequence: Synthetic oligonucleotide
agugacggugcauucacuu

SEQ ID NO: 1377991 - RNA, 19 nt, Artificial Sequence
  Description of Artificial Sequence: Synthetic oligonucleotide
uuaaccggccgccgggagc

SEQ ID NO: 1377992 - RNA, 19 nt, Artificial Sequence
  Description of Artificial Sequence: Synthetic oligonucleotide
uucagaagcuugacucugu

SEQ ID NO: 1377993 - RNA, 19 nt, Artificial Sequence
  Description of Artificial Sequence: Synthetic oligonucleotide
uccccuuccaguugaauuu

SEQ ID NO: 1377994 - RNA, 19 nt, Artificial Sequence
  Description of Artificial Sequence: Synthetic oligonucleotide
ccagaaaucuuucccacag

SEQ ID NO: 1377995 - RNA, 19 nt, Artificial Sequence
  Description of Artificial Sequence: Synthetic oligonucleotide
ggugccauuuguuugggca

SEQ ID NO: 1377996 - RNA, 19 nt, Artificial Sequence
  Description of Artificial Sequence: Synthetic oligonucleotide
cauacuucugauuuucacu

SEQ ID NO: 1377997 - RNA, 19 nt, Artificial Sequence
  Description of Artificial Sequence: Synthetic oligonucleotide
gauacgugcuuuuccaccu

SEQ ID NO: 1377998 - RNA, 19 nt, Artificial Sequence
  Description of Artificial Sequence: Synthetic oligonucleotide
cagaacggcuuuaaugguc

SEQ ID NO: 1377999 - RNA, 19 nt, Artificial Sequence
  Description of Artificial Sequence: Synthetic oligonucleotide
cuuaguggggaucucugca

SEQ ID NO: 1378000 - RNA, 19 nt, Artificial Sequence
  Description of Artificial Sequence: Synthetic oligonucleotide
auuuucgccgcuucuguuu

SEQ ID NO: 1378001 - RNA, 19 nt, Artificial Sequence
  Description of Artificial Sequence: Synthetic oligonucleotide
cacugaugcacuucacgug

SEQ ID NO: 1378002 - RNA, 19 nt, Artificial Sequence
  Description of Artificial Sequence: Synthetic oligonucleotide
acauuggguuucuuuauua

SEQ ID NO: 1378003 - RNA, 19 nt, Artificial Sequence
  Description of Artificial Sequence: Synthetic oligonucleotide
uccuccucugacaugugau

SEQ ID NO: 1378004 - RNA, 19 nt, Artificial Sequence
  Description of Artificial Sequence: Synthetic oligonucleotide
acggucuuaaccggccgcc

SEQ ID NO: 1378005 - RNA, 19 nt, Artificial Sequence
  Description of Artificial Sequence: Synthetic oligonucleotide
caguugaauuuaccuuucg

SEQ ID NO: 1378006 - RNA, 19 nt, Artificial Sequence
  Description of Artificial Sequence: Synthetic oligonucleotide
cacugauuugcugcaaaag

SEQ ID NO: 1378007 - RNA, 19 nt, Artificial Sequence
  Description of Artificial Sequence: Synthetic oligonucleotide
ugaagccugcccaccccgg

SEQ ID NO: 1378008 - RNA, 19 nt, Artificial Sequence
  Description of Artificial Sequence: Synthetic oligonucleotide
ugggcagauggaaccuuag

SEQ ID NO: 1378009 - RNA, 19 nt, Artificial Sequence
  Description of Artificial Sequence: Synthetic oligonucleotide
ucaccccagaaaucuuucc

SEQ ID NO: 1378010 - RNA, 19 nt, Artificial Sequence
  Description of Artificial Sequence: Synthetic oligonucleotide
gucuuaaccggccgccggg

SEQ ID NO: 1378011 - RNA, 19 nt, Artificial Sequence
  Description of Artificial Sequence: Synthetic oligonucleotide
gcuucuucgucuuuuggac

SEQ ID NO: 1378012 - RNA, 19 nt, Artificial Sequence
  Description of Artificial Sequence: Synthetic oligonucleotide
gacaugugauggucgcuug

SEQ ID NO: 1378013 - RNA, 19 nt, Artificial Sequence
  Description of Artificial Sequence: Synthetic oligonucleotide
cuucugucguucuuccuuc

SEQ ID NO: 1378014 - RNA, 19 nt, Artificial Sequence
  Description of Artificial Sequence: Synthetic oligonucleotide
aaccuuaguggggaucucu

SEQ ID NO: 1378015 - RNA, 19 nt, Artificial Sequence
  Description of Artificial Sequence: Synthetic oligonucleotide
aggcuguccugacaacuuc

SEQ ID NO: 1378016 - RNA, 19 nt, Artificial Sequence
  Description of Artificial Sequence: Synthetic oligonucleotide
aucuugcucacugcuggac

SEQ ID NO: 1378017 - RNA, 19 nt, Artificial Sequence
  Description of Artificial Sequence: Synthetic oligonucleotide
gagugcagcgccgccaccg

SEQ ID NO: 1378018 - RNA, 19 nt, Artificial Sequence
  Description of Artificial Sequence: Synthetic oligonucleotide
agauggaaccuuagugggg

SEQ ID NO: 1378019 - RNA, 19 nt, Artificial Sequence
  Description of Artificial Sequence: Synthetic oligonucleotide
uucacaguuucugcagaca

SEQ ID NO: 1378020 - RNA, 19 nt, Artificial Sequence
  Description of Artificial Sequence: Synthetic oligonucleotide
ugaugcacuucacguggcu

SEQ ID NO: 1378021 - RNA, 19 nt, Artificial Sequence
  Description of Artificial Sequence: Synthetic oligonucleotide
cagcaucuuccccagggcc

SEQ ID NO: 1378022 - RNA, 19 nt, Artificial Sequence
  Description of Artificial Sequence: Synthetic oligonucleotide
agacagauacgugcuuuuc

SEQ ID NO: 1378023 - RNA, 19 nt, Artificial Sequence
  Description of Artificial Sequence: Synthetic oligonucleotide
uccuauucuucugucguuc

SEQ ID NO: 1378024 - RNA, 19 nt, Artificial Sequence
  Description of Artificial Sequence: Synthetic oligonucleotide
ccgccaacggucuuaaccg

SEQ ID NO: 1378025 - RNA, 19 nt, Artificial Sequence
  Description of Artificial Sequence: Synthetic oligonucleotide
gucgcuugucacugcgugg

SEQ ID NO: 1378026 - RNA, 19 nt, Artificial Sequence
  Description of Artificial Sequence: Synthetic oligonucleotide
uuuucgccgcuucuguuuu

SEQ ID NO: 1378027 - RNA, 19 nt, Artificial Sequence
  Description of Artificial Sequence: Synthetic oligonucleotide
agcagucaaaaguguguga

SEQ ID NO: 1378028 - RNA, 19 nt, Artificial Sequence
  Description of Artificial Sequence: Synthetic oligonucleotide
ugcagacuccgccaacggu

SEQ ID NO: 1378029 - RNA, 19 nt, Artificial Sequence
  Description of Artificial Sequence: Synthetic oligonucleotide
augugauggucgcuuguca

SEQ ID NO: 1378030 - RNA, 19 nt, Artificial Sequence
  Description of Artificial Sequence: Synthetic oligonucleotide
uacgugcuuuuccaccugu

SEQ ID NO: 1378031 - RNA, 19 nt, Artificial Sequence
  Description of Artificial Sequence: Synthetic oligonucleotide
gaagcagucaaaagugugu

SEQ ID NO: 1378032 - RNA, 19 nt, Artificial Sequence
  Description of Artificial Sequence: Synthetic oligonucleotide
cagggaagcagucaaaagu

SEQ ID NO: 1378033 - RNA, 19 nt, Artificial Sequence
  Description of Artificial Sequence: Synthetic oligonucleotide
cuuaaaggugggguucuug

SEQ ID NO: 1378034 - RNA, 19 nt, Artificial Sequence
  Description of Artificial Sequence: Synthetic oligonucleotide
uguucuucuguggugccau

SEQ ID NO: 1378035 - RNA, 19 nt, Artificial Sequence
  Description of Artificial Sequence: Synthetic oligonucleotide
gguuaaaugacuaaauauu

SEQ ID NO: 1378036 - RNA, 19 nt, Artificial Sequence
  Description of Artificial Sequence: Synthetic oligonucleotide
uucugaauccaugccugcu

SEQ ID NO: 1378037 - RNA, 19 nt, Artificial Sequence
  Description of Artificial Sequence: Synthetic oligonucleotide
ucgcuugucacugcguggu

SEQ ID NO: 1378038 - RNA, 19 nt, Artificial Sequence
  Description of Artificial Sequence: Synthetic oligonucleotide
uacugagcuauaaccuuuu

SEQ ID NO: 1378039 - RNA, 19 nt, Artificial Sequence
  Description of Artificial Sequence: Synthetic oligonucleotide
uggaaccucaugguccuca

SEQ ID NO: 1378040 - RNA, 19 nt, Artificial Sequence
  Description of Artificial Sequence: Synthetic oligonucleotide
ugacaugugauggucgcuu

SEQ ID NO: 1378041 - RNA, 19 nt, Artificial Sequence
  Description of Artificial Sequence: Synthetic oligonucleotide
agacucaacuucugaguau

SEQ ID NO: 1378042 - RNA, 19 nt, Artificial Sequence
  Description of Artificial Sequence: Synthetic oligonucleotide
gcagccaccgagugcagcg

SEQ ID NO: 1378043 - RNA, 19 nt, Artificial Sequence
  Description of Artificial Sequence: Synthetic oligonucleotide
cauccucuucugaagccug

SEQ ID NO: 1378044 - RNA, 19 nt, Artificial Sequence
  Description of Artificial Sequence: Synthetic oligonucleotide
uucuuugccucuacuuguu

SEQ ID NO: 1378045 - RNA, 19 nt, Artificial Sequence
  Description of Artificial Sequence: Synthetic oligonucleotide
guuaucagacucaacuucu

SEQ ID NO: 1378046 - RNA, 19 nt, Artificial Sequence
  Description of Artificial Sequence: Synthetic oligonucleotide
cagauacgugcuuuuccac

SEQ ID NO: 1378047 - RNA, 19 nt, Artificial Sequence
  Description of Artificial Sequence: Synthetic oligonucleotide
ucucugcagaugacuuagc

SEQ ID NO: 1378048 - RNA, 19 nt, Artificial Sequence
  Description of Artificial Sequence: Synthetic oligonucleotide
aucaccccagaaaucuuuc

SEQ ID NO: 1378049 - RNA, 19 nt, Artificial Sequence
  Description of Artificial Sequence: Synthetic oligonucleotide
cauuggguuucuuuauuaa

SEQ ID NO: 1378050 - RNA, 19 nt, Artificial Sequence
  Description of Artificial Sequence: Synthetic oligonucleotide
auagcaucacugugcacuu

SEQ ID NO: 1378051 - RNA, 19 nt, Artificial Sequence
  Description of Artificial Sequence: Synthetic oligonucleotide
ugcuuugcaucaccuuuau

SEQ ID NO: 1378052 - RNA, 19 nt, Artificial Sequence
  Description of Artificial Sequence: Synthetic oligonucleotide
gauggauaucucauugucu

SEQ ID NO: 1378053 - RNA, 19 nt, Artificial Sequence
  Description of Artificial Sequence: Synthetic oligonucleotide
acaugugauggucgcuugu

SEQ ID NO: 1378054 - RNA, 19 nt, Artificial Sequence
  Description of Artificial Sequence: Synthetic oligonucleotide
agcacugauuugcugcaaa

SEQ ID NO: 1378055 - RNA, 19 nt, Artificial Sequence
  Description of Artificial Sequence: Synthetic oligonucleotide
ggaagcagucaaaagugug

SEQ ID NO: 1378056 - RNA, 19 nt, Artificial Sequence
  Description of Artificial Sequence: Synthetic oligonucleotide
acggcuuuaaugguccccu

SEQ ID NO: 1378057 - RNA, 19 nt, Artificial Sequence
  Description of Artificial Sequence: Synthetic oligonucleotide
gagccuguuucagaacggc

SEQ ID NO: 1378058 - RNA, 19 nt, Artificial Sequence
  Description of Artificial Sequence: Synthetic oligonucleotide
uaugugucuuggcuucaua

SEQ ID NO: 1378059 - RNA, 19 nt, Artificial Sequence
  Description of Artificial Sequence: Synthetic oligonucleotide
uucgccgcuucuguuuucc

SEQ ID NO: 1378060 - RNA, 19 nt, Artificial Sequence
  Description of Artificial Sequence: Synthetic oligonucleotide
agucaucaccccagaaauc

SEQ ID NO: 1378061 - RNA, 19 nt, Artificial Sequence
  Description of Artificial Sequence: Synthetic oligonucleotide
uucugucguucuuccuucc

SEQ ID NO: 1378062 - RNA, 19 nt, Artificial Sequence
  Description of Artificial Sequence: Synthetic oligonucleotide
caacggucuuaaccggccg

SEQ ID NO: 1378063 - RNA, 19 nt, Artificial Sequence
  Description of Artificial Sequence: Synthetic oligonucleotide
ucgcuggaaccucaugguc

SEQ ID NO: 1378064 - RNA, 19 nt, Artificial Sequence
  Description of Artificial Sequence: Synthetic oligonucleotide
cuuccuauucuucugucgu

SEQ ID NO: 1378065 - RNA, 19 nt, Artificial Sequence
  Description of Artificial Sequence: Synthetic oligonucleotide
uaaccggccgccgggagca

SEQ ID NO: 1378066 - RNA, 19 nt, Artificial Sequence
  Description of Artificial Sequence: Synthetic oligonucleotide
acaguacagggaagcaguc

SEQ ID NO: 1378067 - RNA, 19 nt, Artificial Sequence
  Description of Artificial Sequence: Synthetic oligonucleotide
uauuuucgccgcuucuguu

SEQ ID NO: 1378068 - RNA, 19 nt, Artificial Sequence
  Description of Artificial Sequence: Synthetic oligonucleotide
gauggucgcuugucacugc

SEQ ID NO: 1378069 - RNA, 19 nt, Artificial Sequence
  Description of Artificial Sequence: Synthetic oligonucleotide
agugcagcgccgccaccgg

SEQ ID NO: 1378070 - RNA, 19 nt, Artificial Sequence
  Description of Artificial Sequence: Synthetic oligonucleotide
uuuugcgcuucuucgucuu

SEQ ID NO: 1378071 - RNA, 19 nt, Artificial Sequence
  Description of Artificial Sequence: Synthetic oligonucleotide
auauucuaccugagacagg

SEQ ID NO: 1378072 - RNA, 19 nt, Artificial Sequence
  Description of Artificial Sequence: Synthetic oligonucleotide
caugugauggucgcuuguc

SEQ ID NO: 1378073 - RNA, 19 nt, Artificial Sequence
  Description of Artificial Sequence: Synthetic oligonucleotide
ccauacuucugauuuucac

SEQ ID NO: 1378074 - RNA, 19 nt, Artificial Sequence
  Description of Artificial Sequence: Synthetic oligonucleotide
aaucuuucccacagucaau

SEQ ID NO: 1378075 - RNA, 19 nt, Artificial Sequence
  Description of Artificial Sequence: Synthetic oligonucleotide
cgucuuuuggaccuucagg

SEQ ID NO: 1378076 - RNA, 19 nt, Artificial Sequence
  Description of Artificial Sequence: Synthetic oligonucleotide
auacgugcuuuuccaccug

SEQ ID NO: 1378077 - RNA, 19 nt, Artificial Sequence
  Description of Artificial Sequence: Synthetic oligonucleotide
ggacgcuucagagaagaug

SEQ ID NO: 1378078 - RNA, 19 nt, Artificial Sequence
  Description of Artificial Sequence: Synthetic oligonucleotide
ggucuuaaccggccgccgg

SEQ ID NO: 1378079 - RNA, 19 nt, Artificial Sequence
  Description of Artificial Sequence: Synthetic oligonucleotide
gacggugcauucacuucag

SEQ ID NO: 1378080 - RNA, 19 nt, Artificial Sequence
  Description of Artificial Sequence: Synthetic oligonucleotide
cugcagacuccgccaacgg

SEQ ID NO: 1378081 - RNA, 19 nt, Artificial Sequence
  Description of Artificial Sequence: Synthetic oligonucleotide
ggucgcuugucacugcgug

SEQ ID NO: 1378082 - RNA, 19 nt, Artificial Sequence
  Description of Artificial Sequence: Synthetic oligonucleotide
ggauaucucauugucugga

SEQ ID NO: 1378083 - RNA, 19 nt, Artificial Sequence
  Description of Artificial Sequence: Synthetic oligonucleotide
uccugacaacuucaucuuu

SEQ ID NO: 1378084 - RNA, 19 nt, Artificial Sequence
  Description of Artificial Sequence: Synthetic oligonucleotide
cagacucaacuucugagua

SEQ ID NO: 1378085 - RNA, 19 nt, Artificial Sequence
  Description of Artificial Sequence: Synthetic oligonucleotide
auguuccacaccugcucca

SEQ ID NO: 1378086 - RNA, 19 nt, Artificial Sequence
  Description of Artificial Sequence: Synthetic oligonucleotide
gaucuugcucacugcugga

SEQ ID NO: 1378087 - RNA, 19 nt, Artificial Sequence
  Description of Artificial Sequence: Synthetic oligonucleotide
caccuuaaaggugggguuc

SEQ ID NO: 1378088 - RNA, 19 nt, Artificial Sequence
  Description of Artificial Sequence: Synthetic oligonucleotide
gugacggugcauucacuuc

SEQ ID NO: 1378089 - RNA, 19 nt, Artificial Sequence
  Description of Artificial Sequence: Synthetic oligonucleotide
uuccuauucuucugucguu

SEQ ID NO: 1378090 - RNA, 19 nt, Artificial Sequence
  Description of Artificial Sequence: Synthetic oligonucleotide
aguggggaucucugcagau

SEQ ID NO: 1378091 - RNA, 19 nt, Artificial Sequence
  Description of Artificial Sequence: Synthetic oligonucleotide
ucaucaccccagaaaucuu

SEQ ID NO: 1378092 - RNA, 19 nt, Artificial Sequence
  Description of Artificial Sequence: Synthetic oligonucleotide
guauuuucgccgcuucugu

SEQ ID NO: 1378093 - RNA, 19 nt, Artificial Sequence
  Description of Artificial Sequence: Synthetic oligonucleotide
cuuucgcuggaaccucaug

SEQ ID NO: 1378094 - RNA, 19 nt, Artificial Sequence
  Description of Artificial Sequence: Synthetic oligonucleotide
cacguggcuuuuauaguca

SEQ ID NO: 1378095 - RNA, 19 nt, Artificial Sequence
  Description of Artificial Sequence: Synthetic oligonucleotide
gugaagugacggugcauuc

SEQ ID NO: 1378096 - RNA, 19 nt, Artificial Sequence
  Description of Artificial Sequence: Synthetic oligonucleotide
ugucuuggucugccccuca

SEQ ID NO: 1378097 - RNA, 19 nt, Artificial Sequence
  Description of Artificial Sequence: Synthetic oligonucleotide
guucuccaaccuuagggcu

SEQ ID NO: 1378098 - RNA, 19 nt, Artificial Sequence
  Description of Artificial Sequence: Synthetic oligonucleotide
caugguccucagucucucc

SEQ ID NO: 1378099 - RNA, 19 nt, Artificial Sequence
  Description of Artificial Sequence: Synthetic oligonucleotide
cuggacgcuucagagaaga

SEQ ID NO: 1378100 - RNA, 19 nt, Artificial Sequence
  Description of Artificial Sequence: Synthetic oligonucleotide
cuuaaccggccgccgggag

SEQ ID NO: 1378101 - RNA, 19 nt, Artificial Sequence
  Description of Artificial Sequence: Synthetic oligonucleotide
cacugcgugguacugagcu

SEQ ID NO: 1378102 - RNA, 19 nt, Artificial Sequence
  Description of Artificial Sequence: Synthetic oligonucleotide
accuuaguggggaucucug

SEQ ID NO: 1378103 - RNA, 19 nt, Artificial Sequence
  Description of Artificial Sequence: Synthetic oligonucleotide
ccaacggucuuaaccggcc

SEQ ID NO: 1378104 - RNA, 19 nt, Artificial Sequence
  Description of Artificial Sequence: Synthetic oligonucleotide
gcagucaaaagugugugaa

SEQ ID NO: 1378105 - RNA, 19 nt, Artificial Sequence
  Description of Artificial Sequence: Synthetic oligonucleotide
uucugggaacauugucaaa

SEQ ID NO: 1378106 - RNA, 19 nt, Artificial Sequence
  Description of Artificial Sequence: Synthetic oligonucleotide
ccuuagggcugacauuggg

SEQ ID NO: 1378107 - RNA, 19 nt, Artificial Sequence
  Description of Artificial Sequence: Synthetic oligonucleotide
ucacugcgugguacugagc

SEQ ID NO: 1378108 - RNA, 19 nt, Artificial Sequence
  Description of Artificial Sequence: Synthetic oligonucleotide
acuucacguggcuuuuaua

SEQ ID NO: 1378109 - RNA, 19 nt, Artificial Sequence
  Description of Artificial Sequence: Synthetic oligonucleotide
acguggcuuuuauagucau

SEQ ID NO: 1378110 - RNA, 19 nt, Artificial Sequence
  Description of Artificial Sequence: Synthetic oligonucleotide
cacguggagccgcagccac

SEQ ID NO: 1378111 - RNA, 19 nt, Artificial Sequence
  Description of Artificial Sequence: Synthetic oligonucleotide
uggugccauuuguuugggc

SEQ ID NO: 1378112 - RNA, 19 nt, Artificial Sequence
  Description of Artificial Sequence: Synthetic oligonucleotide
guggucuccuccccaccag

SEQ ID NO: 1378113 - RNA, 19 nt, Artificial Sequence
  Description of Artificial Sequence: Synthetic oligonucleotide
ccuuaguggggaucucugc

SEQ ID NO: 1378114 - RNA, 19 nt, Artificial Sequence
  Description of Artificial Sequence: Synthetic oligonucleotide
uggucgcuugucacugcgu

SEQ ID NO: 1378115 - RNA, 19 nt, Artificial Sequence
  Description of Artificial Sequence: Synthetic oligonucleotide
ggcuuuaaugguccccuuc

SEQ ID NO: 1378116 - RNA, 19 nt, Artificial Sequence
  Description of Artificial Sequence: Synthetic oligonucleotide
ggagccuguuucagaacgg

SEQ ID NO: 1378117 - RNA, 19 nt, Artificial Sequence
  Description of Artificial Sequence: Synthetic oligonucleotide
gacauuggguuucuuuauu

SEQ ID NO: 1378118 - RNA, 19 nt, Artificial Sequence
  Description of Artificial Sequence: Synthetic oligonucleotide
cagaugacuuagccacaug

SEQ ID NO: 1378119 - RNA, 19 nt, Artificial Sequence
  Description of Artificial Sequence: Synthetic oligonucleotide
uccaaccuuagggcugaca

SEQ ID NO: 1378120 - RNA, 19 nt, Artificial Sequence
  Description of Artificial Sequence: Synthetic oligonucleotide
gagccgcagccaccgagug

SEQ ID NO: 1378121 - RNA, 19 nt, Artificial Sequence
  Description of Artificial Sequence: Synthetic oligonucleotide
gacucaacuucugaguauu

SEQ ID NO: 1378122 - RNA, 19 nt, Artificial Sequence
  Description of Artificial Sequence: Synthetic oligonucleotide
uuugcgcuucuucgucuuu

SEQ ID NO: 1378123 - RNA, 19 nt, Artificial Sequence
  Description of Artificial Sequence: Synthetic oligonucleotide
cuaccugagacagguuuga

SEQ ID NO: 1378124 - RNA, 19 nt, Artificial Sequence
  Description of Artificial Sequence: Synthetic oligonucleotide
aagugacggugcauucacu

SEQ ID NO: 1378125 - RNA, 19 nt, Artificial Sequence
  Description of Artificial Sequence: Synthetic oligonucleotide
gcagacuccgccaacgguc

SEQ ID NO: 1378126 - RNA, 19 nt, Artificial Sequence
  Description of Artificial Sequence: Synthetic oligonucleotide
ccaguugaauuuaccuuuc

SEQ ID NO: 1378127 - RNA, 19 nt, Artificial Sequence
  Description of Artificial Sequence: Synthetic oligonucleotide
accacaugcauugcaugua

SEQ ID NO: 1378128 - RNA, 19 nt, Artificial Sequence
  Description of Artificial Sequence: Synthetic oligonucleotide
gugauggucgcuugucacu

SEQ ID NO: 1378129 - RNA, 19 nt, Artificial Sequence
  Description of Artificial Sequence: Synthetic oligonucleotide
cugcuuugcaucaccuuua

SEQ ID NO: 1378130 - RNA, 19 nt, Artificial Sequence
  Description of Artificial Sequence: Synthetic oligonucleotide
cuugucacugcgugguacu

SEQ ID NO: 1378131 - RNA, 19 nt, Artificial Sequence
  Description of Artificial Sequence: Synthetic oligonucleotide
uggacgcuucagagaagau

SEQ ID NO: 1378132 - RNA, 19 nt, Artificial Sequence
  Description of Artificial Sequence: Synthetic oligonucleotide
gccucuacuuguucuucug

SEQ ID NO: 1378133 - RNA, 19 nt, Artificial Sequence
  Description of Artificial Sequence: Synthetic oligonucleotide
acugcgugguacugagcua

SEQ ID NO: 1378134 - RNA, 19 nt, Artificial Sequence
  Description of Artificial Sequence: Synthetic oligonucleotide
accuuagggcugacauugg

SEQ ID NO: 1378135 - RNA, 19 nt, Artificial Sequence
  Description of Artificial Sequence: Synthetic oligonucleotide
agccuguuucagaacggcu

SEQ ID NO: 1378136 - RNA, 19 nt, Artificial Sequence
  Description of Artificial Sequence: Synthetic oligonucleotide
gcugaucuugcucacugcu

SEQ ID NO: 1378137 - RNA, 19 nt, Artificial Sequence
  Description of Artificial Sequence: Synthetic oligonucleotide
acguggagccgcagccacc

SEQ ID NO: 1378138 - RNA, 19 nt, Artificial Sequence
  Description of Artificial Sequence: Synthetic oligonucleotide
ggaaccuuaguggggaucu

SEQ ID NO: 1378139 - RNA, 19 nt, Artificial Sequence
  Description of Artificial Sequence: Synthetic oligonucleotide
cgugguacugagcuauaac

SEQ ID NO: 1378140 - RNA, 19 nt, Artificial Sequence
  Description of Artificial Sequence: Synthetic oligonucleotide
ugcgugguacugagcuaua

SEQ ID NO: 1378141 - RNA, 19 nt, Artificial Sequence
  Description of Artificial Sequence: Synthetic oligonucleotide
uuucgccgcuucuguuuuc

SEQ ID NO: 1378142 - RNA, 19 nt, Artificial Sequence
  Description of Artificial Sequence: Synthetic oligonucleotide
accgagugcagcgccgcca

SEQ ID NO: 1378143 - RNA, 19 nt, Artificial Sequence
  Description of Artificial Sequence: Synthetic oligonucleotide
cccugucuuggucugcccc

SEQ ID NO: 1378144 - RNA, 19 nt, Artificial Sequence
  Description of Artificial Sequence: Synthetic oligonucleotide
uuuggaccuucagguuuuc

SEQ ID NO: 1378145 - RNA, 19 nt, Artificial Sequence
  Description of Artificial Sequence: Synthetic oligonucleotide
cuucacugauucaccacau

SEQ ID NO: 1378146 - RNA, 19 nt, Artificial Sequence
  Description of Artificial Sequence: Synthetic oligonucleotide
gcuugucacugcgugguac

SEQ ID NO: 1378147 - RNA, 19 nt, Artificial Sequence
  Description of Artificial Sequence: Synthetic oligonucleotide
caccggcucucccagcuca

SEQ ID NO: 1378148 - RNA, 19 nt, Artificial Sequence
  Description of Artificial Sequence: Synthetic oligonucleotide
cucaugguccucagucucu

SEQ ID NO: 1378149 - RNA, 19 nt, Artificial Sequence
  Description of Artificial Sequence: Synthetic oligonucleotide
guuugaacucuugcccucu

SEQ ID NO: 1378150 - RNA, 19 nt, Artificial Sequence
  Description of Artificial Sequence: Synthetic oligonucleotide
gguucuugcuaauuuucuu

SEQ ID NO: 1378151 - RNA, 19 nt, Artificial Sequence
  Description of Artificial Sequence: Synthetic oligonucleotide
ucuuuucuggugggcuguu

SEQ ID NO: 1378152 - RNA, 19 nt, Artificial Sequence
  Description of Artificial Sequence: Synthetic oligonucleotide
caucaccccagaaaucuuu

SEQ ID NO: 1378153 - RNA, 19 nt, Artificial Sequence
  Description of Artificial Sequence: Synthetic oligonucleotide
gaaccuuaguggggaucuc

SEQ ID NO: 1378154 - RNA, 19 nt, Artificial Sequence
  Description of Artificial Sequence: Synthetic oligonucleotide
guacugagcuauaaccuuu

SEQ ID NO: 1378155 - RNA, 19 nt, Artificial Sequence
  Description of Artificial Sequence: Synthetic oligonucleotide
gccaacggucuuaaccggc

SEQ ID NO: 1378156 - RNA, 19 nt, Artificial Sequence
  Description of Artificial Sequence: Synthetic oligonucleotide
cugauucaccacaugcauu

SEQ ID NO: 1378157 - RNA, 19 nt, Artificial Sequence
  Description of Artificial Sequence: Synthetic oligonucleotide
accccgggcccuuuucuuu

SEQ ID NO: 1378158 - RNA, 19 nt, Artificial Sequence
  Description of Artificial Sequence: Synthetic oligonucleotide
accuuucgcuggaaccuca

SEQ ID NO: 1378159 - RNA, 19 nt, Artificial Sequence
  Description of Artificial Sequence: Synthetic oligonucleotide
ucgccgcuucuguuuuccu

SEQ ID NO: 1378160 - RNA, 19 nt, Artificial Sequence
  Description of Artificial Sequence: Synthetic oligonucleotide
gcaaaaguucuccaaccuu

SEQ ID NO: 1378161 - RNA, 19 nt, Artificial Sequence
  Description of Artificial Sequence: Synthetic oligonucleotide
cugucuuggucugccccuc

SEQ ID NO: 1378162 - RNA, 19 nt, Artificial Sequence
  Description of Artificial Sequence: Synthetic oligonucleotide
gaugcacuucacguggcuu

SEQ ID NO: 1378163 - RNA, 19 nt, Artificial Sequence
  Description of Artificial Sequence: Synthetic oligonucleotide
cacugugcacuuucaggcu

SEQ ID NO: 1378164 - RNA, 19 nt, Artificial Sequence
  Description of Artificial Sequence: Synthetic oligonucleotide
ccaaccuuagggcugacau

SEQ ID NO: 1378165 - RNA, 19 nt, Artificial Sequence
  Description of Artificial Sequence: Synthetic oligonucleotide
gcuggaaccucaugguccu

SEQ ID NO: 1378166 - RNA, 19 nt, Artificial Sequence
  Description of Artificial Sequence: Synthetic oligonucleotide
acuccgccaacggucuuaa

SEQ ID NO: 1378167 - RNA, 19 nt, Artificial Sequence
  Description of Artificial Sequence: Synthetic oligonucleotide
gaaccucaugguccucagu

SEQ ID NO: 1378168 - RNA, 19 nt, Artificial Sequence
  Description of Artificial Sequence: Synthetic oligonucleotide
cagacuccgccaacggucu

SEQ ID NO: 1378169 - RNA, 19 nt, Artificial Sequence
  Description of Artificial Sequence: Synthetic oligonucleotide
gacuccgccaacggucuua

SEQ ID NO: 1378170 - RNA, 19 nt, Artificial Sequence
  Description of Artificial Sequence: Synthetic oligonucleotide
cagccaccgagugcagcgc

SEQ ID NO: 1378171 - RNA, 19 nt, Artificial Sequence
  Description of Artificial Sequence: Synthetic oligonucleotide
ggcuguccugacaacuuca

SEQ ID NO: 1378172 - RNA, 19 nt, Artificial Sequence
  Description of Artificial Sequence: Synthetic oligonucleotide
cuuucaggcuguuccucau

SEQ ID NO: 1378173 - RNA, 19 nt, Artificial Sequence
  Description of Artificial Sequence: Synthetic oligonucleotide
ugugcacuuucaggcuguu

SEQ ID NO: 1378174 - RNA, 19 nt, Artificial Sequence
  Description of Artificial Sequence: Synthetic oligonucleotide
aggugggguucuugcuaau

SEQ ID NO: 1378175 - RNA, 19 nt, Artificial Sequence
  Description of Artificial Sequence: Synthetic oligonucleotide
ccccaccagccucaugucc

SEQ ID NO: 1378176 - RNA, 19 nt, Artificial Sequence
  Description of Artificial Sequence: Synthetic oligonucleotide
cugcgugguacugagcuau

SEQ ID NO: 1378177 - RNA, 19 nt, Artificial Sequence
  Description of Artificial Sequence: Synthetic oligonucleotide
gggaucucugcagaugacu

SEQ ID NO: 1378178 - RNA, 19 nt, Artificial Sequence
  Description of Artificial Sequence: Synthetic oligonucleotide
cagacagauacgugcuuuu

SEQ ID NO: 1378179 - RNA, 19 nt, Artificial Sequence
  Description of Artificial Sequence: Synthetic oligonucleotide
ccuuuaugugucuuggcuu

SEQ ID NO: 1378180 - RNA, 19 nt, Artificial Sequence
  Description of Artificial Sequence: Synthetic oligonucleotide
ccgcuucuguuuuccugcc

SEQ ID NO: 1378181 - RNA, 19 nt, Artificial Sequence
  Description of Artificial Sequence: Synthetic oligonucleotide
caccuguauuuucuucacu

SEQ ID NO: 1378182 - RNA, 19 nt, Artificial Sequence
  Description of Artificial Sequence: Synthetic oligonucleotide
accggccgccgggagcacg

SEQ ID NO: 1378183 - RNA, 19 nt, Artificial Sequence
  Description of Artificial Sequence: Synthetic oligonucleotide
cgccaacggucuuaaccgg

SEQ ID NO: 1378184 - RNA, 19 nt, Artificial Sequence
  Description of Artificial Sequence: Synthetic oligonucleotide
ccucauguccagccuccug

SEQ ID NO: 1378185 - RNA, 19 nt, Artificial Sequence
  Description of Artificial Sequence: Synthetic oligonucleotide
cacuucacguggcuuuuau

SEQ ID NO: 1378186 - RNA, 19 nt, Artificial Sequence
  Description of Artificial Sequence: Synthetic oligonucleotide
ccugacaacuucaucuuuu

SEQ ID NO: 1378187 - RNA, 19 nt, Artificial Sequence
  Description of Artificial Sequence: Synthetic oligonucleotide
caaccuuagggcugacauu

SEQ ID NO: 1378188 - RNA, 19 nt, Artificial Sequence
  Description of Artificial Sequence: Synthetic oligonucleotide
aaccggccgccgggagcac

SEQ ID NO: 1378189 - RNA, 19 nt, Artificial Sequence
  Description of Artificial Sequence: Synthetic oligonucleotide
ggaucucugcagaugacuu

SEQ ID NO: 1378190 - RNA, 19 nt, Artificial Sequence
  Description of Artificial Sequence: Synthetic oligonucleotide
ccacaccugcuccagaaua

SEQ ID NO: 1378191 - RNA, 19 nt, Artificial Sequence
  Description of Artificial Sequence: Synthetic oligonucleotide
ccgagugcagcgccgccac

SEQ ID NO: 1378192 - RNA, 19 nt, Artificial Sequence
  Description of Artificial Sequence: Synthetic oligonucleotide
auucuaccugagacagguu

SEQ ID NO: 1378193 - RNA, 19 nt, Artificial Sequence
  Description of Artificial Sequence: Synthetic oligonucleotide
gggcagauggaaccuuagu

SEQ ID NO: 1378194 - RNA, 19 nt, Artificial Sequence
  Description of Artificial Sequence: Synthetic oligonucleotide
acgugcuuuuccaccugua

SEQ ID NO: 1378195 - RNA, 19 nt, Artificial Sequence
  Description of Artificial Sequence: Synthetic oligonucleotide
gcuggacgcuucagagaag

SEQ ID NO: 1378196 - RNA, 19 nt, Artificial Sequence
  Description of Artificial Sequence: Synthetic oligonucleotide
ggggaucucugcagaugac

SEQ ID NO: 1378197 - RNA, 19 nt, Artificial Sequence
  Description of Artificial Sequence: Synthetic oligonucleotide
cuccgccaacggucuuaac

SEQ ID NO: 1378198 - RNA, 19 nt, Artificial Sequence
  Description of Artificial Sequence: Synthetic oligonucleotide
cugacaugugauggucgcu

SEQ ID NO: 1378199 - RNA, 19 nt, Artificial Sequence
  Description of Artificial Sequence: Synthetic oligonucleotide
ggagcacguggagccgcag

SEQ ID NO: 1378200 - RNA, 19 nt, Artificial Sequence
  Description of Artificial Sequence: Synthetic oligonucleotide
ccaccgagugcagcgccgc

SEQ ID NO: 1378201 - RNA, 19 nt, Artificial Sequence
  Description of Artificial Sequence: Synthetic oligonucleotide
cuggaaccucaugguccuc

SEQ ID NO: 1378202 - RNA, 19 nt, Artificial Sequence
  Description of Artificial Sequence: Synthetic oligonucleotide
gcauucacuucagaagcuu

SEQ ID NO: 1378203 - RNA, 19 nt, Artificial Sequence
  Description of Artificial Sequence: Synthetic oligonucleotide
gcaucaccuuuaugugucu

SEQ ID NO: 1378204 - RNA, 19 nt, Artificial Sequence
  Description of Artificial Sequence: Synthetic oligonucleotide
ccccugucuuggucugccc

SEQ ID NO: 1378205 - RNA, 19 nt, Artificial Sequence
  Description of Artificial Sequence: Synthetic oligonucleotide
gcgugguacugagcuauaa

SEQ ID NO: 1378206 - RNA, 19 nt, Artificial Sequence
  Description of Artificial Sequence: Synthetic oligonucleotide
ggagccgcagccaccgagu

SEQ ID NO: 1378207 - RNA, 19 nt, Artificial Sequence
  Description of Artificial Sequence: Synthetic oligonucleotide
cggucuuaaccggccgccg

SEQ ID NO: 1378208 - RNA, 19 nt, Artificial Sequence
  Description of Artificial Sequence: Synthetic oligonucleotide
gccgccgggagcacgugga

SEQ ID NO: 1378209 - RNA, 19 nt, Artificial Sequence
  Description of Artificial Sequence: Synthetic oligonucleotide
ggugggguucuugcuaauu

SEQ ID NO: 1378210 - RNA, 19 nt, Artificial Sequence
  Description of Artificial Sequence: Synthetic oligonucleotide
cccgggcccuuuucuuuuc

SEQ ID NO: 1378211 - RNA, 19 nt, Artificial Sequence
  Description of Artificial Sequence: Synthetic oligonucleotide
ccgccgggagcacguggag

SEQ ID NO: 1378212 - RNA, 19 nt, Artificial Sequence
  Description of Artificial Sequence: Synthetic oligonucleotide
ccuccauacuucugauuuu

SEQ ID NO: 1378213 - RNA, 19 nt, Artificial Sequence
  Description of Artificial Sequence: Synthetic oligonucleotide
gccauuuguuugggcagau

SEQ ID NO: 1378214 - RNA, 19 nt, Artificial Sequence
  Description of Artificial Sequence: Synthetic oligonucleotide
ccuuucgcuggaaccucau

SEQ ID NO: 1378215 - RNA, 19 nt, Artificial Sequence
  Description of Artificial Sequence: Synthetic oligonucleotide
gcacuucacguggcuuuua

SEQ ID NO: 1378216 - RNA, 19 nt, Artificial Sequence
  Description of Artificial Sequence: Synthetic oligonucleotide
ugcccaccccgggcccuuu

SEQ ID NO: 1378217 - RNA, 19 nt, Artificial Sequence
  Description of Artificial Sequence: Synthetic oligonucleotide
ccaccccgggcccuuuucu

SEQ ID NO: 1378218 - RNA, 19 nt, Artificial Sequence
  Description of Artificial Sequence: Synthetic oligonucleotide
cgccgccaccggcucuccc

SEQ ID NO: 1378219 - RNA, 19 nt, Artificial Sequence
  Description of Artificial Sequence: Synthetic oligonucleotide
cgcuugucacugcguggua

SEQ ID NO: 1378220 - RNA, 19 nt, Artificial Sequence
  Description of Artificial Sequence: Synthetic oligonucleotide
cggcuuuaaugguccccuu

SEQ ID NO: 1378221 - RNA, 19 nt, Artificial Sequence
  Description of Artificial Sequence: Synthetic oligonucleotide
cggccgccgggagcacgug

SEQ ID NO: 1378222 - RNA, 19 nt, Artificial Sequence
  Description of Artificial Sequence: Synthetic oligonucleotide
uacacaaugacucagagua

SEQ ID NO: 1378223 - RNA, 19 nt, Artificial Sequence
  Description of Artificial Sequence: Synthetic oligonucleotide
aaguacauuacccacggag

SEQ ID NO: 1378224 - RNA, 19 nt, Artificial Sequence
  Description of Artificial Sequence: Synthetic oligonucleotide
uggaaugucacucagaaau

SEQ ID NO: 1378225 - RNA, 19 nt, Artificial Sequence
  Description of Artificial Sequence: Synthetic oligonucleotide
ugaaguacauuacccacgg

SEQ ID NO: 1378226 - RNA, 19 nt, Artificial Sequence
  Description of Artificial Sequence: Synthetic oligonucleotide
agugacaguuuucuguugc

SEQ ID NO: 1378227 - RNA, 19 nt, Artificial Sequence
  Description of Artificial Sequence: Synthetic oligonucleotide
uuuucuguugcccuuguca

SEQ ID NO: 1378228 - RNA, 19 nt, Artificial Sequence
  Description of Artificial Sequence: Synthetic oligonucleotide
agcgccucaggcuugagcc

SEQ ID NO: 1378229 - RNA, 19 nt, Artificial Sequence
  Description of Artificial Sequence: Synthetic oligonucleotide
agucccacaucuuugcgcc

SEQ ID NO: 1378230 - RNA, 19 nt, Artificial Sequence
  Description of Artificial Sequence: Synthetic oligonucleotide
gucacucagaaauugggcg

SEQ ID NO: 1378231 - RNA, 19 nt, Artificial Sequence
  Description of Artificial Sequence: Synthetic oligonucleotide
ucuggaaugucacucagaa

SEQ ID NO: 1378232 - RNA, 19 nt, Artificial Sequence
  Description of Artificial Sequence: Synthetic oligonucleotide
ugcaccaccaccacgucgg

SEQ ID NO: 1378233 - RNA, 19 nt, Artificial Sequence
  Description of Artificial Sequence: Synthetic oligonucleotide
uacuagacgggacaguccc

SEQ ID NO: 1378234 - RNA, 19 nt, Artificial Sequence
  Description of Artificial Sequence: Synthetic oligonucleotide
aaugacucagaguacgcau

SEQ ID NO: 1378235 - RNA, 19 nt, Artificial Sequence
  Description of Artificial Sequence: Synthetic oligonucleotide
aaugucacucagaaauugg

SEQ ID NO: 1378236 - RNA, 19 nt, Artificial Sequence
  Description of Artificial Sequence: Synthetic oligonucleotide
cagagguacacaaugacuc

SEQ ID NO: 1378237 - RNA, 19 nt, Artificial Sequence
  Description of Artificial Sequence: Synthetic oligonucleotide
agcuugggguacuagacgg

SEQ ID NO: 1378238 - RNA, 19 nt, Artificial Sequence
  Description of Artificial Sequence: Synthetic oligonucleotide
ugacucagaguacgcaugg

SEQ ID NO: 1378239 - RNA, 19 nt, Artificial Sequence
  Description of Artificial Sequence: Synthetic oligonucleotide
gaucacauuuucuaaauua

SEQ ID NO: 1378240 - RNA, 19 nt, Artificial Sequence
  Description of Artificial Sequence: Synthetic oligonucleotide
ucagaaauugggcgaugcg

SEQ ID NO: 1378241 - RNA, 19 nt, Artificial Sequence
  Description of Artificial Sequence: Synthetic oligonucleotide
cugaaguacauuacccacg

SEQ ID NO: 1378242 - RNA, 19 nt, Artificial Sequence
  Description of Artificial Sequence: Synthetic oligonucleotide
aaauugggcgaugcgugcc

SEQ ID NO: 1378243 - RNA, 19 nt, Artificial Sequence
  Description of Artificial Sequence: Synthetic oligonucleotide
ugucacucagaaauugggc

SEQ ID NO: 1378244 - RNA, 19 nt, Artificial Sequence
  Description of Artificial Sequence: Synthetic oligonucleotide
ucagagguacacaaugacu

SEQ ID NO: 1378245 - RNA, 19 nt, Artificial Sequence
  Description of Artificial Sequence: Synthetic oligonucleotide
aaccgcggucaacacagcc

SEQ ID NO: 1378246 - RNA, 19 nt, Artificial Sequence
  Description of Artificial Sequence: Synthetic oligonucleotide
accaccaccacgucggagg

SEQ ID NO: 1378247 - RNA, 19 nt, Artificial Sequence
  Description of Artificial Sequence: Synthetic oligonucleotide
auuacccacggagaugucc

SEQ ID NO: 1378248 - RNA, 19 nt, Artificial Sequence
  Description of Artificial Sequence: Synthetic oligonucleotide
uuacccacggagauguccc

SEQ ID NO: 1378249 - RNA, 19 nt, Artificial Sequence
  Description of Artificial Sequence: Synthetic oligonucleotide
uggcugaaguacauuaccc

SEQ ID NO: 1378250 - RNA, 19 nt, Artificial Sequence
  Description of Artificial Sequence: Synthetic oligonucleotide
cacaaugacucagaguacg

SEQ ID NO: 1378251 - RNA, 19 nt, Artificial Sequence
  Description of Artificial Sequence: Synthetic oligonucleotide
ucuguugcccuugucauca

SEQ ID NO: 1378252 - RNA, 19 nt, Artificial Sequence
  Description of Artificial Sequence: Synthetic oligonucleotide
agugaucacauuuucuaaa

SEQ ID NO: 1378253 - RNA, 19 nt, Artificial Sequence
  Description of Artificial Sequence: Synthetic oligonucleotide
ucacucagaaauugggcga

SEQ ID NO: 1378254 - RNA, 19 nt, Artificial Sequence
  Description of Artificial Sequence: Synthetic oligonucleotide
uguccuugaagccgccgcg

SEQ ID NO: 1378255 - RNA, 19 nt, Artificial Sequence
  Description of Artificial Sequence: Synthetic oligonucleotide
aagcccgcggagcagggcg

SEQ ID NO: 1378256 - RNA, 19 nt, Artificial Sequence
  Description of Artificial Sequence: Synthetic oligonucleotide
gaaugucacucagaaauug

SEQ ID NO: 1378257 - RNA, 19 nt, Artificial Sequence
  Description of Artificial Sequence: Synthetic oligonucleotide
agaaccgcggucaacacag

SEQ ID NO: 1378258 - RNA, 19 nt, Artificial Sequence
  Description of Artificial Sequence: Synthetic oligonucleotide
agucucuggaaugucacuc

SEQ ID NO: 1378259 - RNA, 19 nt, Artificial Sequence
  Description of Artificial Sequence: Synthetic oligonucleotide
acucagaguacgcauggug

SEQ ID NO: 1378260 - RNA, 19 nt, Artificial Sequence
  Description of Artificial Sequence: Synthetic oligonucleotide
cuggcugaaguacauuacc

SEQ ID NO: 1378261 - RNA, 19 nt, Artificial Sequence
  Description of Artificial Sequence: Synthetic oligonucleotide
ucucuggaaugucacucag

SEQ ID NO: 1378262 - RNA, 19 nt, Artificial Sequence
  Description of Artificial Sequence: Synthetic oligonucleotide
gaaauugggcgaugcgugc

SEQ ID NO: 1378263 - RNA, 19 nt, Artificial Sequence
  Description of Artificial Sequence: Synthetic oligonucleotide
gacagucccacaucuuugc

SEQ ID NO: 1378264 - RNA, 19 nt, Artificial Sequence
  Description of Artificial Sequence: Synthetic oligonucleotide
acauuacccacggagaugu

SEQ ID NO: 1378265 - RNA, 19 nt, Artificial Sequence
  Description of Artificial Sequence: Synthetic oligonucleotide
acaucuuugcgccaccagu

SEQ ID NO: 1378266 - RNA, 19 nt, Artificial Sequence
  Description of Artificial Sequence: Synthetic oligonucleotide
gacagaagcucguccgggg

SEQ ID NO: 1378267 - RNA, 19 nt, Artificial Sequence
  Description of Artificial Sequence: Synthetic oligonucleotide
uacgcauggugucccaugc

SEQ ID NO: 1378268 - RNA, 19 nt, Artificial Sequence
  Description of Artificial Sequence: Synthetic oligonucleotide
acagcuugggguacuagac

SEQ ID NO: 1378269 - RNA, 19 nt, Artificial Sequence
  Description of Artificial Sequence: Synthetic oligonucleotide
agaaauugggcgaugcgug

SEQ ID NO: 1378270 - RNA, 19 nt, Artificial Sequence
  Description of Artificial Sequence: Synthetic oligonucleotide
augucacucagaaauuggg

SEQ ID NO: 1378271 - RNA, 19 nt, Artificial Sequence
  Description of Artificial Sequence: Synthetic oligonucleotide
caucuuugcgccaccagug

SEQ ID NO: 1378272 - RNA, 19 nt, Artificial Sequence
  Description of Artificial Sequence: Synthetic oligonucleotide
ugggguacuagacgggaca

SEQ ID NO: 1378273 - RNA, 19 nt, Artificial Sequence
  Description of Artificial Sequence: Synthetic oligonucleotide
augcgugccaugauggccc

SEQ ID NO: 1378274 - RNA, 19 nt, Artificial Sequence
  Description of Artificial Sequence: Synthetic oligonucleotide
ugucccaugcucacuucag

SEQ ID NO: 1378275 - RNA, 19 nt, Artificial Sequence
  Description of Artificial Sequence: Synthetic oligonucleotide
uggagaaccgcggucaaca

SEQ ID NO: 1378276 - RNA, 19 nt, Artificial Sequence
  Description of Artificial Sequence: Synthetic oligonucleotide
agaguacgcaugguguccc

SEQ ID NO: 1378277 - RNA, 19 nt, Artificial Sequence
  Description of Artificial Sequence: Synthetic oligonucleotide
cucagagguacacaaugac

SEQ ID NO: 1378278 - RNA, 19 nt, Artificial Sequence
  Description of Artificial Sequence: Synthetic oligonucleotide
aacacagccgacagaagcu

SEQ ID NO: 1378279 - RNA, 19 nt, Artificial Sequence
  Description of Artificial Sequence: Synthetic oligonucleotide
acaaugacucagaguacgc

SEQ ID NO: 1378280 - RNA, 19 nt, Artificial Sequence
  Description of Artificial Sequence: Synthetic oligonucleotide
ucccaugcucacuucagca

SEQ ID NO: 1378281 - RNA, 19 nt, Artificial Sequence
  Description of Artificial Sequence: Synthetic oligonucleotide
agccgacagaagcucgucc

SEQ ID NO: 1378282 - RNA, 19 nt, Artificial Sequence
  Description of Artificial Sequence: Synthetic oligonucleotide
aauugggcgaugcgugcca

SEQ ID NO: 1378283 - RNA, 19 nt, Artificial Sequence
  Description of Artificial Sequence: Synthetic oligonucleotide
aguacauuacccacggaga

SEQ ID NO: 1378284 - RNA, 19 nt, Artificial Sequence
  Description of Artificial Sequence: Synthetic oligonucleotide
acagucucuggaaugucac

SEQ ID NO: 1378285 - RNA, 19 nt, Artificial Sequence
  Description of Artificial Sequence: Synthetic oligonucleotide
uuugcgccaccagugauca

SEQ ID NO: 1378286 - RNA, 19 nt, Artificial Sequence
  Description of Artificial Sequence: Synthetic oligonucleotide
uucagcacagcuuggggua

SEQ ID NO: 1378287 - RNA, 19 nt, Artificial Sequence
  Description of Artificial Sequence: Synthetic oligonucleotide
ucagaguacgcaugguguc

SEQ ID NO: 1378288 - RNA, 19 nt, Artificial Sequence
  Description of Artificial Sequence: Synthetic oligonucleotide
gaugcgugccaugauggcc

SEQ ID NO: 1378289 - RNA, 19 nt, Artificial Sequence
  Description of Artificial Sequence: Synthetic oligonucleotide
ugacaguuuucuguugccc

SEQ ID NO: 1378290 - RNA, 19 nt, Artificial Sequence
  Description of Artificial Sequence: Synthetic oligonucleotide
gguacacaaugacucagag

SEQ ID NO: 1378291 - RNA, 19 nt, Artificial Sequence
  Description of Artificial Sequence: Synthetic oligonucleotide
ugcgccaccagugaucaca

SEQ ID NO: 1378292 - RNA, 19 nt, Artificial Sequence
  Description of Artificial Sequence: Synthetic oligonucleotide
uccuggcugaaguacauua

SEQ ID NO: 1378293 - RNA, 19 nt, Artificial Sequence
  Description of Artificial Sequence: Synthetic oligonucleotide
ugagccucacguccuggag

SEQ ID NO: 1378294 - RNA, 19 nt, Artificial Sequence
  Description of Artificial Sequence: Synthetic oligonucleotide
accugcagccgaugcaucg

SEQ ID NO: 1378295 - RNA, 19 nt, Artificial Sequence
  Description of Artificial Sequence: Synthetic oligonucleotide
ugaucacauuuucuaaauu

SEQ ID NO: 1378296 - RNA, 19 nt, Artificial Sequence
  Description of Artificial Sequence: Synthetic oligonucleotide
acagucccacaucuuugcg

SEQ ID NO: 1378297 - RNA, 19 nt, Artificial Sequence
  Description of Artificial Sequence: Synthetic oligonucleotide
ggggugguguccuugaagc

SEQ ID NO: 1378298 - RNA, 19 nt, Artificial Sequence
  Description of Artificial Sequence: Synthetic oligonucleotide
accaccacgucggaggccg

SEQ ID NO: 1378299 - RNA, 19 nt, Artificial Sequence
  Description of Artificial Sequence: Synthetic oligonucleotide
aagggacagucucuggaau

SEQ ID NO: 1378300 - RNA, 19 nt, Artificial Sequence
  Description of Artificial Sequence: Synthetic oligonucleotide
gucaacacagccgacagaa

SEQ ID NO: 1378301 - RNA, 19 nt, Artificial Sequence
  Description of Artificial Sequence: Synthetic oligonucleotide
cucagaaauugggcgaugc

SEQ ID NO: 1378302 - RNA, 19 nt, Artificial Sequence
  Description of Artificial Sequence: Synthetic oligonucleotide
cagucccacaucuuugcgc

SEQ ID NO: 1378303 - RNA, 19 nt, Artificial Sequence
  Description of Artificial Sequence: Synthetic oligonucleotide
agggacagucucuggaaug

SEQ ID NO: 1378304 - RNA, 19 nt, Artificial Sequence
  Description of Artificial Sequence: Synthetic oligonucleotide
ucaacacagccgacagaag

SEQ ID NO: 1378305 - RNA, 19 nt, Artificial Sequence
  Description of Artificial Sequence: Synthetic oligonucleotide
caugcucacuucagcacag

SEQ ID NO: 1378306 - RNA, 19 nt, Artificial Sequence
  Description of Artificial Sequence: Synthetic oligonucleotide
uacauuacccacggagaug

SEQ ID NO: 1378307 - RNA, 19 nt, Artificial Sequence
  Description of Artificial Sequence: Synthetic oligonucleotide
ugcucacuucagcacagcu

SEQ ID NO: 1378308 - RNA, 19 nt, Artificial Sequence
  Description of Artificial Sequence: Synthetic oligonucleotide
ucacuucagcacagcuugg

SEQ ID NO: 1378309 - RNA, 19 nt, Artificial Sequence
  Description of Artificial Sequence: Synthetic oligonucleotide
cucacguccuggagaaccg

SEQ ID NO: 1378310 - RNA, 19 nt, Artificial Sequence
  Description of Artificial Sequence: Synthetic oligonucleotide
ggugguguccuugaagccg

SEQ ID NO: 1378311 - RNA, 19 nt, Artificial Sequence
  Description of Artificial Sequence: Synthetic oligonucleotide
cuugaagccgccgcggccc

SEQ ID NO: 1378312 - RNA, 19 nt, Artificial Sequence
  Description of Artificial Sequence: Synthetic oligonucleotide
gcugaaguacauuacccac

SEQ ID NO: 1378313 - RNA, 19 nt, Artificial Sequence
  Description of Artificial Sequence: Synthetic oligonucleotide
uccgugcaccaccaccacg

SEQ ID NO: 1378314 - RNA, 19 nt, Artificial Sequence
  Description of Artificial Sequence: Synthetic oligonucleotide
agaagcucguccggggugg

SEQ ID NO: 1378315 - RNA, 19 nt, Artificial Sequence
  Description of Artificial Sequence: Synthetic oligonucleotide
cuuugcgccaccagugauc

SEQ ID NO: 1378316 - RNA, 19 nt, Artificial Sequence
  Description of Artificial Sequence: Synthetic oligonucleotide
ugccaugauggccccagcu

SEQ ID NO: 1378317 - RNA, 19 nt, Artificial Sequence
  Description of Artificial Sequence: Synthetic oligonucleotide
gugacaguuuucuguugcc

SEQ ID NO: 1378318 - RNA, 19 nt, Artificial Sequence
  Description of Artificial Sequence: Synthetic oligonucleotide
acgggacagucccacaucu

SEQ ID NO: 1378319 - RNA, 19 nt, Artificial Sequence
  Description of Artificial Sequence: Synthetic oligonucleotide
gacaguuuucuguugcccu

SEQ ID NO: 1378320 - RNA, 19 nt, Artificial Sequence
  Description of Artificial Sequence: Synthetic oligonucleotide
ugcagccgaugcaucgcgg

SEQ ID NO: 1378321 - RNA, 19 nt, Artificial Sequence
  Description of Artificial Sequence: Synthetic oligonucleotide
guguccuugaagccgccgc

SEQ ID NO: 1378322 - RNA, 19 nt, Artificial Sequence
  Description of Artificial Sequence: Synthetic oligonucleotide
cacguccuggagaaccgcg

SEQ ID NO: 1378323 - RNA, 19 nt, Artificial Sequence
  Description of Artificial Sequence: Synthetic oligonucleotide
cauggugucccaugcucac

SEQ ID NO: 1378324 - RNA, 19 nt, Artificial Sequence
  Description of Artificial Sequence: Synthetic oligonucleotide
gccgacagaagcucguccg

SEQ ID NO: 1378325 - RNA, 19 nt, Artificial Sequence
  Description of Artificial Sequence: Synthetic oligonucleotide
ugauggccccagcuccugg

SEQ ID NO: 1378326 - RNA, 19 nt, Artificial Sequence
  Description of Artificial Sequence: Synthetic oligonucleotide
cagggcgcggcuugcagcg

SEQ ID NO: 1378327 - RNA, 19 nt, Artificial Sequence
  Description of Artificial Sequence: Synthetic oligonucleotide
gauggccccagcuccuggc

SEQ ID NO: 1378328 - RNA, 19 nt, Artificial Sequence
  Description of Artificial Sequence: Synthetic oligonucleotide
uccuugaagccgccgcggc

SEQ ID NO: 1378329 - RNA, 19 nt, Artificial Sequence
  Description of Artificial Sequence: Synthetic oligonucleotide
cacuucagcacagcuuggg

SEQ ID NO: 1378330 - RNA, 19 nt, Artificial Sequence
  Description of Artificial Sequence: Synthetic oligonucleotide
ucuuugcgccaccagugau

SEQ ID NO: 1378331 - RNA, 19 nt, Artificial Sequence
  Description of Artificial Sequence: Synthetic oligonucleotide
aucuuugcgccaccaguga

SEQ ID NO: 1378332 - RNA, 19 nt, Artificial Sequence
  Description of Artificial Sequence: Synthetic oligonucleotide
acacaaugacucagaguac

SEQ ID NO: 1378333 - RNA, 19 nt, Artificial Sequence
  Description of Artificial Sequence: Synthetic oligonucleotide
acacagccgacagaagcuc

SEQ ID NO: 1378334 - RNA, 19 nt, Artificial Sequence
  Description of Artificial Sequence: Synthetic oligonucleotide
accgcggucaacacagccg

SEQ ID NO: 1378335 - RNA, 19 nt, Artificial Sequence
  Description of Artificial Sequence: Synthetic oligonucleotide
cccagcaccaccugcagcc

SEQ ID NO: 1378336 - RNA, 19 nt, Artificial Sequence
  Description of Artificial Sequence: Synthetic oligonucleotide
acagaagcucguccggggu

SEQ ID NO: 1378337 - RNA, 19 nt, Artificial Sequence
  Description of Artificial Sequence: Synthetic oligonucleotide
uugagccucacguccugga

SEQ ID NO: 1378338 - RNA, 19 nt, Artificial Sequence
  Description of Artificial Sequence: Synthetic oligonucleotide
augacucagaguacgcaug

SEQ ID NO: 1378339 - RNA, 19 nt, Artificial Sequence
  Description of Artificial Sequence: Synthetic oligonucleotide
cagaguacgcauggugucc

SEQ ID NO: 1378340 - RNA, 19 nt, Artificial Sequence
  Description of Artificial Sequence: Synthetic oligonucleotide
uugggguacuagacgggac

SEQ ID NO: 1378341 - RNA, 19 nt, Artificial Sequence
  Description of Artificial Sequence: Synthetic oligonucleotide
uggugucccaugcucacuu

SEQ ID NO: 1378342 - RNA, 19 nt, Artificial Sequence
  Description of Artificial Sequence: Synthetic oligonucleotide
gacagucucuggaauguca

SEQ ID NO: 1378343 - RNA, 19 nt, Artificial Sequence
  Description of Artificial Sequence: Synthetic oligonucleotide
ugcagcgcggagcucgacu

SEQ ID NO: 1378344 - RNA, 19 nt, Artificial Sequence
  Description of Artificial Sequence: Synthetic oligonucleotide
acaguuuucuguugcccuu

SEQ ID NO: 1378345 - RNA, 19 nt, Artificial Sequence
  Description of Artificial Sequence: Synthetic oligonucleotide
cuagacgggacagucccac

SEQ ID NO: 1378346 - RNA, 19 nt, Artificial Sequence
  Description of Artificial Sequence: Synthetic oligonucleotide
gugcaccaccaccacgucg

SEQ ID NO: 1378347 - RNA, 19 nt, Artificial Sequence
  Description of Artificial Sequence: Synthetic oligonucleotide
agacgggacagucccacau

SEQ ID NO: 1378348 - RNA, 19 nt, Artificial Sequence
  Description of Artificial Sequence: Synthetic oligonucleotide
ugggcgaugcgugccauga

SEQ ID NO: 1378349 - RNA, 19 nt, Artificial Sequence
  Description of Artificial Sequence: Synthetic oligonucleotide
agccgaugcaucgcggagg

SEQ ID NO: 1378350 - RNA, 19 nt, Artificial Sequence
  Description of Artificial Sequence: Synthetic oligonucleotide
agccucacguccuggagaa

SEQ ID NO: 1378351 - RNA, 19 nt, Artificial Sequence
  Description of Artificial Sequence: Synthetic oligonucleotide
cacagcuugggguacuaga

SEQ ID NO: 1378352 - RNA, 19 nt, Artificial Sequence
  Description of Artificial Sequence: Synthetic oligonucleotide
guacgcauggugucccaug

SEQ ID NO: 1378353 - RNA, 19 nt, Artificial Sequence
  Description of Artificial Sequence: Synthetic oligonucleotide
cucagaguacgcauggugu

SEQ ID NO: 1378354 - RNA, 19 nt, Artificial Sequence
  Description of Artificial Sequence: Synthetic oligonucleotide
gagaaccgcggucaacaca

SEQ ID NO: 1378355 - RNA, 19 nt, Artificial Sequence
  Description of Artificial Sequence: Synthetic oligonucleotide
gguacuagacgggacaguc

SEQ ID NO: 1378356 - RNA, 19 nt, Artificial Sequence
  Description of Artificial Sequence: Synthetic oligonucleotide
gucucuggaaugucacuca

SEQ ID NO: 1378357 - RNA, 19 nt, Artificial Sequence
  Description of Artificial Sequence: Synthetic oligonucleotide
ccaugauggccccagcucc

SEQ ID NO: 1378358 - RNA, 19 nt, Artificial Sequence
  Description of Artificial Sequence: Synthetic oligonucleotide
cacaucuuugcgccaccag

SEQ ID NO: 1378359 - RNA, 19 nt, Artificial Sequence
  Description of Artificial Sequence: Synthetic oligonucleotide
gcuugcagcgcggagcucg

SEQ ID NO: 1378360 - RNA, 19 nt, Artificial Sequence
  Description of Artificial Sequence: Synthetic oligonucleotide
gagccucacguccuggaga

SEQ ID NO: 1378361 - RNA, 19 nt, Artificial Sequence
  Description of Artificial Sequence: Synthetic oligonucleotide
uugaagccgccgcggcccg

SEQ ID NO: 1378362 - RNA, 19 nt, Artificial Sequence
  Description of Artificial Sequence: Synthetic oligonucleotide
cugcagccgaugcaucgcg

SEQ ID NO: 1378363 - RNA, 19 nt, Artificial Sequence
  Description of Artificial Sequence: Synthetic oligonucleotide
gucccaugcucacuucagc

SEQ ID NO: 1378364 - RNA, 19 nt, Artificial Sequence
  Description of Artificial Sequence: Synthetic oligonucleotide
cucgacucgggccggccgg

SEQ ID NO: 1378365 - RNA, 19 nt, Artificial Sequence
  Description of Artificial Sequence: Synthetic oligonucleotide
gugaucacauuuucuaaau

SEQ ID NO: 1378366 - RNA, 19 nt, Artificial Sequence
  Description of Artificial Sequence: Synthetic oligonucleotide
accaccugcagccgaugca

SEQ ID NO: 1378367 - RNA, 19 nt, Artificial Sequence
  Description of Artificial Sequence: Synthetic oligonucleotide
guacuagacgggacagucc

SEQ ID NO: 1378368 - RNA, 19 nt, Artificial Sequence
  Description of Artificial Sequence: Synthetic oligonucleotide
cagugaucacauuuucuaa

SEQ ID NO: 1378369 - RNA, 19 nt, Artificial Sequence
  Description of Artificial Sequence: Synthetic oligonucleotide
gugguguccuugaagccgc

SEQ ID NO: 1378370 - RNA, 19 nt, Artificial Sequence
  Description of Artificial Sequence: Synthetic oligonucleotide
ggcgaugcgugccaugaug

SEQ ID NO: 1378371 - RNA, 19 nt, Artificial Sequence
  Description of Artificial Sequence: Synthetic oligonucleotide
cccucagagguacacaaug

SEQ ID NO: 1378372 - RNA, 19 nt, Artificial Sequence
  Description of Artificial Sequence: Synthetic oligonucleotide
caggcuugagccucacguc

SEQ ID NO: 1378373 - RNA, 19 nt, Artificial Sequence
  Description of Artificial Sequence: Synthetic oligonucleotide
cagaagcucguccggggug

SEQ ID NO: 1378374 - RNA, 19 nt, Artificial Sequence
  Description of Artificial Sequence: Synthetic oligonucleotide
gacgggacagucccacauc

SEQ ID NO: 1378375 - RNA, 19 nt, Artificial Sequence
  Description of Artificial Sequence: Synthetic oligonucleotide
augcucacuucagcacagc

SEQ ID NO: 1378376 - RNA, 19 nt, Artificial Sequence
  Description of Artificial Sequence: Synthetic oligonucleotide
gcgaugcgugccaugaugg

SEQ ID NO: 1378377 - RNA, 19 nt, Artificial Sequence
  Description of Artificial Sequence: Synthetic oligonucleotide
guacauuacccacggagau

SEQ ID NO: 1378378 - RNA, 19 nt, Artificial Sequence
  Description of Artificial Sequence: Synthetic oligonucleotide
cuugagccucacguccugg

SEQ ID NO: 1378379 - RNA, 19 nt, Artificial Sequence
  Description of Artificial Sequence: Synthetic oligonucleotide
ucccacaucuuugcgccac

SEQ ID NO: 1378380 - RNA, 19 nt, Artificial Sequence
  Description of Artificial Sequence: Synthetic oligonucleotide
cuucagcacagcuuggggu

SEQ ID NO: 1378381 - RNA, 19 nt, Artificial Sequence
  Description of Artificial Sequence: Synthetic oligonucleotide
cagugacaguuuucuguug

SEQ ID NO: 1378382 - RNA, 19 nt, Artificial Sequence
  Description of Artificial Sequence: Synthetic oligonucleotide
acgucggaggccgaggccu

SEQ ID NO: 1378383 - RNA, 19 nt, Artificial Sequence
  Description of Artificial Sequence: Synthetic oligonucleotide
caaugacucagaguacgca

SEQ ID NO: 1378384 - RNA, 19 nt, Artificial Sequence
  Description of Artificial Sequence: Synthetic oligonucleotide
uccggggugguguccuuga

SEQ ID NO: 1378385 - RNA, 19 nt, Artificial Sequence
  Description of Artificial Sequence: Synthetic oligonucleotide
guacacaaugacucagagu

SEQ ID NO: 1378386 - RNA, 19 nt, Artificial Sequence
  Description of Artificial Sequence: Synthetic oligonucleotide
gaaguacauuacccacgga

SEQ ID NO: 1378387 - RNA, 19 nt, Artificial Sequence
  Description of Artificial Sequence: Synthetic oligonucleotide
acguccuggagaaccgcgg

SEQ ID NO: 1378388 - RNA, 19 nt, Artificial Sequence
  Description of Artificial Sequence: Synthetic oligonucleotide
guccuugaagccgccgcgg

SEQ ID NO: 1378389 - RNA, 19 nt, Artificial Sequence
  Description of Artificial Sequence: Synthetic oligonucleotide
gggccggccggccaggugg

SEQ ID NO: 1378390 - RNA, 19 nt, Artificial Sequence
  Description of Artificial Sequence: Synthetic oligonucleotide
ugcgggaagcccgcggagc

SEQ ID NO: 1378391 - RNA, 19 nt, Artificial Sequence
  Description of Artificial Sequence: Synthetic oligonucleotide
caguuuucuguugcccuug

SEQ ID NO: 1378392 - RNA, 19 nt, Artificial Sequence
  Description of Artificial Sequence: Synthetic oligonucleotide
agcgcggagcucgacucgg

SEQ ID NO: 1378393 - RNA, 19 nt, Artificial Sequence
  Description of Artificial Sequence: Synthetic oligonucleotide
ucccucagagguacacaau

SEQ ID NO: 1378394 - RNA, 19 nt, Artificial Sequence
  Description of Artificial Sequence: Synthetic oligonucleotide
gugucccaugcucacuuca

SEQ ID NO: 1378395 - RNA, 19 nt, Artificial Sequence
  Description of Artificial Sequence: Synthetic oligonucleotide
cuugggguacuagacggga

SEQ ID NO: 1378396 - RNA, 19 nt, Artificial Sequence
  Description of Artificial Sequence: Synthetic oligonucleotide
ccucacguccuggagaacc

SEQ ID NO: 1378397 - RNA, 19 nt, Artificial Sequence
  Description of Artificial Sequence: Synthetic oligonucleotide
uacccacggagaugucccc

SEQ ID NO: 1378398 - RNA, 19 nt, Artificial Sequence
  Description of Artificial Sequence: Synthetic oligonucleotide
cagaaauugggcgaugcgu

SEQ ID NO: 1378399 - RNA, 19 nt, Artificial Sequence
  Description of Artificial Sequence: Synthetic oligonucleotide
caccaccugcagccgaugc

SEQ ID NO: 1378400 - RNA, 19 nt, Artificial Sequence
  Description of Artificial Sequence: Synthetic oligonucleotide
ucacguccuggagaaccgc

SEQ ID NO: 1378401 - RNA, 19 nt, Artificial Sequence
  Description of Artificial Sequence: Synthetic oligonucleotide
cagccgaugcaucgcggag

SEQ ID NO: 1378402 - RNA, 19 nt, Artificial Sequence
  Description of Artificial Sequence: Synthetic oligonucleotide
ccuggcugaaguacauuac

SEQ ID NO: 1378403 - RNA, 19 nt, Artificial Sequence
  Description of Artificial Sequence: Synthetic oligonucleotide
agcucguccgggguggugu

SEQ ID NO: 1378404 - RNA, 19 nt, Artificial Sequence
  Description of Artificial Sequence: Synthetic oligonucleotide
cucaggcuugagccucacg

SEQ ID NO: 1378405 - RNA, 19 nt, Artificial Sequence
  Description of Artificial Sequence: Synthetic oligonucleotide
accacgucggaggccgagg

SEQ ID NO: 1378406 - RNA, 19 nt, Artificial Sequence
  Description of Artificial Sequence: Synthetic oligonucleotide
guuuucuguugcccuuguc

SEQ ID NO: 1378407 - RNA, 19 nt, Artificial Sequence
  Description of Artificial Sequence: Synthetic oligonucleotide
gaggccgaggccugcggga

SEQ ID NO: 1378408 - RNA, 19 nt, Artificial Sequence
  Description of Artificial Sequence: Synthetic oligonucleotide
cagcuccuggcugaaguac

SEQ ID NO: 1378409 - RNA, 19 nt, Artificial Sequence
  Description of Artificial Sequence: Synthetic oligonucleotide
acucgggccggccggccag

SEQ ID NO: 1378410 - RNA, 19 nt, Artificial Sequence
  Description of Artificial Sequence: Synthetic oligonucleotide
cagcgccucaggcuugagc

SEQ ID NO: 1378411 - RNA, 19 nt, Artificial Sequence
  Description of Artificial Sequence: Synthetic oligonucleotide
ggacagucccacaucuuug

SEQ ID NO: 1378412 - RNA, 19 nt, Artificial Sequence
  Description of Artificial Sequence: Synthetic oligonucleotide
uugggcgaugcgugccaug

SEQ ID NO: 1378413 - RNA, 19 nt, Artificial Sequence
  Description of Artificial Sequence: Synthetic oligonucleotide
ugcgugccaugauggcccc

SEQ ID NO: 1378414 - RNA, 19 nt, Artificial Sequence
  Description of Artificial Sequence: Synthetic oligonucleotide
ggaggccgaggccugcggg

SEQ ID NO: 1378415 - RNA, 19 nt, Artificial Sequence
  Description of Artificial Sequence: Synthetic oligonucleotide
agcuccuggcugaaguaca

SEQ ID NO: 1378416 - RNA, 19 nt, Artificial Sequence
  Description of Artificial Sequence: Synthetic oligonucleotide
acucagaaauugggcgaug

SEQ ID NO: 1378417 - RNA, 19 nt, Artificial Sequence
  Description of Artificial Sequence: Synthetic oligonucleotide
agcucgacucgggccggcc

SEQ ID NO: 1378418 - RNA, 19 nt, Artificial Sequence
  Description of Artificial Sequence: Synthetic oligonucleotide
cccaugcucacuucagcac

SEQ ID NO: 1378419 - RNA, 19 nt, Artificial Sequence
  Description of Artificial Sequence: Synthetic oligonucleotide
gccaugauggccccagcuc

SEQ ID NO: 1378420 - RNA, 19 nt, Artificial Sequence
  Description of Artificial Sequence: Synthetic oligonucleotide
auggccccagcuccuggcu

SEQ ID NO: 1378421 - RNA, 19 nt, Artificial Sequence
  Description of Artificial Sequence: Synthetic oligonucleotide
gggguacuagacgggacag

SEQ ID NO: 1378422 - RNA, 19 nt, Artificial Sequence
  Description of Artificial Sequence: Synthetic oligonucleotide
cacgucggaggccgaggcc

SEQ ID NO: 1378423 - RNA, 19 nt, Artificial Sequence
  Description of Artificial Sequence: Synthetic oligonucleotide
acgcauggugucccaugcu

SEQ ID NO: 1378424 - RNA, 19 nt, Artificial Sequence
  Description of Artificial Sequence: Synthetic oligonucleotide
ugguguccuugaagccgcc

SEQ ID NO: 1378425 - RNA, 19 nt, Artificial Sequence
  Description of Artificial Sequence: Synthetic oligonucleotide
acagccgacagaagcucgu

SEQ ID NO: 1378426 - RNA, 19 nt, Artificial Sequence
  Description of Artificial Sequence: Synthetic oligonucleotide
gggugguguccuugaagcc

SEQ ID NO: 1378427 - RNA, 19 nt, Artificial Sequence
  Description of Artificial Sequence: Synthetic oligonucleotide
cuggaaugucacucagaaa

SEQ ID NO: 1378428 - RNA, 19 nt, Artificial Sequence
  Description of Artificial Sequence: Synthetic oligonucleotide
cagcgcggagcucgacucg

SEQ ID NO: 1378429 - RNA, 19 nt, Artificial Sequence
  Description of Artificial Sequence: Synthetic oligonucleotide
gcuugggguacuagacggg

SEQ ID NO: 1378430 - RNA, 19 nt, Artificial Sequence
  Description of Artificial Sequence: Synthetic oligonucleotide
aggccugcgggaagcccgc

SEQ ID NO: 1378431 - RNA, 19 nt, Artificial Sequence
  Description of Artificial Sequence: Synthetic oligonucleotide
ccgacagaagcucguccgg

SEQ ID NO: 1378432 - RNA, 19 nt, Artificial Sequence
  Description of Artificial Sequence: Synthetic oligonucleotide
gaguacgcaugguguccca

SEQ ID NO: 1378433 - RNA, 19 nt, Artificial Sequence
  Description of Artificial Sequence: Synthetic oligonucleotide
aguacgcauggugucccau

SEQ ID NO: 1378434 - RNA, 19 nt, Artificial Sequence
  Description of Artificial Sequence: Synthetic oligonucleotide
ucguccggggugguguccu

SEQ ID NO: 1378435 - RNA, 19 nt, Artificial Sequence
  Description of Artificial Sequence: Synthetic oligonucleotide
cggagcucgacucgggccg

SEQ ID NO: 1378436 - RNA, 19 nt, Artificial Sequence
  Description of Artificial Sequence: Synthetic oligonucleotide
ccaugcucacuucagcaca

SEQ ID NO: 1378437 - RNA, 19 nt, Artificial Sequence
  Description of Artificial Sequence: Synthetic oligonucleotide
ggagaaccgcggucaacac

SEQ ID NO: 1378438 - RNA, 19 nt, Artificial Sequence
  Description of Artificial Sequence: Synthetic oligonucleotide
gguguccuugaagccgccg

SEQ ID NO: 1378439 - RNA, 19 nt, Artificial Sequence
  Description of Artificial Sequence: Synthetic oligonucleotide
gccaccagugaucacauuu

SEQ ID NO: 1378440 - RNA, 19 nt, Artificial Sequence
  Description of Artificial Sequence: Synthetic oligonucleotide
cugcgggaagcccgcggag

SEQ ID NO: 1378441 - RNA, 19 nt, Artificial Sequence
  Description of Artificial Sequence: Synthetic oligonucleotide
gaagcccgcggagcagggc

SEQ ID NO: 1378442 - RNA, 19 nt, Artificial Sequence
  Description of Artificial Sequence: Synthetic oligonucleotide
gcccgcacggccgaugggg

SEQ ID NO: 1378443 - RNA, 19 nt, Artificial Sequence
  Description of Artificial Sequence: Synthetic oligonucleotide
cuggagaaccgcggucaac

SEQ ID NO: 1378444 - RNA, 19 nt, Artificial Sequence
  Description of Artificial Sequence: Synthetic oligonucleotide
acuagacgggacaguccca

SEQ ID NO: 1378445 - RNA, 19 nt, Artificial Sequence
  Description of Artificial Sequence: Synthetic oligonucleotide
aagcucguccgggguggug

SEQ ID NO: 1378446 - RNA, 19 nt, Artificial Sequence
  Description of Artificial Sequence: Synthetic oligonucleotide
ccguccgugcaccaccacc

SEQ ID NO: 1378447 - RNA, 19 nt, Artificial Sequence
  Description of Artificial Sequence: Synthetic oligonucleotide
gcucgacucgggccggccg

SEQ ID NO: 1378448 - RNA, 19 nt, Artificial Sequence
  Description of Artificial Sequence: Synthetic oligonucleotide
gcagggcgcggcuugcagc

SEQ ID NO: 1378449 - RNA, 19 nt, Artificial Sequence
  Description of Artificial Sequence: Synthetic oligonucleotide
cauuacccacggagauguc

SEQ ID NO: 1378450 - RNA, 19 nt, Artificial Sequence
  Description of Artificial Sequence: Synthetic oligonucleotide
ccuugaagccgccgcggcc

SEQ ID NO: 1378451 - RNA, 19 nt, Artificial Sequence
  Description of Artificial Sequence: Synthetic oligonucleotide
cggucaacacagccgacag

SEQ ID NO: 1378452 - RNA, 19 nt, Artificial Sequence
  Description of Artificial Sequence: Synthetic oligonucleotide
gcggcuugcagcgcggagc

SEQ ID NO: 1378453 - RNA, 19 nt, Artificial Sequence
  Description of Artificial Sequence: Synthetic oligonucleotide
gcagccgaugcaucgcgga

SEQ ID NO: 1378454 - RNA, 19 nt, Artificial Sequence
  Description of Artificial Sequence: Synthetic oligonucleotide
gcuugagccucacguccug

SEQ ID NO: 1378455 - RNA, 19 nt, Artificial Sequence
  Description of Artificial Sequence: Synthetic oligonucleotide
gccgccgcggcccgcacgg

SEQ ID NO: 1378456 - RNA, 19 nt, Artificial Sequence
  Description of Artificial Sequence: Synthetic oligonucleotide
ggucaacacagccgacaga

SEQ ID NO: 1378457 - RNA, 19 nt, Artificial Sequence
  Description of Artificial Sequence: Synthetic oligonucleotide
gaaccgcggucaacacagc

SEQ ID NO: 1378458 - RNA, 19 nt, Artificial Sequence
  Description of Artificial Sequence: Synthetic oligonucleotide
cuugcagcgcggagcucga

SEQ ID NO: 1378459 - RNA, 19 nt, Artificial Sequence
  Description of Artificial Sequence: Synthetic oligonucleotide
gggcgcggcuugcagcgcg

SEQ ID NO: 1378460 - RNA, 19 nt, Artificial Sequence
  Description of Artificial Sequence: Synthetic oligonucleotide
caccugcagccgaugcauc

SEQ ID NO: 1378461 - RNA, 19 nt, Artificial Sequence
  Description of Artificial Sequence: Synthetic oligonucleotide
gcauggugucccaugcuca

SEQ ID NO: 1378462 - RNA, 19 nt, Artificial Sequence
  Description of Artificial Sequence: Synthetic oligonucleotide
cgcauggugucccaugcuc

SEQ ID NO: 1378463 - RNA, 19 nt, Artificial Sequence
  Description of Artificial Sequence: Synthetic oligonucleotide
ugcgccguccgugcaccac

SEQ ID NO: 1378464 - RNA, 19 nt, Artificial Sequence
  Description of Artificial Sequence: Synthetic oligonucleotide
gggacagucccacaucuuu

SEQ ID NO: 1378465 - RNA, 19 nt, Artificial Sequence
  Description of Artificial Sequence: Synthetic oligonucleotide
auugggcgaugcgugccau

SEQ ID NO: 1378466 - RNA, 19 nt, Artificial Sequence
  Description of Artificial Sequence: Synthetic oligonucleotide
ccacgucggaggccgaggc

SEQ ID NO: 1378467 - RNA, 19 nt, Artificial Sequence
  Description of Artificial Sequence: Synthetic oligonucleotide
gacucgggccggccggcca

SEQ ID NO: 1378468 - RNA, 19 nt, Artificial Sequence
  Description of Artificial Sequence: Synthetic oligonucleotide
ggugcgccguccgugcacc

SEQ ID NO: 1378469 - RNA, 19 nt, Artificial Sequence
  Description of Artificial Sequence: Synthetic oligonucleotide
gaagccgccgcggcccgca

SEQ ID NO: 1378470 - RNA, 19 nt, Artificial Sequence
  Description of Artificial Sequence: Synthetic oligonucleotide
agcaccaccugcagccgau

SEQ ID NO: 1378471 - RNA, 19 nt, Artificial Sequence
  Description of Artificial Sequence: Synthetic oligonucleotide
ccugcagccgaugcaucgc

SEQ ID NO: 1378472 - RNA, 19 nt, Artificial Sequence
  Description of Artificial Sequence: Synthetic oligonucleotide
caccacgucggaggccgag

SEQ ID NO: 1378473 - RNA, 19 nt, Artificial Sequence
  Description of Artificial Sequence: Synthetic oligonucleotide
gcggucaacacagccgaca

SEQ ID NO: 1378474 - RNA, 19 nt, Artificial Sequence
  Description of Artificial Sequence: Synthetic oligonucleotide
agggcgcggcuugcagcgc

SEQ ID NO: 1378475 - RNA, 19 nt, Artificial Sequence
  Description of Artificial Sequence: Synthetic oligonucleotide
ccaccaccacgucggaggc

SEQ ID NO: 1378476 - RNA, 19 nt, Artificial Sequence
  Description of Artificial Sequence: Synthetic oligonucleotide
gggacagucucuggaaugu

SEQ ID NO: 1378477 - RNA, 19 nt, Artificial Sequence
  Description of Artificial Sequence: Synthetic oligonucleotide
cucguccgggguggugucc

SEQ ID NO: 1378478 - RNA, 19 nt, Artificial Sequence
  Description of Artificial Sequence: Synthetic oligonucleotide
ggugucccaugcucacuuc

SEQ ID NO: 1378479 - RNA, 19 nt, Artificial Sequence
  Description of Artificial Sequence: Synthetic oligonucleotide
gccugcgggaagcccgcgg

SEQ ID NO: 1378480 - RNA, 19 nt, Artificial Sequence
  Description of Artificial Sequence: Synthetic oligonucleotide
cagccgacagaagcucguc

SEQ ID NO: 1378481 - RNA, 19 nt, Artificial Sequence
  Description of Artificial Sequence: Synthetic oligonucleotide
gcgccguccgugcaccacc

SEQ ID NO: 1378482 - RNA, 19 nt, Artificial Sequence
  Description of Artificial Sequence: Synthetic oligonucleotide
ggaagcccgcggagcaggg

SEQ ID NO: 1378483 - RNA, 19 nt, Artificial Sequence
  Description of Artificial Sequence: Synthetic oligonucleotide
cagucucuggaaugucacu

SEQ ID NO: 1378484 - RNA, 19 nt, Artificial Sequence
  Description of Artificial Sequence: Synthetic oligonucleotide
cgacagaagcucguccggg

SEQ ID NO: 1378485 - RNA, 19 nt, Artificial Sequence
  Description of Artificial Sequence: Synthetic oligonucleotide
gacucagaguacgcauggu

SEQ ID NO: 1378486 - RNA, 19 nt, Artificial Sequence
  Description of Artificial Sequence: Synthetic oligonucleotide
cgaugcgugccaugauggc

SEQ ID NO: 1378487 - RNA, 19 nt, Artificial Sequence
  Description of Artificial Sequence: Synthetic oligonucleotide
guccggggugguguccuug

SEQ ID NO: 1378488 - RNA, 19 nt, Artificial Sequence
  Description of Artificial Sequence: Synthetic oligonucleotide
gcgggaagcccgcggagca

SEQ ID NO: 1378489 - RNA, 19 nt, Artificial Sequence
  Description of Artificial Sequence: Synthetic oligonucleotide
ggagcucgacucgggccgg

SEQ ID NO: 1378490 - RNA, 19 nt, Artificial Sequence
  Description of Artificial Sequence: Synthetic oligonucleotide
caccaccacgucggaggcc

SEQ ID NO: 1378491 - RNA, 19 nt, Artificial Sequence
  Description of Artificial Sequence: Synthetic oligonucleotide
ccgcggucaacacagccga

SEQ ID NO: 1378492 - RNA, 19 nt, Artificial Sequence
  Description of Artificial Sequence: Synthetic oligonucleotide
ggccccagcuccuggcuga

SEQ ID NO: 1378493 - RNA, 19 nt, Artificial Sequence
  Description of Artificial Sequence: Synthetic oligonucleotide
cacucagaaauugggcgau

SEQ ID NO: 1378494 - RNA, 19 nt, Artificial Sequence
  Description of Artificial Sequence: Synthetic oligonucleotide
agcacagcuugggguacua

SEQ ID NO: 1378495 - RNA, 19 nt, Artificial Sequence
  Description of Artificial Sequence: Synthetic oligonucleotide
cggggugguguccuugaag

SEQ ID NO: 1378496 - RNA, 19 nt, Artificial Sequence
  Description of Artificial Sequence: Synthetic oligonucleotide
cccacaucuuugcgccacc

SEQ ID NO: 1378497 - RNA, 19 nt, Artificial Sequence
  Description of Artificial Sequence: Synthetic oligonucleotide
gccgaggccugcgggaagc

SEQ ID NO: 1378498 - RNA, 19 nt, Artificial Sequence
  Description of Artificial Sequence: Synthetic oligonucleotide
ugaagccgccgcggcccgc

SEQ ID NO: 1378499 - RNA, 19 nt, Artificial Sequence
  Description of Artificial Sequence: Synthetic oligonucleotide
ggacagucucuggaauguc

SEQ ID NO: 1378500 - RNA, 19 nt, Artificial Sequence
  Description of Artificial Sequence: Synthetic oligonucleotide
ggaaugucacucagaaauu

SEQ ID NO: 1378501 - RNA, 19 nt, Artificial Sequence
  Description of Artificial Sequence: Synthetic oligonucleotide
cagcaccaccugcagccga

SEQ ID NO: 1378502 - RNA, 19 nt, Artificial Sequence
  Description of Artificial Sequence: Synthetic oligonucleotide
uugcgccaccagugaucac

SEQ ID NO: 1378503 - RNA, 19 nt, Artificial Sequence
  Description of Artificial Sequence: Synthetic oligonucleotide
aggccgaggccugcgggaa

SEQ ID NO: 1378504 - RNA, 19 nt, Artificial Sequence
  Description of Artificial Sequence: Synthetic oligonucleotide
gagcucgacucgggccggc

SEQ ID NO: 1378505 - RNA, 19 nt, Artificial Sequence
  Description of Artificial Sequence: Synthetic oligonucleotide
gucggaggccgaggccugc

SEQ ID NO: 1378506 - RNA, 19 nt, Artificial Sequence
  Description of Artificial Sequence: Synthetic oligonucleotide
gggugcgccguccgugcac

SEQ ID NO: 1378507 - RNA, 19 nt, Artificial Sequence
  Description of Artificial Sequence: Synthetic oligonucleotide
ggagcagggcgcggcuugc

SEQ ID NO: 1378508 - RNA, 19 nt, Artificial Sequence
  Description of Artificial Sequence: Synthetic oligonucleotide
ccugcgggaagcccgcgga

SEQ ID NO: 1378509 - RNA, 19 nt, Artificial Sequence
  Description of Artificial Sequence: Synthetic oligonucleotide
gccgcggcccgcacggccg

SEQ ID NO: 1378510 - RNA, 19 nt, Artificial Sequence
  Description of Artificial Sequence: Synthetic oligonucleotide
uugcagcgcggagcucgac

SEQ ID NO: 1378511 - RNA, 19 nt, Artificial Sequence
  Description of Artificial Sequence: Synthetic oligonucleotide
cucgggccggccggccagg

SEQ ID NO: 1378512 - RNA, 19 nt, Artificial Sequence
  Description of Artificial Sequence: Synthetic oligonucleotide
gagcagggcgcggcuugca

SEQ ID NO: 1378513 - RNA, 19 nt, Artificial Sequence
  Description of Artificial Sequence: Synthetic oligonucleotide
ggccgaggccugcgggaag

SEQ ID NO: 1378514 - RNA, 19 nt, Artificial Sequence
  Description of Artificial Sequence: Synthetic oligonucleotide
ggcgcggcuugcagcgcgg

SEQ ID NO: 1378515 - RNA, 19 nt, Artificial Sequence
  Description of Artificial Sequence: Synthetic oligonucleotide
ggcccgcacggccgauggg

SEQ ID NO: 1378516 - RNA, 19 nt, Artificial Sequence
  Description of Artificial Sequence: Synthetic oligonucleotide
gccagguggcccagcacca

SEQ ID NO: 1378517 - RNA, 19 nt, Artificial Sequence
  Description of Artificial Sequence: Synthetic oligonucleotide
gcucacuucagcacagcuu

SEQ ID NO: 1378518 - RNA, 19 nt, Artificial Sequence
  Description of Artificial Sequence: Synthetic oligonucleotide
ccaccagugaucacauuuu

SEQ ID NO: 1378519 - RNA, 19 nt, Artificial Sequence
  Description of Artificial Sequence: Synthetic oligonucleotide
cgcggagcucgacucgggc

SEQ ID NO: 1378520 - RNA, 19 nt, Artificial Sequence
  Description of Artificial Sequence: Synthetic oligonucleotide
ccagcuccuggcugaagua

SEQ ID NO: 1378521 - RNA, 19 nt, Artificial Sequence
  Description of Artificial Sequence: Synthetic oligonucleotide
ggcuugagccucacguccu

SEQ ID NO: 1378522 - RNA, 19 nt, Artificial Sequence
  Description of Artificial Sequence: Synthetic oligonucleotide
gcucguccggggugguguc

SEQ ID NO: 1378523 - RNA, 19 nt, Artificial Sequence
  Description of Artificial Sequence: Synthetic oligonucleotide
cggagcagggcgcggcuug

SEQ ID NO: 1378524 - RNA, 19 nt, Artificial Sequence
  Description of Artificial Sequence: Synthetic oligonucleotide
cggcccgcacggccgaugg

SEQ ID NO: 1378525 - RNA, 19 nt, Artificial Sequence
  Description of Artificial Sequence: Synthetic oligonucleotide
gaagcucguccgggguggu

SEQ ID NO: 1378526 - RNA, 19 nt, Artificial Sequence
  Description of Artificial Sequence: Synthetic oligonucleotide
ucgggccggccggccaggu

SEQ ID NO: 1378527 - RNA, 19 nt, Artificial Sequence
  Description of Artificial Sequence: Synthetic oligonucleotide
gcgcggagcucgacucggg

SEQ ID NO: 1378528 - RNA, 19 nt, Artificial Sequence
  Description of Artificial Sequence: Synthetic oligonucleotide
gcaccaccugcagccgaug

SEQ ID NO: 1378529 - RNA, 19 nt, Artificial Sequence
  Description of Artificial Sequence: Synthetic oligonucleotide
ccacaucuuugcgccacca

SEQ ID NO: 1378530 - RNA, 19 nt, Artificial Sequence
  Description of Artificial Sequence: Synthetic oligonucleotide
gcccgcggagcagggcgcg

SEQ ID NO: 1378531 - RNA, 19 nt, Artificial Sequence
  Description of Artificial Sequence: Synthetic oligonucleotide
ggguacuagacgggacagu

SEQ ID NO: 1378532 - RNA, 19 nt, Artificial Sequence
  Description of Artificial Sequence: Synthetic oligonucleotide
gugcgccguccgugcacca

SEQ ID NO: 1378533 - RNA, 19 nt, Artificial Sequence
  Description of Artificial Sequence: Synthetic oligonucleotide
ccggccggccagguggccc

SEQ ID NO: 1378534 - RNA, 19 nt, Artificial Sequence
  Description of Artificial Sequence: Synthetic oligonucleotide
ccuggagaaccgcggucaa

SEQ ID NO: 1378535 - RNA, 19 nt, Artificial Sequence
  Description of Artificial Sequence: Synthetic oligonucleotide
cgccucaggcuugagccuc

SEQ ID NO: 1378536 - RNA, 19 nt, Artificial Sequence
  Description of Artificial Sequence: Synthetic oligonucleotide
ggggugcgccguccgugca

SEQ ID NO: 1378537 - RNA, 19 nt, Artificial Sequence
  Description of Artificial Sequence: Synthetic oligonucleotide
cgaggccugcgggaagccc

SEQ ID NO: 1378538 - RNA, 19 nt, Artificial Sequence
  Description of Artificial Sequence: Synthetic oligonucleotide
ggccugcgggaagcccgcg

SEQ ID NO: 1378539 - RNA, 19 nt, Artificial Sequence
  Description of Artificial Sequence: Synthetic oligonucleotide
ccaccugcagccgaugcau

SEQ ID NO: 1378540 - RNA, 19 nt, Artificial Sequence
  Description of Artificial Sequence: Synthetic oligonucleotide
ccgaggccugcgggaagcc

SEQ ID NO: 1378541 - RNA, 19 nt, Artificial Sequence
  Description of Artificial Sequence: Synthetic oligonucleotide
gccguccgugcaccaccac

SEQ ID NO: 1378542 - RNA, 19 nt, Artificial Sequence
  Description of Artificial Sequence: Synthetic oligonucleotide
cgcggcuugcagcgcggag

SEQ ID NO: 1378543 - RNA, 19 nt, Artificial Sequence
  Description of Artificial Sequence: Synthetic oligonucleotide
gcuccuggcugaaguacau

SEQ ID NO: 1378544 - RNA, 19 nt, Artificial Sequence
  Description of Artificial Sequence: Synthetic oligonucleotide
ggccggccggccagguggc

SEQ ID NO: 1378545 - RNA, 19 nt, Artificial Sequence
  Description of Artificial Sequence: Synthetic oligonucleotide
ccccagcgccucaggcuug

SEQ ID NO: 1378546 - RNA, 19 nt, Artificial Sequence
  Description of Artificial Sequence: Synthetic oligonucleotide
cgcggucaacacagccgac

SEQ ID NO: 1378547 - RNA, 19 nt, Artificial Sequence
  Description of Artificial Sequence: Synthetic oligonucleotide
ccucaggcuugagccucac

SEQ ID NO: 1378548 - RNA, 19 nt, Artificial Sequence
  Description of Artificial Sequence: Synthetic oligonucleotide
gcgccucaggcuugagccu

SEQ ID NO: 1378549 - RNA, 19 nt, Artificial Sequence
  Description of Artificial Sequence: Synthetic oligonucleotide
cuccuggcugaaguacauu

SEQ ID NO: 1378550 - RNA, 19 nt, Artificial Sequence
  Description of Artificial Sequence: Synthetic oligonucleotide
cgccgcggcccgcacggcc

SEQ ID NO: 1378551 - RNA, 19 nt, Artificial Sequence
  Description of Artificial Sequence: Synthetic oligonucleotide
cgggaagcccgcggagcag

SEQ ID NO: 1378552 - RNA, 19 nt, Artificial Sequence
  Description of Artificial Sequence: Synthetic oligonucleotide
gccucacguccuggagaac

SEQ ID NO: 1378553 - RNA, 19 nt, Artificial Sequence
  Description of Artificial Sequence: Synthetic oligonucleotide
gcggcccgcacggccgaug

SEQ ID NO: 1378554 - RNA, 19 nt, Artificial Sequence
  Description of Artificial Sequence: Synthetic oligonucleotide
cguccuggagaaccgcggu

SEQ ID NO: 1378555 - RNA, 19 nt, Artificial Sequence
  Description of Artificial Sequence: Synthetic oligonucleotide
cccgcggagcagggcgcgg

SEQ ID NO: 1378556 - RNA, 19 nt, Artificial Sequence
  Description of Artificial Sequence: Synthetic oligonucleotide
gcgccaccagugaucacau

SEQ ID NO: 1378557 - RNA, 19 nt, Artificial Sequence
  Description of Artificial Sequence: Synthetic oligonucleotide
gggcgaugcgugccaugau

SEQ ID NO: 1378558 - RNA, 19 nt, Artificial Sequence
  Description of Artificial Sequence: Synthetic oligonucleotide
cggcuugcagcgcggagcu

SEQ ID NO: 1378559 - RNA, 19 nt, Artificial Sequence
  Description of Artificial Sequence: Synthetic oligonucleotide
ggcuugcagcgcggagcuc

SEQ ID NO: 1378560 - RNA, 19 nt, Artificial Sequence
  Description of Artificial Sequence: Synthetic oligonucleotide
ccccagcuccuggcugaag

SEQ ID NO: 1378561 - RNA, 19 nt, Artificial Sequence
  Description of Artificial Sequence: Synthetic oligonucleotide
ccagcgccucaggcuugag

SEQ ID NO: 1378562 - RNA, 19 nt, Artificial Sequence
  Description of Artificial Sequence: Synthetic oligonucleotide
cccagcgccucaggcuuga

SEQ ID NO: 1378563 - RNA, 19 nt, Artificial Sequence
  Description of Artificial Sequence: Synthetic oligonucleotide
cgccguccgugcaccacca

SEQ ID NO: 1378564 - RNA, 19 nt, Artificial Sequence
  Description of Artificial Sequence: Synthetic oligonucleotide
ccggggugguguccuugaa

SEQ ID NO: 1378565 - RNA, 19 nt, Artificial Sequence
  Description of Artificial Sequence: Synthetic oligonucleotide
cggccggccagguggccca

SEQ ID NO: 1378566 - RNA, 19 nt, Artificial Sequence
  Description of Artificial Sequence: Synthetic oligonucleotide
gcgugccaugauggcccca

SEQ ID NO: 1378567 - RNA, 19 nt, Artificial Sequence
  Description of Artificial Sequence: Synthetic oligonucleotide
gcgcggcuugcagcgcgga

SEQ ID NO: 1378568 - RNA, 19 nt, Artificial Sequence
  Description of Artificial Sequence: Synthetic oligonucleotide
gccggccggccagguggcc

SEQ ID NO: 1378569 - RNA, 19 nt, Artificial Sequence
  Description of Artificial Sequence: Synthetic oligonucleotide
ccaccacgucggaggccga

SEQ ID NO: 1378570 - RNA, 19 nt, Artificial Sequence
  Description of Artificial Sequence: Synthetic oligonucleotide
gccccagcuccuggcugaa

SEQ ID NO: 1378571 - RNA, 19 nt, Artificial Sequence
  Description of Artificial Sequence: Synthetic oligonucleotide
cgggccggccggccaggug

SEQ ID NO: 1378572 - RNA, 19 nt, Artificial Sequence
  Description of Artificial Sequence: Synthetic oligonucleotide
cgggacagucccacaucuu

SEQ ID NO: 1378573 - RNA, 19 nt, Artificial Sequence
  Description of Artificial Sequence: Synthetic oligonucleotide
gcggagcagggcgcggcuu

SEQ ID NO: 1378574 - RNA, 19 nt, Artificial Sequence
  Description of Artificial Sequence: Synthetic oligonucleotide
ccgccgcggcccgcacggc

SEQ ID NO: 1378575 - RNA, 19 nt, Artificial Sequence
  Description of Artificial Sequence: Synthetic oligonucleotide
cgccaccagugaucacauu

SEQ ID NO: 1378576 - RNA, 19 nt, Artificial Sequence
  Description of Artificial Sequence: Synthetic oligonucleotide
cguccggggugguguccuu

SEQ ID NO: 1378577 - RNA, 19 nt, Artificial Sequence
  Description of Artificial Sequence: Synthetic oligonucleotide
cgcggcccgcacggccgau

SEQ ID NO: 1378578 - RNA, 19 nt, Artificial Sequence
  Description of Artificial Sequence: Synthetic oligonucleotide
aauccacuaacagagaagc

SEQ ID NO: 1378579 - RNA, 19 nt, Artificial Sequence
  Description of Artificial Sequence: Synthetic oligonucleotide
aaagugguaacuuccugcc

SEQ ID NO: 1378580 - RNA, 19 nt, Artificial Sequence
  Description of Artificial Sequence: Synthetic oligonucleotide
agcucuuuuagcuucagcc

SEQ ID NO: 1378581 - RNA, 19 nt, Artificial Sequence
  Description of Artificial Sequence: Synthetic oligonucleotide
acgaauauaucccugagag

SEQ ID NO: 1378582 - RNA, 19 nt, Artificial Sequence
  Description of Artificial Sequence: Synthetic oligonucleotide
ucuuuauggccucagaacc

SEQ ID NO: 1378583 - RNA, 19 nt, Artificial Sequence
  Description of Artificial Sequence: Synthetic oligonucleotide
uggacaaagaaccggaucc

SEQ ID NO: 1378584 - RNA, 19 nt, Artificial Sequence
  Description of Artificial Sequence: Synthetic oligonucleotide
uguccauuacacuugaaag

SEQ ID NO: 1378585 - RNA, 19 nt, Artificial Sequence
  Description of Artificial Sequence: Synthetic oligonucleotide
cauagaucaaguaauacuc

SEQ ID NO: 1378586 - RNA, 19 nt, Artificial Sequence
  Description of Artificial Sequence: Synthetic oligonucleotide
aaacaggcuaucuaaccgg

SEQ ID NO: 1378587 - RNA, 19 nt, Artificial Sequence
  Description of Artificial Sequence: Synthetic oligonucleotide
agugcuaacauccuggaca

SEQ ID NO: 1378588 - RNA, 19 nt, Artificial Sequence
  Description of Artificial Sequence: Synthetic oligonucleotide
acaauggaaauccacugcg

SEQ ID NO: 1378589 - RNA, 19 nt, Artificial Sequence
  Description of Artificial Sequence: Synthetic oligonucleotide
uugaaguacucacacaagc

SEQ ID NO: 1378590 - RNA, 19 nt, Artificial Sequence
  Description of Artificial Sequence: Synthetic oligonucleotide
ugaaaagagcucaagacau

SEQ ID NO: 1378591 - RNA, 19 nt, Artificial Sequence
  Description of Artificial Sequence: Synthetic oligonucleotide
aaauccacugcggugaagg

SEQ ID NO: 1378592 - RNA, 19 nt, Artificial Sequence
  Description of Artificial Sequence: Synthetic oligonucleotide
aaccggaucaguuuguugu

SEQ ID NO: 1378593 - RNA, 19 nt, Artificial Sequence
  Description of Artificial Sequence: Synthetic oligonucleotide
uggagcaugauguagacaa

SEQ ID NO: 1378594 - RNA, 19 nt, Artificial Sequence
  Description of Artificial Sequence: Synthetic oligonucleotide
agaaucuugacuuggggug

SEQ ID NO: 1378595 - RNA, 19 nt, Artificial Sequence
  Description of Artificial Sequence: Synthetic oligonucleotide
ugaagccacgaauauaucc

SEQ ID NO: 1378596 - RNA, 19 nt, Artificial Sequence
  Description of Artificial Sequence: Synthetic oligonucleotide
caaguaauacuccugcagg

SEQ ID NO: 1378597 - RNA, 19 nt, Artificial Sequence
  Description of Artificial Sequence: Synthetic oligonucleotide
gaaccuauucagcacagag

SEQ ID NO: 1378598 - RNA, 19 nt, Artificial Sequence
  Description of Artificial Sequence: Synthetic oligonucleotide
aaagcuuuccuugcagggc

SEQ ID NO: 1378599 - RNA, 19 nt, Artificial Sequence
  Description of Artificial Sequence: Synthetic oligonucleotide
aguaggguacauccgaggg

SEQ ID NO: 1378600 - RNA, 19 nt, Artificial Sequence
  Description of Artificial Sequence: Synthetic oligonucleotide
acagcccuuacauaggccg

SEQ ID NO: 1378601 - RNA, 19 nt, Artificial Sequence
  Description of Artificial Sequence: Synthetic oligonucleotide
ucaauguccauuacacuug

SEQ ID NO: 1378602 - RNA, 19 nt, Artificial Sequence
  Description of Artificial Sequence: Synthetic oligonucleotide
uccuucaaugcacaggcag

SEQ ID NO: 1378603 - RNA, 19 nt, Artificial Sequence
  Description of Artificial Sequence: Synthetic oligonucleotide
caaacaggcuaucuaaccg

SEQ ID NO: 1378604 - RNA, 19 nt, Artificial Sequence
  Description of Artificial Sequence: Synthetic oligonucleotide
uccgucugaaaacacaugu

SEQ ID NO: 1378605 - RNA, 19 nt, Artificial Sequence
  Description of Artificial Sequence: Synthetic oligonucleotide
aucguauccgucugaaaac

SEQ ID NO: 1378606 - RNA, 19 nt, Artificial Sequence
  Description of Artificial Sequence: Synthetic oligonucleotide
gagcucaagacaugcaggg

SEQ ID NO: 1378607 - RNA, 19 nt, Artificial Sequence
  Description of Artificial Sequence: Synthetic oligonucleotide
aaguaauacuccugcagga

SEQ ID NO: 1378608 - RNA, 19 nt, Artificial Sequence
  Description of Artificial Sequence: Synthetic oligonucleotide
cugacuguccucaucauac

SEQ ID NO: 1378609 - RNA, 19 nt, Artificial Sequence
  Description of Artificial Sequence: Synthetic oligonucleotide
ucguaucuuuuccucaggg

SEQ ID NO: 1378610 - RNA, 19 nt, Artificial Sequence
  Description of Artificial Sequence: Synthetic oligonucleotide
aggguagcaaugaaggugc

SEQ ID NO: 1378611 - RNA, 19 nt, Artificial Sequence
  Description of Artificial Sequence: Synthetic oligonucleotide
auagaucaaguaauacucc

SEQ ID NO: 1378612 - RNA, 19 nt, Artificial Sequence
  Description of Artificial Sequence: Synthetic oligonucleotide
uuaacugagguucuucaau

SEQ ID NO: 1378613 - RNA, 19 nt, Artificial Sequence
  Description of Artificial Sequence: Synthetic oligonucleotide
aaguacucacacaagccac

SEQ ID NO: 1378614 - RNA, 19 nt, Artificial Sequence
  Description of Artificial Sequence: Synthetic oligonucleotide
ucagucuggagcauaguga

SEQ ID NO: 1378615 - RNA, 19 nt, Artificial Sequence
  Description of Artificial Sequence: Synthetic oligonucleotide
uuggguagugcccugagaa

SEQ ID NO: 1378616 - RNA, 19 nt, Artificial Sequence
  Description of Artificial Sequence: Synthetic oligonucleotide
acagguuugaacugucaag

SEQ ID NO: 1378617 - RNA, 19 nt, Artificial Sequence
  Description of Artificial Sequence: Synthetic oligonucleotide
acaaugcacagguuugaac

SEQ ID NO: 1378618 - RNA, 19 nt, Artificial Sequence
  Description of Artificial Sequence: Synthetic oligonucleotide
cagguuugaacugucaagg

SEQ ID NO: 1378619 - RNA, 19 nt, Artificial Sequence
  Description of Artificial Sequence: Synthetic oligonucleotide
uguggacugauuucauuag

SEQ ID NO: 1378620 - RNA, 19 nt, Artificial Sequence
  Description of Artificial Sequence: Synthetic oligonucleotide
accuauucagcacagagua

SEQ ID NO: 1378621 - RNA, 19 nt, Artificial Sequence
  Description of Artificial Sequence: Synthetic oligonucleotide
aaacaucguaucuuuuccu

SEQ ID NO: 1378622 - RNA, 19 nt, Artificial Sequence
  Description of Artificial Sequence: Synthetic oligonucleotide
guugaagggaauugucagg

SEQ ID NO: 1378623 - RNA, 19 nt, Artificial Sequence
  Description of Artificial Sequence: Synthetic oligonucleotide
cacauguccaccugaaaag

SEQ ID NO: 1378624 - RNA, 19 nt, Artificial Sequence
  Description of Artificial Sequence: Synthetic oligonucleotide
ucucccgugaaccuauuca

SEQ ID NO: 1378625 - RNA, 19 nt, Artificial Sequence
  Description of Artificial Sequence: Synthetic oligonucleotide
aauugcuguaguugauucu

SEQ ID NO: 1378626 - RNA, 19 nt, Artificial Sequence
  Description of Artificial Sequence: Synthetic oligonucleotide
gaauugucugagaaggugc

SEQ ID NO: 1378627 - RNA, 19 nt, Artificial Sequence
  Description of Artificial Sequence: Synthetic oligonucleotide
ugagguucuucaaugucca

SEQ ID NO: 1378628 - RNA, 19 nt, Artificial Sequence
  Description of Artificial Sequence: Synthetic oligonucleotide
uccgguguuugucacaaug

SEQ ID NO: 1378629 - RNA, 19 nt, Artificial Sequence
  Description of Artificial Sequence: Synthetic oligonucleotide
uccacugcggugaagggca

SEQ ID NO: 1378630 - RNA, 19 nt, Artificial Sequence
  Description of Artificial Sequence: Synthetic oligonucleotide
aaagaaccggauccggugu

SEQ ID NO: 1378631 - RNA, 19 nt, Artificial Sequence
  Description of Artificial Sequence: Synthetic oligonucleotide
cagggcuucauuaacugag

SEQ ID NO: 1378632 - RNA, 19 nt, Artificial Sequence
  Description of Artificial Sequence: Synthetic oligonucleotide
ucgaguuucauccccgacu

SEQ ID NO: 1378633 - RNA, 19 nt, Artificial Sequence
  Description of Artificial Sequence: Synthetic oligonucleotide
auaauccacuaacagagaa

SEQ ID NO: 1378634 - RNA, 19 nt, Artificial Sequence
  Description of Artificial Sequence: Synthetic oligonucleotide
ugaacugucaaggguagca

SEQ ID NO: 1378635 - RNA, 19 nt, Artificial Sequence
  Description of Artificial Sequence: Synthetic oligonucleotide
guaguugauucuuuauggc

SEQ ID NO: 1378636 - RNA, 19 nt, Artificial Sequence
  Description of Artificial Sequence: Synthetic oligonucleotide
gaauugcuguaguugauuc

SEQ ID NO: 1378637 - RNA, 19 nt, Artificial Sequence
  Description of Artificial Sequence: Synthetic oligonucleotide
ugaaagugguaacuuccug

SEQ ID NO: 1378638 - RNA, 19 nt, Artificial Sequence
  Description of Artificial Sequence: Synthetic oligonucleotide
cuuuauggccucagaaccc

SEQ ID NO: 1378639 - RNA, 19 nt, Artificial Sequence
  Description of Artificial Sequence: Synthetic oligonucleotide
acacauguccaccugaaaa

SEQ ID NO: 1378640 - RNA, 19 nt, Artificial Sequence
  Description of Artificial Sequence: Synthetic oligonucleotide
uucuuagcugguuugugga

SEQ ID NO: 1378641 - RNA, 19 nt, Artificial Sequence
  Description of Artificial Sequence: Synthetic oligonucleotide
ugccucugaagguagaacu

SEQ ID NO: 1378642 - RNA, 19 nt, Artificial Sequence
  Description of Artificial Sequence: Synthetic oligonucleotide
auagcugacauccuucaau

SEQ ID NO: 1378643 - RNA, 19 nt, Artificial Sequence
  Description of Artificial Sequence: Synthetic oligonucleotide
uauccgucugaaaacacau

SEQ ID NO: 1378644 - RNA, 19 nt, Artificial Sequence
  Description of Artificial Sequence: Synthetic oligonucleotide
agacaugcaggguuuuggg

SEQ ID NO: 1378645 - RNA, 19 nt, Artificial Sequence
  Description of Artificial Sequence: Synthetic oligonucleotide
aucuaaccggaucaguuug

SEQ ID NO: 1378646 - RNA, 19 nt, Artificial Sequence
  Description of Artificial Sequence: Synthetic oligonucleotide
aauccacugcggugaaggg

SEQ ID NO: 1378647 - RNA, 19 nt, Artificial Sequence
  Description of Artificial Sequence: Synthetic oligonucleotide
aacugagguucuucaaugu

SEQ ID NO: 1378648 - RNA, 19 nt, Artificial Sequence
  Description of Artificial Sequence: Synthetic oligonucleotide
cugacauccuucaaugcac

SEQ ID NO: 1378649 - RNA, 19 nt, Artificial Sequence
  Description of Artificial Sequence: Synthetic oligonucleotide
ucgggucagaaucaugucu

SEQ ID NO: 1378650 - RNA, 19 nt, Artificial Sequence
  Description of Artificial Sequence: Synthetic oligonucleotide
gguugaagggaauugucag

SEQ ID NO: 1378651 - RNA, 19 nt, Artificial Sequence
  Description of Artificial Sequence: Synthetic oligonucleotide
uuacauaggccgaauuguc

SEQ ID NO: 1378652 - RNA, 19 nt, Artificial Sequence
  Description of Artificial Sequence: Synthetic oligonucleotide
uacggcaaaggcacccugg

SEQ ID NO: 1378653 - RNA, 19 nt, Artificial Sequence
  Description of Artificial Sequence: Synthetic oligonucleotide
uacauaggccgaauugucu

SEQ ID NO: 1378654 - RNA, 19 nt, Artificial Sequence
  Description of Artificial Sequence: Synthetic oligonucleotide
ucuugagagaggacgggcu

SEQ ID NO: 1378655 - RNA, 19 nt, Artificial Sequence
  Description of Artificial Sequence: Synthetic oligonucleotide
caauggaaauccacugcgg

SEQ ID NO: 1378656 - RNA, 19 nt, Artificial Sequence
  Description of Artificial Sequence: Synthetic oligonucleotide
aguugauucuuuauggccu

SEQ ID NO: 1378657 - RNA, 19 nt, Artificial Sequence
  Description of Artificial Sequence: Synthetic oligonucleotide
agguuugaacugucaaggg

SEQ ID NO: 1378658 - RNA, 19 nt, Artificial Sequence
  Description of Artificial Sequence: Synthetic oligonucleotide
ugaaggguagcagccaugc

SEQ ID NO: 1378659 - RNA, 19 nt, Artificial Sequence
  Description of Artificial Sequence: Synthetic oligonucleotide
agugguaacuuccugccau

SEQ ID NO: 1378660 - RNA, 19 nt, Artificial Sequence
  Description of Artificial Sequence: Synthetic oligonucleotide
agcugacauccuucaaugc

SEQ ID NO: 1378661 - RNA, 19 nt, Artificial Sequence
  Description of Artificial Sequence: Synthetic oligonucleotide
acauccgagggauugacaa

SEQ ID NO: 1378662 - RNA, 19 nt, Artificial Sequence
  Description of Artificial Sequence: Synthetic oligonucleotide
cacuuguuguccucaaggc

SEQ ID NO: 1378663 - RNA, 19 nt, Artificial Sequence
  Description of Artificial Sequence: Synthetic oligonucleotide
uuagcugugucuugucaga

SEQ ID NO: 1378664 - RNA, 19 nt, Artificial Sequence
  Description of Artificial Sequence: Synthetic oligonucleotide
gaguaggguacauccgagg

SEQ ID NO: 1378665 - RNA, 19 nt, Artificial Sequence
  Description of Artificial Sequence: Synthetic oligonucleotide
caauucugggaaacagucc

SEQ ID NO: 1378666 - RNA, 19 nt, Artificial Sequence
  Description of Artificial Sequence: Synthetic oligonucleotide
ugggaucuugcucucaguc

SEQ ID NO: 1378667 - RNA, 19 nt, Artificial Sequence
  Description of Artificial Sequence: Synthetic oligonucleotide
gccgaauugucugagaagg

SEQ ID NO: 1378668 - RNA, 19 nt, Artificial Sequence
  Description of Artificial Sequence: Synthetic oligonucleotide
agaacccuuaaagcuuucc

SEQ ID NO: 1378669 - RNA, 19 nt, Artificial Sequence
  Description of Artificial Sequence: Synthetic oligonucleotide
ugcgcaugaagccacgaau

SEQ ID NO: 1378670 - RNA, 19 nt, Artificial Sequence
  Description of Artificial Sequence: Synthetic oligonucleotide
aggcuaucuaaccggauca

SEQ ID NO: 1378671 - RNA, 19 nt, Artificial Sequence
  Description of Artificial Sequence: Synthetic oligonucleotide
agaaucaugucuaugccau

SEQ ID NO: 1378672 - RNA, 19 nt, Artificial Sequence
  Description of Artificial Sequence: Synthetic oligonucleotide
aggugagucaauucuggga

SEQ ID NO: 1378673 - RNA, 19 nt, Artificial Sequence
  Description of Artificial Sequence: Synthetic oligonucleotide
caucguauccgucugaaaa

SEQ ID NO: 1378674 - RNA, 19 nt, Artificial Sequence
  Description of Artificial Sequence: Synthetic oligonucleotide
cucccgugaaccuauucag

SEQ ID NO: 1378675 - RNA, 19 nt, Artificial Sequence
  Description of Artificial Sequence: Synthetic oligonucleotide
aauauaucccugagagcug

SEQ ID NO: 1378676 - RNA, 19 nt, Artificial Sequence
  Description of Artificial Sequence: Synthetic oligonucleotide
caugcaggguuuuggguag

SEQ ID NO: 1378677 - RNA, 19 nt, Artificial Sequence
  Description of Artificial Sequence: Synthetic oligonucleotide
caagucugggucagagugg

SEQ ID NO: 1378678 - RNA, 19 nt, Artificial Sequence
  Description of Artificial Sequence: Synthetic oligonucleotide
aggguuuuggguagugccc

SEQ ID NO: 1378679 - RNA, 19 nt, Artificial Sequence
  Description of Artificial Sequence: Synthetic oligonucleotide
agagaggacgggcuugaag

SEQ ID NO: 1378680 - RNA, 19 nt, Artificial Sequence
  Description of Artificial Sequence: Synthetic oligonucleotide
aaggugcgcaugaagccac

SEQ ID NO: 1378681 - RNA, 19 nt, Artificial Sequence
  Description of Artificial Sequence: Synthetic oligonucleotide
aaccuauucagcacagagu

SEQ ID NO: 1378682 - RNA, 19 nt, Artificial Sequence
  Description of Artificial Sequence: Synthetic oligonucleotide
acaugcaggguuuugggua

SEQ ID NO: 1378683 - RNA, 19 nt, Artificial Sequence
  Description of Artificial Sequence: Synthetic oligonucleotide
cauuaacugagguucuuca

SEQ ID NO: 1378684 - RNA, 19 nt, Artificial Sequence
  Description of Artificial Sequence: Synthetic oligonucleotide
ugagucaauucugggaaac

SEQ ID NO: 1378685 - RNA, 19 nt, Artificial Sequence
  Description of Artificial Sequence: Synthetic oligonucleotide
gaaucuugacuuggggugc

SEQ ID NO: 1378686 - RNA, 19 nt, Artificial Sequence
  Description of Artificial Sequence: Synthetic oligonucleotide
uaucuaaccggaucaguuu

SEQ ID NO: 1378687 - RNA, 19 nt, Artificial Sequence
  Description of Artificial Sequence: Synthetic oligonucleotide
gcuaacauccuggacaaag

SEQ ID NO: 1378688 - RNA, 19 nt, Artificial Sequence
  Description of Artificial Sequence: Synthetic oligonucleotide
aaaguuggucauucacaau

SEQ ID NO: 1378689 - RNA, 19 nt, Artificial Sequence
  Description of Artificial Sequence: Synthetic oligonucleotide
ugggguucccuucuagcca

SEQ ID NO: 1378690 - RNA, 19 nt, Artificial Sequence
  Description of Artificial Sequence: Synthetic oligonucleotide
ggaaacaucguaucuuuuc

SEQ ID NO: 1378691 - RNA, 19 nt, Artificial Sequence
  Description of Artificial Sequence: Synthetic oligonucleotide
gaaucgugaccuugaacca

SEQ ID NO: 1378692 - RNA, 19 nt, Artificial Sequence
  Description of Artificial Sequence: Synthetic oligonucleotide
ucuaaccggaucaguuugu

SEQ ID NO: 1378693 - RNA, 19 nt, Artificial Sequence
  Description of Artificial Sequence: Synthetic oligonucleotide
uagacaaggguacggcaaa

SEQ ID NO: 1378694 - RNA, 19 nt, Artificial Sequence
  Description of Artificial Sequence: Synthetic oligonucleotide
auccacugcggugaagggc

SEQ ID NO: 1378695 - RNA, 19 nt, Artificial Sequence
  Description of Artificial Sequence: Synthetic oligonucleotide
aaugcacaggcagugcuaa

SEQ ID NO: 1378696 - RNA, 19 nt, Artificial Sequence
  Description of Artificial Sequence: Synthetic oligonucleotide
aguuucauccccgacuggu

SEQ ID NO: 1378697 - RNA, 19 nt, Artificial Sequence
  Description of Artificial Sequence: Synthetic oligonucleotide
ucccacgcuguucuuagcu

SEQ ID NO: 1378698 - RNA, 19 nt, Artificial Sequence
  Description of Artificial Sequence: Synthetic oligonucleotide
ugggaaacaucguaucuuu

SEQ ID NO: 1378699 - RNA, 19 nt, Artificial Sequence
  Description of Artificial Sequence: Synthetic oligonucleotide
cuugcagggcuucauuaac

SEQ ID NO: 1378700 - RNA, 19 nt, Artificial Sequence
  Description of Artificial Sequence: Synthetic oligonucleotide
gacugguuggagaaauccc

SEQ ID NO: 1378701 - RNA, 19 nt, Artificial Sequence
  Description of Artificial Sequence: Synthetic oligonucleotide
aagucugggucagagugga

SEQ ID NO: 1378702 - RNA, 19 nt, Artificial Sequence
  Description of Artificial Sequence: Synthetic oligonucleotide
uaggguacauccgagggau

SEQ ID NO: 1378703 - RNA, 19 nt, Artificial Sequence
  Description of Artificial Sequence: Synthetic oligonucleotide
aguccaagacagcccuuac

SEQ ID NO: 1378704 - RNA, 19 nt, Artificial Sequence
  Description of Artificial Sequence: Synthetic oligonucleotide
acucccacgcuguucuuag

SEQ ID NO: 1378705 - RNA, 19 nt, Artificial Sequence
  Description of Artificial Sequence: Synthetic oligonucleotide
ggagaaaucccacaccauc

SEQ ID NO: 1378706 - RNA, 19 nt, Artificial Sequence
  Description of Artificial Sequence: Synthetic oligonucleotide
ucccgugaaccuauucagc

SEQ ID NO: 1378707 - RNA, 19 nt, Artificial Sequence
  Description of Artificial Sequence: Synthetic oligonucleotide
ggugagucaauucugggaa

SEQ ID NO: 1378708 - RNA, 19 nt, Artificial Sequence
  Description of Artificial Sequence: Synthetic oligonucleotide
guucaaggagagcagcuca

SEQ ID NO: 1378709 - RNA, 19 nt, Artificial Sequence
  Description of Artificial Sequence: Synthetic oligonucleotide
agaucaaguaauacuccug

SEQ ID NO: 1378710 - RNA, 19 nt, Artificial Sequence
  Description of Artificial Sequence: Synthetic oligonucleotide
cuucaaugcacaggcagug

SEQ ID NO: 1378711 - RNA, 19 nt, Artificial Sequence
  Description of Artificial Sequence: Synthetic oligonucleotide
gucauagaucaaguaauac

SEQ ID NO: 1378712 - RNA, 19 nt, Artificial Sequence
  Description of Artificial Sequence: Synthetic oligonucleotide
cacucgaguuucauccccg

SEQ ID NO: 1378713 - RNA, 19 nt, Artificial Sequence
  Description of Artificial Sequence: Synthetic oligonucleotide
acugucaaggguagcaaug

SEQ ID NO: 1378714 - RNA, 19 nt, Artificial Sequence
  Description of Artificial Sequence: Synthetic oligonucleotide
uaaccggaucaguuuguug

SEQ ID NO: 1378715 - RNA, 19 nt, Artificial Sequence
  Description of Artificial Sequence: Synthetic oligonucleotide
cuaacauccuggacaaaga

SEQ ID NO: 1378716 - RNA, 19 nt, Artificial Sequence
  Description of Artificial Sequence: Synthetic oligonucleotide
aacacauguccaccugaaa

SEQ ID NO: 1378717 - RNA, 19 nt, Artificial Sequence
  Description of Artificial Sequence: Synthetic oligonucleotide
gaucaguuuguuguugcuc

SEQ ID NO: 1378718 - RNA, 19 nt, Artificial Sequence
  Description of Artificial Sequence: Synthetic oligonucleotide
ugauuucauuagcuguguc

SEQ ID NO: 1378719 - RNA, 19 nt, Artificial Sequence
  Description of Artificial Sequence: Synthetic oligonucleotide
cauuuguucucccgugaac

SEQ ID NO: 1378720 - RNA, 19 nt, Artificial Sequence
  Description of Artificial Sequence: Synthetic oligonucleotide
caggcuaucuaaccggauc

SEQ ID NO: 1378721 - RNA, 19 nt, Artificial Sequence
  Description of Artificial Sequence: Synthetic oligonucleotide
acagaguaggguacauccg

SEQ ID NO: 1378722 - RNA, 19 nt, Artificial Sequence
  Description of Artificial Sequence: Synthetic oligonucleotide
agugcccugagaaagucca

SEQ ID NO: 1378723 - RNA, 19 nt, Artificial Sequence
  Description of Artificial Sequence: Synthetic oligonucleotide
uagugcccugagaaagucc

SEQ ID NO: 1378724 - RNA, 19 nt, Artificial Sequence
  Description of Artificial Sequence: Synthetic oligonucleotide
ggacugauuucauuagcug

SEQ ID NO: 1378725 - RNA, 19 nt, Artificial Sequence
  Description of Artificial Sequence: Synthetic oligonucleotide
aacaggcuaucuaaccgga

SEQ ID NO: 1378726 - RNA, 19 nt, Artificial Sequence
  Description of Artificial Sequence: Synthetic oligonucleotide
cuucgggucagaaucaugu

SEQ ID NO: 1378727 - RNA, 19 nt, Artificial Sequence
  Description of Artificial Sequence: Synthetic oligonucleotide
agcagagcaucguauccgu

SEQ ID NO: 1378728 - RNA, 19 nt, Artificial Sequence
  Description of Artificial Sequence: Synthetic oligonucleotide
uggugcaccaagucugggu

SEQ ID NO: 1378729 - RNA, 19 nt, Artificial Sequence
  Description of Artificial Sequence: Synthetic oligonucleotide
cuugacuuggggugcuuuc

SEQ ID NO: 1378730 - RNA, 19 nt, Artificial Sequence
  Description of Artificial Sequence: Synthetic oligonucleotide
uucaaugcacaggcagugc

SEQ ID NO: 1378731 - RNA, 19 nt, Artificial Sequence
  Description of Artificial Sequence: Synthetic oligonucleotide
ccuuacauaggccgaauug

SEQ ID NO: 1378732 - RNA, 19 nt, Artificial Sequence
  Description of Artificial Sequence: Synthetic oligonucleotide
uugagagaggacgggcuug

SEQ ID NO: 1378733 - RNA, 19 nt, Artificial Sequence
  Description of Artificial Sequence: Synthetic oligonucleotide
gaacccuuaaagcuuuccu

SEQ ID NO: 1378734 - RNA, 19 nt, Artificial Sequence
  Description of Artificial Sequence: Synthetic oligonucleotide
cacacaagccacucagauc

SEQ ID NO: 1378735 - RNA, 19 nt, Artificial Sequence
  Description of Artificial Sequence: Synthetic oligonucleotide
uacauccgagggauugaca

SEQ ID NO: 1378736 - RNA, 19 nt, Artificial Sequence
  Description of Artificial Sequence: Synthetic oligonucleotide
ugcacaugggguucccuuc

SEQ ID NO: 1378737 - RNA, 19 nt, Artificial Sequence
  Description of Artificial Sequence: Synthetic oligonucleotide
ucugaagguagaacuccuu

SEQ ID NO: 1378738 - RNA, 19 nt, Artificial Sequence
  Description of Artificial Sequence: Synthetic oligonucleotide
cauuacacuugaaaguggu

SEQ ID NO: 1378739 - RNA, 19 nt, Artificial Sequence
  Description of Artificial Sequence: Synthetic oligonucleotide
uucagagcacgcugggaaa

SEQ ID NO: 1378740 - RNA, 19 nt, Artificial Sequence
  Description of Artificial Sequence: Synthetic oligonucleotide
cagaguaggguacauccga

SEQ ID NO: 1378741 - RNA, 19 nt, Artificial Sequence
  Description of Artificial Sequence: Synthetic oligonucleotide
uccuugcagggcuucauua

SEQ ID NO: 1378742 - RNA, 19 nt, Artificial Sequence
  Description of Artificial Sequence: Synthetic oligonucleotide
ugcacagguuugaacuguc

SEQ ID NO: 1378743 - RNA, 19 nt, Artificial Sequence
  Description of Artificial Sequence: Synthetic oligonucleotide
agaguaggguacauccgag

SEQ ID NO: 1378744 - RNA, 19 nt, Artificial Sequence
  Description of Artificial Sequence: Synthetic oligonucleotide
uccccgacugguuggagaa

SEQ ID NO: 1378745 - RNA, 19 nt, Artificial Sequence
  Description of Artificial Sequence: Synthetic oligonucleotide
ucuaugccauggugcacca

SEQ ID NO: 1378746 - RNA, 19 nt, Artificial Sequence
  Description of Artificial Sequence: Synthetic oligonucleotide
agcuuugguguagucccac

SEQ ID NO: 1378747 - RNA, 19 nt, Artificial Sequence
  Description of Artificial Sequence: Synthetic oligonucleotide
cuuacauaggccgaauugu

SEQ ID NO: 1378748 - RNA, 19 nt, Artificial Sequence
  Description of Artificial Sequence: Synthetic oligonucleotide
agaggacgggcuugaaggu

SEQ ID NO: 1378749 - RNA, 19 nt, Artificial Sequence
  Description of Artificial Sequence: Synthetic oligonucleotide
uggagaaaucccacaccau

SEQ ID NO: 1378750 - RNA, 19 nt, Artificial Sequence
  Description of Artificial Sequence: Synthetic oligonucleotide
aaucuugacuuggggugcu

SEQ ID NO: 1378751 - RNA, 19 nt, Artificial Sequence
  Description of Artificial Sequence: Synthetic oligonucleotide
cuggagcauagugaagacc

SEQ ID NO: 1378752 - RNA, 19 nt, Artificial Sequence
  Description of Artificial Sequence: Synthetic oligonucleotide
ggguagugcccugagaaag

SEQ ID NO: 1378753 - RNA, 19 nt, Artificial Sequence
  Description of Artificial Sequence: Synthetic oligonucleotide
guaggguacauccgaggga

SEQ ID NO: 1378754 - RNA, 19 nt, Artificial Sequence
  Description of Artificial Sequence: Synthetic oligonucleotide
aagaaccggauccgguguu

SEQ ID NO: 1378755 - RNA, 19 nt, Artificial Sequence
  Description of Artificial Sequence: Synthetic oligonucleotide
aaccggauccgguguuugu

SEQ ID NO: 1378756 - RNA, 19 nt, Artificial Sequence
  Description of Artificial Sequence: Synthetic oligonucleotide
gugcuaacauccuggacaa

SEQ ID NO: 1378757 - RNA, 19 nt, Artificial Sequence
  Description of Artificial Sequence: Synthetic oligonucleotide
ccauuacacuugaaagugg

SEQ ID NO: 1378758 - RNA, 19 nt, Artificial Sequence
  Description of Artificial Sequence: Synthetic oligonucleotide
ccgguguuugucacaaugg

SEQ ID NO: 1378759 - RNA, 19 nt, Artificial Sequence
  Description of Artificial Sequence: Synthetic oligonucleotide
cacgaauauaucccugaga

SEQ ID NO: 1378760 - RNA, 19 nt, Artificial Sequence
  Description of Artificial Sequence: Synthetic oligonucleotide
guauccgucugaaaacaca

SEQ ID NO: 1378761 - RNA, 19 nt, Artificial Sequence
  Description of Artificial Sequence: Synthetic oligonucleotide
uaucccugagagcugccuu

SEQ ID NO: 1378762 - RNA, 19 nt, Artificial Sequence
  Description of Artificial Sequence: Synthetic oligonucleotide
ccuugaaguacucacacaa

SEQ ID NO: 1378763 - RNA, 19 nt, Artificial Sequence
  Description of Artificial Sequence: Synthetic oligonucleotide
acggcaaaggcacccugga

SEQ ID NO: 1378764 - RNA, 19 nt, Artificial Sequence
  Description of Artificial Sequence: Synthetic oligonucleotide
uucgggucagaaucauguc

SEQ ID NO: 1378765 - RNA, 19 nt, Artificial Sequence
  Description of Artificial Sequence: Synthetic oligonucleotide
aacucugaggagacccugu

SEQ ID NO: 1378766 - RNA, 19 nt, Artificial Sequence
  Description of Artificial Sequence: Synthetic oligonucleotide
gauccgguguuugucacaa

SEQ ID NO: 1378767 - RNA, 19 nt, Artificial Sequence
  Description of Artificial Sequence: Synthetic oligonucleotide
cuuagcugguuuguggaga

SEQ ID NO: 1378768 - RNA, 19 nt, Artificial Sequence
  Description of Artificial Sequence: Synthetic oligonucleotide
uggguagugcccugagaaa

SEQ ID NO: 1378769 - RNA, 19 nt, Artificial Sequence
  Description of Artificial Sequence: Synthetic oligonucleotide
cugggguugaagggaauug

SEQ ID NO: 1378770 - RNA, 19 nt, Artificial Sequence
  Description of Artificial Sequence: Synthetic oligonucleotide
augcacaggcagugcuaac

SEQ ID NO: 1378771 - RNA, 19 nt, Artificial Sequence
  Description of Artificial Sequence: Synthetic oligonucleotide
cuaucuaaccggaucaguu

SEQ ID NO: 1378772 - RNA, 19 nt, Artificial Sequence
  Description of Artificial Sequence: Synthetic oligonucleotide
caauguccauuacacuuga

SEQ ID NO: 1378773 - RNA, 19 nt, Artificial Sequence
  Description of Artificial Sequence: Synthetic oligonucleotide
uugaacugucaaggguagc

SEQ ID NO: 1378774 - RNA, 19 nt, Artificial Sequence
  Description of Artificial Sequence: Synthetic oligonucleotide
uagucccacuuguuguccu

SEQ ID NO: 1378775 - RNA, 19 nt, Artificial Sequence
  Description of Artificial Sequence: Synthetic oligonucleotide
uucucccgugaaccuauuc

SEQ ID NO: 1378776 - RNA, 19 nt, Artificial Sequence
  Description of Artificial Sequence: Synthetic oligonucleotide
gaggacgggcuugaaggug

SEQ ID NO: 1378777 - RNA, 19 nt, Artificial Sequence
  Description of Artificial Sequence: Synthetic oligonucleotide
gagucaauucugggaaaca

SEQ ID NO: 1378778 - RNA, 19 nt, Artificial Sequence
  Description of Artificial Sequence: Synthetic oligonucleotide
ggccgaauugucugagaag

SEQ ID NO: 1378779 - RNA, 19 nt, Artificial Sequence
  Description of Artificial Sequence: Synthetic oligonucleotide
gacaugcaggguuuugggu

SEQ ID NO: 1378780 - RNA, 19 nt, Artificial Sequence
  Description of Artificial Sequence: Synthetic oligonucleotide
cagggaaucgugaccuuga

SEQ ID NO: 1378781 - RNA, 19 nt, Artificial Sequence
  Description of Artificial Sequence: Synthetic oligonucleotide
uagcugugucuugucagac

SEQ ID NO: 1378782 - RNA, 19 nt, Artificial Sequence
  Description of Artificial Sequence: Synthetic oligonucleotide
gagcuuuuggagguucaga

SEQ ID NO: 1378783 - RNA, 19 nt, Artificial Sequence
  Description of Artificial Sequence: Synthetic oligonucleotide
gaaccggauccgguguuug

SEQ ID NO: 1378784 - RNA, 19 nt, Artificial Sequence
  Description of Artificial Sequence: Synthetic oligonucleotide
gaacugucaaggguagcaa

SEQ ID NO: 1378785 - RNA, 19 nt, Artificial Sequence
  Description of Artificial Sequence: Synthetic oligonucleotide
cguaucuuuuccucagggc

SEQ ID NO: 1378786 - RNA, 19 nt, Artificial Sequence
  Description of Artificial Sequence: Synthetic oligonucleotide
guacauccgagggauugac

SEQ ID NO: 1378787 - RNA, 19 nt, Artificial Sequence
  Description of Artificial Sequence: Synthetic oligonucleotide
ggguacauccgagggauug

SEQ ID NO: 1378788 - RNA, 19 nt, Artificial Sequence
  Description of Artificial Sequence: Synthetic oligonucleotide
guacggcaaaggcacccug

SEQ ID NO: 1378789 - RNA, 19 nt, Artificial Sequence
  Description of Artificial Sequence: Synthetic oligonucleotide
cagugcuaacauccuggac

SEQ ID NO: 1378790 - RNA, 19 nt, Artificial Sequence
  Description of Artificial Sequence: Synthetic oligonucleotide
ggagagguucagaaucuug

SEQ ID NO: 1378791 - RNA, 19 nt, Artificial Sequence
  Description of Artificial Sequence: Synthetic oligonucleotide
ccacuaacagagaagcaga

SEQ ID NO: 1378792 - RNA, 19 nt, Artificial Sequence
  Description of Artificial Sequence: Synthetic oligonucleotide
gccacgaauauaucccuga

SEQ ID NO: 1378793 - RNA, 19 nt, Artificial Sequence
  Description of Artificial Sequence: Synthetic oligonucleotide
agcaucguauccgucugaa

SEQ ID NO: 1378794 - RNA, 19 nt, Artificial Sequence
  Description of Artificial Sequence: Synthetic oligonucleotide
ugcaggguuuuggguagug

SEQ ID NO: 1378795 - RNA, 19 nt, Artificial Sequence
  Description of Artificial Sequence: Synthetic oligonucleotide
aacucccacgcuguucuua

SEQ ID NO: 1378796 - RNA, 19 nt, Artificial Sequence
  Description of Artificial Sequence: Synthetic oligonucleotide
ccuauucagcacagaguag

SEQ ID NO: 1378797 - RNA, 19 nt, Artificial Sequence
  Description of Artificial Sequence: Synthetic oligonucleotide
cacgcugggaaacaucgua

SEQ ID NO: 1378798 - RNA, 19 nt, Artificial Sequence
  Description of Artificial Sequence: Synthetic oligonucleotide
uagaacuccuugggauucu

SEQ ID NO: 1378799 - RNA, 19 nt, Artificial Sequence
  Description of Artificial Sequence: Synthetic oligonucleotide
accggaucaguuuguuguu

SEQ ID NO: 1378800 - RNA, 19 nt, Artificial Sequence
  Description of Artificial Sequence: Synthetic oligonucleotide
cuucaauguccauuacacu

SEQ ID NO: 1378801 - RNA, 19 nt, Artificial Sequence
  Description of Artificial Sequence: Synthetic oligonucleotide
ggguugaagggaauuguca

SEQ ID NO: 1378802 - RNA, 19 nt, Artificial Sequence
  Description of Artificial Sequence: Synthetic oligonucleotide
agggaaucgugaccuugaa

SEQ ID NO: 1378803 - RNA, 19 nt, Artificial Sequence
  Description of Artificial Sequence: Synthetic oligonucleotide
gggguucccuucuagccac

SEQ ID NO: 1378804 - RNA, 19 nt, Artificial Sequence
  Description of Artificial Sequence: Synthetic oligonucleotide
gucaauucugggaaacagu

SEQ ID NO: 1378805 - RNA, 19 nt, Artificial Sequence
  Description of Artificial Sequence: Synthetic oligonucleotide
uucuucgggucagaaucau

SEQ ID NO: 1378806 - RNA, 19 nt, Artificial Sequence
  Description of Artificial Sequence: Synthetic oligonucleotide
aggccuggucaugguaaac

SEQ ID NO: 1378807 - RNA, 19 nt, Artificial Sequence
  Description of Artificial Sequence: Synthetic oligonucleotide
ccacgaauauaucccugag

SEQ ID NO: 1378808 - RNA, 19 nt, Artificial Sequence
  Description of Artificial Sequence: Synthetic oligonucleotide
auccgucugaaaacacaug

SEQ ID NO: 1378809 - RNA, 19 nt, Artificial Sequence
  Description of Artificial Sequence: Synthetic oligonucleotide
gugagucaauucugggaaa

SEQ ID NO: 1378810 - RNA, 19 nt, Artificial Sequence
  Description of Artificial Sequence: Synthetic oligonucleotide
cccgugaaccuauucagca

SEQ ID NO: 1378811 - RNA, 19 nt, Artificial Sequence
  Description of Artificial Sequence: Synthetic oligonucleotide
uucuagccacagcucuuuu

SEQ ID NO: 1378812 - RNA, 19 nt, Artificial Sequence
  Description of Artificial Sequence: Synthetic oligonucleotide
ucucagucuggagcauagu

SEQ ID NO: 1378813 - RNA, 19 nt, Artificial Sequence
  Description of Artificial Sequence: Synthetic oligonucleotide
gguaaacucugaggagacc

SEQ ID NO: 1378814 - RNA, 19 nt, Artificial Sequence
  Description of Artificial Sequence: Synthetic oligonucleotide
aggguacggcaaaggcacc

SEQ ID NO: 1378815 - RNA, 19 nt, Artificial Sequence
  Description of Artificial Sequence: Synthetic oligonucleotide
ucccacuuguuguccucaa

SEQ ID NO: 1378816 - RNA, 19 nt, Artificial Sequence
  Description of Artificial Sequence: Synthetic oligonucleotide
ggcuaucuaaccggaucag

SEQ ID NO: 1378817 - RNA, 19 nt, Artificial Sequence
  Description of Artificial Sequence: Synthetic oligonucleotide
gagcaucguauccgucuga

SEQ ID NO: 1378818 - RNA, 19 nt, Artificial Sequence
  Description of Artificial Sequence: Synthetic oligonucleotide
caaugcacaggcagugcua

SEQ ID NO: 1378819 - RNA, 19 nt, Artificial Sequence
  Description of Artificial Sequence: Synthetic oligonucleotide
auccacuaacagagaagca

SEQ ID NO: 1378820 - RNA, 19 nt, Artificial Sequence
  Description of Artificial Sequence: Synthetic oligonucleotide
ccacaccauccuuugcugc

SEQ ID NO: 1378821 - RNA, 19 nt, Artificial Sequence
  Description of Artificial Sequence: Synthetic oligonucleotide
ccgucugaaaacacauguc

SEQ ID NO: 1378822 - RNA, 19 nt, Artificial Sequence
  Description of Artificial Sequence: Synthetic oligonucleotide
cucugaagguagaacuccu

SEQ ID NO: 1378823 - RNA, 19 nt, Artificial Sequence
  Description of Artificial Sequence: Synthetic oligonucleotide
acgcugggaaacaucguau

SEQ ID NO: 1378824 - RNA, 19 nt, Artificial Sequence
  Description of Artificial Sequence: Synthetic oligonucleotide
gccuggucaugguaaacuc

SEQ ID NO: 1378825 - RNA, 19 nt, Artificial Sequence
  Description of Artificial Sequence: Synthetic oligonucleotide
uggagagguucagaaucuu

SEQ ID NO: 1378826 - RNA, 19 nt, Artificial Sequence
  Description of Artificial Sequence: Synthetic oligonucleotide
ccgugaaccuauucagcac

SEQ ID NO: 1378827 - RNA, 19 nt, Artificial Sequence
  Description of Artificial Sequence: Synthetic oligonucleotide
ggguacggcaaaggcaccc

SEQ ID NO: 1378828 - RNA, 19 nt, Artificial Sequence
  Description of Artificial Sequence: Synthetic oligonucleotide
cgugaaccuauucagcaca

SEQ ID NO: 1378829 - RNA, 19 nt, Artificial Sequence
  Description of Artificial Sequence: Synthetic oligonucleotide
cagaacccuuaaagcuuuc

SEQ ID NO: 1378830 - RNA, 19 nt, Artificial Sequence
  Description of Artificial Sequence: Synthetic oligonucleotide
gcagggcuucauuaacuga

SEQ ID NO: 1378831 - RNA, 19 nt, Artificial Sequence
  Description of Artificial Sequence: Synthetic oligonucleotide
cagcccuuacauaggccga

SEQ ID NO: 1378832 - RNA, 19 nt, Artificial Sequence
  Description of Artificial Sequence: Synthetic oligonucleotide
agcccuuacauaggccgaa

SEQ ID NO: 1378833 - RNA, 19 nt, Artificial Sequence
  Description of Artificial Sequence: Synthetic oligonucleotide
cuccauagucauagaucaa

SEQ ID NO: 1378834 - RNA, 19 nt, Artificial Sequence
  Description of Artificial Sequence: Synthetic oligonucleotide
cacaaugcacagguuugaa

SEQ ID NO: 1378835 - RNA, 19 nt, Artificial Sequence
  Description of Artificial Sequence: Synthetic oligonucleotide
cugauuucauuagcugugu

SEQ ID NO: 1378836 - RNA, 19 nt, Artificial Sequence
  Description of Artificial Sequence: Synthetic oligonucleotide
gcuguaguugauucuuuau

SEQ ID NO: 1378837 - RNA, 19 nt, Artificial Sequence
  Description of Artificial Sequence: Synthetic oligonucleotide
gcaggguuuuggguagugc

SEQ ID NO: 1378838 - RNA, 19 nt, Artificial Sequence
  Description of Artificial Sequence: Synthetic oligonucleotide
aggugcgcaugaagccacg

SEQ ID NO: 1378839 - RNA, 19 nt, Artificial Sequence
  Description of Artificial Sequence: Synthetic oligonucleotide
cagggaaauccucuuggau

SEQ ID NO: 1378840 - RNA, 19 nt, Artificial Sequence
  Description of Artificial Sequence: Synthetic oligonucleotide
agaaccggauccgguguuu

SEQ ID NO: 1378841 - RNA, 19 nt, Artificial Sequence
  Description of Artificial Sequence: Synthetic oligonucleotide
gucccacuuguuguccuca

SEQ ID NO: 1378842 - RNA, 19 nt, Artificial Sequence
  Description of Artificial Sequence: Synthetic oligonucleotide
cguauccgucugaaaacac

SEQ ID NO: 1378843 - RNA, 19 nt, Artificial Sequence
  Description of Artificial Sequence: Synthetic oligonucleotide
gccucugaagguagaacuc

SEQ ID NO: 1378844 - RNA, 19 nt, Artificial Sequence
  Description of Artificial Sequence: Synthetic oligonucleotide
cuuugggaucuugcucuca

SEQ ID NO: 1378845 - RNA, 19 nt, Artificial Sequence
  Description of Artificial Sequence: Synthetic oligonucleotide
cuugagagaggacgggcuu

SEQ ID NO: 1378846 - RNA, 19 nt, Artificial Sequence
  Description of Artificial Sequence: Synthetic oligonucleotide
ggcuucauuaacugagguu

SEQ ID NO: 1378847 - RNA, 19 nt, Artificial Sequence
  Description of Artificial Sequence: Synthetic oligonucleotide
cugggaaacaucguaucuu

SEQ ID NO: 1378848 - RNA, 19 nt, Artificial Sequence
  Description of Artificial Sequence: Synthetic oligonucleotide
guccaccugaaaagagcuc

SEQ ID NO: 1378849 - RNA, 19 nt, Artificial Sequence
  Description of Artificial Sequence: Synthetic oligonucleotide
cagcuuugguguaguccca

SEQ ID NO: 1378850 - RNA, 19 nt, Artificial Sequence
  Description of Artificial Sequence: Synthetic oligonucleotide
caguccaagacagcccuua

SEQ ID NO: 1378851 - RNA, 19 nt, Artificial Sequence
  Description of Artificial Sequence: Synthetic oligonucleotide
gcccugagaaaguccacaa

SEQ ID NO: 1378852 - RNA, 19 nt, Artificial Sequence
  Description of Artificial Sequence: Synthetic oligonucleotide
ugcuaacauccuggacaaa

SEQ ID NO: 1378853 - RNA, 19 nt, Artificial Sequence
  Description of Artificial Sequence: Synthetic oligonucleotide
gggcuucauuaacugaggu

SEQ ID NO: 1378854 - RNA, 19 nt, Artificial Sequence
  Description of Artificial Sequence: Synthetic oligonucleotide
gcgcaugaagccacgaaua

SEQ ID NO: 1378855 - RNA, 19 nt, Artificial Sequence
  Description of Artificial Sequence: Synthetic oligonucleotide
cacgcuguucuuagcuggu

SEQ ID NO: 1378856 - RNA, 19 nt, Artificial Sequence
  Description of Artificial Sequence: Synthetic oligonucleotide
ggaucucaucagggcuugg

SEQ ID NO: 1378857 - RNA, 19 nt, Artificial Sequence
  Description of Artificial Sequence: Synthetic oligonucleotide
ggccuggucaugguaaacu

SEQ ID NO: 1378858 - RNA, 19 nt, Artificial Sequence
  Description of Artificial Sequence: Synthetic oligonucleotide
ggguuuuggguagugcccu

SEQ ID NO: 1378859 - RNA, 19 nt, Artificial Sequence
  Description of Artificial Sequence: Synthetic oligonucleotide
gcacagaguaggguacauc

SEQ ID NO: 1378860 - RNA, 19 nt, Artificial Sequence
  Description of Artificial Sequence: Synthetic oligonucleotide
auccgguguuugucacaau

SEQ ID NO: 1378861 - RNA, 19 nt, Artificial Sequence
  Description of Artificial Sequence: Synthetic oligonucleotide
cugcacaugggguucccuu

SEQ ID NO: 1378862 - RNA, 19 nt, Artificial Sequence
  Description of Artificial Sequence: Synthetic oligonucleotide
cacugcggugaagggcaug

SEQ ID NO: 1378863 - RNA, 19 nt, Artificial Sequence
  Description of Artificial Sequence: Synthetic oligonucleotide
cgggucagaaucaugucua

SEQ ID NO: 1378864 - RNA, 19 nt, Artificial Sequence
  Description of Artificial Sequence: Synthetic oligonucleotide
cugcaggaauugcuguagu

SEQ ID NO: 1378865 - RNA, 19 nt, Artificial Sequence
  Description of Artificial Sequence: Synthetic oligonucleotide
gcuaucuaaccggaucagu

SEQ ID NO: 1378866 - RNA, 19 nt, Artificial Sequence
  Description of Artificial Sequence: Synthetic oligonucleotide
ccuggucaugguaaacucu

SEQ ID NO: 1378867 - RNA, 19 nt, Artificial Sequence
  Description of Artificial Sequence: Synthetic oligonucleotide
ccgacugguuggagaaauc

SEQ ID NO: 1378868 - RNA, 19 nt, Artificial Sequence
  Description of Artificial Sequence: Synthetic oligonucleotide
gcaucguauccgucugaaa

SEQ ID NO: 1378869 - RNA, 19 nt, Artificial Sequence
  Description of Artificial Sequence: Synthetic oligonucleotide
gcacagguuugaacuguca

SEQ ID NO: 1378870 - RNA, 19 nt, Artificial Sequence
  Description of Artificial Sequence: Synthetic oligonucleotide
acgcuguucuuagcugguu

SEQ ID NO: 1378871 - RNA, 19 nt, Artificial Sequence
  Description of Artificial Sequence: Synthetic oligonucleotide
aucuugacuuggggugcuu

SEQ ID NO: 1378872 - RNA, 19 nt, Artificial Sequence
  Description of Artificial Sequence: Synthetic oligonucleotide
ccaagacagcccuuacaua

SEQ ID NO: 1378873 - RNA, 19 nt, Artificial Sequence
  Description of Artificial Sequence: Synthetic oligonucleotide
gagagaggacgggcuugaa

SEQ ID NO: 1378874 - RNA, 19 nt, Artificial Sequence
  Description of Artificial Sequence: Synthetic oligonucleotide
ggugcgcaugaagccacga

SEQ ID NO: 1378875 - RNA, 19 nt, Artificial Sequence
  Description of Artificial Sequence: Synthetic oligonucleotide
gguacggcaaaggcacccu

SEQ ID NO: 1378876 - RNA, 19 nt, Artificial Sequence
  Description of Artificial Sequence: Synthetic oligonucleotide
ccgaauugucugagaaggu

SEQ ID NO: 1378877 - RNA, 19 nt, Artificial Sequence
  Description of Artificial Sequence: Synthetic oligonucleotide
cuaugccauggugcaccaa

SEQ ID NO: 1378878 - RNA, 19 nt, Artificial Sequence
  Description of Artificial Sequence: Synthetic oligonucleotide
aggguacauccgagggauu

SEQ ID NO: 1378879 - RNA, 19 nt, Artificial Sequence
  Description of Artificial Sequence: Synthetic oligonucleotide
gcucucagucuggagcaua

SEQ ID NO: 1378880 - RNA, 19 nt, Artificial Sequence
  Description of Artificial Sequence: Synthetic oligonucleotide
gggaaacaucguaucuuuu

SEQ ID NO: 1378881 - RNA, 19 nt, Artificial Sequence
  Description of Artificial Sequence: Synthetic oligonucleotide
cccgacugguuggagaaau

SEQ ID NO: 1378882 - RNA, 19 nt, Artificial Sequence
  Description of Artificial Sequence: Synthetic oligonucleotide
ggguucccuucuagccaca

SEQ ID NO: 1378883 - RNA, 19 nt, Artificial Sequence
  Description of Artificial Sequence: Synthetic oligonucleotide
cccuuacauaggccgaauu

SEQ ID NO: 1378884 - RNA, 19 nt, Artificial Sequence
  Description of Artificial Sequence: Synthetic oligonucleotide
gcugcacaugggguucccu

SEQ ID NO: 1378885 - RNA, 19 nt, Artificial Sequence
  Description of Artificial Sequence: Synthetic oligonucleotide
gcccuuacauaggccgaau

SEQ ID NO: 1378886 - RNA, 19 nt, Artificial Sequence
  Description of Artificial Sequence: Synthetic oligonucleotide
ccccgacugguuggagaaa

SEQ ID NO: 1378887 - RNA, 19 nt, Artificial Sequence
  Description of Artificial Sequence: Synthetic oligonucleotide
ccacugcggugaagggcau

SEQ ID NO: 1378888 - RNA, 19 nt, Artificial Sequence
  Description of Artificial Sequence: Synthetic oligonucleotide
auagauaaggaacaccacc

SEQ ID NO: 1378889 - RNA, 19 nt, Artificial Sequence
  Description of Artificial Sequence: Synthetic oligonucleotide
aaugcaaaagugcucuugg

SEQ ID NO: 1378890 - RNA, 19 nt, Artificial Sequence
  Description of Artificial Sequence: Synthetic oligonucleotide
aagaagacaaugccugagc

SEQ ID NO: 1378891 - RNA, 19 nt, Artificial Sequence
  Description of Artificial Sequence: Synthetic oligonucleotide
ucgucuacgaugaaggcug

SEQ ID NO: 1378892 - RNA, 19 nt, Artificial Sequence
  Description of Artificial Sequence: Synthetic oligonucleotide
caggguauagauaaggaac

SEQ ID NO: 1378893 - RNA, 19 nt, Artificial Sequence
  Description of Artificial Sequence: Synthetic oligonucleotide
gaagguuacaucccggggc

SEQ ID NO: 1378894 - RNA, 19 nt, Artificial Sequence
  Description of Artificial Sequence: Synthetic oligonucleotide
ucgucuuuacuccacacca

SEQ ID NO: 1378895 - RNA, 19 nt, Artificial Sequence
  Description of Artificial Sequence: Synthetic oligonucleotide
gagaagaagacaaugccug

SEQ ID NO: 1378896 - RNA, 19 nt, Artificial Sequence
  Description of Artificial Sequence: Synthetic oligonucleotide
aucgucuuuacuccacacc

SEQ ID NO: 1378897 - RNA, 19 nt, Artificial Sequence
  Description of Artificial Sequence: Synthetic oligonucleotide
aggacgauccugcagcggc

SEQ ID NO: 1378898 - RNA, 19 nt, Artificial Sequence
  Description of Artificial Sequence: Synthetic oligonucleotide
ucacucggaacucaggaug

SEQ ID NO: 1378899 - RNA, 19 nt, Artificial Sequence
  Description of Artificial Sequence: Synthetic oligonucleotide
aaaguguccaccgagccga

SEQ ID NO: 1378900 - RNA, 19 nt, Artificial Sequence
  Description of Artificial Sequence: Synthetic oligonucleotide
aaggcgaggagcgugcccc

SEQ ID NO: 1378901 - RNA, 19 nt, Artificial Sequence
  Description of Artificial Sequence: Synthetic oligonucleotide
gaggcagacguuuuccugg

SEQ ID NO: 1378902 - RNA, 19 nt, Artificial Sequence
  Description of Artificial Sequence: Synthetic oligonucleotide
ucucguacagaacgaacag

SEQ ID NO: 1378903 - RNA, 19 nt, Artificial Sequence
  Description of Artificial Sequence: Synthetic oligonucleotide
augccaucgucuuuacucc

SEQ ID NO: 1378904 - RNA, 19 nt, Artificial Sequence
  Description of Artificial Sequence: Synthetic oligonucleotide
acaccaacaugguggaggc

SEQ ID NO: 1378905 - RNA, 19 nt, Artificial Sequence
  Description of Artificial Sequence: Synthetic oligonucleotide
uucccuguuaaagagaaac

SEQ ID NO: 1378906 - RNA, 19 nt, Artificial Sequence
  Description of Artificial Sequence: Synthetic oligonucleotide
ucgaggaccauguacuacc

SEQ ID NO: 1378907 - RNA, 19 nt, Artificial Sequence
  Description of Artificial Sequence: Synthetic oligonucleotide
uuuacuccacaccaacaug

SEQ ID NO: 1378908 - RNA, 19 nt, Artificial Sequence
  Description of Artificial Sequence: Synthetic oligonucleotide
gaaaguguccaccgagccg

SEQ ID NO: 1378909 - RNA, 19 nt, Artificial Sequence
  Description of Artificial Sequence: Synthetic oligonucleotide
ucagaugacgcguaguguc

SEQ ID NO: 1378910 - RNA, 19 nt, Artificial Sequence
  Description of Artificial Sequence: Synthetic oligonucleotide
uaucgcaggcaucauagcu

SEQ ID NO: 1378911 - RNA, 19 nt, Artificial Sequence
  Description of Artificial Sequence: Synthetic oligonucleotide
aagcucguagggcuggcac

SEQ ID NO: 1378912 - RNA, 19 nt, Artificial Sequence
  Description of Artificial Sequence: Synthetic oligonucleotide
acgaguagccgcugggucc

SEQ ID NO: 1378913 - RNA, 19 nt, Artificial Sequence
  Description of Artificial Sequence: Synthetic oligonucleotide
ucgaagguuacaucccggg

SEQ ID NO: 1378914 - RNA, 19 nt, Artificial Sequence
  Description of Artificial Sequence: Synthetic oligonucleotide
uauagauaaggaacaccac

SEQ ID NO: 1378915 - RNA, 19 nt, Artificial Sequence
  Description of Artificial Sequence: Synthetic oligonucleotide
uggcuaaugcuccugcugc

SEQ ID NO: 1378916 - RNA, 19 nt, Artificial Sequence
  Description of Artificial Sequence: Synthetic oligonucleotide
aaaucgugcucguguuugg

SEQ ID NO: 1378917 - RNA, 19 nt, Artificial Sequence
  Description of Artificial Sequence: Synthetic oligonucleotide
uguuaaagagaaacugcuc

SEQ ID NO: 1378918 - RNA, 19 nt, Artificial Sequence
  Description of Artificial Sequence: Synthetic oligonucleotide
uccacgucguucaccacgg

SEQ ID NO: 1378919 - RNA, 19 nt, Artificial Sequence
  Description of Artificial Sequence: Synthetic oligonucleotide
gaagacaaugccugagcug

SEQ ID NO: 1378920 - RNA, 19 nt, Artificial Sequence
  Description of Artificial Sequence: Synthetic oligonucleotide
uguuugggcuggccgaagg

SEQ ID NO: 1378921 - RNA, 19 nt, Artificial Sequence
  Description of Artificial Sequence: Synthetic oligonucleotide
aacggaguggcuucccugu

SEQ ID NO: 1378922 - RNA, 19 nt, Artificial Sequence
  Description of Artificial Sequence: Synthetic oligonucleotide
agugccacgaggcaccgug

SEQ ID NO: 1378923 - RNA, 19 nt, Artificial Sequence
  Description of Artificial Sequence: Synthetic oligonucleotide
acgcguaguguccuugggc

SEQ ID NO: 1378924 - RNA, 19 nt, Artificial Sequence
  Description of Artificial Sequence: Synthetic oligonucleotide
ucggaacucaggaugggcu

SEQ ID NO: 1378925 - RNA, 19 nt, Artificial Sequence
  Description of Artificial Sequence: Synthetic oligonucleotide
acaaugagccggcccuucc

SEQ ID NO: 1378926 - RNA, 19 nt, Artificial Sequence
  Description of Artificial Sequence: Synthetic oligonucleotide
ccaucgucuacgaugaagg

SEQ ID NO: 1378927 - RNA, 19 nt, Artificial Sequence
  Description of Artificial Sequence: Synthetic oligonucleotide
acgaugaaggcugucgagg

SEQ ID NO: 1378928 - RNA, 19 nt, Artificial Sequence
  Description of Artificial Sequence: Synthetic oligonucleotide
ucggaucccgccacggacg

SEQ ID NO: 1378929 - RNA, 19 nt, Artificial Sequence
  Description of Artificial Sequence: Synthetic oligonucleotide
aaugguaguuguucugguu

SEQ ID NO: 1378930 - RNA, 19 nt, Artificial Sequence
  Description of Artificial Sequence: Synthetic oligonucleotide
gaugcggaaaguguccacc

SEQ ID NO: 1378931 - RNA, 19 nt, Artificial Sequence
  Description of Artificial Sequence: Synthetic oligonucleotide
agggaaugccgcucacucc

SEQ ID NO: 1378932 - RNA, 19 nt, Artificial Sequence
  Description of Artificial Sequence: Synthetic oligonucleotide
cucgucgggguugaaaucg

SEQ ID NO: 1378933 - RNA, 19 nt, Artificial Sequence
  Description of Artificial Sequence: Synthetic oligonucleotide
uacgaugaaggcugucgag

SEQ ID NO: 1378934 - RNA, 19 nt, Artificial Sequence
  Description of Artificial Sequence: Synthetic oligonucleotide
augcggaaaguguccaccg

SEQ ID NO: 1378935 - RNA, 19 nt, Artificial Sequence
  Description of Artificial Sequence: Synthetic oligonucleotide
acacugauuuucaccaugg

SEQ ID NO: 1378936 - RNA, 19 nt, Artificial Sequence
  Description of Artificial Sequence: Synthetic oligonucleotide
cauguacuacccugguccg

SEQ ID NO: 1378937 - RNA, 19 nt, Artificial Sequence
  Description of Artificial Sequence: Synthetic oligonucleotide
ucccuguuaaagagaaacu

SEQ ID NO: 1378938 - RNA, 19 nt, Artificial Sequence
  Description of Artificial Sequence: Synthetic oligonucleotide
aaucgugcucguguuuggg

SEQ ID NO: 1378939 - RNA, 19 nt, Artificial Sequence
  Description of Artificial Sequence: Synthetic oligonucleotide
gguaucgcaggcaucauag

SEQ ID NO: 1378940 - RNA, 19 nt, Artificial Sequence
  Description of Artificial Sequence: Synthetic oligonucleotide
uggauuggagaagaagaca

SEQ ID NO: 1378941 - RNA, 19 nt, Artificial Sequence
  Description of Artificial Sequence: Synthetic oligonucleotide
gaagucgucuugcacccug

SEQ ID NO: 1378942 - RNA, 19 nt, Artificial Sequence
  Description of Artificial Sequence: Synthetic oligonucleotide
ucgggguugaaaucgugcu

SEQ ID NO: 1378943 - RNA, 19 nt, Artificial Sequence
  Description of Artificial Sequence: Synthetic oligonucleotide
cucguguuugggcuggccg

SEQ ID NO: 1378944 - RNA, 19 nt, Artificial Sequence
  Description of Artificial Sequence: Synthetic oligonucleotide
uuccgggcauugaugauga

SEQ ID NO: 1378945 - RNA, 19 nt, Artificial Sequence
  Description of Artificial Sequence: Synthetic oligonucleotide
augagcgggaugcggaaag

SEQ ID NO: 1378946 - RNA, 19 nt, Artificial Sequence
  Description of Artificial Sequence: Synthetic oligonucleotide
cagcuguuagguccuaacg

SEQ ID NO: 1378947 - RNA, 19 nt, Artificial Sequence
  Description of Artificial Sequence: Synthetic oligonucleotide
aggcagacguuuuccuggc

SEQ ID NO: 1378948 - RNA, 19 nt, Artificial Sequence
  Description of Artificial Sequence: Synthetic oligonucleotide
aggguauagauaaggaaca

SEQ ID NO: 1378949 - RNA, 19 nt, Artificial Sequence
  Description of Artificial Sequence: Synthetic oligonucleotide
cuguuagguccuaacggag

SEQ ID NO: 1378950 - RNA, 19 nt, Artificial Sequence
  Description of Artificial Sequence: Synthetic oligonucleotide
gacguaccguugcugaagc

SEQ ID NO: 1378951 - RNA, 19 nt, Artificial Sequence
  Description of Artificial Sequence: Synthetic oligonucleotide
uuagguccuaacggagugg

SEQ ID NO: 1378952 - RNA, 19 nt, Artificial Sequence
  Description of Artificial Sequence: Synthetic oligonucleotide
acuacccugguccguggac

SEQ ID NO: 1378953 - RNA, 19 nt, Artificial Sequence
  Description of Artificial Sequence: Synthetic oligonucleotide
ugguccguggaccuccuca

SEQ ID NO: 1378954 - RNA, 19 nt, Artificial Sequence
  Description of Artificial Sequence: Synthetic oligonucleotide
gucagggacgaguagccgc

SEQ ID NO: 1378955 - RNA, 19 nt, Artificial Sequence
  Description of Artificial Sequence: Synthetic oligonucleotide
ugacgcguaguguccuugg

SEQ ID NO: 1378956 - RNA, 19 nt, Artificial Sequence
  Description of Artificial Sequence: Synthetic oligonucleotide
aaugcuccugcugcuacca

SEQ ID NO: 1378957 - RNA, 19 nt, Artificial Sequence
  Description of Artificial Sequence: Synthetic oligonucleotide
agucgucuugcacccuggc

SEQ ID NO: 1378958 - RNA, 19 nt, Artificial Sequence
  Description of Artificial Sequence: Synthetic oligonucleotide
cagaugacgcguagugucc

SEQ ID NO: 1378959 - RNA, 19 nt, Artificial Sequence
  Description of Artificial Sequence: Synthetic oligonucleotide
uguccacggagagauuccg

SEQ ID NO: 1378960 - RNA, 19 nt, Artificial Sequence
  Description of Artificial Sequence: Synthetic oligonucleotide
cagaacgaacagcugcggg

SEQ ID NO: 1378961 - RNA, 19 nt, Artificial Sequence
  Description of Artificial Sequence: Synthetic oligonucleotide
caaaaggcuagcaucccga

SEQ ID NO: 1378962 - RNA, 19 nt, Artificial Sequence
  Description of Artificial Sequence: Synthetic oligonucleotide
uaacggaguggcuucccug

SEQ ID NO: 1378963 - RNA, 19 nt, Artificial Sequence
  Description of Artificial Sequence: Synthetic oligonucleotide
ggucagaugacgcguagug

SEQ ID NO: 1378964 - RNA, 19 nt, Artificial Sequence
  Description of Artificial Sequence: Synthetic oligonucleotide
ucguguuugggcuggccga

SEQ ID NO: 1378965 - RNA, 19 nt, Artificial Sequence
  Description of Artificial Sequence: Synthetic oligonucleotide
ggcaucauagcugcggagg

SEQ ID NO: 1378966 - RNA, 19 nt, Artificial Sequence
  Description of Artificial Sequence: Synthetic oligonucleotide
acaaaagacuccaucucgu

SEQ ID NO: 1378967 - RNA, 19 nt, Artificial Sequence
  Description of Artificial Sequence: Synthetic oligonucleotide
cauugcucgcccgaggccc

SEQ ID NO: 1378968 - RNA, 19 nt, Artificial Sequence
  Description of Artificial Sequence: Synthetic oligonucleotide
cuaaugcuccugcugcuac

SEQ ID NO: 1378969 - RNA, 19 nt, Artificial Sequence
  Description of Artificial Sequence: Synthetic oligonucleotide
uugaaaucgugcucguguu

SEQ ID NO: 1378970 - RNA, 19 nt, Artificial Sequence
  Description of Artificial Sequence: Synthetic oligonucleotide
ugguggcuaaugcuccugc

SEQ ID NO: 1378971 - RNA, 19 nt, Artificial Sequence
  Description of Artificial Sequence: Synthetic oligonucleotide
ucguuccagcgucccaugg

SEQ ID NO: 1378972 - RNA, 19 nt, Artificial Sequence
  Description of Artificial Sequence: Synthetic oligonucleotide
guaccguugcugaagcucc

SEQ ID NO: 1378973 - RNA, 19 nt, Artificial Sequence
  Description of Artificial Sequence: Synthetic oligonucleotide
gcaaaaggcuagcaucccg

SEQ ID NO: 1378974 - RNA, 19 nt, Artificial Sequence
  Description of Artificial Sequence: Synthetic oligonucleotide
gacgcguaguguccuuggg

SEQ ID NO: 1378975 - RNA, 19 nt, Artificial Sequence
  Description of Artificial Sequence: Synthetic oligonucleotide
uccaccgagccgaucugcc

SEQ ID NO: 1378976 - RNA, 19 nt, Artificial Sequence
  Description of Artificial Sequence: Synthetic oligonucleotide
caucgucuacgaugaaggc

SEQ ID NO: 1378977 - RNA, 19 nt, Artificial Sequence
  Description of Artificial Sequence: Synthetic oligonucleotide
uuugggcuggccgaaggga

SEQ ID NO: 1378978 - RNA, 19 nt, Artificial Sequence
  Description of Artificial Sequence: Synthetic oligonucleotide
ucauagcugcggaggacga

SEQ ID NO: 1378979 - RNA, 19 nt, Artificial Sequence
  Description of Artificial Sequence: Synthetic oligonucleotide
aucgcaggcaucauagcug

SEQ ID NO: 1378980 - RNA, 19 nt, Artificial Sequence
  Description of Artificial Sequence: Synthetic oligonucleotide
gagcgugccguagacacug

SEQ ID NO: 1378981 - RNA, 19 nt, Artificial Sequence
  Description of Artificial Sequence: Synthetic oligonucleotide
cucguacagaacgaacagc

SEQ ID NO: 1378982 - RNA, 19 nt, Artificial Sequence
  Description of Artificial Sequence: Synthetic oligonucleotide
cugcggaggacgauccugc

SEQ ID NO: 1378983 - RNA, 19 nt, Artificial Sequence
  Description of Artificial Sequence: Synthetic oligonucleotide
agcaccugaccccgacggc

SEQ ID NO: 1378984 - RNA, 19 nt, Artificial Sequence
  Description of Artificial Sequence: Synthetic oligonucleotide
uccacgaaccggugaccgg

SEQ ID NO: 1378985 - RNA, 19 nt, Artificial Sequence
  Description of Artificial Sequence: Synthetic oligonucleotide
gucccguagugccacgagg

SEQ ID NO: 1378986 - RNA, 19 nt, Artificial Sequence
  Description of Artificial Sequence: Synthetic oligonucleotide
gacgaguagccgcuggguc

SEQ ID NO: 1378987 - RNA, 19 nt, Artificial Sequence
  Description of Artificial Sequence: Synthetic oligonucleotide
ugcaaaaggcuagcauccc

SEQ ID NO: 1378988 - RNA, 19 nt, Artificial Sequence
  Description of Artificial Sequence: Synthetic oligonucleotide
ugcggaaaguguccaccga

SEQ ID NO: 1378989 - RNA, 19 nt, Artificial Sequence
  Description of Artificial Sequence: Synthetic oligonucleotide
caucgucuuuacuccacac

SEQ ID NO: 1378990 - RNA, 19 nt, Artificial Sequence
  Description of Artificial Sequence: Synthetic oligonucleotide
gcuguuagguccuaacgga

SEQ ID NO: 1378991 - RNA, 19 nt, Artificial Sequence
  Description of Artificial Sequence: Synthetic oligonucleotide
aagucgucuugcacccugg

SEQ ID NO: 1378992 - RNA, 19 nt, Artificial Sequence
  Description of Artificial Sequence: Synthetic oligonucleotide
ugguccaggggcaaacauu

SEQ ID NO: 1378993 - RNA, 19 nt, Artificial Sequence
  Description of Artificial Sequence: Synthetic oligonucleotide
guuuuccuggccucggcga

SEQ ID NO: 1378994 - RNA, 19 nt, Artificial Sequence
  Description of Artificial Sequence: Synthetic oligonucleotide
guccacgaaccggugaccg

SEQ ID NO: 1378995 - RNA, 19 nt, Artificial Sequence
  Description of Artificial Sequence: Synthetic oligonucleotide
ugaggucagaugacgcgua

SEQ ID NO: 1378996 - RNA, 19 nt, Artificial Sequence
  Description of Artificial Sequence: Synthetic oligonucleotide
agggacgaguagccgcugg

SEQ ID NO: 1378997 - RNA, 19 nt, Artificial Sequence
  Description of Artificial Sequence: Synthetic oligonucleotide
agacguuuuccuggccucg

SEQ ID NO: 1378998 - RNA, 19 nt, Artificial Sequence
  Description of Artificial Sequence: Synthetic oligonucleotide
gcugucgaggaccauguac

SEQ ID NO: 1378999 - RNA, 19 nt, Artificial Sequence
  Description of Artificial Sequence: Synthetic oligonucleotide
cucggaucccgccacggac

SEQ ID NO: 1379000 - RNA, 19 nt, Artificial Sequence
  Description of Artificial Sequence: Synthetic oligonucleotide
aggagcgugccccgagggg

SEQ ID NO: 1379001 - RNA, 19 nt, Artificial Sequence
  Description of Artificial Sequence: Synthetic oligonucleotide
gggaaugccgcucacucca

SEQ ID NO: 1379002 - RNA, 19 nt, Artificial Sequence
  Description of Artificial Sequence: Synthetic oligonucleotide
agcgcugcgagcaccugac

SEQ ID NO: 1379003 - RNA, 19 nt, Artificial Sequence
  Description of Artificial Sequence: Synthetic oligonucleotide
gucgggguugaaaucgugc

SEQ ID NO: 1379004 - RNA, 19 nt, Artificial Sequence
  Description of Artificial Sequence: Synthetic oligonucleotide
gucgucuugcacccuggcc

SEQ ID NO: 1379005 - RNA, 19 nt, Artificial Sequence
  Description of Artificial Sequence: Synthetic oligonucleotide
cuacccugguccguggacc

SEQ ID NO: 1379006 - RNA, 19 nt, Artificial Sequence
  Description of Artificial Sequence: Synthetic oligonucleotide
cugucgaggaccauguacu

SEQ ID NO: 1379007 - RNA, 19 nt, Artificial Sequence
  Description of Artificial Sequence: Synthetic oligonucleotide
cuacgaugaaggcugucga

SEQ ID NO: 1379008 - RNA, 19 nt, Artificial Sequence
  Description of Artificial Sequence: Synthetic oligonucleotide
cuuuacuccacaccaacau

SEQ ID NO: 1379009 - RNA, 19 nt, Artificial Sequence
  Description of Artificial Sequence: Synthetic oligonucleotide
aggcaucauagcugcggag

SEQ ID NO: 1379010 - RNA, 19 nt, Artificial Sequence
  Description of Artificial Sequence: Synthetic oligonucleotide
agucccguagugccacgag

SEQ ID NO: 1379011 - RNA, 19 nt, Artificial Sequence
  Description of Artificial Sequence: Synthetic oligonucleotide
cccuguuaaagagaaacug

SEQ ID NO: 1379012 - RNA, 19 nt, Artificial Sequence
  Description of Artificial Sequence: Synthetic oligonucleotide
gaaggcgaggagcgugccc

SEQ ID NO: 1379013 - RNA, 19 nt, Artificial Sequence
  Description of Artificial Sequence: Synthetic oligonucleotide
uguccaccgagccgaucug

SEQ ID NO: 1379014 - RNA, 19 nt, Artificial Sequence
  Description of Artificial Sequence: Synthetic oligonucleotide
gcggaaaguguccaccgag

SEQ ID NO: 1379015 - RNA, 19 nt, Artificial Sequence
  Description of Artificial Sequence: Synthetic oligonucleotide
cagacguuuuccuggccuc

SEQ ID NO: 1379016 - RNA, 19 nt, Artificial Sequence
  Description of Artificial Sequence: Synthetic oligonucleotide
agauuccggggugggcucc

SEQ ID NO: 1379017 - RNA, 19 nt, Artificial Sequence
  Description of Artificial Sequence: Synthetic oligonucleotide
cgcguaguguccuugggcg

SEQ ID NO: 1379018 - RNA, 19 nt, Artificial Sequence
  Description of Artificial Sequence: Synthetic oligonucleotide
ugccaucgucuuuacucca

SEQ ID NO: 1379019 - RNA, 19 nt, Artificial Sequence
  Description of Artificial Sequence: Synthetic oligonucleotide
uacuacccugguccgugga

SEQ ID NO: 1379020 - RNA, 19 nt, Artificial Sequence
  Description of Artificial Sequence: Synthetic oligonucleotide
caggacguaccguugcuga

SEQ ID NO: 1379021 - RNA, 19 nt, Artificial Sequence
  Description of Artificial Sequence: Synthetic oligonucleotide
gaucccgccacggacgcca

SEQ ID NO: 1379022 - RNA, 19 nt, Artificial Sequence
  Description of Artificial Sequence: Synthetic oligonucleotide
ugucgaggaccauguacua

SEQ ID NO: 1379023 - RNA, 19 nt, Artificial Sequence
  Description of Artificial Sequence: Synthetic oligonucleotide
cacuccagucccguagugc

SEQ ID NO: 1379024 - RNA, 19 nt, Artificial Sequence
  Description of Artificial Sequence: Synthetic oligonucleotide
ucccgcucacccacagcag

SEQ ID NO: 1379025 - RNA, 19 nt, Artificial Sequence
  Description of Artificial Sequence: Synthetic oligonucleotide
ggcuggauuggagaagaag

SEQ ID NO: 1379026 - RNA, 19 nt, Artificial Sequence
  Description of Artificial Sequence: Synthetic oligonucleotide
guccuaacggaguggcuuc

SEQ ID NO: 1379027 - RNA, 19 nt, Artificial Sequence
  Description of Artificial Sequence: Synthetic oligonucleotide
ucgucgggguugaaaucgu

SEQ ID NO: 1379028 - RNA, 19 nt, Artificial Sequence
  Description of Artificial Sequence: Synthetic oligonucleotide
gaggacgauccugcagcgg

SEQ ID NO: 1379029 - RNA, 19 nt, Artificial Sequence
  Description of Artificial Sequence: Synthetic oligonucleotide
cgugaggucagaugacgcg

SEQ ID NO: 1379030 - RNA, 19 nt, Artificial Sequence
  Description of Artificial Sequence: Synthetic oligonucleotide
caccguggucaucacugag

SEQ ID NO: 1379031 - RNA, 19 nt, Artificial Sequence
  Description of Artificial Sequence: Synthetic oligonucleotide
uaccguugcugaagcucca

SEQ ID NO: 1379032 - RNA, 19 nt, Artificial Sequence
  Description of Artificial Sequence: Synthetic oligonucleotide
caccgagccgaucugccuc

SEQ ID NO: 1379033 - RNA, 19 nt, Artificial Sequence
  Description of Artificial Sequence: Synthetic oligonucleotide
aggguccaccagcucgggg

SEQ ID NO: 1379034 - RNA, 19 nt, Artificial Sequence
  Description of Artificial Sequence: Synthetic oligonucleotide
uccuaacggaguggcuucc

SEQ ID NO: 1379035 - RNA, 19 nt, Artificial Sequence
  Description of Artificial Sequence: Synthetic oligonucleotide
cauggucaccagcggcugc

SEQ ID NO: 1379036 - RNA, 19 nt, Artificial Sequence
  Description of Artificial Sequence: Synthetic oligonucleotide
agaugacgcguaguguccu

SEQ ID NO: 1379037 - RNA, 19 nt, Artificial Sequence
  Description of Artificial Sequence: Synthetic oligonucleotide
cugcagccccucgagagag

SEQ ID NO: 1379038 - RNA, 19 nt, Artificial Sequence
  Description of Artificial Sequence: Synthetic oligonucleotide
uuccugucugggagaggca

SEQ ID NO: 1379039 - RNA, 19 nt, Artificial Sequence
  Description of Artificial Sequence: Synthetic oligonucleotide
cggaggacgauccugcagc

SEQ ID NO: 1379040 - RNA, 19 nt, Artificial Sequence
  Description of Artificial Sequence: Synthetic oligonucleotide
agccccucgagagagccgu

SEQ ID NO: 1379041 - RNA, 19 nt, Artificial Sequence
  Description of Artificial Sequence: Synthetic oligonucleotide
cugcgagcaccugaccccg

SEQ ID NO: 1379042 - RNA, 19 nt, Artificial Sequence
  Description of Artificial Sequence: Synthetic oligonucleotide
ggacguaccguugcugaag

SEQ ID NO: 1379043 - RNA, 19 nt, Artificial Sequence
  Description of Artificial Sequence: Synthetic oligonucleotide
ugcucggcugugccgccgc

SEQ ID NO: 1379044 - RNA, 19 nt, Artificial Sequence
  Description of Artificial Sequence: Synthetic oligonucleotide
ucccgaggaagagcugugc

SEQ ID NO: 1379045 - RNA, 19 nt, Artificial Sequence
  Description of Artificial Sequence: Synthetic oligonucleotide
accugaccccgacggcucg

SEQ ID NO: 1379046 - RNA, 19 nt, Artificial Sequence
  Description of Artificial Sequence: Synthetic oligonucleotide
cucgagagagccgugaggu

SEQ ID NO: 1379047 - RNA, 19 nt, Artificial Sequence
  Description of Artificial Sequence: Synthetic oligonucleotide
gcagcuguuagguccuaac

SEQ ID NO: 1379048 - RNA, 19 nt, Artificial Sequence
  Description of Artificial Sequence: Synthetic oligonucleotide
ggucagguucacucggaac

SEQ ID NO: 1379049 - RNA, 19 nt, Artificial Sequence
  Description of Artificial Sequence: Synthetic oligonucleotide
augacgcguaguguccuug

SEQ ID NO: 1379050 - RNA, 19 nt, Artificial Sequence
  Description of Artificial Sequence: Synthetic oligonucleotide
cacggacgccagcagcagg

SEQ ID NO: 1379051 - RNA, 19 nt, Artificial Sequence
  Description of Artificial Sequence: Synthetic oligonucleotide
gccguagacacugauuuuc

SEQ ID NO: 1379052 - RNA, 19 nt, Artificial Sequence
  Description of Artificial Sequence: Synthetic oligonucleotide
uccuugggcgccggugggg

SEQ ID NO: 1379053 - RNA, 19 nt, Artificial Sequence
  Description of Artificial Sequence: Synthetic oligonucleotide
gaggcccguccacgaaccg

SEQ ID NO: 1379054 - RNA, 19 nt, Artificial Sequence
  Description of Artificial Sequence: Synthetic oligonucleotide
guaguguccuugggcgccg

SEQ ID NO: 1379055 - RNA, 19 nt, Artificial Sequence
  Description of Artificial Sequence: Synthetic oligonucleotide
gucgaggaccauguacuac

SEQ ID NO: 1379056 - RNA, 19 nt, Artificial Sequence
  Description of Artificial Sequence: Synthetic oligonucleotide
gccgugaggucagaugacg

SEQ ID NO: 1379057 - RNA, 19 nt, Artificial Sequence
  Description of Artificial Sequence: Synthetic oligonucleotide
agccgugaggucagaugac

SEQ ID NO: 1379058 - RNA, 19 nt, Artificial Sequence
  Description of Artificial Sequence: Synthetic oligonucleotide
guugaccuugugagcacac

SEQ ID NO: 1379059 - RNA, 19 nt, Artificial Sequence
  Description of Artificial Sequence: Synthetic oligonucleotide
gugcucguguuugggcugg

SEQ ID NO: 1379060 - RNA, 19 nt, Artificial Sequence
  Description of Artificial Sequence: Synthetic oligonucleotide
ugagcgggaugcggaaagu

SEQ ID NO: 1379061 - RNA, 19 nt, Artificial Sequence
  Description of Artificial Sequence: Synthetic oligonucleotide
gagcgcugcgagcaccuga

SEQ ID NO: 1379062 - RNA, 19 nt, Artificial Sequence
  Description of Artificial Sequence: Synthetic oligonucleotide
auugcucgcccgaggcccg

SEQ ID NO: 1379063 - RNA, 19 nt, Artificial Sequence
  Description of Artificial Sequence: Synthetic oligonucleotide
ugccguagacacugauuuu

SEQ ID NO: 1379064 - RNA, 19 nt, Artificial Sequence
  Description of Artificial Sequence: Synthetic oligonucleotide
guagccgcugggucccggc

SEQ ID NO: 1379065 - RNA, 19 nt, Artificial Sequence
  Description of Artificial Sequence: Synthetic oligonucleotide
gaccccgacggcucgccca

SEQ ID NO: 1379066 - RNA, 19 nt, Artificial Sequence
  Description of Artificial Sequence: Synthetic oligonucleotide
ugggucccggccacaccug

SEQ ID NO: 1379067 - RNA, 19 nt, Artificial Sequence
  Description of Artificial Sequence: Synthetic oligonucleotide
accaccccuguguccacgu

SEQ ID NO: 1379068 - RNA, 19 nt, Artificial Sequence
  Description of Artificial Sequence: Synthetic oligonucleotide
aggucagaugacgcguagu

SEQ ID NO: 1379069 - RNA, 19 nt, Artificial Sequence
  Description of Artificial Sequence: Synthetic oligonucleotide
cacucgucgggguugaaau

SEQ ID NO: 1379070 - RNA, 19 nt, Artificial Sequence
  Description of Artificial Sequence: Synthetic oligonucleotide
cccaucgucuacgaugaag

SEQ ID NO: 1379071 - RNA, 19 nt, Artificial Sequence
  Description of Artificial Sequence: Synthetic oligonucleotide
gggucgaagguuacauccc

SEQ ID NO: 1379072 - RNA, 19 nt, Artificial Sequence
  Description of Artificial Sequence: Synthetic oligonucleotide
ggaguggcuucccuguuaa

SEQ ID NO: 1379073 - RNA, 19 nt, Artificial Sequence
  Description of Artificial Sequence: Synthetic oligonucleotide
ccucgagagagccgugagg

SEQ ID NO: 1379074 - RNA, 19 nt, Artificial Sequence
  Description of Artificial Sequence: Synthetic oligonucleotide
ccgugaggucagaugacgc

SEQ ID NO: 1379075 - RNA, 19 nt, Artificial Sequence
  Description of Artificial Sequence: Synthetic oligonucleotide
caccugaccccgacggcuc

SEQ ID NO: 1379076 - RNA, 19 nt, Artificial Sequence
  Description of Artificial Sequence: Synthetic oligonucleotide
ugaccccgacggcucgccc

SEQ ID NO: 1379077 - RNA, 19 nt, Artificial Sequence
  Description of Artificial Sequence: Synthetic oligonucleotide
acguaccguugcugaagcu

SEQ ID NO: 1379078 - RNA, 19 nt, Artificial Sequence
  Description of Artificial Sequence: Synthetic oligonucleotide
gguugaaaucgugcucgug

SEQ ID NO: 1379079 - RNA, 19 nt, Artificial Sequence
  Description of Artificial Sequence: Synthetic oligonucleotide
gcucucgguguacugguuc

SEQ ID NO: 1379080 - RNA, 19 nt, Artificial Sequence
  Description of Artificial Sequence: Synthetic oligonucleotide
caaugguaguuguucuggu

SEQ ID NO: 1379081 - RNA, 19 nt, Artificial Sequence
  Description of Artificial Sequence: Synthetic oligonucleotide
gaugagcgggaugcggaaa

SEQ ID NO: 1379082 - RNA, 19 nt, Artificial Sequence
  Description of Artificial Sequence: Synthetic oligonucleotide
ugaagucgucuugcacccu

SEQ ID NO: 1379083 - RNA, 19 nt, Artificial Sequence
  Description of Artificial Sequence: Synthetic oligonucleotide
auguacuacccugguccgu

SEQ ID NO: 1379084 - RNA, 19 nt, Artificial Sequence
  Description of Artificial Sequence: Synthetic oligonucleotide
aguagccgcugggucccgg

SEQ ID NO: 1379085 - RNA, 19 nt, Artificial Sequence
  Description of Artificial Sequence: Synthetic oligonucleotide
gaagggaaugccgcucacu

SEQ ID NO: 1379086 - RNA, 19 nt, Artificial Sequence
  Description of Artificial Sequence: Synthetic oligonucleotide
gaagcucguagggcuggca

SEQ ID NO: 1379087 - RNA, 19 nt, Artificial Sequence
  Description of Artificial Sequence: Synthetic oligonucleotide
guccaccgagccgaucugc

SEQ ID NO: 1379088 - RNA, 19 nt, Artificial Sequence
  Description of Artificial Sequence: Synthetic oligonucleotide
gcucacccacagcagcugc

SEQ ID NO: 1379089 - RNA, 19 nt, Artificial Sequence
  Description of Artificial Sequence: Synthetic oligonucleotide
gcagacguuuuccuggccu

SEQ ID NO: 1379090 - RNA, 19 nt, Artificial Sequence
  Description of Artificial Sequence: Synthetic oligonucleotide
gaggaccauguacuacccu

SEQ ID NO: 1379091 - RNA, 19 nt, Artificial Sequence
  Description of Artificial Sequence: Synthetic oligonucleotide
gcgccgguggggcucagag

SEQ ID NO: 1379092 - RNA, 19 nt, Artificial Sequence
  Description of Artificial Sequence: Synthetic oligonucleotide
cgggaugcggaaagugucc

SEQ ID NO: 1379093 - RNA, 19 nt, Artificial Sequence
  Description of Artificial Sequence: Synthetic oligonucleotide
gcguaguguccuugggcgc

SEQ ID NO: 1379094 - RNA, 19 nt, Artificial Sequence
  Description of Artificial Sequence: Synthetic oligonucleotide
gugccacgaggcaccgugg

SEQ ID NO: 1379095 - RNA, 19 nt, Artificial Sequence
  Description of Artificial Sequence: Synthetic oligonucleotide
cguaccguugcugaagcuc

SEQ ID NO: 1379096 - RNA, 19 nt, Artificial Sequence
  Description of Artificial Sequence: Synthetic oligonucleotide
caucccgaggaagagcugu

SEQ ID NO: 1379097 - RNA, 19 nt, Artificial Sequence
  Description of Artificial Sequence: Synthetic oligonucleotide
gacgauccugcagcggcaa

SEQ ID NO: 1379098 - RNA, 19 nt, Artificial Sequence
  Description of Artificial Sequence: Synthetic oligonucleotide
ugcgagcaccugaccccga

SEQ ID NO: 1379099 - RNA, 19 nt, Artificial Sequence
  Description of Artificial Sequence: Synthetic oligonucleotide
cugaccccgacggcucgcc

SEQ ID NO: 1379100 - RNA, 19 nt, Artificial Sequence
  Description of Artificial Sequence: Synthetic oligonucleotide
gaaugccgcucacuccagu

SEQ ID NO: 1379101 - RNA, 19 nt, Artificial Sequence
  Description of Artificial Sequence: Synthetic oligonucleotide
cguaguguccuugggcgcc

SEQ ID NO: 1379102 - RNA, 19 nt, Artificial Sequence
  Description of Artificial Sequence: Synthetic oligonucleotide
cuucccuguuaaagagaaa

SEQ ID NO: 1379103 - RNA, 19 nt, Artificial Sequence
  Description of Artificial Sequence: Synthetic oligonucleotide
ccauugcucgcccgaggcc

SEQ ID NO: 1379104 - RNA, 19 nt, Artificial Sequence
  Description of Artificial Sequence: Synthetic oligonucleotide
gcgggaugcggaaaguguc

SEQ ID NO: 1379105 - RNA, 19 nt, Artificial Sequence
  Description of Artificial Sequence: Synthetic oligonucleotide
ccaucucguuccagcgucc

SEQ ID NO: 1379106 - RNA, 19 nt, Artificial Sequence
  Description of Artificial Sequence: Synthetic oligonucleotide
ccuuccgaggcucccgcug

SEQ ID NO: 1379107 - RNA, 19 nt, Artificial Sequence
  Description of Artificial Sequence: Synthetic oligonucleotide
ccguagacacugauuuuca

SEQ ID NO: 1379108 - RNA, 19 nt, Artificial Sequence
  Description of Artificial Sequence: Synthetic oligonucleotide
cagguucacucggaacuca

SEQ ID NO: 1379109 - RNA, 19 nt, Artificial Sequence
  Description of Artificial Sequence: Synthetic oligonucleotide
caccaacaugguggaggcc

SEQ ID NO: 1379110 - RNA, 19 nt, Artificial Sequence
  Description of Artificial Sequence: Synthetic oligonucleotide
cucccuccgugcuguuuuc

SEQ ID NO: 1379111 - RNA, 19 nt, Artificial Sequence
  Description of Artificial Sequence: Synthetic oligonucleotide
ggcagacguuuuccuggcc

SEQ ID NO: 1379112 - RNA, 19 nt, Artificial Sequence
  Description of Artificial Sequence: Synthetic oligonucleotide
uuccgaggcucccgcuguu

SEQ ID NO: 1379113 - RNA, 19 nt, Artificial Sequence
  Description of Artificial Sequence: Synthetic oligonucleotide
gguccaggggcaaacauuu

SEQ ID NO: 1379114 - RNA, 19 nt, Artificial Sequence
  Description of Artificial Sequence: Synthetic oligonucleotide
cagcgucccauggccacac

SEQ ID NO: 1379115 - RNA, 19 nt, Artificial Sequence
  Description of Artificial Sequence: Synthetic oligonucleotide
acgauccugcagcggcaau

SEQ ID NO: 1379116 - RNA, 19 nt, Artificial Sequence
  Description of Artificial Sequence: Synthetic oligonucleotide
gggaugcggaaagugucca

SEQ ID NO: 1379117 - RNA, 19 nt, Artificial Sequence
  Description of Artificial Sequence: Synthetic oligonucleotide
gauuccggggugggcucca

SEQ ID NO: 1379118 - RNA, 19 nt, Artificial Sequence
  Description of Artificial Sequence: Synthetic oligonucleotide
gcgaaggcgaggagcgugc

SEQ ID NO: 1379119 - RNA, 19 nt, Artificial Sequence
  Description of Artificial Sequence: Synthetic oligonucleotide
ggaaugccgcucacuccag

SEQ ID NO: 1379120 - RNA, 19 nt, Artificial Sequence
  Description of Artificial Sequence: Synthetic oligonucleotide
cgaggcccguccacgaacc

SEQ ID NO: 1379121 - RNA, 19 nt, Artificial Sequence
  Description of Artificial Sequence: Synthetic oligonucleotide
cccucgagagagccgugag

SEQ ID NO: 1379122 - RNA, 19 nt, Artificial Sequence
  Description of Artificial Sequence: Synthetic oligonucleotide
caccagacugaagucgucu

SEQ ID NO: 1379123 - RNA, 19 nt, Artificial Sequence
  Description of Artificial Sequence: Synthetic oligonucleotide
ccguagugccacgaggcac

SEQ ID NO: 1379124 - RNA, 19 nt, Artificial Sequence
  Description of Artificial Sequence: Synthetic oligonucleotide
gcgaggagcgugccccgag

SEQ ID NO: 1379125 - RNA, 19 nt, Artificial Sequence
  Description of Artificial Sequence: Synthetic oligonucleotide
gguccuaacggaguggcuu

SEQ ID NO: 1379126 - RNA, 19 nt, Artificial Sequence
  Description of Artificial Sequence: Synthetic oligonucleotide
ggguaucgcaggcaucaua

SEQ ID NO: 1379127 - RNA, 19 nt, Artificial Sequence
  Description of Artificial Sequence: Synthetic oligonucleotide
gaugacgcguaguguccuu

SEQ ID NO: 1379128 - RNA, 19 nt, Artificial Sequence
  Description of Artificial Sequence: Synthetic oligonucleotide
ugcucguguuugggcuggc

SEQ ID NO: 1379129 - RNA, 19 nt, Artificial Sequence
  Description of Artificial Sequence: Synthetic oligonucleotide
agguccuaacggaguggcu

SEQ ID NO: 1379130 - RNA, 19 nt, Artificial Sequence
  Description of Artificial Sequence: Synthetic oligonucleotide
ccuaacggaguggcuuccc

SEQ ID NO: 1379131 - RNA, 19 nt, Artificial Sequence
  Description of Artificial Sequence: Synthetic oligonucleotide
gggcuggccgaagggaaug

SEQ ID NO: 1379132 - RNA, 19 nt, Artificial Sequence
  Description of Artificial Sequence: Synthetic oligonucleotide
agagcgcugcgagcaccug

SEQ ID NO: 1379133 - RNA, 19 nt, Artificial Sequence
  Description of Artificial Sequence: Synthetic oligonucleotide
gggucagguucacucggaa

SEQ ID NO: 1379134 - RNA, 19 nt, Artificial Sequence
  Description of Artificial Sequence: Synthetic oligonucleotide
gccaauguccacggagaga

SEQ ID NO: 1379135 - RNA, 19 nt, Artificial Sequence
  Description of Artificial Sequence: Synthetic oligonucleotide
gguggcuaaugcuccugcu

SEQ ID NO: 1379136 - RNA, 19 nt, Artificial Sequence
  Description of Artificial Sequence: Synthetic oligonucleotide
cccucaucggaggcagacg

SEQ ID NO: 1379137 - RNA, 19 nt, Artificial Sequence
  Description of Artificial Sequence: Synthetic oligonucleotide
cgaguagccgcuggguccc

SEQ ID NO: 1379138 - RNA, 19 nt, Artificial Sequence
  Description of Artificial Sequence: Synthetic oligonucleotide
gccucggaucccgccacgg

SEQ ID NO: 1379139 - RNA, 19 nt, Artificial Sequence
  Description of Artificial Sequence: Synthetic oligonucleotide
aaguguccaccgagccgau

SEQ ID NO: 1379140 - RNA, 19 nt, Artificial Sequence
  Description of Artificial Sequence: Synthetic oligonucleotide
cgucguucaccacggcccc

SEQ ID NO: 1379141 - RNA, 19 nt, Artificial Sequence
  Description of Artificial Sequence: Synthetic oligonucleotide
cucggggucgaagguuaca

SEQ ID NO: 1379142 - RNA, 19 nt, Artificial Sequence
  Description of Artificial Sequence: Synthetic oligonucleotide
ccaggacguaccguugcug

SEQ ID NO: 1379143 - RNA, 19 nt, Artificial Sequence
  Description of Artificial Sequence: Synthetic oligonucleotide
ccgaagggaaugccgcuca

SEQ ID NO: 1379144 - RNA, 19 nt, Artificial Sequence
  Description of Artificial Sequence: Synthetic oligonucleotide
agcgucccauggccacaca

SEQ ID NO: 1379145 - RNA, 19 nt, Artificial Sequence
  Description of Artificial Sequence: Synthetic oligonucleotide
gccgccauugcucgcccga

SEQ ID NO: 1379146 - RNA, 19 nt, Artificial Sequence
  Description of Artificial Sequence: Synthetic oligonucleotide
ggcuggccgaagggaaugc

SEQ ID NO: 1379147 - RNA, 19 nt, Artificial Sequence
  Description of Artificial Sequence: Synthetic oligonucleotide
guacugguucaggcccuuc

SEQ ID NO: 1379148 - RNA, 19 nt, Artificial Sequence
  Description of Artificial Sequence: Synthetic oligonucleotide
aggguaucgcaggcaucau

SEQ ID NO: 1379149 - RNA, 19 nt, Artificial Sequence
  Description of Artificial Sequence: Synthetic oligonucleotide
cgaggagcgugccccgagg

SEQ ID NO: 1379150 - RNA, 19 nt, Artificial Sequence
  Description of Artificial Sequence: Synthetic oligonucleotide
ggagcgugccccgaggggu

SEQ ID NO: 1379151 - RNA, 19 nt, Artificial Sequence
  Description of Artificial Sequence: Synthetic oligonucleotide
gccgaagggaaugccgcuc

SEQ ID NO: 1379152 - RNA, 19 nt, Artificial Sequence
  Description of Artificial Sequence: Synthetic oligonucleotide
uggcggugaugagcgggau

SEQ ID NO: 1379153 - RNA, 19 nt, Artificial Sequence
  Description of Artificial Sequence: Synthetic oligonucleotide
gccacgaggcaccgugguc

SEQ ID NO: 1379154 - RNA, 19 nt, Artificial Sequence
  Description of Artificial Sequence: Synthetic oligonucleotide
cagggacgaguagccgcug

SEQ ID NO: 1379155 - RNA, 19 nt, Artificial Sequence
  Description of Artificial Sequence: Synthetic oligonucleotide
cagucccguagugccacga

SEQ ID NO: 1379156 - RNA, 19 nt, Artificial Sequence
  Description of Artificial Sequence: Synthetic oligonucleotide
ggacgauccugcagcggca

SEQ ID NO: 1379157 - RNA, 19 nt, Artificial Sequence
  Description of Artificial Sequence: Synthetic oligonucleotide
ccgugcuguuuuccagggc

SEQ ID NO: 1379158 - RNA, 19 nt, Artificial Sequence
  Description of Artificial Sequence: Synthetic oligonucleotide
ccccagguucagcccgucg

SEQ ID NO: 1379159 - RNA, 19 nt, Artificial Sequence
  Description of Artificial Sequence: Synthetic oligonucleotide
gcucguguuugggcuggcc

SEQ ID NO: 1379160 - RNA, 19 nt, Artificial Sequence
  Description of Artificial Sequence: Synthetic oligonucleotide
cucgcccgaggcccgucca

SEQ ID NO: 1379161 - RNA, 19 nt, Artificial Sequence
  Description of Artificial Sequence: Synthetic oligonucleotide
ccuucucguacagaacgaa

SEQ ID NO: 1379162 - RNA, 19 nt, Artificial Sequence
  Description of Artificial Sequence: Synthetic oligonucleotide
ccgacggcucgcccagccg

SEQ ID NO: 1379163 - RNA, 19 nt, Artificial Sequence
  Description of Artificial Sequence: Synthetic oligonucleotide
cugguccguggaccuccuc

SEQ ID NO: 1379164 - RNA, 19 nt, Artificial Sequence
  Description of Artificial Sequence: Synthetic oligonucleotide
gagagccgugaggucagau

SEQ ID NO: 1379165 - RNA, 19 nt, Artificial Sequence
  Description of Artificial Sequence: Synthetic oligonucleotide
ggguugaaaucgugcucgu

SEQ ID NO: 1379166 - RNA, 19 nt, Artificial Sequence
  Description of Artificial Sequence: Synthetic oligonucleotide
cgucgggguugaaaucgug

SEQ ID NO: 1379167 - RNA, 19 nt, Artificial Sequence
  Description of Artificial Sequence: Synthetic oligonucleotide
uugcucgcccgaggcccgu

SEQ ID NO: 1379168 - RNA, 19 nt, Artificial Sequence
  Description of Artificial Sequence: Synthetic oligonucleotide
caucggaggcagacguuuu

SEQ ID NO: 1379169 - RNA, 19 nt, Artificial Sequence
  Description of Artificial Sequence: Synthetic oligonucleotide
gcaccugaccccgacggcu

SEQ ID NO: 1379170 - RNA, 19 nt, Artificial Sequence
  Description of Artificial Sequence: Synthetic oligonucleotide
cgucuuuacuccacaccaa

SEQ ID NO: 1379171 - RNA, 19 nt, Artificial Sequence
  Description of Artificial Sequence: Synthetic oligonucleotide
cucaucggaggcagacguu

SEQ ID NO: 1379172 - RNA, 19 nt, Artificial Sequence
  Description of Artificial Sequence: Synthetic oligonucleotide
agcgugccguagacacuga

SEQ ID NO: 1379173 - RNA, 19 nt, Artificial Sequence
  Description of Artificial Sequence: Synthetic oligonucleotide
gcacucgucgggguugaaa

SEQ ID NO: 1379174 - RNA, 19 nt, Artificial Sequence
  Description of Artificial Sequence: Synthetic oligonucleotide
ggacgaguagccgcugggu

SEQ ID NO: 1379175 - RNA, 19 nt, Artificial Sequence
  Description of Artificial Sequence: Synthetic oligonucleotide
aucccgccacggacgccag

SEQ ID NO: 1379176 - RNA, 19 nt, Artificial Sequence
  Description of Artificial Sequence: Synthetic oligonucleotide
ggggcucagagcgugccgu

SEQ ID NO: 1379177 - RNA, 19 nt, Artificial Sequence
  Description of Artificial Sequence: Synthetic oligonucleotide
gcaucccgaggaagagcug

SEQ ID NO: 1379178 - RNA, 19 nt, Artificial Sequence
  Description of Artificial Sequence: Synthetic oligonucleotide
ggccgaagggaaugccgcu

SEQ ID NO: 1379179 - RNA, 19 nt, Artificial Sequence
  Description of Artificial Sequence: Synthetic oligonucleotide
cggggucgaagguuacauc

SEQ ID NO: 1379180 - RNA, 19 nt, Artificial Sequence
  Description of Artificial Sequence: Synthetic oligonucleotide
gcaccagacugaagucguc

SEQ ID NO: 1379181 - RNA, 19 nt, Artificial Sequence
  Description of Artificial Sequence: Synthetic oligonucleotide
ugcucgcccgaggcccguc

SEQ ID NO: 1379182 - RNA, 19 nt, Artificial Sequence
  Description of Artificial Sequence: Synthetic oligonucleotide
cauagcugcggaggacgau

SEQ ID NO: 1379183 - RNA, 19 nt, Artificial Sequence
  Description of Artificial Sequence: Synthetic oligonucleotide
cguccacgaaccggugacc

SEQ ID NO: 1379184 - RNA, 19 nt, Artificial Sequence
  Description of Artificial Sequence: Synthetic oligonucleotide
cccguccacgaaccgguga

SEQ ID NO: 1379185 - RNA, 19 nt, Artificial Sequence
  Description of Artificial Sequence: Synthetic oligonucleotide
cccgaggaagagcugugcu

SEQ ID NO: 1379186 - RNA, 19 nt, Artificial Sequence
  Description of Artificial Sequence: Synthetic oligonucleotide
gcucggcugugccgccgcc

SEQ ID NO: 1379187 - RNA, 19 nt, Artificial Sequence
  Description of Artificial Sequence: Synthetic oligonucleotide
cugugccgccgccauugcu

SEQ ID NO: 1379188 - RNA, 19 nt, Artificial Sequence
  Description of Artificial Sequence: Synthetic oligonucleotide
ccugaccccgacggcucgc

SEQ ID NO: 1379189 - RNA, 19 nt, Artificial Sequence
  Description of Artificial Sequence: Synthetic oligonucleotide
ccgccauugcucgcccgag

SEQ ID NO: 1379190 - RNA, 19 nt, Artificial Sequence
  Description of Artificial Sequence: Synthetic oligonucleotide
ccucggaucccgccacgga

SEQ ID NO: 1379191 - RNA, 19 nt, Artificial Sequence
  Description of Artificial Sequence: Synthetic oligonucleotide
cgaaggcgaggagcgugcc

SEQ ID NO: 1379192 - RNA, 19 nt, Artificial Sequence
  Description of Artificial Sequence: Synthetic oligonucleotide
ccgaggaagagcugugcuu

SEQ ID NO: 1379193 - RNA, 19 nt, Artificial Sequence
  Description of Artificial Sequence: Synthetic oligonucleotide
gcucggggucgaagguuac

SEQ ID NO: 1379194 - RNA, 19 nt, Artificial Sequence
  Description of Artificial Sequence: Synthetic oligonucleotide
gggcucagagcgugccgua

SEQ ID NO: 1379195 - RNA, 19 nt, Artificial Sequence
  Description of Artificial Sequence: Synthetic oligonucleotide
ggcugucgaggaccaugua

SEQ ID NO: 1379196 - RNA, 19 nt, Artificial Sequence
  Description of Artificial Sequence: Synthetic oligonucleotide
ccggggccugaggguaucg

SEQ ID NO: 1379197 - RNA, 19 nt, Artificial Sequence
  Description of Artificial Sequence: Synthetic oligonucleotide
cgucggaggccuccccauc

SEQ ID NO: 1379198 - RNA, 19 nt, Artificial Sequence
  Description of Artificial Sequence: Synthetic oligonucleotide
ggcuggcacucgucggggu

SEQ ID NO: 1379199 - RNA, 19 nt, Artificial Sequence
  Description of Artificial Sequence: Synthetic oligonucleotide
cggggccugaggguaucgc

SEQ ID NO: 1379200 - RNA, 19 nt, Artificial Sequence
  Description of Artificial Sequence: Synthetic oligonucleotide
ccccucgagagagccguga

SEQ ID NO: 1379201 - RNA, 19 nt, Artificial Sequence
  Description of Artificial Sequence: Synthetic oligonucleotide
ccaccgagccgaucugccu

SEQ ID NO: 1379202 - RNA, 19 nt, Artificial Sequence
  Description of Artificial Sequence: Synthetic oligonucleotide
gcgugccguagacacugau

SEQ ID NO: 1379203 - RNA, 19 nt, Artificial Sequence
  Description of Artificial Sequence: Synthetic oligonucleotide
gcccguccacgaaccggug

SEQ ID NO: 1379204 - RNA, 19 nt, Artificial Sequence
  Description of Artificial Sequence: Synthetic oligonucleotide
ccgagccgaucugccuccc

SEQ ID NO: 1379205 - RNA, 19 nt, Artificial Sequence
  Description of Artificial Sequence: Synthetic oligonucleotide
gcgugccccgagggguggc

SEQ ID NO: 1379206 - RNA, 19 nt, Artificial Sequence
  Description of Artificial Sequence: Synthetic oligonucleotide
gccccucgagagagccgug

SEQ ID NO: 1379207 - RNA, 19 nt, Artificial Sequence
  Description of Artificial Sequence: Synthetic oligonucleotide
cccgaggcccguccacgaa

SEQ ID NO: 1379208 - RNA, 19 nt, Artificial Sequence
  Description of Artificial Sequence: Synthetic oligonucleotide
ccgucggaggccuccccau

SEQ ID NO: 1379209 - RNA, 19 nt, Artificial Sequence
  Description of Artificial Sequence: Synthetic oligonucleotide
cgucuacgaugaaggcugu

SEQ ID NO: 1379210 - RNA, 19 nt, Artificial Sequence
  Description of Artificial Sequence: Synthetic oligonucleotide
ccugguccguggaccuccu

SEQ ID NO: 1379211 - RNA, 19 nt, Artificial Sequence
  Description of Artificial Sequence: Synthetic oligonucleotide
ggcacucgucgggguugaa

SEQ ID NO: 1379212 - RNA, 19 nt, Artificial Sequence
  Description of Artificial Sequence: Synthetic oligonucleotide
cgcucacuccagucccgua

SEQ ID NO: 1379213 - RNA, 19 nt, Artificial Sequence
  Description of Artificial Sequence: Synthetic oligonucleotide
uuuuauaucaccaugaaca

SEQ ID NO: 1379214 - RNA, 19 nt, Artificial Sequence
  Description of Artificial Sequence: Synthetic oligonucleotide
aguauaucaguccaaaucc

SEQ ID NO: 1379215 - RNA, 19 nt, Artificial Sequence
  Description of Artificial Sequence: Synthetic oligonucleotide
aaauccguaaaauagagga

SEQ ID NO: 1379216 - RNA, 19 nt, Artificial Sequence
  Description of Artificial Sequence: Synthetic oligonucleotide
aaguauaucaguccaaauc

SEQ ID NO: 1379217 - RNA, 19 nt, Artificial Sequence
  Description of Artificial Sequence: Synthetic oligonucleotide
ugcaagauaaaccugaucu

SEQ ID NO: 1379218 - RNA, 19 nt, Artificial Sequence
  Description of Artificial Sequence: Synthetic oligonucleotide
aauacaaagcgagacaaac

SEQ ID NO: 1379219 - RNA, 19 nt, Artificial Sequence
  Description of Artificial Sequence: Synthetic oligonucleotide
agcgagacaaacuaguacc

SEQ ID NO: 1379220 - RNA, 19 nt, Artificial Sequence
  Description of Artificial Sequence: Synthetic oligonucleotide
uuaucuggcaacucaaugg

SEQ ID NO: 1379221 - RNA, 19 nt, Artificial Sequence
  Description of Artificial Sequence: Synthetic oligonucleotide
aaagcuaaguauaucaguc

SEQ ID NO: 1379222 - RNA, 19 nt, Artificial Sequence
  Description of Artificial Sequence: Synthetic oligonucleotide
aaucugaauacucauacau

SEQ ID NO: 1379223 - RNA, 19 nt, Artificial Sequence
  Description of Artificial Sequence: Synthetic oligonucleotide
aagcuaaguauaucagucc

SEQ ID NO: 1379224 - RNA, 19 nt, Artificial Sequence
  Description of Artificial Sequence: Synthetic oligonucleotide
uaucguuccauuauggccc

SEQ ID NO: 1379225 - RNA, 19 nt, Artificial Sequence
  Description of Artificial Sequence: Synthetic oligonucleotide
aacuaguaccaacaggcac

SEQ ID NO: 1379226 - RNA, 19 nt, Artificial Sequence
  Description of Artificial Sequence: Synthetic oligonucleotide
cuaaauuauggacacauac

SEQ ID NO: 1379227 - RNA, 19 nt, Artificial Sequence
  Description of Artificial Sequence: Synthetic oligonucleotide
aauagaggaacuccuaagu

SEQ ID NO: 1379228 - RNA, 19 nt, Artificial Sequence
  Description of Artificial Sequence: Synthetic oligonucleotide
aggacuuacaauacgaacc

SEQ ID NO: 1379229 - RNA, 19 nt, Artificial Sequence
  Description of Artificial Sequence: Synthetic oligonucleotide
aaauagaggaacuccuaag

SEQ ID NO: 1379230 - RNA, 19 nt, Artificial Sequence
  Description of Artificial Sequence: Synthetic oligonucleotide
uugaaaagugcccuucugg

SEQ ID NO: 1379231 - RNA, 19 nt, Artificial Sequence
  Description of Artificial Sequence: Synthetic oligonucleotide
ucgacuuuugaaaagugcc

SEQ ID NO: 1379232 - RNA, 19 nt, Artificial Sequence
  Description of Artificial Sequence: Synthetic oligonucleotide
cauaguuauacacaucugc

SEQ ID NO: 1379233 - RNA, 19 nt, Artificial Sequence
  Description of Artificial Sequence: Synthetic oligonucleotide
uugguuuccguccauauca

SEQ ID NO: 1379234 - RNA, 19 nt, Artificial Sequence
  Description of Artificial Sequence: Synthetic oligonucleotide
aauauagugaguccauagu

SEQ ID NO: 1379235 - RNA, 19 nt, Artificial Sequence
  Description of Artificial Sequence: Synthetic oligonucleotide
aagguuugugucccaaggc

SEQ ID NO: 1379236 - RNA, 19 nt, Artificial Sequence
  Description of Artificial Sequence: Synthetic oligonucleotide
uacaauacgaaccuuggaa

SEQ ID NO: 1379237 - RNA, 19 nt, Artificial Sequence
  Description of Artificial Sequence: Synthetic oligonucleotide
ucugcugcaaaucuacucc

SEQ ID NO: 1379238 - RNA, 19 nt, Artificial Sequence
  Description of Artificial Sequence: Synthetic oligonucleotide
aagcgagacaaacuaguac

SEQ ID NO: 1379239 - RNA, 19 nt, Artificial Sequence
  Description of Artificial Sequence: Synthetic oligonucleotide
ugaauacucauacauauuu

SEQ ID NO: 1379240 - RNA, 19 nt, Artificial Sequence
  Description of Artificial Sequence: Synthetic oligonucleotide
uauguaacccaacaguaga

SEQ ID NO: 1379241 - RNA, 19 nt, Artificial Sequence
  Description of Artificial Sequence: Synthetic oligonucleotide
auuguaucucuacuggugg

SEQ ID NO: 1379242 - RNA, 19 nt, Artificial Sequence
  Description of Artificial Sequence: Synthetic oligonucleotide
caugcaguaaccaaggauc

SEQ ID NO: 1379243 - RNA, 19 nt, Artificial Sequence
  Description of Artificial Sequence: Synthetic oligonucleotide
uuuauguaacccaacagua

SEQ ID NO: 1379244 - RNA, 19 nt, Artificial Sequence
  Description of Artificial Sequence: Synthetic oligonucleotide
agucuggacagccaaaggg

SEQ ID NO: 1379245 - RNA, 19 nt, Artificial Sequence
  Description of Artificial Sequence: Synthetic oligonucleotide
aaagguaccccauugggau

SEQ ID NO: 1379246 - RNA, 19 nt, Artificial Sequence
  Description of Artificial Sequence: Synthetic oligonucleotide
uuauguaacccaacaguag

SEQ ID NO: 1379247 - RNA, 19 nt, Artificial Sequence
  Description of Artificial Sequence: Synthetic oligonucleotide
ucugauuguaucucuacug

SEQ ID NO: 1379248 - RNA, 19 nt, Artificial Sequence
  Description of Artificial Sequence: Synthetic oligonucleotide
uuccugauacuguuuaugg

SEQ ID NO: 1379249 - RNA, 19 nt, Artificial Sequence
  Description of Artificial Sequence: Synthetic oligonucleotide
auagucugcaagauaaacc

SEQ ID NO: 1379250 - RNA, 19 nt, Artificial Sequence
  Description of Artificial Sequence: Synthetic oligonucleotide
aaacucauauagcugggug

SEQ ID NO: 1379251 - RNA, 19 nt, Artificial Sequence
  Description of Artificial Sequence: Synthetic oligonucleotide
uaguggaaaauuccagugg

SEQ ID NO: 1379252 - RNA, 19 nt, Artificial Sequence
  Description of Artificial Sequence: Synthetic oligonucleotide
uauuuguggagaaagcuaa

SEQ ID NO: 1379253 - RNA, 19 nt, Artificial Sequence
  Description of Artificial Sequence: Synthetic oligonucleotide
gaccaaauccguaaaauag

SEQ ID NO: 1379254 - RNA, 19 nt, Artificial Sequence
  Description of Artificial Sequence: Synthetic oligonucleotide
aacuacuuccaggaggagc

SEQ ID NO: 1379255 - RNA, 19 nt, Artificial Sequence
  Description of Artificial Sequence: Synthetic oligonucleotide
cuuacaauacgaaccuugg

SEQ ID NO: 1379256 - RNA, 19 nt, Artificial Sequence
  Description of Artificial Sequence: Synthetic oligonucleotide
aaaauagaggaacuccuaa

SEQ ID NO: 1379257 - RNA, 19 nt, Artificial Sequence
  Description of Artificial Sequence: Synthetic oligonucleotide
aucauaagcuaaauuaugg

SEQ ID NO: 1379258 - RNA, 19 nt, Artificial Sequence
  Description of Artificial Sequence: Synthetic oligonucleotide
agcaacuacuuccaggagg

SEQ ID NO: 1379259 - RNA, 19 nt, Artificial Sequence
  Description of Artificial Sequence: Synthetic oligonucleotide
cuaucguuccauuauggcc

SEQ ID NO: 1379260 - RNA, 19 nt, Artificial Sequence
  Description of Artificial Sequence: Synthetic oligonucleotide
uacaaagcgagacaaacua

SEQ ID NO: 1379261 - RNA, 19 nt, Artificial Sequence
  Description of Artificial Sequence: Synthetic oligonucleotide
uccuaaguaaucaaguuuu

SEQ ID NO: 1379262 - RNA, 19 nt, Artificial Sequence
  Description of Artificial Sequence: Synthetic oligonucleotide
uauuacaugucuugcauuc

SEQ ID NO: 1379263 - RNA, 19 nt, Artificial Sequence
  Description of Artificial Sequence: Synthetic oligonucleotide
agauuugccgcuuuuauau

SEQ ID NO: 1379264 - RNA, 19 nt, Artificial Sequence
  Description of Artificial Sequence: Synthetic oligonucleotide
auccguaaaauagaggaac

SEQ ID NO: 1379265 - RNA, 19 nt, Artificial Sequence
  Description of Artificial Sequence: Synthetic oligonucleotide
uuuauuugaugauuucaga

SEQ ID NO: 1379266 - RNA, 19 nt, Artificial Sequence
  Description of Artificial Sequence: Synthetic oligonucleotide
agcagauugguuuuagcag

SEQ ID NO: 1379267 - RNA, 19 nt, Artificial Sequence
  Description of Artificial Sequence: Synthetic oligonucleotide
ucaacgucgcuucuucugg

SEQ ID NO: 1379268 - RNA, 19 nt, Artificial Sequence
  Description of Artificial Sequence: Synthetic oligonucleotide
ugcuuuaguggaaaauucc

SEQ ID NO: 1379269 - RNA, 19 nt, Artificial Sequence
  Description of Artificial Sequence: Synthetic oligonucleotide
ucuggauuuauguaaccca

SEQ ID NO: 1379270 - RNA, 19 nt, Artificial Sequence
  Description of Artificial Sequence: Synthetic oligonucleotide
aacucauauagcugggugu

SEQ ID NO: 1379271 - RNA, 19 nt, Artificial Sequence
  Description of Artificial Sequence: Synthetic oligonucleotide
cuuguaaacucuaucguuc

SEQ ID NO: 1379272 - RNA, 19 nt, Artificial Sequence
  Description of Artificial Sequence: Synthetic oligonucleotide
cuaaagguaccccauuggg

SEQ ID NO: 1379273 - RNA, 19 nt, Artificial Sequence
  Description of Artificial Sequence: Synthetic oligonucleotide
ugauuucagagaaaauaca

SEQ ID NO: 1379274 - RNA, 19 nt, Artificial Sequence
  Description of Artificial Sequence: Synthetic oligonucleotide
uuuaugguucccauuggga

SEQ ID NO: 1379275 - RNA, 19 nt, Artificial Sequence
  Description of Artificial Sequence: Synthetic oligonucleotide
aacugggcgaguucacagc

SEQ ID NO: 1379276 - RNA, 19 nt, Artificial Sequence
  Description of Artificial Sequence: Synthetic oligonucleotide
aaauccuccagagccaauc

SEQ ID NO: 1379277 - RNA, 19 nt, Artificial Sequence
  Description of Artificial Sequence: Synthetic oligonucleotide
ugauucugggagcucaucc

SEQ ID NO: 1379278 - RNA, 19 nt, Artificial Sequence
  Description of Artificial Sequence: Synthetic oligonucleotide
caauauagugaguccauag

SEQ ID NO: 1379279 - RNA, 19 nt, Artificial Sequence
  Description of Artificial Sequence: Synthetic oligonucleotide
uuaugguucccauugggac

SEQ ID NO: 1379280 - RNA, 19 nt, Artificial Sequence
  Description of Artificial Sequence: Synthetic oligonucleotide
guucugaaaauaaugggcc

SEQ ID NO: 1379281 - RNA, 19 nt, Artificial Sequence
  Description of Artificial Sequence: Synthetic oligonucleotide
auaagcuaaauuauggaca

SEQ ID NO: 1379282 - RNA, 19 nt, Artificial Sequence
  Description of Artificial Sequence: Synthetic oligonucleotide
uuccacuuuuauuacaugu

SEQ ID NO: 1379283 - RNA, 19 nt, Artificial Sequence
  Description of Artificial Sequence: Synthetic oligonucleotide
guccauaucauccagaacu

SEQ ID NO: 1379284 - RNA, 19 nt, Artificial Sequence
  Description of Artificial Sequence: Synthetic oligonucleotide
aguggaaaauuccaguggu

SEQ ID NO: 1379285 - RNA, 19 nt, Artificial Sequence
  Description of Artificial Sequence: Synthetic oligonucleotide
aacucuaucguuccauuau

SEQ ID NO: 1379286 - RNA, 19 nt, Artificial Sequence
  Description of Artificial Sequence: Synthetic oligonucleotide
ugcaaaucuacucccaguc

SEQ ID NO: 1379287 - RNA, 19 nt, Artificial Sequence
  Description of Artificial Sequence: Synthetic oligonucleotide
  modified_base (9)..(9): a, c, u, g, unknown or other
aacaggaancuuguauuuc

SEQ ID NO: 1379288 - RNA, 19 nt, Artificial Sequence
  Description of Artificial Sequence: Synthetic oligonucleotide
uuugugggcauccaaacuu

SEQ ID NO: 1379289 - RNA, 19 nt, Artificial Sequence
  Description of Artificial Sequence: Synthetic oligonucleotide
cuguuuaugguucccauug

SEQ ID NO: 1379290 - RNA, 19 nt, Artificial Sequence
  Description of Artificial Sequence: Synthetic oligonucleotide
aaauaaugggccauucucu

SEQ ID NO: 1379291 - RNA, 19 nt, Artificial Sequence
  Description of Artificial Sequence: Synthetic oligonucleotide
uuggaguacagacacggac

SEQ ID NO: 1379292 - RNA, 19 nt, Artificial Sequence
  Description of Artificial Sequence: Synthetic oligonucleotide
uaaagguaccccauuggga

SEQ ID NO: 1379293 - RNA, 19 nt, Artificial Sequence
  Description of Artificial Sequence: Synthetic oligonucleotide
uguuuaugguucccauugg

SEQ ID NO: 1379294 - RNA, 19 nt, Artificial Sequence
  Description of Artificial Sequence: Synthetic oligonucleotide
uuaccaugaaccuguagcu

SEQ ID NO: 1379295 - RNA, 19 nt, Artificial Sequence
  Description of Artificial Sequence: Synthetic oligonucleotide
  modified_base (12)..(12): a, c, u, g, unknown or other
uggaacaggaancuuguau

SEQ ID NO: 1379296 - RNA, 19 nt, Artificial Sequence
  Description of Artificial Sequence: Synthetic oligonucleotide
aaccaaggaucucaacguc

SEQ ID NO: 1379297 - RNA, 19 nt, Artificial Sequence
  Description of Artificial Sequence: Synthetic oligonucleotide
uggaguacagacacggaca

SEQ ID NO: 1379298 - RNA, 19 nt, Artificial Sequence
  Description of Artificial Sequence: Synthetic oligonucleotide
uucauguauauauuccagu

SEQ ID NO: 1379299 - RNA, 19 nt, Artificial Sequence
  Description of Artificial Sequence: Synthetic oligonucleotide
ucuaucguuccauuauggc

SEQ ID NO: 1379300 - RNA, 19 nt, Artificial Sequence
  Description of Artificial Sequence: Synthetic oligonucleotide
acauaccaagaacugggcg

SEQ ID NO: 1379301 - RNA, 19 nt, Artificial Sequence
  Description of Artificial Sequence: Synthetic oligonucleotide
caucauaagcuaaauuaug

SEQ ID NO: 1379302 - RNA, 19 nt, Artificial Sequence
  Description of Artificial Sequence: Synthetic oligonucleotide
aauaaugggccauucucuu

SEQ ID NO: 1379303 - RNA, 19 nt, Artificial Sequence
  Description of Artificial Sequence: Synthetic oligonucleotide
auaaaccugaucuggauuu

SEQ ID NO: 1379304 - RNA, 19 nt, Artificial Sequence
  Description of Artificial Sequence: Synthetic oligonucleotide
uuguaaacucuaucguucc

SEQ ID NO: 1379305 - RNA, 19 nt, Artificial Sequence
  Description of Artificial Sequence: Synthetic oligonucleotide
gauuguaucucuacuggug

SEQ ID NO: 1379306 - RNA, 19 nt, Artificial Sequence
  Description of Artificial Sequence: Synthetic oligonucleotide
uauaucaguccaaauccuc

SEQ ID NO: 1379307 - RNA, 19 nt, Artificial Sequence
  Description of Artificial Sequence: Synthetic oligonucleotide
agcuaaguauaucagucca

SEQ ID NO: 1379308 - RNA, 19 nt, Artificial Sequence
  Description of Artificial Sequence: Synthetic oligonucleotide
caagguuugugucccaagg

SEQ ID NO: 1379309 - RNA, 19 nt, Artificial Sequence
  Description of Artificial Sequence: Synthetic oligonucleotide
cuggauaggacuuacaaua

SEQ ID NO: 1379310 - RNA, 19 nt, Artificial Sequence
  Description of Artificial Sequence: Synthetic oligonucleotide
gauaggacuuacaauacga

SEQ ID NO: 1379311 - RNA, 19 nt, Artificial Sequence
  Description of Artificial Sequence: Synthetic oligonucleotide
uaguuauacacaucugccu

SEQ ID NO: 1379312 - RNA, 19 nt, Artificial Sequence
  Description of Artificial Sequence: Synthetic oligonucleotide
  modified_base (8)..(8): a, c, u, g, unknown or other
acaggaancuuguauuucu

SEQ ID NO: 1379313 - RNA, 19 nt, Artificial Sequence
  Description of Artificial Sequence: Synthetic oligonucleotide
ugggauuuuccugauacug

SEQ ID NO: 1379314 - RNA, 19 nt, Artificial Sequence
  Description of Artificial Sequence: Synthetic oligonucleotide
uaacguuuggugaauccac

SEQ ID NO: 1379315 - RNA, 19 nt, Artificial Sequence
  Description of Artificial Sequence: Synthetic oligonucleotide
caaauccguaaaauagagg

SEQ ID NO: 1379316 - RNA, 19 nt, Artificial Sequence
  Description of Artificial Sequence: Synthetic oligonucleotide
gagacaaacuaguaccaac

SEQ ID NO: 1379317 - RNA, 19 nt, Artificial Sequence
  Description of Artificial Sequence: Synthetic oligonucleotide
aggaucucaacgucgcuuc

SEQ ID NO: 1379318 - RNA, 19 nt, Artificial Sequence
  Description of Artificial Sequence: Synthetic oligonucleotide
aggcacaauauagugaguc

SEQ ID NO: 1379319 - RNA, 19 nt, Artificial Sequence
  Description of Artificial Sequence: Synthetic oligonucleotide
acaauacgaaccuuggaaa

SEQ ID NO: 1379320 - RNA, 19 nt, Artificial Sequence
  Description of Artificial Sequence: Synthetic oligonucleotide
uaggacuuacaauacgaac

SEQ ID NO: 1379321 - RNA, 19 nt, Artificial Sequence
  Description of Artificial Sequence: Synthetic oligonucleotide
uaugguucccauugggaca

SEQ ID NO: 1379322 - RNA, 19 nt, Artificial Sequence
  Description of Artificial Sequence: Synthetic oligonucleotide
ugggcauccaaacuuguaa

SEQ ID NO: 1379323 - RNA, 19 nt, Artificial Sequence
  Description of Artificial Sequence: Synthetic oligonucleotide
uaaaauagaggaacuccua

SEQ ID NO: 1379324 - RNA, 19 nt, Artificial Sequence
  Description of Artificial Sequence: Synthetic oligonucleotide
cucuaucguuccauuaugg

SEQ ID NO: 1379325 - RNA, 19 nt, Artificial Sequence
  Description of Artificial Sequence: Synthetic oligonucleotide
ucuauccacuuucuaauau

SEQ ID NO: 1379326 - RNA, 19 nt, Artificial Sequence
  Description of Artificial Sequence: Synthetic oligonucleotide
uucugauuguaucucuacu

SEQ ID NO: 1379327 - RNA, 19 nt, Artificial Sequence
  Description of Artificial Sequence: Synthetic oligonucleotide
cuuaucuggcaacucaaug

SEQ ID NO: 1379328 - RNA, 19 nt, Artificial Sequence
  Description of Artificial Sequence: Synthetic oligonucleotide
gguuuuagcagucuggaca

SEQ ID NO: 1379329 - RNA, 19 nt, Artificial Sequence
  Description of Artificial Sequence: Synthetic oligonucleotide
uuguaucucuacugguggg

SEQ ID NO: 1379330 - RNA, 19 nt, Artificial Sequence
  Description of Artificial Sequence: Synthetic oligonucleotide
uccguaaaauagaggaacu

SEQ ID NO: 1379331 - RNA, 19 nt, Artificial Sequence
  Description of Artificial Sequence: Synthetic oligonucleotide
auuugccgcuuuuauauca

SEQ ID NO: 1379332 - RNA, 19 nt, Artificial Sequence
  Description of Artificial Sequence: Synthetic oligonucleotide
acuuacaauacgaaccuug

SEQ ID NO: 1379333 - RNA, 19 nt, Artificial Sequence
  Description of Artificial Sequence: Synthetic oligonucleotide
uucugaaaauaaugggcca

SEQ ID NO: 1379334 - RNA, 19 nt, Artificial Sequence
  Description of Artificial Sequence: Synthetic oligonucleotide
uuacaauacgaaccuugga

SEQ ID NO: 1379335 - RNA, 19 nt, Artificial Sequence
  Description of Artificial Sequence: Synthetic oligonucleotide
acucauauagcuggguguc

SEQ ID NO: 1379336 - RNA, 19 nt, Artificial Sequence
  Description of Artificial Sequence: Synthetic oligonucleotide
aucucaacgucgcuucuuc

SEQ ID NO: 1379337 - RNA, 19 nt, Artificial Sequence
  Description of Artificial Sequence: Synthetic oligonucleotide
uuugggaacuuaucuggca

SEQ ID NO: 1379338 - RNA, 19 nt, Artificial Sequence
  Description of Artificial Sequence: Synthetic oligonucleotide
ugaagacugugcaugucac

SEQ ID NO: 1379339 - RNA, 19 nt, Artificial Sequence
  Description of Artificial Sequence: Synthetic oligonucleotide
ucagucagaccaaauccgu

SEQ ID NO: 1379340 - RNA, 19 nt, Artificial Sequence
  Description of Artificial Sequence: Synthetic oligonucleotide
ugugcuuuaguggaaaauu

SEQ ID NO: 1379341 - RNA, 19 nt, Artificial Sequence
  Description of Artificial Sequence: Synthetic oligonucleotide
uggauaggacuuacaauac

SEQ ID NO: 1379342 - RNA, 19 nt, Artificial Sequence
  Description of Artificial Sequence: Synthetic oligonucleotide
agaaagcuaaguauaucag

SEQ ID NO: 1379343 - RNA, 19 nt, Artificial Sequence
  Description of Artificial Sequence: Synthetic oligonucleotide
agcuaaauuauggacacau

SEQ ID NO: 1379344 - RNA, 19 nt, Artificial Sequence
  Description of Artificial Sequence: Synthetic oligonucleotide
auacgaaccuuggaaacuc

SEQ ID NO: 1379345 - RNA, 19 nt, Artificial Sequence
  Description of Artificial Sequence: Synthetic oligonucleotide
uugggaacuuaucuggcaa

SEQ ID NO: 1379346 - RNA, 19 nt, Artificial Sequence
  Description of Artificial Sequence: Synthetic oligonucleotide
ugggacaguaucuguagga

SEQ ID NO: 1379347 - RNA, 19 nt, Artificial Sequence
  Description of Artificial Sequence: Synthetic oligonucleotide
ccaacaguagauuugccgc

SEQ ID NO: 1379348 - RNA, 19 nt, Artificial Sequence
  Description of Artificial Sequence: Synthetic oligonucleotide
ucuggauaggacuuacaau

SEQ ID NO: 1379349 - RNA, 19 nt, Artificial Sequence
  Description of Artificial Sequence: Synthetic oligonucleotide
uuuguggagaaagcuaagu

SEQ ID NO: 1379350 - RNA, 19 nt, Artificial Sequence
  Description of Artificial Sequence: Synthetic oligonucleotide
acuaguaccaacaggcaca

SEQ ID NO: 1379351 - RNA, 19 nt, Artificial Sequence
  Description of Artificial Sequence: Synthetic oligonucleotide
auagcugggugucuguuga

SEQ ID NO: 1379352 - RNA, 19 nt, Artificial Sequence
  Description of Artificial Sequence: Synthetic oligonucleotide
gguuggaguacagacacgg

SEQ ID NO: 1379353 - RNA, 19 nt, Artificial Sequence
  Description of Artificial Sequence: Synthetic oligonucleotide
aucacugguagaaauauau

SEQ ID NO: 1379354 - RNA, 19 nt, Artificial Sequence
  Description of Artificial Sequence: Synthetic oligonucleotide
uguaaacucuaucguucca

SEQ ID NO: 1379355 - RNA, 19 nt, Artificial Sequence
  Description of Artificial Sequence: Synthetic oligonucleotide
uauagcugggugucuguug

SEQ ID NO: 1379356 - RNA, 19 nt, Artificial Sequence
  Description of Artificial Sequence: Synthetic oligonucleotide
uggagaaagcuaaguauau

SEQ ID NO: 1379357 - RNA, 19 nt, Artificial Sequence
  Description of Artificial Sequence: Synthetic oligonucleotide
gaaagcuaaguauaucagu

SEQ ID NO: 1379358 - RNA, 19 nt, Artificial Sequence
  Description of Artificial Sequence: Synthetic oligonucleotide
acucuaucguuccauuaug

SEQ ID NO: 1379359 - RNA, 19 nt, Artificial Sequence
  Description of Artificial Sequence: Synthetic oligonucleotide
aauggcugcuuucauugua

SEQ ID NO: 1379360 - RNA, 19 nt, Artificial Sequence
  Description of Artificial Sequence: Synthetic oligonucleotide
agucagaccaaauccguaa

SEQ ID NO: 1379361 - RNA, 19 nt, Artificial Sequence
  Description of Artificial Sequence: Synthetic oligonucleotide
ugccgcuuuuauaucacca

SEQ ID NO: 1379362 - RNA, 19 nt, Artificial Sequence
  Description of Artificial Sequence: Synthetic oligonucleotide
ucaagguuugugucccaag

SEQ ID NO: 1379363 - RNA, 19 nt, Artificial Sequence
  Description of Artificial Sequence: Synthetic oligonucleotide
  modified_base (14)..(14): a, c, u, g, unknown or other
aguggaacaggaancuugu

SEQ ID NO: 1379364 - RNA, 19 nt, Artificial Sequence
  Description of Artificial Sequence: Synthetic oligonucleotide
uuugccgcuuuuauaucac

SEQ ID NO: 1379365 - RNA, 19 nt, Artificial Sequence
  Description of Artificial Sequence: Synthetic oligonucleotide
ugguccuaaagguacccca

SEQ ID NO: 1379366 - RNA, 19 nt, Artificial Sequence
  Description of Artificial Sequence: Synthetic oligonucleotide
cacgaaagcacugauucug

SEQ ID NO: 1379367 - RNA, 19 nt, Artificial Sequence
  Description of Artificial Sequence: Synthetic oligonucleotide
uggauuuauguaacccaac

SEQ ID NO: 1379368 - RNA, 19 nt, Artificial Sequence
  Description of Artificial Sequence: Synthetic oligonucleotide
agacaaacuaguaccaaca

SEQ ID NO: 1379369 - RNA, 19 nt, Artificial Sequence
  Description of Artificial Sequence: Synthetic oligonucleotide
aggaaaguccauagucugc

SEQ ID NO: 1379370 - RNA, 19 nt, Artificial Sequence
  Description of Artificial Sequence: Synthetic oligonucleotide
auauaucuguacugagcug

SEQ ID NO: 1379371 - RNA, 19 nt, Artificial Sequence
  Description of Artificial Sequence: Synthetic oligonucleotide
ucauauagcugggugucug

SEQ ID NO: 1379372 - RNA, 19 nt, Artificial Sequence
  Description of Artificial Sequence: Synthetic oligonucleotide
gaaccuuggaaacucauau

SEQ ID NO: 1379373 - RNA, 19 nt, Artificial Sequence
  Description of Artificial Sequence: Synthetic oligonucleotide
ggauaggacuuacaauacg

SEQ ID NO: 1379374 - RNA, 19 nt, Artificial Sequence
  Description of Artificial Sequence: Synthetic oligonucleotide
ucugaaaauaaugggccau

SEQ ID NO: 1379375 - RNA, 19 nt, Artificial Sequence
  Description of Artificial Sequence: Synthetic oligonucleotide
ucacugguagaaauauauc

SEQ ID NO: 1379376 - RNA, 19 nt, Artificial Sequence
  Description of Artificial Sequence: Synthetic oligonucleotide
agaccaaauccguaaaaua

SEQ ID NO: 1379377 - RNA, 19 nt, Artificial Sequence
  Description of Artificial Sequence: Synthetic oligonucleotide
auagaggaacuccuaagua

SEQ ID NO: 1379378 - RNA, 19 nt, Artificial Sequence
  Description of Artificial Sequence: Synthetic oligonucleotide
ucagaccaaauccguaaaa

SEQ ID NO: 1379379 - RNA, 19 nt, Artificial Sequence
  Description of Artificial Sequence: Synthetic oligonucleotide
auaccaagaacugggcgag

SEQ ID NO: 1379380 - RNA, 19 nt, Artificial Sequence
  Description of Artificial Sequence: Synthetic oligonucleotide
auaaugggccauucucuug

SEQ ID NO: 1379381 - RNA, 19 nt, Artificial Sequence
  Description of Artificial Sequence: Synthetic oligonucleotide
ugguagaaauauaucugua

SEQ ID NO: 1379382 - RNA, 19 nt, Artificial Sequence
  Description of Artificial Sequence: Synthetic oligonucleotide
uguaucucuacugguggga

SEQ ID NO: 1379383 - RNA, 19 nt, Artificial Sequence
  Description of Artificial Sequence: Synthetic oligonucleotide
uaaguauaucaguccaaau

SEQ ID NO: 1379384 - RNA, 19 nt, Artificial Sequence
  Description of Artificial Sequence: Synthetic oligonucleotide
ccaaauccguaaaauagag

SEQ ID NO: 1379385 - RNA, 19 nt, Artificial Sequence
  Description of Artificial Sequence: Synthetic oligonucleotide
cagcagauugguuuuagca

SEQ ID NO: 1379386 - RNA, 19 nt, Artificial Sequence
  Description of Artificial Sequence: Synthetic oligonucleotide
ggauuuauguaacccaaca

SEQ ID NO: 1379387 - RNA, 19 nt, Artificial Sequence
  Description of Artificial Sequence: Synthetic oligonucleotide
uccugauacuguuuauggu

SEQ ID NO: 1379388 - RNA, 19 nt, Artificial Sequence
  Description of Artificial Sequence: Synthetic oligonucleotide
cucaacgucgcuucuucug

SEQ ID NO: 1379389 - RNA, 19 nt, Artificial Sequence
  Description of Artificial Sequence: Synthetic oligonucleotide
cacugguagaaauauaucu

SEQ ID NO: 1379390 - RNA, 19 nt, Artificial Sequence
  Description of Artificial Sequence: Synthetic oligonucleotide
ugauagucuggcuuuucau

SEQ ID NO: 1379391 - RNA, 19 nt, Artificial Sequence
  Description of Artificial Sequence: Synthetic oligonucleotide
accaaggaucucaacgucg

SEQ ID NO: 1379392 - RNA, 19 nt, Artificial Sequence
  Description of Artificial Sequence: Synthetic oligonucleotide
cuuugaagucagucagacc

SEQ ID NO: 1379393 - RNA, 19 nt, Artificial Sequence
  Description of Artificial Sequence: Synthetic oligonucleotide
cuuuucaucauaagcuaaa

SEQ ID NO: 1379394 - RNA, 19 nt, Artificial Sequence
  Description of Artificial Sequence: Synthetic oligonucleotide
acuccuaaguaaucaaguu

SEQ ID NO: 1379395 - RNA, 19 nt, Artificial Sequence
  Description of Artificial Sequence: Synthetic oligonucleotide
cacucugugcuuuagugga

SEQ ID NO: 1379396 - RNA, 19 nt, Artificial Sequence
  Description of Artificial Sequence: Synthetic oligonucleotide
uccucaagguuuguguccc

SEQ ID NO: 1379397 - RNA, 19 nt, Artificial Sequence
  Description of Artificial Sequence: Synthetic oligonucleotide
gacuucccaagucugugac

SEQ ID NO: 1379398 - RNA, 19 nt, Artificial Sequence
  Description of Artificial Sequence: Synthetic oligonucleotide
accaaauccguaaaauaga

SEQ ID NO: 1379399 - RNA, 19 nt, Artificial Sequence
  Description of Artificial Sequence: Synthetic oligonucleotide
cauuguaacguuuggugaa

SEQ ID NO: 1379400 - RNA, 19 nt, Artificial Sequence
  Description of Artificial Sequence: Synthetic oligonucleotide
gaaaauaaugggccauucu

SEQ ID NO: 1379401 - RNA, 19 nt, Artificial Sequence
  Description of Artificial Sequence: Synthetic oligonucleotide
gucgacuuuugaaaagugc

SEQ ID NO: 1379402 - RNA, 19 nt, Artificial Sequence
  Description of Artificial Sequence: Synthetic oligonucleotide
aguugcaggacagucgacu

SEQ ID NO: 1379403 - RNA, 19 nt, Artificial Sequence
  Description of Artificial Sequence: Synthetic oligonucleotide
aauccguaaaauagaggaa

SEQ ID NO: 1379404 - RNA, 19 nt, Artificial Sequence
  Description of Artificial Sequence: Synthetic oligonucleotide
uccuuugaagucagucaga

SEQ ID NO: 1379405 - RNA, 19 nt, Artificial Sequence
  Description of Artificial Sequence: Synthetic oligonucleotide
ucugcaagauaaaccugau

SEQ ID NO: 1379406 - RNA, 19 nt, Artificial Sequence
  Description of Artificial Sequence: Synthetic oligonucleotide
ugggcgaguucacagcaac

SEQ ID NO: 1379407 - RNA, 19 nt, Artificial Sequence
  Description of Artificial Sequence: Synthetic oligonucleotide
  modified_base (7)..(7): a, c, u, g, unknown or other
caggaancuuguauuucuc

SEQ ID NO: 1379408 - RNA, 19 nt, Artificial Sequence
  Description of Artificial Sequence: Synthetic oligonucleotide
auuauggcccuuccuggga

SEQ ID NO: 1379409 - RNA, 19 nt, Artificial Sequence
  Description of Artificial Sequence: Synthetic oligonucleotide
acugggcgaguucacagca

SEQ ID NO: 1379410 - RNA, 19 nt, Artificial Sequence
  Description of Artificial Sequence: Synthetic oligonucleotide
acaaagcgagacaaacuag

SEQ ID NO: 1379411 - RNA, 19 nt, Artificial Sequence
  Description of Artificial Sequence: Synthetic oligonucleotide
gucugcaagauaaaccuga

SEQ ID NO: 1379412 - RNA, 19 nt, Artificial Sequence
  Description of Artificial Sequence: Synthetic oligonucleotide
ugggaacuuaucuggcaac

SEQ ID NO: 1379413 - RNA, 19 nt, Artificial Sequence
  Description of Artificial Sequence: Synthetic oligonucleotide
uccagugguccuaaaggua

SEQ ID NO: 1379414 - RNA, 19 nt, Artificial Sequence
  Description of Artificial Sequence: Synthetic oligonucleotide
cccacgaaagcacugauuc

SEQ ID NO: 1379415 - RNA, 19 nt, Artificial Sequence
  Description of Artificial Sequence: Synthetic oligonucleotide
uacuguuuaugguucccau

SEQ ID NO: 1379416 - RNA, 19 nt, Artificial Sequence
  Description of Artificial Sequence: Synthetic oligonucleotide
aacguuuggugaauccacu

SEQ ID NO: 1379417 - RNA, 19 nt, Artificial Sequence
  Description of Artificial Sequence: Synthetic oligonucleotide
ugcaugucacucugaaaau

SEQ ID NO: 1379418 - RNA, 19 nt, Artificial Sequence
  Description of Artificial Sequence: Synthetic oligonucleotide
agguaccccauugggauuc

SEQ ID NO: 1379419 - RNA, 19 nt, Artificial Sequence
  Description of Artificial Sequence: Synthetic oligonucleotide
uacaugucuugcauucuuu

SEQ ID NO: 1379420 - RNA, 19 nt, Artificial Sequence
  Description of Artificial Sequence: Synthetic oligonucleotide
  modified_base (10)..(10): a, c, u, g, unknown or other
gaacaggaancuuguauuu

SEQ ID NO: 1379421 - RNA, 19 nt, Artificial Sequence
  Description of Artificial Sequence: Synthetic oligonucleotide
aaccugaucuggauuuaug

SEQ ID NO: 1379422 - RNA, 19 nt, Artificial Sequence
  Description of Artificial Sequence: Synthetic oligonucleotide
cucauacauauuucuucuc

SEQ ID NO: 1379423 - RNA, 19 nt, Artificial Sequence
  Description of Artificial Sequence: Synthetic oligonucleotide
uacgaaccuuggaaacuca

SEQ ID NO: 1379424 - RNA, 19 nt, Artificial Sequence
  Description of Artificial Sequence: Synthetic oligonucleotide
caugucacucugaaaaucu

SEQ ID NO: 1379425 - RNA, 19 nt, Artificial Sequence
  Description of Artificial Sequence: Synthetic oligonucleotide
cauagccagcgcagcaugc

SEQ ID NO: 1379426 - RNA, 19 nt, Artificial Sequence
  Description of Artificial Sequence: Synthetic oligonucleotide
uuauaucaccaugaacaua

SEQ ID NO: 1379427 - RNA, 19 nt, Artificial Sequence
  Description of Artificial Sequence: Synthetic oligonucleotide
caaagcgagacaaacuagu

SEQ ID NO: 1379428 - RNA, 19 nt, Artificial Sequence
  Description of Artificial Sequence: Synthetic oligonucleotide
ugguuuuagcagucuggac

SEQ ID NO: 1379429 - RNA, 19 nt, Artificial Sequence
  Description of Artificial Sequence: Synthetic oligonucleotide
ugugcaugucacucugaaa

SEQ ID NO: 1379430 - RNA, 19 nt, Artificial Sequence
  Description of Artificial Sequence: Synthetic oligonucleotide
acuuuugaaaagugcccuu

SEQ ID NO: 1379431 - RNA, 19 nt, Artificial Sequence
  Description of Artificial Sequence: Synthetic oligonucleotide
gauaaaccugaucuggauu

SEQ ID NO: 1379432 - RNA, 19 nt, Artificial Sequence
  Description of Artificial Sequence: Synthetic oligonucleotide
acuguuuaugguucccauu

SEQ ID NO: 1379433 - RNA, 19 nt, Artificial Sequence
  Description of Artificial Sequence: Synthetic oligonucleotide
agacugugcaugucacucu

SEQ ID NO: 1379434 - RNA, 19 nt, Artificial Sequence
  Description of Artificial Sequence: Synthetic oligonucleotide
aacgucgcuucuucuggaa

SEQ ID NO: 1379435 - RNA, 19 nt, Artificial Sequence
  Description of Artificial Sequence: Synthetic oligonucleotide
ccaguauccacuugguuuc

SEQ ID NO: 1379436 - RNA, 19 nt, Artificial Sequence
  Description of Artificial Sequence: Synthetic oligonucleotide
guggagaaagcuaaguaua

SEQ ID NO: 1379437 - RNA, 19 nt, Artificial Sequence
  Description of Artificial Sequence: Synthetic oligonucleotide
ggaguacagacacggacac

SEQ ID NO: 1379438 - RNA, 19 nt, Artificial Sequence
  Description of Artificial Sequence: Synthetic oligonucleotide
uugccgcuuuuauaucacc

SEQ ID NO: 1379439 - RNA, 19 nt, Artificial Sequence
  Description of Artificial Sequence: Synthetic oligonucleotide
uaucuguaggaaaguccau

SEQ ID NO: 1379440 - RNA, 19 nt, Artificial Sequence
  Description of Artificial Sequence: Synthetic oligonucleotide
cagcgcagcaugcaguaac

SEQ ID NO: 1379441 - RNA, 19 nt, Artificial Sequence
  Description of Artificial Sequence: Synthetic oligonucleotide
acgucgcuucuucuggaag

SEQ ID NO: 1379442 - RNA, 19 nt, Artificial Sequence
  Description of Artificial Sequence: Synthetic oligonucleotide
auuacaugucuugcauucu

SEQ ID NO: 1379443 - RNA, 19 nt, Artificial Sequence
  Description of Artificial Sequence: Synthetic oligonucleotide
aaaccugaucuggauuuau

SEQ ID NO: 1379444 - RNA, 19 nt, Artificial Sequence
  Description of Artificial Sequence: Synthetic oligonucleotide
aguauccacuugguuuccg

SEQ ID NO: 1379445 - RNA, 19 nt, Artificial Sequence
  Description of Artificial Sequence: Synthetic oligonucleotide
gugcuuuaguggaaaauuc

SEQ ID NO: 1379446 - RNA, 19 nt, Artificial Sequence
  Description of Artificial Sequence: Synthetic oligonucleotide
cagucuggacagccaaagg

SEQ ID NO: 1379447 - RNA, 19 nt, Artificial Sequence
  Description of Artificial Sequence: Synthetic oligonucleotide
gcugcaaaucuacucccag

SEQ ID NO: 1379448 - RNA, 19 nt, Artificial Sequence
  Description of Artificial Sequence: Synthetic oligonucleotide
ggacagucgacuuuugaaa

SEQ ID NO: 1379449 - RNA, 19 nt, Artificial Sequence
  Description of Artificial Sequence: Synthetic oligonucleotide
auaggacuuacaauacgaa

SEQ ID NO: 1379450 - RNA, 19 nt, Artificial Sequence
  Description of Artificial Sequence: Synthetic oligonucleotide
aggacuucccaagucugug

SEQ ID NO: 1379451 - RNA, 19 nt, Artificial Sequence
  Description of Artificial Sequence: Synthetic oligonucleotide
cugauagucuggcuuuuca

SEQ ID NO: 1379452 - RNA, 19 nt, Artificial Sequence
  Description of Artificial Sequence: Synthetic oligonucleotide
agcuggauaccuuggcuuu

SEQ ID NO: 1379453 - RNA, 19 nt, Artificial Sequence
  Description of Artificial Sequence: Synthetic oligonucleotide
aaguugcaggacagucgac

SEQ ID NO: 1379454 - RNA, 19 nt, Artificial Sequence
  Description of Artificial Sequence: Synthetic oligonucleotide
caacucaauggcugcuuuc

SEQ ID NO: 1379455 - RNA, 19 nt, Artificial Sequence
  Description of Artificial Sequence: Synthetic oligonucleotide
aguagauuugccgcuuuua

SEQ ID NO: 1379456 - RNA, 19 nt, Artificial Sequence
  Description of Artificial Sequence: Synthetic oligonucleotide
acagacacggacacucugu

SEQ ID NO: 1379457 - RNA, 19 nt, Artificial Sequence
  Description of Artificial Sequence: Synthetic oligonucleotide
ucucaacgucgcuucuucu

SEQ ID NO: 1379458 - RNA, 19 nt, Artificial Sequence
  Description of Artificial Sequence: Synthetic oligonucleotide
aagguaccccauugggauu

SEQ ID NO: 1379459 - RNA, 19 nt, Artificial Sequence
  Description of Artificial Sequence: Synthetic oligonucleotide
gcuuuaguggaaaauucca

SEQ ID NO: 1379460 - RNA, 19 nt, Artificial Sequence
  Description of Artificial Sequence: Synthetic oligonucleotide
augcaguaaccaaggaucu

SEQ ID NO: 1379461 - RNA, 19 nt, Artificial Sequence
  Description of Artificial Sequence: Synthetic oligonucleotide
cugcaagauaaaccugauc

SEQ ID NO: 1379462 - RNA, 19 nt, Artificial Sequence
  Description of Artificial Sequence: Synthetic oligonucleotide
auaccuuggcuuucugauu

SEQ ID NO: 1379463 - RNA, 19 nt, Artificial Sequence
  Description of Artificial Sequence: Synthetic oligonucleotide
ggacuuacaauacgaaccu

SEQ ID NO: 1379464 - RNA, 19 nt, Artificial Sequence
  Description of Artificial Sequence: Synthetic oligonucleotide
  modified_base (11)..(11): a, c, u, g, unknown or other
ggaacaggaancuuguauu

SEQ ID NO: 1379465 - RNA, 19 nt, Artificial Sequence
  Description of Artificial Sequence: Synthetic oligonucleotide
ggacacauaccaagaacug

SEQ ID NO: 1379466 - RNA, 19 nt, Artificial Sequence
  Description of Artificial Sequence: Synthetic oligonucleotide
agucugcaagauaaaccug

SEQ ID NO: 1379467 - RNA, 19 nt, Artificial Sequence
  Description of Artificial Sequence: Synthetic oligonucleotide
acguuuggugaauccacuu

SEQ ID NO: 1379468 - RNA, 19 nt, Artificial Sequence
  Description of Artificial Sequence: Synthetic oligonucleotide
agauugguuuuagcagucu

SEQ ID NO: 1379469 - RNA, 19 nt, Artificial Sequence
  Description of Artificial Sequence: Synthetic oligonucleotide
auguaacccaacaguagau

SEQ ID NO: 1379470 - RNA, 19 nt, Artificial Sequence
  Description of Artificial Sequence: Synthetic oligonucleotide
ucugauagucuggcuuuuc

SEQ ID NO: 1379471 - RNA, 19 nt, Artificial Sequence
  Description of Artificial Sequence: Synthetic oligonucleotide
gucagaccaaauccguaaa

SEQ ID NO: 1379472 - RNA, 19 nt, Artificial Sequence
  Description of Artificial Sequence: Synthetic oligonucleotide
uuguaacguuuggugaauc

SEQ ID NO: 1379473 - RNA, 19 nt, Artificial Sequence
  Description of Artificial Sequence: Synthetic oligonucleotide
uaaaccugaucuggauuua

SEQ ID NO: 1379474 - RNA, 19 nt, Artificial Sequence
  Description of Artificial Sequence: Synthetic oligonucleotide
gcagauugguuuuagcagu

SEQ ID NO: 1379475 - RNA, 19 nt, Artificial Sequence
  Description of Artificial Sequence: Synthetic oligonucleotide
ggcuuuucaucauaagcua

SEQ ID NO: 1379476 - RNA, 19 nt, Artificial Sequence
  Description of Artificial Sequence: Synthetic oligonucleotide
caaaucuacucccagucuu

SEQ ID NO: 1379477 - RNA, 19 nt, Artificial Sequence
  Description of Artificial Sequence: Synthetic oligonucleotide
gaagacugugcaugucacu

SEQ ID NO: 1379478 - RNA, 19 nt, Artificial Sequence
  Description of Artificial Sequence: Synthetic oligonucleotide
uaccaugaaccuguagcuu

SEQ ID NO: 1379479 - RNA, 19 nt, Artificial Sequence
  Description of Artificial Sequence: Synthetic oligonucleotide
ccauaguuauacacaucug

SEQ ID NO: 1379480 - RNA, 19 nt, Artificial Sequence
  Description of Artificial Sequence: Synthetic oligonucleotide
gaaacucauauagcugggu

SEQ ID NO: 1379481 - RNA, 19 nt, Artificial Sequence
  Description of Artificial Sequence: Synthetic oligonucleotide
guauaucaguccaaauccu

SEQ ID NO: 1379482 - RNA, 19 nt, Artificial Sequence
  Description of Artificial Sequence: Synthetic oligonucleotide
cuccuaaguaaucaaguuu

SEQ ID NO: 1379483 - RNA, 19 nt, Artificial Sequence
  Description of Artificial Sequence: Synthetic oligonucleotide
cugugcaugucacucugaa

SEQ ID NO: 1379484 - RNA, 19 nt, Artificial Sequence
  Description of Artificial Sequence: Synthetic oligonucleotide
ggagaaagcuaaguauauc

SEQ ID NO: 1379485 - RNA, 19 nt, Artificial Sequence
  Description of Artificial Sequence: Synthetic oligonucleotide
gcgaguucacagcaacuac

SEQ ID NO: 1379486 - RNA, 19 nt, Artificial Sequence
  Description of Artificial Sequence: Synthetic oligonucleotide
accaagaacugggcgaguu

SEQ ID NO: 1379487 - RNA, 19 nt, Artificial Sequence
  Description of Artificial Sequence: Synthetic oligonucleotide
ccgcuuuuauaucaccaug

SEQ ID NO: 1379488 - RNA, 19 nt, Artificial Sequence
  Description of Artificial Sequence: Synthetic oligonucleotide
auauagcugggugucuguu

SEQ ID NO: 1379489 - RNA, 19 nt, Artificial Sequence
  Description of Artificial Sequence: Synthetic oligonucleotide
guauccacuugguuuccgu

SEQ ID NO: 1379490 - RNA, 19 nt, Artificial Sequence
  Description of Artificial Sequence: Synthetic oligonucleotide
cuaguaccaacaggcacaa

SEQ ID NO: 1379491 - RNA, 19 nt, Artificial Sequence
  Description of Artificial Sequence: Synthetic oligonucleotide
agcccacgaaagcacugau

SEQ ID NO: 1379492 - RNA, 19 nt, Artificial Sequence
  Description of Artificial Sequence: Synthetic oligonucleotide
cacguugcacuugucccuc

SEQ ID NO: 1379493 - RNA, 19 nt, Artificial Sequence
  Description of Artificial Sequence: Synthetic oligonucleotide
uccugggauuuuccugaua

SEQ ID NO: 1379494 - RNA, 19 nt, Artificial Sequence
  Description of Artificial Sequence: Synthetic oligonucleotide
ggaucuggauaggacuuac

SEQ ID NO: 1379495 - RNA, 19 nt, Artificial Sequence
  Description of Artificial Sequence: Synthetic oligonucleotide
caucacugguagaaauaua

SEQ ID NO: 1379496 - RNA, 19 nt, Artificial Sequence
  Description of Artificial Sequence: Synthetic oligonucleotide
caguauccacuugguuucc

SEQ ID NO: 1379497 - RNA, 19 nt, Artificial Sequence
  Description of Artificial Sequence: Synthetic oligonucleotide
cugcaaaucuacucccagu

SEQ ID NO: 1379498 - RNA, 19 nt, Artificial Sequence
  Description of Artificial Sequence: Synthetic oligonucleotide
agcugcaggccaaagucuu

SEQ ID NO: 1379499 - RNA, 19 nt, Artificial Sequence
  Description of Artificial Sequence: Synthetic oligonucleotide
ggaaagcugcaggccaaag

SEQ ID NO: 1379500 - RNA, 19 nt, Artificial Sequence
  Description of Artificial Sequence: Synthetic oligonucleotide
acgaaccuuggaaacucau

SEQ ID NO: 1379501 - RNA, 19 nt, Artificial Sequence
  Description of Artificial Sequence: Synthetic oligonucleotide
cugauucugggagcucauc

SEQ ID NO: 1379502 - RNA, 19 nt, Artificial Sequence
  Description of Artificial Sequence: Synthetic oligonucleotide
caacgucgcuucuucugga

SEQ ID NO: 1379503 - RNA, 19 nt, Artificial Sequence
  Description of Artificial Sequence: Synthetic oligonucleotide
ccguaaaauagaggaacuc

SEQ ID NO: 1379504 - RNA, 19 nt, Artificial Sequence
  Description of Artificial Sequence: Synthetic oligonucleotide
guugcaggacagucgacuu

SEQ ID NO: 1379505 - RNA, 19 nt, Artificial Sequence
  Description of Artificial Sequence: Synthetic oligonucleotide
gggacaguaucuguaggaa

SEQ ID NO: 1379506 - RNA, 19 nt, Artificial Sequence
  Description of Artificial Sequence: Synthetic oligonucleotide
ggguccucaagguuugugu

SEQ ID NO: 1379507 - RNA, 19 nt, Artificial Sequence
  Description of Artificial Sequence: Synthetic oligonucleotide
ccugaucuggauuuaugua

SEQ ID NO: 1379508 - RNA, 19 nt, Artificial Sequence
  Description of Artificial Sequence: Synthetic oligonucleotide
gcuaaguauaucaguccaa

SEQ ID NO: 1379509 - RNA, 19 nt, Artificial Sequence
  Description of Artificial Sequence: Synthetic oligonucleotide
acugauucugggagcucau

SEQ ID NO: 1379510 - RNA, 19 nt, Artificial Sequence
  Description of Artificial Sequence: Synthetic oligonucleotide
ggcgaguucacagcaacua

SEQ ID NO: 1379511 - RNA, 19 nt, Artificial Sequence
  Description of Artificial Sequence: Synthetic oligonucleotide
caugcuccuuucuccacgu

SEQ ID NO: 1379512 - RNA, 19 nt, Artificial Sequence
  Description of Artificial Sequence: Synthetic oligonucleotide
cccaguauccacuugguuu

SEQ ID NO: 1379513 - RNA, 19 nt, Artificial Sequence
  Description of Artificial Sequence: Synthetic oligonucleotide
cucaagguuugugucccaa

SEQ ID NO: 1379514 - RNA, 19 nt, Artificial Sequence
  Description of Artificial Sequence: Synthetic oligonucleotide
cauccagcagauugguuuu

SEQ ID NO: 1379515 - RNA, 19 nt, Artificial Sequence
  Description of Artificial Sequence: Synthetic oligonucleotide
acguugcacuugucccucu

SEQ ID NO: 1379516 - RNA, 19 nt, Artificial Sequence
  Description of Artificial Sequence: Synthetic oligonucleotide
acggacacucugugcuuua

SEQ ID NO: 1379517 - RNA, 19 nt, Artificial Sequence
  Description of Artificial Sequence: Synthetic oligonucleotide
ggagcccacgaaagcacug

SEQ ID NO: 1379518 - RNA, 19 nt, Artificial Sequence
  Description of Artificial Sequence: Synthetic oligonucleotide
ccguccauaucauccagaa

SEQ ID NO: 1379519 - RNA, 19 nt, Artificial Sequence
  Description of Artificial Sequence: Synthetic oligonucleotide
cuguagcuucuuccuuuga

SEQ ID NO: 1379520 - RNA, 19 nt, Artificial Sequence
  Description of Artificial Sequence: Synthetic oligonucleotide
guaucucuacuggugggau

SEQ ID NO: 1379521 - RNA, 19 nt, Artificial Sequence
  Description of Artificial Sequence: Synthetic oligonucleotide
gggaacuuaucuggcaacu

SEQ ID NO: 1379522 - RNA, 19 nt, Artificial Sequence
  Description of Artificial Sequence: Synthetic oligonucleotide
gaucucaacgucgcuucuu

SEQ ID NO: 1379523 - RNA, 19 nt, Artificial Sequence
  Description of Artificial Sequence: Synthetic oligonucleotide
cugugcuuuaguggaaaau

SEQ ID NO: 1379524 - RNA, 19 nt, Artificial Sequence
  Description of Artificial Sequence: Synthetic oligonucleotide
cugggcgaguucacagcaa

SEQ ID NO: 1379525 - RNA, 19 nt, Artificial Sequence
  Description of Artificial Sequence: Synthetic oligonucleotide
gaguacagacacggacacu

SEQ ID NO: 1379526 - RNA, 19 nt, Artificial Sequence
  Description of Artificial Sequence: Synthetic oligonucleotide
gacuuacaauacgaaccuu

SEQ ID NO: 1379527 - RNA, 19 nt, Artificial Sequence
  Description of Artificial Sequence: Synthetic oligonucleotide
cuacucccagucuuuccau

SEQ ID NO: 1379528 - RNA, 19 nt, Artificial Sequence
  Description of Artificial Sequence: Synthetic oligonucleotide
caaggaucucaacgucgcu

SEQ ID NO: 1379529 - RNA, 19 nt, Artificial Sequence
  Description of Artificial Sequence: Synthetic oligonucleotide
ccaaacuuguaaacucuau

SEQ ID NO: 1379530 - RNA, 19 nt, Artificial Sequence
  Description of Artificial Sequence: Synthetic oligonucleotide
cguccauaucauccagaac

SEQ ID NO: 1379531 - RNA, 19 nt, Artificial Sequence
  Description of Artificial Sequence: Synthetic oligonucleotide
cucauauagcugggugucu

SEQ ID NO: 1379532 - RNA, 19 nt, Artificial Sequence
  Description of Artificial Sequence: Synthetic oligonucleotide
cacccacaucacugguaga

SEQ ID NO: 1379533 - RNA, 19 nt, Artificial Sequence
  Description of Artificial Sequence: Synthetic oligonucleotide
ccacaucacugguagaaau

SEQ ID NO: 1379534 - RNA, 19 nt, Artificial Sequence
  Description of Artificial Sequence: Synthetic oligonucleotide
cauugggauucagaauuuu

SEQ ID NO: 1379535 - RNA, 19 nt, Artificial Sequence
  Description of Artificial Sequence: Synthetic oligonucleotide
cagcacccugauuccaagu

SEQ ID NO: 1379536 - RNA, 19 nt, Artificial Sequence
  Description of Artificial Sequence: Synthetic oligonucleotide
cgaaccuuggaaacucaua

SEQ ID NO: 1379537 - RNA, 19 nt, Artificial Sequence
  Description of Artificial Sequence: Synthetic oligonucleotide
ccaugaaccuguagcuucu

SEQ ID NO: 1379538 - RNA, 19 nt, Artificial Sequence
  Description of Artificial Sequence: Synthetic oligonucleotide
  modified_base (16)..(16): a, c, u, g, unknown or other
ggaguggaacaggaancuu

SEQ ID NO: 1379539 - RNA, 19 nt, Artificial Sequence
  Description of Artificial Sequence: Synthetic oligonucleotide
ggaucucaacgucgcuucu

SEQ ID NO: 1379540 - RNA, 19 nt, Artificial Sequence
  Description of Artificial Sequence: Synthetic oligonucleotide
gcaggacagucgacuuuug

SEQ ID NO: 1379541 - RNA, 19 nt, Artificial Sequence
  Description of Artificial Sequence: Synthetic oligonucleotide
caguagauuugccgcuuuu

SEQ ID NO: 1379542 - RNA, 19 nt, Artificial Sequence
  Description of Artificial Sequence: Synthetic oligonucleotide
gggaucuggauaggacuua

SEQ ID NO: 1379543 - RNA, 19 nt, Artificial Sequence
  Description of Artificial Sequence: Synthetic oligonucleotide
uggcccuuccugggauuuu

SEQ ID NO: 1379544 - RNA, 19 nt, Artificial Sequence
  Description of Artificial Sequence: Synthetic oligonucleotide
ccauugggacaguaucugu

SEQ ID NO: 1379545 - RNA, 19 nt, Artificial Sequence
  Description of Artificial Sequence: Synthetic oligonucleotide
ugguucccauugggacagu

SEQ ID NO: 1379546 - RNA, 19 nt, Artificial Sequence
  Description of Artificial Sequence: Synthetic oligonucleotide
ccacgaaagcacugauucu

SEQ ID NO: 1379547 - RNA, 19 nt, Artificial Sequence
  Description of Artificial Sequence: Synthetic oligonucleotide
gguaccccauugggauuca

SEQ ID NO: 1379548 - RNA, 19 nt, Artificial Sequence
  Description of Artificial Sequence: Synthetic oligonucleotide
cacggacacucugugcuuu

SEQ ID NO: 1379549 - RNA, 19 nt, Artificial Sequence
  Description of Artificial Sequence: Synthetic oligonucleotide
ccauugggauucagaauuu

SEQ ID NO: 1379550 - RNA, 19 nt, Artificial Sequence
  Description of Artificial Sequence: Synthetic oligonucleotide
ccucaagguuuguguccca

SEQ ID NO: 1379551 - RNA, 19 nt, Artificial Sequence
  Description of Artificial Sequence: Synthetic oligonucleotide
caugaaccuguagcuucuu

SEQ ID NO: 1379552 - RNA, 19 nt, Artificial Sequence
  Description of Artificial Sequence: Synthetic oligonucleotide
ccaguauguccagcacccu

SEQ ID NO: 1379553 - RNA, 19 nt, Artificial Sequence
  Description of Artificial Sequence: Synthetic oligonucleotide
ccacuugguuuccguccau

SEQ ID NO: 1379554 - RNA, 19 nt, Artificial Sequence
  Description of Artificial Sequence: Synthetic oligonucleotide
auugcuauugcucaggagc

SEQ ID NO: 1379555 - RNA, 19 nt, Artificial Sequence
  Description of Artificial Sequence: Synthetic oligonucleotide
aagaauuacacacugagga

SEQ ID NO: 1379556 - RNA, 19 nt, Artificial Sequence
  Description of Artificial Sequence: Synthetic oligonucleotide
aaaaucuuaaguuggcugg

SEQ ID NO: 1379557 - RNA, 19 nt, Artificial Sequence
  Description of Artificial Sequence: Synthetic oligonucleotide
ucuccuaacacuauaagag

SEQ ID NO: 1379558 - RNA, 19 nt, Artificial Sequence
  Description of Artificial Sequence: Synthetic oligonucleotide
aacacuauaagaggaaggc

SEQ ID NO: 1379559 - RNA, 19 nt, Artificial Sequence
  Description of Artificial Sequence: Synthetic oligonucleotide
aauaucuauuguuuaacag

SEQ ID NO: 1379560 - RNA, 19 nt, Artificial Sequence
  Description of Artificial Sequence: Synthetic oligonucleotide
aauauuuggcccucacugc

SEQ ID NO: 1379561 - RNA, 19 nt, Artificial Sequence
  Description of Artificial Sequence: Synthetic oligonucleotide
aaacaugaaaguuuaauau

SEQ ID NO: 1379562 - RNA, 19 nt, Artificial Sequence
  Description of Artificial Sequence: Synthetic oligonucleotide
uauuguuuaacagaaauga

SEQ ID NO: 1379563 - RNA, 19 nt, Artificial Sequence
  Description of Artificial Sequence: Synthetic oligonucleotide
aaaguuaggcuucuugccg

SEQ ID NO: 1379564 - RNA, 19 nt, Artificial Sequence
  Description of Artificial Sequence: Synthetic oligonucleotide
auuaacuacagcugucucc

SEQ ID NO: 1379565 - RNA, 19 nt, Artificial Sequence
  Description of Artificial Sequence: Synthetic oligonucleotide
gaagcuggauucuuuaugg

SEQ ID NO: 1379566 - RNA, 19 nt, Artificial Sequence
  Description of Artificial Sequence: Synthetic oligonucleotide
aacacuacagcaaaauggg

SEQ ID NO: 1379567 - RNA, 19 nt, Artificial Sequence
  Description of Artificial Sequence: Synthetic oligonucleotide
ucuauuguuuaacagaaau

SEQ ID NO: 1379568 - RNA, 19 nt, Artificial Sequence
  Description of Artificial Sequence: Synthetic oligonucleotide
uuuuccgugaauauuuggc

SEQ ID NO: 1379569 - RNA, 19 nt, Artificial Sequence
  Description of Artificial Sequence: Synthetic oligonucleotide
gagucaaugagauccaugc

SEQ ID NO: 1379570 - RNA, 19 nt, Artificial Sequence
  Description of Artificial Sequence: Synthetic oligonucleotide
aagacuaucuaccaguuuu

SEQ ID NO: 1379571 - RNA, 19 nt, Artificial Sequence
  Description of Artificial Sequence: Synthetic oligonucleotide
auaucuauuguuuaacaga

SEQ ID NO: 1379572 - RNA, 19 nt, Artificial Sequence
  Description of Artificial Sequence: Synthetic oligonucleotide
gaugacuugucccagaaca

SEQ ID NO: 1379573 - RNA, 19 nt, Artificial Sequence
  Description of Artificial Sequence: Synthetic oligonucleotide
uaacacuauaagaggaagg

SEQ ID NO: 1379574 - RNA, 19 nt, Artificial Sequence
  Description of Artificial Sequence: Synthetic oligonucleotide
cuaggcauccugaagauug

SEQ ID NO: 1379575 - RNA, 19 nt, Artificial Sequence
  Description of Artificial Sequence: Synthetic oligonucleotide
agcuggauucuuuaugggc

SEQ ID NO: 1379576 - RNA, 19 nt, Artificial Sequence
  Description of Artificial Sequence: Synthetic oligonucleotide
agaauaacaucgaagcugg

SEQ ID NO: 1379577 - RNA, 19 nt, Artificial Sequence
  Description of Artificial Sequence: Synthetic oligonucleotide
gauacgaacugagagcagg

SEQ ID NO: 1379578 - RNA, 19 nt, Artificial Sequence
  Description of Artificial Sequence: Synthetic oligonucleotide
ucuuaaguuggcuggaaga

SEQ ID NO: 1379579 - RNA, 19 nt, Artificial Sequence
  Description of Artificial Sequence: Synthetic oligonucleotide
uuaacuacagcugucucca

SEQ ID NO: 1379580 - RNA, 19 nt, Artificial Sequence
  Description of Artificial Sequence: Synthetic oligonucleotide
ugccaguuaacccuugaag

SEQ ID NO: 1379581 - RNA, 19 nt, Artificial Sequence
  Description of Artificial Sequence: Synthetic oligonucleotide
cacagauacaacacuacag

SEQ ID NO: 1379582 - RNA, 19 nt, Artificial Sequence
  Description of Artificial Sequence: Synthetic oligonucleotide
acuacagcaaaaugggaug

SEQ ID NO: 1379583 - RNA, 19 nt, Artificial Sequence
  Description of Artificial Sequence: Synthetic oligonucleotide
uucuccuaacacuauaaga

SEQ ID NO: 1379584 - RNA, 19 nt, Artificial Sequence
  Description of Artificial Sequence: Synthetic oligonucleotide
gauacaacacuacagcaaa

SEQ ID NO: 1379585 - RNA, 19 nt, Artificial Sequence
  Description of Artificial Sequence: Synthetic oligonucleotide
acugugguagcccaggugu

SEQ ID NO: 1379586 - RNA, 19 nt, Artificial Sequence
  Description of Artificial Sequence: Synthetic oligonucleotide
acaugaaaguuuaauaucu

SEQ ID NO: 1379587 - RNA, 19 nt, Artificial Sequence
  Description of Artificial Sequence: Synthetic oligonucleotide
agggacacaagauggauca

SEQ ID NO: 1379588 - RNA, 19 nt, Artificial Sequence
  Description of Artificial Sequence: Synthetic oligonucleotide
ucaggagaugacuuguccc

SEQ ID NO: 1379589 - RNA, 19 nt, Artificial Sequence
  Description of Artificial Sequence: Synthetic oligonucleotide
auaacaucgaagcuggauu

SEQ ID NO: 1379590 - RNA, 19 nt, Artificial Sequence
  Description of Artificial Sequence: Synthetic oligonucleotide
ccgaacacaguuuagaggc

SEQ ID NO: 1379591 - RNA, 19 nt, Artificial Sequence
  Description of Artificial Sequence: Synthetic oligonucleotide
aauaacaucgaagcuggau

SEQ ID NO: 1379592 - RNA, 19 nt, Artificial Sequence
  Description of Artificial Sequence: Synthetic oligonucleotide
cugaagauugcuauugcuc

SEQ ID NO: 1379593 - RNA, 19 nt, Artificial Sequence
  Description of Artificial Sequence: Synthetic oligonucleotide
cuuaaguuggcuggaagag

SEQ ID NO: 1379594 - RNA, 19 nt, Artificial Sequence
  Description of Artificial Sequence: Synthetic oligonucleotide
acaacacuacagcaaaaug

SEQ ID NO: 1379595 - RNA, 19 nt, Artificial Sequence
  Description of Artificial Sequence: Synthetic oligonucleotide
acacuauaagaggaaggcc

SEQ ID NO: 1379596 - RNA, 19 nt, Artificial Sequence
  Description of Artificial Sequence: Synthetic oligonucleotide
auuaauauuccaggucuag

SEQ ID NO: 1379597 - RNA, 19 nt, Artificial Sequence
  Description of Artificial Sequence: Synthetic oligonucleotide
ugaauauuuggcccucacu

SEQ ID NO: 1379598 - RNA, 19 nt, Artificial Sequence
  Description of Artificial Sequence: Synthetic oligonucleotide
caugucauuggcugagagg

SEQ ID NO: 1379599 - RNA, 19 nt, Artificial Sequence
  Description of Artificial Sequence: Synthetic oligonucleotide
cuuccacaaggccagaaag

SEQ ID NO: 1379600 - RNA, 19 nt, Artificial Sequence
  Description of Artificial Sequence: Synthetic oligonucleotide
aaccccuucuccuaacacu

SEQ ID NO: 1379601 - RNA, 19 nt, Artificial Sequence
  Description of Artificial Sequence: Synthetic oligonucleotide
gaaggggacccuuauguac

SEQ ID NO: 1379602 - RNA, 19 nt, Artificial Sequence
  Description of Artificial Sequence: Synthetic oligonucleotide
ggcuccaagaauuacacac

SEQ ID NO: 1379603 - RNA, 19 nt, Artificial Sequence
  Description of Artificial Sequence: Synthetic oligonucleotide
gaacacaguuuagaggccg

SEQ ID NO: 1379604 - RNA, 19 nt, Artificial Sequence
  Description of Artificial Sequence: Synthetic oligonucleotide
cuugaagacuaucuaccag

SEQ ID NO: 1379605 - RNA, 19 nt, Artificial Sequence
  Description of Artificial Sequence: Synthetic oligonucleotide
gguagcaauuuccacaggc

SEQ ID NO: 1379606 - RNA, 19 nt, Artificial Sequence
  Description of Artificial Sequence: Synthetic oligonucleotide
gacacaagauggaucacag

SEQ ID NO: 1379607 - RNA, 19 nt, Artificial Sequence
  Description of Artificial Sequence: Synthetic oligonucleotide
ggugauacgaacugagagc

SEQ ID NO: 1379608 - RNA, 19 nt, Artificial Sequence
  Description of Artificial Sequence: Synthetic oligonucleotide
uugagguuccuccuaggca

SEQ ID NO: 1379609 - RNA, 19 nt, Artificial Sequence
  Description of Artificial Sequence: Synthetic oligonucleotide
aguucaucugagucaauga

SEQ ID NO: 1379610 - RNA, 19 nt, Artificial Sequence
  Description of Artificial Sequence: Synthetic oligonucleotide
agauggaucacagcaacug

SEQ ID NO: 1379611 - RNA, 19 nt, Artificial Sequence
  Description of Artificial Sequence: Synthetic oligonucleotide
uuuagggccuccucaggag

SEQ ID NO: 1379612 - RNA, 19 nt, Artificial Sequence
  Description of Artificial Sequence: Synthetic oligonucleotide
guuuuccgugaauauuugg

SEQ ID NO: 1379613 - RNA, 19 nt, Artificial Sequence
  Description of Artificial Sequence: Synthetic oligonucleotide
uaacaucgaagcuggauuc

SEQ ID NO: 1379614 - RNA, 19 nt, Artificial Sequence
  Description of Artificial Sequence: Synthetic oligonucleotide
uuaauauuccaggucuaga

SEQ ID NO: 1379615 - RNA, 19 nt, Artificial Sequence
  Description of Artificial Sequence: Synthetic oligonucleotide
caagauggaucacagcaac

SEQ ID NO: 1379616 - RNA, 19 nt, Artificial Sequence
  Description of Artificial Sequence: Synthetic oligonucleotide
auaagaggaaggccccuuc

SEQ ID NO: 1379617 - RNA, 19 nt, Artificial Sequence
  Description of Artificial Sequence: Synthetic oligonucleotide
aguacccugcuccuuugac

SEQ ID NO: 1379618 - RNA, 19 nt, Artificial Sequence
  Description of Artificial Sequence: Synthetic oligonucleotide
ugcugccggaccuaaaagc

SEQ ID NO: 1379619 - RNA, 19 nt, Artificial Sequence
  Description of Artificial Sequence: Synthetic oligonucleotide
ggagugacuucuuuggugc

SEQ ID NO: 1379620 - RNA, 19 nt, Artificial Sequence
  Description of Artificial Sequence: Synthetic oligonucleotide
aucuuaaguuggcuggaag

SEQ ID NO: 1379621 - RNA, 19 nt, Artificial Sequence
  Description of Artificial Sequence: Synthetic oligonucleotide
aguuuaauaucuauuguuu

SEQ ID NO: 1379622 - RNA, 19 nt, Artificial Sequence
  Description of Artificial Sequence: Synthetic oligonucleotide
cuucuagccugaauacccg

SEQ ID NO: 1379623 - RNA, 19 nt, Artificial Sequence
  Description of Artificial Sequence: Synthetic oligonucleotide
agugacuucuuuggugccc

SEQ ID NO: 1379624 - RNA, 19 nt, Artificial Sequence
  Description of Artificial Sequence: Synthetic oligonucleotide
cagacuugggcugaguacc

SEQ ID NO: 1379625 - RNA, 19 nt, Artificial Sequence
  Description of Artificial Sequence: Synthetic oligonucleotide
aaaucuuaaguuggcugga

SEQ ID NO: 1379626 - RNA, 19 nt, Artificial Sequence
  Description of Artificial Sequence: Synthetic oligonucleotide
uccaagaauuacacacuga

SEQ ID NO: 1379627 - RNA, 19 nt, Artificial Sequence
  Description of Artificial Sequence: Synthetic oligonucleotide
ucccucaauccagaggugg

SEQ ID NO: 1379628 - RNA, 19 nt, Artificial Sequence
  Description of Artificial Sequence: Synthetic oligonucleotide
gauugcuauugcucaggag

SEQ ID NO: 1379629 - RNA, 19 nt, Artificial Sequence
  Description of Artificial Sequence: Synthetic oligonucleotide
gacuacacccgacagaaua

SEQ ID NO: 1379630 - RNA, 19 nt, Artificial Sequence
  Description of Artificial Sequence: Synthetic oligonucleotide
acgaacugagagcaggcug

SEQ ID NO: 1379631 - RNA, 19 nt, Artificial Sequence
  Description of Artificial Sequence: Synthetic oligonucleotide
gacugcaacaguuggcuga

SEQ ID NO: 1379632 - RNA, 19 nt, Artificial Sequence
  Description of Artificial Sequence: Synthetic oligonucleotide
uccgugaauauuuggcccu

SEQ ID NO: 1379633 - RNA, 19 nt, Artificial Sequence
  Description of Artificial Sequence: Synthetic oligonucleotide
cuccaagaauuacacacug

SEQ ID NO: 1379634 - RNA, 19 nt, Artificial Sequence
  Description of Artificial Sequence: Synthetic oligonucleotide
auacgaacugagagcaggc

SEQ ID NO: 1379635 - RNA, 19 nt, Artificial Sequence
  Description of Artificial Sequence: Synthetic oligonucleotide
uugccggugauacgaacug

SEQ ID NO: 1379636 - RNA, 19 nt, Artificial Sequence
  Description of Artificial Sequence: Synthetic oligonucleotide
aggaguuggcuggaggagc

SEQ ID NO: 1379637 - RNA, 19 nt, Artificial Sequence
  Description of Artificial Sequence: Synthetic oligonucleotide
ugauguuuuccgugaauau

SEQ ID NO: 1379638 - RNA, 19 nt, Artificial Sequence
  Description of Artificial Sequence: Synthetic oligonucleotide
agaugacuugucccagaac

SEQ ID NO: 1379639 - RNA, 19 nt, Artificial Sequence
  Description of Artificial Sequence: Synthetic oligonucleotide
ugccggaccuaaaagcuac

SEQ ID NO: 1379640 - RNA, 19 nt, Artificial Sequence
  Description of Artificial Sequence: Synthetic oligonucleotide
ccuucuagccugaauaccc

SEQ ID NO: 1379641 - RNA, 19 nt, Artificial Sequence
  Description of Artificial Sequence: Synthetic oligonucleotide
auuacacacugaggaagac

SEQ ID NO: 1379642 - RNA, 19 nt, Artificial Sequence
  Description of Artificial Sequence: Synthetic oligonucleotide
ggaucuagcaguucaucug

SEQ ID NO: 1379643 - RNA, 19 nt, Artificial Sequence
  Description of Artificial Sequence: Synthetic oligonucleotide
ugugugugcuugagguucc

SEQ ID NO: 1379644 - RNA, 19 nt, Artificial Sequence
  Description of Artificial Sequence: Synthetic oligonucleotide
uacacccgacagaauaaca

SEQ ID NO: 1379645 - RNA, 19 nt, Artificial Sequence
  Description of Artificial Sequence: Synthetic oligonucleotide
caggagagaucccaaacuc

SEQ ID NO: 1379646 - RNA, 19 nt, Artificial Sequence
  Description of Artificial Sequence: Synthetic oligonucleotide
cuugucccagaacacugcc

SEQ ID NO: 1379647 - RNA, 19 nt, Artificial Sequence
  Description of Artificial Sequence: Synthetic oligonucleotide
aggucuagacucaagggug

SEQ ID NO: 1379648 - RNA, 19 nt, Artificial Sequence
  Description of Artificial Sequence: Synthetic oligonucleotide
agauugcaccuccucgggg

SEQ ID NO: 1379649 - RNA, 19 nt, Artificial Sequence
  Description of Artificial Sequence: Synthetic oligonucleotide
guucuuacaggccuuccuc

SEQ ID NO: 1379650 - RNA, 19 nt, Artificial Sequence
  Description of Artificial Sequence: Synthetic oligonucleotide
ucuagcaguucaucugagu

SEQ ID NO: 1379651 - RNA, 19 nt, Artificial Sequence
  Description of Artificial Sequence: Synthetic oligonucleotide
ugacuucucucuuuccagu

SEQ ID NO: 1379652 - RNA, 19 nt, Artificial Sequence
  Description of Artificial Sequence: Synthetic oligonucleotide
uagccugaauacccgcucc

SEQ ID NO: 1379653 - RNA, 19 nt, Artificial Sequence
  Description of Artificial Sequence: Synthetic oligonucleotide
uuucacagcugaccacggc

SEQ ID NO: 1379654 - RNA, 19 nt, Artificial Sequence
  Description of Artificial Sequence: Synthetic oligonucleotide
aggguggaaaggucagcac

SEQ ID NO: 1379655 - RNA, 19 nt, Artificial Sequence
  Description of Artificial Sequence: Synthetic oligonucleotide
caagguaggggcaguuggc

SEQ ID NO: 1379656 - RNA, 19 nt, Artificial Sequence
  Description of Artificial Sequence: Synthetic oligonucleotide
agauacaacacuacagcaa

SEQ ID NO: 1379657 - RNA, 19 nt, Artificial Sequence
  Description of Artificial Sequence: Synthetic oligonucleotide
uucuagccugaauacccgc

SEQ ID NO: 1379658 - RNA, 19 nt, Artificial Sequence
  Description of Artificial Sequence: Synthetic oligonucleotide
uuuagaggccgucuucauu

SEQ ID NO: 1379659 - RNA, 19 nt, Artificial Sequence
  Description of Artificial Sequence: Synthetic oligonucleotide
uaaggacucccgcugcaac

SEQ ID NO: 1379660 - RNA, 19 nt, Artificial Sequence
  Description of Artificial Sequence: Synthetic oligonucleotide
cuccuaggcauccugaaga

SEQ ID NO: 1379661 - RNA, 19 nt, Artificial Sequence
  Description of Artificial Sequence: Synthetic oligonucleotide
gggacccuuauguacaacc

SEQ ID NO: 1379662 - RNA, 19 nt, Artificial Sequence
  Description of Artificial Sequence: Synthetic oligonucleotide
agauugcuauugcucagga

SEQ ID NO: 1379663 - RNA, 19 nt, Artificial Sequence
  Description of Artificial Sequence: Synthetic oligonucleotide
agccugaauacccgcuccg

SEQ ID NO: 1379664 - RNA, 19 nt, Artificial Sequence
  Description of Artificial Sequence: Synthetic oligonucleotide
gccaguuaacccuugaaga

SEQ ID NO: 1379665 - RNA, 19 nt, Artificial Sequence
  Description of Artificial Sequence: Synthetic oligonucleotide
gaaagagucagggccgaac

SEQ ID NO: 1379666 - RNA, 19 nt, Artificial Sequence
  Description of Artificial Sequence: Synthetic oligonucleotide
aauacccgcuccgcagacg

SEQ ID NO: 1379667 - RNA, 19 nt, Artificial Sequence
  Description of Artificial Sequence: Synthetic oligonucleotide
uccuucuagccugaauacc

SEQ ID NO: 1379668 - RNA, 19 nt, Artificial Sequence
  Description of Artificial Sequence: Synthetic oligonucleotide
aacaucgaagcuggauucu

SEQ ID NO: 1379669 - RNA, 19 nt, Artificial Sequence
  Description of Artificial Sequence: Synthetic oligonucleotide
gccgaacacaguuuagagg

SEQ ID NO: 1379670 - RNA, 19 nt, Artificial Sequence
  Description of Artificial Sequence: Synthetic oligonucleotide
ccuaaaagcuacuuccuuc

SEQ ID NO: 1379671 - RNA, 19 nt, Artificial Sequence
  Description of Artificial Sequence: Synthetic oligonucleotide
cagauugcaccuccucggg

SEQ ID NO: 1379672 - RNA, 19 nt, Artificial Sequence
  Description of Artificial Sequence: Synthetic oligonucleotide
ccaguuaacccuugaagac

SEQ ID NO: 1379673 - RNA, 19 nt, Artificial Sequence
  Description of Artificial Sequence: Synthetic oligonucleotide
cauuaacuacagcugucuc

SEQ ID NO: 1379674 - RNA, 19 nt, Artificial Sequence
  Description of Artificial Sequence: Synthetic oligonucleotide
cacccgacagaauaacauc

SEQ ID NO: 1379675 - RNA, 19 nt, Artificial Sequence
  Description of Artificial Sequence: Synthetic oligonucleotide
acaguuuagaggccgucuu

SEQ ID NO: 1379676 - RNA, 19 nt, Artificial Sequence
  Description of Artificial Sequence: Synthetic oligonucleotide
cuucuugccggugauacga

SEQ ID NO: 1379677 - RNA, 19 nt, Artificial Sequence
  Description of Artificial Sequence: Synthetic oligonucleotide
cucaggagcaccuguucuc

SEQ ID NO: 1379678 - RNA, 19 nt, Artificial Sequence
  Description of Artificial Sequence: Synthetic oligonucleotide
agcaguucaucugagucaa

SEQ ID NO: 1379679 - RNA, 19 nt, Artificial Sequence
  Description of Artificial Sequence: Synthetic oligonucleotide
cucaauccagaggugggag

SEQ ID NO: 1379680 - RNA, 19 nt, Artificial Sequence
  Description of Artificial Sequence: Synthetic oligonucleotide
gcuuguacagcauuaauau

SEQ ID NO: 1379681 - RNA, 19 nt, Artificial Sequence
  Description of Artificial Sequence: Synthetic oligonucleotide
cuccucggggcuuaaggac

SEQ ID NO: 1379682 - RNA, 19 nt, Artificial Sequence
  Description of Artificial Sequence: Synthetic oligonucleotide
aucgaagcuggauucuuua

SEQ ID NO: 1379683 - RNA, 19 nt, Artificial Sequence
  Description of Artificial Sequence: Synthetic oligonucleotide
guagcaauuuccacaggca

SEQ ID NO: 1379684 - RNA, 19 nt, Artificial Sequence
  Description of Artificial Sequence: Synthetic oligonucleotide
aacaguuggcugauguuuu

SEQ ID NO: 1379685 - RNA, 19 nt, Artificial Sequence
  Description of Artificial Sequence: Synthetic oligonucleotide
caucauuaacuacagcugu

SEQ ID NO: 1379686 - RNA, 19 nt, Artificial Sequence
  Description of Artificial Sequence: Synthetic oligonucleotide
gugaauauuuggcccucac

SEQ ID NO: 1379687 - RNA, 19 nt, Artificial Sequence
  Description of Artificial Sequence: Synthetic oligonucleotide
ggccgaacacaguuuagag

SEQ ID NO: 1379688 - RNA, 19 nt, Artificial Sequence
  Description of Artificial Sequence: Synthetic oligonucleotide
cuagccugaauacccgcuc

SEQ ID NO: 1379689 - RNA, 19 nt, Artificial Sequence
  Description of Artificial Sequence: Synthetic oligonucleotide
uggcgcagcggaaagcauc

SEQ ID NO: 1379690 - RNA, 19 nt, Artificial Sequence
  Description of Artificial Sequence: Synthetic oligonucleotide
accuaaaagcuacuuccuu

SEQ ID NO: 1379691 - RNA, 19 nt, Artificial Sequence
  Description of Artificial Sequence: Synthetic oligonucleotide
ccuuucacagcugaccacg

SEQ ID NO: 1379692 - RNA, 19 nt, Artificial Sequence
  Description of Artificial Sequence: Synthetic oligonucleotide
ggcaucccaagguaggggc

SEQ ID NO: 1379693 - RNA, 19 nt, Artificial Sequence
  Description of Artificial Sequence: Synthetic oligonucleotide
aucagaaggggacccuuau

SEQ ID NO: 1379694 - RNA, 19 nt, Artificial Sequence
  Description of Artificial Sequence: Synthetic oligonucleotide
cugggacuacacccgacag

SEQ ID NO: 1379695 - RNA, 19 nt, Artificial Sequence
  Description of Artificial Sequence: Synthetic oligonucleotide
acaaccccuucuccuaaca

SEQ ID NO: 1379696 - RNA, 19 nt, Artificial Sequence
  Description of Artificial Sequence: Synthetic oligonucleotide
cacggcuccaagaauuaca

SEQ ID NO: 1379697 - RNA, 19 nt, Artificial Sequence
  Description of Artificial Sequence: Synthetic oligonucleotide
aguuaacccuugaagacua

SEQ ID NO: 1379698 - RNA, 19 nt, Artificial Sequence
  Description of Artificial Sequence: Synthetic oligonucleotide
acacccgacagaauaacau

SEQ ID NO: 1379699 - RNA, 19 nt, Artificial Sequence
  Description of Artificial Sequence: Synthetic oligonucleotide
gggauacauagaaacauga

SEQ ID NO: 1379700 - RNA, 19 nt, Artificial Sequence
  Description of Artificial Sequence: Synthetic oligonucleotide
acaagauggaucacagcaa

SEQ ID NO: 1379701 - RNA, 19 nt, Artificial Sequence
  Description of Artificial Sequence: Synthetic oligonucleotide
gacuucuuuggugcccgag

SEQ ID NO: 1379702 - RNA, 19 nt, Artificial Sequence
  Description of Artificial Sequence: Synthetic oligonucleotide
cugaccacggcuccaagaa

SEQ ID NO: 1379703 - RNA, 19 nt, Artificial Sequence
  Description of Artificial Sequence: Synthetic oligonucleotide
gugcugccggaccuaaaag

SEQ ID NO: 1379704 - RNA, 19 nt, Artificial Sequence
  Description of Artificial Sequence: Synthetic oligonucleotide
ggucuagacucaagggugg

SEQ ID NO: 1379705 - RNA, 19 nt, Artificial Sequence
  Description of Artificial Sequence: Synthetic oligonucleotide
guuggcgcagcggaaagca

SEQ ID NO: 1379706 - RNA, 19 nt, Artificial Sequence
  Description of Artificial Sequence: Synthetic oligonucleotide
agguagcaauuuccacagg

SEQ ID NO: 1379707 - RNA, 19 nt, Artificial Sequence
  Description of Artificial Sequence: Synthetic oligonucleotide
aggagagaucccaaacucu

SEQ ID NO: 1379708 - RNA, 19 nt, Artificial Sequence
  Description of Artificial Sequence: Synthetic oligonucleotide
caccuguucuccaggcuug

SEQ ID NO: 1379709 - RNA, 19 nt, Artificial Sequence
  Description of Artificial Sequence: Synthetic oligonucleotide
cuacacccgacagaauaac

SEQ ID NO: 1379710 - RNA, 19 nt, Artificial Sequence
  Description of Artificial Sequence: Synthetic oligonucleotide
ugcaguucuuacaggccuu

SEQ ID NO: 1379711 - RNA, 19 nt, Artificial Sequence
  Description of Artificial Sequence: Synthetic oligonucleotide
ugacaacaggacacagaua

SEQ ID NO: 1379712 - RNA, 19 nt, Artificial Sequence
  Description of Artificial Sequence: Synthetic oligonucleotide
uucccucaauccagaggug

SEQ ID NO: 1379713 - RNA, 19 nt, Artificial Sequence
  Description of Artificial Sequence: Synthetic oligonucleotide
caguuuagaggccgucuuc

SEQ ID NO: 1379714 - RNA, 19 nt, Artificial Sequence
  Description of Artificial Sequence: Synthetic oligonucleotide
cggugauacgaacugagag

SEQ ID NO: 1379715 - RNA, 19 nt, Artificial Sequence
  Description of Artificial Sequence: Synthetic oligonucleotide
caaccccuucuccuaacac

SEQ ID NO: 1379716 - RNA, 19 nt, Artificial Sequence
  Description of Artificial Sequence: Synthetic oligonucleotide
acuacacccgacagaauaa

SEQ ID NO: 1379717 - RNA, 19 nt, Artificial Sequence
  Description of Artificial Sequence: Synthetic oligonucleotide
uacaaccccuucuccuaac

SEQ ID NO: 1379718 - RNA, 19 nt, Artificial Sequence
  Description of Artificial Sequence: Synthetic oligonucleotide
caggucuagacucaagggu

SEQ ID NO: 1379719 - RNA, 19 nt, Artificial Sequence
  Description of Artificial Sequence: Synthetic oligonucleotide
gcuggaucgggcuucuuca

SEQ ID NO: 1379720 - RNA, 19 nt, Artificial Sequence
  Description of Artificial Sequence: Synthetic oligonucleotide
cuuaaggacucccgcugca

SEQ ID NO: 1379721 - RNA, 19 nt, Artificial Sequence
  Description of Artificial Sequence: Synthetic oligonucleotide
ugaccacggcuccaagaau

SEQ ID NO: 1379722 - RNA, 19 nt, Artificial Sequence
  Description of Artificial Sequence: Synthetic oligonucleotide
uucuugccggugauacgaa

SEQ ID NO: 1379723 - RNA, 19 nt, Artificial Sequence
  Description of Artificial Sequence: Synthetic oligonucleotide
ggacccuuauguacaaccc

SEQ ID NO: 1379724 - RNA, 19 nt, Artificial Sequence
  Description of Artificial Sequence: Synthetic oligonucleotide
gcuuaaggacucccgcugc

SEQ ID NO: 1379725 - RNA, 19 nt, Artificial Sequence
  Description of Artificial Sequence: Synthetic oligonucleotide
cuugccggugauacgaacu

SEQ ID NO: 1379726 - RNA, 19 nt, Artificial Sequence
  Description of Artificial Sequence: Synthetic oligonucleotide
caucugagucaaugagauc

SEQ ID NO: 1379727 - RNA, 19 nt, Artificial Sequence
  Description of Artificial Sequence: Synthetic oligonucleotide
caaggguggaaaggucagc

SEQ ID NO: 1379728 - RNA, 19 nt, Artificial Sequence
  Description of Artificial Sequence: Synthetic oligonucleotide
caguuggcgcagcggaaag

SEQ ID NO: 1379729 - RNA, 19 nt, Artificial Sequence
  Description of Artificial Sequence: Synthetic oligonucleotide
gguaggggcaguuggcgca

SEQ ID NO: 1379730 - RNA, 19 nt, Artificial Sequence
  Description of Artificial Sequence: Synthetic oligonucleotide
ucccaaacucugccauuuc

SEQ ID NO: 1379731 - RNA, 19 nt, Artificial Sequence
  Description of Artificial Sequence: Synthetic oligonucleotide
cagcauuaauauuccaggu

SEQ ID NO: 1379732 - RNA, 19 nt, Artificial Sequence
  Description of Artificial Sequence: Synthetic oligonucleotide
uccugggacuacacccgac

SEQ ID NO: 1379733 - RNA, 19 nt, Artificial Sequence
  Description of Artificial Sequence: Synthetic oligonucleotide
ggacacaagauggaucaca

SEQ ID NO: 1379734 - RNA, 19 nt, Artificial Sequence
  Description of Artificial Sequence: Synthetic oligonucleotide
cccucaauccagagguggg

SEQ ID NO: 1379735 - RNA, 19 nt, Artificial Sequence
  Description of Artificial Sequence: Synthetic oligonucleotide
ucccgcugcaacucuuuua

SEQ ID NO: 1379736 - RNA, 19 nt, Artificial Sequence
  Description of Artificial Sequence: Synthetic oligonucleotide
uacuuccacaaggccagaa

SEQ ID NO: 1379737 - RNA, 19 nt, Artificial Sequence
  Description of Artificial Sequence: Synthetic oligonucleotide
cagacugcaacaguuggcu

SEQ ID NO: 1379738 - RNA, 19 nt, Artificial Sequence
  Description of Artificial Sequence: Synthetic oligonucleotide
gccggugauacgaacugag

SEQ ID NO: 1379739 - RNA, 19 nt, Artificial Sequence
  Description of Artificial Sequence: Synthetic oligonucleotide
ccuaacacuauaagaggaa

SEQ ID NO: 1379740 - RNA, 19 nt, Artificial Sequence
  Description of Artificial Sequence: Synthetic oligonucleotide
uccgcagacgccgguuucu

SEQ ID NO: 1379741 - RNA, 19 nt, Artificial Sequence
  Description of Artificial Sequence: Synthetic oligonucleotide
ugccggugauacgaacuga

SEQ ID NO: 1379742 - RNA, 19 nt, Artificial Sequence
  Description of Artificial Sequence: Synthetic oligonucleotide
caguucuuacaggccuucc

SEQ ID NO: 1379743 - RNA, 19 nt, Artificial Sequence
  Description of Artificial Sequence: Synthetic oligonucleotide
guacccugcuccuuugacu

SEQ ID NO: 1379744 - RNA, 19 nt, Artificial Sequence
  Description of Artificial Sequence: Synthetic oligonucleotide
gucagggccgaacacaguu

SEQ ID NO: 1379745 - RNA, 19 nt, Artificial Sequence
  Description of Artificial Sequence: Synthetic oligonucleotide
ggcgcagcggaaagcaucc

SEQ ID NO: 1379746 - RNA, 19 nt, Artificial Sequence
  Description of Artificial Sequence: Synthetic oligonucleotide
guacaaccccuucuccuaa

SEQ ID NO: 1379747 - RNA, 19 nt, Artificial Sequence
  Description of Artificial Sequence: Synthetic oligonucleotide
ccuuauguacaaccccuuc

SEQ ID NO: 1379748 - RNA, 19 nt, Artificial Sequence
  Description of Artificial Sequence: Synthetic oligonucleotide
auacaacacuacagcaaaa

SEQ ID NO: 1379749 - RNA, 19 nt, Artificial Sequence
  Description of Artificial Sequence: Synthetic oligonucleotide
acaucgaagcuggauucuu

SEQ ID NO: 1379750 - RNA, 19 nt, Artificial Sequence
  Description of Artificial Sequence: Synthetic oligonucleotide
uuggcgcagcggaaagcau

SEQ ID NO: 1379751 - RNA, 19 nt, Artificial Sequence
  Description of Artificial Sequence: Synthetic oligonucleotide
caguuaacccuugaagacu

SEQ ID NO: 1379752 - RNA, 19 nt, Artificial Sequence
  Description of Artificial Sequence: Synthetic oligonucleotide
aggggacccuuauguacaa

SEQ ID NO: 1379753 - RNA, 19 nt, Artificial Sequence
  Description of Artificial Sequence: Synthetic oligonucleotide
cagacgccgguuucucauc

SEQ ID NO: 1379754 - RNA, 19 nt, Artificial Sequence
  Description of Artificial Sequence: Synthetic oligonucleotide
cauugugcagagaggcgcu

SEQ ID NO: 1379755 - RNA, 19 nt, Artificial Sequence
  Description of Artificial Sequence: Synthetic oligonucleotide
cugccaguuaacccuugaa

SEQ ID NO: 1379756 - RNA, 19 nt, Artificial Sequence
  Description of Artificial Sequence: Synthetic oligonucleotide
uacccgcuccgcagacgcc

SEQ ID NO: 1379757 - RNA, 19 nt, Artificial Sequence
  Description of Artificial Sequence: Synthetic oligonucleotide
caguggugggcugagggaa

SEQ ID NO: 1379758 - RNA, 19 nt, Artificial Sequence
  Description of Artificial Sequence: Synthetic oligonucleotide
cagggccgaacacaguuua

SEQ ID NO: 1379759 - RNA, 19 nt, Artificial Sequence
  Description of Artificial Sequence: Synthetic oligonucleotide
ggccgucuucauuuuguca

SEQ ID NO: 1379760 - RNA, 19 nt, Artificial Sequence
  Description of Artificial Sequence: Synthetic oligonucleotide
cuucuggaucuagcaguuc

SEQ ID NO: 1379761 - RNA, 19 nt, Artificial Sequence
  Description of Artificial Sequence: Synthetic oligonucleotide
ggaguuggcuggaggagca

SEQ ID NO: 1379762 - RNA, 19 nt, Artificial Sequence
  Description of Artificial Sequence: Synthetic oligonucleotide
ggaucgggcuucuucaaau

SEQ ID NO: 1379763 - RNA, 19 nt, Artificial Sequence
  Description of Artificial Sequence: Synthetic oligonucleotide
cccucacugccaguuaacc

SEQ ID NO: 1379764 - RNA, 19 nt, Artificial Sequence
  Description of Artificial Sequence: Synthetic oligonucleotide
gaucccaaacucugccauu

SEQ ID NO: 1379765 - RNA, 19 nt, Artificial Sequence
  Description of Artificial Sequence: Synthetic oligonucleotide
gggccgaacacaguuuaga

SEQ ID NO: 1379766 - RNA, 19 nt, Artificial Sequence
  Description of Artificial Sequence: Synthetic oligonucleotide
gagguuccuccuaggcauc

SEQ ID NO: 1379767 - RNA, 19 nt, Artificial Sequence
  Description of Artificial Sequence: Synthetic oligonucleotide
guuuagaggccgucuucau

SEQ ID NO: 1379768 - RNA, 19 nt, Artificial Sequence
  Description of Artificial Sequence: Synthetic oligonucleotide
caacuggggagugacuucu

SEQ ID NO: 1379769 - RNA, 19 nt, Artificial Sequence
  Description of Artificial Sequence: Synthetic oligonucleotide
cuccgcagacgccgguuuc

SEQ ID NO: 1379770 - RNA, 19 nt, Artificial Sequence
  Description of Artificial Sequence: Synthetic oligonucleotide
aggcgcuuccugggacuac

SEQ ID NO: 1379771 - RNA, 19 nt, Artificial Sequence
  Description of Artificial Sequence: Synthetic oligonucleotide
ccugggacuacacccgaca

SEQ ID NO: 1379772 - RNA, 19 nt, Artificial Sequence
  Description of Artificial Sequence: Synthetic oligonucleotide
cccgacagaauaacaucga

SEQ ID NO: 1379773 - RNA, 19 nt, Artificial Sequence
  Description of Artificial Sequence: Synthetic oligonucleotide
gcugccggaccuaaaagcu

SEQ ID NO: 1379774 - RNA, 19 nt, Artificial Sequence
  Description of Artificial Sequence: Synthetic oligonucleotide
accacggcuccaagaauua

SEQ ID NO: 1379775 - RNA, 19 nt, Artificial Sequence
  Description of Artificial Sequence: Synthetic oligonucleotide
cugaguacccugcuccuuu

SEQ ID NO: 1379776 - RNA, 19 nt, Artificial Sequence
  Description of Artificial Sequence: Synthetic oligonucleotide
cuuacaggccuuccucuuu

SEQ ID NO: 1379777 - RNA, 19 nt, Artificial Sequence
  Description of Artificial Sequence: Synthetic oligonucleotide
cuauaagaggaaggccccu

SEQ ID NO: 1379778 - RNA, 19 nt, Artificial Sequence
  Description of Artificial Sequence: Synthetic oligonucleotide
gcuccaagaauuacacacu

SEQ ID NO: 1379779 - RNA, 19 nt, Artificial Sequence
  Description of Artificial Sequence: Synthetic oligonucleotide
ccccagguagcaauuucca

SEQ ID NO: 1379780 - RNA, 19 nt, Artificial Sequence
  Description of Artificial Sequence: Synthetic oligonucleotide
ggcccucacugccaguuaa

SEQ ID NO: 1379781 - RNA, 19 nt, Artificial Sequence
  Description of Artificial Sequence: Synthetic oligonucleotide
ccccuucacaccuuggucu

SEQ ID NO: 1379782 - RNA, 19 nt, Artificial Sequence
  Description of Artificial Sequence: Synthetic oligonucleotide
cccgaggcccuuucacagc

SEQ ID NO: 1379783 - RNA, 19 nt, Artificial Sequence
  Description of Artificial Sequence: Synthetic oligonucleotide
ccacuucaaaguuaggcuu

SEQ ID NO: 1379784 - RNA, 19 nt, Artificial Sequence
  Description of Artificial Sequence: Synthetic oligonucleotide
cuggagcuuguacagcauu

SEQ ID NO: 1379785 - RNA, 19 nt, Artificial Sequence
  Description of Artificial Sequence: Synthetic oligonucleotide
gcagacgccgguuucucau

SEQ ID NO: 1379786 - RNA, 19 nt, Artificial Sequence
  Description of Artificial Sequence: Synthetic oligonucleotide
ccggugauacgaacugaga

SEQ ID NO: 1379787 - RNA, 19 nt, Artificial Sequence
  Description of Artificial Sequence: Synthetic oligonucleotide
ggggagugacuucuuuggu

SEQ ID NO: 1379788 - RNA, 19 nt, Artificial Sequence
  Description of Artificial Sequence: Synthetic oligonucleotide
ccucaauccagagguggga

SEQ ID NO: 1379789 - RNA, 19 nt, Artificial Sequence
  Description of Artificial Sequence: Synthetic oligonucleotide
gcaucccaagguaggggca

SEQ ID NO: 1379790 - RNA, 19 nt, Artificial Sequence
  Description of Artificial Sequence: Synthetic oligonucleotide
ccacggcuccaagaauuac

SEQ ID NO: 1379791 - RNA, 19 nt, Artificial Sequence
  Description of Artificial Sequence: Synthetic oligonucleotide
cugagucaaugagauccau

SEQ ID NO: 1379792 - RNA, 19 nt, Artificial Sequence
  Description of Artificial Sequence: Synthetic oligonucleotide
cacugcaccacagcagcuu

SEQ ID NO: 1379793 - RNA, 19 nt, Artificial Sequence
  Description of Artificial Sequence: Synthetic oligonucleotide
ggggacccuuauguacaac

SEQ ID NO: 1379794 - RNA, 19 nt, Artificial Sequence
  Description of Artificial Sequence: Synthetic oligonucleotide
ccgaggcccuuucacagcu

SEQ ID NO: 1379795 - RNA, 19 nt, Artificial Sequence
  Description of Artificial Sequence: Synthetic oligonucleotide
ggacucccgcugcaacucu

SEQ ID NO: 1379796 - RNA, 19 nt, Artificial Sequence
  Description of Artificial Sequence: Synthetic oligonucleotide
gccgaaggauucuggccau

SEQ ID NO: 1379797 - RNA, 19 nt, Artificial Sequence
  Description of Artificial Sequence: Synthetic oligonucleotide
gaaggccccuucacaccuu

SEQ ID NO: 1379798 - RNA, 19 nt, Artificial Sequence
  Description of Artificial Sequence: Synthetic oligonucleotide
cgugaauauuuggcccuca

SEQ ID NO: 1379799 - RNA, 19 nt, Artificial Sequence
  Description of Artificial Sequence: Synthetic oligonucleotide
cgaaggauucuggccaucu

SEQ ID NO: 1379800 - RNA, 19 nt, Artificial Sequence
  Description of Artificial Sequence: Synthetic oligonucleotide
gcuccgcagacgccgguuu

SEQ ID NO: 1379801 - RNA, 19 nt, Artificial Sequence
  Description of Artificial Sequence: Synthetic oligonucleotide
gcugaguacccugcuccuu

SEQ ID NO: 1379802 - RNA, 19 nt, Artificial Sequence
  Description of Artificial Sequence: Synthetic oligonucleotide
gccggaccuaaaagcuacu

SEQ ID NO: 1379803 - RNA, 19 nt, Artificial Sequence
  Description of Artificial Sequence: Synthetic oligonucleotide
ggacuacacccgacagaau

SEQ ID NO: 1379804 - RNA, 19 nt, Artificial Sequence
  Description of Artificial Sequence: Synthetic oligonucleotide
ccggaccuaaaagcuacuu

SEQ ID NO: 1379805 - RNA, 19 nt, Artificial Sequence
  Description of Artificial Sequence: Synthetic oligonucleotide
ccgcuccgcagacgccggu

SEQ ID NO: 1379806 - RNA, 19 nt, Artificial Sequence
  Description of Artificial Sequence: Synthetic oligonucleotide
uuuacaaucauuuaguaaa

SEQ ID NO: 1379807 - RNA, 19 nt, Artificial Sequence
  Description of Artificial Sequence: Synthetic oligonucleotide
auucaaauugucuacgagc

SEQ ID NO: 1379808 - RNA, 19 nt, Artificial Sequence
  Description of Artificial Sequence: Synthetic oligonucleotide
ucuaaaauggcuucaacag

SEQ ID NO: 1379809 - RNA, 19 nt, Artificial Sequence
  Description of Artificial Sequence: Synthetic oligonucleotide
uaucugaacagauuaaggg

SEQ ID NO: 1379810 - RNA, 19 nt, Artificial Sequence
  Description of Artificial Sequence: Synthetic oligonucleotide
aucauuugauaauucaugc

SEQ ID NO: 1379811 - RNA, 19 nt, Artificial Sequence
  Description of Artificial Sequence: Synthetic oligonucleotide
acacugaaagucuacaugc

SEQ ID NO: 1379812 - RNA, 19 nt, Artificial Sequence
  Description of Artificial Sequence: Synthetic oligonucleotide
uauaacuggaaccaggaug

SEQ ID NO: 1379813 - RNA, 19 nt, Artificial Sequence
  Description of Artificial Sequence: Synthetic oligonucleotide
cucuagaagaguuacaggg

SEQ ID NO: 1379814 - RNA, 19 nt, Artificial Sequence
  Description of Artificial Sequence: Synthetic oligonucleotide
uuaaggguaaggcagacug

SEQ ID NO: 1379815 - RNA, 19 nt, Artificial Sequence
  Description of Artificial Sequence: Synthetic oligonucleotide
gauaauucaugcauaaggg

SEQ ID NO: 1379816 - RNA, 19 nt, Artificial Sequence
  Description of Artificial Sequence: Synthetic oligonucleotide
acucuuuacacacugaaag

SEQ ID NO: 1379817 - RNA, 19 nt, Artificial Sequence
  Description of Artificial Sequence: Synthetic oligonucleotide
uaucaauuugcauucaaag

SEQ ID NO: 1379818 - RNA, 19 nt, Artificial Sequence
  Description of Artificial Sequence: Synthetic oligonucleotide
aauaaagggucuuuggaca

SEQ ID NO: 1379819 - RNA, 19 nt, Artificial Sequence
  Description of Artificial Sequence: Synthetic oligonucleotide
uuauauaacuggaaccagg

SEQ ID NO: 1379820 - RNA, 19 nt, Artificial Sequence
  Description of Artificial Sequence: Synthetic oligonucleotide
uaauucaugcauaagggca

SEQ ID NO: 1379821 - RNA, 19 nt, Artificial Sequence
  Description of Artificial Sequence: Synthetic oligonucleotide
caucacaacucuaaaaugg

SEQ ID NO: 1379822 - RNA, 19 nt, Artificial Sequence
  Description of Artificial Sequence: Synthetic oligonucleotide
ucuauucccaaucuaaucu

SEQ ID NO: 1379823 - RNA, 19 nt, Artificial Sequence
  Description of Artificial Sequence: Synthetic oligonucleotide
auaacuggaaccaggaugc

SEQ ID NO: 1379824 - RNA, 19 nt, Artificial Sequence
  Description of Artificial Sequence: Synthetic oligonucleotide
aucuaaucuucuuaagacc

SEQ ID NO: 1379825 - RNA, 19 nt, Artificial Sequence
  Description of Artificial Sequence: Synthetic oligonucleotide
uucaaauugucuacgagca

SEQ ID NO: 1379826 - RNA, 19 nt, Artificial Sequence
  Description of Artificial Sequence: Synthetic oligonucleotide
cauuuauauaacuggaacc

SEQ ID NO: 1379827 - RNA, 19 nt, Artificial Sequence
  Description of Artificial Sequence: Synthetic oligonucleotide
aguugaauauuccucuccc

SEQ ID NO: 1379828 - RNA, 19 nt, Artificial Sequence
  Description of Artificial Sequence: Synthetic oligonucleotide
uguaagcaccacuauaugg

SEQ ID NO: 1379829 - RNA, 19 nt, Artificial Sequence
  Description of Artificial Sequence: Synthetic oligonucleotide
uuuaguugaauauuccucu

SEQ ID NO: 1379830 - RNA, 19 nt, Artificial Sequence
  Description of Artificial Sequence: Synthetic oligonucleotide
uucuuuguagguaggauag

SEQ ID NO: 1379831 - RNA, 19 nt, Artificial Sequence
  Description of Artificial Sequence: Synthetic oligonucleotide
gaauagauaugccaucagg

SEQ ID NO: 1379832 - RNA, 19 nt, Artificial Sequence
  Description of Artificial Sequence: Synthetic oligonucleotide
aauucaaauugucuacgag

SEQ ID NO: 1379833 - RNA, 19 nt, Artificial Sequence
  Description of Artificial Sequence: Synthetic oligonucleotide
ugucccuguacaaagaacc

SEQ ID NO: 1379834 - RNA, 19 nt, Artificial Sequence
  Description of Artificial Sequence: Synthetic oligonucleotide
augauaaguaucaauuugc

SEQ ID NO: 1379835 - RNA, 19 nt, Artificial Sequence
  Description of Artificial Sequence: Synthetic oligonucleotide
aauaaacucaagauaaaca

SEQ ID NO: 1379836 - RNA, 19 nt, Artificial Sequence
  Description of Artificial Sequence: Synthetic oligonucleotide
uuaugaacaucaaaucuca

SEQ ID NO: 1379837 - RNA, 19 nt, Artificial Sequence
  Description of Artificial Sequence: Synthetic oligonucleotide
auccuaaucauucaaauaa

SEQ ID NO: 1379838 - RNA, 19 nt, Artificial Sequence
  Description of Artificial Sequence: Synthetic oligonucleotide
cagauuaaggguaaggcag

SEQ ID NO: 1379839 - RNA, 19 nt, Artificial Sequence
  Description of Artificial Sequence: Synthetic oligonucleotide
auaauuuaguugaauauuc

SEQ ID NO: 1379840 - RNA, 19 nt, Artificial Sequence
  Description of Artificial Sequence: Synthetic oligonucleotide
uuuaccuggggcaugauaa

SEQ ID NO: 1379841 - RNA, 19 nt, Artificial Sequence
  Description of Artificial Sequence: Synthetic oligonucleotide
cagaaugaggaguacaacg

SEQ ID NO: 1379842 - RNA, 19 nt, Artificial Sequence
  Description of Artificial Sequence: Synthetic oligonucleotide
ugugacucacucuagaaga

SEQ ID NO: 1379843 - RNA, 19 nt, Artificial Sequence
  Description of Artificial Sequence: Synthetic oligonucleotide
ucuacgagcaccaucauuu

SEQ ID NO: 1379844 - RNA, 19 nt, Artificial Sequence
  Description of Artificial Sequence: Synthetic oligonucleotide
auacauacuguacugagga

SEQ ID NO: 1379845 - RNA, 19 nt, Artificial Sequence
  Description of Artificial Sequence: Synthetic oligonucleotide
auuuauauaacuggaacca

SEQ ID NO: 1379846 - RNA, 19 nt, Artificial Sequence
  Description of Artificial Sequence: Synthetic oligonucleotide
ugauagaagcacuuaaugu

SEQ ID NO: 1379847 - RNA, 19 nt, Artificial Sequence
  Description of Artificial Sequence: Synthetic oligonucleotide
uugucuacgagcaccauca

SEQ ID NO: 1379848 - RNA, 19 nt, Artificial Sequence
  Description of Artificial Sequence: Synthetic oligonucleotide
aauucaugcauaagggcac

SEQ ID NO: 1379849 - RNA, 19 nt, Artificial Sequence
  Description of Artificial Sequence: Synthetic oligonucleotide
aagaaaaguggccucgcag

SEQ ID NO: 1379850 - RNA, 19 nt, Artificial Sequence
  Description of Artificial Sequence: Synthetic oligonucleotide
uuuccuaucccauaacucu

SEQ ID NO: 1379851 - RNA, 19 nt, Artificial Sequence
  Description of Artificial Sequence: Synthetic oligonucleotide
aaaccauucagcuaccuuu

SEQ ID NO: 1379852 - RNA, 19 nt, Artificial Sequence
  Description of Artificial Sequence: Synthetic oligonucleotide
aauaauuuaguugaauauu

SEQ ID NO: 1379853 - RNA, 19 nt, Artificial Sequence
  Description of Artificial Sequence: Synthetic oligonucleotide
aguuguaaaugacuucugg

SEQ ID NO: 1379854 - RNA, 19 nt, Artificial Sequence
  Description of Artificial Sequence: Synthetic oligonucleotide
gaauaaagggucuuuggac

SEQ ID NO: 1379855 - RNA, 19 nt, Artificial Sequence
  Description of Artificial Sequence: Synthetic oligonucleotide
ucugcauuuuaccuggggc

SEQ ID NO: 1379856 - RNA, 19 nt, Artificial Sequence
  Description of Artificial Sequence: Synthetic oligonucleotide
ucaaggucauuacugcccg

SEQ ID NO: 1379857 - RNA, 19 nt, Artificial Sequence
  Description of Artificial Sequence: Synthetic oligonucleotide
caugauaaguaucaauuug

SEQ ID NO: 1379858 - RNA, 19 nt, Artificial Sequence
  Description of Artificial Sequence: Synthetic oligonucleotide
auuuaguugaauauuccuc

SEQ ID NO: 1379859 - RNA, 19 nt, Artificial Sequence
  Description of Artificial Sequence: Synthetic oligonucleotide
uguuauacugugcaucaca

SEQ ID NO: 1379860 - RNA, 19 nt, Artificial Sequence
  Description of Artificial Sequence: Synthetic oligonucleotide
cugugcaucaggaucaagg

SEQ ID NO: 1379861 - RNA, 19 nt, Artificial Sequence
  Description of Artificial Sequence: Synthetic oligonucleotide
accaccaucuauaaagugc

SEQ ID NO: 1379862 - RNA, 19 nt, Artificial Sequence
  Description of Artificial Sequence: Synthetic oligonucleotide
ugauaaguaucaauuugca

SEQ ID NO: 1379863 - RNA, 19 nt, Artificial Sequence
  Description of Artificial Sequence: Synthetic oligonucleotide
agugcaacucuuaauauuc

SEQ ID NO: 1379864 - RNA, 19 nt, Artificial Sequence
  Description of Artificial Sequence: Synthetic oligonucleotide
uucacaaaccuacugguaa

SEQ ID NO: 1379865 - RNA, 19 nt, Artificial Sequence
  Description of Artificial Sequence: Synthetic oligonucleotide
ugugcaucucacaaugaag

SEQ ID NO: 1379866 - RNA, 19 nt, Artificial Sequence
  Description of Artificial Sequence: Synthetic oligonucleotide
uauaaagugcaacucuuaa

SEQ ID NO: 1379867 - RNA, 19 nt, Artificial Sequence
  Description of Artificial Sequence: Synthetic oligonucleotide
aagaguagcaugcuauggu

SEQ ID NO: 1379868 - RNA, 19 nt, Artificial Sequence
  Description of Artificial Sequence: Synthetic oligonucleotide
guaaaugacuucugggcgg

SEQ ID NO: 1379869 - RNA, 19 nt, Artificial Sequence
  Description of Artificial Sequence: Synthetic oligonucleotide
uggacauaguuguaaauga

SEQ ID NO: 1379870 - RNA, 19 nt, Artificial Sequence
  Description of Artificial Sequence: Synthetic oligonucleotide
auaguuguaaaugacuucu

SEQ ID NO: 1379871 - RNA, 19 nt, Artificial Sequence
  Description of Artificial Sequence: Synthetic oligonucleotide
aaucgcaugcuucucucag

SEQ ID NO: 1379872 - RNA, 19 nt, Artificial Sequence
  Description of Artificial Sequence: Synthetic oligonucleotide
uuggugauagauuuacucu

SEQ ID NO: 1379873 - RNA, 19 nt, Artificial Sequence
  Description of Artificial Sequence: Synthetic oligonucleotide
uuggacauaguuguaaaug

SEQ ID NO: 1379874 - RNA, 19 nt, Artificial Sequence
  Description of Artificial Sequence: Synthetic oligonucleotide
aguagcaugcuaugguuuc

SEQ ID NO: 1379875 - RNA, 19 nt, Artificial Sequence
  Description of Artificial Sequence: Synthetic oligonucleotide
aguaaaccaccucuugacg

SEQ ID NO: 1379876 - RNA, 19 nt, Artificial Sequence
  Description of Artificial Sequence: Synthetic oligonucleotide
acuaauggaauuuuauuuu

SEQ ID NO: 1379877 - RNA, 19 nt, Artificial Sequence
  Description of Artificial Sequence: Synthetic oligonucleotide
aagcacuuaauguuauacu

SEQ ID NO: 1379878 - RNA, 19 nt, Artificial Sequence
  Description of Artificial Sequence: Synthetic oligonucleotide
caaauugucuacgagcacc

SEQ ID NO: 1379879 - RNA, 19 nt, Artificial Sequence
  Description of Artificial Sequence: Synthetic oligonucleotide
aucaaggucauuacugccc

SEQ ID NO: 1379880 - RNA, 19 nt, Artificial Sequence
  Description of Artificial Sequence: Synthetic oligonucleotide
uggggcaugauaaguauca

SEQ ID NO: 1379881 - RNA, 19 nt, Artificial Sequence
  Description of Artificial Sequence: Synthetic oligonucleotide
uuacucuuuacacacugaa

SEQ ID NO: 1379882 - RNA, 19 nt, Artificial Sequence
  Description of Artificial Sequence: Synthetic oligonucleotide
caggacauucgaauaaagg

SEQ ID NO: 1379883 - RNA, 19 nt, Artificial Sequence
  Description of Artificial Sequence: Synthetic oligonucleotide
acagauuaaggguaaggca

SEQ ID NO: 1379884 - RNA, 19 nt, Artificial Sequence
  Description of Artificial Sequence: Synthetic oligonucleotide
cuauauggcacucucguuc

SEQ ID NO: 1379885 - RNA, 19 nt, Artificial Sequence
  Description of Artificial Sequence: Synthetic oligonucleotide
guaagcaccacuauauggc

SEQ ID NO: 1379886 - RNA, 19 nt, Artificial Sequence
  Description of Artificial Sequence: Synthetic oligonucleotide
uuuauauaacuggaaccag

SEQ ID NO: 1379887 - RNA, 19 nt, Artificial Sequence
  Description of Artificial Sequence: Synthetic oligonucleotide
ucauuuuccuaucccauaa

SEQ ID NO: 1379888 - RNA, 19 nt, Artificial Sequence
  Description of Artificial Sequence: Synthetic oligonucleotide
ucuauaaagugcaacucuu

SEQ ID NO: 1379889 - RNA, 19 nt, Artificial Sequence
  Description of Artificial Sequence: Synthetic oligonucleotide
uauauggcacucucguucc

SEQ ID NO: 1379890 - RNA, 19 nt, Artificial Sequence
  Description of Artificial Sequence: Synthetic oligonucleotide
guuggugauagauuuacuc

SEQ ID NO: 1379891 - RNA, 19 nt, Artificial Sequence
  Description of Artificial Sequence: Synthetic oligonucleotide
auugucuacgagcaccauc

SEQ ID NO: 1379892 - RNA, 19 nt, Artificial Sequence
  Description of Artificial Sequence: Synthetic oligonucleotide
cugauagaagcacuuaaug

SEQ ID NO: 1379893 - RNA, 19 nt, Artificial Sequence
  Description of Artificial Sequence: Synthetic oligonucleotide
accacuauauggcacucuc

SEQ ID NO: 1379894 - RNA, 19 nt, Artificial Sequence
  Description of Artificial Sequence: Synthetic oligonucleotide
uugcuauaaauaauuuagu

SEQ ID NO: 1379895 - RNA, 19 nt, Artificial Sequence
  Description of Artificial Sequence: Synthetic oligonucleotide
gaagcacuuaauguuauac

SEQ ID NO: 1379896 - RNA, 19 nt, Artificial Sequence
  Description of Artificial Sequence: Synthetic oligonucleotide
auuugcauucaaaguaccc

SEQ ID NO: 1379897 - RNA, 19 nt, Artificial Sequence
  Description of Artificial Sequence: Synthetic oligonucleotide
cacuuaauguuauacugug

SEQ ID NO: 1379898 - RNA, 19 nt, Artificial Sequence
  Description of Artificial Sequence: Synthetic oligonucleotide
uuaguaaaugaagagcaaa

SEQ ID NO: 1379899 - RNA, 19 nt, Artificial Sequence
  Description of Artificial Sequence: Synthetic oligonucleotide
ucuuuacacacugaaaguc

SEQ ID NO: 1379900 - RNA, 19 nt, Artificial Sequence
  Description of Artificial Sequence: Synthetic oligonucleotide
aguacaacgucacugugaa

SEQ ID NO: 1379901 - RNA, 19 nt, Artificial Sequence
  Description of Artificial Sequence: Synthetic oligonucleotide
augacuaccagcugguccu

SEQ ID NO: 1379902 - RNA, 19 nt, Artificial Sequence
  Description of Artificial Sequence: Synthetic oligonucleotide
cacaucucuguuuucaaug

SEQ ID NO: 1379903 - RNA, 19 nt, Artificial Sequence
  Description of Artificial Sequence: Synthetic oligonucleotide
ugagaagauuagaugugug

SEQ ID NO: 1379904 - RNA, 19 nt, Artificial Sequence
  Description of Artificial Sequence: Synthetic oligonucleotide
ugcagaaugaggaguacaa

SEQ ID NO: 1379905 - RNA, 19 nt, Artificial Sequence
  Description of Artificial Sequence: Synthetic oligonucleotide
gagaagauuagauguguga

SEQ ID NO: 1379906 - RNA, 19 nt, Artificial Sequence
  Description of Artificial Sequence: Synthetic oligonucleotide
aagaguuacagggcucugg

SEQ ID NO: 1379907 - RNA, 19 nt, Artificial Sequence
  Description of Artificial Sequence: Synthetic oligonucleotide
ucccauaacucuuaagaaa

SEQ ID NO: 1379908 - RNA, 19 nt, Artificial Sequence
  Description of Artificial Sequence: Synthetic oligonucleotide
caucucacaaugaagaaaa

SEQ ID NO: 1379909 - RNA, 19 nt, Artificial Sequence
  Description of Artificial Sequence: Synthetic oligonucleotide
acucuuaauauucugcauu

SEQ ID NO: 1379910 - RNA, 19 nt, Artificial Sequence
  Description of Artificial Sequence: Synthetic oligonucleotide
uggauucugugcaucagga

SEQ ID NO: 1379911 - RNA, 19 nt, Artificial Sequence
  Description of Artificial Sequence: Synthetic oligonucleotide
aguaaaugaagagcaaaca

SEQ ID NO: 1379912 - RNA, 19 nt, Artificial Sequence
  Description of Artificial Sequence: Synthetic oligonucleotide
acucuaaaauggcuucaac

SEQ ID NO: 1379913 - RNA, 19 nt, Artificial Sequence
  Description of Artificial Sequence: Synthetic oligonucleotide
ugauagauuuacucuuuac

SEQ ID NO: 1379914 - RNA, 19 nt, Artificial Sequence
  Description of Artificial Sequence: Synthetic oligonucleotide
accaucuauaaagugcaac

SEQ ID NO: 1379915 - RNA, 19 nt, Artificial Sequence
  Description of Artificial Sequence: Synthetic oligonucleotide
ugcaacucuuaauauucug

SEQ ID NO: 1379916 - RNA, 19 nt, Artificial Sequence
  Description of Artificial Sequence: Synthetic oligonucleotide
auucccaccacuucugaga

SEQ ID NO: 1379917 - RNA, 19 nt, Artificial Sequence
  Description of Artificial Sequence: Synthetic oligonucleotide
caguaaaccaccucuugac

SEQ ID NO: 1379918 - RNA, 19 nt, Artificial Sequence
  Description of Artificial Sequence: Synthetic oligonucleotide
uggaguagggugcaugacu

SEQ ID NO: 1379919 - RNA, 19 nt, Artificial Sequence
  Description of Artificial Sequence: Synthetic oligonucleotide
augaagaaaaguggccucg

SEQ ID NO: 1379920 - RNA, 19 nt, Artificial Sequence
  Description of Artificial Sequence: Synthetic oligonucleotide
acuuaauguuauacugugc

SEQ ID NO: 1379921 - RNA, 19 nt, Artificial Sequence
  Description of Artificial Sequence: Synthetic oligonucleotide
uucuauucccaaucuaauc

SEQ ID NO: 1379922 - RNA, 19 nt, Artificial Sequence
  Description of Artificial Sequence: Synthetic oligonucleotide
gaaaaguggccucgcagug

SEQ ID NO: 1379923 - RNA, 19 nt, Artificial Sequence
  Description of Artificial Sequence: Synthetic oligonucleotide
aacaugugcaucucacaau

SEQ ID NO: 1379924 - RNA, 19 nt, Artificial Sequence
  Description of Artificial Sequence: Synthetic oligonucleotide
aaggucauuacugcccgag

SEQ ID NO: 1379925 - RNA, 19 nt, Artificial Sequence
  Description of Artificial Sequence: Synthetic oligonucleotide
ugaaagucuacaugccgac

SEQ ID NO: 1379926 - RNA, 19 nt, Artificial Sequence
  Description of Artificial Sequence: Synthetic oligonucleotide
auucagcuaccuuuggucu

SEQ ID NO: 1379927 - RNA, 19 nt, Artificial Sequence
  Description of Artificial Sequence: Synthetic oligonucleotide
caguauccuaaacaugugc

SEQ ID NO: 1379928 - RNA, 19 nt, Artificial Sequence
  Description of Artificial Sequence: Synthetic oligonucleotide
ucacaacucuaaaauggcu

SEQ ID NO: 1379929 - RNA, 19 nt, Artificial Sequence
  Description of Artificial Sequence: Synthetic oligonucleotide
uaaccaccaucuauaaagu

SEQ ID NO: 1379930 - RNA, 19 nt, Artificial Sequence
  Description of Artificial Sequence: Synthetic oligonucleotide
aaaaccauucagcuaccuu

SEQ ID NO: 1379931 - RNA, 19 nt, Artificial Sequence
  Description of Artificial Sequence: Synthetic oligonucleotide
gacaguaaaccaccucuug

SEQ ID NO: 1379932 - RNA, 19 nt, Artificial Sequence
  Description of Artificial Sequence: Synthetic oligonucleotide
cuacaugccgacucuuucc

SEQ ID NO: 1379933 - RNA, 19 nt, Artificial Sequence
  Description of Artificial Sequence: Synthetic oligonucleotide
uguggaguagggugcauga

SEQ ID NO: 1379934 - RNA, 19 nt, Artificial Sequence
  Description of Artificial Sequence: Synthetic oligonucleotide
agcaucacagcauuggauu

SEQ ID NO: 1379935 - RNA, 19 nt, Artificial Sequence
  Description of Artificial Sequence: Synthetic oligonucleotide
gacauucgaauaaaggguc

SEQ ID NO: 1379936 - RNA, 19 nt, Artificial Sequence
  Description of Artificial Sequence: Synthetic oligonucleotide
uucgaauaaagggucuuug

SEQ ID NO: 1379937 - RNA, 19 nt, Artificial Sequence
  Description of Artificial Sequence: Synthetic oligonucleotide
uaagcaccacuauauggca

SEQ ID NO: 1379938 - RNA, 19 nt, Artificial Sequence
  Description of Artificial Sequence: Synthetic oligonucleotide
aguauccuaaacaugugca

SEQ ID NO: 1379939 - RNA, 19 nt, Artificial Sequence
  Description of Artificial Sequence: Synthetic oligonucleotide
agaagauuagaugugugaa

SEQ ID NO: 1379940 - RNA, 19 nt, Artificial Sequence
  Description of Artificial Sequence: Synthetic oligonucleotide
ugaauauuccucucccauc

SEQ ID NO: 1379941 - RNA, 19 nt, Artificial Sequence
  Description of Artificial Sequence: Synthetic oligonucleotide
acucaagauaaacauguuu

SEQ ID NO: 1379942 - RNA, 19 nt, Artificial Sequence
  Description of Artificial Sequence: Synthetic oligonucleotide
agauacaaagguaaucgca

SEQ ID NO: 1379943 - RNA, 19 nt, Artificial Sequence
  Description of Artificial Sequence: Synthetic oligonucleotide
cauuuaaccaccaucuaua

SEQ ID NO: 1379944 - RNA, 19 nt, Artificial Sequence
  Description of Artificial Sequence: Synthetic oligonucleotide
cauaguuguaaaugacuuc

SEQ ID NO: 1379945 - RNA, 19 nt, Artificial Sequence
  Description of Artificial Sequence: Synthetic oligonucleotide
uuaaaacuaauggaauuuu

SEQ ID NO: 1379946 - RNA, 19 nt, Artificial Sequence
  Description of Artificial Sequence: Synthetic oligonucleotide
caugcauaagggcacugag

SEQ ID NO: 1379947 - RNA, 19 nt, Artificial Sequence
  Description of Artificial Sequence: Synthetic oligonucleotide
cucgcagugcagaaugagg

SEQ ID NO: 1379948 - RNA, 19 nt, Artificial Sequence
  Description of Artificial Sequence: Synthetic oligonucleotide
cuaaucauucaaauaaacu

SEQ ID NO: 1379949 - RNA, 19 nt, Artificial Sequence
  Description of Artificial Sequence: Synthetic oligonucleotide
ugaggaauacucugauaga

SEQ ID NO: 1379950 - RNA, 19 nt, Artificial Sequence
  Description of Artificial Sequence: Synthetic oligonucleotide
ucuacaugccgacucuuuc

SEQ ID NO: 1379951 - RNA, 19 nt, Artificial Sequence
  Description of Artificial Sequence: Synthetic oligonucleotide
aucgcaugcuucucucagc

SEQ ID NO: 1379952 - RNA, 19 nt, Artificial Sequence
  Description of Artificial Sequence: Synthetic oligonucleotide
gaagauuagaugugugaaa

SEQ ID NO: 1379953 - RNA, 19 nt, Artificial Sequence
  Description of Artificial Sequence: Synthetic oligonucleotide
aaaccuacugguaaacaaa

SEQ ID NO: 1379954 - RNA, 19 nt, Artificial Sequence
  Description of Artificial Sequence: Synthetic oligonucleotide
aagucuacaugccgacucu

SEQ ID NO: 1379955 - RNA, 19 nt, Artificial Sequence
  Description of Artificial Sequence: Synthetic oligonucleotide
uauucccaaucuaaucuuc

SEQ ID NO: 1379956 - RNA, 19 nt, Artificial Sequence
  Description of Artificial Sequence: Synthetic oligonucleotide
uggugauagauuuacucuu

SEQ ID NO: 1379957 - RNA, 19 nt, Artificial Sequence
  Description of Artificial Sequence: Synthetic oligonucleotide
acugauuuggccacaucuc

SEQ ID NO: 1379958 - RNA, 19 nt, Artificial Sequence
  Description of Artificial Sequence: Synthetic oligonucleotide
agaguuacagggcucugga

SEQ ID NO: 1379959 - RNA, 19 nt, Artificial Sequence
  Description of Artificial Sequence: Synthetic oligonucleotide
ucuuuggacauaguuguaa

SEQ ID NO: 1379960 - RNA, 19 nt, Artificial Sequence
  Description of Artificial Sequence: Synthetic oligonucleotide
aaaauggcuucaacagcuc

SEQ ID NO: 1379961 - RNA, 19 nt, Artificial Sequence
  Description of Artificial Sequence: Synthetic oligonucleotide
aggaugcuaaaguuguacu

SEQ ID NO: 1379962 - RNA, 19 nt, Artificial Sequence
  Description of Artificial Sequence: Synthetic oligonucleotide
uauccuaaacaugugcauc

SEQ ID NO: 1379963 - RNA, 19 nt, Artificial Sequence
  Description of Artificial Sequence: Synthetic oligonucleotide
uagccuucuauucccaauc

SEQ ID NO: 1379964 - RNA, 19 nt, Artificial Sequence
  Description of Artificial Sequence: Synthetic oligonucleotide
uacaugccgacucuuuccu

SEQ ID NO: 1379965 - RNA, 19 nt, Artificial Sequence
  Description of Artificial Sequence: Synthetic oligonucleotide
ugagaucucuacauuuaau

SEQ ID NO: 1379966 - RNA, 19 nt, Artificial Sequence
  Description of Artificial Sequence: Synthetic oligonucleotide
aacgucacugugaagagua

SEQ ID NO: 1379967 - RNA, 19 nt, Artificial Sequence
  Description of Artificial Sequence: Synthetic oligonucleotide
aguuuacaaucauuuagua

SEQ ID NO: 1379968 - RNA, 19 nt, Artificial Sequence
  Description of Artificial Sequence: Synthetic oligonucleotide
gaaugaggaguacaacguc

SEQ ID NO: 1379969 - RNA, 19 nt, Artificial Sequence
  Description of Artificial Sequence: Synthetic oligonucleotide
uacucuuuacacacugaaa

SEQ ID NO: 1379970 - RNA, 19 nt, Artificial Sequence
  Description of Artificial Sequence: Synthetic oligonucleotide
agcaccacuauauggcacu

SEQ ID NO: 1379971 - RNA, 19 nt, Artificial Sequence
  Description of Artificial Sequence: Synthetic oligonucleotide
uuuggacauaguuguaaau

SEQ ID NO: 1379972 - RNA, 19 nt, Artificial Sequence
  Description of Artificial Sequence: Synthetic oligonucleotide
caccucuugacguucacuc

SEQ ID NO: 1379973 - RNA, 19 nt, Artificial Sequence
  Description of Artificial Sequence: Synthetic oligonucleotide
ucaaauugucuacgagcac

SEQ ID NO: 1379974 - RNA, 19 nt, Artificial Sequence
  Description of Artificial Sequence: Synthetic oligonucleotide
agggugcaugacuaccagc

SEQ ID NO: 1379975 - RNA, 19 nt, Artificial Sequence
  Description of Artificial Sequence: Synthetic oligonucleotide
cugaaagucuacaugccga

SEQ ID NO: 1379976 - RNA, 19 nt, Artificial Sequence
  Description of Artificial Sequence: Synthetic oligonucleotide
ucccaaucuaaucuucuua

SEQ ID NO: 1379977 - RNA, 19 nt, Artificial Sequence
  Description of Artificial Sequence: Synthetic oligonucleotide
uguagguaggauagccuuc

SEQ ID NO: 1379978 - RNA, 19 nt, Artificial Sequence
  Description of Artificial Sequence: Synthetic oligonucleotide
aucccauaacucuuaagaa

SEQ ID NO: 1379979 - RNA, 19 nt, Artificial Sequence
  Description of Artificial Sequence: Synthetic oligonucleotide
cucacucuagaagaguuac

SEQ ID NO: 1379980 - RNA, 19 nt, Artificial Sequence
  Description of Artificial Sequence: Synthetic oligonucleotide
caugcuaugguuucaggaa

SEQ ID NO: 1379981 - RNA, 19 nt, Artificial Sequence
  Description of Artificial Sequence: Synthetic oligonucleotide
ggaucaaggucauuacugc

SEQ ID NO: 1379982 - RNA, 19 nt, Artificial Sequence
  Description of Artificial Sequence: Synthetic oligonucleotide
uuauacugugcaucacaac

SEQ ID NO: 1379983 - RNA, 19 nt, Artificial Sequence
  Description of Artificial Sequence: Synthetic oligonucleotide
augaggaguacaacgucac

SEQ ID NO: 1379984 - RNA, 19 nt, Artificial Sequence
  Description of Artificial Sequence: Synthetic oligonucleotide
uaaaugacuucugggcggc

SEQ ID NO: 1379985 - RNA, 19 nt, Artificial Sequence
  Description of Artificial Sequence: Synthetic oligonucleotide
uacacacugaaagucuaca

SEQ ID NO: 1379986 - RNA, 19 nt, Artificial Sequence
  Description of Artificial Sequence: Synthetic oligonucleotide
augccgacucuuuccuucc

SEQ ID NO: 1379987 - RNA, 19 nt, Artificial Sequence
  Description of Artificial Sequence: Synthetic oligonucleotide
cgaguuuacaaucauuuag

SEQ ID NO: 1379988 - RNA, 19 nt, Artificial Sequence
  Description of Artificial Sequence: Synthetic oligonucleotide
aacucgaguuuacaaucau

SEQ ID NO: 1379989 - RNA, 19 nt, Artificial Sequence
  Description of Artificial Sequence: Synthetic oligonucleotide
gggccaacuauacauacug

SEQ ID NO: 1379990 - RNA, 19 nt, Artificial Sequence
  Description of Artificial Sequence: Synthetic oligonucleotide
ugcaugugacucacucuag

SEQ ID NO: 1379991 - RNA, 19 nt, Artificial Sequence
  Description of Artificial Sequence: Synthetic oligonucleotide
uagggugcaugacuaccag

SEQ ID NO: 1379992 - RNA, 19 nt, Artificial Sequence
  Description of Artificial Sequence: Synthetic oligonucleotide
uuaccuggggcaugauaag

SEQ ID NO: 1379993 - RNA, 19 nt, Artificial Sequence
  Description of Artificial Sequence: Synthetic oligonucleotide
ccaacuauacauacuguac

SEQ ID NO: 1379994 - RNA, 19 nt, Artificial Sequence
  Description of Artificial Sequence: Synthetic oligonucleotide
acuauacauacuguacuga

SEQ ID NO: 1379995 - RNA, 19 nt, Artificial Sequence
  Description of Artificial Sequence: Synthetic oligonucleotide
acauaguuguaaaugacuu

SEQ ID NO: 1379996 - RNA, 19 nt, Artificial Sequence
  Description of Artificial Sequence: Synthetic oligonucleotide
agaagaguuacagggcucu

SEQ ID NO: 1379997 - RNA, 19 nt, Artificial Sequence
  Description of Artificial Sequence: Synthetic oligonucleotide
ucucuacauuuaauuguac

SEQ ID NO: 1379998 - RNA, 19 nt, Artificial Sequence
  Description of Artificial Sequence: Synthetic oligonucleotide
augugcaucucacaaugaa

SEQ ID NO: 1379999 - RNA, 19 nt, Artificial Sequence
  Description of Artificial Sequence: Synthetic oligonucleotide
uuuuaccuggggcaugaua

SEQ ID NO: 1380000 - RNA, 19 nt, Artificial Sequence
  Description of Artificial Sequence: Synthetic oligonucleotide
ccuaaucauucaaauaaac

SEQ ID NO: 1380001 - RNA, 19 nt, Artificial Sequence
  Description of Artificial Sequence: Synthetic oligonucleotide
agaguagcaugcuaugguu

SEQ ID NO: 1380002 - RNA, 19 nt, Artificial Sequence
  Description of Artificial Sequence: Synthetic oligonucleotide
caaaccuacugguaaacaa

SEQ ID NO: 1380003 - RNA, 19 nt, Artificial Sequence
  Description of Artificial Sequence: Synthetic oligonucleotide
cuccauuuaaccaccaucu

SEQ ID NO: 1380004 - RNA, 19 nt, Artificial Sequence
  Description of Artificial Sequence: Synthetic oligonucleotide
uucuugugggccaacuaua

SEQ ID NO: 1380005 - RNA, 19 nt, Artificial Sequence
  Description of Artificial Sequence: Synthetic oligonucleotide
uacucugauagaagcacuu

SEQ ID NO: 1380006 - RNA, 19 nt, Artificial Sequence
  Description of Artificial Sequence: Synthetic oligonucleotide
gauacaaagguaaucgcau

SEQ ID NO: 1380007 - RNA, 19 nt, Artificial Sequence
  Description of Artificial Sequence: Synthetic oligonucleotide
cugcauuuuaccuggggca

SEQ ID NO: 1380008 - RNA, 19 nt, Artificial Sequence
  Description of Artificial Sequence: Synthetic oligonucleotide
aaccuacugguaaacaaau

SEQ ID NO: 1380009 - RNA, 19 nt, Artificial Sequence
  Description of Artificial Sequence: Synthetic oligonucleotide
gauacuccucaucccaauc

SEQ ID NO: 1380010 - RNA, 19 nt, Artificial Sequence
  Description of Artificial Sequence: Synthetic oligonucleotide
ugaacagauuaaggguaag

SEQ ID NO: 1380011 - RNA, 19 nt, Artificial Sequence
  Description of Artificial Sequence: Synthetic oligonucleotide
ggaacaucagcaucacagc

SEQ ID NO: 1380012 - RNA, 19 nt, Artificial Sequence
  Description of Artificial Sequence: Synthetic oligonucleotide
ucacucuagaagaguuaca

SEQ ID NO: 1380013 - RNA, 19 nt, Artificial Sequence
  Description of Artificial Sequence: Synthetic oligonucleotide
aacucuaaaauggcuucaa

SEQ ID NO: 1380014 - RNA, 19 nt, Artificial Sequence
  Description of Artificial Sequence: Synthetic oligonucleotide
acaaagguaaucgcaugcu

SEQ ID NO: 1380015 - RNA, 19 nt, Artificial Sequence
  Description of Artificial Sequence: Synthetic oligonucleotide
uuaagaccccucuccuuca

SEQ ID NO: 1380016 - RNA, 19 nt, Artificial Sequence
  Description of Artificial Sequence: Synthetic oligonucleotide
auauggcacucucguuccc

SEQ ID NO: 1380017 - RNA, 19 nt, Artificial Sequence
  Description of Artificial Sequence: Synthetic oligonucleotide
ugacguucacucucccugc

SEQ ID NO: 1380018 - RNA, 19 nt, Artificial Sequence
  Description of Artificial Sequence: Synthetic oligonucleotide
uagaagaguuacagggcuc

SEQ ID NO: 1380019 - RNA, 19 nt, Artificial Sequence
  Description of Artificial Sequence: Synthetic oligonucleotide
agcaugcuaugguuucagg

SEQ ID NO: 1380020 - RNA, 19 nt, Artificial Sequence
  Description of Artificial Sequence: Synthetic oligonucleotide
aggucauuacugcccgagg

SEQ ID NO: 1380021 - RNA, 19 nt, Artificial Sequence
  Description of Artificial Sequence: Synthetic oligonucleotide
gauaaguaucaauuugcau

SEQ ID NO: 1380022 - RNA, 19 nt, Artificial Sequence
  Description of Artificial Sequence: Synthetic oligonucleotide
cuaucccauaacucuuaag

SEQ ID NO: 1380023 - RNA, 19 nt, Artificial Sequence
  Description of Artificial Sequence: Synthetic oligonucleotide
ucgaguuuacaaucauuua

SEQ ID NO: 1380024 - RNA, 19 nt, Artificial Sequence
  Description of Artificial Sequence: Synthetic oligonucleotide
aaccaacauuaugaacauc

SEQ ID NO: 1380025 - RNA, 19 nt, Artificial Sequence
  Description of Artificial Sequence: Synthetic oligonucleotide
gcuaaaguuguacucauua

SEQ ID NO: 1380026 - RNA, 19 nt, Artificial Sequence
  Description of Artificial Sequence: Synthetic oligonucleotide
ugugggccaacuauacaua

SEQ ID NO: 1380027 - RNA, 19 nt, Artificial Sequence
  Description of Artificial Sequence: Synthetic oligonucleotide
auagaagcacuuaauguua

SEQ ID NO: 1380028 - RNA, 19 nt, Artificial Sequence
  Description of Artificial Sequence: Synthetic oligonucleotide
auauaacuggaaccaggau

SEQ ID NO: 1380029 - RNA, 19 nt, Artificial Sequence
  Description of Artificial Sequence: Synthetic oligonucleotide
cagacuggacaguaaacca

SEQ ID NO: 1380030 - RNA, 19 nt, Artificial Sequence
  Description of Artificial Sequence: Synthetic oligonucleotide
uaaucgcaugcuucucuca

SEQ ID NO: 1380031 - RNA, 19 nt, Artificial Sequence
  Description of Artificial Sequence: Synthetic oligonucleotide
gaagaaaaguggccucgca

SEQ ID NO: 1380032 - RNA, 19 nt, Artificial Sequence
  Description of Artificial Sequence: Synthetic oligonucleotide
guaaucgcaugcuucucuc

SEQ ID NO: 1380033 - RNA, 19 nt, Artificial Sequence
  Description of Artificial Sequence: Synthetic oligonucleotide
ggucuuuggacauaguugu

SEQ ID NO: 1380034 - RNA, 19 nt, Artificial Sequence
  Description of Artificial Sequence: Synthetic oligonucleotide
guaaaccaccucuugacgu

SEQ ID NO: 1380035 - RNA, 19 nt, Artificial Sequence
  Description of Artificial Sequence: Synthetic oligonucleotide
uuccuaucccauaacucuu

SEQ ID NO: 1380036 - RNA, 19 nt, Artificial Sequence
  Description of Artificial Sequence: Synthetic oligonucleotide
ugggccaacuauacauacu

SEQ ID NO: 1380037 - RNA, 19 nt, Artificial Sequence
  Description of Artificial Sequence: Synthetic oligonucleotide
gauuaaggguaaggcagac

SEQ ID NO: 1380038 - RNA, 19 nt, Artificial Sequence
  Description of Artificial Sequence: Synthetic oligonucleotide
ggaauagauaugccaucag

SEQ ID NO: 1380039 - RNA, 19 nt, Artificial Sequence
  Description of Artificial Sequence: Synthetic oligonucleotide
acucucguuccccacucug

SEQ ID NO: 1380040 - RNA, 19 nt, Artificial Sequence
  Description of Artificial Sequence: Synthetic oligonucleotide
uccauuuaaccaccaucua

SEQ ID NO: 1380041 - RNA, 19 nt, Artificial Sequence
  Description of Artificial Sequence: Synthetic oligonucleotide
auuacugcccgaggcgggg

SEQ ID NO: 1380042 - RNA, 19 nt, Artificial Sequence
  Description of Artificial Sequence: Synthetic oligonucleotide
cuguaagcaccacuauaug

SEQ ID NO: 1380043 - RNA, 19 nt, Artificial Sequence
  Description of Artificial Sequence: Synthetic oligonucleotide
gaguacaacgucacuguga

SEQ ID NO: 1380044 - RNA, 19 nt, Artificial Sequence
  Description of Artificial Sequence: Synthetic oligonucleotide
cauuggauucugugcauca

SEQ ID NO: 1380045 - RNA, 19 nt, Artificial Sequence
  Description of Artificial Sequence: Synthetic oligonucleotide
agguaggauagccuucuau

SEQ ID NO: 1380046 - RNA, 19 nt, Artificial Sequence
  Description of Artificial Sequence: Synthetic oligonucleotide
cuacacugcaguauccuaa

SEQ ID NO: 1380047 - RNA, 19 nt, Artificial Sequence
  Description of Artificial Sequence: Synthetic oligonucleotide
cuagaagaguuacagggcu

SEQ ID NO: 1380048 - RNA, 19 nt, Artificial Sequence
  Description of Artificial Sequence: Synthetic oligonucleotide
cucgaguuuacaaucauuu

SEQ ID NO: 1380049 - RNA, 19 nt, Artificial Sequence
  Description of Artificial Sequence: Synthetic oligonucleotide
aucucuacauuuaauugua

SEQ ID NO: 1380050 - RNA, 19 nt, Artificial Sequence
  Description of Artificial Sequence: Synthetic oligonucleotide
uacauacuguacugaggaa

SEQ ID NO: 1380051 - RNA, 19 nt, Artificial Sequence
  Description of Artificial Sequence: Synthetic oligonucleotide
aaccaauuucacaaaccua

SEQ ID NO: 1380052 - RNA, 19 nt, Artificial Sequence
  Description of Artificial Sequence: Synthetic oligonucleotide
ucaucccaaucaacuacau

SEQ ID NO: 1380053 - RNA, 19 nt, Artificial Sequence
  Description of Artificial Sequence: Synthetic oligonucleotide
ggaauuuuauuuugaugaa

SEQ ID NO: 1380054 - RNA, 19 nt, Artificial Sequence
  Description of Artificial Sequence: Synthetic oligonucleotide
gugacucacucuagaagag

SEQ ID NO: 1380055 - RNA, 19 nt, Artificial Sequence
  Description of Artificial Sequence: Synthetic oligonucleotide
cugggcacuugcuaccaug

SEQ ID NO: 1380056 - RNA, 19 nt, Artificial Sequence
  Description of Artificial Sequence: Synthetic oligonucleotide
gcuccauuuaaccaccauc

SEQ ID NO: 1380057 - RNA, 19 nt, Artificial Sequence
  Description of Artificial Sequence: Synthetic oligonucleotide
cauccuaaucauucaaaua

SEQ ID NO: 1380058 - RNA, 19 nt, Artificial Sequence
  Description of Artificial Sequence: Synthetic oligonucleotide
caugugacucacucuagaa

SEQ ID NO: 1380059 - RNA, 19 nt, Artificial Sequence
  Description of Artificial Sequence: Synthetic oligonucleotide
acuauauggcacucucguu

SEQ ID NO: 1380060 - RNA, 19 nt, Artificial Sequence
  Description of Artificial Sequence: Synthetic oligonucleotide
gaccccucuccuucaaaac

SEQ ID NO: 1380061 - RNA, 19 nt, Artificial Sequence
  Description of Artificial Sequence: Synthetic oligonucleotide
acaucaaaucucauccuaa

SEQ ID NO: 1380062 - RNA, 19 nt, Artificial Sequence
  Description of Artificial Sequence: Synthetic oligonucleotide
cacaaaccuacugguaaac

SEQ ID NO: 1380063 - RNA, 19 nt, Artificial Sequence
  Description of Artificial Sequence: Synthetic oligonucleotide
gcuaccaugagagggagga

SEQ ID NO: 1380064 - RNA, 19 nt, Artificial Sequence
  Description of Artificial Sequence: Synthetic oligonucleotide
gaacaucaaaucucauccu

SEQ ID NO: 1380065 - RNA, 19 nt, Artificial Sequence
  Description of Artificial Sequence: Synthetic oligonucleotide
cuacgagcaccaucauuug

SEQ ID NO: 1380066 - RNA, 19 nt, Artificial Sequence
  Description of Artificial Sequence: Synthetic oligonucleotide
cugcaugugacucacucua

SEQ ID NO: 1380067 - RNA, 19 nt, Artificial Sequence
  Description of Artificial Sequence: Synthetic oligonucleotide
gaaccaacauuaugaacau

SEQ ID NO: 1380068 - RNA, 19 nt, Artificial Sequence
  Description of Artificial Sequence: Synthetic oligonucleotide
cauucaaaguaccccagcu

SEQ ID NO: 1380069 - RNA, 19 nt, Artificial Sequence
  Description of Artificial Sequence: Synthetic oligonucleotide
gaggaucauuucuuccaga

SEQ ID NO: 1380070 - RNA, 19 nt, Artificial Sequence
  Description of Artificial Sequence: Synthetic oligonucleotide
ggggaggauauccagcuca

SEQ ID NO: 1380071 - RNA, 19 nt, Artificial Sequence
  Description of Artificial Sequence: Synthetic oligonucleotide
ucccuguacaaagaaccaa

SEQ ID NO: 1380072 - RNA, 19 nt, Artificial Sequence
  Description of Artificial Sequence: Synthetic oligonucleotide
cacuauauggcacucucgu

SEQ ID NO: 1380073 - RNA, 19 nt, Artificial Sequence
  Description of Artificial Sequence: Synthetic oligonucleotide
gcaugcuaugguuucagga

SEQ ID NO: 1380074 - RNA, 19 nt, Artificial Sequence
  Description of Artificial Sequence: Synthetic oligonucleotide
ccaccuguggaguagggug

SEQ ID NO: 1380075 - RNA, 19 nt, Artificial Sequence
  Description of Artificial Sequence: Synthetic oligonucleotide
cagcucaggaauagauaug

SEQ ID NO: 1380076 - RNA, 19 nt, Artificial Sequence
  Description of Artificial Sequence: Synthetic oligonucleotide
ccaaucuaaucuucuuaag

SEQ ID NO: 1380077 - RNA, 19 nt, Artificial Sequence
  Description of Artificial Sequence: Synthetic oligonucleotide
cugaacagauuaaggguaa

SEQ ID NO: 1380078 - RNA, 19 nt, Artificial Sequence
  Description of Artificial Sequence: Synthetic oligonucleotide
aaguaccccagcugccaau

SEQ ID NO: 1380079 - RNA, 19 nt, Artificial Sequence
  Description of Artificial Sequence: Synthetic oligonucleotide
augagagggaggaucauuu

SEQ ID NO: 1380080 - RNA, 19 nt, Artificial Sequence
  Description of Artificial Sequence: Synthetic oligonucleotide
cacuugcuaccaugagagg

SEQ ID NO: 1380081 - RNA, 19 nt, Artificial Sequence
  Description of Artificial Sequence: Synthetic oligonucleotide
cuggggcaugauaaguauc

SEQ ID NO: 1380082 - RNA, 19 nt, Artificial Sequence
  Description of Artificial Sequence: Synthetic oligonucleotide
acauucgaauaaagggucu

SEQ ID NO: 1380083 - RNA, 19 nt, Artificial Sequence
  Description of Artificial Sequence: Synthetic oligonucleotide
caaaucucauccuaaucau

SEQ ID NO: 1380084 - RNA, 19 nt, Artificial Sequence
  Description of Artificial Sequence: Synthetic oligonucleotide
ugcuaaaguuguacucauu

SEQ ID NO: 1380085 - RNA, 19 nt, Artificial Sequence
  Description of Artificial Sequence: Synthetic oligonucleotide
agaagcacuuaauguuaua

SEQ ID NO: 1380086 - RNA, 19 nt, Artificial Sequence
  Description of Artificial Sequence: Synthetic oligonucleotide
gaguagggugcaugacuac

SEQ ID NO: 1380087 - RNA, 19 nt, Artificial Sequence
  Description of Artificial Sequence: Synthetic oligonucleotide
guagggugcaugacuacca

SEQ ID NO: 1380088 - RNA, 19 nt, Artificial Sequence
  Description of Artificial Sequence: Synthetic oligonucleotide
agguaaucgcaugcuucuc

SEQ ID NO: 1380089 - RNA, 19 nt, Artificial Sequence
  Description of Artificial Sequence: Synthetic oligonucleotide
cugugguggauacuccuca

SEQ ID NO: 1380090 - RNA, 19 nt, Artificial Sequence
  Description of Artificial Sequence: Synthetic oligonucleotide
cauuuuaccuggggcauga

SEQ ID NO: 1380091 - RNA, 19 nt, Artificial Sequence
  Description of Artificial Sequence: Synthetic oligonucleotide
ggccucgcagugcagaaug

SEQ ID NO: 1380092 - RNA, 19 nt, Artificial Sequence
  Description of Artificial Sequence: Synthetic oligonucleotide
guauccuaaacaugugcau

SEQ ID NO: 1380093 - RNA, 19 nt, Artificial Sequence
  Description of Artificial Sequence: Synthetic oligonucleotide
ggcaugauaaguaucaauu

SEQ ID NO: 1380094 - RNA, 19 nt, Artificial Sequence
  Description of Artificial Sequence: Synthetic oligonucleotide
gugauagauuuacucuuua

SEQ ID NO: 1380095 - RNA, 19 nt, Artificial Sequence
  Description of Artificial Sequence: Synthetic oligonucleotide
ccacuauauggcacucucg

SEQ ID NO: 1380096 - RNA, 19 nt, Artificial Sequence
  Description of Artificial Sequence: Synthetic oligonucleotide
gagaugagugaaccaacau

SEQ ID NO: 1380097 - RNA, 19 nt, Artificial Sequence
  Description of Artificial Sequence: Synthetic oligonucleotide
cuucuugugggccaacuau

SEQ ID NO: 1380098 - RNA, 19 nt, Artificial Sequence
  Description of Artificial Sequence: Synthetic oligonucleotide
gguaggauagccuucuauu

SEQ ID NO: 1380099 - RNA, 19 nt, Artificial Sequence
  Description of Artificial Sequence: Synthetic oligonucleotide
cuucuauucccaaucuaau

SEQ ID NO: 1380100 - RNA, 19 nt, Artificial Sequence
  Description of Artificial Sequence: Synthetic oligonucleotide
aauugucuacgagcaccau

SEQ ID NO: 1380101 - RNA, 19 nt, Artificial Sequence
  Description of Artificial Sequence: Synthetic oligonucleotide
gacuaccagcugguccugg

SEQ ID NO: 1380102 - RNA, 19 nt, Artificial Sequence
  Description of Artificial Sequence: Synthetic oligonucleotide
cccaaucuaaucuucuuaa

SEQ ID NO: 1380103 - RNA, 19 nt, Artificial Sequence
  Description of Artificial Sequence: Synthetic oligonucleotide
uuacagggcucuggagaug

SEQ ID NO: 1380104 - RNA, 19 nt, Artificial Sequence
  Description of Artificial Sequence: Synthetic oligonucleotide
guacaacgucacugugaag

SEQ ID NO: 1380105 - RNA, 19 nt, Artificial Sequence
  Description of Artificial Sequence: Synthetic oligonucleotide
gacguucacucucccugca

SEQ ID NO: 1380106 - RNA, 19 nt, Artificial Sequence
  Description of Artificial Sequence: Synthetic oligonucleotide
cuggggaggauauccagcu

SEQ ID NO: 1380107 - RNA, 19 nt, Artificial Sequence
  Description of Artificial Sequence: Synthetic oligonucleotide
ggagaugagugaaccaaca

SEQ ID NO: 1380108 - RNA, 19 nt, Artificial Sequence
  Description of Artificial Sequence: Synthetic oligonucleotide
ggugcaugacuaccagcug

SEQ ID NO: 1380109 - RNA, 19 nt, Artificial Sequence
  Description of Artificial Sequence: Synthetic oligonucleotide
uggggaggauauccagcuc

SEQ ID NO: 1380110 - RNA, 19 nt, Artificial Sequence
  Description of Artificial Sequence: Synthetic oligonucleotide
ugccaucaggacaccggau

SEQ ID NO: 1380111 - RNA, 19 nt, Artificial Sequence
  Description of Artificial Sequence: Synthetic oligonucleotide
guagguaggauagccuucu

SEQ ID NO: 1380112 - RNA, 19 nt, Artificial Sequence
  Description of Artificial Sequence: Synthetic oligonucleotide
gguaaucgcaugcuucucu

SEQ ID NO: 1380113 - RNA, 19 nt, Artificial Sequence
  Description of Artificial Sequence: Synthetic oligonucleotide
acucugauagaagcacuua

SEQ ID NO: 1380114 - RNA, 19 nt, Artificial Sequence
  Description of Artificial Sequence: Synthetic oligonucleotide
ugucuacgagcaccaucau

SEQ ID NO: 1380115 - RNA, 19 nt, Artificial Sequence
  Description of Artificial Sequence: Synthetic oligonucleotide
acuggacaguaaaccaccu

SEQ ID NO: 1380116 - RNA, 19 nt, Artificial Sequence
  Description of Artificial Sequence: Synthetic oligonucleotide
cucccugcaugugacucac

SEQ ID NO: 1380117 - RNA, 19 nt, Artificial Sequence
  Description of Artificial Sequence: Synthetic oligonucleotide
gacucacucuagaagaguu

SEQ ID NO: 1380118 - RNA, 19 nt, Artificial Sequence
  Description of Artificial Sequence: Synthetic oligonucleotide
cuauucccaaucuaaucuu

SEQ ID NO: 1380119 - RNA, 19 nt, Artificial Sequence
  Description of Artificial Sequence: Synthetic oligonucleotide
gcaugugacucacucuaga

SEQ ID NO: 1380120 - RNA, 19 nt, Artificial Sequence
  Description of Artificial Sequence: Synthetic oligonucleotide
gaagagcaaacaauucauu

SEQ ID NO: 1380121 - RNA, 19 nt, Artificial Sequence
  Description of Artificial Sequence: Synthetic oligonucleotide
acucgaguuuacaaucauu

SEQ ID NO: 1380122 - RNA, 19 nt, Artificial Sequence
  Description of Artificial Sequence: Synthetic oligonucleotide
ugccgacucuuuccuuccu

SEQ ID NO: 1380123 - RNA, 19 nt, Artificial Sequence
  Description of Artificial Sequence: Synthetic oligonucleotide
gaaagucuacaugccgacu

SEQ ID NO: 1380124 - RNA, 19 nt, Artificial Sequence
  Description of Artificial Sequence: Synthetic oligonucleotide
ugacuaccagcugguccug

SEQ ID NO: 1380125 - RNA, 19 nt, Artificial Sequence
  Description of Artificial Sequence: Synthetic oligonucleotide
cucccaggacauucgaaua

SEQ ID NO: 1380126 - RNA, 19 nt, Artificial Sequence
  Description of Artificial Sequence: Synthetic oligonucleotide
accuggggcaugauaagua

SEQ ID NO: 1380127 - RNA, 19 nt, Artificial Sequence
  Description of Artificial Sequence: Synthetic oligonucleotide
acucacucuagaagaguua

SEQ ID NO: 1380128 - RNA, 19 nt, Artificial Sequence
  Description of Artificial Sequence: Synthetic oligonucleotide
caucucuguuuucaaugua

SEQ ID NO: 1380129 - RNA, 19 nt, Artificial Sequence
  Description of Artificial Sequence: Synthetic oligonucleotide
ggcagacuggacaguaaac

SEQ ID NO: 1380130 - RNA, 19 nt, Artificial Sequence
  Description of Artificial Sequence: Synthetic oligonucleotide
uggcacucucguuccccac

SEQ ID NO: 1380131 - RNA, 19 nt, Artificial Sequence
  Description of Artificial Sequence: Synthetic oligonucleotide
acgucacugugaagaguag

SEQ ID NO: 1380132 - RNA, 19 nt, Artificial Sequence
  Description of Artificial Sequence: Synthetic oligonucleotide
cuugacguucacucucccu

SEQ ID NO: 1380133 - RNA, 19 nt, Artificial Sequence
  Description of Artificial Sequence: Synthetic oligonucleotide
cagcugccaauucccacca

SEQ ID NO: 1380134 - RNA, 19 nt, Artificial Sequence
  Description of Artificial Sequence: Synthetic oligonucleotide
caaagguaaucgcaugcuu

SEQ ID NO: 1380135 - RNA, 19 nt, Artificial Sequence
  Description of Artificial Sequence: Synthetic oligonucleotide
ggcucuggagaugagugaa

SEQ ID NO: 1380136 - RNA, 19 nt, Artificial Sequence
  Description of Artificial Sequence: Synthetic oligonucleotide
acaugccgacucuuuccuu

SEQ ID NO: 1380137 - RNA, 19 nt, Artificial Sequence
  Description of Artificial Sequence: Synthetic oligonucleotide
accuacugguaaacaaaua

SEQ ID NO: 1380138 - RNA, 19 nt, Artificial Sequence
  Description of Artificial Sequence: Synthetic oligonucleotide
agucuacaugccgacucuu

SEQ ID NO: 1380139 - RNA, 19 nt, Artificial Sequence
  Description of Artificial Sequence: Synthetic oligonucleotide
uuacugcccgaggcggggu

SEQ ID NO: 1380140 - RNA, 19 nt, Artificial Sequence
  Description of Artificial Sequence: Synthetic oligonucleotide
ccauuuaaccaccaucuau

SEQ ID NO: 1380141 - RNA, 19 nt, Artificial Sequence
  Description of Artificial Sequence: Synthetic oligonucleotide
caaggucauuacugcccga

SEQ ID NO: 1380142 - RNA, 19 nt, Artificial Sequence
  Description of Artificial Sequence: Synthetic oligonucleotide
gcauuggauucugugcauc

SEQ ID NO: 1380143 - RNA, 19 nt, Artificial Sequence
  Description of Artificial Sequence: Synthetic oligonucleotide
guggccucgcagugcagaa

SEQ ID NO: 1380144 - RNA, 19 nt, Artificial Sequence
  Description of Artificial Sequence: Synthetic oligonucleotide
gggcaugauaaguaucaau

SEQ ID NO: 1380145 - RNA, 19 nt, Artificial Sequence
  Description of Artificial Sequence: Synthetic oligonucleotide
caccaucuauaaagugcaa

SEQ ID NO: 1380146 - RNA, 19 nt, Artificial Sequence
  Description of Artificial Sequence: Synthetic oligonucleotide
gucuacgagcaccaucauu

SEQ ID NO: 1380147 - RNA, 19 nt, Artificial Sequence
  Description of Artificial Sequence: Synthetic oligonucleotide
caucuguaagcaccacuau

SEQ ID NO: 1380148 - RNA, 19 nt, Artificial Sequence
  Description of Artificial Sequence: Synthetic oligonucleotide
cauucgaauaaagggucuu

SEQ ID NO: 1380149 - RNA, 19 nt, Artificial Sequence
  Description of Artificial Sequence: Synthetic oligonucleotide
cagcuccauuuaaccacca

SEQ ID NO: 1380150 - RNA, 19 nt, Artificial Sequence
  Description of Artificial Sequence: Synthetic oligonucleotide
cccuguacaaagaaccaau

SEQ ID NO: 1380151 - RNA, 19 nt, Artificial Sequence
  Description of Artificial Sequence: Synthetic oligonucleotide
ggugauagauuuacucuuu

SEQ ID NO: 1380152 - RNA, 19 nt, Artificial Sequence
  Description of Artificial Sequence: Synthetic oligonucleotide
ggauucugugcaucaggau

SEQ ID NO: 1380153 - RNA, 19 nt, Artificial Sequence
  Description of Artificial Sequence: Synthetic oligonucleotide
caugagagggaggaucauu

SEQ ID NO: 1380154 - RNA, 19 nt, Artificial Sequence
  Description of Artificial Sequence: Synthetic oligonucleotide
ccuacacugcaguauccua

SEQ ID NO: 1380155 - RNA, 19 nt, Artificial Sequence
  Description of Artificial Sequence: Synthetic oligonucleotide
ccuaucccauaacucuuaa

SEQ ID NO: 1380156 - RNA, 19 nt, Artificial Sequence
  Description of Artificial Sequence: Synthetic oligonucleotide
caacgucacugugaagagu

SEQ ID NO: 1380157 - RNA, 19 nt, Artificial Sequence
  Description of Artificial Sequence: Synthetic oligonucleotide
gucuacaugccgacucuuu

SEQ ID NO: 1380158 - RNA, 19 nt, Artificial Sequence
  Description of Artificial Sequence: Synthetic oligonucleotide
ggggcaugauaaguaucaa

SEQ ID NO: 1380159 - RNA, 19 nt, Artificial Sequence
  Description of Artificial Sequence: Synthetic oligonucleotide
gcaccacuauauggcacuc

SEQ ID NO: 1380160 - RNA, 19 nt, Artificial Sequence
  Description of Artificial Sequence: Synthetic oligonucleotide
caucaggacaccggaugau

SEQ ID NO: 1380161 - RNA, 19 nt, Artificial Sequence
  Description of Artificial Sequence: Synthetic oligonucleotide
ccuggggcaugauaaguau

SEQ ID NO: 1380162 - RNA, 19 nt, Artificial Sequence
  Description of Artificial Sequence: Synthetic oligonucleotide
gccuacacugcaguauccu

SEQ ID NO: 1380163 - RNA, 19 nt, Artificial Sequence
  Description of Artificial Sequence: Synthetic oligonucleotide
ggacaguaaaccaccucuu

SEQ ID NO: 1380164 - RNA, 19 nt, Artificial Sequence
  Description of Artificial Sequence: Synthetic oligonucleotide
gcaugacuaccagcugguc

SEQ ID NO: 1380165 - RNA, 19 nt, Artificial Sequence
  Description of Artificial Sequence: Synthetic oligonucleotide
gcuaugguuucaggaacau

SEQ ID NO: 1380166 - RNA, 19 nt, Artificial Sequence
  Description of Artificial Sequence: Synthetic oligonucleotide
cugccagguuggugauaga

SEQ ID NO: 1380167 - RNA, 19 nt, Artificial Sequence
  Description of Artificial Sequence: Synthetic oligonucleotide
caccacuauauggcacucu

SEQ ID NO: 1380168 - RNA, 19 nt, Artificial Sequence
  Description of Artificial Sequence: Synthetic oligonucleotide
cgcaugcuucucucagcuc

SEQ ID NO: 1380169 - RNA, 19 nt, Artificial Sequence
  Description of Artificial Sequence: Synthetic oligonucleotide
gccucgcagugcagaauga

SEQ ID NO: 1380170 - RNA, 19 nt, Artificial Sequence
  Description of Artificial Sequence: Synthetic oligonucleotide
cuaccaugagagggaggau

SEQ ID NO: 1380171 - RNA, 19 nt, Artificial Sequence
  Description of Artificial Sequence: Synthetic oligonucleotide
ccuguggaguagggugcau

SEQ ID NO: 1380172 - RNA, 19 nt, Artificial Sequence
  Description of Artificial Sequence: Synthetic oligonucleotide
aauuaaauguucuuuguag

SEQ ID NO: 1380173 - RNA, 19 nt, Artificial Sequence
  Description of Artificial Sequence: Synthetic oligonucleotide
uacaccaucgucaagaucc

SEQ ID NO: 1380174 - RNA, 19 nt, Artificial Sequence
  Description of Artificial Sequence: Synthetic oligonucleotide
auacacaauauguugcugc

SEQ ID NO: 1380175 - RNA, 19 nt, Artificial Sequence
  Description of Artificial Sequence: Synthetic oligonucleotide
uuagcuucuuugcacaugg

SEQ ID NO: 1380176 - RNA, 19 nt, Artificial Sequence
  Description of Artificial Sequence: Synthetic oligonucleotide
acuuucuccugauugauac

SEQ ID NO: 1380177 - RNA, 19 nt, Artificial Sequence
  Description of Artificial Sequence: Synthetic oligonucleotide
uaaguuagcacaaucauuu

SEQ ID NO: 1380178 - RNA, 19 nt, Artificial Sequence
  Description of Artificial Sequence: Synthetic oligonucleotide
agcacaaucauuugaauug

SEQ ID NO: 1380179 - RNA, 19 nt, Artificial Sequence
  Description of Artificial Sequence: Synthetic oligonucleotide
cuuacgaccaccaaguuuc

SEQ ID NO: 1380180 - RNA, 19 nt, Artificial Sequence
  Description of Artificial Sequence: Synthetic oligonucleotide
uuuuaguguaugcagauaa

SEQ ID NO: 1380181 - RNA, 19 nt, Artificial Sequence
  Description of Artificial Sequence: Synthetic oligonucleotide
uuuuggucuaaccagaguc

SEQ ID NO: 1380182 - RNA, 19 nt, Artificial Sequence
  Description of Artificial Sequence: Synthetic oligonucleotide
aacaugacaugagaugucc

SEQ ID NO: 1380183 - RNA, 19 nt, Artificial Sequence
  Description of Artificial Sequence: Synthetic oligonucleotide
ucuuucauaguauagguau

SEQ ID NO: 1380184 - RNA, 19 nt, Artificial Sequence
  Description of Artificial Sequence: Synthetic oligonucleotide
uaaauuguacaacaaauuu

SEQ ID NO: 1380185 - RNA, 19 nt, Artificial Sequence
  Description of Artificial Sequence: Synthetic oligonucleotide
aauauacuggccaagauaa

SEQ ID NO: 1380186 - RNA, 19 nt, Artificial Sequence
  Description of Artificial Sequence: Synthetic oligonucleotide
gacugagacacuuuucucg

SEQ ID NO: 1380187 - RNA, 19 nt, Artificial Sequence
  Description of Artificial Sequence: Synthetic oligonucleotide
ugagucaagagacucaacu

SEQ ID NO: 1380188 - RNA, 19 nt, Artificial Sequence
  Description of Artificial Sequence: Synthetic oligonucleotide
agcuaaaauaaguuagcac

SEQ ID NO: 1380189 - RNA, 19 nt, Artificial Sequence
  Description of Artificial Sequence: Synthetic oligonucleotide
uaaucguuuagucauaaua

SEQ ID NO: 1380190 - RNA, 19 nt, Artificial Sequence
  Description of Artificial Sequence: Synthetic oligonucleotide
ucagcuagcuaaaauaagu

SEQ ID NO: 1380191 - RNA, 19 nt, Artificial Sequence
  Description of Artificial Sequence: Synthetic oligonucleotide
uuuaacuccuuacaugaga

SEQ ID NO: 1380192 - RNA, 19 nt, Artificial Sequence
  Description of Artificial Sequence: Synthetic oligonucleotide
uaagccuucuuccaguuug

SEQ ID NO: 1380193 - RNA, 19 nt, Artificial Sequence
  Description of Artificial Sequence: Synthetic oligonucleotide
ucauauaaucguuuaguca

SEQ ID NO: 1380194 - RNA, 19 nt, Artificial Sequence
  Description of Artificial Sequence: Synthetic oligonucleotide
cauuauauguauuuuccug

SEQ ID NO: 1380195 - RNA, 19 nt, Artificial Sequence
  Description of Artificial Sequence: Synthetic oligonucleotide
gcuaaaauaaguuagcaca

SEQ ID NO: 1380196 - RNA, 19 nt, Artificial Sequence
  Description of Artificial Sequence: Synthetic oligonucleotide
uaaaaccuaaucuggggag

SEQ ID NO: 1380197 - RNA, 19 nt, Artificial Sequence
  Description of Artificial Sequence: Synthetic oligonucleotide
ucuguagaucauuauaugu

SEQ ID NO: 1380198 - RNA, 19 nt, Artificial Sequence
  Description of Artificial Sequence: Synthetic oligonucleotide
gauugauacacugugacuc

SEQ ID NO: 1380199 - RNA, 19 nt, Artificial Sequence
  Description of Artificial Sequence: Synthetic oligonucleotide
caaacaaaucuccuaaaag

SEQ ID NO: 1380200 - RNA, 19 nt, Artificial Sequence
  Description of Artificial Sequence: Synthetic oligonucleotide
ucuggggaguuauauauag

SEQ ID NO: 1380201 - RNA, 19 nt, Artificial Sequence
  Description of Artificial Sequence: Synthetic oligonucleotide
ucgauagaccucaucaucc

SEQ ID NO: 1380202 - RNA, 19 nt, Artificial Sequence
  Description of Artificial Sequence: Synthetic oligonucleotide
auugaucggaaaccgaauc

SEQ ID NO: 1380203 - RNA, 19 nt, Artificial Sequence
  Description of Artificial Sequence: Synthetic oligonucleotide
ucguuuagucauaauauac

SEQ ID NO: 1380204 - RNA, 19 nt, Artificial Sequence
  Description of Artificial Sequence: Synthetic oligonucleotide
auuuccaauagucagcuaa

SEQ ID NO: 1380205 - RNA, 19 nt, Artificial Sequence
  Description of Artificial Sequence: Synthetic oligonucleotide
ugacuuacgaccaccaagu

SEQ ID NO: 1380206 - RNA, 19 nt, Artificial Sequence
  Description of Artificial Sequence: Synthetic oligonucleotide
uguucuuuguagaaggaaa

SEQ ID NO: 1380207 - RNA, 19 nt, Artificial Sequence
  Description of Artificial Sequence: Synthetic oligonucleotide
gaaucugugaggugcuucg

SEQ ID NO: 1380208 - RNA, 19 nt, Artificial Sequence
  Description of Artificial Sequence: Synthetic oligonucleotide
cuagcuaaaauaaguuagc

SEQ ID NO: 1380209 - RNA, 19 nt, Artificial Sequence
  Description of Artificial Sequence: Synthetic oligonucleotide
uccugauugauacacugug

SEQ ID NO: 1380210 - RNA, 19 nt, Artificial Sequence
  Description of Artificial Sequence: Synthetic oligonucleotide
auaaaaccuaaucugggga

SEQ ID NO: 1380211 - RNA, 19 nt, Artificial Sequence
  Description of Artificial Sequence: Synthetic oligonucleotide
aaucguuuagucauaauau

SEQ ID NO: 1380212 - RNA, 19 nt, Artificial Sequence
  Description of Artificial Sequence: Synthetic oligonucleotide
ucagcuaaugagauuucag

SEQ ID NO: 1380213 - RNA, 19 nt, Artificial Sequence
  Description of Artificial Sequence: Synthetic oligonucleotide
uccuaaaagaucauuugaa

SEQ ID NO: 1380214 - RNA, 19 nt, Artificial Sequence
  Description of Artificial Sequence: Synthetic oligonucleotide
auacuugauaaauuguaca

SEQ ID NO: 1380215 - RNA, 19 nt, Artificial Sequence
  Description of Artificial Sequence: Synthetic oligonucleotide
aaaagugugugugugugug

SEQ ID NO: 1380216 - RNA, 19 nt, Artificial Sequence
  Description of Artificial Sequence: Synthetic oligonucleotide
ucuccuaaaagaucauuug

SEQ ID NO: 1380217 - RNA, 19 nt, Artificial Sequence
  Description of Artificial Sequence: Synthetic oligonucleotide
accaaguuucuguagauca

SEQ ID NO: 1380218 - RNA, 19 nt, Artificial Sequence
  Description of Artificial Sequence: Synthetic oligonucleotide
uuaaaagugugugugugug

SEQ ID NO: 1380219 - RNA, 19 nt, Artificial Sequence
  Description of Artificial Sequence: Synthetic oligonucleotide
auugauacacugugacucg

SEQ ID NO: 1380220 - RNA, 19 nt, Artificial Sequence
  Description of Artificial Sequence: Synthetic oligonucleotide
cagcuaaugagauuucagg

SEQ ID NO: 1380221 - RNA, 19 nt, Artificial Sequence
  Description of Artificial Sequence: Synthetic oligonucleotide
uguagaucauuauauguau

SEQ ID NO: 1380222 - RNA, 19 nt, Artificial Sequence
  Description of Artificial Sequence: Synthetic oligonucleotide
gacucgauagaccucauca

SEQ ID NO: 1380223 - RNA, 19 nt, Artificial Sequence
  Description of Artificial Sequence: Synthetic oligonucleotide
acuugauaaauuguacaac

SEQ ID NO: 1380224 - RNA, 19 nt, Artificial Sequence
  Description of Artificial Sequence: Synthetic oligonucleotide
aacuccuuacaugagaggu

SEQ ID NO: 1380225 - RNA, 19 nt, Artificial Sequence
  Description of Artificial Sequence: Synthetic oligonucleotide
uugaucggaaaccgaaucc

SEQ ID NO: 1380226 - RNA, 19 nt, Artificial Sequence
  Description of Artificial Sequence: Synthetic oligonucleotide
agcuaaugagauuucagga

SEQ ID NO: 1380227 - RNA, 19 nt, Artificial Sequence
  Description of Artificial Sequence: Synthetic oligonucleotide
uuuuaggccgcccuuggca

SEQ ID NO: 1380228 - RNA, 19 nt, Artificial Sequence
  Description of Artificial Sequence: Synthetic oligonucleotide
aguuuugccaugaacaaug

SEQ ID NO: 1380229 - RNA, 19 nt, Artificial Sequence
  Description of Artificial Sequence: Synthetic oligonucleotide
auacacugugacucgauag

SEQ ID NO: 1380230 - RNA, 19 nt, Artificial Sequence
  Description of Artificial Sequence: Synthetic oligonucleotide
aaucauucgcuguagcuuu

SEQ ID NO: 1380231 - RNA, 19 nt, Artificial Sequence
  Description of Artificial Sequence: Synthetic oligonucleotide
ugguucaauggcauuaaga

SEQ ID NO: 1380232 - RNA, 19 nt, Artificial Sequence
  Description of Artificial Sequence: Synthetic oligonucleotide
aagagagaagccagauucc

SEQ ID NO: 1380233 - RNA, 19 nt, Artificial Sequence
  Description of Artificial Sequence: Synthetic oligonucleotide
uagaucauuauauguauuu

SEQ ID NO: 1380234 - RNA, 19 nt, Artificial Sequence
  Description of Artificial Sequence: Synthetic oligonucleotide
aagccaauucucacgaagg

SEQ ID NO: 1380235 - RNA, 19 nt, Artificial Sequence
  Description of Artificial Sequence: Synthetic oligonucleotide
uuuggucuaaccagagucu

SEQ ID NO: 1380236 - RNA, 19 nt, Artificial Sequence
  Description of Artificial Sequence: Synthetic oligonucleotide
cugauugauacacugugac

SEQ ID NO: 1380237 - RNA, 19 nt, Artificial Sequence
  Description of Artificial Sequence: Synthetic oligonucleotide
uuuaaaagugugugugugu

SEQ ID NO: 1380238 - RNA, 19 nt, Artificial Sequence
  Description of Artificial Sequence: Synthetic oligonucleotide
uggcaaaucacacaugguu

SEQ ID NO: 1380239 - RNA, 19 nt, Artificial Sequence
  Description of Artificial Sequence: Synthetic oligonucleotide
agguauauauuuccuuauc

SEQ ID NO: 1380240 - RNA, 19 nt, Artificial Sequence
  Description of Artificial Sequence: Synthetic oligonucleotide
ggauucauuucauugcagg

SEQ ID NO: 1380241 - RNA, 19 nt, Artificial Sequence
  Description of Artificial Sequence: Synthetic oligonucleotide
agguacauuuccaauaguc

SEQ ID NO: 1380242 - RNA, 19 nt, Artificial Sequence
  Description of Artificial Sequence: Synthetic oligonucleotide
aguuagaaauauagaauuc

SEQ ID NO: 1380243 - RNA, 19 nt, Artificial Sequence
  Description of Artificial Sequence: Synthetic oligonucleotide
cucuugcugacuuacgacc

SEQ ID NO: 1380244 - RNA, 19 nt, Artificial Sequence
  Description of Artificial Sequence: Synthetic oligonucleotide
acuuacaccaucgucaaga

SEQ ID NO: 1380245 - RNA, 19 nt, Artificial Sequence
  Description of Artificial Sequence: Synthetic oligonucleotide
uuucauaguauagguaucu

SEQ ID NO: 1380246 - RNA, 19 nt, Artificial Sequence
  Description of Artificial Sequence: Synthetic oligonucleotide
uuacaugagagguacuaaa

SEQ ID NO: 1380247 - RNA, 19 nt, Artificial Sequence
  Description of Artificial Sequence: Synthetic oligonucleotide
ggaaaccgaauccugaucc

SEQ ID NO: 1380248 - RNA, 19 nt, Artificial Sequence
  Description of Artificial Sequence: Synthetic oligonucleotide
cugacuuacgaccaccaag

SEQ ID NO: 1380249 - RNA, 19 nt, Artificial Sequence
  Description of Artificial Sequence: Synthetic oligonucleotide
ucguuuuaguguaugcaga

SEQ ID NO: 1380250 - RNA, 19 nt, Artificial Sequence
  Description of Artificial Sequence: Synthetic oligonucleotide
uggggaguuauauauaguu

SEQ ID NO: 1380251 - RNA, 19 nt, Artificial Sequence
  Description of Artificial Sequence: Synthetic oligonucleotide
aauagucagcuaaugagau

SEQ ID NO: 1380252 - RNA, 19 nt, Artificial Sequence
  Description of Artificial Sequence: Synthetic oligonucleotide
ccaauagucagcuaaugag

SEQ ID NO: 1380253 - RNA, 19 nt, Artificial Sequence
  Description of Artificial Sequence: Synthetic oligonucleotide
cugggagguauauauuucc

SEQ ID NO: 1380254 - RNA, 19 nt, Artificial Sequence
  Description of Artificial Sequence: Synthetic oligonucleotide
agagacucaacuucaaauu

SEQ ID NO: 1380255 - RNA, 19 nt, Artificial Sequence
  Description of Artificial Sequence: Synthetic oligonucleotide
ugcaggacuccuuacaauc

SEQ ID NO: 1380256 - RNA, 19 nt, Artificial Sequence
  Description of Artificial Sequence: Synthetic oligonucleotide
acaaaucuccuaaaagauc

SEQ ID NO: 1380257 - RNA, 19 nt, Artificial Sequence
  Description of Artificial Sequence: Synthetic oligonucleotide
aaugagauuucaggaucuc

SEQ ID NO: 1380258 - RNA, 19 nt, Artificial Sequence
  Description of Artificial Sequence: Synthetic oligonucleotide
acagacuuuaacaacuuca

SEQ ID NO: 1380259 - RNA, 19 nt, Artificial Sequence
  Description of Artificial Sequence: Synthetic oligonucleotide
aaguuagcacaaucauuug

SEQ ID NO: 1380260 - RNA, 19 nt, Artificial Sequence
  Description of Artificial Sequence: Synthetic oligonucleotide
uacacaauauguugcugcu

SEQ ID NO: 1380261 - RNA, 19 nt, Artificial Sequence
  Description of Artificial Sequence: Synthetic oligonucleotide
acucucuugugacugggag

SEQ ID NO: 1380262 - RNA, 19 nt, Artificial Sequence
  Description of Artificial Sequence: Synthetic oligonucleotide
uugcaggagguacauuucc

SEQ ID NO: 1380263 - RNA, 19 nt, Artificial Sequence
  Description of Artificial Sequence: Synthetic oligonucleotide
ugguuuuggucuaaccaga

SEQ ID NO: 1380264 - RNA, 19 nt, Artificial Sequence
  Description of Artificial Sequence: Synthetic oligonucleotide
caauagucagcuaaugaga

SEQ ID NO: 1380265 - RNA, 19 nt, Artificial Sequence
  Description of Artificial Sequence: Synthetic oligonucleotide
ugauugauacacugugacu

SEQ ID NO: 1380266 - RNA, 19 nt, Artificial Sequence
  Description of Artificial Sequence: Synthetic oligonucleotide
uaaucucuuucauaguaua

SEQ ID NO: 1380267 - RNA, 19 nt, Artificial Sequence
  Description of Artificial Sequence: Synthetic oligonucleotide
uuuaguguaugcagauaaa

SEQ ID NO: 1380268 - RNA, 19 nt, Artificial Sequence
  Description of Artificial Sequence: Synthetic oligonucleotide
ucauaguauagguaucuuu

SEQ ID NO: 1380269 - RNA, 19 nt, Artificial Sequence
  Description of Artificial Sequence: Synthetic oligonucleotide
uagcuaaaauaaguuagca

SEQ ID NO: 1380270 - RNA, 19 nt, Artificial Sequence
  Description of Artificial Sequence: Synthetic oligonucleotide
acgaccaccaaguuucugu

SEQ ID NO: 1380271 - RNA, 19 nt, Artificial Sequence
  Description of Artificial Sequence: Synthetic oligonucleotide
ugaacaaugcaaccauuuu

SEQ ID NO: 1380272 - RNA, 19 nt, Artificial Sequence
  Description of Artificial Sequence: Synthetic oligonucleotide
uacaaucauucgcuguagc

SEQ ID NO: 1380273 - RNA, 19 nt, Artificial Sequence
  Description of Artificial Sequence: Synthetic oligonucleotide
ugcaccgacagacuuuaac

SEQ ID NO: 1380274 - RNA, 19 nt, Artificial Sequence
  Description of Artificial Sequence: Synthetic oligonucleotide
uuuccaauagucagcuaau

SEQ ID NO: 1380275 - RNA, 19 nt, Artificial Sequence
  Description of Artificial Sequence: Synthetic oligonucleotide
aagugugugugugugugug

SEQ ID NO: 1380276 - RNA, 19 nt, Artificial Sequence
  Description of Artificial Sequence: Synthetic oligonucleotide
aggguccaacaucuguugc

SEQ ID NO: 1380277 - RNA, 19 nt, Artificial Sequence
  Description of Artificial Sequence: Synthetic oligonucleotide
auaauauacuggccaagau

SEQ ID NO: 1380278 - RNA, 19 nt, Artificial Sequence
  Description of Artificial Sequence: Synthetic oligonucleotide
uuuugccaugaacaaugca

SEQ ID NO: 1380279 - RNA, 19 nt, Artificial Sequence
  Description of Artificial Sequence: Synthetic oligonucleotide
ugcuucggcaccaucagua

SEQ ID NO: 1380280 - RNA, 19 nt, Artificial Sequence
  Description of Artificial Sequence: Synthetic oligonucleotide
uagcacaaucauuugaauu

SEQ ID NO: 1380281 - RNA, 19 nt, Artificial Sequence
  Description of Artificial Sequence: Synthetic oligonucleotide
ugaucggaaaccgaauccu

SEQ ID NO: 1380282 - RNA, 19 nt, Artificial Sequence
  Description of Artificial Sequence: Synthetic oligonucleotide
uacacugaauugaucggaa

SEQ ID NO: 1380283 - RNA, 19 nt, Artificial Sequence
  Description of Artificial Sequence: Synthetic oligonucleotide
uccuuaucaucacuuuccu

SEQ ID NO: 1380284 - RNA, 19 nt, Artificial Sequence
  Description of Artificial Sequence: Synthetic oligonucleotide
caauucucacgaagggucc

SEQ ID NO: 1380285 - RNA, 19 nt, Artificial Sequence
  Description of Artificial Sequence: Synthetic oligonucleotide
cuuucauaguauagguauc

SEQ ID NO: 1380286 - RNA, 19 nt, Artificial Sequence
  Description of Artificial Sequence: Synthetic oligonucleotide
uugacggcugggaauaguc

SEQ ID NO: 1380287 - RNA, 19 nt, Artificial Sequence
  Description of Artificial Sequence: Synthetic oligonucleotide
uuuuaugggcaggucagcu

SEQ ID NO: 1380288 - RNA, 19 nt, Artificial Sequence
  Description of Artificial Sequence: Synthetic oligonucleotide
ucucaucauauaaucguuu

SEQ ID NO: 1380289 - RNA, 19 nt, Artificial Sequence
  Description of Artificial Sequence: Synthetic oligonucleotide
uuaagagagaagccagauu

SEQ ID NO: 1380290 - RNA, 19 nt, Artificial Sequence
  Description of Artificial Sequence: Synthetic oligonucleotide
aaagugugugugugugugu

SEQ ID NO: 1380291 - RNA, 19 nt, Artificial Sequence
  Description of Artificial Sequence: Synthetic oligonucleotide
uauaaucguuuagucauaa

SEQ ID NO: 1380292 - RNA, 19 nt, Artificial Sequence
  Description of Artificial Sequence: Synthetic oligonucleotide
uuacaaucauucgcuguag

SEQ ID NO: 1380293 - RNA, 19 nt, Artificial Sequence
  Description of Artificial Sequence: Synthetic oligonucleotide
agcuagcuaaaauaaguua

SEQ ID NO: 1380294 - RNA, 19 nt, Artificial Sequence
  Description of Artificial Sequence: Synthetic oligonucleotide
acaugagagguacuaaaua

SEQ ID NO: 1380295 - RNA, 19 nt, Artificial Sequence
  Description of Artificial Sequence: Synthetic oligonucleotide
ccuaaaagaucauuugaac

SEQ ID NO: 1380296 - RNA, 19 nt, Artificial Sequence
  Description of Artificial Sequence: Synthetic oligonucleotide
ugcuauaaacaaugcugcu

SEQ ID NO: 1380297 - RNA, 19 nt, Artificial Sequence
  Description of Artificial Sequence: Synthetic oligonucleotide
uguaaucuucugagucaag

SEQ ID NO: 1380298 - RNA, 19 nt, Artificial Sequence
  Description of Artificial Sequence: Synthetic oligonucleotide
ucccuuuaucuuccggaag

SEQ ID NO: 1380299 - RNA, 19 nt, Artificial Sequence
  Description of Artificial Sequence: Synthetic oligonucleotide
cuucucaucauauaaucgu

SEQ ID NO: 1380300 - RNA, 19 nt, Artificial Sequence
  Description of Artificial Sequence: Synthetic oligonucleotide
ugccaugaacaaugcaacc

SEQ ID NO: 1380301 - RNA, 19 nt, Artificial Sequence
  Description of Artificial Sequence: Synthetic oligonucleotide
uaaaagugugugugugugu

SEQ ID NO: 1380302 - RNA, 19 nt, Artificial Sequence
  Description of Artificial Sequence: Synthetic oligonucleotide
cucgauagaccucaucauc

SEQ ID NO: 1380303 - RNA, 19 nt, Artificial Sequence
  Description of Artificial Sequence: Synthetic oligonucleotide
agacuuuaacaacuucaga

SEQ ID NO: 1380304 - RNA, 19 nt, Artificial Sequence
  Description of Artificial Sequence: Synthetic oligonucleotide
guuagcacaaucauuugaa

SEQ ID NO: 1380305 - RNA, 19 nt, Artificial Sequence
  Description of Artificial Sequence: Synthetic oligonucleotide
uguugcagugagguggaag

SEQ ID NO: 1380306 - RNA, 19 nt, Artificial Sequence
  Description of Artificial Sequence: Synthetic oligonucleotide
acaugagauguccaguuuu

SEQ ID NO: 1380307 - RNA, 19 nt, Artificial Sequence
  Description of Artificial Sequence: Synthetic oligonucleotide
cuuacaaucauucgcugua

SEQ ID NO: 1380308 - RNA, 19 nt, Artificial Sequence
  Description of Artificial Sequence: Synthetic oligonucleotide
caucuaagccuucuuccag

SEQ ID NO: 1380309 - RNA, 19 nt, Artificial Sequence
  Description of Artificial Sequence: Synthetic oligonucleotide
uuagcacaaucauuugaau

SEQ ID NO: 1380310 - RNA, 19 nt, Artificial Sequence
  Description of Artificial Sequence: Synthetic oligonucleotide
uuuugugcaccgacagacu

SEQ ID NO: 1380311 - RNA, 19 nt, Artificial Sequence
  Description of Artificial Sequence: Synthetic oligonucleotide
ugacggcugggaauagucc

SEQ ID NO: 1380312 - RNA, 19 nt, Artificial Sequence
  Description of Artificial Sequence: Synthetic oligonucleotide
acaugggaaacaugacaug

SEQ ID NO: 1380313 - RNA, 19 nt, Artificial Sequence
  Description of Artificial Sequence: Synthetic oligonucleotide
cuccuuacaugagagguac

SEQ ID NO: 1380314 - RNA, 19 nt, Artificial Sequence
  Description of Artificial Sequence: Synthetic oligonucleotide
uguuccgaagcuggaaucu

SEQ ID NO: 1380315 - RNA, 19 nt, Artificial Sequence
  Description of Artificial Sequence: Synthetic oligonucleotide
ucaagagacucaacuucaa

SEQ ID NO: 1380316 - RNA, 19 nt, Artificial Sequence
  Description of Artificial Sequence: Synthetic oligonucleotide
gcuggaaucugugaggugc

SEQ ID NO: 1380317 - RNA, 19 nt, Artificial Sequence
  Description of Artificial Sequence: Synthetic oligonucleotide
uuuaggccgcccuuggcaa

SEQ ID NO: 1380318 - RNA, 19 nt, Artificial Sequence
  Description of Artificial Sequence: Synthetic oligonucleotide
gugugugugugugugugcg

SEQ ID NO: 1380319 - RNA, 19 nt, Artificial Sequence
  Description of Artificial Sequence: Synthetic oligonucleotide
uccuuacaaucauucgcug

SEQ ID NO: 1380320 - RNA, 19 nt, Artificial Sequence
  Description of Artificial Sequence: Synthetic oligonucleotide
uucccuuuaucuuccggaa

SEQ ID NO: 1380321 - RNA, 19 nt, Artificial Sequence
  Description of Artificial Sequence: Synthetic oligonucleotide
acuuacgaccaccaaguuu

SEQ ID NO: 1380322 - RNA, 19 nt, Artificial Sequence
  Description of Artificial Sequence: Synthetic oligonucleotide
aauugaucggaaaccgaau

SEQ ID NO: 1380323 - RNA, 19 nt, Artificial Sequence
  Description of Artificial Sequence: Synthetic oligonucleotide
gucauaauauacuggccaa

SEQ ID NO: 1380324 - RNA, 19 nt, Artificial Sequence
  Description of Artificial Sequence: Synthetic oligonucleotide
ugugugugugugcgcacgc

SEQ ID NO: 1380325 - RNA, 19 nt, Artificial Sequence
  Description of Artificial Sequence: Synthetic oligonucleotide
gcuauaaacaaugcugcug

SEQ ID NO: 1380326 - RNA, 19 nt, Artificial Sequence
  Description of Artificial Sequence: Synthetic oligonucleotide
acuuuccucagugcaggac

SEQ ID NO: 1380327 - RNA, 19 nt, Artificial Sequence
  Description of Artificial Sequence: Synthetic oligonucleotide
acaaugguuuuggucuaac

SEQ ID NO: 1380328 - RNA, 19 nt, Artificial Sequence
  Description of Artificial Sequence: Synthetic oligonucleotide
uuuaugggcaggucagcua

SEQ ID NO: 1380329 - RNA, 19 nt, Artificial Sequence
  Description of Artificial Sequence: Synthetic oligonucleotide
acaauauguugcugcuucu

SEQ ID NO: 1380330 - RNA, 19 nt, Artificial Sequence
  Description of Artificial Sequence: Synthetic oligonucleotide
agacucaacuucaaauucu

SEQ ID NO: 1380331 - RNA, 19 nt, Artificial Sequence
  Description of Artificial Sequence: Synthetic oligonucleotide
ugugugugugugugugugc

SEQ ID NO: 1380332 - RNA, 19 nt, Artificial Sequence
  Description of Artificial Sequence: Synthetic oligonucleotide
uuccaauagucagcuaaug

SEQ ID NO: 1380333 - RNA, 19 nt, Artificial Sequence
  Description of Artificial Sequence: Synthetic oligonucleotide
uuccgaagcuggaaucugu

SEQ ID NO: 1380334 - RNA, 19 nt, Artificial Sequence
  Description of Artificial Sequence: Synthetic oligonucleotide
ugauccaaccagucaccug

SEQ ID NO: 1380335 - RNA, 19 nt, Artificial Sequence
  Description of Artificial Sequence: Synthetic oligonucleotide
aauucucacgaagggucca

SEQ ID NO: 1380336 - RNA, 19 nt, Artificial Sequence
  Description of Artificial Sequence: Synthetic oligonucleotide
gucagcuagcuaaaauaag

SEQ ID NO: 1380337 - RNA, 19 nt, Artificial Sequence
  Description of Artificial Sequence: Synthetic oligonucleotide
ggcauuaagagagaagcca

SEQ ID NO: 1380338 - RNA, 19 nt, Artificial Sequence
  Description of Artificial Sequence: Synthetic oligonucleotide
ugcgcgcuugcuuucagaa

SEQ ID NO: 1380339 - RNA, 19 nt, Artificial Sequence
  Description of Artificial Sequence: Synthetic oligonucleotide
auaaucucuuucauaguau

SEQ ID NO: 1380340 - RNA, 19 nt, Artificial Sequence
  Description of Artificial Sequence: Synthetic oligonucleotide
acucgauagaccucaucau

SEQ ID NO: 1380341 - RNA, 19 nt, Artificial Sequence
  Description of Artificial Sequence: Synthetic oligonucleotide
ucuugugacugggagguau

SEQ ID NO: 1380342 - RNA, 19 nt, Artificial Sequence
  Description of Artificial Sequence: Synthetic oligonucleotide
ucggaaaccgaauccugau

SEQ ID NO: 1380343 - RNA, 19 nt, Artificial Sequence
  Description of Artificial Sequence: Synthetic oligonucleotide
aucuccuaaaagaucauuu

SEQ ID NO: 1380344 - RNA, 19 nt, Artificial Sequence
  Description of Artificial Sequence: Synthetic oligonucleotide
aaaccgaauccugauccaa

SEQ ID NO: 1380345 - RNA, 19 nt, Artificial Sequence
  Description of Artificial Sequence: Synthetic oligonucleotide
cauuaagagagaagccaga

SEQ ID NO: 1380346 - RNA, 19 nt, Artificial Sequence
  Description of Artificial Sequence: Synthetic oligonucleotide
gaucggaaaccgaauccug

SEQ ID NO: 1380347 - RNA, 19 nt, Artificial Sequence
  Description of Artificial Sequence: Synthetic oligonucleotide
agcuuggcacuccaaacaa

SEQ ID NO: 1380348 - RNA, 19 nt, Artificial Sequence
  Description of Artificial Sequence: Synthetic oligonucleotide
agaucauuauauguauuuu

SEQ ID NO: 1380349 - RNA, 19 nt, Artificial Sequence
  Description of Artificial Sequence: Synthetic oligonucleotide
uggucuaaccagagucucu

SEQ ID NO: 1380350 - RNA, 19 nt, Artificial Sequence
  Description of Artificial Sequence: Synthetic oligonucleotide
gauacacugugacucgaua

SEQ ID NO: 1380351 - RNA, 19 nt, Artificial Sequence
  Description of Artificial Sequence: Synthetic oligonucleotide
acaugguucaauggcauua

SEQ ID NO: 1380352 - RNA, 19 nt, Artificial Sequence
  Description of Artificial Sequence: Synthetic oligonucleotide
ugugugugugugugugcgc

SEQ ID NO: 1380353 - RNA, 19 nt, Artificial Sequence
  Description of Artificial Sequence: Synthetic oligonucleotide
ugugcaccgacagacuuua

SEQ ID NO: 1380354 - RNA, 19 nt, Artificial Sequence
  Description of Artificial Sequence: Synthetic oligonucleotide
caccugaguguucacuuac

SEQ ID NO: 1380355 - RNA, 19 nt, Artificial Sequence
  Description of Artificial Sequence: Synthetic oligonucleotide
auaaucguuuagucauaau

SEQ ID NO: 1380356 - RNA, 19 nt, Artificial Sequence
  Description of Artificial Sequence: Synthetic oligonucleotide
aaaccuaaucuggggaguu

SEQ ID NO: 1380357 - RNA, 19 nt, Artificial Sequence
  Description of Artificial Sequence: Synthetic oligonucleotide
ugcuggacguugacggcug

SEQ ID NO: 1380358 - RNA, 19 nt, Artificial Sequence
  Description of Artificial Sequence: Synthetic oligonucleotide
ucuaagccuucuuccaguu

SEQ ID NO: 1380359 - RNA, 19 nt, Artificial Sequence
  Description of Artificial Sequence: Synthetic oligonucleotide
cacaugggaaacaugacau

SEQ ID NO: 1380360 - RNA, 19 nt, Artificial Sequence
  Description of Artificial Sequence: Synthetic oligonucleotide
uuacaccaucgucaagauc

SEQ ID NO: 1380361 - RNA, 19 nt, Artificial Sequence
  Description of Artificial Sequence: Synthetic oligonucleotide
gcaccgacagacuuuaaca

SEQ ID NO: 1380362 - RNA, 19 nt, Artificial Sequence
  Description of Artificial Sequence: Synthetic oligonucleotide
acaaucauuugaauugguu

SEQ ID NO: 1380363 - RNA, 19 nt, Artificial Sequence
  Description of Artificial Sequence: Synthetic oligonucleotide
uugauacacugugacucga

SEQ ID NO: 1380364 - RNA, 19 nt, Artificial Sequence
  Description of Artificial Sequence: Synthetic oligonucleotide
ugugugugugugugugugu

SEQ ID NO: 1380365 - RNA, 19 nt, Artificial Sequence
  Description of Artificial Sequence: Synthetic oligonucleotide
ucucccucaaaggagucua

SEQ ID NO: 1380366 - RNA, 19 nt, Artificial Sequence
  Description of Artificial Sequence: Synthetic oligonucleotide
caauacacaauauguugcu

SEQ ID NO: 1380367 - RNA, 19 nt, Artificial Sequence
  Description of Artificial Sequence: Synthetic oligonucleotide
uugcugacuuacgaccacc

SEQ ID NO: 1380368 - RNA, 19 nt, Artificial Sequence
  Description of Artificial Sequence: Synthetic oligonucleotide
cauugcaggagguacauuu

SEQ ID NO: 1380369 - RNA, 19 nt, Artificial Sequence
  Description of Artificial Sequence: Synthetic oligonucleotide
ggcaaaucacacaugguuc

SEQ ID NO: 1380370 - RNA, 19 nt, Artificial Sequence
  Description of Artificial Sequence: Synthetic oligonucleotide
gaacaauacacaauauguu

SEQ ID NO: 1380371 - RNA, 19 nt, Artificial Sequence
  Description of Artificial Sequence: Synthetic oligonucleotide
uggacguugacggcuggga

SEQ ID NO: 1380372 - RNA, 19 nt, Artificial Sequence
  Description of Artificial Sequence: Synthetic oligonucleotide
gagauuucaggaucucccu

SEQ ID NO: 1380373 - RNA, 19 nt, Artificial Sequence
  Description of Artificial Sequence: Synthetic oligonucleotide
ggugcuucggcaccaucag

SEQ ID NO: 1380374 - RNA, 19 nt, Artificial Sequence
  Description of Artificial Sequence: Synthetic oligonucleotide
auagucagcuaaugagauu

SEQ ID NO: 1380375 - RNA, 19 nt, Artificial Sequence
  Description of Artificial Sequence: Synthetic oligonucleotide
aaccagucaccugaguguu

SEQ ID NO: 1380376 - RNA, 19 nt, Artificial Sequence
  Description of Artificial Sequence: Synthetic oligonucleotide
cuacacugaauugaucgga

SEQ ID NO: 1380377 - RNA, 19 nt, Artificial Sequence
  Description of Artificial Sequence: Synthetic oligonucleotide
auggacugagacacuuuuc

SEQ ID NO: 1380378 - RNA, 19 nt, Artificial Sequence
  Description of Artificial Sequence: Synthetic oligonucleotide
gugugugugugugugugug

SEQ ID NO: 1380379 - RNA, 19 nt, Artificial Sequence
  Description of Artificial Sequence: Synthetic oligonucleotide
acacugaauugaucggaaa

SEQ ID NO: 1380380 - RNA, 19 nt, Artificial Sequence
  Description of Artificial Sequence: Synthetic oligonucleotide
gcacaugggaaacaugaca

SEQ ID NO: 1380381 - RNA, 19 nt, Artificial Sequence
  Description of Artificial Sequence: Synthetic oligonucleotide
agugugugugugugugugu

SEQ ID NO: 1380382 - RNA, 19 nt, Artificial Sequence
  Description of Artificial Sequence: Synthetic oligonucleotide
aaaucuccuaaaagaucau

SEQ ID NO: 1380383 - RNA, 19 nt, Artificial Sequence
  Description of Artificial Sequence: Synthetic oligonucleotide
aggauucauuucauugcag

SEQ ID NO: 1380384 - RNA, 19 nt, Artificial Sequence
  Description of Artificial Sequence: Synthetic oligonucleotide
gugugugugugugcgcacg

SEQ ID NO: 1380385 - RNA, 19 nt, Artificial Sequence
  Description of Artificial Sequence: Synthetic oligonucleotide
cacgaaggguccaacaucu

SEQ ID NO: 1380386 - RNA, 19 nt, Artificial Sequence
  Description of Artificial Sequence: Synthetic oligonucleotide
gggaauaguccucacucuc

SEQ ID NO: 1380387 - RNA, 19 nt, Artificial Sequence
  Description of Artificial Sequence: Synthetic oligonucleotide
aucggaaaccgaauccuga

SEQ ID NO: 1380388 - RNA, 19 nt, Artificial Sequence
  Description of Artificial Sequence: Synthetic oligonucleotide
uggcuguaaucuucugagu

SEQ ID NO: 1380389 - RNA, 19 nt, Artificial Sequence
  Description of Artificial Sequence: Synthetic oligonucleotide
ccggaagccaauucucacg

SEQ ID NO: 1380390 - RNA, 19 nt, Artificial Sequence
  Description of Artificial Sequence: Synthetic oligonucleotide
uucauaguauagguaucuu

SEQ ID NO: 1380391 - RNA, 19 nt, Artificial Sequence
  Description of Artificial Sequence: Synthetic oligonucleotide
ugugugugugugugcgcac

SEQ ID NO: 1380392 - RNA, 19 nt, Artificial Sequence
  Description of Artificial Sequence: Synthetic oligonucleotide
caccgacagacuuuaacaa

SEQ ID NO: 1380393 - RNA, 19 nt, Artificial Sequence
  Description of Artificial Sequence: Synthetic oligonucleotide
aggugcuucggcaccauca

SEQ ID NO: 1380394 - RNA, 19 nt, Artificial Sequence
  Description of Artificial Sequence: Synthetic oligonucleotide
agucagcuaaugagauuuc

SEQ ID NO: 1380395 - RNA, 19 nt, Artificial Sequence
  Description of Artificial Sequence: Synthetic oligonucleotide
gguuuuggucuaaccagag

SEQ ID NO: 1380396 - RNA, 19 nt, Artificial Sequence
  Description of Artificial Sequence: Synthetic oligonucleotide
cuuacaugagagguacuaa

SEQ ID NO: 1380397 - RNA, 19 nt, Artificial Sequence
  Description of Artificial Sequence: Synthetic oligonucleotide
ggaguuauauauaguuaga

SEQ ID NO: 1380398 - RNA, 19 nt, Artificial Sequence
  Description of Artificial Sequence: Synthetic oligonucleotide
gcuaaugagauuucaggau

SEQ ID NO: 1380399 - RNA, 19 nt, Artificial Sequence
  Description of Artificial Sequence: Synthetic oligonucleotide
ggucagcuagcuaaaauaa

SEQ ID NO: 1380400 - RNA, 19 nt, Artificial Sequence
  Description of Artificial Sequence: Synthetic oligonucleotide
ccugauccaaccagucacc

SEQ ID NO: 1380401 - RNA, 19 nt, Artificial Sequence
  Description of Artificial Sequence: Synthetic oligonucleotide
caagagacucaacuucaaa

SEQ ID NO: 1380402 - RNA, 19 nt, Artificial Sequence
  Description of Artificial Sequence: Synthetic oligonucleotide
cugagucaagagacucaac

SEQ ID NO: 1380403 - RNA, 19 nt, Artificial Sequence
  Description of Artificial Sequence: Synthetic oligonucleotide
gaauccugauccaaccagu

SEQ ID NO: 1380404 - RNA, 19 nt, Artificial Sequence
  Description of Artificial Sequence: Synthetic oligonucleotide
cgaauccugauccaaccag

SEQ ID NO: 1380405 - RNA, 19 nt, Artificial Sequence
  Description of Artificial Sequence: Synthetic oligonucleotide
ugugacugggagguauaua

SEQ ID NO: 1380406 - RNA, 19 nt, Artificial Sequence
  Description of Artificial Sequence: Synthetic oligonucleotide
gugugugugugugugcgca

SEQ ID NO: 1380407 - RNA, 19 nt, Artificial Sequence
  Description of Artificial Sequence: Synthetic oligonucleotide
auauaaucguuuagucaua

SEQ ID NO: 1380408 - RNA, 19 nt, Artificial Sequence
  Description of Artificial Sequence: Synthetic oligonucleotide
ggguccaacaucuguugca

SEQ ID NO: 1380409 - RNA, 19 nt, Artificial Sequence
  Description of Artificial Sequence: Synthetic oligonucleotide
guggucuuucacagagaag

SEQ ID NO: 1380410 - RNA, 19 nt, Artificial Sequence
  Description of Artificial Sequence: Synthetic oligonucleotide
gacguugacggcugggaau

SEQ ID NO: 1380411 - RNA, 19 nt, Artificial Sequence
  Description of Artificial Sequence: Synthetic oligonucleotide
cuaaucuggggaguuauau

SEQ ID NO: 1380412 - RNA, 19 nt, Artificial Sequence
  Description of Artificial Sequence: Synthetic oligonucleotide
gaaggguccaacaucuguu

SEQ ID NO: 1380413 - RNA, 19 nt, Artificial Sequence
  Description of Artificial Sequence: Synthetic oligonucleotide
aaccuaaucuggggaguua

SEQ ID NO: 1380414 - RNA, 19 nt, Artificial Sequence
  Description of Artificial Sequence: Synthetic oligonucleotide
acguugacggcugggaaua

SEQ ID NO: 1380415 - RNA, 19 nt, Artificial Sequence
  Description of Artificial Sequence: Synthetic oligonucleotide
caggcauguccccuuuauc

SEQ ID NO: 1380416 - RNA, 19 nt, Artificial Sequence
  Description of Artificial Sequence: Synthetic oligonucleotide
uugugacugggagguauau

SEQ ID NO: 1380417 - RNA, 19 nt, Artificial Sequence
  Description of Artificial Sequence: Synthetic oligonucleotide
cucagugcaggacuccuua

SEQ ID NO: 1380418 - RNA, 19 nt, Artificial Sequence
  Description of Artificial Sequence: Synthetic oligonucleotide
ggacugagacacuuuucuc

SEQ ID NO: 1380419 - RNA, 19 nt, Artificial Sequence
  Description of Artificial Sequence: Synthetic oligonucleotide
uaucuuccggaagccaauu

SEQ ID NO: 1380420 - RNA, 19 nt, Artificial Sequence
  Description of Artificial Sequence: Synthetic oligonucleotide
guuuuaguguaugcagaua

SEQ ID NO: 1380421 - RNA, 19 nt, Artificial Sequence
  Description of Artificial Sequence: Synthetic oligonucleotide
cucccucaaaggagucuac

SEQ ID NO: 1380422 - RNA, 19 nt, Artificial Sequence
  Description of Artificial Sequence: Synthetic oligonucleotide
caugguucaauggcauuaa

SEQ ID NO: 1380423 - RNA, 19 nt, Artificial Sequence
  Description of Artificial Sequence: Synthetic oligonucleotide
uuaggccgcccuuggcaaa

SEQ ID NO: 1380424 - RNA, 19 nt, Artificial Sequence
  Description of Artificial Sequence: Synthetic oligonucleotide
acuccuuacaugagaggua

SEQ ID NO: 1380425 - RNA, 19 nt, Artificial Sequence
  Description of Artificial Sequence: Synthetic oligonucleotide
gagguacauuuccaauagu

SEQ ID NO: 1380426 - RNA, 19 nt, Artificial Sequence
  Description of Artificial Sequence: Synthetic oligonucleotide
cucacgaaggguccaacau

SEQ ID NO: 1380427 - RNA, 19 nt, Artificial Sequence
  Description of Artificial Sequence: Synthetic oligonucleotide
ccugauugauacacuguga

SEQ ID NO: 1380428 - RNA, 19 nt, Artificial Sequence
  Description of Artificial Sequence: Synthetic oligonucleotide
gacaugagauguccaguuu

SEQ ID NO: 1380429 - RNA, 19 nt, Artificial Sequence
  Description of Artificial Sequence: Synthetic oligonucleotide
ggaaucugugaggugcuuc

SEQ ID NO: 1380430 - RNA, 19 nt, Artificial Sequence
  Description of Artificial Sequence: Synthetic oligonucleotide
auucucacgaaggguccaa

SEQ ID NO: 1380431 - RNA, 19 nt, Artificial Sequence
  Description of Artificial Sequence: Synthetic oligonucleotide
ugggcaggucagcuagcua

SEQ ID NO: 1380432 - RNA, 19 nt, Artificial Sequence
  Description of Artificial Sequence: Synthetic oligonucleotide
cagagucucuuguuccgaa

SEQ ID NO: 1380433 - RNA, 19 nt, Artificial Sequence
  Description of Artificial Sequence: Synthetic oligonucleotide
cuuacaccaucgucaagau

SEQ ID NO: 1380434 - RNA, 19 nt, Artificial Sequence
  Description of Artificial Sequence: Synthetic oligonucleotide
cuccugauugauacacugu

SEQ ID NO: 1380435 - RNA, 19 nt, Artificial Sequence
  Description of Artificial Sequence: Synthetic oligonucleotide
cacaaucauuugaauuggu

SEQ ID NO: 1380436 - RNA, 19 nt, Artificial Sequence
  Description of Artificial Sequence: Synthetic oligonucleotide
cuuugcacaugggaaacau

SEQ ID NO: 1380437 - RNA, 19 nt, Artificial Sequence
  Description of Artificial Sequence: Synthetic oligonucleotide
acaccaucgucaagauccu

SEQ ID NO: 1380438 - RNA, 19 nt, Artificial Sequence
  Description of Artificial Sequence: Synthetic oligonucleotide
aucuggggaguuauauaua

SEQ ID NO: 1380439 - RNA, 19 nt, Artificial Sequence
  Description of Artificial Sequence: Synthetic oligonucleotide
guagaucauuauauguauu

SEQ ID NO: 1380440 - RNA, 19 nt, Artificial Sequence
  Description of Artificial Sequence: Synthetic oligonucleotide
aggacuccuuacaaucauu

SEQ ID NO: 1380441 - RNA, 19 nt, Artificial Sequence
  Description of Artificial Sequence: Synthetic oligonucleotide
cuggggaguuauauauagu

SEQ ID NO: 1380442 - RNA, 19 nt, Artificial Sequence
  Description of Artificial Sequence: Synthetic oligonucleotide
cacuuuccucagugcagga

SEQ ID NO: 1380443 - RNA, 19 nt, Artificial Sequence
  Description of Artificial Sequence: Synthetic oligonucleotide
ccuuacaugagagguacua

SEQ ID NO: 1380444 - RNA, 19 nt, Artificial Sequence
  Description of Artificial Sequence: Synthetic oligonucleotide
caggucagcuagcuaaaau

SEQ ID NO: 1380445 - RNA, 19 nt, Artificial Sequence
  Description of Artificial Sequence: Synthetic oligonucleotide
acgaaggguccaacaucug

SEQ ID NO: 1380446 - RNA, 19 nt, Artificial Sequence
  Description of Artificial Sequence: Synthetic oligonucleotide
cacgcgcgcgcgugcgugc

SEQ ID NO: 1380447 - RNA, 19 nt, Artificial Sequence
  Description of Artificial Sequence: Synthetic oligonucleotide
gcuggacguugacggcugg

SEQ ID NO: 1380448 - RNA, 19 nt, Artificial Sequence
  Description of Artificial Sequence: Synthetic oligonucleotide
gggagguauauauuuccuu

SEQ ID NO: 1380449 - RNA, 19 nt, Artificial Sequence
  Description of Artificial Sequence: Synthetic oligonucleotide
gcugggaauaguccucacu

SEQ ID NO: 1380450 - RNA, 19 nt, Artificial Sequence
  Description of Artificial Sequence: Synthetic oligonucleotide
gugcgcgcuugcuuucaga

SEQ ID NO: 1380451 - RNA, 19 nt, Artificial Sequence
  Description of Artificial Sequence: Synthetic oligonucleotide
caggacuccuuacaaucau

SEQ ID NO: 1380452 - RNA, 19 nt, Artificial Sequence
  Description of Artificial Sequence: Synthetic oligonucleotide
ccgcccuuggcaaaucaca

SEQ ID NO: 1380453 - RNA, 19 nt, Artificial Sequence
  Description of Artificial Sequence: Synthetic oligonucleotide
gcugacuuacgaccaccaa

SEQ ID NO: 1380454 - RNA, 19 nt, Artificial Sequence
  Description of Artificial Sequence: Synthetic oligonucleotide
gacuuacgaccaccaaguu

SEQ ID NO: 1380455 - RNA, 19 nt, Artificial Sequence
  Description of Artificial Sequence: Synthetic oligonucleotide
cugauccaaccagucaccu

SEQ ID NO: 1380456 - RNA, 19 nt, Artificial Sequence
  Description of Artificial Sequence: Synthetic oligonucleotide
guugacggcugggaauagu

SEQ ID NO: 1380457 - RNA, 19 nt, Artificial Sequence
  Description of Artificial Sequence: Synthetic oligonucleotide
cggaaaccgaauccugauc

SEQ ID NO: 1380458 - RNA, 19 nt, Artificial Sequence
  Description of Artificial Sequence: Synthetic oligonucleotide
ggcugggaauaguccucac

SEQ ID NO: 1380459 - RNA, 19 nt, Artificial Sequence
  Description of Artificial Sequence: Synthetic oligonucleotide
cacaugguucaauggcauu

SEQ ID NO: 1380460 - RNA, 19 nt, Artificial Sequence
  Description of Artificial Sequence: Synthetic oligonucleotide
aggccgcccuuggcaaauc

SEQ ID NO: 1380461 - RNA, 19 nt, Artificial Sequence
  Description of Artificial Sequence: Synthetic oligonucleotide
cggcaccaucaguagacac

SEQ ID NO: 1380462 - RNA, 19 nt, Artificial Sequence
  Description of Artificial Sequence: Synthetic oligonucleotide
guggaaggggaggauucau

SEQ ID NO: 1380463 - RNA, 19 nt, Artificial Sequence
  Description of Artificial Sequence: Synthetic oligonucleotide
gccgcccuuggcaaaucac

SEQ ID NO: 1380464 - RNA, 19 nt, Artificial Sequence
  Description of Artificial Sequence: Synthetic oligonucleotide
ccuaaucuggggaguuaua

SEQ ID NO: 1380465 - RNA, 19 nt, Artificial Sequence
  Description of Artificial Sequence: Synthetic oligonucleotide
ggccgcccuuggcaaauca

SEQ ID NO: 1380466 - RNA, 19 nt, Artificial Sequence
  Description of Artificial Sequence: Synthetic oligonucleotide
ggcacaucuaagccuucuu

SEQ ID NO: 1380467 - RNA, 19 nt, Artificial Sequence
  Description of Artificial Sequence: Synthetic oligonucleotide
cgucaagauccugauuuga

SEQ ID NO: 1380468 - RNA, 19 nt, Artificial Sequence
  Description of Artificial Sequence: Synthetic oligonucleotide
cugagacacuuuucucguu

SEQ ID NO: 1380469 - RNA, 19 nt, Artificial Sequence
  Description of Artificial Sequence: Synthetic oligonucleotide
cgcgcuugcuuucagaauu

SEQ ID NO: 1380470 - RNA, 19 nt, Artificial Sequence
  Description of Artificial Sequence: Synthetic oligonucleotide
gcaggucagcuagcuaaaa

SEQ ID NO: 1380471 - RNA, 19 nt, Artificial Sequence
  Description of Artificial Sequence: Synthetic oligonucleotide
cgauagaccucaucauccu

SEQ ID NO: 1380472 - RNA, 19 nt, Artificial Sequence
  Description of Artificial Sequence: Synthetic oligonucleotide
gcacgcgcgcgcgugcgug

SEQ ID NO: 1380473 - RNA, 19 nt, Artificial Sequence
  Description of Artificial Sequence: Synthetic oligonucleotide
cgugcgcgcuugcuuucag

SEQ ID NO: 1380474 - RNA, 19 nt, Artificial Sequence
  Description of Artificial Sequence: Synthetic oligonucleotide
cucuugugacugggaggua

SEQ ID NO: 1380475 - RNA, 19 nt, Artificial Sequence
  Description of Artificial Sequence: Synthetic oligonucleotide
cguugacggcugggaauag

SEQ ID NO: 1380476 - RNA, 19 nt, Artificial Sequence
  Description of Artificial Sequence: Synthetic oligonucleotide
gcgcgcuugcuuucagaau

SEQ ID NO: 1380477 - RNA, 19 nt, Artificial Sequence
  Description of Artificial Sequence: Synthetic oligonucleotide
gcgugcgcgcuugcuuuca

SEQ ID NO: 1380478 - RNA, 19 nt, Artificial Sequence
  Description of Artificial Sequence: Synthetic oligonucleotide
gugcaccgacagacuuuaa

SEQ ID NO: 1380479 - RNA, 19 nt, Artificial Sequence
  Description of Artificial Sequence: Synthetic oligonucleotide
gcgcuugcuuucagaauuu

SEQ ID NO: 1380480 - RNA, 19 nt, Artificial Sequence
  Description of Artificial Sequence: Synthetic oligonucleotide
ccccuuuauccuucccuuu

SEQ ID NO: 1380481 - RNA, 19 nt, Artificial Sequence
  Description of Artificial Sequence: Synthetic oligonucleotide
cgcgugcgugcgcgcuugc

SEQ ID NO: 1380482 - RNA, 19 nt, Artificial Sequence
  Description of Artificial Sequence: Synthetic oligonucleotide
gcgugcgugcgcgcuugcu

SEQ ID NO: 1380483 - RNA, 19 nt, Artificial Sequence
  Description of Artificial Sequence: Synthetic oligonucleotide
cgcacgcgcgcgcgugcgu

SEQ ID NO: 1380484 - RNA, 19 nt, Artificial Sequence
  Description of Artificial Sequence: Synthetic oligonucleotide
ugaauugugaaucuaaaag

SEQ ID NO: 1380485 - RNA, 19 nt, Artificial Sequence
  Description of Artificial Sequence: Synthetic oligonucleotide
uuuccauuagcuaauaugc

SEQ ID NO: 1380486 - RNA, 19 nt, Artificial Sequence
  Description of Artificial Sequence: Synthetic oligonucleotide
uauagaaacguccaggcgc

SEQ ID NO: 1380487 - RNA, 19 nt, Artificial Sequence
  Description of Artificial Sequence: Synthetic oligonucleotide
ugguuaaacacugaaaucg

SEQ ID NO: 1380488 - RNA, 19 nt, Artificial Sequence
  Description of Artificial Sequence: Synthetic oligonucleotide
uuaaauuggauaaucacuc

SEQ ID NO: 1380489 - RNA, 19 nt, Artificial Sequence
  Description of Artificial Sequence: Synthetic oligonucleotide
aauaaaaugugcagcgucc

SEQ ID NO: 1380490 - RNA, 19 nt, Artificial Sequence
  Description of Artificial Sequence: Synthetic oligonucleotide
aauaagauaugaaaacuuc

SEQ ID NO: 1380491 - RNA, 19 nt, Artificial Sequence
  Description of Artificial Sequence: Synthetic oligonucleotide
aacaccaacaagcaccuuc

SEQ ID NO: 1380492 - RNA, 19 nt, Artificial Sequence
  Description of Artificial Sequence: Synthetic oligonucleotide
uuuacagccguuaacauuc

SEQ ID NO: 1380493 - RNA, 19 nt, Artificial Sequence
  Description of Artificial Sequence: Synthetic oligonucleotide
aaugauacucugaacaaac

SEQ ID NO: 1380494 - RNA, 19 nt, Artificial Sequence
  Description of Artificial Sequence: Synthetic oligonucleotide
acuaagaagaaaguguccc

SEQ ID NO: 1380495 - RNA, 19 nt, Artificial Sequence
  Description of Artificial Sequence: Synthetic oligonucleotide
gaauauuccucucuguggg

SEQ ID NO: 1380496 - RNA, 19 nt, Artificial Sequence
  Description of Artificial Sequence: Synthetic oligonucleotide
gaauucaucuggcaaaggg

SEQ ID NO: 1380497 - RNA, 19 nt, Artificial Sequence
  Description of Artificial Sequence: Synthetic oligonucleotide
ugucacuuucccaugagcg

SEQ ID NO: 1380498 - RNA, 19 nt, Artificial Sequence
  Description of Artificial Sequence: Synthetic oligonucleotide
uaaaacagucauuuucucg

SEQ ID NO: 1380499 - RNA, 19 nt, Artificial Sequence
  Description of Artificial Sequence: Synthetic oligonucleotide
uugaauaagauaugaaaac

SEQ ID NO: 1380500 - RNA, 19 nt, Artificial Sequence
  Description of Artificial Sequence: Synthetic oligonucleotide
acugaaaucgguugugggc

SEQ ID NO: 1380501 - RNA, 19 nt, Artificial Sequence
  Description of Artificial Sequence: Synthetic oligonucleotide
ucugucauguaaaauuuag

SEQ ID NO: 1380502 - RNA, 19 nt, Artificial Sequence
  Description of Artificial Sequence: Synthetic oligonucleotide
auuggauaaucacucauuc

SEQ ID NO: 1380503 - RNA, 19 nt, Artificial Sequence
  Description of Artificial Sequence: Synthetic oligonucleotide
uggauaaucacucauucaa

SEQ ID NO: 1380504 - RNA, 19 nt, Artificial Sequence
  Description of Artificial Sequence: Synthetic oligonucleotide
aauugugaaucuaaaagug

SEQ ID NO: 1380505 - RNA, 19 nt, Artificial Sequence
  Description of Artificial Sequence: Synthetic oligonucleotide
uuagcuaauaugcuuccag

SEQ ID NO: 1380506 - RNA, 19 nt, Artificial Sequence
  Description of Artificial Sequence: Synthetic oligonucleotide
uuaacauucagcuccccag

SEQ ID NO: 1380507 - RNA, 19 nt, Artificial Sequence
  Description of Artificial Sequence: Synthetic oligonucleotide
auaauuaucucugucaugu

SEQ ID NO: 1380508 - RNA, 19 nt, Artificial Sequence
  Description of Artificial Sequence: Synthetic oligonucleotide
aacuuuaaauuggauaauc

SEQ ID NO: 1380509 - RNA, 19 nt, Artificial Sequence
  Description of Artificial Sequence: Synthetic oligonucleotide
aauuuaguuguuucugaug

SEQ ID NO: 1380510 - RNA, 19 nt, Artificial Sequence
  Description of Artificial Sequence: Synthetic oligonucleotide
aacuucuauacuuaaccca

SEQ ID NO: 1380511 - RNA, 19 nt, Artificial Sequence
  Description of Artificial Sequence: Synthetic oligonucleotide
aucuaaaagugcuucucgc

SEQ ID NO: 1380512 - RNA, 19 nt, Artificial Sequence
  Description of Artificial Sequence: Synthetic oligonucleotide
gaugcaacccaucuccucg

SEQ ID NO: 1380513 - RNA, 19 nt, Artificial Sequence
  Description of Artificial Sequence: Synthetic oligonucleotide
ugauacucugaacaaacug

SEQ ID NO: 1380514 - RNA, 19 nt, Artificial Sequence
  Description of Artificial Sequence: Synthetic oligonucleotide
uucucguggauguagaggc

SEQ ID NO: 1380515 - RNA, 19 nt, Artificial Sequence
  Description of Artificial Sequence: Synthetic oligonucleotide
uuauagaaacguccaggcg

SEQ ID NO: 1380516 - RNA, 19 nt, Artificial Sequence
  Description of Artificial Sequence: Synthetic oligonucleotide
guuauagaaacguccaggc

SEQ ID NO: 1380517 - RNA, 19 nt, Artificial Sequence
  Description of Artificial Sequence: Synthetic oligonucleotide
guuaccagaacccggacag

SEQ ID NO: 1380518 - RNA, 19 nt, Artificial Sequence
  Description of Artificial Sequence: Synthetic oligonucleotide
ugaauaagauaugaaaacu

SEQ ID NO: 1380519 - RNA, 19 nt, Artificial Sequence
  Description of Artificial Sequence: Synthetic oligonucleotide
auuucgaagugguucaauc

SEQ ID NO: 1380520 - RNA, 19 nt, Artificial Sequence
  Description of Artificial Sequence: Synthetic oligonucleotide
gucauguaaaauuuaguug

SEQ ID NO: 1380521 - RNA, 19 nt, Artificial Sequence
  Description of Artificial Sequence: Synthetic oligonucleotide
uuaacccagacuucaacag

SEQ ID NO: 1380522 - RNA, 19 nt, Artificial Sequence
  Description of Artificial Sequence: Synthetic oligonucleotide
aguuauagaaacguccagg

SEQ ID NO: 1380523 - RNA, 19 nt, Artificial Sequence
  Description of Artificial Sequence: Synthetic oligonucleotide
auugugaaucuaaaagugc

SEQ ID NO: 1380524 - RNA, 19 nt, Artificial Sequence
  Description of Artificial Sequence: Synthetic oligonucleotide
gauaaucacucauucaaca

SEQ ID NO: 1380525 - RNA, 19 nt, Artificial Sequence
  Description of Artificial Sequence: Synthetic oligonucleotide
ucacccaggauuagcagcg

SEQ ID NO: 1380526 - RNA, 19 nt, Artificial Sequence
  Description of Artificial Sequence: Synthetic oligonucleotide
uuucccaugagcgagcaag

SEQ ID NO: 1380527 - RNA, 19 nt, Artificial Sequence
  Description of Artificial Sequence: Synthetic oligonucleotide
aaauuggauaaucacucau

SEQ ID NO: 1380528 - RNA, 19 nt, Artificial Sequence
  Description of Artificial Sequence: Synthetic oligonucleotide
aacagucauuuucucgugg

SEQ ID NO: 1380529 - RNA, 19 nt, Artificial Sequence
  Description of Artificial Sequence: Synthetic oligonucleotide
gaggcuuauuagcaaaggg

SEQ ID NO: 1380530 - RNA, 19 nt, Artificial Sequence
  Description of Artificial Sequence: Synthetic oligonucleotide
aaaacuucccucagauggc

SEQ ID NO: 1380531 - RNA, 19 nt, Artificial Sequence
  Description of Artificial Sequence: Synthetic oligonucleotide
ggcaauaaaaugugcagcg

SEQ ID NO: 1380532 - RNA, 19 nt, Artificial Sequence
  Description of Artificial Sequence: Synthetic oligonucleotide
aacacuaccuugcaacgcu

SEQ ID NO: 1380533 - RNA, 19 nt, Artificial Sequence
  Description of Artificial Sequence: Synthetic oligonucleotide
aaauuuaguuguuucugau

SEQ ID NO: 1380534 - RNA, 19 nt, Artificial Sequence
  Description of Artificial Sequence: Synthetic oligonucleotide
agagggcagagucaaaggg

SEQ ID NO: 1380535 - RNA, 19 nt, Artificial Sequence
  Description of Artificial Sequence: Synthetic oligonucleotide
agugguucaaucaccaaac

SEQ ID NO: 1380536 - RNA, 19 nt, Artificial Sequence
  Description of Artificial Sequence: Synthetic oligonucleotide
uuuuacacccucaggaaaa

SEQ ID NO: 1380537 - RNA, 19 nt, Artificial Sequence
  Description of Artificial Sequence: Synthetic oligonucleotide
gaauugugaaucuaaaagu

SEQ ID NO: 1380538 - RNA, 19 nt, Artificial Sequence
  Description of Artificial Sequence: Synthetic oligonucleotide
ucuaaaagugcuucucgca

SEQ ID NO: 1380539 - RNA, 19 nt, Artificial Sequence
  Description of Artificial Sequence: Synthetic oligonucleotide
cuaaaagugcuucucgcag

SEQ ID NO: 1380540 - RNA, 19 nt, Artificial Sequence
  Description of Artificial Sequence: Synthetic oligonucleotide
uuuaaacaaaccgggagcu

SEQ ID NO: 1380541 - RNA, 19 nt, Artificial Sequence
  Description of Artificial Sequence: Synthetic oligonucleotide
uucgaagugguucaaucac

SEQ ID NO: 1380542 - RNA, 19 nt, Artificial Sequence
  Description of Artificial Sequence: Synthetic oligonucleotide
uuuaucgugacgucaccgc

SEQ ID NO: 1380543 - RNA, 19 nt, Artificial Sequence
  Description of Artificial Sequence: Synthetic oligonucleotide
aaacacugaaaucgguugu

SEQ ID NO: 1380544 - RNA, 19 nt, Artificial Sequence
  Description of Artificial Sequence: Synthetic oligonucleotide
ugagaccuugguauguuag

SEQ ID NO: 1380545 - RNA, 19 nt, Artificial Sequence
  Description of Artificial Sequence: Synthetic oligonucleotide
gauacucugaacaaacuga

SEQ ID NO: 1380546 - RNA, 19 nt, Artificial Sequence
  Description of Artificial Sequence: Synthetic oligonucleotide
gcaacuucuauacuuaacc

SEQ ID NO: 1380547 - RNA, 19 nt, Artificial Sequence
  Description of Artificial Sequence: Synthetic oligonucleotide
acuuaacccagacuucaac

SEQ ID NO: 1380548 - RNA, 19 nt, Artificial Sequence
  Description of Artificial Sequence: Synthetic oligonucleotide
gaaacguccaggcgcaucc

SEQ ID NO: 1380549 - RNA, 19 nt, Artificial Sequence
  Description of Artificial Sequence: Synthetic oligonucleotide
gauacagucucucccaaca

SEQ ID NO: 1380550 - RNA, 19 nt, Artificial Sequence
  Description of Artificial Sequence: Synthetic oligonucleotide
uuucgaagugguucaauca

SEQ ID NO: 1380551 - RNA, 19 nt, Artificial Sequence
  Description of Artificial Sequence: Synthetic oligonucleotide
ucuuugaauaagauaugaa

SEQ ID NO: 1380552 - RNA, 19 nt, Artificial Sequence
  Description of Artificial Sequence: Synthetic oligonucleotide
acuucuauacuuaacccag

SEQ ID NO: 1380553 - RNA, 19 nt, Artificial Sequence
  Description of Artificial Sequence: Synthetic oligonucleotide
uuaggaaaacuucccucag

SEQ ID NO: 1380554 - RNA, 19 nt, Artificial Sequence
  Description of Artificial Sequence: Synthetic oligonucleotide
agugaugcauugcuccucg

SEQ ID NO: 1380555 - RNA, 19 nt, Artificial Sequence
  Description of Artificial Sequence: Synthetic oligonucleotide
ugaacaaacugagaccuug

SEQ ID NO: 1380556 - RNA, 19 nt, Artificial Sequence
  Description of Artificial Sequence: Synthetic oligonucleotide
uucuauacuuaacccagac

SEQ ID NO: 1380557 - RNA, 19 nt, Artificial Sequence
  Description of Artificial Sequence: Synthetic oligonucleotide
aauucaucuggcaaaggga

SEQ ID NO: 1380558 - RNA, 19 nt, Artificial Sequence
  Description of Artificial Sequence: Synthetic oligonucleotide
gccguuaacauucagcucc

SEQ ID NO: 1380559 - RNA, 19 nt, Artificial Sequence
  Description of Artificial Sequence: Synthetic oligonucleotide
guauguuaggaaaacuucc

SEQ ID NO: 1380560 - RNA, 19 nt, Artificial Sequence
  Description of Artificial Sequence: Synthetic oligonucleotide
ugguauguuaggaaaacuu

SEQ ID NO: 1380561 - RNA, 19 nt, Artificial Sequence
  Description of Artificial Sequence: Synthetic oligonucleotide
auaugcuuccagguggugc

SEQ ID NO: 1380562 - RNA, 19 nt, Artificial Sequence
  Description of Artificial Sequence: Synthetic oligonucleotide
cuaagaagaaagugucccc

SEQ ID NO: 1380563 - RNA, 19 nt, Artificial Sequence
  Description of Artificial Sequence: Synthetic oligonucleotide
uguuaggaaaacuucccuc

SEQ ID NO: 1380564 - RNA, 19 nt, Artificial Sequence
  Description of Artificial Sequence: Synthetic oligonucleotide
cuugcaacgcuuacaaaug

SEQ ID NO: 1380565 - RNA, 19 nt, Artificial Sequence
  Description of Artificial Sequence: Synthetic oligonucleotide
uggcugaauaauuaucucu

SEQ ID NO: 1380566 - RNA, 19 nt, Artificial Sequence
  Description of Artificial Sequence: Synthetic oligonucleotide
ucaccaaacugucugaguu

SEQ ID NO: 1380567 - RNA, 19 nt, Artificial Sequence
  Description of Artificial Sequence: Synthetic oligonucleotide
cucugaacaaacugagacc

SEQ ID NO: 1380568 - RNA, 19 nt, Artificial Sequence
  Description of Artificial Sequence: Synthetic oligonucleotide
ugagcgagcaagcucuuca

SEQ ID NO: 1380569 - RNA, 19 nt, Artificial Sequence
  Description of Artificial Sequence: Synthetic oligonucleotide
uaaacaaaccgggagcucu

SEQ ID NO: 1380570 - RNA, 19 nt, Artificial Sequence
  Description of Artificial Sequence: Synthetic oligonucleotide
uaaauuggauaaucacuca

SEQ ID NO: 1380571 - RNA, 19 nt, Artificial Sequence
  Description of Artificial Sequence: Synthetic oligonucleotide
uugaauugugaaucuaaaa

SEQ ID NO: 1380572 - RNA, 19 nt, Artificial Sequence
  Description of Artificial Sequence: Synthetic oligonucleotide
aaguuuauuuccugggauu

SEQ ID NO: 1380573 - RNA, 19 nt, Artificial Sequence
  Description of Artificial Sequence: Synthetic oligonucleotide
ugagcuugcaagcuuuggu

SEQ ID NO: 1380574 - RNA, 19 nt, Artificial Sequence
  Description of Artificial Sequence: Synthetic oligonucleotide
aacaaacugagaccuuggu

SEQ ID NO: 1380575 - RNA, 19 nt, Artificial Sequence
  Description of Artificial Sequence: Synthetic oligonucleotide
aaaccgggagcucuuaaaa

SEQ ID NO: 1380576 - RNA, 19 nt, Artificial Sequence
  Description of Artificial Sequence: Synthetic oligonucleotide
aaacagucauuuucucgug

SEQ ID NO: 1380577 - RNA, 19 nt, Artificial Sequence
  Description of Artificial Sequence: Synthetic oligonucleotide
aggaaaacuucccucagau

SEQ ID NO: 1380578 - RNA, 19 nt, Artificial Sequence
  Description of Artificial Sequence: Synthetic oligonucleotide
acuaccuugcaacgcuuac

SEQ ID NO: 1380579 - RNA, 19 nt, Artificial Sequence
  Description of Artificial Sequence: Synthetic oligonucleotide
aacgcuuacaaaugacuuu

SEQ ID NO: 1380580 - RNA, 19 nt, Artificial Sequence
  Description of Artificial Sequence: Synthetic oligonucleotide
uccuuuaucgugacgucac

SEQ ID NO: 1380581 - RNA, 19 nt, Artificial Sequence
  Description of Artificial Sequence: Synthetic oligonucleotide
uggcaauaaaaugugcagc

SEQ ID NO: 1380582 - RNA, 19 nt, Artificial Sequence
  Description of Artificial Sequence: Synthetic oligonucleotide
augcauugcuccucgacag

SEQ ID NO: 1380583 - RNA, 19 nt, Artificial Sequence
  Description of Artificial Sequence: Synthetic oligonucleotide
aaucaccaaacugucugag

SEQ ID NO: 1380584 - RNA, 19 nt, Artificial Sequence
  Description of Artificial Sequence: Synthetic oligonucleotide
agcuaauaugcuuccaggu

SEQ ID NO: 1380585 - RNA, 19 nt, Artificial Sequence
  Description of Artificial Sequence: Synthetic oligonucleotide
uaccuugcaacgcuuacaa

SEQ ID NO: 1380586 - RNA, 19 nt, Artificial Sequence
  Description of Artificial Sequence: Synthetic oligonucleotide
uuggauaaucacucauuca

SEQ ID NO: 1380587 - RNA, 19 nt, Artificial Sequence
  Description of Artificial Sequence: Synthetic oligonucleotide
gaguuauagaaacguccag

SEQ ID NO: 1380588 - RNA, 19 nt, Artificial Sequence
  Description of Artificial Sequence: Synthetic oligonucleotide
ucacuuucccaugagcgag

SEQ ID NO: 1380589 - RNA, 19 nt, Artificial Sequence
  Description of Artificial Sequence: Synthetic oligonucleotide
gcagaugcaacccaucucc

SEQ ID NO: 1380590 - RNA, 19 nt, Artificial Sequence
  Description of Artificial Sequence: Synthetic oligonucleotide
agaccgagcccgcaguuac

SEQ ID NO: 1380591 - RNA, 19 nt, Artificial Sequence
  Description of Artificial Sequence: Synthetic oligonucleotide
uuaucgugacgucaccgca

SEQ ID NO: 1380592 - RNA, 19 nt, Artificial Sequence
  Description of Artificial Sequence: Synthetic oligonucleotide
uaucgugacgucaccgcag

SEQ ID NO: 1380593 - RNA, 19 nt, Artificial Sequence
  Description of Artificial Sequence: Synthetic oligonucleotide
cuuaacccagacuucaaca

SEQ ID NO: 1380594 - RNA, 19 nt, Artificial Sequence
  Description of Artificial Sequence: Synthetic oligonucleotide
aacacugaaaucgguugug

SEQ ID NO: 1380595 - RNA, 19 nt, Artificial Sequence
  Description of Artificial Sequence: Synthetic oligonucleotide
uaauaugcuuccagguggu

SEQ ID NO: 1380596 - RNA, 19 nt, Artificial Sequence
  Description of Artificial Sequence: Synthetic oligonucleotide
aauauuccucucuguggga

SEQ ID NO: 1380597 - RNA, 19 nt, Artificial Sequence
  Description of Artificial Sequence: Synthetic oligonucleotide
auguacugcaagccucggc

SEQ ID NO: 1380598 - RNA, 19 nt, Artificial Sequence
  Description of Artificial Sequence: Synthetic oligonucleotide
uuugguuccugcuccaaau

SEQ ID NO: 1380599 - RNA, 19 nt, Artificial Sequence
  Description of Artificial Sequence: Synthetic oligonucleotide
gaauaauuaucucugucau

SEQ ID NO: 1380600 - RNA, 19 nt, Artificial Sequence
  Description of Artificial Sequence: Synthetic oligonucleotide
caaacugagaccuugguau

SEQ ID NO: 1380601 - RNA, 19 nt, Artificial Sequence
  Description of Artificial Sequence: Synthetic oligonucleotide
uuauuagcaaaggggucag

SEQ ID NO: 1380602 - RNA, 19 nt, Artificial Sequence
  Description of Artificial Sequence: Synthetic oligonucleotide
gcaagcuuugguuaaacac

SEQ ID NO: 1380603 - RNA, 19 nt, Artificial Sequence
  Description of Artificial Sequence: Synthetic oligonucleotide
cuuuaucgugacgucaccg

SEQ ID NO: 1380604 - RNA, 19 nt, Artificial Sequence
  Description of Artificial Sequence: Synthetic oligonucleotide
ccaacaagcaccuucuuug

SEQ ID NO: 1380605 - RNA, 19 nt, Artificial Sequence
  Description of Artificial Sequence: Synthetic oligonucleotide
aacacgcgcguuuccgccg

SEQ ID NO: 1380606 - RNA, 19 nt, Artificial Sequence
  Description of Artificial Sequence: Synthetic oligonucleotide
ugaugcauugcuccucgac

SEQ ID NO: 1380607 - RNA, 19 nt, Artificial Sequence
  Description of Artificial Sequence: Synthetic oligonucleotide
acgcuuacaaaugacuuug

SEQ ID NO: 1380608 - RNA, 19 nt, Artificial Sequence
  Description of Artificial Sequence: Synthetic oligonucleotide
gaacaaacugagaccuugg

SEQ ID NO: 1380609 - RNA, 19 nt, Artificial Sequence
  Description of Artificial Sequence: Synthetic oligonucleotide
cacugaaaucgguuguggg

SEQ ID NO: 1380610 - RNA, 19 nt, Artificial Sequence
  Description of Artificial Sequence: Synthetic oligonucleotide
acaagcaccuucuuugaau

SEQ ID NO: 1380611 - RNA, 19 nt, Artificial Sequence
  Description of Artificial Sequence: Synthetic oligonucleotide
uacacccucaggaaaacuu

SEQ ID NO: 1380612 - RNA, 19 nt, Artificial Sequence
  Description of Artificial Sequence: Synthetic oligonucleotide
agauggcugaauaauuauc

SEQ ID NO: 1380613 - RNA, 19 nt, Artificial Sequence
  Description of Artificial Sequence: Synthetic oligonucleotide
cucggcacgaggaaggcac

SEQ ID NO: 1380614 - RNA, 19 nt, Artificial Sequence
  Description of Artificial Sequence: Synthetic oligonucleotide
ucucacucggcagugggag

SEQ ID NO: 1380615 - RNA, 19 nt, Artificial Sequence
  Description of Artificial Sequence: Synthetic oligonucleotide
agaacccggacagaguggg

SEQ ID NO: 1380616 - RNA, 19 nt, Artificial Sequence
  Description of Artificial Sequence: Synthetic oligonucleotide
auuuacagccguuaacauu

SEQ ID NO: 1380617 - RNA, 19 nt, Artificial Sequence
  Description of Artificial Sequence: Synthetic oligonucleotide
ugugaaucuaaaagugcuu

SEQ ID NO: 1380618 - RNA, 19 nt, Artificial Sequence
  Description of Artificial Sequence: Synthetic oligonucleotide
uugcaacgcuuacaaauga

SEQ ID NO: 1380619 - RNA, 19 nt, Artificial Sequence
  Description of Artificial Sequence: Synthetic oligonucleotide
auacuuaacccagacuuca

SEQ ID NO: 1380620 - RNA, 19 nt, Artificial Sequence
  Description of Artificial Sequence: Synthetic oligonucleotide
ugcaacgcuuacaaaugac

SEQ ID NO: 1380621 - RNA, 19 nt, Artificial Sequence
  Description of Artificial Sequence: Synthetic oligonucleotide
uccaacgagagcuccccag

SEQ ID NO: 1380622 - RNA, 19 nt, Artificial Sequence
  Description of Artificial Sequence: Synthetic oligonucleotide
gauggcugaauaauuaucu

SEQ ID NO: 1380623 - RNA, 19 nt, Artificial Sequence
  Description of Artificial Sequence: Synthetic oligonucleotide
uccuucgucuggcucaccc

SEQ ID NO: 1380624 - RNA, 19 nt, Artificial Sequence
  Description of Artificial Sequence: Synthetic oligonucleotide
agcaccacucuccaacgag

SEQ ID NO: 1380625 - RNA, 19 nt, Artificial Sequence
  Description of Artificial Sequence: Synthetic oligonucleotide
uucaaucaccaaacugucu

SEQ ID NO: 1380626 - RNA, 19 nt, Artificial Sequence
  Description of Artificial Sequence: Synthetic oligonucleotide
cuugguauguuaggaaaac

SEQ ID NO: 1380627 - RNA, 19 nt, Artificial Sequence
  Description of Artificial Sequence: Synthetic oligonucleotide
gguuaaacacugaaaucgg

SEQ ID NO: 1380628 - RNA, 19 nt, Artificial Sequence
  Description of Artificial Sequence: Synthetic oligonucleotide
aucgugacgucaccgcagg

SEQ ID NO: 1380629 - RNA, 19 nt, Artificial Sequence
  Description of Artificial Sequence: Synthetic oligonucleotide
guucucacucggcaguggg

SEQ ID NO: 1380630 - RNA, 19 nt, Artificial Sequence
  Description of Artificial Sequence: Synthetic oligonucleotide
gcuaauaugcuuccaggug

SEQ ID NO: 1380631 - RNA, 19 nt, Artificial Sequence
  Description of Artificial Sequence: Synthetic oligonucleotide
uaccagaacccggacagag

SEQ ID NO: 1380632 - RNA, 19 nt, Artificial Sequence
  Description of Artificial Sequence: Synthetic oligonucleotide
uggaagcugggucucggug

SEQ ID NO: 1380633 - RNA, 19 nt, Artificial Sequence
  Description of Artificial Sequence: Synthetic oligonucleotide
aaggcacaagccugaccuc

SEQ ID NO: 1380634 - RNA, 19 nt, Artificial Sequence
  Description of Artificial Sequence: Synthetic oligonucleotide
cagguguccgcaucaagag

SEQ ID NO: 1380635 - RNA, 19 nt, Artificial Sequence
  Description of Artificial Sequence: Synthetic oligonucleotide
ucuggcucacccaggauua

SEQ ID NO: 1380636 - RNA, 19 nt, Artificial Sequence
  Description of Artificial Sequence: Synthetic oligonucleotide
guuaacauucagcucccca

SEQ ID NO: 1380637 - RNA, 19 nt, Artificial Sequence
  Description of Artificial Sequence: Synthetic oligonucleotide
acuggaauuucgaaguggu

SEQ ID NO: 1380638 - RNA, 19 nt, Artificial Sequence
  Description of Artificial Sequence: Synthetic oligonucleotide
auuaucucugucauguaaa

SEQ ID NO: 1380639 - RNA, 19 nt, Artificial Sequence
  Description of Artificial Sequence: Synthetic oligonucleotide
cuugaauugugaaucuaaa

SEQ ID NO: 1380640 - RNA, 19 nt, Artificial Sequence
  Description of Artificial Sequence: Synthetic oligonucleotide
ugggaguuauagaaacguc

SEQ ID NO: 1380641 - RNA, 19 nt, Artificial Sequence
  Description of Artificial Sequence: Synthetic oligonucleotide
cucgcuguguucacacagg

SEQ ID NO: 1380642 - RNA, 19 nt, Artificial Sequence
  Description of Artificial Sequence: Synthetic oligonucleotide
ugggauuuacagccguuaa

SEQ ID NO: 1380643 - RNA, 19 nt, Artificial Sequence
  Description of Artificial Sequence: Synthetic oligonucleotide
gaacacgcgcguuuccgcc

SEQ ID NO: 1380644 - RNA, 19 nt, Artificial Sequence
  Description of Artificial Sequence: Synthetic oligonucleotide
cucaggaaaacuuuaaauu

SEQ ID NO: 1380645 - RNA, 19 nt, Artificial Sequence
  Description of Artificial Sequence: Synthetic oligonucleotide
uugagcuugcaagcuuugg

SEQ ID NO: 1380646 - RNA, 19 nt, Artificial Sequence
  Description of Artificial Sequence: Synthetic oligonucleotide
acgagagcuccccaguucu

SEQ ID NO: 1380647 - RNA, 19 nt, Artificial Sequence
  Description of Artificial Sequence: Synthetic oligonucleotide
acacugaaaucgguugugg

SEQ ID NO: 1380648 - RNA, 19 nt, Artificial Sequence
  Description of Artificial Sequence: Synthetic oligonucleotide
uucccaugagcgagcaagc

SEQ ID NO: 1380649 - RNA, 19 nt, Artificial Sequence
  Description of Artificial Sequence: Synthetic oligonucleotide
aggauuagcagcgcgcucu

SEQ ID NO: 1380650 - RNA, 19 nt, Artificial Sequence
  Description of Artificial Sequence: Synthetic oligonucleotide
aaacuucccucagauggcu

SEQ ID NO: 1380651 - RNA, 19 nt, Artificial Sequence
  Description of Artificial Sequence: Synthetic oligonucleotide
cccaacacuaccuugcaac

SEQ ID NO: 1380652 - RNA, 19 nt, Artificial Sequence
  Description of Artificial Sequence: Synthetic oligonucleotide
ucgcuguguucacacagga

SEQ ID NO: 1380653 - RNA, 19 nt, Artificial Sequence
  Description of Artificial Sequence: Synthetic oligonucleotide
aggguggacacugauguca

SEQ ID NO: 1380654 - RNA, 19 nt, Artificial Sequence
  Description of Artificial Sequence: Synthetic oligonucleotide
cucggauguacugcaagcc

SEQ ID NO: 1380655 - RNA, 19 nt, Artificial Sequence
  Description of Artificial Sequence: Synthetic oligonucleotide
gguauguuaggaaaacuuc

SEQ ID NO: 1380656 - RNA, 19 nt, Artificial Sequence
  Description of Artificial Sequence: Synthetic oligonucleotide
augcaacccaucuccucgg

SEQ ID NO: 1380657 - RNA, 19 nt, Artificial Sequence
  Description of Artificial Sequence: Synthetic oligonucleotide
uucgucuggcucacccagg

SEQ ID NO: 1380658 - RNA, 19 nt, Artificial Sequence
  Description of Artificial Sequence: Synthetic oligonucleotide
aaacguccaggcgcauccc

SEQ ID NO: 1380659 - RNA, 19 nt, Artificial Sequence
  Description of Artificial Sequence: Synthetic oligonucleotide
agauggguuuccauuagcu

SEQ ID NO: 1380660 - RNA, 19 nt, Artificial Sequence
  Description of Artificial Sequence: Synthetic oligonucleotide
ucuccgcacuuccaggaac

SEQ ID NO: 1380661 - RNA, 19 nt, Artificial Sequence
  Description of Artificial Sequence: Synthetic oligonucleotide
aacugagaccuugguaugu

SEQ ID NO: 1380662 - RNA, 19 nt, Artificial Sequence
  Description of Artificial Sequence: Synthetic oligonucleotide
aauuucgaagugguucaau

SEQ ID NO: 1380663 - RNA, 19 nt, Artificial Sequence
  Description of Artificial Sequence: Synthetic oligonucleotide
guuuccgccgcagccaccg

SEQ ID NO: 1380664 - RNA, 19 nt, Artificial Sequence
  Description of Artificial Sequence: Synthetic oligonucleotide
aggaacacgcgcguuuccg

SEQ ID NO: 1380665 - RNA, 19 nt, Artificial Sequence
  Description of Artificial Sequence: Synthetic oligonucleotide
acucuccaacgagagcucc

SEQ ID NO: 1380666 - RNA, 19 nt, Artificial Sequence
  Description of Artificial Sequence: Synthetic oligonucleotide
agcuccccagugaaguucc

SEQ ID NO: 1380667 - RNA, 19 nt, Artificial Sequence
  Description of Artificial Sequence: Synthetic oligonucleotide
ugauacagucucucccaac

SEQ ID NO: 1380668 - RNA, 19 nt, Artificial Sequence
  Description of Artificial Sequence: Synthetic oligonucleotide
aucaccaaacugucugagu

SEQ ID NO: 1380669 - RNA, 19 nt, Artificial Sequence
  Description of Artificial Sequence: Synthetic oligonucleotide
acgcagaugcaacccaucu

SEQ ID NO: 1380670 - RNA, 19 nt, Artificial Sequence
  Description of Artificial Sequence: Synthetic oligonucleotide
gucugaguuuaaaauccag

SEQ ID NO: 1380671 - RNA, 19 nt, Artificial Sequence
  Description of Artificial Sequence: Synthetic oligonucleotide
uuuacacccucaggaaaac

SEQ ID NO: 1380672 - RNA, 19 nt, Artificial Sequence
  Description of Artificial Sequence: Synthetic oligonucleotide
acccaggauuagcagcgcg

SEQ ID NO: 1380673 - RNA, 19 nt, Artificial Sequence
  Description of Artificial Sequence: Synthetic oligonucleotide
uuccucgcuguguucacac

SEQ ID NO: 1380674 - RNA, 19 nt, Artificial Sequence
  Description of Artificial Sequence: Synthetic oligonucleotide
ugcaagccucggcacgagg

SEQ ID NO: 1380675 - RNA, 19 nt, Artificial Sequence
  Description of Artificial Sequence: Synthetic oligonucleotide
cgcaucaagagugaggugg

SEQ ID NO: 1380676 - RNA, 19 nt, Artificial Sequence
  Description of Artificial Sequence: Synthetic oligonucleotide
ugacgucaccgcaggacug

SEQ ID NO: 1380677 - RNA, 19 nt, Artificial Sequence
  Description of Artificial Sequence: Synthetic oligonucleotide
gucacuuucccaugagcga

SEQ ID NO: 1380678 - RNA, 19 nt, Artificial Sequence
  Description of Artificial Sequence: Synthetic oligonucleotide
ggaguuauagaaacgucca

SEQ ID NO: 1380679 - RNA, 19 nt, Artificial Sequence
  Description of Artificial Sequence: Synthetic oligonucleotide
gacgucaccgcaggacugg

SEQ ID NO: 1380680 - RNA, 19 nt, Artificial Sequence
  Description of Artificial Sequence: Synthetic oligonucleotide
uauuagcaaaggggucagg

SEQ ID NO: 1380681 - RNA, 19 nt, Artificial Sequence
  Description of Artificial Sequence: Synthetic oligonucleotide
uucucacucggcaguggga

SEQ ID NO: 1380682 - RNA, 19 nt, Artificial Sequence
  Description of Artificial Sequence: Synthetic oligonucleotide
gacuggcaauaaaaugugc

SEQ ID NO: 1380683 - RNA, 19 nt, Artificial Sequence
  Description of Artificial Sequence: Synthetic oligonucleotide
acacgcgcguuuccgccgc

SEQ ID NO: 1380684 - RNA, 19 nt, Artificial Sequence
  Description of Artificial Sequence: Synthetic oligonucleotide
aauaugcuuccagguggug

SEQ ID NO: 1380685 - RNA, 19 nt, Artificial Sequence
  Description of Artificial Sequence: Synthetic oligonucleotide
aucuggcaaagggacagag

SEQ ID NO: 1380686 - RNA, 19 nt, Artificial Sequence
  Description of Artificial Sequence: Synthetic oligonucleotide
agaaacguccaggcgcauc

SEQ ID NO: 1380687 - RNA, 19 nt, Artificial Sequence
  Description of Artificial Sequence: Synthetic oligonucleotide
cuccccaguucucacucgg

SEQ ID NO: 1380688 - RNA, 19 nt, Artificial Sequence
  Description of Artificial Sequence: Synthetic oligonucleotide
gaagcugggucucggugca

SEQ ID NO: 1380689 - RNA, 19 nt, Artificial Sequence
  Description of Artificial Sequence: Synthetic oligonucleotide
aagcaccuucuuugaauaa

SEQ ID NO: 1380690 - RNA, 19 nt, Artificial Sequence
  Description of Artificial Sequence: Synthetic oligonucleotide
ggauguacugcaagccucg

SEQ ID NO: 1380691 - RNA, 19 nt, Artificial Sequence
  Description of Artificial Sequence: Synthetic oligonucleotide
uccaggaacacgcgcguuu

SEQ ID NO: 1380692 - RNA, 19 nt, Artificial Sequence
  Description of Artificial Sequence: Synthetic oligonucleotide
gauguacugcaagccucgg

SEQ ID NO: 1380693 - RNA, 19 nt, Artificial Sequence
  Description of Artificial Sequence: Synthetic oligonucleotide
ucccucagauggcugaaua

SEQ ID NO: 1380694 - RNA, 19 nt, Artificial Sequence
  Description of Artificial Sequence: Synthetic oligonucleotide
acugggcaaugauacucug

SEQ ID NO: 1380695 - RNA, 19 nt, Artificial Sequence
  Description of Artificial Sequence: Synthetic oligonucleotide
cuugagcuugcaagcuuug

SEQ ID NO: 1380696 - RNA, 19 nt, Artificial Sequence
  Description of Artificial Sequence: Synthetic oligonucleotide
uuaaacaaaccgggagcuc

SEQ ID NO: 1380697 - RNA, 19 nt, Artificial Sequence
  Description of Artificial Sequence: Synthetic oligonucleotide
ugaggcccgcacacgagac

SEQ ID NO: 1380698 - RNA, 19 nt, Artificial Sequence
  Description of Artificial Sequence: Synthetic oligonucleotide
cucuccaacgagagcuccc

SEQ ID NO: 1380699 - RNA, 19 nt, Artificial Sequence
  Description of Artificial Sequence: Synthetic oligonucleotide
aagccucggcacgaggaag

SEQ ID NO: 1380700 - RNA, 19 nt, Artificial Sequence
  Description of Artificial Sequence: Synthetic oligonucleotide
ugcauugcuccucgacagu

SEQ ID NO: 1380701 - RNA, 19 nt, Artificial Sequence
  Description of Artificial Sequence: Synthetic oligonucleotide
guccgcaucaagagugagg

SEQ ID NO: 1380702 - RNA, 19 nt, Artificial Sequence
  Description of Artificial Sequence: Synthetic oligonucleotide
gcacacgagaccgagcccg

SEQ ID NO: 1380703 - RNA, 19 nt, Artificial Sequence
  Description of Artificial Sequence: Synthetic oligonucleotide
uuacagccguuaacauuca

SEQ ID NO: 1380704 - RNA, 19 nt, Artificial Sequence
  Description of Artificial Sequence: Synthetic oligonucleotide
cagaggagaguuccaccag

SEQ ID NO: 1380705 - RNA, 19 nt, Artificial Sequence
  Description of Artificial Sequence: Synthetic oligonucleotide
cacuuucccaugagcgagc

SEQ ID NO: 1380706 - RNA, 19 nt, Artificial Sequence
  Description of Artificial Sequence: Synthetic oligonucleotide
gcacgaggaaggcacaagc

SEQ ID NO: 1380707 - RNA, 19 nt, Artificial Sequence
  Description of Artificial Sequence: Synthetic oligonucleotide
augauacagucucucccaa

SEQ ID NO: 1380708 - RNA, 19 nt, Artificial Sequence
  Description of Artificial Sequence: Synthetic oligonucleotide
cccgcaguuaccagaaccc

SEQ ID NO: 1380709 - RNA, 19 nt, Artificial Sequence
  Description of Artificial Sequence: Synthetic oligonucleotide
caaucaccaaacugucuga

SEQ ID NO: 1380710 - RNA, 19 nt, Artificial Sequence
  Description of Artificial Sequence: Synthetic oligonucleotide
gcagaggagaguuccacca

SEQ ID NO: 1380711 - RNA, 19 nt, Artificial Sequence
  Description of Artificial Sequence: Synthetic oligonucleotide
ggacuggcaauaaaaugug

SEQ ID NO: 1380712 - RNA, 19 nt, Artificial Sequence
  Description of Artificial Sequence: Synthetic oligonucleotide
agcacccugaggagcuucc

SEQ ID NO: 1380713 - RNA, 19 nt, Artificial Sequence
  Description of Artificial Sequence: Synthetic oligonucleotide
ucucucccaacacuaccuu

SEQ ID NO: 1380714 - RNA, 19 nt, Artificial Sequence
  Description of Artificial Sequence: Synthetic oligonucleotide
uugcaagcuuugguuaaac

SEQ ID NO: 1380715 - RNA, 19 nt, Artificial Sequence
  Description of Artificial Sequence: Synthetic oligonucleotide
agguguccgcaucaagagu

SEQ ID NO: 1380716 - RNA, 19 nt, Artificial Sequence
  Description of Artificial Sequence: Synthetic oligonucleotide
cuucuauacuuaacccaga

SEQ ID NO: 1380717 - RNA, 19 nt, Artificial Sequence
  Description of Artificial Sequence: Synthetic oligonucleotide
ggucgcagagggcagaguc

SEQ ID NO: 1380718 - RNA, 19 nt, Artificial Sequence
  Description of Artificial Sequence: Synthetic oligonucleotide
gugggaguuauagaaacgu

SEQ ID NO: 1380719 - RNA, 19 nt, Artificial Sequence
  Description of Artificial Sequence: Synthetic oligonucleotide
acagucucucccaacacua

SEQ ID NO: 1380720 - RNA, 19 nt, Artificial Sequence
  Description of Artificial Sequence: Synthetic oligonucleotide
ucguggauguagaggcuua

SEQ ID NO: 1380721 - RNA, 19 nt, Artificial Sequence
  Description of Artificial Sequence: Synthetic oligonucleotide
cuguccuuuaucgugacgu

SEQ ID NO: 1380722 - RNA, 19 nt, Artificial Sequence
  Description of Artificial Sequence: Synthetic oligonucleotide
ugcaacccaucuccucgga

SEQ ID NO: 1380723 - RNA, 19 nt, Artificial Sequence
  Description of Artificial Sequence: Synthetic oligonucleotide
aucacucauucaacaaaca

SEQ ID NO: 1380724 - RNA, 19 nt, Artificial Sequence
  Description of Artificial Sequence: Synthetic oligonucleotide
ucgcagagggcagagucaa

SEQ ID NO: 1380725 - RNA, 19 nt, Artificial Sequence
  Description of Artificial Sequence: Synthetic oligonucleotide
ucccaacacuaccuugcaa

SEQ ID NO: 1380726 - RNA, 19 nt, Artificial Sequence
  Description of Artificial Sequence: Synthetic oligonucleotide
uuacacccucaggaaaacu

SEQ ID NO: 1380727 - RNA, 19 nt, Artificial Sequence
  Description of Artificial Sequence: Synthetic oligonucleotide
cacgagaccgagcccgcag

SEQ ID NO: 1380728 - RNA, 19 nt, Artificial Sequence
  Description of Artificial Sequence: Synthetic oligonucleotide
ccucggauguacugcaagc

SEQ ID NO: 1380729 - RNA, 19 nt, Artificial Sequence
  Description of Artificial Sequence: Synthetic oligonucleotide
aggcacaagccugaccucu

SEQ ID NO: 1380730 - RNA, 19 nt, Artificial Sequence
  Description of Artificial Sequence: Synthetic oligonucleotide
ugauucagugugggccugc

SEQ ID NO: 1380731 - RNA, 19 nt, Artificial Sequence
  Description of Artificial Sequence: Synthetic oligonucleotide
cagucucucccaacacuac

SEQ ID NO: 1380732 - RNA, 19 nt, Artificial Sequence
  Description of Artificial Sequence: Synthetic oligonucleotide
acaaaccgggagcucuuaa

SEQ ID NO: 1380733 - RNA, 19 nt, Artificial Sequence
  Description of Artificial Sequence: Synthetic oligonucleotide
gcaucaagagugagguggg

SEQ ID NO: 1380734 - RNA, 19 nt, Artificial Sequence
  Description of Artificial Sequence: Synthetic oligonucleotide
gcagccaucagguguccgc

SEQ ID NO: 1380735 - RNA, 19 nt, Artificial Sequence
  Description of Artificial Sequence: Synthetic oligonucleotide
gcccgcaguuaccagaacc

SEQ ID NO: 1380736 - RNA, 19 nt, Artificial Sequence
  Description of Artificial Sequence: Synthetic oligonucleotide
caaaccgggagcucuuaaa

SEQ ID NO: 1380737 - RNA, 19 nt, Artificial Sequence
  Description of Artificial Sequence: Synthetic oligonucleotide
ugcugacacagcacagauu

SEQ ID NO: 1380738 - RNA, 19 nt, Artificial Sequence
  Description of Artificial Sequence: Synthetic oligonucleotide
ggaacacgcgcguuuccgc

SEQ ID NO: 1380739 - RNA, 19 nt, Artificial Sequence
  Description of Artificial Sequence: Synthetic oligonucleotide
uucucgcagaggagaguuc

SEQ ID NO: 1380740 - RNA, 19 nt, Artificial Sequence
  Description of Artificial Sequence: Synthetic oligonucleotide
aaacaaaccgggagcucuu

SEQ ID NO: 1380741 - RNA, 19 nt, Artificial Sequence
  Description of Artificial Sequence: Synthetic oligonucleotide
uggcucacccaggauuagc

SEQ ID NO: 1380742 - RNA, 19 nt, Artificial Sequence
  Description of Artificial Sequence: Synthetic oligonucleotide
ccuugaauugugaaucuaa

SEQ ID NO: 1380743 - RNA, 19 nt, Artificial Sequence
  Description of Artificial Sequence: Synthetic oligonucleotide
guccuuuaucgugacguca

SEQ ID NO: 1380744 - RNA, 19 nt, Artificial Sequence
  Description of Artificial Sequence: Synthetic oligonucleotide
cugaccuugaauugugaau

SEQ ID NO: 1380745 - RNA, 19 nt, Artificial Sequence
  Description of Artificial Sequence: Synthetic oligonucleotide
cccaggauuagcagcgcgc

SEQ ID NO: 1380746 - RNA, 19 nt, Artificial Sequence
  Description of Artificial Sequence: Synthetic oligonucleotide
gaggugggaguuauagaaa

SEQ ID NO: 1380747 - RNA, 19 nt, Artificial Sequence
  Description of Artificial Sequence: Synthetic oligonucleotide
cuccgcacuuccaggaaca

SEQ ID NO: 1380748 - RNA, 19 nt, Artificial Sequence
  Description of Artificial Sequence: Synthetic oligonucleotide
caacgcuuacaaaugacuu

SEQ ID NO: 1380749 - RNA, 19 nt, Artificial Sequence
  Description of Artificial Sequence: Synthetic oligonucleotide
cacacgagaccgagcccgc

SEQ ID NO: 1380750 - RNA, 19 nt, Artificial Sequence
  Description of Artificial Sequence: Synthetic oligonucleotide
gugacgucaccgcaggacu

SEQ ID NO: 1380751 - RNA, 19 nt, Artificial Sequence
  Description of Artificial Sequence: Synthetic oligonucleotide
acuuucccaugagcgagca

SEQ ID NO: 1380752 - RNA, 19 nt, Artificial Sequence
  Description of Artificial Sequence: Synthetic oligonucleotide
uuaccagaacccggacaga

SEQ ID NO: 1380753 - RNA, 19 nt, Artificial Sequence
  Description of Artificial Sequence: Synthetic oligonucleotide
guagaggugcaacuucuau

SEQ ID NO: 1380754 - RNA, 19 nt, Artificial Sequence
  Description of Artificial Sequence: Synthetic oligonucleotide
cuaccuugcaacgcuuaca

SEQ ID NO: 1380755 - RNA, 19 nt, Artificial Sequence
  Description of Artificial Sequence: Synthetic oligonucleotide
gcuuccgauguauuuucca

SEQ ID NO: 1380756 - RNA, 19 nt, Artificial Sequence
  Description of Artificial Sequence: Synthetic oligonucleotide
cucugucauguaaaauuua

SEQ ID NO: 1380757 - RNA, 19 nt, Artificial Sequence
  Description of Artificial Sequence: Synthetic oligonucleotide
ccuugcaacgcuuacaaau

SEQ ID NO: 1380758 - RNA, 19 nt, Artificial Sequence
  Description of Artificial Sequence: Synthetic oligonucleotide
acgucaccgcaggacuggc

SEQ ID NO: 1380759 - RNA, 19 nt, Artificial Sequence
  Description of Artificial Sequence: Synthetic oligonucleotide
gacuuugacugcguuccaa

SEQ ID NO: 1380760 - RNA, 19 nt, Artificial Sequence
  Description of Artificial Sequence: Synthetic oligonucleotide
caggaacacgcgcguuucc

SEQ ID NO: 1380761 - RNA, 19 nt, Artificial Sequence
  Description of Artificial Sequence: Synthetic oligonucleotide
aacaaaccgggagcucuua

SEQ ID NO: 1380762 - RNA, 19 nt, Artificial Sequence
  Description of Artificial Sequence: Synthetic oligonucleotide
caguuaccagaacccggac

SEQ ID NO: 1380763 - RNA, 19 nt, Artificial Sequence
  Description of Artificial Sequence: Synthetic oligonucleotide
gcagacgcagaugcaaccc

SEQ ID NO: 1380764 - RNA, 19 nt, Artificial Sequence
  Description of Artificial Sequence: Synthetic oligonucleotide
ucccuccuucgucuggcuc

SEQ ID NO: 1380765 - RNA, 19 nt, Artificial Sequence
  Description of Artificial Sequence: Synthetic oligonucleotide
cgcaguuaccagaacccgg

SEQ ID NO: 1380766 - RNA, 19 nt, Artificial Sequence
  Description of Artificial Sequence: Synthetic oligonucleotide
cccaguucucacucggcag

SEQ ID NO: 1380767 - RNA, 19 nt, Artificial Sequence
  Description of Artificial Sequence: Synthetic oligonucleotide
ucggugcagccaucaggug

SEQ ID NO: 1380768 - RNA, 19 nt, Artificial Sequence
  Description of Artificial Sequence: Synthetic oligonucleotide
acguccaggcgcaucccuc

SEQ ID NO: 1380769 - RNA, 19 nt, Artificial Sequence
  Description of Artificial Sequence: Synthetic oligonucleotide
gaauuucgaagugguucaa

SEQ ID NO: 1380770 - RNA, 19 nt, Artificial Sequence
  Description of Artificial Sequence: Synthetic oligonucleotide
acacccucaggaaaacuuu

SEQ ID NO: 1380771 - RNA, 19 nt, Artificial Sequence
  Description of Artificial Sequence: Synthetic oligonucleotide
cagacgcagaugcaaccca

SEQ ID NO: 1380772 - RNA, 19 nt, Artificial Sequence
  Description of Artificial Sequence: Synthetic oligonucleotide
acagaggcagugaugcauu

SEQ ID NO: 1380773 - RNA, 19 nt, Artificial Sequence
  Description of Artificial Sequence: Synthetic oligonucleotide
gacgcagaugcaacccauc

SEQ ID NO: 1380774 - RNA, 19 nt, Artificial Sequence
  Description of Artificial Sequence: Synthetic oligonucleotide
caggcgcaucccuccuucg

SEQ ID NO: 1380775 - RNA, 19 nt, Artificial Sequence
  Description of Artificial Sequence: Synthetic oligonucleotide
gucucggugcagccaucag

SEQ ID NO: 1380776 - RNA, 19 nt, Artificial Sequence
  Description of Artificial Sequence: Synthetic oligonucleotide
agcccgcaguuaccagaac

SEQ ID NO: 1380777 - RNA, 19 nt, Artificial Sequence
  Description of Artificial Sequence: Synthetic oligonucleotide
acugaggcccgcacacgag

SEQ ID NO: 1380778 - RNA, 19 nt, Artificial Sequence
  Description of Artificial Sequence: Synthetic oligonucleotide
ucgugacgucaccgcagga

SEQ ID NO: 1380779 - RNA, 19 nt, Artificial Sequence
  Description of Artificial Sequence: Synthetic oligonucleotide
caguucucacucggcagug

SEQ ID NO: 1380780 - RNA, 19 nt, Artificial Sequence
  Description of Artificial Sequence: Synthetic oligonucleotide
accuugaauugugaaucua

SEQ ID NO: 1380781 - RNA, 19 nt, Artificial Sequence
  Description of Artificial Sequence: Synthetic oligonucleotide
ggauuagcagcgcgcucug

SEQ ID NO: 1380782 - RNA, 19 nt, Artificial Sequence
  Description of Artificial Sequence: Synthetic oligonucleotide
ccucgacaguaucagcagc

SEQ ID NO: 1380783 - RNA, 19 nt, Artificial Sequence
  Description of Artificial Sequence: Synthetic oligonucleotide
gggccugauucaguguggg

SEQ ID NO: 1380784 - RNA, 19 nt, Artificial Sequence
  Description of Artificial Sequence: Synthetic oligonucleotide
agcguccuugagcuugcaa

SEQ ID NO: 1380785 - RNA, 19 nt, Artificial Sequence
  Description of Artificial Sequence: Synthetic oligonucleotide
caggauuagcagcgcgcuc

SEQ ID NO: 1380786 - RNA, 19 nt, Artificial Sequence
  Description of Artificial Sequence: Synthetic oligonucleotide
cccaauaaaacagucauuu

SEQ ID NO: 1380787 - RNA, 19 nt, Artificial Sequence
  Description of Artificial Sequence: Synthetic oligonucleotide
gcuccaaaucacuucucaa

SEQ ID NO: 1380788 - RNA, 19 nt, Artificial Sequence
  Description of Artificial Sequence: Synthetic oligonucleotide
gucucucccaacacuaccu

SEQ ID NO: 1380789 - RNA, 19 nt, Artificial Sequence
  Description of Artificial Sequence: Synthetic oligonucleotide
cacugggcaaugauacucu

SEQ ID NO: 1380790 - RNA, 19 nt, Artificial Sequence
  Description of Artificial Sequence: Synthetic oligonucleotide
gugguucaaucaccaaacu

SEQ ID NO: 1380791 - RNA, 19 nt, Artificial Sequence
  Description of Artificial Sequence: Synthetic oligonucleotide
gucgcagagggcagaguca

SEQ ID NO: 1380792 - RNA, 19 nt, Artificial Sequence
  Description of Artificial Sequence: Synthetic oligonucleotide
gcaucccuccuucgucugg

SEQ ID NO: 1380793 - RNA, 19 nt, Artificial Sequence
  Description of Artificial Sequence: Synthetic oligonucleotide
agcuuugguuaaacacuga

SEQ ID NO: 1380794 - RNA, 19 nt, Artificial Sequence
  Description of Artificial Sequence: Synthetic oligonucleotide
ccucaggaaaacuuuaaau

SEQ ID NO: 1380795 - RNA, 19 nt, Artificial Sequence
  Description of Artificial Sequence: Synthetic oligonucleotide
cugggauuuacagccguua

SEQ ID NO: 1380796 - RNA, 19 nt, Artificial Sequence
  Description of Artificial Sequence: Synthetic oligonucleotide
cucgcagaggagaguucca

SEQ ID NO: 1380797 - RNA, 19 nt, Artificial Sequence
  Description of Artificial Sequence: Synthetic oligonucleotide
gcaacgcuuacaaaugacu

SEQ ID NO: 1380798 - RNA, 19 nt, Artificial Sequence
  Description of Artificial Sequence: Synthetic oligonucleotide
cuugcaagcuuugguuaaa

SEQ ID NO: 1380799 - RNA, 19 nt, Artificial Sequence
  Description of Artificial Sequence: Synthetic oligonucleotide
caagccucggcacgaggaa

SEQ ID NO: 1380800 - RNA, 19 nt, Artificial Sequence
  Description of Artificial Sequence: Synthetic oligonucleotide
cauccugaccuugaauugu

SEQ ID NO: 1380801 - RNA, 19 nt, Artificial Sequence
  Description of Artificial Sequence: Synthetic oligonucleotide
gagucagcuuccgauguau

SEQ ID NO: 1380802 - RNA, 19 nt, Artificial Sequence
  Description of Artificial Sequence: Synthetic oligonucleotide
aucgguugugggccugauu

SEQ ID NO: 1380803 - RNA, 19 nt, Artificial Sequence
  Description of Artificial Sequence: Synthetic oligonucleotide
cgcuuacaaaugacuuugg

SEQ ID NO: 1380804 - RNA, 19 nt, Artificial Sequence
  Description of Artificial Sequence: Synthetic oligonucleotide
gcuccucgacaguaucagc

SEQ ID NO: 1380805 - RNA, 19 nt, Artificial Sequence
  Description of Artificial Sequence: Synthetic oligonucleotide
cugagaccuugguauguua

SEQ ID NO: 1380806 - RNA, 19 nt, Artificial Sequence
  Description of Artificial Sequence: Synthetic oligonucleotide
gaccgagcccgcaguuacc

SEQ ID NO: 1380807 - RNA, 19 nt, Artificial Sequence
  Description of Artificial Sequence: Synthetic oligonucleotide
acuuugccauccugaccuu

SEQ ID NO: 1380808 - RNA, 19 nt, Artificial Sequence
  Description of Artificial Sequence: Synthetic oligonucleotide
cacuaccuugcaacgcuua

SEQ ID NO: 1380809 - RNA, 19 nt, Artificial Sequence
  Description of Artificial Sequence: Synthetic oligonucleotide
gcaagccucggcacgagga

SEQ ID NO: 1380810 - RNA, 19 nt, Artificial Sequence
  Description of Artificial Sequence: Synthetic oligonucleotide
gcgcguuuccgccgcagcc

SEQ ID NO: 1380811 - RNA, 19 nt, Artificial Sequence
  Description of Artificial Sequence: Synthetic oligonucleotide
ccugaccuugaauugugaa

SEQ ID NO: 1380812 - RNA, 19 nt, Artificial Sequence
  Description of Artificial Sequence: Synthetic oligonucleotide
ccgcaguuaccagaacccg

SEQ ID NO: 1380813 - RNA, 19 nt, Artificial Sequence
  Description of Artificial Sequence: Synthetic oligonucleotide
cuggcucacccaggauuag

SEQ ID NO: 1380814 - RNA, 19 nt, Artificial Sequence
  Description of Artificial Sequence: Synthetic oligonucleotide
cuuccaggaacacgcgcgu

SEQ ID NO: 1380815 - RNA, 19 nt, Artificial Sequence
  Description of Artificial Sequence: Synthetic oligonucleotide
cuucucgcagaggagaguu

SEQ ID NO: 1380816 - RNA, 19 nt, Artificial Sequence
  Description of Artificial Sequence: Synthetic oligonucleotide
gcagagucaaaggguggac

SEQ ID NO: 1380817 - RNA, 19 nt, Artificial Sequence
  Description of Artificial Sequence: Synthetic oligonucleotide
aaacaccaacaagcaccuu

SEQ ID NO: 1380818 - RNA, 19 nt, Artificial Sequence
  Description of Artificial Sequence: Synthetic oligonucleotide
cacccaggauuagcagcgc

SEQ ID NO: 1380819 - RNA, 19 nt, Artificial Sequence
  Description of Artificial Sequence: Synthetic oligonucleotide
cgugacgucaccgcaggac

SEQ ID NO: 1380820 - RNA, 19 nt, Artificial Sequence
  Description of Artificial Sequence: Synthetic oligonucleotide
agccugaccucugcuggaa

SEQ ID NO: 1380821 - RNA, 19 nt, Artificial Sequence
  Description of Artificial Sequence: Synthetic oligonucleotide
gcaauaaaaugugcagcgu

SEQ ID NO: 1380822 - RNA, 19 nt, Artificial Sequence
  Description of Artificial Sequence: Synthetic oligonucleotide
gagaccgagcccgcaguua

SEQ ID NO: 1380823 - RNA, 19 nt, Artificial Sequence
  Description of Artificial Sequence: Synthetic oligonucleotide
gcaccacucuccaacgaga

SEQ ID NO: 1380824 - RNA, 19 nt, Artificial Sequence
  Description of Artificial Sequence: Synthetic oligonucleotide
cagaugcaacccaucuccu

SEQ ID NO: 1380825 - RNA, 19 nt, Artificial Sequence
  Description of Artificial Sequence: Synthetic oligonucleotide
cagcaccacucuccaacga

SEQ ID NO: 1380826 - RNA, 19 nt, Artificial Sequence
  Description of Artificial Sequence: Synthetic oligonucleotide
caggacagauggguuucca

SEQ ID NO: 1380827 - RNA, 19 nt, Artificial Sequence
  Description of Artificial Sequence: Synthetic oligonucleotide
cugcaagccucggcacgag

SEQ ID NO: 1380828 - RNA, 19 nt, Artificial Sequence
  Description of Artificial Sequence: Synthetic oligonucleotide
acacuaccuugcaacgcuu

SEQ ID NO: 1380829 - RNA, 19 nt, Artificial Sequence
  Description of Artificial Sequence: Synthetic oligonucleotide
ccaggcgcaucccuccuuc

SEQ ID NO: 1380830 - RNA, 19 nt, Artificial Sequence
  Description of Artificial Sequence: Synthetic oligonucleotide
uagaaacguccaggcgcau

SEQ ID NO: 1380831 - RNA, 19 nt, Artificial Sequence
  Description of Artificial Sequence: Synthetic oligonucleotide
uggcccacugaggcccgca

SEQ ID NO: 1380832 - RNA, 19 nt, Artificial Sequence
  Description of Artificial Sequence: Synthetic oligonucleotide
acacgagaccgagcccgca

SEQ ID NO: 1380833 - RNA, 19 nt, Artificial Sequence
  Description of Artificial Sequence: Synthetic oligonucleotide
ggucucggugcagccauca

SEQ ID NO: 1380834 - RNA, 19 nt, Artificial Sequence
  Description of Artificial Sequence: Synthetic oligonucleotide
ggcugguagaggacuuuga

SEQ ID NO: 1380835 - RNA, 19 nt, Artificial Sequence
  Description of Artificial Sequence: Synthetic oligonucleotide
agcgcgcucugcagccguc

SEQ ID NO: 1380836 - RNA, 19 nt, Artificial Sequence
  Description of Artificial Sequence: Synthetic oligonucleotide
cacucggcagugggagcac

SEQ ID NO: 1380837 - RNA, 19 nt, Artificial Sequence
  Description of Artificial Sequence: Synthetic oligonucleotide
caucagguguccgcaucaa

SEQ ID NO: 1380838 - RNA, 19 nt, Artificial Sequence
  Description of Artificial Sequence: Synthetic oligonucleotide
acgcgcguuuccgccgcag

SEQ ID NO: 1380839 - RNA, 19 nt, Artificial Sequence
  Description of Artificial Sequence: Synthetic oligonucleotide
cugaacaaacugagaccuu

SEQ ID NO: 1380840 - RNA, 19 nt, Artificial Sequence
  Description of Artificial Sequence: Synthetic oligonucleotide
ccaguucucacucggcagu

SEQ ID NO: 1380841 - RNA, 19 nt, Artificial Sequence
  Description of Artificial Sequence: Synthetic oligonucleotide
cuggaagcugggucucggu

SEQ ID NO: 1380842 - RNA, 19 nt, Artificial Sequence
  Description of Artificial Sequence: Synthetic oligonucleotide
cucguggauguagaggcuu

SEQ ID NO: 1380843 - RNA, 19 nt, Artificial Sequence
  Description of Artificial Sequence: Synthetic oligonucleotide
gcccgcacacgagaccgag

SEQ ID NO: 1380844 - RNA, 19 nt, Artificial Sequence
  Description of Artificial Sequence: Synthetic oligonucleotide
cgagcccgcaguuaccaga

SEQ ID NO: 1380845 - RNA, 19 nt, Artificial Sequence
  Description of Artificial Sequence: Synthetic oligonucleotide
caacgagagcuccccaguu

SEQ ID NO: 1380846 - RNA, 19 nt, Artificial Sequence
  Description of Artificial Sequence: Synthetic oligonucleotide
gcagccgucuccgcacuuc

SEQ ID NO: 1380847 - RNA, 19 nt, Artificial Sequence
  Description of Artificial Sequence: Synthetic oligonucleotide
ccuugagcuugcaagcuuu

SEQ ID NO: 1380848 - RNA, 19 nt, Artificial Sequence
  Description of Artificial Sequence: Synthetic oligonucleotide
gcgcaucccuccuucgucu

SEQ ID NO: 1380849 - RNA, 19 nt, Artificial Sequence
  Description of Artificial Sequence: Synthetic oligonucleotide
ccgcaucaagagugaggug

SEQ ID NO: 1380850 - RNA, 19 nt, Artificial Sequence
  Description of Artificial Sequence: Synthetic oligonucleotide
gccucggcacgaggaaggc

SEQ ID NO: 1380851 - RNA, 19 nt, Artificial Sequence
  Description of Artificial Sequence: Synthetic oligonucleotide
ccgagcccgcaguuaccag

SEQ ID NO: 1380852 - RNA, 19 nt, Artificial Sequence
  Description of Artificial Sequence: Synthetic oligonucleotide
ccaacgagagcuccccagu

SEQ ID NO: 1380853 - RNA, 19 nt, Artificial Sequence
  Description of Artificial Sequence: Synthetic oligonucleotide
ccaggauuagcagcgcgcu

SEQ ID NO: 1380854 - RNA, 19 nt, Artificial Sequence
  Description of Artificial Sequence: Synthetic oligonucleotide
cccagugaaguuccucgcu

SEQ ID NO: 1380855 - RNA, 19 nt, Artificial Sequence
  Description of Artificial Sequence: Synthetic oligonucleotide
caugagcgagcaagcucuu

SEQ ID NO: 1380856 - RNA, 19 nt, Artificial Sequence
  Description of Artificial Sequence: Synthetic oligonucleotide
gcaacccaucuccucggau

SEQ ID NO: 1380857 - RNA, 19 nt, Artificial Sequence
  Description of Artificial Sequence: Synthetic oligonucleotide
cagcgcgcucugcagccgu

SEQ ID NO: 1380858 - RNA, 19 nt, Artificial Sequence
  Description of Artificial Sequence: Synthetic oligonucleotide
cacgcgcguuuccgccgca

SEQ ID NO: 1380859 - RNA, 19 nt, Artificial Sequence
  Description of Artificial Sequence: Synthetic oligonucleotide
ccucggcacgaggaaggca

SEQ ID NO: 1380860 - RNA, 19 nt, Artificial Sequence
  Description of Artificial Sequence: Synthetic oligonucleotide
cgucaccgcaggacuggca

SEQ ID NO: 1380861 - RNA, 19 nt, Artificial Sequence
  Description of Artificial Sequence: Synthetic oligonucleotide
cagcguccuugagcuugca

SEQ ID NO: 1380862 - RNA, 19 nt, Artificial Sequence
  Description of Artificial Sequence: Synthetic oligonucleotide
gggucucggugcagccauc

SEQ ID NO: 1380863 - RNA, 19 nt, Artificial Sequence
  Description of Artificial Sequence: Synthetic oligonucleotide
ggcccgcacacgagaccga

SEQ ID NO: 1380864 - RNA, 19 nt, Artificial Sequence
  Description of Artificial Sequence: Synthetic oligonucleotide
cguggauguagaggcuuau

SEQ ID NO: 1380865 - RNA, 19 nt, Artificial Sequence
  Description of Artificial Sequence: Synthetic oligonucleotide
cggcacgaggaaggcacaa

SEQ ID NO: 1380866 - RNA, 19 nt, Artificial Sequence
  Description of Artificial Sequence: Synthetic oligonucleotide
cgagaccgagcccgcaguu

SEQ ID NO: 1380867 - RNA, 19 nt, Artificial Sequence
  Description of Artificial Sequence: Synthetic oligonucleotide
uuuauuaucgccaaugcug

SEQ ID NO: 1380868 - RNA, 19 nt, Artificial Sequence
  Description of Artificial Sequence: Synthetic oligonucleotide
aauuuauuaucgccaaugc

SEQ ID NO: 1380869 - RNA, 19 nt, Artificial Sequence
  Description of Artificial Sequence: Synthetic oligonucleotide
uuaaaucucaaauuuagcu

SEQ ID NO: 1380870 - RNA, 19 nt, Artificial Sequence
  Description of Artificial Sequence: Synthetic oligonucleotide
aggaaaauuuauuaucgcc

SEQ ID NO: 1380871 - RNA, 19 nt, Artificial Sequence
  Description of Artificial Sequence: Synthetic oligonucleotide
aacuaguuggaaugaaccc

SEQ ID NO: 1380872 - RNA, 19 nt, Artificial Sequence
  Description of Artificial Sequence: Synthetic oligonucleotide
aaacuaguuggaaugaacc

SEQ ID NO: 1380873 - RNA, 19 nt, Artificial Sequence
  Description of Artificial Sequence: Synthetic oligonucleotide
agaaaguuugucuuugggc

SEQ ID NO: 1380874 - RNA, 19 nt, Artificial Sequence
  Description of Artificial Sequence: Synthetic oligonucleotide
aaagauaucuuguggaugu

SEQ ID NO: 1380875 - RNA, 19 nt, Artificial Sequence
  Description of Artificial Sequence: Synthetic oligonucleotide
uaaugcaugaacuuaaaac

SEQ ID NO: 1380876 - RNA, 19 nt, Artificial Sequence
  Description of Artificial Sequence: Synthetic oligonucleotide
aguuugacagcauaauagc

SEQ ID NO: 1380877 - RNA, 19 nt, Artificial Sequence
  Description of Artificial Sequence: Synthetic oligonucleotide
uuauuaucgccaaugcugg

SEQ ID NO: 1380878 - RNA, 19 nt, Artificial Sequence
  Description of Artificial Sequence: Synthetic oligonucleotide
uuuuacaagcuuaacacga

SEQ ID NO: 1380879 - RNA, 19 nt, Artificial Sequence
  Description of Artificial Sequence: Synthetic oligonucleotide
ucuaauuagauucuuguau

SEQ ID NO: 1380880 - RNA, 19 nt, Artificial Sequence
  Description of Artificial Sequence: Synthetic oligonucleotide
ucguucaacagucugaacc

SEQ ID NO: 1380881 - RNA, 19 nt, Artificial Sequence
  Description of Artificial Sequence: Synthetic oligonucleotide
ucuuacaauaugaaguuca

SEQ ID NO: 1380882 - RNA, 19 nt, Artificial Sequence
  Description of Artificial Sequence: Synthetic oligonucleotide
ugcauagggacuaacaagc

SEQ ID NO: 1380883 - RNA, 19 nt, Artificial Sequence
  Description of Artificial Sequence: Synthetic oligonucleotide
ucaacaggcucucaguucg

SEQ ID NO: 1380884 - RNA, 19 nt, Artificial Sequence
  Description of Artificial Sequence: Synthetic oligonucleotide
cauaauagcucauauaauc

SEQ ID NO: 1380885 - RNA, 19 nt, Artificial Sequence
  Description of Artificial Sequence: Synthetic oligonucleotide
gauaaaggcgagcuggucg

SEQ ID NO: 1380886 - RNA, 19 nt, Artificial Sequence
  Description of Artificial Sequence: Synthetic oligonucleotide
aaugaucucaucacaaccg

SEQ ID NO: 1380887 - RNA, 19 nt, Artificial Sequence
  Description of Artificial Sequence: Synthetic oligonucleotide
uuuuauagguacagguagg

SEQ ID NO: 1380888 - RNA, 19 nt, Artificial Sequence
  Description of Artificial Sequence: Synthetic oligonucleotide
uauaaucuuuuauagguac

SEQ ID NO: 1380889 - RNA, 19 nt, Artificial Sequence
  Description of Artificial Sequence: Synthetic oligonucleotide
cacaucuacacuuauacac

SEQ ID NO: 1380890 - RNA, 19 nt, Artificial Sequence
  Description of Artificial Sequence: Synthetic oligonucleotide
aauuagauucuuguauugg

SEQ ID NO: 1380891 - RNA, 19 nt, Artificial Sequence
  Description of Artificial Sequence: Synthetic oligonucleotide
uuuaagauaauaguacaca

SEQ ID NO: 1380892 - RNA, 19 nt, Artificial Sequence
  Description of Artificial Sequence: Synthetic oligonucleotide
ugaaguucagcuauagucu

SEQ ID NO: 1380893 - RNA, 19 nt, Artificial Sequence
  Description of Artificial Sequence: Synthetic oligonucleotide
augaguaucagguauccag

SEQ ID NO: 1380894 - RNA, 19 nt, Artificial Sequence
  Description of Artificial Sequence: Synthetic oligonucleotide
uucgauaaaggcgagcugg

SEQ ID NO: 1380895 - RNA, 19 nt, Artificial Sequence
  Description of Artificial Sequence: Synthetic oligonucleotide
uccaaauuacagaucacag

SEQ ID NO: 1380896 - RNA, 19 nt, Artificial Sequence
  Description of Artificial Sequence: Synthetic oligonucleotide
aguucccuaguauaaaagg

SEQ ID NO: 1380897 - RNA, 19 nt, Artificial Sequence
  Description of Artificial Sequence: Synthetic oligonucleotide
aguucuuacaauaugaagu

SEQ ID NO: 1380898 - RNA, 19 nt, Artificial Sequence
  Description of Artificial Sequence: Synthetic oligonucleotide
aaaacuaguuggaaugaac

SEQ ID NO: 1380899 - RNA, 19 nt, Artificial Sequence
  Description of Artificial Sequence: Synthetic oligonucleotide
caugguaacacacaucuac

SEQ ID NO: 1380900 - RNA, 19 nt, Artificial Sequence
  Description of Artificial Sequence: Synthetic oligonucleotide
uacucaaucuuaaaucuca

SEQ ID NO: 1380901 - RNA, 19 nt, Artificial Sequence
  Description of Artificial Sequence: Synthetic oligonucleotide
acaggaaaauuuauuaucg

SEQ ID NO: 1380902 - RNA, 19 nt, Artificial Sequence
  Description of Artificial Sequence: Synthetic oligonucleotide
uucagcuauagucuuacca

SEQ ID NO: 1380903 - RNA, 19 nt, Artificial Sequence
  Description of Artificial Sequence: Synthetic oligonucleotide
gauaauaguacacauggua

SEQ ID NO: 1380904 - RNA, 19 nt, Artificial Sequence
  Description of Artificial Sequence: Synthetic oligonucleotide
uuugacagcauaauagcuc

SEQ ID NO: 1380905 - RNA, 19 nt, Artificial Sequence
  Description of Artificial Sequence: Synthetic oligonucleotide
agagaauaugaguaucagg

SEQ ID NO: 1380906 - RNA, 19 nt, Artificial Sequence
  Description of Artificial Sequence: Synthetic oligonucleotide
ugauuuauauaaaccacaa

SEQ ID NO: 1380907 - RNA, 19 nt, Artificial Sequence
  Description of Artificial Sequence: Synthetic oligonucleotide
aucuuuuauagguacaggu

SEQ ID NO: 1380908 - RNA, 19 nt, Artificial Sequence
  Description of Artificial Sequence: Synthetic oligonucleotide
uuuauagguacagguaggg

SEQ ID NO: 1380909 - RNA, 19 nt, Artificial Sequence
  Description of Artificial Sequence: Synthetic oligonucleotide
uuagcuuuugauaacugau

SEQ ID NO: 1380910 - RNA, 19 nt, Artificial Sequence
  Description of Artificial Sequence: Synthetic oligonucleotide
uuagauucuuguauuggca

SEQ ID NO: 1380911 - RNA, 19 nt, Artificial Sequence
  Description of Artificial Sequence: Synthetic oligonucleotide
ucuuguauuggcagucacg

SEQ ID NO: 1380912 - RNA, 19 nt, Artificial Sequence
  Description of Artificial Sequence: Synthetic oligonucleotide
uuaagauaauaguacacau

SEQ ID NO: 1380913 - RNA, 19 nt, Artificial Sequence
  Description of Artificial Sequence: Synthetic oligonucleotide
aaacccgccauccagggca

SEQ ID NO: 1380914 - RNA, 19 nt, Artificial Sequence
  Description of Artificial Sequence: Synthetic oligonucleotide
ucagcauuuacucucgauc

SEQ ID NO: 1380915 - RNA, 19 nt, Artificial Sequence
  Description of Artificial Sequence: Synthetic oligonucleotide
aucacaaccgagcucuucg

SEQ ID NO: 1380916 - RNA, 19 nt, Artificial Sequence
  Description of Artificial Sequence: Synthetic oligonucleotide
cauauaaucuuuuauaggu

SEQ ID NO: 1380917 - RNA, 19 nt, Artificial Sequence
  Description of Artificial Sequence: Synthetic oligonucleotide
cacacaucuacacuuauac

SEQ ID NO: 1380918 - RNA, 19 nt, Artificial Sequence
  Description of Artificial Sequence: Synthetic oligonucleotide
gagaggaggagagagagag

SEQ ID NO: 1380919 - RNA, 19 nt, Artificial Sequence
  Description of Artificial Sequence: Synthetic oligonucleotide
ucuuucgucagcauuuacu

SEQ ID NO: 1380920 - RNA, 19 nt, Artificial Sequence
  Description of Artificial Sequence: Synthetic oligonucleotide
uuuacucucgaucaaugau

SEQ ID NO: 1380921 - RNA, 19 nt, Artificial Sequence
  Description of Artificial Sequence: Synthetic oligonucleotide
uaauaguacacaugguaac

SEQ ID NO: 1380922 - RNA, 19 nt, Artificial Sequence
  Description of Artificial Sequence: Synthetic oligonucleotide
aauaguacacaugguaaca

SEQ ID NO: 1380923 - RNA, 19 nt, Artificial Sequence
  Description of Artificial Sequence: Synthetic oligonucleotide
gagaauaugaguaucaggu

SEQ ID NO: 1380924 - RNA, 19 nt, Artificial Sequence
  Description of Artificial Sequence: Synthetic oligonucleotide
uuucucaacaggcucucag

SEQ ID NO: 1380925 - RNA, 19 nt, Artificial Sequence
  Description of Artificial Sequence: Synthetic oligonucleotide
cuuaacacgaccaaguucu

SEQ ID NO: 1380926 - RNA, 19 nt, Artificial Sequence
  Description of Artificial Sequence: Synthetic oligonucleotide
gaaaguuugucuuugggcu

SEQ ID NO: 1380927 - RNA, 19 nt, Artificial Sequence
  Description of Artificial Sequence: Synthetic oligonucleotide
uucugagcagauuuaaaac

SEQ ID NO: 1380928 - RNA, 19 nt, Artificial Sequence
  Description of Artificial Sequence: Synthetic oligonucleotide
uauagguacagguaggguu

SEQ ID NO: 1380929 - RNA, 19 nt, Artificial Sequence
  Description of Artificial Sequence: Synthetic oligonucleotide
caaugaucucaucacaacc

SEQ ID NO: 1380930 - RNA, 19 nt, Artificial Sequence
  Description of Artificial Sequence: Synthetic oligonucleotide
uuacucucgaucaaugauc

SEQ ID NO: 1380931 - RNA, 19 nt, Artificial Sequence
  Description of Artificial Sequence: Synthetic oligonucleotide
gucgaaagggcucuucucg

SEQ ID NO: 1380932 - RNA, 19 nt, Artificial Sequence
  Description of Artificial Sequence: Synthetic oligonucleotide
ucccauaaauuuuaaugca

SEQ ID NO: 1380933 - RNA, 19 nt, Artificial Sequence
  Description of Artificial Sequence: Synthetic oligonucleotide
ugugcagucaaaucccagc

SEQ ID NO: 1380934 - RNA, 19 nt, Artificial Sequence
  Description of Artificial Sequence: Synthetic oligonucleotide
aggagagagagagagagag

SEQ ID NO: 1380935 - RNA, 19 nt, Artificial Sequence
  Description of Artificial Sequence: Synthetic oligonucleotide
gaggaggagagagagagag

SEQ ID NO: 1380936 - RNA, 19 nt, Artificial Sequence
  Description of Artificial Sequence: Synthetic oligonucleotide
agucuuaccaucugucaag

SEQ ID NO: 1380937 - RNA, 19 nt, Artificial Sequence
  Description of Artificial Sequence: Synthetic oligonucleotide
cuuucgucagcauuuacuc

SEQ ID NO: 1380938 - RNA, 19 nt, Artificial Sequence
  Description of Artificial Sequence: Synthetic oligonucleotide
cuccauaucgcccucgccg

SEQ ID NO: 1380939 - RNA, 19 nt, Artificial Sequence
  Description of Artificial Sequence: Synthetic oligonucleotide
auuuauuaucgccaaugcu

SEQ ID NO: 1380940 - RNA, 19 nt, Artificial Sequence
  Description of Artificial Sequence: Synthetic oligonucleotide
uuacaagcuuaacacgacc

SEQ ID NO: 1380941 - RNA, 19 nt, Artificial Sequence
  Description of Artificial Sequence: Synthetic oligonucleotide
aagauauccugauuggcuu

SEQ ID NO: 1380942 - RNA, 19 nt, Artificial Sequence
  Description of Artificial Sequence: Synthetic oligonucleotide
auugacaaccaucagcgaa

SEQ ID NO: 1380943 - RNA, 19 nt, Artificial Sequence
  Description of Artificial Sequence: Synthetic oligonucleotide
ucuucgauaaaggcgagcu

SEQ ID NO: 1380944 - RNA, 19 nt, Artificial Sequence
  Description of Artificial Sequence: Synthetic oligonucleotide
gcuuucuucguacagcucg

SEQ ID NO: 1380945 - RNA, 19 nt, Artificial Sequence
  Description of Artificial Sequence: Synthetic oligonucleotide
aaaccuccaaaguuugaca

SEQ ID NO: 1380946 - RNA, 19 nt, Artificial Sequence
  Description of Artificial Sequence: Synthetic oligonucleotide
ucucaguucgaaucaaaga

SEQ ID NO: 1380947 - RNA, 19 nt, Artificial Sequence
  Description of Artificial Sequence: Synthetic oligonucleotide
aaucccagcuuuuguaaca

SEQ ID NO: 1380948 - RNA, 19 nt, Artificial Sequence
  Description of Artificial Sequence: Synthetic oligonucleotide
uuuacaagcuuaacacgac

SEQ ID NO: 1380949 - RNA, 19 nt, Artificial Sequence
  Description of Artificial Sequence: Synthetic oligonucleotide
guucccuaguauaaaaggg

SEQ ID NO: 1380950 - RNA, 19 nt, Artificial Sequence
  Description of Artificial Sequence: Synthetic oligonucleotide
uuccaaauuacagaucaca

SEQ ID NO: 1380951 - RNA, 19 nt, Artificial Sequence
  Description of Artificial Sequence: Synthetic oligonucleotide
aguaaaaguucccuaguau

SEQ ID NO: 1380952 - RNA, 19 nt, Artificial Sequence
  Description of Artificial Sequence: Synthetic oligonucleotide
cagcucuucgauaaaggcg

SEQ ID NO: 1380953 - RNA, 19 nt, Artificial Sequence
  Description of Artificial Sequence: Synthetic oligonucleotide
ggaaaguuuucucaacagg

SEQ ID NO: 1380954 - RNA, 19 nt, Artificial Sequence
  Description of Artificial Sequence: Synthetic oligonucleotide
uucgucagcauuuacucuc

SEQ ID NO: 1380955 - RNA, 19 nt, Artificial Sequence
  Description of Artificial Sequence: Synthetic oligonucleotide
cugauuuauauaaaccaca

SEQ ID NO: 1380956 - RNA, 19 nt, Artificial Sequence
  Description of Artificial Sequence: Synthetic oligonucleotide
auaauagcucauauaaucu

SEQ ID NO: 1380957 - RNA, 19 nt, Artificial Sequence
  Description of Artificial Sequence: Synthetic oligonucleotide
gagagaggaggagagagag

SEQ ID NO: 1380958 - RNA, 19 nt, Artificial Sequence
  Description of Artificial Sequence: Synthetic oligonucleotide
aaaguuuucucaacaggcu

SEQ ID NO: 1380959 - RNA, 19 nt, Artificial Sequence
  Description of Artificial Sequence: Synthetic oligonucleotide
aucaucucguucaacaguc

SEQ ID NO: 1380960 - RNA, 19 nt, Artificial Sequence
  Description of Artificial Sequence: Synthetic oligonucleotide
aaggcgagcuggucgaaag

SEQ ID NO: 1380961 - RNA, 19 nt, Artificial Sequence
  Description of Artificial Sequence: Synthetic oligonucleotide
cagaauguugaaucucucc

SEQ ID NO: 1380962 - RNA, 19 nt, Artificial Sequence
  Description of Artificial Sequence: Synthetic oligonucleotide
ucgaugaauacucaaucuu

SEQ ID NO: 1380963 - RNA, 19 nt, Artificial Sequence
  Description of Artificial Sequence: Synthetic oligonucleotide
auagggacuaacaagcaug

SEQ ID NO: 1380964 - RNA, 19 nt, Artificial Sequence
  Description of Artificial Sequence: Synthetic oligonucleotide
ugaucagaaggagggacgg

SEQ ID NO: 1380965 - RNA, 19 nt, Artificial Sequence
  Description of Artificial Sequence: Synthetic oligonucleotide
caguucuuacaauaugaag

SEQ ID NO: 1380966 - RNA, 19 nt, Artificial Sequence
  Description of Artificial Sequence: Synthetic oligonucleotide
acaaccgagcucuucgguc

SEQ ID NO: 1380967 - RNA, 19 nt, Artificial Sequence
  Description of Artificial Sequence: Synthetic oligonucleotide
uccauaucgcccucgccgg

SEQ ID NO: 1380968 - RNA, 19 nt, Artificial Sequence
  Description of Artificial Sequence: Synthetic oligonucleotide
cgauugacaaccaucagcg

SEQ ID NO: 1380969 - RNA, 19 nt, Artificial Sequence
  Description of Artificial Sequence: Synthetic oligonucleotide
gagagagagagaauaugag

SEQ ID NO: 1380970 - RNA, 19 nt, Artificial Sequence
  Description of Artificial Sequence: Synthetic oligonucleotide
cuucguacagcucgcaaag

SEQ ID NO: 1380971 - RNA, 19 nt, Artificial Sequence
  Description of Artificial Sequence: Synthetic oligonucleotide
caggaaaauuuauuaucgc

SEQ ID NO: 1380972 - RNA, 19 nt, Artificial Sequence
  Description of Artificial Sequence: Synthetic oligonucleotide
uagggacuaacaagcauga

SEQ ID NO: 1380973 - RNA, 19 nt, Artificial Sequence
  Description of Artificial Sequence: Synthetic oligonucleotide
ucuucggucagucgauuga

SEQ ID NO: 1380974 - RNA, 19 nt, Artificial Sequence
  Description of Artificial Sequence: Synthetic oligonucleotide
auagucuuaccaucuguca

SEQ ID NO: 1380975 - RNA, 19 nt, Artificial Sequence
  Description of Artificial Sequence: Synthetic oligonucleotide
ucaguucgaaucaaagaua

SEQ ID NO: 1380976 - RNA, 19 nt, Artificial Sequence
  Description of Artificial Sequence: Synthetic oligonucleotide
auaaaggcgagcuggucga

SEQ ID NO: 1380977 - RNA, 19 nt, Artificial Sequence
  Description of Artificial Sequence: Synthetic oligonucleotide
acuaguuggaaugaaccca

SEQ ID NO: 1380978 - RNA, 19 nt, Artificial Sequence
  Description of Artificial Sequence: Synthetic oligonucleotide
ucguacagcucgcaaagcu

SEQ ID NO: 1380979 - RNA, 19 nt, Artificial Sequence
  Description of Artificial Sequence: Synthetic oligonucleotide
uugcacaaaacuaguugga

SEQ ID NO: 1380980 - RNA, 19 nt, Artificial Sequence
  Description of Artificial Sequence: Synthetic oligonucleotide
aaucaugaagauacaugug

SEQ ID NO: 1380981 - RNA, 19 nt, Artificial Sequence
  Description of Artificial Sequence: Synthetic oligonucleotide
agagagagagagaauauga

SEQ ID NO: 1380982 - RNA, 19 nt, Artificial Sequence
  Description of Artificial Sequence: Synthetic oligonucleotide
acaagcaugaucagaagga

SEQ ID NO: 1380983 - RNA, 19 nt, Artificial Sequence
  Description of Artificial Sequence: Synthetic oligonucleotide
ggacuaacaagcaugauca

SEQ ID NO: 1380984 - RNA, 19 nt, Artificial Sequence
  Description of Artificial Sequence: Synthetic oligonucleotide
agcuuuugauaacugauuu

SEQ ID NO: 1380985 - RNA, 19 nt, Artificial Sequence
  Description of Artificial Sequence: Synthetic oligonucleotide
ugcacggucacucacuguu

SEQ ID NO: 1380986 - RNA, 19 nt, Artificial Sequence
  Description of Artificial Sequence: Synthetic oligonucleotide
gagagagagagagagagaa

SEQ ID NO: 1380987 - RNA, 19 nt, Artificial Sequence
  Description of Artificial Sequence: Synthetic oligonucleotide
ugguaacacacaucuacac

SEQ ID NO: 1380988 - RNA, 19 nt, Artificial Sequence
  Description of Artificial Sequence: Synthetic oligonucleotide
ggaaaauuuauuaucgcca

SEQ ID NO: 1380989 - RNA, 19 nt, Artificial Sequence
  Description of Artificial Sequence: Synthetic oligonucleotide
agcgaaaacagcucuucga

SEQ ID NO: 1380990 - RNA, 19 nt, Artificial Sequence
  Description of Artificial Sequence: Synthetic oligonucleotide
ggaggagagagagagagag

SEQ ID NO: 1380991 - RNA, 19 nt, Artificial Sequence
  Description of Artificial Sequence: Synthetic oligonucleotide
acagcauaauagcucauau

SEQ ID NO: 1380992 - RNA, 19 nt, Artificial Sequence
  Description of Artificial Sequence: Synthetic oligonucleotide
agcucuucgauaaaggcga

SEQ ID NO: 1380993 - RNA, 19 nt, Artificial Sequence
  Description of Artificial Sequence: Synthetic oligonucleotide
acagcagaauguugaaucu

SEQ ID NO: 1380994 - RNA, 19 nt, Artificial Sequence
  Description of Artificial Sequence: Synthetic oligonucleotide
gaagucguagucguccucc

SEQ ID NO: 1380995 - RNA, 19 nt, Artificial Sequence
  Description of Artificial Sequence: Synthetic oligonucleotide
agucgauugacaaccauca

SEQ ID NO: 1380996 - RNA, 19 nt, Artificial Sequence
  Description of Artificial Sequence: Synthetic oligonucleotide
auuuuaaugcaugaacuua

SEQ ID NO: 1380997 - RNA, 19 nt, Artificial Sequence
  Description of Artificial Sequence: Synthetic oligonucleotide
uaacaagcaugaucagaag

SEQ ID NO: 1380998 - RNA, 19 nt, Artificial Sequence
  Description of Artificial Sequence: Synthetic oligonucleotide
cuucugagcagauuuaaaa

SEQ ID NO: 1380999 - RNA, 19 nt, Artificial Sequence
  Description of Artificial Sequence: Synthetic oligonucleotide
gaaagggcucuucucgcag

SEQ ID NO: 1381000 - RNA, 19 nt, Artificial Sequence
  Description of Artificial Sequence: Synthetic oligonucleotide
aaaguuugucuuugggcuu

SEQ ID NO: 1381001 - RNA, 19 nt, Artificial Sequence
  Description of Artificial Sequence: Synthetic oligonucleotide
aaaaguucccuaguauaaa

SEQ ID NO: 1381002 - RNA, 19 nt, Artificial Sequence
  Description of Artificial Sequence: Synthetic oligonucleotide
uggugcauagggacuaaca

SEQ ID NO: 1381003 - RNA, 19 nt, Artificial Sequence
  Description of Artificial Sequence: Synthetic oligonucleotide
cugaaacccgccauccagg

SEQ ID NO: 1381004 - RNA, 19 nt, Artificial Sequence
  Description of Artificial Sequence: Synthetic oligonucleotide
gagagagagagagaauaug

SEQ ID NO: 1381005 - RNA, 19 nt, Artificial Sequence
  Description of Artificial Sequence: Synthetic oligonucleotide
ucuuguggauguauucuuc

SEQ ID NO: 1381006 - RNA, 19 nt, Artificial Sequence
  Description of Artificial Sequence: Synthetic oligonucleotide
ugggaagucguagucgucc

SEQ ID NO: 1381007 - RNA, 19 nt, Artificial Sequence
  Description of Artificial Sequence: Synthetic oligonucleotide
aaccaucagcgaaaacagc

SEQ ID NO: 1381008 - RNA, 19 nt, Artificial Sequence
  Description of Artificial Sequence: Synthetic oligonucleotide
uaucagguauccaggugga

SEQ ID NO: 1381009 - RNA, 19 nt, Artificial Sequence
  Description of Artificial Sequence: Synthetic oligonucleotide
accaucagcgaaaacagcu

SEQ ID NO: 1381010 - RNA, 19 nt, Artificial Sequence
  Description of Artificial Sequence: Synthetic oligonucleotide
acagugaguaaaaguuccc

SEQ ID NO: 1381011 - RNA, 19 nt, Artificial Sequence
  Description of Artificial Sequence: Synthetic oligonucleotide
gauucuuguauuggcaguc

SEQ ID NO: 1381012 - RNA, 19 nt, Artificial Sequence
  Description of Artificial Sequence: Synthetic oligonucleotide
gagagagagagagagaaua

SEQ ID NO: 1381013 - RNA, 19 nt, Artificial Sequence
  Description of Artificial Sequence: Synthetic oligonucleotide
acacccugugcaucgcgcc

SEQ ID NO: 1381014 - RNA, 19 nt, Artificial Sequence
  Description of Artificial Sequence: Synthetic oligonucleotide
caugaucagaaggagggac

SEQ ID NO: 1381015 - RNA, 19 nt, Artificial Sequence
  Description of Artificial Sequence: Synthetic oligonucleotide
auuaucgccaaugcuggug

SEQ ID NO: 1381016 - RNA, 19 nt, Artificial Sequence
  Description of Artificial Sequence: Synthetic oligonucleotide
guugcuuucuucguacagc

SEQ ID NO: 1381017 - RNA, 19 nt, Artificial Sequence
  Description of Artificial Sequence: Synthetic oligonucleotide
ucacaaccgagcucuucgg

SEQ ID NO: 1381018 - RNA, 19 nt, Artificial Sequence
  Description of Artificial Sequence: Synthetic oligonucleotide
cuuucuucguacagcucgc

SEQ ID NO: 1381019 - RNA, 19 nt, Artificial Sequence
  Description of Artificial Sequence: Synthetic oligonucleotide
agugaguaaaaguucccua

SEQ ID NO: 1381020 - RNA, 19 nt, Artificial Sequence
  Description of Artificial Sequence: Synthetic oligonucleotide
ggucagucgauugacaacc

SEQ ID NO: 1381021 - RNA, 19 nt, Artificial Sequence
  Description of Artificial Sequence: Synthetic oligonucleotide
augaucagaaggagggacg

SEQ ID NO: 1381022 - RNA, 19 nt, Artificial Sequence
  Description of Artificial Sequence: Synthetic oligonucleotide
aacaggccgcgcugggcgc

SEQ ID NO: 1381023 - RNA, 19 nt, Artificial Sequence
  Description of Artificial Sequence: Synthetic oligonucleotide
ucucgaucaaugaucucau

SEQ ID NO: 1381024 - RNA, 19 nt, Artificial Sequence
  Description of Artificial Sequence: Synthetic oligonucleotide
cagcauuuacucucgauca

SEQ ID NO: 1381025 - RNA, 19 nt, Artificial Sequence
  Description of Artificial Sequence: Synthetic oligonucleotide
ucgaaagggcucuucucgc

SEQ ID NO: 1381026 - RNA, 19 nt, Artificial Sequence
  Description of Artificial Sequence: Synthetic oligonucleotide
uucauucucuaauuagauu

SEQ ID NO: 1381027 - RNA, 19 nt, Artificial Sequence
  Description of Artificial Sequence: Synthetic oligonucleotide
gggacuaacaagcaugauc

SEQ ID NO: 1381028 - RNA, 19 nt, Artificial Sequence
  Description of Artificial Sequence: Synthetic oligonucleotide
cagucgauugacaaccauc

SEQ ID NO: 1381029 - RNA, 19 nt, Artificial Sequence
  Description of Artificial Sequence: Synthetic oligonucleotide
cucguugcuuucuucguac

SEQ ID NO: 1381030 - RNA, 19 nt, Artificial Sequence
  Description of Artificial Sequence: Synthetic oligonucleotide
gcaaagcucagccaucucc

SEQ ID NO: 1381031 - RNA, 19 nt, Artificial Sequence
  Description of Artificial Sequence: Synthetic oligonucleotide
acgaccaaguucuucucca

SEQ ID NO: 1381032 - RNA, 19 nt, Artificial Sequence
  Description of Artificial Sequence: Synthetic oligonucleotide
cucaguucgaaucaaagau

SEQ ID NO: 1381033 - RNA, 19 nt, Artificial Sequence
  Description of Artificial Sequence: Synthetic oligonucleotide
ucacucacuguuuugucuu

SEQ ID NO: 1381034 - RNA, 19 nt, Artificial Sequence
  Description of Artificial Sequence: Synthetic oligonucleotide
ucggucagucgauugacaa

SEQ ID NO: 1381035 - RNA, 19 nt, Artificial Sequence
  Description of Artificial Sequence: Synthetic oligonucleotide
uugggcuuucccauaaauu

SEQ ID NO: 1381036 - RNA, 19 nt, Artificial Sequence
  Description of Artificial Sequence: Synthetic oligonucleotide
acaucuacacuuauacaca

SEQ ID NO: 1381037 - RNA, 19 nt, Artificial Sequence
  Description of Artificial Sequence: Synthetic oligonucleotide
accuccauaucgcccucgc

SEQ ID NO: 1381038 - RNA, 19 nt, Artificial Sequence
  Description of Artificial Sequence: Synthetic oligonucleotide
agacugcacggucacucac

SEQ ID NO: 1381039 - RNA, 19 nt, Artificial Sequence
  Description of Artificial Sequence: Synthetic oligonucleotide
agguaggguuuccuuuuac

SEQ ID NO: 1381040 - RNA, 19 nt, Artificial Sequence
  Description of Artificial Sequence: Synthetic oligonucleotide
gagcucuucggucagucga

SEQ ID NO: 1381041 - RNA, 19 nt, Artificial Sequence
  Description of Artificial Sequence: Synthetic oligonucleotide
uagcuuuauaaaucaugaa

SEQ ID NO: 1381042 - RNA, 19 nt, Artificial Sequence
  Description of Artificial Sequence: Synthetic oligonucleotide
uggucgaaagggcucuucu

SEQ ID NO: 1381043 - RNA, 19 nt, Artificial Sequence
  Description of Artificial Sequence: Synthetic oligonucleotide
ucgauaaaggcgagcuggu

SEQ ID NO: 1381044 - RNA, 19 nt, Artificial Sequence
  Description of Artificial Sequence: Synthetic oligonucleotide
ucucagguaguuuccuccu

SEQ ID NO: 1381045 - RNA, 19 nt, Artificial Sequence
  Description of Artificial Sequence: Synthetic oligonucleotide
acacaucuacacuuauaca

SEQ ID NO: 1381046 - RNA, 19 nt, Artificial Sequence
  Description of Artificial Sequence: Synthetic oligonucleotide
ucucguucaacagucugaa

SEQ ID NO: 1381047 - RNA, 19 nt, Artificial Sequence
  Description of Artificial Sequence: Synthetic oligonucleotide
gaguaaaaguucccuagua

SEQ ID NO: 1381048 - RNA, 19 nt, Artificial Sequence
  Description of Artificial Sequence: Synthetic oligonucleotide
auaaucuuuuauagguaca

SEQ ID NO: 1381049 - RNA, 19 nt, Artificial Sequence
  Description of Artificial Sequence: Synthetic oligonucleotide
cagcucgcaaagcucagcc

SEQ ID NO: 1381050 - RNA, 19 nt, Artificial Sequence
  Description of Artificial Sequence: Synthetic oligonucleotide
gcucauauaaucuuuuaua

SEQ ID NO: 1381051 - RNA, 19 nt, Artificial Sequence
  Description of Artificial Sequence: Synthetic oligonucleotide
cucgcagcgcgccugaaac

SEQ ID NO: 1381052 - RNA, 19 nt, Artificial Sequence
  Description of Artificial Sequence: Synthetic oligonucleotide
gucuuaccaucugucaagg

SEQ ID NO: 1381053 - RNA, 19 nt, Artificial Sequence
  Description of Artificial Sequence: Synthetic oligonucleotide
auuacagaucacaguagcu

SEQ ID NO: 1381054 - RNA, 19 nt, Artificial Sequence
  Description of Artificial Sequence: Synthetic oligonucleotide
uuauagguacagguagggu

SEQ ID NO: 1381055 - RNA, 19 nt, Artificial Sequence
  Description of Artificial Sequence: Synthetic oligonucleotide
gcggccuaccuccauaucg

SEQ ID NO: 1381056 - RNA, 19 nt, Artificial Sequence
  Description of Artificial Sequence: Synthetic oligonucleotide
cuaguuggaaugaacccaa

SEQ ID NO: 1381057 - RNA, 19 nt, Artificial Sequence
  Description of Artificial Sequence: Synthetic oligonucleotide
ggucgaugaauacucaauc

SEQ ID NO: 1381058 - RNA, 19 nt, Artificial Sequence
  Description of Artificial Sequence: Synthetic oligonucleotide
cuaauuagauucuuguauu

SEQ ID NO: 1381059 - RNA, 19 nt, Artificial Sequence
  Description of Artificial Sequence: Synthetic oligonucleotide
cagcuauagucuuaccauc

SEQ ID NO: 1381060 - RNA, 19 nt, Artificial Sequence
  Description of Artificial Sequence: Synthetic oligonucleotide
cagcgaaaacagcucuucg

SEQ ID NO: 1381061 - RNA, 19 nt, Artificial Sequence
  Description of Artificial Sequence: Synthetic oligonucleotide
cucaacaggcucucaguuc

SEQ ID NO: 1381062 - RNA, 19 nt, Artificial Sequence
  Description of Artificial Sequence: Synthetic oligonucleotide
aucuuguggauguauucuu

SEQ ID NO: 1381063 - RNA, 19 nt, Artificial Sequence
  Description of Artificial Sequence: Synthetic oligonucleotide
acacgaccaaguucuucuc

SEQ ID NO: 1381064 - RNA, 19 nt, Artificial Sequence
  Description of Artificial Sequence: Synthetic oligonucleotide
uucggucagucgauugaca

SEQ ID NO: 1381065 - RNA, 19 nt, Artificial Sequence
  Description of Artificial Sequence: Synthetic oligonucleotide
uucuuacaauaugaaguuc

SEQ ID NO: 1381066 - RNA, 19 nt, Artificial Sequence
  Description of Artificial Sequence: Synthetic oligonucleotide
auauaaucuuuuauaggua

SEQ ID NO: 1381067 - RNA, 19 nt, Artificial Sequence
  Description of Artificial Sequence: Synthetic oligonucleotide
ccaaugcuggugcauaggg

SEQ ID NO: 1381068 - RNA, 19 nt, Artificial Sequence
  Description of Artificial Sequence: Synthetic oligonucleotide
ucagucgauugacaaccau

SEQ ID NO: 1381069 - RNA, 19 nt, Artificial Sequence
  Description of Artificial Sequence: Synthetic oligonucleotide
aaccgagcucuucggucag

SEQ ID NO: 1381070 - RNA, 19 nt, Artificial Sequence
  Description of Artificial Sequence: Synthetic oligonucleotide
uaugaguaucagguaucca

SEQ ID NO: 1381071 - RNA, 19 nt, Artificial Sequence
  Description of Artificial Sequence: Synthetic oligonucleotide
gggagagaggaggagagag

SEQ ID NO: 1381072 - RNA, 19 nt, Artificial Sequence
  Description of Artificial Sequence: Synthetic oligonucleotide
augguaacacacaucuaca

SEQ ID NO: 1381073 - RNA, 19 nt, Artificial Sequence
  Description of Artificial Sequence: Synthetic oligonucleotide
agacacccugugcaucgcg

SEQ ID NO: 1381074 - RNA, 19 nt, Artificial Sequence
  Description of Artificial Sequence: Synthetic oligonucleotide
ggugcauagggacuaacaa

SEQ ID NO: 1381075 - RNA, 19 nt, Artificial Sequence
  Description of Artificial Sequence: Synthetic oligonucleotide
gucgaugaauacucaaucu

SEQ ID NO: 1381076 - RNA, 19 nt, Artificial Sequence
  Description of Artificial Sequence: Synthetic oligonucleotide
agcauuuacucucgaucaa

SEQ ID NO: 1381077 - RNA, 19 nt, Artificial Sequence
  Description of Artificial Sequence: Synthetic oligonucleotide
gucgauugacaaccaucag

SEQ ID NO: 1381078 - RNA, 19 nt, Artificial Sequence
  Description of Artificial Sequence: Synthetic oligonucleotide
ucggggaacaggccgcgcu

SEQ ID NO: 1381079 - RNA, 19 nt, Artificial Sequence
  Description of Artificial Sequence: Synthetic oligonucleotide
uagcucauauaaucuuuua

SEQ ID NO: 1381080 - RNA, 19 nt, Artificial Sequence
  Description of Artificial Sequence: Synthetic oligonucleotide
cuucgauaaaggcgagcug

SEQ ID NO: 1381081 - RNA, 19 nt, Artificial Sequence
  Description of Artificial Sequence: Synthetic oligonucleotide
uauuaucgccaaugcuggu

SEQ ID NO: 1381082 - RNA, 19 nt, Artificial Sequence
  Description of Artificial Sequence: Synthetic oligonucleotide
ugugcaucgcgccgcucca

SEQ ID NO: 1381083 - RNA, 19 nt, Artificial Sequence
  Description of Artificial Sequence: Synthetic oligonucleotide
cucuaauuagauucuugua

SEQ ID NO: 1381084 - RNA, 19 nt, Artificial Sequence
  Description of Artificial Sequence: Synthetic oligonucleotide
agauaauaguacacauggu

SEQ ID NO: 1381085 - RNA, 19 nt, Artificial Sequence
  Description of Artificial Sequence: Synthetic oligonucleotide
aggcgagcuggucgaaagg

SEQ ID NO: 1381086 - RNA, 19 nt, Artificial Sequence
  Description of Artificial Sequence: Synthetic oligonucleotide
guacagcucgcaaagcuca

SEQ ID NO: 1381087 - RNA, 19 nt, Artificial Sequence
  Description of Artificial Sequence: Synthetic oligonucleotide
agauauccugauuggcuuu

SEQ ID NO: 1381088 - RNA, 19 nt, Artificial Sequence
  Description of Artificial Sequence: Synthetic oligonucleotide
ucgcccuccagaucugcgc

SEQ ID NO: 1381089 - RNA, 19 nt, Artificial Sequence
  Description of Artificial Sequence: Synthetic oligonucleotide
ucuuaccaucugucaaggu

SEQ ID NO: 1381090 - RNA, 19 nt, Artificial Sequence
  Description of Artificial Sequence: Synthetic oligonucleotide
aguucgaaucaaagauauc

SEQ ID NO: 1381091 - RNA, 19 nt, Artificial Sequence
  Description of Artificial Sequence: Synthetic oligonucleotide
gauugacaaccaucagcga

SEQ ID NO: 1381092 - RNA, 19 nt, Artificial Sequence
  Description of Artificial Sequence: Synthetic oligonucleotide
cgaucaaugaucucaucac

SEQ ID NO: 1381093 - RNA, 19 nt, Artificial Sequence
  Description of Artificial Sequence: Synthetic oligonucleotide
cucuucggucagucgauug

SEQ ID NO: 1381094 - RNA, 19 nt, Artificial Sequence
  Description of Artificial Sequence: Synthetic oligonucleotide
caaccgagcucuucgguca

SEQ ID NO: 1381095 - RNA, 19 nt, Artificial Sequence
  Description of Artificial Sequence: Synthetic oligonucleotide
ucgcaaagcucagccaucu

SEQ ID NO: 1381096 - RNA, 19 nt, Artificial Sequence
  Description of Artificial Sequence: Synthetic oligonucleotide
gcuuaacacgaccaaguuc

SEQ ID NO: 1381097 - RNA, 19 nt, Artificial Sequence
  Description of Artificial Sequence: Synthetic oligonucleotide
cuucggucagucgauugac

SEQ ID NO: 1381098 - RNA, 19 nt, Artificial Sequence
  Description of Artificial Sequence: Synthetic oligonucleotide
caguucgaaucaaagauau

SEQ ID NO: 1381099 - RNA, 19 nt, Artificial Sequence
  Description of Artificial Sequence: Synthetic oligonucleotide
cauucucuaauuagauucu

SEQ ID NO: 1381100 - RNA, 19 nt, Artificial Sequence
  Description of Artificial Sequence: Synthetic oligonucleotide
agcucguugcuuucuucgu

SEQ ID NO: 1381101 - RNA, 19 nt, Artificial Sequence
  Description of Artificial Sequence: Synthetic oligonucleotide
auagcucauauaaucuuuu

SEQ ID NO: 1381102 - RNA, 19 nt, Artificial Sequence
  Description of Artificial Sequence: Synthetic oligonucleotide
acacacauauucacuuuga

SEQ ID NO: 1381103 - RNA, 19 nt, Artificial Sequence
  Description of Artificial Sequence: Synthetic oligonucleotide
ucuucucgcagcgcgccug

SEQ ID NO: 1381104 - RNA, 19 nt, Artificial Sequence
  Description of Artificial Sequence: Synthetic oligonucleotide
agagagagagagagaauau

SEQ ID NO: 1381105 - RNA, 19 nt, Artificial Sequence
  Description of Artificial Sequence: Synthetic oligonucleotide
gaguaucagguauccaggu

SEQ ID NO: 1381106 - RNA, 19 nt, Artificial Sequence
  Description of Artificial Sequence: Synthetic oligonucleotide
acccugugcaucgcgccgc

SEQ ID NO: 1381107 - RNA, 19 nt, Artificial Sequence
  Description of Artificial Sequence: Synthetic oligonucleotide
ggcgagcuggucgaaaggg

SEQ ID NO: 1381108 - RNA, 19 nt, Artificial Sequence
  Description of Artificial Sequence: Synthetic oligonucleotide
uucguacagcucgcaaagc

SEQ ID NO: 1381109 - RNA, 19 nt, Artificial Sequence
  Description of Artificial Sequence: Synthetic oligonucleotide
gacagcauaauagcucaua

SEQ ID NO: 1381110 - RNA, 19 nt, Artificial Sequence
  Description of Artificial Sequence: Synthetic oligonucleotide
agaucugcgccagccucgg

SEQ ID NO: 1381111 - RNA, 19 nt, Artificial Sequence
  Description of Artificial Sequence: Synthetic oligonucleotide
ugucuucuauuccguguuu

SEQ ID NO: 1381112 - RNA, 19 nt, Artificial Sequence
  Description of Artificial Sequence: Synthetic oligonucleotide
aucagguauccagguggac

SEQ ID NO: 1381113 - RNA, 19 nt, Artificial Sequence
  Description of Artificial Sequence: Synthetic oligonucleotide
guauaaaaggguauuuauu

SEQ ID NO: 1381114 - RNA, 19 nt, Artificial Sequence
  Description of Artificial Sequence: Synthetic oligonucleotide
ucguagucguccucccagu

SEQ ID NO: 1381115 - RNA, 19 nt, Artificial Sequence
  Description of Artificial Sequence: Synthetic oligonucleotide
caaugcuggugcauaggga

SEQ ID NO: 1381116 - RNA, 19 nt, Artificial Sequence
  Description of Artificial Sequence: Synthetic oligonucleotide
uuucuucguacagcucgca

SEQ ID NO: 1381117 - RNA, 19 nt, Artificial Sequence
  Description of Artificial Sequence: Synthetic oligonucleotide
ugacaaccaucagcgaaaa

SEQ ID NO: 1381118 - RNA, 19 nt, Artificial Sequence
  Description of Artificial Sequence: Synthetic oligonucleotide
cucgcaaagcucagccauc

SEQ ID NO: 1381119 - RNA, 19 nt, Artificial Sequence
  Description of Artificial Sequence: Synthetic oligonucleotide
cacccugugcaucgcgccg

SEQ ID NO: 1381120 - RNA, 19 nt, Artificial Sequence
  Description of Artificial Sequence: Synthetic oligonucleotide
guucagcuauagucuuacc

SEQ ID NO: 1381121 - RNA, 19 nt, Artificial Sequence
  Description of Artificial Sequence: Synthetic oligonucleotide
cucuucgauaaaggcgagc

SEQ ID NO: 1381122 - RNA, 19 nt, Artificial Sequence
  Description of Artificial Sequence: Synthetic oligonucleotide
cauaucgcccucgccgggc

SEQ ID NO: 1381123 - RNA, 19 nt, Artificial Sequence
  Description of Artificial Sequence: Synthetic oligonucleotide
cucgucgcccuccagaucu

SEQ ID NO: 1381124 - RNA, 19 nt, Artificial Sequence
  Description of Artificial Sequence: Synthetic oligonucleotide
uuaacacgaccaaguucuu

SEQ ID NO: 1381125 - RNA, 19 nt, Artificial Sequence
  Description of Artificial Sequence: Synthetic oligonucleotide
ugcuggugcauagggacua

SEQ ID NO: 1381126 - RNA, 19 nt, Artificial Sequence
  Description of Artificial Sequence: Synthetic oligonucleotide
aacaggcucucaguucgaa

SEQ ID NO: 1381127 - RNA, 19 nt, Artificial Sequence
  Description of Artificial Sequence: Synthetic oligonucleotide
aaaggcgagcuggucgaaa

SEQ ID NO: 1381128 - RNA, 19 nt, Artificial Sequence
  Description of Artificial Sequence: Synthetic oligonucleotide
uuccucgauucuccuuuuc

SEQ ID NO: 1381129 - RNA, 19 nt, Artificial Sequence
  Description of Artificial Sequence: Synthetic oligonucleotide
acucgucgcccuccagauc

SEQ ID NO: 1381130 - RNA, 19 nt, Artificial Sequence
  Description of Artificial Sequence: Synthetic oligonucleotide
cagcauaauagcucauaua

SEQ ID NO: 1381131 - RNA, 19 nt, Artificial Sequence
  Description of Artificial Sequence: Synthetic oligonucleotide
cucuuucgucagcauuuac

SEQ ID NO: 1381132 - RNA, 19 nt, Artificial Sequence
  Description of Artificial Sequence: Synthetic oligonucleotide
aagauaucuuguggaugua

SEQ ID NO: 1381133 - RNA, 19 nt, Artificial Sequence
  Description of Artificial Sequence: Synthetic oligonucleotide
agcgcuccucuucugggaa

SEQ ID NO: 1381134 - RNA, 19 nt, Artificial Sequence
  Description of Artificial Sequence: Synthetic oligonucleotide
cucguucaacagucugaac

SEQ ID NO: 1381135 - RNA, 19 nt, Artificial Sequence
  Description of Artificial Sequence: Synthetic oligonucleotide
acuucugagcagauuuaaa

SEQ ID NO: 1381136 - RNA, 19 nt, Artificial Sequence
  Description of Artificial Sequence: Synthetic oligonucleotide
cacucacuguuuugucuuc

SEQ ID NO: 1381137 - RNA, 19 nt, Artificial Sequence
  Description of Artificial Sequence: Synthetic oligonucleotide
agcuggucgaaagggcucu

SEQ ID NO: 1381138 - RNA, 19 nt, Artificial Sequence
  Description of Artificial Sequence: Synthetic oligonucleotide
acacuuauacacacauauu

SEQ ID NO: 1381139 - RNA, 19 nt, Artificial Sequence
  Description of Artificial Sequence: Synthetic oligonucleotide
cucgaucaaugaucucauc

SEQ ID NO: 1381140 - RNA, 19 nt, Artificial Sequence
  Description of Artificial Sequence: Synthetic oligonucleotide
auaucgcccucgccgggca

SEQ ID NO: 1381141 - RNA, 19 nt, Artificial Sequence
  Description of Artificial Sequence: Synthetic oligonucleotide
caucagcgaaaacagcucu

SEQ ID NO: 1381142 - RNA, 19 nt, Artificial Sequence
  Description of Artificial Sequence: Synthetic oligonucleotide
aucagcucguugcuuucuu

SEQ ID NO: 1381143 - RNA, 19 nt, Artificial Sequence
  Description of Artificial Sequence: Synthetic oligonucleotide
cucgccgggcagcucgucc

SEQ ID NO: 1381144 - RNA, 19 nt, Artificial Sequence
  Description of Artificial Sequence: Synthetic oligonucleotide
ggucgaaagggcucuucuc

SEQ ID NO: 1381145 - RNA, 19 nt, Artificial Sequence
  Description of Artificial Sequence: Synthetic oligonucleotide
gguaggguuuccuuuuacu

SEQ ID NO: 1381146 - RNA, 19 nt, Artificial Sequence
  Description of Artificial Sequence: Synthetic oligonucleotide
ucgcgccguucucaggaac

SEQ ID NO: 1381147 - RNA, 19 nt, Artificial Sequence
  Description of Artificial Sequence: Synthetic oligonucleotide
acagaucacaguagcuuua

SEQ ID NO: 1381148 - RNA, 19 nt, Artificial Sequence
  Description of Artificial Sequence: Synthetic oligonucleotide
uauuggcagucacgauuuu

SEQ ID NO: 1381149 - RNA, 19 nt, Artificial Sequence
  Description of Artificial Sequence: Synthetic oligonucleotide
gagcuggucgaaagggcuc

SEQ ID NO: 1381150 - RNA, 19 nt, Artificial Sequence
  Description of Artificial Sequence: Synthetic oligonucleotide
gaggagagagagagagaga

SEQ ID NO: 1381151 - RNA, 19 nt, Artificial Sequence
  Description of Artificial Sequence: Synthetic oligonucleotide
gucgcccuccagaucugcg

SEQ ID NO: 1381152 - RNA, 19 nt, Artificial Sequence
  Description of Artificial Sequence: Synthetic oligonucleotide
agagagagagagagagaau

SEQ ID NO: 1381153 - RNA, 19 nt, Artificial Sequence
  Description of Artificial Sequence: Synthetic oligonucleotide
gaucugcgccagccucggg

SEQ ID NO: 1381154 - RNA, 19 nt, Artificial Sequence
  Description of Artificial Sequence: Synthetic oligonucleotide
cugggaagucguagucguc

SEQ ID NO: 1381155 - RNA, 19 nt, Artificial Sequence
  Description of Artificial Sequence: Synthetic oligonucleotide
agagaggaggagagagaga

SEQ ID NO: 1381156 - RNA, 19 nt, Artificial Sequence
  Description of Artificial Sequence: Synthetic oligonucleotide
gcgaaaacagcucuucgau

SEQ ID NO: 1381157 - RNA, 19 nt, Artificial Sequence
  Description of Artificial Sequence: Synthetic oligonucleotide
gguauuuauuagaaaguuu

SEQ ID NO: 1381158 - RNA, 19 nt, Artificial Sequence
  Description of Artificial Sequence: Synthetic oligonucleotide
gcagucaaaucccagcuuu

SEQ ID NO: 1381159 - RNA, 19 nt, Artificial Sequence
  Description of Artificial Sequence: Synthetic oligonucleotide
ggguauuuauuagaaaguu

SEQ ID NO: 1381160 - RNA, 19 nt, Artificial Sequence
  Description of Artificial Sequence: Synthetic oligonucleotide
cgaugaauacucaaucuua

SEQ ID NO: 1381161 - RNA, 19 nt, Artificial Sequence
  Description of Artificial Sequence: Synthetic oligonucleotide
aucagcgaaaacagcucuu

SEQ ID NO: 1381162 - RNA, 19 nt, Artificial Sequence
  Description of Artificial Sequence: Synthetic oligonucleotide
ugcgccagccucggggaac

SEQ ID NO: 1381163 - RNA, 19 nt, Artificial Sequence
  Description of Artificial Sequence: Synthetic oligonucleotide
ucgucgcccuccagaucug

SEQ ID NO: 1381164 - RNA, 19 nt, Artificial Sequence
  Description of Artificial Sequence: Synthetic oligonucleotide
cagugaguaaaaguucccu

SEQ ID NO: 1381165 - RNA, 19 nt, Artificial Sequence
  Description of Artificial Sequence: Synthetic oligonucleotide
gcaugaacuuaaaacuuua

SEQ ID NO: 1381166 - RNA, 19 nt, Artificial Sequence
  Description of Artificial Sequence: Synthetic oligonucleotide
uaaaggcgagcuggucgaa

SEQ ID NO: 1381167 - RNA, 19 nt, Artificial Sequence
  Description of Artificial Sequence: Synthetic oligonucleotide
agaggaggagagagagaga

SEQ ID NO: 1381168 - RNA, 19 nt, Artificial Sequence
  Description of Artificial Sequence: Synthetic oligonucleotide
cguugcuuucuucguacag

SEQ ID NO: 1381169 - RNA, 19 nt, Artificial Sequence
  Description of Artificial Sequence: Synthetic oligonucleotide
ggccuaccuccauaucgcc

SEQ ID NO: 1381170 - RNA, 19 nt, Artificial Sequence
  Description of Artificial Sequence: Synthetic oligonucleotide
agcucuucggucagucgau

SEQ ID NO: 1381171 - RNA, 19 nt, Artificial Sequence
  Description of Artificial Sequence: Synthetic oligonucleotide
aggaggagagagagagaga

SEQ ID NO: 1381172 - RNA, 19 nt, Artificial Sequence
  Description of Artificial Sequence: Synthetic oligonucleotide
ggggucgaugaauacucaa

SEQ ID NO: 1381173 - RNA, 19 nt, Artificial Sequence
  Description of Artificial Sequence: Synthetic oligonucleotide
cggccuaccuccauaucgc

SEQ ID NO: 1381174 - RNA, 19 nt, Artificial Sequence
  Description of Artificial Sequence: Synthetic oligonucleotide
cuaacggcgcggccuccuc

SEQ ID NO: 1381175 - RNA, 19 nt, Artificial Sequence
  Description of Artificial Sequence: Synthetic oligonucleotide
cuggucgaaagggcucuuc

SEQ ID NO: 1381176 - RNA, 19 nt, Artificial Sequence
  Description of Artificial Sequence: Synthetic oligonucleotide
gucuuugggcuuucccaua

SEQ ID NO: 1381177 - RNA, 19 nt, Artificial Sequence
  Description of Artificial Sequence: Synthetic oligonucleotide
cuaccuccauaucgcccuc

SEQ ID NO: 1381178 - RNA, 19 nt, Artificial Sequence
  Description of Artificial Sequence: Synthetic oligonucleotide
ggagagaggaggagagaga

SEQ ID NO: 1381179 - RNA, 19 nt, Artificial Sequence
  Description of Artificial Sequence: Synthetic oligonucleotide
ccuaccuccauaucgcccu

SEQ ID NO: 1381180 - RNA, 19 nt, Artificial Sequence
  Description of Artificial Sequence: Synthetic oligonucleotide
gcucgcaaagcucagccau

SEQ ID NO: 1381181 - RNA, 19 nt, Artificial Sequence
  Description of Artificial Sequence: Synthetic oligonucleotide
gccuaccuccauaucgccc

SEQ ID NO: 1381182 - RNA, 19 nt, Artificial Sequence
  Description of Artificial Sequence: Synthetic oligonucleotide
gcauagggacuaacaagca

SEQ ID NO: 1381183 - RNA, 19 nt, Artificial Sequence
  Description of Artificial Sequence: Synthetic oligonucleotide
cuccagcgcggcagacacc

SEQ ID NO: 1381184 - RNA, 19 nt, Artificial Sequence
  Description of Artificial Sequence: Synthetic oligonucleotide
ggagagagagagagagaga

SEQ ID NO: 1381185 - RNA, 19 nt, Artificial Sequence
  Description of Artificial Sequence: Synthetic oligonucleotide
acaugguaacacacaucua

SEQ ID NO: 1381186 - RNA, 19 nt, Artificial Sequence
  Description of Artificial Sequence: Synthetic oligonucleotide
gcucuucucgcagcgcgcc

SEQ ID NO: 1381187 - RNA, 19 nt, Artificial Sequence
  Description of Artificial Sequence: Synthetic oligonucleotide
uccggcucgcgccguucuc

SEQ ID NO: 1381188 - RNA, 19 nt, Artificial Sequence
  Description of Artificial Sequence: Synthetic oligonucleotide
agggacuaacaagcaugau

SEQ ID NO: 1381189 - RNA, 19 nt, Artificial Sequence
  Description of Artificial Sequence: Synthetic oligonucleotide
ccucucagguaguuuccuc

SEQ ID NO: 1381190 - RNA, 19 nt, Artificial Sequence
  Description of Artificial Sequence: Synthetic oligonucleotide
cuucucgcagcgcgccuga

SEQ ID NO: 1381191 - RNA, 19 nt, Artificial Sequence
  Description of Artificial Sequence: Synthetic oligonucleotide
caacaggcucucaguucga

SEQ ID NO: 1381192 - RNA, 19 nt, Artificial Sequence
  Description of Artificial Sequence: Synthetic oligonucleotide
cgagcucuucggucagucg

SEQ ID NO: 1381193 - RNA, 19 nt, Artificial Sequence
  Description of Artificial Sequence: Synthetic oligonucleotide
cggucagucgauugacaac

SEQ ID NO: 1381194 - RNA, 19 nt, Artificial Sequence
  Description of Artificial Sequence: Synthetic oligonucleotide
cacaaccgagcucuucggu

SEQ ID NO: 1381195 - RNA, 19 nt, Artificial Sequence
  Description of Artificial Sequence: Synthetic oligonucleotide
ccauaucgcccucgccggg

SEQ ID NO: 1381196 - RNA, 19 nt, Artificial Sequence
  Description of Artificial Sequence: Synthetic oligonucleotide
gcaugaucagaaggaggga

SEQ ID NO: 1381197 - RNA, 19 nt, Artificial Sequence
  Description of Artificial Sequence: Synthetic oligonucleotide
gguacagguaggguuuccu

SEQ ID NO: 1381198 - RNA, 19 nt, Artificial Sequence
  Description of Artificial Sequence: Synthetic oligonucleotide
aacccgccauccagggcau

SEQ ID NO: 1381199 - RNA, 19 nt, Artificial Sequence
  Description of Artificial Sequence: Synthetic oligonucleotide
ccuaguauaaaaggguauu

SEQ ID NO: 1381200 - RNA, 19 nt, Artificial Sequence
  Description of Artificial Sequence: Synthetic oligonucleotide
gugcaucgcgccgcuccag

SEQ ID NO: 1381201 - RNA, 19 nt, Artificial Sequence
  Description of Artificial Sequence: Synthetic oligonucleotide
gggucgaugaauacucaau

SEQ ID NO: 1381202 - RNA, 19 nt, Artificial Sequence
  Description of Artificial Sequence: Synthetic oligonucleotide
cucggggaacaggccgcgc

SEQ ID NO: 1381203 - RNA, 19 nt, Artificial Sequence
  Description of Artificial Sequence: Synthetic oligonucleotide
cagaucacaguagcuuuau

SEQ ID NO: 1381204 - RNA, 19 nt, Artificial Sequence
  Description of Artificial Sequence: Synthetic oligonucleotide
gcagcgcgccugaaacccg

SEQ ID NO: 1381205 - RNA, 19 nt, Artificial Sequence
  Description of Artificial Sequence: Synthetic oligonucleotide
gcgccugaaacccgccauc

SEQ ID NO: 1381206 - RNA, 19 nt, Artificial Sequence
  Description of Artificial Sequence: Synthetic oligonucleotide
cccuaguauaaaaggguau

SEQ ID NO: 1381207 - RNA, 19 nt, Artificial Sequence
  Description of Artificial Sequence: Synthetic oligonucleotide
cgccugaaacccgccaucc

SEQ ID NO: 1381208 - RNA, 19 nt, Artificial Sequence
  Description of Artificial Sequence: Synthetic oligonucleotide
accgagcucuucggucagu

SEQ ID NO: 1381209 - RNA, 19 nt, Artificial Sequence
  Description of Artificial Sequence: Synthetic oligonucleotide
cucgcgccguucucaggaa

SEQ ID NO: 1381210 - RNA, 19 nt, Artificial Sequence
  Description of Artificial Sequence: Synthetic oligonucleotide
uucucgcagcgcgccugaa

SEQ ID NO: 1381211 - RNA, 19 nt, Artificial Sequence
  Description of Artificial Sequence: Synthetic oligonucleotide
ggcggcuaacggcgcggcc

SEQ ID NO: 1381212 - RNA, 19 nt, Artificial Sequence
  Description of Artificial Sequence: Synthetic oligonucleotide
ccgagcucuucggucaguc

SEQ ID NO: 1381213 - RNA, 19 nt, Artificial Sequence
  Description of Artificial Sequence: Synthetic oligonucleotide
ggcucucaguucgaaucaa

SEQ ID NO: 1381214 - RNA, 19 nt, Artificial Sequence
  Description of Artificial Sequence: Synthetic oligonucleotide
ccucggggaacaggccgcg

SEQ ID NO: 1381215 - RNA, 19 nt, Artificial Sequence
  Description of Artificial Sequence: Synthetic oligonucleotide
gcgccguucucaggaacac

SEQ ID NO: 1381216 - RNA, 19 nt, Artificial Sequence
  Description of Artificial Sequence: Synthetic oligonucleotide
cuuccucgauucuccuuuu

SEQ ID NO: 1381217 - RNA, 19 nt, Artificial Sequence
  Description of Artificial Sequence: Synthetic oligonucleotide
cgagcuggucgaaagggcu

SEQ ID NO: 1381218 - RNA, 19 nt, Artificial Sequence
  Description of Artificial Sequence: Synthetic oligonucleotide
cgcgccguucucaggaaca

SEQ ID NO: 1381219 - RNA, 19 nt, Artificial Sequence
  Description of Artificial Sequence: Synthetic oligonucleotide
acccgccauccagggcauc

SEQ ID NO: 1381220 - RNA, 19 nt, Artificial Sequence
  Description of Artificial Sequence: Synthetic oligonucleotide
gcggcuaacggcgcggccu

SEQ ID NO: 1381221 - RNA, 19 nt, Artificial Sequence
  Description of Artificial Sequence: Synthetic oligonucleotide
gggcggcuaacggcgcggc

SEQ ID NO: 1381222 - RNA, 19 nt, Artificial Sequence
  Description of Artificial Sequence: Synthetic oligonucleotide
gcgcgccugaaacccgcca

SEQ ID NO: 1381223 - RNA, 19 nt, Artificial Sequence
  Description of Artificial Sequence: Synthetic oligonucleotide
cgccguucucaggaacacc

SEQ ID NO: 1381224 - RNA, 19 nt, Artificial Sequence
  Description of Artificial Sequence: Synthetic oligonucleotide
cuccggcucgcgccguucu

SEQ ID NO: 1381225 - RNA, 19 nt, Artificial Sequence
  Description of Artificial Sequence: Synthetic oligonucleotide
cugcgccagccucggggaa

SEQ ID NO: 1381226 - RNA, 19 nt, Artificial Sequence
  Description of Artificial Sequence: Synthetic oligonucleotide
ccgcgcugggcgcgggcgg

SEQ ID NO: 1381227 - RNA, 19 nt, Artificial Sequence
  Description of Artificial Sequence: Synthetic oligonucleotide
cggcuaacggcgcggccuc

SEQ ID NO: 1381228 - RNA, 19 nt, Artificial Sequence
  Description of Artificial Sequence: Synthetic oligonucleotide
cgucgcccuccagaucugc

SEQ ID NO: 1381229 - RNA, 19 nt, Artificial Sequence
  Description of Artificial Sequence: Synthetic oligonucleotide
ggccgcgcugggcgcgggc

SEQ ID NO: 1381230 - RNA, 19 nt, Artificial Sequence
  Description of Artificial Sequence: Synthetic oligonucleotide
gcuaacggcgcggccuccu

SEQ ID NO: 1381231 - RNA, 19 nt, Artificial Sequence
  Description of Artificial Sequence: Synthetic oligonucleotide
ccgccauccagggcaucuc

SEQ ID NO: 1381232 - RNA, 19 nt, Artificial Sequence
  Description of Artificial Sequence: Synthetic oligonucleotide
ccggcucgcgccguucuca

SEQ ID NO: 1381233 - RNA, 19 nt, Artificial Sequence
  Description of Artificial Sequence: Synthetic oligonucleotide
cccgcggccuaccuccaua

SEQ ID NO: 1381234 - RNA, 19 nt, Artificial Sequence
  Description of Artificial Sequence: Synthetic oligonucleotide
cccgccauccagggcaucu

SEQ ID NO: 1381235 - RNA, 19 nt, Artificial Sequence
  Description of Artificial Sequence: Synthetic oligonucleotide
cgcggccuaccuccauauc

SEQ ID NO: 1381236 - RNA, 19 nt, Artificial Sequence
  Description of Artificial Sequence: Synthetic oligonucleotide
gccgggcagcucguccauc

SEQ ID NO: 1381237 - RNA, 19 nt, Artificial Sequence
  Description of Artificial Sequence: Synthetic oligonucleotide
caucuccggcucgcgccgu

SEQ ID NO: 1381238 - RNA, 19 nt, Artificial Sequence
  Description of Artificial Sequence: Synthetic oligonucleotide
gcucuucggucagucgauu

SEQ ID NO: 1381239 - RNA, 19 nt, Artificial Sequence
  Description of Artificial Sequence: Synthetic oligonucleotide
ccguucucaggaacaccuu

SEQ ID NO: 1381240 - RNA, 19 nt, Artificial Sequence
  Description of Artificial Sequence: Synthetic oligonucleotide
ccgcggccuaccuccauau

SEQ ID NO: 1381241 - RNA, 19 nt, Artificial Sequence
  Description of Artificial Sequence: Synthetic oligonucleotide
cgcgccugaaacccgccau

SEQ ID NO: 1381242 - RNA, 19 nt, Artificial Sequence
  Description of Artificial Sequence: Synthetic oligonucleotide
cgccagccucggggaacag

SEQ ID NO: 1381243 - RNA, 19 nt, Artificial Sequence
  Description of Artificial Sequence: Synthetic oligonucleotide
ccccgcggccuaccuccau

SEQ ID NO: 1381244 - RNA, 19 nt, Artificial Sequence
  Description of Artificial Sequence: Synthetic oligonucleotide
aauuucaaagucugcagcc

SEQ ID NO: 1381245 - RNA, 19 nt, Artificial Sequence
  Description of Artificial Sequence: Synthetic oligonucleotide
ugcacauuuaacuugaagg

SEQ ID NO: 1381246 - RNA, 19 nt, Artificial Sequence
  Description of Artificial Sequence: Synthetic oligonucleotide
uuugauaucuuucaagugc

SEQ ID NO: 1381247 - RNA, 19 nt, Artificial Sequence
  Description of Artificial Sequence: Synthetic oligonucleotide
ucauaaauugcauuaauga

SEQ ID NO: 1381248 - RNA, 19 nt, Artificial Sequence
  Description of Artificial Sequence: Synthetic oligonucleotide
aaucugaggauuuugcauc

SEQ ID NO: 1381249 - RNA, 19 nt, Artificial Sequence
  Description of Artificial Sequence: Synthetic oligonucleotide
uaaauugcauuaaugaucu

SEQ ID NO: 1381250 - RNA, 19 nt, Artificial Sequence
  Description of Artificial Sequence: Synthetic oligonucleotide
uucaacgucauccaaaucu

SEQ ID NO: 1381251 - RNA, 19 nt, Artificial Sequence
  Description of Artificial Sequence: Synthetic oligonucleotide
uucaagaucaugaacuucc

SEQ ID NO: 1381252 - RNA, 19 nt, Artificial Sequence
  Description of Artificial Sequence: Synthetic oligonucleotide
aacccauaauuucuggucc

SEQ ID NO: 1381253 - RNA, 19 nt, Artificial Sequence
  Description of Artificial Sequence: Synthetic oligonucleotide
ugaaccauaucacugagca

SEQ ID NO: 1381254 - RNA, 19 nt, Artificial Sequence
  Description of Artificial Sequence: Synthetic oligonucleotide
uuucaauguauccuguugg

SEQ ID NO: 1381255 - RNA, 19 nt, Artificial Sequence
  Description of Artificial Sequence: Synthetic oligonucleotide
aaauucuaagauaaaacuc

SEQ ID NO: 1381256 - RNA, 19 nt, Artificial Sequence
  Description of Artificial Sequence: Synthetic oligonucleotide
agugcuucagaauagguuc

SEQ ID NO: 1381257 - RNA, 19 nt, Artificial Sequence
  Description of Artificial Sequence: Synthetic oligonucleotide
aaacugucaaccaaaauuc

SEQ ID NO: 1381258 - RNA, 19 nt, Artificial Sequence
  Description of Artificial Sequence: Synthetic oligonucleotide
ugaaauucuaagauaaaac

SEQ ID NO: 1381259 - RNA, 19 nt, Artificial Sequence
  Description of Artificial Sequence: Synthetic oligonucleotide
agauaaaacucauagguug

SEQ ID NO: 1381260 - RNA, 19 nt, Artificial Sequence
  Description of Artificial Sequence: Synthetic oligonucleotide
uuaaagaaagaaucauugg

SEQ ID NO: 1381261 - RNA, 19 nt, Artificial Sequence
  Description of Artificial Sequence: Synthetic oligonucleotide
cauuaaugaucucaaaucg

SEQ ID NO: 1381262 - RNA, 19 nt, Artificial Sequence
  Description of Artificial Sequence: Synthetic oligonucleotide
uagugaaauauucauuggg

SEQ ID NO: 1381263 - RNA, 19 nt, Artificial Sequence
  Description of Artificial Sequence: Synthetic oligonucleotide
aaauuaggcaaacaaacaa

SEQ ID NO: 1381264 - RNA, 19 nt, Artificial Sequence
  Description of Artificial Sequence: Synthetic oligonucleotide
auaaauugcauuaaugauc

SEQ ID NO: 1381265 - RNA, 19 nt, Artificial Sequence
  Description of Artificial Sequence: Synthetic oligonucleotide
uguagguucauaaauugca

SEQ ID NO: 1381266 - RNA, 19 nt, Artificial Sequence
  Description of Artificial Sequence: Synthetic oligonucleotide
agaaagaaucauuggaaac

SEQ ID NO: 1381267 - RNA, 19 nt, Artificial Sequence
  Description of Artificial Sequence: Synthetic oligonucleotide
uuaaugaucucaaaucgcu

SEQ ID NO: 1381268 - RNA, 19 nt, Artificial Sequence
  Description of Artificial Sequence: Synthetic oligonucleotide
aaagucugcagccaguaug

SEQ ID NO: 1381269 - RNA, 19 nt, Artificial Sequence
  Description of Artificial Sequence: Synthetic oligonucleotide
uaggcuauaaaacaaaauu

SEQ ID NO: 1381270 - RNA, 19 nt, Artificial Sequence
  Description of Artificial Sequence: Synthetic oligonucleotide
ucuuuugacuacuuuaggc

SEQ ID NO: 1381271 - RNA, 19 nt, Artificial Sequence
  Description of Artificial Sequence: Synthetic oligonucleotide
aacuguuuuagucacagua

SEQ ID NO: 1381272 - RNA, 19 nt, Artificial Sequence
  Description of Artificial Sequence: Synthetic oligonucleotide
ucugaccucauccuguacg

SEQ ID NO: 1381273 - RNA, 19 nt, Artificial Sequence
  Description of Artificial Sequence: Synthetic oligonucleotide
cuaagauaaaacucauagg

SEQ ID NO: 1381274 - RNA, 19 nt, Artificial Sequence
  Description of Artificial Sequence: Synthetic oligonucleotide
aauuaggcaaacaaacaag

SEQ ID NO: 1381275 - RNA, 19 nt, Artificial Sequence
  Description of Artificial Sequence: Synthetic oligonucleotide
acuuugauaucuuucaagu

SEQ ID NO: 1381276 - RNA, 19 nt, Artificial Sequence
  Description of Artificial Sequence: Synthetic oligonucleotide
aagaaucugaggauuuugc

SEQ ID NO: 1381277 - RNA, 19 nt, Artificial Sequence
  Description of Artificial Sequence: Synthetic oligonucleotide
guaagaacuccaauuaucg

SEQ ID NO: 1381278 - RNA, 19 nt, Artificial Sequence
  Description of Artificial Sequence: Synthetic oligonucleotide
cuaaagagacccgagaucc

SEQ ID NO: 1381279 - RNA, 19 nt, Artificial Sequence
  Description of Artificial Sequence: Synthetic oligonucleotide
aaaacucauagguuggcca

SEQ ID NO: 1381280 - RNA, 19 nt, Artificial Sequence
  Description of Artificial Sequence: Synthetic oligonucleotide
uuuugacuacuuuaggcag

SEQ ID NO: 1381281 - RNA, 19 nt, Artificial Sequence
  Description of Artificial Sequence: Synthetic oligonucleotide
uuagugaaauauucauugg

SEQ ID NO: 1381282 - RNA, 19 nt, Artificial Sequence
  Description of Artificial Sequence: Synthetic oligonucleotide
uucaaagugacauucuuuc

SEQ ID NO: 1381283 - RNA, 19 nt, Artificial Sequence
  Description of Artificial Sequence: Synthetic oligonucleotide
uuuguugucaaugucugcc

SEQ ID NO: 1381284 - RNA, 19 nt, Artificial Sequence
  Description of Artificial Sequence: Synthetic oligonucleotide
gaaauucuaagauaaaacu

SEQ ID NO: 1381285 - RNA, 19 nt, Artificial Sequence
  Description of Artificial Sequence: Synthetic oligonucleotide
uucagcaucaucauccaga

SEQ ID NO: 1381286 - RNA, 19 nt, Artificial Sequence
  Description of Artificial Sequence: Synthetic oligonucleotide
uucauuagugaaauauuca

SEQ ID NO: 1381287 - RNA, 19 nt, Artificial Sequence
  Description of Artificial Sequence: Synthetic oligonucleotide
aaacucauagguuggccag

SEQ ID NO: 1381288 - RNA, 19 nt, Artificial Sequence
  Description of Artificial Sequence: Synthetic oligonucleotide
auuaaugaucucaaaucgc

SEQ ID NO: 1381289 - RNA, 19 nt, Artificial Sequence
  Description of Artificial Sequence: Synthetic oligonucleotide
aaucgcuuaucaaauaaag

SEQ ID NO: 1381290 - RNA, 19 nt, Artificial Sequence
  Description of Artificial Sequence: Synthetic oligonucleotide
ugcauuaaugaucucaaau

SEQ ID NO: 1381291 - RNA, 19 nt, Artificial Sequence
  Description of Artificial Sequence: Synthetic oligonucleotide
aagaacuccaauuaucguu

SEQ ID NO: 1381292 - RNA, 19 nt, Artificial Sequence
  Description of Artificial Sequence: Synthetic oligonucleotide
uaucugugcacauuuaacu

SEQ ID NO: 1381293 - RNA, 19 nt, Artificial Sequence
  Description of Artificial Sequence: Synthetic oligonucleotide
cuugaucaaguucagacug

SEQ ID NO: 1381294 - RNA, 19 nt, Artificial Sequence
  Description of Artificial Sequence: Synthetic oligonucleotide
aaccauaucacugagcaaa

SEQ ID NO: 1381295 - RNA, 19 nt, Artificial Sequence
  Description of Artificial Sequence: Synthetic oligonucleotide
aaggcugauagagaacagc

SEQ ID NO: 1381296 - RNA, 19 nt, Artificial Sequence
  Description of Artificial Sequence: Synthetic oligonucleotide
uuaggcaaacaaacaagag

SEQ ID NO: 1381297 - RNA, 19 nt, Artificial Sequence
  Description of Artificial Sequence: Synthetic oligonucleotide
ugaggauuuugcaucaucu

SEQ ID NO: 1381298 - RNA, 19 nt, Artificial Sequence
  Description of Artificial Sequence: Synthetic oligonucleotide
ucauuagugaaauauucau

SEQ ID NO: 1381299 - RNA, 19 nt, Artificial Sequence
  Description of Artificial Sequence: Synthetic oligonucleotide
cuucauuagugaaauauuc

SEQ ID NO: 1381300 - RNA, 19 nt, Artificial Sequence
  Description of Artificial Sequence: Synthetic oligonucleotide
ucgucuucaaucuuggccu

SEQ ID NO: 1381301 - RNA, 19 nt, Artificial Sequence
  Description of Artificial Sequence: Synthetic oligonucleotide
gaaacuguuuuagucacag

SEQ ID NO: 1381302 - RNA, 19 nt, Artificial Sequence
  Description of Artificial Sequence: Synthetic oligonucleotide
aaaauuaggcaaacaaaca

SEQ ID NO: 1381303 - RNA, 19 nt, Artificial Sequence
  Description of Artificial Sequence: Synthetic oligonucleotide
uuuuaggcuauaaaacaaa

SEQ ID NO: 1381304 - RNA, 19 nt, Artificial Sequence
  Description of Artificial Sequence: Synthetic oligonucleotide
ugucaaccaaaauucagga

SEQ ID NO: 1381305 - RNA, 19 nt, Artificial Sequence
  Description of Artificial Sequence: Synthetic oligonucleotide
uuuaggcuauaaaacaaaa

SEQ ID NO: 1381306 - RNA, 19 nt, Artificial Sequence
  Description of Artificial Sequence: Synthetic oligonucleotide
aaagagacccgagaucccg

SEQ ID NO: 1381307 - RNA, 19 nt, Artificial Sequence
  Description of Artificial Sequence: Synthetic oligonucleotide
aauagguucaaaugaugua

SEQ ID NO: 1381308 - RNA, 19 nt, Artificial Sequence
  Description of Artificial Sequence: Synthetic oligonucleotide
gauggcgcuaaagagaccc

SEQ ID NO: 1381309 - RNA, 19 nt, Artificial Sequence
  Description of Artificial Sequence: Synthetic oligonucleotide
ucugugcacauuuaacuug

SEQ ID NO: 1381310 - RNA, 19 nt, Artificial Sequence
  Description of Artificial Sequence: Synthetic oligonucleotide
uuucaaagucugcagccag

SEQ ID NO: 1381311 - RNA, 19 nt, Artificial Sequence
  Description of Artificial Sequence: Synthetic oligonucleotide
cucgucuucaaucuuggcc

SEQ ID NO: 1381312 - RNA, 19 nt, Artificial Sequence
  Description of Artificial Sequence: Synthetic oligonucleotide
uucaagugcuucagaauag

SEQ ID NO: 1381313 - RNA, 19 nt, Artificial Sequence
  Description of Artificial Sequence: Synthetic oligonucleotide
uguucuuuguugucaaugu

SEQ ID NO: 1381314 - RNA, 19 nt, Artificial Sequence
  Description of Artificial Sequence: Synthetic oligonucleotide
cugaucuugggauuauccg

SEQ ID NO: 1381315 - RNA, 19 nt, Artificial Sequence
  Description of Artificial Sequence: Synthetic oligonucleotide
aaaauagguucaaaugaug

SEQ ID NO: 1381316 - RNA, 19 nt, Artificial Sequence
  Description of Artificial Sequence: Synthetic oligonucleotide
cuuuugacuacuuuaggca

SEQ ID NO: 1381317 - RNA, 19 nt, Artificial Sequence
  Description of Artificial Sequence: Synthetic oligonucleotide
ugguccaucaaaagagaag

SEQ ID NO: 1381318 - RNA, 19 nt, Artificial Sequence
  Description of Artificial Sequence: Synthetic oligonucleotide
ucaggaauuccuuuagggu

SEQ ID NO: 1381319 - RNA, 19 nt, Artificial Sequence
  Description of Artificial Sequence: Synthetic oligonucleotide
aauuaaagaaagaaucauu

SEQ ID NO: 1381320 - RNA, 19 nt, Artificial Sequence
  Description of Artificial Sequence: Synthetic oligonucleotide
uguuccugaaccauaucac

SEQ ID NO: 1381321 - RNA, 19 nt, Artificial Sequence
  Description of Artificial Sequence: Synthetic oligonucleotide
agcagauggcgcuaaagag

SEQ ID NO: 1381322 - RNA, 19 nt, Artificial Sequence
  Description of Artificial Sequence: Synthetic oligonucleotide
auaaaacucauagguuggc

SEQ ID NO: 1381323 - RNA, 19 nt, Artificial Sequence
  Description of Artificial Sequence: Synthetic oligonucleotide
agaacuccaauuaucguuc

SEQ ID NO: 1381324 - RNA, 19 nt, Artificial Sequence
  Description of Artificial Sequence: Synthetic oligonucleotide
aggauuuugcaucaucuga

SEQ ID NO: 1381325 - RNA, 19 nt, Artificial Sequence
  Description of Artificial Sequence: Synthetic oligonucleotide
ucuugaucaaguucagacu

SEQ ID NO: 1381326 - RNA, 19 nt, Artificial Sequence
  Description of Artificial Sequence: Synthetic oligonucleotide
uucucgucuucaaucuugg

SEQ ID NO: 1381327 - RNA, 19 nt, Artificial Sequence
  Description of Artificial Sequence: Synthetic oligonucleotide
ucgucaucauccucaauag

SEQ ID NO: 1381328 - RNA, 19 nt, Artificial Sequence
  Description of Artificial Sequence: Synthetic oligonucleotide
cacuuugauaucuuucaag

SEQ ID NO: 1381329 - RNA, 19 nt, Artificial Sequence
  Description of Artificial Sequence: Synthetic oligonucleotide
uuaggcuauaaaacaaaau

SEQ ID NO: 1381330 - RNA, 19 nt, Artificial Sequence
  Description of Artificial Sequence: Synthetic oligonucleotide
aaugucugccaucuuguaa

SEQ ID NO: 1381331 - RNA, 19 nt, Artificial Sequence
  Description of Artificial Sequence: Synthetic oligonucleotide
uacgaacugucccacgucc

SEQ ID NO: 1381332 - RNA, 19 nt, Artificial Sequence
  Description of Artificial Sequence: Synthetic oligonucleotide
uaucacugagcaaaucaac

SEQ ID NO: 1381333 - RNA, 19 nt, Artificial Sequence
  Description of Artificial Sequence: Synthetic oligonucleotide
gaauagguucaucauguuc

SEQ ID NO: 1381334 - RNA, 19 nt, Artificial Sequence
  Description of Artificial Sequence: Synthetic oligonucleotide
uacagcacugaucuuggga

SEQ ID NO: 1381335 - RNA, 19 nt, Artificial Sequence
  Description of Artificial Sequence: Synthetic oligonucleotide
uguacgucuuuguuaacac

SEQ ID NO: 1381336 - RNA, 19 nt, Artificial Sequence
  Description of Artificial Sequence: Synthetic oligonucleotide
gaucucaaaucgcuuauca

SEQ ID NO: 1381337 - RNA, 19 nt, Artificial Sequence
  Description of Artificial Sequence: Synthetic oligonucleotide
uacaacccauaauuucugg

SEQ ID NO: 1381338 - RNA, 19 nt, Artificial Sequence
  Description of Artificial Sequence: Synthetic oligonucleotide
auagguucaaaugauguaa

SEQ ID NO: 1381339 - RNA, 19 nt, Artificial Sequence
  Description of Artificial Sequence: Synthetic oligonucleotide
uccuguacgucuuuguuaa

SEQ ID NO: 1381340 - RNA, 19 nt, Artificial Sequence
  Description of Artificial Sequence: Synthetic oligonucleotide
uccaauuaucguuccagga

SEQ ID NO: 1381341 - RNA, 19 nt, Artificial Sequence
  Description of Artificial Sequence: Synthetic oligonucleotide
ucaagugcuucagaauagg

SEQ ID NO: 1381342 - RNA, 19 nt, Artificial Sequence
  Description of Artificial Sequence: Synthetic oligonucleotide
uggguucugauccuucuug

SEQ ID NO: 1381343 - RNA, 19 nt, Artificial Sequence
  Description of Artificial Sequence: Synthetic oligonucleotide
cuaucugugcacauuuaac

SEQ ID NO: 1381344 - RNA, 19 nt, Artificial Sequence
  Description of Artificial Sequence: Synthetic oligonucleotide
aaccaaaauucaggaauuc

SEQ ID NO: 1381345 - RNA, 19 nt, Artificial Sequence
  Description of Artificial Sequence: Synthetic oligonucleotide
agugaaauauucauugggu

SEQ ID NO: 1381346 - RNA, 19 nt, Artificial Sequence
  Description of Artificial Sequence: Synthetic oligonucleotide
ucagacuguucuuuguugu

SEQ ID NO: 1381347 - RNA, 19 nt, Artificial Sequence
  Description of Artificial Sequence: Synthetic oligonucleotide
auuaggcaaacaaacaaga

SEQ ID NO: 1381348 - RNA, 19 nt, Artificial Sequence
  Description of Artificial Sequence: Synthetic oligonucleotide
aacucauagguuggccagc

SEQ ID NO: 1381349 - RNA, 19 nt, Artificial Sequence
  Description of Artificial Sequence: Synthetic oligonucleotide
accaauuucaaagucugca

SEQ ID NO: 1381350 - RNA, 19 nt, Artificial Sequence
  Description of Artificial Sequence: Synthetic oligonucleotide
gaaagaaucauuggaaacu

SEQ ID NO: 1381351 - RNA, 19 nt, Artificial Sequence
  Description of Artificial Sequence: Synthetic oligonucleotide
uuaggcaggcuuucaaugu

SEQ ID NO: 1381352 - RNA, 19 nt, Artificial Sequence
  Description of Artificial Sequence: Synthetic oligonucleotide
gcauuaaugaucucaaauc

SEQ ID NO: 1381353 - RNA, 19 nt, Artificial Sequence
  Description of Artificial Sequence: Synthetic oligonucleotide
uccguucucaggaacuuca

SEQ ID NO: 1381354 - RNA, 19 nt, Artificial Sequence
  Description of Artificial Sequence: Synthetic oligonucleotide
uucuucuguagguucauaa

SEQ ID NO: 1381355 - RNA, 19 nt, Artificial Sequence
  Description of Artificial Sequence: Synthetic oligonucleotide
caucugaacagucagcuga

SEQ ID NO: 1381356 - RNA, 19 nt, Artificial Sequence
  Description of Artificial Sequence: Synthetic oligonucleotide
acagcacugaucuugggau

SEQ ID NO: 1381357 - RNA, 19 nt, Artificial Sequence
  Description of Artificial Sequence: Synthetic oligonucleotide
uuugagggcguucacccgu

SEQ ID NO: 1381358 - RNA, 19 nt, Artificial Sequence
  Description of Artificial Sequence: Synthetic oligonucleotide
ugauguaauuccaucuuuu

SEQ ID NO: 1381359 - RNA, 19 nt, Artificial Sequence
  Description of Artificial Sequence: Synthetic oligonucleotide
uuuuccaaucuaucuggca

SEQ ID NO: 1381360 - RNA, 19 nt, Artificial Sequence
  Description of Artificial Sequence: Synthetic oligonucleotide
aguacgaacugucccacgu

SEQ ID NO: 1381361 - RNA, 19 nt, Artificial Sequence
  Description of Artificial Sequence: Synthetic oligonucleotide
cagacauccugcuucacug

SEQ ID NO: 1381362 - RNA, 19 nt, Artificial Sequence
  Description of Artificial Sequence: Synthetic oligonucleotide
uaucguuccaggaggcuca

SEQ ID NO: 1381363 - RNA, 19 nt, Artificial Sequence
  Description of Artificial Sequence: Synthetic oligonucleotide
aggcugauagagaacagcg

SEQ ID NO: 1381364 - RNA, 19 nt, Artificial Sequence
  Description of Artificial Sequence: Synthetic oligonucleotide
uaaaacucauagguuggcc

SEQ ID NO: 1381365 - RNA, 19 nt, Artificial Sequence
  Description of Artificial Sequence: Synthetic oligonucleotide
uucaauguauccuguuggu

SEQ ID NO: 1381366 - RNA, 19 nt, Artificial Sequence
  Description of Artificial Sequence: Synthetic oligonucleotide
uaggccguccucaaggcca

SEQ ID NO: 1381367 - RNA, 19 nt, Artificial Sequence
  Description of Artificial Sequence: Synthetic oligonucleotide
caacccauaauuucugguc

SEQ ID NO: 1381368 - RNA, 19 nt, Artificial Sequence
  Description of Artificial Sequence: Synthetic oligonucleotide
aguaaaguacagcacugau

SEQ ID NO: 1381369 - RNA, 19 nt, Artificial Sequence
  Description of Artificial Sequence: Synthetic oligonucleotide
uaccagaccauccagucuu

SEQ ID NO: 1381370 - RNA, 19 nt, Artificial Sequence
  Description of Artificial Sequence: Synthetic oligonucleotide
cugaacagucagcugacgc

SEQ ID NO: 1381371 - RNA, 19 nt, Artificial Sequence
  Description of Artificial Sequence: Synthetic oligonucleotide
aacagcguauuuccuuuca

SEQ ID NO: 1381372 - RNA, 19 nt, Artificial Sequence
  Description of Artificial Sequence: Synthetic oligonucleotide
cuuguaagaacuccaauua

SEQ ID NO: 1381373 - RNA, 19 nt, Artificial Sequence
  Description of Artificial Sequence: Synthetic oligonucleotide
aauagccucuccaguaaag

SEQ ID NO: 1381374 - RNA, 19 nt, Artificial Sequence
  Description of Artificial Sequence: Synthetic oligonucleotide
uuugcaucaucugaacagu

SEQ ID NO: 1381375 - RNA, 19 nt, Artificial Sequence
  Description of Artificial Sequence: Synthetic oligonucleotide
ucaauagccucuccaguaa

SEQ ID NO: 1381376 - RNA, 19 nt, Artificial Sequence
  Description of Artificial Sequence: Synthetic oligonucleotide
ucauguuccugaaccauau

SEQ ID NO: 1381377 - RNA, 19 nt, Artificial Sequence
  Description of Artificial Sequence: Synthetic oligonucleotide
agaccauccagucuuuccu

SEQ ID NO: 1381378 - RNA, 19 nt, Artificial Sequence
  Description of Artificial Sequence: Synthetic oligonucleotide
ucaucauccagaucuccgu

SEQ ID NO: 1381379 - RNA, 19 nt, Artificial Sequence
  Description of Artificial Sequence: Synthetic oligonucleotide
ucuucuguagguucauaaa

SEQ ID NO: 1381380 - RNA, 19 nt, Artificial Sequence
  Description of Artificial Sequence: Synthetic oligonucleotide
gucuuuugacuacuuuagg

SEQ ID NO: 1381381 - RNA, 19 nt, Artificial Sequence
  Description of Artificial Sequence: Synthetic oligonucleotide
uaagaacuccaauuaucgu

SEQ ID NO: 1381382 - RNA, 19 nt, Artificial Sequence
  Description of Artificial Sequence: Synthetic oligonucleotide
agccucuccaguaaaguac

SEQ ID NO: 1381383 - RNA, 19 nt, Artificial Sequence
  Description of Artificial Sequence: Synthetic oligonucleotide
ucacugagcaaaucaacau

SEQ ID NO: 1381384 - RNA, 19 nt, Artificial Sequence
  Description of Artificial Sequence: Synthetic oligonucleotide
ucagacgcggagccgggcg

SEQ ID NO: 1381385 - RNA, 19 nt, Artificial Sequence
  Description of Artificial Sequence: Synthetic oligonucleotide
uuuugagggcguucacccg

SEQ ID NO: 1381386 - RNA, 19 nt, Artificial Sequence
  Description of Artificial Sequence: Synthetic oligonucleotide
cauagucaggaucauuuuc

SEQ ID NO: 1381387 - RNA, 19 nt, Artificial Sequence
  Description of Artificial Sequence: Synthetic oligonucleotide
cuugggauuauccgcuccc

SEQ ID NO: 1381388 - RNA, 19 nt, Artificial Sequence
  Description of Artificial Sequence: Synthetic oligonucleotide
aagauaaaacucauagguu

SEQ ID NO: 1381389 - RNA, 19 nt, Artificial Sequence
  Description of Artificial Sequence: Synthetic oligonucleotide
agugacucagggcggcggc

SEQ ID NO: 1381390 - RNA, 19 nt, Artificial Sequence
  Description of Artificial Sequence: Synthetic oligonucleotide
cuaucuggcacccuguaca

SEQ ID NO: 1381391 - RNA, 19 nt, Artificial Sequence
  Description of Artificial Sequence: Synthetic oligonucleotide
uguuggugugucuaccaga

SEQ ID NO: 1381392 - RNA, 19 nt, Artificial Sequence
  Description of Artificial Sequence: Synthetic oligonucleotide
ugucccacgucccuugugu

SEQ ID NO: 1381393 - RNA, 19 nt, Artificial Sequence
  Description of Artificial Sequence: Synthetic oligonucleotide
acaacccauaauuucuggu

SEQ ID NO: 1381394 - RNA, 19 nt, Artificial Sequence
  Description of Artificial Sequence: Synthetic oligonucleotide
auuuuaggcuauaaaacaa

SEQ ID NO: 1381395 - RNA, 19 nt, Artificial Sequence
  Description of Artificial Sequence: Synthetic oligonucleotide
gaacagucagcugacgcgc

SEQ ID NO: 1381396 - RNA, 19 nt, Artificial Sequence
  Description of Artificial Sequence: Synthetic oligonucleotide
acugucaaccaaaauucag

SEQ ID NO: 1381397 - RNA, 19 nt, Artificial Sequence
  Description of Artificial Sequence: Synthetic oligonucleotide
ucuugggauuauccgcucc

SEQ ID NO: 1381398 - RNA, 19 nt, Artificial Sequence
  Description of Artificial Sequence: Synthetic oligonucleotide
uccgaaauuucuuccuccu

SEQ ID NO: 1381399 - RNA, 19 nt, Artificial Sequence
  Description of Artificial Sequence: Synthetic oligonucleotide
cuccgaaauuucuuccucc

SEQ ID NO: 1381400 - RNA, 19 nt, Artificial Sequence
  Description of Artificial Sequence: Synthetic oligonucleotide
uugacuacuuuaggcaggc

SEQ ID NO: 1381401 - RNA, 19 nt, Artificial Sequence
  Description of Artificial Sequence: Synthetic oligonucleotide
aguacagcacugaucuugg

SEQ ID NO: 1381402 - RNA, 19 nt, Artificial Sequence
  Description of Artificial Sequence: Synthetic oligonucleotide
aaaucgcuuaucaaauaaa

SEQ ID NO: 1381403 - RNA, 19 nt, Artificial Sequence
  Description of Artificial Sequence: Synthetic oligonucleotide
ucuaucuggcacccuguac

SEQ ID NO: 1381404 - RNA, 19 nt, Artificial Sequence
  Description of Artificial Sequence: Synthetic oligonucleotide
uaaagagacccgagauccc

SEQ ID NO: 1381405 - RNA, 19 nt, Artificial Sequence
  Description of Artificial Sequence: Synthetic oligonucleotide
agaacagcguauuuccuuu

SEQ ID NO: 1381406 - RNA, 19 nt, Artificial Sequence
  Description of Artificial Sequence: Synthetic oligonucleotide
aacugucccacgucccuug

SEQ ID NO: 1381407 - RNA, 19 nt, Artificial Sequence
  Description of Artificial Sequence: Synthetic oligonucleotide
acauuuaacuugaagguuu

SEQ ID NO: 1381408 - RNA, 19 nt, Artificial Sequence
  Description of Artificial Sequence: Synthetic oligonucleotide
aucacugagcaaaucaaca

SEQ ID NO: 1381409 - RNA, 19 nt, Artificial Sequence
  Description of Artificial Sequence: Synthetic oligonucleotide
uucuaagauaaaacucaua

SEQ ID NO: 1381410 - RNA, 19 nt, Artificial Sequence
  Description of Artificial Sequence: Synthetic oligonucleotide
caaaucgcuuaucaaauaa

SEQ ID NO: 1381411 - RNA, 19 nt, Artificial Sequence
  Description of Artificial Sequence: Synthetic oligonucleotide
gguucaaaugauguaauuc

SEQ ID NO: 1381412 - RNA, 19 nt, Artificial Sequence
  Description of Artificial Sequence: Synthetic oligonucleotide
aguucagacuguucuuugu

SEQ ID NO: 1381413 - RNA, 19 nt, Artificial Sequence
  Description of Artificial Sequence: Synthetic oligonucleotide
aucugguuuccauucacau

SEQ ID NO: 1381414 - RNA, 19 nt, Artificial Sequence
  Description of Artificial Sequence: Synthetic oligonucleotide
cagaccauccagucuuucc

SEQ ID NO: 1381415 - RNA, 19 nt, Artificial Sequence
  Description of Artificial Sequence: Synthetic oligonucleotide
aacuccaauuaucguucca

SEQ ID NO: 1381416 - RNA, 19 nt, Artificial Sequence
  Description of Artificial Sequence: Synthetic oligonucleotide
uccagaucuccguucucag

SEQ ID NO: 1381417 - RNA, 19 nt, Artificial Sequence
  Description of Artificial Sequence: Synthetic oligonucleotide
uuaucguuccaggaggcuc

SEQ ID NO: 1381418 - RNA, 19 nt, Artificial Sequence
  Description of Artificial Sequence: Synthetic oligonucleotide
guaaaguacagcacugauc

SEQ ID NO: 1381419 - RNA, 19 nt, Artificial Sequence
  Description of Artificial Sequence: Synthetic oligonucleotide
ucagcugacgcgcuuugau

SEQ ID NO: 1381420 - RNA, 19 nt, Artificial Sequence
  Description of Artificial Sequence: Synthetic oligonucleotide
augauguaauuccaucuuu

SEQ ID NO: 1381421 - RNA, 19 nt, Artificial Sequence
  Description of Artificial Sequence: Synthetic oligonucleotide
ucaaaucgcuuaucaaaua

SEQ ID NO: 1381422 - RNA, 19 nt, Artificial Sequence
  Description of Artificial Sequence: Synthetic oligonucleotide
acaguacgaacugucccac

SEQ ID NO: 1381423 - RNA, 19 nt, Artificial Sequence
  Description of Artificial Sequence: Synthetic oligonucleotide
uuccuuuagggucuucuuu

SEQ ID NO: 1381424 - RNA, 19 nt, Artificial Sequence
  Description of Artificial Sequence: Synthetic oligonucleotide
auccaaaucuugaucaagu

SEQ ID NO: 1381425 - RNA, 19 nt, Artificial Sequence
  Description of Artificial Sequence: Synthetic oligonucleotide
aagugcuucagaauagguu

SEQ ID NO: 1381426 - RNA, 19 nt, Artificial Sequence
  Description of Artificial Sequence: Synthetic oligonucleotide
agcaucugagaacuucacu

SEQ ID NO: 1381427 - RNA, 19 nt, Artificial Sequence
  Description of Artificial Sequence: Synthetic oligonucleotide
uagguucauaaauugcauu

SEQ ID NO: 1381428 - RNA, 19 nt, Artificial Sequence
  Description of Artificial Sequence: Synthetic oligonucleotide
guuggugugucuaccagac

SEQ ID NO: 1381429 - RNA, 19 nt, Artificial Sequence
  Description of Artificial Sequence: Synthetic oligonucleotide
cugaaccauaucacugagc

SEQ ID NO: 1381430 - RNA, 19 nt, Artificial Sequence
  Description of Artificial Sequence: Synthetic oligonucleotide
ccaauuucaaagucugcag

SEQ ID NO: 1381431 - RNA, 19 nt, Artificial Sequence
  Description of Artificial Sequence: Synthetic oligonucleotide
uguugucaaugucugccau

SEQ ID NO: 1381432 - RNA, 19 nt, Artificial Sequence
  Description of Artificial Sequence: Synthetic oligonucleotide
uccuccgaaauuucuuccu

SEQ ID NO: 1381433 - RNA, 19 nt, Artificial Sequence
  Description of Artificial Sequence: Synthetic oligonucleotide
caagaaucugaggauuuug

SEQ ID NO: 1381434 - RNA, 19 nt, Artificial Sequence
  Description of Artificial Sequence: Synthetic oligonucleotide
uuucaagaucaugaacuuc

SEQ ID NO: 1381435 - RNA, 19 nt, Artificial Sequence
  Description of Artificial Sequence: Synthetic oligonucleotide
ucaaguucagacuguucuu

SEQ ID NO: 1381436 - RNA, 19 nt, Artificial Sequence
  Description of Artificial Sequence: Synthetic oligonucleotide
aacugucaaccaaaauuca

SEQ ID NO: 1381437 - RNA, 19 nt, Artificial Sequence
  Description of Artificial Sequence: Synthetic oligonucleotide
uugggauuauccgcucccg

SEQ ID NO: 1381438 - RNA, 19 nt, Artificial Sequence
  Description of Artificial Sequence: Synthetic oligonucleotide
aucugaacagucagcugac

SEQ ID NO: 1381439 - RNA, 19 nt, Artificial Sequence
  Description of Artificial Sequence: Synthetic oligonucleotide
agcugacgcgcuuugauuu

SEQ ID NO: 1381440 - RNA, 19 nt, Artificial Sequence
  Description of Artificial Sequence: Synthetic oligonucleotide
cacaguacgaacuguccca

SEQ ID NO: 1381441 - RNA, 19 nt, Artificial Sequence
  Description of Artificial Sequence: Synthetic oligonucleotide
ucugaacagucagcugacg

SEQ ID NO: 1381442 - RNA, 19 nt, Artificial Sequence
  Description of Artificial Sequence: Synthetic oligonucleotide
ugauagagaacagcguauu

SEQ ID NO: 1381443 - RNA, 19 nt, Artificial Sequence
  Description of Artificial Sequence: Synthetic oligonucleotide
ucauagucaggaucauuuu

SEQ ID NO: 1381444 - RNA, 19 nt, Artificial Sequence
  Description of Artificial Sequence: Synthetic oligonucleotide
aaucuaucuggcacccugu

SEQ ID NO: 1381445 - RNA, 19 nt, Artificial Sequence
  Description of Artificial Sequence: Synthetic oligonucleotide
caaaagagaagggaucaga

SEQ ID NO: 1381446 - RNA, 19 nt, Artificial Sequence
  Description of Artificial Sequence: Synthetic oligonucleotide
acgucauccaaaucuugau

SEQ ID NO: 1381447 - RNA, 19 nt, Artificial Sequence
  Description of Artificial Sequence: Synthetic oligonucleotide
uauccuguuggugugucua

SEQ ID NO: 1381448 - RNA, 19 nt, Artificial Sequence
  Description of Artificial Sequence: Synthetic oligonucleotide
auccuguacgucuuuguua

SEQ ID NO: 1381449 - RNA, 19 nt, Artificial Sequence
  Description of Artificial Sequence: Synthetic oligonucleotide
uucacccgucuuuugacua

SEQ ID NO: 1381450 - RNA, 19 nt, Artificial Sequence
  Description of Artificial Sequence: Synthetic oligonucleotide
acuacuuuaggcaggcuuu

SEQ ID NO: 1381451 - RNA, 19 nt, Artificial Sequence
  Description of Artificial Sequence: Synthetic oligonucleotide
guacaacccauaauuucug

SEQ ID NO: 1381452 - RNA, 19 nt, Artificial Sequence
  Description of Artificial Sequence: Synthetic oligonucleotide
cuugcacucugcuggguuc

SEQ ID NO: 1381453 - RNA, 19 nt, Artificial Sequence
  Description of Artificial Sequence: Synthetic oligonucleotide
acccauaauuucuggucca

SEQ ID NO: 1381454 - RNA, 19 nt, Artificial Sequence
  Description of Artificial Sequence: Synthetic oligonucleotide
acuucauuagugaaauauu

SEQ ID NO: 1381455 - RNA, 19 nt, Artificial Sequence
  Description of Artificial Sequence: Synthetic oligonucleotide
ugggauuauccgcucccgu

SEQ ID NO: 1381456 - RNA, 19 nt, Artificial Sequence
  Description of Artificial Sequence: Synthetic oligonucleotide
cgucuuuugacuacuuuag

SEQ ID NO: 1381457 - RNA, 19 nt, Artificial Sequence
  Description of Artificial Sequence: Synthetic oligonucleotide
acgucuuuguuaacacuuc

SEQ ID NO: 1381458 - RNA, 19 nt, Artificial Sequence
  Description of Artificial Sequence: Synthetic oligonucleotide
cucaaaucgcuuaucaaau

SEQ ID NO: 1381459 - RNA, 19 nt, Artificial Sequence
  Description of Artificial Sequence: Synthetic oligonucleotide
gcacauuuaacuugaaggu

SEQ ID NO: 1381460 - RNA, 19 nt, Artificial Sequence
  Description of Artificial Sequence: Synthetic oligonucleotide
aacuucaggaggggcaaaa

SEQ ID NO: 1381461 - RNA, 19 nt, Artificial Sequence
  Description of Artificial Sequence: Synthetic oligonucleotide
uuggugugucuaccagacc

SEQ ID NO: 1381462 - RNA, 19 nt, Artificial Sequence
  Description of Artificial Sequence: Synthetic oligonucleotide
gcugauagagaacagcgua

SEQ ID NO: 1381463 - RNA, 19 nt, Artificial Sequence
  Description of Artificial Sequence: Synthetic oligonucleotide
ucacccgucuuuugacuac

SEQ ID NO: 1381464 - RNA, 19 nt, Artificial Sequence
  Description of Artificial Sequence: Synthetic oligonucleotide
accauccagucuuuccuga

SEQ ID NO: 1381465 - RNA, 19 nt, Artificial Sequence
  Description of Artificial Sequence: Synthetic oligonucleotide
gacuacuuuaggcaggcuu

SEQ ID NO: 1381466 - RNA, 19 nt, Artificial Sequence
  Description of Artificial Sequence: Synthetic oligonucleotide
gaucuugggauuauccgcu

SEQ ID NO: 1381467 - RNA, 19 nt, Artificial Sequence
  Description of Artificial Sequence: Synthetic oligonucleotide
ugaucaaguucagacuguu

SEQ ID NO: 1381468 - RNA, 19 nt, Artificial Sequence
  Description of Artificial Sequence: Synthetic oligonucleotide
agguuggccagcaucugag

SEQ ID NO: 1381469 - RNA, 19 nt, Artificial Sequence
  Description of Artificial Sequence: Synthetic oligonucleotide
gcuaaagagacccgagauc

SEQ ID NO: 1381470 - RNA, 19 nt, Artificial Sequence
  Description of Artificial Sequence: Synthetic oligonucleotide
aaaguacagcacugaucuu

SEQ ID NO: 1381471 - RNA, 19 nt, Artificial Sequence
  Description of Artificial Sequence: Synthetic oligonucleotide
uccuguuggugugucuacc

SEQ ID NO: 1381472 - RNA, 19 nt, Artificial Sequence
  Description of Artificial Sequence: Synthetic oligonucleotide
cuguacgucuuuguuaaca

SEQ ID NO: 1381473 - RNA, 19 nt, Artificial Sequence
  Description of Artificial Sequence: Synthetic oligonucleotide
auuauccgcucccguaaaa

SEQ ID NO: 1381474 - RNA, 19 nt, Artificial Sequence
  Description of Artificial Sequence: Synthetic oligonucleotide
gucaaccaaaauucaggaa

SEQ ID NO: 1381475 - RNA, 19 nt, Artificial Sequence
  Description of Artificial Sequence: Synthetic oligonucleotide
guuccugaaccauaucacu

SEQ ID NO: 1381476 - RNA, 19 nt, Artificial Sequence
  Description of Artificial Sequence: Synthetic oligonucleotide
caguauggcuucagcauca

SEQ ID NO: 1381477 - RNA, 19 nt, Artificial Sequence
  Description of Artificial Sequence: Synthetic oligonucleotide
gucauagucaggaucauuu

SEQ ID NO: 1381478 - RNA, 19 nt, Artificial Sequence
  Description of Artificial Sequence: Synthetic oligonucleotide
gauuauccgcucccguaaa

SEQ ID NO: 1381479 - RNA, 19 nt, Artificial Sequence
  Description of Artificial Sequence: Synthetic oligonucleotide
cugccaucuuguaagaacu

SEQ ID NO: 1381480 - RNA, 19 nt, Artificial Sequence
  Description of Artificial Sequence: Synthetic oligonucleotide
uguauccuguugguguguc

SEQ ID NO: 1381481 - RNA, 19 nt, Artificial Sequence
  Description of Artificial Sequence: Synthetic oligonucleotide
gggcuaaaacuguauuaug

SEQ ID NO: 1381482 - RNA, 19 nt, Artificial Sequence
  Description of Artificial Sequence: Synthetic oligonucleotide
auuaucguuccaggaggcu

SEQ ID NO: 1381483 - RNA, 19 nt, Artificial Sequence
  Description of Artificial Sequence: Synthetic oligonucleotide
caguacgaacugucccacg

SEQ ID NO: 1381484 - RNA, 19 nt, Artificial Sequence
  Description of Artificial Sequence: Synthetic oligonucleotide
cauuagugaaauauucauu

SEQ ID NO: 1381485 - RNA, 19 nt, Artificial Sequence
  Description of Artificial Sequence: Synthetic oligonucleotide
agucagcugacgcgcuuug

SEQ ID NO: 1381486 - RNA, 19 nt, Artificial Sequence
  Description of Artificial Sequence: Synthetic oligonucleotide
guacagcacugaucuuggg

SEQ ID NO: 1381487 - RNA, 19 nt, Artificial Sequence
  Description of Artificial Sequence: Synthetic oligonucleotide
uacuuuaggcaggcuuuca

SEQ ID NO: 1381488 - RNA, 19 nt, Artificial Sequence
  Description of Artificial Sequence: Synthetic oligonucleotide
gaucaaguucagacuguuc

SEQ ID NO: 1381489 - RNA, 19 nt, Artificial Sequence
  Description of Artificial Sequence: Synthetic oligonucleotide
uagucacaguacgaacugu

SEQ ID NO: 1381490 - RNA, 19 nt, Artificial Sequence
  Description of Artificial Sequence: Synthetic oligonucleotide
uggcgcuaaagagacccga

SEQ ID NO: 1381491 - RNA, 19 nt, Artificial Sequence
  Description of Artificial Sequence: Synthetic oligonucleotide
guaggccguccucaaggcc

SEQ ID NO: 1381492 - RNA, 19 nt, Artificial Sequence
  Description of Artificial Sequence: Synthetic oligonucleotide
gaaccauaucacugagcaa

SEQ ID NO: 1381493 - RNA, 19 nt, Artificial Sequence
  Description of Artificial Sequence: Synthetic oligonucleotide
ggcuaaaacuguauuaugu

SEQ ID NO: 1381494 - RNA, 19 nt, Artificial Sequence
  Description of Artificial Sequence: Synthetic oligonucleotide
gccaucuuguaagaacucc

SEQ ID NO: 1381495 - RNA, 19 nt, Artificial Sequence
  Description of Artificial Sequence: Synthetic oligonucleotide
ggaaagcagaagguaggcc

SEQ ID NO: 1381496 - RNA, 19 nt, Artificial Sequence
  Description of Artificial Sequence: Synthetic oligonucleotide
aucuccguucucaggaacu

SEQ ID NO: 1381497 - RNA, 19 nt, Artificial Sequence
  Description of Artificial Sequence: Synthetic oligonucleotide
agggcguucacccgucuuu

SEQ ID NO: 1381498 - RNA, 19 nt, Artificial Sequence
  Description of Artificial Sequence: Synthetic oligonucleotide
ugcuggguucugauccuuc

SEQ ID NO: 1381499 - RNA, 19 nt, Artificial Sequence
  Description of Artificial Sequence: Synthetic oligonucleotide
gcagauggcgcuaaagaga

SEQ ID NO: 1381500 - RNA, 19 nt, Artificial Sequence
  Description of Artificial Sequence: Synthetic oligonucleotide
ggauuauccgcucccguaa

SEQ ID NO: 1381501 - RNA, 19 nt, Artificial Sequence
  Description of Artificial Sequence: Synthetic oligonucleotide
gauagagaacagcguauuu

SEQ ID NO: 1381502 - RNA, 19 nt, Artificial Sequence
  Description of Artificial Sequence: Synthetic oligonucleotide
cuacuuuaggcaggcuuuc

SEQ ID NO: 1381503 - RNA, 19 nt, Artificial Sequence
  Description of Artificial Sequence: Synthetic oligonucleotide
guacgaacugucccacguc

SEQ ID NO: 1381504 - RNA, 19 nt, Artificial Sequence
  Description of Artificial Sequence: Synthetic oligonucleotide
aguuccuccgaaauuucuu

SEQ ID NO: 1381505 - RNA, 19 nt, Artificial Sequence
  Description of Artificial Sequence: Synthetic oligonucleotide
agagaacagcguauuuccu

SEQ ID NO: 1381506 - RNA, 19 nt, Artificial Sequence
  Description of Artificial Sequence: Synthetic oligonucleotide
aucuaucuggcacccugua

SEQ ID NO: 1381507 - RNA, 19 nt, Artificial Sequence
  Description of Artificial Sequence: Synthetic oligonucleotide
acccuguacaacccauaau

SEQ ID NO: 1381508 - RNA, 19 nt, Artificial Sequence
  Description of Artificial Sequence: Synthetic oligonucleotide
uugagggcguucacccguc

SEQ ID NO: 1381509 - RNA, 19 nt, Artificial Sequence
  Description of Artificial Sequence: Synthetic oligonucleotide
cuucaacgucauccaaauc

SEQ ID NO: 1381510 - RNA, 19 nt, Artificial Sequence
  Description of Artificial Sequence: Synthetic oligonucleotide
ggcucagacgcggagccgg

SEQ ID NO: 1381511 - RNA, 19 nt, Artificial Sequence
  Description of Artificial Sequence: Synthetic oligonucleotide
aucuggcacccuguacaac

SEQ ID NO: 1381512 - RNA, 19 nt, Artificial Sequence
  Description of Artificial Sequence: Synthetic oligonucleotide
ccaucuuguaagaacucca

SEQ ID NO: 1381513 - RNA, 19 nt, Artificial Sequence
  Description of Artificial Sequence: Synthetic oligonucleotide
aacagucagcugacgcgcu

SEQ ID NO: 1381514 - RNA, 19 nt, Artificial Sequence
  Description of Artificial Sequence: Synthetic oligonucleotide
cagacgcggagccgggcgg

SEQ ID NO: 1381515 - RNA, 19 nt, Artificial Sequence
  Description of Artificial Sequence: Synthetic oligonucleotide
caguaaaguacagcacuga

SEQ ID NO: 1381516 - RNA, 19 nt, Artificial Sequence
  Description of Artificial Sequence: Synthetic oligonucleotide
cugauagagaacagcguau

SEQ ID NO: 1381517 - RNA, 19 nt, Artificial Sequence
  Description of Artificial Sequence: Synthetic oligonucleotide
ccagucuuuccugaagggc

SEQ ID NO: 1381518 - RNA, 19 nt, Artificial Sequence
  Description of Artificial Sequence: Synthetic oligonucleotide
cagugacucagggcggcgg

SEQ ID NO: 1381519 - RNA, 19 nt, Artificial Sequence
  Description of Artificial Sequence: Synthetic oligonucleotide
agacgcggagccgggcggc

SEQ ID NO: 1381520 - RNA, 19 nt, Artificial Sequence
  Description of Artificial Sequence: Synthetic oligonucleotide
ucuccguucucaggaacuu

SEQ ID NO: 1381521 - RNA, 19 nt, Artificial Sequence
  Description of Artificial Sequence: Synthetic oligonucleotide
auggcgcuaaagagacccg

SEQ ID NO: 1381522 - RNA, 19 nt, Artificial Sequence
  Description of Artificial Sequence: Synthetic oligonucleotide
guacgucuuuguuaacacu

SEQ ID NO: 1381523 - RNA, 19 nt, Artificial Sequence
  Description of Artificial Sequence: Synthetic oligonucleotide
ucccacgucccuuguguuu

SEQ ID NO: 1381524 - RNA, 19 nt, Artificial Sequence
  Description of Artificial Sequence: Synthetic oligonucleotide
guagguucauaaauugcau

SEQ ID NO: 1381525 - RNA, 19 nt, Artificial Sequence
  Description of Artificial Sequence: Synthetic oligonucleotide
gugacucagggcggcggcg

SEQ ID NO: 1381526 - RNA, 19 nt, Artificial Sequence
  Description of Artificial Sequence: Synthetic oligonucleotide
cacccuguacaacccauaa

SEQ ID NO: 1381527 - RNA, 19 nt, Artificial Sequence
  Description of Artificial Sequence: Synthetic oligonucleotide
guauggcuucagcaucauc

SEQ ID NO: 1381528 - RNA, 19 nt, Artificial Sequence
  Description of Artificial Sequence: Synthetic oligonucleotide
caauagccucuccaguaaa

SEQ ID NO: 1381529 - RNA, 19 nt, Artificial Sequence
  Description of Artificial Sequence: Synthetic oligonucleotide
ggcgcuaaagagacccgag

SEQ ID NO: 1381530 - RNA, 19 nt, Artificial Sequence
  Description of Artificial Sequence: Synthetic oligonucleotide
ccagcaucugagaacuuca

SEQ ID NO: 1381531 - RNA, 19 nt, Artificial Sequence
  Description of Artificial Sequence: Synthetic oligonucleotide
cugaccucauccuguacgu

SEQ ID NO: 1381532 - RNA, 19 nt, Artificial Sequence
  Description of Artificial Sequence: Synthetic oligonucleotide
ugagggcguucacccgucu

SEQ ID NO: 1381533 - RNA, 19 nt, Artificial Sequence
  Description of Artificial Sequence: Synthetic oligonucleotide
auguauccuguuggugugu

SEQ ID NO: 1381534 - RNA, 19 nt, Artificial Sequence
  Description of Artificial Sequence: Synthetic oligonucleotide
gacucagggcggcggcggc

SEQ ID NO: 1381535 - RNA, 19 nt, Artificial Sequence
  Description of Artificial Sequence: Synthetic oligonucleotide
acacuucauuagugaaaua

SEQ ID NO: 1381536 - RNA, 19 nt, Artificial Sequence
  Description of Artificial Sequence: Synthetic oligonucleotide
gggauuauccgcucccgua

SEQ ID NO: 1381537 - RNA, 19 nt, Artificial Sequence
  Description of Artificial Sequence: Synthetic oligonucleotide
ccgucuuuugacuacuuua

SEQ ID NO: 1381538 - RNA, 19 nt, Artificial Sequence
  Description of Artificial Sequence: Synthetic oligonucleotide
gcguauuuccuuucaagau

SEQ ID NO: 1381539 - RNA, 19 nt, Artificial Sequence
  Description of Artificial Sequence: Synthetic oligonucleotide
aggccguccucaaggccac

SEQ ID NO: 1381540 - RNA, 19 nt, Artificial Sequence
  Description of Artificial Sequence: Synthetic oligonucleotide
cacugaucuugggauuauc

SEQ ID NO: 1381541 - RNA, 19 nt, Artificial Sequence
  Description of Artificial Sequence: Synthetic oligonucleotide
ccuccgaaauuucuuccuc

SEQ ID NO: 1381542 - RNA, 19 nt, Artificial Sequence
  Description of Artificial Sequence: Synthetic oligonucleotide
gccagcaucugagaacuuc

SEQ ID NO: 1381543 - RNA, 19 nt, Artificial Sequence
  Description of Artificial Sequence: Synthetic oligonucleotide
ggaacuucaggaggggcaa

SEQ ID NO: 1381544 - RNA, 19 nt, Artificial Sequence
  Description of Artificial Sequence: Synthetic oligonucleotide
aucguuccaggaggcucag

SEQ ID NO: 1381545 - RNA, 19 nt, Artificial Sequence
  Description of Artificial Sequence: Synthetic oligonucleotide
cugucccacgucccuugug

SEQ ID NO: 1381546 - RNA, 19 nt, Artificial Sequence
  Description of Artificial Sequence: Synthetic oligonucleotide
gcgcuaaagagacccgaga

SEQ ID NO: 1381547 - RNA, 19 nt, Artificial Sequence
  Description of Artificial Sequence: Synthetic oligonucleotide
cuccguucucaggaacuuc

SEQ ID NO: 1381548 - RNA, 19 nt, Artificial Sequence
  Description of Artificial Sequence: Synthetic oligonucleotide
ugacuacuuuaggcaggcu

SEQ ID NO: 1381549 - RNA, 19 nt, Artificial Sequence
  Description of Artificial Sequence: Synthetic oligonucleotide
cuaccagaccauccagucu

SEQ ID NO: 1381550 - RNA, 19 nt, Artificial Sequence
  Description of Artificial Sequence: Synthetic oligonucleotide
gccucuccaguaaaguaca

SEQ ID NO: 1381551 - RNA, 19 nt, Artificial Sequence
  Description of Artificial Sequence: Synthetic oligonucleotide
aggcucagacgcggagccg

SEQ ID NO: 1381552 - RNA, 19 nt, Artificial Sequence
  Description of Artificial Sequence: Synthetic oligonucleotide
ggaggagcgggaggcggcg

SEQ ID NO: 1381553 - RNA, 19 nt, Artificial Sequence
  Description of Artificial Sequence: Synthetic oligonucleotide
gguucugaccucauccugu

SEQ ID NO: 1381554 - RNA, 19 nt, Artificial Sequence
  Description of Artificial Sequence: Synthetic oligonucleotide
ggaaacuguuuuagucaca

SEQ ID NO: 1381555 - RNA, 19 nt, Artificial Sequence
  Description of Artificial Sequence: Synthetic oligonucleotide
agggcggcggcggcggcgg

SEQ ID NO: 1381556 - RNA, 19 nt, Artificial Sequence
  Description of Artificial Sequence: Synthetic oligonucleotide
uaggccaggguaggccguc

SEQ ID NO: 1381557 - RNA, 19 nt, Artificial Sequence
  Description of Artificial Sequence: Synthetic oligonucleotide
cauccuguacgucuuuguu

SEQ ID NO: 1381558 - RNA, 19 nt, Artificial Sequence
  Description of Artificial Sequence: Synthetic oligonucleotide
caucauguuccugaaccau

SEQ ID NO: 1381559 - RNA, 19 nt, Artificial Sequence
  Description of Artificial Sequence: Synthetic oligonucleotide
ggcguucacccgucuuuug

SEQ ID NO: 1381560 - RNA, 19 nt, Artificial Sequence
  Description of Artificial Sequence: Synthetic oligonucleotide
guauccuguuggugugucu

SEQ ID NO: 1381561 - RNA, 19 nt, Artificial Sequence
  Description of Artificial Sequence: Synthetic oligonucleotide
agcugcgcaggcagugacu

SEQ ID NO: 1381562 - RNA, 19 nt, Artificial Sequence
  Description of Artificial Sequence: Synthetic oligonucleotide
gagccgggcggccggagcu

SEQ ID NO: 1381563 - RNA, 19 nt, Artificial Sequence
  Description of Artificial Sequence: Synthetic oligonucleotide
gucagcugacgcgcuuuga

SEQ ID NO: 1381564 - RNA, 19 nt, Artificial Sequence
  Description of Artificial Sequence: Synthetic oligonucleotide
gacgcggagccgggcggcc

SEQ ID NO: 1381565 - RNA, 19 nt, Artificial Sequence
  Description of Artificial Sequence: Synthetic oligonucleotide
gcuggguucugauccuucu

SEQ ID NO: 1381566 - RNA, 19 nt, Artificial Sequence
  Description of Artificial Sequence: Synthetic oligonucleotide
caaagucugcagccaguau

SEQ ID NO: 1381567 - RNA, 19 nt, Artificial Sequence
  Description of Artificial Sequence: Synthetic oligonucleotide
ucguuccaggaggcucaga

SEQ ID NO: 1381568 - RNA, 19 nt, Artificial Sequence
  Description of Artificial Sequence: Synthetic oligonucleotide
ggcgccgcgagcagauggc

SEQ ID NO: 1381569 - RNA, 19 nt, Artificial Sequence
  Description of Artificial Sequence: Synthetic oligonucleotide
acgcggagccgggcggccg

SEQ ID NO: 1381570 - RNA, 19 nt, Artificial Sequence
  Description of Artificial Sequence: Synthetic oligonucleotide
gcuuucaauguauccuguu

SEQ ID NO: 1381571 - RNA, 19 nt, Artificial Sequence
  Description of Artificial Sequence: Synthetic oligonucleotide
ggcugauagagaacagcgu

SEQ ID NO: 1381572 - RNA, 19 nt, Artificial Sequence
  Description of Artificial Sequence: Synthetic oligonucleotide
ccuguacgucuuuguuaac

SEQ ID NO: 1381573 - RNA, 19 nt, Artificial Sequence
  Description of Artificial Sequence: Synthetic oligonucleotide
gcucagacgcggagccggg

SEQ ID NO: 1381574 - RNA, 19 nt, Artificial Sequence
  Description of Artificial Sequence: Synthetic oligonucleotide
ggcggccggagcugcgcag

SEQ ID NO: 1381575 - RNA, 19 nt, Artificial Sequence
  Description of Artificial Sequence: Synthetic oligonucleotide
gcggccggagcugcgcagg

SEQ ID NO: 1381576 - RNA, 19 nt, Artificial Sequence
  Description of Artificial Sequence: Synthetic oligonucleotide
gccgcgagcagauggcgcu

SEQ ID NO: 1381577 - RNA, 19 nt, Artificial Sequence
  Description of Artificial Sequence: Synthetic oligonucleotide
cagcugacgcgcuuugauu

SEQ ID NO: 1381578 - RNA, 19 nt, Artificial Sequence
  Description of Artificial Sequence: Synthetic oligonucleotide
cggcgccgcgagcagaugg

SEQ ID NO: 1381579 - RNA, 19 nt, Artificial Sequence
  Description of Artificial Sequence: Synthetic oligonucleotide
ccaggguaggccguccuca

SEQ ID NO: 1381580 - RNA, 19 nt, Artificial Sequence
  Description of Artificial Sequence: Synthetic oligonucleotide
ggagcugcgcaggcaguga

SEQ ID NO: 1381581 - RNA, 19 nt, Artificial Sequence
  Description of Artificial Sequence: Synthetic oligonucleotide
gccaggguaggccguccuc

SEQ ID NO: 1381582 - RNA, 19 nt, Artificial Sequence
  Description of Artificial Sequence: Synthetic oligonucleotide
gagggcguucacccgucuu

SEQ ID NO: 1381583 - RNA, 19 nt, Artificial Sequence
  Description of Artificial Sequence: Synthetic oligonucleotide
ccucaauagccucuccagu

SEQ ID NO: 1381584 - RNA, 19 nt, Artificial Sequence
  Description of Artificial Sequence: Synthetic oligonucleotide
accagaccauccagucuuu

SEQ ID NO: 1381585 - RNA, 19 nt, Artificial Sequence
  Description of Artificial Sequence: Synthetic oligonucleotide
ggcuuucaauguauccugu

SEQ ID NO: 1381586 - RNA, 19 nt, Artificial Sequence
  Description of Artificial Sequence: Synthetic oligonucleotide
gcgccgcgagcagauggcg

SEQ ID NO: 1381587 - RNA, 19 nt, Artificial Sequence
  Description of Artificial Sequence: Synthetic oligonucleotide
gcuugcacucugcuggguu

SEQ ID NO: 1381588 - RNA, 19 nt, Artificial Sequence
  Description of Artificial Sequence: Synthetic oligonucleotide
cgcuaaagagacccgagau

SEQ ID NO: 1381589 - RNA, 19 nt, Artificial Sequence
  Description of Artificial Sequence: Synthetic oligonucleotide
gcuucuaucugugcacauu

SEQ ID NO: 1381590 - RNA, 19 nt, Artificial Sequence
  Description of Artificial Sequence: Synthetic oligonucleotide
cacccgucuuuugacuacu

SEQ ID NO: 1381591 - RNA, 19 nt, Artificial Sequence
  Description of Artificial Sequence: Synthetic oligonucleotide
acccgucuuuugacuacuu

SEQ ID NO: 1381592 - RNA, 19 nt, Artificial Sequence
  Description of Artificial Sequence: Synthetic oligonucleotide
cgccgcgagcagauggcgc

SEQ ID NO: 1381593 - RNA, 19 nt, Artificial Sequence
  Description of Artificial Sequence: Synthetic oligonucleotide
ggucauagucaggaucauu

SEQ ID NO: 1381594 - RNA, 19 nt, Artificial Sequence
  Description of Artificial Sequence: Synthetic oligonucleotide
cucauagguuggccagcau

SEQ ID NO: 1381595 - RNA, 19 nt, Artificial Sequence
  Description of Artificial Sequence: Synthetic oligonucleotide
gcggcggcggcggcggcgg

SEQ ID NO: 1381596 - RNA, 19 nt, Artificial Sequence
  Description of Artificial Sequence: Synthetic oligonucleotide
ggcggcggcggcggcggcg

SEQ ID NO: 1381597 - RNA, 19 nt, Artificial Sequence
  Description of Artificial Sequence: Synthetic oligonucleotide
ccguccucaaggccacaga

SEQ ID NO: 1381598 - RNA, 19 nt, Artificial Sequence
  Description of Artificial Sequence: Synthetic oligonucleotide
cggagcugcgcaggcagug

SEQ ID NO: 1381599 - RNA, 19 nt, Artificial Sequence
  Description of Artificial Sequence: Synthetic oligonucleotide
cgggaggcggcgccgcgag

SEQ ID NO: 1381600 - RNA, 19 nt, Artificial Sequence
  Description of Artificial Sequence: Synthetic oligonucleotide
cccauaauuucugguccau

SEQ ID NO: 1381601 - RNA, 19 nt, Artificial Sequence
  Description of Artificial Sequence: Synthetic oligonucleotide
gcacugaucuugggauuau

SEQ ID NO: 1381602 - RNA, 19 nt, Artificial Sequence
  Description of Artificial Sequence: Synthetic oligonucleotide
gggcguucacccgucuuuu

SEQ ID NO: 1381603 - RNA, 19 nt, Artificial Sequence
  Description of Artificial Sequence: Synthetic oligonucleotide
ggcggcggcggcggcggga

SEQ ID NO: 1381604 - RNA, 19 nt, Artificial Sequence
  Description of Artificial Sequence: Synthetic oligonucleotide
gcggcgccgcgagcagaug

SEQ ID NO: 1381605 - RNA, 19 nt, Artificial Sequence
  Description of Artificial Sequence: Synthetic oligonucleotide
cgcgagcagauggcgcuaa

SEQ ID NO: 1381606 - RNA, 19 nt, Artificial Sequence
  Description of Artificial Sequence: Synthetic oligonucleotide
gggcggcggcggcggcggc

SEQ ID NO: 1381607 - RNA, 19 nt, Artificial Sequence
  Description of Artificial Sequence: Synthetic oligonucleotide
ccgcgagcagauggcgcua

SEQ ID NO: 1381608 - RNA, 19 nt, Artificial Sequence
  Description of Artificial Sequence: Synthetic oligonucleotide
cggcggcggcggcggcggg

SEQ ID NO: 1381609 - RNA, 19 nt, Artificial Sequence
  Description of Artificial Sequence: Synthetic oligonucleotide
cggcggcggcggcggcggc

SEQ ID NO: 1381610 - RNA, 19 nt, Artificial Sequence
  Description of Artificial Sequence: Synthetic oligonucleotide
gauaagagcuaucagaaac

SEQ ID NO: 1381611 - RNA, 19 nt, Artificial Sequence
  Description of Artificial Sequence: Synthetic oligonucleotide
agagagauagaguauuccc

SEQ ID NO: 1381612 - RNA, 19 nt, Artificial Sequence
  Description of Artificial Sequence: Synthetic oligonucleotide
uaaucugcaagacacagca

SEQ ID NO: 1381613 - RNA, 19 nt, Artificial Sequence
  Description of Artificial Sequence: Synthetic oligonucleotide
uguccuuggacaaagguag

SEQ ID NO: 1381614 - RNA, 19 nt, Artificial Sequence
  Description of Artificial Sequence: Synthetic oligonucleotide
ucugguacaccauugauug

SEQ ID NO: 1381615 - RNA, 19 nt, Artificial Sequence
  Description of Artificial Sequence: Synthetic oligonucleotide
aacuacauaucccaagaag

SEQ ID NO: 1381616 - RNA, 19 nt, Artificial Sequence
  Description of Artificial Sequence: Synthetic oligonucleotide
uagcuguagagacagaacg

SEQ ID NO: 1381617 - RNA, 19 nt, Artificial Sequence
  Description of Artificial Sequence: Synthetic oligonucleotide
acuacauaucccaagaagc

SEQ ID NO: 1381618 - RNA, 19 nt, Artificial Sequence
  Description of Artificial Sequence: Synthetic oligonucleotide
cuagcuuaguccuugaacc

SEQ ID NO: 1381619 - RNA, 19 nt, Artificial Sequence
  Description of Artificial Sequence: Synthetic oligonucleotide
aauagagcaccgcuucccc

SEQ ID NO: 1381620 - RNA, 19 nt, Artificial Sequence
  Description of Artificial Sequence: Synthetic oligonucleotide
agagcuaucagaaacgagg

SEQ ID NO: 1381621 - RNA, 19 nt, Artificial Sequence
  Description of Artificial Sequence: Synthetic oligonucleotide
uauuagaggaaccaaaguu

SEQ ID NO: 1381622 - RNA, 19 nt, Artificial Sequence
  Description of Artificial Sequence: Synthetic oligonucleotide
  modified_base (12)..(12): a, c, u, g, unknown or other
ugaagcuccganaaggggc

SEQ ID NO: 1381623 - RNA, 19 nt, Artificial Sequence
  Description of Artificial Sequence: Synthetic oligonucleotide
agaaccccgguucugaagc

SEQ ID NO: 1381624 - RNA, 19 nt, Artificial Sequence
  Description of Artificial Sequence: Synthetic oligonucleotide
acuagcuuaguccuugaac

SEQ ID NO: 1381625 - RNA, 19 nt, Artificial Sequence
  Description of Artificial Sequence: Synthetic oligonucleotide
acgaggagaaaucagacug

SEQ ID NO: 1381626 - RNA, 19 nt, Artificial Sequence
  Description of Artificial Sequence: Synthetic oligonucleotide
ucuagcaagaaguauuaga

SEQ ID NO: 1381627 - RNA, 19 nt, Artificial Sequence
  Description of Artificial Sequence: Synthetic oligonucleotide
uauaauagagcaccgcuuc

SEQ ID NO: 1381628 - RNA, 19 nt, Artificial Sequence
  Description of Artificial Sequence: Synthetic oligonucleotide
uguagagacagaacgaaaa

SEQ ID NO: 1381629 - RNA, 19 nt, Artificial Sequence
  Description of Artificial Sequence: Synthetic oligonucleotide
aagacuaugggugccuccc

SEQ ID NO: 1381630 - RNA, 19 nt, Artificial Sequence
  Description of Artificial Sequence: Synthetic oligonucleotide
ugggauaagagcuaucaga

SEQ ID NO: 1381631 - RNA, 19 nt, Artificial Sequence
  Description of Artificial Sequence: Synthetic oligonucleotide
gaaacgcccucucagaugc

SEQ ID NO: 1381632 - RNA, 19 nt, Artificial Sequence
  Description of Artificial Sequence: Synthetic oligonucleotide
uugauugugacugacuuca

SEQ ID NO: 1381633 - RNA, 19 nt, Artificial Sequence
  Description of Artificial Sequence: Synthetic oligonucleotide
ucagaggcuaagacuaugg

SEQ ID NO: 1381634 - RNA, 19 nt, Artificial Sequence
  Description of Artificial Sequence: Synthetic oligonucleotide
gaggcuaagacuaugggug

SEQ ID NO: 1381635 - RNA, 19 nt, Artificial Sequence
  Description of Artificial Sequence: Synthetic oligonucleotide
aucacucacaauucucacc

SEQ ID NO: 1381636 - RNA, 19 nt, Artificial Sequence
  Description of Artificial Sequence: Synthetic oligonucleotide
aagagaagguggaagaaag

SEQ ID NO: 1381637 - RNA, 19 nt, Artificial Sequence
  Description of Artificial Sequence: Synthetic oligonucleotide
auaauagagcaccgcuucc

SEQ ID NO: 1381638 - RNA, 19 nt, Artificial Sequence
  Description of Artificial Sequence: Synthetic oligonucleotide
aagaaguauuagaggaacc

SEQ ID NO: 1381639 - RNA, 19 nt, Artificial Sequence
  Description of Artificial Sequence: Synthetic oligonucleotide
agauucuuccaucucugac

SEQ ID NO: 1381640 - RNA, 19 nt, Artificial Sequence
  Description of Artificial Sequence: Synthetic oligonucleotide
aaaagcaccagccccggga

SEQ ID NO: 1381641 - RNA, 19 nt, Artificial Sequence
  Description of Artificial Sequence: Synthetic oligonucleotide
auucccuccuagcacaugg

SEQ ID NO: 1381642 - RNA, 19 nt, Artificial Sequence
  Description of Artificial Sequence: Synthetic oligonucleotide
uuucucaaaacuacaacuu

SEQ ID NO: 1381643 - RNA, 19 nt, Artificial Sequence
  Description of Artificial Sequence: Synthetic oligonucleotide
augaaagacaagaucuccc

SEQ ID NO: 1381644 - RNA, 19 nt, Artificial Sequence
  Description of Artificial Sequence: Synthetic oligonucleotide
acaccauugauugugacug

SEQ ID NO: 1381645 - RNA, 19 nt, Artificial Sequence
  Description of Artificial Sequence: Synthetic oligonucleotide
uaaagugagggagagagau

SEQ ID NO: 1381646 - RNA, 19 nt, Artificial Sequence
  Description of Artificial Sequence: Synthetic oligonucleotide
auaagagcuaucagaaacg

SEQ ID NO: 1381647 - RNA, 19 nt, Artificial Sequence
  Description of Artificial Sequence: Synthetic oligonucleotide
gaugaaagacaagaucucc

SEQ ID NO: 1381648 - RNA, 19 nt, Artificial Sequence
  Description of Artificial Sequence: Synthetic oligonucleotide
ugcccauucuccaugauuc

SEQ ID NO: 1381649 - RNA, 19 nt, Artificial Sequence
  Description of Artificial Sequence: Synthetic oligonucleotide
acaagaucuccccagucag

SEQ ID NO: 1381650 - RNA, 19 nt, Artificial Sequence
  Description of Artificial Sequence: Synthetic oligonucleotide
uucaucuagcuuugguggg

SEQ ID NO: 1381651 - RNA, 19 nt, Artificial Sequence
  Description of Artificial Sequence: Synthetic oligonucleotide
ugccauaccuacuccaucc

SEQ ID NO: 1381652 - RNA, 19 nt, Artificial Sequence
  Description of Artificial Sequence: Synthetic oligonucleotide
aguauucccuccuagcaca

SEQ ID NO: 1381653 - RNA, 19 nt, Artificial Sequence
  Description of Artificial Sequence: Synthetic oligonucleotide
aagaucuccccagucagag

SEQ ID NO: 1381654 - RNA, 19 nt, Artificial Sequence
  Description of Artificial Sequence: Synthetic oligonucleotide
agagacagaacgaaaagca

SEQ ID NO: 1381655 - RNA, 19 nt, Artificial Sequence
  Description of Artificial Sequence: Synthetic oligonucleotide
gcuaaagugagggagagag

SEQ ID NO: 1381656 - RNA, 19 nt, Artificial Sequence
  Description of Artificial Sequence: Synthetic oligonucleotide
ugaagguugcugcucacga

SEQ ID NO: 1381657 - RNA, 19 nt, Artificial Sequence
  Description of Artificial Sequence: Synthetic oligonucleotide
agaguauucccuccuagca

SEQ ID NO: 1381658 - RNA, 19 nt, Artificial Sequence
  Description of Artificial Sequence: Synthetic oligonucleotide
cucuguauccaggauaucc

SEQ ID NO: 1381659 - RNA, 19 nt, Artificial Sequence
  Description of Artificial Sequence: Synthetic oligonucleotide
ugcaagacacagcacuaag

SEQ ID NO: 1381660 - RNA, 19 nt, Artificial Sequence
  Description of Artificial Sequence: Synthetic oligonucleotide
auagaguauucccuccuag

SEQ ID NO: 1381661 - RNA, 19 nt, Artificial Sequence
  Description of Artificial Sequence: Synthetic oligonucleotide
uucuguuugagagggaaca

SEQ ID NO: 1381662 - RNA, 19 nt, Artificial Sequence
  Description of Artificial Sequence: Synthetic oligonucleotide
cacucagcuaaagugaggg

SEQ ID NO: 1381663 - RNA, 19 nt, Artificial Sequence
  Description of Artificial Sequence: Synthetic oligonucleotide
uuauaauagagcaccgcuu

SEQ ID NO: 1381664 - RNA, 19 nt, Artificial Sequence
  Description of Artificial Sequence: Synthetic oligonucleotide
agaaguauuagaggaacca

SEQ ID NO: 1381665 - RNA, 19 nt, Artificial Sequence
  Description of Artificial Sequence: Synthetic oligonucleotide
agaggcuaagacuaugggu

SEQ ID NO: 1381666 - RNA, 19 nt, Artificial Sequence
  Description of Artificial Sequence: Synthetic oligonucleotide
acuacaacuuuauuggcuu

SEQ ID NO: 1381667 - RNA, 19 nt, Artificial Sequence
  Description of Artificial Sequence: Synthetic oligonucleotide
aacuacaacuuuauuggcu

SEQ ID NO: 1381668 - RNA, 19 nt, Artificial Sequence
  Description of Artificial Sequence: Synthetic oligonucleotide
ugguacaccauugauugug

SEQ ID NO: 1381669 - RNA, 19 nt, Artificial Sequence
  Description of Artificial Sequence: Synthetic oligonucleotide
gauugugacugacuucagc

SEQ ID NO: 1381670 - RNA, 19 nt, Artificial Sequence
  Description of Artificial Sequence: Synthetic oligonucleotide
aagcccagcuuuauaauag

SEQ ID NO: 1381671 - RNA, 19 nt, Artificial Sequence
  Description of Artificial Sequence: Synthetic oligonucleotide
cagucuucgccauacacac

SEQ ID NO: 1381672 - RNA, 19 nt, Artificial Sequence
  Description of Artificial Sequence: Synthetic oligonucleotide
uguuugagagggaacacuu

SEQ ID NO: 1381673 - RNA, 19 nt, Artificial Sequence
  Description of Artificial Sequence: Synthetic oligonucleotide
agccauucaagcaauaugu

SEQ ID NO: 1381674 - RNA, 19 nt, Artificial Sequence
  Description of Artificial Sequence: Synthetic oligonucleotide
ucuccacucccgaagaacu

SEQ ID NO: 1381675 - RNA, 19 nt, Artificial Sequence
  Description of Artificial Sequence: Synthetic oligonucleotide
ucagaaacgaggccagggu

SEQ ID NO: 1381676 - RNA, 19 nt, Artificial Sequence
  Description of Artificial Sequence: Synthetic oligonucleotide
caagaaguauuagaggaac

SEQ ID NO: 1381677 - RNA, 19 nt, Artificial Sequence
  Description of Artificial Sequence: Synthetic oligonucleotide
uacaccauugauugugacu

SEQ ID NO: 1381678 - RNA, 19 nt, Artificial Sequence
  Description of Artificial Sequence: Synthetic oligonucleotide
gagauagaguauucccucc

SEQ ID NO: 1381679 - RNA, 19 nt, Artificial Sequence
  Description of Artificial Sequence: Synthetic oligonucleotide
agcuuaguccuugaacccc

SEQ ID NO: 1381680 - RNA, 19 nt, Artificial Sequence
  Description of Artificial Sequence: Synthetic oligonucleotide
cuaucagaaacgaggccag

SEQ ID NO: 1381681 - RNA, 19 nt, Artificial Sequence
  Description of Artificial Sequence: Synthetic oligonucleotide
ccuacacucagcuaaagug

SEQ ID NO: 1381682 - RNA, 19 nt, Artificial Sequence
  Description of Artificial Sequence: Synthetic oligonucleotide
uucucaaaacuacaacuuu

SEQ ID NO: 1381683 - RNA, 19 nt, Artificial Sequence
  Description of Artificial Sequence: Synthetic oligonucleotide
aagacaagaucuccccagu

SEQ ID NO: 1381684 - RNA, 19 nt, Artificial Sequence
  Description of Artificial Sequence: Synthetic oligonucleotide
gaagacaggagucgucggc

SEQ ID NO: 1381685 - RNA, 19 nt, Artificial Sequence
  Description of Artificial Sequence: Synthetic oligonucleotide
uccaugauucugcgugugg

SEQ ID NO: 1381686 - RNA, 19 nt, Artificial Sequence
  Description of Artificial Sequence: Synthetic oligonucleotide
uaauagagcaccgcuuccc

SEQ ID NO: 1381687 - RNA, 19 nt, Artificial Sequence
  Description of Artificial Sequence: Synthetic oligonucleotide
  modified_base (2)..(2): a, c, u, g, unknown or other
anaaggggcccaauucauc

SEQ ID NO: 1381688 - RNA, 19 nt, Artificial Sequence
  Description of Artificial Sequence: Synthetic oligonucleotide
uggucuuuucuccaucacu

SEQ ID NO: 1381689 - RNA, 19 nt, Artificial Sequence
  Description of Artificial Sequence: Synthetic oligonucleotide
cagaacgaaaagcaccagc

SEQ ID NO: 1381690 - RNA, 19 nt, Artificial Sequence
  Description of Artificial Sequence: Synthetic oligonucleotide
uguccuguuggaacugcag

SEQ ID NO: 1381691 - RNA, 19 nt, Artificial Sequence
  Description of Artificial Sequence: Synthetic oligonucleotide
gacagaacgaaaagcacca

SEQ ID NO: 1381692 - RNA, 19 nt, Artificial Sequence
  Description of Artificial Sequence: Synthetic oligonucleotide
uaagagcuaucagaaacga

SEQ ID NO: 1381693 - RNA, 19 nt, Artificial Sequence
  Description of Artificial Sequence: Synthetic oligonucleotide
agacuugucagguuuggaa

SEQ ID NO: 1381694 - RNA, 19 nt, Artificial Sequence
  Description of Artificial Sequence: Synthetic oligonucleotide
aggguuacagaagcuggcc

SEQ ID NO: 1381695 - RNA, 19 nt, Artificial Sequence
  Description of Artificial Sequence: Synthetic oligonucleotide
ggauauccagcucagaaca

SEQ ID NO: 1381696 - RNA, 19 nt, Artificial Sequence
  Description of Artificial Sequence: Synthetic oligonucleotide
gagagagauagaguauucc

SEQ ID NO: 1381697 - RNA, 19 nt, Artificial Sequence
  Description of Artificial Sequence: Synthetic oligonucleotide
uccucagaagggcugcugc

SEQ ID NO: 1381698 - RNA, 19 nt, Artificial Sequence
  Description of Artificial Sequence: Synthetic oligonucleotide
gaguauucccuccuagcac

SEQ ID NO: 1381699 - RNA, 19 nt, Artificial Sequence
  Description of Artificial Sequence: Synthetic oligonucleotide
aaagccauucaagcaauau

SEQ ID NO: 1381700 - RNA, 19 nt, Artificial Sequence
  Description of Artificial Sequence: Synthetic oligonucleotide
ugagcucaguucaucuagc

SEQ ID NO: 1381701 - RNA, 19 nt, Artificial Sequence
  Description of Artificial Sequence: Synthetic oligonucleotide
ucccuccuagcacaugggg

SEQ ID NO: 1381702 - RNA, 19 nt, Artificial Sequence
  Description of Artificial Sequence: Synthetic oligonucleotide
ugcggaaagugaaugugaa

SEQ ID NO: 1381703 - RNA, 19 nt, Artificial Sequence
  Description of Artificial Sequence: Synthetic oligonucleotide
uagcuuaguccuugaaccc

SEQ ID NO: 1381704 - RNA, 19 nt, Artificial Sequence
  Description of Artificial Sequence: Synthetic oligonucleotide
gucuucgccauacacacuc

SEQ ID NO: 1381705 - RNA, 19 nt, Artificial Sequence
  Description of Artificial Sequence: Synthetic oligonucleotide
gaaugugaagccagguccc

SEQ ID NO: 1381706 - RNA, 19 nt, Artificial Sequence
  Description of Artificial Sequence: Synthetic oligonucleotide
agauagaguauucccuccu

SEQ ID NO: 1381707 - RNA, 19 nt, Artificial Sequence
  Description of Artificial Sequence: Synthetic oligonucleotide
uccaucacucacaauucuc

SEQ ID NO: 1381708 - RNA, 19 nt, Artificial Sequence
  Description of Artificial Sequence: Synthetic oligonucleotide
  modified_base (11)..(11): a, c, u, g, unknown or other
gaagcuccganaaggggcc

SEQ ID NO: 1381709 - RNA, 19 nt, Artificial Sequence
  Description of Artificial Sequence: Synthetic oligonucleotide
  modified_base (16)..(16): a, c, u, g, unknown or other
guucugaagcuccganaag

SEQ ID NO: 1381710 - RNA, 19 nt, Artificial Sequence
  Description of Artificial Sequence: Synthetic oligonucleotide
uugagucugagcucaguuc

SEQ ID NO: 1381711 - RNA, 19 nt, Artificial Sequence
  Description of Artificial Sequence: Synthetic oligonucleotide
accauugauugugacugac

SEQ ID NO: 1381712 - RNA, 19 nt, Artificial Sequence
  Description of Artificial Sequence: Synthetic oligonucleotide
gaccaugccauaccuacuc

SEQ ID NO: 1381713 - RNA, 19 nt, Artificial Sequence
  Description of Artificial Sequence: Synthetic oligonucleotide
uagagcaccgcuuccccug

SEQ ID NO: 1381714 - RNA, 19 nt, Artificial Sequence
  Description of Artificial Sequence: Synthetic oligonucleotide
gaugcuacgggacuugggu

SEQ ID NO: 1381715 - RNA, 19 nt, Artificial Sequence
  Description of Artificial Sequence: Synthetic oligonucleotide
uccacuagcuuaguccuug

SEQ ID NO: 1381716 - RNA, 19 nt, Artificial Sequence
  Description of Artificial Sequence: Synthetic oligonucleotide
auucugcguguggugaugc

SEQ ID NO: 1381717 - RNA, 19 nt, Artificial Sequence
  Description of Artificial Sequence: Synthetic oligonucleotide
cagaggcuaagacuauggg

SEQ ID NO: 1381718 - RNA, 19 nt, Artificial Sequence
  Description of Artificial Sequence: Synthetic oligonucleotide
ugucagguuuggaacuaca

SEQ ID NO: 1381719 - RNA, 19 nt, Artificial Sequence
  Description of Artificial Sequence: Synthetic oligonucleotide
augggugccucccacucag

SEQ ID NO: 1381720 - RNA, 19 nt, Artificial Sequence
  Description of Artificial Sequence: Synthetic oligonucleotide
agagacucaggguuacaga

SEQ ID NO: 1381721 - RNA, 19 nt, Artificial Sequence
  Description of Artificial Sequence: Synthetic oligonucleotide
gacugacuucagcuguccg

SEQ ID NO: 1381722 - RNA, 19 nt, Artificial Sequence
  Description of Artificial Sequence: Synthetic oligonucleotide
caucacucacaauucucac

SEQ ID NO: 1381723 - RNA, 19 nt, Artificial Sequence
  Description of Artificial Sequence: Synthetic oligonucleotide
cagcacuaagcacccaggg

SEQ ID NO: 1381724 - RNA, 19 nt, Artificial Sequence
  Description of Artificial Sequence: Synthetic oligonucleotide
cagguuuggaacuacauau

SEQ ID NO: 1381725 - RNA, 19 nt, Artificial Sequence
  Description of Artificial Sequence: Synthetic oligonucleotide
uuggguaugcucacuccaa

SEQ ID NO: 1381726 - RNA, 19 nt, Artificial Sequence
  Description of Artificial Sequence: Synthetic oligonucleotide
uucccuccuagcacauggg

SEQ ID NO: 1381727 - RNA, 19 nt, Artificial Sequence
  Description of Artificial Sequence: Synthetic oligonucleotide
aaaucagacuggccaggaa

SEQ ID NO: 1381728 - RNA, 19 nt, Artificial Sequence
  Description of Artificial Sequence: Synthetic oligonucleotide
ugcuacgggacuuggguau

SEQ ID NO: 1381729 - RNA, 19 nt, Artificial Sequence
  Description of Artificial Sequence: Synthetic oligonucleotide
cagaaacgaggccagggug

SEQ ID NO: 1381730 - RNA, 19 nt, Artificial Sequence
  Description of Artificial Sequence: Synthetic oligonucleotide
  modified_base (10)..(10): a, c, u, g, unknown or other
aagcuccganaaggggccc

SEQ ID NO: 1381731 - RNA, 19 nt, Artificial Sequence
  Description of Artificial Sequence: Synthetic oligonucleotide
ucccuugagucugagcuca

SEQ ID NO: 1381732 - RNA, 19 nt, Artificial Sequence
  Description of Artificial Sequence: Synthetic oligonucleotide
acuccaaccugggucuagc

SEQ ID NO: 1381733 - RNA, 19 nt, Artificial Sequence
  Description of Artificial Sequence: Synthetic oligonucleotide
gagaaccccgguucugaag

SEQ ID NO: 1381734 - RNA, 19 nt, Artificial Sequence
  Description of Artificial Sequence: Synthetic oligonucleotide
auaccuacuccauccacua

SEQ ID NO: 1381735 - RNA, 19 nt, Artificial Sequence
  Description of Artificial Sequence: Synthetic oligonucleotide
gcuaucagaaacgaggcca

SEQ ID NO: 1381736 - RNA, 19 nt, Artificial Sequence
  Description of Artificial Sequence: Synthetic oligonucleotide
  modified_base (6)..(6): a, c, u, g, unknown or other
uccganaaggggcccaauu

SEQ ID NO: 1381737 - RNA, 19 nt, Artificial Sequence
  Description of Artificial Sequence: Synthetic oligonucleotide
uucagaggcuaagacuaug

SEQ ID NO: 1381738 - RNA, 19 nt, Artificial Sequence
  Description of Artificial Sequence: Synthetic oligonucleotide
ggugaugcgguguccuugg

SEQ ID NO: 1381739 - RNA, 19 nt, Artificial Sequence
  Description of Artificial Sequence: Synthetic oligonucleotide
guaaucugcaagacacagc

SEQ ID NO: 1381740 - RNA, 19 nt, Artificial Sequence
  Description of Artificial Sequence: Synthetic oligonucleotide
gugucgagaaccccgguuc

SEQ ID NO: 1381741 - RNA, 19 nt, Artificial Sequence
  Description of Artificial Sequence: Synthetic oligonucleotide
cugggauaagagcuaucag

SEQ ID NO: 1381742 - RNA, 19 nt, Artificial Sequence
  Description of Artificial Sequence: Synthetic oligonucleotide
cauaucccaagaagcccag

SEQ ID NO: 1381743 - RNA, 19 nt, Artificial Sequence
  Description of Artificial Sequence: Synthetic oligonucleotide
gcccaauucaucaaagagc

SEQ ID NO: 1381744 - RNA, 19 nt, Artificial Sequence
  Description of Artificial Sequence: Synthetic oligonucleotide
cagagacucaggguuacag

SEQ ID NO: 1381745 - RNA, 19 nt, Artificial Sequence
  Description of Artificial Sequence: Synthetic oligonucleotide
cuaagcacccaggggagag

SEQ ID NO: 1381746 - RNA, 19 nt, Artificial Sequence
  Description of Artificial Sequence: Synthetic oligonucleotide
ucuguuugagagggaacac

SEQ ID NO: 1381747 - RNA, 19 nt, Artificial Sequence
  Description of Artificial Sequence: Synthetic oligonucleotide
gaaugggcagcaaggucag

SEQ ID NO: 1381748 - RNA, 19 nt, Artificial Sequence
  Description of Artificial Sequence: Synthetic oligonucleotide
ugucgagaaccccgguucu

SEQ ID NO: 1381749 - RNA, 19 nt, Artificial Sequence
  Description of Artificial Sequence: Synthetic oligonucleotide
uaugggugccucccacuca

SEQ ID NO: 1381750 - RNA, 19 nt, Artificial Sequence
  Description of Artificial Sequence: Synthetic oligonucleotide
ucucagagacucaggguua

SEQ ID NO: 1381751 - RNA, 19 nt, Artificial Sequence
  Description of Artificial Sequence: Synthetic oligonucleotide
caauucucaccaccccugc

SEQ ID NO: 1381752 - RNA, 19 nt, Artificial Sequence
  Description of Artificial Sequence: Synthetic oligonucleotide
ucuucgccauacacacucc

SEQ ID NO: 1381753 - RNA, 19 nt, Artificial Sequence
  Description of Artificial Sequence: Synthetic oligonucleotide
uauguccaacacucccuug

SEQ ID NO: 1381754 - RNA, 19 nt, Artificial Sequence
  Description of Artificial Sequence: Synthetic oligonucleotide
augauucugcgugugguga

SEQ ID NO: 1381755 - RNA, 19 nt, Artificial Sequence
  Description of Artificial Sequence: Synthetic oligonucleotide
aaccugaaggagacugaag

SEQ ID NO: 1381756 - RNA, 19 nt, Artificial Sequence
  Description of Artificial Sequence: Synthetic oligonucleotide
ucagaugcuacgggacuug

SEQ ID NO: 1381757 - RNA, 19 nt, Artificial Sequence
  Description of Artificial Sequence: Synthetic oligonucleotide
uccauccacuagcuuaguc

SEQ ID NO: 1381758 - RNA, 19 nt, Artificial Sequence
  Description of Artificial Sequence: Synthetic oligonucleotide
acgacgaggagaaaucaga

SEQ ID NO: 1381759 - RNA, 19 nt, Artificial Sequence
  Description of Artificial Sequence: Synthetic oligonucleotide
acgggacuuggguaugcuc

SEQ ID NO: 1381760 - RNA, 19 nt, Artificial Sequence
  Description of Artificial Sequence: Synthetic oligonucleotide
gacuaugggugccucccac

SEQ ID NO: 1381761 - RNA, 19 nt, Artificial Sequence
  Description of Artificial Sequence: Synthetic oligonucleotide
cugacuucagcuguccguc

SEQ ID NO: 1381762 - RNA, 19 nt, Artificial Sequence
  Description of Artificial Sequence: Synthetic oligonucleotide
cugaagguugcugcucacg

SEQ ID NO: 1381763 - RNA, 19 nt, Artificial Sequence
  Description of Artificial Sequence: Synthetic oligonucleotide
gucggcuggaccugugugc

SEQ ID NO: 1381764 - RNA, 19 nt, Artificial Sequence
  Description of Artificial Sequence: Synthetic oligonucleotide
gauagaguauucccuccua

SEQ ID NO: 1381765 - RNA, 19 nt, Artificial Sequence
  Description of Artificial Sequence: Synthetic oligonucleotide
acuaugggugccucccacu

SEQ ID NO: 1381766 - RNA, 19 nt, Artificial Sequence
  Description of Artificial Sequence: Synthetic oligonucleotide
aaagggccggagugucgag

SEQ ID NO: 1381767 - RNA, 19 nt, Artificial Sequence
  Description of Artificial Sequence: Synthetic oligonucleotide
cuaugggugccucccacuc

SEQ ID NO: 1381768 - RNA, 19 nt, Artificial Sequence
  Description of Artificial Sequence: Synthetic oligonucleotide
caaggggacggaagacagg

SEQ ID NO: 1381769 - RNA, 19 nt, Artificial Sequence
  Description of Artificial Sequence: Synthetic oligonucleotide
aaccccgguucugaagcuc

SEQ ID NO: 1381770 - RNA, 19 nt, Artificial Sequence
  Description of Artificial Sequence: Synthetic oligonucleotide
gauauccagcucagaacac

SEQ ID NO: 1381771 - RNA, 19 nt, Artificial Sequence
  Description of Artificial Sequence: Synthetic oligonucleotide
agagcaccgcuuccccugg

SEQ ID NO: 1381772 - RNA, 19 nt, Artificial Sequence
  Description of Artificial Sequence: Synthetic oligonucleotide
gggacugaaggagaaagac

SEQ ID NO: 1381773 - RNA, 19 nt, Artificial Sequence
  Description of Artificial Sequence: Synthetic oligonucleotide
guagcuguagagacagaac

SEQ ID NO: 1381774 - RNA, 19 nt, Artificial Sequence
  Description of Artificial Sequence: Synthetic oligonucleotide
gaaaucagacuggccagga

SEQ ID NO: 1381775 - RNA, 19 nt, Artificial Sequence
  Description of Artificial Sequence: Synthetic oligonucleotide
auagagcaccgcuuccccu

SEQ ID NO: 1381776 - RNA, 19 nt, Artificial Sequence
  Description of Artificial Sequence: Synthetic oligonucleotide
agugucgagaaccccgguu

SEQ ID NO: 1381777 - RNA, 19 nt, Artificial Sequence
  Description of Artificial Sequence: Synthetic oligonucleotide
ugacugacuucagcugucc

SEQ ID NO: 1381778 - RNA, 19 nt, Artificial Sequence
  Description of Artificial Sequence: Synthetic oligonucleotide
gaaagggccggagugucga

SEQ ID NO: 1381779 - RNA, 19 nt, Artificial Sequence
  Description of Artificial Sequence: Synthetic oligonucleotide
ucgagaaccccgguucuga

SEQ ID NO: 1381780 - RNA, 19 nt, Artificial Sequence
  Description of Artificial Sequence: Synthetic oligonucleotide
cucaaaacuacaacuuuau

SEQ ID NO: 1381781 - RNA, 19 nt, Artificial Sequence
  Description of Artificial Sequence: Synthetic oligonucleotide
uggugaugcgguguccuug

SEQ ID NO: 1381782 - RNA, 19 nt, Artificial Sequence
  Description of Artificial Sequence: Synthetic oligonucleotide
ucuagcuuuggugggucuc

SEQ ID NO: 1381783 - RNA, 19 nt, Artificial Sequence
  Description of Artificial Sequence: Synthetic oligonucleotide
aaggggcccaauucaucaa

SEQ ID NO: 1381784 - RNA, 19 nt, Artificial Sequence
  Description of Artificial Sequence: Synthetic oligonucleotide
agacucaggguuacagaag

SEQ ID NO: 1381785 - RNA, 19 nt, Artificial Sequence
  Description of Artificial Sequence: Synthetic oligonucleotide
gacgaggagaaaucagacu

SEQ ID NO: 1381786 - RNA, 19 nt, Artificial Sequence
  Description of Artificial Sequence: Synthetic oligonucleotide
cuuaguccuugaaccccag

SEQ ID NO: 1381787 - RNA, 19 nt, Artificial Sequence
  Description of Artificial Sequence: Synthetic oligonucleotide
acucugggacuuguaaucu

SEQ ID NO: 1381788 - RNA, 19 nt, Artificial Sequence
  Description of Artificial Sequence: Synthetic oligonucleotide
cagcuaaagugagggagag

SEQ ID NO: 1381789 - RNA, 19 nt, Artificial Sequence
  Description of Artificial Sequence: Synthetic oligonucleotide
cugcggaaagugaauguga

SEQ ID NO: 1381790 - RNA, 19 nt, Artificial Sequence
  Description of Artificial Sequence: Synthetic oligonucleotide
ggguaugcucacuccaacc

SEQ ID NO: 1381791 - RNA, 19 nt, Artificial Sequence
  Description of Artificial Sequence: Synthetic oligonucleotide
acucagcuaaagugaggga

SEQ ID NO: 1381792 - RNA, 19 nt, Artificial Sequence
  Description of Artificial Sequence: Synthetic oligonucleotide
caacucuguauccaggaua

SEQ ID NO: 1381793 - RNA, 19 nt, Artificial Sequence
  Description of Artificial Sequence: Synthetic oligonucleotide
uucccuugagucugagcuc

SEQ ID NO: 1381794 - RNA, 19 nt, Artificial Sequence
  Description of Artificial Sequence: Synthetic oligonucleotide
cauugauugugacugacuu

SEQ ID NO: 1381795 - RNA, 19 nt, Artificial Sequence
  Description of Artificial Sequence: Synthetic oligonucleotide
cauaccuacuccauccacu

SEQ ID NO: 1381796 - RNA, 19 nt, Artificial Sequence
  Description of Artificial Sequence: Synthetic oligonucleotide
guacaccauugauugugac

SEQ ID NO: 1381797 - RNA, 19 nt, Artificial Sequence
  Description of Artificial Sequence: Synthetic oligonucleotide
ggaaacgcccucucagaug

SEQ ID NO: 1381798 - RNA, 19 nt, Artificial Sequence
  Description of Artificial Sequence: Synthetic oligonucleotide
ggacggaagacaggagucg

SEQ ID NO: 1381799 - RNA, 19 nt, Artificial Sequence
  Description of Artificial Sequence: Synthetic oligonucleotide
gucuagcaagaaguauuag

SEQ ID NO: 1381800 - RNA, 19 nt, Artificial Sequence
  Description of Artificial Sequence: Synthetic oligonucleotide
agaugcuacgggacuuggg

SEQ ID NO: 1381801 - RNA, 19 nt, Artificial Sequence
  Description of Artificial Sequence: Synthetic oligonucleotide
ugggucuagcaagaaguau

SEQ ID NO: 1381802 - RNA, 19 nt, Artificial Sequence
  Description of Artificial Sequence: Synthetic oligonucleotide
acagaacgaaaagcaccag

SEQ ID NO: 1381803 - RNA, 19 nt, Artificial Sequence
  Description of Artificial Sequence: Synthetic oligonucleotide
ucggcuggaccugugugcu

SEQ ID NO: 1381804 - RNA, 19 nt, Artificial Sequence
  Description of Artificial Sequence: Synthetic oligonucleotide
aagccaggucccacgccac

SEQ ID NO: 1381805 - RNA, 19 nt, Artificial Sequence
  Description of Artificial Sequence: Synthetic oligonucleotide
ugcucacgacggcucagcu

SEQ ID NO: 1381806 - RNA, 19 nt, Artificial Sequence
  Description of Artificial Sequence: Synthetic oligonucleotide
uccuuggacaaagguagua

SEQ ID NO: 1381807 - RNA, 19 nt, Artificial Sequence
  Description of Artificial Sequence: Synthetic oligonucleotide
agaaagggccggagugucg

SEQ ID NO: 1381808 - RNA, 19 nt, Artificial Sequence
  Description of Artificial Sequence: Synthetic oligonucleotide
ccuuggacaaagguaguag

SEQ ID NO: 1381809 - RNA, 19 nt, Artificial Sequence
  Description of Artificial Sequence: Synthetic oligonucleotide
gguaugcucacuccaaccu

SEQ ID NO: 1381810 - RNA, 19 nt, Artificial Sequence
  Description of Artificial Sequence: Synthetic oligonucleotide
gcugcggaaagugaaugug

SEQ ID NO: 1381811 - RNA, 19 nt, Artificial Sequence
  Description of Artificial Sequence: Synthetic oligonucleotide
cuguagagacagaacgaaa

SEQ ID NO: 1381812 - RNA, 19 nt, Artificial Sequence
  Description of Artificial Sequence: Synthetic oligonucleotide
ucggggcugcggaaaguga

SEQ ID NO: 1381813 - RNA, 19 nt, Artificial Sequence
  Description of Artificial Sequence: Synthetic oligonucleotide
caaccugggucuagcaaga

SEQ ID NO: 1381814 - RNA, 19 nt, Artificial Sequence
  Description of Artificial Sequence: Synthetic oligonucleotide
gucuccacucccgaagaac

SEQ ID NO: 1381815 - RNA, 19 nt, Artificial Sequence
  Description of Artificial Sequence: Synthetic oligonucleotide
  modified_base (5)..(5): a, c, u, g, unknown or other
ccganaaggggcccaauuc

SEQ ID NO: 1381816 - RNA, 19 nt, Artificial Sequence
  Description of Artificial Sequence: Synthetic oligonucleotide
gcggaaagugaaugugaag

SEQ ID NO: 1381817 - RNA, 19 nt, Artificial Sequence
  Description of Artificial Sequence: Synthetic oligonucleotide
cuaagacuaugggugccuc

SEQ ID NO: 1381818 - RNA, 19 nt, Artificial Sequence
  Description of Artificial Sequence: Synthetic oligonucleotide
ugcguguggugaugcggug

SEQ ID NO: 1381819 - RNA, 19 nt, Artificial Sequence
  Description of Artificial Sequence: Synthetic oligonucleotide
agacuaugggugccuccca

SEQ ID NO: 1381820 - RNA, 19 nt, Artificial Sequence
  Description of Artificial Sequence: Synthetic oligonucleotide
cggagugucgagaaccccg

SEQ ID NO: 1381821 - RNA, 19 nt, Artificial Sequence
  Description of Artificial Sequence: Synthetic oligonucleotide
acgacggcucagcuccaag

SEQ ID NO: 1381822 - RNA, 19 nt, Artificial Sequence
  Description of Artificial Sequence: Synthetic oligonucleotide
acggaagacaggagucguc

SEQ ID NO: 1381823 - RNA, 19 nt, Artificial Sequence
  Description of Artificial Sequence: Synthetic oligonucleotide
cccagucagagagugacag

SEQ ID NO: 1381824 - RNA, 19 nt, Artificial Sequence
  Description of Artificial Sequence: Synthetic oligonucleotide
ucgucggcuggaccugugu

SEQ ID NO: 1381825 - RNA, 19 nt, Artificial Sequence
  Description of Artificial Sequence: Synthetic oligonucleotide
  modified_base (3)..(3): a, c, u, g, unknown or other
ganaaggggcccaauucau

SEQ ID NO: 1381826 - RNA, 19 nt, Artificial Sequence
  Description of Artificial Sequence: Synthetic oligonucleotide
augcuacgggacuugggua

SEQ ID NO: 1381827 - RNA, 19 nt, Artificial Sequence
  Description of Artificial Sequence: Synthetic oligonucleotide
uauucccuccuagcacaug

SEQ ID NO: 1381828 - RNA, 19 nt, Artificial Sequence
  Description of Artificial Sequence: Synthetic oligonucleotide
cuucgccauacacacucca

SEQ ID NO: 1381829 - RNA, 19 nt, Artificial Sequence
  Description of Artificial Sequence: Synthetic oligonucleotide
cccaaccugaaggagacug

SEQ ID NO: 1381830 - RNA, 19 nt, Artificial Sequence
  Description of Artificial Sequence: Synthetic oligonucleotide
cuccacucccgaagaacuc

SEQ ID NO: 1381831 - RNA, 19 nt, Artificial Sequence
  Description of Artificial Sequence: Synthetic oligonucleotide
caagaucuccccagucaga

SEQ ID NO: 1381832 - RNA, 19 nt, Artificial Sequence
  Description of Artificial Sequence: Synthetic oligonucleotide
ccagucuucgccauacaca

SEQ ID NO: 1381833 - RNA, 19 nt, Artificial Sequence
  Description of Artificial Sequence: Synthetic oligonucleotide
cucggggcugcggaaagug

SEQ ID NO: 1381834 - RNA, 19 nt, Artificial Sequence
  Description of Artificial Sequence: Synthetic oligonucleotide
caggcugcccaagggaaac

SEQ ID NO: 1381835 - RNA, 19 nt, Artificial Sequence
  Description of Artificial Sequence: Synthetic oligonucleotide
ccggaagacuuccucgggg

SEQ ID NO: 1381836 - RNA, 19 nt, Artificial Sequence
  Description of Artificial Sequence: Synthetic oligonucleotide
gacaaagguaguagcugua

SEQ ID NO: 1381837 - RNA, 19 nt, Artificial Sequence
  Description of Artificial Sequence: Synthetic oligonucleotide
cuagcuuuggugggucuca

SEQ ID NO: 1381838 - RNA, 19 nt, Artificial Sequence
  Description of Artificial Sequence: Synthetic oligonucleotide
cgccauacacacuccagcc

SEQ ID NO: 1381839 - RNA, 19 nt, Artificial Sequence
  Description of Artificial Sequence: Synthetic oligonucleotide
ggauaagagcuaucagaaa

SEQ ID NO: 1381840 - RNA, 19 nt, Artificial Sequence
  Description of Artificial Sequence: Synthetic oligonucleotide
ccugggauaagagcuauca

SEQ ID NO: 1381841 - RNA, 19 nt, Artificial Sequence
  Description of Artificial Sequence: Synthetic oligonucleotide
ccgggacugaaggagaaag

SEQ ID NO: 1381842 - RNA, 19 nt, Artificial Sequence
  Description of Artificial Sequence: Synthetic oligonucleotide
cuacgggacuuggguaugc

SEQ ID NO: 1381843 - RNA, 19 nt, Artificial Sequence
  Description of Artificial Sequence: Synthetic oligonucleotide
  modified_base (4)..(4): a, c, u, g, unknown or other
cganaaggggcccaauuca

SEQ ID NO: 1381844 - RNA, 19 nt, Artificial Sequence
  Description of Artificial Sequence: Synthetic oligonucleotide
acaggagucgucggcugga

SEQ ID NO: 1381845 - RNA, 19 nt, Artificial Sequence
  Description of Artificial Sequence: Synthetic oligonucleotide
ugccagucuucgccauaca

SEQ ID NO: 1381846 - RNA, 19 nt, Artificial Sequence
  Description of Artificial Sequence: Synthetic oligonucleotide
gggacuuggguaugcucac

SEQ ID NO: 1381847 - RNA, 19 nt, Artificial Sequence
  Description of Artificial Sequence: Synthetic oligonucleotide
cugcucacgacggcucagc

SEQ ID NO: 1381848 - RNA, 19 nt, Artificial Sequence
  Description of Artificial Sequence: Synthetic oligonucleotide
caccacccaggccccagcc

SEQ ID NO: 1381849 - RNA, 19 nt, Artificial Sequence
  Description of Artificial Sequence: Synthetic oligonucleotide
cgacgaggagaaaucagac

SEQ ID NO: 1381850 - RNA, 19 nt, Artificial Sequence
  Description of Artificial Sequence: Synthetic oligonucleotide
gcccagcuuuauaauagag

SEQ ID NO: 1381851 - RNA, 19 nt, Artificial Sequence
  Description of Artificial Sequence: Synthetic oligonucleotide
auccucagaagggcugcug

SEQ ID NO: 1381852 - RNA, 19 nt, Artificial Sequence
  Description of Artificial Sequence: Synthetic oligonucleotide
caaccugaaggagacugaa

SEQ ID NO: 1381853 - RNA, 19 nt, Artificial Sequence
  Description of Artificial Sequence: Synthetic oligonucleotide
cuugaaccccaggcugccc

SEQ ID NO: 1381854 - RNA, 19 nt, Artificial Sequence
  Description of Artificial Sequence: Synthetic oligonucleotide
agcuaaagugagggagaga

SEQ ID NO: 1381855 - RNA, 19 nt, Artificial Sequence
  Description of Artificial Sequence: Synthetic oligonucleotide
caugccauaccuacuccau

SEQ ID NO: 1381856 - RNA, 19 nt, Artificial Sequence
  Description of Artificial Sequence: Synthetic oligonucleotide
aggcugcccaagggaaacg

SEQ ID NO: 1381857 - RNA, 19 nt, Artificial Sequence
  Description of Artificial Sequence: Synthetic oligonucleotide
gggacggaagacaggaguc

SEQ ID NO: 1381858 - RNA, 19 nt, Artificial Sequence
  Description of Artificial Sequence: Synthetic oligonucleotide
cacgccaccaguuucuguu

SEQ ID NO: 1381859 - RNA, 19 nt, Artificial Sequence
  Description of Artificial Sequence: Synthetic oligonucleotide
  modified_base (9)..(9): a, c, u, g, unknown or other
agcuccganaaggggccca

SEQ ID NO: 1381860 - RNA, 19 nt, Artificial Sequence
  Description of Artificial Sequence: Synthetic oligonucleotide
ggucuagcaagaaguauua

SEQ ID NO: 1381861 - RNA, 19 nt, Artificial Sequence
  Description of Artificial Sequence: Synthetic oligonucleotide
ggcuaagacuaugggugcc

SEQ ID NO: 1381862 - RNA, 19 nt, Artificial Sequence
  Description of Artificial Sequence: Synthetic oligonucleotide
gguacaccauugauuguga

SEQ ID NO: 1381863 - RNA, 19 nt, Artificial Sequence
  Description of Artificial Sequence: Synthetic oligonucleotide
gucgagaaccccgguucug

SEQ ID NO: 1381864 - RNA, 19 nt, Artificial Sequence
  Description of Artificial Sequence: Synthetic oligonucleotide
ccgaagaacucccggaaga

SEQ ID NO: 1381865 - RNA, 19 nt, Artificial Sequence
  Description of Artificial Sequence: Synthetic oligonucleotide
gacggaagacaggagucgu

SEQ ID NO: 1381866 - RNA, 19 nt, Artificial Sequence
  Description of Artificial Sequence: Synthetic oligonucleotide
ccacucccgaagaacuccc

SEQ ID NO: 1381867 - RNA, 19 nt, Artificial Sequence
  Description of Artificial Sequence: Synthetic oligonucleotide
ccauaccuacuccauccac

SEQ ID NO: 1381868 - RNA, 19 nt, Artificial Sequence
  Description of Artificial Sequence: Synthetic oligonucleotide
gcgguguccuuggacaaag

SEQ ID NO: 1381869 - RNA, 19 nt, Artificial Sequence
  Description of Artificial Sequence: Synthetic oligonucleotide
gaaagccauucaagcaaua

SEQ ID NO: 1381870 - RNA, 19 nt, Artificial Sequence
  Description of Artificial Sequence: Synthetic oligonucleotide
ggggacggaagacaggagu

SEQ ID NO: 1381871 - RNA, 19 nt, Artificial Sequence
  Description of Artificial Sequence: Synthetic oligonucleotide
gggcccaauucaucaaaga

SEQ ID NO: 1381872 - RNA, 19 nt, Artificial Sequence
  Description of Artificial Sequence: Synthetic oligonucleotide
aggcuagugccaggucauc

SEQ ID NO: 1381873 - RNA, 19 nt, Artificial Sequence
  Description of Artificial Sequence: Synthetic oligonucleotide
cuugucagguuuggaacua

SEQ ID NO: 1381874 - RNA, 19 nt, Artificial Sequence
  Description of Artificial Sequence: Synthetic oligonucleotide
ugcgguguccuuggacaaa

SEQ ID NO: 1381875 - RNA, 19 nt, Artificial Sequence
  Description of Artificial Sequence: Synthetic oligonucleotide
cgacggcucagcuccaagg

SEQ ID NO: 1381876 - RNA, 19 nt, Artificial Sequence
  Description of Artificial Sequence: Synthetic oligonucleotide
cccgaagaacucccggaag

SEQ ID NO: 1381877 - RNA, 19 nt, Artificial Sequence
  Description of Artificial Sequence: Synthetic oligonucleotide
aaccugggucuagcaagaa

SEQ ID NO: 1381878 - RNA, 19 nt, Artificial Sequence
  Description of Artificial Sequence: Synthetic oligonucleotide
cuguuugagagggaacacu

SEQ ID NO: 1381879 - RNA, 19 nt, Artificial Sequence
  Description of Artificial Sequence: Synthetic oligonucleotide
caccauugauugugacuga

SEQ ID NO: 1381880 - RNA, 19 nt, Artificial Sequence
  Description of Artificial Sequence: Synthetic oligonucleotide
cugcguguggugaugcggu

SEQ ID NO: 1381881 - RNA, 19 nt, Artificial Sequence
  Description of Artificial Sequence: Synthetic oligonucleotide
caucugguacaccauugau

SEQ ID NO: 1381882 - RNA, 19 nt, Artificial Sequence
  Description of Artificial Sequence: Synthetic oligonucleotide
agggcgcuguccuguugga

SEQ ID NO: 1381883 - RNA, 19 nt, Artificial Sequence
  Description of Artificial Sequence: Synthetic oligonucleotide
cuccaaccugggucuagca

SEQ ID NO: 1381884 - RNA, 19 nt, Artificial Sequence
  Description of Artificial Sequence: Synthetic oligonucleotide
ccaugccauaccuacucca

SEQ ID NO: 1381885 - RNA, 19 nt, Artificial Sequence
  Description of Artificial Sequence: Synthetic oligonucleotide
cacccaggggagagaguuc

SEQ ID NO: 1381886 - RNA, 19 nt, Artificial Sequence
  Description of Artificial Sequence: Synthetic oligonucleotide
cacuagcuuaguccuugaa

SEQ ID NO: 1381887 - RNA, 19 nt, Artificial Sequence
  Description of Artificial Sequence: Synthetic oligonucleotide
aggggacggaagacaggag

SEQ ID NO: 1381888 - RNA, 19 nt, Artificial Sequence
  Description of Artificial Sequence: Synthetic oligonucleotide
gggucuagcaagaaguauu

SEQ ID NO: 1381889 - RNA, 19 nt, Artificial Sequence
  Description of Artificial Sequence: Synthetic oligonucleotide
gaaccccgguucugaagcu

SEQ ID NO: 1381890 - RNA, 19 nt, Artificial Sequence
  Description of Artificial Sequence: Synthetic oligonucleotide
gccauaccuacuccaucca

SEQ ID NO: 1381891 - RNA, 19 nt, Artificial Sequence
  Description of Artificial Sequence: Synthetic oligonucleotide
agucuucgccauacacacu

SEQ ID NO: 1381892 - RNA, 19 nt, Artificial Sequence
  Description of Artificial Sequence: Synthetic oligonucleotide
cuggaccugugugcucccc

SEQ ID NO: 1381893 - RNA, 19 nt, Artificial Sequence
  Description of Artificial Sequence: Synthetic oligonucleotide
gcugcccaagggaaacgcc

SEQ ID NO: 1381894 - RNA, 19 nt, Artificial Sequence
  Description of Artificial Sequence: Synthetic oligonucleotide
ccaagggaaacgcccucuc

SEQ ID NO: 1381895 - RNA, 19 nt, Artificial Sequence
  Description of Artificial Sequence: Synthetic oligonucleotide
ccuugaaccccaggcugcc

SEQ ID NO: 1381896 - RNA, 19 nt, Artificial Sequence
  Description of Artificial Sequence: Synthetic oligonucleotide
ccaaccugaaggagacuga

SEQ ID NO: 1381897 - RNA, 19 nt, Artificial Sequence
  Description of Artificial Sequence: Synthetic oligonucleotide
aaacgcccucucagaugcu

SEQ ID NO: 1381898 - RNA, 19 nt, Artificial Sequence
  Description of Artificial Sequence: Synthetic oligonucleotide
caggagucgucggcuggac

SEQ ID NO: 1381899 - RNA, 19 nt, Artificial Sequence
  Description of Artificial Sequence: Synthetic oligonucleotide
ggaccugugugcuccccaa

SEQ ID NO: 1381900 - RNA, 19 nt, Artificial Sequence
  Description of Artificial Sequence: Synthetic oligonucleotide
caggaccaugccauaccua

SEQ ID NO: 1381901 - RNA, 19 nt, Artificial Sequence
  Description of Artificial Sequence: Synthetic oligonucleotide
gcuacgggacuuggguaug

SEQ ID NO: 1381902 - RNA, 19 nt, Artificial Sequence
  Description of Artificial Sequence: Synthetic oligonucleotide
cguguggugaugcgguguc

SEQ ID NO: 1381903 - RNA, 19 nt, Artificial Sequence
  Description of Artificial Sequence: Synthetic oligonucleotide
gagugucgagaaccccggu

SEQ ID NO: 1381904 - RNA, 19 nt, Artificial Sequence
  Description of Artificial Sequence: Synthetic oligonucleotide
gguggcucauggaggguga

SEQ ID NO: 1381905 - RNA, 19 nt, Artificial Sequence
  Description of Artificial Sequence: Synthetic oligonucleotide
aggucccacgccaccaguu

SEQ ID NO: 1381906 - RNA, 19 nt, Artificial Sequence
  Description of Artificial Sequence: Synthetic oligonucleotide
ccccgguucugaagcuccg

SEQ ID NO: 1381907 - RNA, 19 nt, Artificial Sequence
  Description of Artificial Sequence: Synthetic oligonucleotide
gcccuacacucagcuaaag

SEQ ID NO: 1381908 - RNA, 19 nt, Artificial Sequence
  Description of Artificial Sequence: Synthetic oligonucleotide
auccacuagcuuaguccuu

SEQ ID NO: 1381909 - RNA, 19 nt, Artificial Sequence
  Description of Artificial Sequence: Synthetic oligonucleotide
gucgucggcuggaccugug

SEQ ID NO: 1381910 - RNA, 19 nt, Artificial Sequence
  Description of Artificial Sequence: Synthetic oligonucleotide
cgucggcuggaccugugug

SEQ ID NO: 1381911 - RNA, 19 nt, Artificial Sequence
  Description of Artificial Sequence: Synthetic oligonucleotide
ccggagugucgagaacccc

SEQ ID NO: 1381912 - RNA, 19 nt, Artificial Sequence
  Description of Artificial Sequence: Synthetic oligonucleotide
cccuugagucugagcucag

SEQ ID NO: 1381913 - RNA, 19 nt, Artificial Sequence
  Description of Artificial Sequence: Synthetic oligonucleotide
cccuacacucagcuaaagu

SEQ ID NO: 1381914 - RNA, 19 nt, Artificial Sequence
  Description of Artificial Sequence: Synthetic oligonucleotide
guggcucauggagggugaa

SEQ ID NO: 1381915 - RNA, 19 nt, Artificial Sequence
  Description of Artificial Sequence: Synthetic oligonucleotide
gggccggagugucgagaac

SEQ ID NO: 1381916 - RNA, 19 nt, Artificial Sequence
  Description of Artificial Sequence: Synthetic oligonucleotide
ccacuagcuuaguccuuga

SEQ ID NO: 1381917 - RNA, 19 nt, Artificial Sequence
  Description of Artificial Sequence: Synthetic oligonucleotide
caccccugcccagggacaa

SEQ ID NO: 1381918 - RNA, 19 nt, Artificial Sequence
  Description of Artificial Sequence: Synthetic oligonucleotide
ggaccaugccauaccuacu

SEQ ID NO: 1381919 - RNA, 19 nt, Artificial Sequence
  Description of Artificial Sequence: Synthetic oligonucleotide
cggggcugcggaaagugaa

SEQ ID NO: 1381920 - RNA, 19 nt, Artificial Sequence
  Description of Artificial Sequence: Synthetic oligonucleotide
  modified_base (8)..(8): a, c, u, g, unknown or other
gcuccganaaggggcccaa

SEQ ID NO: 1381921 - RNA, 19 nt, Artificial Sequence
  Description of Artificial Sequence: Synthetic oligonucleotide
cuacuccauccacuagcuu

SEQ ID NO: 1381922 - RNA, 19 nt, Artificial Sequence
  Description of Artificial Sequence: Synthetic oligonucleotide
ccccagucagagagugaca

SEQ ID NO: 1381923 - RNA, 19 nt, Artificial Sequence
  Description of Artificial Sequence: Synthetic oligonucleotide
ggacuuggguaugcucacu

SEQ ID NO: 1381924 - RNA, 19 nt, Artificial Sequence
  Description of Artificial Sequence: Synthetic oligonucleotide
gcguguggugaugcggugu

SEQ ID NO: 1381925 - RNA, 19 nt, Artificial Sequence
  Description of Artificial Sequence: Synthetic oligonucleotide
ccccgggacugaaggagaa

SEQ ID NO: 1381926 - RNA, 19 nt, Artificial Sequence
  Description of Artificial Sequence: Synthetic oligonucleotide
  modified_base (7)..(7): a, c, u, g, unknown or other
cuccganaaggggcccaau

SEQ ID NO: 1381927 - RNA, 19 nt, Artificial Sequence
  Description of Artificial Sequence: Synthetic oligonucleotide
cccgguucugaagcuccga

SEQ ID NO: 1381928 - RNA, 19 nt, Artificial Sequence
  Description of Artificial Sequence: Synthetic oligonucleotide
cccgggacugaaggagaaa

SEQ ID NO: 1381929 - RNA, 19 nt, Artificial Sequence
  Description of Artificial Sequence: Synthetic oligonucleotide
ccacgccaccaguuucugu

SEQ ID NO: 1381930 - RNA, 19 nt, Artificial Sequence
  Description of Artificial Sequence: Synthetic oligonucleotide
ccucggggcugcggaaagu

SEQ ID NO: 1381931 - RNA, 19 nt, Artificial Sequence
  Description of Artificial Sequence: Synthetic oligonucleotide
ccccaaccugaaggagacu

SEQ ID NO: 1381932 - RNA, 19 nt, Artificial Sequence
  Description of Artificial Sequence: Synthetic oligonucleotide
uggaaaaugaugaugauag

SEQ ID NO: 1381933 - RNA, 19 nt, Artificial Sequence
  Description of Artificial Sequence: Synthetic oligonucleotide
auacguauuuucuaaaggc

SEQ ID NO: 1381934 - RNA, 19 nt, Artificial Sequence
  Description of Artificial Sequence: Synthetic oligonucleotide
uuuucuaccaagcagcuca

SEQ ID NO: 1381935 - RNA, 19 nt, Artificial Sequence
  Description of Artificial Sequence: Synthetic oligonucleotide
aaaugaugaugauagauca

SEQ ID NO: 1381936 - RNA, 19 nt, Artificial Sequence
  Description of Artificial Sequence: Synthetic oligonucleotide
ugauagaucaucaucuucc

SEQ ID NO: 1381937 - RNA, 19 nt, Artificial Sequence
  Description of Artificial Sequence: Synthetic oligonucleotide
gaugauaucaucuggcaag

SEQ ID NO: 1381938 - RNA, 19 nt, Artificial Sequence
  Description of Artificial Sequence: Synthetic oligonucleotide
aguguuucaauuucaauuc

SEQ ID NO: 1381939 - RNA, 19 nt, Artificial Sequence
  Description of Artificial Sequence: Synthetic oligonucleotide
uguaguagaauacuggcug

SEQ ID NO: 1381940 - RNA, 19 nt, Artificial Sequence
  Description of Artificial Sequence: Synthetic oligonucleotide
uauacguauuuucuaaagg

SEQ ID NO: 1381941 - RNA, 19 nt, Artificial Sequence
  Description of Artificial Sequence: Synthetic oligonucleotide
aguuccuuggcuuuggucg

SEQ ID NO: 1381942 - RNA, 19 nt, Artificial Sequence
  Description of Artificial Sequence: Synthetic oligonucleotide
uuugcauggaagcaaauca

SEQ ID NO: 1381943 - RNA, 19 nt, Artificial Sequence
  Description of Artificial Sequence: Synthetic oligonucleotide
ugaugauagaucaucaucu

SEQ ID NO: 1381944 - RNA, 19 nt, Artificial Sequence
  Description of Artificial Sequence: Synthetic oligonucleotide
uucaauagaagucccauga

SEQ ID NO: 1381945 - RNA, 19 nt, Artificial Sequence
  Description of Artificial Sequence: Synthetic oligonucleotide
ugaagguacaaaaugcaag

SEQ ID NO: 1381946 - RNA, 19 nt, Artificial Sequence
  Description of Artificial Sequence: Synthetic oligonucleotide
uugacuuaaguuccgagag

SEQ ID NO: 1381947 - RNA, 19 nt, Artificial Sequence
  Description of Artificial Sequence: Synthetic oligonucleotide
acguuagaaauacugaagg

SEQ ID NO: 1381948 - RNA, 19 nt, Artificial Sequence
  Description of Artificial Sequence: Synthetic oligonucleotide
acugaauauacguauuuuc

SEQ ID NO: 1381949 - RNA, 19 nt, Artificial Sequence
  Description of Artificial Sequence: Synthetic oligonucleotide
acauuuggcuauuuugucc

SEQ ID NO: 1381950 - RNA, 19 nt, Artificial Sequence
  Description of Artificial Sequence: Synthetic oligonucleotide
agcauaaugacccacugug

SEQ ID NO: 1381951 - RNA, 19 nt, Artificial Sequence
  Description of Artificial Sequence: Synthetic oligonucleotide
agaucgacccaauucaugg

SEQ ID NO: 1381952 - RNA, 19 nt, Artificial Sequence
  Description of Artificial Sequence: Synthetic oligonucleotide
aguuuugcggcauccauac

SEQ ID NO: 1381953 - RNA, 19 nt, Artificial Sequence
  Description of Artificial Sequence: Synthetic oligonucleotide
agaagcaccaaguuuugcg

SEQ ID NO: 1381954 - RNA, 19 nt, Artificial Sequence
  Description of Artificial Sequence: Synthetic oligonucleotide
ucccuuuggaaaaugauga

SEQ ID NO: 1381955 - RNA, 19 nt, Artificial Sequence
  Description of Artificial Sequence: Synthetic oligonucleotide
ucuaccaagcagcucaucc

SEQ ID NO: 1381956 - RNA, 19 nt, Artificial Sequence
  Description of Artificial Sequence: Synthetic oligonucleotide
ucagaauaucaucauaccu

SEQ ID NO: 1381957 - RNA, 19 nt, Artificial Sequence
  Description of Artificial Sequence: Synthetic oligonucleotide
ucuuagaugggacacauuu

SEQ ID NO: 1381958 - RNA, 19 nt, Artificial Sequence
  Description of Artificial Sequence: Synthetic oligonucleotide
caugacguuagaaauacug

SEQ ID NO: 1381959 - RNA, 19 nt, Artificial Sequence
  Description of Artificial Sequence: Synthetic oligonucleotide
aacuucauaaauggccacc

SEQ ID NO: 1381960 - RNA, 19 nt, Artificial Sequence
  Description of Artificial Sequence: Synthetic oligonucleotide
agucccaugaucauaagac

SEQ ID NO: 1381961 - RNA, 19 nt, Artificial Sequence
  Description of Artificial Sequence: Synthetic oligonucleotide
cagaauaucaucauaccuc

SEQ ID NO: 1381962 - RNA, 19 nt, Artificial Sequence
  Description of Artificial Sequence: Synthetic oligonucleotide
aaaacuucauaaauggcca

SEQ ID NO: 1381963 - RNA, 19 nt, Artificial Sequence
  Description of Artificial Sequence: Synthetic oligonucleotide
ugaacauuugacuuaaguu

SEQ ID NO: 1381964 - RNA, 19 nt, Artificial Sequence
  Description of Artificial Sequence: Synthetic oligonucleotide
uguaucuagcaauacaguc

SEQ ID NO: 1381965 - RNA, 19 nt, Artificial Sequence
  Description of Artificial Sequence: Synthetic oligonucleotide
aaacuucauaaauggccac

SEQ ID NO: 1381966 - RNA, 19 nt, Artificial Sequence
  Description of Artificial Sequence: Synthetic oligonucleotide
agaauaucaucauaccucu

SEQ ID NO: 1381967 - RNA, 19 nt, Artificial Sequence
  Description of Artificial Sequence: Synthetic oligonucleotide
uaaaguuacucccuuugga

SEQ ID NO: 1381968 - RNA, 19 nt, Artificial Sequence
  Description of Artificial Sequence: Synthetic oligonucleotide
uacguauuuucuaaaggca

SEQ ID NO: 1381969 - RNA, 19 nt, Artificial Sequence
  Description of Artificial Sequence: Synthetic oligonucleotide
cauuuggcuauuuuguccc

SEQ ID NO: 1381970 - RNA, 19 nt, Artificial Sequence
  Description of Artificial Sequence: Synthetic oligonucleotide
uuucccaucgaccuggggu

SEQ ID NO: 1381971 - RNA, 19 nt, Artificial Sequence
  Description of Artificial Sequence: Synthetic oligonucleotide
auauacaggaaauucuggu

SEQ ID NO: 1381972 - RNA, 19 nt, Artificial Sequence
  Description of Artificial Sequence: Synthetic oligonucleotide
aucgacccaauucaugggc

SEQ ID NO: 1381973 - RNA, 19 nt, Artificial Sequence
  Description of Artificial Sequence: Synthetic oligonucleotide
uuuugcggcauccauacuc

SEQ ID NO: 1381974 - RNA, 19 nt, Artificial Sequence
  Description of Artificial Sequence: Synthetic oligonucleotide
aaugccagcucaguaucgc

SEQ ID NO: 1381975 - RNA, 19 nt, Artificial Sequence
  Description of Artificial Sequence: Synthetic oligonucleotide
cuaaaggcauauauacagg

SEQ ID NO: 1381976 - RNA, 19 nt, Artificial Sequence
  Description of Artificial Sequence: Synthetic oligonucleotide
cauaaugacccacugugag

SEQ ID NO: 1381977 - RNA, 19 nt, Artificial Sequence
  Description of Artificial Sequence: Synthetic oligonucleotide
ucccaugaucauaagacug

SEQ ID NO: 1381978 - RNA, 19 nt, Artificial Sequence
  Description of Artificial Sequence: Synthetic oligonucleotide
agguagauugaccaaacca

SEQ ID NO: 1381979 - RNA, 19 nt, Artificial Sequence
  Description of Artificial Sequence: Synthetic oligonucleotide
caaucuuuucccaucgacc

SEQ ID NO: 1381980 - RNA, 19 nt, Artificial Sequence
  Description of Artificial Sequence: Synthetic oligonucleotide
ugaugaugauagaucauca

SEQ ID NO: 1381981 - RNA, 19 nt, Artificial Sequence
  Description of Artificial Sequence: Synthetic oligonucleotide
gauugaccaaaccacagca

SEQ ID NO: 1381982 - RNA, 19 nt, Artificial Sequence
  Description of Artificial Sequence: Synthetic oligonucleotide
auugaucagaauaucauca

SEQ ID NO: 1381983 - RNA, 19 nt, Artificial Sequence
  Description of Artificial Sequence: Synthetic oligonucleotide
acugugagaauaaugaaca

SEQ ID NO: 1381984 - RNA, 19 nt, Artificial Sequence
  Description of Artificial Sequence: Synthetic oligonucleotide
gacuuaaguuccgagagcc

SEQ ID NO: 1381985 - RNA, 19 nt, Artificial Sequence
  Description of Artificial Sequence: Synthetic oligonucleotide
ugagaauaaugaacaggag

SEQ ID NO: 1381986 - RNA, 19 nt, Artificial Sequence
  Description of Artificial Sequence: Synthetic oligonucleotide
ugacuuucgccuccgaagc

SEQ ID NO: 1381987 - RNA, 19 nt, Artificial Sequence
  Description of Artificial Sequence: Synthetic oligonucleotide
cauggaagcaaaucaugcc

SEQ ID NO: 1381988 - RNA, 19 nt, Artificial Sequence
  Description of Artificial Sequence: Synthetic oligonucleotide
aagcaaaucaugccauugu

SEQ ID NO: 1381989 - RNA, 19 nt, Artificial Sequence
  Description of Artificial Sequence: Synthetic oligonucleotide
cagccaaucgucaauuugc

SEQ ID NO: 1381990 - RNA, 19 nt, Artificial Sequence
  Description of Artificial Sequence: Synthetic oligonucleotide
ugacguuagaaauacugaa

SEQ ID NO: 1381991 - RNA, 19 nt, Artificial Sequence
  Description of Artificial Sequence: Synthetic oligonucleotide
gugagaauaaugaacagga

SEQ ID NO: 1381992 - RNA, 19 nt, Artificial Sequence
  Description of Artificial Sequence: Synthetic oligonucleotide
cuaaaguuacucccuuugg

SEQ ID NO: 1381993 - RNA, 19 nt, Artificial Sequence
  Description of Artificial Sequence: Synthetic oligonucleotide
uuuggaccaguucaaccag

SEQ ID NO: 1381994 - RNA, 19 nt, Artificial Sequence
  Description of Artificial Sequence: Synthetic oligonucleotide
aauaaugaacaggaguaau

SEQ ID NO: 1381995 - RNA, 19 nt, Artificial Sequence
  Description of Artificial Sequence: Synthetic oligonucleotide
uaucuagcaauacagucuu

SEQ ID NO: 1381996 - RNA, 19 nt, Artificial Sequence
  Description of Artificial Sequence: Synthetic oligonucleotide
ucacagaucgacccaauuc

SEQ ID NO: 1381997 - RNA, 19 nt, Artificial Sequence
  Description of Artificial Sequence: Synthetic oligonucleotide
gacguuagaaauacugaag

SEQ ID NO: 1381998 - RNA, 19 nt, Artificial Sequence
  Description of Artificial Sequence: Synthetic oligonucleotide
uguaaggcaaaaccaaauu

SEQ ID NO: 1381999 - RNA, 19 nt, Artificial Sequence
  Description of Artificial Sequence: Synthetic oligonucleotide
uguagcucgaguucuuucu

SEQ ID NO: 1382000 - RNA, 19 nt, Artificial Sequence
  Description of Artificial Sequence: Synthetic oligonucleotide
aauuucaauucuagccagg

SEQ ID NO: 1382001 - RNA, 19 nt, Artificial Sequence
  Description of Artificial Sequence: Synthetic oligonucleotide
uacaaaaugcaaguuucug

SEQ ID NO: 1382002 - RNA, 19 nt, Artificial Sequence
  Description of Artificial Sequence: Synthetic oligonucleotide
ugagauuucuaaaguuacu

SEQ ID NO: 1382003 - RNA, 19 nt, Artificial Sequence
  Description of Artificial Sequence: Synthetic oligonucleotide
cauaaauggccaccaauug

SEQ ID NO: 1382004 - RNA, 19 nt, Artificial Sequence
  Description of Artificial Sequence: Synthetic oligonucleotide
ugcauaaaacugcccagca

SEQ ID NO: 1382005 - RNA, 19 nt, Artificial Sequence
  Description of Artificial Sequence: Synthetic oligonucleotide
uagaauacuggcugucgcc

SEQ ID NO: 1382006 - RNA, 19 nt, Artificial Sequence
  Description of Artificial Sequence: Synthetic oligonucleotide
gauuagaugaggcaaugcu

SEQ ID NO: 1382007 - RNA, 19 nt, Artificial Sequence
  Description of Artificial Sequence: Synthetic oligonucleotide
uuucaauucuagccagggc

SEQ ID NO: 1382008 - RNA, 19 nt, Artificial Sequence
  Description of Artificial Sequence: Synthetic oligonucleotide
agcaaaucaugccauugug

SEQ ID NO: 1382009 - RNA, 19 nt, Artificial Sequence
  Description of Artificial Sequence: Synthetic oligonucleotide
uagaaauacugaagguaca

SEQ ID NO: 1382010 - RNA, 19 nt, Artificial Sequence
  Description of Artificial Sequence: Synthetic oligonucleotide
cucccuuuggaaaaugaug

SEQ ID NO: 1382011 - RNA, 19 nt, Artificial Sequence
  Description of Artificial Sequence: Synthetic oligonucleotide
uuaaguuccgagagccuga

SEQ ID NO: 1382012 - RNA, 19 nt, Artificial Sequence
  Description of Artificial Sequence: Synthetic oligonucleotide
uuguaucuagcaauacagu

SEQ ID NO: 1382013 - RNA, 19 nt, Artificial Sequence
  Description of Artificial Sequence: Synthetic oligonucleotide
ucugcaugagauuucuaaa

SEQ ID NO: 1382014 - RNA, 19 nt, Artificial Sequence
  Description of Artificial Sequence: Synthetic oligonucleotide
agagccugaccauuccugg

SEQ ID NO: 1382015 - RNA, 19 nt, Artificial Sequence
  Description of Artificial Sequence: Synthetic oligonucleotide
aguagaauacuggcugucg

SEQ ID NO: 1382016 - RNA, 19 nt, Artificial Sequence
  Description of Artificial Sequence: Synthetic oligonucleotide
ugggaacuuaaccauaguu

SEQ ID NO: 1382017 - RNA, 19 nt, Artificial Sequence
  Description of Artificial Sequence: Synthetic oligonucleotide
uuugcggcauccauacucu

SEQ ID NO: 1382018 - RNA, 19 nt, Artificial Sequence
  Description of Artificial Sequence: Synthetic oligonucleotide
gaucgacccaauucauggg

SEQ ID NO: 1382019 - RNA, 19 nt, Artificial Sequence
  Description of Artificial Sequence: Synthetic oligonucleotide
ugacuuaaguuccgagagc

SEQ ID NO: 1382020 - RNA, 19 nt, Artificial Sequence
  Description of Artificial Sequence: Synthetic oligonucleotide
acaggaguaaugccagcuc

SEQ ID NO: 1382021 - RNA, 19 nt, Artificial Sequence
  Description of Artificial Sequence: Synthetic oligonucleotide
aaaaugcaaguuucugcau

SEQ ID NO: 1382022 - RNA, 19 nt, Artificial Sequence
  Description of Artificial Sequence: Synthetic oligonucleotide
cuuagaugggacacauuug

SEQ ID NO: 1382023 - RNA, 19 nt, Artificial Sequence
  Description of Artificial Sequence: Synthetic oligonucleotide
ugaucagaauaucaucaua

SEQ ID NO: 1382024 - RNA, 19 nt, Artificial Sequence
  Description of Artificial Sequence: Synthetic oligonucleotide
gguagauugaccaaaccac

SEQ ID NO: 1382025 - RNA, 19 nt, Artificial Sequence
  Description of Artificial Sequence: Synthetic oligonucleotide
cacaugacguuagaaauac

SEQ ID NO: 1382026 - RNA, 19 nt, Artificial Sequence
  Description of Artificial Sequence: Synthetic oligonucleotide
augauaucaucuggcaagg

SEQ ID NO: 1382027 - RNA, 19 nt, Artificial Sequence
  Description of Artificial Sequence: Synthetic oligonucleotide
gauagaucaucaucuucca

SEQ ID NO: 1382028 - RNA, 19 nt, Artificial Sequence
  Description of Artificial Sequence: Synthetic oligonucleotide
aguuacucccuuuggaaaa

SEQ ID NO: 1382029 - RNA, 19 nt, Artificial Sequence
  Description of Artificial Sequence: Synthetic oligonucleotide
uaucaucuggcaagguugu

SEQ ID NO: 1382030 - RNA, 19 nt, Artificial Sequence
  Description of Artificial Sequence: Synthetic oligonucleotide
auaaugacccacugugaga

SEQ ID NO: 1382031 - RNA, 19 nt, Artificial Sequence
  Description of Artificial Sequence: Synthetic oligonucleotide
auagaucaucaucuuccag

SEQ ID NO: 1382032 - RNA, 19 nt, Artificial Sequence
  Description of Artificial Sequence: Synthetic oligonucleotide
uuucucacucgccuguagu

SEQ ID NO: 1382033 - RNA, 19 nt, Artificial Sequence
  Description of Artificial Sequence: Synthetic oligonucleotide
uugcauaaaacugcccagc

SEQ ID NO: 1382034 - RNA, 19 nt, Artificial Sequence
  Description of Artificial Sequence: Synthetic oligonucleotide
uuuucucacucgccuguag

SEQ ID NO: 1382035 - RNA, 19 nt, Artificial Sequence
  Description of Artificial Sequence: Synthetic oligonucleotide
accaaguuuugcggcaucc

SEQ ID NO: 1382036 - RNA, 19 nt, Artificial Sequence
  Description of Artificial Sequence: Synthetic oligonucleotide
gccauugugguuuuacuag

SEQ ID NO: 1382037 - RNA, 19 nt, Artificial Sequence
  Description of Artificial Sequence: Synthetic oligonucleotide
ucacaugacguuagaaaua

SEQ ID NO: 1382038 - RNA, 19 nt, Artificial Sequence
  Description of Artificial Sequence: Synthetic oligonucleotide
cacagaucgacccaauuca

SEQ ID NO: 1382039 - RNA, 19 nt, Artificial Sequence
  Description of Artificial Sequence: Synthetic oligonucleotide
uuugggguacugcuguagu

SEQ ID NO: 1382040 - RNA, 19 nt, Artificial Sequence
  Description of Artificial Sequence: Synthetic oligonucleotide
uugaucagaauaucaucau

SEQ ID NO: 1382041 - RNA, 19 nt, Artificial Sequence
  Description of Artificial Sequence: Synthetic oligonucleotide
auuucuaaaguuacucccu

SEQ ID NO: 1382042 - RNA, 19 nt, Artificial Sequence
  Description of Artificial Sequence: Synthetic oligonucleotide
gaugggacacauuuggcua

SEQ ID NO: 1382043 - RNA, 19 nt, Artificial Sequence
  Description of Artificial Sequence: Synthetic oligonucleotide
ccaccaauugucuaaacug

SEQ ID NO: 1382044 - RNA, 19 nt, Artificial Sequence
  Description of Artificial Sequence: Synthetic oligonucleotide
cauccauacucuugcuucc

SEQ ID NO: 1382045 - RNA, 19 nt, Artificial Sequence
  Description of Artificial Sequence: Synthetic oligonucleotide
ugggguacugcuguagugc

SEQ ID NO: 1382046 - RNA, 19 nt, Artificial Sequence
  Description of Artificial Sequence: Synthetic oligonucleotide
acugaagguacaaaaugca

SEQ ID NO: 1382047 - RNA, 19 nt, Artificial Sequence
  Description of Artificial Sequence: Synthetic oligonucleotide
cugaauauacguauuuucu

SEQ ID NO: 1382048 - RNA, 19 nt, Artificial Sequence
  Description of Artificial Sequence: Synthetic oligonucleotide
guaaugccagcucaguauc

SEQ ID NO: 1382049 - RNA, 19 nt, Artificial Sequence
  Description of Artificial Sequence: Synthetic oligonucleotide
uugucuaaacugaguuucu

SEQ ID NO: 1382050 - RNA, 19 nt, Artificial Sequence
  Description of Artificial Sequence: Synthetic oligonucleotide
ucuagaaguuucugcugac

SEQ ID NO: 1382051 - RNA, 19 nt, Artificial Sequence
  Description of Artificial Sequence: Synthetic oligonucleotide
ucucacucgccuguaguag

SEQ ID NO: 1382052 - RNA, 19 nt, Artificial Sequence
  Description of Artificial Sequence: Synthetic oligonucleotide
auccuggauuagaugaggc

SEQ ID NO: 1382053 - RNA, 19 nt, Artificial Sequence
  Description of Artificial Sequence: Synthetic oligonucleotide
ugcggcauccauacucuug

SEQ ID NO: 1382054 - RNA, 19 nt, Artificial Sequence
  Description of Artificial Sequence: Synthetic oligonucleotide
ugucuaaacugaguuucug

SEQ ID NO: 1382055 - RNA, 19 nt, Artificial Sequence
  Description of Artificial Sequence: Synthetic oligonucleotide
ugccauugugguuuuacua

SEQ ID NO: 1382056 - RNA, 19 nt, Artificial Sequence
  Description of Artificial Sequence: Synthetic oligonucleotide
cugugagaauaaugaacag

SEQ ID NO: 1382057 - RNA, 19 nt, Artificial Sequence
  Description of Artificial Sequence: Synthetic oligonucleotide
cucgccuguaguagaauac

SEQ ID NO: 1382058 - RNA, 19 nt, Artificial Sequence
  Description of Artificial Sequence: Synthetic oligonucleotide
cauucuggcugacuuucgc

SEQ ID NO: 1382059 - RNA, 19 nt, Artificial Sequence
  Description of Artificial Sequence: Synthetic oligonucleotide
guagugccaguucuagaag

SEQ ID NO: 1382060 - RNA, 19 nt, Artificial Sequence
  Description of Artificial Sequence: Synthetic oligonucleotide
uacuagcaaucuuucauuu

SEQ ID NO: 1382061 - RNA, 19 nt, Artificial Sequence
  Description of Artificial Sequence: Synthetic oligonucleotide
augacguuagaaauacuga

SEQ ID NO: 1382062 - RNA, 19 nt, Artificial Sequence
  Description of Artificial Sequence: Synthetic oligonucleotide
uucccaucgaccugggguc

SEQ ID NO: 1382063 - RNA, 19 nt, Artificial Sequence
  Description of Artificial Sequence: Synthetic oligonucleotide
auugugguuuuacuagcaa

SEQ ID NO: 1382064 - RNA, 19 nt, Artificial Sequence
  Description of Artificial Sequence: Synthetic oligonucleotide
caccaauugucuaaacuga

SEQ ID NO: 1382065 - RNA, 19 nt, Artificial Sequence
  Description of Artificial Sequence: Synthetic oligonucleotide
uggauuagaugaggcaaug

SEQ ID NO: 1382066 - RNA, 19 nt, Artificial Sequence
  Description of Artificial Sequence: Synthetic oligonucleotide
ugccgaguccucccgcugg

SEQ ID NO: 1382067 - RNA, 19 nt, Artificial Sequence
  Description of Artificial Sequence: Synthetic oligonucleotide
gcaaaucaugccauugugg

SEQ ID NO: 1382068 - RNA, 19 nt, Artificial Sequence
  Description of Artificial Sequence: Synthetic oligonucleotide
accaauugucuaaacugag

SEQ ID NO: 1382069 - RNA, 19 nt, Artificial Sequence
  Description of Artificial Sequence: Synthetic oligonucleotide
agaauacuggcugucgcca

SEQ ID NO: 1382070 - RNA, 19 nt, Artificial Sequence
  Description of Artificial Sequence: Synthetic oligonucleotide
gaagccgggcuucuauggc

SEQ ID NO: 1382071 - RNA, 19 nt, Artificial Sequence
  Description of Artificial Sequence: Synthetic oligonucleotide
ggcuauuuugucccagcgg

SEQ ID NO: 1382072 - RNA, 19 nt, Artificial Sequence
  Description of Artificial Sequence: Synthetic oligonucleotide
auuuugucccagcggucag

SEQ ID NO: 1382073 - RNA, 19 nt, Artificial Sequence
  Description of Artificial Sequence: Synthetic oligonucleotide
cauccuggauuagaugagg

SEQ ID NO: 1382074 - RNA, 19 nt, Artificial Sequence
  Description of Artificial Sequence: Synthetic oligonucleotide
uccauacucuugcuuccug

SEQ ID NO: 1382075 - RNA, 19 nt, Artificial Sequence
  Description of Artificial Sequence: Synthetic oligonucleotide
auuagaugaggcaaugcuu

SEQ ID NO: 1382076 - RNA, 19 nt, Artificial Sequence
  Description of Artificial Sequence: Synthetic oligonucleotide
guuuuacuagcaaucuuuc

SEQ ID NO: 1382077 - RNA, 19 nt, Artificial Sequence
  Description of Artificial Sequence: Synthetic oligonucleotide
ucgucaauuugcuucucua

SEQ ID NO: 1382078 - RNA, 19 nt, Artificial Sequence
  Description of Artificial Sequence: Synthetic oligonucleotide
guagauugaccaaaccaca

SEQ ID NO: 1382079 - RNA, 19 nt, Artificial Sequence
  Description of Artificial Sequence: Synthetic oligonucleotide
accaaauucccaguuugca

SEQ ID NO: 1382080 - RNA, 19 nt, Artificial Sequence
  Description of Artificial Sequence: Synthetic oligonucleotide
acccaauucaugggcaauc

SEQ ID NO: 1382081 - RNA, 19 nt, Artificial Sequence
  Description of Artificial Sequence: Synthetic oligonucleotide
agcucaguaucgcucauuu

SEQ ID NO: 1382082 - RNA, 19 nt, Artificial Sequence
  Description of Artificial Sequence: Synthetic oligonucleotide
agcaccaaguuuugcggca

SEQ ID NO: 1382083 - RNA, 19 nt, Artificial Sequence
  Description of Artificial Sequence: Synthetic oligonucleotide
ugacccacugugagaauaa

SEQ ID NO: 1382084 - RNA, 19 nt, Artificial Sequence
  Description of Artificial Sequence: Synthetic oligonucleotide
guuugcauggaagcaaauc

SEQ ID NO: 1382085 - RNA, 19 nt, Artificial Sequence
  Description of Artificial Sequence: Synthetic oligonucleotide
gauaucaucuggcaagguu

SEQ ID NO: 1382086 - RNA, 19 nt, Artificial Sequence
  Description of Artificial Sequence: Synthetic oligonucleotide
guaacugaguccuucaguu

SEQ ID NO: 1382087 - RNA, 19 nt, Artificial Sequence
  Description of Artificial Sequence: Synthetic oligonucleotide
gcauccauacucuugcuuc

SEQ ID NO: 1382088 - RNA, 19 nt, Artificial Sequence
  Description of Artificial Sequence: Synthetic oligonucleotide
guaucuagcaauacagucu

SEQ ID NO: 1382089 - RNA, 19 nt, Artificial Sequence
  Description of Artificial Sequence: Synthetic oligonucleotide
cagaucgacccaauucaug

SEQ ID NO: 1382090 - RNA, 19 nt, Artificial Sequence
  Description of Artificial Sequence: Synthetic oligonucleotide
ggucacaugacguuagaaa

SEQ ID NO: 1382091 - RNA, 19 nt, Artificial Sequence
  Description of Artificial Sequence: Synthetic oligonucleotide
aaauggccaccaauugucu

SEQ ID NO: 1382092 - RNA, 19 nt, Artificial Sequence
  Description of Artificial Sequence: Synthetic oligonucleotide
cauugugguuuuacuagca

SEQ ID NO: 1382093 - RNA, 19 nt, Artificial Sequence
  Description of Artificial Sequence: Synthetic oligonucleotide
ucccgcugggugaugauau

SEQ ID NO: 1382094 - RNA, 19 nt, Artificial Sequence
  Description of Artificial Sequence: Synthetic oligonucleotide
gcauggaagcaaaucaugc

SEQ ID NO: 1382095 - RNA, 19 nt, Artificial Sequence
  Description of Artificial Sequence: Synthetic oligonucleotide
ugaccauuccuggggagca

SEQ ID NO: 1382096 - RNA, 19 nt, Artificial Sequence
  Description of Artificial Sequence: Synthetic oligonucleotide
aggcauauauacaggaaau

SEQ ID NO: 1382097 - RNA, 19 nt, Artificial Sequence
  Description of Artificial Sequence: Synthetic oligonucleotide
uucuaaaguuacucccuuu

SEQ ID NO: 1382098 - RNA, 19 nt, Artificial Sequence
  Description of Artificial Sequence: Synthetic oligonucleotide
ccugguuuccagccaaucg

SEQ ID NO: 1382099 - RNA, 19 nt, Artificial Sequence
  Description of Artificial Sequence: Synthetic oligonucleotide
gcuuguaucuagcaauaca

SEQ ID NO: 1382100 - RNA, 19 nt, Artificial Sequence
  Description of Artificial Sequence: Synthetic oligonucleotide
caaucuggaaguccauuga

SEQ ID NO: 1382101 - RNA, 19 nt, Artificial Sequence
  Description of Artificial Sequence: Synthetic oligonucleotide
ucgccuguaguagaauacu

SEQ ID NO: 1382102 - RNA, 19 nt, Artificial Sequence
  Description of Artificial Sequence: Synthetic oligonucleotide
gccuguaguagaauacugg

SEQ ID NO: 1382103 - RNA, 19 nt, Artificial Sequence
  Description of Artificial Sequence: Synthetic oligonucleotide
cuauuuugucccagcgguc

SEQ ID NO: 1382104 - RNA, 19 nt, Artificial Sequence
  Description of Artificial Sequence: Synthetic oligonucleotide
cugcuccugguuuccagcc

SEQ ID NO: 1382105 - RNA, 19 nt, Artificial Sequence
  Description of Artificial Sequence: Synthetic oligonucleotide
uccgagagccugaccauuc

SEQ ID NO: 1382106 - RNA, 19 nt, Artificial Sequence
  Description of Artificial Sequence: Synthetic oligonucleotide
cugaacauuugacuuaagu

SEQ ID NO: 1382107 - RNA, 19 nt, Artificial Sequence
  Description of Artificial Sequence: Synthetic oligonucleotide
uuuggucgucacaucuguc

SEQ ID NO: 1382108 - RNA, 19 nt, Artificial Sequence
  Description of Artificial Sequence: Synthetic oligonucleotide
cuuugggguacugcuguag

SEQ ID NO: 1382109 - RNA, 19 nt, Artificial Sequence
  Description of Artificial Sequence: Synthetic oligonucleotide
cugaccauuccuggggagc

SEQ ID NO: 1382110 - RNA, 19 nt, Artificial Sequence
  Description of Artificial Sequence: Synthetic oligonucleotide
aaguuuugcggcauccaua

SEQ ID NO: 1382111 - RNA, 19 nt, Artificial Sequence
  Description of Artificial Sequence: Synthetic oligonucleotide
ucacucgccuguaguagaa

SEQ ID NO: 1382112 - RNA, 19 nt, Artificial Sequence
  Description of Artificial Sequence: Synthetic oligonucleotide
gcggcauccauacucuugc

SEQ ID NO: 1382113 - RNA, 19 nt, Artificial Sequence
  Description of Artificial Sequence: Synthetic oligonucleotide
gaguaaugccagcucagua

SEQ ID NO: 1382114 - RNA, 19 nt, Artificial Sequence
  Description of Artificial Sequence: Synthetic oligonucleotide
uaguagaauacuggcuguc

SEQ ID NO: 1382115 - RNA, 19 nt, Artificial Sequence
  Description of Artificial Sequence: Synthetic oligonucleotide
aggaguaaugccagcucag

SEQ ID NO: 1382116 - RNA, 19 nt, Artificial Sequence
  Description of Artificial Sequence: Synthetic oligonucleotide
auacuggcugucgccaauc

SEQ ID NO: 1382117 - RNA, 19 nt, Artificial Sequence
  Description of Artificial Sequence: Synthetic oligonucleotide
uccuucaauuuugucuccu

SEQ ID NO: 1382118 - RNA, 19 nt, Artificial Sequence
  Description of Artificial Sequence: Synthetic oligonucleotide
ccauugugguuuuacuagc

SEQ ID NO: 1382119 - RNA, 19 nt, Artificial Sequence
  Description of Artificial Sequence: Synthetic oligonucleotide
gaaguguuucaauuucaau

SEQ ID NO: 1382120 - RNA, 19 nt, Artificial Sequence
  Description of Artificial Sequence: Synthetic oligonucleotide
uguccauucaggugccguu

SEQ ID NO: 1382121 - RNA, 19 nt, Artificial Sequence
  Description of Artificial Sequence: Synthetic oligonucleotide
acucgccuguaguagaaua

SEQ ID NO: 1382122 - RNA, 19 nt, Artificial Sequence
  Description of Artificial Sequence: Synthetic oligonucleotide
gaugauagaucaucaucuu

SEQ ID NO: 1382123 - RNA, 19 nt, Artificial Sequence
  Description of Artificial Sequence: Synthetic oligonucleotide
uacuggcugucgccaaucu

SEQ ID NO: 1382124 - RNA, 19 nt, Artificial Sequence
  Description of Artificial Sequence: Synthetic oligonucleotide
uuucgccuccgaagccggg

SEQ ID NO: 1382125 - RNA, 19 nt, Artificial Sequence
  Description of Artificial Sequence: Synthetic oligonucleotide
agguuguggcugucuugac

SEQ ID NO: 1382126 - RNA, 19 nt, Artificial Sequence
  Description of Artificial Sequence: Synthetic oligonucleotide
ccuuuggaaaaugaugaug

SEQ ID NO: 1382127 - RNA, 19 nt, Artificial Sequence
  Description of Artificial Sequence: Synthetic oligonucleotide
uaaguuccgagagccugac

SEQ ID NO: 1382128 - RNA, 19 nt, Artificial Sequence
  Description of Artificial Sequence: Synthetic oligonucleotide
ugcucuuagaugggacaca

SEQ ID NO: 1382129 - RNA, 19 nt, Artificial Sequence
  Description of Artificial Sequence: Synthetic oligonucleotide
uuuugucccagcggucaga

SEQ ID NO: 1382130 - RNA, 19 nt, Artificial Sequence
  Description of Artificial Sequence: Synthetic oligonucleotide
guaguagaauacuggcugu

SEQ ID NO: 1382131 - RNA, 19 nt, Artificial Sequence
  Description of Artificial Sequence: Synthetic oligonucleotide
cugguuuccagccaaucgu

SEQ ID NO: 1382132 - RNA, 19 nt, Artificial Sequence
  Description of Artificial Sequence: Synthetic oligonucleotide
guauuuucuaaaggcauau

SEQ ID NO: 1382133 - RNA, 19 nt, Artificial Sequence
  Description of Artificial Sequence: Synthetic oligonucleotide
uccauucaggugccguuuu

SEQ ID NO: 1382134 - RNA, 19 nt, Artificial Sequence
  Description of Artificial Sequence: Synthetic oligonucleotide
ggauuagaugaggcaaugc

SEQ ID NO: 1382135 - RNA, 19 nt, Artificial Sequence
  Description of Artificial Sequence: Synthetic oligonucleotide
ugucacagaucgacccaau

SEQ ID NO: 1382136 - RNA, 19 nt, Artificial Sequence
  Description of Artificial Sequence: Synthetic oligonucleotide
uaccucugccuucuuucau

SEQ ID NO: 1382137 - RNA, 19 nt, Artificial Sequence
  Description of Artificial Sequence: Synthetic oligonucleotide
ugauaucaucuggcaaggu

SEQ ID NO: 1382138 - RNA, 19 nt, Artificial Sequence
  Description of Artificial Sequence: Synthetic oligonucleotide
uucgccuccgaagccgggc

SEQ ID NO: 1382139 - RNA, 19 nt, Artificial Sequence
  Description of Artificial Sequence: Synthetic oligonucleotide
augacccacugugagaaua

SEQ ID NO: 1382140 - RNA, 19 nt, Artificial Sequence
  Description of Artificial Sequence: Synthetic oligonucleotide
gggguacugcuguagugcc

SEQ ID NO: 1382141 - RNA, 19 nt, Artificial Sequence
  Description of Artificial Sequence: Synthetic oligonucleotide
cucacucgccuguaguaga

SEQ ID NO: 1382142 - RNA, 19 nt, Artificial Sequence
  Description of Artificial Sequence: Synthetic oligonucleotide
cuuuuaguguaaggcaaaa

SEQ ID NO: 1382143 - RNA, 19 nt, Artificial Sequence
  Description of Artificial Sequence: Synthetic oligonucleotide
agccaaucgucaauuugcu

SEQ ID NO: 1382144 - RNA, 19 nt, Artificial Sequence
  Description of Artificial Sequence: Synthetic oligonucleotide
cccuccugggaacuuaacc

SEQ ID NO: 1382145 - RNA, 19 nt, Artificial Sequence
  Description of Artificial Sequence: Synthetic oligonucleotide
guuucugcaugagauuucu

SEQ ID NO: 1382146 - RNA, 19 nt, Artificial Sequence
  Description of Artificial Sequence: Synthetic oligonucleotide
ccagccaaucgucaauuug

SEQ ID NO: 1382147 - RNA, 19 nt, Artificial Sequence
  Description of Artificial Sequence: Synthetic oligonucleotide
ccagguagauugaccaaac

SEQ ID NO: 1382148 - RNA, 19 nt, Artificial Sequence
  Description of Artificial Sequence: Synthetic oligonucleotide
cacagcauaaugacccacu

SEQ ID NO: 1382149 - RNA, 19 nt, Artificial Sequence
  Description of Artificial Sequence: Synthetic oligonucleotide
acuuaaguuccgagagccu

SEQ ID NO: 1382150 - RNA, 19 nt, Artificial Sequence
  Description of Artificial Sequence: Synthetic oligonucleotide
cccaugaucauaagacuga

SEQ ID NO: 1382151 - RNA, 19 nt, Artificial Sequence
  Description of Artificial Sequence: Synthetic oligonucleotide
aggucacaugacguuagaa

SEQ ID NO: 1382152 - RNA, 19 nt, Artificial Sequence
  Description of Artificial Sequence: Synthetic oligonucleotide
uccagccaaucgucaauuu

SEQ ID NO: 1382153 - RNA, 19 nt, Artificial Sequence
  Description of Artificial Sequence: Synthetic oligonucleotide
uccugguuuccagccaauc

SEQ ID NO: 1382154 - RNA, 19 nt, Artificial Sequence
  Description of Artificial Sequence: Synthetic oligonucleotide
acagaucgacccaauucau

SEQ ID NO: 1382155 - RNA, 19 nt, Artificial Sequence
  Description of Artificial Sequence: Synthetic oligonucleotide
gcaaugcuuuuaguguaag

SEQ ID NO: 1382156 - RNA, 19 nt, Artificial Sequence
  Description of Artificial Sequence: Synthetic oligonucleotide
cuucauaaauggccaccaa

SEQ ID NO: 1382157 - RNA, 19 nt, Artificial Sequence
  Description of Artificial Sequence: Synthetic oligonucleotide
cgaagccgggcuucuaugg

SEQ ID NO: 1382158 - RNA, 19 nt, Artificial Sequence
  Description of Artificial Sequence: Synthetic oligonucleotide
cuggauuagaugaggcaau

SEQ ID NO: 1382159 - RNA, 19 nt, Artificial Sequence
  Description of Artificial Sequence: Synthetic oligonucleotide
guguaaggcaaaaccaaau

SEQ ID NO: 1382160 - RNA, 19 nt, Artificial Sequence
  Description of Artificial Sequence: Synthetic oligonucleotide
gccaccaauugucuaaacu

SEQ ID NO: 1382161 - RNA, 19 nt, Artificial Sequence
  Description of Artificial Sequence: Synthetic oligonucleotide
ucccaucgaccuggggucc

SEQ ID NO: 1382162 - RNA, 19 nt, Artificial Sequence
  Description of Artificial Sequence: Synthetic oligonucleotide
caaguuuugcggcauccau

SEQ ID NO: 1382163 - RNA, 19 nt, Artificial Sequence
  Description of Artificial Sequence: Synthetic oligonucleotide
cugucgccaaucuggaagu

SEQ ID NO: 1382164 - RNA, 19 nt, Artificial Sequence
  Description of Artificial Sequence: Synthetic oligonucleotide
uuccgagagccugaccauu

SEQ ID NO: 1382165 - RNA, 19 nt, Artificial Sequence
  Description of Artificial Sequence: Synthetic oligonucleotide
uucuaccaagcagcucauc

SEQ ID NO: 1382166 - RNA, 19 nt, Artificial Sequence
  Description of Artificial Sequence: Synthetic oligonucleotide
caugaucauaagacugaau

SEQ ID NO: 1382167 - RNA, 19 nt, Artificial Sequence
  Description of Artificial Sequence: Synthetic oligonucleotide
acaugacguuagaaauacu

SEQ ID NO: 1382168 - RNA, 19 nt, Artificial Sequence
  Description of Artificial Sequence: Synthetic oligonucleotide
caccaaguuuugcggcauc

SEQ ID NO: 1382169 - RNA, 19 nt, Artificial Sequence
  Description of Artificial Sequence: Synthetic oligonucleotide
caucauaccucugccuucu

SEQ ID NO: 1382170 - RNA, 19 nt, Artificial Sequence
  Description of Artificial Sequence: Synthetic oligonucleotide
ugucgccaaucuggaaguc

SEQ ID NO: 1382171 - RNA, 19 nt, Artificial Sequence
  Description of Artificial Sequence: Synthetic oligonucleotide
gcuuuuaguguaaggcaaa

SEQ ID NO: 1382172 - RNA, 19 nt, Artificial Sequence
  Description of Artificial Sequence: Synthetic oligonucleotide
caauacagucuuccuugcu

SEQ ID NO: 1382173 - RNA, 19 nt, Artificial Sequence
  Description of Artificial Sequence: Synthetic oligonucleotide
cagcauaaugacccacugu

SEQ ID NO: 1382174 - RNA, 19 nt, Artificial Sequence
  Description of Artificial Sequence: Synthetic oligonucleotide
cugcccagcauccuggauu

SEQ ID NO: 1382175 - RNA, 19 nt, Artificial Sequence
  Description of Artificial Sequence: Synthetic oligonucleotide
ccaauugucuaaacugagu

SEQ ID NO: 1382176 - RNA, 19 nt, Artificial Sequence
  Description of Artificial Sequence: Synthetic oligonucleotide
guagcucgaguucuuucuu

SEQ ID NO: 1382177 - RNA, 19 nt, Artificial Sequence
  Description of Artificial Sequence: Synthetic oligonucleotide
ccaguuugcauggaagcaa

SEQ ID NO: 1382178 - RNA, 19 nt, Artificial Sequence
  Description of Artificial Sequence: Synthetic oligonucleotide
ggcaaugcuuuuaguguaa

SEQ ID NO: 1382179 - RNA, 19 nt, Artificial Sequence
  Description of Artificial Sequence: Synthetic oligonucleotide
ccgagagccugaccauucc

SEQ ID NO: 1382180 - RNA, 19 nt, Artificial Sequence
  Description of Artificial Sequence: Synthetic oligonucleotide
cuggcaagguuguggcugu

SEQ ID NO: 1382181 - RNA, 19 nt, Artificial Sequence
  Description of Artificial Sequence: Synthetic oligonucleotide
gucacagaucgacccaauu

SEQ ID NO: 1382182 - RNA, 19 nt, Artificial Sequence
  Description of Artificial Sequence: Synthetic oligonucleotide
cguuagaaauacugaaggu

SEQ ID NO: 1382183 - RNA, 19 nt, Artificial Sequence
  Description of Artificial Sequence: Synthetic oligonucleotide
ggcauauauacaggaaauu

SEQ ID NO: 1382184 - RNA, 19 nt, Artificial Sequence
  Description of Artificial Sequence: Synthetic oligonucleotide
cccaguuugcauggaagca

SEQ ID NO: 1382185 - RNA, 19 nt, Artificial Sequence
  Description of Artificial Sequence: Synthetic oligonucleotide
ggccaccaauugucuaaac

SEQ ID NO: 1382186 - RNA, 19 nt, Artificial Sequence
  Description of Artificial Sequence: Synthetic oligonucleotide
ccacagcauaaugacccac

SEQ ID NO: 1382187 - RNA, 19 nt, Artificial Sequence
  Description of Artificial Sequence: Synthetic oligonucleotide
gacccaauucaugggcaau

SEQ ID NO: 1382188 - RNA, 19 nt, Artificial Sequence
  Description of Artificial Sequence: Synthetic oligonucleotide
ggaguaaugccagcucagu

SEQ ID NO: 1382189 - RNA, 19 nt, Artificial Sequence
  Description of Artificial Sequence: Synthetic oligonucleotide
guuuugcggcauccauacu

SEQ ID NO: 1382190 - RNA, 19 nt, Artificial Sequence
  Description of Artificial Sequence: Synthetic oligonucleotide
gccccugccgaguccuccc

SEQ ID NO: 1382191 - RNA, 19 nt, Artificial Sequence
  Description of Artificial Sequence: Synthetic oligonucleotide
ccaaguuuugcggcaucca

SEQ ID NO: 1382192 - RNA, 19 nt, Artificial Sequence
  Description of Artificial Sequence: Synthetic oligonucleotide
guccauucaggugccguuu

SEQ ID NO: 1382193 - RNA, 19 nt, Artificial Sequence
  Description of Artificial Sequence: Synthetic oligonucleotide
ccgcugggugaugauauca

SEQ ID NO: 1382194 - RNA, 19 nt, Artificial Sequence
  Description of Artificial Sequence: Synthetic oligonucleotide
cgucaauuugcuucucuau

SEQ ID NO: 1382195 - RNA, 19 nt, Artificial Sequence
  Description of Artificial Sequence: Synthetic oligonucleotide
ccccugccgaguccucccg

SEQ ID NO: 1382196 - RNA, 19 nt, Artificial Sequence
  Description of Artificial Sequence: Synthetic oligonucleotide
ggcugucgccaaucuggaa

SEQ ID NO: 1382197 - RNA, 19 nt, Artificial Sequence
  Description of Artificial Sequence: Synthetic oligonucleotide
cccgcugggugaugauauc

SEQ ID NO: 1382198 - RNA, 19 nt, Artificial Sequence
  Description of Artificial Sequence: Synthetic oligonucleotide
ccauggccccugccgaguc

SEQ ID NO: 1382199 - RNA, 19 nt, Artificial Sequence
  Description of Artificial Sequence: Synthetic oligonucleotide
cccaauucaugggcaaucu

SEQ ID NO: 1382200 - RNA, 19 nt, Artificial Sequence
  Description of Artificial Sequence: Synthetic oligonucleotide
cccaucgaccugggguccc

SEQ ID NO: 1382201 - RNA, 19 nt, Artificial Sequence
  Description of Artificial Sequence: Synthetic oligonucleotide
cccuuuggaaaaugaugau

SEQ ID NO: 1382202 - RNA, 19 nt, Artificial Sequence
  Description of Artificial Sequence: Synthetic oligonucleotide
gccaaucgucaauuugcuu

SEQ ID NO: 1382203 - RNA, 19 nt, Artificial Sequence
  Description of Artificial Sequence: Synthetic oligonucleotide
gccgggcuucuauggccac

SEQ ID NO: 1382204 - RNA, 19 nt, Artificial Sequence
  Description of Artificial Sequence: Synthetic oligonucleotide
ggcugacuuucgccuccga

SEQ ID NO: 1382205 - RNA, 19 nt, Artificial Sequence
  Description of Artificial Sequence: Synthetic oligonucleotide
ccaauucaugggcaaucuu

SEQ ID NO: 1382206 - RNA, 19 nt, Artificial Sequence
  Description of Artificial Sequence: Synthetic oligonucleotide
gcaccaaguuuugcggcau

SEQ ID NO: 1382207 - RNA, 19 nt, Artificial Sequence
  Description of Artificial Sequence: Synthetic oligonucleotide
cacucgccuguaguagaau

SEQ ID NO: 1382208 - RNA, 19 nt, Artificial Sequence
  Description of Artificial Sequence: Synthetic oligonucleotide
gcccagcauccuggauuag

SEQ ID NO: 1382209 - RNA, 19 nt, Artificial Sequence
  Description of Artificial Sequence: Synthetic oligonucleotide
ggggucccuccugggaacu

SEQ ID NO: 1382210 - RNA, 19 nt, Artificial Sequence
  Description of Artificial Sequence: Synthetic oligonucleotide
gggacacauuuggcuauuu

SEQ ID NO: 1382211 - RNA, 19 nt, Artificial Sequence
  Description of Artificial Sequence: Synthetic oligonucleotide
ccgggcuucuauggccacu

SEQ ID NO: 1382212 - RNA, 19 nt, Artificial Sequence
  Description of Artificial Sequence: Synthetic oligonucleotide
uugagugacaaucggaagg

SEQ ID NO: 1382213 - RNA, 19 nt, Artificial Sequence
  Description of Artificial Sequence: Synthetic oligonucleotide
aauaaugcuccccaccguc

SEQ ID NO: 1382214 - RNA, 19 nt, Artificial Sequence
  Description of Artificial Sequence: Synthetic oligonucleotide
uuugccuccacauucagca

SEQ ID NO: 1382215 - RNA, 19 nt, Artificial Sequence
  Description of Artificial Sequence: Synthetic oligonucleotide
aauuugagaccugucaagg

SEQ ID NO: 1382216 - RNA, 19 nt, Artificial Sequence
  Description of Artificial Sequence: Synthetic oligonucleotide
acaguuaucggccaccagg

SEQ ID NO: 1382217 - RNA, 19 nt, Artificial Sequence
  Description of Artificial Sequence: Synthetic oligonucleotide
ucgacaaccauccaggggu

SEQ ID NO: 1382218 - RNA, 19 nt, Artificial Sequence
  Description of Artificial Sequence: Synthetic oligonucleotide
guuacaggccuucacacgg

SEQ ID NO: 1382219 - RNA, 19 nt, Artificial Sequence
  Description of Artificial Sequence: Synthetic oligonucleotide
uuuggugcgggcauuguag

SEQ ID NO: 1382220 - RNA, 19 nt, Artificial Sequence
  Description of Artificial Sequence: Synthetic oligonucleotide
guuguuggcaugcagacac

SEQ ID NO: 1382221 - RNA, 19 nt, Artificial Sequence
  Description of Artificial Sequence: Synthetic oligonucleotide
agaguuaaggcuccaagca

SEQ ID NO: 1382222 - RNA, 19 nt, Artificial Sequence
  Description of Artificial Sequence: Synthetic oligonucleotide
agagaauucaccagcuacc

SEQ ID NO: 1382223 - RNA, 19 nt, Artificial Sequence
  Description of Artificial Sequence: Synthetic oligonucleotide
ucgaaauugguccugcggu

SEQ ID NO: 1382224 - RNA, 19 nt, Artificial Sequence
  Description of Artificial Sequence: Synthetic oligonucleotide
aacgucacacaguuaucgg

SEQ ID NO: 1382225 - RNA, 19 nt, Artificial Sequence
  Description of Artificial Sequence: Synthetic oligonucleotide
ucaaggugugcucagugug

SEQ ID NO: 1382226 - RNA, 19 nt, Artificial Sequence
  Description of Artificial Sequence: Synthetic oligonucleotide
aguuaaggcuccaagcagc

SEQ ID NO: 1382227 - RNA, 19 nt, Artificial Sequence
  Description of Artificial Sequence: Synthetic oligonucleotide
acgucacacaguuaucggc

SEQ ID NO: 1382228 - RNA, 19 nt, Artificial Sequence
  Description of Artificial Sequence: Synthetic oligonucleotide
aaaguccaccaugaggugg

SEQ ID NO: 1382229 - RNA, 19 nt, Artificial Sequence
  Description of Artificial Sequence: Synthetic oligonucleotide
ugcuuggcagugaagcugg

SEQ ID NO: 1382230 - RNA, 19 nt, Artificial Sequence
  Description of Artificial Sequence: Synthetic oligonucleotide
uguacacccaggcaaucag

SEQ ID NO: 1382231 - RNA, 19 nt, Artificial Sequence
  Description of Artificial Sequence: Synthetic oligonucleotide
aacuugagagucugcagca

SEQ ID NO: 1382232 - RNA, 19 nt, Artificial Sequence
  Description of Artificial Sequence: Synthetic oligonucleotide
guaguggucaaucuugcug

SEQ ID NO: 1382233 - RNA, 19 nt, Artificial Sequence
  Description of Artificial Sequence: Synthetic oligonucleotide
cuuugauuugcuuggcggc

SEQ ID NO: 1382234 - RNA, 19 nt, Artificial Sequence
  Description of Artificial Sequence: Synthetic oligonucleotide
cauauugucgcugaccuug

SEQ ID NO: 1382235 - RNA, 19 nt, Artificial Sequence
  Description of Artificial Sequence: Synthetic oligonucleotide
uuugagugacaaucggaag

SEQ ID NO: 1382236 - RNA, 19 nt, Artificial Sequence
  Description of Artificial Sequence: Synthetic oligonucleotide
uguuacaggccuucacacg

SEQ ID NO: 1382237 - RNA, 19 nt, Artificial Sequence
  Description of Artificial Sequence: Synthetic oligonucleotide
uucuccaaacacucaagcc

SEQ ID NO: 1382238 - RNA, 19 nt, Artificial Sequence
  Description of Artificial Sequence: Synthetic oligonucleotide
uaguggucaaucuugcugu

SEQ ID NO: 1382239 - RNA, 19 nt, Artificial Sequence
  Description of Artificial Sequence: Synthetic oligonucleotide
cauuguagaaagacaggag

SEQ ID NO: 1382240 - RNA, 19 nt, Artificial Sequence
  Description of Artificial Sequence: Synthetic oligonucleotide
gauucugcagcucauaggu

SEQ ID NO: 1382241 - RNA, 19 nt, Artificial Sequence
  Description of Artificial Sequence: Synthetic oligonucleotide
uacuccagcacguaguggu

SEQ ID NO: 1382242 - RNA, 19 nt, Artificial Sequence
  Description of Artificial Sequence: Synthetic oligonucleotide
aagacucagcugugaagcg

SEQ ID NO: 1382243 - RNA, 19 nt, Artificial Sequence
  Description of Artificial Sequence: Synthetic oligonucleotide
aaguccaccaugagguggc

SEQ ID NO: 1382244 - RNA, 19 nt, Artificial Sequence
  Description of Artificial Sequence: Synthetic oligonucleotide
agccaauuagcccuccgcg

SEQ ID NO: 1382245 - RNA, 19 nt, Artificial Sequence
  Description of Artificial Sequence: Synthetic oligonucleotide
gagaauucaccagcuaccg

SEQ ID NO: 1382246 - RNA, 19 nt, Artificial Sequence
  Description of Artificial Sequence: Synthetic oligonucleotide
aaggugugcucagugugcc

SEQ ID NO: 1382247 - RNA, 19 nt, Artificial Sequence
  Description of Artificial Sequence: Synthetic oligonucleotide
ugguucaaagcgcaccucc

SEQ ID NO: 1382248 - RNA, 19 nt, Artificial Sequence
  Description of Artificial Sequence: Synthetic oligonucleotide
gaguuaaggcuccaagcag

SEQ ID NO: 1382249 - RNA, 19 nt, Artificial Sequence
  Description of Artificial Sequence: Synthetic oligonucleotide
uggcuuugagugacaaucg

SEQ ID NO: 1382250 - RNA, 19 nt, Artificial Sequence
  Description of Artificial Sequence: Synthetic oligonucleotide
cagaguuaaggcuccaagc

SEQ ID NO: 1382251 - RNA, 19 nt, Artificial Sequence
  Description of Artificial Sequence: Synthetic oligonucleotide
cagagaauucaccagcuac

SEQ ID NO: 1382252 - RNA, 19 nt, Artificial Sequence
  Description of Artificial Sequence: Synthetic oligonucleotide
uucacacggaaguucaugu

SEQ ID NO: 1382253 - RNA, 19 nt, Artificial Sequence
  Description of Artificial Sequence: Synthetic oligonucleotide
uuaucggccaccagggacu

SEQ ID NO: 1382254 - RNA, 19 nt, Artificial Sequence
  Description of Artificial Sequence: Synthetic oligonucleotide
uacacccaggcaaucaggc

SEQ ID NO: 1382255 - RNA, 19 nt, Artificial Sequence
  Description of Artificial Sequence: Synthetic oligonucleotide
ugagugacaaucggaaggc

SEQ ID NO: 1382256 - RNA, 19 nt, Artificial Sequence
  Description of Artificial Sequence: Synthetic oligonucleotide
ucaugucaaauuugagacc

SEQ ID NO: 1382257 - RNA, 19 nt, Artificial Sequence
  Description of Artificial Sequence: Synthetic oligonucleotide
guaggcuacacccaggcca

SEQ ID NO: 1382258 - RNA, 19 nt, Artificial Sequence
  Description of Artificial Sequence: Synthetic oligonucleotide
caguuaucggccaccaggg

SEQ ID NO: 1382259 - RNA, 19 nt, Artificial Sequence
  Description of Artificial Sequence: Synthetic oligonucleotide
uguaagacucagcugugaa

SEQ ID NO: 1382260 - RNA, 19 nt, Artificial Sequence
  Description of Artificial Sequence: Synthetic oligonucleotide
gcuacgguaggcuacaccc

SEQ ID NO: 1382261 - RNA, 19 nt, Artificial Sequence
  Description of Artificial Sequence: Synthetic oligonucleotide
ugcucagugugccggaugc

SEQ ID NO: 1382262 - RNA, 19 nt, Artificial Sequence
  Description of Artificial Sequence: Synthetic oligonucleotide
caacgucacacaguuaucg

SEQ ID NO: 1382263 - RNA, 19 nt, Artificial Sequence
  Description of Artificial Sequence: Synthetic oligonucleotide
uauuggaacugcugguggc

SEQ ID NO: 1382264 - RNA, 19 nt, Artificial Sequence
  Description of Artificial Sequence: Synthetic oligonucleotide
uacgguaggcuacacccag

SEQ ID NO: 1382265 - RNA, 19 nt, Artificial Sequence
  Description of Artificial Sequence: Synthetic oligonucleotide
cacguaguggucaaucuug

SEQ ID NO: 1382266 - RNA, 19 nt, Artificial Sequence
  Description of Artificial Sequence: Synthetic oligonucleotide
aacugcugguggcaccuac

SEQ ID NO: 1382267 - RNA, 19 nt, Artificial Sequence
  Description of Artificial Sequence: Synthetic oligonucleotide
cucgaaauugguccugcgg

SEQ ID NO: 1382268 - RNA, 19 nt, Artificial Sequence
  Description of Artificial Sequence: Synthetic oligonucleotide
ucauaggugcggcuggccc

SEQ ID NO: 1382269 - RNA, 19 nt, Artificial Sequence
  Description of Artificial Sequence: Synthetic oligonucleotide
guaagacucagcugugaag

SEQ ID NO: 1382270 - RNA, 19 nt, Artificial Sequence
  Description of Artificial Sequence: Synthetic oligonucleotide
uuugauuugcuuggcggcc

SEQ ID NO: 1382271 - RNA, 19 nt, Artificial Sequence
  Description of Artificial Sequence: Synthetic oligonucleotide
guagaugaaggucugcguc

SEQ ID NO: 1382272 - RNA, 19 nt, Artificial Sequence
  Description of Artificial Sequence: Synthetic oligonucleotide
ugacaaucggaaggcaggg

SEQ ID NO: 1382273 - RNA, 19 nt, Artificial Sequence
  Description of Artificial Sequence: Synthetic oligonucleotide
gugacaaucggaaggcagg

SEQ ID NO: 1382274 - RNA, 19 nt, Artificial Sequence
  Description of Artificial Sequence: Synthetic oligonucleotide
ggcuaguugauucugcagc

SEQ ID NO: 1382275 - RNA, 19 nt, Artificial Sequence
  Description of Artificial Sequence: Synthetic oligonucleotide
aaaacggcccaggcuacgg

SEQ ID NO: 1382276 - RNA, 19 nt, Artificial Sequence
  Description of Artificial Sequence: Synthetic oligonucleotide
guuaucggccaccagggac

SEQ ID NO: 1382277 - RNA, 19 nt, Artificial Sequence
  Description of Artificial Sequence: Synthetic oligonucleotide
ugucaaauuugagaccugu

SEQ ID NO: 1382278 - RNA, 19 nt, Artificial Sequence
  Description of Artificial Sequence: Synthetic oligonucleotide
cucagagcucuccagggcc

SEQ ID NO: 1382279 - RNA, 19 nt, Artificial Sequence
  Description of Artificial Sequence: Synthetic oligonucleotide
aaauugguccugcgguacu

SEQ ID NO: 1382280 - RNA, 19 nt, Artificial Sequence
  Description of Artificial Sequence: Synthetic oligonucleotide
ccaauaaugcuccccaccg

SEQ ID NO: 1382281 - RNA, 19 nt, Artificial Sequence
  Description of Artificial Sequence: Synthetic oligonucleotide
ugaggcugguauuggaacu

SEQ ID NO: 1382282 - RNA, 19 nt, Artificial Sequence
  Description of Artificial Sequence: Synthetic oligonucleotide
acaccaacgucacacaguu

SEQ ID NO: 1382283 - RNA, 19 nt, Artificial Sequence
  Description of Artificial Sequence: Synthetic oligonucleotide
auuugagaccugucaaggu

SEQ ID NO: 1382284 - RNA, 19 nt, Artificial Sequence
  Description of Artificial Sequence: Synthetic oligonucleotide
uucuguaggcagcgcacag

SEQ ID NO: 1382285 - RNA, 19 nt, Artificial Sequence
  Description of Artificial Sequence: Synthetic oligonucleotide
agugacaaucggaaggcag

SEQ ID NO: 1382286 - RNA, 19 nt, Artificial Sequence
  Description of Artificial Sequence: Synthetic oligonucleotide
cuccucguucuucacagcc

SEQ ID NO: 1382287 - RNA, 19 nt, Artificial Sequence
  Description of Artificial Sequence: Synthetic oligonucleotide
ccagcuaccgccuuguuac

SEQ ID NO: 1382288 - RNA, 19 nt, Artificial Sequence
  Description of Artificial Sequence: Synthetic oligonucleotide
cucggcuaggucaaugaug

SEQ ID NO: 1382289 - RNA, 19 nt, Artificial Sequence
  Description of Artificial Sequence: Synthetic oligonucleotide
caguuguuggcaugcagac

SEQ ID NO: 1382290 - RNA, 19 nt, Artificial Sequence
  Description of Artificial Sequence: Synthetic oligonucleotide
uucaaagcgcaccucccaa

SEQ ID NO: 1382291 - RNA, 19 nt, Artificial Sequence
  Description of Artificial Sequence: Synthetic oligonucleotide
gggcauuguagaaagacag

SEQ ID NO: 1382292 - RNA, 19 nt, Artificial Sequence
  Description of Artificial Sequence: Synthetic oligonucleotide
accgccuuguuacaggccu

SEQ ID NO: 1382293 - RNA, 19 nt, Artificial Sequence
  Description of Artificial Sequence: Synthetic oligonucleotide
guuggcugucuccaggagc

SEQ ID NO: 1382294 - RNA, 19 nt, Artificial Sequence
  Description of Artificial Sequence: Synthetic oligonucleotide
caaucggaaggcaggggcc

SEQ ID NO: 1382295 - RNA, 19 nt, Artificial Sequence
  Description of Artificial Sequence: Synthetic oligonucleotide
aggcaugcgccacaccaac

SEQ ID NO: 1382296 - RNA, 19 nt, Artificial Sequence
  Description of Artificial Sequence: Synthetic oligonucleotide
cacccaggcaaucaggcac

SEQ ID NO: 1382297 - RNA, 19 nt, Artificial Sequence
  Description of Artificial Sequence: Synthetic oligonucleotide
ucgcaguguacacccaggc

SEQ ID NO: 1382298 - RNA, 19 nt, Artificial Sequence
  Description of Artificial Sequence: Synthetic oligonucleotide
ucccuuccagaguuaaggc

SEQ ID NO: 1382299 - RNA, 19 nt, Artificial Sequence
  Description of Artificial Sequence: Synthetic oligonucleotide
agucgcaguguacacccag

SEQ ID NO: 1382300 - RNA, 19 nt, Artificial Sequence
  Description of Artificial Sequence: Synthetic oligonucleotide
uugagagucugcagcauuu

SEQ ID NO: 1382301 - RNA, 19 nt, Artificial Sequence
  Description of Artificial Sequence: Synthetic oligonucleotide
cucgacaaccauccagggg

SEQ ID NO: 1382302 - RNA, 19 nt, Artificial Sequence
  Description of Artificial Sequence: Synthetic oligonucleotide
gacaugagggacuggaacu

SEQ ID NO: 1382303 - RNA, 19 nt, Artificial Sequence
  Description of Artificial Sequence: Synthetic oligonucleotide
cacaccacacugugaaggc

SEQ ID NO: 1382304 - RNA, 19 nt, Artificial Sequence
  Description of Artificial Sequence: Synthetic oligonucleotide
uccuccuugaggcggggug

SEQ ID NO: 1382305 - RNA, 19 nt, Artificial Sequence
  Description of Artificial Sequence: Synthetic oligonucleotide
acuggcucagagaauucac

SEQ ID NO: 1382306 - RNA, 19 nt, Artificial Sequence
  Description of Artificial Sequence: Synthetic oligonucleotide
gaaauugguccugcgguac

SEQ ID NO: 1382307 - RNA, 19 nt, Artificial Sequence
  Description of Artificial Sequence: Synthetic oligonucleotide
aaaagccuugcugucuggu

SEQ ID NO: 1382308 - RNA, 19 nt, Artificial Sequence
  Description of Artificial Sequence: Synthetic oligonucleotide
ugaguuuugccuccacauu

SEQ ID NO: 1382309 - RNA, 19 nt, Artificial Sequence
  Description of Artificial Sequence: Synthetic oligonucleotide
aaagcgcaccucccaauaa

SEQ ID NO: 1382310 - RNA, 19 nt, Artificial Sequence
  Description of Artificial Sequence: Synthetic oligonucleotide
agaccugucaaggugugcu

SEQ ID NO: 1382311 - RNA, 19 nt, Artificial Sequence
  Description of Artificial Sequence: Synthetic oligonucleotide
ggagaugccggcugaagcc

SEQ ID NO: 1382312 - RNA, 19 nt, Artificial Sequence
  Description of Artificial Sequence: Synthetic oligonucleotide
agacucagcugugaagcgg

SEQ ID NO: 1382313 - RNA, 19 nt, Artificial Sequence
  Description of Artificial Sequence: Synthetic oligonucleotide
cuaccgccuuguuacaggc

SEQ ID NO: 1382314 - RNA, 19 nt, Artificial Sequence
  Description of Artificial Sequence: Synthetic oligonucleotide
aagcgcaccucccaauaau

SEQ ID NO: 1382315 - RNA, 19 nt, Artificial Sequence
  Description of Artificial Sequence: Synthetic oligonucleotide
gugcgggcauuguagaaag

SEQ ID NO: 1382316 - RNA, 19 nt, Artificial Sequence
  Description of Artificial Sequence: Synthetic oligonucleotide
acguaguggucaaucuugc

SEQ ID NO: 1382317 - RNA, 19 nt, Artificial Sequence
  Description of Artificial Sequence: Synthetic oligonucleotide
caccacacugugaaggcug

SEQ ID NO: 1382318 - RNA, 19 nt, Artificial Sequence
  Description of Artificial Sequence: Synthetic oligonucleotide
cuaggugaggcugguauug

SEQ ID NO: 1382319 - RNA, 19 nt, Artificial Sequence
  Description of Artificial Sequence: Synthetic oligonucleotide
aguggucaaucuugcuguc

SEQ ID NO: 1382320 - RNA, 19 nt, Artificial Sequence
  Description of Artificial Sequence: Synthetic oligonucleotide
ggccccucgaaauuggucc

SEQ ID NO: 1382321 - RNA, 19 nt, Artificial Sequence
  Description of Artificial Sequence: Synthetic oligonucleotide
aaagccuugcugucugguu

SEQ ID NO: 1382322 - RNA, 19 nt, Artificial Sequence
  Description of Artificial Sequence: Synthetic oligonucleotide
uccucguucuucacagcca

SEQ ID NO: 1382323 - RNA, 19 nt, Artificial Sequence
  Description of Artificial Sequence: Synthetic oligonucleotide
acugugaaggcuggaagca

SEQ ID NO: 1382324 - RNA, 19 nt, Artificial Sequence
  Description of Artificial Sequence: Synthetic oligonucleotide
ucaaaacggcccaggcuac

SEQ ID NO: 1382325 - RNA, 19 nt, Artificial Sequence
  Description of Artificial Sequence: Synthetic oligonucleotide
uggcagaucggccccggcc

SEQ ID NO: 1382326 - RNA, 19 nt, Artificial Sequence
  Description of Artificial Sequence: Synthetic oligonucleotide
cugugaagcggucccgucc

SEQ ID NO: 1382327 - RNA, 19 nt, Artificial Sequence
  Description of Artificial Sequence: Synthetic oligonucleotide
aaucggaaggcaggggcca

SEQ ID NO: 1382328 - RNA, 19 nt, Artificial Sequence
  Description of Artificial Sequence: Synthetic oligonucleotide
uccaguacuuugaccuugu

SEQ ID NO: 1382329 - RNA, 19 nt, Artificial Sequence
  Description of Artificial Sequence: Synthetic oligonucleotide
aauucaccagcuaccgccu

SEQ ID NO: 1382330 - RNA, 19 nt, Artificial Sequence
  Description of Artificial Sequence: Synthetic oligonucleotide
caugucaaauuugagaccu

SEQ ID NO: 1382331 - RNA, 19 nt, Artificial Sequence
  Description of Artificial Sequence: Synthetic oligonucleotide
uguuggcaugcagacacca

SEQ ID NO: 1382332 - RNA, 19 nt, Artificial Sequence
  Description of Artificial Sequence: Synthetic oligonucleotide
cucauauugucgcugaccu

SEQ ID NO: 1382333 - RNA, 19 nt, Artificial Sequence
  Description of Artificial Sequence: Synthetic oligonucleotide
ucaucaggcaugcgccaca

SEQ ID NO: 1382334 - RNA, 19 nt, Artificial Sequence
  Description of Artificial Sequence: Synthetic oligonucleotide
uugccguuccugugcaaag

SEQ ID NO: 1382335 - RNA, 19 nt, Artificial Sequence
  Description of Artificial Sequence: Synthetic oligonucleotide
ucagagaauucaccagcua

SEQ ID NO: 1382336 - RNA, 19 nt, Artificial Sequence
  Description of Artificial Sequence: Synthetic oligonucleotide
ggcuuugagugacaaucgg

SEQ ID NO: 1382337 - RNA, 19 nt, Artificial Sequence
  Description of Artificial Sequence: Synthetic oligonucleotide
ucggccccggccuagguga

SEQ ID NO: 1382338 - RNA, 19 nt, Artificial Sequence
  Description of Artificial Sequence: Synthetic oligonucleotide
uuugccguuccugugcaaa

SEQ ID NO: 1382339 - RNA, 19 nt, Artificial Sequence
  Description of Artificial Sequence: Synthetic oligonucleotide
accguguaagacucagcug

SEQ ID NO: 1382340 - RNA, 19 nt, Artificial Sequence
  Description of Artificial Sequence: Synthetic oligonucleotide
agguagguggagaugccgg

SEQ ID NO: 1382341 - RNA, 19 nt, Artificial Sequence
  Description of Artificial Sequence: Synthetic oligonucleotide
accaugagguggcucauau

SEQ ID NO: 1382342 - RNA, 19 nt, Artificial Sequence
  Description of Artificial Sequence: Synthetic oligonucleotide
uaaugcuccccaccgucaa

SEQ ID NO: 1382343 - RNA, 19 nt, Artificial Sequence
  Description of Artificial Sequence: Synthetic oligonucleotide
aaguccucgcugucugcug

SEQ ID NO: 1382344 - RNA, 19 nt, Artificial Sequence
  Description of Artificial Sequence: Synthetic oligonucleotide
gacucggcuaggucaauga

SEQ ID NO: 1382345 - RNA, 19 nt, Artificial Sequence
  Description of Artificial Sequence: Synthetic oligonucleotide
acggaaguucauguacuuc

SEQ ID NO: 1382346 - RNA, 19 nt, Artificial Sequence
  Description of Artificial Sequence: Synthetic oligonucleotide
cucagugugccggaugccc

SEQ ID NO: 1382347 - RNA, 19 nt, Artificial Sequence
  Description of Artificial Sequence: Synthetic oligonucleotide
uggcucauauugucgcuga

SEQ ID NO: 1382348 - RNA, 19 nt, Artificial Sequence
  Description of Artificial Sequence: Synthetic oligonucleotide
agcggucccguccccaagg

SEQ ID NO: 1382349 - RNA, 19 nt, Artificial Sequence
  Description of Artificial Sequence: Synthetic oligonucleotide
cagccaauuagcccuccgc

SEQ ID NO: 1382350 - RNA, 19 nt, Artificial Sequence
  Description of Artificial Sequence: Synthetic oligonucleotide
agaaagacaggaggccuug

SEQ ID NO: 1382351 - RNA, 19 nt, Artificial Sequence
  Description of Artificial Sequence: Synthetic oligonucleotide
ugguggaagucgcagugua

SEQ ID NO: 1382352 - RNA, 19 nt, Artificial Sequence
  Description of Artificial Sequence: Synthetic oligonucleotide
uuacaggccuucacacgga

SEQ ID NO: 1382353 - RNA, 19 nt, Artificial Sequence
  Description of Artificial Sequence: Synthetic oligonucleotide
cccucgacaaccauccagg

SEQ ID NO: 1382354 - RNA, 19 nt, Artificial Sequence
  Description of Artificial Sequence: Synthetic oligonucleotide
ugcgccacaccaacgucac

SEQ ID NO: 1382355 - RNA, 19 nt, Artificial Sequence
  Description of Artificial Sequence: Synthetic oligonucleotide
ucacacaguuaucggccac

SEQ ID NO: 1382356 - RNA, 19 nt, Artificial Sequence
  Description of Artificial Sequence: Synthetic oligonucleotide
gcaguguacacccaggcaa

SEQ ID NO: 1382357 - RNA, 19 nt, Artificial Sequence
  Description of Artificial Sequence: Synthetic oligonucleotide
agcaccguguaagacucag

SEQ ID NO: 1382358 - RNA, 19 nt, Artificial Sequence
  Description of Artificial Sequence: Synthetic oligonucleotide
caaaagccuugcugucugg

SEQ ID NO: 1382359 - RNA, 19 nt, Artificial Sequence
  Description of Artificial Sequence: Synthetic oligonucleotide
ugguccugcgguacuccag

SEQ ID NO: 1382360 - RNA, 19 nt, Artificial Sequence
  Description of Artificial Sequence: Synthetic oligonucleotide
accuaccccgcuucuguag

SEQ ID NO: 1382361 - RNA, 19 nt, Artificial Sequence
  Description of Artificial Sequence: Synthetic oligonucleotide
gaugcccucgacaaccauc

SEQ ID NO: 1382362 - RNA, 19 nt, Artificial Sequence
  Description of Artificial Sequence: Synthetic oligonucleotide
cuugaggcgggguggcccc

SEQ ID NO: 1382363 - RNA, 19 nt, Artificial Sequence
  Description of Artificial Sequence: Synthetic oligonucleotide
aaacggcccaggcuacggu

SEQ ID NO: 1382364 - RNA, 19 nt, Artificial Sequence
  Description of Artificial Sequence: Synthetic oligonucleotide
augcuccccaccgucaauc

SEQ ID NO: 1382365 - RNA, 19 nt, Artificial Sequence
  Description of Artificial Sequence: Synthetic oligonucleotide
cacacaguuaucggccacc

SEQ ID NO: 1382366 - RNA, 19 nt, Artificial Sequence
  Description of Artificial Sequence: Synthetic oligonucleotide
guggaagucgcaguguaca

SEQ ID NO: 1382367 - RNA, 19 nt, Artificial Sequence
  Description of Artificial Sequence: Synthetic oligonucleotide
gcagccggcagccaauuag

SEQ ID NO: 1382368 - RNA, 19 nt, Artificial Sequence
  Description of Artificial Sequence: Synthetic oligonucleotide
aggaugcagcugucuugcc

SEQ ID NO: 1382369 - RNA, 19 nt, Artificial Sequence
  Description of Artificial Sequence: Synthetic oligonucleotide
ccaauuagcccuccgcgcc

SEQ ID NO: 1382370 - RNA, 19 nt, Artificial Sequence
  Description of Artificial Sequence: Synthetic oligonucleotide
auauugucgcugaccuugg

SEQ ID NO: 1382371 - RNA, 19 nt, Artificial Sequence
  Description of Artificial Sequence: Synthetic oligonucleotide
ccugcgguacuccagcacg

SEQ ID NO: 1382372 - RNA, 19 nt, Artificial Sequence
  Description of Artificial Sequence: Synthetic oligonucleotide
caaaguccaccaugaggug

SEQ ID NO: 1382373 - RNA, 19 nt, Artificial Sequence
  Description of Artificial Sequence: Synthetic oligonucleotide
ugcuguccucaucaggcau

SEQ ID NO: 1382374 - RNA, 19 nt, Artificial Sequence
  Description of Artificial Sequence: Synthetic oligonucleotide
guaggcagcgcacagcacu

SEQ ID NO: 1382375 - RNA, 19 nt, Artificial Sequence
  Description of Artificial Sequence: Synthetic oligonucleotide
gcuaccgccuuguuacagg

SEQ ID NO: 1382376 - RNA, 19 nt, Artificial Sequence
  Description of Artificial Sequence: Synthetic oligonucleotide
aucaggcaugcgccacacc

SEQ ID NO: 1382377 - RNA, 19 nt, Artificial Sequence
  Description of Artificial Sequence: Synthetic oligonucleotide
gaagcaggggcugugugaa

SEQ ID NO: 1382378 - RNA, 19 nt, Artificial Sequence
  Description of Artificial Sequence: Synthetic oligonucleotide
gcuuccacaccacacugug

SEQ ID NO: 1382379 - RNA, 19 nt, Artificial Sequence
  Description of Artificial Sequence: Synthetic oligonucleotide
uugauuugcuuggcggccu

SEQ ID NO: 1382380 - RNA, 19 nt, Artificial Sequence
  Description of Artificial Sequence: Synthetic oligonucleotide
ccgucaaucagcguguccc

SEQ ID NO: 1382381 - RNA, 19 nt, Artificial Sequence
  Description of Artificial Sequence: Synthetic oligonucleotide
agucugcagcauuugccgu

SEQ ID NO: 1382382 - RNA, 19 nt, Artificial Sequence
  Description of Artificial Sequence: Synthetic oligonucleotide
cagguagguggagaugccg

SEQ ID NO: 1382383 - RNA, 19 nt, Artificial Sequence
  Description of Artificial Sequence: Synthetic oligonucleotide
aacggcccaggcuacggua

SEQ ID NO: 1382384 - RNA, 19 nt, Artificial Sequence
  Description of Artificial Sequence: Synthetic oligonucleotide
ucacacggaaguucaugua

SEQ ID NO: 1382385 - RNA, 19 nt, Artificial Sequence
  Description of Artificial Sequence: Synthetic oligonucleotide
aguguacacccaggcaauc

SEQ ID NO: 1382386 - RNA, 19 nt, Artificial Sequence
  Description of Artificial Sequence: Synthetic oligonucleotide
accucccaauaaugcuccc

SEQ ID NO: 1382387 - RNA, 19 nt, Artificial Sequence
  Description of Artificial Sequence: Synthetic oligonucleotide
aaugcuccccaccgucaau

SEQ ID NO: 1382388 - RNA, 19 nt, Artificial Sequence
  Description of Artificial Sequence: Synthetic oligonucleotide
gcuacacccaggccaaaag

SEQ ID NO: 1382389 - RNA, 19 nt, Artificial Sequence
  Description of Artificial Sequence: Synthetic oligonucleotide
ccagaguuaaggcuccaag

SEQ ID NO: 1382390 - RNA, 19 nt, Artificial Sequence
  Description of Artificial Sequence: Synthetic oligonucleotide
uggcaugcuuggcagugaa

SEQ ID NO: 1382391 - RNA, 19 nt, Artificial Sequence
  Description of Artificial Sequence: Synthetic oligonucleotide
ugugugaacuuggccuuga

SEQ ID NO: 1382392 - RNA, 19 nt, Artificial Sequence
  Description of Artificial Sequence: Synthetic oligonucleotide
acacggaaguucauguacu

SEQ ID NO: 1382393 - RNA, 19 nt, Artificial Sequence
  Description of Artificial Sequence: Synthetic oligonucleotide
agggcccgagugcaggcgg

SEQ ID NO: 1382394 - RNA, 19 nt, Artificial Sequence
  Description of Artificial Sequence: Synthetic oligonucleotide
gucaaucuugcuguccuca

SEQ ID NO: 1382395 - RNA, 19 nt, Artificial Sequence
  Description of Artificial Sequence: Synthetic oligonucleotide
ugucugguucaaagcgcac

SEQ ID NO: 1382396 - RNA, 19 nt, Artificial Sequence
  Description of Artificial Sequence: Synthetic oligonucleotide
ccacaccacacugugaagg

SEQ ID NO: 1382397 - RNA, 19 nt, Artificial Sequence
  Description of Artificial Sequence: Synthetic oligonucleotide
gacaaccauccaggggugg

SEQ ID NO: 1382398 - RNA, 19 nt, Artificial Sequence
  Description of Artificial Sequence: Synthetic oligonucleotide
uccccgaccccgccguggg

SEQ ID NO: 1382399 - RNA, 19 nt, Artificial Sequence
  Description of Artificial Sequence: Synthetic oligonucleotide
uguccuguuugaucuucau

SEQ ID NO: 1382400 - RNA, 19 nt, Artificial Sequence
  Description of Artificial Sequence: Synthetic oligonucleotide
aauuagcccuccgcgcccu

SEQ ID NO: 1382401 - RNA, 19 nt, Artificial Sequence
  Description of Artificial Sequence: Synthetic oligonucleotide
gucgcaguguacacccagg

SEQ ID NO: 1382402 - RNA, 19 nt, Artificial Sequence
  Description of Artificial Sequence: Synthetic oligonucleotide
agcuguuuggugcgggcau

SEQ ID NO: 1382403 - RNA, 19 nt, Artificial Sequence
  Description of Artificial Sequence: Synthetic oligonucleotide
guuaaggcuccaagcagca

SEQ ID NO: 1382404 - RNA, 19 nt, Artificial Sequence
  Description of Artificial Sequence: Synthetic oligonucleotide
aagcggucccguccccaag

SEQ ID NO: 1382405 - RNA, 19 nt, Artificial Sequence
  Description of Artificial Sequence: Synthetic oligonucleotide
aggugugcucagugugccg

SEQ ID NO: 1382406 - RNA, 19 nt, Artificial Sequence
  Description of Artificial Sequence: Synthetic oligonucleotide
aguuaucggccaccaggga

SEQ ID NO: 1382407 - RNA, 19 nt, Artificial Sequence
  Description of Artificial Sequence: Synthetic oligonucleotide
uaccgccuuguuacaggcc

SEQ ID NO: 1382408 - RNA, 19 nt, Artificial Sequence
  Description of Artificial Sequence: Synthetic oligonucleotide
gccaauuagcccuccgcgc

SEQ ID NO: 1382409 - RNA, 19 nt, Artificial Sequence
  Description of Artificial Sequence: Synthetic oligonucleotide
auaaugcuccccaccguca

SEQ ID NO: 1382410 - RNA, 19 nt, Artificial Sequence
  Description of Artificial Sequence: Synthetic oligonucleotide
caccguguaagacucagcu

SEQ ID NO: 1382411 - RNA, 19 nt, Artificial Sequence
  Description of Artificial Sequence: Synthetic oligonucleotide
cagccaguuguuggcaugc

SEQ ID NO: 1382412 - RNA, 19 nt, Artificial Sequence
  Description of Artificial Sequence: Synthetic oligonucleotide
cugugaaggcuggaagcag

SEQ ID NO: 1382413 - RNA, 19 nt, Artificial Sequence
  Description of Artificial Sequence: Synthetic oligonucleotide
gguccugcgguacuccagc

SEQ ID NO: 1382414 - RNA, 19 nt, Artificial Sequence
  Description of Artificial Sequence: Synthetic oligonucleotide
accagcuaccgccuuguua

SEQ ID NO: 1382415 - RNA, 19 nt, Artificial Sequence
  Description of Artificial Sequence: Synthetic oligonucleotide
aggugaggcugguauugga

SEQ ID NO: 1382416 - RNA, 19 nt, Artificial Sequence
  Description of Artificial Sequence: Synthetic oligonucleotide
cugaguuuugccuccacau

SEQ ID NO: 1382417 - RNA, 19 nt, Artificial Sequence
  Description of Artificial Sequence: Synthetic oligonucleotide
ucuccucguucuucacagc

SEQ ID NO: 1382418 - RNA, 19 nt, Artificial Sequence
  Description of Artificial Sequence: Synthetic oligonucleotide
gcucauauugucgcugacc

SEQ ID NO: 1382419 - RNA, 19 nt, Artificial Sequence
  Description of Artificial Sequence: Synthetic oligonucleotide
uguccaguacuuugaccuu

SEQ ID NO: 1382420 - RNA, 19 nt, Artificial Sequence
  Description of Artificial Sequence: Synthetic oligonucleotide
agcgcaccucccaauaaug

SEQ ID NO: 1382421 - RNA, 19 nt, Artificial Sequence
  Description of Artificial Sequence: Synthetic oligonucleotide
ggaagucgcaguguacacc

SEQ ID NO: 1382422 - RNA, 19 nt, Artificial Sequence
  Description of Artificial Sequence: Synthetic oligonucleotide
caaaacggcccaggcuacg

SEQ ID NO: 1382423 - RNA, 19 nt, Artificial Sequence
  Description of Artificial Sequence: Synthetic oligonucleotide
ugcaggccuguugucaccu

SEQ ID NO: 1382424 - RNA, 19 nt, Artificial Sequence
  Description of Artificial Sequence: Synthetic oligonucleotide
cuaccccgcuucuguaggc

SEQ ID NO: 1382425 - RNA, 19 nt, Artificial Sequence
  Description of Artificial Sequence: Synthetic oligonucleotide
agugugccggaugcccucg

SEQ ID NO: 1382426 - RNA, 19 nt, Artificial Sequence
  Description of Artificial Sequence: Synthetic oligonucleotide
gagaugccggcugaagcca

SEQ ID NO: 1382427 - RNA, 19 nt, Artificial Sequence
  Description of Artificial Sequence: Synthetic oligonucleotide
aggagcuguuuggugcggg

SEQ ID NO: 1382428 - RNA, 19 nt, Artificial Sequence
  Description of Artificial Sequence: Synthetic oligonucleotide
gaccugucaaggugugcuc

SEQ ID NO: 1382429 - RNA, 19 nt, Artificial Sequence
  Description of Artificial Sequence: Synthetic oligonucleotide
agcuaccgccuuguuacag

SEQ ID NO: 1382430 - RNA, 19 nt, Artificial Sequence
  Description of Artificial Sequence: Synthetic oligonucleotide
gccuguugucaccuggaag

SEQ ID NO: 1382431 - RNA, 19 nt, Artificial Sequence
  Description of Artificial Sequence: Synthetic oligonucleotide
accugucaaggugugcuca

SEQ ID NO: 1382432 - RNA, 19 nt, Artificial Sequence
  Description of Artificial Sequence: Synthetic oligonucleotide
agcaccgacaugagggacu

SEQ ID NO: 1382433 - RNA, 19 nt, Artificial Sequence
  Description of Artificial Sequence: Synthetic oligonucleotide
acacaguuaucggccacca

SEQ ID NO: 1382434 - RNA, 19 nt, Artificial Sequence
  Description of Artificial Sequence: Synthetic oligonucleotide
cauccaggggugguccucc

SEQ ID NO: 1382435 - RNA, 19 nt, Artificial Sequence
  Description of Artificial Sequence: Synthetic oligonucleotide
ccucguucuucacagccag

SEQ ID NO: 1382436 - RNA, 19 nt, Artificial Sequence
  Description of Artificial Sequence: Synthetic oligonucleotide
cauuugccguuccugugca

SEQ ID NO: 1382437 - RNA, 19 nt, Artificial Sequence
  Description of Artificial Sequence: Synthetic oligonucleotide
uuagugccucccucugguc

SEQ ID NO: 1382438 - RNA, 19 nt, Artificial Sequence
  Description of Artificial Sequence: Synthetic oligonucleotide
uccagaguuaaggcuccaa

SEQ ID NO: 1382439 - RNA, 19 nt, Artificial Sequence
  Description of Artificial Sequence: Synthetic oligonucleotide
augcgccacaccaacguca

SEQ ID NO: 1382440 - RNA, 19 nt, Artificial Sequence
  Description of Artificial Sequence: Synthetic oligonucleotide
ugccguuccugugcaaagu

SEQ ID NO: 1382441 - RNA, 19 nt, Artificial Sequence
  Description of Artificial Sequence: Synthetic oligonucleotide
uggugcgggcauuguagaa

SEQ ID NO: 1382442 - RNA, 19 nt, Artificial Sequence
  Description of Artificial Sequence: Synthetic oligonucleotide
aucggccccggccuaggug

SEQ ID NO: 1382443 - RNA, 19 nt, Artificial Sequence
  Description of Artificial Sequence: Synthetic oligonucleotide
agaugccggcugaagccac

SEQ ID NO: 1382444 - RNA, 19 nt, Artificial Sequence
  Description of Artificial Sequence: Synthetic oligonucleotide
gcgggcauuguagaaagac

SEQ ID NO: 1382445 - RNA, 19 nt, Artificial Sequence
  Description of Artificial Sequence: Synthetic oligonucleotide
cacaguuaucggccaccag

SEQ ID NO: 1382446 - RNA, 19 nt, Artificial Sequence
  Description of Artificial Sequence: Synthetic oligonucleotide
cuacgguaggcuacaccca

SEQ ID NO: 1382447 - RNA, 19 nt, Artificial Sequence
  Description of Artificial Sequence: Synthetic oligonucleotide
caugcgccacaccaacguc

SEQ ID NO: 1382448 - RNA, 19 nt, Artificial Sequence
  Description of Artificial Sequence: Synthetic oligonucleotide
ggcaaucaggcacagggcu

SEQ ID NO: 1382449 - RNA, 19 nt, Artificial Sequence
  Description of Artificial Sequence: Synthetic oligonucleotide
cagcacguaguggucaauc

SEQ ID NO: 1382450 - RNA, 19 nt, Artificial Sequence
  Description of Artificial Sequence: Synthetic oligonucleotide
ggucacaccaucuuugauu

SEQ ID NO: 1382451 - RNA, 19 nt, Artificial Sequence
  Description of Artificial Sequence: Synthetic oligonucleotide
ccuaccccgcuucuguagg

SEQ ID NO: 1382452 - RNA, 19 nt, Artificial Sequence
  Description of Artificial Sequence: Synthetic oligonucleotide
uuggcaugcuuggcaguga

SEQ ID NO: 1382453 - RNA, 19 nt, Artificial Sequence
  Description of Artificial Sequence: Synthetic oligonucleotide
cugcaggccuguugucacc

SEQ ID NO: 1382454 - RNA, 19 nt, Artificial Sequence
  Description of Artificial Sequence: Synthetic oligonucleotide
uguuuggugcgggcauugu

SEQ ID NO: 1382455 - RNA, 19 nt, Artificial Sequence
  Description of Artificial Sequence: Synthetic oligonucleotide
acaccacacugugaaggcu

SEQ ID NO: 1382456 - RNA, 19 nt, Artificial Sequence
  Description of Artificial Sequence: Synthetic oligonucleotide
guguacacccaggcaauca

SEQ ID NO: 1382457 - RNA, 19 nt, Artificial Sequence
  Description of Artificial Sequence: Synthetic oligonucleotide
guuuggugcgggcauugua

SEQ ID NO: 1382458 - RNA, 19 nt, Artificial Sequence
  Description of Artificial Sequence: Synthetic oligonucleotide
gcuuugagugacaaucgga

SEQ ID NO: 1382459 - RNA, 19 nt, Artificial Sequence
  Description of Artificial Sequence: Synthetic oligonucleotide
gguaggcuacacccaggcc

SEQ ID NO: 1382460 - RNA, 19 nt, Artificial Sequence
  Description of Artificial Sequence: Synthetic oligonucleotide
guggcaccuaccccgcuuc

SEQ ID NO: 1382461 - RNA, 19 nt, Artificial Sequence
  Description of Artificial Sequence: Synthetic oligonucleotide
uaccccgcuucuguaggca

SEQ ID NO: 1382462 - RNA, 19 nt, Artificial Sequence
  Description of Artificial Sequence: Synthetic oligonucleotide
gcugaguuuugccuccaca

SEQ ID NO: 1382463 - RNA, 19 nt, Artificial Sequence
  Description of Artificial Sequence: Synthetic oligonucleotide
acaccaucuuugauuugcu

SEQ ID NO: 1382464 - RNA, 19 nt, Artificial Sequence
  Description of Artificial Sequence: Synthetic oligonucleotide
gucacuggcucagagaauu

SEQ ID NO: 1382465 - RNA, 19 nt, Artificial Sequence
  Description of Artificial Sequence: Synthetic oligonucleotide
gugcucagugugccggaug

SEQ ID NO: 1382466 - RNA, 19 nt, Artificial Sequence
  Description of Artificial Sequence: Synthetic oligonucleotide
caaagcgcaccucccaaua

SEQ ID NO: 1382467 - RNA, 19 nt, Artificial Sequence
  Description of Artificial Sequence: Synthetic oligonucleotide
gcuaguugauucugcagcu

SEQ ID NO: 1382468 - RNA, 19 nt, Artificial Sequence
  Description of Artificial Sequence: Synthetic oligonucleotide
ggcuacgguaggcuacacc

SEQ ID NO: 1382469 - RNA, 19 nt, Artificial Sequence
  Description of Artificial Sequence: Synthetic oligonucleotide
ccuuguuacaggccuucac

SEQ ID NO: 1382470 - RNA, 19 nt, Artificial Sequence
  Description of Artificial Sequence: Synthetic oligonucleotide
gccggcagccaauuagccc

SEQ ID NO: 1382471 - RNA, 19 nt, Artificial Sequence
  Description of Artificial Sequence: Synthetic oligonucleotide
augucaaauuugagaccug

SEQ ID NO: 1382472 - RNA, 19 nt, Artificial Sequence
  Description of Artificial Sequence: Synthetic oligonucleotide
auuagcccuccgcgcccuc

SEQ ID NO: 1382473 - RNA, 19 nt, Artificial Sequence
  Description of Artificial Sequence: Synthetic oligonucleotide
ggccugagggaaguccucg

SEQ ID NO: 1382474 - RNA, 19 nt, Artificial Sequence
  Description of Artificial Sequence: Synthetic oligonucleotide
guguaagacucagcuguga

SEQ ID NO: 1382475 - RNA, 19 nt, Artificial Sequence
  Description of Artificial Sequence: Synthetic oligonucleotide
acuugagagucugcagcau

SEQ ID NO: 1382476 - RNA, 19 nt, Artificial Sequence
  Description of Artificial Sequence: Synthetic oligonucleotide
cacuggcucagagaauuca

SEQ ID NO: 1382477 - RNA, 19 nt, Artificial Sequence
  Description of Artificial Sequence: Synthetic oligonucleotide
ggugcggcuggcccugucc

SEQ ID NO: 1382478 - RNA, 19 nt, Artificial Sequence
  Description of Artificial Sequence: Synthetic oligonucleotide
gaggcgggguggccccucg

SEQ ID NO: 1382479 - RNA, 19 nt, Artificial Sequence
  Description of Artificial Sequence: Synthetic oligonucleotide
acaggccuucacacggaag

SEQ ID NO: 1382480 - RNA, 19 nt, Artificial Sequence
  Description of Artificial Sequence: Synthetic oligonucleotide
ccugucaaggugugcucag

SEQ ID NO: 1382481 - RNA, 19 nt, Artificial Sequence
  Description of Artificial Sequence: Synthetic oligonucleotide
gagugacaaucggaaggca

SEQ ID NO: 1382482 - RNA, 19 nt, Artificial Sequence
  Description of Artificial Sequence: Synthetic oligonucleotide
gcgguacuccagcacguag

SEQ ID NO: 1382483 - RNA, 19 nt, Artificial Sequence
  Description of Artificial Sequence: Synthetic oligonucleotide
gguggccccucgaaauugg

SEQ ID NO: 1382484 - RNA, 19 nt, Artificial Sequence
  Description of Artificial Sequence: Synthetic oligonucleotide
ccucgacaaccauccaggg

SEQ ID NO: 1382485 - RNA, 19 nt, Artificial Sequence
  Description of Artificial Sequence: Synthetic oligonucleotide
ccaggcuacgguaggcuac

SEQ ID NO: 1382486 - RNA, 19 nt, Artificial Sequence
  Description of Artificial Sequence: Synthetic oligonucleotide
acggcccaggcuacgguag

SEQ ID NO: 1382487 - RNA, 19 nt, Artificial Sequence
  Description of Artificial Sequence: Synthetic oligonucleotide
ccacaccaacgucacacag

SEQ ID NO: 1382488 - RNA, 19 nt, Artificial Sequence
  Description of Artificial Sequence: Synthetic oligonucleotide
cagugugccggaugcccuc

SEQ ID NO: 1382489 - RNA, 19 nt, Artificial Sequence
  Description of Artificial Sequence: Synthetic oligonucleotide
cacucaagccuccuuggcu

SEQ ID NO: 1382490 - RNA, 19 nt, Artificial Sequence
  Description of Artificial Sequence: Synthetic oligonucleotide
cacagggcuguccaguacu

SEQ ID NO: 1382491 - RNA, 19 nt, Artificial Sequence
  Description of Artificial Sequence: Synthetic oligonucleotide
agaucggccccggccuagg

SEQ ID NO: 1382492 - RNA, 19 nt, Artificial Sequence
  Description of Artificial Sequence: Synthetic oligonucleotide
caugagggacuggaacuca

SEQ ID NO: 1382493 - RNA, 19 nt, Artificial Sequence
  Description of Artificial Sequence: Synthetic oligonucleotide
ccucgaaauugguccugcg

SEQ ID NO: 1382494 - RNA, 19 nt, Artificial Sequence
  Description of Artificial Sequence: Synthetic oligonucleotide
uggcaccuaccccgcuucu

SEQ ID NO: 1382495 - RNA, 19 nt, Artificial Sequence
  Description of Artificial Sequence: Synthetic oligonucleotide
cauaggugcggcuggcccu

SEQ ID NO: 1382496 - RNA, 19 nt, Artificial Sequence
  Description of Artificial Sequence: Synthetic oligonucleotide
ugugcucagugugccggau

SEQ ID NO: 1382497 - RNA, 19 nt, Artificial Sequence
  Description of Artificial Sequence: Synthetic oligonucleotide
gauuugcuuggcggccuga

SEQ ID NO: 1382498 - RNA, 19 nt, Artificial Sequence
  Description of Artificial Sequence: Synthetic oligonucleotide
auuugccguuccugugcaa

SEQ ID NO: 1382499 - RNA, 19 nt, Artificial Sequence
  Description of Artificial Sequence: Synthetic oligonucleotide
gcggcuaguugauucugca

SEQ ID NO: 1382500 - RNA, 19 nt, Artificial Sequence
  Description of Artificial Sequence: Synthetic oligonucleotide
ggccaaaagccuugcuguc

SEQ ID NO: 1382501 - RNA, 19 nt, Artificial Sequence
  Description of Artificial Sequence: Synthetic oligonucleotide
ccgacccucccuuccagag

SEQ ID NO: 1382502 - RNA, 19 nt, Artificial Sequence
  Description of Artificial Sequence: Synthetic oligonucleotide
agggacucggcuaggucaa

SEQ ID NO: 1382503 - RNA, 19 nt, Artificial Sequence
  Description of Artificial Sequence: Synthetic oligonucleotide
ggcaugcgccacaccaacg

SEQ ID NO: 1382504 - RNA, 19 nt, Artificial Sequence
  Description of Artificial Sequence: Synthetic oligonucleotide
aagucgcaguguacaccca

SEQ ID NO: 1382505 - RNA, 19 nt, Artificial Sequence
  Description of Artificial Sequence: Synthetic oligonucleotide
ggugcgggcauuguagaaa

SEQ ID NO: 1382506 - RNA, 19 nt, Artificial Sequence
  Description of Artificial Sequence: Synthetic oligonucleotide
ggugaggcugguauuggaa

SEQ ID NO: 1382507 - RNA, 19 nt, Artificial Sequence
  Description of Artificial Sequence: Synthetic oligonucleotide
caauaaugcuccccaccgu

SEQ ID NO: 1382508 - RNA, 19 nt, Artificial Sequence
  Description of Artificial Sequence: Synthetic oligonucleotide
ugcagccggcagccaauua

SEQ ID NO: 1382509 - RNA, 19 nt, Artificial Sequence
  Description of Artificial Sequence: Synthetic oligonucleotide
cguuccugugcaaagucca

SEQ ID NO: 1382510 - RNA, 19 nt, Artificial Sequence
  Description of Artificial Sequence: Synthetic oligonucleotide
ggucuccccgaccccgccg

SEQ ID NO: 1382511 - RNA, 19 nt, Artificial Sequence
  Description of Artificial Sequence: Synthetic oligonucleotide
uaucggccaccagggacuc

SEQ ID NO: 1382512 - RNA, 19 nt, Artificial Sequence
  Description of Artificial Sequence: Synthetic oligonucleotide
ucgcugucugcugccugca

SEQ ID NO: 1382513 - RNA, 19 nt, Artificial Sequence
  Description of Artificial Sequence: Synthetic oligonucleotide
cagggcccgagugcaggcg

SEQ ID NO: 1382514 - RNA, 19 nt, Artificial Sequence
  Description of Artificial Sequence: Synthetic oligonucleotide
cccgcuucuguaggcagcg

SEQ ID NO: 1382515 - RNA, 19 nt, Artificial Sequence
  Description of Artificial Sequence: Synthetic oligonucleotide
caggcaugcgccacaccaa

SEQ ID NO: 1382516 - RNA, 19 nt, Artificial Sequence
  Description of Artificial Sequence: Synthetic oligonucleotide
augcagacaccaggaugca

SEQ ID NO: 1382517 - RNA, 19 nt, Artificial Sequence
  Description of Artificial Sequence: Synthetic oligonucleotide
cagcaccgacaugagggac

SEQ ID NO: 1382518 - RNA, 19 nt, Artificial Sequence
  Description of Artificial Sequence: Synthetic oligonucleotide
gugaagcggucccgucccc

SEQ ID NO: 1382519 - RNA, 19 nt, Artificial Sequence
  Description of Artificial Sequence: Synthetic oligonucleotide
caaucaggcacagggcugu

SEQ ID NO: 1382520 - RNA, 19 nt, Artificial Sequence
  Description of Artificial Sequence: Synthetic oligonucleotide
ugcgguacuccagcacgua

SEQ ID NO: 1382521 - RNA, 19 nt, Artificial Sequence
  Description of Artificial Sequence: Synthetic oligonucleotide
ccaacgucacacaguuauc

SEQ ID NO: 1382522 - RNA, 19 nt, Artificial Sequence
  Description of Artificial Sequence: Synthetic oligonucleotide
uccaggggugguccuccuu

SEQ ID NO: 1382523 - RNA, 19 nt, Artificial Sequence
  Description of Artificial Sequence: Synthetic oligonucleotide
cuggcagaucggccccggc

SEQ ID NO: 1382524 - RNA, 19 nt, Artificial Sequence
  Description of Artificial Sequence: Synthetic oligonucleotide
ccggcagccaauuagcccu

SEQ ID NO: 1382525 - RNA, 19 nt, Artificial Sequence
  Description of Artificial Sequence: Synthetic oligonucleotide
gcuccccaccgucaaucag

SEQ ID NO: 1382526 - RNA, 19 nt, Artificial Sequence
  Description of Artificial Sequence: Synthetic oligonucleotide
caggcuacgguaggcuaca

SEQ ID NO: 1382527 - RNA, 19 nt, Artificial Sequence
  Description of Artificial Sequence: Synthetic oligonucleotide
aggcuacgguaggcuacac

SEQ ID NO: 1382528 - RNA, 19 nt, Artificial Sequence
  Description of Artificial Sequence: Synthetic oligonucleotide
cgucaaucagcgugucccc

SEQ ID NO: 1382529 - RNA, 19 nt, Artificial Sequence
  Description of Artificial Sequence: Synthetic oligonucleotide
gcaccgacaugagggacug

SEQ ID NO: 1382530 - RNA, 19 nt, Artificial Sequence
  Description of Artificial Sequence: Synthetic oligonucleotide
ugguggcaccuaccccgcu

SEQ ID NO: 1382531 - RNA, 19 nt, Artificial Sequence
  Description of Artificial Sequence: Synthetic oligonucleotide
gcaugcgccacaccaacgu

SEQ ID NO: 1382532 - RNA, 19 nt, Artificial Sequence
  Description of Artificial Sequence: Synthetic oligonucleotide
caguguacacccaggcaau

SEQ ID NO: 1382533 - RNA, 19 nt, Artificial Sequence
  Description of Artificial Sequence: Synthetic oligonucleotide
gccuaggugaggcugguau

SEQ ID NO: 1382534 - RNA, 19 nt, Artificial Sequence
  Description of Artificial Sequence: Synthetic oligonucleotide
cagaucggccccggccuag

SEQ ID NO: 1382535 - RNA, 19 nt, Artificial Sequence
  Description of Artificial Sequence: Synthetic oligonucleotide
ggguggccccucgaaauug

SEQ ID NO: 1382536 - RNA, 19 nt, Artificial Sequence
  Description of Artificial Sequence: Synthetic oligonucleotide
ggcagaucggccccggccu

SEQ ID NO: 1382537 - RNA, 19 nt, Artificial Sequence
  Description of Artificial Sequence: Synthetic oligonucleotide
aggccuucacacggaaguu

SEQ ID NO: 1382538 - RNA, 19 nt, Artificial Sequence
  Description of Artificial Sequence: Synthetic oligonucleotide
ccucccuuccagaguuaag

SEQ ID NO: 1382539 - RNA, 19 nt, Artificial Sequence
  Description of Artificial Sequence: Synthetic oligonucleotide
cuuggcuuugagugacaau

SEQ ID NO: 1382540 - RNA, 19 nt, Artificial Sequence
  Description of Artificial Sequence: Synthetic oligonucleotide
ggaacugcugguggcaccu

SEQ ID NO: 1382541 - RNA, 19 nt, Artificial Sequence
  Description of Artificial Sequence: Synthetic oligonucleotide
gucccguccccaaggucac

SEQ ID NO: 1382542 - RNA, 19 nt, Artificial Sequence
  Description of Artificial Sequence: Synthetic oligonucleotide
gcacagggcuguccaguac

SEQ ID NO: 1382543 - RNA, 19 nt, Artificial Sequence
  Description of Artificial Sequence: Synthetic oligonucleotide
gguggcucauauugucgcu

SEQ ID NO: 1382544 - RNA, 19 nt, Artificial Sequence
  Description of Artificial Sequence: Synthetic oligonucleotide
ccccgcuucuguaggcagc

SEQ ID NO: 1382545 - RNA, 19 nt, Artificial Sequence
  Description of Artificial Sequence: Synthetic oligonucleotide
ggcaccuaccccgcuucug

SEQ ID NO: 1382546 - RNA, 19 nt, Artificial Sequence
  Description of Artificial Sequence: Synthetic oligonucleotide
aucggccaccagggacucg

SEQ ID NO: 1382547 - RNA, 19 nt, Artificial Sequence
  Description of Artificial Sequence: Synthetic oligonucleotide
gcaccguguaagacucagc

SEQ ID NO: 1382548 - RNA, 19 nt, Artificial Sequence
  Description of Artificial Sequence: Synthetic oligonucleotide
ugcaggcggcuaguugauu

SEQ ID NO: 1382549 - RNA, 19 nt, Artificial Sequence
  Description of Artificial Sequence: Synthetic oligonucleotide
cccucugguccuccauagc

SEQ ID NO: 1382550 - RNA, 19 nt, Artificial Sequence
  Description of Artificial Sequence: Synthetic oligonucleotide
cagcuaccgccuuguuaca

SEQ ID NO: 1382551 - RNA, 19 nt, Artificial Sequence
  Description of Artificial Sequence: Synthetic oligonucleotide
ggucugcgucuccucguuc

SEQ ID NO: 1382552 - RNA, 19 nt, Artificial Sequence
  Description of Artificial Sequence: Synthetic oligonucleotide
caccgucaaucagcguguc

SEQ ID NO: 1382553 - RNA, 19 nt, Artificial Sequence
  Description of Artificial Sequence: Synthetic oligonucleotide
cccuuccagaguuaaggcu

SEQ ID NO: 1382554 - RNA, 19 nt, Artificial Sequence
  Description of Artificial Sequence: Synthetic oligonucleotide
gccaaaagccuugcugucu

SEQ ID NO: 1382555 - RNA, 19 nt, Artificial Sequence
  Description of Artificial Sequence: Synthetic oligonucleotide
caccgacaugagggacugg

SEQ ID NO: 1382556 - RNA, 19 nt, Artificial Sequence
  Description of Artificial Sequence: Synthetic oligonucleotide
gcacguaguggucaaucuu

SEQ ID NO: 1382557 - RNA, 19 nt, Artificial Sequence
  Description of Artificial Sequence: Synthetic oligonucleotide
cacccaggccaaaagccuu

SEQ ID NO: 1382558 - RNA, 19 nt, Artificial Sequence
  Description of Artificial Sequence: Synthetic oligonucleotide
gcucagugugccggaugcc

SEQ ID NO: 1382559 - RNA, 19 nt, Artificial Sequence
  Description of Artificial Sequence: Synthetic oligonucleotide
cgacaaccauccaggggug

SEQ ID NO: 1382560 - RNA, 19 nt, Artificial Sequence
  Description of Artificial Sequence: Synthetic oligonucleotide
cgaaauugguccugcggua

SEQ ID NO: 1382561 - RNA, 19 nt, Artificial Sequence
  Description of Artificial Sequence: Synthetic oligonucleotide
gcaggccuguugucaccug

SEQ ID NO: 1382562 - RNA, 19 nt, Artificial Sequence
  Description of Artificial Sequence: Synthetic oligonucleotide
gaucggccccggccuaggu

SEQ ID NO: 1382563 - RNA, 19 nt, Artificial Sequence
  Description of Artificial Sequence: Synthetic oligonucleotide
aggcgggguggccccucga

SEQ ID NO: 1382564 - RNA, 19 nt, Artificial Sequence
  Description of Artificial Sequence: Synthetic oligonucleotide
cagcaccguguaagacuca

SEQ ID NO: 1382565 - RNA, 19 nt, Artificial Sequence
  Description of Artificial Sequence: Synthetic oligonucleotide
ccaccgucaaucagcgugu

SEQ ID NO: 1382566 - RNA, 19 nt, Artificial Sequence
  Description of Artificial Sequence: Synthetic oligonucleotide
cgcaguguacacccaggca

SEQ ID NO: 1382567 - RNA, 19 nt, Artificial Sequence
  Description of Artificial Sequence: Synthetic oligonucleotide
cugucaaggugugcucagu

SEQ ID NO: 1382568 - RNA, 19 nt, Artificial Sequence
  Description of Artificial Sequence: Synthetic oligonucleotide
ucccguccccaaggucacu

SEQ ID NO: 1382569 - RNA, 19 nt, Artificial Sequence
  Description of Artificial Sequence: Synthetic oligonucleotide
ggcgggguggccccucgaa

SEQ ID NO: 1382570 - RNA, 19 nt, Artificial Sequence
  Description of Artificial Sequence: Synthetic oligonucleotide
caccaacgucacacaguua

SEQ ID NO: 1382571 - RNA, 19 nt, Artificial Sequence
  Description of Artificial Sequence: Synthetic oligonucleotide
gaacugcugguggcaccua

SEQ ID NO: 1382572 - RNA, 19 nt, Artificial Sequence
  Description of Artificial Sequence: Synthetic oligonucleotide
ccgacaugagggacuggaa

SEQ ID NO: 1382573 - RNA, 19 nt, Artificial Sequence
  Description of Artificial Sequence: Synthetic oligonucleotide
gguggcaccuaccccgcuu

SEQ ID NO: 1382574 - RNA, 19 nt, Artificial Sequence
  Description of Artificial Sequence: Synthetic oligonucleotide
uaggugcggcuggcccugu

SEQ ID NO: 1382575 - RNA, 19 nt, Artificial Sequence
  Description of Artificial Sequence: Synthetic oligonucleotide
ccccagcaccguguaagac

SEQ ID NO: 1382576 - RNA, 19 nt, Artificial Sequence
  Description of Artificial Sequence: Synthetic oligonucleotide
ggaccccgacccucccuuc

SEQ ID NO: 1382577 - RNA, 19 nt, Artificial Sequence
  Description of Artificial Sequence: Synthetic oligonucleotide
ccccgacccucccuuccag

SEQ ID NO: 1382578 - RNA, 19 nt, Artificial Sequence
  Description of Artificial Sequence: Synthetic oligonucleotide
cccaggcuacgguaggcua

SEQ ID NO: 1382579 - RNA, 19 nt, Artificial Sequence
  Description of Artificial Sequence: Synthetic oligonucleotide
cgguacuccagcacguagu

SEQ ID NO: 1382580 - RNA, 19 nt, Artificial Sequence
  Description of Artificial Sequence: Synthetic oligonucleotide
ccccgggcuggcagaucgg

SEQ ID NO: 1382581 - RNA, 19 nt, Artificial Sequence
  Description of Artificial Sequence: Synthetic oligonucleotide
accccgccguggggucccc

SEQ ID NO: 1382582 - RNA, 19 nt, Artificial Sequence
  Description of Artificial Sequence: Synthetic oligonucleotide
gcggccugagggaaguccu

SEQ ID NO: 1382583 - RNA, 19 nt, Artificial Sequence
  Description of Artificial Sequence: Synthetic oligonucleotide
gggaccccgacccucccuu

SEQ ID NO: 1382584 - RNA, 19 nt, Artificial Sequence
  Description of Artificial Sequence: Synthetic oligonucleotide
gcagaucggccccggccua

SEQ ID NO: 1382585 - RNA, 19 nt, Artificial Sequence
  Description of Artificial Sequence: Synthetic oligonucleotide
ccuaggugaggcugguauu

SEQ ID NO: 1382586 - RNA, 19 nt, Artificial Sequence
  Description of Artificial Sequence: Synthetic oligonucleotide
gggguggccccucgaaauu

SEQ ID NO: 1382587 - RNA, 19 nt, Artificial Sequence
  Description of Artificial Sequence: Synthetic oligonucleotide
cccgacccucccuuccaga

SEQ ID NO: 1382588 - RNA, 19 nt, Artificial Sequence
  Description of Artificial Sequence: Synthetic oligonucleotide
ggaugcccucgacaaccau

SEQ ID NO: 1382589 - RNA, 19 nt, Artificial Sequence
  Description of Artificial Sequence: Synthetic oligonucleotide
cccucccuuccagaguuaa

SEQ ID NO: 1382590 - RNA, 19 nt, Artificial Sequence
  Description of Artificial Sequence: Synthetic oligonucleotide
caccccgggcuggcagauc

SEQ ID NO: 1382591 - RNA, 19 nt, Artificial Sequence
  Description of Artificial Sequence: Synthetic oligonucleotide
ccgaccccgccgugggguc

SEQ ID NO: 1382592 - RNA, 19 nt, Artificial Sequence
  Description of Artificial Sequence: Synthetic oligonucleotide
guccuccuugaggcggggu

SEQ ID NO: 1382593 - RNA, 19 nt, Artificial Sequence
  Description of Artificial Sequence: Synthetic oligonucleotide
ccgcuucuguaggcagcgc

SEQ ID NO: 1382594 - RNA, 19 nt, Artificial Sequence
  Description of Artificial Sequence: Synthetic oligonucleotide
gcggucccguccccaaggu

SEQ ID NO: 1382595 - RNA, 19 nt, Artificial Sequence
  Description of Artificial Sequence: Synthetic oligonucleotide
gcuguuuggugcgggcauu

SEQ ID NO: 1382596 - RNA, 19 nt, Artificial Sequence
  Description of Artificial Sequence: Synthetic oligonucleotide
ggggaccccgacccucccu

SEQ ID NO: 1382597 - RNA, 19 nt, Artificial Sequence
  Description of Artificial Sequence: Synthetic oligonucleotide
gcgccacaccaacgucaca

SEQ ID NO: 1382598 - RNA, 19 nt, Artificial Sequence
  Description of Artificial Sequence: Synthetic oligonucleotide
ccuucacacggaaguucau

SEQ ID NO: 1382599 - RNA, 19 nt, Artificial Sequence
  Description of Artificial Sequence: Synthetic oligonucleotide
cggucccguccccaagguc

SEQ ID NO: 1382600 - RNA, 19 nt, Artificial Sequence
  Description of Artificial Sequence: Synthetic oligonucleotide
cgggguggccccucgaaau

SEQ ID NO: 1382601 - RNA, 19 nt, Artificial Sequence
  Description of Artificial Sequence: Synthetic oligonucleotide
caccagcuaccgccuuguu

SEQ ID NO: 1382602 - RNA, 19 nt, Artificial Sequence
  Description of Artificial Sequence: Synthetic oligonucleotide
gcccgagugcaggcggcua

SEQ ID NO: 1382603 - RNA, 19 nt, Artificial Sequence
  Description of Artificial Sequence: Synthetic oligonucleotide
ccgagugcaggcggcuagu

SEQ ID NO: 1382604 - RNA, 19 nt, Artificial Sequence
  Description of Artificial Sequence: Synthetic oligonucleotide
ccgccuuguuacaggccuu

SEQ ID NO: 1382605 - RNA, 19 nt, Artificial Sequence
  Description of Artificial Sequence: Synthetic oligonucleotide
ccccaccgucaaucagcgu

SEQ ID NO: 1382606 - RNA, 19 nt, Artificial Sequence
  Description of Artificial Sequence: Synthetic oligonucleotide
ccaccccgggcuggcagau

SEQ ID NO: 1382607 - RNA, 19 nt, Artificial Sequence
  Description of Artificial Sequence: Synthetic oligonucleotide
cgagugcaggcggcuaguu

SEQ ID NO: 1382608 - RNA, 19 nt, Artificial Sequence
  Description of Artificial Sequence: Synthetic oligonucleotide
ucugauuccacucaggucc

SEQ ID NO: 1382609 - RNA, 19 nt, Artificial Sequence
  Description of Artificial Sequence: Synthetic oligonucleotide
ugauguaagauacagauuu

SEQ ID NO: 1382610 - RNA, 19 nt, Artificial Sequence
  Description of Artificial Sequence: Synthetic oligonucleotide
aaaugugcgcacuggagac

SEQ ID NO: 1382611 - RNA, 19 nt, Artificial Sequence
  Description of Artificial Sequence: Synthetic oligonucleotide
aaaguuauucccugcugac

SEQ ID NO: 1382612 - RNA, 19 nt, Artificial Sequence
  Description of Artificial Sequence: Synthetic oligonucleotide
agauuuugugcacagggac

SEQ ID NO: 1382613 - RNA, 19 nt, Artificial Sequence
  Description of Artificial Sequence: Synthetic oligonucleotide
gauuauuaauggcugcagg

SEQ ID NO: 1382614 - RNA, 19 nt, Artificial Sequence
  Description of Artificial Sequence: Synthetic oligonucleotide
aacucggugaucaucuucc

SEQ ID NO: 1382615 - RNA, 19 nt, Artificial Sequence
  Description of Artificial Sequence: Synthetic oligonucleotide
uuaggguucgcucugucag

SEQ ID NO: 1382616 - RNA, 19 nt, Artificial Sequence
  Description of Artificial Sequence: Synthetic oligonucleotide
aauccgcugccucugauuc

SEQ ID NO: 1382617 - RNA, 19 nt, Artificial Sequence
  Description of Artificial Sequence: Synthetic oligonucleotide
gaaagcuugaacgacuccg

SEQ ID NO: 1382618 - RNA, 19 nt, Artificial Sequence
  Description of Artificial Sequence: Synthetic oligonucleotide
ucggugaucaucuuccagg

SEQ ID NO: 1382619 - RNA, 19 nt, Artificial Sequence
  Description of Artificial Sequence: Synthetic oligonucleotide
aaaacugagcaccaaguau

SEQ ID NO: 1382620 - RNA, 19 nt, Artificial Sequence
  Description of Artificial Sequence: Synthetic oligonucleotide
gacuccgagaaguucaugg

SEQ ID NO: 1382621 - RNA, 19 nt, Artificial Sequence
  Description of Artificial Sequence: Synthetic oligonucleotide
uccgagaaguucauggccg

SEQ ID NO: 1382622 - RNA, 19 nt, Artificial Sequence
  Description of Artificial Sequence: Synthetic oligonucleotide
gacgguuauucgaagaugg

SEQ ID NO: 1382623 - RNA, 19 nt, Artificial Sequence
  Description of Artificial Sequence: Synthetic oligonucleotide
aaugugacggccauccggg

SEQ ID NO: 1382624 - RNA, 19 nt, Artificial Sequence
  Description of Artificial Sequence: Synthetic oligonucleotide
aggaccuuguacuccaagc

SEQ ID NO: 1382625 - RNA, 19 nt, Artificial Sequence
  Description of Artificial Sequence: Synthetic oligonucleotide
gaaugugacggccauccgg

SEQ ID NO: 1382626 - RNA, 19 nt, Artificial Sequence
  Description of Artificial Sequence: Synthetic oligonucleotide
ugcaaagcaggcccgaaag

SEQ ID NO: 1382627 - RNA, 19 nt, Artificial Sequence
  Description of Artificial Sequence: Synthetic oligonucleotide
gaaccugcaaagcaggccc

SEQ ID NO: 1382628 - RNA, 19 nt, Artificial Sequence
  Description of Artificial Sequence: Synthetic oligonucleotide
aggcccgaaagcuugaacg

SEQ ID NO: 1382629 - RNA, 19 nt, Artificial Sequence
  Description of Artificial Sequence: Synthetic oligonucleotide
gaggcgaucucauauuugc

SEQ ID NO: 1382630 - RNA, 19 nt, Artificial Sequence
  Description of Artificial Sequence: Synthetic oligonucleotide
uuguacuccaagcagcugu

SEQ ID NO: 1382631 - RNA, 19 nt, Artificial Sequence
  Description of Artificial Sequence: Synthetic oligonucleotide
guuguauucagaaugugac

SEQ ID NO: 1382632 - RNA, 19 nt, Artificial Sequence
  Description of Artificial Sequence: Synthetic oligonucleotide
ugcaccgacacacagccug

SEQ ID NO: 1382633 - RNA, 19 nt, Artificial Sequence
  Description of Artificial Sequence: Synthetic oligonucleotide
uaugcugagagcaggcggc

SEQ ID NO: 1382634 - RNA, 19 nt, Artificial Sequence
  Description of Artificial Sequence: Synthetic oligonucleotide
agcauuagggacauugucg

SEQ ID NO: 1382635 - RNA, 19 nt, Artificial Sequence
  Description of Artificial Sequence: Synthetic oligonucleotide
gaagugauccuugcuaagg

SEQ ID NO: 1382636 - RNA, 19 nt, Artificial Sequence
  Description of Artificial Sequence: Synthetic oligonucleotide
aaggaauccccacuuaaau

SEQ ID NO: 1382637 - RNA, 19 nt, Artificial Sequence
  Description of Artificial Sequence: Synthetic oligonucleotide
uauucgaagauggaauuca

SEQ ID NO: 1382638 - RNA, 19 nt, Artificial Sequence
  Description of Artificial Sequence: Synthetic oligonucleotide
gaaaguuauucccugcuga

SEQ ID NO: 1382639 - RNA, 19 nt, Artificial Sequence
  Description of Artificial Sequence: Synthetic oligonucleotide
gcauguauacagcugaagg

SEQ ID NO: 1382640 - RNA, 19 nt, Artificial Sequence
  Description of Artificial Sequence: Synthetic oligonucleotide
acuccgagaaguucauggc

SEQ ID NO: 1382641 - RNA, 19 nt, Artificial Sequence
  Description of Artificial Sequence: Synthetic oligonucleotide
acagguacaccuugcuccc

SEQ ID NO: 1382642 - RNA, 19 nt, Artificial Sequence
  Description of Artificial Sequence: Synthetic oligonucleotide
uauuugcucucugagguag

SEQ ID NO: 1382643 - RNA, 19 nt, Artificial Sequence
  Description of Artificial Sequence: Synthetic oligonucleotide
uucaccagguaccugcacc

SEQ ID NO: 1382644 - RNA, 19 nt, Artificial Sequence
  Description of Artificial Sequence: Synthetic oligonucleotide
ugucguuucuuguugccag

SEQ ID NO: 1382645 - RNA, 19 nt, Artificial Sequence
  Description of Artificial Sequence: Synthetic oligonucleotide
accauaccugcacaaggcc

SEQ ID NO: 1382646 - RNA, 19 nt, Artificial Sequence
  Description of Artificial Sequence: Synthetic oligonucleotide
agauacagauuuugugcac

SEQ ID NO: 1382647 - RNA, 19 nt, Artificial Sequence
  Description of Artificial Sequence: Synthetic oligonucleotide
cuugauguaagauacagau

SEQ ID NO: 1382648 - RNA, 19 nt, Artificial Sequence
  Description of Artificial Sequence: Synthetic oligonucleotide
ucaccagguaccugcaccg

SEQ ID NO: 1382649 - RNA, 19 nt, Artificial Sequence
  Description of Artificial Sequence: Synthetic oligonucleotide
ugauuaaggaggcgcaccu

SEQ ID NO: 1382650 - RNA, 19 nt, Artificial Sequence
  Description of Artificial Sequence: Synthetic oligonucleotide
uugggauacuugauguaag

SEQ ID NO: 1382651 - RNA, 19 nt, Artificial Sequence
  Description of Artificial Sequence: Synthetic oligonucleotide
aaggaggcgcaccuuuccg

SEQ ID NO: 1382652 - RNA, 19 nt, Artificial Sequence
  Description of Artificial Sequence: Synthetic oligonucleotide
uuugggauacuugauguaa

SEQ ID NO: 1382653 - RNA, 19 nt, Artificial Sequence
  Description of Artificial Sequence: Synthetic oligonucleotide
ucgucgauuuugcagugcc

SEQ ID NO: 1382654 - RNA, 19 nt, Artificial Sequence
  Description of Artificial Sequence: Synthetic oligonucleotide
gauuuugugcacagggacc

SEQ ID NO: 1382655 - RNA, 19 nt, Artificial Sequence
  Description of Artificial Sequence: Synthetic oligonucleotide
uguugcuuguguugggacc

SEQ ID NO: 1382656 - RNA, 19 nt, Artificial Sequence
  Description of Artificial Sequence: Synthetic oligonucleotide
cacuuaaaugccagcacag

SEQ ID NO: 1382657 - RNA, 19 nt, Artificial Sequence
  Description of Artificial Sequence: Synthetic oligonucleotide
gaaugucccagauccagac

SEQ ID NO: 1382658 - RNA, 19 nt, Artificial Sequence
  Description of Artificial Sequence: Synthetic oligonucleotide
acguagucccugcaguccc

SEQ ID NO: 1382659 - RNA, 19 nt, Artificial Sequence
  Description of Artificial Sequence: Synthetic oligonucleotide
cagaaugugacggccaucc

SEQ ID NO: 1382660 - RNA, 19 nt, Artificial Sequence
  Description of Artificial Sequence: Synthetic oligonucleotide
acagaagugauccuugcua

SEQ ID NO: 1382661 - RNA, 19 nt, Artificial Sequence
  Description of Artificial Sequence: Synthetic oligonucleotide
cacgaagaugcucacguag

SEQ ID NO: 1382662 - RNA, 19 nt, Artificial Sequence
  Description of Artificial Sequence: Synthetic oligonucleotide
guugggaccagcagaaucc

SEQ ID NO: 1382663 - RNA, 19 nt, Artificial Sequence
  Description of Artificial Sequence: Synthetic oligonucleotide
acucauaggcgcaguaugc

SEQ ID NO: 1382664 - RNA, 19 nt, Artificial Sequence
  Description of Artificial Sequence: Synthetic oligonucleotide
aacgacuccgagaaguuca

SEQ ID NO: 1382665 - RNA, 19 nt, Artificial Sequence
  Description of Artificial Sequence: Synthetic oligonucleotide
gacugcuaggacuccaagc

SEQ ID NO: 1382666 - RNA, 19 nt, Artificial Sequence
  Description of Artificial Sequence: Synthetic oligonucleotide
ugcagaccauucuaugugc

SEQ ID NO: 1382667 - RNA, 19 nt, Artificial Sequence
  Description of Artificial Sequence: Synthetic oligonucleotide
gagacaugugcucuaggac

SEQ ID NO: 1382668 - RNA, 19 nt, Artificial Sequence
  Description of Artificial Sequence: Synthetic oligonucleotide
uccgucguagcucccaaug

SEQ ID NO: 1382669 - RNA, 19 nt, Artificial Sequence
  Description of Artificial Sequence: Synthetic oligonucleotide
uacuccaagcagcuguccc

SEQ ID NO: 1382670 - RNA, 19 nt, Artificial Sequence
  Description of Artificial Sequence: Synthetic oligonucleotide
uuauucccugcugacaggc

SEQ ID NO: 1382671 - RNA, 19 nt, Artificial Sequence
  Description of Artificial Sequence: Synthetic oligonucleotide
ucagguccuaggcauggcc

SEQ ID NO: 1382672 - RNA, 19 nt, Artificial Sequence
  Description of Artificial Sequence: Synthetic oligonucleotide
cacgugauuaaggaggcgc

SEQ ID NO: 1382673 - RNA, 19 nt, Artificial Sequence
  Description of Artificial Sequence: Synthetic oligonucleotide
aagagggagucugcagacc

SEQ ID NO: 1382674 - RNA, 19 nt, Artificial Sequence
  Description of Artificial Sequence: Synthetic oligonucleotide
uaaggaggcgcaccuuucc

SEQ ID NO: 1382675 - RNA, 19 nt, Artificial Sequence
  Description of Artificial Sequence: Synthetic oligonucleotide
ugggauacuugauguaaga

SEQ ID NO: 1382676 - RNA, 19 nt, Artificial Sequence
  Description of Artificial Sequence: Synthetic oligonucleotide
cauauuugcucucugaggu

SEQ ID NO: 1382677 - RNA, 19 nt, Artificial Sequence
  Description of Artificial Sequence: Synthetic oligonucleotide
auacacaacugccuuggga

SEQ ID NO: 1382678 - RNA, 19 nt, Artificial Sequence
  Description of Artificial Sequence: Synthetic oligonucleotide
aguuguauucagaauguga

SEQ ID NO: 1382679 - RNA, 19 nt, Artificial Sequence
  Description of Artificial Sequence: Synthetic oligonucleotide
ucauaggcgcaguaugcug

SEQ ID NO: 1382680 - RNA, 19 nt, Artificial Sequence
  Description of Artificial Sequence: Synthetic oligonucleotide
cauugucguuucuuguugc

SEQ ID NO: 1382681 - RNA, 19 nt, Artificial Sequence
  Description of Artificial Sequence: Synthetic oligonucleotide
uucggggcccacucgaucc

SEQ ID NO: 1382682 - RNA, 19 nt, Artificial Sequence
  Description of Artificial Sequence: Synthetic oligonucleotide
acuagccgguacuggacac

SEQ ID NO: 1382683 - RNA, 19 nt, Artificial Sequence
  Description of Artificial Sequence: Synthetic oligonucleotide
auuaaggaggcgcaccuuu

SEQ ID NO: 1382684 - RNA, 19 nt, Artificial Sequence
  Description of Artificial Sequence: Synthetic oligonucleotide
aucccggaccacuagccgg

SEQ ID NO: 1382685 - RNA, 19 nt, Artificial Sequence
  Description of Artificial Sequence: Synthetic oligonucleotide
uccaggcauguauacagcu

SEQ ID NO: 1382686 - RNA, 19 nt, Artificial Sequence
  Description of Artificial Sequence: Synthetic oligonucleotide
cuccgagaaguucauggcc

SEQ ID NO: 1382687 - RNA, 19 nt, Artificial Sequence
  Description of Artificial Sequence: Synthetic oligonucleotide
cacucauaggcgcaguaug

SEQ ID NO: 1382688 - RNA, 19 nt, Artificial Sequence
  Description of Artificial Sequence: Synthetic oligonucleotide
uaaggagggccaaggaauc

SEQ ID NO: 1382689 - RNA, 19 nt, Artificial Sequence
  Description of Artificial Sequence: Synthetic oligonucleotide
aggagggccaaggaauccc

SEQ ID NO: 1382690 - RNA, 19 nt, Artificial Sequence
  Description of Artificial Sequence: Synthetic oligonucleotide
uuauucgaagauggaauuc

SEQ ID NO: 1382691 - RNA, 19 nt, Artificial Sequence
  Description of Artificial Sequence: Synthetic oligonucleotide
aaguuauucccugcugaca

SEQ ID NO: 1382692 - RNA, 19 nt, Artificial Sequence
  Description of Artificial Sequence: Synthetic oligonucleotide
uugauguaagauacagauu

SEQ ID NO: 1382693 - RNA, 19 nt, Artificial Sequence
  Description of Artificial Sequence: Synthetic oligonucleotide
acaucccggaccacuagcc

SEQ ID NO: 1382694 - RNA, 19 nt, Artificial Sequence
  Description of Artificial Sequence: Synthetic oligonucleotide
ugagcaccaaguaucccau

SEQ ID NO: 1382695 - RNA, 19 nt, Artificial Sequence
  Description of Artificial Sequence: Synthetic oligonucleotide
gacuugaugcccagggacc

SEQ ID NO: 1382696 - RNA, 19 nt, Artificial Sequence
  Description of Artificial Sequence: Synthetic oligonucleotide
uuagggacauugucguuuc

SEQ ID NO: 1382697 - RNA, 19 nt, Artificial Sequence
  Description of Artificial Sequence: Synthetic oligonucleotide
gugcucuaggaccacaaac

SEQ ID NO: 1382698 - RNA, 19 nt, Artificial Sequence
  Description of Artificial Sequence: Synthetic oligonucleotide
auuagggacauugucguuu

SEQ ID NO: 1382699 - RNA, 19 nt, Artificial Sequence
  Description of Artificial Sequence: Synthetic oligonucleotide
ucguagcucccaauggcca

SEQ ID NO: 1382700 - RNA, 19 nt, Artificial Sequence
  Description of Artificial Sequence: Synthetic oligonucleotide
uucgcucugucagcuaccg

SEQ ID NO: 1382701 - RNA, 19 nt, Artificial Sequence
  Description of Artificial Sequence: Synthetic oligonucleotide
ugacugcuaggacuccaag

SEQ ID NO: 1382702 - RNA, 19 nt, Artificial Sequence
  Description of Artificial Sequence: Synthetic oligonucleotide
uccggggagaaccugcaaa

SEQ ID NO: 1382703 - RNA, 19 nt, Artificial Sequence
  Description of Artificial Sequence: Synthetic oligonucleotide
uccagugaccauaccugca

SEQ ID NO: 1382704 - RNA, 19 nt, Artificial Sequence
  Description of Artificial Sequence: Synthetic oligonucleotide
agcauccccacacccaucu

SEQ ID NO: 1382705 - RNA, 19 nt, Artificial Sequence
  Description of Artificial Sequence: Synthetic oligonucleotide
uuaaggaggcgcaccuuuc

SEQ ID NO: 1382706 - RNA, 19 nt, Artificial Sequence
  Description of Artificial Sequence: Synthetic oligonucleotide
ucccguuguccacaggcug

SEQ ID NO: 1382707 - RNA, 19 nt, Artificial Sequence
  Description of Artificial Sequence: Synthetic oligonucleotide
caguaugcugagagcaggc

SEQ ID NO: 1382708 - RNA, 19 nt, Artificial Sequence
  Description of Artificial Sequence: Synthetic oligonucleotide
ccaaguaucccaucuggag

SEQ ID NO: 1382709 - RNA, 19 nt, Artificial Sequence
  Description of Artificial Sequence: Synthetic oligonucleotide
ugugacggccauccgggcu

SEQ ID NO: 1382710 - RNA, 19 nt, Artificial Sequence
  Description of Artificial Sequence: Synthetic oligonucleotide
gauuccacucagguccuag

SEQ ID NO: 1382711 - RNA, 19 nt, Artificial Sequence
  Description of Artificial Sequence: Synthetic oligonucleotide
uugccguccggggagaacc

SEQ ID NO: 1382712 - RNA, 19 nt, Artificial Sequence
  Description of Artificial Sequence: Synthetic oligonucleotide
auaggcgcaguaugcugag

SEQ ID NO: 1382713 - RNA, 19 nt, Artificial Sequence
  Description of Artificial Sequence: Synthetic oligonucleotide
caggcauguauacagcuga

SEQ ID NO: 1382714 - RNA, 19 nt, Artificial Sequence
  Description of Artificial Sequence: Synthetic oligonucleotide
agaaugugacggccauccg

SEQ ID NO: 1382715 - RNA, 19 nt, Artificial Sequence
  Description of Artificial Sequence: Synthetic oligonucleotide
cauaggcgcaguaugcuga

SEQ ID NO: 1382716 - RNA, 19 nt, Artificial Sequence
  Description of Artificial Sequence: Synthetic oligonucleotide
acacccaucuuaggguucg

SEQ ID NO: 1382717 - RNA, 19 nt, Artificial Sequence
  Description of Artificial Sequence: Synthetic oligonucleotide
cauugcucggggugguggg

SEQ ID NO: 1382718 - RNA, 19 nt, Artificial Sequence
  Description of Artificial Sequence: Synthetic oligonucleotide
cucgaucccugugaggucc

SEQ ID NO: 1382719 - RNA, 19 nt, Artificial Sequence
  Description of Artificial Sequence: Synthetic oligonucleotide
ucacaucccggaccacuag

SEQ ID NO: 1382720 - RNA, 19 nt, Artificial Sequence
  Description of Artificial Sequence: Synthetic oligonucleotide
uccaggucacgugauuaag

SEQ ID NO: 1382721 - RNA, 19 nt, Artificial Sequence
  Description of Artificial Sequence: Synthetic oligonucleotide
agggaccagacgguuauuc

SEQ ID NO: 1382722 - RNA, 19 nt, Artificial Sequence
  Description of Artificial Sequence: Synthetic oligonucleotide
agccauucggggcccacuc

SEQ ID NO: 1382723 - RNA, 19 nt, Artificial Sequence
  Description of Artificial Sequence: Synthetic oligonucleotide
gugauuaaggaggcgcacc

SEQ ID NO: 1382724 - RNA, 19 nt, Artificial Sequence
  Description of Artificial Sequence: Synthetic oligonucleotide
caggucacgugauuaagga

SEQ ID NO: 1382725 - RNA, 19 nt, Artificial Sequence
  Description of Artificial Sequence: Synthetic oligonucleotide
gggacauugucguuucuug

SEQ ID NO: 1382726 - RNA, 19 nt, Artificial Sequence
  Description of Artificial Sequence: Synthetic oligonucleotide
acugagcaccaaguauccc

SEQ ID NO: 1382727 - RNA, 19 nt, Artificial Sequence
  Description of Artificial Sequence: Synthetic oligonucleotide
ggagacaugugcucuagga

SEQ ID NO: 1382728 - RNA, 19 nt, Artificial Sequence
  Description of Artificial Sequence: Synthetic oligonucleotide
auucggggcccacucgauc

SEQ ID NO: 1382729 - RNA, 19 nt, Artificial Sequence
  Description of Artificial Sequence: Synthetic oligonucleotide
uucacaucccggaccacua

SEQ ID NO: 1382730 - RNA, 19 nt, Artificial Sequence
  Description of Artificial Sequence: Synthetic oligonucleotide
guacuggacacaggaagcc

SEQ ID NO: 1382731 - RNA, 19 nt, Artificial Sequence
  Description of Artificial Sequence: Synthetic oligonucleotide
acuuaaaugccagcacagu

SEQ ID NO: 1382732 - RNA, 19 nt, Artificial Sequence
  Description of Artificial Sequence: Synthetic oligonucleotide
uugucguuucuuguugcca

SEQ ID NO: 1382733 - RNA, 19 nt, Artificial Sequence
  Description of Artificial Sequence: Synthetic oligonucleotide
ggauuauuaauggcugcag

SEQ ID NO: 1382734 - RNA, 19 nt, Artificial Sequence
  Description of Artificial Sequence: Synthetic oligonucleotide
cucugauuccacucagguc

SEQ ID NO: 1382735 - RNA, 19 nt, Artificial Sequence
  Description of Artificial Sequence: Synthetic oligonucleotide
auccgcugccucugauucc

SEQ ID NO: 1382736 - RNA, 19 nt, Artificial Sequence
  Description of Artificial Sequence: Synthetic oligonucleotide
gauguugcuuguguuggga

SEQ ID NO: 1382737 - RNA, 19 nt, Artificial Sequence
  Description of Artificial Sequence: Synthetic oligonucleotide
accagacgguuauucgaag

SEQ ID NO: 1382738 - RNA, 19 nt, Artificial Sequence
  Description of Artificial Sequence: Synthetic oligonucleotide
agacgguuauucgaagaug

SEQ ID NO: 1382739 - RNA, 19 nt, Artificial Sequence
  Description of Artificial Sequence: Synthetic oligonucleotide
ugugcucuaggaccacaaa

SEQ ID NO: 1382740 - RNA, 19 nt, Artificial Sequence
  Description of Artificial Sequence: Synthetic oligonucleotide
ccaagcacuggaaagucac

SEQ ID NO: 1382741 - RNA, 19 nt, Artificial Sequence
  Description of Artificial Sequence: Synthetic oligonucleotide
gaugcucacguagucccug

SEQ ID NO: 1382742 - RNA, 19 nt, Artificial Sequence
  Description of Artificial Sequence: Synthetic oligonucleotide
ugggugucggugucaaagu

SEQ ID NO: 1382743 - RNA, 19 nt, Artificial Sequence
  Description of Artificial Sequence: Synthetic oligonucleotide
gacuccaagccacagacuu

SEQ ID NO: 1382744 - RNA, 19 nt, Artificial Sequence
  Description of Artificial Sequence: Synthetic oligonucleotide
ugugcagauguugcuugug

SEQ ID NO: 1382745 - RNA, 19 nt, Artificial Sequence
  Description of Artificial Sequence: Synthetic oligonucleotide
caucuuaggguucgcucug

SEQ ID NO: 1382746 - RNA, 19 nt, Artificial Sequence
  Description of Artificial Sequence: Synthetic oligonucleotide
cagguagcggccaucccug

SEQ ID NO: 1382747 - RNA, 19 nt, Artificial Sequence
  Description of Artificial Sequence: Synthetic oligonucleotide
gggaccagacgguuauucg

SEQ ID NO: 1382748 - RNA, 19 nt, Artificial Sequence
  Description of Artificial Sequence: Synthetic oligonucleotide
caucccggaccacuagccg

SEQ ID NO: 1382749 - RNA, 19 nt, Artificial Sequence
  Description of Artificial Sequence: Synthetic oligonucleotide
cacaucccggaccacuagc

SEQ ID NO: 1382750 - RNA, 19 nt, Artificial Sequence
  Description of Artificial Sequence: Synthetic oligonucleotide
gguagagagggcaccagcc

SEQ ID NO: 1382751 - RNA, 19 nt, Artificial Sequence
  Description of Artificial Sequence: Synthetic oligonucleotide
gucguagcucccaauggcc

SEQ ID NO: 1382752 - RNA, 19 nt, Artificial Sequence
  Description of Artificial Sequence: Synthetic oligonucleotide
aguucauggccgcggccag

SEQ ID NO: 1382753 - RNA, 19 nt, Artificial Sequence
  Description of Artificial Sequence: Synthetic oligonucleotide
aaccugcaaagcaggcccg

SEQ ID NO: 1382754 - RNA, 19 nt, Artificial Sequence
  Description of Artificial Sequence: Synthetic oligonucleotide
cugccagucacugcacacg

SEQ ID NO: 1382755 - RNA, 19 nt, Artificial Sequence
  Description of Artificial Sequence: Synthetic oligonucleotide
acuugauguaagauacaga

SEQ ID NO: 1382756 - RNA, 19 nt, Artificial Sequence
  Description of Artificial Sequence: Synthetic oligonucleotide
gaucccugugagguccugg

SEQ ID NO: 1382757 - RNA, 19 nt, Artificial Sequence
  Description of Artificial Sequence: Synthetic oligonucleotide
caggcggccguccaaggag

SEQ ID NO: 1382758 - RNA, 19 nt, Artificial Sequence
  Description of Artificial Sequence: Synthetic oligonucleotide
accugcacaaggccccguc

SEQ ID NO: 1382759 - RNA, 19 nt, Artificial Sequence
  Description of Artificial Sequence: Synthetic oligonucleotide
agggugcccaaacucggug

SEQ ID NO: 1382760 - RNA, 19 nt, Artificial Sequence
  Description of Artificial Sequence: Synthetic oligonucleotide
augugacggccauccgggc

SEQ ID NO: 1382761 - RNA, 19 nt, Artificial Sequence
  Description of Artificial Sequence: Synthetic oligonucleotide
acucgaucccugugagguc

SEQ ID NO: 1382762 - RNA, 19 nt, Artificial Sequence
  Description of Artificial Sequence: Synthetic oligonucleotide
guuauucgaagauggaauu

SEQ ID NO: 1382763 - RNA, 19 nt, Artificial Sequence
  Description of Artificial Sequence: Synthetic oligonucleotide
cauccgggcuccaacagga

SEQ ID NO: 1382764 - RNA, 19 nt, Artificial Sequence
  Description of Artificial Sequence: Synthetic oligonucleotide
ucacgugauuaaggaggcg

SEQ ID NO: 1382765 - RNA, 19 nt, Artificial Sequence
  Description of Artificial Sequence: Synthetic oligonucleotide
ucguuucuuguugccagga

SEQ ID NO: 1382766 - RNA, 19 nt, Artificial Sequence
  Description of Artificial Sequence: Synthetic oligonucleotide
uuuccgucguagcucccaa

SEQ ID NO: 1382767 - RNA, 19 nt, Artificial Sequence
  Description of Artificial Sequence: Synthetic oligonucleotide
ucuuaggguucgcucuguc

SEQ ID NO: 1382768 - RNA, 19 nt, Artificial Sequence
  Description of Artificial Sequence: Synthetic oligonucleotide
auucagaaugugacggcca

SEQ ID NO: 1382769 - RNA, 19 nt, Artificial Sequence
  Description of Artificial Sequence: Synthetic oligonucleotide
guacagauggccagccgug

SEQ ID NO: 1382770 - RNA, 19 nt, Artificial Sequence
  Description of Artificial Sequence: Synthetic oligonucleotide
ucccggaccacuagccggu

SEQ ID NO: 1382771 - RNA, 19 nt, Artificial Sequence
  Description of Artificial Sequence: Synthetic oligonucleotide
gacauugucguuucuuguu

SEQ ID NO: 1382772 - RNA, 19 nt, Artificial Sequence
  Description of Artificial Sequence: Synthetic oligonucleotide
gaccacuagccgguacugg

SEQ ID NO: 1382773 - RNA, 19 nt, Artificial Sequence
  Description of Artificial Sequence: Synthetic oligonucleotide
cacguagucccugcagucc

SEQ ID NO: 1382774 - RNA, 19 nt, Artificial Sequence
  Description of Artificial Sequence: Synthetic oligonucleotide
agcuucugaaugucccaga

SEQ ID NO: 1382775 - RNA, 19 nt, Artificial Sequence
  Description of Artificial Sequence: Synthetic oligonucleotide
gguucgcucugucagcuac

SEQ ID NO: 1382776 - RNA, 19 nt, Artificial Sequence
  Description of Artificial Sequence: Synthetic oligonucleotide
ggugucggugucaaagugc

SEQ ID NO: 1382777 - RNA, 19 nt, Artificial Sequence
  Description of Artificial Sequence: Synthetic oligonucleotide
agguccuaggcauggccgu

SEQ ID NO: 1382778 - RNA, 19 nt, Artificial Sequence
  Description of Artificial Sequence: Synthetic oligonucleotide
aggaggcgcaccuuuccgu

SEQ ID NO: 1382779 - RNA, 19 nt, Artificial Sequence
  Description of Artificial Sequence: Synthetic oligonucleotide
ccuugggauuauuaauggc

SEQ ID NO: 1382780 - RNA, 19 nt, Artificial Sequence
  Description of Artificial Sequence: Synthetic oligonucleotide
gauccuugcuaaggagggc

SEQ ID NO: 1382781 - RNA, 19 nt, Artificial Sequence
  Description of Artificial Sequence: Synthetic oligonucleotide
ccgacacacagccugcugg

SEQ ID NO: 1382782 - RNA, 19 nt, Artificial Sequence
  Description of Artificial Sequence: Synthetic oligonucleotide
ugcacacgaagaugcucac

SEQ ID NO: 1382783 - RNA, 19 nt, Artificial Sequence
  Description of Artificial Sequence: Synthetic oligonucleotide
uccuaggcauggccguccc

SEQ ID NO: 1382784 - RNA, 19 nt, Artificial Sequence
  Description of Artificial Sequence: Synthetic oligonucleotide
aggccccgucuguacaugg

SEQ ID NO: 1382785 - RNA, 19 nt, Artificial Sequence
  Description of Artificial Sequence: Synthetic oligonucleotide
cagcuucugaaugucccag

SEQ ID NO: 1382786 - RNA, 19 nt, Artificial Sequence
  Description of Artificial Sequence: Synthetic oligonucleotide
ugguccaggcauguauaca

SEQ ID NO: 1382787 - RNA, 19 nt, Artificial Sequence
  Description of Artificial Sequence: Synthetic oligonucleotide
gcuuccuuauacacaacug

SEQ ID NO: 1382788 - RNA, 19 nt, Artificial Sequence
  Description of Artificial Sequence: Synthetic oligonucleotide
cuugaacgacuccgagaag

SEQ ID NO: 1382789 - RNA, 19 nt, Artificial Sequence
  Description of Artificial Sequence: Synthetic oligonucleotide
ugcucacguagucccugca

SEQ ID NO: 1382790 - RNA, 19 nt, Artificial Sequence
  Description of Artificial Sequence: Synthetic oligonucleotide
gugacggccauccgggcuc

SEQ ID NO: 1382791 - RNA, 19 nt, Artificial Sequence
  Description of Artificial Sequence: Synthetic oligonucleotide
augcccagggaccacucau

SEQ ID NO: 1382792 - RNA, 19 nt, Artificial Sequence
  Description of Artificial Sequence: Synthetic oligonucleotide
gaccagacgguuauucgaa

SEQ ID NO: 1382793 - RNA, 19 nt, Artificial Sequence
  Description of Artificial Sequence: Synthetic oligonucleotide
ucgauuuugcagugccauu

SEQ ID NO: 1382794 - RNA, 19 nt, Artificial Sequence
  Description of Artificial Sequence: Synthetic oligonucleotide
gccgguacuggacacagga

SEQ ID NO: 1382795 - RNA, 19 nt, Artificial Sequence
  Description of Artificial Sequence: Synthetic oligonucleotide
cagucacugcacacgaaga

SEQ ID NO: 1382796 - RNA, 19 nt, Artificial Sequence
  Description of Artificial Sequence: Synthetic oligonucleotide
accaaguaucccaucugga

SEQ ID NO: 1382797 - RNA, 19 nt, Artificial Sequence
  Description of Artificial Sequence: Synthetic oligonucleotide
gcgcacuggagacaugugc

SEQ ID NO: 1382798 - RNA, 19 nt, Artificial Sequence
  Description of Artificial Sequence: Synthetic oligonucleotide
aacugccuugggauuauua

SEQ ID NO: 1382799 - RNA, 19 nt, Artificial Sequence
  Description of Artificial Sequence: Synthetic oligonucleotide
acgugauuaaggaggcgca

SEQ ID NO: 1382800 - RNA, 19 nt, Artificial Sequence
  Description of Artificial Sequence: Synthetic oligonucleotide
ugccaaggccagguagcgg

SEQ ID NO: 1382801 - RNA, 19 nt, Artificial Sequence
  Description of Artificial Sequence: Synthetic oligonucleotide
auaccugcacaaggccccg

SEQ ID NO: 1382802 - RNA, 19 nt, Artificial Sequence
  Description of Artificial Sequence: Synthetic oligonucleotide
caaagugccggaggagcug

SEQ ID NO: 1382803 - RNA, 19 nt, Artificial Sequence
  Description of Artificial Sequence: Synthetic oligonucleotide
cagauccagacagcauuag

SEQ ID NO: 1382804 - RNA, 19 nt, Artificial Sequence
  Description of Artificial Sequence: Synthetic oligonucleotide
gagcccucgucgauuuugc

SEQ ID NO: 1382805 - RNA, 19 nt, Artificial Sequence
  Description of Artificial Sequence: Synthetic oligonucleotide
ggaccacagguacaccuug

SEQ ID NO: 1382806 - RNA, 19 nt, Artificial Sequence
  Description of Artificial Sequence: Synthetic oligonucleotide
cacucgaucccugugaggu

SEQ ID NO: 1382807 - RNA, 19 nt, Artificial Sequence
  Description of Artificial Sequence: Synthetic oligonucleotide
gaucucauauuugcucucu

SEQ ID NO: 1382808 - RNA, 19 nt, Artificial Sequence
  Description of Artificial Sequence: Synthetic oligonucleotide
ccggggagaaccugcaaag

SEQ ID NO: 1382809 - RNA, 19 nt, Artificial Sequence
  Description of Artificial Sequence: Synthetic oligonucleotide
ucggggcccacucgauccc

SEQ ID NO: 1382810 - RNA, 19 nt, Artificial Sequence
  Description of Artificial Sequence: Synthetic oligonucleotide
ccacuuaaaugccagcaca

SEQ ID NO: 1382811 - RNA, 19 nt, Artificial Sequence
  Description of Artificial Sequence: Synthetic oligonucleotide
caccuuuccgucguagcuc

SEQ ID NO: 1382812 - RNA, 19 nt, Artificial Sequence
  Description of Artificial Sequence: Synthetic oligonucleotide
agguagcggccaucccugg

SEQ ID NO: 1382813 - RNA, 19 nt, Artificial Sequence
  Description of Artificial Sequence: Synthetic oligonucleotide
gagcaggcggccguccaag

SEQ ID NO: 1382814 - RNA, 19 nt, Artificial Sequence
  Description of Artificial Sequence: Synthetic oligonucleotide
cacucagguccuaggcaug

SEQ ID NO: 1382815 - RNA, 19 nt, Artificial Sequence
  Description of Artificial Sequence: Synthetic oligonucleotide
agaauccgcugccucugau

SEQ ID NO: 1382816 - RNA, 19 nt, Artificial Sequence
  Description of Artificial Sequence: Synthetic oligonucleotide
aaggccccgucuguacaug

SEQ ID NO: 1382817 - RNA, 19 nt, Artificial Sequence
  Description of Artificial Sequence: Synthetic oligonucleotide
gggugucggugucaaagug

SEQ ID NO: 1382818 - RNA, 19 nt, Artificial Sequence
  Description of Artificial Sequence: Synthetic oligonucleotide
agggacauugucguuucuu

SEQ ID NO: 1382819 - RNA, 19 nt, Artificial Sequence
  Description of Artificial Sequence: Synthetic oligonucleotide
aggcauggccgucccguug

SEQ ID NO: 1382820 - RNA, 19 nt, Artificial Sequence
  Description of Artificial Sequence: Synthetic oligonucleotide
cuucaccagguaccugcac

SEQ ID NO: 1382821 - RNA, 19 nt, Artificial Sequence
  Description of Artificial Sequence: Synthetic oligonucleotide
ccaggcauguauacagcug

SEQ ID NO: 1382822 - RNA, 19 nt, Artificial Sequence
  Description of Artificial Sequence: Synthetic oligonucleotide
cgucccguuguccacaggc

SEQ ID NO: 1382823 - RNA, 19 nt, Artificial Sequence
  Description of Artificial Sequence: Synthetic oligonucleotide
augugcgcacuggagacau

SEQ ID NO: 1382824 - RNA, 19 nt, Artificial Sequence
  Description of Artificial Sequence: Synthetic oligonucleotide
cccacuuaaaugccagcac

SEQ ID NO: 1382825 - RNA, 19 nt, Artificial Sequence
  Description of Artificial Sequence: Synthetic oligonucleotide
cucgucgauuuugcagugc

SEQ ID NO: 1382826 - RNA, 19 nt, Artificial Sequence
  Description of Artificial Sequence: Synthetic oligonucleotide
ucccgccucucugccaagg

SEQ ID NO: 1382827 - RNA, 19 nt, Artificial Sequence
  Description of Artificial Sequence: Synthetic oligonucleotide
cacuagccgguacuggaca

SEQ ID NO: 1382828 - RNA, 19 nt, Artificial Sequence
  Description of Artificial Sequence: Synthetic oligonucleotide
accacucauaggcgcagua

SEQ ID NO: 1382829 - RNA, 19 nt, Artificial Sequence
  Description of Artificial Sequence: Synthetic oligonucleotide
ggcgcaguaugcugagagc

SEQ ID NO: 1382830 - RNA, 19 nt, Artificial Sequence
  Description of Artificial Sequence: Synthetic oligonucleotide
cacacccaucuuaggguuc

SEQ ID NO: 1382831 - RNA, 19 nt, Artificial Sequence
  Description of Artificial Sequence: Synthetic oligonucleotide
cagccguggcugcuguggg

SEQ ID NO: 1382832 - RNA, 19 nt, Artificial Sequence
  Description of Artificial Sequence: Synthetic oligonucleotide
uagggacauugucguuucu

SEQ ID NO: 1382833 - RNA, 19 nt, Artificial Sequence
  Description of Artificial Sequence: Synthetic oligonucleotide
ggcccgaaagcuugaacga

SEQ ID NO: 1382834 - RNA, 19 nt, Artificial Sequence
  Description of Artificial Sequence: Synthetic oligonucleotide
aggcgcaccuuuccgucgu

SEQ ID NO: 1382835 - RNA, 19 nt, Artificial Sequence
  Description of Artificial Sequence: Synthetic oligonucleotide
acacgaagaugcucacgua

SEQ ID NO: 1382836 - RNA, 19 nt, Artificial Sequence
  Description of Artificial Sequence: Synthetic oligonucleotide
ccauucuaugugcuggauc

SEQ ID NO: 1382837 - RNA, 19 nt, Artificial Sequence
  Description of Artificial Sequence: Synthetic oligonucleotide
caggcccgaaagcuugaac

SEQ ID NO: 1382838 - RNA, 19 nt, Artificial Sequence
  Description of Artificial Sequence: Synthetic oligonucleotide
cccaucuuaggguucgcuc

SEQ ID NO: 1382839 - RNA, 19 nt, Artificial Sequence
  Description of Artificial Sequence: Synthetic oligonucleotide
ugugcgcacuggagacaug

SEQ ID NO: 1382840 - RNA, 19 nt, Artificial Sequence
  Description of Artificial Sequence: Synthetic oligonucleotide
ucgaucccugugagguccu

SEQ ID NO: 1382841 - RNA, 19 nt, Artificial Sequence
  Description of Artificial Sequence: Synthetic oligonucleotide
gcagggugcccaaacucgg

SEQ ID NO: 1382842 - RNA, 19 nt, Artificial Sequence
  Description of Artificial Sequence: Synthetic oligonucleotide
acgguuauucgaagaugga

SEQ ID NO: 1382843 - RNA, 19 nt, Artificial Sequence
  Description of Artificial Sequence: Synthetic oligonucleotide
cugcagucccgccucucug

SEQ ID NO: 1382844 - RNA, 19 nt, Artificial Sequence
  Description of Artificial Sequence: Synthetic oligonucleotide
ccgaaagcuugaacgacuc

SEQ ID NO: 1382845 - RNA, 19 nt, Artificial Sequence
  Description of Artificial Sequence: Synthetic oligonucleotide
guacuccaagcagcugucc

SEQ ID NO: 1382846 - RNA, 19 nt, Artificial Sequence
  Description of Artificial Sequence: Synthetic oligonucleotide
ccgucguagcucccaaugg

SEQ ID NO: 1382847 - RNA, 19 nt, Artificial Sequence
  Description of Artificial Sequence: Synthetic oligonucleotide
gauguaagauacagauuuu

SEQ ID NO: 1382848 - RNA, 19 nt, Artificial Sequence
  Description of Artificial Sequence: Synthetic oligonucleotide
cugacugcuaggacuccaa

SEQ ID NO: 1382849 - RNA, 19 nt, Artificial Sequence
  Description of Artificial Sequence: Synthetic oligonucleotide
gcgcaguaugcugagagca

SEQ ID NO: 1382850 - RNA, 19 nt, Artificial Sequence
  Description of Artificial Sequence: Synthetic oligonucleotide
gccagguacuugccguccg

SEQ ID NO: 1382851 - RNA, 19 nt, Artificial Sequence
  Description of Artificial Sequence: Synthetic oligonucleotide
cagacgguuauucgaagau

SEQ ID NO: 1382852 - RNA, 19 nt, Artificial Sequence
  Description of Artificial Sequence: Synthetic oligonucleotide
guagucccugcagucccgc

SEQ ID NO: 1382853 - RNA, 19 nt, Artificial Sequence
  Description of Artificial Sequence: Synthetic oligonucleotide
cuuuccgucguagcuccca

SEQ ID NO: 1382854 - RNA, 19 nt, Artificial Sequence
  Description of Artificial Sequence: Synthetic oligonucleotide
augugcucuaggaccacaa

SEQ ID NO: 1382855 - RNA, 19 nt, Artificial Sequence
  Description of Artificial Sequence: Synthetic oligonucleotide
aucuuaggguucgcucugu

SEQ ID NO: 1382856 - RNA, 19 nt, Artificial Sequence
  Description of Artificial Sequence: Synthetic oligonucleotide
ugccguccggggagaaccu

SEQ ID NO: 1382857 - RNA, 19 nt, Artificial Sequence
  Description of Artificial Sequence: Synthetic oligonucleotide
acccaucuuaggguucgcu

SEQ ID NO: 1382858 - RNA, 19 nt, Artificial Sequence
  Description of Artificial Sequence: Synthetic oligonucleotide
gccauucggggcccacucg

SEQ ID NO: 1382859 - RNA, 19 nt, Artificial Sequence
  Description of Artificial Sequence: Synthetic oligonucleotide
ugucagcuaccggcuucag

SEQ ID NO: 1382860 - RNA, 19 nt, Artificial Sequence
  Description of Artificial Sequence: Synthetic oligonucleotide
ccauugcucgggguggugg

SEQ ID NO: 1382861 - RNA, 19 nt, Artificial Sequence
  Description of Artificial Sequence: Synthetic oligonucleotide
ucauggccgcggccagccc

SEQ ID NO: 1382862 - RNA, 19 nt, Artificial Sequence
  Description of Artificial Sequence: Synthetic oligonucleotide
gcacacgaagaugcucacg

SEQ ID NO: 1382863 - RNA, 19 nt, Artificial Sequence
  Description of Artificial Sequence: Synthetic oligonucleotide
aaacuggcccagaggcgau

SEQ ID NO: 1382864 - RNA, 19 nt, Artificial Sequence
  Description of Artificial Sequence: Synthetic oligonucleotide
auugcucggggugguggga

SEQ ID NO: 1382865 - RNA, 19 nt, Artificial Sequence
  Description of Artificial Sequence: Synthetic oligonucleotide
cacaacugccuugggauua

SEQ ID NO: 1382866 - RNA, 19 nt, Artificial Sequence
  Description of Artificial Sequence: Synthetic oligonucleotide
uuccgucguagcucccaau

SEQ ID NO: 1382867 - RNA, 19 nt, Artificial Sequence
  Description of Artificial Sequence: Synthetic oligonucleotide
agaugcucacguagucccu

SEQ ID NO: 1382868 - RNA, 19 nt, Artificial Sequence
  Description of Artificial Sequence: Synthetic oligonucleotide
cccacucgaucccugugag

SEQ ID NO: 1382869 - RNA, 19 nt, Artificial Sequence
  Description of Artificial Sequence: Synthetic oligonucleotide
cugcaaagcaggcccgaaa

SEQ ID NO: 1382870 - RNA, 19 nt, Artificial Sequence
  Description of Artificial Sequence: Synthetic oligonucleotide
agguaccugcaccgacaca

SEQ ID NO: 1382871 - RNA, 19 nt, Artificial Sequence
  Description of Artificial Sequence: Synthetic oligonucleotide
ccagacgguuauucgaaga

SEQ ID NO: 1382872 - RNA, 19 nt, Artificial Sequence
  Description of Artificial Sequence: Synthetic oligonucleotide
ccaaggaguacagcaggac

SEQ ID NO: 1382873 - RNA, 19 nt, Artificial Sequence
  Description of Artificial Sequence: Synthetic oligonucleotide
cuucacaucccggaccacu

SEQ ID NO: 1382874 - RNA, 19 nt, Artificial Sequence
  Description of Artificial Sequence: Synthetic oligonucleotide
gucccacgcugccagcaca

SEQ ID NO: 1382875 - RNA, 19 nt, Artificial Sequence
  Description of Artificial Sequence: Synthetic oligonucleotide
uaggcauggccgucccguu

SEQ ID NO: 1382876 - RNA, 19 nt, Artificial Sequence
  Description of Artificial Sequence: Synthetic oligonucleotide
ccaucuuaggguucgcucu

SEQ ID NO: 1382877 - RNA, 19 nt, Artificial Sequence
  Description of Artificial Sequence: Synthetic oligonucleotide
gggucccacugaaaugugc

SEQ ID NO: 1382878 - RNA, 19 nt, Artificial Sequence
  Description of Artificial Sequence: Synthetic oligonucleotide
ggaccacuagccgguacug

SEQ ID NO: 1382879 - RNA, 19 nt, Artificial Sequence
  Description of Artificial Sequence: Synthetic oligonucleotide
cucauaggcgcaguaugcu

SEQ ID NO: 1382880 - RNA, 19 nt, Artificial Sequence
  Description of Artificial Sequence: Synthetic oligonucleotide
cgcaguaugcugagagcag

SEQ ID NO: 1382881 - RNA, 19 nt, Artificial Sequence
  Description of Artificial Sequence: Synthetic oligonucleotide
ccacagguacaccuugcuc

SEQ ID NO: 1382882 - RNA, 19 nt, Artificial Sequence
  Description of Artificial Sequence: Synthetic oligonucleotide
cuugccguccggggagaac

SEQ ID NO: 1382883 - RNA, 19 nt, Artificial Sequence
  Description of Artificial Sequence: Synthetic oligonucleotide
gagggccaaggaaucccca

SEQ ID NO: 1382884 - RNA, 19 nt, Artificial Sequence
  Description of Artificial Sequence: Synthetic oligonucleotide
ugacggccauccgggcucc

SEQ ID NO: 1382885 - RNA, 19 nt, Artificial Sequence
  Description of Artificial Sequence: Synthetic oligonucleotide
cgaagaugcucacguaguc

SEQ ID NO: 1382886 - RNA, 19 nt, Artificial Sequence
  Description of Artificial Sequence: Synthetic oligonucleotide
uaggcgcaguaugcugaga

SEQ ID NO: 1382887 - RNA, 19 nt, Artificial Sequence
  Description of Artificial Sequence: Synthetic oligonucleotide
ccagguaccugcaccgaca

SEQ ID NO: 1382888 - RNA, 19 nt, Artificial Sequence
  Description of Artificial Sequence: Synthetic oligonucleotide
ccguccggggagaaccugc

SEQ ID NO: 1382889 - RNA, 19 nt, Artificial Sequence
  Description of Artificial Sequence: Synthetic oligonucleotide
ccacucgaucccugugagg

SEQ ID NO: 1382890 - RNA, 19 nt, Artificial Sequence
  Description of Artificial Sequence: Synthetic oligonucleotide
cacagggaccagacgguua

SEQ ID NO: 1382891 - RNA, 19 nt, Artificial Sequence
  Description of Artificial Sequence: Synthetic oligonucleotide
cgaaagcuugaacgacucc

SEQ ID NO: 1382892 - RNA, 19 nt, Artificial Sequence
  Description of Artificial Sequence: Synthetic oligonucleotide
ccccgucuguacauggcac

SEQ ID NO: 1382893 - RNA, 19 nt, Artificial Sequence
  Description of Artificial Sequence: Synthetic oligonucleotide
gcaccuuuccgucguagcu

SEQ ID NO: 1382894 - RNA, 19 nt, Artificial Sequence
  Description of Artificial Sequence: Synthetic oligonucleotide
cccucgucgauuuugcagu

SEQ ID NO: 1382895 - RNA, 19 nt, Artificial Sequence
  Description of Artificial Sequence: Synthetic oligonucleotide
gccccgucuguacauggca

SEQ ID NO: 1382896 - RNA, 19 nt, Artificial Sequence
  Description of Artificial Sequence: Synthetic oligonucleotide
ccucgucgauuuugcagug

SEQ ID NO: 1382897 - RNA, 19 nt, Artificial Sequence
  Description of Artificial Sequence: Synthetic oligonucleotide
cgcaccuuuccgucguagc

SEQ ID NO: 1382898 - RNA, 19 nt, Artificial Sequence
  Description of Artificial Sequence: Synthetic oligonucleotide
gcccgaaagcuugaacgac

SEQ ID NO: 1382899 - RNA, 19 nt, Artificial Sequence
  Description of Artificial Sequence: Synthetic oligonucleotide
ccccacuuaaaugccagca

SEQ ID NO: 1382900 - RNA, 19 nt, Artificial Sequence
  Description of Artificial Sequence: Synthetic oligonucleotide
cccuguacagauggccagc

SEQ ID NO: 1382901 - RNA, 19 nt, Artificial Sequence
  Description of Artificial Sequence: Synthetic oligonucleotide
gggauacuugauguaagau

SEQ ID NO: 1382902 - RNA, 19 nt, Artificial Sequence
  Description of Artificial Sequence: Synthetic oligonucleotide
gauuaaggaggcgcaccuu

SEQ ID NO: 1382903 - RNA, 19 nt, Artificial Sequence
  Description of Artificial Sequence: Synthetic oligonucleotide
ccagauccagacagcauua

SEQ ID NO: 1382904 - RNA, 19 nt, Artificial Sequence
  Description of Artificial Sequence: Synthetic oligonucleotide
cguagucccugcagucccg

SEQ ID NO: 1382905 - RNA, 19 nt, Artificial Sequence
  Description of Artificial Sequence: Synthetic oligonucleotide
gggaccacucauaggcgca

SEQ ID NO: 1382906 - RNA, 19 nt, Artificial Sequence
  Description of Artificial Sequence: Synthetic oligonucleotide
ccgucuguacauggcacac

SEQ ID NO: 1382907 - RNA, 19 nt, Artificial Sequence
  Description of Artificial Sequence: Synthetic oligonucleotide
ugauuccacucagguccua

SEQ ID NO: 1382908 - RNA, 19 nt, Artificial Sequence
  Description of Artificial Sequence: Synthetic oligonucleotide
ccauucggggcccacucga

SEQ ID NO: 1382909 - RNA, 19 nt, Artificial Sequence
  Description of Artificial Sequence: Synthetic oligonucleotide
ggcauggccgucccguugu

SEQ ID NO: 1382910 - RNA, 19 nt, Artificial Sequence
  Description of Artificial Sequence: Synthetic oligonucleotide
cgugauuaaggaggcgcac

SEQ ID NO: 1382911 - RNA, 19 nt, Artificial Sequence
  Description of Artificial Sequence: Synthetic oligonucleotide
cgagaaguucauggccgcg

SEQ ID NO: 1382912 - RNA, 19 nt, Artificial Sequence
  Description of Artificial Sequence: Synthetic oligonucleotide
cccgucuguacauggcaca

SEQ ID NO: 1382913 - RNA, 19 nt, Artificial Sequence
  Description of Artificial Sequence: Synthetic oligonucleotide
cacccaucuuaggguucgc

SEQ ID NO: 1382914 - RNA, 19 nt, Artificial Sequence
  Description of Artificial Sequence: Synthetic oligonucleotide
cccgaaagcuugaacgacu

SEQ ID NO: 1382915 - RNA, 19 nt, Artificial Sequence
  Description of Artificial Sequence: Synthetic oligonucleotide
caaggccccgucuguacau

SEQ ID NO: 1382916 - RNA, 19 nt, Artificial Sequence
  Description of Artificial Sequence: Synthetic oligonucleotide
cauuagggacauugucguu

SEQ ID NO: 1382917 - RNA, 19 nt, Artificial Sequence
  Description of Artificial Sequence: Synthetic oligonucleotide
cccagaggcgaucucauau

SEQ ID NO: 1382918 - RNA, 19 nt, Artificial Sequence
  Description of Artificial Sequence: Synthetic oligonucleotide
ggccccgucuguacauggc

SEQ ID NO: 1382919 - RNA, 19 nt, Artificial Sequence
  Description of Artificial Sequence: Synthetic oligonucleotide
gucccguuguccacaggcu

SEQ ID NO: 1382920 - RNA, 19 nt, Artificial Sequence
  Description of Artificial Sequence: Synthetic oligonucleotide
gguccuaggcauggccguc

SEQ ID NO: 1382921 - RNA, 19 nt, Artificial Sequence
  Description of Artificial Sequence: Synthetic oligonucleotide
cagggugcccaaacucggu

SEQ ID NO: 1382922 - RNA, 19 nt, Artificial Sequence
  Description of Artificial Sequence: Synthetic oligonucleotide
ggccaaggaauccccacuu

SEQ ID NO: 1382923 - RNA, 19 nt, Artificial Sequence
  Description of Artificial Sequence: Synthetic oligonucleotide
gcgcaccuuuccgucguag

SEQ ID NO: 1382924 - RNA, 19 nt, Artificial Sequence
  Description of Artificial Sequence: Synthetic oligonucleotide
cagcuaccggcuucagagu

SEQ ID NO: 1382925 - RNA, 19 nt, Artificial Sequence
  Description of Artificial Sequence: Synthetic oligonucleotide
caccagguaccugcaccga

SEQ ID NO: 1382926 - RNA, 19 nt, Artificial Sequence
  Description of Artificial Sequence: Synthetic oligonucleotide
ccguuguccacaggcugug

SEQ ID NO: 1382927 - RNA, 19 nt, Artificial Sequence
  Description of Artificial Sequence: Synthetic oligonucleotide
cggggagaaccugcaaagc

SEQ ID NO: 1382928 - RNA, 19 nt, Artificial Sequence
  Description of Artificial Sequence: Synthetic oligonucleotide
gaccacucauaggcgcagu

SEQ ID NO: 1382929 - RNA, 19 nt, Artificial Sequence
  Description of Artificial Sequence: Synthetic oligonucleotide
cauucggggcccacucgau

SEQ ID NO: 1382930 - RNA, 19 nt, Artificial Sequence
  Description of Artificial Sequence: Synthetic oligonucleotide
ggaucugguccaggcaugu

SEQ ID NO: 1382931 - RNA, 19 nt, Artificial Sequence
  Description of Artificial Sequence: Synthetic oligonucleotide
gguagcggccaucccuggu

SEQ ID NO: 1382932 - RNA, 19 nt, Artificial Sequence
  Description of Artificial Sequence: Synthetic oligonucleotide
cgucgauuuugcagugcca

SEQ ID NO: 1382933 - RNA, 19 nt, Artificial Sequence
  Description of Artificial Sequence: Synthetic oligonucleotide
cccguuguccacaggcugu

SEQ ID NO: 1382934 - RNA, 19 nt, Artificial Sequence
  Description of Artificial Sequence: Synthetic oligonucleotide
ccggaccacuagccgguac

SEQ ID NO: 1382935 - RNA, 19 nt, Artificial Sequence
  Description of Artificial Sequence: Synthetic oligonucleotide
cggugaucaucuuccaggu

SEQ ID NO: 1382936 - RNA, 19 nt, Artificial Sequence
  Description of Artificial Sequence: Synthetic oligonucleotide
ggccgucccguuguccaca

SEQ ID NO: 1382937 - RNA, 19 nt, Artificial Sequence
  Description of Artificial Sequence: Synthetic oligonucleotide
gccguccggggagaaccug

SEQ ID NO: 1382938 - RNA, 19 nt, Artificial Sequence
  Description of Artificial Sequence: Synthetic oligonucleotide
cggccauccgggcuccaac

SEQ ID NO: 1382939 - RNA, 19 nt, Artificial Sequence
  Description of Artificial Sequence: Synthetic oligonucleotide
gcugugggucccacugaaa

SEQ ID NO: 1382940 - RNA, 19 nt, Artificial Sequence
  Description of Artificial Sequence: Synthetic oligonucleotide
gcacaaggccccgucugua

SEQ ID NO: 1382941 - RNA, 19 nt, Artificial Sequence
  Description of Artificial Sequence: Synthetic oligonucleotide
gggaccacagguacaccuu

SEQ ID NO: 1382942 - RNA, 19 nt, Artificial Sequence
  Description of Artificial Sequence: Synthetic oligonucleotide
cguccggggagaaccugca

SEQ ID NO: 1382943 - RNA, 19 nt, Artificial Sequence
  Description of Artificial Sequence: Synthetic oligonucleotide
ccuugcuaaggagggccaa

SEQ ID NO: 1382944 - RNA, 19 nt, Artificial Sequence
  Description of Artificial Sequence: Synthetic oligonucleotide
cugcaccgacacacagccu

SEQ ID NO: 1382945 - RNA, 19 nt, Artificial Sequence
  Description of Artificial Sequence: Synthetic oligonucleotide
caccgacacacagccugcu

SEQ ID NO: 1382946 - RNA, 19 nt, Artificial Sequence
  Description of Artificial Sequence: Synthetic oligonucleotide
cagccauucggggcccacu

SEQ ID NO: 1382947 - RNA, 19 nt, Artificial Sequence
  Description of Artificial Sequence: Synthetic oligonucleotide
gcaggcccgaaagcuugaa

SEQ ID NO: 1382948 - RNA, 19 nt, Artificial Sequence
  Description of Artificial Sequence: Synthetic oligonucleotide
gggcccacucgaucccugu

SEQ ID NO: 1382949 - RNA, 19 nt, Artificial Sequence
  Description of Artificial Sequence: Synthetic oligonucleotide
cgucuguacauggcacaca

SEQ ID NO: 1382950 - RNA, 19 nt, Artificial Sequence
  Description of Artificial Sequence: Synthetic oligonucleotide
ccacucauaggcgcaguau

SEQ ID NO: 1382951 - RNA, 19 nt, Artificial Sequence
  Description of Artificial Sequence: Synthetic oligonucleotide
cgacuccgagaaguucaug

SEQ ID NO: 1382952 - RNA, 19 nt, Artificial Sequence
  Description of Artificial Sequence: Synthetic oligonucleotide
ccgcugccucugauuccac

SEQ ID NO: 1382953 - RNA, 19 nt, Artificial Sequence
  Description of Artificial Sequence: Synthetic oligonucleotide
ggcgcaccuuuccgucgua

SEQ ID NO: 1382954 - RNA, 19 nt, Artificial Sequence
  Description of Artificial Sequence: Synthetic oligonucleotide
ggcggccguccaaggagua

SEQ ID NO: 1382955 - RNA, 19 nt, Artificial Sequence
  Description of Artificial Sequence: Synthetic oligonucleotide
caacugccuugggauuauu

SEQ ID NO: 1382956 - RNA, 19 nt, Artificial Sequence
  Description of Artificial Sequence: Synthetic oligonucleotide
cagggaccagacgguuauu

SEQ ID NO: 1382957 - RNA, 19 nt, Artificial Sequence
  Description of Artificial Sequence: Synthetic oligonucleotide
uuuauuaccuuuaagaagc

SEQ ID NO: 1382958 - RNA, 19 nt, Artificial Sequence
  Description of Artificial Sequence: Synthetic oligonucleotide
uaauuaacaucaaugaugg

SEQ ID NO: 1382959 - RNA, 19 nt, Artificial Sequence
  Description of Artificial Sequence: Synthetic oligonucleotide
uuaauuaacaucaaugaug

SEQ ID NO: 1382960 - RNA, 19 nt, Artificial Sequence
  Description of Artificial Sequence: Synthetic oligonucleotide
aaauuauuuaacaugcugc

SEQ ID NO: 1382961 - RNA, 19 nt, Artificial Sequence
  Description of Artificial Sequence: Synthetic oligonucleotide
cuuacaauugauuuaaacg

SEQ ID NO: 1382962 - RNA, 19 nt, Artificial Sequence
  Description of Artificial Sequence: Synthetic oligonucleotide
aaauguguuaauuaacauc

SEQ ID NO: 1382963 - RNA, 19 nt, Artificial Sequence
  Description of Artificial Sequence: Synthetic oligonucleotide
uuacaauugauuuaaacgc

SEQ ID NO: 1382964 - RNA, 19 nt, Artificial Sequence
  Description of Artificial Sequence: Synthetic oligonucleotide
uuuacuuugaaauggagug

SEQ ID NO: 1382965 - RNA, 19 nt, Artificial Sequence
  Description of Artificial Sequence: Synthetic oligonucleotide
cuaaauuaaguuaaugggg

SEQ ID NO: 1382966 - RNA, 19 nt, Artificial Sequence
  Description of Artificial Sequence: Synthetic oligonucleotide
ucaauuagcagagaaagcg

SEQ ID NO: 1382967 - RNA, 19 nt, Artificial Sequence
  Description of Artificial Sequence: Synthetic oligonucleotide
agcuaaauuaaguuaaugg

SEQ ID NO: 1382968 - RNA, 19 nt, Artificial Sequence
  Description of Artificial Sequence: Synthetic oligonucleotide
ugaaaugagguucaaauga

SEQ ID NO: 1382969 - RNA, 19 nt, Artificial Sequence
  Description of Artificial Sequence: Synthetic oligonucleotide
uuacauuagacacacacug

SEQ ID NO: 1382970 - RNA, 19 nt, Artificial Sequence
  Description of Artificial Sequence: Synthetic oligonucleotide
ugauuuaaacgcaugaagc

SEQ ID NO: 1382971 - RNA, 19 nt, Artificial Sequence
  Description of Artificial Sequence: Synthetic oligonucleotide
ugaucguuaacagugaugg

SEQ ID NO: 1382972 - RNA, 19 nt, Artificial Sequence
  Description of Artificial Sequence: Synthetic oligonucleotide
uuauuuaacaugcugcuca

SEQ ID NO: 1382973 - RNA, 19 nt, Artificial Sequence
  Description of Artificial Sequence: Synthetic oligonucleotide
uuuaaacgcaugaagcugg

SEQ ID NO: 1382974 - RNA, 19 nt, Artificial Sequence
  Description of Artificial Sequence: Synthetic oligonucleotide
uaacaugcugcucagaucc

SEQ ID NO: 1382975 - RNA, 19 nt, Artificial Sequence
  Description of Artificial Sequence: Synthetic oligonucleotide
aauuauuuaacaugcugcu

SEQ ID NO: 1382976 - RNA, 19 nt, Artificial Sequence
  Description of Artificial Sequence: Synthetic oligonucleotide
uugauuuaaacgcaugaag

SEQ ID NO: 1382977 - RNA, 19 nt, Artificial Sequence
  Description of Artificial Sequence: Synthetic oligonucleotide
aauauacccgcuuucuggg

SEQ ID NO: 1382978 - RNA, 19 nt, Artificial Sequence
  Description of Artificial Sequence: Synthetic oligonucleotide
aauugauuuaaacgcauga

SEQ ID NO: 1382979 - RNA, 19 nt, Artificial Sequence
  Description of Artificial Sequence: Synthetic oligonucleotide
aauuaaguuaauggggaac

SEQ ID NO: 1382980 - RNA, 19 nt, Artificial Sequence
  Description of Artificial Sequence: Synthetic oligonucleotide
aauaauucgagauccacua

SEQ ID NO: 1382981 - RNA, 19 nt, Artificial Sequence
  Description of Artificial Sequence: Synthetic oligonucleotide
gcuaaauuaaguuaauggg

SEQ ID NO: 1382982 - RNA, 19 nt, Artificial Sequence
  Description of Artificial Sequence: Synthetic oligonucleotide
aacauuauagucaauucug

SEQ ID NO: 1382983 - RNA, 19 nt, Artificial Sequence
  Description of Artificial Sequence: Synthetic oligonucleotide
gaguggauaaaucaaauca

SEQ ID NO: 1382984 - RNA, 19 nt, Artificial Sequence
  Description of Artificial Sequence: Synthetic oligonucleotide
aagaugaagaggcauuuug

SEQ ID NO: 1382985 - RNA, 19 nt, Artificial Sequence
  Description of Artificial Sequence: Synthetic oligonucleotide
uguguaaauuuacaguuca

SEQ ID NO: 1382986 - RNA, 19 nt, Artificial Sequence
  Description of Artificial Sequence: Synthetic oligonucleotide
uuuuacuuugaaauggagu

SEQ ID NO: 1382987 - RNA, 19 nt, Artificial Sequence
  Description of Artificial Sequence: Synthetic oligonucleotide
uuaaaugaagucagguuug

SEQ ID NO: 1382988 - RNA, 19 nt, Artificial Sequence
  Description of Artificial Sequence: Synthetic oligonucleotide
auugcuaaguggcaauggc

SEQ ID NO: 1382989 - RNA, 19 nt, Artificial Sequence
  Description of Artificial Sequence: Synthetic oligonucleotide
uaaaucaaaucauggguag

SEQ ID NO: 1382990 - RNA, 19 nt, Artificial Sequence
  Description of Artificial Sequence: Synthetic oligonucleotide
auuaaguuaauggggaacg

SEQ ID NO: 1382991 - RNA, 19 nt, Artificial Sequence
  Description of Artificial Sequence: Synthetic oligonucleotide
ugugagauugcuuuauuug

SEQ ID NO: 1382992 - RNA, 19 nt, Artificial Sequence
  Description of Artificial Sequence: Synthetic oligonucleotide
uugguuuacaguagaaaag

SEQ ID NO: 1382993 - RNA, 19 nt, Artificial Sequence
  Description of Artificial Sequence: Synthetic oligonucleotide
ugguuuacaguagaaaagg

SEQ ID NO: 1382994 - RNA, 19 nt, Artificial Sequence
  Description of Artificial Sequence: Synthetic oligonucleotide
agucaauucugucaagaac

SEQ ID NO: 1382995 - RNA, 19 nt, Artificial Sequence
  Description of Artificial Sequence: Synthetic oligonucleotide
auccacuaauccuaaaugg

SEQ ID NO: 1382996 - RNA, 19 nt, Artificial Sequence
  Description of Artificial Sequence: Synthetic oligonucleotide
auucgagauccacuaaucc

SEQ ID NO: 1382997 - RNA, 19 nt, Artificial Sequence
  Description of Artificial Sequence: Synthetic oligonucleotide
ucuaaauguguuaauuaac

SEQ ID NO: 1382998 - RNA, 19 nt, Artificial Sequence
  Description of Artificial Sequence: Synthetic oligonucleotide
uucugaaugagggauaugc

SEQ ID NO: 1382999 - RNA, 19 nt, Artificial Sequence
  Description of Artificial Sequence: Synthetic oligonucleotide
ugaaauggagugauguuug

SEQ ID NO: 1383000 - RNA, 19 nt, Artificial Sequence
  Description of Artificial Sequence: Synthetic oligonucleotide
uugguuaauaauucgagau

SEQ ID NO: 1383001 - RNA, 19 nt, Artificial Sequence
  Description of Artificial Sequence: Synthetic oligonucleotide
acuguucaacauuauaguc

SEQ ID NO: 1383002 - RNA, 19 nt, Artificial Sequence
  Description of Artificial Sequence: Synthetic oligonucleotide
ucauuacguagcuagagug

SEQ ID NO: 1383003 - RNA, 19 nt, Artificial Sequence
  Description of Artificial Sequence: Synthetic oligonucleotide
auuauaaauucuugaagga

SEQ ID NO: 1383004 - RNA, 19 nt, Artificial Sequence
  Description of Artificial Sequence: Synthetic oligonucleotide
aauggggugacccauuuaa

SEQ ID NO: 1383005 - RNA, 19 nt, Artificial Sequence
  Description of Artificial Sequence: Synthetic oligonucleotide
uuuaacaugcugcucagau

SEQ ID NO: 1383006 - RNA, 19 nt, Artificial Sequence
  Description of Artificial Sequence: Synthetic oligonucleotide
caaauuauuuaacaugcug

SEQ ID NO: 1383007 - RNA, 19 nt, Artificial Sequence
  Description of Artificial Sequence: Synthetic oligonucleotide
auugaaaacaauuuuccua

SEQ ID NO: 1383008 - RNA, 19 nt, Artificial Sequence
  Description of Artificial Sequence: Synthetic oligonucleotide
acuagcgagacuucacacc

SEQ ID NO: 1383009 - RNA, 19 nt, Artificial Sequence
  Description of Artificial Sequence: Synthetic oligonucleotide
uacaauugauuuaaacgca

SEQ ID NO: 1383010 - RNA, 19 nt, Artificial Sequence
  Description of Artificial Sequence: Synthetic oligonucleotide
auuagcugggaugaaacac

SEQ ID NO: 1383011 - RNA, 19 nt, Artificial Sequence
  Description of Artificial Sequence: Synthetic oligonucleotide
uaauaauucgagauccacu

SEQ ID NO: 1383012 - RNA, 19 nt, Artificial Sequence
  Description of Artificial Sequence: Synthetic oligonucleotide
uccgucuugacacaggacu

SEQ ID NO: 1383013 - RNA, 19 nt, Artificial Sequence
  Description of Artificial Sequence: Synthetic oligonucleotide
gauccacuaauccuaaaug

SEQ ID NO: 1383014 - RNA, 19 nt, Artificial Sequence
  Description of Artificial Sequence: Synthetic oligonucleotide
aaaucacaagcaucuuccg

SEQ ID NO: 1383015 - RNA, 19 nt, Artificial Sequence
  Description of Artificial Sequence: Synthetic oligonucleotide
cauccguuacauuagacac

SEQ ID NO: 1383016 - RNA, 19 nt, Artificial Sequence
  Description of Artificial Sequence: Synthetic oligonucleotide
uggccaauuagguuggcgg

SEQ ID NO: 1383017 - RNA, 19 nt, Artificial Sequence
  Description of Artificial Sequence: Synthetic oligonucleotide
aagcacuugugucaaaaca

SEQ ID NO: 1383018 - RNA, 19 nt, Artificial Sequence
  Description of Artificial Sequence: Synthetic oligonucleotide
ugugaagcuguuucaagcc

SEQ ID NO: 1383019 - RNA, 19 nt, Artificial Sequence
  Description of Artificial Sequence: Synthetic oligonucleotide
uuauaaauucuugaaggac

SEQ ID NO: 1383020 - RNA, 19 nt, Artificial Sequence
  Description of Artificial Sequence: Synthetic oligonucleotide
cuagcgagacuucacaccg

SEQ ID NO: 1383021 - RNA, 19 nt, Artificial Sequence
  Description of Artificial Sequence: Synthetic oligonucleotide
ucaaaugaccaacuuucug

SEQ ID NO: 1383022 - RNA, 19 nt, Artificial Sequence
  Description of Artificial Sequence: Synthetic oligonucleotide
gaaaagcuaaauuaaguua

SEQ ID NO: 1383023 - RNA, 19 nt, Artificial Sequence
  Description of Artificial Sequence: Synthetic oligonucleotide
cagagaaagcgguacaucc

SEQ ID NO: 1383024 - RNA, 19 nt, Artificial Sequence
  Description of Artificial Sequence: Synthetic oligonucleotide
aaugagguucaaaugacca

SEQ ID NO: 1383025 - RNA, 19 nt, Artificial Sequence
  Description of Artificial Sequence: Synthetic oligonucleotide
acccauuuaaaauggcuuc

SEQ ID NO: 1383026 - RNA, 19 nt, Artificial Sequence
  Description of Artificial Sequence: Synthetic oligonucleotide
acaaucauggcucccaggu

SEQ ID NO: 1383027 - RNA, 19 nt, Artificial Sequence
  Description of Artificial Sequence: Synthetic oligonucleotide
aauucgagauccacuaauc

SEQ ID NO: 1383028 - RNA, 19 nt, Artificial Sequence
  Description of Artificial Sequence: Synthetic oligonucleotide
uguccucaggaauauaccc

SEQ ID NO: 1383029 - RNA, 19 nt, Artificial Sequence
  Description of Artificial Sequence: Synthetic oligonucleotide
acauuagacacacacugcu

SEQ ID NO: 1383030 - RNA, 19 nt, Artificial Sequence
  Description of Artificial Sequence: Synthetic oligonucleotide
ucaacauuauagucaauuc

SEQ ID NO: 1383031 - RNA, 19 nt, Artificial Sequence
  Description of Artificial Sequence: Synthetic oligonucleotide
uaugcuacuuacaauugau

SEQ ID NO: 1383032 - RNA, 19 nt, Artificial Sequence
  Description of Artificial Sequence: Synthetic oligonucleotide
uuagcugggaugaaacacu

SEQ ID NO: 1383033 - RNA, 19 nt, Artificial Sequence
  Description of Artificial Sequence: Synthetic oligonucleotide
caaaugaccaacuuucuga

SEQ ID NO: 1383034 - RNA, 19 nt, Artificial Sequence
  Description of Artificial Sequence: Synthetic oligonucleotide
cucagauccaugcaguagc

SEQ ID NO: 1383035 - RNA, 19 nt, Artificial Sequence
  Description of Artificial Sequence: Synthetic oligonucleotide
uguuucaagccaucuuccg

SEQ ID NO: 1383036 - RNA, 19 nt, Artificial Sequence
  Description of Artificial Sequence: Synthetic oligonucleotide
ucauuaaaugaagucaggu

SEQ ID NO: 1383037 - RNA, 19 nt, Artificial Sequence
  Description of Artificial Sequence: Synthetic oligonucleotide
cugggcauugcuaaguggc

SEQ ID NO: 1383038 - RNA, 19 nt, Artificial Sequence
  Description of Artificial Sequence: Synthetic oligonucleotide
ugagggauaugcuacuuac

SEQ ID NO: 1383039 - RNA, 19 nt, Artificial Sequence
  Description of Artificial Sequence: Synthetic oligonucleotide
uggacuguacaaucugacg

SEQ ID NO: 1383040 - RNA, 19 nt, Artificial Sequence
  Description of Artificial Sequence: Synthetic oligonucleotide
uggggaacggauuauaaau

SEQ ID NO: 1383041 - RNA, 19 nt, Artificial Sequence
  Description of Artificial Sequence: Synthetic oligonucleotide
aaugcucucucaauuagca

SEQ ID NO: 1383042 - RNA, 19 nt, Artificial Sequence
  Description of Artificial Sequence: Synthetic oligonucleotide
aaauuaaguuaauggggaa

SEQ ID NO: 1383043 - RNA, 19 nt, Artificial Sequence
  Description of Artificial Sequence: Synthetic oligonucleotide
gaauguggagucacuagcg

SEQ ID NO: 1383044 - RNA, 19 nt, Artificial Sequence
  Description of Artificial Sequence: Synthetic oligonucleotide
uucgagauccacuaauccu

SEQ ID NO: 1383045 - RNA, 19 nt, Artificial Sequence
  Description of Artificial Sequence: Synthetic oligonucleotide
uacauuagacacacacugc

SEQ ID NO: 1383046 - RNA, 19 nt, Artificial Sequence
  Description of Artificial Sequence: Synthetic oligonucleotide
uaauucgagauccacuaau

SEQ ID NO: 1383047 - RNA, 19 nt, Artificial Sequence
  Description of Artificial Sequence: Synthetic oligonucleotide
uuuggacaggucauuacgu

SEQ ID NO: 1383048 - RNA, 19 nt, Artificial Sequence
  Description of Artificial Sequence: Synthetic oligonucleotide
uucaacauuauagucaauu

SEQ ID NO: 1383049 - RNA, 19 nt, Artificial Sequence
  Description of Artificial Sequence: Synthetic oligonucleotide
aaucaaaucauggguagaa

SEQ ID NO: 1383050 - RNA, 19 nt, Artificial Sequence
  Description of Artificial Sequence: Synthetic oligonucleotide
acucugaucguuaacagug

SEQ ID NO: 1383051 - RNA, 19 nt, Artificial Sequence
  Description of Artificial Sequence: Synthetic oligonucleotide
guuugguuaauaauucgag

SEQ ID NO: 1383052 - RNA, 19 nt, Artificial Sequence
  Description of Artificial Sequence: Synthetic oligonucleotide
acauccguuacauuagaca

SEQ ID NO: 1383053 - RNA, 19 nt, Artificial Sequence
  Description of Artificial Sequence: Synthetic oligonucleotide
auccuaaauggggugaccc

SEQ ID NO: 1383054 - RNA, 19 nt, Artificial Sequence
  Description of Artificial Sequence: Synthetic oligonucleotide
uuacucugaucguuaacag

SEQ ID NO: 1383055 - RNA, 19 nt, Artificial Sequence
  Description of Artificial Sequence: Synthetic oligonucleotide
acggauuauaaauucuuga

SEQ ID NO: 1383056 - RNA, 19 nt, Artificial Sequence
  Description of Artificial Sequence: Synthetic oligonucleotide
gaguguaagcaauggacug

SEQ ID NO: 1383057 - RNA, 19 nt, Artificial Sequence
  Description of Artificial Sequence: Synthetic oligonucleotide
ugguuaauaauucgagauc

SEQ ID NO: 1383058 - RNA, 19 nt, Artificial Sequence
  Description of Artificial Sequence: Synthetic oligonucleotide
cuugguuuacaguagaaaa

SEQ ID NO: 1383059 - RNA, 19 nt, Artificial Sequence
  Description of Artificial Sequence: Synthetic oligonucleotide
uuucaagccaucuuccguc

SEQ ID NO: 1383060 - RNA, 19 nt, Artificial Sequence
  Description of Artificial Sequence: Synthetic oligonucleotide
cuagucgagguucucauug

SEQ ID NO: 1383061 - RNA, 19 nt, Artificial Sequence
  Description of Artificial Sequence: Synthetic oligonucleotide
acuaauccuaaauggggug

SEQ ID NO: 1383062 - RNA, 19 nt, Artificial Sequence
  Description of Artificial Sequence: Synthetic oligonucleotide
gauuuaaacgcaugaagcu

SEQ ID NO: 1383063 - RNA, 19 nt, Artificial Sequence
  Description of Artificial Sequence: Synthetic oligonucleotide
aaugaugguuucuuauuuu

SEQ ID NO: 1383064 - RNA, 19 nt, Artificial Sequence
  Description of Artificial Sequence: Synthetic oligonucleotide
agguuuugcuuaguaaccc

SEQ ID NO: 1383065 - RNA, 19 nt, Artificial Sequence
  Description of Artificial Sequence: Synthetic oligonucleotide
aauccuaaauggggugacc

SEQ ID NO: 1383066 - RNA, 19 nt, Artificial Sequence
  Description of Artificial Sequence: Synthetic oligonucleotide
ucgagauccacuaauccua

SEQ ID NO: 1383067 - RNA, 19 nt, Artificial Sequence
  Description of Artificial Sequence: Synthetic oligonucleotide
ugucaagcuuucaugaaau

SEQ ID NO: 1383068 - RNA, 19 nt, Artificial Sequence
  Description of Artificial Sequence: Synthetic oligonucleotide
uuaguaaccccucuugguu

SEQ ID NO: 1383069 - RNA, 19 nt, Artificial Sequence
  Description of Artificial Sequence: Synthetic oligonucleotide
acccugaccguacacgagc

SEQ ID NO: 1383070 - RNA, 19 nt, Artificial Sequence
  Description of Artificial Sequence: Synthetic oligonucleotide
gauggcuggggacacacug

SEQ ID NO: 1383071 - RNA, 19 nt, Artificial Sequence
  Description of Artificial Sequence: Synthetic oligonucleotide
gagauugcuuuauuuguac

SEQ ID NO: 1383072 - RNA, 19 nt, Artificial Sequence
  Description of Artificial Sequence: Synthetic oligonucleotide
caaucugacggaucucucg

SEQ ID NO: 1383073 - RNA, 19 nt, Artificial Sequence
  Description of Artificial Sequence: Synthetic oligonucleotide
auuauuuaacaugcugcuc

SEQ ID NO: 1383074 - RNA, 19 nt, Artificial Sequence
  Description of Artificial Sequence: Synthetic oligonucleotide
uuuguuacucugaucguua

SEQ ID NO: 1383075 - RNA, 19 nt, Artificial Sequence
  Description of Artificial Sequence: Synthetic oligonucleotide
agggauaugcuacuuacaa

SEQ ID NO: 1383076 - RNA, 19 nt, Artificial Sequence
  Description of Artificial Sequence: Synthetic oligonucleotide
ucguuaacagugauggaaa

SEQ ID NO: 1383077 - RNA, 19 nt, Artificial Sequence
  Description of Artificial Sequence: Synthetic oligonucleotide
uugcuuuauuuguacagga

SEQ ID NO: 1383078 - RNA, 19 nt, Artificial Sequence
  Description of Artificial Sequence: Synthetic oligonucleotide
ggacuguucaacauuauag

SEQ ID NO: 1383079 - RNA, 19 nt, Artificial Sequence
  Description of Artificial Sequence: Synthetic oligonucleotide
aagcuaaauuaaguuaaug

SEQ ID NO: 1383080 - RNA, 19 nt, Artificial Sequence
  Description of Artificial Sequence: Synthetic oligonucleotide
cucaauuagcagagaaagc

SEQ ID NO: 1383081 - RNA, 19 nt, Artificial Sequence
  Description of Artificial Sequence: Synthetic oligonucleotide
guuacucugaucguuaaca

SEQ ID NO: 1383082 - RNA, 19 nt, Artificial Sequence
  Description of Artificial Sequence: Synthetic oligonucleotide
aacggauuauaaauucuug

SEQ ID NO: 1383083 - RNA, 19 nt, Artificial Sequence
  Description of Artificial Sequence: Synthetic oligonucleotide
uuugcuuaguaaccccucu

SEQ ID NO: 1383084 - RNA, 19 nt, Artificial Sequence
  Description of Artificial Sequence: Synthetic oligonucleotide
agauccacuaauccuaaau

SEQ ID NO: 1383085 - RNA, 19 nt, Artificial Sequence
  Description of Artificial Sequence: Synthetic oligonucleotide
uguacccugcuccacaauc

SEQ ID NO: 1383086 - RNA, 19 nt, Artificial Sequence
  Description of Artificial Sequence: Synthetic oligonucleotide
agcacuacgaugaugacaa

SEQ ID NO: 1383087 - RNA, 19 nt, Artificial Sequence
  Description of Artificial Sequence: Synthetic oligonucleotide
aucaaugaugguuucuuau

SEQ ID NO: 1383088 - RNA, 19 nt, Artificial Sequence
  Description of Artificial Sequence: Synthetic oligonucleotide
auaugcuacuuacaauuga

SEQ ID NO: 1383089 - RNA, 19 nt, Artificial Sequence
  Description of Artificial Sequence: Synthetic oligonucleotide
uuauuaccuuuaagaagcc

SEQ ID NO: 1383090 - RNA, 19 nt, Artificial Sequence
  Description of Artificial Sequence: Synthetic oligonucleotide
cauuauagucaauucuguc

SEQ ID NO: 1383091 - RNA, 19 nt, Artificial Sequence
  Description of Artificial Sequence: Synthetic oligonucleotide
uccguuacauuagacacac

SEQ ID NO: 1383092 - RNA, 19 nt, Artificial Sequence
  Description of Artificial Sequence: Synthetic oligonucleotide
gucuaaauguguuaauuaa

SEQ ID NO: 1383093 - RNA, 19 nt, Artificial Sequence
  Description of Artificial Sequence: Synthetic oligonucleotide
aagccauuagcugggauga

SEQ ID NO: 1383094 - RNA, 19 nt, Artificial Sequence
  Description of Artificial Sequence: Synthetic oligonucleotide
uauacccgcuuucugggca

SEQ ID NO: 1383095 - RNA, 19 nt, Artificial Sequence
  Description of Artificial Sequence: Synthetic oligonucleotide
gucccugaagauuucacug

SEQ ID NO: 1383096 - RNA, 19 nt, Artificial Sequence
  Description of Artificial Sequence: Synthetic oligonucleotide
uucaaaugaccaacuuucu

SEQ ID NO: 1383097 - RNA, 19 nt, Artificial Sequence
  Description of Artificial Sequence: Synthetic oligonucleotide
ugagauugcuuuauuugua

SEQ ID NO: 1383098 - RNA, 19 nt, Artificial Sequence
  Description of Artificial Sequence: Synthetic oligonucleotide
gauaugcuacuuacaauug

SEQ ID NO: 1383099 - RNA, 19 nt, Artificial Sequence
  Description of Artificial Sequence: Synthetic oligonucleotide
uuguuuucagcugggaaga

SEQ ID NO: 1383100 - RNA, 19 nt, Artificial Sequence
  Description of Artificial Sequence: Synthetic oligonucleotide
aagcgcuucacuaauugcu

SEQ ID NO: 1383101 - RNA, 19 nt, Artificial Sequence
  Description of Artificial Sequence: Synthetic oligonucleotide
cuuuaagaagccauuagcu

SEQ ID NO: 1383102 - RNA, 19 nt, Artificial Sequence
  Description of Artificial Sequence: Synthetic oligonucleotide
ucaagaacuguacccugcu

SEQ ID NO: 1383103 - RNA, 19 nt, Artificial Sequence
  Description of Artificial Sequence: Synthetic oligonucleotide
auauacccgcuuucugggc

SEQ ID NO: 1383104 - RNA, 19 nt, Artificial Sequence
  Description of Artificial Sequence: Synthetic oligonucleotide
aucguuaacagugauggaa

SEQ ID NO: 1383105 - RNA, 19 nt, Artificial Sequence
  Description of Artificial Sequence: Synthetic oligonucleotide
ugugaaacccugaccguac

SEQ ID NO: 1383106 - RNA, 19 nt, Artificial Sequence
  Description of Artificial Sequence: Synthetic oligonucleotide
auaaaucaaaucaugggua

SEQ ID NO: 1383107 - RNA, 19 nt, Artificial Sequence
  Description of Artificial Sequence: Synthetic oligonucleotide
uugaaauggagugauguuu

SEQ ID NO: 1383108 - RNA, 19 nt, Artificial Sequence
  Description of Artificial Sequence: Synthetic oligonucleotide
uacacgagcagcagcacuc

SEQ ID NO: 1383109 - RNA, 19 nt, Artificial Sequence
  Description of Artificial Sequence: Synthetic oligonucleotide
gaugauugaaaacaauuuu

SEQ ID NO: 1383110 - RNA, 19 nt, Artificial Sequence
  Description of Artificial Sequence: Synthetic oligonucleotide
caugaaaugagguucaaau

SEQ ID NO: 1383111 - RNA, 19 nt, Artificial Sequence
  Description of Artificial Sequence: Synthetic oligonucleotide
cuaaguggcaauggcagag

SEQ ID NO: 1383112 - RNA, 19 nt, Artificial Sequence
  Description of Artificial Sequence: Synthetic oligonucleotide
accguacacgagcagcagc

SEQ ID NO: 1383113 - RNA, 19 nt, Artificial Sequence
  Description of Artificial Sequence: Synthetic oligonucleotide
aaguuaauggggaacggau

SEQ ID NO: 1383114 - RNA, 19 nt, Artificial Sequence
  Description of Artificial Sequence: Synthetic oligonucleotide
aacacugcaagcacuugug

SEQ ID NO: 1383115 - RNA, 19 nt, Artificial Sequence
  Description of Artificial Sequence: Synthetic oligonucleotide
caauugauuuaaacgcaug

SEQ ID NO: 1383116 - RNA, 19 nt, Artificial Sequence
  Description of Artificial Sequence: Synthetic oligonucleotide
uacguagcuagaguguaag

SEQ ID NO: 1383117 - RNA, 19 nt, Artificial Sequence
  Description of Artificial Sequence: Synthetic oligonucleotide
agcaaggauggcuggggac

SEQ ID NO: 1383118 - RNA, 19 nt, Artificial Sequence
  Description of Artificial Sequence: Synthetic oligonucleotide
auagucaauucugucaaga

SEQ ID NO: 1383119 - RNA, 19 nt, Artificial Sequence
  Description of Artificial Sequence: Synthetic oligonucleotide
ugaccguacacgagcagca

SEQ ID NO: 1383120 - RNA, 19 nt, Artificial Sequence
  Description of Artificial Sequence: Synthetic oligonucleotide
auugauuuaaacgcaugaa

SEQ ID NO: 1383121 - RNA, 19 nt, Artificial Sequence
  Description of Artificial Sequence: Synthetic oligonucleotide
aguacauuuuggauagaag

SEQ ID NO: 1383122 - RNA, 19 nt, Artificial Sequence
  Description of Artificial Sequence: Synthetic oligonucleotide
cagaauguggagucacuag

SEQ ID NO: 1383123 - RNA, 19 nt, Artificial Sequence
  Description of Artificial Sequence: Synthetic oligonucleotide
gguaccaaaguucuuaaaa

SEQ ID NO: 1383124 - RNA, 19 nt, Artificial Sequence
  Description of Artificial Sequence: Synthetic oligonucleotide
cacagugagcacuacgaug

SEQ ID NO: 1383125 - RNA, 19 nt, Artificial Sequence
  Description of Artificial Sequence: Synthetic oligonucleotide
uuuugcuuaguaaccccuc

SEQ ID NO: 1383126 - RNA, 19 nt, Artificial Sequence
  Description of Artificial Sequence: Synthetic oligonucleotide
ugucaagaacuguacccug

SEQ ID NO: 1383127 - RNA, 19 nt, Artificial Sequence
  Description of Artificial Sequence: Synthetic oligonucleotide
acguagcuagaguguaagc

SEQ ID NO: 1383128 - RNA, 19 nt, Artificial Sequence
  Description of Artificial Sequence: Synthetic oligonucleotide
uggauagaagcgcuucacu

SEQ ID NO: 1383129 - RNA, 19 nt, Artificial Sequence
  Description of Artificial Sequence: Synthetic oligonucleotide
ugacaaccaguauuaaaau

SEQ ID NO: 1383130 - RNA, 19 nt, Artificial Sequence
  Description of Artificial Sequence: Synthetic oligonucleotide
ccacuaauccuaaaugggg

SEQ ID NO: 1383131 - RNA, 19 nt, Artificial Sequence
  Description of Artificial Sequence: Synthetic oligonucleotide
uuaacuggcccgucuaaau

SEQ ID NO: 1383132 - RNA, 19 nt, Artificial Sequence
  Description of Artificial Sequence: Synthetic oligonucleotide
agauugcuuuauuuguaca

SEQ ID NO: 1383133 - RNA, 19 nt, Artificial Sequence
  Description of Artificial Sequence: Synthetic oligonucleotide
guuaauggggaacggauua

SEQ ID NO: 1383134 - RNA, 19 nt, Artificial Sequence
  Description of Artificial Sequence: Synthetic oligonucleotide
uacucugaucguuaacagu

SEQ ID NO: 1383135 - RNA, 19 nt, Artificial Sequence
  Description of Artificial Sequence: Synthetic oligonucleotide
agaacuguacccugcucca

SEQ ID NO: 1383136 - RNA, 19 nt, Artificial Sequence
  Description of Artificial Sequence: Synthetic oligonucleotide
gacuguucaacauuauagu

SEQ ID NO: 1383137 - RNA, 19 nt, Artificial Sequence
  Description of Artificial Sequence: Synthetic oligonucleotide
uaccaguaccagcugguca

SEQ ID NO: 1383138 - RNA, 19 nt, Artificial Sequence
  Description of Artificial Sequence: Synthetic oligonucleotide
cuuuugguacugcucugcc

SEQ ID NO: 1383139 - RNA, 19 nt, Artificial Sequence
  Description of Artificial Sequence: Synthetic oligonucleotide
cugaucguuaacagugaug

SEQ ID NO: 1383140 - RNA, 19 nt, Artificial Sequence
  Description of Artificial Sequence: Synthetic oligonucleotide
cuacuuacaauugauuuaa

SEQ ID NO: 1383141 - RNA, 19 nt, Artificial Sequence
  Description of Artificial Sequence: Synthetic oligonucleotide
auuaguggcacugccgugu

SEQ ID NO: 1383142 - RNA, 19 nt, Artificial Sequence
  Description of Artificial Sequence: Synthetic oligonucleotide
uuaucuggccaauuagguu

SEQ ID NO: 1383143 - RNA, 19 nt, Artificial Sequence
  Description of Artificial Sequence: Synthetic oligonucleotide
gagacuucacaccgaugag

SEQ ID NO: 1383144 - RNA, 19 nt, Artificial Sequence
  Description of Artificial Sequence: Synthetic oligonucleotide
ugacacaggacuguucaac

SEQ ID NO: 1383145 - RNA, 19 nt, Artificial Sequence
  Description of Artificial Sequence: Synthetic oligonucleotide
uuggcggguuuuauuaccu

SEQ ID NO: 1383146 - RNA, 19 nt, Artificial Sequence
  Description of Artificial Sequence: Synthetic oligonucleotide
uacauccguuacauuagac

SEQ ID NO: 1383147 - RNA, 19 nt, Artificial Sequence
  Description of Artificial Sequence: Synthetic oligonucleotide
uuuugguacugcucugccu

SEQ ID NO: 1383148 - RNA, 19 nt, Artificial Sequence
  Description of Artificial Sequence: Synthetic oligonucleotide
cauugcuaaguggcaaugg

SEQ ID NO: 1383149 - RNA, 19 nt, Artificial Sequence
  Description of Artificial Sequence: Synthetic oligonucleotide
uuuucacacuuuguuacuc

SEQ ID NO: 1383150 - RNA, 19 nt, Artificial Sequence
  Description of Artificial Sequence: Synthetic oligonucleotide
aggcauuuugcgccucuac

SEQ ID NO: 1383151 - RNA, 19 nt, Artificial Sequence
  Description of Artificial Sequence: Synthetic oligonucleotide
agaaaaggcagugcaaaau

SEQ ID NO: 1383152 - RNA, 19 nt, Artificial Sequence
  Description of Artificial Sequence: Synthetic oligonucleotide
agcacccaaaugccccucc

SEQ ID NO: 1383153 - RNA, 19 nt, Artificial Sequence
  Description of Artificial Sequence: Synthetic oligonucleotide
uccuaaauggggugaccca

SEQ ID NO: 1383154 - RNA, 19 nt, Artificial Sequence
  Description of Artificial Sequence: Synthetic oligonucleotide
uuugcgccucuacucauaa

SEQ ID NO: 1383155 - RNA, 19 nt, Artificial Sequence
  Description of Artificial Sequence: Synthetic oligonucleotide
agcacuugugucaaaacaa

SEQ ID NO: 1383156 - RNA, 19 nt, Artificial Sequence
  Description of Artificial Sequence: Synthetic oligonucleotide
ugguuuaacuggcccgucu

SEQ ID NO: 1383157 - RNA, 19 nt, Artificial Sequence
  Description of Artificial Sequence: Synthetic oligonucleotide
augagguucaaaugaccaa

SEQ ID NO: 1383158 - RNA, 19 nt, Artificial Sequence
  Description of Artificial Sequence: Synthetic oligonucleotide
cacagggcuucccuagucg

SEQ ID NO: 1383159 - RNA, 19 nt, Artificial Sequence
  Description of Artificial Sequence: Synthetic oligonucleotide
ucugugaaacccugaccgu

SEQ ID NO: 1383160 - RNA, 19 nt, Artificial Sequence
  Description of Artificial Sequence: Synthetic oligonucleotide
gguacauccguuacauuag

SEQ ID NO: 1383161 - RNA, 19 nt, Artificial Sequence
  Description of Artificial Sequence: Synthetic oligonucleotide
agguuggcggguuuuauua

SEQ ID NO: 1383162 - RNA, 19 nt, Artificial Sequence
  Description of Artificial Sequence: Synthetic oligonucleotide
aagcgguacauccguuaca

SEQ ID NO: 1383163 - RNA, 19 nt, Artificial Sequence
  Description of Artificial Sequence: Synthetic oligonucleotide
uaauccuaaauggggugac

SEQ ID NO: 1383164 - RNA, 19 nt, Artificial Sequence
  Description of Artificial Sequence: Synthetic oligonucleotide
acuuuguuacucugaucgu

SEQ ID NO: 1383165 - RNA, 19 nt, Artificial Sequence
  Description of Artificial Sequence: Synthetic oligonucleotide
cugaccguacacgagcagc

SEQ ID NO: 1383166 - RNA, 19 nt, Artificial Sequence
  Description of Artificial Sequence: Synthetic oligonucleotide
aggagguuuugcuuaguaa

SEQ ID NO: 1383167 - RNA, 19 nt, Artificial Sequence
  Description of Artificial Sequence: Synthetic oligonucleotide
auaauucgagauccacuaa

SEQ ID NO: 1383168 - RNA, 19 nt, Artificial Sequence
  Description of Artificial Sequence: Synthetic oligonucleotide
ggauaugcuacuuacaauu

SEQ ID NO: 1383169 - RNA, 19 nt, Artificial Sequence
  Description of Artificial Sequence: Synthetic oligonucleotide
gguuuugcuuaguaacccc

SEQ ID NO: 1383170 - RNA, 19 nt, Artificial Sequence
  Description of Artificial Sequence: Synthetic oligonucleotide
augcucucucaauuagcag

SEQ ID NO: 1383171 - RNA, 19 nt, Artificial Sequence
  Description of Artificial Sequence: Synthetic oligonucleotide
gcuagaguguaagcaaugg

SEQ ID NO: 1383172 - RNA, 19 nt, Artificial Sequence
  Description of Artificial Sequence: Synthetic oligonucleotide
acaauugauuuaaacgcau

SEQ ID NO: 1383173 - RNA, 19 nt, Artificial Sequence
  Description of Artificial Sequence: Synthetic oligonucleotide
aaccaguauuaaaaucaca

SEQ ID NO: 1383174 - RNA, 19 nt, Artificial Sequence
  Description of Artificial Sequence: Synthetic oligonucleotide
auggggaacggauuauaaa

SEQ ID NO: 1383175 - RNA, 19 nt, Artificial Sequence
  Description of Artificial Sequence: Synthetic oligonucleotide
cacuagcgagacuucacac

SEQ ID NO: 1383176 - RNA, 19 nt, Artificial Sequence
  Description of Artificial Sequence: Synthetic oligonucleotide
uucaagccaucuuccgucu

SEQ ID NO: 1383177 - RNA, 19 nt, Artificial Sequence
  Description of Artificial Sequence: Synthetic oligonucleotide
ggccaauuagguuggcggg

SEQ ID NO: 1383178 - RNA, 19 nt, Artificial Sequence
  Description of Artificial Sequence: Synthetic oligonucleotide
auuacguagcuagagugua

SEQ ID NO: 1383179 - RNA, 19 nt, Artificial Sequence
  Description of Artificial Sequence: Synthetic oligonucleotide
cuagaguguaagcaaugga

SEQ ID NO: 1383180 - RNA, 19 nt, Artificial Sequence
  Description of Artificial Sequence: Synthetic oligonucleotide
acggaucucucguucccuc

SEQ ID NO: 1383181 - RNA, 19 nt, Artificial Sequence
  Description of Artificial Sequence: Synthetic oligonucleotide
aggacuguucaacauuaua

SEQ ID NO: 1383182 - RNA, 19 nt, Artificial Sequence
  Description of Artificial Sequence: Synthetic oligonucleotide
ggucauuacguagcuagag

SEQ ID NO: 1383183 - RNA, 19 nt, Artificial Sequence
  Description of Artificial Sequence: Synthetic oligonucleotide
aauuagguuggcggguuuu

SEQ ID NO: 1383184 - RNA, 19 nt, Artificial Sequence
  Description of Artificial Sequence: Synthetic oligonucleotide
gagaaagcgguacauccgu

SEQ ID NO: 1383185 - RNA, 19 nt, Artificial Sequence
  Description of Artificial Sequence: Synthetic oligonucleotide
gucgagguucucauugucc

SEQ ID NO: 1383186 - RNA, 19 nt, Artificial Sequence
  Description of Artificial Sequence: Synthetic oligonucleotide
caggaauauacccgcuuuc

SEQ ID NO: 1383187 - RNA, 19 nt, Artificial Sequence
  Description of Artificial Sequence: Synthetic oligonucleotide
aaugagggauaugcuacuu

SEQ ID NO: 1383188 - RNA, 19 nt, Artificial Sequence
  Description of Artificial Sequence: Synthetic oligonucleotide
aagcuguuucaagccaucu

SEQ ID NO: 1383189 - RNA, 19 nt, Artificial Sequence
  Description of Artificial Sequence: Synthetic oligonucleotide
uagucgagguucucauugu

SEQ ID NO: 1383190 - RNA, 19 nt, Artificial Sequence
  Description of Artificial Sequence: Synthetic oligonucleotide
acagggcuucccuagucga

SEQ ID NO: 1383191 - RNA, 19 nt, Artificial Sequence
  Description of Artificial Sequence: Synthetic oligonucleotide
uuaauggggaacggauuau

SEQ ID NO: 1383192 - RNA, 19 nt, Artificial Sequence
  Description of Artificial Sequence: Synthetic oligonucleotide
cuaauccuaaaugggguga

SEQ ID NO: 1383193 - RNA, 19 nt, Artificial Sequence
  Description of Artificial Sequence: Synthetic oligonucleotide
agcgguacauccguuacau

SEQ ID NO: 1383194 - RNA, 19 nt, Artificial Sequence
  Description of Artificial Sequence: Synthetic oligonucleotide
cauuaaaugaagucagguu

SEQ ID NO: 1383195 - RNA, 19 nt, Artificial Sequence
  Description of Artificial Sequence: Synthetic oligonucleotide
gagcacuacgaugaugaca

SEQ ID NO: 1383196 - RNA, 19 nt, Artificial Sequence
  Description of Artificial Sequence: Synthetic oligonucleotide
uugcuuaguaaccccucuu

SEQ ID NO: 1383197 - RNA, 19 nt, Artificial Sequence
  Description of Artificial Sequence: Synthetic oligonucleotide
gcauuuugcgccucuacuc

SEQ ID NO: 1383198 - RNA, 19 nt, Artificial Sequence
  Description of Artificial Sequence: Synthetic oligonucleotide
aaauggggugacccauuua

SEQ ID NO: 1383199 - RNA, 19 nt, Artificial Sequence
  Description of Artificial Sequence: Synthetic oligonucleotide
uuuugcgccucuacucaua

SEQ ID NO: 1383200 - RNA, 19 nt, Artificial Sequence
  Description of Artificial Sequence: Synthetic oligonucleotide
agcgagacuucacaccgau

SEQ ID NO: 1383201 - RNA, 19 nt, Artificial Sequence
  Description of Artificial Sequence: Synthetic oligonucleotide
acacugcaagcacuugugu

SEQ ID NO: 1383202 - RNA, 19 nt, Artificial Sequence
  Description of Artificial Sequence: Synthetic oligonucleotide
cuuaguaaccccucuuggu

SEQ ID NO: 1383203 - RNA, 19 nt, Artificial Sequence
  Description of Artificial Sequence: Synthetic oligonucleotide
ucauuguccucaggaauau

SEQ ID NO: 1383204 - RNA, 19 nt, Artificial Sequence
  Description of Artificial Sequence: Synthetic oligonucleotide
guuacauuagacacacacu

SEQ ID NO: 1383205 - RNA, 19 nt, Artificial Sequence
  Description of Artificial Sequence: Synthetic oligonucleotide
cugucaagcuuucaugaaa

SEQ ID NO: 1383206 - RNA, 19 nt, Artificial Sequence
  Description of Artificial Sequence: Synthetic oligonucleotide
ggacaggucauuacguagc

SEQ ID NO: 1383207 - RNA, 19 nt, Artificial Sequence
  Description of Artificial Sequence: Synthetic oligonucleotide
ggauagaagcgcuucacua

SEQ ID NO: 1383208 - RNA, 19 nt, Artificial Sequence
  Description of Artificial Sequence: Synthetic oligonucleotide
uaauggggaacggauuaua

SEQ ID NO: 1383209 - RNA, 19 nt, Artificial Sequence
  Description of Artificial Sequence: Synthetic oligonucleotide
aguaaccccucuugguuua

SEQ ID NO: 1383210 - RNA, 19 nt, Artificial Sequence
  Description of Artificial Sequence: Synthetic oligonucleotide
aggucccugaagauuucac

SEQ ID NO: 1383211 - RNA, 19 nt, Artificial Sequence
  Description of Artificial Sequence: Synthetic oligonucleotide
cacuaauccuaaauggggu

SEQ ID NO: 1383212 - RNA, 19 nt, Artificial Sequence
  Description of Artificial Sequence: Synthetic oligonucleotide
cauuaguggcacugccgug

SEQ ID NO: 1383213 - RNA, 19 nt, Artificial Sequence
  Description of Artificial Sequence: Synthetic oligonucleotide
agcuguuucaagccaucuu

SEQ ID NO: 1383214 - RNA, 19 nt, Artificial Sequence
  Description of Artificial Sequence: Synthetic oligonucleotide
cuggccaauuagguuggcg

SEQ ID NO: 1383215 - RNA, 19 nt, Artificial Sequence
  Description of Artificial Sequence: Synthetic oligonucleotide
gucauuacguagcuagagu

SEQ ID NO: 1383216 - RNA, 19 nt, Artificial Sequence
  Description of Artificial Sequence: Synthetic oligonucleotide
acaggacuguucaacauua

SEQ ID NO: 1383217 - RNA, 19 nt, Artificial Sequence
  Description of Artificial Sequence: Synthetic oligonucleotide
agguucaaaugaccaacuu

SEQ ID NO: 1383218 - RNA, 19 nt, Artificial Sequence
  Description of Artificial Sequence: Synthetic oligonucleotide
agucacuagcgagacuuca

SEQ ID NO: 1383219 - RNA, 19 nt, Artificial Sequence
  Description of Artificial Sequence: Synthetic oligonucleotide
ugagcacuacgaugaugac

SEQ ID NO: 1383220 - RNA, 19 nt, Artificial Sequence
  Description of Artificial Sequence: Synthetic oligonucleotide
uuccgucuugacacaggac

SEQ ID NO: 1383221 - RNA, 19 nt, Artificial Sequence
  Description of Artificial Sequence: Synthetic oligonucleotide
ucccuagucgagguucuca

SEQ ID NO: 1383222 - RNA, 19 nt, Artificial Sequence
  Description of Artificial Sequence: Synthetic oligonucleotide
aacccugaccguacacgag

SEQ ID NO: 1383223 - RNA, 19 nt, Artificial Sequence
  Description of Artificial Sequence: Synthetic oligonucleotide
cauuacguagcuagagugu

SEQ ID NO: 1383224 - RNA, 19 nt, Artificial Sequence
  Description of Artificial Sequence: Synthetic oligonucleotide
guacauccguuacauuaga

SEQ ID NO: 1383225 - RNA, 19 nt, Artificial Sequence
  Description of Artificial Sequence: Synthetic oligonucleotide
gguuuggacaggucauuac

SEQ ID NO: 1383226 - RNA, 19 nt, Artificial Sequence
  Description of Artificial Sequence: Synthetic oligonucleotide
uggcccgucuaaauguguu

SEQ ID NO: 1383227 - RNA, 19 nt, Artificial Sequence
  Description of Artificial Sequence: Synthetic oligonucleotide
ucugccuugugaagcuguu

SEQ ID NO: 1383228 - RNA, 19 nt, Artificial Sequence
  Description of Artificial Sequence: Synthetic oligonucleotide
aguuaauggggaacggauu

SEQ ID NO: 1383229 - RNA, 19 nt, Artificial Sequence
  Description of Artificial Sequence: Synthetic oligonucleotide
auccguuacauuagacaca

SEQ ID NO: 1383230 - RNA, 19 nt, Artificial Sequence
  Description of Artificial Sequence: Synthetic oligonucleotide
uagaagcgcuucacuaauu

SEQ ID NO: 1383231 - RNA, 19 nt, Artificial Sequence
  Description of Artificial Sequence: Synthetic oligonucleotide
aucuuccgucuugacacag

SEQ ID NO: 1383232 - RNA, 19 nt, Artificial Sequence
  Description of Artificial Sequence: Synthetic oligonucleotide
ugaugacaaccaguauuaa

SEQ ID NO: 1383233 - RNA, 19 nt, Artificial Sequence
  Description of Artificial Sequence: Synthetic oligonucleotide
accccucuugguuuacagu

SEQ ID NO: 1383234 - RNA, 19 nt, Artificial Sequence
  Description of Artificial Sequence: Synthetic oligonucleotide
cucugaucguuaacaguga

SEQ ID NO: 1383235 - RNA, 19 nt, Artificial Sequence
  Description of Artificial Sequence: Synthetic oligonucleotide
gucacuagcgagacuucac

SEQ ID NO: 1383236 - RNA, 19 nt, Artificial Sequence
  Description of Artificial Sequence: Synthetic oligonucleotide
gagggauaugcuacuuaca

SEQ ID NO: 1383237 - RNA, 19 nt, Artificial Sequence
  Description of Artificial Sequence: Synthetic oligonucleotide
uagcgagacuucacaccga

SEQ ID NO: 1383238 - RNA, 19 nt, Artificial Sequence
  Description of Artificial Sequence: Synthetic oligonucleotide
uuagguuggcggguuuuau

SEQ ID NO: 1383239 - RNA, 19 nt, Artificial Sequence
  Description of Artificial Sequence: Synthetic oligonucleotide
auuuaacaugcugcucaga

SEQ ID NO: 1383240 - RNA, 19 nt, Artificial Sequence
  Description of Artificial Sequence: Synthetic oligonucleotide
uucaugaaaugagguucaa

SEQ ID NO: 1383241 - RNA, 19 nt, Artificial Sequence
  Description of Artificial Sequence: Synthetic oligonucleotide
gaagaggcauuuugcgccu

SEQ ID NO: 1383242 - RNA, 19 nt, Artificial Sequence
  Description of Artificial Sequence: Synthetic oligonucleotide
gaccguacacgagcagcag

SEQ ID NO: 1383243 - RNA, 19 nt, Artificial Sequence
  Description of Artificial Sequence: Synthetic oligonucleotide
caaugaugguuucuuauuu

SEQ ID NO: 1383244 - RNA, 19 nt, Artificial Sequence
  Description of Artificial Sequence: Synthetic oligonucleotide
gguucaaaugaccaacuuu

SEQ ID NO: 1383245 - RNA, 19 nt, Artificial Sequence
  Description of Artificial Sequence: Synthetic oligonucleotide
guacccugcuccacaauca

SEQ ID NO: 1383246 - RNA, 19 nt, Artificial Sequence
  Description of Artificial Sequence: Synthetic oligonucleotide
ccgguucuucuuuugguac

SEQ ID NO: 1383247 - RNA, 19 nt, Artificial Sequence
  Description of Artificial Sequence: Synthetic oligonucleotide
gguuggcggguuuuauuac

SEQ ID NO: 1383248 - RNA, 19 nt, Artificial Sequence
  Description of Artificial Sequence: Synthetic oligonucleotide
auacccgcuuucugggcau

SEQ ID NO: 1383249 - RNA, 19 nt, Artificial Sequence
  Description of Artificial Sequence: Synthetic oligonucleotide
auuagguuggcggguuuua

SEQ ID NO: 1383250 - RNA, 19 nt, Artificial Sequence
  Description of Artificial Sequence: Synthetic oligonucleotide
ggcagaguggauaaaucaa

SEQ ID NO: 1383251 - RNA, 19 nt, Artificial Sequence
  Description of Artificial Sequence: Synthetic oligonucleotide
gagguucaaaugaccaacu

SEQ ID NO: 1383252 - RNA, 19 nt, Artificial Sequence
  Description of Artificial Sequence: Synthetic oligonucleotide
cgcaauggacuguacaauc

SEQ ID NO: 1383253 - RNA, 19 nt, Artificial Sequence
  Description of Artificial Sequence: Synthetic oligonucleotide
ggagucacuagcgagacuu

SEQ ID NO: 1383254 - RNA, 19 nt, Artificial Sequence
  Description of Artificial Sequence: Synthetic oligonucleotide
aucugacggaucucucguu

SEQ ID NO: 1383255 - RNA, 19 nt, Artificial Sequence
  Description of Artificial Sequence: Synthetic oligonucleotide
aggucauuacguagcuaga

SEQ ID NO: 1383256 - RNA, 19 nt, Artificial Sequence
  Description of Artificial Sequence: Synthetic oligonucleotide
gcuucccuagucgagguuc

SEQ ID NO: 1383257 - RNA, 19 nt, Artificial Sequence
  Description of Artificial Sequence: Synthetic oligonucleotide
gagauccacuaauccuaaa

SEQ ID NO: 1383258 - RNA, 19 nt, Artificial Sequence
  Description of Artificial Sequence: Synthetic oligonucleotide
gcauugcuaaguggcaaug

SEQ ID NO: 1383259 - RNA, 19 nt, Artificial Sequence
  Description of Artificial Sequence: Synthetic oligonucleotide
guacacgagcagcagcacu

SEQ ID NO: 1383260 - RNA, 19 nt, Artificial Sequence
  Description of Artificial Sequence: Synthetic oligonucleotide
ggggugacccauuuaaaau

SEQ ID NO: 1383261 - RNA, 19 nt, Artificial Sequence
  Description of Artificial Sequence: Synthetic oligonucleotide
caggagguuuugcuuagua

SEQ ID NO: 1383262 - RNA, 19 nt, Artificial Sequence
  Description of Artificial Sequence: Synthetic oligonucleotide
cuuuguuacucugaucguu

SEQ ID NO: 1383263 - RNA, 19 nt, Artificial Sequence
  Description of Artificial Sequence: Synthetic oligonucleotide
caauggacugagcaaggau

SEQ ID NO: 1383264 - RNA, 19 nt, Artificial Sequence
  Description of Artificial Sequence: Synthetic oligonucleotide
cugugaaacccugaccgua

SEQ ID NO: 1383265 - RNA, 19 nt, Artificial Sequence
  Description of Artificial Sequence: Synthetic oligonucleotide
cgguacauccguuacauua

SEQ ID NO: 1383266 - RNA, 19 nt, Artificial Sequence
  Description of Artificial Sequence: Synthetic oligonucleotide
uggcggguuuuauuaccuu

SEQ ID NO: 1383267 - RNA, 19 nt, Artificial Sequence
  Description of Artificial Sequence: Synthetic oligonucleotide
gagucacuagcgagacuuc

SEQ ID NO: 1383268 - RNA, 19 nt, Artificial Sequence
  Description of Artificial Sequence: Synthetic oligonucleotide
agguccgcaauggacugua

SEQ ID NO: 1383269 - RNA, 19 nt, Artificial Sequence
  Description of Artificial Sequence: Synthetic oligonucleotide
gcacuugugucaaaacaaa

SEQ ID NO: 1383270 - RNA, 19 nt, Artificial Sequence
  Description of Artificial Sequence: Synthetic oligonucleotide
acgcaugaagcugguuuaa

SEQ ID NO: 1383271 - RNA, 19 nt, Artificial Sequence
  Description of Artificial Sequence: Synthetic oligonucleotide
cacaggacuguucaacauu

SEQ ID NO: 1383272 - RNA, 19 nt, Artificial Sequence
  Description of Artificial Sequence: Synthetic oligonucleotide
agaaagcgguacauccguu

SEQ ID NO: 1383273 - RNA, 19 nt, Artificial Sequence
  Description of Artificial Sequence: Synthetic oligonucleotide
cacaccgaugaggaccaca

SEQ ID NO: 1383274 - RNA, 19 nt, Artificial Sequence
  Description of Artificial Sequence: Synthetic oligonucleotide
gggauaugcuacuuacaau

SEQ ID NO: 1383275 - RNA, 19 nt, Artificial Sequence
  Description of Artificial Sequence: Synthetic oligonucleotide
cuucccuagucgagguucu

SEQ ID NO: 1383276 - RNA, 19 nt, Artificial Sequence
  Description of Artificial Sequence: Synthetic oligonucleotide
cucaggaauauacccgcuu

SEQ ID NO: 1383277 - RNA, 19 nt, Artificial Sequence
  Description of Artificial Sequence: Synthetic oligonucleotide
caauucugucaagaacugu

SEQ ID NO: 1383278 - RNA, 19 nt, Artificial Sequence
  Description of Artificial Sequence: Synthetic oligonucleotide
guaaccccucuugguuuac

SEQ ID NO: 1383279 - RNA, 19 nt, Artificial Sequence
  Description of Artificial Sequence: Synthetic oligonucleotide
gacggaucucucguucccu

SEQ ID NO: 1383280 - RNA, 19 nt, Artificial Sequence
  Description of Artificial Sequence: Synthetic oligonucleotide
uucccuagucgagguucuc

SEQ ID NO: 1383281 - RNA, 19 nt, Artificial Sequence
  Description of Artificial Sequence: Synthetic oligonucleotide
ggcauugcuaaguggcaau

SEQ ID NO: 1383282 - RNA, 19 nt, Artificial Sequence
  Description of Artificial Sequence: Synthetic oligonucleotide
gcccgucuaaauguguuaa

SEQ ID NO: 1383283 - RNA, 19 nt, Artificial Sequence
  Description of Artificial Sequence: Synthetic oligonucleotide
gcggguuuuauuaccuuua

SEQ ID NO: 1383284 - RNA, 19 nt, Artificial Sequence
  Description of Artificial Sequence: Synthetic oligonucleotide
ggcggguuuuauuaccuuu

SEQ ID NO: 1383285 - RNA, 19 nt, Artificial Sequence
  Description of Artificial Sequence: Synthetic oligonucleotide
gggcauugcuaaguggcaa

SEQ ID NO: 1383286 - RNA, 19 nt, Artificial Sequence
  Description of Artificial Sequence: Synthetic oligonucleotide
ggcccgucuaaauguguua

SEQ ID NO: 1383287 - RNA, 19 nt, Artificial Sequence
  Description of Artificial Sequence: Synthetic oligonucleotide
ggggaacggauuauaaauu

SEQ ID NO: 1383288 - RNA, 19 nt, Artificial Sequence
  Description of Artificial Sequence: Synthetic oligonucleotide
agccauuagcugggaugaa

SEQ ID NO: 1383289 - RNA, 19 nt, Artificial Sequence
  Description of Artificial Sequence: Synthetic oligonucleotide
cuggcccgucuaaaugugu

SEQ ID NO: 1383290 - RNA, 19 nt, Artificial Sequence
  Description of Artificial Sequence: Synthetic oligonucleotide
cccugaccguacacgagca

SEQ ID NO: 1383291 - RNA, 19 nt, Artificial Sequence
  Description of Artificial Sequence: Synthetic oligonucleotide
gccaauuagguuggcgggu

SEQ ID NO: 1383292 - RNA, 19 nt, Artificial Sequence
  Description of Artificial Sequence: Synthetic oligonucleotide
caggacuguucaacauuau

SEQ ID NO: 1383293 - RNA, 19 nt, Artificial Sequence
  Description of Artificial Sequence: Synthetic oligonucleotide
gagguccgcaauggacugu

SEQ ID NO: 1383294 - RNA, 19 nt, Artificial Sequence
  Description of Artificial Sequence: Synthetic oligonucleotide
cgagauccacuaauccuaa

SEQ ID NO: 1383295 - RNA, 19 nt, Artificial Sequence
  Description of Artificial Sequence: Synthetic oligonucleotide
ccuaaauggggugacccau

SEQ ID NO: 1383296 - RNA, 19 nt, Artificial Sequence
  Description of Artificial Sequence: Synthetic oligonucleotide
caauuagguuggcggguuu

SEQ ID NO: 1383297 - RNA, 19 nt, Artificial Sequence
  Description of Artificial Sequence: Synthetic oligonucleotide
uacccgcuuucugggcauu

SEQ ID NO: 1383298 - RNA, 19 nt, Artificial Sequence
  Description of Artificial Sequence: Synthetic oligonucleotide
gggcuucccuagucgaggu

SEQ ID NO: 1383299 - RNA, 19 nt, Artificial Sequence
  Description of Artificial Sequence: Synthetic oligonucleotide
ccgucuaaauguguuaauu

SEQ ID NO: 1383300 - RNA, 19 nt, Artificial Sequence
  Description of Artificial Sequence: Synthetic oligonucleotide
caccgaugaggaccacagu

SEQ ID NO: 1383301 - RNA, 19 nt, Artificial Sequence
  Description of Artificial Sequence: Synthetic oligonucleotide
ggaccacagugagcacuac

SEQ ID NO: 1383302 - RNA, 19 nt, Artificial Sequence
  Description of Artificial Sequence: Synthetic oligonucleotide
cguacacgagcagcagcac

SEQ ID NO: 1383303 - RNA, 19 nt, Artificial Sequence
  Description of Artificial Sequence: Synthetic oligonucleotide
cagguuuggacaggucauu

SEQ ID NO: 1383304 - RNA, 19 nt, Artificial Sequence
  Description of Artificial Sequence: Synthetic oligonucleotide
cccuagucgagguucucau

SEQ ID NO: 1383305 - RNA, 19 nt, Artificial Sequence
  Description of Artificial Sequence: Synthetic oligonucleotide
cgccucuacucauaaauuu

SEQ ID NO: 1383306 - RNA, 19 nt, Artificial Sequence
  Description of Artificial Sequence: Synthetic oligonucleotide
cagugagcacuacgaugau

SEQ ID NO: 1383307 - RNA, 19 nt, Artificial Sequence
  Description of Artificial Sequence: Synthetic oligonucleotide
ccucaggaauauacccgcu

SEQ ID NO: 1383308 - RNA, 19 nt, Artificial Sequence
  Description of Artificial Sequence: Synthetic oligonucleotide
ccagcacccaaaugccccu

SEQ ID NO: 1383309 - RNA, 19 nt, Artificial Sequence
  Description of Artificial Sequence: Synthetic oligonucleotide
cccgucuaaauguguuaau

SEQ ID NO: 1383310 - RNA, 19 nt, Artificial Sequence
  Description of Artificial Sequence: Synthetic oligonucleotide
cugccuugugaagcuguuu

SEQ ID NO: 1383311 - RNA, 19 nt, Artificial Sequence
  Description of Artificial Sequence: Synthetic oligonucleotide
gcgccucuacucauaaauu

SEQ ID NO: 1383312 - RNA, 19 nt, Artificial Sequence
  Description of Artificial Sequence: Synthetic oligonucleotide
ccaauuagguuggcggguu

SEQ ID NO: 1383313 - RNA, 19 nt, Artificial Sequence
  Description of Artificial Sequence: Synthetic oligonucleotide
ccguuacauuagacacaca

SEQ ID NO: 1383314 - RNA, 19 nt, Artificial Sequence
  Description of Artificial Sequence: Synthetic oligonucleotide
ccgcaauggacuguacaau

SEQ ID NO: 1383315 - RNA, 19 nt, Artificial Sequence
  Description of Artificial Sequence: Synthetic oligonucleotide
ccuagucgagguucucauu

SEQ ID NO: 1383316 - RNA, 19 nt, Artificial Sequence
  Description of Artificial Sequence: Synthetic oligonucleotide
ggcuucccuagucgagguu

SEQ ID NO: 1383317 - RNA, 19 nt, Artificial Sequence
  Description of Artificial Sequence: Synthetic oligonucleotide
gcgguacauccguuacauu

SEQ ID NO: 1383318 - RNA, 19 nt, Artificial Sequence
  Description of Artificial Sequence: Synthetic oligonucleotide
aauacaagggguuuaauac

SEQ ID NO: 1383319 - RNA, 19 nt, Artificial Sequence
  Description of Artificial Sequence: Synthetic oligonucleotide
ucuaauacuauuuaucaag

SEQ ID NO: 1383320 - RNA, 19 nt, Artificial Sequence
  Description of Artificial Sequence: Synthetic oligonucleotide
auaaugaaugcucaguuac

SEQ ID NO: 1383321 - RNA, 19 nt, Artificial Sequence
  Description of Artificial Sequence: Synthetic oligonucleotide
acauucaccaaucuggggc

SEQ ID NO: 1383322 - RNA, 19 nt, Artificial Sequence
  Description of Artificial Sequence: Synthetic oligonucleotide
uuuacugugaguuacugca

SEQ ID NO: 1383323 - RNA, 19 nt, Artificial Sequence
  Description of Artificial Sequence: Synthetic oligonucleotide
uuaucaagaaaucagugcu

SEQ ID NO: 1383324 - RNA, 19 nt, Artificial Sequence
  Description of Artificial Sequence: Synthetic oligonucleotide
ugagcuuauauucucauug

SEQ ID NO: 1383325 - RNA, 19 nt, Artificial Sequence
  Description of Artificial Sequence: Synthetic oligonucleotide
uuuuguacuagugagauga

SEQ ID NO: 1383326 - RNA, 19 nt, Artificial Sequence
  Description of Artificial Sequence: Synthetic oligonucleotide
aauacuauuuaucaagaaa

SEQ ID NO: 1383327 - RNA, 19 nt, Artificial Sequence
  Description of Artificial Sequence: Synthetic oligonucleotide
uguacuagugagaugaggc

SEQ ID NO: 1383328 - RNA, 19 nt, Artificial Sequence
  Description of Artificial Sequence: Synthetic oligonucleotide
uuucuaauacuauuuauca

SEQ ID NO: 1383329 - RNA, 19 nt, Artificial Sequence
  Description of Artificial Sequence: Synthetic oligonucleotide
aucauuuugagcuggauug

SEQ ID NO: 1383330 - RNA, 19 nt, Artificial Sequence
  Description of Artificial Sequence: Synthetic oligonucleotide
uguuuuauauagcuggacc

SEQ ID NO: 1383331 - RNA, 19 nt, Artificial Sequence
  Description of Artificial Sequence: Synthetic oligonucleotide
auuuguuaucauuuugagc

SEQ ID NO: 1383332 - RNA, 19 nt, Artificial Sequence
  Description of Artificial Sequence: Synthetic oligonucleotide
aaggaagaugccuuuuagc

SEQ ID NO: 1383333 - RNA, 19 nt, Artificial Sequence
  Description of Artificial Sequence: Synthetic oligonucleotide
cucuauuucuuguagagcc

SEQ ID NO: 1383334 - RNA, 19 nt, Artificial Sequence
  Description of Artificial Sequence: Synthetic oligonucleotide
uuuucuaauacuauuuauc

SEQ ID NO: 1383335 - RNA, 19 nt, Artificial Sequence
  Description of Artificial Sequence: Synthetic oligonucleotide
aguuacugcaguuaauuuc

SEQ ID NO: 1383336 - RNA, 19 nt, Artificial Sequence
  Description of Artificial Sequence: Synthetic oligonucleotide
aaugaaugcucaguuacac

SEQ ID NO: 1383337 - RNA, 19 nt, Artificial Sequence
  Description of Artificial Sequence: Synthetic oligonucleotide
auaauggugguacauagug

SEQ ID NO: 1383338 - RNA, 19 nt, Artificial Sequence
  Description of Artificial Sequence: Synthetic oligonucleotide
ucuaaaugaaugaaugggu

SEQ ID NO: 1383339 - RNA, 19 nt, Artificial Sequence
  Description of Artificial Sequence: Synthetic oligonucleotide
aaugggugacaacuguagc

SEQ ID NO: 1383340 - RNA, 19 nt, Artificial Sequence
  Description of Artificial Sequence: Synthetic oligonucleotide
uauuuaucaagaaaucagu

SEQ ID NO: 1383341 - RNA, 19 nt, Artificial Sequence
  Description of Artificial Sequence: Synthetic oligonucleotide
uauauucucauugaguuca

SEQ ID NO: 1383342 - RNA, 19 nt, Artificial Sequence
  Description of Artificial Sequence: Synthetic oligonucleotide
agaugucacacuucuauac

SEQ ID NO: 1383343 - RNA, 19 nt, Artificial Sequence
  Description of Artificial Sequence: Synthetic oligonucleotide
ugauaauggugguacauag

SEQ ID NO: 1383344 - RNA, 19 nt, Artificial Sequence
  Description of Artificial Sequence: Synthetic oligonucleotide
gaugagaacacagacauuc

SEQ ID NO: 1383345 - RNA, 19 nt, Artificial Sequence
  Description of Artificial Sequence: Synthetic oligonucleotide
ucuuguagagccaaugcca

SEQ ID NO: 1383346 - RNA, 19 nt, Artificial Sequence
  Description of Artificial Sequence: Synthetic oligonucleotide
agaacuggccaauucuugc

SEQ ID NO: 1383347 - RNA, 19 nt, Artificial Sequence
  Description of Artificial Sequence: Synthetic oligonucleotide
uacacuucagauuuauuug

SEQ ID NO: 1383348 - RNA, 19 nt, Artificial Sequence
  Description of Artificial Sequence: Synthetic oligonucleotide
aaaagucagcaaugggugg

SEQ ID NO: 1383349 - RNA, 19 nt, Artificial Sequence
  Description of Artificial Sequence: Synthetic oligonucleotide
cuugacugagcuuauauuc

SEQ ID NO: 1383350 - RNA, 19 nt, Artificial Sequence
  Description of Artificial Sequence: Synthetic oligonucleotide
uauagcuggaccagugagg

SEQ ID NO: 1383351 - RNA, 19 nt, Artificial Sequence
  Description of Artificial Sequence: Synthetic oligonucleotide
ucuccauuaugccauagga

SEQ ID NO: 1383352 - RNA, 19 nt, Artificial Sequence
  Description of Artificial Sequence: Synthetic oligonucleotide
cucucuaaaugaaugaaug

SEQ ID NO: 1383353 - RNA, 19 nt, Artificial Sequence
  Description of Artificial Sequence: Synthetic oligonucleotide
uuugauaaugaaugcucag

SEQ ID NO: 1383354 - RNA, 19 nt, Artificial Sequence
  Description of Artificial Sequence: Synthetic oligonucleotide
agaacuuuuguacuaguga

SEQ ID NO: 1383355 - RNA, 19 nt, Artificial Sequence
  Description of Artificial Sequence: Synthetic oligonucleotide
cauagaugagaacacagac

SEQ ID NO: 1383356 - RNA, 19 nt, Artificial Sequence
  Description of Artificial Sequence: Synthetic oligonucleotide
uaggguuuuagacuaggcc

SEQ ID NO: 1383357 - RNA, 19 nt, Artificial Sequence
  Description of Artificial Sequence: Synthetic oligonucleotide
aggguuuuagacuaggccu

SEQ ID NO: 1383358 - RNA, 19 nt, Artificial Sequence
  Description of Artificial Sequence: Synthetic oligonucleotide
uaugccauaggacaucccu

SEQ ID NO: 1383359 - RNA, 19 nt, Artificial Sequence
  Description of Artificial Sequence: Synthetic oligonucleotide
ugucuaauuuauaaauuaa

SEQ ID NO: 1383360 - RNA, 19 nt, Artificial Sequence
  Description of Artificial Sequence: Synthetic oligonucleotide
aaugaggagaacuuuugua

SEQ ID NO: 1383361 - RNA, 19 nt, Artificial Sequence
  Description of Artificial Sequence: Synthetic oligonucleotide
uacaagggguuuaauacug

SEQ ID NO: 1383362 - RNA, 19 nt, Artificial Sequence
  Description of Artificial Sequence: Synthetic oligonucleotide
cuuaugcuuaaaaguaugc

SEQ ID NO: 1383363 - RNA, 19 nt, Artificial Sequence
  Description of Artificial Sequence: Synthetic oligonucleotide
uuauauagcuggaccagug

SEQ ID NO: 1383364 - RNA, 19 nt, Artificial Sequence
  Description of Artificial Sequence: Synthetic oligonucleotide
auacuauuuaucaagaaau

SEQ ID NO: 1383365 - RNA, 19 nt, Artificial Sequence
  Description of Artificial Sequence: Synthetic oligonucleotide
aggacugccaucugaugcc

SEQ ID NO: 1383366 - RNA, 19 nt, Artificial Sequence
  Description of Artificial Sequence: Synthetic oligonucleotide
uuagaguagugccauuuga

SEQ ID NO: 1383367 - RNA, 19 nt, Artificial Sequence
  Description of Artificial Sequence: Synthetic oligonucleotide
auauagcuggaccagugag

SEQ ID NO: 1383368 - RNA, 19 nt, Artificial Sequence
  Description of Artificial Sequence: Synthetic oligonucleotide
guuuuauauagcuggacca

SEQ ID NO: 1383369 - RNA, 19 nt, Artificial Sequence
  Description of Artificial Sequence: Synthetic oligonucleotide
uugguuucaagcauccacu

SEQ ID NO: 1383370 - RNA, 19 nt, Artificial Sequence
  Description of Artificial Sequence: Synthetic oligonucleotide
ucaagcauccacuaggguu

SEQ ID NO: 1383371 - RNA, 19 nt, Artificial Sequence
  Description of Artificial Sequence: Synthetic oligonucleotide
ucuauacagccccacuucc

SEQ ID NO: 1383372 - RNA, 19 nt, Artificial Sequence
  Description of Artificial Sequence: Synthetic oligonucleotide
aaugcucaguuacacuuca

SEQ ID NO: 1383373 - RNA, 19 nt, Artificial Sequence
  Description of Artificial Sequence: Synthetic oligonucleotide
uuaauuucuuacugugucu

SEQ ID NO: 1383374 - RNA, 19 nt, Artificial Sequence
  Description of Artificial Sequence: Synthetic oligonucleotide
cugauuaaaucccugcuuc

SEQ ID NO: 1383375 - RNA, 19 nt, Artificial Sequence
  Description of Artificial Sequence: Synthetic oligonucleotide
uauauagcuggaccaguga

SEQ ID NO: 1383376 - RNA, 19 nt, Artificial Sequence
  Description of Artificial Sequence: Synthetic oligonucleotide
aucugaugccaguaucccc

SEQ ID NO: 1383377 - RNA, 19 nt, Artificial Sequence
  Description of Artificial Sequence: Synthetic oligonucleotide
uaaugaaugcucaguuaca

SEQ ID NO: 1383378 - RNA, 19 nt, Artificial Sequence
  Description of Artificial Sequence: Synthetic oligonucleotide
uguucugauuaaaucccug

SEQ ID NO: 1383379 - RNA, 19 nt, Artificial Sequence
  Description of Artificial Sequence: Synthetic oligonucleotide
agcuuauauucucauugag

SEQ ID NO: 1383380 - RNA, 19 nt, Artificial Sequence
  Description of Artificial Sequence: Synthetic oligonucleotide
cuaauacuauuuaucaaga

SEQ ID NO: 1383381 - RNA, 19 nt, Artificial Sequence
  Description of Artificial Sequence: Synthetic oligonucleotide
uuuuagacuaggccucucu

SEQ ID NO: 1383382 - RNA, 19 nt, Artificial Sequence
  Description of Artificial Sequence: Synthetic oligonucleotide
uuugagcuggauugauggg

SEQ ID NO: 1383383 - RNA, 19 nt, Artificial Sequence
  Description of Artificial Sequence: Synthetic oligonucleotide
uugauaaugaaugcucagu

SEQ ID NO: 1383384 - RNA, 19 nt, Artificial Sequence
  Description of Artificial Sequence: Synthetic oligonucleotide
aguaagagucuuggggugc

SEQ ID NO: 1383385 - RNA, 19 nt, Artificial Sequence
  Description of Artificial Sequence: Synthetic oligonucleotide
gaaugggugacaacuguag

SEQ ID NO: 1383386 - RNA, 19 nt, Artificial Sequence
  Description of Artificial Sequence: Synthetic oligonucleotide
gucacacuucuauacagcc

SEQ ID NO: 1383387 - RNA, 19 nt, Artificial Sequence
  Description of Artificial Sequence: Synthetic oligonucleotide
auacaagggguuuaauacu

SEQ ID NO: 1383388 - RNA, 19 nt, Artificial Sequence
  Description of Artificial Sequence: Synthetic oligonucleotide
agccauuuacuucauagau

SEQ ID NO: 1383389 - RNA, 19 nt, Artificial Sequence
  Description of Artificial Sequence: Synthetic oligonucleotide
guaccgaagcaugagaaag

SEQ ID NO: 1383390 - RNA, 19 nt, Artificial Sequence
  Description of Artificial Sequence: Synthetic oligonucleotide
uucuauacagccccacuuc

SEQ ID NO: 1383391 - RNA, 19 nt, Artificial Sequence
  Description of Artificial Sequence: Synthetic oligonucleotide
aucuccauuaugccauagg

SEQ ID NO: 1383392 - RNA, 19 nt, Artificial Sequence
  Description of Artificial Sequence: Synthetic oligonucleotide
caugagaaagaggaggcag

SEQ ID NO: 1383393 - RNA, 19 nt, Artificial Sequence
  Description of Artificial Sequence: Synthetic oligonucleotide
ugccauuuuacugugaguu

SEQ ID NO: 1383394 - RNA, 19 nt, Artificial Sequence
  Description of Artificial Sequence: Synthetic oligonucleotide
cauucaccaaucuggggcc

SEQ ID NO: 1383395 - RNA, 19 nt, Artificial Sequence
  Description of Artificial Sequence: Synthetic oligonucleotide
uacuugacugagcuuauau

SEQ ID NO: 1383396 - RNA, 19 nt, Artificial Sequence
  Description of Artificial Sequence: Synthetic oligonucleotide
ugcacaaugaggagaacuu

SEQ ID NO: 1383397 - RNA, 19 nt, Artificial Sequence
  Description of Artificial Sequence: Synthetic oligonucleotide
gaugucacacuucuauaca

SEQ ID NO: 1383398 - RNA, 19 nt, Artificial Sequence
  Description of Artificial Sequence: Synthetic oligonucleotide
uccuagacacuuagaguag

SEQ ID NO: 1383399 - RNA, 19 nt, Artificial Sequence
  Description of Artificial Sequence: Synthetic oligonucleotide
uagaguagugccauuugau

SEQ ID NO: 1383400 - RNA, 19 nt, Artificial Sequence
  Description of Artificial Sequence: Synthetic oligonucleotide
ugcucuacaccuugauucc

SEQ ID NO: 1383401 - RNA, 19 nt, Artificial Sequence
  Description of Artificial Sequence: Synthetic oligonucleotide
ucuuacugugucuaauuua

SEQ ID NO: 1383402 - RNA, 19 nt, Artificial Sequence
  Description of Artificial Sequence: Synthetic oligonucleotide
caauucuugccccaugcac

SEQ ID NO: 1383403 - RNA, 19 nt, Artificial Sequence
  Description of Artificial Sequence: Synthetic oligonucleotide
aguaugccauuuuacugug

SEQ ID NO: 1383404 - RNA, 19 nt, Artificial Sequence
  Description of Artificial Sequence: Synthetic oligonucleotide
caagggguuuaauacugcc

SEQ ID NO: 1383405 - RNA, 19 nt, Artificial Sequence
  Description of Artificial Sequence: Synthetic oligonucleotide
guacuagugagaugaggcc

SEQ ID NO: 1383406 - RNA, 19 nt, Artificial Sequence
  Description of Artificial Sequence: Synthetic oligonucleotide
auaagugugugcagaaaag

SEQ ID NO: 1383407 - RNA, 19 nt, Artificial Sequence
  Description of Artificial Sequence: Synthetic oligonucleotide
ugauuaaaucccugcuucu

SEQ ID NO: 1383408 - RNA, 19 nt, Artificial Sequence
  Description of Artificial Sequence: Synthetic oligonucleotide
gaagaggugcucuacaccu

SEQ ID NO: 1383409 - RNA, 19 nt, Artificial Sequence
  Description of Artificial Sequence: Synthetic oligonucleotide
uuuguacuagugagaugag

SEQ ID NO: 1383410 - RNA, 19 nt, Artificial Sequence
  Description of Artificial Sequence: Synthetic oligonucleotide
agcaauggguggcauucac

SEQ ID NO: 1383411 - RNA, 19 nt, Artificial Sequence
  Description of Artificial Sequence: Synthetic oligonucleotide
aguagugccauuugauaau

SEQ ID NO: 1383412 - RNA, 19 nt, Artificial Sequence
  Description of Artificial Sequence: Synthetic oligonucleotide
agugccauuugauaaugaa

SEQ ID NO: 1383413 - RNA, 19 nt, Artificial Sequence
  Description of Artificial Sequence: Synthetic oligonucleotide
cuuauagaugucacacuuc

SEQ ID NO: 1383414 - RNA, 19 nt, Artificial Sequence
  Description of Artificial Sequence: Synthetic oligonucleotide
uugagcuggauugauggga

SEQ ID NO: 1383415 - RNA, 19 nt, Artificial Sequence
  Description of Artificial Sequence: Synthetic oligonucleotide
uccccagucagcuuauaga

SEQ ID NO: 1383416 - RNA, 19 nt, Artificial Sequence
  Description of Artificial Sequence: Synthetic oligonucleotide
aauacugccuuugguuuca

SEQ ID NO: 1383417 - RNA, 19 nt, Artificial Sequence
  Description of Artificial Sequence: Synthetic oligonucleotide
cuccauuaugccauaggac

SEQ ID NO: 1383418 - RNA, 19 nt, Artificial Sequence
  Description of Artificial Sequence: Synthetic oligonucleotide
aguauccccagucagcuua

SEQ ID NO: 1383419 - RNA, 19 nt, Artificial Sequence
  Description of Artificial Sequence: Synthetic oligonucleotide
acucauggcuauugagcac

SEQ ID NO: 1383420 - RNA, 19 nt, Artificial Sequence
  Description of Artificial Sequence: Synthetic oligonucleotide
ugccaguauccccagucag

SEQ ID NO: 1383421 - RNA, 19 nt, Artificial Sequence
  Description of Artificial Sequence: Synthetic oligonucleotide
uaccgaagcaugagaaaga

SEQ ID NO: 1383422 - RNA, 19 nt, Artificial Sequence
  Description of Artificial Sequence: Synthetic oligonucleotide
agggguuuaauacugccuu

SEQ ID NO: 1383423 - RNA, 19 nt, Artificial Sequence
  Description of Artificial Sequence: Synthetic oligonucleotide
gaugaggccugcauugugc

SEQ ID NO: 1383424 - RNA, 19 nt, Artificial Sequence
  Description of Artificial Sequence: Synthetic oligonucleotide
uuuagacuaggccucucua

SEQ ID NO: 1383425 - RNA, 19 nt, Artificial Sequence
  Description of Artificial Sequence: Synthetic oligonucleotide
ucucuauuucuuguagagc

SEQ ID NO: 1383426 - RNA, 19 nt, Artificial Sequence
  Description of Artificial Sequence: Synthetic oligonucleotide
cuaggguuuuagacuaggc

SEQ ID NO: 1383427 - RNA, 19 nt, Artificial Sequence
  Description of Artificial Sequence: Synthetic oligonucleotide
ucagcaauggguggcauuc

SEQ ID NO: 1383428 - RNA, 19 nt, Artificial Sequence
  Description of Artificial Sequence: Synthetic oligonucleotide
gguuuaauacugccuuugg

SEQ ID NO: 1383429 - RNA, 19 nt, Artificial Sequence
  Description of Artificial Sequence: Synthetic oligonucleotide
uguauccagauauucucua

SEQ ID NO: 1383430 - RNA, 19 nt, Artificial Sequence
  Description of Artificial Sequence: Synthetic oligonucleotide
ucaagaaaucagugcuuca

SEQ ID NO: 1383431 - RNA, 19 nt, Artificial Sequence
  Description of Artificial Sequence: Synthetic oligonucleotide
uaucaagaaaucagugcuu

SEQ ID NO: 1383432 - RNA, 19 nt, Artificial Sequence
  Description of Artificial Sequence: Synthetic oligonucleotide
cauaagugugugcagaaaa

SEQ ID NO: 1383433 - RNA, 19 nt, Artificial Sequence
  Description of Artificial Sequence: Synthetic oligonucleotide
cuuagaguagugccauuug

SEQ ID NO: 1383434 - RNA, 19 nt, Artificial Sequence
  Description of Artificial Sequence: Synthetic oligonucleotide
uccccagcguccuggaggg

SEQ ID NO: 1383435 - RNA, 19 nt, Artificial Sequence
  Description of Artificial Sequence: Synthetic oligonucleotide
uauuacagcuuaugcuuaa

SEQ ID NO: 1383436 - RNA, 19 nt, Artificial Sequence
  Description of Artificial Sequence: Synthetic oligonucleotide
gaagcaugagaaagaggag

SEQ ID NO: 1383437 - RNA, 19 nt, Artificial Sequence
  Description of Artificial Sequence: Synthetic oligonucleotide
gauuaaaucccugcuucuc

SEQ ID NO: 1383438 - RNA, 19 nt, Artificial Sequence
  Description of Artificial Sequence: Synthetic oligonucleotide
gagcuuauauucucauuga

SEQ ID NO: 1383439 - RNA, 19 nt, Artificial Sequence
  Description of Artificial Sequence: Synthetic oligonucleotide
cuguuuccuagacacuuag

SEQ ID NO: 1383440 - RNA, 19 nt, Artificial Sequence
  Description of Artificial Sequence: Synthetic oligonucleotide
agaggugcucuacaccuug

SEQ ID NO: 1383441 - RNA, 19 nt, Artificial Sequence
  Description of Artificial Sequence: Synthetic oligonucleotide
agaguagugccauuugaua

SEQ ID NO: 1383442 - RNA, 19 nt, Artificial Sequence
  Description of Artificial Sequence: Synthetic oligonucleotide
cuugugccuguacagguac

SEQ ID NO: 1383443 - RNA, 19 nt, Artificial Sequence
  Description of Artificial Sequence: Synthetic oligonucleotide
aucuggggccaucugucac

SEQ ID NO: 1383444 - RNA, 19 nt, Artificial Sequence
  Description of Artificial Sequence: Synthetic oligonucleotide
uuguuuuauauagcuggac

SEQ ID NO: 1383445 - RNA, 19 nt, Artificial Sequence
  Description of Artificial Sequence: Synthetic oligonucleotide
cuuacugugucuaauuuau

SEQ ID NO: 1383446 - RNA, 19 nt, Artificial Sequence
  Description of Artificial Sequence: Synthetic oligonucleotide
cacucauggcuauugagca

SEQ ID NO: 1383447 - RNA, 19 nt, Artificial Sequence
  Description of Artificial Sequence: Synthetic oligonucleotide
uggcugguggccauacuug

SEQ ID NO: 1383448 - RNA, 19 nt, Artificial Sequence
  Description of Artificial Sequence: Synthetic oligonucleotide
accgaagcaugagaaagag

SEQ ID NO: 1383449 - RNA, 19 nt, Artificial Sequence
  Description of Artificial Sequence: Synthetic oligonucleotide
acaagggguuuaauacugc

SEQ ID NO: 1383450 - RNA, 19 nt, Artificial Sequence
  Description of Artificial Sequence: Synthetic oligonucleotide
ugcucaucgccacgcggcg

SEQ ID NO: 1383451 - RNA, 19 nt, Artificial Sequence
  Description of Artificial Sequence: Synthetic oligonucleotide
cagcuuaugcuuaaaagua

SEQ ID NO: 1383452 - RNA, 19 nt, Artificial Sequence
  Description of Artificial Sequence: Synthetic oligonucleotide
augaaugcucaguuacacu

SEQ ID NO: 1383453 - RNA, 19 nt, Artificial Sequence
  Description of Artificial Sequence: Synthetic oligonucleotide
uuaaaucccugcuucucuu

SEQ ID NO: 1383454 - RNA, 19 nt, Artificial Sequence
  Description of Artificial Sequence: Synthetic oligonucleotide
cugcucaucgccacgcggc

SEQ ID NO: 1383455 - RNA, 19 nt, Artificial Sequence
  Description of Artificial Sequence: Synthetic oligonucleotide
ugguggccauacuugacug

SEQ ID NO: 1383456 - RNA, 19 nt, Artificial Sequence
  Description of Artificial Sequence: Synthetic oligonucleotide
agcuggaccagugagggga

SEQ ID NO: 1383457 - RNA, 19 nt, Artificial Sequence
  Description of Artificial Sequence: Synthetic oligonucleotide
uuacuucauagaugagaac

SEQ ID NO: 1383458 - RNA, 19 nt, Artificial Sequence
  Description of Artificial Sequence: Synthetic oligonucleotide
ucauuuugagcuggauuga

SEQ ID NO: 1383459 - RNA, 19 nt, Artificial Sequence
  Description of Artificial Sequence: Synthetic oligonucleotide
acuugacugagcuuauauu

SEQ ID NO: 1383460 - RNA, 19 nt, Artificial Sequence
  Description of Artificial Sequence: Synthetic oligonucleotide
cagaacuggccaauucuug

SEQ ID NO: 1383461 - RNA, 19 nt, Artificial Sequence
  Description of Artificial Sequence: Synthetic oligonucleotide
auacagccccacuuccagg

SEQ ID NO: 1383462 - RNA, 19 nt, Artificial Sequence
  Description of Artificial Sequence: Synthetic oligonucleotide
cauuggugugguaggugcc

SEQ ID NO: 1383463 - RNA, 19 nt, Artificial Sequence
  Description of Artificial Sequence: Synthetic oligonucleotide
cuacaccuugauuccuucc

SEQ ID NO: 1383464 - RNA, 19 nt, Artificial Sequence
  Description of Artificial Sequence: Synthetic oligonucleotide
ucuacaccuugauuccuuc

SEQ ID NO: 1383465 - RNA, 19 nt, Artificial Sequence
  Description of Artificial Sequence: Synthetic oligonucleotide
cuuuuguacuagugagaug

SEQ ID NO: 1383466 - RNA, 19 nt, Artificial Sequence
  Description of Artificial Sequence: Synthetic oligonucleotide
aguuacacuucagauuuau

SEQ ID NO: 1383467 - RNA, 19 nt, Artificial Sequence
  Description of Artificial Sequence: Synthetic oligonucleotide
caaaugucaaggacugcca

SEQ ID NO: 1383468 - RNA, 19 nt, Artificial Sequence
  Description of Artificial Sequence: Synthetic oligonucleotide
guggccauacuugacugag

SEQ ID NO: 1383469 - RNA, 19 nt, Artificial Sequence
  Description of Artificial Sequence: Synthetic oligonucleotide
agucagcuuauagauguca

SEQ ID NO: 1383470 - RNA, 19 nt, Artificial Sequence
  Description of Artificial Sequence: Synthetic oligonucleotide
uuguagagccaaugccagc

SEQ ID NO: 1383471 - RNA, 19 nt, Artificial Sequence
  Description of Artificial Sequence: Synthetic oligonucleotide
cucaucgccacgcggcggg

SEQ ID NO: 1383472 - RNA, 19 nt, Artificial Sequence
  Description of Artificial Sequence: Synthetic oligonucleotide
agaugaggccugcauugug

SEQ ID NO: 1383473 - RNA, 19 nt, Artificial Sequence
  Description of Artificial Sequence: Synthetic oligonucleotide
uuaugccauaggacauccc

SEQ ID NO: 1383474 - RNA, 19 nt, Artificial Sequence
  Description of Artificial Sequence: Synthetic oligonucleotide
uugccccaugcacacagac

SEQ ID NO: 1383475 - RNA, 19 nt, Artificial Sequence
  Description of Artificial Sequence: Synthetic oligonucleotide
uagugccauuugauaauga

SEQ ID NO: 1383476 - RNA, 19 nt, Artificial Sequence
  Description of Artificial Sequence: Synthetic oligonucleotide
guagugccauuugauaaug

SEQ ID NO: 1383477 - RNA, 19 nt, Artificial Sequence
  Description of Artificial Sequence: Synthetic oligonucleotide
gaggagaacuuuuguacua

SEQ ID NO: 1383478 - RNA, 19 nt, Artificial Sequence
  Description of Artificial Sequence: Synthetic oligonucleotide
uggaccagugaggggaaag

SEQ ID NO: 1383479 - RNA, 19 nt, Artificial Sequence
  Description of Artificial Sequence: Synthetic oligonucleotide
aagccaaauacaagggguu

SEQ ID NO: 1383480 - RNA, 19 nt, Artificial Sequence
  Description of Artificial Sequence: Synthetic oligonucleotide
guacagguaccgaagcaug

SEQ ID NO: 1383481 - RNA, 19 nt, Artificial Sequence
  Description of Artificial Sequence: Synthetic oligonucleotide
guuuaauacugccuuuggu

SEQ ID NO: 1383482 - RNA, 19 nt, Artificial Sequence
  Description of Artificial Sequence: Synthetic oligonucleotide
ggcccaaccacccaugcac

SEQ ID NO: 1383483 - RNA, 19 nt, Artificial Sequence
  Description of Artificial Sequence: Synthetic oligonucleotide
gcuuaugcuuaaaaguaug

SEQ ID NO: 1383484 - RNA, 19 nt, Artificial Sequence
  Description of Artificial Sequence: Synthetic oligonucleotide
cucauggcuauugagcaca

SEQ ID NO: 1383485 - RNA, 19 nt, Artificial Sequence
  Description of Artificial Sequence: Synthetic oligonucleotide
ggcauucacuguuuccuag

SEQ ID NO: 1383486 - RNA, 19 nt, Artificial Sequence
  Description of Artificial Sequence: Synthetic oligonucleotide
uacugcaguuaauuucuua

SEQ ID NO: 1383487 - RNA, 19 nt, Artificial Sequence
  Description of Artificial Sequence: Synthetic oligonucleotide
cacgcggcggggaaacacg

SEQ ID NO: 1383488 - RNA, 19 nt, Artificial Sequence
  Description of Artificial Sequence: Synthetic oligonucleotide
aagucagcaauggguggca

SEQ ID NO: 1383489 - RNA, 19 nt, Artificial Sequence
  Description of Artificial Sequence: Synthetic oligonucleotide
aggccucucuaaaugaaug

SEQ ID NO: 1383490 - RNA, 19 nt, Artificial Sequence
  Description of Artificial Sequence: Synthetic oligonucleotide
aaacacgcggugggcgcac

SEQ ID NO: 1383491 - RNA, 19 nt, Artificial Sequence
  Description of Artificial Sequence: Synthetic oligonucleotide
uggccauacuugacugagc

SEQ ID NO: 1383492 - RNA, 19 nt, Artificial Sequence
  Description of Artificial Sequence: Synthetic oligonucleotide
ugggucaggcucguggcgc

SEQ ID NO: 1383493 - RNA, 19 nt, Artificial Sequence
  Description of Artificial Sequence: Synthetic oligonucleotide
guaagagucuuggggugcc

SEQ ID NO: 1383494 - RNA, 19 nt, Artificial Sequence
  Description of Artificial Sequence: Synthetic oligonucleotide
agcuuaugcuuaaaaguau

SEQ ID NO: 1383495 - RNA, 19 nt, Artificial Sequence
  Description of Artificial Sequence: Synthetic oligonucleotide
uaccccucagaugaaguau

SEQ ID NO: 1383496 - RNA, 19 nt, Artificial Sequence
  Description of Artificial Sequence: Synthetic oligonucleotide
cuauugagcacaagucucu

SEQ ID NO: 1383497 - RNA, 19 nt, Artificial Sequence
  Description of Artificial Sequence: Synthetic oligonucleotide
ggcccaaugacugugcuuc

SEQ ID NO: 1383498 - RNA, 19 nt, Artificial Sequence
  Description of Artificial Sequence: Synthetic oligonucleotide
gccauuuacuucauagaug

SEQ ID NO: 1383499 - RNA, 19 nt, Artificial Sequence
  Description of Artificial Sequence: Synthetic oligonucleotide
ugacaacuguagccagcca

SEQ ID NO: 1383500 - RNA, 19 nt, Artificial Sequence
  Description of Artificial Sequence: Synthetic oligonucleotide
ggguuuaauacugccuuug

SEQ ID NO: 1383501 - RNA, 19 nt, Artificial Sequence
  Description of Artificial Sequence: Synthetic oligonucleotide
ggaaacacgcggugggcgc

SEQ ID NO: 1383502 - RNA, 19 nt, Artificial Sequence
  Description of Artificial Sequence: Synthetic oligonucleotide
gcaguaagagucuuggggu

SEQ ID NO: 1383503 - RNA, 19 nt, Artificial Sequence
  Description of Artificial Sequence: Synthetic oligonucleotide
ggccucauuggugugguag

SEQ ID NO: 1383504 - RNA, 19 nt, Artificial Sequence
  Description of Artificial Sequence: Synthetic oligonucleotide
caagcauccacuaggguuu

SEQ ID NO: 1383505 - RNA, 19 nt, Artificial Sequence
  Description of Artificial Sequence: Synthetic oligonucleotide
guucacucauggcuauuga

SEQ ID NO: 1383506 - RNA, 19 nt, Artificial Sequence
  Description of Artificial Sequence: Synthetic oligonucleotide
cuguguauccagauauucu

SEQ ID NO: 1383507 - RNA, 19 nt, Artificial Sequence
  Description of Artificial Sequence: Synthetic oligonucleotide
accaaucuggggccaucug

SEQ ID NO: 1383508 - RNA, 19 nt, Artificial Sequence
  Description of Artificial Sequence: Synthetic oligonucleotide
cugcauugugcagggagac

SEQ ID NO: 1383509 - RNA, 19 nt, Artificial Sequence
  Description of Artificial Sequence: Synthetic oligonucleotide
ggaccagugaggggaaagg

SEQ ID NO: 1383510 - RNA, 19 nt, Artificial Sequence
  Description of Artificial Sequence: Synthetic oligonucleotide
caguuuccuggcaggcacc

SEQ ID NO: 1383511 - RNA, 19 nt, Artificial Sequence
  Description of Artificial Sequence: Synthetic oligonucleotide
uauugagcacaagucucuu

SEQ ID NO: 1383512 - RNA, 19 nt, Artificial Sequence
  Description of Artificial Sequence: Synthetic oligonucleotide
uggcauucacuguuuccua

SEQ ID NO: 1383513 - RNA, 19 nt, Artificial Sequence
  Description of Artificial Sequence: Synthetic oligonucleotide
ccauuuguuuuauauagcu

SEQ ID NO: 1383514 - RNA, 19 nt, Artificial Sequence
  Description of Artificial Sequence: Synthetic oligonucleotide
aucaguuuccuggcaggca

SEQ ID NO: 1383515 - RNA, 19 nt, Artificial Sequence
  Description of Artificial Sequence: Synthetic oligonucleotide
gggaaacacgcggugggcg

SEQ ID NO: 1383516 - RNA, 19 nt, Artificial Sequence
  Description of Artificial Sequence: Synthetic oligonucleotide
cacuaggguuuuagacuag

SEQ ID NO: 1383517 - RNA, 19 nt, Artificial Sequence
  Description of Artificial Sequence: Synthetic oligonucleotide
cuagugagaugaggccugc

SEQ ID NO: 1383518 - RNA, 19 nt, Artificial Sequence
  Description of Artificial Sequence: Synthetic oligonucleotide
acauaagugugugcagaaa

SEQ ID NO: 1383519 - RNA, 19 nt, Artificial Sequence
  Description of Artificial Sequence: Synthetic oligonucleotide
gcuuauagaugucacacuu

SEQ ID NO: 1383520 - RNA, 19 nt, Artificial Sequence
  Description of Artificial Sequence: Synthetic oligonucleotide
gccaguggcccaaugacug

SEQ ID NO: 1383521 - RNA, 19 nt, Artificial Sequence
  Description of Artificial Sequence: Synthetic oligonucleotide
gccuuuuagcucuggcacc

SEQ ID NO: 1383522 - RNA, 19 nt, Artificial Sequence
  Description of Artificial Sequence: Synthetic oligonucleotide
ggagguggagucugcuacc

SEQ ID NO: 1383523 - RNA, 19 nt, Artificial Sequence
  Description of Artificial Sequence: Synthetic oligonucleotide
gaguuacugcaguuaauuu

SEQ ID NO: 1383524 - RNA, 19 nt, Artificial Sequence
  Description of Artificial Sequence: Synthetic oligonucleotide
aggugcucuacaccuugau

SEQ ID NO: 1383525 - RNA, 19 nt, Artificial Sequence
  Description of Artificial Sequence: Synthetic oligonucleotide
ggguuuuagacuaggccuc

SEQ ID NO: 1383526 - RNA, 19 nt, Artificial Sequence
  Description of Artificial Sequence: Synthetic oligonucleotide
cauuuuacugugaguuacu

SEQ ID NO: 1383527 - RNA, 19 nt, Artificial Sequence
  Description of Artificial Sequence: Synthetic oligonucleotide
ggccucucuaaaugaauga

SEQ ID NO: 1383528 - RNA, 19 nt, Artificial Sequence
  Description of Artificial Sequence: Synthetic oligonucleotide
cugauaauggugguacaua

SEQ ID NO: 1383529 - RNA, 19 nt, Artificial Sequence
  Description of Artificial Sequence: Synthetic oligonucleotide
cacaaugaggagaacuuuu

SEQ ID NO: 1383530 - RNA, 19 nt, Artificial Sequence
  Description of Artificial Sequence: Synthetic oligonucleotide
gcuuauauucucauugagu

SEQ ID NO: 1383531 - RNA, 19 nt, Artificial Sequence
  Description of Artificial Sequence: Synthetic oligonucleotide
agaugccuuuuagcucugg

SEQ ID NO: 1383532 - RNA, 19 nt, Artificial Sequence
  Description of Artificial Sequence: Synthetic oligonucleotide
cacuucuauacagccccac

SEQ ID NO: 1383533 - RNA, 19 nt, Artificial Sequence
  Description of Artificial Sequence: Synthetic oligonucleotide
caaugaggagaacuuuugu

SEQ ID NO: 1383534 - RNA, 19 nt, Artificial Sequence
  Description of Artificial Sequence: Synthetic oligonucleotide
gaggggaaaggucauucuu

SEQ ID NO: 1383535 - RNA, 19 nt, Artificial Sequence
  Description of Artificial Sequence: Synthetic oligonucleotide
ccuguguauccagauauuc

SEQ ID NO: 1383536 - RNA, 19 nt, Artificial Sequence
  Description of Artificial Sequence: Synthetic oligonucleotide
acgcggcggggaaacacgc

SEQ ID NO: 1383537 - RNA, 19 nt, Artificial Sequence
  Description of Artificial Sequence: Synthetic oligonucleotide
ccgaagcaugagaaagagg

SEQ ID NO: 1383538 - RNA, 19 nt, Artificial Sequence
  Description of Artificial Sequence: Synthetic oligonucleotide
agccaaauacaagggguuu

SEQ ID NO: 1383539 - RNA, 19 nt, Artificial Sequence
  Description of Artificial Sequence: Synthetic oligonucleotide
gggugacaacuguagccag

SEQ ID NO: 1383540 - RNA, 19 nt, Artificial Sequence
  Description of Artificial Sequence: Synthetic oligonucleotide
gguaccgaagcaugagaaa

SEQ ID NO: 1383541 - RNA, 19 nt, Artificial Sequence
  Description of Artificial Sequence: Synthetic oligonucleotide
guauccagauauucucuau

SEQ ID NO: 1383542 - RNA, 19 nt, Artificial Sequence
  Description of Artificial Sequence: Synthetic oligonucleotide
gcauucacuguuuccuaga

SEQ ID NO: 1383543 - RNA, 19 nt, Artificial Sequence
  Description of Artificial Sequence: Synthetic oligonucleotide
gccauaggacaucccuggg

SEQ ID NO: 1383544 - RNA, 19 nt, Artificial Sequence
  Description of Artificial Sequence: Synthetic oligonucleotide
gggagaccuguguauccag

SEQ ID NO: 1383545 - RNA, 19 nt, Artificial Sequence
  Description of Artificial Sequence: Synthetic oligonucleotide
gaaacacgcggugggcgca

SEQ ID NO: 1383546 - RNA, 19 nt, Artificial Sequence
  Description of Artificial Sequence: Synthetic oligonucleotide
gguggagucugcuaccccu

SEQ ID NO: 1383547 - RNA, 19 nt, Artificial Sequence
  Description of Artificial Sequence: Synthetic oligonucleotide
guguauccagauauucucu

SEQ ID NO: 1383548 - RNA, 19 nt, Artificial Sequence
  Description of Artificial Sequence: Synthetic oligonucleotide
aagaggugcucuacaccuu

SEQ ID NO: 1383549 - RNA, 19 nt, Artificial Sequence
  Description of Artificial Sequence: Synthetic oligonucleotide
acgcggugggcgcacugug

SEQ ID NO: 1383550 - RNA, 19 nt, Artificial Sequence
  Description of Artificial Sequence: Synthetic oligonucleotide
ggcaccugcuguucucccc

SEQ ID NO: 1383551 - RNA, 19 nt, Artificial Sequence
  Description of Artificial Sequence: Synthetic oligonucleotide
cagauuuauuuguuaucau

SEQ ID NO: 1383552 - RNA, 19 nt, Artificial Sequence
  Description of Artificial Sequence: Synthetic oligonucleotide
gggucaggcucguggcgcg

SEQ ID NO: 1383553 - RNA, 19 nt, Artificial Sequence
  Description of Artificial Sequence: Synthetic oligonucleotide
gugagaugaggccugcauu

SEQ ID NO: 1383554 - RNA, 19 nt, Artificial Sequence
  Description of Artificial Sequence: Synthetic oligonucleotide
uucaccaaucuggggccau

SEQ ID NO: 1383555 - RNA, 19 nt, Artificial Sequence
  Description of Artificial Sequence: Synthetic oligonucleotide
ucaccaaucuggggccauc

SEQ ID NO: 1383556 - RNA, 19 nt, Artificial Sequence
  Description of Artificial Sequence: Synthetic oligonucleotide
guuuuagacuaggccucuc

SEQ ID NO: 1383557 - RNA, 19 nt, Artificial Sequence
  Description of Artificial Sequence: Synthetic oligonucleotide
ucaucgccacgcggcgggg

SEQ ID NO: 1383558 - RNA, 19 nt, Artificial Sequence
  Description of Artificial Sequence: Synthetic oligonucleotide
cugugaguuacugcaguua

SEQ ID NO: 1383559 - RNA, 19 nt, Artificial Sequence
  Description of Artificial Sequence: Synthetic oligonucleotide
cuuuuagcucuggcaccug

SEQ ID NO: 1383560 - RNA, 19 nt, Artificial Sequence
  Description of Artificial Sequence: Synthetic oligonucleotide
ggcggggaaacacgcggug

SEQ ID NO: 1383561 - RNA, 19 nt, Artificial Sequence
  Description of Artificial Sequence: Synthetic oligonucleotide
accccucagaugaaguauu

SEQ ID NO: 1383562 - RNA, 19 nt, Artificial Sequence
  Description of Artificial Sequence: Synthetic oligonucleotide
cggggaaacacgcgguggg

SEQ ID NO: 1383563 - RNA, 19 nt, Artificial Sequence
  Description of Artificial Sequence: Synthetic oligonucleotide
gcggggaaacacgcggugg

SEQ ID NO: 1383564 - RNA, 19 nt, Artificial Sequence
  Description of Artificial Sequence: Synthetic oligonucleotide
acacgcggugggcgcacug

SEQ ID NO: 1383565 - RNA, 19 nt, Artificial Sequence
  Description of Artificial Sequence: Synthetic oligonucleotide
cagggucacuuugcagggc

SEQ ID NO: 1383566 - RNA, 19 nt, Artificial Sequence
  Description of Artificial Sequence: Synthetic oligonucleotide
cauacuugacugagcuuau

SEQ ID NO: 1383567 - RNA, 19 nt, Artificial Sequence
  Description of Artificial Sequence: Synthetic oligonucleotide
guaugccauuuuacuguga

SEQ ID NO: 1383568 - RNA, 19 nt, Artificial Sequence
  Description of Artificial Sequence: Synthetic oligonucleotide
uaggugcccuugugccugu

SEQ ID NO: 1383569 - RNA, 19 nt, Artificial Sequence
  Description of Artificial Sequence: Synthetic oligonucleotide
gcuuaaaaguaugccauuu

SEQ ID NO: 1383570 - RNA, 19 nt, Artificial Sequence
  Description of Artificial Sequence: Synthetic oligonucleotide
gcaugagaaagaggaggca

SEQ ID NO: 1383571 - RNA, 19 nt, Artificial Sequence
  Description of Artificial Sequence: Synthetic oligonucleotide
ggggaaacacgcggugggc

SEQ ID NO: 1383572 - RNA, 19 nt, Artificial Sequence
  Description of Artificial Sequence: Synthetic oligonucleotide
cugagcuuauauucucauu

SEQ ID NO: 1383573 - RNA, 19 nt, Artificial Sequence
  Description of Artificial Sequence: Synthetic oligonucleotide
aacacgcggugggcgcacu

SEQ ID NO: 1383574 - RNA, 19 nt, Artificial Sequence
  Description of Artificial Sequence: Synthetic oligonucleotide
cauuuugagcuggauugau

SEQ ID NO: 1383575 - RNA, 19 nt, Artificial Sequence
  Description of Artificial Sequence: Synthetic oligonucleotide
gccaaauacaagggguuua

SEQ ID NO: 1383576 - RNA, 19 nt, Artificial Sequence
  Description of Artificial Sequence: Synthetic oligonucleotide
guacauagugggugugcuu

SEQ ID NO: 1383577 - RNA, 19 nt, Artificial Sequence
  Description of Artificial Sequence: Synthetic oligonucleotide
ccccucagaugaaguauuc

SEQ ID NO: 1383578 - RNA, 19 nt, Artificial Sequence
  Description of Artificial Sequence: Synthetic oligonucleotide
ggugugcuuucucuccugu

SEQ ID NO: 1383579 - RNA, 19 nt, Artificial Sequence
  Description of Artificial Sequence: Synthetic oligonucleotide
ccccagucagcuuauagau

SEQ ID NO: 1383580 - RNA, 19 nt, Artificial Sequence
  Description of Artificial Sequence: Synthetic oligonucleotide
caguuacacuucagauuua

SEQ ID NO: 1383581 - RNA, 19 nt, Artificial Sequence
  Description of Artificial Sequence: Synthetic oligonucleotide
ggugcucuacaccuugauu

SEQ ID NO: 1383582 - RNA, 19 nt, Artificial Sequence
  Description of Artificial Sequence: Synthetic oligonucleotide
gcucaucgccacgcggcgg

SEQ ID NO: 1383583 - RNA, 19 nt, Artificial Sequence
  Description of Artificial Sequence: Synthetic oligonucleotide
gguuuuagacuaggccucu

SEQ ID NO: 1383584 - RNA, 19 nt, Artificial Sequence
  Description of Artificial Sequence: Synthetic oligonucleotide
uauccccagucagcuuaua

SEQ ID NO: 1383585 - RNA, 19 nt, Artificial Sequence
  Description of Artificial Sequence: Synthetic oligonucleotide
cagcaauggguggcauuca

SEQ ID NO: 1383586 - RNA, 19 nt, Artificial Sequence
  Description of Artificial Sequence: Synthetic oligonucleotide
ggucaggcucguggcgcgg

SEQ ID NO: 1383587 - RNA, 19 nt, Artificial Sequence
  Description of Artificial Sequence: Synthetic oligonucleotide
ccaguauccccagucagcu

SEQ ID NO: 1383588 - RNA, 19 nt, Artificial Sequence
  Description of Artificial Sequence: Synthetic oligonucleotide
auacugccuuugguuucaa

SEQ ID NO: 1383589 - RNA, 19 nt, Artificial Sequence
  Description of Artificial Sequence: Synthetic oligonucleotide
cgcggugggcgcacugugg

SEQ ID NO: 1383590 - RNA, 19 nt, Artificial Sequence
  Description of Artificial Sequence: Synthetic oligonucleotide
gcaauggguggcauucacu

SEQ ID NO: 1383591 - RNA, 19 nt, Artificial Sequence
  Description of Artificial Sequence: Synthetic oligonucleotide
gggguuuaauacugccuuu

SEQ ID NO: 1383592 - RNA, 19 nt, Artificial Sequence
  Description of Artificial Sequence: Synthetic oligonucleotide
ccuugugccuguacaggua

SEQ ID NO: 1383593 - RNA, 19 nt, Artificial Sequence
  Description of Artificial Sequence: Synthetic oligonucleotide
ggaaaggaagaugccuuuu

SEQ ID NO: 1383594 - RNA, 19 nt, Artificial Sequence
  Description of Artificial Sequence: Synthetic oligonucleotide
caccaaucuggggccaucu

SEQ ID NO: 1383595 - RNA, 19 nt, Artificial Sequence
  Description of Artificial Sequence: Synthetic oligonucleotide
ccacgcggcggggaaacac

SEQ ID NO: 1383596 - RNA, 19 nt, Artificial Sequence
  Description of Artificial Sequence: Synthetic oligonucleotide
ucgccacgcggcggggaaa

SEQ ID NO: 1383597 - RNA, 19 nt, Artificial Sequence
  Description of Artificial Sequence: Synthetic oligonucleotide
guauccccagucagcuuau

SEQ ID NO: 1383598 - RNA, 19 nt, Artificial Sequence
  Description of Artificial Sequence: Synthetic oligonucleotide
ccuagacacuuagaguagu

SEQ ID NO: 1383599 - RNA, 19 nt, Artificial Sequence
  Description of Artificial Sequence: Synthetic oligonucleotide
agccagccauuuacuucau

SEQ ID NO: 1383600 - RNA, 19 nt, Artificial Sequence
  Description of Artificial Sequence: Synthetic oligonucleotide
caucgccacgcggcgggga

SEQ ID NO: 1383601 - RNA, 19 nt, Artificial Sequence
  Description of Artificial Sequence: Synthetic oligonucleotide
ccacagcauucccaggacu

SEQ ID NO: 1383602 - RNA, 19 nt, Artificial Sequence
  Description of Artificial Sequence: Synthetic oligonucleotide
cuggaccagugaggggaaa

SEQ ID NO: 1383603 - RNA, 19 nt, Artificial Sequence
  Description of Artificial Sequence: Synthetic oligonucleotide
gccauacuugacugagcuu

SEQ ID NO: 1383604 - RNA, 19 nt, Artificial Sequence
  Description of Artificial Sequence: Synthetic oligonucleotide
ggcgugcuccuggggcugc

SEQ ID NO: 1383605 - RNA, 19 nt, Artificial Sequence
  Description of Artificial Sequence: Synthetic oligonucleotide
gccagccauuuacuucaua

SEQ ID NO: 1383606 - RNA, 19 nt, Artificial Sequence
  Description of Artificial Sequence: Synthetic oligonucleotide
cacgcggugggcgcacugu

SEQ ID NO: 1383607 - RNA, 19 nt, Artificial Sequence
  Description of Artificial Sequence: Synthetic oligonucleotide
caguauccccagucagcuu

SEQ ID NO: 1383608 - RNA, 19 nt, Artificial Sequence
  Description of Artificial Sequence: Synthetic oligonucleotide
cuggggccaucugucacuu

SEQ ID NO: 1383609 - RNA, 19 nt, Artificial Sequence
  Description of Artificial Sequence: Synthetic oligonucleotide
cgccacgcggcggggaaac

SEQ ID NO: 1383610 - RNA, 19 nt, Artificial Sequence
  Description of Artificial Sequence: Synthetic oligonucleotide
aggugcccuugugccugua

SEQ ID NO: 1383611 - RNA, 19 nt, Artificial Sequence
  Description of Artificial Sequence: Synthetic oligonucleotide
ggccugcauugugcaggga

SEQ ID NO: 1383612 - RNA, 19 nt, Artificial Sequence
  Description of Artificial Sequence: Synthetic oligonucleotide
gccacgcggcggggaaaca

SEQ ID NO: 1383613 - RNA, 19 nt, Artificial Sequence
  Description of Artificial Sequence: Synthetic oligonucleotide
cggcggggaaacacgcggu

SEQ ID NO: 1383614 - RNA, 19 nt, Artificial Sequence
  Description of Artificial Sequence: Synthetic oligonucleotide
ccccagcguccuggagggc

SEQ ID NO: 1383615 - RNA, 19 nt, Artificial Sequence
  Description of Artificial Sequence: Synthetic oligonucleotide
ucuagaacagacuugaugg

SEQ ID NO: 1383616 - RNA, 19 nt, Artificial Sequence
  Description of Artificial Sequence: Synthetic oligonucleotide
aagcuaacaacgcaggucg

SEQ ID NO: 1383617 - RNA, 19 nt, Artificial Sequence
  Description of Artificial Sequence: Synthetic oligonucleotide
agaagucucacucacagac

SEQ ID NO: 1383618 - RNA, 19 nt, Artificial Sequence
  Description of Artificial Sequence: Synthetic oligonucleotide
ucaucaauugaacugcugg

SEQ ID NO: 1383619 - RNA, 19 nt, Artificial Sequence
  Description of Artificial Sequence: Synthetic oligonucleotide
aacguguacacucggaaac

SEQ ID NO: 1383620 - RNA, 19 nt, Artificial Sequence
  Description of Artificial Sequence: Synthetic oligonucleotide
uaggcuuuaacucaggcug

SEQ ID NO: 1383621 - RNA, 19 nt, Artificial Sequence
  Description of Artificial Sequence: Synthetic oligonucleotide
uugugaaagaguacaaagg

SEQ ID NO: 1383622 - RNA, 19 nt, Artificial Sequence
  Description of Artificial Sequence: Synthetic oligonucleotide
uagagauagacucuguugc

SEQ ID NO: 1383623 - RNA, 19 nt, Artificial Sequence
  Description of Artificial Sequence: Synthetic oligonucleotide
uuugugaugaugcaucaug

SEQ ID NO: 1383624 - RNA, 19 nt, Artificial Sequence
  Description of Artificial Sequence: Synthetic oligonucleotide
uuuucagaguuagagauag

SEQ ID NO: 1383625 - RNA, 19 nt, Artificial Sequence
  Description of Artificial Sequence: Synthetic oligonucleotide
ugcaucauguccaagagaa

SEQ ID NO: 1383626 - RNA, 19 nt, Artificial Sequence
  Description of Artificial Sequence: Synthetic oligonucleotide
ucauuacuagucuugcugg

SEQ ID NO: 1383627 - RNA, 19 nt, Artificial Sequence
  Description of Artificial Sequence: Synthetic oligonucleotide
gaagcuuggagucucuagg

SEQ ID NO: 1383628 - RNA, 19 nt, Artificial Sequence
  Description of Artificial Sequence: Synthetic oligonucleotide
uuuaggcaggaaaacauca

SEQ ID NO: 1383629 - RNA, 19 nt, Artificial Sequence
  Description of Artificial Sequence: Synthetic oligonucleotide
ucaagcuaaaguuggacca

SEQ ID NO: 1383630 - RNA, 19 nt, Artificial Sequence
  Description of Artificial Sequence: Synthetic oligonucleotide
aacagcgcaacguguacac

SEQ ID NO: 1383631 - RNA, 19 nt, Artificial Sequence
  Description of Artificial Sequence: Synthetic oligonucleotide
uguuaauacgguuguacgc

SEQ ID NO: 1383632 - RNA, 19 nt, Artificial Sequence
  Description of Artificial Sequence: Synthetic oligonucleotide
uguccaagagaaaugcaag

SEQ ID NO: 1383633 - RNA, 19 nt, Artificial Sequence
  Description of Artificial Sequence: Synthetic oligonucleotide
agacuacacgcacacaagc

SEQ ID NO: 1383634 - RNA, 19 nt, Artificial Sequence
  Description of Artificial Sequence: Synthetic oligonucleotide
uacaaaggaggccugcccg

SEQ ID NO: 1383635 - RNA, 19 nt, Artificial Sequence
  Description of Artificial Sequence: Synthetic oligonucleotide
uagauugugaaagaguaca

SEQ ID NO: 1383636 - RNA, 19 nt, Artificial Sequence
  Description of Artificial Sequence: Synthetic oligonucleotide
uucaagcuaaaguuggacc

SEQ ID NO: 1383637 - RNA, 19 nt, Artificial Sequence
  Description of Artificial Sequence: Synthetic oligonucleotide
uggaacagucuuuacuugg

SEQ ID NO: 1383638 - RNA, 19 nt, Artificial Sequence
  Description of Artificial Sequence: Synthetic oligonucleotide
uucgguuuguucuacugag

SEQ ID NO: 1383639 - RNA, 19 nt, Artificial Sequence
  Description of Artificial Sequence: Synthetic oligonucleotide
ugguucaugugucuggaag

SEQ ID NO: 1383640 - RNA, 19 nt, Artificial Sequence
  Description of Artificial Sequence: Synthetic oligonucleotide
gaacuugccagaaucagcc

SEQ ID NO: 1383641 - RNA, 19 nt, Artificial Sequence
  Description of Artificial Sequence: Synthetic oligonucleotide
gauaucuuuaggcaggaaa

SEQ ID NO: 1383642 - RNA, 19 nt, Artificial Sequence
  Description of Artificial Sequence: Synthetic oligonucleotide
cacagagcuacaaucaaag

SEQ ID NO: 1383643 - RNA, 19 nt, Artificial Sequence
  Description of Artificial Sequence: Synthetic oligonucleotide
gaugcaaacucgucucugg

SEQ ID NO: 1383644 - RNA, 19 nt, Artificial Sequence
  Description of Artificial Sequence: Synthetic oligonucleotide
gggucaaacacaaacagcg

SEQ ID NO: 1383645 - RNA, 19 nt, Artificial Sequence
  Description of Artificial Sequence: Synthetic oligonucleotide
guguuaauacgguuguacg

SEQ ID NO: 1383646 - RNA, 19 nt, Artificial Sequence
  Description of Artificial Sequence: Synthetic oligonucleotide
ucuuacacaagcuggcuac

SEQ ID NO: 1383647 - RNA, 19 nt, Artificial Sequence
  Description of Artificial Sequence: Synthetic oligonucleotide
uguacacucggaaacagua

SEQ ID NO: 1383648 - RNA, 19 nt, Artificial Sequence
  Description of Artificial Sequence: Synthetic oligonucleotide
cuaaaguuggaccaguuga

SEQ ID NO: 1383649 - RNA, 19 nt, Artificial Sequence
  Description of Artificial Sequence: Synthetic oligonucleotide
gaaagaguacaaaggaggc

SEQ ID NO: 1383650 - RNA, 19 nt, Artificial Sequence
  Description of Artificial Sequence: Synthetic oligonucleotide
ugcaagaggcucaugcugc

SEQ ID NO: 1383651 - RNA, 19 nt, Artificial Sequence
  Description of Artificial Sequence: Synthetic oligonucleotide
uacacucggaaacaguaga

SEQ ID NO: 1383652 - RNA, 19 nt, Artificial Sequence
  Description of Artificial Sequence: Synthetic oligonucleotide
cauuccaacagcacagagc

SEQ ID NO: 1383653 - RNA, 19 nt, Artificial Sequence
  Description of Artificial Sequence: Synthetic oligonucleotide
aacaguagauugugaaaga

SEQ ID NO: 1383654 - RNA, 19 nt, Artificial Sequence
  Description of Artificial Sequence: Synthetic oligonucleotide
uuacuagucuugcuggucu

SEQ ID NO: 1383655 - RNA, 19 nt, Artificial Sequence
  Description of Artificial Sequence: Synthetic oligonucleotide
gucucuaggguccacgggg

SEQ ID NO: 1383656 - RNA, 19 nt, Artificial Sequence
  Description of Artificial Sequence: Synthetic oligonucleotide
acagaugacagaacagggc

SEQ ID NO: 1383657 - RNA, 19 nt, Artificial Sequence
  Description of Artificial Sequence: Synthetic oligonucleotide
uguacgcucuagaacagac

SEQ ID NO: 1383658 - RNA, 19 nt, Artificial Sequence
  Description of Artificial Sequence: Synthetic oligonucleotide
gguuguacgcucuagaaca

SEQ ID NO: 1383659 - RNA, 19 nt, Artificial Sequence
  Description of Artificial Sequence: Synthetic oligonucleotide
agcaaggucaacuacuuua

SEQ ID NO: 1383660 - RNA, 19 nt, Artificial Sequence
  Description of Artificial Sequence: Synthetic oligonucleotide
cauucagugggcagcaaag

SEQ ID NO: 1383661 - RNA, 19 nt, Artificial Sequence
  Description of Artificial Sequence: Synthetic oligonucleotide
aggcgacagagucacaugg

SEQ ID NO: 1383662 - RNA, 19 nt, Artificial Sequence
  Description of Artificial Sequence: Synthetic oligonucleotide
cucuuugugaugaugcauc

SEQ ID NO: 1383663 - RNA, 19 nt, Artificial Sequence
  Description of Artificial Sequence: Synthetic oligonucleotide
aacuuggaacagucuuuac

SEQ ID NO: 1383664 - RNA, 19 nt, Artificial Sequence
  Description of Artificial Sequence: Synthetic oligonucleotide
aagucucacucacagacua

SEQ ID NO: 1383665 - RNA, 19 nt, Artificial Sequence
  Description of Artificial Sequence: Synthetic oligonucleotide
aguagauugugaaagagua

SEQ ID NO: 1383666 - RNA, 19 nt, Artificial Sequence
  Description of Artificial Sequence: Synthetic oligonucleotide
uccaggucgauaucuuuag

SEQ ID NO: 1383667 - RNA, 19 nt, Artificial Sequence
  Description of Artificial Sequence: Synthetic oligonucleotide
aggucgauaucuuuaggca

SEQ ID NO: 1383668 - RNA, 19 nt, Artificial Sequence
  Description of Artificial Sequence: Synthetic oligonucleotide
ugucgguucugucuagcag

SEQ ID NO: 1383669 - RNA, 19 nt, Artificial Sequence
  Description of Artificial Sequence: Synthetic oligonucleotide
aucaaagaagucucacuca

SEQ ID NO: 1383670 - RNA, 19 nt, Artificial Sequence
  Description of Artificial Sequence: Synthetic oligonucleotide
uuaucaguccacggcaucc

SEQ ID NO: 1383671 - RNA, 19 nt, Artificial Sequence
  Description of Artificial Sequence: Synthetic oligonucleotide
gucgauaucuuuaggcagg

SEQ ID NO: 1383672 - RNA, 19 nt, Artificial Sequence
  Description of Artificial Sequence: Synthetic oligonucleotide
uccguguuaauacgguugu

SEQ ID NO: 1383673 - RNA, 19 nt, Artificial Sequence
  Description of Artificial Sequence: Synthetic oligonucleotide
ucuucgguuuguucuacug

SEQ ID NO: 1383674 - RNA, 19 nt, Artificial Sequence
  Description of Artificial Sequence: Synthetic oligonucleotide
aaaguuggaccaguugaug

SEQ ID NO: 1383675 - RNA, 19 nt, Artificial Sequence
  Description of Artificial Sequence: Synthetic oligonucleotide
ucuuugucgguucugucua

SEQ ID NO: 1383676 - RNA, 19 nt, Artificial Sequence
  Description of Artificial Sequence: Synthetic oligonucleotide
ucuuugugaugaugcauca

SEQ ID NO: 1383677 - RNA, 19 nt, Artificial Sequence
  Description of Artificial Sequence: Synthetic oligonucleotide
uagaacagacuugauggug

SEQ ID NO: 1383678 - RNA, 19 nt, Artificial Sequence
  Description of Artificial Sequence: Synthetic oligonucleotide
agggucuuacacaagcugg

SEQ ID NO: 1383679 - RNA, 19 nt, Artificial Sequence
  Description of Artificial Sequence: Synthetic oligonucleotide
uguucuacugagccauugu

SEQ ID NO: 1383680 - RNA, 19 nt, Artificial Sequence
  Description of Artificial Sequence: Synthetic oligonucleotide
gaaaauuucuagcaagcau

SEQ ID NO: 1383681 - RNA, 19 nt, Artificial Sequence
  Description of Artificial Sequence: Synthetic oligonucleotide
cuuuaggcaggaaaacauc

SEQ ID NO: 1383682 - RNA, 19 nt, Artificial Sequence
  Description of Artificial Sequence: Synthetic oligonucleotide
auaucuuuaggcaggaaaa

SEQ ID NO: 1383683 - RNA, 19 nt, Artificial Sequence
  Description of Artificial Sequence: Synthetic oligonucleotide
guucuacugagccauugug

SEQ ID NO: 1383684 - RNA, 19 nt, Artificial Sequence
  Description of Artificial Sequence: Synthetic oligonucleotide
uaacaacgcaggucgagca

SEQ ID NO: 1383685 - RNA, 19 nt, Artificial Sequence
  Description of Artificial Sequence: Synthetic oligonucleotide
cuccguguuaauacgguug

SEQ ID NO: 1383686 - RNA, 19 nt, Artificial Sequence
  Description of Artificial Sequence: Synthetic oligonucleotide
acaacgcaggucgagcagc

SEQ ID NO: 1383687 - RNA, 19 nt, Artificial Sequence
  Description of Artificial Sequence: Synthetic oligonucleotide
auuacuagucuugcugguc

SEQ ID NO: 1383688 - RNA, 19 nt, Artificial Sequence
  Description of Artificial Sequence: Synthetic oligonucleotide
ucuggaaggggagugagau

SEQ ID NO: 1383689 - RNA, 19 nt, Artificial Sequence
  Description of Artificial Sequence: Synthetic oligonucleotide
gaguuagagauagacucug

SEQ ID NO: 1383690 - RNA, 19 nt, Artificial Sequence
  Description of Artificial Sequence: Synthetic oligonucleotide
guucaugugucuggaaggg

SEQ ID NO: 1383691 - RNA, 19 nt, Artificial Sequence
  Description of Artificial Sequence: Synthetic oligonucleotide
cagagcuacaaucaaagaa

SEQ ID NO: 1383692 - RNA, 19 nt, Artificial Sequence
  Description of Artificial Sequence: Synthetic oligonucleotide
cauauccacacuguccagg

SEQ ID NO: 1383693 - RNA, 19 nt, Artificial Sequence
  Description of Artificial Sequence: Synthetic oligonucleotide
gguucugucuagcagaguc

SEQ ID NO: 1383694 - RNA, 19 nt, Artificial Sequence
  Description of Artificial Sequence: Synthetic oligonucleotide
ucauucagugggcagcaaa

SEQ ID NO: 1383695 - RNA, 19 nt, Artificial Sequence
  Description of Artificial Sequence: Synthetic oligonucleotide
cuggauggcucauuacuag

SEQ ID NO: 1383696 - RNA, 19 nt, Artificial Sequence
  Description of Artificial Sequence: Synthetic oligonucleotide
ucgguucugucuagcagag

SEQ ID NO: 1383697 - RNA, 19 nt, Artificial Sequence
  Description of Artificial Sequence: Synthetic oligonucleotide
uacgguuguacgcucuaga

SEQ ID NO: 1383698 - RNA, 19 nt, Artificial Sequence
  Description of Artificial Sequence: Synthetic oligonucleotide
agagauagacucuguugcu

SEQ ID NO: 1383699 - RNA, 19 nt, Artificial Sequence
  Description of Artificial Sequence: Synthetic oligonucleotide
uuuacuuggccgcuccuuu

SEQ ID NO: 1383700 - RNA, 19 nt, Artificial Sequence
  Description of Artificial Sequence: Synthetic oligonucleotide
ggucgauaucuuuaggcag

SEQ ID NO: 1383701 - RNA, 19 nt, Artificial Sequence
  Description of Artificial Sequence: Synthetic oligonucleotide
gacuugauggugugaguac

SEQ ID NO: 1383702 - RNA, 19 nt, Artificial Sequence
  Description of Artificial Sequence: Synthetic oligonucleotide
aauuggcgggaacuacugu

SEQ ID NO: 1383703 - RNA, 19 nt, Artificial Sequence
  Description of Artificial Sequence: Synthetic oligonucleotide
caggccuccguguuaauac

SEQ ID NO: 1383704 - RNA, 19 nt, Artificial Sequence
  Description of Artificial Sequence: Synthetic oligonucleotide
cuaacaacgcaggucgagc

SEQ ID NO: 1383705 - RNA, 19 nt, Artificial Sequence
  Description of Artificial Sequence: Synthetic oligonucleotide
uaauacgguuguacgcucu

SEQ ID NO: 1383706 - RNA, 19 nt, Artificial Sequence
  Description of Artificial Sequence: Synthetic oligonucleotide
gagauagacucuguugcug

SEQ ID NO: 1383707 - RNA, 19 nt, Artificial Sequence
  Description of Artificial Sequence: Synthetic oligonucleotide
auucagugggcagcaaagg

SEQ ID NO: 1383708 - RNA, 19 nt, Artificial Sequence
  Description of Artificial Sequence: Synthetic oligonucleotide
uuaauacgguuguacgcuc

SEQ ID NO: 1383709 - RNA, 19 nt, Artificial Sequence
  Description of Artificial Sequence: Synthetic oligonucleotide
ggaaacaguagauugugaa

SEQ ID NO: 1383710 - RNA, 19 nt, Artificial Sequence
  Description of Artificial Sequence: Synthetic oligonucleotide
gaccaguugauggacaguc

SEQ ID NO: 1383711 - RNA, 19 nt, Artificial Sequence
  Description of Artificial Sequence: Synthetic oligonucleotide
caagcuaacaacgcagguc

SEQ ID NO: 1383712 - RNA, 19 nt, Artificial Sequence
  Description of Artificial Sequence: Synthetic oligonucleotide
ucuagcaagcauguccaac

SEQ ID NO: 1383713 - RNA, 19 nt, Artificial Sequence
  Description of Artificial Sequence: Synthetic oligonucleotide
gaacagacuugauggugug

SEQ ID NO: 1383714 - RNA, 19 nt, Artificial Sequence
  Description of Artificial Sequence: Synthetic oligonucleotide
ucgguuuguucuacugagc

SEQ ID NO: 1383715 - RNA, 19 nt, Artificial Sequence
  Description of Artificial Sequence: Synthetic oligonucleotide
gucgguucugucuagcaga

SEQ ID NO: 1383716 - RNA, 19 nt, Artificial Sequence
  Description of Artificial Sequence: Synthetic oligonucleotide
guacaaaggaggccugccc

SEQ ID NO: 1383717 - RNA, 19 nt, Artificial Sequence
  Description of Artificial Sequence: Synthetic oligonucleotide
gaauuggcgggaacuacug

SEQ ID NO: 1383718 - RNA, 19 nt, Artificial Sequence
  Description of Artificial Sequence: Synthetic oligonucleotide
agucacauggaugaugcaa

SEQ ID NO: 1383719 - RNA, 19 nt, Artificial Sequence
  Description of Artificial Sequence: Synthetic oligonucleotide
acaagcuaacaacgcaggu

SEQ ID NO: 1383720 - RNA, 19 nt, Artificial Sequence
  Description of Artificial Sequence: Synthetic oligonucleotide
aaacagcgcaacguguaca

SEQ ID NO: 1383721 - RNA, 19 nt, Artificial Sequence
  Description of Artificial Sequence: Synthetic oligonucleotide
aggaauuggcgggaacuac

SEQ ID NO: 1383722 - RNA, 19 nt, Artificial Sequence
  Description of Artificial Sequence: Synthetic oligonucleotide
caaggucaacuacuuuagg

SEQ ID NO: 1383723 - RNA, 19 nt, Artificial Sequence
  Description of Artificial Sequence: Synthetic oligonucleotide
aggcaggaaaacaucauca

SEQ ID NO: 1383724 - RNA, 19 nt, Artificial Sequence
  Description of Artificial Sequence: Synthetic oligonucleotide
agcaagcauguccaacuug

SEQ ID NO: 1383725 - RNA, 19 nt, Artificial Sequence
  Description of Artificial Sequence: Synthetic oligonucleotide
ugcagaggcgacagaguca

SEQ ID NO: 1383726 - RNA, 19 nt, Artificial Sequence
  Description of Artificial Sequence: Synthetic oligonucleotide
gauugugaaagaguacaaa

SEQ ID NO: 1383727 - RNA, 19 nt, Artificial Sequence
  Description of Artificial Sequence: Synthetic oligonucleotide
uggauggcucauuacuagu

SEQ ID NO: 1383728 - RNA, 19 nt, Artificial Sequence
  Description of Artificial Sequence: Synthetic oligonucleotide
guuaauacgguuguacgcu

SEQ ID NO: 1383729 - RNA, 19 nt, Artificial Sequence
  Description of Artificial Sequence: Synthetic oligonucleotide
uuggcgggaacuacuguuc

SEQ ID NO: 1383730 - RNA, 19 nt, Artificial Sequence
  Description of Artificial Sequence: Synthetic oligonucleotide
ccacauaucccucuucagg

SEQ ID NO: 1383731 - RNA, 19 nt, Artificial Sequence
  Description of Artificial Sequence: Synthetic oligonucleotide
ugaugcaaacucgucucug

SEQ ID NO: 1383732 - RNA, 19 nt, Artificial Sequence
  Description of Artificial Sequence: Synthetic oligonucleotide
cacaagcuggcuacaaguc

SEQ ID NO: 1383733 - RNA, 19 nt, Artificial Sequence
  Description of Artificial Sequence: Synthetic oligonucleotide
ugucuggaaggggagugag

SEQ ID NO: 1383734 - RNA, 19 nt, Artificial Sequence
  Description of Artificial Sequence: Synthetic oligonucleotide
caagcuaaaguuggaccag

SEQ ID NO: 1383735 - RNA, 19 nt, Artificial Sequence
  Description of Artificial Sequence: Synthetic oligonucleotide
gaacuacuguuccauucca

SEQ ID NO: 1383736 - RNA, 19 nt, Artificial Sequence
  Description of Artificial Sequence: Synthetic oligonucleotide
aacuugccagaaucagccu

SEQ ID NO: 1383737 - RNA, 19 nt, Artificial Sequence
  Description of Artificial Sequence: Synthetic oligonucleotide
acauaucccucuucaggca

SEQ ID NO: 1383738 - RNA, 19 nt, Artificial Sequence
  Description of Artificial Sequence: Synthetic oligonucleotide
agaguuagagauagacucu

SEQ ID NO: 1383739 - RNA, 19 nt, Artificial Sequence
  Description of Artificial Sequence: Synthetic oligonucleotide
aggccuccguguuaauacg

SEQ ID NO: 1383740 - RNA, 19 nt, Artificial Sequence
  Description of Artificial Sequence: Synthetic oligonucleotide
ucucuaggguccacggggu

SEQ ID NO: 1383741 - RNA, 19 nt, Artificial Sequence
  Description of Artificial Sequence: Synthetic oligonucleotide
cagcgcaacguguacacuc

SEQ ID NO: 1383742 - RNA, 19 nt, Artificial Sequence
  Description of Artificial Sequence: Synthetic oligonucleotide
uugucgguucugucuagca

SEQ ID NO: 1383743 - RNA, 19 nt, Artificial Sequence
  Description of Artificial Sequence: Synthetic oligonucleotide
uggguaccgaagcucugug

SEQ ID NO: 1383744 - RNA, 19 nt, Artificial Sequence
  Description of Artificial Sequence: Synthetic oligonucleotide
cacacaagcuaacaacgca

SEQ ID NO: 1383745 - RNA, 19 nt, Artificial Sequence
  Description of Artificial Sequence: Synthetic oligonucleotide
augaugcaaacucgucucu

SEQ ID NO: 1383746 - RNA, 19 nt, Artificial Sequence
  Description of Artificial Sequence: Synthetic oligonucleotide
gucuuuacuuggccgcucc

SEQ ID NO: 1383747 - RNA, 19 nt, Artificial Sequence
  Description of Artificial Sequence: Synthetic oligonucleotide
aagcuaaaguuggaccagu

SEQ ID NO: 1383748 - RNA, 19 nt, Artificial Sequence
  Description of Artificial Sequence: Synthetic oligonucleotide
uuugucgguucugucuagc

SEQ ID NO: 1383749 - RNA, 19 nt, Artificial Sequence
  Description of Artificial Sequence: Synthetic oligonucleotide
uacuagucuugcuggucug

SEQ ID NO: 1383750 - RNA, 19 nt, Artificial Sequence
  Description of Artificial Sequence: Synthetic oligonucleotide
gaugaugcaucauguccaa

SEQ ID NO: 1383751 - RNA, 19 nt, Artificial Sequence
  Description of Artificial Sequence: Synthetic oligonucleotide
caaacagcgcaacguguac

SEQ ID NO: 1383752 - RNA, 19 nt, Artificial Sequence
  Description of Artificial Sequence: Synthetic oligonucleotide
acgguuguacgcucuagaa

SEQ ID NO: 1383753 - RNA, 19 nt, Artificial Sequence
  Description of Artificial Sequence: Synthetic oligonucleotide
guaccgaagcucuguggag

SEQ ID NO: 1383754 - RNA, 19 nt, Artificial Sequence
  Description of Artificial Sequence: Synthetic oligonucleotide
uaucaguccacggcauccc

SEQ ID NO: 1383755 - RNA, 19 nt, Artificial Sequence
  Description of Artificial Sequence: Synthetic oligonucleotide
guagauugugaaagaguac

SEQ ID NO: 1383756 - RNA, 19 nt, Artificial Sequence
  Description of Artificial Sequence: Synthetic oligonucleotide
aucaauugaacugcugguu

SEQ ID NO: 1383757 - RNA, 19 nt, Artificial Sequence
  Description of Artificial Sequence: Synthetic oligonucleotide
cucuaagugguucaugugu

SEQ ID NO: 1383758 - RNA, 19 nt, Artificial Sequence
  Description of Artificial Sequence: Synthetic oligonucleotide
acggggucuguagccaucc

SEQ ID NO: 1383759 - RNA, 19 nt, Artificial Sequence
  Description of Artificial Sequence: Synthetic oligonucleotide
ugacagaacagggcaagau

SEQ ID NO: 1383760 - RNA, 19 nt, Artificial Sequence
  Description of Artificial Sequence: Synthetic oligonucleotide
auggaugaugcaaacucgu

SEQ ID NO: 1383761 - RNA, 19 nt, Artificial Sequence
  Description of Artificial Sequence: Synthetic oligonucleotide
agacuugauggugugagua

SEQ ID NO: 1383762 - RNA, 19 nt, Artificial Sequence
  Description of Artificial Sequence: Synthetic oligonucleotide
caguccacggcaucccgcc

SEQ ID NO: 1383763 - RNA, 19 nt, Artificial Sequence
  Description of Artificial Sequence: Synthetic oligonucleotide
gcuggcuacaagucagggg

SEQ ID NO: 1383764 - RNA, 19 nt, Artificial Sequence
  Description of Artificial Sequence: Synthetic oligonucleotide
gaggcgacagagucacaug

SEQ ID NO: 1383765 - RNA, 19 nt, Artificial Sequence
  Description of Artificial Sequence: Synthetic oligonucleotide
agcgcaacguguacacucg

SEQ ID NO: 1383766 - RNA, 19 nt, Artificial Sequence
  Description of Artificial Sequence: Synthetic oligonucleotide
aggagagcaaggucaacua

SEQ ID NO: 1383767 - RNA, 19 nt, Artificial Sequence
  Description of Artificial Sequence: Synthetic oligonucleotide
gcaaggucaacuacuuuag

SEQ ID NO: 1383768 - RNA, 19 nt, Artificial Sequence
  Description of Artificial Sequence: Synthetic oligonucleotide
ucgauaucuuuaggcagga

SEQ ID NO: 1383769 - RNA, 19 nt, Artificial Sequence
  Description of Artificial Sequence: Synthetic oligonucleotide
ucuuuacuuggccgcuccu

SEQ ID NO: 1383770 - RNA, 19 nt, Artificial Sequence
  Description of Artificial Sequence: Synthetic oligonucleotide
cuucgguuuguucuacuga

SEQ ID NO: 1383771 - RNA, 19 nt, Artificial Sequence
  Description of Artificial Sequence: Synthetic oligonucleotide
ugaguggcgcagcccagcu

SEQ ID NO: 1383772 - RNA, 19 nt, Artificial Sequence
  Description of Artificial Sequence: Synthetic oligonucleotide
cuacacgcacacaagcuaa

SEQ ID NO: 1383773 - RNA, 19 nt, Artificial Sequence
  Description of Artificial Sequence: Synthetic oligonucleotide
guuguacgcucuagaacag

SEQ ID NO: 1383774 - RNA, 19 nt, Artificial Sequence
  Description of Artificial Sequence: Synthetic oligonucleotide
aguccacggcaucccgccc

SEQ ID NO: 1383775 - RNA, 19 nt, Artificial Sequence
  Description of Artificial Sequence: Synthetic oligonucleotide
cuuugucgguucugucuag

SEQ ID NO: 1383776 - RNA, 19 nt, Artificial Sequence
  Description of Artificial Sequence: Synthetic oligonucleotide
agaaaugcaagaggcucau

SEQ ID NO: 1383777 - RNA, 19 nt, Artificial Sequence
  Description of Artificial Sequence: Synthetic oligonucleotide
aggcuuuaacucaggcugg

SEQ ID NO: 1383778 - RNA, 19 nt, Artificial Sequence
  Description of Artificial Sequence: Synthetic oligonucleotide
ggaacagucuuuacuuggc

SEQ ID NO: 1383779 - RNA, 19 nt, Artificial Sequence
  Description of Artificial Sequence: Synthetic oligonucleotide
uucaggcaguccucauuca

SEQ ID NO: 1383780 - RNA, 19 nt, Artificial Sequence
  Description of Artificial Sequence: Synthetic oligonucleotide
ucaacuacuuuaggcuuua

SEQ ID NO: 1383781 - RNA, 19 nt, Artificial Sequence
  Description of Artificial Sequence: Synthetic oligonucleotide
auggcucauuacuagucuu

SEQ ID NO: 1383782 - RNA, 19 nt, Artificial Sequence
  Description of Artificial Sequence: Synthetic oligonucleotide
agucucacucacagacuac

SEQ ID NO: 1383783 - RNA, 19 nt, Artificial Sequence
  Description of Artificial Sequence: Synthetic oligonucleotide
uuacacaagcuggcuacaa

SEQ ID NO: 1383784 - RNA, 19 nt, Artificial Sequence
  Description of Artificial Sequence: Synthetic oligonucleotide
guccacggggucuguagcc

SEQ ID NO: 1383785 - RNA, 19 nt, Artificial Sequence
  Description of Artificial Sequence: Synthetic oligonucleotide
ggagugacaguguucagcu

SEQ ID NO: 1383786 - RNA, 19 nt, Artificial Sequence
  Description of Artificial Sequence: Synthetic oligonucleotide
acaaacagcgcaacgugua

SEQ ID NO: 1383787 - RNA, 19 nt, Artificial Sequence
  Description of Artificial Sequence: Synthetic oligonucleotide
uggcucuugaguggcgcag

SEQ ID NO: 1383788 - RNA, 19 nt, Artificial Sequence
  Description of Artificial Sequence: Synthetic oligonucleotide
agucuuuacuuggccgcuc

SEQ ID NO: 1383789 - RNA, 19 nt, Artificial Sequence
  Description of Artificial Sequence: Synthetic oligonucleotide
uuguacgcucuagaacaga

SEQ ID NO: 1383790 - RNA, 19 nt, Artificial Sequence
  Description of Artificial Sequence: Synthetic oligonucleotide
ugugaguacuggguggguu

SEQ ID NO: 1383791 - RNA, 19 nt, Artificial Sequence
  Description of Artificial Sequence: Synthetic oligonucleotide
caguagauugugaaagagu

SEQ ID NO: 1383792 - RNA, 19 nt, Artificial Sequence
  Description of Artificial Sequence: Synthetic oligonucleotide
ggagagcaaggucaacuac

SEQ ID NO: 1383793 - RNA, 19 nt, Artificial Sequence
  Description of Artificial Sequence: Synthetic oligonucleotide
auacgguuguacgcucuag

SEQ ID NO: 1383794 - RNA, 19 nt, Artificial Sequence
  Description of Artificial Sequence: Synthetic oligonucleotide
guacuggguggguuucuug

SEQ ID NO: 1383795 - RNA, 19 nt, Artificial Sequence
  Description of Artificial Sequence: Synthetic oligonucleotide
guuagagauagacucuguu

SEQ ID NO: 1383796 - RNA, 19 nt, Artificial Sequence
  Description of Artificial Sequence: Synthetic oligonucleotide
aggcucaugcugcuuucca

SEQ ID NO: 1383797 - RNA, 19 nt, Artificial Sequence
  Description of Artificial Sequence: Synthetic oligonucleotide
caacguguacacucggaaa

SEQ ID NO: 1383798 - RNA, 19 nt, Artificial Sequence
  Description of Artificial Sequence: Synthetic oligonucleotide
agagcaaggucaacuacuu

SEQ ID NO: 1383799 - RNA, 19 nt, Artificial Sequence
  Description of Artificial Sequence: Synthetic oligonucleotide
uuuguucuacugagccauu

SEQ ID NO: 1383800 - RNA, 19 nt, Artificial Sequence
  Description of Artificial Sequence: Synthetic oligonucleotide
uccacggggucuguagcca

SEQ ID NO: 1383801 - RNA, 19 nt, Artificial Sequence
  Description of Artificial Sequence: Synthetic oligonucleotide
ucccgcccuacacacccug

SEQ ID NO: 1383802 - RNA, 19 nt, Artificial Sequence
  Description of Artificial Sequence: Synthetic oligonucleotide
uuacuuggccgcuccuuuu

SEQ ID NO: 1383803 - RNA, 19 nt, Artificial Sequence
  Description of Artificial Sequence: Synthetic oligonucleotide
gcuaacaacgcaggucgag

SEQ ID NO: 1383804 - RNA, 19 nt, Artificial Sequence
  Description of Artificial Sequence: Synthetic oligonucleotide
cguguuaauacgguuguac

SEQ ID NO: 1383805 - RNA, 19 nt, Artificial Sequence
  Description of Artificial Sequence: Synthetic oligonucleotide
ugccagaaucagccugcca

SEQ ID NO: 1383806 - RNA, 19 nt, Artificial Sequence
  Description of Artificial Sequence: Synthetic oligonucleotide
ggcucuaagugguucaugu

SEQ ID NO: 1383807 - RNA, 19 nt, Artificial Sequence
  Description of Artificial Sequence: Synthetic oligonucleotide
ggcaucccgcccuacacac

SEQ ID NO: 1383808 - RNA, 19 nt, Artificial Sequence
  Description of Artificial Sequence: Synthetic oligonucleotide
gggucuuacacaagcuggc

SEQ ID NO: 1383809 - RNA, 19 nt, Artificial Sequence
  Description of Artificial Sequence: Synthetic oligonucleotide
caggucgagcagcaaguuc

SEQ ID NO: 1383810 - RNA, 19 nt, Artificial Sequence
  Description of Artificial Sequence: Synthetic oligonucleotide
gaggcucaugcugcuuucc

SEQ ID NO: 1383811 - RNA, 19 nt, Artificial Sequence
  Description of Artificial Sequence: Synthetic oligonucleotide
cacgcacacaagcuaacaa

SEQ ID NO: 1383812 - RNA, 19 nt, Artificial Sequence
  Description of Artificial Sequence: Synthetic oligonucleotide
cuagaacagacuugauggu

SEQ ID NO: 1383813 - RNA, 19 nt, Artificial Sequence
  Description of Artificial Sequence: Synthetic oligonucleotide
gcaacguguacacucggaa

SEQ ID NO: 1383814 - RNA, 19 nt, Artificial Sequence
  Description of Artificial Sequence: Synthetic oligonucleotide
cuguagccauccccgguug

SEQ ID NO: 1383815 - RNA, 19 nt, Artificial Sequence
  Description of Artificial Sequence: Synthetic oligonucleotide
acacccuggguggguaccg

SEQ ID NO: 1383816 - RNA, 19 nt, Artificial Sequence
  Description of Artificial Sequence: Synthetic oligonucleotide
ggauggcucauuacuaguc

SEQ ID NO: 1383817 - RNA, 19 nt, Artificial Sequence
  Description of Artificial Sequence: Synthetic oligonucleotide
gaggaauuggcgggaacua

SEQ ID NO: 1383818 - RNA, 19 nt, Artificial Sequence
  Description of Artificial Sequence: Synthetic oligonucleotide
ggguccacggggucuguag

SEQ ID NO: 1383819 - RNA, 19 nt, Artificial Sequence
  Description of Artificial Sequence: Synthetic oligonucleotide
gagucacauggaugaugca

SEQ ID NO: 1383820 - RNA, 19 nt, Artificial Sequence
  Description of Artificial Sequence: Synthetic oligonucleotide
cauuacuagucuugcuggu

SEQ ID NO: 1383821 - RNA, 19 nt, Artificial Sequence
  Description of Artificial Sequence: Synthetic oligonucleotide
ugaggagagcaaggucaac

SEQ ID NO: 1383822 - RNA, 19 nt, Artificial Sequence
  Description of Artificial Sequence: Synthetic oligonucleotide
gaguggcgcagcccagcug

SEQ ID NO: 1383823 - RNA, 19 nt, Artificial Sequence
  Description of Artificial Sequence: Synthetic oligonucleotide
ggccuccguguuaauacgg

SEQ ID NO: 1383824 - RNA, 19 nt, Artificial Sequence
  Description of Artificial Sequence: Synthetic oligonucleotide
ccaggucgauaucuuuagg

SEQ ID NO: 1383825 - RNA, 19 nt, Artificial Sequence
  Description of Artificial Sequence: Synthetic oligonucleotide
accaguugauggacagucu

SEQ ID NO: 1383826 - RNA, 19 nt, Artificial Sequence
  Description of Artificial Sequence: Synthetic oligonucleotide
ugguuuugggaggcuccac

SEQ ID NO: 1383827 - RNA, 19 nt, Artificial Sequence
  Description of Artificial Sequence: Synthetic oligonucleotide
guccgccuugggugggacg

SEQ ID NO: 1383828 - RNA, 19 nt, Artificial Sequence
  Description of Artificial Sequence: Synthetic oligonucleotide
cccaguccgccuugggugg

SEQ ID NO: 1383829 - RNA, 19 nt, Artificial Sequence
  Description of Artificial Sequence: Synthetic oligonucleotide
aguacuggguggguuucuu

SEQ ID NO: 1383830 - RNA, 19 nt, Artificial Sequence
  Description of Artificial Sequence: Synthetic oligonucleotide
cacggcccaggccucugag

SEQ ID NO: 1383831 - RNA, 19 nt, Artificial Sequence
  Description of Artificial Sequence: Synthetic oligonucleotide
ggacagucuuugucgguuc

SEQ ID NO: 1383832 - RNA, 19 nt, Artificial Sequence
  Description of Artificial Sequence: Synthetic oligonucleotide
ggaggaauuggcgggaacu

SEQ ID NO: 1383833 - RNA, 19 nt, Artificial Sequence
  Description of Artificial Sequence: Synthetic oligonucleotide
gugguuuugggaggcucca

SEQ ID NO: 1383834 - RNA, 19 nt, Artificial Sequence
  Description of Artificial Sequence: Synthetic oligonucleotide
cugaggccgugguagugga

SEQ ID NO: 1383835 - RNA, 19 nt, Artificial Sequence
  Description of Artificial Sequence: Synthetic oligonucleotide
ggcaagaugcagaggcgac

SEQ ID NO: 1383836 - RNA, 19 nt, Artificial Sequence
  Description of Artificial Sequence: Synthetic oligonucleotide
ggucaacuacuuuaggcuu

SEQ ID NO: 1383837 - RNA, 19 nt, Artificial Sequence
  Description of Artificial Sequence: Synthetic oligonucleotide
agcugagggauggcugaca

SEQ ID NO: 1383838 - RNA, 19 nt, Artificial Sequence
  Description of Artificial Sequence: Synthetic oligonucleotide
cacggggucuguagccauc

SEQ ID NO: 1383839 - RNA, 19 nt, Artificial Sequence
  Description of Artificial Sequence: Synthetic oligonucleotide
cugacacccuggcggggac

SEQ ID NO: 1383840 - RNA, 19 nt, Artificial Sequence
  Description of Artificial Sequence: Synthetic oligonucleotide
acagcgcaacguguacacu

SEQ ID NO: 1383841 - RNA, 19 nt, Artificial Sequence
  Description of Artificial Sequence: Synthetic oligonucleotide
cgguuguacgcucuagaac

SEQ ID NO: 1383842 - RNA, 19 nt, Artificial Sequence
  Description of Artificial Sequence: Synthetic oligonucleotide
aggcaggccuccguguuaa

SEQ ID NO: 1383843 - RNA, 19 nt, Artificial Sequence
  Description of Artificial Sequence: Synthetic oligonucleotide
gggcaagaugcagaggcga

SEQ ID NO: 1383844 - RNA, 19 nt, Artificial Sequence
  Description of Artificial Sequence: Synthetic oligonucleotide
gcgcaacguguacacucgg

SEQ ID NO: 1383845 - RNA, 19 nt, Artificial Sequence
  Description of Artificial Sequence: Synthetic oligonucleotide
gcggggacagaugacagaa

SEQ ID NO: 1383846 - RNA, 19 nt, Artificial Sequence
  Description of Artificial Sequence: Synthetic oligonucleotide
ugacacccuggcggggaca

SEQ ID NO: 1383847 - RNA, 19 nt, Artificial Sequence
  Description of Artificial Sequence: Synthetic oligonucleotide
gcaagaugcagaggcgaca

SEQ ID NO: 1383848 - RNA, 19 nt, Artificial Sequence
  Description of Artificial Sequence: Synthetic oligonucleotide
agcuaacaacgcaggucga

SEQ ID NO: 1383849 - RNA, 19 nt, Artificial Sequence
  Description of Artificial Sequence: Synthetic oligonucleotide
cgcucuagaacagacuuga

SEQ ID NO: 1383850 - RNA, 19 nt, Artificial Sequence
  Description of Artificial Sequence: Synthetic oligonucleotide
ccgcccuacacacccuggg

SEQ ID NO: 1383851 - RNA, 19 nt, Artificial Sequence
  Description of Artificial Sequence: Synthetic oligonucleotide
ggcucuugaguggcgcagc

SEQ ID NO: 1383852 - RNA, 19 nt, Artificial Sequence
  Description of Artificial Sequence: Synthetic oligonucleotide
ggcgggaacuacuguucca

SEQ ID NO: 1383853 - RNA, 19 nt, Artificial Sequence
  Description of Artificial Sequence: Synthetic oligonucleotide
uggagucucuaggguccac

SEQ ID NO: 1383854 - RNA, 19 nt, Artificial Sequence
  Description of Artificial Sequence: Synthetic oligonucleotide
cacggcaucccgcccuaca

SEQ ID NO: 1383855 - RNA, 19 nt, Artificial Sequence
  Description of Artificial Sequence: Synthetic oligonucleotide
guacgcucuagaacagacu

SEQ ID NO: 1383856 - RNA, 19 nt, Artificial Sequence
  Description of Artificial Sequence: Synthetic oligonucleotide
cagucuuugucgguucugu

SEQ ID NO: 1383857 - RNA, 19 nt, Artificial Sequence
  Description of Artificial Sequence: Synthetic oligonucleotide
guggguaccgaagcucugu

SEQ ID NO: 1383858 - RNA, 19 nt, Artificial Sequence
  Description of Artificial Sequence: Synthetic oligonucleotide
ggcgacagagucacaugga

SEQ ID NO: 1383859 - RNA, 19 nt, Artificial Sequence
  Description of Artificial Sequence: Synthetic oligonucleotide
cagacuugauggugugagu

SEQ ID NO: 1383860 - RNA, 19 nt, Artificial Sequence
  Description of Artificial Sequence: Synthetic oligonucleotide
gagcaaggucaacuacuuu

SEQ ID NO: 1383861 - RNA, 19 nt, Artificial Sequence
  Description of Artificial Sequence: Synthetic oligonucleotide
gcgacagagucacauggau

SEQ ID NO: 1383862 - RNA, 19 nt, Artificial Sequence
  Description of Artificial Sequence: Synthetic oligonucleotide
ccccgguuggcuccaggcc

SEQ ID NO: 1383863 - RNA, 19 nt, Artificial Sequence
  Description of Artificial Sequence: Synthetic oligonucleotide
gguggguaccgaagcucug

SEQ ID NO: 1383864 - RNA, 19 nt, Artificial Sequence
  Description of Artificial Sequence: Synthetic oligonucleotide
gggcucuaagugguucaug

SEQ ID NO: 1383865 - RNA, 19 nt, Artificial Sequence
  Description of Artificial Sequence: Synthetic oligonucleotide
cuggguggguaccgaagcu

SEQ ID NO: 1383866 - RNA, 19 nt, Artificial Sequence
  Description of Artificial Sequence: Synthetic oligonucleotide
cuuuacuuggccgcuccuu

SEQ ID NO: 1383867 - RNA, 19 nt, Artificial Sequence
  Description of Artificial Sequence: Synthetic oligonucleotide
cuuugugaugaugcaucau

SEQ ID NO: 1383868 - RNA, 19 nt, Artificial Sequence
  Description of Artificial Sequence: Synthetic oligonucleotide
cacucggaaacaguagauu

SEQ ID NO: 1383869 - RNA, 19 nt, Artificial Sequence
  Description of Artificial Sequence: Synthetic oligonucleotide
gggugggacgacagggcac

SEQ ID NO: 1383870 - RNA, 19 nt, Artificial Sequence
  Description of Artificial Sequence: Synthetic oligonucleotide
ggucuuacacaagcuggcu

SEQ ID NO: 1383871 - RNA, 19 nt, Artificial Sequence
  Description of Artificial Sequence: Synthetic oligonucleotide
cccgcccuacacacccugg

SEQ ID NO: 1383872 - RNA, 19 nt, Artificial Sequence
  Description of Artificial Sequence: Synthetic oligonucleotide
ccaacuuggaacagucuuu

SEQ ID NO: 1383873 - RNA, 19 nt, Artificial Sequence
  Description of Artificial Sequence: Synthetic oligonucleotide
gcugacacccuggcgggga

SEQ ID NO: 1383874 - RNA, 19 nt, Artificial Sequence
  Description of Artificial Sequence: Synthetic oligonucleotide
ccucauucagugggcagca

SEQ ID NO: 1383875 - RNA, 19 nt, Artificial Sequence
  Description of Artificial Sequence: Synthetic oligonucleotide
guccaacuuggaacagucu

SEQ ID NO: 1383876 - RNA, 19 nt, Artificial Sequence
  Description of Artificial Sequence: Synthetic oligonucleotide
cagucuuuacuuggccgcu

SEQ ID NO: 1383877 - RNA, 19 nt, Artificial Sequence
  Description of Artificial Sequence: Synthetic oligonucleotide
ggguggguaccgaagcucu

SEQ ID NO: 1383878 - RNA, 19 nt, Artificial Sequence
  Description of Artificial Sequence: Synthetic oligonucleotide
gguuaucaguccacggcau

SEQ ID NO: 1383879 - RNA, 19 nt, Artificial Sequence
  Description of Artificial Sequence: Synthetic oligonucleotide
cggaaacaguagauuguga

SEQ ID NO: 1383880 - RNA, 19 nt, Artificial Sequence
  Description of Artificial Sequence: Synthetic oligonucleotide
caggcaggccuccguguua

SEQ ID NO: 1383881 - RNA, 19 nt, Artificial Sequence
  Description of Artificial Sequence: Synthetic oligonucleotide
gcaucauguccaagagaaa

SEQ ID NO: 1383882 - RNA, 19 nt, Artificial Sequence
  Description of Artificial Sequence: Synthetic oligonucleotide
cgcaacguguacacucgga

SEQ ID NO: 1383883 - RNA, 19 nt, Artificial Sequence
  Description of Artificial Sequence: Synthetic oligonucleotide
gcaggccuccguguuaaua

SEQ ID NO: 1383884 - RNA, 19 nt, Artificial Sequence
  Description of Artificial Sequence: Synthetic oligonucleotide
aucccgcccuacacacccu

SEQ ID NO: 1383885 - RNA, 19 nt, Artificial Sequence
  Description of Artificial Sequence: Synthetic oligonucleotide
cagaggcgacagagucaca

SEQ ID NO: 1383886 - RNA, 19 nt, Artificial Sequence
  Description of Artificial Sequence: Synthetic oligonucleotide
gccgugguaguggaggaau

SEQ ID NO: 1383887 - RNA, 19 nt, Artificial Sequence
  Description of Artificial Sequence: Synthetic oligonucleotide
gccuccguguuaauacggu

SEQ ID NO: 1383888 - RNA, 19 nt, Artificial Sequence
  Description of Artificial Sequence: Synthetic oligonucleotide
cacccuggguggguaccga

SEQ ID NO: 1383889 - RNA, 19 nt, Artificial Sequence
  Description of Artificial Sequence: Synthetic oligonucleotide
ggaccaguugauggacagu

SEQ ID NO: 1383890 - RNA, 19 nt, Artificial Sequence
  Description of Artificial Sequence: Synthetic oligonucleotide
ccgcccaguccgccuuggg

SEQ ID NO: 1383891 - RNA, 19 nt, Artificial Sequence
  Description of Artificial Sequence: Synthetic oligonucleotide
ccuccguguuaauacgguu

SEQ ID NO: 1383892 - RNA, 19 nt, Artificial Sequence
  Description of Artificial Sequence: Synthetic oligonucleotide
cccgcccaguccgccuugg

SEQ ID NO: 1383893 - RNA, 19 nt, Artificial Sequence
  Description of Artificial Sequence: Synthetic oligonucleotide
gcccgcccaguccgccuug

SEQ ID NO: 1383894 - RNA, 19 nt, Artificial Sequence
  Description of Artificial Sequence: Synthetic oligonucleotide
ccgcucagucucauccaua

SEQ ID NO: 1383895 - RNA, 19 nt, Artificial Sequence
  Description of Artificial Sequence: Synthetic oligonucleotide
gcucuagaacagacuugau

SEQ ID NO: 1383896 - RNA, 19 nt, Artificial Sequence
  Description of Artificial Sequence: Synthetic oligonucleotide
ccguguuaauacgguugua

SEQ ID NO: 1383897 - RNA, 19 nt, Artificial Sequence
  Description of Artificial Sequence: Synthetic oligonucleotide
ccgccuugggugggacgac

SEQ ID NO: 1383898 - RNA, 19 nt, Artificial Sequence
  Description of Artificial Sequence: Synthetic oligonucleotide
ccacggcccaggccucuga

SEQ ID NO: 1383899 - RNA, 19 nt, Artificial Sequence
  Description of Artificial Sequence: Synthetic oligonucleotide
cgauaucuuuaggcaggaa

SEQ ID NO: 1383900 - RNA, 19 nt, Artificial Sequence
  Description of Artificial Sequence: Synthetic oligonucleotide
ccgugguaguggaggaauu

SEQ ID NO: 1383901 - RNA, 19 nt, Artificial Sequence
  Description of Artificial Sequence: Synthetic oligonucleotide
ccauccccgguuggcucca

SEQ ID NO: 1383902 - RNA, 19 nt, Artificial Sequence
  Description of Artificial Sequence: Synthetic oligonucleotide
ccacggggucuguagccau

SEQ ID NO: 1383903 - RNA, 19 nt, Artificial Sequence
  Description of Artificial Sequence: Synthetic oligonucleotide
ccacggcaucccgcccuac

SEQ ID NO: 1383904 - RNA, 19 nt, Artificial Sequence
  Description of Artificial Sequence: Synthetic oligonucleotide
ggcaggccuccguguuaau

SEQ ID NO: 1383905 - RNA, 19 nt, Artificial Sequence
  Description of Artificial Sequence: Synthetic oligonucleotide
cgggaacuacuguuccauu

SEQ ID NO: 1383906 - RNA, 19 nt, Artificial Sequence
  Description of Artificial Sequence: Synthetic oligonucleotide
aaucagaaaagucacaucc

SEQ ID NO: 1383907 - RNA, 19 nt, Artificial Sequence
  Description of Artificial Sequence: Synthetic oligonucleotide
agucacauccuauaaaucc

SEQ ID NO: 1383908 - RNA, 19 nt, Artificial Sequence
  Description of Artificial Sequence: Synthetic oligonucleotide
gaauaauccaacuuggcag

SEQ ID NO: 1383909 - RNA, 19 nt, Artificial Sequence
  Description of Artificial Sequence: Synthetic oligonucleotide
uugagugacaguuauauac

SEQ ID NO: 1383910 - RNA, 19 nt, Artificial Sequence
  Description of Artificial Sequence: Synthetic oligonucleotide
agaagagucagucugagcu

SEQ ID NO: 1383911 - RNA, 19 nt, Artificial Sequence
  Description of Artificial Sequence: Synthetic oligonucleotide
ugggcuuaaaggcacaugg

SEQ ID NO: 1383912 - RNA, 19 nt, Artificial Sequence
  Description of Artificial Sequence: Synthetic oligonucleotide
ugggcuaugggcuuaaagg

SEQ ID NO: 1383913 - RNA, 19 nt, Artificial Sequence
  Description of Artificial Sequence: Synthetic oligonucleotide
auuaaaucagaaaagucac

SEQ ID NO: 1383914 - RNA, 19 nt, Artificial Sequence
  Description of Artificial Sequence: Synthetic oligonucleotide
aaagucacauccuauaaau

SEQ ID NO: 1383915 - RNA, 19 nt, Artificial Sequence
  Description of Artificial Sequence: Synthetic oligonucleotide
aaaagacgagcuuaccuuc

SEQ ID NO: 1383916 - RNA, 19 nt, Artificial Sequence
  Description of Artificial Sequence: Synthetic oligonucleotide
guaaagaagagucagucug

SEQ ID NO: 1383917 - RNA, 19 nt, Artificial Sequence
  Description of Artificial Sequence: Synthetic oligonucleotide
aagcucaggcaauuuaccc

SEQ ID NO: 1383918 - RNA, 19 nt, Artificial Sequence
  Description of Artificial Sequence: Synthetic oligonucleotide
aagcauugucuccacauac

SEQ ID NO: 1383919 - RNA, 19 nt, Artificial Sequence
  Description of Artificial Sequence: Synthetic oligonucleotide
auauaaaucagaaccugcc

SEQ ID NO: 1383920 - RNA, 19 nt, Artificial Sequence
  Description of Artificial Sequence: Synthetic oligonucleotide
cuuggaauaauccaacuug

SEQ ID NO: 1383921 - RNA, 19 nt, Artificial Sequence
  Description of Artificial Sequence: Synthetic oligonucleotide
aauaauccaacuuggcagu

SEQ ID NO: 1383922 - RNA, 19 nt, Artificial Sequence
  Description of Artificial Sequence: Synthetic oligonucleotide
aaaucagaaaagucacauc

SEQ ID NO: 1383923 - RNA, 19 nt, Artificial Sequence
  Description of Artificial Sequence: Synthetic oligonucleotide
augucggucgguuauaagg

SEQ ID NO: 1383924 - RNA, 19 nt, Artificial Sequence
  Description of Artificial Sequence: Synthetic oligonucleotide
ugagcaagucauaaaacug

SEQ ID NO: 1383925 - RNA, 19 nt, Artificial Sequence
  Description of Artificial Sequence: Synthetic oligonucleotide
ucuuguccacaauaggugg

SEQ ID NO: 1383926 - RNA, 19 nt, Artificial Sequence
  Description of Artificial Sequence: Synthetic oligonucleotide
ggauaagacaaacaguggg

SEQ ID NO: 1383927 - RNA, 19 nt, Artificial Sequence
  Description of Artificial Sequence: Synthetic oligonucleotide
aacuuggcagugcuaggcc

SEQ ID NO: 1383928 - RNA, 19 nt, Artificial Sequence
  Description of Artificial Sequence: Synthetic oligonucleotide
aacugcugaacaucacugg

SEQ ID NO: 1383929 - RNA, 19 nt, Artificial Sequence
  Description of Artificial Sequence: Synthetic oligonucleotide
agaucgguaggccaggcgg

SEQ ID NO: 1383930 - RNA, 19 nt, Artificial Sequence
  Description of Artificial Sequence: Synthetic oligonucleotide
uagaagagaucucaagcug

SEQ ID NO: 1383931 - RNA, 19 nt, Artificial Sequence
  Description of Artificial Sequence: Synthetic oligonucleotide
acaacuuccuucaccaugc

SEQ ID NO: 1383932 - RNA, 19 nt, Artificial Sequence
  Description of Artificial Sequence: Synthetic oligonucleotide
aaaucagaaccugccauuc

SEQ ID NO: 1383933 - RNA, 19 nt, Artificial Sequence
  Description of Artificial Sequence: Synthetic oligonucleotide
agucauaaaacugcugaac

SEQ ID NO: 1383934 - RNA, 19 nt, Artificial Sequence
  Description of Artificial Sequence: Synthetic oligonucleotide
cauagugcugacaggaagc

SEQ ID NO: 1383935 - RNA, 19 nt, Artificial Sequence
  Description of Artificial Sequence: Synthetic oligonucleotide
gaugcugucaauccaguca

SEQ ID NO: 1383936 - RNA, 19 nt, Artificial Sequence
  Description of Artificial Sequence: Synthetic oligonucleotide
  modified_base (7)..(7): a, c, u, g, unknown or other
cuugaanccccacuccggg

SEQ ID NO: 1383937 - RNA, 19 nt, Artificial Sequence
  Description of Artificial Sequence: Synthetic oligonucleotide
  modified_base (5)..(5): a, c, u, g, unknown or other
ugaanccccacuccgggcc

SEQ ID NO: 1383938 - RNA, 19 nt, Artificial Sequence
  Description of Artificial Sequence: Synthetic oligonucleotide
aagugaggagauugguagg

SEQ ID NO: 1383939 - RNA, 19 nt, Artificial Sequence
  Description of Artificial Sequence: Synthetic oligonucleotide
aaagcggggcagcacuagc

SEQ ID NO: 1383940 - RNA, 19 nt, Artificial Sequence
  Description of Artificial Sequence: Synthetic oligonucleotide
auaaaucagaaccugccau

SEQ ID NO: 1383941 - RNA, 19 nt, Artificial Sequence
  Description of Artificial Sequence: Synthetic oligonucleotide
agaagauacgcugcaggcc

SEQ ID NO: 1383942 - RNA, 19 nt, Artificial Sequence
  Description of Artificial Sequence: Synthetic oligonucleotide
acaaacaguggggucaccc

SEQ ID NO: 1383943 - RNA, 19 nt, Artificial Sequence
  Description of Artificial Sequence: Synthetic oligonucleotide
ucaacuacaugucuauuuu

SEQ ID NO: 1383944 - RNA, 19 nt, Artificial Sequence
  Description of Artificial Sequence: Synthetic oligonucleotide
aaggcuaggaugcugucaa

SEQ ID NO: 1383945 - RNA, 19 nt, Artificial Sequence
  Description of Artificial Sequence: Synthetic oligonucleotide
ugucggucgguuauaagga

SEQ ID NO: 1383946 - RNA, 19 nt, Artificial Sequence
  Description of Artificial Sequence: Synthetic oligonucleotide
auccuauaaauccaggaaa

SEQ ID NO: 1383947 - RNA, 19 nt, Artificial Sequence
  Description of Artificial Sequence: Synthetic oligonucleotide
agccaagcuaugcagggac

SEQ ID NO: 1383948 - RNA, 19 nt, Artificial Sequence
  Description of Artificial Sequence: Synthetic oligonucleotide
gacaauguguccauaaaga

SEQ ID NO: 1383949 - RNA, 19 nt, Artificial Sequence
  Description of Artificial Sequence: Synthetic oligonucleotide
auaaagaucuuguccacaa

SEQ ID NO: 1383950 - RNA, 19 nt, Artificial Sequence
  Description of Artificial Sequence: Synthetic oligonucleotide
aagacgagcuuaccuucac

SEQ ID NO: 1383951 - RNA, 19 nt, Artificial Sequence
  Description of Artificial Sequence: Synthetic oligonucleotide
aaugugcccggauaagaga

SEQ ID NO: 1383952 - RNA, 19 nt, Artificial Sequence
  Description of Artificial Sequence: Synthetic oligonucleotide
aguaaagaagagucagucu

SEQ ID NO: 1383953 - RNA, 19 nt, Artificial Sequence
  Description of Artificial Sequence: Synthetic oligonucleotide
uggaauaauccaacuuggc

SEQ ID NO: 1383954 - RNA, 19 nt, Artificial Sequence
  Description of Artificial Sequence: Synthetic oligonucleotide
agugcuaggcccggaaucc

SEQ ID NO: 1383955 - RNA, 19 nt, Artificial Sequence
  Description of Artificial Sequence: Synthetic oligonucleotide
aacuuggaauaauccaacu

SEQ ID NO: 1383956 - RNA, 19 nt, Artificial Sequence
  Description of Artificial Sequence: Synthetic oligonucleotide
acagccaagcuaugcaggg

SEQ ID NO: 1383957 - RNA, 19 nt, Artificial Sequence
  Description of Artificial Sequence: Synthetic oligonucleotide
ugacuaagcuacaaggaua

SEQ ID NO: 1383958 - RNA, 19 nt, Artificial Sequence
  Description of Artificial Sequence: Synthetic oligonucleotide
uccaaaugugcccggauaa

SEQ ID NO: 1383959 - RNA, 19 nt, Artificial Sequence
  Description of Artificial Sequence: Synthetic oligonucleotide
uugagguagaagauacgcu

SEQ ID NO: 1383960 - RNA, 19 nt, Artificial Sequence
  Description of Artificial Sequence: Synthetic oligonucleotide
gauaacauccagggaaccc

SEQ ID NO: 1383961 - RNA, 19 nt, Artificial Sequence
  Description of Artificial Sequence: Synthetic oligonucleotide
augacuaagcuacaaggau

SEQ ID NO: 1383962 - RNA, 19 nt, Artificial Sequence
  Description of Artificial Sequence: Synthetic oligonucleotide
ccaugacuaagcuacaagg

SEQ ID NO: 1383963 - RNA, 19 nt, Artificial Sequence
  Description of Artificial Sequence: Synthetic oligonucleotide
  modified_base (9)..(9): a, c, u, g, unknown or other
cacuugaanccccacuccg

SEQ ID NO: 1383964 - RNA, 19 nt, Artificial Sequence
  Description of Artificial Sequence: Synthetic oligonucleotide
acaggugcggaccccauag

SEQ ID NO: 1383965 - RNA, 19 nt, Artificial Sequence
  Description of Artificial Sequence: Synthetic oligonucleotide
uucaggguagggaucagaa

SEQ ID NO: 1383966 - RNA, 19 nt, Artificial Sequence
  Description of Artificial Sequence: Synthetic oligonucleotide
uauaaggaccagagcagac

SEQ ID NO: 1383967 - RNA, 19 nt, Artificial Sequence
  Description of Artificial Sequence: Synthetic oligonucleotide
agcuacaaggauaagacaa

SEQ ID NO: 1383968 - RNA, 19 nt, Artificial Sequence
  Description of Artificial Sequence: Synthetic oligonucleotide
cuggaagcgacagaacugg

SEQ ID NO: 1383969 - RNA, 19 nt, Artificial Sequence
  Description of Artificial Sequence: Synthetic oligonucleotide
aagcuacaaggauaagaca

SEQ ID NO: 1383970 - RNA, 19 nt, Artificial Sequence
  Description of Artificial Sequence: Synthetic oligonucleotide
uuauaaggaccagagcaga

SEQ ID NO: 1383971 - RNA, 19 nt, Artificial Sequence
  Description of Artificial Sequence: Synthetic oligonucleotide
aagucacauccuauaaauc

SEQ ID NO: 1383972 - RNA, 19 nt, Artificial Sequence
  Description of Artificial Sequence: Synthetic oligonucleotide
aggaaagccgacuccagca

SEQ ID NO: 1383973 - RNA, 19 nt, Artificial Sequence
  Description of Artificial Sequence: Synthetic oligonucleotide
uaaaucagaaccugccauu

SEQ ID NO: 1383974 - RNA, 19 nt, Artificial Sequence
  Description of Artificial Sequence: Synthetic oligonucleotide
ucgggcacacuguagccgg

SEQ ID NO: 1383975 - RNA, 19 nt, Artificial Sequence
  Description of Artificial Sequence: Synthetic oligonucleotide
ucggucgguuauaaggacc

SEQ ID NO: 1383976 - RNA, 19 nt, Artificial Sequence
  Description of Artificial Sequence: Synthetic oligonucleotide
caugacuaagcuacaagga

SEQ ID NO: 1383977 - RNA, 19 nt, Artificial Sequence
  Description of Artificial Sequence: Synthetic oligonucleotide
agcgacagaacuggcagcg

SEQ ID NO: 1383978 - RNA, 19 nt, Artificial Sequence
  Description of Artificial Sequence: Synthetic oligonucleotide
ggaauaauccaacuuggca

SEQ ID NO: 1383979 - RNA, 19 nt, Artificial Sequence
  Description of Artificial Sequence: Synthetic oligonucleotide
cuucaccaugcccacagcc

SEQ ID NO: 1383980 - RNA, 19 nt, Artificial Sequence
  Description of Artificial Sequence: Synthetic oligonucleotide
agcucaggcaauuuaccca

SEQ ID NO: 1383981 - RNA, 19 nt, Artificial Sequence
  Description of Artificial Sequence: Synthetic oligonucleotide
uguccggacaacuuccuuc

SEQ ID NO: 1383982 - RNA, 19 nt, Artificial Sequence
  Description of Artificial Sequence: Synthetic oligonucleotide
cauugucuccacauacggc

SEQ ID NO: 1383983 - RNA, 19 nt, Artificial Sequence
  Description of Artificial Sequence: Synthetic oligonucleotide
uguccauaaagaucuuguc

SEQ ID NO: 1383984 - RNA, 19 nt, Artificial Sequence
  Description of Artificial Sequence: Synthetic oligonucleotide
cuuaccuucaccuggcuua

SEQ ID NO: 1383985 - RNA, 19 nt, Artificial Sequence
  Description of Artificial Sequence: Synthetic oligonucleotide
agaaagacaauguguccau

SEQ ID NO: 1383986 - RNA, 19 nt, Artificial Sequence
  Description of Artificial Sequence: Synthetic oligonucleotide
gaagcucaggcaauuuacc

SEQ ID NO: 1383987 - RNA, 19 nt, Artificial Sequence
  Description of Artificial Sequence: Synthetic oligonucleotide
uagaucgguaggccaggcg

SEQ ID NO: 1383988 - RNA, 19 nt, Artificial Sequence
  Description of Artificial Sequence: Synthetic oligonucleotide
ugucuguccggacaacuuc

SEQ ID NO: 1383989 - RNA, 19 nt, Artificial Sequence
  Description of Artificial Sequence: Synthetic oligonucleotide
augaaugcacacccuccuc

SEQ ID NO: 1383990 - RNA, 19 nt, Artificial Sequence
  Description of Artificial Sequence: Synthetic oligonucleotide
uacgcugcaggccuugggu

SEQ ID NO: 1383991 - RNA, 19 nt, Artificial Sequence
  Description of Artificial Sequence: Synthetic oligonucleotide
aauccaaaugugcccggau

SEQ ID NO: 1383992 - RNA, 19 nt, Artificial Sequence
  Description of Artificial Sequence: Synthetic oligonucleotide
cucccuguccaucuucugg

SEQ ID NO: 1383993 - RNA, 19 nt, Artificial Sequence
  Description of Artificial Sequence: Synthetic oligonucleotide
cacauccuauaaauccagg

SEQ ID NO: 1383994 - RNA, 19 nt, Artificial Sequence
  Description of Artificial Sequence: Synthetic oligonucleotide
uagccgguguagcacgagg

SEQ ID NO: 1383995 - RNA, 19 nt, Artificial Sequence
  Description of Artificial Sequence: Synthetic oligonucleotide
uguguccauaaagaucuug

SEQ ID NO: 1383996 - RNA, 19 nt, Artificial Sequence
  Description of Artificial Sequence: Synthetic oligonucleotide
gacuaagcuacaaggauaa

SEQ ID NO: 1383997 - RNA, 19 nt, Artificial Sequence
  Description of Artificial Sequence: Synthetic oligonucleotide
gaucuuguccacaauaggu

SEQ ID NO: 1383998 - RNA, 19 nt, Artificial Sequence
  Description of Artificial Sequence: Synthetic oligonucleotide
cuggcuuagaucgguaggc

SEQ ID NO: 1383999 - RNA, 19 nt, Artificial Sequence
  Description of Artificial Sequence: Synthetic oligonucleotide
cauccuauaaauccaggaa

SEQ ID NO: 1384000 - RNA, 19 nt, Artificial Sequence
  Description of Artificial Sequence: Synthetic oligonucleotide
cuguagcccaugucggucg

SEQ ID NO: 1384001 - RNA, 19 nt, Artificial Sequence
  Description of Artificial Sequence: Synthetic oligonucleotide
gggcuaugggcuuaaaggc

SEQ ID NO: 1384002 - RNA, 19 nt, Artificial Sequence
  Description of Artificial Sequence: Synthetic oligonucleotide
gaagagucagucugagcuc

SEQ ID NO: 1384003 - RNA, 19 nt, Artificial Sequence
  Description of Artificial Sequence: Synthetic oligonucleotide
ccacauacggcacagugcc

SEQ ID NO: 1384004 - RNA, 19 nt, Artificial Sequence
  Description of Artificial Sequence: Synthetic oligonucleotide
ggauaagagaagugaggag

SEQ ID NO: 1384005 - RNA, 19 nt, Artificial Sequence
  Description of Artificial Sequence: Synthetic oligonucleotide
  modified_base (8)..(8): a, c, u, g, unknown or other
acuugaanccccacuccgg

SEQ ID NO: 1384006 - RNA, 19 nt, Artificial Sequence
  Description of Artificial Sequence: Synthetic oligonucleotide
  modified_base (12)..(12): a, c, u, g, unknown or other
ugccacuugaanccccacu

SEQ ID NO: 1384007 - RNA, 19 nt, Artificial Sequence
  Description of Artificial Sequence: Synthetic oligonucleotide
ggaaagcucagcaaaacca

SEQ ID NO: 1384008 - RNA, 19 nt, Artificial Sequence
  Description of Artificial Sequence: Synthetic oligonucleotide
acguguucaggguagggau

SEQ ID NO: 1384009 - RNA, 19 nt, Artificial Sequence
  Description of Artificial Sequence: Synthetic oligonucleotide
ggagauugguaggagaggc

SEQ ID NO: 1384010 - RNA, 19 nt, Artificial Sequence
  Description of Artificial Sequence: Synthetic oligonucleotide
agugaggagauugguagga

SEQ ID NO: 1384011 - RNA, 19 nt, Artificial Sequence
  Description of Artificial Sequence: Synthetic oligonucleotide
  modified_base (6)..(6): a, c, u, g, unknown or other
uugaanccccacuccgggc

SEQ ID NO: 1384012 - RNA, 19 nt, Artificial Sequence
  Description of Artificial Sequence: Synthetic oligonucleotide
guagcacgaggccugagca

SEQ ID NO: 1384013 - RNA, 19 nt, Artificial Sequence
  Description of Artificial Sequence: Synthetic oligonucleotide
uaggcccggaauccaaaug

SEQ ID NO: 1384014 - RNA, 19 nt, Artificial Sequence
  Description of Artificial Sequence: Synthetic oligonucleotide
ugccauucaccuugaguga

SEQ ID NO: 1384015 - RNA, 19 nt, Artificial Sequence
  Description of Artificial Sequence: Synthetic oligonucleotide
aaagacgagcuuaccuuca

SEQ ID NO: 1384016 - RNA, 19 nt, Artificial Sequence
  Description of Artificial Sequence: Synthetic oligonucleotide
agacaaacaguggggucac

SEQ ID NO: 1384017 - RNA, 19 nt, Artificial Sequence
  Description of Artificial Sequence: Synthetic oligonucleotide
uauauacauguggaaggaa

SEQ ID NO: 1384018 - RNA, 19 nt, Artificial Sequence
  Description of Artificial Sequence: Synthetic oligonucleotide
accuggcuuagaucgguag

SEQ ID NO: 1384019 - RNA, 19 nt, Artificial Sequence
  Description of Artificial Sequence: Synthetic oligonucleotide
aggagauugguaggagagg

SEQ ID NO: 1384020 - RNA, 19 nt, Artificial Sequence
  Description of Artificial Sequence: Synthetic oligonucleotide
caggcggagaaugaagagc

SEQ ID NO: 1384021 - RNA, 19 nt, Artificial Sequence
  Description of Artificial Sequence: Synthetic oligonucleotide
cuuagaucgguaggccagg

SEQ ID NO: 1384022 - RNA, 19 nt, Artificial Sequence
  Description of Artificial Sequence: Synthetic oligonucleotide
ugcacacguguucagggua

SEQ ID NO: 1384023 - RNA, 19 nt, Artificial Sequence
  Description of Artificial Sequence: Synthetic oligonucleotide
agugacaguuauauacaug

SEQ ID NO: 1384024 - RNA, 19 nt, Artificial Sequence
  Description of Artificial Sequence: Synthetic oligonucleotide
aggugcggaccccauagug

SEQ ID NO: 1384025 - RNA, 19 nt, Artificial Sequence
  Description of Artificial Sequence: Synthetic oligonucleotide
aggcggagaaugaagagcu

SEQ ID NO: 1384026 - RNA, 19 nt, Artificial Sequence
  Description of Artificial Sequence: Synthetic oligonucleotide
auaagagaagugaggagau

SEQ ID NO: 1384027 - RNA, 19 nt, Artificial Sequence
  Description of Artificial Sequence: Synthetic oligonucleotide
uccggauaacauccaggga

SEQ ID NO: 1384028 - RNA, 19 nt, Artificial Sequence
  Description of Artificial Sequence: Synthetic oligonucleotide
gugggcuaugggcuuaaag

SEQ ID NO: 1384029 - RNA, 19 nt, Artificial Sequence
  Description of Artificial Sequence: Synthetic oligonucleotide
ggcacagugccccucacug

SEQ ID NO: 1384030 - RNA, 19 nt, Artificial Sequence
  Description of Artificial Sequence: Synthetic oligonucleotide
  modified_base (16)..(16): a, c, u, g, unknown or other
ucacugccacuugaanccc

SEQ ID NO: 1384031 - RNA, 19 nt, Artificial Sequence
  Description of Artificial Sequence: Synthetic oligonucleotide
agccgguguagcacgaggc

SEQ ID NO: 1384032 - RNA, 19 nt, Artificial Sequence
  Description of Artificial Sequence: Synthetic oligonucleotide
caggcaauuuacccagcag

SEQ ID NO: 1384033 - RNA, 19 nt, Artificial Sequence
  Description of Artificial Sequence: Synthetic oligonucleotide
cauucaccuugagugacag

SEQ ID NO: 1384034 - RNA, 19 nt, Artificial Sequence
  Description of Artificial Sequence: Synthetic oligonucleotide
ggcaauuuacccagcaggc

SEQ ID NO: 1384035 - RNA, 19 nt, Artificial Sequence
  Description of Artificial Sequence: Synthetic oligonucleotide
ccggauaagagaagugagg

SEQ ID NO: 1384036 - RNA, 19 nt, Artificial Sequence
  Description of Artificial Sequence: Synthetic oligonucleotide
uacauguggaaggaagaua

SEQ ID NO: 1384037 - RNA, 19 nt, Artificial Sequence
  Description of Artificial Sequence: Synthetic oligonucleotide
cagcaggcgugauaggcag

SEQ ID NO: 1384038 - RNA, 19 nt, Artificial Sequence
  Description of Artificial Sequence: Synthetic oligonucleotide
uuuaggcugucuguccgga

SEQ ID NO: 1384039 - RNA, 19 nt, Artificial Sequence
  Description of Artificial Sequence: Synthetic oligonucleotide
acgagcuuaccuucaccug

SEQ ID NO: 1384040 - RNA, 19 nt, Artificial Sequence
  Description of Artificial Sequence: Synthetic oligonucleotide
auagugcugacaggaagca

SEQ ID NO: 1384041 - RNA, 19 nt, Artificial Sequence
  Description of Artificial Sequence: Synthetic oligonucleotide
aaagccucgggcacacugu

SEQ ID NO: 1384042 - RNA, 19 nt, Artificial Sequence
  Description of Artificial Sequence: Synthetic oligonucleotide
ugcccggauaagagaagug

SEQ ID NO: 1384043 - RNA, 19 nt, Artificial Sequence
  Description of Artificial Sequence: Synthetic oligonucleotide
cccggaauccaaaugugcc

SEQ ID NO: 1384044 - RNA, 19 nt, Artificial Sequence
  Description of Artificial Sequence: Synthetic oligonucleotide
ucaggguagggaucagaaa

SEQ ID NO: 1384045 - RNA, 19 nt, Artificial Sequence
  Description of Artificial Sequence: Synthetic oligonucleotide
gucugagcucaaaaccagg

SEQ ID NO: 1384046 - RNA, 19 nt, Artificial Sequence
  Description of Artificial Sequence: Synthetic oligonucleotide
uccgccucuuguccacagg

SEQ ID NO: 1384047 - RNA, 19 nt, Artificial Sequence
  Description of Artificial Sequence: Synthetic oligonucleotide
caauuuacccagcaggcgu

SEQ ID NO: 1384048 - RNA, 19 nt, Artificial Sequence
  Description of Artificial Sequence: Synthetic oligonucleotide
uggaagcgacagaacuggc

SEQ ID NO: 1384049 - RNA, 19 nt, Artificial Sequence
  Description of Artificial Sequence: Synthetic oligonucleotide
  modified_base (18)..(18): a, c, u, g, unknown or other
ccucacugccacuugaanc

SEQ ID NO: 1384050 - RNA, 19 nt, Artificial Sequence
  Description of Artificial Sequence: Synthetic oligonucleotide
cuuguccacaauaggugga

SEQ ID NO: 1384051 - RNA, 19 nt, Artificial Sequence
  Description of Artificial Sequence: Synthetic oligonucleotide
accgugagaaggcuaggau

SEQ ID NO: 1384052 - RNA, 19 nt, Artificial Sequence
  Description of Artificial Sequence: Synthetic oligonucleotide
caaaagacgagcuuaccuu

SEQ ID NO: 1384053 - RNA, 19 nt, Artificial Sequence
  Description of Artificial Sequence: Synthetic oligonucleotide
cuggggaaagcucagcaaa

SEQ ID NO: 1384054 - RNA, 19 nt, Artificial Sequence
  Description of Artificial Sequence: Synthetic oligonucleotide
uguagccgguguagcacga

SEQ ID NO: 1384055 - RNA, 19 nt, Artificial Sequence
  Description of Artificial Sequence: Synthetic oligonucleotide
ggaaagccgacuccagcag

SEQ ID NO: 1384056 - RNA, 19 nt, Artificial Sequence
  Description of Artificial Sequence: Synthetic oligonucleotide
gcaauuuacccagcaggcg

SEQ ID NO: 1384057 - RNA, 19 nt, Artificial Sequence
  Description of Artificial Sequence: Synthetic oligonucleotide
guaggccaggcggagaaug

SEQ ID NO: 1384058 - RNA, 19 nt, Artificial Sequence
  Description of Artificial Sequence: Synthetic oligonucleotide
gcuuagaucgguaggccag

SEQ ID NO: 1384059 - RNA, 19 nt, Artificial Sequence
  Description of Artificial Sequence: Synthetic oligonucleotide
gaaggcuaggaugcuguca

SEQ ID NO: 1384060 - RNA, 19 nt, Artificial Sequence
  Description of Artificial Sequence: Synthetic oligonucleotide
ggguccgugggcuaugggc

SEQ ID NO: 1384061 - RNA, 19 nt, Artificial Sequence
  Description of Artificial Sequence: Synthetic oligonucleotide
uuagaucgguaggccaggc

SEQ ID NO: 1384062 - RNA, 19 nt, Artificial Sequence
  Description of Artificial Sequence: Synthetic oligonucleotide
auaauccaacuuggcagug

SEQ ID NO: 1384063 - RNA, 19 nt, Artificial Sequence
  Description of Artificial Sequence: Synthetic oligonucleotide
  modified_base (11)..(11): a, c, u, g, unknown or other
gccacuugaanccccacuc

SEQ ID NO: 1384064 - RNA, 19 nt, Artificial Sequence
  Description of Artificial Sequence: Synthetic oligonucleotide
cgagcuuaccuucaccugg

SEQ ID NO: 1384065 - RNA, 19 nt, Artificial Sequence
  Description of Artificial Sequence: Synthetic oligonucleotide
cucgggcacacuguagccg

SEQ ID NO: 1384066 - RNA, 19 nt, Artificial Sequence
  Description of Artificial Sequence: Synthetic oligonucleotide
caugucggucgguuauaag

SEQ ID NO: 1384067 - RNA, 19 nt, Artificial Sequence
  Description of Artificial Sequence: Synthetic oligonucleotide
caaaugugcccggauaaga

SEQ ID NO: 1384068 - RNA, 19 nt, Artificial Sequence
  Description of Artificial Sequence: Synthetic oligonucleotide
cagugcuaggcccggaauc

SEQ ID NO: 1384069 - RNA, 19 nt, Artificial Sequence
  Description of Artificial Sequence: Synthetic oligonucleotide
ccggauaacauccagggaa

SEQ ID NO: 1384070 - RNA, 19 nt, Artificial Sequence
  Description of Artificial Sequence: Synthetic oligonucleotide
caguuauauacauguggaa

SEQ ID NO: 1384071 - RNA, 19 nt, Artificial Sequence
  Description of Artificial Sequence: Synthetic oligonucleotide
ugcugucaauccagucacc

SEQ ID NO: 1384072 - RNA, 19 nt, Artificial Sequence
  Description of Artificial Sequence: Synthetic oligonucleotide
uuacccagcaggcgugaua

SEQ ID NO: 1384073 - RNA, 19 nt, Artificial Sequence
  Description of Artificial Sequence: Synthetic oligonucleotide
  modified_base (10)..(10): a, c, u, g, unknown or other
ccacuugaanccccacucc

SEQ ID NO: 1384074 - RNA, 19 nt, Artificial Sequence
  Description of Artificial Sequence: Synthetic oligonucleotide
gauguacuuggcacuuuuc

SEQ ID NO: 1384075 - RNA, 19 nt, Artificial Sequence
  Description of Artificial Sequence: Synthetic oligonucleotide
cugugcgcuugaagaaacc

SEQ ID NO: 1384076 - RNA, 19 nt, Artificial Sequence
  Description of Artificial Sequence: Synthetic oligonucleotide
cccggauaagagaagugag

SEQ ID NO: 1384077 - RNA, 19 nt, Artificial Sequence
  Description of Artificial Sequence: Synthetic oligonucleotide
agcccucacaggugcggac

SEQ ID NO: 1384078 - RNA, 19 nt, Artificial Sequence
  Description of Artificial Sequence: Synthetic oligonucleotide
ccuggcuuagaucgguagg

SEQ ID NO: 1384079 - RNA, 19 nt, Artificial Sequence
  Description of Artificial Sequence: Synthetic oligonucleotide
ccggaauccaaaugugccc

SEQ ID NO: 1384080 - RNA, 19 nt, Artificial Sequence
  Description of Artificial Sequence: Synthetic oligonucleotide
gucggucgguuauaaggac

SEQ ID NO: 1384081 - RNA, 19 nt, Artificial Sequence
  Description of Artificial Sequence: Synthetic oligonucleotide
gcaaaagacgagcuuaccu

SEQ ID NO: 1384082 - RNA, 19 nt, Artificial Sequence
  Description of Artificial Sequence: Synthetic oligonucleotide
ugcuaggcccggaauccaa

SEQ ID NO: 1384083 - RNA, 19 nt, Artificial Sequence
  Description of Artificial Sequence: Synthetic oligonucleotide
acacguguucaggguaggg

SEQ ID NO: 1384084 - RNA, 19 nt, Artificial Sequence
  Description of Artificial Sequence: Synthetic oligonucleotide
uuaggcugucuguccggac

SEQ ID NO: 1384085 - RNA, 19 nt, Artificial Sequence
  Description of Artificial Sequence: Synthetic oligonucleotide
gucgguuauaaggaccaga

SEQ ID NO: 1384086 - RNA, 19 nt, Artificial Sequence
  Description of Artificial Sequence: Synthetic oligonucleotide
ggcuuaaaggcacaugggu

SEQ ID NO: 1384087 - RNA, 19 nt, Artificial Sequence
  Description of Artificial Sequence: Synthetic oligonucleotide
uuucaacuacaugucuauu

SEQ ID NO: 1384088 - RNA, 19 nt, Artificial Sequence
  Description of Artificial Sequence: Synthetic oligonucleotide
acuaagcuacaaggauaag

SEQ ID NO: 1384089 - RNA, 19 nt, Artificial Sequence
  Description of Artificial Sequence: Synthetic oligonucleotide
agcagacaggcaggcaaag

SEQ ID NO: 1384090 - RNA, 19 nt, Artificial Sequence
  Description of Artificial Sequence: Synthetic oligonucleotide
uuccuccgccucuugucca

SEQ ID NO: 1384091 - RNA, 19 nt, Artificial Sequence
  Description of Artificial Sequence: Synthetic oligonucleotide
aggaagcauugucuccaca

SEQ ID NO: 1384092 - RNA, 19 nt, Artificial Sequence
  Description of Artificial Sequence: Synthetic oligonucleotide
ggugcggaccccauagugc

SEQ ID NO: 1384093 - RNA, 19 nt, Artificial Sequence
  Description of Artificial Sequence: Synthetic oligonucleotide
cacauacggcacagugccc

SEQ ID NO: 1384094 - RNA, 19 nt, Artificial Sequence
  Description of Artificial Sequence: Synthetic oligonucleotide
aagccgacuccagcagcag

SEQ ID NO: 1384095 - RNA, 19 nt, Artificial Sequence
  Description of Artificial Sequence: Synthetic oligonucleotide
gggcuuaaaggcacauggg

SEQ ID NO: 1384096 - RNA, 19 nt, Artificial Sequence
  Description of Artificial Sequence: Synthetic oligonucleotide
ggagccaugugcuccuuca

SEQ ID NO: 1384097 - RNA, 19 nt, Artificial Sequence
  Description of Artificial Sequence: Synthetic oligonucleotide
caugaaugcacacccuccu

SEQ ID NO: 1384098 - RNA, 19 nt, Artificial Sequence
  Description of Artificial Sequence: Synthetic oligonucleotide
gaccgugagaaggcuagga

SEQ ID NO: 1384099 - RNA, 19 nt, Artificial Sequence
  Description of Artificial Sequence: Synthetic oligonucleotide
cuuguuugccaggcagaug

SEQ ID NO: 1384100 - RNA, 19 nt, Artificial Sequence
  Description of Artificial Sequence: Synthetic oligonucleotide
gccugagcaaaagacgagc

SEQ ID NO: 1384101 - RNA, 19 nt, Artificial Sequence
  Description of Artificial Sequence: Synthetic oligonucleotide
ggaagcauugucuccacau

SEQ ID NO: 1384102 - RNA, 19 nt, Artificial Sequence
  Description of Artificial Sequence: Synthetic oligonucleotide
caaagcggggcagcacuag

SEQ ID NO: 1384103 - RNA, 19 nt, Artificial Sequence
  Description of Artificial Sequence: Synthetic oligonucleotide
cacuguagccgguguagca

SEQ ID NO: 1384104 - RNA, 19 nt, Artificial Sequence
  Description of Artificial Sequence: Synthetic oligonucleotide
gaucgguaggccaggcgga

SEQ ID NO: 1384105 - RNA, 19 nt, Artificial Sequence
  Description of Artificial Sequence: Synthetic oligonucleotide
caucaacagccaagcuaug

SEQ ID NO: 1384106 - RNA, 19 nt, Artificial Sequence
  Description of Artificial Sequence: Synthetic oligonucleotide
ugcggaccccauagugcug

SEQ ID NO: 1384107 - RNA, 19 nt, Artificial Sequence
  Description of Artificial Sequence: Synthetic oligonucleotide
aucgguaggccaggcggag

SEQ ID NO: 1384108 - RNA, 19 nt, Artificial Sequence
  Description of Artificial Sequence: Synthetic oligonucleotide
ggcuuagaucgguaggcca

SEQ ID NO: 1384109 - RNA, 19 nt, Artificial Sequence
  Description of Artificial Sequence: Synthetic oligonucleotide
ccggacaacuuccuucacc

SEQ ID NO: 1384110 - RNA, 19 nt, Artificial Sequence
  Description of Artificial Sequence: Synthetic oligonucleotide
agauacgcugcaggccuug

SEQ ID NO: 1384111 - RNA, 19 nt, Artificial Sequence
  Description of Artificial Sequence: Synthetic oligonucleotide
cacguguucaggguaggga

SEQ ID NO: 1384112 - RNA, 19 nt, Artificial Sequence
  Description of Artificial Sequence: Synthetic oligonucleotide
auuuacccagcaggcguga

SEQ ID NO: 1384113 - RNA, 19 nt, Artificial Sequence
  Description of Artificial Sequence: Synthetic oligonucleotide
cacgaggccugagcaaaag

SEQ ID NO: 1384114 - RNA, 19 nt, Artificial Sequence
  Description of Artificial Sequence: Synthetic oligonucleotide
ccacuccgggccuuggugg

SEQ ID NO: 1384115 - RNA, 19 nt, Artificial Sequence
  Description of Artificial Sequence: Synthetic oligonucleotide
ccaacuuggcagugcuagg

SEQ ID NO: 1384116 - RNA, 19 nt, Artificial Sequence
  Description of Artificial Sequence: Synthetic oligonucleotide
acggcacagugccccucac

SEQ ID NO: 1384117 - RNA, 19 nt, Artificial Sequence
  Description of Artificial Sequence: Synthetic oligonucleotide
acaugugugcacacguguu

SEQ ID NO: 1384118 - RNA, 19 nt, Artificial Sequence
  Description of Artificial Sequence: Synthetic oligonucleotide
acccgugagcaagucauaa

SEQ ID NO: 1384119 - RNA, 19 nt, Artificial Sequence
  Description of Artificial Sequence: Synthetic oligonucleotide
agcuuaccuucaccuggcu

SEQ ID NO: 1384120 - RNA, 19 nt, Artificial Sequence
  Description of Artificial Sequence: Synthetic oligonucleotide
cggauaacauccagggaac

SEQ ID NO: 1384121 - RNA, 19 nt, Artificial Sequence
  Description of Artificial Sequence: Synthetic oligonucleotide
ggguagggaucagaaagac

SEQ ID NO: 1384122 - RNA, 19 nt, Artificial Sequence
  Description of Artificial Sequence: Synthetic oligonucleotide
ugccccucacugccacuug

SEQ ID NO: 1384123 - RNA, 19 nt, Artificial Sequence
  Description of Artificial Sequence: Synthetic oligonucleotide
uagguggaggggucaccaa

SEQ ID NO: 1384124 - RNA, 19 nt, Artificial Sequence
  Description of Artificial Sequence: Synthetic oligonucleotide
cggacaacuuccuucacca

SEQ ID NO: 1384125 - RNA, 19 nt, Artificial Sequence
  Description of Artificial Sequence: Synthetic oligonucleotide
auacggcacagugccccuc

SEQ ID NO: 1384126 - RNA, 19 nt, Artificial Sequence
  Description of Artificial Sequence: Synthetic oligonucleotide
gcuacaaggauaagacaaa

SEQ ID NO: 1384127 - RNA, 19 nt, Artificial Sequence
  Description of Artificial Sequence: Synthetic oligonucleotide
gcgauucugcagcuccucc

SEQ ID NO: 1384128 - RNA, 19 nt, Artificial Sequence
  Description of Artificial Sequence: Synthetic oligonucleotide
gcccggauaagagaaguga

SEQ ID NO: 1384129 - RNA, 19 nt, Artificial Sequence
  Description of Artificial Sequence: Synthetic oligonucleotide
ggcgugauaggcagcuagc

SEQ ID NO: 1384130 - RNA, 19 nt, Artificial Sequence
  Description of Artificial Sequence: Synthetic oligonucleotide
cuccgggccuugguggagg

SEQ ID NO: 1384131 - RNA, 19 nt, Artificial Sequence
  Description of Artificial Sequence: Synthetic oligonucleotide
guagccgguguagcacgag

SEQ ID NO: 1384132 - RNA, 19 nt, Artificial Sequence
  Description of Artificial Sequence: Synthetic oligonucleotide
cggauaagagaagugagga

SEQ ID NO: 1384133 - RNA, 19 nt, Artificial Sequence
  Description of Artificial Sequence: Synthetic oligonucleotide
uuuacccagcaggcgugau

SEQ ID NO: 1384134 - RNA, 19 nt, Artificial Sequence
  Description of Artificial Sequence: Synthetic oligonucleotide
gccauucaccuugagugac

SEQ ID NO: 1384135 - RNA, 19 nt, Artificial Sequence
  Description of Artificial Sequence: Synthetic oligonucleotide
  modified_base (2)..(2): a, c, u, g, unknown or other
anccccacuccgggccuug

SEQ ID NO: 1384136 - RNA, 19 nt, Artificial Sequence
  Description of Artificial Sequence: Synthetic oligonucleotide
aggcuccuguagcccaugu

SEQ ID NO: 1384137 - RNA, 19 nt, Artificial Sequence
  Description of Artificial Sequence: Synthetic oligonucleotide
ucccaaagcggggcagcac

SEQ ID NO: 1384138 - RNA, 19 nt, Artificial Sequence
  Description of Artificial Sequence: Synthetic oligonucleotide
gcacagugccccucacugc

SEQ ID NO: 1384139 - RNA, 19 nt, Artificial Sequence
  Description of Artificial Sequence: Synthetic oligonucleotide
gcccggaauccaaaugugc

SEQ ID NO: 1384140 - RNA, 19 nt, Artificial Sequence
  Description of Artificial Sequence: Synthetic oligonucleotide
ggccugagcaaaagacgag

SEQ ID NO: 1384141 - RNA, 19 nt, Artificial Sequence
  Description of Artificial Sequence: Synthetic oligonucleotide
caaugcgauucugcagcuc

SEQ ID NO: 1384142 - RNA, 19 nt, Artificial Sequence
  Description of Artificial Sequence: Synthetic oligonucleotide
ucgguaggccaggcggaga

SEQ ID NO: 1384143 - RNA, 19 nt, Artificial Sequence
  Description of Artificial Sequence: Synthetic oligonucleotide
gggugacauaauagcacac

SEQ ID NO: 1384144 - RNA, 19 nt, Artificial Sequence
  Description of Artificial Sequence: Synthetic oligonucleotide
aagauacgcugcaggccuu

SEQ ID NO: 1384145 - RNA, 19 nt, Artificial Sequence
  Description of Artificial Sequence: Synthetic oligonucleotide
aaccugccauucaccuuga

SEQ ID NO: 1384146 - RNA, 19 nt, Artificial Sequence
  Description of Artificial Sequence: Synthetic oligonucleotide
cucacaggugcggacccca

SEQ ID NO: 1384147 - RNA, 19 nt, Artificial Sequence
  Description of Artificial Sequence: Synthetic oligonucleotide
agcuggcaaugcgauucug

SEQ ID NO: 1384148 - RNA, 19 nt, Artificial Sequence
  Description of Artificial Sequence: Synthetic oligonucleotide
ggaguaaagaagagucagu

SEQ ID NO: 1384149 - RNA, 19 nt, Artificial Sequence
  Description of Artificial Sequence: Synthetic oligonucleotide
agggaacccgugagcaagu

SEQ ID NO: 1384150 - RNA, 19 nt, Artificial Sequence
  Description of Artificial Sequence: Synthetic oligonucleotide
ggcccggaauccaaaugug

SEQ ID NO: 1384151 - RNA, 19 nt, Artificial Sequence
  Description of Artificial Sequence: Synthetic oligonucleotide
aacccgugagcaagucaua

SEQ ID NO: 1384152 - RNA, 19 nt, Artificial Sequence
  Description of Artificial Sequence: Synthetic oligonucleotide
agcccaugucggucgguua

SEQ ID NO: 1384153 - RNA, 19 nt, Artificial Sequence
  Description of Artificial Sequence: Synthetic oligonucleotide
gggcaguccuuguuugcca

SEQ ID NO: 1384154 - RNA, 19 nt, Artificial Sequence
  Description of Artificial Sequence: Synthetic oligonucleotide
gcugaacaucacuggcauc

SEQ ID NO: 1384155 - RNA, 19 nt, Artificial Sequence
  Description of Artificial Sequence: Synthetic oligonucleotide
ggucgguuauaaggaccag

SEQ ID NO: 1384156 - RNA, 19 nt, Artificial Sequence
  Description of Artificial Sequence: Synthetic oligonucleotide
gugcccggauaagagaagu

SEQ ID NO: 1384157 - RNA, 19 nt, Artificial Sequence
  Description of Artificial Sequence: Synthetic oligonucleotide
ccgccggcccuuuaggcug

SEQ ID NO: 1384158 - RNA, 19 nt, Artificial Sequence
  Description of Artificial Sequence: Synthetic oligonucleotide
  modified_base (3)..(3): a, c, u, g, unknown or other
aanccccacuccgggccuu

SEQ ID NO: 1384159 - RNA, 19 nt, Artificial Sequence
  Description of Artificial Sequence: Synthetic oligonucleotide
cggucgguuauaaggacca

SEQ ID NO: 1384160 - RNA, 19 nt, Artificial Sequence
  Description of Artificial Sequence: Synthetic oligonucleotide
gccaagcuaugcagggacc

SEQ ID NO: 1384161 - RNA, 19 nt, Artificial Sequence
  Description of Artificial Sequence: Synthetic oligonucleotide
cgguguagcacgaggccug

SEQ ID NO: 1384162 - RNA, 19 nt, Artificial Sequence
  Description of Artificial Sequence: Synthetic oligonucleotide
ggcuccuguagcccauguc

SEQ ID NO: 1384163 - RNA, 19 nt, Artificial Sequence
  Description of Artificial Sequence: Synthetic oligonucleotide
cguguucaggguagggauc

SEQ ID NO: 1384164 - RNA, 19 nt, Artificial Sequence
  Description of Artificial Sequence: Synthetic oligonucleotide
gcccuuuaggcugucuguc

SEQ ID NO: 1384165 - RNA, 19 nt, Artificial Sequence
  Description of Artificial Sequence: Synthetic oligonucleotide
gcccucacaggugcggacc

SEQ ID NO: 1384166 - RNA, 19 nt, Artificial Sequence
  Description of Artificial Sequence: Synthetic oligonucleotide
cuaggcccggaauccaaau

SEQ ID NO: 1384167 - RNA, 19 nt, Artificial Sequence
  Description of Artificial Sequence: Synthetic oligonucleotide
guguagcacgaggccugag

SEQ ID NO: 1384168 - RNA, 19 nt, Artificial Sequence
  Description of Artificial Sequence: Synthetic oligonucleotide
gcgacagaacuggcagcgg

SEQ ID NO: 1384169 - RNA, 19 nt, Artificial Sequence
  Description of Artificial Sequence: Synthetic oligonucleotide
ggccccgccggcccuuuag

SEQ ID NO: 1384170 - RNA, 19 nt, Artificial Sequence
  Description of Artificial Sequence: Synthetic oligonucleotide
gccccgccggcccuuuagg

SEQ ID NO: 1384171 - RNA, 19 nt, Artificial Sequence
  Description of Artificial Sequence: Synthetic oligonucleotide
gugcuaggcccggaaucca

SEQ ID NO: 1384172 - RNA, 19 nt, Artificial Sequence
  Description of Artificial Sequence: Synthetic oligonucleotide
ggacaucaacagccaagcu

SEQ ID NO: 1384173 - RNA, 19 nt, Artificial Sequence
  Description of Artificial Sequence: Synthetic oligonucleotide
gcaaugcgauucugcagcu

SEQ ID NO: 1384174 - RNA, 19 nt, Artificial Sequence
  Description of Artificial Sequence: Synthetic oligonucleotide
auccaacuuggcagugcua

SEQ ID NO: 1384175 - RNA, 19 nt, Artificial Sequence
  Description of Artificial Sequence: Synthetic oligonucleotide
cacaggugcggaccccaua

SEQ ID NO: 1384176 - RNA, 19 nt, Artificial Sequence
  Description of Artificial Sequence: Synthetic oligonucleotide
cgccgaggcuccuguagcc

SEQ ID NO: 1384177 - RNA, 19 nt, Artificial Sequence
  Description of Artificial Sequence: Synthetic oligonucleotide
ccccgccggcccuuuaggc

SEQ ID NO: 1384178 - RNA, 19 nt, Artificial Sequence
  Description of Artificial Sequence: Synthetic oligonucleotide
cagcuagcuggcuguggcu

SEQ ID NO: 1384179 - RNA, 19 nt, Artificial Sequence
  Description of Artificial Sequence: Synthetic oligonucleotide
gccgacuccagcagcaggu

SEQ ID NO: 1384180 - RNA, 19 nt, Artificial Sequence
  Description of Artificial Sequence: Synthetic oligonucleotide
gcuuaccuucaccuggcuu

SEQ ID NO: 1384181 - RNA, 19 nt, Artificial Sequence
  Description of Artificial Sequence: Synthetic oligonucleotide
gcccaugucggucgguuau

SEQ ID NO: 1384182 - RNA, 19 nt, Artificial Sequence
  Description of Artificial Sequence: Synthetic oligonucleotide
ggcggagaaugaagagcuc

SEQ ID NO: 1384183 - RNA, 19 nt, Artificial Sequence
  Description of Artificial Sequence: Synthetic oligonucleotide
gcuaggcccggaauccaaa

SEQ ID NO: 1384184 - RNA, 19 nt, Artificial Sequence
  Description of Artificial Sequence: Synthetic oligonucleotide
cagcuggcaaugcgauucu

SEQ ID NO: 1384185 - RNA, 19 nt, Artificial Sequence
  Description of Artificial Sequence: Synthetic oligonucleotide
gggaacccgugagcaaguc

SEQ ID NO: 1384186 - RNA, 19 nt, Artificial Sequence
  Description of Artificial Sequence: Synthetic oligonucleotide
gcagugcuaggcccggaau

SEQ ID NO: 1384187 - RNA, 19 nt, Artificial Sequence
  Description of Artificial Sequence: Synthetic oligonucleotide
ccaaagcggggcagcacua

SEQ ID NO: 1384188 - RNA, 19 nt, Artificial Sequence
  Description of Artificial Sequence: Synthetic oligonucleotide
caggugcggaccccauagu

SEQ ID NO: 1384189 - RNA, 19 nt, Artificial Sequence
  Description of Artificial Sequence: Synthetic oligonucleotide
ccaugucggucgguuauaa

SEQ ID NO: 1384190 - RNA, 19 nt, Artificial Sequence
  Description of Artificial Sequence: Synthetic oligonucleotide
ggcagcgguuccuccgccu

SEQ ID NO: 1384191 - RNA, 19 nt, Artificial Sequence
  Description of Artificial Sequence: Synthetic oligonucleotide
cacccgccgaggcuccugu

SEQ ID NO: 1384192 - RNA, 19 nt, Artificial Sequence
  Description of Artificial Sequence: Synthetic oligonucleotide
guagcccaugucggucggu

SEQ ID NO: 1384193 - RNA, 19 nt, Artificial Sequence
  Description of Artificial Sequence: Synthetic oligonucleotide
cccgccggcccuuuaggcu

SEQ ID NO: 1384194 - RNA, 19 nt, Artificial Sequence
  Description of Artificial Sequence: Synthetic oligonucleotide
ggcagcuggcaaugcgauu

SEQ ID NO: 1384195 - RNA, 19 nt, Artificial Sequence
  Description of Artificial Sequence: Synthetic oligonucleotide
caggcgugauaggcagcua

SEQ ID NO: 1384196 - RNA, 19 nt, Artificial Sequence
  Description of Artificial Sequence: Synthetic oligonucleotide
cggaccccauagugcugac

SEQ ID NO: 1384197 - RNA, 19 nt, Artificial Sequence
  Description of Artificial Sequence: Synthetic oligonucleotide
cccaugucggucgguuaua

SEQ ID NO: 1384198 - RNA, 19 nt, Artificial Sequence
  Description of Artificial Sequence: Synthetic oligonucleotide
ccgugggcuaugggcuuaa

SEQ ID NO: 1384199 - RNA, 19 nt, Artificial Sequence
  Description of Artificial Sequence: Synthetic oligonucleotide
ccccacuccgggccuuggu

SEQ ID NO: 1384200 - RNA, 19 nt, Artificial Sequence
  Description of Artificial Sequence: Synthetic oligonucleotide
cgugggcuaugggcuuaaa

SEQ ID NO: 1384201 - RNA, 19 nt, Artificial Sequence
  Description of Artificial Sequence: Synthetic oligonucleotide
cgccggcccuuuaggcugu

SEQ ID NO: 1384202 - RNA, 19 nt, Artificial Sequence
  Description of Artificial Sequence: Synthetic oligonucleotide
ccggcccuuuaggcugucu

SEQ ID NO: 1384203 - RNA, 19 nt, Artificial Sequence
  Description of Artificial Sequence: Synthetic oligonucleotide
cggccccgccggcccuuua

SEQ ID NO: 1384204 - RNA, 19 nt, Artificial Sequence
  Description of Artificial Sequence: Synthetic oligonucleotide
aauguuaauaauuggguug

SEQ ID NO: 1384205 - RNA, 19 nt, Artificial Sequence
  Description of Artificial Sequence: Synthetic oligonucleotide
aagacauccaccauaaagc

SEQ ID NO: 1384206 - RNA, 19 nt, Artificial Sequence
  Description of Artificial Sequence: Synthetic oligonucleotide
aauaauuggguugaaguac

SEQ ID NO: 1384207 - RNA, 19 nt, Artificial Sequence
  Description of Artificial Sequence: Synthetic oligonucleotide
agccuugacacauagaagc

SEQ ID NO: 1384208 - RNA, 19 nt, Artificial Sequence
  Description of Artificial Sequence: Synthetic oligonucleotide
uuaauaauuggguugaagu

SEQ ID NO: 1384209 - RNA, 19 nt, Artificial Sequence
  Description of Artificial Sequence: Synthetic oligonucleotide
aagacuuuggacuauguca

SEQ ID NO: 1384210 - RNA, 19 nt, Artificial Sequence
  Description of Artificial Sequence: Synthetic oligonucleotide
aaaugagucgcuugcuucc

SEQ ID NO: 1384211 - RNA, 19 nt, Artificial Sequence
  Description of Artificial Sequence: Synthetic oligonucleotide
aagagaacaacuccagaac

SEQ ID NO: 1384212 - RNA, 19 nt, Artificial Sequence
  Description of Artificial Sequence: Synthetic oligonucleotide
aaagccuugacacauagaa

SEQ ID NO: 1384213 - RNA, 19 nt, Artificial Sequence
  Description of Artificial Sequence: Synthetic oligonucleotide
uuuucuaugguguauggug

SEQ ID NO: 1384214 - RNA, 19 nt, Artificial Sequence
  Description of Artificial Sequence: Synthetic oligonucleotide
ucaauccgcauucuaaugg

SEQ ID NO: 1384215 - RNA, 19 nt, Artificial Sequence
  Description of Artificial Sequence: Synthetic oligonucleotide
aaagagaacaacuccagaa

SEQ ID NO: 1384216 - RNA, 19 nt, Artificial Sequence
  Description of Artificial Sequence: Synthetic oligonucleotide
ucaauguuaauaauugggu

SEQ ID NO: 1384217 - RNA, 19 nt, Artificial Sequence
  Description of Artificial Sequence: Synthetic oligonucleotide
uugacgauaaggaagcgug

SEQ ID NO: 1384218 - RNA, 19 nt, Artificial Sequence
  Description of Artificial Sequence: Synthetic oligonucleotide
uggaugaaagguaggaagg

SEQ ID NO: 1384219 - RNA, 19 nt, Artificial Sequence
  Description of Artificial Sequence: Synthetic oligonucleotide
aguaagaacagggaccugc

SEQ ID NO: 1384220 - RNA, 19 nt, Artificial Sequence
  Description of Artificial Sequence: Synthetic oligonucleotide
ucagauaagaaccuuucuc

SEQ ID NO: 1384221 - RNA, 19 nt, Artificial Sequence
  Description of Artificial Sequence: Synthetic oligonucleotide
gaucaauguuaauaauugg

SEQ ID NO: 1384222 - RNA, 19 nt, Artificial Sequence
  Description of Artificial Sequence: Synthetic oligonucleotide
ucugcaaucagcugguaug

SEQ ID NO: 1384223 - RNA, 19 nt, Artificial Sequence
  Description of Artificial Sequence: Synthetic oligonucleotide
auaaggaagcgugaugucc

SEQ ID NO: 1384224 - RNA, 19 nt, Artificial Sequence
  Description of Artificial Sequence: Synthetic oligonucleotide
ucaauggcaucccugagga

SEQ ID NO: 1384225 - RNA, 19 nt, Artificial Sequence
  Description of Artificial Sequence: Synthetic oligonucleotide
gacuaugucauuauucugc

SEQ ID NO: 1384226 - RNA, 19 nt, Artificial Sequence
  Description of Artificial Sequence: Synthetic oligonucleotide
uuucuaugguguauggugc

SEQ ID NO: 1384227 - RNA, 19 nt, Artificial Sequence
  Description of Artificial Sequence: Synthetic oligonucleotide
uggacuaucuuccuccugc

SEQ ID NO: 1384228 - RNA, 19 nt, Artificial Sequence
  Description of Artificial Sequence: Synthetic oligonucleotide
uuuaccagggguagaaaug

SEQ ID NO: 1384229 - RNA, 19 nt, Artificial Sequence
  Description of Artificial Sequence: Synthetic oligonucleotide
cauaaagcuaggcagugcc

SEQ ID NO: 1384230 - RNA, 19 nt, Artificial Sequence
  Description of Artificial Sequence: Synthetic oligonucleotide
cuugaaugcaacaguuugg

SEQ ID NO: 1384231 - RNA, 19 nt, Artificial Sequence
  Description of Artificial Sequence: Synthetic oligonucleotide
augaggauaacucuucugu

SEQ ID NO: 1384232 - RNA, 19 nt, Artificial Sequence
  Description of Artificial Sequence: Synthetic oligonucleotide
uccaccauaaagcuaggca

SEQ ID NO: 1384233 - RNA, 19 nt, Artificial Sequence
  Description of Artificial Sequence: Synthetic oligonucleotide
guugcagacaaacugagga

SEQ ID NO: 1384234 - RNA, 19 nt, Artificial Sequence
  Description of Artificial Sequence: Synthetic oligonucleotide
gguaucauaacagcaaugg

SEQ ID NO: 1384235 - RNA, 19 nt, Artificial Sequence
  Description of Artificial Sequence: Synthetic oligonucleotide
aaugucuucaauccgcauu

SEQ ID NO: 1384236 - RNA, 19 nt, Artificial Sequence
  Description of Artificial Sequence: Synthetic oligonucleotide
aagcuuagugaggaugucc

SEQ ID NO: 1384237 - RNA, 19 nt, Artificial Sequence
  Description of Artificial Sequence: Synthetic oligonucleotide
cuugacacauagaagcagc

SEQ ID NO: 1384238 - RNA, 19 nt, Artificial Sequence
  Description of Artificial Sequence: Synthetic oligonucleotide
aaagaggagaccugguuaa

SEQ ID NO: 1384239 - RNA, 19 nt, Artificial Sequence
  Description of Artificial Sequence: Synthetic oligonucleotide
aaaagagaacaacuccaga

SEQ ID NO: 1384240 - RNA, 19 nt, Artificial Sequence
  Description of Artificial Sequence: Synthetic oligonucleotide
caaacugaggaaugagugg

SEQ ID NO: 1384241 - RNA, 19 nt, Artificial Sequence
  Description of Artificial Sequence: Synthetic oligonucleotide
aauaacuuuucaauggcau

SEQ ID NO: 1384242 - RNA, 19 nt, Artificial Sequence
  Description of Artificial Sequence: Synthetic oligonucleotide
uaauaauuggguugaagua

SEQ ID NO: 1384243 - RNA, 19 nt, Artificial Sequence
  Description of Artificial Sequence: Synthetic oligonucleotide
agcaccuugcuuuaccagg

SEQ ID NO: 1384244 - RNA, 19 nt, Artificial Sequence
  Description of Artificial Sequence: Synthetic oligonucleotide
uaaggaagcgugaugucca

SEQ ID NO: 1384245 - RNA, 19 nt, Artificial Sequence
  Description of Artificial Sequence: Synthetic oligonucleotide
auaggcccugcguagacac

SEQ ID NO: 1384246 - RNA, 19 nt, Artificial Sequence
  Description of Artificial Sequence: Synthetic oligonucleotide
uuuugaaaggcugcaagac

SEQ ID NO: 1384247 - RNA, 19 nt, Artificial Sequence
  Description of Artificial Sequence: Synthetic oligonucleotide
agauaagaaccuuucucug

SEQ ID NO: 1384248 - RNA, 19 nt, Artificial Sequence
  Description of Artificial Sequence: Synthetic oligonucleotide
acucugaucauucccauau

SEQ ID NO: 1384249 - RNA, 19 nt, Artificial Sequence
  Description of Artificial Sequence: Synthetic oligonucleotide
aguacaccggagaagaauc

SEQ ID NO: 1384250 - RNA, 19 nt, Artificial Sequence
  Description of Artificial Sequence: Synthetic oligonucleotide
uucagcucacuucuugacc

SEQ ID NO: 1384251 - RNA, 19 nt, Artificial Sequence
  Description of Artificial Sequence: Synthetic oligonucleotide
agaugguauggaugaaagg

SEQ ID NO: 1384252 - RNA, 19 nt, Artificial Sequence
  Description of Artificial Sequence: Synthetic oligonucleotide
acuaucuuccuccugcccu

SEQ ID NO: 1384253 - RNA, 19 nt, Artificial Sequence
  Description of Artificial Sequence: Synthetic oligonucleotide
gaaaugagucgcuugcuuc

SEQ ID NO: 1384254 - RNA, 19 nt, Artificial Sequence
  Description of Artificial Sequence: Synthetic oligonucleotide
uuggguugaaguacagagc

SEQ ID NO: 1384255 - RNA, 19 nt, Artificial Sequence
  Description of Artificial Sequence: Synthetic oligonucleotide
augaauaggcccugcguag

SEQ ID NO: 1384256 - RNA, 19 nt, Artificial Sequence
  Description of Artificial Sequence: Synthetic oligonucleotide
aaauaacuuuucaauggca

SEQ ID NO: 1384257 - RNA, 19 nt, Artificial Sequence
  Description of Artificial Sequence: Synthetic oligonucleotide
auucgggucguuuucugag

SEQ ID NO: 1384258 - RNA, 19 nt, Artificial Sequence
  Description of Artificial Sequence: Synthetic oligonucleotide
uguagucaaacagguacag

SEQ ID NO: 1384259 - RNA, 19 nt, Artificial Sequence
  Description of Artificial Sequence: Synthetic oligonucleotide
uacuugacaaggaauucuc

SEQ ID NO: 1384260 - RNA, 19 nt, Artificial Sequence
  Description of Artificial Sequence: Synthetic oligonucleotide
aguaaaacaaacaguugca

SEQ ID NO: 1384261 - RNA, 19 nt, Artificial Sequence
  Description of Artificial Sequence: Synthetic oligonucleotide
agcuccaugaggauaacuc

SEQ ID NO: 1384262 - RNA, 19 nt, Artificial Sequence
  Description of Artificial Sequence: Synthetic oligonucleotide
acuaugucauuauucugcu

SEQ ID NO: 1384263 - RNA, 19 nt, Artificial Sequence
  Description of Artificial Sequence: Synthetic oligonucleotide
ucugaucauucccauauuu

SEQ ID NO: 1384264 - RNA, 19 nt, Artificial Sequence
  Description of Artificial Sequence: Synthetic oligonucleotide
uguauggugcccuggaaau

SEQ ID NO: 1384265 - RNA, 19 nt, Artificial Sequence
  Description of Artificial Sequence: Synthetic oligonucleotide
guuaauaauuggguugaag

SEQ ID NO: 1384266 - RNA, 19 nt, Artificial Sequence
  Description of Artificial Sequence: Synthetic oligonucleotide
uucaauccgcauucuaaug

SEQ ID NO: 1384267 - RNA, 19 nt, Artificial Sequence
  Description of Artificial Sequence: Synthetic oligonucleotide
caguaguggaccuccagcc

SEQ ID NO: 1384268 - RNA, 19 nt, Artificial Sequence
  Description of Artificial Sequence: Synthetic oligonucleotide
gagaacaacuccagaacag

SEQ ID NO: 1384269 - RNA, 19 nt, Artificial Sequence
  Description of Artificial Sequence: Synthetic oligonucleotide
acaguuuggacaucaggga

SEQ ID NO: 1384270 - RNA, 19 nt, Artificial Sequence
  Description of Artificial Sequence: Synthetic oligonucleotide
ucgcuugcuuccuugaaug

SEQ ID NO: 1384271 - RNA, 19 nt, Artificial Sequence
  Description of Artificial Sequence: Synthetic oligonucleotide
aagcgugauguccaguagu

SEQ ID NO: 1384272 - RNA, 19 nt, Artificial Sequence
  Description of Artificial Sequence: Synthetic oligonucleotide
caacaguuuggacaucagg

SEQ ID NO: 1384273 - RNA, 19 nt, Artificial Sequence
  Description of Artificial Sequence: Synthetic oligonucleotide
agacauccaccauaaagcu

SEQ ID NO: 1384274 - RNA, 19 nt, Artificial Sequence
  Description of Artificial Sequence: Synthetic oligonucleotide
ugcguagacacuuuccaaa

SEQ ID NO: 1384275 - RNA, 19 nt, Artificial Sequence
  Description of Artificial Sequence: Synthetic oligonucleotide
agcaagccaagccuugggg

SEQ ID NO: 1384276 - RNA, 19 nt, Artificial Sequence
  Description of Artificial Sequence: Synthetic oligonucleotide
agguccagaagcuuaguga

SEQ ID NO: 1384277 - RNA, 19 nt, Artificial Sequence
  Description of Artificial Sequence: Synthetic oligonucleotide
uuaccagggguagaaauga

SEQ ID NO: 1384278 - RNA, 19 nt, Artificial Sequence
  Description of Artificial Sequence: Synthetic oligonucleotide
aguacuugacaaggaauuc

SEQ ID NO: 1384279 - RNA, 19 nt, Artificial Sequence
  Description of Artificial Sequence: Synthetic oligonucleotide
uugacagccuuguacuccc

SEQ ID NO: 1384280 - RNA, 19 nt, Artificial Sequence
  Description of Artificial Sequence: Synthetic oligonucleotide
caauccgcauucuaauggc

SEQ ID NO: 1384281 - RNA, 19 nt, Artificial Sequence
  Description of Artificial Sequence: Synthetic oligonucleotide
aacugaggaaugaguggcc

SEQ ID NO: 1384282 - RNA, 19 nt, Artificial Sequence
  Description of Artificial Sequence: Synthetic oligonucleotide
uugacacauagaagcagca

SEQ ID NO: 1384283 - RNA, 19 nt, Artificial Sequence
  Description of Artificial Sequence: Synthetic oligonucleotide
auaagaaccuuucucugua

SEQ ID NO: 1384284 - RNA, 19 nt, Artificial Sequence
  Description of Artificial Sequence: Synthetic oligonucleotide
ugcugauucacucgcccug

SEQ ID NO: 1384285 - RNA, 19 nt, Artificial Sequence
  Description of Artificial Sequence: Synthetic oligonucleotide
ugugaguacaccggagaag

SEQ ID NO: 1384286 - RNA, 19 nt, Artificial Sequence
  Description of Artificial Sequence: Synthetic oligonucleotide
ggcauugacgauaaggaag

SEQ ID NO: 1384287 - RNA, 19 nt, Artificial Sequence
  Description of Artificial Sequence: Synthetic oligonucleotide
uugaccagaucuuccaaaa

SEQ ID NO: 1384288 - RNA, 19 nt, Artificial Sequence
  Description of Artificial Sequence: Synthetic oligonucleotide
gagaaaggaguacuugaca

SEQ ID NO: 1384289 - RNA, 19 nt, Artificial Sequence
  Description of Artificial Sequence: Synthetic oligonucleotide
caguuuggacaucagggag

SEQ ID NO: 1384290 - RNA, 19 nt, Artificial Sequence
  Description of Artificial Sequence: Synthetic oligonucleotide
uccaugaggauaacucuuc

SEQ ID NO: 1384291 - RNA, 19 nt, Artificial Sequence
  Description of Artificial Sequence: Synthetic oligonucleotide
guaguggaccuccagccag

SEQ ID NO: 1384292 - RNA, 19 nt, Artificial Sequence
  Description of Artificial Sequence: Synthetic oligonucleotide
cagggguagaaaugagucg

SEQ ID NO: 1384293 - RNA, 19 nt, Artificial Sequence
  Description of Artificial Sequence: Synthetic oligonucleotide
ucagacucucugcugcgcc

SEQ ID NO: 1384294 - RNA, 19 nt, Artificial Sequence
  Description of Artificial Sequence: Synthetic oligonucleotide
ugauucacucgcccugugc

SEQ ID NO: 1384295 - RNA, 19 nt, Artificial Sequence
  Description of Artificial Sequence: Synthetic oligonucleotide
ugcaacaguuuggacauca

SEQ ID NO: 1384296 - RNA, 19 nt, Artificial Sequence
  Description of Artificial Sequence: Synthetic oligonucleotide
accugguuaaagccuugac

SEQ ID NO: 1384297 - RNA, 19 nt, Artificial Sequence
  Description of Artificial Sequence: Synthetic oligonucleotide
aauggcaggaaaauucauu

SEQ ID NO: 1384298 - RNA, 19 nt, Artificial Sequence
  Description of Artificial Sequence: Synthetic oligonucleotide
gauaagaaccuuucucugu

SEQ ID NO: 1384299 - RNA, 19 nt, Artificial Sequence
  Description of Artificial Sequence: Synthetic oligonucleotide
acacuuggguuuccagucg

SEQ ID NO: 1384300 - RNA, 19 nt, Artificial Sequence
  Description of Artificial Sequence: Synthetic oligonucleotide
ugcccugccacauucgggu

SEQ ID NO: 1384301 - RNA, 19 nt, Artificial Sequence
  Description of Artificial Sequence: Synthetic oligonucleotide
aaggaagcgugauguccag

SEQ ID NO: 1384302 - RNA, 19 nt, Artificial Sequence
  Description of Artificial Sequence: Synthetic oligonucleotide
gaagcgugauguccaguag

SEQ ID NO: 1384303 - RNA, 19 nt, Artificial Sequence
  Description of Artificial Sequence: Synthetic oligonucleotide
uucucuguacagagaggcc

SEQ ID NO: 1384304 - RNA, 19 nt, Artificial Sequence
  Description of Artificial Sequence: Synthetic oligonucleotide
gacuucuuugaccaccaga

SEQ ID NO: 1384305 - RNA, 19 nt, Artificial Sequence
  Description of Artificial Sequence: Synthetic oligonucleotide
acaccggagaagaaucccc

SEQ ID NO: 1384306 - RNA, 19 nt, Artificial Sequence
  Description of Artificial Sequence: Synthetic oligonucleotide
agaagcuuagugaggaugu

SEQ ID NO: 1384307 - RNA, 19 nt, Artificial Sequence
  Description of Artificial Sequence: Synthetic oligonucleotide
gguagaaaugagucgcuug

SEQ ID NO: 1384308 - RNA, 19 nt, Artificial Sequence
  Description of Artificial Sequence: Synthetic oligonucleotide
ucgggucguuuucugaggc

SEQ ID NO: 1384309 - RNA, 19 nt, Artificial Sequence
  Description of Artificial Sequence: Synthetic oligonucleotide
ugacgauaaggaagcguga

SEQ ID NO: 1384310 - RNA, 19 nt, Artificial Sequence
  Description of Artificial Sequence: Synthetic oligonucleotide
acgauaaggaagcgugaug

SEQ ID NO: 1384311 - RNA, 19 nt, Artificial Sequence
  Description of Artificial Sequence: Synthetic oligonucleotide
aagccuugacacauagaag

SEQ ID NO: 1384312 - RNA, 19 nt, Artificial Sequence
  Description of Artificial Sequence: Synthetic oligonucleotide
ugguuaaagccuugacaca

SEQ ID NO: 1384313 - RNA, 19 nt, Artificial Sequence
  Description of Artificial Sequence: Synthetic oligonucleotide
augaaagguaggaaggagu

SEQ ID NO: 1384314 - RNA, 19 nt, Artificial Sequence
  Description of Artificial Sequence: Synthetic oligonucleotide
ugagucgcuugcuuccuug

SEQ ID NO: 1384315 - RNA, 19 nt, Artificial Sequence
  Description of Artificial Sequence: Synthetic oligonucleotide
agaacaacuccagaacaga

SEQ ID NO: 1384316 - RNA, 19 nt, Artificial Sequence
  Description of Artificial Sequence: Synthetic oligonucleotide
uugcagacaaacugaggaa

SEQ ID NO: 1384317 - RNA, 19 nt, Artificial Sequence
  Description of Artificial Sequence: Synthetic oligonucleotide
uggguuuccagucgccgga

SEQ ID NO: 1384318 - RNA, 19 nt, Artificial Sequence
  Description of Artificial Sequence: Synthetic oligonucleotide
gugaguacaccggagaaga

SEQ ID NO: 1384319 - RNA, 19 nt, Artificial Sequence
  Description of Artificial Sequence: Synthetic oligonucleotide
guauggaugaaagguagga

SEQ ID NO: 1384320 - RNA, 19 nt, Artificial Sequence
  Description of Artificial Sequence: Synthetic oligonucleotide
ugggagaaaggaguacuug

SEQ ID NO: 1384321 - RNA, 19 nt, Artificial Sequence
  Description of Artificial Sequence: Synthetic oligonucleotide
agacuuuggacuaugucau

SEQ ID NO: 1384322 - RNA, 19 nt, Artificial Sequence
  Description of Artificial Sequence: Synthetic oligonucleotide
auaaagcuaggcagugccg

SEQ ID NO: 1384323 - RNA, 19 nt, Artificial Sequence
  Description of Artificial Sequence: Synthetic oligonucleotide
guagucaaacagguacagg

SEQ ID NO: 1384324 - RNA, 19 nt, Artificial Sequence
  Description of Artificial Sequence: Synthetic oligonucleotide
ugaaugcaacaguuuggac

SEQ ID NO: 1384325 - RNA, 19 nt, Artificial Sequence
  Description of Artificial Sequence: Synthetic oligonucleotide
ucuaugguguauggugccc

SEQ ID NO: 1384326 - RNA, 19 nt, Artificial Sequence
  Description of Artificial Sequence: Synthetic oligonucleotide
ucuugaccagaucuuccaa

SEQ ID NO: 1384327 - RNA, 19 nt, Artificial Sequence
  Description of Artificial Sequence: Synthetic oligonucleotide
ugcgccagugauacacaag

SEQ ID NO: 1384328 - RNA, 19 nt, Artificial Sequence
  Description of Artificial Sequence: Synthetic oligonucleotide
uacaccggagaagaauccc

SEQ ID NO: 1384329 - RNA, 19 nt, Artificial Sequence
  Description of Artificial Sequence: Synthetic oligonucleotide
cagugauacacaagcagga

SEQ ID NO: 1384330 - RNA, 19 nt, Artificial Sequence
  Description of Artificial Sequence: Synthetic oligonucleotide
auauggccaugaauaggcc

SEQ ID NO: 1384331 - RNA, 19 nt, Artificial Sequence
  Description of Artificial Sequence: Synthetic oligonucleotide
aggagaauguugacuuugg

SEQ ID NO: 1384332 - RNA, 19 nt, Artificial Sequence
  Description of Artificial Sequence: Synthetic oligonucleotide
cuaucuuccuccugcccug

SEQ ID NO: 1384333 - RNA, 19 nt, Artificial Sequence
  Description of Artificial Sequence: Synthetic oligonucleotide
uggggaaaccuucccauuu

SEQ ID NO: 1384334 - RNA, 19 nt, Artificial Sequence
  Description of Artificial Sequence: Synthetic oligonucleotide
gcgccagugauacacaagc

SEQ ID NO: 1384335 - RNA, 19 nt, Artificial Sequence
  Description of Artificial Sequence: Synthetic oligonucleotide
ggaaugaguggccagaaua

SEQ ID NO: 1384336 - RNA, 19 nt, Artificial Sequence
  Description of Artificial Sequence: Synthetic oligonucleotide
uggcauugacgauaaggaa

SEQ ID NO: 1384337 - RNA, 19 nt, Artificial Sequence
  Description of Artificial Sequence: Synthetic oligonucleotide
uggucagaacacuuggguu

SEQ ID NO: 1384338 - RNA, 19 nt, Artificial Sequence
  Description of Artificial Sequence: Synthetic oligonucleotide
gacuaucuuccuccugccc

SEQ ID NO: 1384339 - RNA, 19 nt, Artificial Sequence
  Description of Artificial Sequence: Synthetic oligonucleotide
gauaacucuucuguggcua

SEQ ID NO: 1384340 - RNA, 19 nt, Artificial Sequence
  Description of Artificial Sequence: Synthetic oligonucleotide
caugaauaggcccugcgua

SEQ ID NO: 1384341 - RNA, 19 nt, Artificial Sequence
  Description of Artificial Sequence: Synthetic oligonucleotide
agcuuagugaggauguccu

SEQ ID NO: 1384342 - RNA, 19 nt, Artificial Sequence
  Description of Artificial Sequence: Synthetic oligonucleotide
ugcuuuaccagggguagaa

SEQ ID NO: 1384343 - RNA, 19 nt, Artificial Sequence
  Description of Artificial Sequence: Synthetic oligonucleotide
auccaccauaaagcuaggc

SEQ ID NO: 1384344 - RNA, 19 nt, Artificial Sequence
  Description of Artificial Sequence: Synthetic oligonucleotide
cuugcuuccuugaaugcaa

SEQ ID NO: 1384345 - RNA, 19 nt, Artificial Sequence
  Description of Artificial Sequence: Synthetic oligonucleotide
uccgcauucuaauggcauc

SEQ ID NO: 1384346 - RNA, 19 nt, Artificial Sequence
  Description of Artificial Sequence: Synthetic oligonucleotide
ugaauaggcccugcguaga

SEQ ID NO: 1384347 - RNA, 19 nt, Artificial Sequence
  Description of Artificial Sequence: Synthetic oligonucleotide
gaauaggcccugcguagac

SEQ ID NO: 1384348 - RNA, 19 nt, Artificial Sequence
  Description of Artificial Sequence: Synthetic oligonucleotide
agccuuguacucccaaaga

SEQ ID NO: 1384349 - RNA, 19 nt, Artificial Sequence
  Description of Artificial Sequence: Synthetic oligonucleotide
uccuugaaugcaacaguuu

SEQ ID NO: 1384350 - RNA, 19 nt, Artificial Sequence
  Description of Artificial Sequence: Synthetic oligonucleotide
uugaaguacagagcccagu

SEQ ID NO: 1384351 - RNA, 19 nt, Artificial Sequence
  Description of Artificial Sequence: Synthetic oligonucleotide
aguugcagacaaacugagg

SEQ ID NO: 1384352 - RNA, 19 nt, Artificial Sequence
  Description of Artificial Sequence: Synthetic oligonucleotide
gcugguaugggagaaagga

SEQ ID NO: 1384353 - RNA, 19 nt, Artificial Sequence
  Description of Artificial Sequence: Synthetic oligonucleotide
auucacucgcccugugcug

SEQ ID NO: 1384354 - RNA, 19 nt, Artificial Sequence
  Description of Artificial Sequence: Synthetic oligonucleotide
aauccgcauucuaauggca

SEQ ID NO: 1384355 - RNA, 19 nt, Artificial Sequence
  Description of Artificial Sequence: Synthetic oligonucleotide
guacucccaaagauucugg

SEQ ID NO: 1384356 - RNA, 19 nt, Artificial Sequence
  Description of Artificial Sequence: Synthetic oligonucleotide
guacagagcccaguaaaac

SEQ ID NO: 1384357 - RNA, 19 nt, Artificial Sequence
  Description of Artificial Sequence: Synthetic oligonucleotide
gggagaaaggaguacuuga

SEQ ID NO: 1384358 - RNA, 19 nt, Artificial Sequence
  Description of Artificial Sequence: Synthetic oligonucleotide
aauaggcccugcguagaca

SEQ ID NO: 1384359 - RNA, 19 nt, Artificial Sequence
  Description of Artificial Sequence: Synthetic oligonucleotide
ucgccggacuucuuugacc

SEQ ID NO: 1384360 - RNA, 19 nt, Artificial Sequence
  Description of Artificial Sequence: Synthetic oligonucleotide
auacacaagcaggaugacu

SEQ ID NO: 1384361 - RNA, 19 nt, Artificial Sequence
  Description of Artificial Sequence: Synthetic oligonucleotide
cuaugucauuauucugcug

SEQ ID NO: 1384362 - RNA, 19 nt, Artificial Sequence
  Description of Artificial Sequence: Synthetic oligonucleotide
cacuuggguuuccagucgc

SEQ ID NO: 1384363 - RNA, 19 nt, Artificial Sequence
  Description of Artificial Sequence: Synthetic oligonucleotide
acuuuggacuaugucauua

SEQ ID NO: 1384364 - RNA, 19 nt, Artificial Sequence
  Description of Artificial Sequence: Synthetic oligonucleotide
gcauucuaauggcaucagg

SEQ ID NO: 1384365 - RNA, 19 nt, Artificial Sequence
  Description of Artificial Sequence: Synthetic oligonucleotide
gguauggaugaaagguagg

SEQ ID NO: 1384366 - RNA, 19 nt, Artificial Sequence
  Description of Artificial Sequence: Synthetic oligonucleotide
agggguaucauaacagcaa

SEQ ID NO: 1384367 - RNA, 19 nt, Artificial Sequence
  Description of Artificial Sequence: Synthetic oligonucleotide
ucuuucagauaagaaccuu

SEQ ID NO: 1384368 - RNA, 19 nt, Artificial Sequence
  Description of Artificial Sequence: Synthetic oligonucleotide
ggagaaaggaguacuugac

SEQ ID NO: 1384369 - RNA, 19 nt, Artificial Sequence
  Description of Artificial Sequence: Synthetic oligonucleotide
ccaguaaaacaaacaguug

SEQ ID NO: 1384370 - RNA, 19 nt, Artificial Sequence
  Description of Artificial Sequence: Synthetic oligonucleotide
gaaugaguggccagaauau

SEQ ID NO: 1384371 - RNA, 19 nt, Artificial Sequence
  Description of Artificial Sequence: Synthetic oligonucleotide
cagggaaagaggagaccug

SEQ ID NO: 1384372 - RNA, 19 nt, Artificial Sequence
  Description of Artificial Sequence: Synthetic oligonucleotide
accaccagaucaauguuaa

SEQ ID NO: 1384373 - RNA, 19 nt, Artificial Sequence
  Description of Artificial Sequence: Synthetic oligonucleotide
guugaaguacagagcccag

SEQ ID NO: 1384374 - RNA, 19 nt, Artificial Sequence
  Description of Artificial Sequence: Synthetic oligonucleotide
ccagggguaucauaacagc

SEQ ID NO: 1384375 - RNA, 19 nt, Artificial Sequence
  Description of Artificial Sequence: Synthetic oligonucleotide
ugccggcagaagcuguggc

SEQ ID NO: 1384376 - RNA, 19 nt, Artificial Sequence
  Description of Artificial Sequence: Synthetic oligonucleotide
uaguggaccuccagccagu

SEQ ID NO: 1384377 - RNA, 19 nt, Artificial Sequence
  Description of Artificial Sequence: Synthetic oligonucleotide
cauugacgauaaggaagcg

SEQ ID NO: 1384378 - RNA, 19 nt, Artificial Sequence
  Description of Artificial Sequence: Synthetic oligonucleotide
ugucauuauucugcugaau

SEQ ID NO: 1384379 - RNA, 19 nt, Artificial Sequence
  Description of Artificial Sequence: Synthetic oligonucleotide
guacaccggagaagaaucc

SEQ ID NO: 1384380 - RNA, 19 nt, Artificial Sequence
  Description of Artificial Sequence: Synthetic oligonucleotide
uucaagguggugggguuaa

SEQ ID NO: 1384381 - RNA, 19 nt, Artificial Sequence
  Description of Artificial Sequence: Synthetic oligonucleotide
acuugacaaggaauucucu

SEQ ID NO: 1384382 - RNA, 19 nt, Artificial Sequence
  Description of Artificial Sequence: Synthetic oligonucleotide
gccaugaauaggcccugcg

SEQ ID NO: 1384383 - RNA, 19 nt, Artificial Sequence
  Description of Artificial Sequence: Synthetic oligonucleotide
caguuaggggacucugauc

SEQ ID NO: 1384384 - RNA, 19 nt, Artificial Sequence
  Description of Artificial Sequence: Synthetic oligonucleotide
cauccaccauaaagcuagg

SEQ ID NO: 1384385 - RNA, 19 nt, Artificial Sequence
  Description of Artificial Sequence: Synthetic oligonucleotide
cucuguacagagaggccca

SEQ ID NO: 1384386 - RNA, 19 nt, Artificial Sequence
  Description of Artificial Sequence: Synthetic oligonucleotide
cagggcucucacacgcucc

SEQ ID NO: 1384387 - RNA, 19 nt, Artificial Sequence
  Description of Artificial Sequence: Synthetic oligonucleotide
uggcaguuaggggacucug

SEQ ID NO: 1384388 - RNA, 19 nt, Artificial Sequence
  Description of Artificial Sequence: Synthetic oligonucleotide
cuucaauccgcauucuaau

SEQ ID NO: 1384389 - RNA, 19 nt, Artificial Sequence
  Description of Artificial Sequence: Synthetic oligonucleotide
gcauucuggacacucuguc

SEQ ID NO: 1384390 - RNA, 19 nt, Artificial Sequence
  Description of Artificial Sequence: Synthetic oligonucleotide
aaccagaggacaacuucuu

SEQ ID NO: 1384391 - RNA, 19 nt, Artificial Sequence
  Description of Artificial Sequence: Synthetic oligonucleotide
cagucgccggacuucuuug

SEQ ID NO: 1384392 - RNA, 19 nt, Artificial Sequence
  Description of Artificial Sequence: Synthetic oligonucleotide
agucgccggacuucuuuga

SEQ ID NO: 1384393 - RNA, 19 nt, Artificial Sequence
  Description of Artificial Sequence: Synthetic oligonucleotide
cccaguaaaacaaacaguu

SEQ ID NO: 1384394 - RNA, 19 nt, Artificial Sequence
  Description of Artificial Sequence: Synthetic oligonucleotide
ggaagcgugauguccagua

SEQ ID NO: 1384395 - RNA, 19 nt, Artificial Sequence
  Description of Artificial Sequence: Synthetic oligonucleotide
gucagaacacuuggguuuc

SEQ ID NO: 1384396 - RNA, 19 nt, Artificial Sequence
  Description of Artificial Sequence: Synthetic oligonucleotide
ugggguggcuucacaccca

SEQ ID NO: 1384397 - RNA, 19 nt, Artificial Sequence
  Description of Artificial Sequence: Synthetic oligonucleotide
agccuuggggagcucuuga

SEQ ID NO: 1384398 - RNA, 19 nt, Artificial Sequence
  Description of Artificial Sequence: Synthetic oligonucleotide
uuggggaaaccuucccauu

SEQ ID NO: 1384399 - RNA, 19 nt, Artificial Sequence
  Description of Artificial Sequence: Synthetic oligonucleotide
gaagcuuagugaggauguc

SEQ ID NO: 1384400 - RNA, 19 nt, Artificial Sequence
  Description of Artificial Sequence: Synthetic oligonucleotide
aggccaugcucagacucuc

SEQ ID NO: 1384401 - RNA, 19 nt, Artificial Sequence
  Description of Artificial Sequence: Synthetic oligonucleotide
ggaugaaagguaggaagga

SEQ ID NO: 1384402 - RNA, 19 nt, Artificial Sequence
  Description of Artificial Sequence: Synthetic oligonucleotide
agcugugaguacaccggag

SEQ ID NO: 1384403 - RNA, 19 nt, Artificial Sequence
  Description of Artificial Sequence: Synthetic oligonucleotide
uuccagucgccggacuucu

SEQ ID NO: 1384404 - RNA, 19 nt, Artificial Sequence
  Description of Artificial Sequence: Synthetic oligonucleotide
agucgcuugcuuccuugaa

SEQ ID NO: 1384405 - RNA, 19 nt, Artificial Sequence
  Description of Artificial Sequence: Synthetic oligonucleotide
cagccuugugcaccaggag

SEQ ID NO: 1384406 - RNA, 19 nt, Artificial Sequence
  Description of Artificial Sequence: Synthetic oligonucleotide
gauguccaguaguggaccu

SEQ ID NO: 1384407 - RNA, 19 nt, Artificial Sequence
  Description of Artificial Sequence: Synthetic oligonucleotide
ggguugacagccuuguacu

SEQ ID NO: 1384408 - RNA, 19 nt, Artificial Sequence
  Description of Artificial Sequence: Synthetic oligonucleotide
ccuugacacauagaagcag

SEQ ID NO: 1384409 - RNA, 19 nt, Artificial Sequence
  Description of Artificial Sequence: Synthetic oligonucleotide
ggguaucauaacagcaaug

SEQ ID NO: 1384410 - RNA, 19 nt, Artificial Sequence
  Description of Artificial Sequence: Synthetic oligonucleotide
auccgcauucuaauggcau

SEQ ID NO: 1384411 - RNA, 19 nt, Artificial Sequence
  Description of Artificial Sequence: Synthetic oligonucleotide
gacgauaaggaagcgugau

SEQ ID NO: 1384412 - RNA, 19 nt, Artificial Sequence
  Description of Artificial Sequence: Synthetic oligonucleotide
ggucagaacacuuggguuu

SEQ ID NO: 1384413 - RNA, 19 nt, Artificial Sequence
  Description of Artificial Sequence: Synthetic oligonucleotide
cugaucauucccauauuuu

SEQ ID NO: 1384414 - RNA, 19 nt, Artificial Sequence
  Description of Artificial Sequence: Synthetic oligonucleotide
caauggcaucccugaggag

SEQ ID NO: 1384415 - RNA, 19 nt, Artificial Sequence
  Description of Artificial Sequence: Synthetic oligonucleotide
cuggacuaucuuccuccug

SEQ ID NO: 1384416 - RNA, 19 nt, Artificial Sequence
  Description of Artificial Sequence: Synthetic oligonucleotide
gucgccggacuucuuugac

SEQ ID NO: 1384417 - RNA, 19 nt, Artificial Sequence
  Description of Artificial Sequence: Synthetic oligonucleotide
uguccuccccagagcugcc

SEQ ID NO: 1384418 - RNA, 19 nt, Artificial Sequence
  Description of Artificial Sequence: Synthetic oligonucleotide
gaguacaccggagaagaau

SEQ ID NO: 1384419 - RNA, 19 nt, Artificial Sequence
  Description of Artificial Sequence: Synthetic oligonucleotide
gcuguucuaaccagaggac

SEQ ID NO: 1384420 - RNA, 19 nt, Artificial Sequence
  Description of Artificial Sequence: Synthetic oligonucleotide
gacauccaccauaaagcua

SEQ ID NO: 1384421 - RNA, 19 nt, Artificial Sequence
  Description of Artificial Sequence: Synthetic oligonucleotide
cuuuggacuaugucauuau

SEQ ID NO: 1384422 - RNA, 19 nt, Artificial Sequence
  Description of Artificial Sequence: Synthetic oligonucleotide
gaccugguuaaagccuuga

SEQ ID NO: 1384423 - RNA, 19 nt, Artificial Sequence
  Description of Artificial Sequence: Synthetic oligonucleotide
cugauucacucgcccugug

SEQ ID NO: 1384424 - RNA, 19 nt, Artificial Sequence
  Description of Artificial Sequence: Synthetic oligonucleotide
cuguacagagaggcccaag

SEQ ID NO: 1384425 - RNA, 19 nt, Artificial Sequence
  Description of Artificial Sequence: Synthetic oligonucleotide
ggauguccuccccagagcu

SEQ ID NO: 1384426 - RNA, 19 nt, Artificial Sequence
  Description of Artificial Sequence: Synthetic oligonucleotide
ggcaucccugaggagaaug

SEQ ID NO: 1384427 - RNA, 19 nt, Artificial Sequence
  Description of Artificial Sequence: Synthetic oligonucleotide
augggagaaaggaguacuu

SEQ ID NO: 1384428 - RNA, 19 nt, Artificial Sequence
  Description of Artificial Sequence: Synthetic oligonucleotide
gggucguuuucugaggcuc

SEQ ID NO: 1384429 - RNA, 19 nt, Artificial Sequence
  Description of Artificial Sequence: Synthetic oligonucleotide
ccggacuucuuugaccacc

SEQ ID NO: 1384430 - RNA, 19 nt, Artificial Sequence
  Description of Artificial Sequence: Synthetic oligonucleotide
gucgcuugcuuccuugaau

SEQ ID NO: 1384431 - RNA, 19 nt, Artificial Sequence
  Description of Artificial Sequence: Synthetic oligonucleotide
agccaagccuuggggagcu

SEQ ID NO: 1384432 - RNA, 19 nt, Artificial Sequence
  Description of Artificial Sequence: Synthetic oligonucleotide
cagccagucccaggcaaac

SEQ ID NO: 1384433 - RNA, 19 nt, Artificial Sequence
  Description of Artificial Sequence: Synthetic oligonucleotide
gcgugauguccaguagugg

SEQ ID NO: 1384434 - RNA, 19 nt, Artificial Sequence
  Description of Artificial Sequence: Synthetic oligonucleotide
aggcccugcguagacacuu

SEQ ID NO: 1384435 - RNA, 19 nt, Artificial Sequence
  Description of Artificial Sequence: Synthetic oligonucleotide
agaccugguuaaagccuug

SEQ ID NO: 1384436 - RNA, 19 nt, Artificial Sequence
  Description of Artificial Sequence: Synthetic oligonucleotide
ccaugugggcucccgcagg

SEQ ID NO: 1384437 - RNA, 19 nt, Artificial Sequence
  Description of Artificial Sequence: Synthetic oligonucleotide
gcagaugguauggaugaaa

SEQ ID NO: 1384438 - RNA, 19 nt, Artificial Sequence
  Description of Artificial Sequence: Synthetic oligonucleotide
augagucgcuugcuuccuu

SEQ ID NO: 1384439 - RNA, 19 nt, Artificial Sequence
  Description of Artificial Sequence: Synthetic oligonucleotide
aggaagcgugauguccagu

SEQ ID NO: 1384440 - RNA, 19 nt, Artificial Sequence
  Description of Artificial Sequence: Synthetic oligonucleotide
ugggcucccgcagguccag

SEQ ID NO: 1384441 - RNA, 19 nt, Artificial Sequence
  Description of Artificial Sequence: Synthetic oligonucleotide
gggguaucauaacagcaau

SEQ ID NO: 1384442 - RNA, 19 nt, Artificial Sequence
  Description of Artificial Sequence: Synthetic oligonucleotide
cuuugaagacauccaccau

SEQ ID NO: 1384443 - RNA, 19 nt, Artificial Sequence
  Description of Artificial Sequence: Synthetic oligonucleotide
ggccagaauauggccauga

SEQ ID NO: 1384444 - RNA, 19 nt, Artificial Sequence
  Description of Artificial Sequence: Synthetic oligonucleotide
gccuugacacauagaagca

SEQ ID NO: 1384445 - RNA, 19 nt, Artificial Sequence
  Description of Artificial Sequence: Synthetic oligonucleotide
cugcgccagugauacacaa

SEQ ID NO: 1384446 - RNA, 19 nt, Artificial Sequence
  Description of Artificial Sequence: Synthetic oligonucleotide
cugcugauucacucgcccu

SEQ ID NO: 1384447 - RNA, 19 nt, Artificial Sequence
  Description of Artificial Sequence: Synthetic oligonucleotide
cccugugcuggcaguuagg

SEQ ID NO: 1384448 - RNA, 19 nt, Artificial Sequence
  Description of Artificial Sequence: Synthetic oligonucleotide
guucaagguggugggguua

SEQ ID NO: 1384449 - RNA, 19 nt, Artificial Sequence
  Description of Artificial Sequence: Synthetic oligonucleotide
cugccuccaugugggcucc

SEQ ID NO: 1384450 - RNA, 19 nt, Artificial Sequence
  Description of Artificial Sequence: Synthetic oligonucleotide
ggaugacugccacaccagu

SEQ ID NO: 1384451 - RNA, 19 nt, Artificial Sequence
  Description of Artificial Sequence: Synthetic oligonucleotide
cgccggacuucuuugacca

SEQ ID NO: 1384452 - RNA, 19 nt, Artificial Sequence
  Description of Artificial Sequence: Synthetic oligonucleotide
gugcugaugacuggacuau

SEQ ID NO: 1384453 - RNA, 19 nt, Artificial Sequence
  Description of Artificial Sequence: Synthetic oligonucleotide
ccuugugcaccaggaggcc

SEQ ID NO: 1384454 - RNA, 19 nt, Artificial Sequence
  Description of Artificial Sequence: Synthetic oligonucleotide
ccgcauucuaauggcauca

SEQ ID NO: 1384455 - RNA, 19 nt, Artificial Sequence
  Description of Artificial Sequence: Synthetic oligonucleotide
ucgcccugugcuggcaguu

SEQ ID NO: 1384456 - RNA, 19 nt, Artificial Sequence
  Description of Artificial Sequence: Synthetic oligonucleotide
ccaugaauaggcccugcgu

SEQ ID NO: 1384457 - RNA, 19 nt, Artificial Sequence
  Description of Artificial Sequence: Synthetic oligonucleotide
gccacauucgggucguuuu

SEQ ID NO: 1384458 - RNA, 19 nt, Artificial Sequence
  Description of Artificial Sequence: Synthetic oligonucleotide
ggaccugccuggguugaca

SEQ ID NO: 1384459 - RNA, 19 nt, Artificial Sequence
  Description of Artificial Sequence: Synthetic oligonucleotide
ggacucugaucauucccau

SEQ ID NO: 1384460 - RNA, 19 nt, Artificial Sequence
  Description of Artificial Sequence: Synthetic oligonucleotide
gccuggguugacagccuug

SEQ ID NO: 1384461 - RNA, 19 nt, Artificial Sequence
  Description of Artificial Sequence: Synthetic oligonucleotide
ggguuuccagucgccggac

SEQ ID NO: 1384462 - RNA, 19 nt, Artificial Sequence
  Description of Artificial Sequence: Synthetic oligonucleotide
guauggugcccuggaaauu

SEQ ID NO: 1384463 - RNA, 19 nt, Artificial Sequence
  Description of Artificial Sequence: Synthetic oligonucleotide
gcugauucacucgcccugu

SEQ ID NO: 1384464 - RNA, 19 nt, Artificial Sequence
  Description of Artificial Sequence: Synthetic oligonucleotide
gcuuuaccagggguagaaa

SEQ ID NO: 1384465 - RNA, 19 nt, Artificial Sequence
  Description of Artificial Sequence: Synthetic oligonucleotide
ccaugaggauaacucuucu

SEQ ID NO: 1384466 - RNA, 19 nt, Artificial Sequence
  Description of Artificial Sequence: Synthetic oligonucleotide
ggucguuuucugaggcucu

SEQ ID NO: 1384467 - RNA, 19 nt, Artificial Sequence
  Description of Artificial Sequence: Synthetic oligonucleotide
gcugcgccagugauacaca

SEQ ID NO: 1384468 - RNA, 19 nt, Artificial Sequence
  Description of Artificial Sequence: Synthetic oligonucleotide
gccggacuucuuugaccac

SEQ ID NO: 1384469 - RNA, 19 nt, Artificial Sequence
  Description of Artificial Sequence: Synthetic oligonucleotide
gguuuccagucgccggacu

SEQ ID NO: 1384470 - RNA, 19 nt, Artificial Sequence
  Description of Artificial Sequence: Synthetic oligonucleotide
ugccuccaugugggcuccc

SEQ ID NO: 1384471 - RNA, 19 nt, Artificial Sequence
  Description of Artificial Sequence: Synthetic oligonucleotide
cucgcccugugcuggcagu

SEQ ID NO: 1384472 - RNA, 19 nt, Artificial Sequence
  Description of Artificial Sequence: Synthetic oligonucleotide
ccagccagucccaggcaaa

SEQ ID NO: 1384473 - RNA, 19 nt, Artificial Sequence
  Description of Artificial Sequence: Synthetic oligonucleotide
gcccugccacauucggguc

SEQ ID NO: 1384474 - RNA, 19 nt, Artificial Sequence
  Description of Artificial Sequence: Synthetic oligonucleotide
cacucgcccugugcuggca

SEQ ID NO: 1384475 - RNA, 19 nt, Artificial Sequence
  Description of Artificial Sequence: Synthetic oligonucleotide
gggaccugccuggguugac

SEQ ID NO: 1384476 - RNA, 19 nt, Artificial Sequence
  Description of Artificial Sequence: Synthetic oligonucleotide
ggcccugcguagacacuuu

SEQ ID NO: 1384477 - RNA, 19 nt, Artificial Sequence
  Description of Artificial Sequence: Synthetic oligonucleotide
cugccacauucgggucguu

SEQ ID NO: 1384478 - RNA, 19 nt, Artificial Sequence
  Description of Artificial Sequence: Synthetic oligonucleotide
gauaaauccuauuauagcg

SEQ ID NO: 1384479 - RNA, 19 nt, Artificial Sequence
  Description of Artificial Sequence: Synthetic oligonucleotide
aauaaauuuccucuccugc

SEQ ID NO: 1384480 - RNA, 19 nt, Artificial Sequence
  Description of Artificial Sequence: Synthetic oligonucleotide
acuaaucacauauuuagcc

SEQ ID NO: 1384481 - RNA, 19 nt, Artificial Sequence
  Description of Artificial Sequence: Synthetic oligonucleotide
aaacuaugcacuuaaugac

SEQ ID NO: 1384482 - RNA, 19 nt, Artificial Sequence
  Description of Artificial Sequence: Synthetic oligonucleotide
auuauagcggcauaagugc

SEQ ID NO: 1384483 - RNA, 19 nt, Artificial Sequence
  Description of Artificial Sequence: Synthetic oligonucleotide
aaagauaagaacuuccacu

SEQ ID NO: 1384484 - RNA, 19 nt, Artificial Sequence
  Description of Artificial Sequence: Synthetic oligonucleotide
uuuagaaacgcacaagcag

SEQ ID NO: 1384485 - RNA, 19 nt, Artificial Sequence
  Description of Artificial Sequence: Synthetic oligonucleotide
aaagagaguagcaagcugc

SEQ ID NO: 1384486 - RNA, 19 nt, Artificial Sequence
  Description of Artificial Sequence: Synthetic oligonucleotide
ugugagaaaggauaaaucc

SEQ ID NO: 1384487 - RNA, 19 nt, Artificial Sequence
  Description of Artificial Sequence: Synthetic oligonucleotide
uauuauagcggcauaagug

SEQ ID NO: 1384488 - RNA, 19 nt, Artificial Sequence
  Description of Artificial Sequence: Synthetic oligonucleotide
aauccaagcagcuuuagca

SEQ ID NO: 1384489 - RNA, 19 nt, Artificial Sequence
  Description of Artificial Sequence: Synthetic oligonucleotide
aauggcacuaaucacauau

SEQ ID NO: 1384490 - RNA, 19 nt, Artificial Sequence
  Description of Artificial Sequence: Synthetic oligonucleotide
cuauagugaaucuucaugc

SEQ ID NO: 1384491 - RNA, 19 nt, Artificial Sequence
  Description of Artificial Sequence: Synthetic oligonucleotide
acaggaauaaagaaagucc

SEQ ID NO: 1384492 - RNA, 19 nt, Artificial Sequence
  Description of Artificial Sequence: Synthetic oligonucleotide
uguaaguacaacugcaaag

SEQ ID NO: 1384493 - RNA, 19 nt, Artificial Sequence
  Description of Artificial Sequence: Synthetic oligonucleotide
uuuacauaccacaggaacc

SEQ ID NO: 1384494 - RNA, 19 nt, Artificial Sequence
  Description of Artificial Sequence: Synthetic oligonucleotide
uugcauagagcucacaaag

SEQ ID NO: 1384495 - RNA, 19 nt, Artificial Sequence
  Description of Artificial Sequence: Synthetic oligonucleotide
aauaaucaugguuccacag

SEQ ID NO: 1384496 - RNA, 19 nt, Artificial Sequence
  Description of Artificial Sequence: Synthetic oligonucleotide
aacccuuccauacuggguc

SEQ ID NO: 1384497 - RNA, 19 nt, Artificial Sequence
  Description of Artificial Sequence: Synthetic oligonucleotide
ucaacucuaaagcaaagga

SEQ ID NO: 1384498 - RNA, 19 nt, Artificial Sequence
  Description of Artificial Sequence: Synthetic oligonucleotide
ugugugauuaaauuucacc

SEQ ID NO: 1384499 - RNA, 19 nt, Artificial Sequence
  Description of Artificial Sequence: Synthetic oligonucleotide
cacacaggaauaaagaaag

SEQ ID NO: 1384500 - RNA, 19 nt, Artificial Sequence
  Description of Artificial Sequence: Synthetic oligonucleotide
agacguaucaguuuucuag

SEQ ID NO: 1384501 - RNA, 19 nt, Artificial Sequence
  Description of Artificial Sequence: Synthetic oligonucleotide
aaggauaucuacugaguag

SEQ ID NO: 1384502 - RNA, 19 nt, Artificial Sequence
  Description of Artificial Sequence: Synthetic oligonucleotide
uuaaugacugaacccaaag

SEQ ID NO: 1384503 - RNA, 19 nt, Artificial Sequence
  Description of Artificial Sequence: Synthetic oligonucleotide
auaaacuaugcacuuaaug

SEQ ID NO: 1384504 - RNA, 19 nt, Artificial Sequence
  Description of Artificial Sequence: Synthetic oligonucleotide
cuugguaucauccaaugug

SEQ ID NO: 1384505 - RNA, 19 nt, Artificial Sequence
  Description of Artificial Sequence: Synthetic oligonucleotide
aguuaauacagaguaaauc

SEQ ID NO: 1384506 - RNA, 19 nt, Artificial Sequence
  Description of Artificial Sequence: Synthetic oligonucleotide
aacucuaaagcaaaggaug

SEQ ID NO: 1384507 - RNA, 19 nt, Artificial Sequence
  Description of Artificial Sequence: Synthetic oligonucleotide
uuaauacagaguaaaucca

SEQ ID NO: 1384508 - RNA, 19 nt, Artificial Sequence
  Description of Artificial Sequence: Synthetic oligonucleotide
acuauagugaaucuucaug

SEQ ID NO: 1384509 - RNA, 19 nt, Artificial Sequence
  Description of Artificial Sequence: Synthetic oligonucleotide
uaauaaacuaugcacuuaa

SEQ ID NO: 1384510 - RNA, 19 nt, Artificial Sequence
  Description of Artificial Sequence: Synthetic oligonucleotide
ugcuuuacauaccacagga

SEQ ID NO: 1384511 - RNA, 19 nt, Artificial Sequence
  Description of Artificial Sequence: Synthetic oligonucleotide
aguuuucuagcuuugugag

SEQ ID NO: 1384512 - RNA, 19 nt, Artificial Sequence
  Description of Artificial Sequence: Synthetic oligonucleotide
cagucauccacauaugagg

SEQ ID NO: 1384513 - RNA, 19 nt, Artificial Sequence
  Description of Artificial Sequence: Synthetic oligonucleotide
uaccaguuaauacagagua

SEQ ID NO: 1384514 - RNA, 19 nt, Artificial Sequence
  Description of Artificial Sequence: Synthetic oligonucleotide
gguuuauucaacucuaaag

SEQ ID NO: 1384515 - RNA, 19 nt, Artificial Sequence
  Description of Artificial Sequence: Synthetic oligonucleotide
aucaacuuguauccauucc

SEQ ID NO: 1384516 - RNA, 19 nt, Artificial Sequence
  Description of Artificial Sequence: Synthetic oligonucleotide
cauaugaggggcuuacugg

SEQ ID NO: 1384517 - RNA, 19 nt, Artificial Sequence
  Description of Artificial Sequence: Synthetic oligonucleotide
ucuuugguaagacguauca

SEQ ID NO: 1384518 - RNA, 19 nt, Artificial Sequence
  Description of Artificial Sequence: Synthetic oligonucleotide
auaugaggggcuuacuggg

SEQ ID NO: 1384519 - RNA, 19 nt, Artificial Sequence
  Description of Artificial Sequence: Synthetic oligonucleotide
ucuagcuuugugagaaagg

SEQ ID NO: 1384520 - RNA, 19 nt, Artificial Sequence
  Description of Artificial Sequence: Synthetic oligonucleotide
uaaauccuauuauagcggc

SEQ ID NO: 1384521 - RNA, 19 nt, Artificial Sequence
  Description of Artificial Sequence: Synthetic oligonucleotide
gaugauucugguugugccg

SEQ ID NO: 1384522 - RNA, 19 nt, Artificial Sequence
  Description of Artificial Sequence: Synthetic oligonucleotide
uauuuagccucauauauuu

SEQ ID NO: 1384523 - RNA, 19 nt, Artificial Sequence
  Description of Artificial Sequence: Synthetic oligonucleotide
auaagugccaucuggcuug

SEQ ID NO: 1384524 - RNA, 19 nt, Artificial Sequence
  Description of Artificial Sequence: Synthetic oligonucleotide
ugcaaagaaaauccugccc

SEQ ID NO: 1384525 - RNA, 19 nt, Artificial Sequence
  Description of Artificial Sequence: Synthetic oligonucleotide
ucuaaagcaaaggaugagc

SEQ ID NO: 1384526 - RNA, 19 nt, Artificial Sequence
  Description of Artificial Sequence: Synthetic oligonucleotide
aguugguuuauucaacucu

SEQ ID NO: 1384527 - RNA, 19 nt, Artificial Sequence
  Description of Artificial Sequence: Synthetic oligonucleotide
aaaggauaucuacugagua

SEQ ID NO: 1384528 - RNA, 19 nt, Artificial Sequence
  Description of Artificial Sequence: Synthetic oligonucleotide
ggaaauacaucuugggagg

SEQ ID NO: 1384529 - RNA, 19 nt, Artificial Sequence
  Description of Artificial Sequence: Synthetic oligonucleotide
uacugaguagcacaauacc

SEQ ID NO: 1384530 - RNA, 19 nt, Artificial Sequence
  Description of Artificial Sequence: Synthetic oligonucleotide
auacaguuggcaauauucc

SEQ ID NO: 1384531 - RNA, 19 nt, Artificial Sequence
  Description of Artificial Sequence: Synthetic oligonucleotide
gcacuaaucacauauuuag

SEQ ID NO: 1384532 - RNA, 19 nt, Artificial Sequence
  Description of Artificial Sequence: Synthetic oligonucleotide
auaaauccuauuauagcgg

SEQ ID NO: 1384533 - RNA, 19 nt, Artificial Sequence
  Description of Artificial Sequence: Synthetic oligonucleotide
cugaguagcacaauaccag

SEQ ID NO: 1384534 - RNA, 19 nt, Artificial Sequence
  Description of Artificial Sequence: Synthetic oligonucleotide
uauagugaaucuucaugcc

SEQ ID NO: 1384535 - RNA, 19 nt, Artificial Sequence
  Description of Artificial Sequence: Synthetic oligonucleotide
uucaacucuaaagcaaagg

SEQ ID NO: 1384536 - RNA, 19 nt, Artificial Sequence
  Description of Artificial Sequence: Synthetic oligonucleotide
acguagaacccuuccauac

SEQ ID NO: 1384537 - RNA, 19 nt, Artificial Sequence
  Description of Artificial Sequence: Synthetic oligonucleotide
aagaacuugaguaggugag

SEQ ID NO: 1384538 - RNA, 19 nt, Artificial Sequence
  Description of Artificial Sequence: Synthetic oligonucleotide
ugugauuaaauuucaccuc

SEQ ID NO: 1384539 - RNA, 19 nt, Artificial Sequence
  Description of Artificial Sequence: Synthetic oligonucleotide
gaaacgcacaagcaggccc

SEQ ID NO: 1384540 - RNA, 19 nt, Artificial Sequence
  Description of Artificial Sequence: Synthetic oligonucleotide
uugguaucauccaaugugu

SEQ ID NO: 1384541 - RNA, 19 nt, Artificial Sequence
  Description of Artificial Sequence: Synthetic oligonucleotide
aggauaaauccuauuauag

SEQ ID NO: 1384542 - RNA, 19 nt, Artificial Sequence
  Description of Artificial Sequence: Synthetic oligonucleotide
aacuugaguaggugaggac

SEQ ID NO: 1384543 - RNA, 19 nt, Artificial Sequence
  Description of Artificial Sequence: Synthetic oligonucleotide
aacaagcaagagcaaagga

SEQ ID NO: 1384544 - RNA, 19 nt, Artificial Sequence
  Description of Artificial Sequence: Synthetic oligonucleotide
gacguaucaguuuucuagc

SEQ ID NO: 1384545 - RNA, 19 nt, Artificial Sequence
  Description of Artificial Sequence: Synthetic oligonucleotide
ucaguuuucuagcuuugug

SEQ ID NO: 1384546 - RNA, 19 nt, Artificial Sequence
  Description of Artificial Sequence: Synthetic oligonucleotide
aaacgcacaagcaggcccc

SEQ ID NO: 1384547 - RNA, 19 nt, Artificial Sequence
  Description of Artificial Sequence: Synthetic oligonucleotide
auaagaacuuccacuauuc

SEQ ID NO: 1384548 - RNA, 19 nt, Artificial Sequence
  Description of Artificial Sequence: Synthetic oligonucleotide
guaucauccaauguguacc

SEQ ID NO: 1384549 - RNA, 19 nt, Artificial Sequence
  Description of Artificial Sequence: Synthetic oligonucleotide
agaaaauccugcccacugg

SEQ ID NO: 1384550 - RNA, 19 nt, Artificial Sequence
  Description of Artificial Sequence: Synthetic oligonucleotide
agccucauauauuucauca

SEQ ID NO: 1384551 - RNA, 19 nt, Artificial Sequence
  Description of Artificial Sequence: Synthetic oligonucleotide
ugacugaacccaaaggcac

SEQ ID NO: 1384552 - RNA, 19 nt, Artificial Sequence
  Description of Artificial Sequence: Synthetic oligonucleotide
cacacgagugaucagcugg

SEQ ID NO: 1384553 - RNA, 19 nt, Artificial Sequence
  Description of Artificial Sequence: Synthetic oligonucleotide
ucuacugaguagcacaaua

SEQ ID NO: 1384554 - RNA, 19 nt, Artificial Sequence
  Description of Artificial Sequence: Synthetic oligonucleotide
aaguaucucuccaggaagg

SEQ ID NO: 1384555 - RNA, 19 nt, Artificial Sequence
  Description of Artificial Sequence: Synthetic oligonucleotide
uugugagaaaggauaaauc

SEQ ID NO: 1384556 - RNA, 19 nt, Artificial Sequence
  Description of Artificial Sequence: Synthetic oligonucleotide
auaaucaugguuccacaga

SEQ ID NO: 1384557 - RNA, 19 nt, Artificial Sequence
  Description of Artificial Sequence: Synthetic oligonucleotide
uaauggacuggcugcagag

SEQ ID NO: 1384558 - RNA, 19 nt, Artificial Sequence
  Description of Artificial Sequence: Synthetic oligonucleotide
uuauagcggcauaagugcc

SEQ ID NO: 1384559 - RNA, 19 nt, Artificial Sequence
  Description of Artificial Sequence: Synthetic oligonucleotide
uagguuguguagcagcccc

SEQ ID NO: 1384560 - RNA, 19 nt, Artificial Sequence
  Description of Artificial Sequence: Synthetic oligonucleotide
aguagguuguguagcagcc

SEQ ID NO: 1384561 - RNA, 19 nt, Artificial Sequence
  Description of Artificial Sequence: Synthetic oligonucleotide
ucacaaaguuucuuuaguc

SEQ ID NO: 1384562 - RNA, 19 nt, Artificial Sequence
  Description of Artificial Sequence: Synthetic oligonucleotide
aauccuauuauagcggcau

SEQ ID NO: 1384563 - RNA, 19 nt, Artificial Sequence
  Description of Artificial Sequence: Synthetic oligonucleotide
caaguaucucuccaggaag

SEQ ID NO: 1384564 - RNA, 19 nt, Artificial Sequence
  Description of Artificial Sequence: Synthetic oligonucleotide
ggauaaauccuauuauagc

SEQ ID NO: 1384565 - RNA, 19 nt, Artificial Sequence
  Description of Artificial Sequence: Synthetic oligonucleotide
aguuaugcaaggcaggauu

SEQ ID NO: 1384566 - RNA, 19 nt, Artificial Sequence
  Description of Artificial Sequence: Synthetic oligonucleotide
acaguuggcaauauuccac

SEQ ID NO: 1384567 - RNA, 19 nt, Artificial Sequence
  Description of Artificial Sequence: Synthetic oligonucleotide
gugaggacacaacacacag

SEQ ID NO: 1384568 - RNA, 19 nt, Artificial Sequence
  Description of Artificial Sequence: Synthetic oligonucleotide
aucaugguuccacagaaau

SEQ ID NO: 1384569 - RNA, 19 nt, Artificial Sequence
  Description of Artificial Sequence: Synthetic oligonucleotide
uccuucaauaaucaugguu

SEQ ID NO: 1384570 - RNA, 19 nt, Artificial Sequence
  Description of Artificial Sequence: Synthetic oligonucleotide
guuucuuagcaucggcagg

SEQ ID NO: 1384571 - RNA, 19 nt, Artificial Sequence
  Description of Artificial Sequence: Synthetic oligonucleotide
gguggaauggcacuaauca

SEQ ID NO: 1384572 - RNA, 19 nt, Artificial Sequence
  Description of Artificial Sequence: Synthetic oligonucleotide
uacaguuggcaauauucca

SEQ ID NO: 1384573 - RNA, 19 nt, Artificial Sequence
  Description of Artificial Sequence: Synthetic oligonucleotide
cacuaaucacauauuuagc

SEQ ID NO: 1384574 - RNA, 19 nt, Artificial Sequence
  Description of Artificial Sequence: Synthetic oligonucleotide
ggcaauauuccacaaaaca

SEQ ID NO: 1384575 - RNA, 19 nt, Artificial Sequence
  Description of Artificial Sequence: Synthetic oligonucleotide
aauguguacccgauuggag

SEQ ID NO: 1384576 - RNA, 19 nt, Artificial Sequence
  Description of Artificial Sequence: Synthetic oligonucleotide
cuacugaguagcacaauac

SEQ ID NO: 1384577 - RNA, 19 nt, Artificial Sequence
  Description of Artificial Sequence: Synthetic oligonucleotide
gugugauuaaauuucaccu

SEQ ID NO: 1384578 - RNA, 19 nt, Artificial Sequence
  Description of Artificial Sequence: Synthetic oligonucleotide
ugguuucuuagcaucggca

SEQ ID NO: 1384579 - RNA, 19 nt, Artificial Sequence
  Description of Artificial Sequence: Synthetic oligonucleotide
uauagcggcauaagugcca

SEQ ID NO: 1384580 - RNA, 19 nt, Artificial Sequence
  Description of Artificial Sequence: Synthetic oligonucleotide
uuagcaucggcaggggagg

SEQ ID NO: 1384581 - RNA, 19 nt, Artificial Sequence
  Description of Artificial Sequence: Synthetic oligonucleotide
ugucauguagucccacucu

SEQ ID NO: 1384582 - RNA, 19 nt, Artificial Sequence
  Description of Artificial Sequence: Synthetic oligonucleotide
agaacagguggaauggcac

SEQ ID NO: 1384583 - RNA, 19 nt, Artificial Sequence
  Description of Artificial Sequence: Synthetic oligonucleotide
ucauccaauguguacccga

SEQ ID NO: 1384584 - RNA, 19 nt, Artificial Sequence
  Description of Artificial Sequence: Synthetic oligonucleotide
uagaacccuuccauacugg

SEQ ID NO: 1384585 - RNA, 19 nt, Artificial Sequence
  Description of Artificial Sequence: Synthetic oligonucleotide
ugaguagcacaauaccagu

SEQ ID NO: 1384586 - RNA, 19 nt, Artificial Sequence
  Description of Artificial Sequence: Synthetic oligonucleotide
aggugggaaaagcaucaac

SEQ ID NO: 1384587 - RNA, 19 nt, Artificial Sequence
  Description of Artificial Sequence: Synthetic oligonucleotide
acugcuuuacauaccacag

SEQ ID NO: 1384588 - RNA, 19 nt, Artificial Sequence
  Description of Artificial Sequence: Synthetic oligonucleotide
uugguaagacguaucaguu

SEQ ID NO: 1384589 - RNA, 19 nt, Artificial Sequence
  Description of Artificial Sequence: Synthetic oligonucleotide
uaucuacugaguagcacaa

SEQ ID NO: 1384590 - RNA, 19 nt, Artificial Sequence
  Description of Artificial Sequence: Synthetic oligonucleotide
cugcaaagaaaauccugcc

SEQ ID NO: 1384591 - RNA, 19 nt, Artificial Sequence
  Description of Artificial Sequence: Synthetic oligonucleotide
uaucaguuuucuagcuuug

SEQ ID NO: 1384592 - RNA, 19 nt, Artificial Sequence
  Description of Artificial Sequence: Synthetic oligonucleotide
ugguuuauucaacucuaaa

SEQ ID NO: 1384593 - RNA, 19 nt, Artificial Sequence
  Description of Artificial Sequence: Synthetic oligonucleotide
ugcauagagcucacaaagu

SEQ ID NO: 1384594 - RNA, 19 nt, Artificial Sequence
  Description of Artificial Sequence: Synthetic oligonucleotide
ugcaguugguuuauucaac

SEQ ID NO: 1384595 - RNA, 19 nt, Artificial Sequence
  Description of Artificial Sequence: Synthetic oligonucleotide
ugugccgccacacugcuuu

SEQ ID NO: 1384596 - RNA, 19 nt, Artificial Sequence
  Description of Artificial Sequence: Synthetic oligonucleotide
acauauuuagccucauaua

SEQ ID NO: 1384597 - RNA, 19 nt, Artificial Sequence
  Description of Artificial Sequence: Synthetic oligonucleotide
uugucauguagucccacuc

SEQ ID NO: 1384598 - RNA, 19 nt, Artificial Sequence
  Description of Artificial Sequence: Synthetic oligonucleotide
aaucacauauuuagccuca

SEQ ID NO: 1384599 - RNA, 19 nt, Artificial Sequence
  Description of Artificial Sequence: Synthetic oligonucleotide
ggauuguaaguacaacugc

SEQ ID NO: 1384600 - RNA, 19 nt, Artificial Sequence
  Description of Artificial Sequence: Synthetic oligonucleotide
gaucuuaucuagcaacucu

SEQ ID NO: 1384601 - RNA, 19 nt, Artificial Sequence
  Description of Artificial Sequence: Synthetic oligonucleotide
acaagcaagagcaaaggau

SEQ ID NO: 1384602 - RNA, 19 nt, Artificial Sequence
  Description of Artificial Sequence: Synthetic oligonucleotide
ccuugugugauuaaauuuc

SEQ ID NO: 1384603 - RNA, 19 nt, Artificial Sequence
  Description of Artificial Sequence: Synthetic oligonucleotide
aguucagaacuuuugcaua

SEQ ID NO: 1384604 - RNA, 19 nt, Artificial Sequence
  Description of Artificial Sequence: Synthetic oligonucleotide
agaacuugaguaggugagg

SEQ ID NO: 1384605 - RNA, 19 nt, Artificial Sequence
  Description of Artificial Sequence: Synthetic oligonucleotide
cugcuuuacauaccacagg

SEQ ID NO: 1384606 - RNA, 19 nt, Artificial Sequence
  Description of Artificial Sequence: Synthetic oligonucleotide
gauaucuacugaguagcac

SEQ ID NO: 1384607 - RNA, 19 nt, Artificial Sequence
  Description of Artificial Sequence: Synthetic oligonucleotide
cacuuaaugacugaaccca

SEQ ID NO: 1384608 - RNA, 19 nt, Artificial Sequence
  Description of Artificial Sequence: Synthetic oligonucleotide
gcagaucuuaucuagcaac

SEQ ID NO: 1384609 - RNA, 19 nt, Artificial Sequence
  Description of Artificial Sequence: Synthetic oligonucleotide
uggcacuaaucacauauuu

SEQ ID NO: 1384610 - RNA, 19 nt, Artificial Sequence
  Description of Artificial Sequence: Synthetic oligonucleotide
gugauuaaauuucaccucu

SEQ ID NO: 1384611 - RNA, 19 nt, Artificial Sequence
  Description of Artificial Sequence: Synthetic oligonucleotide
auaauggacuggcugcaga

SEQ ID NO: 1384612 - RNA, 19 nt, Artificial Sequence
  Description of Artificial Sequence: Synthetic oligonucleotide
aguagcaagcugcuuugca

SEQ ID NO: 1384613 - RNA, 19 nt, Artificial Sequence
  Description of Artificial Sequence: Synthetic oligonucleotide
caaagagaguagcaagcug

SEQ ID NO: 1384614 - RNA, 19 nt, Artificial Sequence
  Description of Artificial Sequence: Synthetic oligonucleotide
uugagaugauucugguugu

SEQ ID NO: 1384615 - RNA, 19 nt, Artificial Sequence
  Description of Artificial Sequence: Synthetic oligonucleotide
auugucauguagucccacu

SEQ ID NO: 1384616 - RNA, 19 nt, Artificial Sequence
  Description of Artificial Sequence: Synthetic oligonucleotide
cuugugugauuaaauuuca

SEQ ID NO: 1384617 - RNA, 19 nt, Artificial Sequence
  Description of Artificial Sequence: Synthetic oligonucleotide
guauuuaaugucuuccagu

SEQ ID NO: 1384618 - RNA, 19 nt, Artificial Sequence
  Description of Artificial Sequence: Synthetic oligonucleotide
uccgugccugcaaagaaaa

SEQ ID NO: 1384619 - RNA, 19 nt, Artificial Sequence
  Description of Artificial Sequence: Synthetic oligonucleotide
uggcaauauuccacaaaac

SEQ ID NO: 1384620 - RNA, 19 nt, Artificial Sequence
  Description of Artificial Sequence: Synthetic oligonucleotide
uaggaacaaccaccaauga

SEQ ID NO: 1384621 - RNA, 19 nt, Artificial Sequence
  Description of Artificial Sequence: Synthetic oligonucleotide
ucacucacuugaccggacc

SEQ ID NO: 1384622 - RNA, 19 nt, Artificial Sequence
  Description of Artificial Sequence: Synthetic oligonucleotide
ucuuaucuagcaacucuuu

SEQ ID NO: 1384623 - RNA, 19 nt, Artificial Sequence
  Description of Artificial Sequence: Synthetic oligonucleotide
cugguaaugggucgugcag

SEQ ID NO: 1384624 - RNA, 19 nt, Artificial Sequence
  Description of Artificial Sequence: Synthetic oligonucleotide
aacaaccaccaaugaagau

SEQ ID NO: 1384625 - RNA, 19 nt, Artificial Sequence
  Description of Artificial Sequence: Synthetic oligonucleotide
agcaugcagaaucucucug

SEQ ID NO: 1384626 - RNA, 19 nt, Artificial Sequence
  Description of Artificial Sequence: Synthetic oligonucleotide
cuaaagcaaaggaugagcu

SEQ ID NO: 1384627 - RNA, 19 nt, Artificial Sequence
  Description of Artificial Sequence: Synthetic oligonucleotide
gguaucauccaauguguac

SEQ ID NO: 1384628 - RNA, 19 nt, Artificial Sequence
  Description of Artificial Sequence: Synthetic oligonucleotide
ucugcaaggggugcuuucc

SEQ ID NO: 1384629 - RNA, 19 nt, Artificial Sequence
  Description of Artificial Sequence: Synthetic oligonucleotide
agcggcauaagugccaucu

SEQ ID NO: 1384630 - RNA, 19 nt, Artificial Sequence
  Description of Artificial Sequence: Synthetic oligonucleotide
cuuugguaagacguaucag

SEQ ID NO: 1384631 - RNA, 19 nt, Artificial Sequence
  Description of Artificial Sequence: Synthetic oligonucleotide
uuugugggccaggaaacca

SEQ ID NO: 1384632 - RNA, 19 nt, Artificial Sequence
  Description of Artificial Sequence: Synthetic oligonucleotide
agaaaggauaaauccuauu

SEQ ID NO: 1384633 - RNA, 19 nt, Artificial Sequence
  Description of Artificial Sequence: Synthetic oligonucleotide
uuuugugggccaggaaacc

SEQ ID NO: 1384634 - RNA, 19 nt, Artificial Sequence
  Description of Artificial Sequence: Synthetic oligonucleotide
gaacuugaguaggugagga

SEQ ID NO: 1384635 - RNA, 19 nt, Artificial Sequence
  Description of Artificial Sequence: Synthetic oligonucleotide
augcacuuaaugacugaac

SEQ ID NO: 1384636 - RNA, 19 nt, Artificial Sequence
  Description of Artificial Sequence: Synthetic oligonucleotide
caaauuucgucuucuggaa

SEQ ID NO: 1384637 - RNA, 19 nt, Artificial Sequence
  Description of Artificial Sequence: Synthetic oligonucleotide
ucuccgugccugcaaagaa

SEQ ID NO: 1384638 - RNA, 19 nt, Artificial Sequence
  Description of Artificial Sequence: Synthetic oligonucleotide
ucuuagcaucggcagggga

SEQ ID NO: 1384639 - RNA, 19 nt, Artificial Sequence
  Description of Artificial Sequence: Synthetic oligonucleotide
aagagaguagcaagcugcu

SEQ ID NO: 1384640 - RNA, 19 nt, Artificial Sequence
  Description of Artificial Sequence: Synthetic oligonucleotide
acguaucaguuuucuagcu

SEQ ID NO: 1384641 - RNA, 19 nt, Artificial Sequence
  Description of Artificial Sequence: Synthetic oligonucleotide
acuggcugacguagaaccc

SEQ ID NO: 1384642 - RNA, 19 nt, Artificial Sequence
  Description of Artificial Sequence: Synthetic oligonucleotide
aaauccuauuauagcggca

SEQ ID NO: 1384643 - RNA, 19 nt, Artificial Sequence
  Description of Artificial Sequence: Synthetic oligonucleotide
gcuuacugggccuugugug

SEQ ID NO: 1384644 - RNA, 19 nt, Artificial Sequence
  Description of Artificial Sequence: Synthetic oligonucleotide
aagacguaucaguuuucua

SEQ ID NO: 1384645 - RNA, 19 nt, Artificial Sequence
  Description of Artificial Sequence: Synthetic oligonucleotide
cacucacuugaccggaccc

SEQ ID NO: 1384646 - RNA, 19 nt, Artificial Sequence
  Description of Artificial Sequence: Synthetic oligonucleotide
caauaaucaugguuccaca

SEQ ID NO: 1384647 - RNA, 19 nt, Artificial Sequence
  Description of Artificial Sequence: Synthetic oligonucleotide
guagccacuccagugugag

SEQ ID NO: 1384648 - RNA, 19 nt, Artificial Sequence
  Description of Artificial Sequence: Synthetic oligonucleotide
ugccaaauuucgucuucug

SEQ ID NO: 1384649 - RNA, 19 nt, Artificial Sequence
  Description of Artificial Sequence: Synthetic oligonucleotide
agcagaucuuaucuagcaa

SEQ ID NO: 1384650 - RNA, 19 nt, Artificial Sequence
  Description of Artificial Sequence: Synthetic oligonucleotide
acccgauuggagcuuccuc

SEQ ID NO: 1384651 - RNA, 19 nt, Artificial Sequence
  Description of Artificial Sequence: Synthetic oligonucleotide
ugccugcaaagaaaauccu

SEQ ID NO: 1384652 - RNA, 19 nt, Artificial Sequence
  Description of Artificial Sequence: Synthetic oligonucleotide
uuugcagauuugguccagc

SEQ ID NO: 1384653 - RNA, 19 nt, Artificial Sequence
  Description of Artificial Sequence: Synthetic oligonucleotide
ucaauccaagcagcuuuag

SEQ ID NO: 1384654 - RNA, 19 nt, Artificial Sequence
  Description of Artificial Sequence: Synthetic oligonucleotide
gagaguagcaagcugcuuu

SEQ ID NO: 1384655 - RNA, 19 nt, Artificial Sequence
  Description of Artificial Sequence: Synthetic oligonucleotide
ggaguucagaacuuuugca

SEQ ID NO: 1384656 - RNA, 19 nt, Artificial Sequence
  Description of Artificial Sequence: Synthetic oligonucleotide
guagcacaauaccaguuaa

SEQ ID NO: 1384657 - RNA, 19 nt, Artificial Sequence
  Description of Artificial Sequence: Synthetic oligonucleotide
ugguaagacguaucaguuu

SEQ ID NO: 1384658 - RNA, 19 nt, Artificial Sequence
  Description of Artificial Sequence: Synthetic oligonucleotide
gagggaaguagguugugua

SEQ ID NO: 1384659 - RNA, 19 nt, Artificial Sequence
  Description of Artificial Sequence: Synthetic oligonucleotide
cauaggaacaaccaccaau

SEQ ID NO: 1384660 - RNA, 19 nt, Artificial Sequence
  Description of Artificial Sequence: Synthetic oligonucleotide
ugaccggacccaccaauaa

SEQ ID NO: 1384661 - RNA, 19 nt, Artificial Sequence
  Description of Artificial Sequence: Synthetic oligonucleotide
auccguagacucugguucu

SEQ ID NO: 1384662 - RNA, 19 nt, Artificial Sequence
  Description of Artificial Sequence: Synthetic oligonucleotide
uggcuugguaucauccaau

SEQ ID NO: 1384663 - RNA, 19 nt, Artificial Sequence
  Description of Artificial Sequence: Synthetic oligonucleotide
agguggaauggcacuaauc

SEQ ID NO: 1384664 - RNA, 19 nt, Artificial Sequence
  Description of Artificial Sequence: Synthetic oligonucleotide
guaucaguuuucuagcuuu

SEQ ID NO: 1384665 - RNA, 19 nt, Artificial Sequence
  Description of Artificial Sequence: Synthetic oligonucleotide
ugguaucauccaaugugua

SEQ ID NO: 1384666 - RNA, 19 nt, Artificial Sequence
  Description of Artificial Sequence: Synthetic oligonucleotide
cuuaaugacugaacccaaa

SEQ ID NO: 1384667 - RNA, 19 nt, Artificial Sequence
  Description of Artificial Sequence: Synthetic oligonucleotide
cuauuauagcggcauaagu

SEQ ID NO: 1384668 - RNA, 19 nt, Artificial Sequence
  Description of Artificial Sequence: Synthetic oligonucleotide
gggaggacuauagugaauc

SEQ ID NO: 1384669 - RNA, 19 nt, Artificial Sequence
  Description of Artificial Sequence: Synthetic oligonucleotide
uaugcaaggcaggauugua

SEQ ID NO: 1384670 - RNA, 19 nt, Artificial Sequence
  Description of Artificial Sequence: Synthetic oligonucleotide
uugaccggacccaccaaua

SEQ ID NO: 1384671 - RNA, 19 nt, Artificial Sequence
  Description of Artificial Sequence: Synthetic oligonucleotide
ucacuugaccggacccacc

SEQ ID NO: 1384672 - RNA, 19 nt, Artificial Sequence
  Description of Artificial Sequence: Synthetic oligonucleotide
agcuccagaugguauuuaa

SEQ ID NO: 1384673 - RNA, 19 nt, Artificial Sequence
  Description of Artificial Sequence: Synthetic oligonucleotide
aggggaggacuauagugaa

SEQ ID NO: 1384674 - RNA, 19 nt, Artificial Sequence
  Description of Artificial Sequence: Synthetic oligonucleotide
ugauucugguugugccgcc

SEQ ID NO: 1384675 - RNA, 19 nt, Artificial Sequence
  Description of Artificial Sequence: Synthetic oligonucleotide
aguuggcaauauuccacaa

SEQ ID NO: 1384676 - RNA, 19 nt, Artificial Sequence
  Description of Artificial Sequence: Synthetic oligonucleotide
ggaguacugcuccucacac

SEQ ID NO: 1384677 - RNA, 19 nt, Artificial Sequence
  Description of Artificial Sequence: Synthetic oligonucleotide
aguaucucuccaggaaggu

SEQ ID NO: 1384678 - RNA, 19 nt, Artificial Sequence
  Description of Artificial Sequence: Synthetic oligonucleotide
ggucucugcagugacacac

SEQ ID NO: 1384679 - RNA, 19 nt, Artificial Sequence
  Description of Artificial Sequence: Synthetic oligonucleotide
uucugguugugccgccaca

SEQ ID NO: 1384680 - RNA, 19 nt, Artificial Sequence
  Description of Artificial Sequence: Synthetic oligonucleotide
guaucucuccaggaaggug

SEQ ID NO: 1384681 - RNA, 19 nt, Artificial Sequence
  Description of Artificial Sequence: Synthetic oligonucleotide
caauguguacccgauugga

SEQ ID NO: 1384682 - RNA, 19 nt, Artificial Sequence
  Description of Artificial Sequence: Synthetic oligonucleotide
cucaugggucucugcagug

SEQ ID NO: 1384683 - RNA, 19 nt, Artificial Sequence
  Description of Artificial Sequence: Synthetic oligonucleotide
gauuggagcuuccucuccu

SEQ ID NO: 1384684 - RNA, 19 nt, Artificial Sequence
  Description of Artificial Sequence: Synthetic oligonucleotide
ggcuccuuauaauaaacua

SEQ ID NO: 1384685 - RNA, 19 nt, Artificial Sequence
  Description of Artificial Sequence: Synthetic oligonucleotide
caacucuaaagcaaaggau

SEQ ID NO: 1384686 - RNA, 19 nt, Artificial Sequence
  Description of Artificial Sequence: Synthetic oligonucleotide
gguaagacguaucaguuuu

SEQ ID NO: 1384687 - RNA, 19 nt, Artificial Sequence
  Description of Artificial Sequence: Synthetic oligonucleotide
ggugggaaaagcaucaacu

SEQ ID NO: 1384688 - RNA, 19 nt, Artificial Sequence
  Description of Artificial Sequence: Synthetic oligonucleotide
gcugacguagaacccuucc

SEQ ID NO: 1384689 - RNA, 19 nt, Artificial Sequence
  Description of Artificial Sequence: Synthetic oligonucleotide
accggacccaccaauaaau

SEQ ID NO: 1384690 - RNA, 19 nt, Artificial Sequence
  Description of Artificial Sequence: Synthetic oligonucleotide
cauaauggacuggcugcag

SEQ ID NO: 1384691 - RNA, 19 nt, Artificial Sequence
  Description of Artificial Sequence: Synthetic oligonucleotide
ccaauguguacccgauugg

SEQ ID NO: 1384692 - RNA, 19 nt, Artificial Sequence
  Description of Artificial Sequence: Synthetic oligonucleotide
cccaccaauaaauuuccuc

SEQ ID NO: 1384693 - RNA, 19 nt, Artificial Sequence
  Description of Artificial Sequence: Synthetic oligonucleotide
gggaaaagcaucaacuugu

SEQ ID NO: 1384694 - RNA, 19 nt, Artificial Sequence
  Description of Artificial Sequence: Synthetic oligonucleotide
cugacguagaacccuucca

SEQ ID NO: 1384695 - RNA, 19 nt, Artificial Sequence
  Description of Artificial Sequence: Synthetic oligonucleotide
uccucacaccaguucuucu

SEQ ID NO: 1384696 - RNA, 19 nt, Artificial Sequence
  Description of Artificial Sequence: Synthetic oligonucleotide
cagguucacaaagagagua

SEQ ID NO: 1384697 - RNA, 19 nt, Artificial Sequence
  Description of Artificial Sequence: Synthetic oligonucleotide
gcaaguaucucuccaggaa

SEQ ID NO: 1384698 - RNA, 19 nt, Artificial Sequence
  Description of Artificial Sequence: Synthetic oligonucleotide
guagguuguguagcagccc

SEQ ID NO: 1384699 - RNA, 19 nt, Artificial Sequence
  Description of Artificial Sequence: Synthetic oligonucleotide
cuuccauacugggucauga

SEQ ID NO: 1384700 - RNA, 19 nt, Artificial Sequence
  Description of Artificial Sequence: Synthetic oligonucleotide
acucacuugaccggaccca

SEQ ID NO: 1384701 - RNA, 19 nt, Artificial Sequence
  Description of Artificial Sequence: Synthetic oligonucleotide
uuagcaguccuggcacaga

SEQ ID NO: 1384702 - RNA, 19 nt, Artificial Sequence
  Description of Artificial Sequence: Synthetic oligonucleotide
ugcugguaaugggucgugc

SEQ ID NO: 1384703 - RNA, 19 nt, Artificial Sequence
  Description of Artificial Sequence: Synthetic oligonucleotide
acuuaaugacugaacccaa

SEQ ID NO: 1384704 - RNA, 19 nt, Artificial Sequence
  Description of Artificial Sequence: Synthetic oligonucleotide
gacuauagugaaucuucau

SEQ ID NO: 1384705 - RNA, 19 nt, Artificial Sequence
  Description of Artificial Sequence: Synthetic oligonucleotide
accaagagcuguugcugaa

SEQ ID NO: 1384706 - RNA, 19 nt, Artificial Sequence
  Description of Artificial Sequence: Synthetic oligonucleotide
uguacccgauuggagcuuc

SEQ ID NO: 1384707 - RNA, 19 nt, Artificial Sequence
  Description of Artificial Sequence: Synthetic oligonucleotide
gcaagagcaaaggauaucu

SEQ ID NO: 1384708 - RNA, 19 nt, Artificial Sequence
  Description of Artificial Sequence: Synthetic oligonucleotide
caugcccagaacaggugga

SEQ ID NO: 1384709 - RNA, 19 nt, Artificial Sequence
  Description of Artificial Sequence: Synthetic oligonucleotide
auuggagcuuccucuccuu

SEQ ID NO: 1384710 - RNA, 19 nt, Artificial Sequence
  Description of Artificial Sequence: Synthetic oligonucleotide
gggacauccguagacucug

SEQ ID NO: 1384711 - RNA, 19 nt, Artificial Sequence
  Description of Artificial Sequence: Synthetic oligonucleotide
auagcggcauaagugccau

SEQ ID NO: 1384712 - RNA, 19 nt, Artificial Sequence
  Description of Artificial Sequence: Synthetic oligonucleotide
agcaucggcaggggaggac

SEQ ID NO: 1384713 - RNA, 19 nt, Artificial Sequence
  Description of Artificial Sequence: Synthetic oligonucleotide
gaaauacaucuugggaggu

SEQ ID NO: 1384714 - RNA, 19 nt, Artificial Sequence
  Description of Artificial Sequence: Synthetic oligonucleotide
gguugugccgccacacugc

SEQ ID NO: 1384715 - RNA, 19 nt, Artificial Sequence
  Description of Artificial Sequence: Synthetic oligonucleotide
auacugggucaugaugccu

SEQ ID NO: 1384716 - RNA, 19 nt, Artificial Sequence
  Description of Artificial Sequence: Synthetic oligonucleotide
acacgagugaucagcuggu

SEQ ID NO: 1384717 - RNA, 19 nt, Artificial Sequence
  Description of Artificial Sequence: Synthetic oligonucleotide
ggccaggaaaccaagagcu

SEQ ID NO: 1384718 - RNA, 19 nt, Artificial Sequence
  Description of Artificial Sequence: Synthetic oligonucleotide
cuggcuugguaucauccaa

SEQ ID NO: 1384719 - RNA, 19 nt, Artificial Sequence
  Description of Artificial Sequence: Synthetic oligonucleotide
guaagacguaucaguuuuc

SEQ ID NO: 1384720 - RNA, 19 nt, Artificial Sequence
  Description of Artificial Sequence: Synthetic oligonucleotide
gccugcaaagaaaauccug

SEQ ID NO: 1384721 - RNA, 19 nt, Artificial Sequence
  Description of Artificial Sequence: Synthetic oligonucleotide
uggucaauccaagcagcuu

SEQ ID NO: 1384722 - RNA, 19 nt, Artificial Sequence
  Description of Artificial Sequence: Synthetic oligonucleotide
gauucugguugugccgcca

SEQ ID NO: 1384723 - RNA, 19 nt, Artificial Sequence
  Description of Artificial Sequence: Synthetic oligonucleotide
aggaaccacaaagcagaga

SEQ ID NO: 1384724 - RNA, 19 nt, Artificial Sequence
  Description of Artificial Sequence: Synthetic oligonucleotide
cuuugugagaaaggauaaa

SEQ ID NO: 1384725 - RNA, 19 nt, Artificial Sequence
  Description of Artificial Sequence: Synthetic oligonucleotide
aucuugggaggugggaaaa

SEQ ID NO: 1384726 - RNA, 19 nt, Artificial Sequence
  Description of Artificial Sequence: Synthetic oligonucleotide
agagaccucaugggucucu

SEQ ID NO: 1384727 - RNA, 19 nt, Artificial Sequence
  Description of Artificial Sequence: Synthetic oligonucleotide
ggacuauagugaaucuuca

SEQ ID NO: 1384728 - RNA, 19 nt, Artificial Sequence
  Description of Artificial Sequence: Synthetic oligonucleotide
cuccucacaccaguucuuc

SEQ ID NO: 1384729 - RNA, 19 nt, Artificial Sequence
  Description of Artificial Sequence: Synthetic oligonucleotide
uacccgauuggagcuuccu

SEQ ID NO: 1384730 - RNA, 19 nt, Artificial Sequence
  Description of Artificial Sequence: Synthetic oligonucleotide
cuccgugccugcaaagaaa

SEQ ID NO: 1384731 - RNA, 19 nt, Artificial Sequence
  Description of Artificial Sequence: Synthetic oligonucleotide
caguuaauacagaguaaau

SEQ ID NO: 1384732 - RNA, 19 nt, Artificial Sequence
  Description of Artificial Sequence: Synthetic oligonucleotide
cgugccugcaaagaaaauc

SEQ ID NO: 1384733 - RNA, 19 nt, Artificial Sequence
  Description of Artificial Sequence: Synthetic oligonucleotide
gcuuugugagaaaggauaa

SEQ ID NO: 1384734 - RNA, 19 nt, Artificial Sequence
  Description of Artificial Sequence: Synthetic oligonucleotide
aacgcacaagcaggccccu

SEQ ID NO: 1384735 - RNA, 19 nt, Artificial Sequence
  Description of Artificial Sequence: Synthetic oligonucleotide
gcaggauuguaaguacaac

SEQ ID NO: 1384736 - RNA, 19 nt, Artificial Sequence
  Description of Artificial Sequence: Synthetic oligonucleotide
gacauccguagacucuggu

SEQ ID NO: 1384737 - RNA, 19 nt, Artificial Sequence
  Description of Artificial Sequence: Synthetic oligonucleotide
gcauagagcucacaaaguu

SEQ ID NO: 1384738 - RNA, 19 nt, Artificial Sequence
  Description of Artificial Sequence: Synthetic oligonucleotide
acagguggaauggcacuaa

SEQ ID NO: 1384739 - RNA, 19 nt, Artificial Sequence
  Description of Artificial Sequence: Synthetic oligonucleotide
cccuccauugguuguugag

SEQ ID NO: 1384740 - RNA, 19 nt, Artificial Sequence
  Description of Artificial Sequence: Synthetic oligonucleotide
gaacccuuccauacugggu

SEQ ID NO: 1384741 - RNA, 19 nt, Artificial Sequence
  Description of Artificial Sequence: Synthetic oligonucleotide
gcuccuuauaauaaacuau

SEQ ID NO: 1384742 - RNA, 19 nt, Artificial Sequence
  Description of Artificial Sequence: Synthetic oligonucleotide
gcagagaccucaugggucu

SEQ ID NO: 1384743 - RNA, 19 nt, Artificial Sequence
  Description of Artificial Sequence: Synthetic oligonucleotide
ggauaucuacugaguagca

SEQ ID NO: 1384744 - RNA, 19 nt, Artificial Sequence
  Description of Artificial Sequence: Synthetic oligonucleotide
auggcacuaaucacauauu

SEQ ID NO: 1384745 - RNA, 19 nt, Artificial Sequence
  Description of Artificial Sequence: Synthetic oligonucleotide
gucaauccaagcagcuuua

SEQ ID NO: 1384746 - RNA, 19 nt, Artificial Sequence
  Description of Artificial Sequence: Synthetic oligonucleotide
aucuacugaguagcacaau

SEQ ID NO: 1384747 - RNA, 19 nt, Artificial Sequence
  Description of Artificial Sequence: Synthetic oligonucleotide
cauccaauguguacccgau

SEQ ID NO: 1384748 - RNA, 19 nt, Artificial Sequence
  Description of Artificial Sequence: Synthetic oligonucleotide
ggucgugcagggacauccg

SEQ ID NO: 1384749 - RNA, 19 nt, Artificial Sequence
  Description of Artificial Sequence: Synthetic oligonucleotide
agagaguagcaagcugcuu

SEQ ID NO: 1384750 - RNA, 19 nt, Artificial Sequence
  Description of Artificial Sequence: Synthetic oligonucleotide
cuugaccggacccaccaau

SEQ ID NO: 1384751 - RNA, 19 nt, Artificial Sequence
  Description of Artificial Sequence: Synthetic oligonucleotide
gccuugugugauuaaauuu

SEQ ID NO: 1384752 - RNA, 19 nt, Artificial Sequence
  Description of Artificial Sequence: Synthetic oligonucleotide
cugcaaggggugcuuucca

SEQ ID NO: 1384753 - RNA, 19 nt, Artificial Sequence
  Description of Artificial Sequence: Synthetic oligonucleotide
guugugccgccacacugcu

SEQ ID NO: 1384754 - RNA, 19 nt, Artificial Sequence
  Description of Artificial Sequence: Synthetic oligonucleotide
gaggugggaaaagcaucaa

SEQ ID NO: 1384755 - RNA, 19 nt, Artificial Sequence
  Description of Artificial Sequence: Synthetic oligonucleotide
ccaguuaugcaaggcagga

SEQ ID NO: 1384756 - RNA, 19 nt, Artificial Sequence
  Description of Artificial Sequence: Synthetic oligonucleotide
ugccgccacacugcuuuac

SEQ ID NO: 1384757 - RNA, 19 nt, Artificial Sequence
  Description of Artificial Sequence: Synthetic oligonucleotide
uagcaucggcaggggagga

SEQ ID NO: 1384758 - RNA, 19 nt, Artificial Sequence
  Description of Artificial Sequence: Synthetic oligonucleotide
gcacacgagugaucagcug

SEQ ID NO: 1384759 - RNA, 19 nt, Artificial Sequence
  Description of Artificial Sequence: Synthetic oligonucleotide
ccagaacagguggaauggc

SEQ ID NO: 1384760 - RNA, 19 nt, Artificial Sequence
  Description of Artificial Sequence: Synthetic oligonucleotide
uacugggccuugugugauu

SEQ ID NO: 1384761 - RNA, 19 nt, Artificial Sequence
  Description of Artificial Sequence: Synthetic oligonucleotide
cagaagggcuccuuauaau

SEQ ID NO: 1384762 - RNA, 19 nt, Artificial Sequence
  Description of Artificial Sequence: Synthetic oligonucleotide
ggacauccguagacucugg

SEQ ID NO: 1384763 - RNA, 19 nt, Artificial Sequence
  Description of Artificial Sequence: Synthetic oligonucleotide
guggucaauccaagcagcu

SEQ ID NO: 1384764 - RNA, 19 nt, Artificial Sequence
  Description of Artificial Sequence: Synthetic oligonucleotide
ggccuugugugauuaaauu

SEQ ID NO: 1384765 - RNA, 19 nt, Artificial Sequence
  Description of Artificial Sequence: Synthetic oligonucleotide
cauccacauaugaggggcu

SEQ ID NO: 1384766 - RNA, 19 nt, Artificial Sequence
  Description of Artificial Sequence: Synthetic oligonucleotide
gcggcauaagugccaucug

SEQ ID NO: 1384767 - RNA, 19 nt, Artificial Sequence
  Description of Artificial Sequence: Synthetic oligonucleotide
gggcuuacugggccuugug

SEQ ID NO: 1384768 - RNA, 19 nt, Artificial Sequence
  Description of Artificial Sequence: Synthetic oligonucleotide
cccgauuggagcuuccucu

SEQ ID NO: 1384769 - RNA, 19 nt, Artificial Sequence
  Description of Artificial Sequence: Synthetic oligonucleotide
guacccgauuggagcuucc

SEQ ID NO: 1384770 - RNA, 19 nt, Artificial Sequence
  Description of Artificial Sequence: Synthetic oligonucleotide
augggucgugcagggacau

SEQ ID NO: 1384771 - RNA, 19 nt, Artificial Sequence
  Description of Artificial Sequence: Synthetic oligonucleotide
uagcggcauaagugccauc

SEQ ID NO: 1384772 - RNA, 19 nt, Artificial Sequence
  Description of Artificial Sequence: Synthetic oligonucleotide
aggggcuuacugggccuug

SEQ ID NO: 1384773 - RNA, 19 nt, Artificial Sequence
  Description of Artificial Sequence: Synthetic oligonucleotide
gccgccacacugcuuuaca

SEQ ID NO: 1384774 - RNA, 19 nt, Artificial Sequence
  Description of Artificial Sequence: Synthetic oligonucleotide
ucccuccauguagccacuc

SEQ ID NO: 1384775 - RNA, 19 nt, Artificial Sequence
  Description of Artificial Sequence: Synthetic oligonucleotide
cauugguuguugagaugau

SEQ ID NO: 1384776 - RNA, 19 nt, Artificial Sequence
  Description of Artificial Sequence: Synthetic oligonucleotide
ggaugagcuccagauggua

SEQ ID NO: 1384777 - RNA, 19 nt, Artificial Sequence
  Description of Artificial Sequence: Synthetic oligonucleotide
caucggcaggggaggacua

SEQ ID NO: 1384778 - RNA, 19 nt, Artificial Sequence
  Description of Artificial Sequence: Synthetic oligonucleotide
cagagaccucaugggucuc

SEQ ID NO: 1384779 - RNA, 19 nt, Artificial Sequence
  Description of Artificial Sequence: Synthetic oligonucleotide
cugguugugccgccacacu

SEQ ID NO: 1384780 - RNA, 19 nt, Artificial Sequence
  Description of Artificial Sequence: Synthetic oligonucleotide
ugggucgugcagggacauc

SEQ ID NO: 1384781 - RNA, 19 nt, Artificial Sequence
  Description of Artificial Sequence: Synthetic oligonucleotide
guacaacugcaaagaacuu

SEQ ID NO: 1384782 - RNA, 19 nt, Artificial Sequence
  Description of Artificial Sequence: Synthetic oligonucleotide
ggugcuuuccauggagcau

SEQ ID NO: 1384783 - RNA, 19 nt, Artificial Sequence
  Description of Artificial Sequence: Synthetic oligonucleotide
ccucaugggucucugcagu

SEQ ID NO: 1384784 - RNA, 19 nt, Artificial Sequence
  Description of Artificial Sequence: Synthetic oligonucleotide
cugggccuugugugauuaa

SEQ ID NO: 1384785 - RNA, 19 nt, Artificial Sequence
  Description of Artificial Sequence: Synthetic oligonucleotide
gcaucggcaggggaggacu

SEQ ID NO: 1384786 - RNA, 19 nt, Artificial Sequence
  Description of Artificial Sequence: Synthetic oligonucleotide
cccggaguacugcuccuca

SEQ ID NO: 1384787 - RNA, 19 nt, Artificial Sequence
  Description of Artificial Sequence: Synthetic oligonucleotide
ggcugacguagaacccuuc

SEQ ID NO: 1384788 - RNA, 19 nt, Artificial Sequence
  Description of Artificial Sequence: Synthetic oligonucleotide
acgcacaagcaggccccuu

SEQ ID NO: 1384789 - RNA, 19 nt, Artificial Sequence
  Description of Artificial Sequence: Synthetic oligonucleotide
cguaucaguuuucuagcuu

SEQ ID NO: 1384790 - RNA, 19 nt, Artificial Sequence
  Description of Artificial Sequence: Synthetic oligonucleotide
gcacaagcaggccccuuuu

SEQ ID NO: 1384791 - RNA, 19 nt, Artificial Sequence
  Description of Artificial Sequence: Synthetic oligonucleotide
caccucuguugcaguuggu

SEQ ID NO: 1384792 - RNA, 19 nt, Artificial Sequence
  Description of Artificial Sequence: Synthetic oligonucleotide
guguacccgauuggagcuu

SEQ ID NO: 1384793 - RNA, 19 nt, Artificial Sequence
  Description of Artificial Sequence: Synthetic oligonucleotide
ccccggaguacugcuccuc

SEQ ID NO: 1384794 - RNA, 19 nt, Artificial Sequence
  Description of Artificial Sequence: Synthetic oligonucleotide
ggggcuuacugggccuugu

SEQ ID NO: 1384795 - RNA, 19 nt, Artificial Sequence
  Description of Artificial Sequence: Synthetic oligonucleotide
ccgccacacugcuuuacau

SEQ ID NO: 1384796 - RNA, 19 nt, Artificial Sequence
  Description of Artificial Sequence: Synthetic oligonucleotide
ccgugccugcaaagaaaau

SEQ ID NO: 1384797 - RNA, 19 nt, Artificial Sequence
  Description of Artificial Sequence: Synthetic oligonucleotide
aaagcaguaauuuaccauc

SEQ ID NO: 1384798 - RNA, 19 nt, Artificial Sequence
  Description of Artificial Sequence: Synthetic oligonucleotide
ucuauuaauguuauggaug

SEQ ID NO: 1384799 - RNA, 19 nt, Artificial Sequence
  Description of Artificial Sequence: Synthetic oligonucleotide
uuuggauacaucuugagac

SEQ ID NO: 1384800 - RNA, 19 nt, Artificial Sequence
  Description of Artificial Sequence: Synthetic oligonucleotide
uugauugaaaccaaagcag

SEQ ID NO: 1384801 - RNA, 19 nt, Artificial Sequence
  Description of Artificial Sequence: Synthetic oligonucleotide
auugauugaaaccaaagca

SEQ ID NO: 1384802 - RNA, 19 nt, Artificial Sequence
  Description of Artificial Sequence: Synthetic oligonucleotide
cuauuaauguuauggaugg

SEQ ID NO: 1384803 - RNA, 19 nt, Artificial Sequence
  Description of Artificial Sequence: Synthetic oligonucleotide
uuaaccauaguuguggagg

SEQ ID NO: 1384804 - RNA, 19 nt, Artificial Sequence
  Description of Artificial Sequence: Synthetic oligonucleotide
uuauggauggccaacuggg

SEQ ID NO: 1384805 - RNA, 19 nt, Artificial Sequence
  Description of Artificial Sequence: Synthetic oligonucleotide
augaguguaauguuauugc

SEQ ID NO: 1384806 - RNA, 19 nt, Artificial Sequence
  Description of Artificial Sequence: Synthetic oligonucleotide
aguguaauguuauugccac

SEQ ID NO: 1384807 - RNA, 19 nt, Artificial Sequence
  Description of Artificial Sequence: Synthetic oligonucleotide
uccuauaacaacuuuguug

SEQ ID NO: 1384808 - RNA, 19 nt, Artificial Sequence
  Description of Artificial Sequence: Synthetic oligonucleotide
aguaauggcauccagcaag

SEQ ID NO: 1384809 - RNA, 19 nt, Artificial Sequence
  Description of Artificial Sequence: Synthetic oligonucleotide
agcauacucaaucacggcc

SEQ ID NO: 1384810 - RNA, 19 nt, Artificial Sequence
  Description of Artificial Sequence: Synthetic oligonucleotide
uuauugauugaaaccaaag

SEQ ID NO: 1384811 - RNA, 19 nt, Artificial Sequence
  Description of Artificial Sequence: Synthetic oligonucleotide
aagcaaaaguagccgagcc

SEQ ID NO: 1384812 - RNA, 19 nt, Artificial Sequence
  Description of Artificial Sequence: Synthetic oligonucleotide
ugagacacaggcauuaacc

SEQ ID NO: 1384813 - RNA, 19 nt, Artificial Sequence
  Description of Artificial Sequence: Synthetic oligonucleotide
aaucuggcugcuuagccac

SEQ ID NO: 1384814 - RNA, 19 nt, Artificial Sequence
  Description of Artificial Sequence: Synthetic oligonucleotide
caaacugggaucuucacgc

SEQ ID NO: 1384815 - RNA, 19 nt, Artificial Sequence
  Description of Artificial Sequence: Synthetic oligonucleotide
aguaauuuaccauccaaug

SEQ ID NO: 1384816 - RNA, 19 nt, Artificial Sequence
  Description of Artificial Sequence: Synthetic oligonucleotide
aagcagacgacucauucuc

SEQ ID NO: 1384817 - RNA, 19 nt, Artificial Sequence
  Description of Artificial Sequence: Synthetic oligonucleotide
aguugaauaucccaucauc

SEQ ID NO: 1384818 - RNA, 19 nt, Artificial Sequence
  Description of Artificial Sequence: Synthetic oligonucleotide
aguaaaggucccuggaggc

SEQ ID NO: 1384819 - RNA, 19 nt, Artificial Sequence
  Description of Artificial Sequence: Synthetic oligonucleotide
ucggucaugaauaaucuca

SEQ ID NO: 1384820 - RNA, 19 nt, Artificial Sequence
  Description of Artificial Sequence: Synthetic oligonucleotide
ucaaacugggaucuucacg

SEQ ID NO: 1384821 - RNA, 19 nt, Artificial Sequence
  Description of Artificial Sequence: Synthetic oligonucleotide
ucugcucucacaaaaugcc

SEQ ID NO: 1384822 - RNA, 19 nt, Artificial Sequence
  Description of Artificial Sequence: Synthetic oligonucleotide
aaagcaaaaguagccgagc

SEQ ID NO: 1384823 - RNA, 19 nt, Artificial Sequence
  Description of Artificial Sequence: Synthetic oligonucleotide
cuagauaggugucuaagcc

SEQ ID NO: 1384824 - RNA, 19 nt, Artificial Sequence
  Description of Artificial Sequence: Synthetic oligonucleotide
aggaacaaauccuauaaca

SEQ ID NO: 1384825 - RNA, 19 nt, Artificial Sequence
  Description of Artificial Sequence: Synthetic oligonucleotide
uuaaguccaacugucaaag

SEQ ID NO: 1384826 - RNA, 19 nt, Artificial Sequence
  Description of Artificial Sequence: Synthetic oligonucleotide
aaaacagcguucuuacuga

SEQ ID NO: 1384827 - RNA, 19 nt, Artificial Sequence
  Description of Artificial Sequence: Synthetic oligonucleotide
uuaauguuauggauggcca

SEQ ID NO: 1384828 - RNA, 19 nt, Artificial Sequence
  Description of Artificial Sequence: Synthetic oligonucleotide
uaaagcaaaaguagccgag

SEQ ID NO: 1384829 - RNA, 19 nt, Artificial Sequence
  Description of Artificial Sequence: Synthetic oligonucleotide
aacaacuuuguuguccugg

SEQ ID NO: 1384830 - RNA, 19 nt, Artificial Sequence
  Description of Artificial Sequence: Synthetic oligonucleotide
uuuuggauacaucuugaga

SEQ ID NO: 1384831 - RNA, 19 nt, Artificial Sequence
  Description of Artificial Sequence: Synthetic oligonucleotide
cugcuaaaggaacaaaucc

SEQ ID NO: 1384832 - RNA, 19 nt, Artificial Sequence
  Description of Artificial Sequence: Synthetic oligonucleotide
uucuuugugccaaaucugc

SEQ ID NO: 1384833 - RNA, 19 nt, Artificial Sequence
  Description of Artificial Sequence: Synthetic oligonucleotide
uaggucuacacugauacag

SEQ ID NO: 1384834 - RNA, 19 nt, Artificial Sequence
  Description of Artificial Sequence: Synthetic oligonucleotide
ugauugaaaccaaagcagu

SEQ ID NO: 1384835 - RNA, 19 nt, Artificial Sequence
  Description of Artificial Sequence: Synthetic oligonucleotide
acaaaaugccgcuugucuc

SEQ ID NO: 1384836 - RNA, 19 nt, Artificial Sequence
  Description of Artificial Sequence: Synthetic oligonucleotide
aauccuauaacaacuuugu

SEQ ID NO: 1384837 - RNA, 19 nt, Artificial Sequence
  Description of Artificial Sequence: Synthetic oligonucleotide
aagguccuaaagcacauga

SEQ ID NO: 1384838 - RNA, 19 nt, Artificial Sequence
  Description of Artificial Sequence: Synthetic oligonucleotide
aaaucugccaggacagggc

SEQ ID NO: 1384839 - RNA, 19 nt, Artificial Sequence
  Description of Artificial Sequence: Synthetic oligonucleotide
aaguagccgagccugaugu

SEQ ID NO: 1384840 - RNA, 19 nt, Artificial Sequence
  Description of Artificial Sequence: Synthetic oligonucleotide
aggugucuaagccauacuc

SEQ ID NO: 1384841 - RNA, 19 nt, Artificial Sequence
  Description of Artificial Sequence: Synthetic oligonucleotide
ucugcuaaaggaacaaauc

SEQ ID NO: 1384842 - RNA, 19 nt, Artificial Sequence
  Description of Artificial Sequence: Synthetic oligonucleotide
gauguuaccagcagucagg

SEQ ID NO: 1384843 - RNA, 19 nt, Artificial Sequence
  Description of Artificial Sequence: Synthetic oligonucleotide
guuuaagaugguuucccgg

SEQ ID NO: 1384844 - RNA, 19 nt, Artificial Sequence
  Description of Artificial Sequence: Synthetic oligonucleotide
gauacagucagcauacuca

SEQ ID NO: 1384845 - RNA, 19 nt, Artificial Sequence
  Description of Artificial Sequence: Synthetic oligonucleotide
uguuauugccacaucuuga

SEQ ID NO: 1384846 - RNA, 19 nt, Artificial Sequence
  Description of Artificial Sequence: Synthetic oligonucleotide
ugaguguaauguuauugcc

SEQ ID NO: 1384847 - RNA, 19 nt, Artificial Sequence
  Description of Artificial Sequence: Synthetic oligonucleotide
aagcaguaauuuaccaucc

SEQ ID NO: 1384848 - RNA, 19 nt, Artificial Sequence
  Description of Artificial Sequence: Synthetic oligonucleotide
aguuuaagaugguuucccg

SEQ ID NO: 1384849 - RNA, 19 nt, Artificial Sequence
  Description of Artificial Sequence: Synthetic oligonucleotide
auaacaacuuuguuguccu

SEQ ID NO: 1384850 - RNA, 19 nt, Artificial Sequence
  Description of Artificial Sequence: Synthetic oligonucleotide
aggaucaagccucacuuuc

SEQ ID NO: 1384851 - RNA, 19 nt, Artificial Sequence
  Description of Artificial Sequence: Synthetic oligonucleotide
uaauccauguucccaaggu

SEQ ID NO: 1384852 - RNA, 19 nt, Artificial Sequence
  Description of Artificial Sequence: Synthetic oligonucleotide
uuucaaggcacucccacac

SEQ ID NO: 1384853 - RNA, 19 nt, Artificial Sequence
  Description of Artificial Sequence: Synthetic oligonucleotide
uuguuuaaguccaacuguc

SEQ ID NO: 1384854 - RNA, 19 nt, Artificial Sequence
  Description of Artificial Sequence: Synthetic oligonucleotide
uacucaaucacggccaugc

SEQ ID NO: 1384855 - RNA, 19 nt, Artificial Sequence
  Description of Artificial Sequence: Synthetic oligonucleotide
aguaaaugcgcaggaaaac

SEQ ID NO: 1384856 - RNA, 19 nt, Artificial Sequence
  Description of Artificial Sequence: Synthetic oligonucleotide
gaaaacaggcucuggaauc

SEQ ID NO: 1384857 - RNA, 19 nt, Artificial Sequence
  Description of Artificial Sequence: Synthetic oligonucleotide
ucucacaaaaugccgcuug

SEQ ID NO: 1384858 - RNA, 19 nt, Artificial Sequence
  Description of Artificial Sequence: Synthetic oligonucleotide
acugucaaagcgauguuac

SEQ ID NO: 1384859 - RNA, 19 nt, Artificial Sequence
  Description of Artificial Sequence: Synthetic oligonucleotide
ucaaggcacucccacacag

SEQ ID NO: 1384860 - RNA, 19 nt, Artificial Sequence
  Description of Artificial Sequence: Synthetic oligonucleotide
uuucaauggccucacggga

SEQ ID NO: 1384861 - RNA, 19 nt, Artificial Sequence
  Description of Artificial Sequence: Synthetic oligonucleotide
ugucaaagcgauguuacca

SEQ ID NO: 1384862 - RNA, 19 nt, Artificial Sequence
  Description of Artificial Sequence: Synthetic oligonucleotide
gguucuauggugcagaaga

SEQ ID NO: 1384863 - RNA, 19 nt, Artificial Sequence
  Description of Artificial Sequence: Synthetic oligonucleotide
ugcagcacuuuuaaaugcc

SEQ ID NO: 1384864 - RNA, 19 nt, Artificial Sequence
  Description of Artificial Sequence: Synthetic oligonucleotide
auugccacaucuugaacug

SEQ ID NO: 1384865 - RNA, 19 nt, Artificial Sequence
  Description of Artificial Sequence: Synthetic oligonucleotide
auggcaaguacauaguaau

SEQ ID NO: 1384866 - RNA, 19 nt, Artificial Sequence
  Description of Artificial Sequence: Synthetic oligonucleotide
cucaagacucaucaguggc

SEQ ID NO: 1384867 - RNA, 19 nt, Artificial Sequence
  Description of Artificial Sequence: Synthetic oligonucleotide
caggcauuaauccauguuc

SEQ ID NO: 1384868 - RNA, 19 nt, Artificial Sequence
  Description of Artificial Sequence: Synthetic oligonucleotide
ucaggaucaagccucacuu

SEQ ID NO: 1384869 - RNA, 19 nt, Artificial Sequence
  Description of Artificial Sequence: Synthetic oligonucleotide
aggcauuaauccauguucc

SEQ ID NO: 1384870 - RNA, 19 nt, Artificial Sequence
  Description of Artificial Sequence: Synthetic oligonucleotide
aaguacauaguaauggcau

SEQ ID NO: 1384871 - RNA, 19 nt, Artificial Sequence
  Description of Artificial Sequence: Synthetic oligonucleotide
acgaacugaguuuaagaug

SEQ ID NO: 1384872 - RNA, 19 nt, Artificial Sequence
  Description of Artificial Sequence: Synthetic oligonucleotide
uagauaggugucuaagcca

SEQ ID NO: 1384873 - RNA, 19 nt, Artificial Sequence
  Description of Artificial Sequence: Synthetic oligonucleotide
ggcaaguacauaguaaugg

SEQ ID NO: 1384874 - RNA, 19 nt, Artificial Sequence
  Description of Artificial Sequence: Synthetic oligonucleotide
accauaguuguggagguac

SEQ ID NO: 1384875 - RNA, 19 nt, Artificial Sequence
  Description of Artificial Sequence: Synthetic oligonucleotide
uguuuaaguccaacuguca

SEQ ID NO: 1384876 - RNA, 19 nt, Artificial Sequence
  Description of Artificial Sequence: Synthetic oligonucleotide
ugaugcuucuacuggccgg

SEQ ID NO: 1384877 - RNA, 19 nt, Artificial Sequence
  Description of Artificial Sequence: Synthetic oligonucleotide
agacgacucauucucuccg

SEQ ID NO: 1384878 - RNA, 19 nt, Artificial Sequence
  Description of Artificial Sequence: Synthetic oligonucleotide
agcguucuuacugagaaug

SEQ ID NO: 1384879 - RNA, 19 nt, Artificial Sequence
  Description of Artificial Sequence: Synthetic oligonucleotide
ugccagugcacacaaguca

SEQ ID NO: 1384880 - RNA, 19 nt, Artificial Sequence
  Description of Artificial Sequence: Synthetic oligonucleotide
gacuuggaagaaacaaugg

SEQ ID NO: 1384881 - RNA, 19 nt, Artificial Sequence
  Description of Artificial Sequence: Synthetic oligonucleotide
guaaaugcgcaggaaaacc

SEQ ID NO: 1384882 - RNA, 19 nt, Artificial Sequence
  Description of Artificial Sequence: Synthetic oligonucleotide
uccuaaagcacaugagcca

SEQ ID NO: 1384883 - RNA, 19 nt, Artificial Sequence
  Description of Artificial Sequence: Synthetic oligonucleotide
acagcguucuuacugagaa

SEQ ID NO: 1384884 - RNA, 19 nt, Artificial Sequence
  Description of Artificial Sequence: Synthetic oligonucleotide
aggcauuaaccauaguugu

SEQ ID NO: 1384885 - RNA, 19 nt, Artificial Sequence
  Description of Artificial Sequence: Synthetic oligonucleotide
aaaguagccgagccugaug

SEQ ID NO: 1384886 - RNA, 19 nt, Artificial Sequence
  Description of Artificial Sequence: Synthetic oligonucleotide
gugaccucaagacucauca

SEQ ID NO: 1384887 - RNA, 19 nt, Artificial Sequence
  Description of Artificial Sequence: Synthetic oligonucleotide
guacauaguaauggcaucc

SEQ ID NO: 1384888 - RNA, 19 nt, Artificial Sequence
  Description of Artificial Sequence: Synthetic oligonucleotide
gaacguucccucuucuuug

SEQ ID NO: 1384889 - RNA, 19 nt, Artificial Sequence
  Description of Artificial Sequence: Synthetic oligonucleotide
gaagcacaguugaauaucc

SEQ ID NO: 1384890 - RNA, 19 nt, Artificial Sequence
  Description of Artificial Sequence: Synthetic oligonucleotide
ucacccuuauaccacugca

SEQ ID NO: 1384891 - RNA, 19 nt, Artificial Sequence
  Description of Artificial Sequence: Synthetic oligonucleotide
aaacagcguucuuacugag

SEQ ID NO: 1384892 - RNA, 19 nt, Artificial Sequence
  Description of Artificial Sequence: Synthetic oligonucleotide
ucucaauauguaacucccc

SEQ ID NO: 1384893 - RNA, 19 nt, Artificial Sequence
  Description of Artificial Sequence: Synthetic oligonucleotide
guccuaaagcacaugagcc

SEQ ID NO: 1384894 - RNA, 19 nt, Artificial Sequence
  Description of Artificial Sequence: Synthetic oligonucleotide
acaucuugaacuggggauc

SEQ ID NO: 1384895 - RNA, 19 nt, Artificial Sequence
  Description of Artificial Sequence: Synthetic oligonucleotide
gguccuaaagcacaugagc

SEQ ID NO: 1384896 - RNA, 19 nt, Artificial Sequence
  Description of Artificial Sequence: Synthetic oligonucleotide
ggugaaucaucaaugagug

SEQ ID NO: 1384897 - RNA, 19 nt, Artificial Sequence
  Description of Artificial Sequence: Synthetic oligonucleotide
gaugcuucuacuggccggg

SEQ ID NO: 1384898 - RNA, 19 nt, Artificial Sequence
  Description of Artificial Sequence: Synthetic oligonucleotide
ugaugucagcguucgaagc

SEQ ID NO: 1384899 - RNA, 19 nt, Artificial Sequence
  Description of Artificial Sequence: Synthetic oligonucleotide
ugaguagaguacuuugguc

SEQ ID NO: 1384900 - RNA, 19 nt, Artificial Sequence
  Description of Artificial Sequence: Synthetic oligonucleotide
gaugucagcguucgaagca

SEQ ID NO: 1384901 - RNA, 19 nt, Artificial Sequence
  Description of Artificial Sequence: Synthetic oligonucleotide
agcacaugagccaaaccac

SEQ ID NO: 1384902 - RNA, 19 nt, Artificial Sequence
  Description of Artificial Sequence: Synthetic oligonucleotide
uguuauggauggccaacug

SEQ ID NO: 1384903 - RNA, 19 nt, Artificial Sequence
  Description of Artificial Sequence: Synthetic oligonucleotide
augaugcuucuacuggccg

SEQ ID NO: 1384904 - RNA, 19 nt, Artificial Sequence
  Description of Artificial Sequence: Synthetic oligonucleotide
aagaugguuucccgguaug

SEQ ID NO: 1384905 - RNA, 19 nt, Artificial Sequence
  Description of Artificial Sequence: Synthetic oligonucleotide
uucgaagcacaguugaaua

SEQ ID NO: 1384906 - RNA, 19 nt, Artificial Sequence
  Description of Artificial Sequence: Synthetic oligonucleotide
cagacucucuguuucacug

SEQ ID NO: 1384907 - RNA, 19 nt, Artificial Sequence
  Description of Artificial Sequence: Synthetic oligonucleotide
guuauugccacaucuugaa

SEQ ID NO: 1384908 - RNA, 19 nt, Artificial Sequence
  Description of Artificial Sequence: Synthetic oligonucleotide
agaugguuucccgguaugc

SEQ ID NO: 1384909 - RNA, 19 nt, Artificial Sequence
  Description of Artificial Sequence: Synthetic oligonucleotide
agggugaaucaucaaugag

SEQ ID NO: 1384910 - RNA, 19 nt, Artificial Sequence
  Description of Artificial Sequence: Synthetic oligonucleotide
ugagaaugaagcagcccgu

SEQ ID NO: 1384911 - RNA, 19 nt, Artificial Sequence
  Description of Artificial Sequence: Synthetic oligonucleotide
caagucacccuuauaccac

SEQ ID NO: 1384912 - RNA, 19 nt, Artificial Sequence
  Description of Artificial Sequence: Synthetic oligonucleotide
auacagucagcauacucaa

SEQ ID NO: 1384913 - RNA, 19 nt, Artificial Sequence
  Description of Artificial Sequence: Synthetic oligonucleotide
gaugaugcuucuacuggcc

SEQ ID NO: 1384914 - RNA, 19 nt, Artificial Sequence
  Description of Artificial Sequence: Synthetic oligonucleotide
ugugcccgaguaaaugcgc

SEQ ID NO: 1384915 - RNA, 19 nt, Artificial Sequence
  Description of Artificial Sequence: Synthetic oligonucleotide
gcaaguacauaguaauggc

SEQ ID NO: 1384916 - RNA, 19 nt, Artificial Sequence
  Description of Artificial Sequence: Synthetic oligonucleotide
uggggcgucagugugcccg

SEQ ID NO: 1384917 - RNA, 19 nt, Artificial Sequence
  Description of Artificial Sequence: Synthetic oligonucleotide
ugauggcaaguacauagua

SEQ ID NO: 1384918 - RNA, 19 nt, Artificial Sequence
  Description of Artificial Sequence: Synthetic oligonucleotide
aggaaaaccaggggucccc

SEQ ID NO: 1384919 - RNA, 19 nt, Artificial Sequence
  Description of Artificial Sequence: Synthetic oligonucleotide
gaugguuucccgguaugcc

SEQ ID NO: 1384920 - RNA, 19 nt, Artificial Sequence
  Description of Artificial Sequence: Synthetic oligonucleotide
gagccaaaccacuucucug

SEQ ID NO: 1384921 - RNA, 19 nt, Artificial Sequence
  Description of Artificial Sequence: Synthetic oligonucleotide
uaagaugguuucccgguau

SEQ ID NO: 1384922 - RNA, 19 nt, Artificial Sequence
  Description of Artificial Sequence: Synthetic oligonucleotide
aagcgauguuaccagcagu

SEQ ID NO: 1384923 - RNA, 19 nt, Artificial Sequence
  Description of Artificial Sequence: Synthetic oligonucleotide
guuuaaguccaacugucaa

SEQ ID NO: 1384924 - RNA, 19 nt, Artificial Sequence
  Description of Artificial Sequence: Synthetic oligonucleotide
uuauugccacaucuugaac

SEQ ID NO: 1384925 - RNA, 19 nt, Artificial Sequence
  Description of Artificial Sequence: Synthetic oligonucleotide
agcaaaaguagccgagccu

SEQ ID NO: 1384926 - RNA, 19 nt, Artificial Sequence
  Description of Artificial Sequence: Synthetic oligonucleotide
aagggcugaacacccuugu

SEQ ID NO: 1384927 - RNA, 19 nt, Artificial Sequence
  Description of Artificial Sequence: Synthetic oligonucleotide
cuuugugccaaaucugcca

SEQ ID NO: 1384928 - RNA, 19 nt, Artificial Sequence
  Description of Artificial Sequence: Synthetic oligonucleotide
uagaguccggucuagggua

SEQ ID NO: 1384929 - RNA, 19 nt, Artificial Sequence
  Description of Artificial Sequence: Synthetic oligonucleotide
ugccgcuugucuccuagag

SEQ ID NO: 1384930 - RNA, 19 nt, Artificial Sequence
  Description of Artificial Sequence: Synthetic oligonucleotide
uuuguuguccuggcgaguc

SEQ ID NO: 1384931 - RNA, 19 nt, Artificial Sequence
  Description of Artificial Sequence: Synthetic oligonucleotide
gaaucucuaccccagccaa

SEQ ID NO: 1384932 - RNA, 19 nt, Artificial Sequence
  Description of Artificial Sequence: Synthetic oligonucleotide
uguggcacgaacugaguuu

SEQ ID NO: 1384933 - RNA, 19 nt, Artificial Sequence
  Description of Artificial Sequence: Synthetic oligonucleotide
cuugaggacucauggcuug

SEQ ID NO: 1384934 - RNA, 19 nt, Artificial Sequence
  Description of Artificial Sequence: Synthetic oligonucleotide
aacguucccucuucuuugu

SEQ ID NO: 1384935 - RNA, 19 nt, Artificial Sequence
  Description of Artificial Sequence: Synthetic oligonucleotide
acucgcguucuucagguga

SEQ ID NO: 1384936 - RNA, 19 nt, Artificial Sequence
  Description of Artificial Sequence: Synthetic oligonucleotide
uuaagaugguuucccggua

SEQ ID NO: 1384937 - RNA, 19 nt, Artificial Sequence
  Description of Artificial Sequence: Synthetic oligonucleotide
ugcagaggcccuagauagg

SEQ ID NO: 1384938 - RNA, 19 nt, Artificial Sequence
  Description of Artificial Sequence: Synthetic oligonucleotide
ucgaagcacaguugaauau

SEQ ID NO: 1384939 - RNA, 19 nt, Artificial Sequence
  Description of Artificial Sequence: Synthetic oligonucleotide
ccuauaacaacuuuguugu

SEQ ID NO: 1384940 - RNA, 19 nt, Artificial Sequence
  Description of Artificial Sequence: Synthetic oligonucleotide
ugucuaagccauacucccu

SEQ ID NO: 1384941 - RNA, 19 nt, Artificial Sequence
  Description of Artificial Sequence: Synthetic oligonucleotide
aaacugggaucuucacgcu

SEQ ID NO: 1384942 - RNA, 19 nt, Artificial Sequence
  Description of Artificial Sequence: Synthetic oligonucleotide
ugguuucccgguaugccac

SEQ ID NO: 1384943 - RNA, 19 nt, Artificial Sequence
  Description of Artificial Sequence: Synthetic oligonucleotide
augucagcguucgaagcac

SEQ ID NO: 1384944 - RNA, 19 nt, Artificial Sequence
  Description of Artificial Sequence: Synthetic oligonucleotide
cagacgacucauucucucc

SEQ ID NO: 1384945 - RNA, 19 nt, Artificial Sequence
  Description of Artificial Sequence: Synthetic oligonucleotide
aguuucuauuaauguuaug

SEQ ID NO: 1384946 - RNA, 19 nt, Artificial Sequence
  Description of Artificial Sequence: Synthetic oligonucleotide
gauggcaaguacauaguaa

SEQ ID NO: 1384947 - RNA, 19 nt, Artificial Sequence
  Description of Artificial Sequence: Synthetic oligonucleotide
aacugucaaagcgauguua

SEQ ID NO: 1384948 - RNA, 19 nt, Artificial Sequence
  Description of Artificial Sequence: Synthetic oligonucleotide
ccauacucccucuugauuc

SEQ ID NO: 1384949 - RNA, 19 nt, Artificial Sequence
  Description of Artificial Sequence: Synthetic oligonucleotide
acuuuggucuugaggacuc

SEQ ID NO: 1384950 - RNA, 19 nt, Artificial Sequence
  Description of Artificial Sequence: Synthetic oligonucleotide
aguccaacugucaaagcga

SEQ ID NO: 1384951 - RNA, 19 nt, Artificial Sequence
  Description of Artificial Sequence: Synthetic oligonucleotide
cugucaaagcgauguuacc

SEQ ID NO: 1384952 - RNA, 19 nt, Artificial Sequence
  Description of Artificial Sequence: Synthetic oligonucleotide
guugaauaucccaucaucu

SEQ ID NO: 1384953 - RNA, 19 nt, Artificial Sequence
  Description of Artificial Sequence: Synthetic oligonucleotide
uugauucggucaugaauaa

SEQ ID NO: 1384954 - RNA, 19 nt, Artificial Sequence
  Description of Artificial Sequence: Synthetic oligonucleotide
ugcucgacgggcugcagcu

SEQ ID NO: 1384955 - RNA, 19 nt, Artificial Sequence
  Description of Artificial Sequence: Synthetic oligonucleotide
ccuagauaggugucuaagc

SEQ ID NO: 1384956 - RNA, 19 nt, Artificial Sequence
  Description of Artificial Sequence: Synthetic oligonucleotide
uagccgagccugaugucag

SEQ ID NO: 1384957 - RNA, 19 nt, Artificial Sequence
  Description of Artificial Sequence: Synthetic oligonucleotide
aucaaugaguguaauguua

SEQ ID NO: 1384958 - RNA, 19 nt, Artificial Sequence
  Description of Artificial Sequence: Synthetic oligonucleotide
agauaggugucuaagccau

SEQ ID NO: 1384959 - RNA, 19 nt, Artificial Sequence
  Description of Artificial Sequence: Synthetic oligonucleotide
uucuauggugcagaagaaa

SEQ ID NO: 1384960 - RNA, 19 nt, Artificial Sequence
  Description of Artificial Sequence: Synthetic oligonucleotide
gcugagguaaucuccaguc

SEQ ID NO: 1384961 - RNA, 19 nt, Artificial Sequence
  Description of Artificial Sequence: Synthetic oligonucleotide
auucggucaugaauaaucu

SEQ ID NO: 1384962 - RNA, 19 nt, Artificial Sequence
  Description of Artificial Sequence: Synthetic oligonucleotide
ggaucuucacgcugaaggc

SEQ ID NO: 1384963 - RNA, 19 nt, Artificial Sequence
  Description of Artificial Sequence: Synthetic oligonucleotide
cucuaccccagccaacagc

SEQ ID NO: 1384964 - RNA, 19 nt, Artificial Sequence
  Description of Artificial Sequence: Synthetic oligonucleotide
cuggcgagucugaauuucc

SEQ ID NO: 1384965 - RNA, 19 nt, Artificial Sequence
  Description of Artificial Sequence: Synthetic oligonucleotide
caacuuuguuguccuggcg

SEQ ID NO: 1384966 - RNA, 19 nt, Artificial Sequence
  Description of Artificial Sequence: Synthetic oligonucleotide
gucuugaggacucauggcu

SEQ ID NO: 1384967 - RNA, 19 nt, Artificial Sequence
  Description of Artificial Sequence: Synthetic oligonucleotide
ucuaagccauacucccucu

SEQ ID NO: 1384968 - RNA, 19 nt, Artificial Sequence
  Description of Artificial Sequence: Synthetic oligonucleotide
ggagguaccagggugaauc

SEQ ID NO: 1384969 - RNA, 19 nt, Artificial Sequence
  Description of Artificial Sequence: Synthetic oligonucleotide
uucggucaugaauaaucuc

SEQ ID NO: 1384970 - RNA, 19 nt, Artificial Sequence
  Description of Artificial Sequence: Synthetic oligonucleotide
ucuccuagaguccggucua

SEQ ID NO: 1384971 - RNA, 19 nt, Artificial Sequence
  Description of Artificial Sequence: Synthetic oligonucleotide
aucacggccaugccagaug

SEQ ID NO: 1384972 - RNA, 19 nt, Artificial Sequence
  Description of Artificial Sequence: Synthetic oligonucleotide
ugaaggcguuccaaggcau

SEQ ID NO: 1384973 - RNA, 19 nt, Artificial Sequence
  Description of Artificial Sequence: Synthetic oligonucleotide
uccggucuaggguaucugu

SEQ ID NO: 1384974 - RNA, 19 nt, Artificial Sequence
  Description of Artificial Sequence: Synthetic oligonucleotide
aaaaugccgcuugucuccu

SEQ ID NO: 1384975 - RNA, 19 nt, Artificial Sequence
  Description of Artificial Sequence: Synthetic oligonucleotide
gauugaaaccaaagcagua

SEQ ID NO: 1384976 - RNA, 19 nt, Artificial Sequence
  Description of Artificial Sequence: Synthetic oligonucleotide
uaguaauggcauccagcaa

SEQ ID NO: 1384977 - RNA, 19 nt, Artificial Sequence
  Description of Artificial Sequence: Synthetic oligonucleotide
acgggaggccugcaguagg

SEQ ID NO: 1384978 - RNA, 19 nt, Artificial Sequence
  Description of Artificial Sequence: Synthetic oligonucleotide
aaacccguacucgcguucu

SEQ ID NO: 1384979 - RNA, 19 nt, Artificial Sequence
  Description of Artificial Sequence: Synthetic oligonucleotide
aguagccgagccugauguc

SEQ ID NO: 1384980 - RNA, 19 nt, Artificial Sequence
  Description of Artificial Sequence: Synthetic oligonucleotide
uaggugucuaagccauacu

SEQ ID NO: 1384981 - RNA, 19 nt, Artificial Sequence
  Description of Artificial Sequence: Synthetic oligonucleotide
gggugaguagaguacuuug

SEQ ID NO: 1384982 - RNA, 19 nt, Artificial Sequence
  Description of Artificial Sequence: Synthetic oligonucleotide
agacucucuguuucacugu

SEQ ID NO: 1384983 - RNA, 19 nt, Artificial Sequence
  Description of Artificial Sequence: Synthetic oligonucleotide
ccagaugaugcuucuacug

SEQ ID NO: 1384984 - RNA, 19 nt, Artificial Sequence
  Description of Artificial Sequence: Synthetic oligonucleotide
ucuugaacuggggauccaa

SEQ ID NO: 1384985 - RNA, 19 nt, Artificial Sequence
  Description of Artificial Sequence: Synthetic oligonucleotide
gaaaaccagggguccccgc

SEQ ID NO: 1384986 - RNA, 19 nt, Artificial Sequence
  Description of Artificial Sequence: Synthetic oligonucleotide
ucuguggcacgaacugagu

SEQ ID NO: 1384987 - RNA, 19 nt, Artificial Sequence
  Description of Artificial Sequence: Synthetic oligonucleotide
cagggaagggauuucuaca

SEQ ID NO: 1384988 - RNA, 19 nt, Artificial Sequence
  Description of Artificial Sequence: Synthetic oligonucleotide
ucuacauguuggucagcaa

SEQ ID NO: 1384989 - RNA, 19 nt, Artificial Sequence
  Description of Artificial Sequence: Synthetic oligonucleotide
cagcccgugcuuuuccagg

SEQ ID NO: 1384990 - RNA, 19 nt, Artificial Sequence
  Description of Artificial Sequence: Synthetic oligonucleotide
uccugaacguucccucuuc

SEQ ID NO: 1384991 - RNA, 19 nt, Artificial Sequence
  Description of Artificial Sequence: Synthetic oligonucleotide
ggcauuaauccauguuccc

SEQ ID NO: 1384992 - RNA, 19 nt, Artificial Sequence
  Description of Artificial Sequence: Synthetic oligonucleotide
ccuagaguccggucuaggg

SEQ ID NO: 1384993 - RNA, 19 nt, Artificial Sequence
  Description of Artificial Sequence: Synthetic oligonucleotide
gaaacccguacucgcguuc

SEQ ID NO: 1384994 - RNA, 19 nt, Artificial Sequence
  Description of Artificial Sequence: Synthetic oligonucleotide
acgacucauucucuccgug

SEQ ID NO: 1384995 - RNA, 19 nt, Artificial Sequence
  Description of Artificial Sequence: Synthetic oligonucleotide
uugccacaucuugaacugg

SEQ ID NO: 1384996 - RNA, 19 nt, Artificial Sequence
  Description of Artificial Sequence: Synthetic oligonucleotide
ccgcuugucuccuagaguc

SEQ ID NO: 1384997 - RNA, 19 nt, Artificial Sequence
  Description of Artificial Sequence: Synthetic oligonucleotide
agaguacuuuggucuugag

SEQ ID NO: 1384998 - RNA, 19 nt, Artificial Sequence
  Description of Artificial Sequence: Synthetic oligonucleotide
acaaauccuauaacaacuu

SEQ ID NO: 1384999 - RNA, 19 nt, Artificial Sequence
  Description of Artificial Sequence: Synthetic oligonucleotide
ggcaugauccaaaucuggc

SEQ ID NO: 1385000 - RNA, 19 nt, Artificial Sequence
  Description of Artificial Sequence: Synthetic oligonucleotide
auaucccaucaucucugcu

SEQ ID NO: 1385001 - RNA, 19 nt, Artificial Sequence
  Description of Artificial Sequence: Synthetic oligonucleotide
ugauccaaaucuggcugcu

SEQ ID NO: 1385002 - RNA, 19 nt, Artificial Sequence
  Description of Artificial Sequence: Synthetic oligonucleotide
ggucuaggguaucuguggc

SEQ ID NO: 1385003 - RNA, 19 nt, Artificial Sequence
  Description of Artificial Sequence: Synthetic oligonucleotide
uccuagaguccggucuagg

SEQ ID NO: 1385004 - RNA, 19 nt, Artificial Sequence
  Description of Artificial Sequence: Synthetic oligonucleotide
ugcuucuacuggccgggcu

SEQ ID NO: 1385005 - RNA, 19 nt, Artificial Sequence
  Description of Artificial Sequence: Synthetic oligonucleotide
cugaaggcguuccaaggca

SEQ ID NO: 1385006 - RNA, 19 nt, Artificial Sequence
  Description of Artificial Sequence: Synthetic oligonucleotide
cacgaacugaguuuaagau

SEQ ID NO: 1385007 - RNA, 19 nt, Artificial Sequence
  Description of Artificial Sequence: Synthetic oligonucleotide
agguccuaaagcacaugag

SEQ ID NO: 1385008 - RNA, 19 nt, Artificial Sequence
  Description of Artificial Sequence: Synthetic oligonucleotide
gugaguagaguacuuuggu

SEQ ID NO: 1385009 - RNA, 19 nt, Artificial Sequence
  Description of Artificial Sequence: Synthetic oligonucleotide
ugguucuauggugcagaag

SEQ ID NO: 1385010 - RNA, 19 nt, Artificial Sequence
  Description of Artificial Sequence: Synthetic oligonucleotide
ucagcguucgaagcacagu

SEQ ID NO: 1385011 - RNA, 19 nt, Artificial Sequence
  Description of Artificial Sequence: Synthetic oligonucleotide
ggcaaaagcagacgacuca

SEQ ID NO: 1385012 - RNA, 19 nt, Artificial Sequence
  Description of Artificial Sequence: Synthetic oligonucleotide
ggucuacacugauacaguc

SEQ ID NO: 1385013 - RNA, 19 nt, Artificial Sequence
  Description of Artificial Sequence: Synthetic oligonucleotide
gaggcaugcacugugcacu

SEQ ID NO: 1385014 - RNA, 19 nt, Artificial Sequence
  Description of Artificial Sequence: Synthetic oligonucleotide
uacucccucuugauucggu

SEQ ID NO: 1385015 - RNA, 19 nt, Artificial Sequence
  Description of Artificial Sequence: Synthetic oligonucleotide
guagccgagccugauguca

SEQ ID NO: 1385016 - RNA, 19 nt, Artificial Sequence
  Description of Artificial Sequence: Synthetic oligonucleotide
ugcacacaagucacccuua

SEQ ID NO: 1385017 - RNA, 19 nt, Artificial Sequence
  Description of Artificial Sequence: Synthetic oligonucleotide
gaaggcguuccaaggcaug

SEQ ID NO: 1385018 - RNA, 19 nt, Artificial Sequence
  Description of Artificial Sequence: Synthetic oligonucleotide
guagaguacuuuggucuug

SEQ ID NO: 1385019 - RNA, 19 nt, Artificial Sequence
  Description of Artificial Sequence: Synthetic oligonucleotide
gcacgaacugaguuuaaga

SEQ ID NO: 1385020 - RNA, 19 nt, Artificial Sequence
  Description of Artificial Sequence: Synthetic oligonucleotide
caguuuguuuaaguccaac

SEQ ID NO: 1385021 - RNA, 19 nt, Artificial Sequence
  Description of Artificial Sequence: Synthetic oligonucleotide
cacaucuugaacuggggau

SEQ ID NO: 1385022 - RNA, 19 nt, Artificial Sequence
  Description of Artificial Sequence: Synthetic oligonucleotide
gggugaaucaucaaugagu

SEQ ID NO: 1385023 - RNA, 19 nt, Artificial Sequence
  Description of Artificial Sequence: Synthetic oligonucleotide
gucuccuagaguccggucu

SEQ ID NO: 1385024 - RNA, 19 nt, Artificial Sequence
  Description of Artificial Sequence: Synthetic oligonucleotide
cagugugcccgaguaaaug

SEQ ID NO: 1385025 - RNA, 19 nt, Artificial Sequence
  Description of Artificial Sequence: Synthetic oligonucleotide
uggugguucuauggugcag

SEQ ID NO: 1385026 - RNA, 19 nt, Artificial Sequence
  Description of Artificial Sequence: Synthetic oligonucleotide
gcuaaggcacuggacuugg

SEQ ID NO: 1385027 - RNA, 19 nt, Artificial Sequence
  Description of Artificial Sequence: Synthetic oligonucleotide
ucgacgggcugcagcuaag

SEQ ID NO: 1385028 - RNA, 19 nt, Artificial Sequence
  Description of Artificial Sequence: Synthetic oligonucleotide
ucacgggaggccugcagua

SEQ ID NO: 1385029 - RNA, 19 nt, Artificial Sequence
  Description of Artificial Sequence: Synthetic oligonucleotide
uguccuggcgagucugaau

SEQ ID NO: 1385030 - RNA, 19 nt, Artificial Sequence
  Description of Artificial Sequence: Synthetic oligonucleotide
ggcgagucugaauuuccug

SEQ ID NO: 1385031 - RNA, 19 nt, Artificial Sequence
  Description of Artificial Sequence: Synthetic oligonucleotide
ggcauuaaccauaguugug

SEQ ID NO: 1385032 - RNA, 19 nt, Artificial Sequence
  Description of Artificial Sequence: Synthetic oligonucleotide
guacucgcguucuucaggu

SEQ ID NO: 1385033 - RNA, 19 nt, Artificial Sequence
  Description of Artificial Sequence: Synthetic oligonucleotide
cauaguuguggagguacca

SEQ ID NO: 1385034 - RNA, 19 nt, Artificial Sequence
  Description of Artificial Sequence: Synthetic oligonucleotide
ugauucggucaugaauaau

SEQ ID NO: 1385035 - RNA, 19 nt, Artificial Sequence
  Description of Artificial Sequence: Synthetic oligonucleotide
aggucuacacugauacagu

SEQ ID NO: 1385036 - RNA, 19 nt, Artificial Sequence
  Description of Artificial Sequence: Synthetic oligonucleotide
cuagaguccggucuagggu

SEQ ID NO: 1385037 - RNA, 19 nt, Artificial Sequence
  Description of Artificial Sequence: Synthetic oligonucleotide
gcauuaauccauguuccca

SEQ ID NO: 1385038 - RNA, 19 nt, Artificial Sequence
  Description of Artificial Sequence: Synthetic oligonucleotide
agaaacccguacucgcguu

SEQ ID NO: 1385039 - RNA, 19 nt, Artificial Sequence
  Description of Artificial Sequence: Synthetic oligonucleotide
acccguacucgcguucuuc

SEQ ID NO: 1385040 - RNA, 19 nt, Artificial Sequence
  Description of Artificial Sequence: Synthetic oligonucleotide
ucccgguaugccaccugca

SEQ ID NO: 1385041 - RNA, 19 nt, Artificial Sequence
  Description of Artificial Sequence: Synthetic oligonucleotide
gguaccagggugaaucauc

SEQ ID NO: 1385042 - RNA, 19 nt, Artificial Sequence
  Description of Artificial Sequence: Synthetic oligonucleotide
guguaauguuauugccaca

SEQ ID NO: 1385043 - RNA, 19 nt, Artificial Sequence
  Description of Artificial Sequence: Synthetic oligonucleotide
gggaagggauuucuacaug

SEQ ID NO: 1385044 - RNA, 19 nt, Artificial Sequence
  Description of Artificial Sequence: Synthetic oligonucleotide
ggcacgaacugaguuuaag

SEQ ID NO: 1385045 - RNA, 19 nt, Artificial Sequence
  Description of Artificial Sequence: Synthetic oligonucleotide
gcguucgaagcacaguuga

SEQ ID NO: 1385046 - RNA, 19 nt, Artificial Sequence
  Description of Artificial Sequence: Synthetic oligonucleotide
uacuggccgggcuuccagu

SEQ ID NO: 1385047 - RNA, 19 nt, Artificial Sequence
  Description of Artificial Sequence: Synthetic oligonucleotide
ugucuccuagaguccgguc

SEQ ID NO: 1385048 - RNA, 19 nt, Artificial Sequence
  Description of Artificial Sequence: Synthetic oligonucleotide
ggugguucuauggugcaga

SEQ ID NO: 1385049 - RNA, 19 nt, Artificial Sequence
  Description of Artificial Sequence: Synthetic oligonucleotide
ggaaaaccagggguccccg

SEQ ID NO: 1385050 - RNA, 19 nt, Artificial Sequence
  Description of Artificial Sequence: Synthetic oligonucleotide
agcguucgaagcacaguug

SEQ ID NO: 1385051 - RNA, 19 nt, Artificial Sequence
  Description of Artificial Sequence: Synthetic oligonucleotide
agggccuuuuggauacauc

SEQ ID NO: 1385052 - RNA, 19 nt, Artificial Sequence
  Description of Artificial Sequence: Synthetic oligonucleotide
uacucgcguucuucaggug

SEQ ID NO: 1385053 - RNA, 19 nt, Artificial Sequence
  Description of Artificial Sequence: Synthetic oligonucleotide
cugauggugguucuauggu

SEQ ID NO: 1385054 - RNA, 19 nt, Artificial Sequence
  Description of Artificial Sequence: Synthetic oligonucleotide
cggucuaggguaucugugg

SEQ ID NO: 1385055 - RNA, 19 nt, Artificial Sequence
  Description of Artificial Sequence: Synthetic oligonucleotide
cccuagauaggugucuaag

SEQ ID NO: 1385056 - RNA, 19 nt, Artificial Sequence
  Description of Artificial Sequence: Synthetic oligonucleotide
guucgaagcacaguugaau

SEQ ID NO: 1385057 - RNA, 19 nt, Artificial Sequence
  Description of Artificial Sequence: Synthetic oligonucleotide
cguacucgcguucuucagg

SEQ ID NO: 1385058 - RNA, 19 nt, Artificial Sequence
  Description of Artificial Sequence: Synthetic oligonucleotide
gcagacgacucauucucuc

SEQ ID NO: 1385059 - RNA, 19 nt, Artificial Sequence
  Description of Artificial Sequence: Synthetic oligonucleotide
aguccggucuaggguaucu

SEQ ID NO: 1385060 - RNA, 19 nt, Artificial Sequence
  Description of Artificial Sequence: Synthetic oligonucleotide
cagaggcccuagauaggug

SEQ ID NO: 1385061 - RNA, 19 nt, Artificial Sequence
  Description of Artificial Sequence: Synthetic oligonucleotide
gccagugcacacaagucac

SEQ ID NO: 1385062 - RNA, 19 nt, Artificial Sequence
  Description of Artificial Sequence: Synthetic oligonucleotide
ccaacugucaaagcgaugu

SEQ ID NO: 1385063 - RNA, 19 nt, Artificial Sequence
  Description of Artificial Sequence: Synthetic oligonucleotide
aggcacucccacacagcac

SEQ ID NO: 1385064 - RNA, 19 nt, Artificial Sequence
  Description of Artificial Sequence: Synthetic oligonucleotide
gacagggcugagguaaucu

SEQ ID NO: 1385065 - RNA, 19 nt, Artificial Sequence
  Description of Artificial Sequence: Synthetic oligonucleotide
ggauuucuacauguugguc

SEQ ID NO: 1385066 - RNA, 19 nt, Artificial Sequence
  Description of Artificial Sequence: Synthetic oligonucleotide
auacucaaucacggccaug

SEQ ID NO: 1385067 - RNA, 19 nt, Artificial Sequence
  Description of Artificial Sequence: Synthetic oligonucleotide
gccaacuggggcgucagug

SEQ ID NO: 1385068 - RNA, 19 nt, Artificial Sequence
  Description of Artificial Sequence: Synthetic oligonucleotide
guucuauggugcagaagaa

SEQ ID NO: 1385069 - RNA, 19 nt, Artificial Sequence
  Description of Artificial Sequence: Synthetic oligonucleotide
gacgacucauucucuccgu

SEQ ID NO: 1385070 - RNA, 19 nt, Artificial Sequence
  Description of Artificial Sequence: Synthetic oligonucleotide
cauguucccaagguccuaa

SEQ ID NO: 1385071 - RNA, 19 nt, Artificial Sequence
  Description of Artificial Sequence: Synthetic oligonucleotide
gagccugaugucagcguuc

SEQ ID NO: 1385072 - RNA, 19 nt, Artificial Sequence
  Description of Artificial Sequence: Synthetic oligonucleotide
agcagacgacucauucucu

SEQ ID NO: 1385073 - RNA, 19 nt, Artificial Sequence
  Description of Artificial Sequence: Synthetic oligonucleotide
gagucaggaucaagccuca

SEQ ID NO: 1385074 - RNA, 19 nt, Artificial Sequence
  Description of Artificial Sequence: Synthetic oligonucleotide
ccaugccagaugaugcuuc

SEQ ID NO: 1385075 - RNA, 19 nt, Artificial Sequence
  Description of Artificial Sequence: Synthetic oligonucleotide
gguaugccaccugcagagg

SEQ ID NO: 1385076 - RNA, 19 nt, Artificial Sequence
  Description of Artificial Sequence: Synthetic oligonucleotide
agggcugaacacccuuguu

SEQ ID NO: 1385077 - RNA, 19 nt, Artificial Sequence
  Description of Artificial Sequence: Synthetic oligonucleotide
cacgggaggccugcaguag

SEQ ID NO: 1385078 - RNA, 19 nt, Artificial Sequence
  Description of Artificial Sequence: Synthetic oligonucleotide
gugguucuauggugcagaa

SEQ ID NO: 1385079 - RNA, 19 nt, Artificial Sequence
  Description of Artificial Sequence: Synthetic oligonucleotide
ccggucuaggguaucugug

SEQ ID NO: 1385080 - RNA, 19 nt, Artificial Sequence
  Description of Artificial Sequence: Synthetic oligonucleotide
gguuucccgguaugccacc

SEQ ID NO: 1385081 - RNA, 19 nt, Artificial Sequence
  Description of Artificial Sequence: Synthetic oligonucleotide
gccgagccugaugucagcg

SEQ ID NO: 1385082 - RNA, 19 nt, Artificial Sequence
  Description of Artificial Sequence: Synthetic oligonucleotide
guccccgcugcuugucaug

SEQ ID NO: 1385083 - RNA, 19 nt, Artificial Sequence
  Description of Artificial Sequence: Synthetic oligonucleotide
cccgguaugccaccugcag

SEQ ID NO: 1385084 - RNA, 19 nt, Artificial Sequence
  Description of Artificial Sequence: Synthetic oligonucleotide
caguaggucuacacugaua

SEQ ID NO: 1385085 - RNA, 19 nt, Artificial Sequence
  Description of Artificial Sequence: Synthetic oligonucleotide
aacccguacucgcguucuu

SEQ ID NO: 1385086 - RNA, 19 nt, Artificial Sequence
  Description of Artificial Sequence: Synthetic oligonucleotide
cuccuagaguccggucuag

SEQ ID NO: 1385087 - RNA, 19 nt, Artificial Sequence
  Description of Artificial Sequence: Synthetic oligonucleotide
cgaagcacaguugaauauc

SEQ ID NO: 1385088 - RNA, 19 nt, Artificial Sequence
  Description of Artificial Sequence: Synthetic oligonucleotide
ggauacaucuugagacaca

SEQ ID NO: 1385089 - RNA, 19 nt, Artificial Sequence
  Description of Artificial Sequence: Synthetic oligonucleotide
cagcguucgaagcacaguu

SEQ ID NO: 1385090 - RNA, 19 nt, Artificial Sequence
  Description of Artificial Sequence: Synthetic oligonucleotide
cucgacgggcugcagcuaa

SEQ ID NO: 1385091 - RNA, 19 nt, Artificial Sequence
  Description of Artificial Sequence: Synthetic oligonucleotide
gcagcacuuuuaaaugcca

SEQ ID NO: 1385092 - RNA, 19 nt, Artificial Sequence
  Description of Artificial Sequence: Synthetic oligonucleotide
cuggccgggcuuccaguuc

SEQ ID NO: 1385093 - RNA, 19 nt, Artificial Sequence
  Description of Artificial Sequence: Synthetic oligonucleotide
cacacaagucacccuuaua

SEQ ID NO: 1385094 - RNA, 19 nt, Artificial Sequence
  Description of Artificial Sequence: Synthetic oligonucleotide
guuguccuggcgagucuga

SEQ ID NO: 1385095 - RNA, 19 nt, Artificial Sequence
  Description of Artificial Sequence: Synthetic oligonucleotide
gcucucacaaaaugccgcu

SEQ ID NO: 1385096 - RNA, 19 nt, Artificial Sequence
  Description of Artificial Sequence: Synthetic oligonucleotide
agcaagggcugaacacccu

SEQ ID NO: 1385097 - RNA, 19 nt, Artificial Sequence
  Description of Artificial Sequence: Synthetic oligonucleotide
gggcugaacacccuuguuu

SEQ ID NO: 1385098 - RNA, 19 nt, Artificial Sequence
  Description of Artificial Sequence: Synthetic oligonucleotide
agaguccggucuaggguau

SEQ ID NO: 1385099 - RNA, 19 nt, Artificial Sequence
  Description of Artificial Sequence: Synthetic oligonucleotide
caaugaguguaauguuauu

SEQ ID NO: 1385100 - RNA, 19 nt, Artificial Sequence
  Description of Artificial Sequence: Synthetic oligonucleotide
gcaaaagcagacgacucau

SEQ ID NO: 1385101 - RNA, 19 nt, Artificial Sequence
  Description of Artificial Sequence: Synthetic oligonucleotide
ccguacucgcguucuucag

SEQ ID NO: 1385102 - RNA, 19 nt, Artificial Sequence
  Description of Artificial Sequence: Synthetic oligonucleotide
ccuggcgagucugaauuuc

SEQ ID NO: 1385103 - RNA, 19 nt, Artificial Sequence
  Description of Artificial Sequence: Synthetic oligonucleotide
gcgucagugugcccgagua

SEQ ID NO: 1385104 - RNA, 19 nt, Artificial Sequence
  Description of Artificial Sequence: Synthetic oligonucleotide
uggagguaccagggugaau

SEQ ID NO: 1385105 - RNA, 19 nt, Artificial Sequence
  Description of Artificial Sequence: Synthetic oligonucleotide
cccgaguaaaugcgcagga

SEQ ID NO: 1385106 - RNA, 19 nt, Artificial Sequence
  Description of Artificial Sequence: Synthetic oligonucleotide
cuguggcacgaacugaguu

SEQ ID NO: 1385107 - RNA, 19 nt, Artificial Sequence
  Description of Artificial Sequence: Synthetic oligonucleotide
acucucuguuucacuguuu

SEQ ID NO: 1385108 - RNA, 19 nt, Artificial Sequence
  Description of Artificial Sequence: Synthetic oligonucleotide
gcugcuugucaugcagcac

SEQ ID NO: 1385109 - RNA, 19 nt, Artificial Sequence
  Description of Artificial Sequence: Synthetic oligonucleotide
cccguacucgcguucuuca

SEQ ID NO: 1385110 - RNA, 19 nt, Artificial Sequence
  Description of Artificial Sequence: Synthetic oligonucleotide
gugcuuuuccaggcauuaa

SEQ ID NO: 1385111 - RNA, 19 nt, Artificial Sequence
  Description of Artificial Sequence: Synthetic oligonucleotide
ggccaugccagaugaugcu

SEQ ID NO: 1385112 - RNA, 19 nt, Artificial Sequence
  Description of Artificial Sequence: Synthetic oligonucleotide
ccucacgggaggccugcag

SEQ ID NO: 1385113 - RNA, 19 nt, Artificial Sequence
  Description of Artificial Sequence: Synthetic oligonucleotide
gaguccggucuaggguauc

SEQ ID NO: 1385114 - RNA, 19 nt, Artificial Sequence
  Description of Artificial Sequence: Synthetic oligonucleotide
gauggccaacuggggcguc

SEQ ID NO: 1385115 - RNA, 19 nt, Artificial Sequence
  Description of Artificial Sequence: Synthetic oligonucleotide
caggaucaagccucacuuu

SEQ ID NO: 1385116 - RNA, 19 nt, Artificial Sequence
  Description of Artificial Sequence: Synthetic oligonucleotide
gcuucuacuggccgggcuu

SEQ ID NO: 1385117 - RNA, 19 nt, Artificial Sequence
  Description of Artificial Sequence: Synthetic oligonucleotide
cuaagccauacucccucuu

SEQ ID NO: 1385118 - RNA, 19 nt, Artificial Sequence
  Description of Artificial Sequence: Synthetic oligonucleotide
cuuuguuguccuggcgagu

SEQ ID NO: 1385119 - RNA, 19 nt, Artificial Sequence
  Description of Artificial Sequence: Synthetic oligonucleotide
guuucccgguaugccaccu

SEQ ID NO: 1385120 - RNA, 19 nt, Artificial Sequence
  Description of Artificial Sequence: Synthetic oligonucleotide
ccaacuggggcgucagugu

SEQ ID NO: 1385121 - RNA, 19 nt, Artificial Sequence
  Description of Artificial Sequence: Synthetic oligonucleotide
gccgcuugucuccuagagu

SEQ ID NO: 1385122 - RNA, 19 nt, Artificial Sequence
  Description of Artificial Sequence: Synthetic oligonucleotide
gcccuagauaggugucuaa

SEQ ID NO: 1385123 - RNA, 19 nt, Artificial Sequence
  Description of Artificial Sequence: Synthetic oligonucleotide
ggggcgucagugugcccga

SEQ ID NO: 1385124 - RNA, 19 nt, Artificial Sequence
  Description of Artificial Sequence: Synthetic oligonucleotide
cgacgggcugcagcuaagg

SEQ ID NO: 1385125 - RNA, 19 nt, Artificial Sequence
  Description of Artificial Sequence: Synthetic oligonucleotide
gcccgugcuuuuccaggca

SEQ ID NO: 1385126 - RNA, 19 nt, Artificial Sequence
  Description of Artificial Sequence: Synthetic oligonucleotide
cguucgaagcacaguugaa

SEQ ID NO: 1385127 - RNA, 19 nt, Artificial Sequence
  Description of Artificial Sequence: Synthetic oligonucleotide
cucucacaaaaugccgcuu

SEQ ID NO: 1385128 - RNA, 19 nt, Artificial Sequence
  Description of Artificial Sequence: Synthetic oligonucleotide
gccgggcuuccaguucugc

SEQ ID NO: 1385129 - RNA, 19 nt, Artificial Sequence
  Description of Artificial Sequence: Synthetic oligonucleotide
ccgaguaaaugcgcaggaa

SEQ ID NO: 1385130 - RNA, 19 nt, Artificial Sequence
  Description of Artificial Sequence: Synthetic oligonucleotide
ggcgucagugugcccgagu

SEQ ID NO: 1385131 - RNA, 19 nt, Artificial Sequence
  Description of Artificial Sequence: Synthetic oligonucleotide
ccgugcaguuucuauuaau

SEQ ID NO: 1385132 - RNA, 19 nt, Artificial Sequence
  Description of Artificial Sequence: Synthetic oligonucleotide
gccugaugucagcguucga

SEQ ID NO: 1385133 - RNA, 19 nt, Artificial Sequence
  Description of Artificial Sequence: Synthetic oligonucleotide
ggccgggcuuccaguucug

SEQ ID NO: 1385134 - RNA, 19 nt, Artificial Sequence
  Description of Artificial Sequence: Synthetic oligonucleotide
ccgagccugaugucagcgu

SEQ ID NO: 1385135 - RNA, 19 nt, Artificial Sequence
  Description of Artificial Sequence: Synthetic oligonucleotide
cccgugcuuuuccaggcau

SEQ ID NO: 1385136 - RNA, 19 nt, Artificial Sequence
  Description of Artificial Sequence: Synthetic oligonucleotide
ggccaacuggggcgucagu

SEQ ID NO: 1385137 - RNA, 19 nt, Artificial Sequence
  Description of Artificial Sequence: Synthetic oligonucleotide
ccgugcuuuuccaggcauu

SEQ ID NO: 1385138 - RNA, 19 nt, Artificial Sequence
  Description of Artificial Sequence: Synthetic oligonucleotide
gccucacgggaggccugca

SEQ ID NO: 1385139 - RNA, 19 nt, Artificial Sequence
  Description of Artificial Sequence: Synthetic oligonucleotide
agagcugucgaucacaccc

SEQ ID NO: 1385140 - RNA, 19 nt, Artificial Sequence
  Description of Artificial Sequence: Synthetic oligonucleotide
uguuuauaaaccaugagaa

SEQ ID NO: 1385141 - RNA, 19 nt, Artificial Sequence
  Description of Artificial Sequence: Synthetic oligonucleotide
aacucaacaguguaaugcc

SEQ ID NO: 1385142 - RNA, 19 nt, Artificial Sequence
  Description of Artificial Sequence: Synthetic oligonucleotide
aaaugguagguucuccucc

SEQ ID NO: 1385143 - RNA, 19 nt, Artificial Sequence
  Description of Artificial Sequence: Synthetic oligonucleotide
acgaacacgaaguacauac

SEQ ID NO: 1385144 - RNA, 19 nt, Artificial Sequence
  Description of Artificial Sequence: Synthetic oligonucleotide
uuauaaaccaugagaauca

SEQ ID NO: 1385145 - RNA, 19 nt, Artificial Sequence
  Description of Artificial Sequence: Synthetic oligonucleotide
  modified_base (14)..(14): a, c, u, g, unknown or other
ugcuccggaacccngaagg

SEQ ID NO: 1385146 - RNA, 19 nt, Artificial Sequence
  Description of Artificial Sequence: Synthetic oligonucleotide
aguucagcaucauuggagc

SEQ ID NO: 1385147 - RNA, 19 nt, Artificial Sequence
  Description of Artificial Sequence: Synthetic oligonucleotide
agguauacagggcaggacc

SEQ ID NO: 1385148 - RNA, 19 nt, Artificial Sequence
  Description of Artificial Sequence: Synthetic oligonucleotide
accuaaauaaaaugguagg

SEQ ID NO: 1385149 - RNA, 19 nt, Artificial Sequence
  Description of Artificial Sequence: Synthetic oligonucleotide
ucguaguccaagcagaugc

SEQ ID NO: 1385150 - RNA, 19 nt, Artificial Sequence
  Description of Artificial Sequence: Synthetic oligonucleotide
acgaaguacauacacagag

SEQ ID NO: 1385151 - RNA, 19 nt, Artificial Sequence
  Description of Artificial Sequence: Synthetic oligonucleotide
aauccuguuaugcagcugu

SEQ ID NO: 1385152 - RNA, 19 nt, Artificial Sequence
  Description of Artificial Sequence: Synthetic oligonucleotide
acagguaacacagagaaug

SEQ ID NO: 1385153 - RNA, 19 nt, Artificial Sequence
  Description of Artificial Sequence: Synthetic oligonucleotide
uauuguuuauaaaccauga

SEQ ID NO: 1385154 - RNA, 19 nt, Artificial Sequence
  Description of Artificial Sequence: Synthetic oligonucleotide
uguaguucagcaucauugg

SEQ ID NO: 1385155 - RNA, 19 nt, Artificial Sequence
  Description of Artificial Sequence: Synthetic oligonucleotide
acacgaaguacauacacag

SEQ ID NO: 1385156 - RNA, 19 nt, Artificial Sequence
  Description of Artificial Sequence: Synthetic oligonucleotide
aaaccaugagaaucacagc

SEQ ID NO: 1385157 - RNA, 19 nt, Artificial Sequence
  Description of Artificial Sequence: Synthetic oligonucleotide
cauaguuaggaaaagucug

SEQ ID NO: 1385158 - RNA, 19 nt, Artificial Sequence
  Description of Artificial Sequence: Synthetic oligonucleotide
cuguaguucagcaucauug

SEQ ID NO: 1385159 - RNA, 19 nt, Artificial Sequence
  Description of Artificial Sequence: Synthetic oligonucleotide
aagauuuggucauaggcaa

SEQ ID NO: 1385160 - RNA, 19 nt, Artificial Sequence
  Description of Artificial Sequence: Synthetic oligonucleotide
agguaaagcaugcaagagg

SEQ ID NO: 1385161 - RNA, 19 nt, Artificial Sequence
  Description of Artificial Sequence: Synthetic oligonucleotide
uaaagcaugcaagagggag

SEQ ID NO: 1385162 - RNA, 19 nt, Artificial Sequence
  Description of Artificial Sequence: Synthetic oligonucleotide
gaccuaaauaaaaugguag

SEQ ID NO: 1385163 - RNA, 19 nt, Artificial Sequence
  Description of Artificial Sequence: Synthetic oligonucleotide
ucuugguuaagacggcagg

SEQ ID NO: 1385164 - RNA, 19 nt, Artificial Sequence
  Description of Artificial Sequence: Synthetic oligonucleotide
uguaucaggguucucgaga

SEQ ID NO: 1385165 - RNA, 19 nt, Artificial Sequence
  Description of Artificial Sequence: Synthetic oligonucleotide
ucgagaagggcacuggugc

SEQ ID NO: 1385166 - RNA, 19 nt, Artificial Sequence
  Description of Artificial Sequence: Synthetic oligonucleotide
acuggugccccucaccucc

SEQ ID NO: 1385167 - RNA, 19 nt, Artificial Sequence
  Description of Artificial Sequence: Synthetic oligonucleotide
cuaugucuugguuaagacg

SEQ ID NO: 1385168 - RNA, 19 nt, Artificial Sequence
  Description of Artificial Sequence: Synthetic oligonucleotide
gguaaagcaugcaagaggg

SEQ ID NO: 1385169 - RNA, 19 nt, Artificial Sequence
  Description of Artificial Sequence: Synthetic oligonucleotide
  modified_base (6)..(6): a, c, u, g, unknown or other
aacccngaaggaucuugcc

SEQ ID NO: 1385170 - RNA, 19 nt, Artificial Sequence
  Description of Artificial Sequence: Synthetic oligonucleotide
ggaagauuuggucauaggc

SEQ ID NO: 1385171 - RNA, 19 nt, Artificial Sequence
  Description of Artificial Sequence: Synthetic oligonucleotide
agcacaggaagauuugguc

SEQ ID NO: 1385172 - RNA, 19 nt, Artificial Sequence
  Description of Artificial Sequence: Synthetic oligonucleotide
  modified_base (5)..(5): a, c, u, g, unknown or other
acccngaaggaucuugccc

SEQ ID NO: 1385173 - RNA, 19 nt, Artificial Sequence
  Description of Artificial Sequence: Synthetic oligonucleotide
agggaccuaaauaaaaugg

SEQ ID NO: 1385174 - RNA, 19 nt, Artificial Sequence
  Description of Artificial Sequence: Synthetic oligonucleotide
gaugacaggagccuccggc

SEQ ID NO: 1385175 - RNA, 19 nt, Artificial Sequence
  Description of Artificial Sequence: Synthetic oligonucleotide
agcuuggcaaggcaaaggg

SEQ ID NO: 1385176 - RNA, 19 nt, Artificial Sequence
  Description of Artificial Sequence: Synthetic oligonucleotide
guaacacagagaauggagg

SEQ ID NO: 1385177 - RNA, 19 nt, Artificial Sequence
  Description of Artificial Sequence: Synthetic oligonucleotide
uaaaaugguagguucuccu

SEQ ID NO: 1385178 - RNA, 19 nt, Artificial Sequence
  Description of Artificial Sequence: Synthetic oligonucleotide
gaacacgaaguacauacac

SEQ ID NO: 1385179 - RNA, 19 nt, Artificial Sequence
  Description of Artificial Sequence: Synthetic oligonucleotide
gaagauuuggucauaggca

SEQ ID NO: 1385180 - RNA, 19 nt, Artificial Sequence
  Description of Artificial Sequence: Synthetic oligonucleotide
ugguuaagacggcaggcgg

SEQ ID NO: 1385181 - RNA, 19 nt, Artificial Sequence
  Description of Artificial Sequence: Synthetic oligonucleotide
ucagcauaggccuagcaau

SEQ ID NO: 1385182 - RNA, 19 nt, Artificial Sequence
  Description of Artificial Sequence: Synthetic oligonucleotide
acaguguaaugccaggcag

SEQ ID NO: 1385183 - RNA, 19 nt, Artificial Sequence
  Description of Artificial Sequence: Synthetic oligonucleotide
cacagagccuguaucaggg

SEQ ID NO: 1385184 - RNA, 19 nt, Artificial Sequence
  Description of Artificial Sequence: Synthetic oligonucleotide
gguauagggaccuaaauaa

SEQ ID NO: 1385185 - RNA, 19 nt, Artificial Sequence
  Description of Artificial Sequence: Synthetic oligonucleotide
gauuuggucauaggcaaag

SEQ ID NO: 1385186 - RNA, 19 nt, Artificial Sequence
  Description of Artificial Sequence: Synthetic oligonucleotide
agcaaugcccacugcaagg

SEQ ID NO: 1385187 - RNA, 19 nt, Artificial Sequence
  Description of Artificial Sequence: Synthetic oligonucleotide
ucuaugucuugguuaagac

SEQ ID NO: 1385188 - RNA, 19 nt, Artificial Sequence
  Description of Artificial Sequence: Synthetic oligonucleotide
uugguuaagacggcaggcg

SEQ ID NO: 1385189 - RNA, 19 nt, Artificial Sequence
  Description of Artificial Sequence: Synthetic oligonucleotide
acauccagcuggcaauggc

SEQ ID NO: 1385190 - RNA, 19 nt, Artificial Sequence
  Description of Artificial Sequence: Synthetic oligonucleotide
caucauuggagcagggagc

SEQ ID NO: 1385191 - RNA, 19 nt, Artificial Sequence
  Description of Artificial Sequence: Synthetic oligonucleotide
aggcucaaagccuggcugc

SEQ ID NO: 1385192 - RNA, 19 nt, Artificial Sequence
  Description of Artificial Sequence: Synthetic oligonucleotide
uaguuaggaaaagucuggg

SEQ ID NO: 1385193 - RNA, 19 nt, Artificial Sequence
  Description of Artificial Sequence: Synthetic oligonucleotide
gacagaagggacaugcggc

SEQ ID NO: 1385194 - RNA, 19 nt, Artificial Sequence
  Description of Artificial Sequence: Synthetic oligonucleotide
agaagggacaugcggcugg

SEQ ID NO: 1385195 - RNA, 19 nt, Artificial Sequence
  Description of Artificial Sequence: Synthetic oligonucleotide
caaacaacccgcugccugg

SEQ ID NO: 1385196 - RNA, 19 nt, Artificial Sequence
  Description of Artificial Sequence: Synthetic oligonucleotide
cauaggccuagcaaugccc

SEQ ID NO: 1385197 - RNA, 19 nt, Artificial Sequence
  Description of Artificial Sequence: Synthetic oligonucleotide
cugucgaucacacccacug

SEQ ID NO: 1385198 - RNA, 19 nt, Artificial Sequence
  Description of Artificial Sequence: Synthetic oligonucleotide
gacauccagagguaaucag

SEQ ID NO: 1385199 - RNA, 19 nt, Artificial Sequence
  Description of Artificial Sequence: Synthetic oligonucleotide
uucuaugucuugguuaaga

SEQ ID NO: 1385200 - RNA, 19 nt, Artificial Sequence
  Description of Artificial Sequence: Synthetic oligonucleotide
cucucaggaaguuaagcuc

SEQ ID NO: 1385201 - RNA, 19 nt, Artificial Sequence
  Description of Artificial Sequence: Synthetic oligonucleotide
uagguaaagcaugcaagag

SEQ ID NO: 1385202 - RNA, 19 nt, Artificial Sequence
  Description of Artificial Sequence: Synthetic oligonucleotide
uguugcagccacgaacacg

SEQ ID NO: 1385203 - RNA, 19 nt, Artificial Sequence
  Description of Artificial Sequence: Synthetic oligonucleotide
cauacacagagccuguauc

SEQ ID NO: 1385204 - RNA, 19 nt, Artificial Sequence
  Description of Artificial Sequence: Synthetic oligonucleotide
guaaucaggggagagcccc

SEQ ID NO: 1385205 - RNA, 19 nt, Artificial Sequence
  Description of Artificial Sequence: Synthetic oligonucleotide
caguguaaugccaggcagg

SEQ ID NO: 1385206 - RNA, 19 nt, Artificial Sequence
  Description of Artificial Sequence: Synthetic oligonucleotide
agcgccaccaccaaugaag

SEQ ID NO: 1385207 - RNA, 19 nt, Artificial Sequence
  Description of Artificial Sequence: Synthetic oligonucleotide
gguaacacagagaauggag

SEQ ID NO: 1385208 - RNA, 19 nt, Artificial Sequence
  Description of Artificial Sequence: Synthetic oligonucleotide
ggugacuuuccucucaggc

SEQ ID NO: 1385209 - RNA, 19 nt, Artificial Sequence
  Description of Artificial Sequence: Synthetic oligonucleotide
guauucuccauagccagcc

SEQ ID NO: 1385210 - RNA, 19 nt, Artificial Sequence
  Description of Artificial Sequence: Synthetic oligonucleotide
aggaagauuuggucauagg

SEQ ID NO: 1385211 - RNA, 19 nt, Artificial Sequence
  Description of Artificial Sequence: Synthetic oligonucleotide
  modified_base (11)..(11): a, c, u, g, unknown or other
uccggaacccngaaggauc

SEQ ID NO: 1385212 - RNA, 19 nt, Artificial Sequence
  Description of Artificial Sequence: Synthetic oligonucleotide
  modified_base (7)..(7): a, c, u, g, unknown or other
gaacccngaaggaucuugc

SEQ ID NO: 1385213 - RNA, 19 nt, Artificial Sequence
  Description of Artificial Sequence: Synthetic oligonucleotide
ucucacgccccacauccag

SEQ ID NO: 1385214 - RNA, 19 nt, Artificial Sequence
  Description of Artificial Sequence: Synthetic oligonucleotide
aguccaagcagaugcccag

SEQ ID NO: 1385215 - RNA, 19 nt, Artificial Sequence
  Description of Artificial Sequence: Synthetic oligonucleotide
cuugguuaagacggcaggc

SEQ ID NO: 1385216 - RNA, 19 nt, Artificial Sequence
  Description of Artificial Sequence: Synthetic oligonucleotide
agcauaggccuagcaaugc

SEQ ID NO: 1385217 - RNA, 19 nt, Artificial Sequence
  Description of Artificial Sequence: Synthetic oligonucleotide
uggugucacaguuuauugu

SEQ ID NO: 1385218 - RNA, 19 nt, Artificial Sequence
  Description of Artificial Sequence: Synthetic oligonucleotide
ugggauaggggcuuucuau

SEQ ID NO: 1385219 - RNA, 19 nt, Artificial Sequence
  Description of Artificial Sequence: Synthetic oligonucleotide
ugcagccacgaacacgaag

SEQ ID NO: 1385220 - RNA, 19 nt, Artificial Sequence
  Description of Artificial Sequence: Synthetic oligonucleotide
acaguuuauuguuuauaaa

SEQ ID NO: 1385221 - RNA, 19 nt, Artificial Sequence
  Description of Artificial Sequence: Synthetic oligonucleotide
ggacagaagggacaugcgg

SEQ ID NO: 1385222 - RNA, 19 nt, Artificial Sequence
  Description of Artificial Sequence: Synthetic oligonucleotide
aaugccaggcaggugguga

SEQ ID NO: 1385223 - RNA, 19 nt, Artificial Sequence
  Description of Artificial Sequence: Synthetic oligonucleotide
guuaagacggcaggcgggg

SEQ ID NO: 1385224 - RNA, 19 nt, Artificial Sequence
  Description of Artificial Sequence: Synthetic oligonucleotide
ugcgccggaacucaacagu

SEQ ID NO: 1385225 - RNA, 19 nt, Artificial Sequence
  Description of Artificial Sequence: Synthetic oligonucleotide
gaagcugcugggcaaacaa

SEQ ID NO: 1385226 - RNA, 19 nt, Artificial Sequence
  Description of Artificial Sequence: Synthetic oligonucleotide
ucauaggcaaaggugcgcu

SEQ ID NO: 1385227 - RNA, 19 nt, Artificial Sequence
  Description of Artificial Sequence: Synthetic oligonucleotide
ugggugucgaugacaggag

SEQ ID NO: 1385228 - RNA, 19 nt, Artificial Sequence
  Description of Artificial Sequence: Synthetic oligonucleotide
acaacccgcugccuggagg

SEQ ID NO: 1385229 - RNA, 19 nt, Artificial Sequence
  Description of Artificial Sequence: Synthetic oligonucleotide
acgccccacauccagcugg

SEQ ID NO: 1385230 - RNA, 19 nt, Artificial Sequence
  Description of Artificial Sequence: Synthetic oligonucleotide
uauaaaccaugagaaucac

SEQ ID NO: 1385231 - RNA, 19 nt, Artificial Sequence
  Description of Artificial Sequence: Synthetic oligonucleotide
uguucuaggugcccucccu

SEQ ID NO: 1385232 - RNA, 19 nt, Artificial Sequence
  Description of Artificial Sequence: Synthetic oligonucleotide
uuggcaugggugcagggua

SEQ ID NO: 1385233 - RNA, 19 nt, Artificial Sequence
  Description of Artificial Sequence: Synthetic oligonucleotide
ugaaagacucaguccaguu

SEQ ID NO: 1385234 - RNA, 19 nt, Artificial Sequence
  Description of Artificial Sequence: Synthetic oligonucleotide
ucgaucacacccacuguuc

SEQ ID NO: 1385235 - RNA, 19 nt, Artificial Sequence
  Description of Artificial Sequence: Synthetic oligonucleotide
gauaggggcuuucuauguc

SEQ ID NO: 1385236 - RNA, 19 nt, Artificial Sequence
  Description of Artificial Sequence: Synthetic oligonucleotide
gaaucacagcuguugcuca

SEQ ID NO: 1385237 - RNA, 19 nt, Artificial Sequence
  Description of Artificial Sequence: Synthetic oligonucleotide
aaaggugcgcugggugucg

SEQ ID NO: 1385238 - RNA, 19 nt, Artificial Sequence
  Description of Artificial Sequence: Synthetic oligonucleotide
ucuaggugcccucccuccc

SEQ ID NO: 1385239 - RNA, 19 nt, Artificial Sequence
  Description of Artificial Sequence: Synthetic oligonucleotide
agaagggcacuggugcccc

SEQ ID NO: 1385240 - RNA, 19 nt, Artificial Sequence
  Description of Artificial Sequence: Synthetic oligonucleotide
agcuuggcccaacccagcg

SEQ ID NO: 1385241 - RNA, 19 nt, Artificial Sequence
  Description of Artificial Sequence: Synthetic oligonucleotide
auagggaccuaaauaaaau

SEQ ID NO: 1385242 - RNA, 19 nt, Artificial Sequence
  Description of Artificial Sequence: Synthetic oligonucleotide
gagguaaucaggggagagc

SEQ ID NO: 1385243 - RNA, 19 nt, Artificial Sequence
  Description of Artificial Sequence: Synthetic oligonucleotide
gucuggagggccucaagug

SEQ ID NO: 1385244 - RNA, 19 nt, Artificial Sequence
  Description of Artificial Sequence: Synthetic oligonucleotide
aucauuggagcagggagcu

SEQ ID NO: 1385245 - RNA, 19 nt, Artificial Sequence
  Description of Artificial Sequence: Synthetic oligonucleotide
gaaggaucuugcccaugcc

SEQ ID NO: 1385246 - RNA, 19 nt, Artificial Sequence
  Description of Artificial Sequence: Synthetic oligonucleotide
cucggcugaguucccaagg

SEQ ID NO: 1385247 - RNA, 19 nt, Artificial Sequence
  Description of Artificial Sequence: Synthetic oligonucleotide
caacccgcugccuggaggc

SEQ ID NO: 1385248 - RNA, 19 nt, Artificial Sequence
  Description of Artificial Sequence: Synthetic oligonucleotide
uggcggaaggaggagcugg

SEQ ID NO: 1385249 - RNA, 19 nt, Artificial Sequence
  Description of Artificial Sequence: Synthetic oligonucleotide
ucucgagaagggcacuggu

SEQ ID NO: 1385250 - RNA, 19 nt, Artificial Sequence
  Description of Artificial Sequence: Synthetic oligonucleotide
gagcuuggcaaggcaaagg

SEQ ID NO: 1385251 - RNA, 19 nt, Artificial Sequence
  Description of Artificial Sequence: Synthetic oligonucleotide
uucaucucacgccccacau

SEQ ID NO: 1385252 - RNA, 19 nt, Artificial Sequence
  Description of Artificial Sequence: Synthetic oligonucleotide
augacaggagccuccggca

SEQ ID NO: 1385253 - RNA, 19 nt, Artificial Sequence
  Description of Artificial Sequence: Synthetic oligonucleotide
ucgaugacaggagccuccg

SEQ ID NO: 1385254 - RNA, 19 nt, Artificial Sequence
  Description of Artificial Sequence: Synthetic oligonucleotide
acaucggugcgccggaacu

SEQ ID NO: 1385255 - RNA, 19 nt, Artificial Sequence
  Description of Artificial Sequence: Synthetic oligonucleotide
cucgagaagggcacuggug

SEQ ID NO: 1385256 - RNA, 19 nt, Artificial Sequence
  Description of Artificial Sequence: Synthetic oligonucleotide
acauacacagagccuguau

SEQ ID NO: 1385257 - RNA, 19 nt, Artificial Sequence
  Description of Artificial Sequence: Synthetic oligonucleotide
agggagacuuggcacguug

SEQ ID NO: 1385258 - RNA, 19 nt, Artificial Sequence
  Description of Artificial Sequence: Synthetic oligonucleotide
uccggcacucucaggaagu

SEQ ID NO: 1385259 - RNA, 19 nt, Artificial Sequence
  Description of Artificial Sequence: Synthetic oligonucleotide
ugcagguguacaucuucac

SEQ ID NO: 1385260 - RNA, 19 nt, Artificial Sequence
  Description of Artificial Sequence: Synthetic oligonucleotide
guaucaggguucucgagaa

SEQ ID NO: 1385261 - RNA, 19 nt, Artificial Sequence
  Description of Artificial Sequence: Synthetic oligonucleotide
aggaccacauaguuaggaa

SEQ ID NO: 1385262 - RNA, 19 nt, Artificial Sequence
  Description of Artificial Sequence: Synthetic oligonucleotide
agcuuaggucuggaaaggg

SEQ ID NO: 1385263 - RNA, 19 nt, Artificial Sequence
  Description of Artificial Sequence: Synthetic oligonucleotide
agggacaucggugcgccgg

SEQ ID NO: 1385264 - RNA, 19 nt, Artificial Sequence
  Description of Artificial Sequence: Synthetic oligonucleotide
ugccuggugucacaguuua

SEQ ID NO: 1385265 - RNA, 19 nt, Artificial Sequence
  Description of Artificial Sequence: Synthetic oligonucleotide
cagcauaggccuagcaaug

SEQ ID NO: 1385266 - RNA, 19 nt, Artificial Sequence
  Description of Artificial Sequence: Synthetic oligonucleotide
cacucucaggaaguuaagc

SEQ ID NO: 1385267 - RNA, 19 nt, Artificial Sequence
  Description of Artificial Sequence: Synthetic oligonucleotide
uggcaugggugcaggguag

SEQ ID NO: 1385268 - RNA, 19 nt, Artificial Sequence
  Description of Artificial Sequence: Synthetic oligonucleotide
ugggaagacacagcuggca

SEQ ID NO: 1385269 - RNA, 19 nt, Artificial Sequence
  Description of Artificial Sequence: Synthetic oligonucleotide
caggccaacagguaacaca

SEQ ID NO: 1385270 - RNA, 19 nt, Artificial Sequence
  Description of Artificial Sequence: Synthetic oligonucleotide
ugcccucccucccuguaag

SEQ ID NO: 1385271 - RNA, 19 nt, Artificial Sequence
  Description of Artificial Sequence: Synthetic oligonucleotide
cugccauucgaacuugcuc

SEQ ID NO: 1385272 - RNA, 19 nt, Artificial Sequence
  Description of Artificial Sequence: Synthetic oligonucleotide
ccagagguaaucaggggag

SEQ ID NO: 1385273 - RNA, 19 nt, Artificial Sequence
  Description of Artificial Sequence: Synthetic oligonucleotide
cagcuguugcucagcauag

SEQ ID NO: 1385274 - RNA, 19 nt, Artificial Sequence
  Description of Artificial Sequence: Synthetic oligonucleotide
guagcaggcaccagaggcc

SEQ ID NO: 1385275 - RNA, 19 nt, Artificial Sequence
  Description of Artificial Sequence: Synthetic oligonucleotide
agccacgaacacgaaguac

SEQ ID NO: 1385276 - RNA, 19 nt, Artificial Sequence
  Description of Artificial Sequence: Synthetic oligonucleotide
ugucgaucacacccacugu

SEQ ID NO: 1385277 - RNA, 19 nt, Artificial Sequence
  Description of Artificial Sequence: Synthetic oligonucleotide
ucacgccccacauccagcu

SEQ ID NO: 1385278 - RNA, 19 nt, Artificial Sequence
  Description of Artificial Sequence: Synthetic oligonucleotide
cucgaggagcccacggaag

SEQ ID NO: 1385279 - RNA, 19 nt, Artificial Sequence
  Description of Artificial Sequence: Synthetic oligonucleotide
gucuugguuaagacggcag

SEQ ID NO: 1385280 - RNA, 19 nt, Artificial Sequence
  Description of Artificial Sequence: Synthetic oligonucleotide
aacaacccgcugccuggag

SEQ ID NO: 1385281 - RNA, 19 nt, Artificial Sequence
  Description of Artificial Sequence: Synthetic oligonucleotide
cuguaucaggguucucgag

SEQ ID NO: 1385282 - RNA, 19 nt, Artificial Sequence
  Description of Artificial Sequence: Synthetic oligonucleotide
uauucuccauagccagccu

SEQ ID NO: 1385283 - RNA, 19 nt, Artificial Sequence
  Description of Artificial Sequence: Synthetic oligonucleotide
auggugaggaaagccaggu

SEQ ID NO: 1385284 - RNA, 19 nt, Artificial Sequence
  Description of Artificial Sequence: Synthetic oligonucleotide
cugaguucccaagggagac

SEQ ID NO: 1385285 - RNA, 19 nt, Artificial Sequence
  Description of Artificial Sequence: Synthetic oligonucleotide
gggauaggggcuuucuaug

SEQ ID NO: 1385286 - RNA, 19 nt, Artificial Sequence
  Description of Artificial Sequence: Synthetic oligonucleotide
agagacuuggugggccugg

SEQ ID NO: 1385287 - RNA, 19 nt, Artificial Sequence
  Description of Artificial Sequence: Synthetic oligonucleotide
cagagcuuaggucuggaaa

SEQ ID NO: 1385288 - RNA, 19 nt, Artificial Sequence
  Description of Artificial Sequence: Synthetic oligonucleotide
guuuauaaaccaugagaau

SEQ ID NO: 1385289 - RNA, 19 nt, Artificial Sequence
  Description of Artificial Sequence: Synthetic oligonucleotide
gguuaagacggcaggcggg

SEQ ID NO: 1385290 - RNA, 19 nt, Artificial Sequence
  Description of Artificial Sequence: Synthetic oligonucleotide
cucagcauaggccuagcaa

SEQ ID NO: 1385291 - RNA, 19 nt, Artificial Sequence
  Description of Artificial Sequence: Synthetic oligonucleotide
acuuggcacguuggcaugg

SEQ ID NO: 1385292 - RNA, 19 nt, Artificial Sequence
  Description of Artificial Sequence: Synthetic oligonucleotide
gacuuggcacguuggcaug

SEQ ID NO: 1385293 - RNA, 19 nt, Artificial Sequence
  Description of Artificial Sequence: Synthetic oligonucleotide
ucaucucacgccccacauc

SEQ ID NO: 1385294 - RNA, 19 nt, Artificial Sequence
  Description of Artificial Sequence: Synthetic oligonucleotide
caggcagguggugaguggg

SEQ ID NO: 1385295 - RNA, 19 nt, Artificial Sequence
  Description of Artificial Sequence: Synthetic oligonucleotide
  modified_base (15)..(15): a, c, u, g, unknown or other
uugcuccggaacccngaag

SEQ ID NO: 1385296 - RNA, 19 nt, Artificial Sequence
  Description of Artificial Sequence: Synthetic oligonucleotide
gcuuaggucuggaaagggg

SEQ ID NO: 1385297 - RNA, 19 nt, Artificial Sequence
  Description of Artificial Sequence: Synthetic oligonucleotide
gagacuuggcacguuggca

SEQ ID NO: 1385298 - RNA, 19 nt, Artificial Sequence
  Description of Artificial Sequence: Synthetic oligonucleotide
gcaugcaagagggagaaga

SEQ ID NO: 1385299 - RNA, 19 nt, Artificial Sequence
  Description of Artificial Sequence: Synthetic oligonucleotide
agaggccuagcuuggccca

SEQ ID NO: 1385300 - RNA, 19 nt, Artificial Sequence
  Description of Artificial Sequence: Synthetic oligonucleotide
cagcauccaggaaggaaac

SEQ ID NO: 1385301 - RNA, 19 nt, Artificial Sequence
  Description of Artificial Sequence: Synthetic oligonucleotide
caauggcggaaggaggagc

SEQ ID NO: 1385302 - RNA, 19 nt, Artificial Sequence
  Description of Artificial Sequence: Synthetic oligonucleotide
ggguauagggaccuaaaua

SEQ ID NO: 1385303 - RNA, 19 nt, Artificial Sequence
  Description of Artificial Sequence: Synthetic oligonucleotide
gggagcagagcuuaggucu

SEQ ID NO: 1385304 - RNA, 19 nt, Artificial Sequence
  Description of Artificial Sequence: Synthetic oligonucleotide
ggcugaguucccaagggag

SEQ ID NO: 1385305 - RNA, 19 nt, Artificial Sequence
  Description of Artificial Sequence: Synthetic oligonucleotide
aagggcacuggugccccuc

SEQ ID NO: 1385306 - RNA, 19 nt, Artificial Sequence
  Description of Artificial Sequence: Synthetic oligonucleotide
ggagacuuggcacguuggc

SEQ ID NO: 1385307 - RNA, 19 nt, Artificial Sequence
  Description of Artificial Sequence: Synthetic oligonucleotide
gucgaugacaggagccucc

SEQ ID NO: 1385308 - RNA, 19 nt, Artificial Sequence
  Description of Artificial Sequence: Synthetic oligonucleotide
gagccuccggcacucucag

SEQ ID NO: 1385309 - RNA, 19 nt, Artificial Sequence
  Description of Artificial Sequence: Synthetic oligonucleotide
  modified_base (4)..(4): a, c, u, g, unknown or other
cccngaaggaucuugccca

SEQ ID NO: 1385310 - RNA, 19 nt, Artificial Sequence
  Description of Artificial Sequence: Synthetic oligonucleotide
aggagcuggcagccggccg

SEQ ID NO: 1385311 - RNA, 19 nt, Artificial Sequence
  Description of Artificial Sequence: Synthetic oligonucleotide
gcuuucuaugucuugguua

SEQ ID NO: 1385312 - RNA, 19 nt, Artificial Sequence
  Description of Artificial Sequence: Synthetic oligonucleotide
ggcaaaggugcgcugggug

SEQ ID NO: 1385313 - RNA, 19 nt, Artificial Sequence
  Description of Artificial Sequence: Synthetic oligonucleotide
cucccucccuguaagccug

SEQ ID NO: 1385314 - RNA, 19 nt, Artificial Sequence
  Description of Artificial Sequence: Synthetic oligonucleotide
gccacgaacacgaaguaca

SEQ ID NO: 1385315 - RNA, 19 nt, Artificial Sequence
  Description of Artificial Sequence: Synthetic oligonucleotide
acccagcggggacaccagc

SEQ ID NO: 1385316 - RNA, 19 nt, Artificial Sequence
  Description of Artificial Sequence: Synthetic oligonucleotide
gggcugaaagacucagucc

SEQ ID NO: 1385317 - RNA, 19 nt, Artificial Sequence
  Description of Artificial Sequence: Synthetic oligonucleotide
gacaucggugcgccggaac

SEQ ID NO: 1385318 - RNA, 19 nt, Artificial Sequence
  Description of Artificial Sequence: Synthetic oligonucleotide
augucuggagggccucaag

SEQ ID NO: 1385319 - RNA, 19 nt, Artificial Sequence
  Description of Artificial Sequence: Synthetic oligonucleotide
ggaccacauaguuaggaaa

SEQ ID NO: 1385320 - RNA, 19 nt, Artificial Sequence
  Description of Artificial Sequence: Synthetic oligonucleotide
aaugucuggagggccucaa

SEQ ID NO: 1385321 - RNA, 19 nt, Artificial Sequence
  Description of Artificial Sequence: Synthetic oligonucleotide
ggcaauccuguuaugcagc

SEQ ID NO: 1385322 - RNA, 19 nt, Artificial Sequence
  Description of Artificial Sequence: Synthetic oligonucleotide
uggggagaagcugcugggc

SEQ ID NO: 1385323 - RNA, 19 nt, Artificial Sequence
  Description of Artificial Sequence: Synthetic oligonucleotide
aacccgcugccuggaggcc

SEQ ID NO: 1385324 - RNA, 19 nt, Artificial Sequence
  Description of Artificial Sequence: Synthetic oligonucleotide
ucccggucagcccugccau

SEQ ID NO: 1385325 - RNA, 19 nt, Artificial Sequence
  Description of Artificial Sequence: Synthetic oligonucleotide
acagcgccaccaccaauga

SEQ ID NO: 1385326 - RNA, 19 nt, Artificial Sequence
  Description of Artificial Sequence: Synthetic oligonucleotide
cacgaaguacauacacaga

SEQ ID NO: 1385327 - RNA, 19 nt, Artificial Sequence
  Description of Artificial Sequence: Synthetic oligonucleotide
aggggcuuucuaugucuug

SEQ ID NO: 1385328 - RNA, 19 nt, Artificial Sequence
  Description of Artificial Sequence: Synthetic oligonucleotide
guauagggaccuaaauaaa

SEQ ID NO: 1385329 - RNA, 19 nt, Artificial Sequence
  Description of Artificial Sequence: Synthetic oligonucleotide
cuguucuaggugcccuccc

SEQ ID NO: 1385330 - RNA, 19 nt, Artificial Sequence
  Description of Artificial Sequence: Synthetic oligonucleotide
gaggccggggagcagagcu

SEQ ID NO: 1385331 - RNA, 19 nt, Artificial Sequence
  Description of Artificial Sequence: Synthetic oligonucleotide
agcuguugcucagcauagg

SEQ ID NO: 1385332 - RNA, 19 nt, Artificial Sequence
  Description of Artificial Sequence: Synthetic oligonucleotide
agggaagcccugggaagac

SEQ ID NO: 1385333 - RNA, 19 nt, Artificial Sequence
  Description of Artificial Sequence: Synthetic oligonucleotide
agccccuuagucagggaag

SEQ ID NO: 1385334 - RNA, 19 nt, Artificial Sequence
  Description of Artificial Sequence: Synthetic oligonucleotide
ucccgucgcugccagcgug

SEQ ID NO: 1385335 - RNA, 19 nt, Artificial Sequence
  Description of Artificial Sequence: Synthetic oligonucleotide
ugaguucccaagggagacu

SEQ ID NO: 1385336 - RNA, 19 nt, Artificial Sequence
  Description of Artificial Sequence: Synthetic oligonucleotide
agcccacggaaggacacag

SEQ ID NO: 1385337 - RNA, 19 nt, Artificial Sequence
  Description of Artificial Sequence: Synthetic oligonucleotide
cuuggcacguuggcauggg

SEQ ID NO: 1385338 - RNA, 19 nt, Artificial Sequence
  Description of Artificial Sequence: Synthetic oligonucleotide
  modified_base (8)..(8): a, c, u, g, unknown or other
ggaacccngaaggaucuug

SEQ ID NO: 1385339 - RNA, 19 nt, Artificial Sequence
  Description of Artificial Sequence: Synthetic oligonucleotide
caaguggcucuggcaaucc

SEQ ID NO: 1385340 - RNA, 19 nt, Artificial Sequence
  Description of Artificial Sequence: Synthetic oligonucleotide
gaucacacccacuguucua

SEQ ID NO: 1385341 - RNA, 19 nt, Artificial Sequence
  Description of Artificial Sequence: Synthetic oligonucleotide
ggguagguaaagcaugcaa

SEQ ID NO: 1385342 - RNA, 19 nt, Artificial Sequence
  Description of Artificial Sequence: Synthetic oligonucleotide
ugucgaugacaggagccuc

SEQ ID NO: 1385343 - RNA, 19 nt, Artificial Sequence
  Description of Artificial Sequence: Synthetic oligonucleotide
ggcaagguauacagggcag

SEQ ID NO: 1385344 - RNA, 19 nt, Artificial Sequence
  Description of Artificial Sequence: Synthetic oligonucleotide
cagccggccggaaugucug

SEQ ID NO: 1385345 - RNA, 19 nt, Artificial Sequence
  Description of Artificial Sequence: Synthetic oligonucleotide
agcuggcaagguauacagg

SEQ ID NO: 1385346 - RNA, 19 nt, Artificial Sequence
  Description of Artificial Sequence: Synthetic oligonucleotide
  modified_base (16)..(16): a, c, u, g, unknown or other
cuugcuccggaacccngaa

SEQ ID NO: 1385347 - RNA, 19 nt, Artificial Sequence
  Description of Artificial Sequence: Synthetic oligonucleotide
uuaagacggcaggcggggc

SEQ ID NO: 1385348 - RNA, 19 nt, Artificial Sequence
  Description of Artificial Sequence: Synthetic oligonucleotide
caucccucccggucagccc

SEQ ID NO: 1385349 - RNA, 19 nt, Artificial Sequence
  Description of Artificial Sequence: Synthetic oligonucleotide
augggauaggggcuuucua

SEQ ID NO: 1385350 - RNA, 19 nt, Artificial Sequence
  Description of Artificial Sequence: Synthetic oligonucleotide
  modified_base (19)..(19): a, c, u, g, unknown or other
gaacuugcuccggaacccn

SEQ ID NO: 1385351 - RNA, 19 nt, Artificial Sequence
  Description of Artificial Sequence: Synthetic oligonucleotide
ggugucacaguuuauuguu

SEQ ID NO: 1385352 - RNA, 19 nt, Artificial Sequence
  Description of Artificial Sequence: Synthetic oligonucleotide
uuggcacguuggcaugggu

SEQ ID NO: 1385353 - RNA, 19 nt, Artificial Sequence
  Description of Artificial Sequence: Synthetic oligonucleotide
aggaaaagucuggggagaa

SEQ ID NO: 1385354 - RNA, 19 nt, Artificial Sequence
  Description of Artificial Sequence: Synthetic oligonucleotide
caaaggugcgcuggguguc

SEQ ID NO: 1385355 - RNA, 19 nt, Artificial Sequence
  Description of Artificial Sequence: Synthetic oligonucleotide
ggcacucucaggaaguuaa

SEQ ID NO: 1385356 - RNA, 19 nt, Artificial Sequence
  Description of Artificial Sequence: Synthetic oligonucleotide
ugcgcugggugucgaugac

SEQ ID NO: 1385357 - RNA, 19 nt, Artificial Sequence
  Description of Artificial Sequence: Synthetic oligonucleotide
acguuggcaugggugcagg

SEQ ID NO: 1385358 - RNA, 19 nt, Artificial Sequence
  Description of Artificial Sequence: Synthetic oligonucleotide
ggaccuaaauaaaauggua

SEQ ID NO: 1385359 - RNA, 19 nt, Artificial Sequence
  Description of Artificial Sequence: Synthetic oligonucleotide
ccuagcaaugcccacugca

SEQ ID NO: 1385360 - RNA, 19 nt, Artificial Sequence
  Description of Artificial Sequence: Synthetic oligonucleotide
cccuuagucagggaagccc

SEQ ID NO: 1385361 - RNA, 19 nt, Artificial Sequence
  Description of Artificial Sequence: Synthetic oligonucleotide
uacauacacagagccugua

SEQ ID NO: 1385362 - RNA, 19 nt, Artificial Sequence
  Description of Artificial Sequence: Synthetic oligonucleotide
gccuccggcacucucagga

SEQ ID NO: 1385363 - RNA, 19 nt, Artificial Sequence
  Description of Artificial Sequence: Synthetic oligonucleotide
cagccuuguugcagccacg

SEQ ID NO: 1385364 - RNA, 19 nt, Artificial Sequence
  Description of Artificial Sequence: Synthetic oligonucleotide
cucaaagccuggcugccaa

SEQ ID NO: 1385365 - RNA, 19 nt, Artificial Sequence
  Description of Artificial Sequence: Synthetic oligonucleotide
cacauccagcuggcaaugg

SEQ ID NO: 1385366 - RNA, 19 nt, Artificial Sequence
  Description of Artificial Sequence: Synthetic oligonucleotide
ggccuagcaaugcccacug

SEQ ID NO: 1385367 - RNA, 19 nt, Artificial Sequence
  Description of Artificial Sequence: Synthetic oligonucleotide
gugcgcugggugucgauga

SEQ ID NO: 1385368 - RNA, 19 nt, Artificial Sequence
  Description of Artificial Sequence: Synthetic oligonucleotide
aucggugcgccggaacuca

SEQ ID NO: 1385369 - RNA, 19 nt, Artificial Sequence
  Description of Artificial Sequence: Synthetic oligonucleotide
cacagcuggcaagguauac

SEQ ID NO: 1385370 - RNA, 19 nt, Artificial Sequence
  Description of Artificial Sequence: Synthetic oligonucleotide
gagcugucgaucacaccca

SEQ ID NO: 1385371 - RNA, 19 nt, Artificial Sequence
  Description of Artificial Sequence: Synthetic oligonucleotide
ugggugcaggguagguaaa

SEQ ID NO: 1385372 - RNA, 19 nt, Artificial Sequence
  Description of Artificial Sequence: Synthetic oligonucleotide
aacccagcggggacaccag

SEQ ID NO: 1385373 - RNA, 19 nt, Artificial Sequence
  Description of Artificial Sequence: Synthetic oligonucleotide
gggaagacacagcuggcaa

SEQ ID NO: 1385374 - RNA, 19 nt, Artificial Sequence
  Description of Artificial Sequence: Synthetic oligonucleotide
cacguuggcaugggugcag

SEQ ID NO: 1385375 - RNA, 19 nt, Artificial Sequence
  Description of Artificial Sequence: Synthetic oligonucleotide
auacagggcaggaccacau

SEQ ID NO: 1385376 - RNA, 19 nt, Artificial Sequence
  Description of Artificial Sequence: Synthetic oligonucleotide
gggacagaagggacaugcg

SEQ ID NO: 1385377 - RNA, 19 nt, Artificial Sequence
  Description of Artificial Sequence: Synthetic oligonucleotide
gggaccuaaauaaaauggu

SEQ ID NO: 1385378 - RNA, 19 nt, Artificial Sequence
  Description of Artificial Sequence: Synthetic oligonucleotide
gucgaucacacccacuguu

SEQ ID NO: 1385379 - RNA, 19 nt, Artificial Sequence
  Description of Artificial Sequence: Synthetic oligonucleotide
acacaggcccugagcaguc

SEQ ID NO: 1385380 - RNA, 19 nt, Artificial Sequence
  Description of Artificial Sequence: Synthetic oligonucleotide
gcugcugggcaaacaaccc

SEQ ID NO: 1385381 - RNA, 19 nt, Artificial Sequence
  Description of Artificial Sequence: Synthetic oligonucleotide
guaaagcaugcaagaggga

SEQ ID NO: 1385382 - RNA, 19 nt, Artificial Sequence
  Description of Artificial Sequence: Synthetic oligonucleotide
aggacacagcauccaggaa

SEQ ID NO: 1385383 - RNA, 19 nt, Artificial Sequence
  Description of Artificial Sequence: Synthetic oligonucleotide
aggguagguaaagcaugca

SEQ ID NO: 1385384 - RNA, 19 nt, Artificial Sequence
  Description of Artificial Sequence: Synthetic oligonucleotide
  modified_base (17)..(17): a, c, u, g, unknown or other
acuugcuccggaacccnga

SEQ ID NO: 1385385 - RNA, 19 nt, Artificial Sequence
  Description of Artificial Sequence: Synthetic oligonucleotide
gguggcaggggcacugugc

SEQ ID NO: 1385386 - RNA, 19 nt, Artificial Sequence
  Description of Artificial Sequence: Synthetic oligonucleotide
gcagccacgaacacgaagu

SEQ ID NO: 1385387 - RNA, 19 nt, Artificial Sequence
  Description of Artificial Sequence: Synthetic oligonucleotide
cagaagggacaugcggcug

SEQ ID NO: 1385388 - RNA, 19 nt, Artificial Sequence
  Description of Artificial Sequence: Synthetic oligonucleotide
aggcuguaguucagcauca

SEQ ID NO: 1385389 - RNA, 19 nt, Artificial Sequence
  Description of Artificial Sequence: Synthetic oligonucleotide
ccuaaauaaaaugguaggu

SEQ ID NO: 1385390 - RNA, 19 nt, Artificial Sequence
  Description of Artificial Sequence: Synthetic oligonucleotide
agggagcuuggcaaggcaa

SEQ ID NO: 1385391 - RNA, 19 nt, Artificial Sequence
  Description of Artificial Sequence: Synthetic oligonucleotide
gucacaguuuauuguuuau

SEQ ID NO: 1385392 - RNA, 19 nt, Artificial Sequence
  Description of Artificial Sequence: Synthetic oligonucleotide
ccaacagguaacacagaga

SEQ ID NO: 1385393 - RNA, 19 nt, Artificial Sequence
  Description of Artificial Sequence: Synthetic oligonucleotide
agccggccggaaugucugg

SEQ ID NO: 1385394 - RNA, 19 nt, Artificial Sequence
  Description of Artificial Sequence: Synthetic oligonucleotide
agggccucaaguggcucug

SEQ ID NO: 1385395 - RNA, 19 nt, Artificial Sequence
  Description of Artificial Sequence: Synthetic oligonucleotide
cagcuggcaauggcggaag

SEQ ID NO: 1385396 - RNA, 19 nt, Artificial Sequence
  Description of Artificial Sequence: Synthetic oligonucleotide
ggauaggggcuuucuaugu

SEQ ID NO: 1385397 - RNA, 19 nt, Artificial Sequence
  Description of Artificial Sequence: Synthetic oligonucleotide
ccgcucguaguccaagcag

SEQ ID NO: 1385398 - RNA, 19 nt, Artificial Sequence
  Description of Artificial Sequence: Synthetic oligonucleotide
aggccuagcuuggcccaac

SEQ ID NO: 1385399 - RNA, 19 nt, Artificial Sequence
  Description of Artificial Sequence: Synthetic oligonucleotide
cccagcggggacaccagcc

SEQ ID NO: 1385400 - RNA, 19 nt, Artificial Sequence
  Description of Artificial Sequence: Synthetic oligonucleotide
ccuguaucaggguucucga

SEQ ID NO: 1385401 - RNA, 19 nt, Artificial Sequence
  Description of Artificial Sequence: Synthetic oligonucleotide
agcagagcuuaggucugga

SEQ ID NO: 1385402 - RNA, 19 nt, Artificial Sequence
  Description of Artificial Sequence: Synthetic oligonucleotide
gaggcgugugcagguguac

SEQ ID NO: 1385403 - RNA, 19 nt, Artificial Sequence
  Description of Artificial Sequence: Synthetic oligonucleotide
cucccggucagcccugcca

SEQ ID NO: 1385404 - RNA, 19 nt, Artificial Sequence
  Description of Artificial Sequence: Synthetic oligonucleotide
  modified_base (2)..(2): a, c, u, g, unknown or other
cngaaggaucuugcccaug

SEQ ID NO: 1385405 - RNA, 19 nt, Artificial Sequence
  Description of Artificial Sequence: Synthetic oligonucleotide
guuggcaugggugcagggu

SEQ ID NO: 1385406 - RNA, 19 nt, Artificial Sequence
  Description of Artificial Sequence: Synthetic oligonucleotide
gcagggacaucggugcgcc

SEQ ID NO: 1385407 - RNA, 19 nt, Artificial Sequence
  Description of Artificial Sequence: Synthetic oligonucleotide
cuggggaggcucaaagccu

SEQ ID NO: 1385408 - RNA, 19 nt, Artificial Sequence
  Description of Artificial Sequence: Synthetic oligonucleotide
ggcucuggcaauccuguua

SEQ ID NO: 1385409 - RNA, 19 nt, Artificial Sequence
  Description of Artificial Sequence: Synthetic oligonucleotide
guguacaucuucacuguau

SEQ ID NO: 1385410 - RNA, 19 nt, Artificial Sequence
  Description of Artificial Sequence: Synthetic oligonucleotide
caucggugcgccggaacuc

SEQ ID NO: 1385411 - RNA, 19 nt, Artificial Sequence
  Description of Artificial Sequence: Synthetic oligonucleotide
gugucgaugacaggagccu

SEQ ID NO: 1385412 - RNA, 19 nt, Artificial Sequence
  Description of Artificial Sequence: Synthetic oligonucleotide
gcugaguucccaagggaga

SEQ ID NO: 1385413 - RNA, 19 nt, Artificial Sequence
  Description of Artificial Sequence: Synthetic oligonucleotide
ggugccccucaccuccucc

SEQ ID NO: 1385414 - RNA, 19 nt, Artificial Sequence
  Description of Artificial Sequence: Synthetic oligonucleotide
cgaacuugcuccggaaccc

SEQ ID NO: 1385415 - RNA, 19 nt, Artificial Sequence
  Description of Artificial Sequence: Synthetic oligonucleotide
agccuccggcacucucagg

SEQ ID NO: 1385416 - RNA, 19 nt, Artificial Sequence
  Description of Artificial Sequence: Synthetic oligonucleotide
cacuggugccccucaccuc

SEQ ID NO: 1385417 - RNA, 19 nt, Artificial Sequence
  Description of Artificial Sequence: Synthetic oligonucleotide
ggugcgcugggugucgaug

SEQ ID NO: 1385418 - RNA, 19 nt, Artificial Sequence
  Description of Artificial Sequence: Synthetic oligonucleotide
gaguucccaagggagacuu

SEQ ID NO: 1385419 - RNA, 19 nt, Artificial Sequence
  Description of Artificial Sequence: Synthetic oligonucleotide
gcaaaggugcgcugggugu

SEQ ID NO: 1385420 - RNA, 19 nt, Artificial Sequence
  Description of Artificial Sequence: Synthetic oligonucleotide
ggcagagcugucgaucaca

SEQ ID NO: 1385421 - RNA, 19 nt, Artificial Sequence
  Description of Artificial Sequence: Synthetic oligonucleotide
cagcggggacaccagccuc

SEQ ID NO: 1385422 - RNA, 19 nt, Artificial Sequence
  Description of Artificial Sequence: Synthetic oligonucleotide
gccccuuagucagggaagc

SEQ ID NO: 1385423 - RNA, 19 nt, Artificial Sequence
  Description of Artificial Sequence: Synthetic oligonucleotide
ggcaugggugcaggguagg

SEQ ID NO: 1385424 - RNA, 19 nt, Artificial Sequence
  Description of Artificial Sequence: Synthetic oligonucleotide
cagagguaaucaggggaga

SEQ ID NO: 1385425 - RNA, 19 nt, Artificial Sequence
  Description of Artificial Sequence: Synthetic oligonucleotide
gggcagggacaucggugcg

SEQ ID NO: 1385426 - RNA, 19 nt, Artificial Sequence
  Description of Artificial Sequence: Synthetic oligonucleotide
aguucccaagggagacuug

SEQ ID NO: 1385427 - RNA, 19 nt, Artificial Sequence
  Description of Artificial Sequence: Synthetic oligonucleotide
ggcagggacaucggugcgc

SEQ ID NO: 1385428 - RNA, 19 nt, Artificial Sequence
  Description of Artificial Sequence: Synthetic oligonucleotide
gcgccggaacucaacagug

SEQ ID NO: 1385429 - RNA, 19 nt, Artificial Sequence
  Description of Artificial Sequence: Synthetic oligonucleotide
cagggcaggaccacauagu

SEQ ID NO: 1385430 - RNA, 19 nt, Artificial Sequence
  Description of Artificial Sequence: Synthetic oligonucleotide
ggcccaggccaacagguaa

SEQ ID NO: 1385431 - RNA, 19 nt, Artificial Sequence
  Description of Artificial Sequence: Synthetic oligonucleotide
gacggcaggcggggccugg

SEQ ID NO: 1385432 - RNA, 19 nt, Artificial Sequence
  Description of Artificial Sequence: Synthetic oligonucleotide
gccggaacucaacagugua

SEQ ID NO: 1385433 - RNA, 19 nt, Artificial Sequence
  Description of Artificial Sequence: Synthetic oligonucleotide
ucggugcgccggaacucaa

SEQ ID NO: 1385434 - RNA, 19 nt, Artificial Sequence
  Description of Artificial Sequence: Synthetic oligonucleotide
cagggacaucggugcgccg

SEQ ID NO: 1385435 - RNA, 19 nt, Artificial Sequence
  Description of Artificial Sequence: Synthetic oligonucleotide
gccggaaugucuggagggc

SEQ ID NO: 1385436 - RNA, 19 nt, Artificial Sequence
  Description of Artificial Sequence: Synthetic oligonucleotide
uugcagccacgaacacgaa

SEQ ID NO: 1385437 - RNA, 19 nt, Artificial Sequence
  Description of Artificial Sequence: Synthetic oligonucleotide
guacauacacagagccugu

SEQ ID NO: 1385438 - RNA, 19 nt, Artificial Sequence
  Description of Artificial Sequence: Synthetic oligonucleotide
uggcagccggccggaaugu

SEQ ID NO: 1385439 - RNA, 19 nt, Artificial Sequence
  Description of Artificial Sequence: Synthetic oligonucleotide
cagcccugccauucgaacu

SEQ ID NO: 1385440 - RNA, 19 nt, Artificial Sequence
  Description of Artificial Sequence: Synthetic oligonucleotide
caugggugcaggguaggua

SEQ ID NO: 1385441 - RNA, 19 nt, Artificial Sequence
  Description of Artificial Sequence: Synthetic oligonucleotide
ccuuagucagggaagcccu

SEQ ID NO: 1385442 - RNA, 19 nt, Artificial Sequence
  Description of Artificial Sequence: Synthetic oligonucleotide
cacacccacuguucuaggu

SEQ ID NO: 1385443 - RNA, 19 nt, Artificial Sequence
  Description of Artificial Sequence: Synthetic oligonucleotide
ccggaaugucuggagggcc

SEQ ID NO: 1385444 - RNA, 19 nt, Artificial Sequence
  Description of Artificial Sequence: Synthetic oligonucleotide
cacaggcccugagcagucc

SEQ ID NO: 1385445 - RNA, 19 nt, Artificial Sequence
  Description of Artificial Sequence: Synthetic oligonucleotide
ggccuagcuuggcccaacc

SEQ ID NO: 1385446 - RNA, 19 nt, Artificial Sequence
  Description of Artificial Sequence: Synthetic oligonucleotide
ggcaagacagggaugggau

SEQ ID NO: 1385447 - RNA, 19 nt, Artificial Sequence
  Description of Artificial Sequence: Synthetic oligonucleotide
ggaggacauccagagguaa

SEQ ID NO: 1385448 - RNA, 19 nt, Artificial Sequence
  Description of Artificial Sequence: Synthetic oligonucleotide
gggguauagggaccuaaau

SEQ ID NO: 1385449 - RNA, 19 nt, Artificial Sequence
  Description of Artificial Sequence: Synthetic oligonucleotide
cacgccccacauccagcug

SEQ ID NO: 1385450 - RNA, 19 nt, Artificial Sequence
  Description of Artificial Sequence: Synthetic oligonucleotide
gcaggaccacauaguuagg

SEQ ID NO: 1385451 - RNA, 19 nt, Artificial Sequence
  Description of Artificial Sequence: Synthetic oligonucleotide
acaccagccucggcugagu

SEQ ID NO: 1385452 - RNA, 19 nt, Artificial Sequence
  Description of Artificial Sequence: Synthetic oligonucleotide
caugagaaucacagcuguu

SEQ ID NO: 1385453 - RNA, 19 nt, Artificial Sequence
  Description of Artificial Sequence: Synthetic oligonucleotide
ccauucgaacuugcuccgg

SEQ ID NO: 1385454 - RNA, 19 nt, Artificial Sequence
  Description of Artificial Sequence: Synthetic oligonucleotide
cucaaguggcucuggcaau

SEQ ID NO: 1385455 - RNA, 19 nt, Artificial Sequence
  Description of Artificial Sequence: Synthetic oligonucleotide
gcucagcauaggccuagca

SEQ ID NO: 1385456 - RNA, 19 nt, Artificial Sequence
  Description of Artificial Sequence: Synthetic oligonucleotide
ggucagcccugccauucga

SEQ ID NO: 1385457 - RNA, 19 nt, Artificial Sequence
  Description of Artificial Sequence: Synthetic oligonucleotide
cagagccuguaucaggguu

SEQ ID NO: 1385458 - RNA, 19 nt, Artificial Sequence
  Description of Artificial Sequence: Synthetic oligonucleotide
ggcacucgaggagcccacg

SEQ ID NO: 1385459 - RNA, 19 nt, Artificial Sequence
  Description of Artificial Sequence: Synthetic oligonucleotide
ggaggagcuggcagccggc

SEQ ID NO: 1385460 - RNA, 19 nt, Artificial Sequence
  Description of Artificial Sequence: Synthetic oligonucleotide
cgcucguaguccaagcaga

SEQ ID NO: 1385461 - RNA, 19 nt, Artificial Sequence
  Description of Artificial Sequence: Synthetic oligonucleotide
gcagagcuuaggucuggaa

SEQ ID NO: 1385462 - RNA, 19 nt, Artificial Sequence
  Description of Artificial Sequence: Synthetic oligonucleotide
ccggaacucaacaguguaa

SEQ ID NO: 1385463 - RNA, 19 nt, Artificial Sequence
  Description of Artificial Sequence: Synthetic oligonucleotide
acaggcuccugcagcugaa

SEQ ID NO: 1385464 - RNA, 19 nt, Artificial Sequence
  Description of Artificial Sequence: Synthetic oligonucleotide
cgaacacgaaguacauaca

SEQ ID NO: 1385465 - RNA, 19 nt, Artificial Sequence
  Description of Artificial Sequence: Synthetic oligonucleotide
gggacaucggugcgccgga

SEQ ID NO: 1385466 - RNA, 19 nt, Artificial Sequence
  Description of Artificial Sequence: Synthetic oligonucleotide
cagccacgaacacgaagua

SEQ ID NO: 1385467 - RNA, 19 nt, Artificial Sequence
  Description of Artificial Sequence: Synthetic oligonucleotide
cacgaacacgaaguacaua

SEQ ID NO: 1385468 - RNA, 19 nt, Artificial Sequence
  Description of Artificial Sequence: Synthetic oligonucleotide
aggugcgcugggugucgau

SEQ ID NO: 1385469 - RNA, 19 nt, Artificial Sequence
  Description of Artificial Sequence: Synthetic oligonucleotide
ccccgcucguaguccaagc

SEQ ID NO: 1385470 - RNA, 19 nt, Artificial Sequence
  Description of Artificial Sequence: Synthetic oligonucleotide
ccggggagcagagcuuagg

SEQ ID NO: 1385471 - RNA, 19 nt, Artificial Sequence
  Description of Artificial Sequence: Synthetic oligonucleotide
cccucaccuccucccgucg

SEQ ID NO: 1385472 - RNA, 19 nt, Artificial Sequence
  Description of Artificial Sequence: Synthetic oligonucleotide
  modified_base (13)..(13): a, c, u, g, unknown or other
gcuccggaacccngaagga

SEQ ID NO: 1385473 - RNA, 19 nt, Artificial Sequence
  Description of Artificial Sequence: Synthetic oligonucleotide
gcgugugcagguguacauc

SEQ ID NO: 1385474 - RNA, 19 nt, Artificial Sequence
  Description of Artificial Sequence: Synthetic oligonucleotide
gaggccuagcuuggcccaa

SEQ ID NO: 1385475 - RNA, 19 nt, Artificial Sequence
  Description of Artificial Sequence: Synthetic oligonucleotide
ggcuuucuaugucuugguu

SEQ ID NO: 1385476 - RNA, 19 nt, Artificial Sequence
  Description of Artificial Sequence: Synthetic oligonucleotide
ccacauaguuaggaaaagu

SEQ ID NO: 1385477 - RNA, 19 nt, Artificial Sequence
  Description of Artificial Sequence: Synthetic oligonucleotide
  modified_base (12)..(12): a, c, u, g, unknown or other
cuccggaacccngaaggau

SEQ ID NO: 1385478 - RNA, 19 nt, Artificial Sequence
  Description of Artificial Sequence: Synthetic oligonucleotide
cccgcucguaguccaagca

SEQ ID NO: 1385479 - RNA, 19 nt, Artificial Sequence
  Description of Artificial Sequence: Synthetic oligonucleotide
gggccucaaguggcucugg

SEQ ID NO: 1385480 - RNA, 19 nt, Artificial Sequence
  Description of Artificial Sequence: Synthetic oligonucleotide
ccccuuagucagggaagcc

SEQ ID NO: 1385481 - RNA, 19 nt, Artificial Sequence
  Description of Artificial Sequence: Synthetic oligonucleotide
gaagggcacuggugccccu

SEQ ID NO: 1385482 - RNA, 19 nt, Artificial Sequence
  Description of Artificial Sequence: Synthetic oligonucleotide
ccccucaccuccucccguc

SEQ ID NO: 1385483 - RNA, 19 nt, Artificial Sequence
  Description of Artificial Sequence: Synthetic oligonucleotide
gcucaaagccuggcugcca

SEQ ID NO: 1385484 - RNA, 19 nt, Artificial Sequence
  Description of Artificial Sequence: Synthetic oligonucleotide
agacggcaggcggggccug

SEQ ID NO: 1385485 - RNA, 19 nt, Artificial Sequence
  Description of Artificial Sequence: Synthetic oligonucleotide
ccuggugucacaguuuauu

SEQ ID NO: 1385486 - RNA, 19 nt, Artificial Sequence
  Description of Artificial Sequence: Synthetic oligonucleotide
cccaacccagcggggacac

SEQ ID NO: 1385487 - RNA, 19 nt, Artificial Sequence
  Description of Artificial Sequence: Synthetic oligonucleotide
gcacguuggcaugggugca

SEQ ID NO: 1385488 - RNA, 19 nt, Artificial Sequence
  Description of Artificial Sequence: Synthetic oligonucleotide
gcugggcagggacaucggu

SEQ ID NO: 1385489 - RNA, 19 nt, Artificial Sequence
  Description of Artificial Sequence: Synthetic oligonucleotide
cgccccacauccagcuggc

SEQ ID NO: 1385490 - RNA, 19 nt, Artificial Sequence
  Description of Artificial Sequence: Synthetic oligonucleotide
ggugcccucccucccugua

SEQ ID NO: 1385491 - RNA, 19 nt, Artificial Sequence
  Description of Artificial Sequence: Synthetic oligonucleotide
gcggaaggaggagcuggca

SEQ ID NO: 1385492 - RNA, 19 nt, Artificial Sequence
  Description of Artificial Sequence: Synthetic oligonucleotide
ggccaacagguaacacaga

SEQ ID NO: 1385493 - RNA, 19 nt, Artificial Sequence
  Description of Artificial Sequence: Synthetic oligonucleotide
ccacgaacacgaaguacau

SEQ ID NO: 1385494 - RNA, 19 nt, Artificial Sequence
  Description of Artificial Sequence: Synthetic oligonucleotide
ggccggggagcagagcuua

SEQ ID NO: 1385495 - RNA, 19 nt, Artificial Sequence
  Description of Artificial Sequence: Synthetic oligonucleotide
cgaucacacccacuguucu

SEQ ID NO: 1385496 - RNA, 19 nt, Artificial Sequence
  Description of Artificial Sequence: Synthetic oligonucleotide
gcagccggccggaaugucu

SEQ ID NO: 1385497 - RNA, 19 nt, Artificial Sequence
  Description of Artificial Sequence: Synthetic oligonucleotide
gccggggagcagagcuuag

SEQ ID NO: 1385498 - RNA, 19 nt, Artificial Sequence
  Description of Artificial Sequence: Synthetic oligonucleotide
cggcugaguucccaaggga

SEQ ID NO: 1385499 - RNA, 19 nt, Artificial Sequence
  Description of Artificial Sequence: Synthetic oligonucleotide
ggcaaacaacccgcugccu

SEQ ID NO: 1385500 - RNA, 19 nt, Artificial Sequence
  Description of Artificial Sequence: Synthetic oligonucleotide
cuggugccccucaccuccu

SEQ ID NO: 1385501 - RNA, 19 nt, Artificial Sequence
  Description of Artificial Sequence: Synthetic oligonucleotide
gccggccggaaugucugga

SEQ ID NO: 1385502 - RNA, 19 nt, Artificial Sequence
  Description of Artificial Sequence: Synthetic oligonucleotide
  modified_base (3)..(3): a, c, u, g, unknown or other
ccngaaggaucuugcccau

SEQ ID NO: 1385503 - RNA, 19 nt, Artificial Sequence
  Description of Artificial Sequence: Synthetic oligonucleotide
ccucccggucagcccugcc

SEQ ID NO: 1385504 - RNA, 19 nt, Artificial Sequence
  Description of Artificial Sequence: Synthetic oligonucleotide
gcugucgaucacacccacu

SEQ ID NO: 1385505 - RNA, 19 nt, Artificial Sequence
  Description of Artificial Sequence: Synthetic oligonucleotide
cccuguaagccuggguugu

SEQ ID NO: 1385506 - RNA, 19 nt, Artificial Sequence
  Description of Artificial Sequence: Synthetic oligonucleotide
cggggagcagagcuuaggu

SEQ ID NO: 1385507 - RNA, 19 nt, Artificial Sequence
  Description of Artificial Sequence: Synthetic oligonucleotide
ggcagccggccggaauguc

SEQ ID NO: 1385508 - RNA, 19 nt, Artificial Sequence
  Description of Artificial Sequence: Synthetic oligonucleotide
caccagccucggcugaguu

SEQ ID NO: 1385509 - RNA, 19 nt, Artificial Sequence
  Description of Artificial Sequence: Synthetic oligonucleotide
cucccgucgcugccagcgu

SEQ ID NO: 1385510 - RNA, 19 nt, Artificial Sequence
  Description of Artificial Sequence: Synthetic oligonucleotide
cugggccaucccucccggu

SEQ ID NO: 1385511 - RNA, 19 nt, Artificial Sequence
  Description of Artificial Sequence: Synthetic oligonucleotide
ccaacccagcggggacacc

SEQ ID NO: 1385512 - RNA, 19 nt, Artificial Sequence
  Description of Artificial Sequence: Synthetic oligonucleotide
cgucgcugccagcgugcag

SEQ ID NO: 1385513 - RNA, 19 nt, Artificial Sequence
  Description of Artificial Sequence: Synthetic oligonucleotide
ggacaucggugcgccggaa

SEQ ID NO: 1385514 - RNA, 19 nt, Artificial Sequence
  Description of Artificial Sequence: Synthetic oligonucleotide
ccccgauggugacuuuccu

SEQ ID NO: 1385515 - RNA, 19 nt, Artificial Sequence
  Description of Artificial Sequence: Synthetic oligonucleotide
gccccacauccagcuggca

SEQ ID NO: 1385516 - RNA, 19 nt, Artificial Sequence
  Description of Artificial Sequence: Synthetic oligonucleotide
gccuggugucacaguuuau

SEQ ID NO: 1385517 - RNA, 19 nt, Artificial Sequence
  Description of Artificial Sequence: Synthetic oligonucleotide
cggcacucucaggaaguua

SEQ ID NO: 1385518 - RNA, 19 nt, Artificial Sequence
  Description of Artificial Sequence: Synthetic oligonucleotide
ccggcacucucaggaaguu

SEQ ID NO: 1385519 - RNA, 19 nt, Artificial Sequence
  Description of Artificial Sequence: Synthetic oligonucleotide
  modified_base (9)..(9): a, c, u, g, unknown or other
cggaacccngaaggaucuu

SEQ ID NO: 1385520 - RNA, 19 nt, Artificial Sequence
  Description of Artificial Sequence: Synthetic oligonucleotide
auagauuuaaaauucaaac

SEQ ID NO: 1385521 - RNA, 19 nt, Artificial Sequence
  Description of Artificial Sequence: Synthetic oligonucleotide
uauauaucuaaucucaggg

SEQ ID NO: 1385522 - RNA, 19 nt, Artificial Sequence
  Description of Artificial Sequence: Synthetic oligonucleotide
agugauaauagcuguaugc

SEQ ID NO: 1385523 - RNA, 19 nt, Artificial Sequence
  Description of Artificial Sequence: Synthetic oligonucleotide
agaacaaacuauuugguac

SEQ ID NO: 1385524 - RNA, 19 nt, Artificial Sequence
  Description of Artificial Sequence: Synthetic oligonucleotide
aaagacaauaacuagaaua

SEQ ID NO: 1385525 - RNA, 19 nt, Artificial Sequence
  Description of Artificial Sequence: Synthetic oligonucleotide
gauugaaguacuuagcuag

SEQ ID NO: 1385526 - RNA, 19 nt, Artificial Sequence
  Description of Artificial Sequence: Synthetic oligonucleotide
ucaucgacaacauauuugg

SEQ ID NO: 1385527 - RNA, 19 nt, Artificial Sequence
  Description of Artificial Sequence: Synthetic oligonucleotide
uaaucuagcaguagcauag

SEQ ID NO: 1385528 - RNA, 19 nt, Artificial Sequence
  Description of Artificial Sequence: Synthetic oligonucleotide
uguauauagauuuaaaauu

SEQ ID NO: 1385529 - RNA, 19 nt, Artificial Sequence
  Description of Artificial Sequence: Synthetic oligonucleotide
uggaauaagaucugcauag

SEQ ID NO: 1385530 - RNA, 19 nt, Artificial Sequence
  Description of Artificial Sequence: Synthetic oligonucleotide
auaauugaaaacuggagcu

SEQ ID NO: 1385531 - RNA, 19 nt, Artificial Sequence
  Description of Artificial Sequence: Synthetic oligonucleotide
uuucguagcaauaaauacc

SEQ ID NO: 1385532 - RNA, 19 nt, Artificial Sequence
  Description of Artificial Sequence: Synthetic oligonucleotide
uauugaguuaacaacagaa

SEQ ID NO: 1385533 - RNA, 19 nt, Artificial Sequence
  Description of Artificial Sequence: Synthetic oligonucleotide
agcaaaacaaccuagugca

SEQ ID NO: 1385534 - RNA, 19 nt, Artificial Sequence
  Description of Artificial Sequence: Synthetic oligonucleotide
uuuucauacgagcuggcgg

SEQ ID NO: 1385535 - RNA, 19 nt, Artificial Sequence
  Description of Artificial Sequence: Synthetic oligonucleotide
acugaugaacuucaagacc

SEQ ID NO: 1385536 - RNA, 19 nt, Artificial Sequence
  Description of Artificial Sequence: Synthetic oligonucleotide
aauaagaucugcauagguc

SEQ ID NO: 1385537 - RNA, 19 nt, Artificial Sequence
  Description of Artificial Sequence: Synthetic oligonucleotide
uuuaucauguaagugagug

SEQ ID NO: 1385538 - RNA, 19 nt, Artificial Sequence
  Description of Artificial Sequence: Synthetic oligonucleotide
ugaagauaaaugcugucag

SEQ ID NO: 1385539 - RNA, 19 nt, Artificial Sequence
  Description of Artificial Sequence: Synthetic oligonucleotide
acauauaagaugcugauaa

SEQ ID NO: 1385540 - RNA, 19 nt, Artificial Sequence
  Description of Artificial Sequence: Synthetic oligonucleotide
uucguagcaauaaauacca

SEQ ID NO: 1385541 - RNA, 19 nt, Artificial Sequence
  Description of Artificial Sequence: Synthetic oligonucleotide
ugucuauuaugccagaaca

SEQ ID NO: 1385542 - RNA, 19 nt, Artificial Sequence
  Description of Artificial Sequence: Synthetic oligonucleotide
uuuauugaguuaacaacag

SEQ ID NO: 1385543 - RNA, 19 nt, Artificial Sequence
  Description of Artificial Sequence: Synthetic oligonucleotide
aacaaauaccguuagccca

SEQ ID NO: 1385544 - RNA, 19 nt, Artificial Sequence
  Description of Artificial Sequence: Synthetic oligonucleotide
auaagaucugcauagguca

SEQ ID NO: 1385545 - RNA, 19 nt, Artificial Sequence
  Description of Artificial Sequence: Synthetic oligonucleotide
uacgguauauaucuaaucu

SEQ ID NO: 1385546 - RNA, 19 nt, Artificial Sequence
  Description of Artificial Sequence: Synthetic oligonucleotide
uuguguacgguauauaucu

SEQ ID NO: 1385547 - RNA, 19 nt, Artificial Sequence
  Description of Artificial Sequence: Synthetic oligonucleotide
aacuagaauaauucaucuc

SEQ ID NO: 1385548 - RNA, 19 nt, Artificial Sequence
  Description of Artificial Sequence: Synthetic oligonucleotide
uuuacugucaguuucucaa

SEQ ID NO: 1385549 - RNA, 19 nt, Artificial Sequence
  Description of Artificial Sequence: Synthetic oligonucleotide
gacauaaaacacugcagcg

SEQ ID NO: 1385550 - RNA, 19 nt, Artificial Sequence
  Description of Artificial Sequence: Synthetic oligonucleotide
uuuuaaucuagcaguagca

SEQ ID NO: 1385551 - RNA, 19 nt, Artificial Sequence
  Description of Artificial Sequence: Synthetic oligonucleotide
aauuuaucauguaagugag

SEQ ID NO: 1385552 - RNA, 19 nt, Artificial Sequence
  Description of Artificial Sequence: Synthetic oligonucleotide
guagcaauaaauaccaucc

SEQ ID NO: 1385553 - RNA, 19 nt, Artificial Sequence
  Description of Artificial Sequence: Synthetic oligonucleotide
uauuaugccagaacaaacu

SEQ ID NO: 1385554 - RNA, 19 nt, Artificial Sequence
  Description of Artificial Sequence: Synthetic oligonucleotide
uauaucuaaucucagggaa

SEQ ID NO: 1385555 - RNA, 19 nt, Artificial Sequence
  Description of Artificial Sequence: Synthetic oligonucleotide
aaaugcauagucucguugu

SEQ ID NO: 1385556 - RNA, 19 nt, Artificial Sequence
  Description of Artificial Sequence: Synthetic oligonucleotide
guauuaaccacaucaacug

SEQ ID NO: 1385557 - RNA, 19 nt, Artificial Sequence
  Description of Artificial Sequence: Synthetic oligonucleotide
aagacuacugaugaacuuc

SEQ ID NO: 1385558 - RNA, 19 nt, Artificial Sequence
  Description of Artificial Sequence: Synthetic oligonucleotide
auaacuagaauaauucauc

SEQ ID NO: 1385559 - RNA, 19 nt, Artificial Sequence
  Description of Artificial Sequence: Synthetic oligonucleotide
aaaaugcauagucucguug

SEQ ID NO: 1385560 - RNA, 19 nt, Artificial Sequence
  Description of Artificial Sequence: Synthetic oligonucleotide
guauauaucuaaucucagg

SEQ ID NO: 1385561 - RNA, 19 nt, Artificial Sequence
  Description of Artificial Sequence: Synthetic oligonucleotide
aauaacuagaauaauucau

SEQ ID NO: 1385562 - RNA, 19 nt, Artificial Sequence
  Description of Artificial Sequence: Synthetic oligonucleotide
aagauaaaugcugucagca

SEQ ID NO: 1385563 - RNA, 19 nt, Artificial Sequence
  Description of Artificial Sequence: Synthetic oligonucleotide
caaggauugaaguacuuag

SEQ ID NO: 1385564 - RNA, 19 nt, Artificial Sequence
  Description of Artificial Sequence: Synthetic oligonucleotide
gaaauucugacauuacuuc

SEQ ID NO: 1385565 - RNA, 19 nt, Artificial Sequence
  Description of Artificial Sequence: Synthetic oligonucleotide
guuuuaaucuagcaguagc

SEQ ID NO: 1385566 - RNA, 19 nt, Artificial Sequence
  Description of Artificial Sequence: Synthetic oligonucleotide
ugcaacauuaaaauacuuc

SEQ ID NO: 1385567 - RNA, 19 nt, Artificial Sequence
  Description of Artificial Sequence: Synthetic oligonucleotide
uuuguauuggcccacguuu

SEQ ID NO: 1385568 - RNA, 19 nt, Artificial Sequence
  Description of Artificial Sequence: Synthetic oligonucleotide
uguuaauguguauauagau

SEQ ID NO: 1385569 - RNA, 19 nt, Artificial Sequence
  Description of Artificial Sequence: Synthetic oligonucleotide
agaauaauucaucucacaa

SEQ ID NO: 1385570 - RNA, 19 nt, Artificial Sequence
  Description of Artificial Sequence: Synthetic oligonucleotide
uuucauacgagcuggcggc

SEQ ID NO: 1385571 - RNA, 19 nt, Artificial Sequence
  Description of Artificial Sequence: Synthetic oligonucleotide
gcugauaagaacuuuauca

SEQ ID NO: 1385572 - RNA, 19 nt, Artificial Sequence
  Description of Artificial Sequence: Synthetic oligonucleotide
aaggauugaaguacuuagc

SEQ ID NO: 1385573 - RNA, 19 nt, Artificial Sequence
  Description of Artificial Sequence: Synthetic oligonucleotide
uuaucauguaagugagugg

SEQ ID NO: 1385574 - RNA, 19 nt, Artificial Sequence
  Description of Artificial Sequence: Synthetic oligonucleotide
aaaacuggagcugccaaag

SEQ ID NO: 1385575 - RNA, 19 nt, Artificial Sequence
  Description of Artificial Sequence: Synthetic oligonucleotide
aguacuuagcuaguguucg

SEQ ID NO: 1385576 - RNA, 19 nt, Artificial Sequence
  Description of Artificial Sequence: Synthetic oligonucleotide
acgguauauaucuaaucuc

SEQ ID NO: 1385577 - RNA, 19 nt, Artificial Sequence
  Description of Artificial Sequence: Synthetic oligonucleotide
ucuucaagaaucagauagc

SEQ ID NO: 1385578 - RNA, 19 nt, Artificial Sequence
  Description of Artificial Sequence: Synthetic oligonucleotide
gaacuuuaucagcaagugg

SEQ ID NO: 1385579 - RNA, 19 nt, Artificial Sequence
  Description of Artificial Sequence: Synthetic oligonucleotide
accaagauggggaaagucc

SEQ ID NO: 1385580 - RNA, 19 nt, Artificial Sequence
  Description of Artificial Sequence: Synthetic oligonucleotide
uggauuuucauacgagcug

SEQ ID NO: 1385581 - RNA, 19 nt, Artificial Sequence
  Description of Artificial Sequence: Synthetic oligonucleotide
uguaugcugacgcagcugu

SEQ ID NO: 1385582 - RNA, 19 nt, Artificial Sequence
  Description of Artificial Sequence: Synthetic oligonucleotide
uuuccgaccauagugauaa

SEQ ID NO: 1385583 - RNA, 19 nt, Artificial Sequence
  Description of Artificial Sequence: Synthetic oligonucleotide
aacuauuugguaccugaga

SEQ ID NO: 1385584 - RNA, 19 nt, Artificial Sequence
  Description of Artificial Sequence: Synthetic oligonucleotide
guauuuaccuugcugauga

SEQ ID NO: 1385585 - RNA, 19 nt, Artificial Sequence
  Description of Artificial Sequence: Synthetic oligonucleotide
accaauucuugucaucgac

SEQ ID NO: 1385586 - RNA, 19 nt, Artificial Sequence
  Description of Artificial Sequence: Synthetic oligonucleotide
auuauaguuuuauuuguau

SEQ ID NO: 1385587 - RNA, 19 nt, Artificial Sequence
  Description of Artificial Sequence: Synthetic oligonucleotide
gaugaugcaagucgcuucc

SEQ ID NO: 1385588 - RNA, 19 nt, Artificial Sequence
  Description of Artificial Sequence: Synthetic oligonucleotide
ugauaauagcuguaugcug

SEQ ID NO: 1385589 - RNA, 19 nt, Artificial Sequence
  Description of Artificial Sequence: Synthetic oligonucleotide
augacauaugaguacaggu

SEQ ID NO: 1385590 - RNA, 19 nt, Artificial Sequence
  Description of Artificial Sequence: Synthetic oligonucleotide
ucaagcuaacauauaagau

SEQ ID NO: 1385591 - RNA, 19 nt, Artificial Sequence
  Description of Artificial Sequence: Synthetic oligonucleotide
aauaccguuagcccacgcu

SEQ ID NO: 1385592 - RNA, 19 nt, Artificial Sequence
  Description of Artificial Sequence: Synthetic oligonucleotide
uuugggauuguccauggau

SEQ ID NO: 1385593 - RNA, 19 nt, Artificial Sequence
  Description of Artificial Sequence: Synthetic oligonucleotide
uacugaugaacuucaagac

SEQ ID NO: 1385594 - RNA, 19 nt, Artificial Sequence
  Description of Artificial Sequence: Synthetic oligonucleotide
acuacugaugaacuucaag

SEQ ID NO: 1385595 - RNA, 19 nt, Artificial Sequence
  Description of Artificial Sequence: Synthetic oligonucleotide
aaauucuacauuauaguuu

SEQ ID NO: 1385596 - RNA, 19 nt, Artificial Sequence
  Description of Artificial Sequence: Synthetic oligonucleotide
gucaagcuaacauauaaga
